United States Patent Application Publication US 2005/0255487 A1 - sequence listing, part 20

SEQ ID NO: 531270 - RNA, 19 nt, Homo sapiens
  misc_RNA (1)...(19): siRNA sense strand
agaacaaucugcaugaauc

SEQ ID NO: 531271 - RNA, 19 nt, Homo sapiens
  misc_RNA (1)...(19): siRNA sense strand
ccaaucuucuuaagggaaa

SEQ ID NO: 531272 - RNA, 19 nt, Homo sapiens
  misc_RNA (1)...(19): siRNA sense strand
uaguagcuguggauacaua

SEQ ID NO: 531273 - RNA, 19 nt, Homo sapiens
  misc_RNA (1)...(19): siRNA sense strand
ccucguggcucccuaugaa

SEQ ID NO: 531274 - RNA, 19 nt, Homo sapiens
  misc_RNA (1)...(19): siRNA sense strand
ggaaaucauccauugugaa

SEQ ID NO: 531275 - RNA, 19 nt, Homo sapiens
  misc_RNA (1)...(19): siRNA sense strand
gagaauaauaugucugaug

SEQ ID NO: 531276 - RNA, 19 nt, Homo sapiens
  misc_RNA (1)...(19): siRNA sense strand
caaaacaugucaaaaguca

SEQ ID NO: 531277 - RNA, 19 nt, Homo sapiens
  misc_RNA (1)...(19): siRNA sense strand
caagguuccugggcuauau

SEQ ID NO: 531278 - RNA, 19 nt, Homo sapiens
  misc_RNA (1)...(19): siRNA sense strand
ccucuuugccugagaauaa

SEQ ID NO: 531279 - RNA, 19 nt, Homo sapiens
  misc_RNA (1)...(19): siRNA sense strand
gaacaaucugcaugaauca

SEQ ID NO: 531280 - RNA, 19 nt, Homo sapiens
  misc_RNA (1)...(19): siRNA sense strand
gagcuuuucugaaguguuu

SEQ ID NO: 531281 - RNA, 19 nt, Homo sapiens
  misc_RNA (1)...(19): siRNA sense strand
gagagcagcaaauuuacaa

SEQ ID NO: 531282 - RNA, 19 nt, Homo sapiens
  misc_RNA (1)...(19): siRNA sense strand
guauaaagggcagguagua

SEQ ID NO: 531283 - RNA, 19 nt, Homo sapiens
  misc_RNA (1)...(19): siRNA sense strand
aaauagcucugaaggcaau

SEQ ID NO: 531284 - RNA, 19 nt, Homo sapiens
  misc_RNA (1)...(19): siRNA sense strand
uaucaaagaagcuucagaa

SEQ ID NO: 531285 - RNA, 19 nt, Homo sapiens
  misc_RNA (1)...(19): siRNA sense strand
guuagcagcauuuggcaua

SEQ ID NO: 531286 - RNA, 19 nt, Homo sapiens
  misc_RNA (1)...(19): siRNA sense strand
aagcuacgcugggcaauau

SEQ ID NO: 531287 - RNA, 19 nt, Homo sapiens
  misc_RNA (1)...(19): siRNA sense strand
uugaacagaucgaugacua

SEQ ID NO: 531288 - RNA, 19 nt, Homo sapiens
  misc_RNA (1)...(19): siRNA sense strand
gcaguuggccuaucuuaac

SEQ ID NO: 531289 - RNA, 19 nt, Homo sapiens
  misc_RNA (1)...(19): siRNA sense strand
guacuaaaggguuaaaucu

SEQ ID NO: 531290 - RNA, 19 nt, Homo sapiens
  misc_RNA (1)...(19): siRNA sense strand
ccaauaauccagauauagu

SEQ ID NO: 531291 - RNA, 19 nt, Homo sapiens
  misc_RNA (1)...(19): siRNA sense strand
ggaccaguuuggaaaugga

SEQ ID NO: 531292 - RNA, 19 nt, Homo sapiens
  misc_RNA (1)...(19): siRNA sense strand
ggaauugugcaagccauaa

SEQ ID NO: 531293 - RNA, 19 nt, Homo sapiens
  misc_RNA (1)...(19): siRNA sense strand
gguuacagaucaaacucaa

SEQ ID NO: 531294 - RNA, 19 nt, Homo sapiens
  misc_RNA (1)...(19): siRNA sense strand
gaacagaucgaugacuaca

SEQ ID NO: 531295 - RNA, 19 nt, Homo sapiens
  misc_RNA (1)...(19): siRNA sense strand
acaauaccuuccucuauca

SEQ ID NO: 531296 - RNA, 19 nt, Homo sapiens
  misc_RNA (1)...(19): siRNA sense strand
ggacucggaucuccuagcu

SEQ ID NO: 531297 - RNA, 19 nt, Homo sapiens
  misc_RNA (1)...(19): siRNA sense strand
gacaagccaaucuucuuaa

SEQ ID NO: 531298 - RNA, 19 nt, Homo sapiens
  misc_RNA (1)...(19): siRNA sense strand
guggaacgagugauuagua

SEQ ID NO: 531299 - RNA, 19 nt, Homo sapiens
  misc_RNA (1)...(19): siRNA sense strand
cuaugaagaugauguugau

SEQ ID NO: 531300 - RNA, 19 nt, Homo sapiens
  misc_RNA (1)...(19): siRNA sense strand
aacaauaccuuccucuauc

SEQ ID NO: 531301 - RNA, 19 nt, Homo sapiens
  misc_RNA (1)...(19): siRNA sense strand
ugccauggcccacaaagua

SEQ ID NO: 531302 - RNA, 19 nt, Homo sapiens
  misc_RNA (1)...(19): siRNA sense strand
ucaagccuauucucguauu

SEQ ID NO: 531303 - RNA, 19 nt, Homo sapiens
  misc_RNA (1)...(19): siRNA sense strand
gcgcaguuggccuaucuua

SEQ ID NO: 531304 - RNA, 19 nt, Homo sapiens
  misc_RNA (1)...(19): siRNA sense strand
gagaacaaucugcaugaau

SEQ ID NO: 531305 - RNA, 19 nt, Homo sapiens
  misc_RNA (1)...(19): siRNA sense strand
guuugugccugaccuggua

SEQ ID NO: 531306 - RNA, 19 nt, Homo sapiens
  misc_RNA (1)...(19): siRNA sense strand
uuaaaucucccaaggaaau

SEQ ID NO: 531307 - RNA, 19 nt, Homo sapiens
  misc_RNA (1)...(19): siRNA sense strand
ucacgguaccagaggauua

SEQ ID NO: 531308 - RNA, 19 nt, Homo sapiens
  misc_RNA (1)...(19): siRNA sense strand
uuacgaagaagaccaagaa

SEQ ID NO: 531309 - RNA, 19 nt, Homo sapiens
  misc_RNA (1)...(19): siRNA sense strand
gugaucauauuccagacaa

SEQ ID NO: 531310 - RNA, 19 nt, Homo sapiens
  misc_RNA (1)...(19): siRNA sense strand
gaagugcagagcugucaga

SEQ ID NO: 531311 - RNA, 19 nt, Homo sapiens
  misc_RNA (1)...(19): siRNA sense strand
caagcuauguuuaucucau

SEQ ID NO: 531312 - RNA, 19 nt, Homo sapiens
  misc_RNA (1)...(19): siRNA sense strand
ucugaugugucgcaguuaa

SEQ ID NO: 531313 - RNA, 19 nt, Homo sapiens
  misc_RNA (1)...(19): siRNA sense strand
ugucugaugugucgcaguu

SEQ ID NO: 531314 - RNA, 19 nt, Homo sapiens
  misc_RNA (1)...(19): siRNA sense strand
cagcaguuccgaagaaaga

SEQ ID NO: 531315 - RNA, 19 nt, Homo sapiens
  misc_RNA (1)...(19): siRNA sense strand
gagacugguugacacagau

SEQ ID NO: 531316 - RNA, 19 nt, Homo sapiens
  misc_RNA (1)...(19): siRNA sense strand
agaaaguggugcaguugug

SEQ ID NO: 531317 - RNA, 19 nt, Homo sapiens
  misc_RNA (1)...(19): siRNA sense strand
agagaaguuucguuacaug

SEQ ID NO: 531318 - RNA, 19 nt, Homo sapiens
  misc_RNA (1)...(19): siRNA sense strand
caagaucaaaccucuagga

SEQ ID NO: 531319 - RNA, 19 nt, Homo sapiens
  misc_RNA (1)...(19): siRNA sense strand
gcuauugcuugugcugaaa

SEQ ID NO: 531320 - RNA, 19 nt, Homo sapiens
  misc_RNA (1)...(19): siRNA sense strand
ucagaacccauccauguga

SEQ ID NO: 531321 - RNA, 19 nt, Homo sapiens
  misc_RNA (1)...(19): siRNA sense strand
gaaauggacuugaaauuga

SEQ ID NO: 531322 - RNA, 19 nt, Homo sapiens
  misc_RNA (1)...(19): siRNA sense strand
gaagagaaguuucguuaca

SEQ ID NO: 531323 - RNA, 19 nt, Homo sapiens
  misc_RNA (1)...(19): siRNA sense strand
gaucaagccuauucucgua

SEQ ID NO: 531324 - RNA, 19 nt, Homo sapiens
  misc_RNA (1)...(19): siRNA sense strand
uuccauagcucuucaaaua

SEQ ID NO: 531325 - RNA, 19 nt, Homo sapiens
  misc_RNA (1)...(19): siRNA sense strand
gugcagagcugucagaaga

SEQ ID NO: 531326 - RNA, 19 nt, Homo sapiens
  misc_RNA (1)...(19): siRNA sense strand
caaaggagcuauugcuugu

SEQ ID NO: 531327 - RNA, 19 nt, Homo sapiens
  misc_RNA (1)...(19): siRNA sense strand
gaaaucauccauugugaaa

SEQ ID NO: 531328 - RNA, 19 nt, Homo sapiens
  misc_RNA (1)...(19): siRNA sense strand
ccaaggaaaucauccauug

SEQ ID NO: 531329 - RNA, 19 nt, Homo sapiens
  misc_RNA (1)...(19): siRNA sense strand
gcacguaauucaagugaug

SEQ ID NO: 531330 - RNA, 19 nt, Homo sapiens
  misc_RNA (1)...(19): siRNA sense strand
ggaaauggacuugaaauug

SEQ ID NO: 531331 - RNA, 19 nt, Homo sapiens
  misc_RNA (1)...(19): siRNA sense strand
gaccagaccuccaagcuau

SEQ ID NO: 531332 - RNA, 19 nt, Homo sapiens
  misc_RNA (1)...(19): siRNA sense strand
ucaaaugcaucaaagcuuu

SEQ ID NO: 531333 - RNA, 19 nt, Homo sapiens
  misc_RNA (1)...(19): siRNA sense strand
gcacuuggaaauaaagaua

SEQ ID NO: 531334 - RNA, 19 nt, Homo sapiens
  misc_RNA (1)...(19): siRNA sense strand
gguuaaaucucccaaggaa

SEQ ID NO: 531335 - RNA, 19 nt, Homo sapiens
  misc_RNA (1)...(19): siRNA sense strand
ggcaauauguugaugauuc

SEQ ID NO: 531336 - RNA, 19 nt, Homo sapiens
  misc_RNA (1)...(19): siRNA sense strand
gcacagcauugcagcaguu

SEQ ID NO: 531337 - RNA, 19 nt, Homo sapiens
  misc_RNA (1)...(19): siRNA sense strand
gaacgagugauuaguacua

SEQ ID NO: 531338 - RNA, 19 nt, Homo sapiens
  misc_RNA (1)...(19): siRNA sense strand
gcauuuggcauaggaauua

SEQ ID NO: 531339 - RNA, 19 nt, Homo sapiens
  misc_RNA (1)...(19): siRNA sense strand
ccagauauaguaaagguua

SEQ ID NO: 531340 - RNA, 19 nt, Homo sapiens
  misc_RNA (1)...(19): siRNA sense strand
gaagagaaagcaucauaau

SEQ ID NO: 531341 - RNA, 19 nt, Homo sapiens
  misc_RNA (1)...(19): siRNA sense strand
ggaugaaacugcugucaca

SEQ ID NO: 531342 - RNA, 19 nt, Homo sapiens
  misc_RNA (1)...(19): siRNA sense strand
cgacaagccaaucuucuua

SEQ ID NO: 531343 - RNA, 19 nt, Homo sapiens
  misc_RNA (1)...(19): siRNA sense strand
ccaggaaaguggagaauuc

SEQ ID NO: 531344 - RNA, 19 nt, Homo sapiens
  misc_RNA (1)...(19): siRNA sense strand
ucaaauagcacuuggaaau

SEQ ID NO: 531345 - RNA, 19 nt, Homo sapiens
  misc_RNA (1)...(19): siRNA sense strand
ggauguacuuuaccuucua

SEQ ID NO: 531346 - RNA, 19 nt, Homo sapiens
  misc_RNA (1)...(19): siRNA sense strand
caaauagcacuuggaaaua

SEQ ID NO: 531347 - RNA, 19 nt, Homo sapiens
  misc_RNA (1)...(19): siRNA sense strand
gaaguuucguuacaugugu

SEQ ID NO: 531348 - RNA, 19 nt, Homo sapiens
  misc_RNA (1)...(19): siRNA sense strand
acacagauguagcacguaa

SEQ ID NO: 531349 - RNA, 19 nt, Homo sapiens
  misc_RNA (1)...(19): siRNA sense strand
ugaagaaaguggugcaguu

SEQ ID NO: 531350 - RNA, 19 nt, Homo sapiens
  misc_RNA (1)...(19): siRNA sense strand
guaaauggaccuacuaaca

SEQ ID NO: 531351 - RNA, 19 nt, Homo sapiens
  misc_RNA (1)...(19): siRNA sense strand
ugauagguauguaggauuu

SEQ ID NO: 531352 - RNA, 19 nt, Homo sapiens
  misc_RNA (1)...(19): siRNA sense strand
aaagagcaauauuccagua

SEQ ID NO: 531353 - RNA, 19 nt, Homo sapiens
  misc_RNA (1)...(19): siRNA sense strand
ggaagaggauauauuuaac

SEQ ID NO: 531354 - RNA, 19 nt, Homo sapiens
  misc_RNA (1)...(19): siRNA sense strand
gaacgccuaugaagaugau

SEQ ID NO: 531355 - RNA, 19 nt, Homo sapiens
  misc_RNA (1)...(19): siRNA sense strand
caacaauaccuuccucuau

SEQ ID NO: 531356 - RNA, 19 nt, Homo sapiens
  misc_RNA (1)...(19): siRNA sense strand
agagagaucuagaagagaa

SEQ ID NO: 531357 - RNA, 19 nt, Homo sapiens
  misc_RNA (1)...(19): siRNA sense strand
gguaguagcuguggauaca

SEQ ID NO: 531358 - RNA, 19 nt, Homo sapiens
  misc_RNA (1)...(19): siRNA sense strand
ccaccuaggacgagaaaua

SEQ ID NO: 531359 - RNA, 19 nt, Homo sapiens
  misc_RNA (1)...(19): siRNA sense strand
aaauggaccuacuaacaaa

SEQ ID NO: 531360 - RNA, 19 nt, Homo sapiens
  misc_RNA (1)...(19): siRNA sense strand
gcaagaagccggcaagcau

SEQ ID NO: 531361 - RNA, 19 nt, Homo sapiens
  misc_RNA (1)...(19): siRNA sense strand
cggaagaggauauauuuaa

SEQ ID NO: 531362 - RNA, 19 nt, Homo sapiens
  misc_RNA (1)...(19): siRNA sense strand
agagauaacauccaacuaa

SEQ ID NO: 531363 - RNA, 19 nt, Homo sapiens
  misc_RNA (1)...(19): siRNA sense strand
cggaagagaaguuucguua

SEQ ID NO: 531364 - RNA, 19 nt, Homo sapiens
  misc_RNA (1)...(19): siRNA sense strand
cagaagagaaagcaucaua

SEQ ID NO: 531365 - RNA, 19 nt, Homo sapiens
  misc_RNA (1)...(19): siRNA sense strand
uaaauggaccuacuaacaa

SEQ ID NO: 531366 - RNA, 19 nt, Homo sapiens
  misc_RNA (1)...(19): siRNA sense strand
gauguacuuuaccuucuaa

SEQ ID NO: 531367 - RNA, 19 nt, Homo sapiens
  misc_RNA (1)...(19): siRNA sense strand
gaagaaaguggugcaguug

SEQ ID NO: 531368 - RNA, 19 nt, Homo sapiens
  misc_RNA (1)...(19): siRNA sense strand
gaauguggccguguucaaa

SEQ ID NO: 531369 - RNA, 19 nt, Homo sapiens
  misc_RNA (1)...(19): siRNA sense strand
ccagugggcugagcaagaa

SEQ ID NO: 531370 - RNA, 19 nt, Homo sapiens
  misc_RNA (1)...(19): siRNA sense strand
acagaucgaugacuacaau

SEQ ID NO: 531371 - RNA, 19 nt, Homo sapiens
  misc_RNA (1)...(19): siRNA sense strand
gcaagcauccagaagagaa

SEQ ID NO: 531372 - RNA, 19 nt, Homo sapiens
  misc_RNA (1)...(19): siRNA sense strand
gcagagcugucagaagaug

SEQ ID NO: 531373 - RNA, 19 nt, Homo sapiens
  misc_RNA (1)...(19): siRNA sense strand
ggaguggaacgagugauua

SEQ ID NO: 531374 - RNA, 19 nt, Homo sapiens
  misc_RNA (1)...(19): siRNA sense strand
acucggaucuccuagcuuu

SEQ ID NO: 531375 - RNA, 19 nt, Homo sapiens
  misc_RNA (1)...(19): siRNA sense strand
gagauaacauccaacuaac

SEQ ID NO: 531376 - RNA, 19 nt, Homo sapiens
  misc_RNA (1)...(19): siRNA sense strand
agaacaaucugcaugaauc

SEQ ID NO: 531377 - RNA, 19 nt, Homo sapiens
  misc_RNA (1)...(19): siRNA sense strand
ccaaucuucuuaagggaaa

SEQ ID NO: 531378 - RNA, 19 nt, Homo sapiens
  misc_RNA (1)...(19): siRNA sense strand
uaguagcuguggauacaua

SEQ ID NO: 531379 - RNA, 19 nt, Homo sapiens
  misc_RNA (1)...(19): siRNA sense strand
ccucguggcucccuaugaa

SEQ ID NO: 531380 - RNA, 19 nt, Homo sapiens
  misc_RNA (1)...(19): siRNA sense strand
ggaaaucauccauugugaa

SEQ ID NO: 531381 - RNA, 19 nt, Homo sapiens
  misc_RNA (1)...(19): siRNA sense strand
gagaauaauaugucugaug

SEQ ID NO: 531382 - RNA, 19 nt, Homo sapiens
  misc_RNA (1)...(19): siRNA sense strand
caaaacaugucaaaaguca

SEQ ID NO: 531383 - RNA, 19 nt, Homo sapiens
  misc_RNA (1)...(19): siRNA sense strand
caagguuccugggcuauau

SEQ ID NO: 531384 - RNA, 19 nt, Homo sapiens
  misc_RNA (1)...(19): siRNA sense strand
ccucuuugccugagaauaa

SEQ ID NO: 531385 - RNA, 19 nt, Homo sapiens
  misc_RNA (1)...(19): siRNA sense strand
gaacaaucugcaugaauca

SEQ ID NO: 531386 - RNA, 19 nt, Homo sapiens
  misc_RNA (1)...(19): siRNA sense strand
gagcuuuucugaaguguuu

SEQ ID NO: 531387 - RNA, 19 nt, Homo sapiens
  misc_RNA (1)...(19): siRNA sense strand
gagagcagcaaauuuacaa

SEQ ID NO: 531388 - RNA, 19 nt, Homo sapiens
  misc_RNA (1)...(19): siRNA sense strand
guauaaagggcagguagua

SEQ ID NO: 531389 - RNA, 19 nt, Homo sapiens
  misc_RNA (1)...(19): siRNA sense strand
aaauagcucugaaggcaau

SEQ ID NO: 531390 - RNA, 19 nt, Homo sapiens
  misc_RNA (1)...(19): siRNA sense strand
uaucaaagaagcuucagaa

SEQ ID NO: 531391 - RNA, 19 nt, Homo sapiens
  misc_RNA (1)...(19): siRNA sense strand
guuagcagcauuuggcaua

SEQ ID NO: 531392 - RNA, 19 nt, Homo sapiens
  misc_RNA (1)...(19): siRNA sense strand
aagcuacgcugggcaauau

SEQ ID NO: 531393 - RNA, 19 nt, Homo sapiens
  misc_RNA (1)...(19): siRNA sense strand
uugaacagaucgaugacua

SEQ ID NO: 531394 - RNA, 19 nt, Homo sapiens
  misc_RNA (1)...(19): siRNA sense strand
gcaguuggccuaucuuaac

SEQ ID NO: 531395 - RNA, 19 nt, Homo sapiens
  misc_RNA (1)...(19): siRNA sense strand
guacuaaaggguuaaaucu

SEQ ID NO: 531396 - RNA, 19 nt, Homo sapiens
  misc_RNA (1)...(19): siRNA sense strand
ccaauaauccagauauagu

SEQ ID NO: 531397 - RNA, 19 nt, Homo sapiens
  misc_RNA (1)...(19): siRNA sense strand
ggaccaguuuggaaaugga

SEQ ID NO: 531398 - RNA, 19 nt, Homo sapiens
  misc_RNA (1)...(19): siRNA sense strand
ggaauugugcaagccauaa

SEQ ID NO: 531399 - RNA, 19 nt, Homo sapiens
  misc_RNA (1)...(19): siRNA sense strand
gcggaagaggauauauuua

SEQ ID NO: 531400 - RNA, 19 nt, Homo sapiens
  misc_RNA (1)...(19): siRNA sense strand
gguuacagaucaaacucaa

SEQ ID NO: 531401 - RNA, 19 nt, Homo sapiens
  misc_RNA (1)...(19): siRNA sense strand
gaacagaucgaugacuaca

SEQ ID NO: 531402 - RNA, 19 nt, Homo sapiens
  misc_RNA (1)...(19): siRNA sense strand
acaauaccuuccucuauca

SEQ ID NO: 531403 - RNA, 19 nt, Homo sapiens
  misc_RNA (1)...(19): siRNA sense strand
ggacucggaucuccuagcu

SEQ ID NO: 531404 - RNA, 19 nt, Homo sapiens
  misc_RNA (1)...(19): siRNA sense strand
gacaagccaaucuucuuaa

SEQ ID NO: 531405 - RNA, 19 nt, Homo sapiens
  misc_RNA (1)...(19): siRNA sense strand
guggaacgagugauuagua

SEQ ID NO: 531406 - RNA, 19 nt, Homo sapiens
  misc_RNA (1)...(19): siRNA sense strand
ucaagccuauucucguauu

SEQ ID NO: 531407 - RNA, 19 nt, Homo sapiens
  misc_RNA (1)...(19): siRNA sense strand
cuaugaagaugauguugau

SEQ ID NO: 531408 - RNA, 19 nt, Homo sapiens
  misc_RNA (1)...(19): siRNA sense strand
aacaauaccuuccucuauc

SEQ ID NO: 531409 - RNA, 19 nt, Homo sapiens
  misc_RNA (1)...(19): siRNA sense strand
ugccauggcccacaaagua

SEQ ID NO: 531410 - RNA, 19 nt, Homo sapiens
  misc_RNA (1)...(19): siRNA sense strand
gcgcaguuggccuaucuua

SEQ ID NO: 531411 - RNA, 19 nt, Homo sapiens
  misc_RNA (1)...(19): siRNA sense strand
gauaacauccaacuaacuc

SEQ ID NO: 531412 - RNA, 19 nt, Homo sapiens
  misc_RNA (1)...(19): siRNA sense strand
gagaacaaucugcaugaau

SEQ ID NO: 531413 - RNA, 19 nt, Homo sapiens
  misc_RNA (1)...(19): siRNA sense strand
guuugugccugaccuggua

SEQ ID NO: 531414 - RNA, 19 nt, Homo sapiens
  misc_RNA (1)...(19): siRNA sense strand
uuaaaucucccaaggaaau

SEQ ID NO: 531415 - RNA, 19 nt, Homo sapiens
  misc_RNA (1)...(19): siRNA sense strand
ucacgguaccagaggauua

SEQ ID NO: 531416 - RNA, 19 nt, Homo sapiens
  misc_RNA (1)...(19): siRNA sense strand
uuacgaagaagaccaagaa

SEQ ID NO: 531417 - RNA, 19 nt, Homo sapiens
  misc_RNA (1)...(19): siRNA sense strand
agucagagauaacauccaa

SEQ ID NO: 531418 - RNA, 19 nt, Homo sapiens
  misc_RNA (1)...(19): siRNA sense strand
gaaaagcuuccuccuugua

SEQ ID NO: 531419 - RNA, 19 nt, Homo sapiens
  misc_RNA (1)...(19): siRNA sense strand
gugaucauauuccagacaa

SEQ ID NO: 531420 - RNA, 19 nt, Homo sapiens
  misc_RNA (1)...(19): siRNA sense strand
caagcuauguuuaucucau

SEQ ID NO: 531421 - RNA, 19 nt, Homo sapiens
  misc_RNA (1)...(19): siRNA sense strand
gaaauggacuugaaauuga

SEQ ID NO: 531422 - RNA, 19 nt, Homo sapiens
  misc_RNA (1)...(19): siRNA sense strand
gaagagaaguuucguuaca

SEQ ID NO: 531423 - RNA, 19 nt, Homo sapiens
  misc_RNA (1)...(19): siRNA sense strand
gaucaagccuauucucgua

SEQ ID NO: 531424 - RNA, 19 nt, Homo sapiens
  misc_RNA (1)...(19): siRNA sense strand
uuccauagcucuucaaaua

SEQ ID NO: 531425 - RNA, 19 nt, Homo sapiens
  misc_RNA (1)...(19): siRNA sense strand
gugcagagcugucagaaga

SEQ ID NO: 531426 - RNA, 19 nt, Homo sapiens
  misc_RNA (1)...(19): siRNA sense strand
caaaggagcuauugcuugu

SEQ ID NO: 531427 - RNA, 19 nt, Homo sapiens
  misc_RNA (1)...(19): siRNA sense strand
gaaaucauccauugugaaa

SEQ ID NO: 531428 - RNA, 19 nt, Homo sapiens
  misc_RNA (1)...(19): siRNA sense strand
ccaaggaaaucauccauug

SEQ ID NO: 531429 - RNA, 19 nt, Homo sapiens
  misc_RNA (1)...(19): siRNA sense strand
gcacguaauucaagugaug

SEQ ID NO: 531430 - RNA, 19 nt, Homo sapiens
  misc_RNA (1)...(19): siRNA sense strand
ggaaauggacuugaaauug

SEQ ID NO: 531431 - RNA, 19 nt, Homo sapiens
  misc_RNA (1)...(19): siRNA sense strand
gaccagaccuccaagcuau

SEQ ID NO: 531432 - RNA, 19 nt, Homo sapiens
  misc_RNA (1)...(19): siRNA sense strand
ucaaaugcaucaaagcuuu

SEQ ID NO: 531433 - RNA, 19 nt, Homo sapiens
  misc_RNA (1)...(19): siRNA sense strand
gcacuuggaaauaaagaua

SEQ ID NO: 531434 - RNA, 19 nt, Homo sapiens
  misc_RNA (1)...(19): siRNA sense strand
gguuaaaucucccaaggaa

SEQ ID NO: 531435 - RNA, 19 nt, Homo sapiens
  misc_RNA (1)...(19): siRNA sense strand
ggcaauauguugaugauuc

SEQ ID NO: 531436 - RNA, 19 nt, Homo sapiens
  misc_RNA (1)...(19): siRNA sense strand
gcacagcauugcagcaguu

SEQ ID NO: 531437 - RNA, 19 nt, Homo sapiens
  misc_RNA (1)...(19): siRNA sense strand
gaacgagugauuaguacua

SEQ ID NO: 531438 - RNA, 19 nt, Homo sapiens
  misc_RNA (1)...(19): siRNA sense strand
gcauuuggcauaggaauua

SEQ ID NO: 531439 - RNA, 19 nt, Homo sapiens
  misc_RNA (1)...(19): siRNA sense strand
ccagauauaguaaagguua

SEQ ID NO: 531440 - RNA, 19 nt, Homo sapiens
  misc_RNA (1)...(19): siRNA sense strand
gaagagaaagcaucauaau

SEQ ID NO: 531441 - RNA, 19 nt, Homo sapiens
  misc_RNA (1)...(19): siRNA sense strand
ggaugaaacugcugucaca

SEQ ID NO: 531442 - RNA, 19 nt, Homo sapiens
  misc_RNA (1)...(19): siRNA sense strand
cgacaagccaaucuucuua

SEQ ID NO: 531443 - RNA, 19 nt, Homo sapiens
  misc_RNA (1)...(19): siRNA sense strand
ccaggaaaguggagaauuc

SEQ ID NO: 531444 - RNA, 19 nt, Homo sapiens
  misc_RNA (1)...(19): siRNA sense strand
ucaaauagcacuuggaaau

SEQ ID NO: 531445 - RNA, 19 nt, Homo sapiens
  misc_RNA (1)...(19): siRNA sense strand
ggauguacuuuaccuucua

SEQ ID NO: 531446 - RNA, 19 nt, Homo sapiens
  misc_RNA (1)...(19): siRNA sense strand
caaauagcacuuggaaaua

SEQ ID NO: 531447 - RNA, 19 nt, Homo sapiens
  misc_RNA (1)...(19): siRNA sense strand
gaaguuucguuacaugugu

SEQ ID NO: 531448 - RNA, 19 nt, Homo sapiens
  misc_RNA (1)...(19): siRNA sense strand
acacagauguagcacguaa

SEQ ID NO: 531449 - RNA, 19 nt, Homo sapiens
  misc_RNA (1)...(19): siRNA sense strand
ugaagaaaguggugcaguu

SEQ ID NO: 531450 - RNA, 19 nt, Homo sapiens
  misc_RNA (1)...(19): siRNA sense strand
guaaauggaccuacuaaca

SEQ ID NO: 531451 - RNA, 19 nt, Homo sapiens
  misc_RNA (1)...(19): siRNA sense strand
ugauagguauguaggauuu

SEQ ID NO: 531452 - RNA, 19 nt, Homo sapiens
  misc_RNA (1)...(19): siRNA sense strand
aaagagcaauauuccagua

SEQ ID NO: 531453 - RNA, 19 nt, Homo sapiens
  misc_RNA (1)...(19): siRNA sense strand
ggaagaggauauauuuaac

SEQ ID NO: 531454 - RNA, 19 nt, Homo sapiens
  misc_RNA (1)...(19): siRNA sense strand
gaacgccuaugaagaugau

SEQ ID NO: 531455 - RNA, 19 nt, Homo sapiens
  misc_RNA (1)...(19): siRNA sense strand
caacaauaccuuccucuau

SEQ ID NO: 531456 - RNA, 19 nt, Homo sapiens
  misc_RNA (1)...(19): siRNA sense strand
agagagaucuagaagagaa

SEQ ID NO: 531457 - RNA, 19 nt, Homo sapiens
  misc_RNA (1)...(19): siRNA sense strand
gguaguagcuguggauaca

SEQ ID NO: 531458 - RNA, 19 nt, Homo sapiens
  misc_RNA (1)...(19): siRNA sense strand
ccaccuaggacgagaaaua

SEQ ID NO: 531459 - RNA, 19 nt, Homo sapiens
  misc_RNA (1)...(19): siRNA sense strand
aaauggaccuacuaacaaa

SEQ ID NO: 531460 - RNA, 19 nt, Homo sapiens
  misc_RNA (1)...(19): siRNA sense strand
gcaagaagccggcaagcau

SEQ ID NO: 531461 - RNA, 19 nt, Homo sapiens
  misc_RNA (1)...(19): siRNA sense strand
cggaagaggauauauuuaa

SEQ ID NO: 531462 - RNA, 19 nt, Homo sapiens
  misc_RNA (1)...(19): siRNA sense strand
agagauaacauccaacuaa

SEQ ID NO: 531463 - RNA, 19 nt, Homo sapiens
  misc_RNA (1)...(19): siRNA sense strand
cggaagagaaguuucguua

SEQ ID NO: 531464 - RNA, 19 nt, Homo sapiens
  misc_RNA (1)...(19): siRNA sense strand
cagaagagaaagcaucaua

SEQ ID NO: 531465 - RNA, 19 nt, Homo sapiens
  misc_RNA (1)...(19): siRNA sense strand
uaaauggaccuacuaacaa

SEQ ID NO: 531466 - RNA, 19 nt, Homo sapiens
  misc_RNA (1)...(19): siRNA sense strand
gauguacuuuaccuucuaa

SEQ ID NO: 531467 - RNA, 19 nt, Homo sapiens
  misc_RNA (1)...(19): siRNA sense strand
gaagaaaguggugcaguug

SEQ ID NO: 531468 - RNA, 19 nt, Homo sapiens
  misc_RNA (1)...(19): siRNA sense strand
gaauguggccguguucaaa

SEQ ID NO: 531469 - RNA, 19 nt, Homo sapiens
  misc_RNA (1)...(19): siRNA sense strand
ccagugggcugagcaagaa

SEQ ID NO: 531470 - RNA, 19 nt, Homo sapiens
  misc_RNA (1)...(19): siRNA sense strand
acagaucgaugacuacaau

SEQ ID NO: 531471 - RNA, 19 nt, Homo sapiens
  misc_RNA (1)...(19): siRNA sense strand
gcaagcauccagaagagaa

SEQ ID NO: 531472 - RNA, 19 nt, Homo sapiens
  misc_RNA (1)...(19): siRNA sense strand
gcagagcugucagaagaug

SEQ ID NO: 531473 - RNA, 19 nt, Homo sapiens
  misc_RNA (1)...(19): siRNA sense strand
ggaguggaacgagugauua

SEQ ID NO: 531474 - RNA, 19 nt, Homo sapiens
  misc_RNA (1)...(19): siRNA sense strand
acucggaucuccuagcuuu

SEQ ID NO: 531475 - RNA, 19 nt, Homo sapiens
  misc_RNA (1)...(19): siRNA sense strand
gagauaacauccaacuaac

SEQ ID NO: 531476 - RNA, 19 nt, Homo sapiens
  misc_RNA (1)...(19): siRNA sense strand
agaacaaucugcaugaauc

SEQ ID NO: 531477 - RNA, 19 nt, Homo sapiens
  misc_RNA (1)...(19): siRNA sense strand
ccaaucuucuuaagggaaa

SEQ ID NO: 531478 - RNA, 19 nt, Homo sapiens
  misc_RNA (1)...(19): siRNA sense strand
uaguagcuguggauacaua

SEQ ID NO: 531479 - RNA, 19 nt, Homo sapiens
  misc_RNA (1)...(19): siRNA sense strand
ccucguggcucccuaugaa

SEQ ID NO: 531480 - RNA, 19 nt, Homo sapiens
  misc_RNA (1)...(19): siRNA sense strand
ggaaaucauccauugugaa

SEQ ID NO: 531481 - RNA, 19 nt, Homo sapiens
  misc_RNA (1)...(19): siRNA sense strand
gagaauaauaugucugaug

SEQ ID NO: 531482 - RNA, 19 nt, Homo sapiens
  misc_RNA (1)...(19): siRNA sense strand
caaaacaugucaaaaguca

SEQ ID NO: 531483 - RNA, 19 nt, Homo sapiens
  misc_RNA (1)...(19): siRNA sense strand
caagguuccugggcuauau

SEQ ID NO: 531484 - RNA, 19 nt, Homo sapiens
  misc_RNA (1)...(19): siRNA sense strand
ccucuuugccugagaauaa

SEQ ID NO: 531485 - RNA, 19 nt, Homo sapiens
  misc_RNA (1)...(19): siRNA sense strand
gaacaaucugcaugaauca

SEQ ID NO: 531486 - RNA, 19 nt, Homo sapiens
  misc_RNA (1)...(19): siRNA sense strand
gagcuuuucugaaguguuu

SEQ ID NO: 531487 - RNA, 19 nt, Homo sapiens
  misc_RNA (1)...(19): siRNA sense strand
gagagcagcaaauuuacaa

SEQ ID NO: 531488 - RNA, 19 nt, Homo sapiens
  misc_RNA (1)...(19): siRNA sense strand
guauaaagggcagguagua

SEQ ID NO: 531489 - RNA, 19 nt, Homo sapiens
  misc_RNA (1)...(19): siRNA sense strand
aaauagcucugaaggcaau

SEQ ID NO: 531490 - RNA, 19 nt, Homo sapiens
  misc_RNA (1)...(19): siRNA sense strand
uaucaaagaagcuucagaa

SEQ ID NO: 531491 - RNA, 19 nt, Homo sapiens
  misc_RNA (1)...(19): siRNA sense strand
guuagcagcauuuggcaua

SEQ ID NO: 531492 - RNA, 19 nt, Homo sapiens
  misc_RNA (1)...(19): siRNA sense strand
aagcuacgcugggcaauau

SEQ ID NO: 531493 - RNA, 19 nt, Homo sapiens
  misc_RNA (1)...(19): siRNA sense strand
uugaacagaucgaugacua

SEQ ID NO: 531494 - RNA, 19 nt, Homo sapiens
  misc_RNA (1)...(19): siRNA sense strand
gcaguuggccuaucuuaac

SEQ ID NO: 531495 - RNA, 19 nt, Homo sapiens
  misc_RNA (1)...(19): siRNA sense strand
guacuaaaggguuaaaucu

SEQ ID NO: 531496 - RNA, 19 nt, Homo sapiens
  misc_RNA (1)...(19): siRNA sense strand
ccaauaauccagauauagu

SEQ ID NO: 531497 - RNA, 19 nt, Homo sapiens
  misc_RNA (1)...(19): siRNA sense strand
ggaccaguuuggaaaugga

SEQ ID NO: 531498 - RNA, 19 nt, Homo sapiens
  misc_RNA (1)...(19): siRNA sense strand
ggaauugugcaagccauaa

SEQ ID NO: 531499 - RNA, 19 nt, Homo sapiens
  misc_RNA (1)...(19): siRNA sense strand
gcggaagaggauauauuua

SEQ ID NO: 531500 - RNA, 19 nt, Homo sapiens
  misc_RNA (1)...(19): siRNA sense strand
gguuacagaucaaacucaa

SEQ ID NO: 531501 - RNA, 19 nt, Homo sapiens
  misc_RNA (1)...(19): siRNA sense strand
gaacagaucgaugacuaca

SEQ ID NO: 531502 - RNA, 19 nt, Homo sapiens
  misc_RNA (1)...(19): siRNA sense strand
acaauaccuuccucuauca

SEQ ID NO: 531503 - RNA, 19 nt, Homo sapiens
  misc_RNA (1)...(19): siRNA sense strand
ggacucggaucuccuagcu

SEQ ID NO: 531504 - RNA, 19 nt, Homo sapiens
  misc_RNA (1)...(19): siRNA sense strand
gacaagccaaucuucuuaa

SEQ ID NO: 531505 - RNA, 19 nt, Homo sapiens
  misc_RNA (1)...(19): siRNA sense strand
guggaacgagugauuagua

SEQ ID NO: 531506 - RNA, 19 nt, Homo sapiens
  misc_RNA (1)...(19): siRNA sense strand
ucaagccuauucucguauu

SEQ ID NO: 531507 - RNA, 19 nt, Homo sapiens
  misc_RNA (1)...(19): siRNA sense strand
cuaugaagaugauguugau

SEQ ID NO: 531508 - RNA, 19 nt, Homo sapiens
  misc_RNA (1)...(19): siRNA sense strand
aacaauaccuuccucuauc

SEQ ID NO: 531509 - RNA, 19 nt, Homo sapiens
  misc_RNA (1)...(19): siRNA sense strand
ugccauggcccacaaagua

SEQ ID NO: 531510 - RNA, 19 nt, Homo sapiens
  misc_RNA (1)...(19): siRNA sense strand
gcgcaguuggccuaucuua

SEQ ID NO: 531511 - RNA, 19 nt, Homo sapiens
  misc_RNA (1)...(19): siRNA sense strand
gauaacauccaacuaacuc

SEQ ID NO: 531512 - RNA, 19 nt, Homo sapiens
  misc_RNA (1)...(19): siRNA sense strand
gagaacaaucugcaugaau

SEQ ID NO: 531513 - RNA, 19 nt, Homo sapiens
  misc_RNA (1)...(19): siRNA sense strand
guuugugccugaccuggua

SEQ ID NO: 531514 - RNA, 19 nt, Homo sapiens
  misc_RNA (1)...(19): siRNA sense strand
uuaaaucucccaaggaaau

SEQ ID NO: 531515 - RNA, 19 nt, Homo sapiens
  misc_RNA (1)...(19): siRNA sense strand
ucacgguaccagaggauua

SEQ ID NO: 531516 - RNA, 19 nt, Homo sapiens
  misc_RNA (1)...(19): siRNA sense strand
uuacgaagaagaccaagaa

SEQ ID NO: 531517 - RNA, 19 nt, Homo sapiens
  misc_RNA (1)...(19): siRNA sense strand
agucagagauaacauccaa

SEQ ID NO: 531518 - RNA, 19 nt, Homo sapiens
  misc_RNA (1)...(19): siRNA sense strand
gaaaagcuuccuccuugua

SEQ ID NO: 531519 - RNA, 19 nt, Homo sapiens
  misc_RNA (1)...(19): siRNA sense strand
gugaucauauuccagacaa

SEQ ID NO: 531520 - RNA, 19 nt, Homo sapiens
  misc_RNA (1)...(19): siRNA sense strand
caagcuauguuuaucucau

SEQ ID NO: 531521 - RNA, 19 nt, Homo sapiens
  misc_RNA (1)...(19): siRNA sense strand
gaucacaaaugcugagaga

SEQ ID NO: 531522 - RNA, 19 nt, Homo sapiens
  misc_RNA (1)...(19): siRNA sense strand
ucacuacucuccucugcaa

SEQ ID NO: 531523 - RNA, 19 nt, Homo sapiens
  misc_RNA (1)...(19): siRNA sense strand
cagcugggcuccuaugauc

SEQ ID NO: 531524 - RNA, 19 nt, Homo sapiens
  misc_RNA (1)...(19): siRNA sense strand
gcaccaaucggccguucua

SEQ ID NO: 531525 - RNA, 19 nt, Homo sapiens
  misc_RNA (1)...(19): siRNA sense strand
gaaaacagaugcagaagcu

SEQ ID NO: 531526 - RNA, 19 nt, Homo sapiens
  misc_RNA (1)...(19): siRNA sense strand
gcccaacagucauggagaa

SEQ ID NO: 531527 - RNA, 19 nt, Homo sapiens
  misc_RNA (1)...(19): siRNA sense strand
gcugagagacugcgaagga

SEQ ID NO: 531528 - RNA, 19 nt, Homo sapiens
  misc_RNA (1)...(19): siRNA sense strand
gaaacgggcacgugaaguc

SEQ ID NO: 531529 - RNA, 19 nt, Homo sapiens
  misc_RNA (1)...(19): siRNA sense strand
gggcuccuaugauccauug

SEQ ID NO: 531530 - RNA, 19 nt, Homo sapiens
  misc_RNA (1)...(19): siRNA sense strand
gacaggauccgucauugga

SEQ ID NO: 531531 - RNA, 19 nt, Homo sapiens
  misc_RNA (1)...(19): siRNA sense strand
uacagaggcuacagaaaca

SEQ ID NO: 531532 - RNA, 19 nt, Homo sapiens
  misc_RNA (1)...(19): siRNA sense strand
ggauggccguuucguagag

SEQ ID NO: 531533 - RNA, 19 nt, Homo sapiens
  misc_RNA (1)...(19): siRNA sense strand
cagaggcuacagaaacaua

SEQ ID NO: 531534 - RNA, 19 nt, Homo sapiens
  misc_RNA (1)...(19): siRNA sense strand
gaugcagaagcuacagaua

SEQ ID NO: 531535 - RNA, 19 nt, Homo sapiens
  misc_RNA (1)...(19): siRNA sense strand
ugcagaagcuacagauaca

SEQ ID NO: 531536 - RNA, 19 nt, Homo sapiens
  misc_RNA (1)...(19): siRNA sense strand
uaugauccauugcccaaca

SEQ ID NO: 531537 - RNA, 19 nt, Homo sapiens
  misc_RNA (1)...(19): siRNA sense strand
gauacagaggcuacagaaa

SEQ ID NO: 531538 - RNA, 19 nt, Homo sapiens
  misc_RNA (1)...(19): siRNA sense strand
cuagacaggauccgucauu

SEQ ID NO: 531539 - RNA, 19 nt, Homo sapiens
  misc_RNA (1)...(19): siRNA sense strand
ucacaaaugcugagagacu

SEQ ID NO: 531540 - RNA, 19 nt, Homo sapiens
  misc_RNA (1)...(19): siRNA sense strand
uagacaggauccgucauug

SEQ ID NO: 531541 - RNA, 19 nt, Homo sapiens
  misc_RNA (1)...(19): siRNA sense strand
gcacgugaaguccuguuag

SEQ ID NO: 531542 - RNA, 19 nt, Homo sapiens
  misc_RNA (1)...(19): siRNA sense strand
cagaagcuacagauacaga

SEQ ID NO: 531543 - RNA, 19 nt, Homo sapiens
  misc_RNA (1)...(19): siRNA sense strand
gcagcugggcuccuaugau

SEQ ID NO: 531544 - RNA, 19 nt, Homo sapiens
  misc_RNA (1)...(19): siRNA sense strand
auacagaggcuacagaaac

SEQ ID NO: 531545 - RNA, 19 nt, Homo sapiens
  misc_RNA (1)...(19): siRNA sense strand
ucucuaagccuauggaaaa

SEQ ID NO: 531546 - RNA, 19 nt, Homo sapiens
  misc_RNA (1)...(19): siRNA sense strand
gggauggccguuucguaga

SEQ ID NO: 531547 - RNA, 19 nt, Homo sapiens
  misc_RNA (1)...(19): siRNA sense strand
ugagagacugcgaaggaaa

SEQ ID NO: 531548 - RNA, 19 nt, Homo sapiens
  misc_RNA (1)...(19): siRNA sense strand
ccaccucucuaagccuaug

SEQ ID NO: 531549 - RNA, 19 nt, Homo sapiens
  misc_RNA (1)...(19): siRNA sense strand
cgugaaguccuguuagcuu

SEQ ID NO: 531550 - RNA, 19 nt, Homo sapiens
  misc_RNA (1)...(19): siRNA sense strand
ggcacgugaaguccuguua

SEQ ID NO: 531551 - RNA, 19 nt, Homo sapiens
  misc_RNA (1)...(19): siRNA sense strand
cugagagacugcgaaggaa

SEQ ID NO: 531552 - RNA, 19 nt, Homo sapiens
  misc_RNA (1)...(19): siRNA sense strand
gagagacugcgaaggaaac

SEQ ID NO: 531553 - RNA, 19 nt, Homo sapiens
  misc_RNA (1)...(19): siRNA sense strand
cagggauggccguuucgua

SEQ ID NO: 531554 - RNA, 19 nt, Homo sapiens
  misc_RNA (1)...(19): siRNA sense strand
uaagagagcucaaauaaug

SEQ ID NO: 531555 - RNA, 19 nt, Homo sapiens
  misc_RNA (1)...(19): siRNA sense strand
caucagauaucgggaauaa

SEQ ID NO: 531556 - RNA, 19 nt, Homo sapiens
  misc_RNA (1)...(19): siRNA sense strand
guggaaagcauguagauua

SEQ ID NO: 531557 - RNA, 19 nt, Homo sapiens
  misc_RNA (1)...(19): siRNA sense strand
caacagguauccagcaaug

SEQ ID NO: 531558 - RNA, 19 nt, Homo sapiens
  misc_RNA (1)...(19): siRNA sense strand
ggaagaaacagaaagaaau

SEQ ID NO: 531559 - RNA, 19 nt, Homo sapiens
  misc_RNA (1)...(19): siRNA sense strand
aaauguaucuuguguggaa

SEQ ID NO: 531560 - RNA, 19 nt, Homo sapiens
  misc_RNA (1)...(19): siRNA sense strand
gaagaaacagaaagaaauc

SEQ ID NO: 531561 - RNA, 19 nt, Homo sapiens
  misc_RNA (1)...(19): siRNA sense strand
auacaaggauccugcauau

SEQ ID NO: 531562 - RNA, 19 nt, Homo sapiens
  misc_RNA (1)...(19): siRNA sense strand
caaggacccuaaaguuugu

SEQ ID NO: 531563 - RNA, 19 nt, Homo sapiens
  misc_RNA (1)...(19): siRNA sense strand
ccaguuuguuucuccauuu

SEQ ID NO: 531564 - RNA, 19 nt, Homo sapiens
  misc_RNA (1)...(19): siRNA sense strand
gggaagaaacagaaagaaa

SEQ ID NO: 531565 - RNA, 19 nt, Homo sapiens
  misc_RNA (1)...(19): siRNA sense strand
ggaaagcauguagauuaua

SEQ ID NO: 531566 - RNA, 19 nt, Homo sapiens
  misc_RNA (1)...(19): siRNA sense strand
ucaaggacccuaaaguuug

SEQ ID NO: 531567 - RNA, 19 nt, Homo sapiens
  misc_RNA (1)...(19): siRNA sense strand
gcaauuaagagagcucaaa

SEQ ID NO: 531568 - RNA, 19 nt, Homo sapiens
  misc_RNA (1)...(19): siRNA sense strand
caguuuguuucuccauuua

SEQ ID NO: 531569 - RNA, 19 nt, Homo sapiens
  misc_RNA (1)...(19): siRNA sense strand
uggaaagcauguagauuau

SEQ ID NO: 531570 - RNA, 19 nt, Homo sapiens
  misc_RNA (1)...(19): siRNA sense strand
gcacauuacaggucuuugu

SEQ ID NO: 531571 - RNA, 19 nt, Homo sapiens
  misc_RNA (1)...(19): siRNA sense strand
ggacucacacggugcuuug

SEQ ID NO: 531572 - RNA, 19 nt, Homo sapiens
  misc_RNA (1)...(19): siRNA sense strand
ggaggaagaaguugacaca

SEQ ID NO: 531573 - RNA, 19 nt, Homo sapiens
  misc_RNA (1)...(19): siRNA sense strand
ccuaaaguuuguaacauca

SEQ ID NO: 531574 - RNA, 19 nt, Homo sapiens
  misc_RNA (1)...(19): siRNA sense strand
gaaacagaaagaaaucaca

SEQ ID NO: 531575 - RNA, 19 nt, Homo sapiens
  misc_RNA (1)...(19): siRNA sense strand
acaaggauccugcauaucu

SEQ ID NO: 531576 - RNA, 19 nt, Homo sapiens
  misc_RNA (1)...(19): siRNA sense strand
gaaccucuuaagaaaugua

SEQ ID NO: 531577 - RNA, 19 nt, Homo sapiens
  misc_RNA (1)...(19): siRNA sense strand
cauacaaggauccugcaua

SEQ ID NO: 531578 - RNA, 19 nt, Homo sapiens
  misc_RNA (1)...(19): siRNA sense strand
ucucaaggacccuaaaguu

SEQ ID NO: 531579 - RNA, 19 nt, Homo sapiens
  misc_RNA (1)...(19): siRNA sense strand
cacaacagguauccagcaa

SEQ ID NO: 531580 - RNA, 19 nt, Homo sapiens
  misc_RNA (1)...(19): siRNA sense strand
caaggauccugcauaucuc

SEQ ID NO: 531581 - RNA, 19 nt, Homo sapiens
  misc_RNA (1)...(19): siRNA sense strand
caauuaagagagcucaaau

SEQ ID NO: 531582 - RNA, 19 nt, Homo sapiens
  misc_RNA (1)...(19): siRNA sense strand
cucaaggacccuaaaguuu

SEQ ID NO: 531583 - RNA, 19 nt, Homo sapiens
  misc_RNA (1)...(19): siRNA sense strand
augaggaccugcccauuuc

SEQ ID NO: 531584 - RNA, 19 nt, Homo sapiens
  misc_RNA (1)...(19): siRNA sense strand
ccauuuacuggaugcauuu

SEQ ID NO: 531585 - RNA, 19 nt, Homo sapiens
  misc_RNA (1)...(19): siRNA sense strand
uaucuuguguggaaagcau

SEQ ID NO: 531586 - RNA, 19 nt, Homo sapiens
  misc_RNA (1)...(19): siRNA sense strand
gacccuaaaguuuguaaca

SEQ ID NO: 531587 - RNA, 19 nt, Homo sapiens
  misc_RNA (1)...(19): siRNA sense strand
uuuacuggaugcauuuaug

SEQ ID NO: 531588 - RNA, 19 nt, Homo sapiens
  misc_RNA (1)...(19): siRNA sense strand
cccuaaaguuuguaacauc

SEQ ID NO: 531589 - RNA, 19 nt, Homo sapiens
  misc_RNA (1)...(19): siRNA sense strand
aggaagaaguugacacacu

SEQ ID NO: 531590 - RNA, 19 nt, Homo sapiens
  misc_RNA (1)...(19): siRNA sense strand
gugggaagaaacagaaaga

SEQ ID NO: 531591 - RNA, 19 nt, Homo sapiens
  misc_RNA (1)...(19): siRNA sense strand
acacggugcuuuggagaag

SEQ ID NO: 531592 - RNA, 19 nt, Homo sapiens
  misc_RNA (1)...(19): siRNA sense strand
gcgguggucuagggaggaa

SEQ ID NO: 531593 - RNA, 19 nt, Homo sapiens
  misc_RNA (1)...(19): siRNA sense strand
agaaagaaaucacaaaagc

SEQ ID NO: 531594 - RNA, 19 nt, Homo sapiens
  misc_RNA (1)...(19): siRNA sense strand
ggagaagagguuguucaca

SEQ ID NO: 531595 - RNA, 19 nt, Homo sapiens
  misc_RNA (1)...(19): siRNA sense strand
gcucaaauaaugggguuua

SEQ ID NO: 531596 - RNA, 19 nt, Homo sapiens
  misc_RNA (1)...(19): siRNA sense strand
gaggaccugcccauuucaa

SEQ ID NO: 531597 - RNA, 19 nt, Homo sapiens
  misc_RNA (1)...(19): siRNA sense strand
gaaagaaaucacaaaagca

SEQ ID NO: 531598 - RNA, 19 nt, Homo sapiens
  misc_RNA (1)...(19): siRNA sense strand
acacaucccgggacucaca

SEQ ID NO: 531599 - RNA, 19 nt, Homo sapiens
  misc_RNA (1)...(19): siRNA sense strand
ggucuagggaggaagaagu

SEQ ID NO: 531600 - RNA, 19 nt, Homo sapiens
  misc_RNA (1)...(19): siRNA sense strand
uuacacaucccgggacuca

SEQ ID NO: 531601 - RNA, 19 nt, Homo sapiens
  misc_RNA (1)...(19): siRNA sense strand
cgaaggaucugguagagaa

SEQ ID NO: 531602 - RNA, 19 nt, Homo sapiens
  misc_RNA (1)...(19): siRNA sense strand
gcuccuaccuggccaauga

SEQ ID NO: 531603 - RNA, 19 nt, Homo sapiens
  misc_RNA (1)...(19): siRNA sense strand
gagaagaaccaguacaaga

SEQ ID NO: 531604 - RNA, 19 nt, Homo sapiens
  misc_RNA (1)...(19): siRNA sense strand
gaagaaccaguacaagauu

SEQ ID NO: 531605 - RNA, 19 nt, Homo sapiens
  misc_RNA (1)...(19): siRNA sense strand
cuaccuggcugacauguuc

SEQ ID NO: 531606 - RNA, 19 nt, Homo sapiens
  misc_RNA (1)...(19): siRNA sense strand
caacauggacgagaaguca

SEQ ID NO: 531607 - RNA, 19 nt, Homo sapiens
  misc_RNA (1)...(19): siRNA sense strand
caucgacuccuucaugauu

SEQ ID NO: 531608 - RNA, 19 nt, Homo sapiens
  misc_RNA (1)...(19): siRNA sense strand
gcaaccgcuucgucaagaa

SEQ ID NO: 531609 - RNA, 19 nt, Homo sapiens
  misc_RNA (1)...(19): siRNA sense strand
caucaucgacuccuucaug

SEQ ID NO: 531610 - RNA, 19 nt, Homo sapiens
  misc_RNA (1)...(19): siRNA sense strand
agaagaaccaguacaagau

SEQ ID NO: 531611 - RNA, 19 nt, Homo sapiens
  misc_RNA (1)...(19): siRNA sense strand
gggccuggaccgcaucuuu

SEQ ID NO: 531612 - RNA, 19 nt, Homo sapiens
  misc_RNA (1)...(19): siRNA sense strand
ccaucaccaucuugcauga

SEQ ID NO: 531613 - RNA, 19 nt, Homo sapiens
  misc_RNA (1)...(19): siRNA sense strand
gcaggugcacggcuucaug

SEQ ID NO: 531614 - RNA, 19 nt, Homo sapiens
  misc_RNA (1)...(19): siRNA sense strand
aagaaccaguacaagauug

SEQ ID NO: 531615 - RNA, 19 nt, Homo sapiens
  misc_RNA (1)...(19): siRNA sense strand
ucgaggagaagaaccagua

SEQ ID NO: 531616 - RNA, 19 nt, Homo sapiens
  misc_RNA (1)...(19): siRNA sense strand
gaucguggucauccuggaa

SEQ ID NO: 531617 - RNA, 19 nt, Homo sapiens
  misc_RNA (1)...(19): siRNA sense strand
ucgccaacauggacgagaa

SEQ ID NO: 531618 - RNA, 19 nt, Homo sapiens
  misc_RNA (1)...(19): siRNA sense strand
ggagacggacgacuuugag

SEQ ID NO: 531619 - RNA, 19 nt, Homo sapiens
  misc_RNA (1)...(19): siRNA sense strand
ggagaagaaccaguacaag

SEQ ID NO: 531620 - RNA, 19 nt, Homo sapiens
  misc_RNA (1)...(19): siRNA sense strand
cgcaaccgcuucgucaaga

SEQ ID NO: 531621 - RNA, 19 nt, Homo sapiens
  misc_RNA (1)...(19): siRNA sense strand
acauugaguucgccaacau

SEQ ID NO: 531622 - RNA, 19 nt, Homo sapiens
  misc_RNA (1)...(19): siRNA sense strand
gcacuuccacaagaccuau

SEQ ID NO: 531623 - RNA, 19 nt, Homo sapiens
  misc_RNA (1)...(19): siRNA sense strand
ggcaugacuuugacagacu

SEQ ID NO: 531624 - RNA, 19 nt, Homo sapiens
  misc_RNA (1)...(19): siRNA sense strand
aagaauggccagugcaaca

SEQ ID NO: 531625 - RNA, 19 nt, Homo sapiens
  misc_RNA (1)...(19): siRNA sense strand
agaacgagcuggccuuccu

SEQ ID NO: 531626 - RNA, 19 nt, Homo sapiens
  misc_RNA (1)...(19): siRNA sense strand
gugcgaaggaucugguaga

SEQ ID NO: 531627 - RNA, 19 nt, Homo sapiens
  misc_RNA (1)...(19): siRNA sense strand
caucgugggcugcaucauc

SEQ ID NO: 531628 - RNA, 19 nt, Homo sapiens
  misc_RNA (1)...(19): siRNA sense strand
gcgccaacuccuucugcua

SEQ ID NO: 531629 - RNA, 19 nt, Homo sapiens
  misc_RNA (1)...(19): siRNA sense strand
gacggacgacuuugagauc

SEQ ID NO: 531630 - RNA, 19 nt, Homo sapiens
  misc_RNA (1)...(19): siRNA sense strand
gagacggacgacuuugaga

SEQ ID NO: 531631 - RNA, 19 nt, Homo sapiens
  misc_RNA (1)...(19): siRNA sense strand
ccuggagacggacgacuuu

SEQ ID NO: 531632 - RNA, 19 nt, Homo sapiens
  misc_RNA (1)...(19): siRNA sense strand
ggccaggcaugacuuugac

SEQ ID NO: 531633 - RNA, 19 nt, Homo sapiens
  misc_RNA (1)...(19): siRNA sense strand
agaagaauggccagugcaa

SEQ ID NO: 531634 - RNA, 19 nt, Homo sapiens
  misc_RNA (1)...(19): siRNA sense strand
gagcugaucugcuugaaga

SEQ ID NO: 531635 - RNA, 19 nt, Homo sapiens
  misc_RNA (1)...(19): siRNA sense strand
gggaggagcugaucugcuu

SEQ ID NO: 531636 - RNA, 19 nt, Homo sapiens
  misc_RNA (1)...(19): siRNA sense strand
gcagggaaguggagcaaug

SEQ ID NO: 531637 - RNA, 19 nt, Homo sapiens
  misc_RNA (1)...(19): siRNA sense strand
caaaaggguugcuguaauu

SEQ ID NO: 531638 - RNA, 19 nt, Homo sapiens
  misc_RNA (1)...(19): siRNA sense strand
gaaggagacuaugcaguuc

SEQ ID NO: 531639 - RNA, 19 nt, Homo sapiens
  misc_RNA (1)...(19): siRNA sense strand
ccgaggagcugaacaagca

SEQ ID NO: 531640 - RNA, 19 nt, Homo sapiens
  misc_RNA (1)...(19): siRNA sense strand
gagcugagacgcacaguca

SEQ ID NO: 531641 - RNA, 19 nt, Homo sapiens
  misc_RNA (1)...(19): siRNA sense strand
uaaaaggacugcagaggaa

SEQ ID NO: 531642 - RNA, 19 nt, Homo sapiens
  misc_RNA (1)...(19): siRNA sense strand
caccaugucuuacaguugu

SEQ ID NO: 531643 - RNA, 19 nt, Homo sapiens
  misc_RNA (1)...(19): siRNA sense strand
uugaggagcuccagcagaa

SEQ ID NO: 531644 - RNA, 19 nt, Homo sapiens
  misc_RNA (1)...(19): siRNA sense strand
ugugagggcuccuucaaug

SEQ ID NO: 531645 - RNA, 19 nt, Homo sapiens
  misc_RNA (1)...(19): siRNA sense strand
gagcugacccucugcaagu

SEQ ID NO: 531646 - RNA, 19 nt, Homo sapiens
  misc_RNA (1)...(19): siRNA sense strand
agaaggagacuaugcaguu

SEQ ID NO: 531647 - RNA, 19 nt, Homo sapiens
  misc_RNA (1)...(19): siRNA sense strand
uggcagagauccgcuguga

SEQ ID NO: 531648 - RNA, 19 nt, Homo sapiens
  misc_RNA (1)...(19): siRNA sense strand
guaugaggcucugguggaa

SEQ ID NO: 531649 - RNA, 19 nt, Homo sapiens
  misc_RNA (1)...(19): siRNA sense strand
ucaccaacguggagucuca

SEQ ID NO: 531650 - RNA, 19 nt, Homo sapiens
  misc_RNA (1)...(19): siRNA sense strand
acucaaaccugcccacauc

SEQ ID NO: 531651 - RNA, 19 nt, Homo sapiens
  misc_RNA (1)...(19): siRNA sense strand
gcagcgagaaggagacuau

SEQ ID NO: 531652 - RNA, 19 nt, Homo sapiens
  misc_RNA (1)...(19): siRNA sense strand
gaggaaggagagacucaaa

SEQ ID NO: 531653 - RNA, 19 nt, Homo sapiens
  misc_RNA (1)...(19): siRNA sense strand
gaggagcuccagcagaaga

SEQ ID NO: 531654 - RNA, 19 nt, Homo sapiens
  misc_RNA (1)...(19): siRNA sense strand
guuccagcaccaugucuua

SEQ ID NO: 531655 - RNA, 19 nt, Homo sapiens
  misc_RNA (1)...(19): siRNA sense strand
gcuugaagaagaaccauga

SEQ ID NO: 531656 - RNA, 19 nt, Homo sapiens
  misc_RNA (1)...(19): siRNA sense strand
gcuggccucugacgacuuc

SEQ ID NO: 531657 - RNA, 19 nt, Homo sapiens
  misc_RNA (1)...(19): siRNA sense strand
gcaccaugucuuacaguug

SEQ ID NO: 531658 - RNA, 19 nt, Homo sapiens
  misc_RNA (1)...(19): siRNA sense strand
acgcggagcuggagaaacu

SEQ ID NO: 531659 - RNA, 19 nt, Homo sapiens
  misc_RNA (1)...(19): siRNA sense strand
gaggcucugguggaaauua

SEQ ID NO: 531660 - RNA, 19 nt, Homo sapiens
  misc_RNA (1)...(19): siRNA sense strand
ccacccacaauuaauggua

SEQ ID NO: 531661 - RNA, 19 nt, Homo sapiens
  misc_RNA (1)...(19): siRNA sense strand
gaggagcugaucugcuuga

SEQ ID NO: 531662 - RNA, 19 nt, Homo sapiens
  misc_RNA (1)...(19): siRNA sense strand
ucaaaaggguugcuguaau

SEQ ID NO: 531663 - RNA, 19 nt, Homo sapiens
  misc_RNA (1)...(19): siRNA sense strand
ucaacgcccuggagaucga

SEQ ID NO: 531664 - RNA, 19 nt, Homo sapiens
  misc_RNA (1)...(19): siRNA sense strand
uaccaguccuacuucaaga

SEQ ID NO: 531665 - RNA, 19 nt, Homo sapiens
  misc_RNA (1)...(19): siRNA sense strand
cugaucugcuugaagaaga

SEQ ID NO: 531666 - RNA, 19 nt, Homo sapiens
  misc_RNA (1)...(19): siRNA sense strand
cacccacaauuaaugguau

SEQ ID NO: 531667 - RNA, 19 nt, Homo sapiens
  misc_RNA (1)...(19): siRNA sense strand
agaccaggagucaguauga

SEQ ID NO: 531668 - RNA, 19 nt, Homo sapiens
  misc_RNA (1)...(19): siRNA sense strand
caacugcaacugguucugu

SEQ ID NO: 531669 - RNA, 19 nt, Homo sapiens
  misc_RNA (1)...(19): siRNA sense strand
aggcucugguggaaauuaa

SEQ ID NO: 531670 - RNA, 19 nt, Homo sapiens
  misc_RNA (1)...(19): siRNA sense strand
ccagcuaccaguccuacuu

SEQ ID NO: 531671 - RNA, 19 nt, Homo sapiens
  misc_RNA (1)...(19): siRNA sense strand
ggagaucaucgagcugaga

SEQ ID NO: 531672 - RNA, 19 nt, Homo sapiens
  misc_RNA (1)...(19): siRNA sense strand
ugaacaagcaggugguauc

SEQ ID NO: 531673 - RNA, 19 nt, Homo sapiens
  misc_RNA (1)...(19): siRNA sense strand
gggaaguggagcaaugguu

SEQ ID NO: 531674 - RNA, 19 nt, Homo sapiens
  misc_RNA (1)...(19): siRNA sense strand
gcgagaaggagacuaugca

SEQ ID NO: 531675 - RNA, 19 nt, Homo sapiens
  misc_RNA (1)...(19): siRNA sense strand
ggcugguggugaacauuga

SEQ ID NO: 531676 - RNA, 19 nt, Homo sapiens
  misc_RNA (1)...(19): siRNA sense strand
ugaucugcuugaagaagaa

SEQ ID NO: 531677 - RNA, 19 nt, Homo sapiens
  misc_RNA (1)...(19): siRNA sense strand
aaaggguugcuguaauuga

SEQ ID NO: 531678 - RNA, 19 nt, Homo sapiens
  misc_RNA (1)...(19): siRNA sense strand
gcacaaccugcgagacucu

SEQ ID NO: 531679 - RNA, 19 nt, Homo sapiens
  misc_RNA (1)...(19): siRNA sense strand
gaccaggagucaguaugag

SEQ ID NO: 531680 - RNA, 19 nt, Homo sapiens
  misc_RNA (1)...(19): siRNA sense strand
ggaaggagagacucaaacc

SEQ ID NO: 531681 - RNA, 19 nt, Homo sapiens
  misc_RNA (1)...(19): siRNA sense strand
gaacaagcaggugguaucc

SEQ ID NO: 531682 - RNA, 19 nt, Homo sapiens
  misc_RNA (1)...(19): siRNA sense strand
acccacaauuaaugguaua

SEQ ID NO: 531683 - RNA, 19 nt, Homo sapiens
  misc_RNA (1)...(19): siRNA sense strand
ugcagagccugaucaccaa

SEQ ID NO: 531684 - RNA, 19 nt, Homo sapiens
  misc_RNA (1)...(19): siRNA sense strand
caacgcggagcuggagaaa

SEQ ID NO: 531685 - RNA, 19 nt, Homo sapiens
  misc_RNA (1)...(19): siRNA sense strand
gagaccaggagucaguaug

SEQ ID NO: 531686 - RNA, 19 nt, Homo sapiens
  misc_RNA (1)...(19): siRNA sense strand
ugaacgagaccaggaguca

SEQ ID NO: 531687 - RNA, 19 nt, Homo sapiens
  misc_RNA (1)...(19): siRNA sense strand
cagcacaaccugcgagacu

SEQ ID NO: 531688 - RNA, 19 nt, Homo sapiens
  misc_RNA (1)...(19): siRNA sense strand
agaccgaggagcugaacaa

SEQ ID NO: 531689 - RNA, 19 nt, Homo sapiens
  misc_RNA (1)...(19): siRNA sense strand
augaggcucugguggaaau

SEQ ID NO: 531690 - RNA, 19 nt, Homo sapiens
  misc_RNA (1)...(19): siRNA sense strand
ucaauggcagcgagaagga

SEQ ID NO: 531691 - RNA, 19 nt, Homo sapiens
  misc_RNA (1)...(19): siRNA sense strand
ccaaugugagcaacugcaa

SEQ ID NO: 531692 - RNA, 19 nt, Homo sapiens
  misc_RNA (1)...(19): siRNA sense strand
gcugaacaagcagguggua

SEQ ID NO: 531693 - RNA, 19 nt, Homo sapiens
  misc_RNA (1)...(19): siRNA sense strand
agacuaugcaguuccugaa

SEQ ID NO: 531694 - RNA, 19 nt, Homo sapiens
  misc_RNA (1)...(19): siRNA sense strand
gagcagcacucaguaagaa

SEQ ID NO: 531695 - RNA, 19 nt, Homo sapiens
  misc_RNA (1)...(19): siRNA sense strand
uggcugacuugauucauuu

SEQ ID NO: 531696 - RNA, 19 nt, Homo sapiens
  misc_RNA (1)...(19): siRNA sense strand
guggcugacuugauucauu

SEQ ID NO: 531697 - RNA, 19 nt, Homo sapiens
  misc_RNA (1)...(19): siRNA sense strand
gcacugcaagccugaggaa

SEQ ID NO: 531698 - RNA, 19 nt, Homo sapiens
  misc_RNA (1)...(19): siRNA sense strand
ugccaucgauuucacucua

SEQ ID NO: 531699 - RNA, 19 nt, Homo sapiens
  misc_RNA (1)...(19): siRNA sense strand
gccaucgauuucacucuau

SEQ ID NO: 531700 - RNA, 19 nt, Homo sapiens
  misc_RNA (1)...(19): siRNA sense strand
ccaucgauuucacucuaug

SEQ ID NO: 531701 - RNA, 19 nt, Homo sapiens
  misc_RNA (1)...(19): siRNA sense strand
cgagcagcacucaguaaga

SEQ ID NO: 531702 - RNA, 19 nt, Homo sapiens
  misc_RNA (1)...(19): siRNA sense strand
ccacugccaucgauuucac

SEQ ID NO: 531703 - RNA, 19 nt, Homo sapiens
  misc_RNA (1)...(19): siRNA sense strand
uaagggcuccagcaaccaa

SEQ ID NO: 531704 - RNA, 19 nt, Homo sapiens
  misc_RNA (1)...(19): siRNA sense strand
ccauuaagggcuccagcaa

SEQ ID NO: 531705 - RNA, 19 nt, Homo sapiens
  misc_RNA (1)...(19): siRNA sense strand
agaagagucagcacugcaa

SEQ ID NO: 531706 - RNA, 19 nt, Homo sapiens
  misc_RNA (1)...(19): siRNA sense strand
ggacagcaaugguuguauc

SEQ ID NO: 531707 - RNA, 19 nt, Homo sapiens
  misc_RNA (1)...(19): siRNA sense strand
ugaaggugcuggacuuuga

SEQ ID NO: 531708 - RNA, 19 nt, Homo sapiens
  misc_RNA (1)...(19): siRNA sense strand
gugaugagaugaaugugaa

SEQ ID NO: 531709 - RNA, 19 nt, Homo sapiens
  misc_RNA (1)...(19): siRNA sense strand
cgucaugggugcugaaauc

SEQ ID NO: 531710 - RNA, 19 nt, Homo sapiens
  misc_RNA (1)...(19): siRNA sense strand
caagagugaugagaugaau

SEQ ID NO: 531711 - RNA, 19 nt, Homo sapiens
  misc_RNA (1)...(19): siRNA sense strand
ggacuucggguguuugaca

SEQ ID NO: 531712 - RNA, 19 nt, Homo sapiens
  misc_RNA (1)...(19): siRNA sense strand
gaacaggugauggcaagau

SEQ ID NO: 531713 - RNA, 19 nt, Homo sapiens
  misc_RNA (1)...(19): siRNA sense strand
gaggacagcaaugguugua

SEQ ID NO: 531714 - RNA, 19 nt, Homo sapiens
  misc_RNA (1)...(19): siRNA sense strand
gcuggacuuugagcacuuu

SEQ ID NO: 531715 - RNA, 19 nt, Homo sapiens
  misc_RNA (1)...(19): siRNA sense strand
ccaagagugaugagaugaa

SEQ ID NO: 531716 - RNA, 19 nt, Homo sapiens
  misc_RNA (1)...(19): siRNA sense strand
agacaguggccaagaacaa

SEQ ID NO: 531717 - RNA, 19 nt, Homo sapiens
  misc_RNA (1)...(19): siRNA sense strand
caugaggacagcaaugguu

SEQ ID NO: 531718 - RNA, 19 nt, Homo sapiens
  misc_RNA (1)...(19): siRNA sense strand
ggacuuugagcacuuucug

SEQ ID NO: 531719 - RNA, 19 nt, Homo sapiens
  misc_RNA (1)...(19): siRNA sense strand
agagugaugagaugaaugu

SEQ ID NO: 531720 - RNA, 19 nt, Homo sapiens
  misc_RNA (1)...(19): siRNA sense strand
gacuucggguguuugacaa

SEQ ID NO: 531721 - RNA, 19 nt, Homo sapiens
  misc_RNA (1)...(19): siRNA sense strand
ugcagacaguggccaagaa

SEQ ID NO: 531722 - RNA, 19 nt, Homo sapiens
  misc_RNA (1)...(19): siRNA sense strand
ccagggcaccuaugaggau

SEQ ID NO: 531723 - RNA, 19 nt, Homo sapiens
  misc_RNA (1)...(19): siRNA sense strand
gacagcaaugguuguauca

SEQ ID NO: 531724 - RNA, 19 nt, Homo sapiens
  misc_RNA (1)...(19): siRNA sense strand
gcagacaguggccaagaac

SEQ ID NO: 531725 - RNA, 19 nt, Homo sapiens
  misc_RNA (1)...(19): siRNA sense strand
acaaggaccagggcaccua

SEQ ID NO: 531726 - RNA, 19 nt, Homo sapiens
  misc_RNA (1)...(19): siRNA sense strand
caaggaccagggcaccuau

SEQ ID NO: 531727 - RNA, 19 nt, Homo sapiens
  misc_RNA (1)...(19): siRNA sense strand
ggacagcaaugguuguauc

SEQ ID NO: 531728 - RNA, 19 nt, Homo sapiens
  misc_RNA (1)...(19): siRNA sense strand
ugaaggugcuggacuuuga

SEQ ID NO: 531729 - RNA, 19 nt, Homo sapiens
  misc_RNA (1)...(19): siRNA sense strand
gugaugagaugaaugugaa

SEQ ID NO: 531730 - RNA, 19 nt, Homo sapiens
  misc_RNA (1)...(19): siRNA sense strand
cgucaugggugcugaaauc

SEQ ID NO: 531731 - RNA, 19 nt, Homo sapiens
  misc_RNA (1)...(19): siRNA sense strand
caagagugaugagaugaau

SEQ ID NO: 531732 - RNA, 19 nt, Homo sapiens
  misc_RNA (1)...(19): siRNA sense strand
ggacuucggguguuugaca

SEQ ID NO: 531733 - RNA, 19 nt, Homo sapiens
  misc_RNA (1)...(19): siRNA sense strand
gaggacagcaaugguugua

SEQ ID NO: 531734 - RNA, 19 nt, Homo sapiens
  misc_RNA (1)...(19): siRNA sense strand
gcuggacuuugagcacuuu

SEQ ID NO: 531735 - RNA, 19 nt, Homo sapiens
  misc_RNA (1)...(19): siRNA sense strand
ccaagagugaugagaugaa

SEQ ID NO: 531736 - RNA, 19 nt, Homo sapiens
  misc_RNA (1)...(19): siRNA sense strand
agacaguggccaagaacaa

SEQ ID NO: 531737 - RNA, 19 nt, Homo sapiens
  misc_RNA (1)...(19): siRNA sense strand
caugaggacagcaaugguu

SEQ ID NO: 531738 - RNA, 19 nt, Homo sapiens
  misc_RNA (1)...(19): siRNA sense strand
ggacuuugagcacuuucug

SEQ ID NO: 531739 - RNA, 19 nt, Homo sapiens
  misc_RNA (1)...(19): siRNA sense strand
agagugaugagaugaaugu

SEQ ID NO: 531740 - RNA, 19 nt, Homo sapiens
  misc_RNA (1)...(19): siRNA sense strand
gacuucggguguuugacaa

SEQ ID NO: 531741 - RNA, 19 nt, Homo sapiens
  misc_RNA (1)...(19): siRNA sense strand
ugcagacaguggccaagaa

SEQ ID NO: 531742 - RNA, 19 nt, Homo sapiens
  misc_RNA (1)...(19): siRNA sense strand
ccagggcaccuaugaggau

SEQ ID NO: 531743 - RNA, 19 nt, Homo sapiens
  misc_RNA (1)...(19): siRNA sense strand
gacagcaaugguuguauca

SEQ ID NO: 531744 - RNA, 19 nt, Homo sapiens
  misc_RNA (1)...(19): siRNA sense strand
gcagacaguggccaagaac

SEQ ID NO: 531745 - RNA, 19 nt, Homo sapiens
  misc_RNA (1)...(19): siRNA sense strand
acaaggaccagggcaccua

SEQ ID NO: 531746 - RNA, 19 nt, Homo sapiens
  misc_RNA (1)...(19): siRNA sense strand
caaggaccagggcaccuau

SEQ ID NO: 531747 - RNA, 19 nt, Homo sapiens
  misc_RNA (1)...(19): siRNA sense strand
ggacagcaaugguuguauc

SEQ ID NO: 531748 - RNA, 19 nt, Homo sapiens
  misc_RNA (1)...(19): siRNA sense strand
ugaaggugcuggacuuuga

SEQ ID NO: 531749 - RNA, 19 nt, Homo sapiens
  misc_RNA (1)...(19): siRNA sense strand
gugaugagaugaaugugaa

SEQ ID NO: 531750 - RNA, 19 nt, Homo sapiens
  misc_RNA (1)...(19): siRNA sense strand
cgucaugggugcugaaauc

SEQ ID NO: 531751 - RNA, 19 nt, Homo sapiens
  misc_RNA (1)...(19): siRNA sense strand
caagagugaugagaugaau

SEQ ID NO: 531752 - RNA, 19 nt, Homo sapiens
  misc_RNA (1)...(19): siRNA sense strand
ggacuucggguguuugaca

SEQ ID NO: 531753 - RNA, 19 nt, Homo sapiens
  misc_RNA (1)...(19): siRNA sense strand
gaggacagcaaugguugua

SEQ ID NO: 531754 - RNA, 19 nt, Homo sapiens
  misc_RNA (1)...(19): siRNA sense strand
gcuggacuuugagcacuuu

SEQ ID NO: 531755 - RNA, 19 nt, Homo sapiens
  misc_RNA (1)...(19): siRNA sense strand
ccaagagugaugagaugaa

SEQ ID NO: 531756 - RNA, 19 nt, Homo sapiens
  misc_RNA (1)...(19): siRNA sense strand
agacaguggccaagaacaa

SEQ ID NO: 531757 - RNA, 19 nt, Homo sapiens
  misc_RNA (1)...(19): siRNA sense strand
caugaggacagcaaugguu

SEQ ID NO: 531758 - RNA, 19 nt, Homo sapiens
  misc_RNA (1)...(19): siRNA sense strand
ggacuuugagcacuuucug

SEQ ID NO: 531759 - RNA, 19 nt, Homo sapiens
  misc_RNA (1)...(19): siRNA sense strand
agagugaugagaugaaugu

SEQ ID NO: 531760 - RNA, 19 nt, Homo sapiens
  misc_RNA (1)...(19): siRNA sense strand
gacuucggguguuugacaa

SEQ ID NO: 531761 - RNA, 19 nt, Homo sapiens
  misc_RNA (1)...(19): siRNA sense strand
ugcagacaguggccaagaa

SEQ ID NO: 531762 - RNA, 19 nt, Homo sapiens
  misc_RNA (1)...(19): siRNA sense strand
ccagggcaccuaugaggau

SEQ ID NO: 531763 - RNA, 19 nt, Homo sapiens
  misc_RNA (1)...(19): siRNA sense strand
gacagcaaugguuguauca

SEQ ID NO: 531764 - RNA, 19 nt, Homo sapiens
  misc_RNA (1)...(19): siRNA sense strand
gcagacaguggccaagaac

SEQ ID NO: 531765 - RNA, 19 nt, Homo sapiens
  misc_RNA (1)...(19): siRNA sense strand
acaaggaccagggcaccua

SEQ ID NO: 531766 - RNA, 19 nt, Homo sapiens
  misc_RNA (1)...(19): siRNA sense strand
caaggaccagggcaccuau

SEQ ID NO: 531767 - RNA, 19 nt, Homo sapiens
  misc_RNA (1)...(19): siRNA sense strand
ggacagcaaugguuguauc

SEQ ID NO: 531768 - RNA, 19 nt, Homo sapiens
  misc_RNA (1)...(19): siRNA sense strand
ugaaggugcuggacuuuga

SEQ ID NO: 531769 - RNA, 19 nt, Homo sapiens
  misc_RNA (1)...(19): siRNA sense strand
gugaugagaugaaugugaa

SEQ ID NO: 531770 - RNA, 19 nt, Homo sapiens
  misc_RNA (1)...(19): siRNA sense strand
cgucaugggugcugaaauc

SEQ ID NO: 531771 - RNA, 19 nt, Homo sapiens
  misc_RNA (1)...(19): siRNA sense strand
caagagugaugagaugaau

SEQ ID NO: 531772 - RNA, 19 nt, Homo sapiens
  misc_RNA (1)...(19): siRNA sense strand
ggacuucggguguuugaca

SEQ ID NO: 531773 - RNA, 19 nt, Homo sapiens
  misc_RNA (1)...(19): siRNA sense strand
gaacaggugauggcaagau

SEQ ID NO: 531774 - RNA, 19 nt, Homo sapiens
  misc_RNA (1)...(19): siRNA sense strand
gaggacagcaaugguugua

SEQ ID NO: 531775 - RNA, 19 nt, Homo sapiens
  misc_RNA (1)...(19): siRNA sense strand
gcuggacuuugagcacuuu

SEQ ID NO: 531776 - RNA, 19 nt, Homo sapiens
  misc_RNA (1)...(19): siRNA sense strand
ccaagagugaugagaugaa

SEQ ID NO: 531777 - RNA, 19 nt, Homo sapiens
  misc_RNA (1)...(19): siRNA sense strand
agacaguggccaagaacaa

SEQ ID NO: 531778 - RNA, 19 nt, Homo sapiens
  misc_RNA (1)...(19): siRNA sense strand
caugaggacagcaaugguu

SEQ ID NO: 531779 - RNA, 19 nt, Homo sapiens
  misc_RNA (1)...(19): siRNA sense strand
ggacuuugagcacuuucug

SEQ ID NO: 531780 - RNA, 19 nt, Homo sapiens
  misc_RNA (1)...(19): siRNA sense strand
agagugaugagaugaaugu

SEQ ID NO: 531781 - RNA, 19 nt, Homo sapiens
  misc_RNA (1)...(19): siRNA sense strand
gacuucggguguuugacaa

SEQ ID NO: 531782 - RNA, 19 nt, Homo sapiens
  misc_RNA (1)...(19): siRNA sense strand
ugcagacaguggccaagaa

SEQ ID NO: 531783 - RNA, 19 nt, Homo sapiens
  misc_RNA (1)...(19): siRNA sense strand
ccagggcaccuaugaggau

SEQ ID NO: 531784 - RNA, 19 nt, Homo sapiens
  misc_RNA (1)...(19): siRNA sense strand
gacagcaaugguuguauca

SEQ ID NO: 531785 - RNA, 19 nt, Homo sapiens
  misc_RNA (1)...(19): siRNA sense strand
gcagacaguggccaagaac

SEQ ID NO: 531786 - RNA, 19 nt, Homo sapiens
  misc_RNA (1)...(19): siRNA sense strand
acaaggaccagggcaccua

SEQ ID NO: 531787 - RNA, 19 nt, Homo sapiens
  misc_RNA (1)...(19): siRNA sense strand
caaggaccagggcaccuau

SEQ ID NO: 531788 - RNA, 19 nt, Homo sapiens
  misc_RNA (1)...(19): siRNA sense strand
ucgagaagcugcucaauua

SEQ ID NO: 531789 - RNA, 19 nt, Homo sapiens
  misc_RNA (1)...(19): siRNA sense strand
gcaacaagugggaggcuua

SEQ ID NO: 531790 - RNA, 19 nt, Homo sapiens
  misc_RNA (1)...(19): siRNA sense strand
gagaagcugcucaauuaug

SEQ ID NO: 531791 - RNA, 19 nt, Homo sapiens
  misc_RNA (1)...(19): siRNA sense strand
guacgcugcuucacuugug

SEQ ID NO: 531792 - RNA, 19 nt, Homo sapiens
  misc_RNA (1)...(19): siRNA sense strand
gcaagaucgucggcaacaa

SEQ ID NO: 531793 - RNA, 19 nt, Homo sapiens
  misc_RNA (1)...(19): siRNA sense strand
ccuguacgcugcuucacuu

SEQ ID NO: 531794 - RNA, 19 nt, Homo sapiens
  misc_RNA (1)...(19): siRNA sense strand
agaagcugcucaauuaugc

SEQ ID NO: 531795 - RNA, 19 nt, Homo sapiens
  misc_RNA (1)...(19): siRNA sense strand
caagaucgucggcaacaag

SEQ ID NO: 531796 - RNA, 19 nt, Homo sapiens
  misc_RNA (1)...(19): siRNA sense strand
acguggaccugaucgagaa

SEQ ID NO: 531797 - RNA, 19 nt, Homo sapiens
  misc_RNA (1)...(19): siRNA sense strand
cgagaagcugcucaauuau

SEQ ID NO: 531798 - RNA, 19 nt, Homo sapiens
  misc_RNA (1)...(19): siRNA sense strand
gcugaaaccuggcuacuua

SEQ ID NO: 531799 - RNA, 19 nt, Homo sapiens
  misc_RNA (1)...(19): siRNA sense strand
ggaaucaguugcaugaaua

SEQ ID NO: 531800 - RNA, 19 nt, Homo sapiens
  misc_RNA (1)...(19): siRNA sense strand
ggaaagucauugccauuaa

SEQ ID NO: 531801 - RNA, 19 nt, Homo sapiens
  misc_RNA (1)...(19): siRNA sense strand
caacagacguggauaagug

SEQ ID NO: 531802 - RNA, 19 nt, Homo sapiens
  misc_RNA (1)...(19): siRNA sense strand
ggauauaucuggaacuaug

SEQ ID NO: 531803 - RNA, 19 nt, Homo sapiens
  misc_RNA (1)...(19): siRNA sense strand
gauaaggacuuugccauug

SEQ ID NO: 531804 - RNA, 19 nt, Homo sapiens
  misc_RNA (1)...(19): siRNA sense strand
ugaaauaauuggcgugaaa

SEQ ID NO: 531805 - RNA, 19 nt, Homo sapiens
  misc_RNA (1)...(19): siRNA sense strand
gaaagucauugccauuaau

SEQ ID NO: 531806 - RNA, 19 nt, Homo sapiens
  misc_RNA (1)...(19): siRNA sense strand
cgaauuuguucccguauaa

SEQ ID NO: 531807 - RNA, 19 nt, Homo sapiens
  misc_RNA (1)...(19): siRNA sense strand
gaaaaugaguuugcguuua

SEQ ID NO: 531808 - RNA, 19 nt, Homo sapiens
  misc_RNA (1)...(19): siRNA sense strand
aaauggagauugcuacaaa

SEQ ID NO: 531809 - RNA, 19 nt, Homo sapiens
  misc_RNA (1)...(19): siRNA sense strand
gaaauuggaagcaagguau

SEQ ID NO: 531810 - RNA, 19 nt, Homo sapiens
  misc_RNA (1)...(19): siRNA sense strand
gcgaauuuguucccguaua

SEQ ID NO: 531811 - RNA, 19 nt, Homo sapiens
  misc_RNA (1)...(19): siRNA sense strand
cgugaaaguucuaggcaua

SEQ ID NO: 531812 - RNA, 19 nt, Homo sapiens
  misc_RNA (1)...(19): siRNA sense strand
ggacuuugccauugauauu

SEQ ID NO: 531813 - RNA, 19 nt, Homo sapiens
  misc_RNA (1)...(19): siRNA sense strand
gcagccaauuauaaugaua

SEQ ID NO: 531814 - RNA, 19 nt, Homo sapiens
  misc_RNA (1)...(19): siRNA sense strand
gcacaaugauaaacauacu

SEQ ID NO: 531815 - RNA, 19 nt, Homo sapiens
  misc_RNA (1)...(19): siRNA sense strand
gaaaacgaauggaaaagga

SEQ ID NO: 531816 - RNA, 19 nt, Homo sapiens
  misc_RNA (1)...(19): siRNA sense strand
ucacaugguaguugaagua

SEQ ID NO: 531817 - RNA, 19 nt, Homo sapiens
  misc_RNA (1)...(19): siRNA sense strand
ggacugguuuagaagguau

SEQ ID NO: 531818 - RNA, 19 nt, Homo sapiens
  misc_RNA (1)...(19): siRNA sense strand
aaaggaaucaguugcauga

SEQ ID NO: 531819 - RNA, 19 nt, Homo sapiens
  misc_RNA (1)...(19): siRNA sense strand
gaaaguucuaggcauauug

SEQ ID NO: 531820 - RNA, 19 nt, Homo sapiens
  misc_RNA (1)...(19): siRNA sense strand
gaaucugccugcacaguac

SEQ ID NO: 531821 - RNA, 19 nt, Homo sapiens
  misc_RNA (1)...(19): siRNA sense strand
aaggauauaucuggaacua

SEQ ID NO: 531822 - RNA, 19 nt, Homo sapiens
  misc_RNA (1)...(19): siRNA sense strand
guaccgagucuuccucaaa

SEQ ID NO: 531823 - RNA, 19 nt, Homo sapiens
  misc_RNA (1)...(19): siRNA sense strand
caauugaugugugugaaau

SEQ ID NO: 531824 - RNA, 19 nt, Homo sapiens
  misc_RNA (1)...(19): siRNA sense strand
guauaagguuccugaugga

SEQ ID NO: 531825 - RNA, 19 nt, Homo sapiens
  misc_RNA (1)...(19): siRNA sense strand
gaaaccuggcuacuuagaa

SEQ ID NO: 531826 - RNA, 19 nt, Homo sapiens
  misc_RNA (1)...(19): siRNA sense strand
ugaaaguucuaggcauauu

SEQ ID NO: 531827 - RNA, 19 nt, Homo sapiens
  misc_RNA (1)...(19): siRNA sense strand
gagccauuguggaugcuuu

SEQ ID NO: 531828 - RNA, 19 nt, Homo sapiens
  misc_RNA (1)...(19): siRNA sense strand
auaaggacuuugccauuga

SEQ ID NO: 531829 - RNA, 19 nt, Homo sapiens
  misc_RNA (1)...(19): siRNA sense strand
aaaccuggcuacuuagaag

SEQ ID NO: 531830 - RNA, 19 nt, Homo sapiens
  misc_RNA (1)...(19): siRNA sense strand
gcacucaugaccauuggaa

SEQ ID NO: 531831 - RNA, 19 nt, Homo sapiens
  misc_RNA (1)...(19): siRNA sense strand
cagauaaggauguguuuca

SEQ ID NO: 531832 - RNA, 19 nt, Homo sapiens
  misc_RNA (1)...(19): siRNA sense strand
gacuuugccauugauauua

SEQ ID NO: 531833 - RNA, 19 nt, Homo sapiens
  misc_RNA (1)...(19): siRNA sense strand
ugaaucugccugcacagua

SEQ ID NO: 531834 - RNA, 19 nt, Homo sapiens
  misc_RNA (1)...(19): siRNA sense strand
gggcacaaugauaaacaua

SEQ ID NO: 531835 - RNA, 19 nt, Homo sapiens
  misc_RNA (1)...(19): siRNA sense strand
acuguggacugguuuagaa

SEQ ID NO: 531836 - RNA, 19 nt, Homo sapiens
  misc_RNA (1)...(19): siRNA sense strand
uggaaagucauugccauua

SEQ ID NO: 531837 - RNA, 19 nt, Homo sapiens
  misc_RNA (1)...(19): siRNA sense strand
ggaagcaagguaugugcaa

SEQ ID NO: 531838 - RNA, 19 nt, Homo sapiens
  misc_RNA (1)...(19): siRNA sense strand
gaagacccagggcacaaug

SEQ ID NO: 531839 - RNA, 19 nt, Homo sapiens
  misc_RNA (1)...(19): siRNA sense strand
gacccagggcacaaugaua

SEQ ID NO: 531840 - RNA, 19 nt, Homo sapiens
  misc_RNA (1)...(19): siRNA sense strand
aggaaucaguugcaugaau

SEQ ID NO: 531841 - RNA, 19 nt, Homo sapiens
  misc_RNA (1)...(19): siRNA sense strand
uaaaagcacucaugaccau

SEQ ID NO: 531842 - RNA, 19 nt, Homo sapiens
  misc_RNA (1)...(19): siRNA sense strand
uaaggacuuugccauugau

SEQ ID NO: 531843 - RNA, 19 nt, Homo sapiens
  misc_RNA (1)...(19): siRNA sense strand
gaaauaauuggcgugaaag

SEQ ID NO: 531844 - RNA, 19 nt, Homo sapiens
  misc_RNA (1)...(19): siRNA sense strand
gaauuuguucccguauaaa

SEQ ID NO: 531845 - RNA, 19 nt, Homo sapiens
  misc_RNA (1)...(19): siRNA sense strand
cugaugcagccaauuauaa

SEQ ID NO: 531846 - RNA, 19 nt, Homo sapiens
  misc_RNA (1)...(19): siRNA sense strand
ccacgcuggucuaaugcaa

SEQ ID NO: 531847 - RNA, 19 nt, Homo sapiens
  misc_RNA (1)...(19): siRNA sense strand
ccaauugaugugugugaaa

SEQ ID NO: 531848 - RNA, 19 nt, Homo sapiens
  misc_RNA (1)...(19): siRNA sense strand
aagcuacuguggacugguu

SEQ ID NO: 531849 - RNA, 19 nt, Homo sapiens
  misc_RNA (1)...(19): siRNA sense strand
ugaaauuggaagcaaggua

SEQ ID NO: 531850 - RNA, 19 nt, Homo sapiens
  misc_RNA (1)...(19): siRNA sense strand
gaaaaggaaucaguugcau

SEQ ID NO: 531851 - RNA, 19 nt, Homo sapiens
  misc_RNA (1)...(19): siRNA sense strand
ugaugugugugaaauugga

SEQ ID NO: 531852 - RNA, 19 nt, Homo sapiens
  misc_RNA (1)...(19): siRNA sense strand
ggaaaacuucgcuauguug

SEQ ID NO: 531853 - RNA, 19 nt, Homo sapiens
  misc_RNA (1)...(19): siRNA sense strand
auaauuggcgugaaaguuc

SEQ ID NO: 531854 - RNA, 19 nt, Homo sapiens
  misc_RNA (1)...(19): siRNA sense strand
ggaagacccagggcacaau

SEQ ID NO: 531855 - RNA, 19 nt, Homo sapiens
  misc_RNA (1)...(19): siRNA sense strand
ccugaugcagccaauuaua

SEQ ID NO: 531856 - RNA, 19 nt, Homo sapiens
  misc_RNA (1)...(19): siRNA sense strand
ugacccaauugaugugugu

SEQ ID NO: 531857 - RNA, 19 nt, Homo sapiens
  misc_RNA (1)...(19): siRNA sense strand
acccagggcacaaugauaa

SEQ ID NO: 531858 - RNA, 19 nt, Homo sapiens
  misc_RNA (1)...(19): siRNA sense strand
agauaaggacuuugccauu

SEQ ID NO: 531859 - RNA, 19 nt, Homo sapiens
  misc_RNA (1)...(19): siRNA sense strand
ugcguuuaaugcagaauuu

SEQ ID NO: 531860 - RNA, 19 nt, Homo sapiens
  misc_RNA (1)...(19): siRNA sense strand
gaugcagccaauuauaaug

SEQ ID NO: 531861 - RNA, 19 nt, Homo sapiens
  misc_RNA (1)...(19): siRNA sense strand
gacccuuuaaacccuauua

SEQ ID NO: 531862 - RNA, 19 nt, Homo sapiens
  misc_RNA (1)...(19): siRNA sense strand
caagugugauccugaugcu

SEQ ID NO: 531863 - RNA, 19 nt, Homo sapiens
  misc_RNA (1)...(19): siRNA sense strand
uugcaugaauacaacuuug

SEQ ID NO: 531864 - RNA, 19 nt, Homo sapiens
  misc_RNA (1)...(19): siRNA sense strand
gcuauguugcgaauuuguu

SEQ ID NO: 531865 - RNA, 19 nt, Homo sapiens
  misc_RNA (1)...(19): siRNA sense strand
gcguuuaaugcagaauuua

SEQ ID NO: 531866 - RNA, 19 nt, Homo sapiens
  misc_RNA (1)...(19): siRNA sense strand
uaauuggcgugaaaguucu

SEQ ID NO: 531867 - RNA, 19 nt, Homo sapiens
  misc_RNA (1)...(19): siRNA sense strand
uaccaacagacguggauaa

SEQ ID NO: 531868 - RNA, 19 nt, Homo sapiens
  misc_RNA (1)...(19): siRNA sense strand
aaagcacucaugaccauug

SEQ ID NO: 531869 - RNA, 19 nt, Homo sapiens
  misc_RNA (1)...(19): siRNA sense strand
gcagauaaggauguguuuc

SEQ ID NO: 531870 - RNA, 19 nt, Homo sapiens
  misc_RNA (1)...(19): siRNA sense strand
ugaugcagccaauuauaau

SEQ ID NO: 531871 - RNA, 19 nt, Homo sapiens
  misc_RNA (1)...(19): siRNA sense strand
cauuggaaagcauuaguga

SEQ ID NO: 531872 - RNA, 19 nt, Homo sapiens
  misc_RNA (1)...(19): siRNA sense strand
cauuguggaugcuuuacca

SEQ ID NO: 531873 - RNA, 19 nt, Homo sapiens
  misc_RNA (1)...(19): siRNA sense strand
guuuagaagguauaagguu

SEQ ID NO: 531874 - RNA, 19 nt, Homo sapiens
  misc_RNA (1)...(19): siRNA sense strand
gggaagacccagggcacaa

SEQ ID NO: 531875 - RNA, 19 nt, Homo sapiens
  misc_RNA (1)...(19): siRNA sense strand
ugaaaccuggcuacuuaga

SEQ ID NO: 531876 - RNA, 19 nt, Homo sapiens
  misc_RNA (1)...(19): siRNA sense strand
ccaccacccugugaaucug

SEQ ID NO: 531877 - RNA, 19 nt, Homo sapiens
  misc_RNA (1)...(19): siRNA sense strand
gcuacuguggacugguuua

SEQ ID NO: 531878 - RNA, 19 nt, Homo sapiens
  misc_RNA (1)...(19): siRNA sense strand
uggugacaaugacccaauu

SEQ ID NO: 531879 - RNA, 19 nt, Homo sapiens
  misc_RNA (1)...(19): siRNA sense strand
ccuauuaaacaagauguga

SEQ ID NO: 531880 - RNA, 19 nt, Homo sapiens
  misc_RNA (1)...(19): siRNA sense strand
ggacaauauauaucuccau

SEQ ID NO: 531881 - RNA, 19 nt, Homo sapiens
  misc_RNA (1)...(19): siRNA sense strand
auugaugugugugaaauug

SEQ ID NO: 531882 - RNA, 19 nt, Homo sapiens
  misc_RNA (1)...(19): siRNA sense strand
guucccguauaaaggauau

SEQ ID NO: 531883 - RNA, 19 nt, Homo sapiens
  misc_RNA (1)...(19): siRNA sense strand
cuucaagugugauccugau

SEQ ID NO: 531884 - RNA, 19 nt, Homo sapiens
  misc_RNA (1)...(19): siRNA sense strand
uggacugguuuagaaggua

SEQ ID NO: 531885 - RNA, 19 nt, Homo sapiens
  misc_RNA (1)...(19): siRNA sense strand
aauaauuggcgugaaaguu

SEQ ID NO: 531886 - RNA, 19 nt, Homo sapiens
  misc_RNA (1)...(19): siRNA sense strand
guaccaacagacguggaua

SEQ ID NO: 531887 - RNA, 19 nt, Homo sapiens
  misc_RNA (1)...(19): siRNA sense strand
uguuucacaugguaguuga

SEQ ID NO: 531888 - RNA, 19 nt, Homo sapiens
  misc_RNA (1)...(19): siRNA sense strand
ugaccauuggaaagcauua

SEQ ID NO: 531889 - RNA, 19 nt, Homo sapiens
  misc_RNA (1)...(19): siRNA sense strand
uaccgagucuuccucaaaa

SEQ ID NO: 531890 - RNA, 19 nt, Homo sapiens
  misc_RNA (1)...(19): siRNA sense strand
gaugguaucugggauguua

SEQ ID NO: 531891 - RNA, 19 nt, Homo sapiens
  misc_RNA (1)...(19): siRNA sense strand
gaagaaacauggugcagau

SEQ ID NO: 531892 - RNA, 19 nt, Homo sapiens
  misc_RNA (1)...(19): siRNA sense strand
gcagguggcucuguaauga

SEQ ID NO: 531893 - RNA, 19 nt, Homo sapiens
  misc_RNA (1)...(19): siRNA sense strand
guucucagguugccaaaua

SEQ ID NO: 531894 - RNA, 19 nt, Homo sapiens
  misc_RNA (1)...(19): siRNA sense strand
guaauccgcuggagaaaga

SEQ ID NO: 531895 - RNA, 19 nt, Homo sapiens
  misc_RNA (1)...(19): siRNA sense strand
gaugaacacaugagaguua

SEQ ID NO: 531896 - RNA, 19 nt, Homo sapiens
  misc_RNA (1)...(19): siRNA sense strand
ugaagaagaugaucaguuc

SEQ ID NO: 531897 - RNA, 19 nt, Homo sapiens
  misc_RNA (1)...(19): siRNA sense strand
gaaaugaagagcucuguga

SEQ ID NO: 531898 - RNA, 19 nt, Homo sapiens
  misc_RNA (1)...(19): siRNA sense strand
ggagauugaugaacacaug

SEQ ID NO: 531899 - RNA, 19 nt, Homo sapiens
  misc_RNA (1)...(19): siRNA sense strand
gaaugcagguggcucugua

SEQ ID NO: 531900 - RNA, 19 nt, Homo sapiens
  misc_RNA (1)...(19): siRNA sense strand
gguaauggguugcgauaug

SEQ ID NO: 531901 - RNA, 19 nt, Homo sapiens
  misc_RNA (1)...(19): siRNA sense strand
gaaacauggugcagauaga

SEQ ID NO: 531902 - RNA, 19 nt, Homo sapiens
  misc_RNA (1)...(19): siRNA sense strand
uagaucacaucaccaauaa

SEQ ID NO: 531903 - RNA, 19 nt, Homo sapiens
  misc_RNA (1)...(19): siRNA sense strand
ugagaaaguuugcaaugaa

SEQ ID NO: 531904 - RNA, 19 nt, Homo sapiens
  misc_RNA (1)...(19): siRNA sense strand
ucaagagguuuacuuugua

SEQ ID NO: 531905 - RNA, 19 nt, Homo sapiens
  misc_RNA (1)...(19): siRNA sense strand
gaagaaggaggcagaguug

SEQ ID NO: 531906 - RNA, 19 nt, Homo sapiens
  misc_RNA (1)...(19): siRNA sense strand
gaaaguuugcaaugaagua

SEQ ID NO: 531907 - RNA, 19 nt, Homo sapiens
  misc_RNA (1)...(19): siRNA sense strand
caagaucacaaaccaagua

SEQ ID NO: 531908 - RNA, 19 nt, Homo sapiens
  misc_RNA (1)...(19): siRNA sense strand
aggcagaguuggacaagua

SEQ ID NO: 531909 - RNA, 19 nt, Homo sapiens
  misc_RNA (1)...(19): siRNA sense strand
caaguaauccgcuggagaa

SEQ ID NO: 531910 - RNA, 19 nt, Homo sapiens
  misc_RNA (1)...(19): siRNA sense strand
gaauggcucucuggcugua

SEQ ID NO: 531911 - RNA, 19 nt, Homo sapiens
  misc_RNA (1)...(19): siRNA sense strand
acaaauguguccauggaaa

SEQ ID NO: 531912 - RNA, 19 nt, Homo sapiens
  misc_RNA (1)...(19): siRNA sense strand
ugaaguccaugauauugaa

SEQ ID NO: 531913 - RNA, 19 nt, Homo sapiens
  misc_RNA (1)...(19): siRNA sense strand
gagaaagaacgaauucaga

SEQ ID NO: 531914 - RNA, 19 nt, Homo sapiens
  misc_RNA (1)...(19): siRNA sense strand
augaagagcucugugauuu

SEQ ID NO: 531915 - RNA, 19 nt, Homo sapiens
  misc_RNA (1)...(19): siRNA sense strand
uuacaaauguguccaugga

SEQ ID NO: 531916 - RNA, 19 nt, Homo sapiens
  misc_RNA (1)...(19): siRNA sense strand
gucgacaccuguuuguaua

SEQ ID NO: 531917 - RNA, 19 nt, Homo sapiens
  misc_RNA (1)...(19): siRNA sense strand
gagaaaguuugcaaugaag

SEQ ID NO: 531918 - RNA, 19 nt, Homo sapiens
  misc_RNA (1)...(19): siRNA sense strand
gaucacaaaccaaguaauc

SEQ ID NO: 531919 - RNA, 19 nt, Homo sapiens
  misc_RNA (1)...(19): siRNA sense strand
cagaagcagugaagaagga

SEQ ID NO: 531920 - RNA, 19 nt, Homo sapiens
  misc_RNA (1)...(19): siRNA sense strand
gaagagcucugugauuuug

SEQ ID NO: 531921 - RNA, 19 nt, Homo sapiens
  misc_RNA (1)...(19): siRNA sense strand
guaaagaauggaaucagaa

SEQ ID NO: 531922 - RNA, 19 nt, Homo sapiens
  misc_RNA (1)...(19): siRNA sense strand
ggaagucgagacaacauga

SEQ ID NO: 531923 - RNA, 19 nt, Homo sapiens
  misc_RNA (1)...(19): siRNA sense strand
ccaaaugcacccaaaguau

SEQ ID NO: 531924 - RNA, 19 nt, Homo sapiens
  misc_RNA (1)...(19): siRNA sense strand
gcugugagcauuuguuaga

SEQ ID NO: 531925 - RNA, 19 nt, Homo sapiens
  misc_RNA (1)...(19): siRNA sense strand
caaaguaucgccagaagca

SEQ ID NO: 531926 - RNA, 19 nt, Homo sapiens
  misc_RNA (1)...(19): siRNA sense strand
uguaaagaauggaaucaga

SEQ ID NO: 531927 - RNA, 19 nt, Homo sapiens
  misc_RNA (1)...(19): siRNA sense strand
gaaauggaggaugcacaua

SEQ ID NO: 531928 - RNA, 19 nt, Homo sapiens
  misc_RNA (1)...(19): siRNA sense strand
caagagguuuacuuuguag

SEQ ID NO: 531929 - RNA, 19 nt, Homo sapiens
  misc_RNA (1)...(19): siRNA sense strand
guaggugucuuaauuucuc

SEQ ID NO: 531930 - RNA, 19 nt, Homo sapiens
  misc_RNA (1)...(19): siRNA sense strand
ggacuugaaucguggucau

SEQ ID NO: 531931 - RNA, 19 nt, Homo sapiens
  misc_RNA (1)...(19): siRNA sense strand
cgagacaacaugaguguga

SEQ ID NO: 531932 - RNA, 19 nt, Homo sapiens
  misc_RNA (1)...(19): siRNA sense strand
cugaugaccuugagaaagu

SEQ ID NO: 531933 - RNA, 19 nt, Homo sapiens
  misc_RNA (1)...(19): siRNA sense strand
uuagaucacaucaccaaua

SEQ ID NO: 531934 - RNA, 19 nt, Homo sapiens
  misc_RNA (1)...(19): siRNA sense strand
ggucauucuuugcugugua

SEQ ID NO: 531935 - RNA, 19 nt, Homo sapiens
  misc_RNA (1)...(19): siRNA sense strand
cucaagagguuuacuuugu

SEQ ID NO: 531936 - RNA, 19 nt, Homo sapiens
  misc_RNA (1)...(19): siRNA sense strand
gagguuuacuuuguaggaa

SEQ ID NO: 531937 - RNA, 19 nt, Homo sapiens
  misc_RNA (1)...(19): siRNA sense strand
caaaugcacccaaaguauc

SEQ ID NO: 531938 - RNA, 19 nt, Homo sapiens
  misc_RNA (1)...(19): siRNA sense strand
agaaagaacgaauucagaa

SEQ ID NO: 531939 - RNA, 19 nt, Homo sapiens
  misc_RNA (1)...(19): siRNA sense strand
guucauuucuucacacaag

SEQ ID NO: 531940 - RNA, 19 nt, Homo sapiens
  misc_RNA (1)...(19): siRNA sense strand
ugagaguuaugucagagaa

SEQ ID NO: 531941 - RNA, 19 nt, Homo sapiens
  misc_RNA (1)...(19): siRNA sense strand
uuuguaagauccagacuug

SEQ ID NO: 531942 - RNA, 19 nt, Homo sapiens
  misc_RNA (1)...(19): siRNA sense strand
gggauguuaugggaaauga

SEQ ID NO: 531943 - RNA, 19 nt, Homo sapiens
  misc_RNA (1)...(19): siRNA sense strand
ucauuauccuugcauguga

SEQ ID NO: 531944 - RNA, 19 nt, Homo sapiens
  misc_RNA (1)...(19): siRNA sense strand
gcuguaggugucuuaauuu

SEQ ID NO: 531945 - RNA, 19 nt, Homo sapiens
  misc_RNA (1)...(19): siRNA sense strand
augcaaggcuggcguguug

SEQ ID NO: 531946 - RNA, 19 nt, Homo sapiens
  misc_RNA (1)...(19): siRNA sense strand
guaauggguugcgauaugg

SEQ ID NO: 531947 - RNA, 19 nt, Homo sapiens
  misc_RNA (1)...(19): siRNA sense strand
guaaugauucagcguguga

SEQ ID NO: 531948 - RNA, 19 nt, Homo sapiens
  misc_RNA (1)...(19): siRNA sense strand
uaagggaagucgagacaac

SEQ ID NO: 531949 - RNA, 19 nt, Homo sapiens
  misc_RNA (1)...(19): siRNA sense strand
guaccuggaaugcagagua

SEQ ID NO: 531950 - RNA, 19 nt, Homo sapiens
  misc_RNA (1)...(19): siRNA sense strand
gagcauuuguuagaucaca

SEQ ID NO: 531951 - RNA, 19 nt, Homo sapiens
  misc_RNA (1)...(19): siRNA sense strand
gagccugaaguccaugaua

SEQ ID NO: 531952 - RNA, 19 nt, Homo sapiens
  misc_RNA (1)...(19): siRNA sense strand
ggagaaagaacgaauucag

SEQ ID NO: 531953 - RNA, 19 nt, Homo sapiens
  misc_RNA (1)...(19): siRNA sense strand
gaacagguuuucuggagau

SEQ ID NO: 531954 - RNA, 19 nt, Homo sapiens
  misc_RNA (1)...(19): siRNA sense strand
ccaauaaccaggauuuuaa

SEQ ID NO: 531955 - RNA, 19 nt, Homo sapiens
  misc_RNA (1)...(19): siRNA sense strand
ucaccaauaaccaggauuu

SEQ ID NO: 531956 - RNA, 19 nt, Homo sapiens
  misc_RNA (1)...(19): siRNA sense strand
ugaagaaggaggcagaguu

SEQ ID NO: 531957 - RNA, 19 nt, Homo sapiens
  misc_RNA (1)...(19): siRNA sense strand
caacaugagugugauuuug

SEQ ID NO: 531958 - RNA, 19 nt, Homo sapiens
  misc_RNA (1)...(19): siRNA sense strand
gauaugggcuaagcagcau

SEQ ID NO: 531959 - RNA, 19 nt, Homo sapiens
  misc_RNA (1)...(19): siRNA sense strand
auacggcugugaucgguuu

SEQ ID NO: 531960 - RNA, 19 nt, Homo sapiens
  misc_RNA (1)...(19): siRNA sense strand
uugagaaaguuugcaauga

SEQ ID NO: 531961 - RNA, 19 nt, Homo sapiens
  misc_RNA (1)...(19): siRNA sense strand
agaguuaugucagagaaga

SEQ ID NO: 531962 - RNA, 19 nt, Homo sapiens
  misc_RNA (1)...(19): siRNA sense strand
gaaguagucgacaccuguu

SEQ ID NO: 531963 - RNA, 19 nt, Homo sapiens
  misc_RNA (1)...(19): siRNA sense strand
gugagcauuuguuagauca

SEQ ID NO: 531964 - RNA, 19 nt, Homo sapiens
  misc_RNA (1)...(19): siRNA sense strand
gcaaggcuggcguguugaa

SEQ ID NO: 531965 - RNA, 19 nt, Homo sapiens
  misc_RNA (1)...(19): siRNA sense strand
cauuaacuguggagacuca

SEQ ID NO: 531966 - RNA, 19 nt, Homo sapiens
  misc_RNA (1)...(19): siRNA sense strand
gcaugcugguucucagguu

SEQ ID NO: 531967 - RNA, 19 nt, Homo sapiens
  misc_RNA (1)...(19): siRNA sense strand
uguaagauccagacuugaa

SEQ ID NO: 531968 - RNA, 19 nt, Homo sapiens
  misc_RNA (1)...(19): siRNA sense strand
ucugggauguuaugggaaa

SEQ ID NO: 531969 - RNA, 19 nt, Homo sapiens
  misc_RNA (1)...(19): siRNA sense strand
gacaacaugagugugauuu

SEQ ID NO: 531970 - RNA, 19 nt, Homo sapiens
  misc_RNA (1)...(19): siRNA sense strand
gcagauagaagugggucaa

SEQ ID NO: 531971 - RNA, 19 nt, Homo sapiens
  misc_RNA (1)...(19): siRNA sense strand
ucacugaugaccuugagaa

SEQ ID NO: 531972 - RNA, 19 nt, Homo sapiens
  misc_RNA (1)...(19): siRNA sense strand
aggagcaccuucuguggaa

SEQ ID NO: 531973 - RNA, 19 nt, Homo sapiens
  misc_RNA (1)...(19): siRNA sense strand
gacucaagagguuuacuuu

SEQ ID NO: 531974 - RNA, 19 nt, Homo sapiens
  misc_RNA (1)...(19): siRNA sense strand
uguggagacucaagagguu

SEQ ID NO: 531975 - RNA, 19 nt, Homo sapiens
  misc_RNA (1)...(19): siRNA sense strand
agcuguaggugucuuaauu

SEQ ID NO: 531976 - RNA, 19 nt, Homo sapiens
  misc_RNA (1)...(19): siRNA sense strand
caacagcuguaggugucuu

SEQ ID NO: 531977 - RNA, 19 nt, Homo sapiens
  misc_RNA (1)...(19): siRNA sense strand
cacacaagaucacaaacca

SEQ ID NO: 531978 - RNA, 19 nt, Homo sapiens
  misc_RNA (1)...(19): siRNA sense strand
ggacaaguaccuggaaugc

SEQ ID NO: 531979 - RNA, 19 nt, Homo sapiens
  misc_RNA (1)...(19): siRNA sense strand
gagacaacaugagugugau

SEQ ID NO: 531980 - RNA, 19 nt, Homo sapiens
  misc_RNA (1)...(19): siRNA sense strand
gcucugugauuuuguaaga

SEQ ID NO: 531981 - RNA, 19 nt, Homo sapiens
  misc_RNA (1)...(19): siRNA sense strand
uccaugauauugaaagauc

SEQ ID NO: 531982 - RNA, 19 nt, Homo sapiens
  misc_RNA (1)...(19): siRNA sense strand
gauauugaaagaucugaag

SEQ ID NO: 531983 - RNA, 19 nt, Homo sapiens
  misc_RNA (1)...(19): siRNA sense strand
cgacaccuguuuguauaag

SEQ ID NO: 531984 - RNA, 19 nt, Homo sapiens
  misc_RNA (1)...(19): siRNA sense strand
gucauucuuugcuguguau

SEQ ID NO: 531985 - RNA, 19 nt, Homo sapiens
  misc_RNA (1)...(19): siRNA sense strand
gauguuaugggaaaugaag

SEQ ID NO: 531986 - RNA, 19 nt, Homo sapiens
  misc_RNA (1)...(19): siRNA sense strand
aaacauggugcagauagaa

SEQ ID NO: 531987 - RNA, 19 nt, Homo sapiens
  misc_RNA (1)...(19): siRNA sense strand
gaagaagaugaucaguuca

SEQ ID NO: 531988 - RNA, 19 nt, Homo sapiens
  misc_RNA (1)...(19): siRNA sense strand
gaaguccaugauauugaaa

SEQ ID NO: 531989 - RNA, 19 nt, Homo sapiens
  misc_RNA (1)...(19): siRNA sense strand
agccugaaguccaugauau

SEQ ID NO: 531990 - RNA, 19 nt, Homo sapiens
  misc_RNA (1)...(19): siRNA sense strand
gaugguaucugggauguua

SEQ ID NO: 531991 - RNA, 19 nt, Homo sapiens
  misc_RNA (1)...(19): siRNA sense strand
gaagaaacauggugcagau

SEQ ID NO: 531992 - RNA, 19 nt, Homo sapiens
  misc_RNA (1)...(19): siRNA sense strand
gcagguggcucuguaauga

SEQ ID NO: 531993 - RNA, 19 nt, Homo sapiens
  misc_RNA (1)...(19): siRNA sense strand
guucucagguugccaaaua

SEQ ID NO: 531994 - RNA, 19 nt, Homo sapiens
  misc_RNA (1)...(19): siRNA sense strand
guaauccgcuggagaaaga

SEQ ID NO: 531995 - RNA, 19 nt, Homo sapiens
  misc_RNA (1)...(19): siRNA sense strand
gaugaacacaugagaguua

SEQ ID NO: 531996 - RNA, 19 nt, Homo sapiens
  misc_RNA (1)...(19): siRNA sense strand
ugaagaagaugaucaguuc

SEQ ID NO: 531997 - RNA, 19 nt, Homo sapiens
  misc_RNA (1)...(19): siRNA sense strand
gaaaugaagagcucuguga

SEQ ID NO: 531998 - RNA, 19 nt, Homo sapiens
  misc_RNA (1)...(19): siRNA sense strand
ggagauugaugaacacaug

SEQ ID NO: 531999 - RNA, 19 nt, Homo sapiens
  misc_RNA (1)...(19): siRNA sense strand
gaaugcagguggcucugua

SEQ ID NO: 532000 - RNA, 19 nt, Homo sapiens
  misc_RNA (1)...(19): siRNA sense strand
gguaauggguugcgauaug

SEQ ID NO: 532001 - RNA, 19 nt, Homo sapiens
  misc_RNA (1)...(19): siRNA sense strand
gaaacauggugcagauaga

SEQ ID NO: 532002 - RNA, 19 nt, Homo sapiens
  misc_RNA (1)...(19): siRNA sense strand
uagaucacaucaccaauaa

SEQ ID NO: 532003 - RNA, 19 nt, Homo sapiens
  misc_RNA (1)...(19): siRNA sense strand
ugagaaaguuugcaaugaa

SEQ ID NO: 532004 - RNA, 19 nt, Homo sapiens
  misc_RNA (1)...(19): siRNA sense strand
ucaagagguuuacuuugua

SEQ ID NO: 532005 - RNA, 19 nt, Homo sapiens
  misc_RNA (1)...(19): siRNA sense strand
gaagaaggaggcagaguug

SEQ ID NO: 532006 - RNA, 19 nt, Homo sapiens
  misc_RNA (1)...(19): siRNA sense strand
gaaaguuugcaaugaagua

SEQ ID NO: 532007 - RNA, 19 nt, Homo sapiens
  misc_RNA (1)...(19): siRNA sense strand
caagaucacaaaccaagua

SEQ ID NO: 532008 - RNA, 19 nt, Homo sapiens
  misc_RNA (1)...(19): siRNA sense strand
aggcagaguuggacaagua

SEQ ID NO: 532009 - RNA, 19 nt, Homo sapiens
  misc_RNA (1)...(19): siRNA sense strand
caaguaauccgcuggagaa

SEQ ID NO: 532010 - RNA, 19 nt, Homo sapiens
  misc_RNA (1)...(19): siRNA sense strand
gaauggcucucuggcugua

SEQ ID NO: 532011 - RNA, 19 nt, Homo sapiens
  misc_RNA (1)...(19): siRNA sense strand
acaaauguguccauggaaa

SEQ ID NO: 532012 - RNA, 19 nt, Homo sapiens
  misc_RNA (1)...(19): siRNA sense strand
ugaaguccaugauauugaa

SEQ ID NO: 532013 - RNA, 19 nt, Homo sapiens
  misc_RNA (1)...(19): siRNA sense strand
gagaaagaacgaauucaga

SEQ ID NO: 532014 - RNA, 19 nt, Homo sapiens
  misc_RNA (1)...(19): siRNA sense strand
augaagagcucugugauuu

SEQ ID NO: 532015 - RNA, 19 nt, Homo sapiens
  misc_RNA (1)...(19): siRNA sense strand
uuacaaauguguccaugga

SEQ ID NO: 532016 - RNA, 19 nt, Homo sapiens
  misc_RNA (1)...(19): siRNA sense strand
gucgacaccuguuuguaua

SEQ ID NO: 532017 - RNA, 19 nt, Homo sapiens
  misc_RNA (1)...(19): siRNA sense strand
gagaaaguuugcaaugaag

SEQ ID NO: 532018 - RNA, 19 nt, Homo sapiens
  misc_RNA (1)...(19): siRNA sense strand
gaucacaaaccaaguaauc

SEQ ID NO: 532019 - RNA, 19 nt, Homo sapiens
  misc_RNA (1)...(19): siRNA sense strand
cagaagcagugaagaagga

SEQ ID NO: 532020 - RNA, 19 nt, Homo sapiens
  misc_RNA (1)...(19): siRNA sense strand
gaagagcucugugauuuug

SEQ ID NO: 532021 - RNA, 19 nt, Homo sapiens
  misc_RNA (1)...(19): siRNA sense strand
guaaagaauggaaucagaa

SEQ ID NO: 532022 - RNA, 19 nt, Homo sapiens
  misc_RNA (1)...(19): siRNA sense strand
ggaagucgagacaacauga

SEQ ID NO: 532023 - RNA, 19 nt, Homo sapiens
  misc_RNA (1)...(19): siRNA sense strand
ccaaaugcacccaaaguau

SEQ ID NO: 532024 - RNA, 19 nt, Homo sapiens
  misc_RNA (1)...(19): siRNA sense strand
gcugugagcauuuguuaga

SEQ ID NO: 532025 - RNA, 19 nt, Homo sapiens
  misc_RNA (1)...(19): siRNA sense strand
caaaguaucgccagaagca

SEQ ID NO: 532026 - RNA, 19 nt, Homo sapiens
  misc_RNA (1)...(19): siRNA sense strand
uguaaagaauggaaucaga

SEQ ID NO: 532027 - RNA, 19 nt, Homo sapiens
  misc_RNA (1)...(19): siRNA sense strand
gaaauggaggaugcacaua

SEQ ID NO: 532028 - RNA, 19 nt, Homo sapiens
  misc_RNA (1)...(19): siRNA sense strand
caagagguuuacuuuguag

SEQ ID NO: 532029 - RNA, 19 nt, Homo sapiens
  misc_RNA (1)...(19): siRNA sense strand
guaggugucuuaauuucuc

SEQ ID NO: 532030 - RNA, 19 nt, Homo sapiens
  misc_RNA (1)...(19): siRNA sense strand
ggacuugaaucguggucau

SEQ ID NO: 532031 - RNA, 19 nt, Homo sapiens
  misc_RNA (1)...(19): siRNA sense strand
cgagacaacaugaguguga

SEQ ID NO: 532032 - RNA, 19 nt, Homo sapiens
  misc_RNA (1)...(19): siRNA sense strand
cugaugaccuugagaaagu

SEQ ID NO: 532033 - RNA, 19 nt, Homo sapiens
  misc_RNA (1)...(19): siRNA sense strand
uuagaucacaucaccaaua

SEQ ID NO: 532034 - RNA, 19 nt, Homo sapiens
  misc_RNA (1)...(19): siRNA sense strand
ggucauucuuugcugugua

SEQ ID NO: 532035 - RNA, 19 nt, Homo sapiens
  misc_RNA (1)...(19): siRNA sense strand
cucaagagguuuacuuugu

SEQ ID NO: 532036 - RNA, 19 nt, Homo sapiens
  misc_RNA (1)...(19): siRNA sense strand
gagguuuacuuuguaggaa

SEQ ID NO: 532037 - RNA, 19 nt, Homo sapiens
  misc_RNA (1)...(19): siRNA sense strand
caaaugcacccaaaguauc

SEQ ID NO: 532038 - RNA, 19 nt, Homo sapiens
  misc_RNA (1)...(19): siRNA sense strand
agaaagaacgaauucagaa

SEQ ID NO: 532039 - RNA, 19 nt, Homo sapiens
  misc_RNA (1)...(19): siRNA sense strand
guucauuucuucacacaag

SEQ ID NO: 532040 - RNA, 19 nt, Homo sapiens
  misc_RNA (1)...(19): siRNA sense strand
ugagaguuaugucagagaa

SEQ ID NO: 532041 - RNA, 19 nt, Homo sapiens
  misc_RNA (1)...(19): siRNA sense strand
uuuguaagauccagacuug

SEQ ID NO: 532042 - RNA, 19 nt, Homo sapiens
  misc_RNA (1)...(19): siRNA sense strand
gggauguuaugggaaauga

SEQ ID NO: 532043 - RNA, 19 nt, Homo sapiens
  misc_RNA (1)...(19): siRNA sense strand
ucauuauccuugcauguga

SEQ ID NO: 532044 - RNA, 19 nt, Homo sapiens
  misc_RNA (1)...(19): siRNA sense strand
gcuguaggugucuuaauuu

SEQ ID NO: 532045 - RNA, 19 nt, Homo sapiens
  misc_RNA (1)...(19): siRNA sense strand
augcaaggcuggcguguug

SEQ ID NO: 532046 - RNA, 19 nt, Homo sapiens
  misc_RNA (1)...(19): siRNA sense strand
guaauggguugcgauaugg

SEQ ID NO: 532047 - RNA, 19 nt, Homo sapiens
  misc_RNA (1)...(19): siRNA sense strand
guaaugauucagcguguga

SEQ ID NO: 532048 - RNA, 19 nt, Homo sapiens
  misc_RNA (1)...(19): siRNA sense strand
uaagggaagucgagacaac

SEQ ID NO: 532049 - RNA, 19 nt, Homo sapiens
  misc_RNA (1)...(19): siRNA sense strand
guaccuggaaugcagagua

SEQ ID NO: 532050 - RNA, 19 nt, Homo sapiens
  misc_RNA (1)...(19): siRNA sense strand
gagcauuuguuagaucaca

SEQ ID NO: 532051 - RNA, 19 nt, Homo sapiens
  misc_RNA (1)...(19): siRNA sense strand
gagccugaaguccaugaua

SEQ ID NO: 532052 - RNA, 19 nt, Homo sapiens
  misc_RNA (1)...(19): siRNA sense strand
ggagaaagaacgaauucag

SEQ ID NO: 532053 - RNA, 19 nt, Homo sapiens
  misc_RNA (1)...(19): siRNA sense strand
gaacagguuuucuggagau

SEQ ID NO: 532054 - RNA, 19 nt, Homo sapiens
  misc_RNA (1)...(19): siRNA sense strand
ccaauaaccaggauuuuaa

SEQ ID NO: 532055 - RNA, 19 nt, Homo sapiens
  misc_RNA (1)...(19): siRNA sense strand
ucaccaauaaccaggauuu

SEQ ID NO: 532056 - RNA, 19 nt, Homo sapiens
  misc_RNA (1)...(19): siRNA sense strand
ugaagaaggaggcagaguu

SEQ ID NO: 532057 - RNA, 19 nt, Homo sapiens
  misc_RNA (1)...(19): siRNA sense strand
caacaugagugugauuuug

SEQ ID NO: 532058 - RNA, 19 nt, Homo sapiens
  misc_RNA (1)...(19): siRNA sense strand
gauaugggcuaagcagcau

SEQ ID NO: 532059 - RNA, 19 nt, Homo sapiens
  misc_RNA (1)...(19): siRNA sense strand
auacggcugugaucgguuu

SEQ ID NO: 532060 - RNA, 19 nt, Homo sapiens
  misc_RNA (1)...(19): siRNA sense strand
uugagaaaguuugcaauga

SEQ ID NO: 532061 - RNA, 19 nt, Homo sapiens
  misc_RNA (1)...(19): siRNA sense strand
agaguuaugucagagaaga

SEQ ID NO: 532062 - RNA, 19 nt, Homo sapiens
  misc_RNA (1)...(19): siRNA sense strand
gaaguagucgacaccuguu

SEQ ID NO: 532063 - RNA, 19 nt, Homo sapiens
  misc_RNA (1)...(19): siRNA sense strand
gugagcauuuguuagauca

SEQ ID NO: 532064 - RNA, 19 nt, Homo sapiens
  misc_RNA (1)...(19): siRNA sense strand
gcaaggcuggcguguugaa

SEQ ID NO: 532065 - RNA, 19 nt, Homo sapiens
  misc_RNA (1)...(19): siRNA sense strand
cauuaacuguggagacuca

SEQ ID NO: 532066 - RNA, 19 nt, Homo sapiens
  misc_RNA (1)...(19): siRNA sense strand
gcaugcugguucucagguu

SEQ ID NO: 532067 - RNA, 19 nt, Homo sapiens
  misc_RNA (1)...(19): siRNA sense strand
uguaagauccagacuugaa

SEQ ID NO: 532068 - RNA, 19 nt, Homo sapiens
  misc_RNA (1)...(19): siRNA sense strand
ucugggauguuaugggaaa

SEQ ID NO: 532069 - RNA, 19 nt, Homo sapiens
  misc_RNA (1)...(19): siRNA sense strand
gacaacaugagugugauuu

SEQ ID NO: 532070 - RNA, 19 nt, Homo sapiens
  misc_RNA (1)...(19): siRNA sense strand
gcagauagaagugggucaa

SEQ ID NO: 532071 - RNA, 19 nt, Homo sapiens
  misc_RNA (1)...(19): siRNA sense strand
ucacugaugaccuugagaa

SEQ ID NO: 532072 - RNA, 19 nt, Homo sapiens
  misc_RNA (1)...(19): siRNA sense strand
aggagcaccuucuguggaa

SEQ ID NO: 532073 - RNA, 19 nt, Homo sapiens
  misc_RNA (1)...(19): siRNA sense strand
gacucaagagguuuacuuu

SEQ ID NO: 532074 - RNA, 19 nt, Homo sapiens
  misc_RNA (1)...(19): siRNA sense strand
uguggagacucaagagguu

SEQ ID NO: 532075 - RNA, 19 nt, Homo sapiens
  misc_RNA (1)...(19): siRNA sense strand
agcuguaggugucuuaauu

SEQ ID NO: 532076 - RNA, 19 nt, Homo sapiens
  misc_RNA (1)...(19): siRNA sense strand
caacagcuguaggugucuu

SEQ ID NO: 532077 - RNA, 19 nt, Homo sapiens
  misc_RNA (1)...(19): siRNA sense strand
cacacaagaucacaaacca

SEQ ID NO: 532078 - RNA, 19 nt, Homo sapiens
  misc_RNA (1)...(19): siRNA sense strand
ggacaaguaccuggaaugc

SEQ ID NO: 532079 - RNA, 19 nt, Homo sapiens
  misc_RNA (1)...(19): siRNA sense strand
gagacaacaugagugugau

SEQ ID NO: 532080 - RNA, 19 nt, Homo sapiens
  misc_RNA (1)...(19): siRNA sense strand
gcucugugauuuuguaaga

SEQ ID NO: 532081 - RNA, 19 nt, Homo sapiens
  misc_RNA (1)...(19): siRNA sense strand
uccaugauauugaaagauc

SEQ ID NO: 532082 - RNA, 19 nt, Homo sapiens
  misc_RNA (1)...(19): siRNA sense strand
gauauugaaagaucugaag

SEQ ID NO: 532083 - RNA, 19 nt, Homo sapiens
  misc_RNA (1)...(19): siRNA sense strand
cgacaccuguuuguauaag

SEQ ID NO: 532084 - RNA, 19 nt, Homo sapiens
  misc_RNA (1)...(19): siRNA sense strand
gucauucuuugcuguguau

SEQ ID NO: 532085 - RNA, 19 nt, Homo sapiens
  misc_RNA (1)...(19): siRNA sense strand
gauguuaugggaaaugaag

SEQ ID NO: 532086 - RNA, 19 nt, Homo sapiens
  misc_RNA (1)...(19): siRNA sense strand
aaacauggugcagauagaa

SEQ ID NO: 532087 - RNA, 19 nt, Homo sapiens
  misc_RNA (1)...(19): siRNA sense strand
gaagaagaugaucaguuca

SEQ ID NO: 532088 - RNA, 19 nt, Homo sapiens
  misc_RNA (1)...(19): siRNA sense strand
gaaguccaugauauugaaa

SEQ ID NO: 532089 - RNA, 19 nt, Homo sapiens
  misc_RNA (1)...(19): siRNA sense strand
agccugaaguccaugauau

SEQ ID NO: 532090 - RNA, 19 nt, Homo sapiens
  misc_RNA (1)...(19): siRNA sense strand
gaugguaucugggauguua

SEQ ID NO: 532091 - RNA, 19 nt, Homo sapiens
  misc_RNA (1)...(19): siRNA sense strand
gaagaaacauggugcagau

SEQ ID NO: 532092 - RNA, 19 nt, Homo sapiens
  misc_RNA (1)...(19): siRNA sense strand
gcagguggcucuguaauga

SEQ ID NO: 532093 - RNA, 19 nt, Homo sapiens
  misc_RNA (1)...(19): siRNA sense strand
guucucagguugccaaaua

SEQ ID NO: 532094 - RNA, 19 nt, Homo sapiens
  misc_RNA (1)...(19): siRNA sense strand
guaauccgcuggagaaaga

SEQ ID NO: 532095 - RNA, 19 nt, Homo sapiens
  misc_RNA (1)...(19): siRNA sense strand
gaugaacacaugagaguua

SEQ ID NO: 532096 - RNA, 19 nt, Homo sapiens
  misc_RNA (1)...(19): siRNA sense strand
ugaagaagaugaucaguuc

SEQ ID NO: 532097 - RNA, 19 nt, Homo sapiens
  misc_RNA (1)...(19): siRNA sense strand
gaaaugaagagcucuguga

SEQ ID NO: 532098 - RNA, 19 nt, Homo sapiens
  misc_RNA (1)...(19): siRNA sense strand
ggagauugaugaacacaug

SEQ ID NO: 532099 - RNA, 19 nt, Homo sapiens
  misc_RNA (1)...(19): siRNA sense strand
gaaugcagguggcucugua

SEQ ID NO: 532100 - RNA, 19 nt, Homo sapiens
  misc_RNA (1)...(19): siRNA sense strand
gguaauggguugcgauaug

SEQ ID NO: 532101 - RNA, 19 nt, Homo sapiens
  misc_RNA (1)...(19): siRNA sense strand
gaaacauggugcagauaga

SEQ ID NO: 532102 - RNA, 19 nt, Homo sapiens
  misc_RNA (1)...(19): siRNA sense strand
uagaucacaucaccaauaa

SEQ ID NO: 532103 - RNA, 19 nt, Homo sapiens
  misc_RNA (1)...(19): siRNA sense strand
ugagaaaguuugcaaugaa

SEQ ID NO: 532104 - RNA, 19 nt, Homo sapiens
  misc_RNA (1)...(19): siRNA sense strand
ucaagagguuuacuuugua

SEQ ID NO: 532105 - RNA, 19 nt, Homo sapiens
  misc_RNA (1)...(19): siRNA sense strand
gaagaaggaggcagaguug

SEQ ID NO: 532106 - RNA, 19 nt, Homo sapiens
  misc_RNA (1)...(19): siRNA sense strand
gaaaguuugcaaugaagua

SEQ ID NO: 532107 - RNA, 19 nt, Homo sapiens
  misc_RNA (1)...(19): siRNA sense strand
caagaucacaaaccaagua

SEQ ID NO: 532108 - RNA, 19 nt, Homo sapiens
  misc_RNA (1)...(19): siRNA sense strand
aggcagaguuggacaagua

SEQ ID NO: 532109 - RNA, 19 nt, Homo sapiens
  misc_RNA (1)...(19): siRNA sense strand
caaguaauccgcuggagaa

SEQ ID NO: 532110 - RNA, 19 nt, Homo sapiens
  misc_RNA (1)...(19): siRNA sense strand
gaauggcucucuggcugua

SEQ ID NO: 532111 - RNA, 19 nt, Homo sapiens
  misc_RNA (1)...(19): siRNA sense strand
acaaauguguccauggaaa

SEQ ID NO: 532112 - RNA, 19 nt, Homo sapiens
  misc_RNA (1)...(19): siRNA sense strand
ugaaguccaugauauugaa

SEQ ID NO: 532113 - RNA, 19 nt, Homo sapiens
  misc_RNA (1)...(19): siRNA sense strand
gagaaagaacgaauucaga

SEQ ID NO: 532114 - RNA, 19 nt, Homo sapiens
  misc_RNA (1)...(19): siRNA sense strand
augaagagcucugugauuu

SEQ ID NO: 532115 - RNA, 19 nt, Homo sapiens
  misc_RNA (1)...(19): siRNA sense strand
uuacaaauguguccaugga

SEQ ID NO: 532116 - RNA, 19 nt, Homo sapiens
  misc_RNA (1)...(19): siRNA sense strand
gucgacaccuguuuguaua

SEQ ID NO: 532117 - RNA, 19 nt, Homo sapiens
  misc_RNA (1)...(19): siRNA sense strand
gagaaaguuugcaaugaag

SEQ ID NO: 532118 - RNA, 19 nt, Homo sapiens
  misc_RNA (1)...(19): siRNA sense strand
gaucacaaaccaaguaauc

SEQ ID NO: 532119 - RNA, 19 nt, Homo sapiens
  misc_RNA (1)...(19): siRNA sense strand
cagaagcagugaagaagga

SEQ ID NO: 532120 - RNA, 19 nt, Homo sapiens
  misc_RNA (1)...(19): siRNA sense strand
gaagagcucugugauuuug

SEQ ID NO: 532121 - RNA, 19 nt, Homo sapiens
  misc_RNA (1)...(19): siRNA sense strand
guaaagaauggaaucagaa

SEQ ID NO: 532122 - RNA, 19 nt, Homo sapiens
  misc_RNA (1)...(19): siRNA sense strand
ggaagucgagacaacauga

SEQ ID NO: 532123 - RNA, 19 nt, Homo sapiens
  misc_RNA (1)...(19): siRNA sense strand
ccaaaugcacccaaaguau

SEQ ID NO: 532124 - RNA, 19 nt, Homo sapiens
  misc_RNA (1)...(19): siRNA sense strand
gcugugagcauuuguuaga

SEQ ID NO: 532125 - RNA, 19 nt, Homo sapiens
  misc_RNA (1)...(19): siRNA sense strand
caaaguaucgccagaagca

SEQ ID NO: 532126 - RNA, 19 nt, Homo sapiens
  misc_RNA (1)...(19): siRNA sense strand
uguaaagaauggaaucaga

SEQ ID NO: 532127 - RNA, 19 nt, Homo sapiens
  misc_RNA (1)...(19): siRNA sense strand
gaaauggaggaugcacaua

SEQ ID NO: 532128 - RNA, 19 nt, Homo sapiens
  misc_RNA (1)...(19): siRNA sense strand
caagagguuuacuuuguag

SEQ ID NO: 532129 - RNA, 19 nt, Homo sapiens
  misc_RNA (1)...(19): siRNA sense strand
guaggugucuuaauuucuc

SEQ ID NO: 532130 - RNA, 19 nt, Homo sapiens
  misc_RNA (1)...(19): siRNA sense strand
ggacuugaaucguggucau

SEQ ID NO: 532131 - RNA, 19 nt, Homo sapiens
  misc_RNA (1)...(19): siRNA sense strand
cgagacaacaugaguguga

SEQ ID NO: 532132 - RNA, 19 nt, Homo sapiens
  misc_RNA (1)...(19): siRNA sense strand
cugaugaccuugagaaagu

SEQ ID NO: 532133 - RNA, 19 nt, Homo sapiens
  misc_RNA (1)...(19): siRNA sense strand
uuagaucacaucaccaaua

SEQ ID NO: 532134 - RNA, 19 nt, Homo sapiens
  misc_RNA (1)...(19): siRNA sense strand
ggucauucuuugcugugua

SEQ ID NO: 532135 - RNA, 19 nt, Homo sapiens
  misc_RNA (1)...(19): siRNA sense strand
cucaagagguuuacuuugu

SEQ ID NO: 532136 - RNA, 19 nt, Homo sapiens
  misc_RNA (1)...(19): siRNA sense strand
gagguuuacuuuguaggaa

SEQ ID NO: 532137 - RNA, 19 nt, Homo sapiens
  misc_RNA (1)...(19): siRNA sense strand
caaaugcacccaaaguauc

SEQ ID NO: 532138 - RNA, 19 nt, Homo sapiens
  misc_RNA (1)...(19): siRNA sense strand
agaaagaacgaauucagaa

SEQ ID NO: 532139 - RNA, 19 nt, Homo sapiens
  misc_RNA (1)...(19): siRNA sense strand
guucauuucuucacacaag

SEQ ID NO: 532140 - RNA, 19 nt, Homo sapiens
  misc_RNA (1)...(19): siRNA sense strand
ugagaguuaugucagagaa

SEQ ID NO: 532141 - RNA, 19 nt, Homo sapiens
  misc_RNA (1)...(19): siRNA sense strand
uuuguaagauccagacuug

SEQ ID NO: 532142 - RNA, 19 nt, Homo sapiens
  misc_RNA (1)...(19): siRNA sense strand
gggauguuaugggaaauga

SEQ ID NO: 532143 - RNA, 19 nt, Homo sapiens
  misc_RNA (1)...(19): siRNA sense strand
ucauuauccuugcauguga

SEQ ID NO: 532144 - RNA, 19 nt, Homo sapiens
  misc_RNA (1)...(19): siRNA sense strand
gcuguaggugucuuaauuu

SEQ ID NO: 532145 - RNA, 19 nt, Homo sapiens
  misc_RNA (1)...(19): siRNA sense strand
augcaaggcuggcguguug

SEQ ID NO: 532146 - RNA, 19 nt, Homo sapiens
  misc_RNA (1)...(19): siRNA sense strand
guaauggguugcgauaugg

SEQ ID NO: 532147 - RNA, 19 nt, Homo sapiens
  misc_RNA (1)...(19): siRNA sense strand
guaaugauucagcguguga

SEQ ID NO: 532148 - RNA, 19 nt, Homo sapiens
  misc_RNA (1)...(19): siRNA sense strand
uaagggaagucgagacaac

SEQ ID NO: 532149 - RNA, 19 nt, Homo sapiens
  misc_RNA (1)...(19): siRNA sense strand
guaccuggaaugcagagua

SEQ ID NO: 532150 - RNA, 19 nt, Homo sapiens
  misc_RNA (1)...(19): siRNA sense strand
gagcauuuguuagaucaca

SEQ ID NO: 532151 - RNA, 19 nt, Homo sapiens
  misc_RNA (1)...(19): siRNA sense strand
gagccugaaguccaugaua

SEQ ID NO: 532152 - RNA, 19 nt, Homo sapiens
  misc_RNA (1)...(19): siRNA sense strand
ggagaaagaacgaauucag

SEQ ID NO: 532153 - RNA, 19 nt, Homo sapiens
  misc_RNA (1)...(19): siRNA sense strand
gaacagguuuucuggagau

SEQ ID NO: 532154 - RNA, 19 nt, Homo sapiens
  misc_RNA (1)...(19): siRNA sense strand
ccaauaaccaggauuuuaa

SEQ ID NO: 532155 - RNA, 19 nt, Homo sapiens
  misc_RNA (1)...(19): siRNA sense strand
ucaccaauaaccaggauuu

SEQ ID NO: 532156 - RNA, 19 nt, Homo sapiens
  misc_RNA (1)...(19): siRNA sense strand
ugaagaaggaggcagaguu

SEQ ID NO: 532157 - RNA, 19 nt, Homo sapiens
  misc_RNA (1)...(19): siRNA sense strand
caacaugagugugauuuug

SEQ ID NO: 532158 - RNA, 19 nt, Homo sapiens
  misc_RNA (1)...(19): siRNA sense strand
gauaugggcuaagcagcau

SEQ ID NO: 532159 - RNA, 19 nt, Homo sapiens
  misc_RNA (1)...(19): siRNA sense strand
auacggcugugaucgguuu

SEQ ID NO: 532160 - RNA, 19 nt, Homo sapiens
  misc_RNA (1)...(19): siRNA sense strand
uugagaaaguuugcaauga

SEQ ID NO: 532161 - RNA, 19 nt, Homo sapiens
  misc_RNA (1)...(19): siRNA sense strand
agaguuaugucagagaaga

SEQ ID NO: 532162 - RNA, 19 nt, Homo sapiens
  misc_RNA (1)...(19): siRNA sense strand
gaaguagucgacaccuguu

SEQ ID NO: 532163 - RNA, 19 nt, Homo sapiens
  misc_RNA (1)...(19): siRNA sense strand
gugagcauuuguuagauca

SEQ ID NO: 532164 - RNA, 19 nt, Homo sapiens
  misc_RNA (1)...(19): siRNA sense strand
gcaaggcuggcguguugaa

SEQ ID NO: 532165 - RNA, 19 nt, Homo sapiens
  misc_RNA (1)...(19): siRNA sense strand
cauuaacuguggagacuca

SEQ ID NO: 532166 - RNA, 19 nt, Homo sapiens
  misc_RNA (1)...(19): siRNA sense strand
gcaugcugguucucagguu

SEQ ID NO: 532167 - RNA, 19 nt, Homo sapiens
  misc_RNA (1)...(19): siRNA sense strand
uguaagauccagacuugaa

SEQ ID NO: 532168 - RNA, 19 nt, Homo sapiens
  misc_RNA (1)...(19): siRNA sense strand
ucugggauguuaugggaaa

SEQ ID NO: 532169 - RNA, 19 nt, Homo sapiens
  misc_RNA (1)...(19): siRNA sense strand
gacaacaugagugugauuu

SEQ ID NO: 532170 - RNA, 19 nt, Homo sapiens
  misc_RNA (1)...(19): siRNA sense strand
gcagauagaagugggucaa

SEQ ID NO: 532171 - RNA, 19 nt, Homo sapiens
  misc_RNA (1)...(19): siRNA sense strand
ucacugaugaccuugagaa

SEQ ID NO: 532172 - RNA, 19 nt, Homo sapiens
  misc_RNA (1)...(19): siRNA sense strand
aggagcaccuucuguggaa

SEQ ID NO: 532173 - RNA, 19 nt, Homo sapiens
  misc_RNA (1)...(19): siRNA sense strand
gacucaagagguuuacuuu

SEQ ID NO: 532174 - RNA, 19 nt, Homo sapiens
  misc_RNA (1)...(19): siRNA sense strand
uguggagacucaagagguu

SEQ ID NO: 532175 - RNA, 19 nt, Homo sapiens
  misc_RNA (1)...(19): siRNA sense strand
agcuguaggugucuuaauu

SEQ ID NO: 532176 - RNA, 19 nt, Homo sapiens
  misc_RNA (1)...(19): siRNA sense strand
caacagcuguaggugucuu

SEQ ID NO: 532177 - RNA, 19 nt, Homo sapiens
  misc_RNA (1)...(19): siRNA sense strand
cacacaagaucacaaacca

SEQ ID NO: 532178 - RNA, 19 nt, Homo sapiens
  misc_RNA (1)...(19): siRNA sense strand
ggacaaguaccuggaaugc

SEQ ID NO: 532179 - RNA, 19 nt, Homo sapiens
  misc_RNA (1)...(19): siRNA sense strand
gagacaacaugagugugau

SEQ ID NO: 532180 - RNA, 19 nt, Homo sapiens
  misc_RNA (1)...(19): siRNA sense strand
gcucugugauuuuguaaga

SEQ ID NO: 532181 - RNA, 19 nt, Homo sapiens
  misc_RNA (1)...(19): siRNA sense strand
uccaugauauugaaagauc

SEQ ID NO: 532182 - RNA, 19 nt, Homo sapiens
  misc_RNA (1)...(19): siRNA sense strand
gauauugaaagaucugaag

SEQ ID NO: 532183 - RNA, 19 nt, Homo sapiens
  misc_RNA (1)...(19): siRNA sense strand
cgacaccuguuuguauaag

SEQ ID NO: 532184 - RNA, 19 nt, Homo sapiens
  misc_RNA (1)...(19): siRNA sense strand
gucauucuuugcuguguau

SEQ ID NO: 532185 - RNA, 19 nt, Homo sapiens
  misc_RNA (1)...(19): siRNA sense strand
gauguuaugggaaaugaag

SEQ ID NO: 532186 - RNA, 19 nt, Homo sapiens
  misc_RNA (1)...(19): siRNA sense strand
aaacauggugcagauagaa

SEQ ID NO: 532187 - RNA, 19 nt, Homo sapiens
  misc_RNA (1)...(19): siRNA sense strand
gaagaagaugaucaguuca

SEQ ID NO: 532188 - RNA, 19 nt, Homo sapiens
  misc_RNA (1)...(19): siRNA sense strand
gaaguccaugauauugaaa

SEQ ID NO: 532189 - RNA, 19 nt, Homo sapiens
  misc_RNA (1)...(19): siRNA sense strand
agccugaaguccaugauau

SEQ ID NO: 532190 - RNA, 19 nt, Homo sapiens
  misc_RNA (1)...(19): siRNA sense strand
ccauggaccuucuuacuua

SEQ ID NO: 532191 - RNA, 19 nt, Homo sapiens
  misc_RNA (1)...(19): siRNA sense strand
caaacuaccuguacugguu

SEQ ID NO: 532192 - RNA, 19 nt, Homo sapiens
  misc_RNA (1)...(19): siRNA sense strand
gaagauaucgcucuauucu

SEQ ID NO: 532193 - RNA, 19 nt, Homo sapiens
  misc_RNA (1)...(19): siRNA sense strand
guacugacaaucuguguuu

SEQ ID NO: 532194 - RNA, 19 nt, Homo sapiens
  misc_RNA (1)...(19): siRNA sense strand
gaaagcacaauuagauuca

SEQ ID NO: 532195 - RNA, 19 nt, Homo sapiens
  misc_RNA (1)...(19): siRNA sense strand
uggaagauaucgcucuauu

SEQ ID NO: 532196 - RNA, 19 nt, Homo sapiens
  misc_RNA (1)...(19): siRNA sense strand
gaagcaccauauaaaguag

SEQ ID NO: 532197 - RNA, 19 nt, Homo sapiens
  misc_RNA (1)...(19): siRNA sense strand
caaccaauaauuucacuga

SEQ ID NO: 532198 - RNA, 19 nt, Homo sapiens
  misc_RNA (1)...(19): siRNA sense strand
gagaagcaccauauaaagu

SEQ ID NO: 532199 - RNA, 19 nt, Homo sapiens
  misc_RNA (1)...(19): siRNA sense strand
gaugcgcaauucauacuug

SEQ ID NO: 532200 - RNA, 19 nt, Homo sapiens
  misc_RNA (1)...(19): siRNA sense strand
gacaugaucgccauucuug

SEQ ID NO: 532201 - RNA, 19 nt, Homo sapiens
  misc_RNA (1)...(19): siRNA sense strand
agaagcaccauauaaagua

SEQ ID NO: 532202 - RNA, 19 nt, Homo sapiens
  misc_RNA (1)...(19): siRNA sense strand
ugaucgccauucuugauua

SEQ ID NO: 532203 - RNA, 19 nt, Homo sapiens
  misc_RNA (1)...(19): siRNA sense strand
ggagaagcaccauauaaag

SEQ ID NO: 532204 - RNA, 19 nt, Homo sapiens
  misc_RNA (1)...(19): siRNA sense strand
gaucgccauucuugauuau

SEQ ID NO: 532205 - RNA, 19 nt, Homo sapiens
  misc_RNA (1)...(19): siRNA sense strand
ggaugaaaaucuugcaaaa

SEQ ID NO: 532206 - RNA, 19 nt, Homo sapiens
  misc_RNA (1)...(19): siRNA sense strand
ccagauguccuaugagaug

SEQ ID NO: 532207 - RNA, 19 nt, Homo sapiens
  misc_RNA (1)...(19): siRNA sense strand
gauguccuaugagauguuu

SEQ ID NO: 532208 - RNA, 19 nt, Homo sapiens
  misc_RNA (1)...(19): siRNA sense strand
ugaagcagcucugaaagca

SEQ ID NO: 532209 - RNA, 19 nt, Homo sapiens
  misc_RNA (1)...(19): siRNA sense strand
gcagugcacuccuguucuc

SEQ ID NO: 532210 - RNA, 19 nt, Homo sapiens
  misc_RNA (1)...(19): siRNA sense strand
gaagugaaagauuaugcuu

SEQ ID NO: 532211 - RNA, 19 nt, Homo sapiens
  misc_RNA (1)...(19): siRNA sense strand
uggagaagcaccauauaaa

SEQ ID NO: 532212 - RNA, 19 nt, Homo sapiens
  misc_RNA (1)...(19): siRNA sense strand
gccaugguaugaugaagug

SEQ ID NO: 532213 - RNA, 19 nt, Homo sapiens
  misc_RNA (1)...(19): siRNA sense strand
ggaccuucuuacuuacuga

SEQ ID NO: 532214 - RNA, 19 nt, Homo sapiens
  misc_RNA (1)...(19): siRNA sense strand
caauuagauucagcggaua

SEQ ID NO: 532215 - RNA, 19 nt, Homo sapiens
  misc_RNA (1)...(19): siRNA sense strand
gauuggagaagcaccauau

SEQ ID NO: 532216 - RNA, 19 nt, Homo sapiens
  misc_RNA (1)...(19): siRNA sense strand
gucaagccaugguaugaug

SEQ ID NO: 532217 - RNA, 19 nt, Homo sapiens
  misc_RNA (1)...(19): siRNA sense strand
ggaagauaucgcucuauuc

SEQ ID NO: 532218 - RNA, 19 nt, Homo sapiens
  misc_RNA (1)...(19): siRNA sense strand
ugaaagcacaauuagauuc

SEQ ID NO: 532219 - RNA, 19 nt, Homo sapiens
  misc_RNA (1)...(19): siRNA sense strand
uaccuguacugguuuaaau

SEQ ID NO: 532220 - RNA, 19 nt, Homo sapiens
  misc_RNA (1)...(19): siRNA sense strand
ucugaaagcacaauuagau

SEQ ID NO: 532221 - RNA, 19 nt, Homo sapiens
  misc_RNA (1)...(19): siRNA sense strand
gguaugaugaagugaaaga

SEQ ID NO: 532222 - RNA, 19 nt, Homo sapiens
  misc_RNA (1)...(19): siRNA sense strand
uguacgcacuggaagauau

SEQ ID NO: 532223 - RNA, 19 nt, Homo sapiens
  misc_RNA (1)...(19): siRNA sense strand
cggcagcaaauauggaaua

SEQ ID NO: 532224 - RNA, 19 nt, Homo sapiens
  misc_RNA (1)...(19): siRNA sense strand
gauaggaugcgcaauucau

SEQ ID NO: 532225 - RNA, 19 nt, Homo sapiens
  misc_RNA (1)...(19): siRNA sense strand
uauugaagcagcucugaaa

SEQ ID NO: 532226 - RNA, 19 nt, Homo sapiens
  misc_RNA (1)...(19): siRNA sense strand
gguaccauguucaucuugu

SEQ ID NO: 532227 - RNA, 19 nt, Homo sapiens
  misc_RNA (1)...(19): siRNA sense strand
gcaguuuacuugguaugca

SEQ ID NO: 532228 - RNA, 19 nt, Homo sapiens
  misc_RNA (1)...(19): siRNA sense strand
cggauaggaugcgcaauuc

SEQ ID NO: 532229 - RNA, 19 nt, Homo sapiens
  misc_RNA (1)...(19): siRNA sense strand
gcucuauucuccaguuggu

SEQ ID NO: 532230 - RNA, 19 nt, Homo sapiens
  misc_RNA (1)...(19): siRNA sense strand
gcacacauuauacgcagau

SEQ ID NO: 532231 - RNA, 19 nt, Homo sapiens
  misc_RNA (1)...(19): siRNA sense strand
gcucugaaagcacaauuag

SEQ ID NO: 532232 - RNA, 19 nt, Homo sapiens
  misc_RNA (1)...(19): siRNA sense strand
aauauaugguuugggauga

SEQ ID NO: 532233 - RNA, 19 nt, Homo sapiens
  misc_RNA (1)...(19): siRNA sense strand
cuucuuacuuacugagauu

SEQ ID NO: 532234 - RNA, 19 nt, Homo sapiens
  misc_RNA (1)...(19): siRNA sense strand
uauaugguuugggaugaaa

SEQ ID NO: 532235 - RNA, 19 nt, Homo sapiens
  misc_RNA (1)...(19): siRNA sense strand
ccuguacugguuuaaauaa

SEQ ID NO: 532236 - RNA, 19 nt, Homo sapiens
  misc_RNA (1)...(19): siRNA sense strand
ggcggaagcgcuacauuuc

SEQ ID NO: 532237 - RNA, 19 nt, Homo sapiens
  misc_RNA (1)...(19): siRNA sense strand
gauauugaagcagcucuga

SEQ ID NO: 532238 - RNA, 19 nt, Homo sapiens
  misc_RNA (1)...(19): siRNA sense strand
gggccaaaaucuaucugua

SEQ ID NO: 532239 - RNA, 19 nt, Homo sapiens
  misc_RNA (1)...(19): siRNA sense strand
cauuauacgcagaugguuu

SEQ ID NO: 532240 - RNA, 19 nt, Homo sapiens
  misc_RNA (1)...(19): siRNA sense strand
caugaucgccauucuugau

SEQ ID NO: 532241 - RNA, 19 nt, Homo sapiens
  misc_RNA (1)...(19): siRNA sense strand
caguuuacuugguaugcaa

SEQ ID NO: 532242 - RNA, 19 nt, Homo sapiens
  misc_RNA (1)...(19): siRNA sense strand
gaccauggaccuucuuacu

SEQ ID NO: 532243 - RNA, 19 nt, Homo sapiens
  misc_RNA (1)...(19): siRNA sense strand
ucggauaggaugcgcaauu

SEQ ID NO: 532244 - RNA, 19 nt, Homo sapiens
  misc_RNA (1)...(19): siRNA sense strand
cagcagugcacuccuguuc

SEQ ID NO: 532245 - RNA, 19 nt, Homo sapiens
  misc_RNA (1)...(19): siRNA sense strand
uuccaggaguuacgucaaa

SEQ ID NO: 532246 - RNA, 19 nt, Homo sapiens
  misc_RNA (1)...(19): siRNA sense strand
auaggaugcgcaauucaua

SEQ ID NO: 532247 - RNA, 19 nt, Homo sapiens
  misc_RNA (1)...(19): siRNA sense strand
gggaccauggaccuucuua

SEQ ID NO: 532248 - RNA, 19 nt, Homo sapiens
  misc_RNA (1)...(19): siRNA sense strand
guaccauguucaucuuguc

SEQ ID NO: 532249 - RNA, 19 nt, Homo sapiens
  misc_RNA (1)...(19): siRNA sense strand
uuggagaagcaccauauaa

SEQ ID NO: 532250 - RNA, 19 nt, Homo sapiens
  misc_RNA (1)...(19): siRNA sense strand
gcgacgugcaguuuacuug

SEQ ID NO: 532251 - RNA, 19 nt, Homo sapiens
  misc_RNA (1)...(19): siRNA sense strand
acuggaagauaucgcucua

SEQ ID NO: 532252 - RNA, 19 nt, Homo sapiens
  misc_RNA (1)...(19): siRNA sense strand
aggcggaagcgcuacauuu

SEQ ID NO: 532253 - RNA, 19 nt, Homo sapiens
  misc_RNA (1)...(19): siRNA sense strand
gcgcuacauuucgcagaau

SEQ ID NO: 532254 - RNA, 19 nt, Homo sapiens
  misc_RNA (1)...(19): siRNA sense strand
ggauuggagaagcaccaua

SEQ ID NO: 532255 - RNA, 19 nt, Homo sapiens
  misc_RNA (1)...(19): siRNA sense strand
gacgugcaguuuacuuggu

SEQ ID NO: 532256 - RNA, 19 nt, Homo sapiens
  misc_RNA (1)...(19): siRNA sense strand
ucaauuccacugacucauc

SEQ ID NO: 532257 - RNA, 19 nt, Homo sapiens
  misc_RNA (1)...(19): siRNA sense strand
ugacaugaucgccauucuu

SEQ ID NO: 532258 - RNA, 19 nt, Homo sapiens
  misc_RNA (1)...(19): siRNA sense strand
ggauaggaugcgcaauuca

SEQ ID NO: 532259 - RNA, 19 nt, Homo sapiens
  misc_RNA (1)...(19): siRNA sense strand
caagccaugguaugaugaa

SEQ ID NO: 532260 - RNA, 19 nt, Homo sapiens
  misc_RNA (1)...(19): siRNA sense strand
guaccgucguccuacucaa

SEQ ID NO: 532261 - RNA, 19 nt, Homo sapiens
  misc_RNA (1)...(19): siRNA sense strand
uuacuugguaugcaacuau

SEQ ID NO: 532262 - RNA, 19 nt, Homo sapiens
  misc_RNA (1)...(19): siRNA sense strand
uguucucccuucucuguga

SEQ ID NO: 532263 - RNA, 19 nt, Homo sapiens
  misc_RNA (1)...(19): siRNA sense strand
cugaaagcacaauuagauu

SEQ ID NO: 532264 - RNA, 19 nt, Homo sapiens
  misc_RNA (1)...(19): siRNA sense strand
acgugcaguuuacuuggua

SEQ ID NO: 532265 - RNA, 19 nt, Homo sapiens
  misc_RNA (1)...(19): siRNA sense strand
cagauguccuaugagaugu

SEQ ID NO: 532266 - RNA, 19 nt, Homo sapiens
  misc_RNA (1)...(19): siRNA sense strand
caugguaugaugaagugaa

SEQ ID NO: 532267 - RNA, 19 nt, Homo sapiens
  misc_RNA (1)...(19): siRNA sense strand
uuacgucaaacuaccugua

SEQ ID NO: 532268 - RNA, 19 nt, Homo sapiens
  misc_RNA (1)...(19): siRNA sense strand
cuacucaauuccacugacu

SEQ ID NO: 532269 - RNA, 19 nt, Homo sapiens
  misc_RNA (1)...(19): siRNA sense strand
ccauaucgcuggccucuau

SEQ ID NO: 532270 - RNA, 19 nt, Homo sapiens
  misc_RNA (1)...(19): siRNA sense strand
gaaccugggcccucuggaa

SEQ ID NO: 532271 - RNA, 19 nt, Homo sapiens
  misc_RNA (1)...(19): siRNA sense strand
ggaagaaccguaccagaac

SEQ ID NO: 532272 - RNA, 19 nt, Homo sapiens
  misc_RNA (1)...(19): siRNA sense strand
gcaacguggucaucuucga

SEQ ID NO: 532273 - RNA, 19 nt, Homo sapiens
  misc_RNA (1)...(19): siRNA sense strand
ggucaucaccaaccaggaa

SEQ ID NO: 532274 - RNA, 19 nt, Homo sapiens
  misc_RNA (1)...(19): siRNA sense strand
gcacuguacccggcuacua

SEQ ID NO: 532275 - RNA, 19 nt, Homo sapiens
  misc_RNA (1)...(19): siRNA sense strand
aggaagaaccguaccagaa

SEQ ID NO: 532276 - RNA, 19 nt, Homo sapiens
  misc_RNA (1)...(19): siRNA sense strand
cguggcaucccgggaauua

SEQ ID NO: 532277 - RNA, 19 nt, Homo sapiens
  misc_RNA (1)...(19): siRNA sense strand
gauggcuggugcucugugu

SEQ ID NO: 532278 - RNA, 19 nt, Homo sapiens
  misc_RNA (1)...(19): siRNA sense strand
gcaccagacgggaagaaag

SEQ ID NO: 532279 - RNA, 19 nt, Homo sapiens
  misc_RNA (1)...(19): siRNA sense strand
uggcaucccgggaauuaaa

SEQ ID NO: 532280 - RNA, 19 nt, Homo sapiens
  misc_RNA (1)...(19): siRNA sense strand
gggcaacguggucaucuuc

SEQ ID NO: 532281 - RNA, 19 nt, Homo sapiens
  misc_RNA (1)...(19): siRNA sense strand
ucccugggcuucugugaca

SEQ ID NO: 532282 - RNA, 19 nt, Homo sapiens
  misc_RNA (1)...(19): siRNA sense strand
gaaaggggaggcaggaaga

SEQ ID NO: 532283 - RNA, 19 nt, Homo sapiens
  misc_RNA (1)...(19): siRNA sense strand
cgauucgucugcacuguac

SEQ ID NO: 532284 - RNA, 19 nt, Homo sapiens
  misc_RNA (1)...(19): siRNA sense strand
gcccaggaaacaucaagga

SEQ ID NO: 532285 - RNA, 19 nt, Homo sapiens
  misc_RNA (1)...(19): siRNA sense strand
guacccggcuacuacuacu

SEQ ID NO: 532286 - RNA, 19 nt, Homo sapiens
  misc_RNA (1)...(19): siRNA sense strand
ucgacacggucaucaccaa

SEQ ID NO: 532287 - RNA, 19 nt, Homo sapiens
  misc_RNA (1)...(19): siRNA sense strand
ccgauucgucugcacugua

SEQ ID NO: 532288 - RNA, 19 nt, Homo sapiens
  misc_RNA (1)...(19): siRNA sense strand
ucugugugcuggccauauc

SEQ ID NO: 532289 - RNA, 19 nt, Homo sapiens
  misc_RNA (1)...(19): siRNA sense strand
ggagagcuauucaguguau

SEQ ID NO: 532290 - RNA, 19 nt, Homo sapiens
  misc_RNA (1)...(19): siRNA sense strand
guacaccaguuccaaguaa

SEQ ID NO: 532291 - RNA, 19 nt, Homo sapiens
  misc_RNA (1)...(19): siRNA sense strand
ccaagaaggcggugacuaa

SEQ ID NO: 532292 - RNA, 19 nt, Homo sapiens
  misc_RNA (1)...(19): siRNA sense strand
ccaaggccgucaccaagua

SEQ ID NO: 532293 - RNA, 19 nt, Homo sapiens
  misc_RNA (1)...(19): siRNA sense strand
gcuauucaguguaugugua

SEQ ID NO: 532294 - RNA, 19 nt, Homo sapiens
  misc_RNA (1)...(19): siRNA sense strand
ugacuaaggcucagaagaa

SEQ ID NO: 532295 - RNA, 19 nt, Homo sapiens
  misc_RNA (1)...(19): siRNA sense strand
gcaaggagagcuauucagu

SEQ ID NO: 532296 - RNA, 19 nt, Homo sapiens
  misc_RNA (1)...(19): siRNA sense strand
aaggagagcuauucagugu

SEQ ID NO: 532297 - RNA, 19 nt, Homo sapiens
  misc_RNA (1)...(19): siRNA sense strand
aacaagcgcucgaccauca

SEQ ID NO: 532298 - RNA, 19 nt, Homo sapiens
  misc_RNA (1)...(19): siRNA sense strand
gcaccaaggccgucaccaa

SEQ ID NO: 532299 - RNA, 19 nt, Homo sapiens
  misc_RNA (1)...(19): siRNA sense strand
gaagaaggacgggaagaag

SEQ ID NO: 532300 - RNA, 19 nt, Homo sapiens
  misc_RNA (1)...(19): siRNA sense strand
gacuaaggcucagaagaag

SEQ ID NO: 532301 - RNA, 19 nt, Homo sapiens
  misc_RNA (1)...(19): siRNA sense strand
caauggggaucaugaauuc

SEQ ID NO: 532302 - RNA, 19 nt, Homo sapiens
  misc_RNA (1)...(19): siRNA sense strand
gcaauggggaucaugaauu

SEQ ID NO: 532303 - RNA, 19 nt, Homo sapiens
  misc_RNA (1)...(19): siRNA sense strand
cuaaggcucagaagaagga

SEQ ID NO: 532304 - RNA, 19 nt, Homo sapiens
  misc_RNA (1)...(19): siRNA sense strand
agaagaaggacgggaagaa

SEQ ID NO: 532305 - RNA, 19 nt, Homo sapiens
  misc_RNA (1)...(19): siRNA sense strand
ccaaguacaccaguuccaa

SEQ ID NO: 532306 - RNA, 19 nt, Homo sapiens
  misc_RNA (1)...(19): siRNA sense strand
acaccggcaucucuuccaa

SEQ ID NO: 532307 - RNA, 19 nt, Homo sapiens
  misc_RNA (1)...(19): siRNA sense strand
caagaaggcggugacuaag

SEQ ID NO: 532308 - RNA, 19 nt, Homo sapiens
  misc_RNA (1)...(19): siRNA sense strand
gccugaaccuaccaagucu

SEQ ID NO: 532309 - RNA, 19 nt, Homo sapiens
  misc_RNA (1)...(19): siRNA sense strand
ucaccaaguacaccaguuc

SEQ ID NO: 532310 - RNA, 19 nt, Homo sapiens
  misc_RNA (1)...(19): siRNA sense strand
ggagagcuauucaguguau

SEQ ID NO: 532311 - RNA, 19 nt, Homo sapiens
  misc_RNA (1)...(19): siRNA sense strand
guacaccaguuccaaguaa

SEQ ID NO: 532312 - RNA, 19 nt, Homo sapiens
  misc_RNA (1)...(19): siRNA sense strand
ccaagaaggcggugacuaa

SEQ ID NO: 532313 - RNA, 19 nt, Homo sapiens
  misc_RNA (1)...(19): siRNA sense strand
ccaaggccgucaccaagua

SEQ ID NO: 532314 - RNA, 19 nt, Homo sapiens
  misc_RNA (1)...(19): siRNA sense strand
gcuauucaguguaugugua

SEQ ID NO: 532315 - RNA, 19 nt, Homo sapiens
  misc_RNA (1)...(19): siRNA sense strand
ugacuaaggcucagaagaa

SEQ ID NO: 532316 - RNA, 19 nt, Homo sapiens
  misc_RNA (1)...(19): siRNA sense strand
gcaaggagagcuauucagu

SEQ ID NO: 532317 - RNA, 19 nt, Homo sapiens
  misc_RNA (1)...(19): siRNA sense strand
aaggagagcuauucagugu

SEQ ID NO: 532318 - RNA, 19 nt, Homo sapiens
  misc_RNA (1)...(19): siRNA sense strand
aacaagcgcucgaccauca

SEQ ID NO: 532319 - RNA, 19 nt, Homo sapiens
  misc_RNA (1)...(19): siRNA sense strand
gcaccaaggccgucaccaa

SEQ ID NO: 532320 - RNA, 19 nt, Homo sapiens
  misc_RNA (1)...(19): siRNA sense strand
gaagaaggacgggaagaag

SEQ ID NO: 532321 - RNA, 19 nt, Homo sapiens
  misc_RNA (1)...(19): siRNA sense strand
gacuaaggcucagaagaag

SEQ ID NO: 532322 - RNA, 19 nt, Homo sapiens
  misc_RNA (1)...(19): siRNA sense strand
caauggggaucaugaauuc

SEQ ID NO: 532323 - RNA, 19 nt, Homo sapiens
  misc_RNA (1)...(19): siRNA sense strand
gcaauggggaucaugaauu

SEQ ID NO: 532324 - RNA, 19 nt, Homo sapiens
  misc_RNA (1)...(19): siRNA sense strand
cuaaggcucagaagaagga

SEQ ID NO: 532325 - RNA, 19 nt, Homo sapiens
  misc_RNA (1)...(19): siRNA sense strand
agaagaaggacgggaagaa

SEQ ID NO: 532326 - RNA, 19 nt, Homo sapiens
  misc_RNA (1)...(19): siRNA sense strand
ccaaguacaccaguuccaa

SEQ ID NO: 532327 - RNA, 19 nt, Homo sapiens
  misc_RNA (1)...(19): siRNA sense strand
acaccggcaucucuuccaa

SEQ ID NO: 532328 - RNA, 19 nt, Homo sapiens
  misc_RNA (1)...(19): siRNA sense strand
caagaaggcggugacuaag

SEQ ID NO: 532329 - RNA, 19 nt, Homo sapiens
  misc_RNA (1)...(19): siRNA sense strand
gccugaaccuaccaagucu

SEQ ID NO: 532330 - RNA, 19 nt, Homo sapiens
  misc_RNA (1)...(19): siRNA sense strand
ucaccaaguacaccaguuc

SEQ ID NO: 532331 - RNA, 19 nt, Homo sapiens
  misc_RNA (1)...(19): siRNA sense strand
gaagaaggaugguaagaag

SEQ ID NO: 532332 - RNA, 19 nt, Homo sapiens
  misc_RNA (1)...(19): siRNA sense strand
ggagagcuauucuaucuau

SEQ ID NO: 532333 - RNA, 19 nt, Homo sapiens
  misc_RNA (1)...(19): siRNA sense strand
gcaaggagagcuauucuau

SEQ ID NO: 532334 - RNA, 19 nt, Homo sapiens
  misc_RNA (1)...(19): siRNA sense strand
gcuauucuaucuaugugua

SEQ ID NO: 532335 - RNA, 19 nt, Homo sapiens
  misc_RNA (1)...(19): siRNA sense strand
cuaagaaggcuaucacuaa

SEQ ID NO: 532336 - RNA, 19 nt, Homo sapiens
  misc_RNA (1)...(19): siRNA sense strand
cuaaggcaguuaccaagua

SEQ ID NO: 532337 - RNA, 19 nt, Homo sapiens
  misc_RNA (1)...(19): siRNA sense strand
caaguacacuagcucuaaa

SEQ ID NO: 532338 - RNA, 19 nt, Homo sapiens
  misc_RNA (1)...(19): siRNA sense strand
aauaagcgcucgaccauca

SEQ ID NO: 532339 - RNA, 19 nt, Homo sapiens
  misc_RNA (1)...(19): siRNA sense strand
ucacuaaggcgcagaagaa

SEQ ID NO: 532340 - RNA, 19 nt, Homo sapiens
  misc_RNA (1)...(19): siRNA sense strand
guacacuagcucuaaauaa

SEQ ID NO: 532341 - RNA, 19 nt, Homo sapiens
  misc_RNA (1)...(19): siRNA sense strand
uaagaaggcuaucacuaag

SEQ ID NO: 532342 - RNA, 19 nt, Homo sapiens
  misc_RNA (1)...(19): siRNA sense strand
gcacuaaggcaguuaccaa

SEQ ID NO: 532343 - RNA, 19 nt, Homo sapiens
  misc_RNA (1)...(19): siRNA sense strand
aaggagagcuauucuaucu

SEQ ID NO: 532344 - RNA, 19 nt, Homo sapiens
  misc_RNA (1)...(19): siRNA sense strand
gcaguuaccaaguacacua

SEQ ID NO: 532345 - RNA, 19 nt, Homo sapiens
  misc_RNA (1)...(19): siRNA sense strand
ccaaguacacuagcucuaa

SEQ ID NO: 532346 - RNA, 19 nt, Homo sapiens
  misc_RNA (1)...(19): siRNA sense strand
gagcuauucuaucuaugug

SEQ ID NO: 532347 - RNA, 19 nt, Homo sapiens
  misc_RNA (1)...(19): siRNA sense strand
cuaaggcgcagaagaagga

SEQ ID NO: 532348 - RNA, 19 nt, Homo sapiens
  misc_RNA (1)...(19): siRNA sense strand
uguacaagguucugaagca

SEQ ID NO: 532349 - RNA, 19 nt, Homo sapiens
  misc_RNA (1)...(19): siRNA sense strand
ucgccuggcucacuacaau

SEQ ID NO: 532350 - RNA, 19 nt, Homo sapiens
  misc_RNA (1)...(19): siRNA sense strand
agaagaaggaugguaagaa

SEQ ID NO: 532351 - RNA, 19 nt, Homo sapiens
  misc_RNA (1)...(19): siRNA sense strand
ucuaagaaggcuaucacua

SEQ ID NO: 532352 - RNA, 19 nt, Homo sapiens
  misc_RNA (1)...(19): siRNA sense strand
uaaggcaguuaccaaguac

SEQ ID NO: 532353 - RNA, 19 nt, Homo sapiens
  misc_RNA (1)...(19): siRNA sense strand
gagagcuauucuaucuaug

SEQ ID NO: 532354 - RNA, 19 nt, Homo sapiens
  misc_RNA (1)...(19): siRNA sense strand
cgagggcacuaaggcaguu

SEQ ID NO: 532355 - RNA, 19 nt, Homo sapiens
  misc_RNA (1)...(19): siRNA sense strand
acaauaagcgcucgaccau

SEQ ID NO: 532356 - RNA, 19 nt, Homo sapiens
  misc_RNA (1)...(19): siRNA sense strand
gccuggcucacuacaauaa

SEQ ID NO: 532357 - RNA, 19 nt, Homo sapiens
  misc_RNA (1)...(19): siRNA sense strand
cgcagaagaaggaugguaa

SEQ ID NO: 532358 - RNA, 19 nt, Homo sapiens
  misc_RNA (1)...(19): siRNA sense strand
gcagaagaaggaugguaag

SEQ ID NO: 532359 - RNA, 19 nt, Homo sapiens
  misc_RNA (1)...(19): siRNA sense strand
gcgcagaagaaggauggua

SEQ ID NO: 532360 - RNA, 19 nt, Homo sapiens
  misc_RNA (1)...(19): siRNA sense strand
caaggagagcuauucuauc

SEQ ID NO: 532361 - RNA, 19 nt, Homo sapiens
  misc_RNA (1)...(19): siRNA sense strand
cuucucgccuggcucacua

SEQ ID NO: 532362 - RNA, 19 nt, Homo sapiens
  misc_RNA (1)...(19): siRNA sense strand
acaccggcaucucauccaa

SEQ ID NO: 532363 - RNA, 19 nt, Homo sapiens
  misc_RNA (1)...(19): siRNA sense strand
cuaucuauguguacaaggu

SEQ ID NO: 532364 - RNA, 19 nt, Homo sapiens
  misc_RNA (1)...(19): siRNA sense strand
cagaagaaggaugguaaga

SEQ ID NO: 532365 - RNA, 19 nt, Homo sapiens
  misc_RNA (1)...(19): siRNA sense strand
aguacacuagcucuaaaua

SEQ ID NO: 532366 - RNA, 19 nt, Homo sapiens
  misc_RNA (1)...(19): siRNA sense strand
ggaaauagaugacuuuaga

SEQ ID NO: 532367 - RNA, 19 nt, Homo sapiens
  misc_RNA (1)...(19): siRNA sense strand
uuacacaccuggauaauua

SEQ ID NO: 532368 - RNA, 19 nt, Homo sapiens
  misc_RNA (1)...(19): siRNA sense strand
gaacaaauuuccagaucuu

SEQ ID NO: 532369 - RNA, 19 nt, Homo sapiens
  misc_RNA (1)...(19): siRNA sense strand
ugaaauaacugacauggaa

SEQ ID NO: 532370 - RNA, 19 nt, Homo sapiens
  misc_RNA (1)...(19): siRNA sense strand
gaagauaccaccuuucauu

SEQ ID NO: 532371 - RNA, 19 nt, Homo sapiens
  misc_RNA (1)...(19): siRNA sense strand
ccagaaggauuacagauuu

SEQ ID NO: 532372 - RNA, 19 nt, Homo sapiens
  misc_RNA (1)...(19): siRNA sense strand
uaaaggagcacucugaaua

SEQ ID NO: 532373 - RNA, 19 nt, Homo sapiens
  misc_RNA (1)...(19): siRNA sense strand
gcaaagcauucaagacauu

SEQ ID NO: 532374 - RNA, 19 nt, Homo sapiens
  misc_RNA (1)...(19): siRNA sense strand
ucacggagcuuauucaaau

SEQ ID NO: 532375 - RNA, 19 nt, Homo sapiens
  misc_RNA (1)...(19): siRNA sense strand
uaauggagcugguaaauca

SEQ ID NO: 532376 - RNA, 19 nt, Homo sapiens
  misc_RNA (1)...(19): siRNA sense strand
gaaaugaaguauggaaaug

SEQ ID NO: 532377 - RNA, 19 nt, Homo sapiens
  misc_RNA (1)...(19): siRNA sense strand
gaucagccacuauuuauaa

SEQ ID NO: 532378 - RNA, 19 nt, Homo sapiens
  misc_RNA (1)...(19): siRNA sense strand
caaaggaaguggaacaaga

SEQ ID NO: 532379 - RNA, 19 nt, Homo sapiens
  misc_RNA (1)...(19): siRNA sense strand
uaaaguaacucgugaaacu

SEQ ID NO: 532380 - RNA, 19 nt, Homo sapiens
  misc_RNA (1)...(19): siRNA sense strand
ggauuucucuucacuguau

SEQ ID NO: 532381 - RNA, 19 nt, Homo sapiens
  misc_RNA (1)...(19): siRNA sense strand
gguaucaacucaauaugaa

SEQ ID NO: 532382 - RNA, 19 nt, Homo sapiens
  misc_RNA (1)...(19): siRNA sense strand
uaacugacauggaagaaau

SEQ ID NO: 532383 - RNA, 19 nt, Homo sapiens
  misc_RNA (1)...(19): siRNA sense strand
gcaaugcccuuaugggaau

SEQ ID NO: 532384 - RNA, 19 nt, Homo sapiens
  misc_RNA (1)...(19): siRNA sense strand
gaugaucccuccuacaaug

SEQ ID NO: 532385 - RNA, 19 nt, Homo sapiens
  misc_RNA (1)...(19): siRNA sense strand
cgacuuauccucuucagua

SEQ ID NO: 532386 - RNA, 19 nt, Homo sapiens
  misc_RNA (1)...(19): siRNA sense strand
caucuuggcugauaggaaa

SEQ ID NO: 532387 - RNA, 19 nt, Homo sapiens
  misc_RNA (1)...(19): siRNA sense strand
agaagaagaugaagauguu

SEQ ID NO: 532388 - RNA, 19 nt, Homo sapiens
  misc_RNA (1)...(19): siRNA sense strand
ggagagcucuuuuguguuu

SEQ ID NO: 532389 - RNA, 19 nt, Homo sapiens
  misc_RNA (1)...(19): siRNA sense strand
gcugacaucuuggcugaua

SEQ ID NO: 532390 - RNA, 19 nt, Homo sapiens
  misc_RNA (1)...(19): siRNA sense strand
caaggaauauuaugagaca

SEQ ID NO: 532391 - RNA, 19 nt, Homo sapiens
  misc_RNA (1)...(19): siRNA sense strand
ggaagagcccgaagaagaa

SEQ ID NO: 532392 - RNA, 19 nt, Homo sapiens
  misc_RNA (1)...(19): siRNA sense strand
cauaucgccugaaguuuaa

SEQ ID NO: 532393 - RNA, 19 nt, Homo sapiens
  misc_RNA (1)...(19): siRNA sense strand
uaaggugucuggaaaugaa

SEQ ID NO: 532394 - RNA, 19 nt, Homo sapiens
  misc_RNA (1)...(19): siRNA sense strand
ggcaacacuucgcuucuua

SEQ ID NO: 532395 - RNA, 19 nt, Homo sapiens
  misc_RNA (1)...(19): siRNA sense strand
gauauagaaucccaguuau

SEQ ID NO: 532396 - RNA, 19 nt, Homo sapiens
  misc_RNA (1)...(19): siRNA sense strand
gggauucacuguguuauau

SEQ ID NO: 532397 - RNA, 19 nt, Homo sapiens
  misc_RNA (1)...(19): siRNA sense strand
aaacagaaauggcucagau

SEQ ID NO: 532398 - RNA, 19 nt, Homo sapiens
  misc_RNA (1)...(19): siRNA sense strand
acaccuggauaauuacuua

SEQ ID NO: 532399 - RNA, 19 nt, Homo sapiens
  misc_RNA (1)...(19): siRNA sense strand
gaagagaccauggauauag

SEQ ID NO: 532400 - RNA, 19 nt, Homo sapiens
  misc_RNA (1)...(19): siRNA sense strand
gggaaauguugaugauaaa

SEQ ID NO: 532401 - RNA, 19 nt, Homo sapiens
  misc_RNA (1)...(19): siRNA sense strand
ugggaaauguugaugauaa

SEQ ID NO: 532402 - RNA, 19 nt, Homo sapiens
  misc_RNA (1)...(19): siRNA sense strand
ugacaucucugaaugaagu

SEQ ID NO: 532403 - RNA, 19 nt, Homo sapiens
  misc_RNA (1)...(19): siRNA sense strand
ucauaucgccugaaguuua

SEQ ID NO: 532404 - RNA, 19 nt, Homo sapiens
  misc_RNA (1)...(19): siRNA sense strand
gaccauggauauagaacuu

SEQ ID NO: 532405 - RNA, 19 nt, Homo sapiens
  misc_RNA (1)...(19): siRNA sense strand
ggcccaagcuuacaaugaa

SEQ ID NO: 532406 - RNA, 19 nt, Homo sapiens
  misc_RNA (1)...(19): siRNA sense strand
gaaaauagccaucagaaau

SEQ ID NO: 532407 - RNA, 19 nt, Homo sapiens
  misc_RNA (1)...(19): siRNA sense strand
gaaaggaagaacagucauu

SEQ ID NO: 532408 - RNA, 19 nt, Homo sapiens
  misc_RNA (1)...(19): siRNA sense strand
gaaaauacaugugacaaga

SEQ ID NO: 532409 - RNA, 19 nt, Homo sapiens
  misc_RNA (1)...(19): siRNA sense strand
gaucaucuuuguuucugaa

SEQ ID NO: 532410 - RNA, 19 nt, Homo sapiens
  misc_RNA (1)...(19): siRNA sense strand
ggaaguggaacaagaggua

SEQ ID NO: 532411 - RNA, 19 nt, Homo sapiens
  misc_RNA (1)...(19): siRNA sense strand
gagcauuccucugaugauu

SEQ ID NO: 532412 - RNA, 19 nt, Homo sapiens
  misc_RNA (1)...(19): siRNA sense strand
caugaaaucuuugagaaug

SEQ ID NO: 532413 - RNA, 19 nt, Homo sapiens
  misc_RNA (1)...(19): siRNA sense strand
ugaaagagcacuuggaguu

SEQ ID NO: 532414 - RNA, 19 nt, Homo sapiens
  misc_RNA (1)...(19): siRNA sense strand
gaaccggugucuccagaau

SEQ ID NO: 532415 - RNA, 19 nt, Homo sapiens
  misc_RNA (1)...(19): siRNA sense strand
caagaaaggcugucaguag

SEQ ID NO: 532416 - RNA, 19 nt, Homo sapiens
  misc_RNA (1)...(19): siRNA sense strand
ugaaaggacugggcaaaga

SEQ ID NO: 532417 - RNA, 19 nt, Homo sapiens
  misc_RNA (1)...(19): siRNA sense strand
gaaaggacugggcaaagaa

SEQ ID NO: 532418 - RNA, 19 nt, Homo sapiens
  misc_RNA (1)...(19): siRNA sense strand
ggccuuggcuuccuuuaug

SEQ ID NO: 532419 - RNA, 19 nt, Homo sapiens
  misc_RNA (1)...(19): siRNA sense strand
acagugaccuugauaagug

SEQ ID NO: 532420 - RNA, 19 nt, Homo sapiens
  misc_RNA (1)...(19): siRNA sense strand
acucaacucucugaaauaa

SEQ ID NO: 532421 - RNA, 19 nt, Homo sapiens
  misc_RNA (1)...(19): siRNA sense strand
acagaucacugcaauacuu

SEQ ID NO: 532422 - RNA, 19 nt, Homo sapiens
  misc_RNA (1)...(19): siRNA sense strand
ugaaauaaauccugagcau

SEQ ID NO: 532423 - RNA, 19 nt, Homo sapiens
  misc_RNA (1)...(19): siRNA sense strand
gaagucacaacaaaucauu

SEQ ID NO: 532424 - RNA, 19 nt, Homo sapiens
  misc_RNA (1)...(19): siRNA sense strand
ggaggaggaaccagucaua

SEQ ID NO: 532425 - RNA, 19 nt, Homo sapiens
  misc_RNA (1)...(19): siRNA sense strand
uaccauaccuucagagugu

SEQ ID NO: 532426 - RNA, 19 nt, Homo sapiens
  misc_RNA (1)...(19): siRNA sense strand
guucuuaugggaauuguua

SEQ ID NO: 532427 - RNA, 19 nt, Homo sapiens
  misc_RNA (1)...(19): siRNA sense strand
ggaauuaugcuguuucagu

SEQ ID NO: 532428 - RNA, 19 nt, Homo sapiens
  misc_RNA (1)...(19): siRNA sense strand
agggagaaauuaugaauga

SEQ ID NO: 532429 - RNA, 19 nt, Homo sapiens
  misc_RNA (1)...(19): siRNA sense strand
gaguugacaucaguuauug

SEQ ID NO: 532430 - RNA, 19 nt, Homo sapiens
  misc_RNA (1)...(19): siRNA sense strand
cacaacaaaucauucugua

SEQ ID NO: 532431 - RNA, 19 nt, Homo sapiens
  misc_RNA (1)...(19): siRNA sense strand
ggaaaugaaguauggaaau

SEQ ID NO: 532432 - RNA, 19 nt, Homo sapiens
  misc_RNA (1)...(19): siRNA sense strand
cauaauugguugugcaguu

SEQ ID NO: 532433 - RNA, 19 nt, Homo sapiens
  misc_RNA (1)...(19): siRNA sense strand
gaccagggcauaaggaauu

SEQ ID NO: 532434 - RNA, 19 nt, Homo sapiens
  misc_RNA (1)...(19): siRNA sense strand
ugaaccaacugcuggauug

SEQ ID NO: 532435 - RNA, 19 nt, Homo sapiens
  misc_RNA (1)...(19): siRNA sense strand
ggaguugacaucaguuauu

SEQ ID NO: 532436 - RNA, 19 nt, Homo sapiens
  misc_RNA (1)...(19): siRNA sense strand
ggagcacucugaauacaca

SEQ ID NO: 532437 - RNA, 19 nt, Homo sapiens
  misc_RNA (1)...(19): siRNA sense strand
uagagaaacucaucccaau

SEQ ID NO: 532438 - RNA, 19 nt, Homo sapiens
  misc_RNA (1)...(19): siRNA sense strand
ggacauuccauuauacuuc

SEQ ID NO: 532439 - RNA, 19 nt, Homo sapiens
  misc_RNA (1)...(19): siRNA sense strand
gaaggaaaaucagcaauug

SEQ ID NO: 532440 - RNA, 19 nt, Homo sapiens
  misc_RNA (1)...(19): siRNA sense strand
guauauaguuugccuuugg

SEQ ID NO: 532441 - RNA, 19 nt, Homo sapiens
  misc_RNA (1)...(19): siRNA sense strand
gaaauaaauccugagcauu

SEQ ID NO: 532442 - RNA, 19 nt, Homo sapiens
  misc_RNA (1)...(19): siRNA sense strand
ggauggguauuaagucuuc

SEQ ID NO: 532443 - RNA, 19 nt, Homo sapiens
  misc_RNA (1)...(19): siRNA sense strand
ugacaucaguuauuggaau

SEQ ID NO: 532444 - RNA, 19 nt, Homo sapiens
  misc_RNA (1)...(19): siRNA sense strand
gauaccaccuuucauuucu

SEQ ID NO: 532445 - RNA, 19 nt, Homo sapiens
  misc_RNA (1)...(19): siRNA sense strand
caacuuaaggcuccuguga

SEQ ID NO: 532446 - RNA, 19 nt, Homo sapiens
  misc_RNA (1)...(19): siRNA sense strand
gucauaaggugucuggaaa

SEQ ID NO: 532447 - RNA, 19 nt, Homo sapiens
  misc_RNA (1)...(19): siRNA sense strand
caagaaauacuggagauga

SEQ ID NO: 532448 - RNA, 19 nt, Homo sapiens
  misc_RNA (1)...(19): siRNA sense strand
gacaagaaauacuggagau

SEQ ID NO: 532449 - RNA, 19 nt, Homo sapiens
  misc_RNA (1)...(19): siRNA sense strand
cuuaguggauugucuguuu

SEQ ID NO: 532450 - RNA, 19 nt, Homo sapiens
  misc_RNA (1)...(19): siRNA sense strand
ggacagaucacugcaauac

SEQ ID NO: 532451 - RNA, 19 nt, Homo sapiens
  misc_RNA (1)...(19): siRNA sense strand
caaguuugguagagauuau

SEQ ID NO: 532452 - RNA, 19 nt, Homo sapiens
  misc_RNA (1)...(19): siRNA sense strand
cagcaaauguggcagauac

SEQ ID NO: 532453 - RNA, 19 nt, Homo sapiens
  misc_RNA (1)...(19): siRNA sense strand
gaagaugcugcucucagua

SEQ ID NO: 532454 - RNA, 19 nt, Homo sapiens
  misc_RNA (1)...(19): siRNA sense strand
ggagaugagucugaaaugg

SEQ ID NO: 532455 - RNA, 19 nt, Homo sapiens
  misc_RNA (1)...(19): siRNA sense strand
guugaaaugugcaggauca

SEQ ID NO: 532456 - RNA, 19 nt, Homo sapiens
  misc_RNA (1)...(19): siRNA sense strand
gaaggaucagccacuauuu

SEQ ID NO: 532457 - RNA, 19 nt, Homo sapiens
  misc_RNA (1)...(19): siRNA sense strand
gaaaagaagccauaagaau

SEQ ID NO: 532458 - RNA, 19 nt, Homo sapiens
  misc_RNA (1)...(19): siRNA sense strand
gaaagagcacuuggaguug

SEQ ID NO: 532459 - RNA, 19 nt, Homo sapiens
  misc_RNA (1)...(19): siRNA sense strand
agaaauggcucagaugauc

SEQ ID NO: 532460 - RNA, 19 nt, Homo sapiens
  misc_RNA (1)...(19): siRNA sense strand
gaaauggugggaguuauau

SEQ ID NO: 532461 - RNA, 19 nt, Homo sapiens
  misc_RNA (1)...(19): siRNA sense strand
uuccagaucuuuacaguga

SEQ ID NO: 532462 - RNA, 19 nt, Homo sapiens
  misc_RNA (1)...(19): siRNA sense strand
caacacugcuaaacauucu

SEQ ID NO: 532463 - RNA, 19 nt, Homo sapiens
  misc_RNA (1)...(19): siRNA sense strand
cggaagagcccgaagaaga

SEQ ID NO: 532464 - RNA, 19 nt, Homo sapiens
  misc_RNA (1)...(19): siRNA sense strand
ccucuuuaauggcguauaa

SEQ ID NO: 532465 - RNA, 19 nt, Homo sapiens
  misc_RNA (1)...(19): siRNA sense strand
ugaaauggugggaguuaua

SEQ ID NO: 532466 - RNA, 19 nt, Homo sapiens
  misc_RNA (1)...(19): siRNA sense strand
gaacauagcuauagaagug

SEQ ID NO: 532467 - RNA, 19 nt, Homo sapiens
  misc_RNA (1)...(19): siRNA sense strand
gaaaugaacugcaggaaga

SEQ ID NO: 532468 - RNA, 19 nt, Homo sapiens
  misc_RNA (1)...(19): siRNA sense strand
ggaagaaacuaaugagaaa

SEQ ID NO: 532469 - RNA, 19 nt, Homo sapiens
  misc_RNA (1)...(19): siRNA sense strand
gaaggaauaugcaggcaaa

SEQ ID NO: 532470 - RNA, 19 nt, Homo sapiens
  misc_RNA (1)...(19): siRNA sense strand
gacaauacauuacgucauu

SEQ ID NO: 532471 - RNA, 19 nt, Homo sapiens
  misc_RNA (1)...(19): siRNA sense strand
gggcauaggcuaccauuua

SEQ ID NO: 532472 - RNA, 19 nt, Homo sapiens
  misc_RNA (1)...(19): siRNA sense strand
gaaaucagacagaguaauu

SEQ ID NO: 532473 - RNA, 19 nt, Homo sapiens
  misc_RNA (1)...(19): siRNA sense strand
ggaaaggacaaacaaauuu

SEQ ID NO: 532474 - RNA, 19 nt, Homo sapiens
  misc_RNA (1)...(19): siRNA sense strand
gagaaaggauccuguguuc

SEQ ID NO: 532475 - RNA, 19 nt, Homo sapiens
  misc_RNA (1)...(19): siRNA sense strand
aagaauggcugauauagaa

SEQ ID NO: 532476 - RNA, 19 nt, Homo sapiens
  misc_RNA (1)...(19): siRNA sense strand
gcagagauccugaggcuuu

SEQ ID NO: 532477 - RNA, 19 nt, Homo sapiens
  misc_RNA (1)...(19): siRNA sense strand
gaugauaacuggagacaca

SEQ ID NO: 532478 - RNA, 19 nt, Homo sapiens
  misc_RNA (1)...(19): siRNA sense strand
gaaagaagccaucagaauc

SEQ ID NO: 532479 - RNA, 19 nt, Homo sapiens
  misc_RNA (1)...(19): siRNA sense strand
gauccuguguucagaauuu

SEQ ID NO: 532480 - RNA, 19 nt, Homo sapiens
  misc_RNA (1)...(19): siRNA sense strand
gcagugagagucaucuuua

SEQ ID NO: 532481 - RNA, 19 nt, Homo sapiens
  misc_RNA (1)...(19): siRNA sense strand
gaaagaaugagaacaguga

SEQ ID NO: 532482 - RNA, 19 nt, Homo sapiens
  misc_RNA (1)...(19): siRNA sense strand
gcucuucucuguuccuuaa

SEQ ID NO: 532483 - RNA, 19 nt, Homo sapiens
  misc_RNA (1)...(19): siRNA sense strand
gaaggaaaaucaacuauug

SEQ ID NO: 532484 - RNA, 19 nt, Homo sapiens
  misc_RNA (1)...(19): siRNA sense strand
caaauccuguguaguauug

SEQ ID NO: 532485 - RNA, 19 nt, Homo sapiens
  misc_RNA (1)...(19): siRNA sense strand
agagucaucuuuacugaua

SEQ ID NO: 532486 - RNA, 19 nt, Homo sapiens
  misc_RNA (1)...(19): siRNA sense strand
ggaggaagauauccagaug

SEQ ID NO: 532487 - RNA, 19 nt, Homo sapiens
  misc_RNA (1)...(19): siRNA sense strand
gcacccaguuuauagauga

SEQ ID NO: 532488 - RNA, 19 nt, Homo sapiens
  misc_RNA (1)...(19): siRNA sense strand
cauuaaugcugcuaucaua

SEQ ID NO: 532489 - RNA, 19 nt, Homo sapiens
  misc_RNA (1)...(19): siRNA sense strand
gcuaauaccuuaccuucau

SEQ ID NO: 532490 - RNA, 19 nt, Homo sapiens
  misc_RNA (1)...(19): siRNA sense strand
ggaaagaagccaucagaau

SEQ ID NO: 532491 - RNA, 19 nt, Homo sapiens
  misc_RNA (1)...(19): siRNA sense strand
ugaagaaccuggcacaaau

SEQ ID NO: 532492 - RNA, 19 nt, Homo sapiens
  misc_RNA (1)...(19): siRNA sense strand
ggcauaggcuaccauuuaa

SEQ ID NO: 532493 - RNA, 19 nt, Homo sapiens
  misc_RNA (1)...(19): siRNA sense strand
gaaacuaacuuuugggauu

SEQ ID NO: 532494 - RNA, 19 nt, Homo sapiens
  misc_RNA (1)...(19): siRNA sense strand
ugaaugagguguuucugaa

SEQ ID NO: 532495 - RNA, 19 nt, Homo sapiens
  misc_RNA (1)...(19): siRNA sense strand
gauaguugcuacugaucua

SEQ ID NO: 532496 - RNA, 19 nt, Homo sapiens
  misc_RNA (1)...(19): siRNA sense strand
ucaaaugucuucaauggau

SEQ ID NO: 532497 - RNA, 19 nt, Homo sapiens
  misc_RNA (1)...(19): siRNA sense strand
gaguauggguaccgaagua

SEQ ID NO: 532498 - RNA, 19 nt, Homo sapiens
  misc_RNA (1)...(19): siRNA sense strand
ugaaaggugugguguuuga

SEQ ID NO: 532499 - RNA, 19 nt, Homo sapiens
  misc_RNA (1)...(19): siRNA sense strand
ggaacugucuccaaauaca

SEQ ID NO: 532500 - RNA, 19 nt, Homo sapiens
  misc_RNA (1)...(19): siRNA sense strand
gguguacgcugccgugaaa

SEQ ID NO: 532501 - RNA, 19 nt, Homo sapiens
  misc_RNA (1)...(19): siRNA sense strand
gauuggcucucuauucauu

SEQ ID NO: 532502 - RNA, 19 nt, Homo sapiens
  misc_RNA (1)...(19): siRNA sense strand
guuaauaccucccuucaca

SEQ ID NO: 532503 - RNA, 19 nt, Homo sapiens
  misc_RNA (1)...(19): siRNA sense strand
ucauagaaaucgcaacaaa

SEQ ID NO: 532504 - RNA, 19 nt, Homo sapiens
  misc_RNA (1)...(19): siRNA sense strand
gcaauggacuacuuggaau

SEQ ID NO: 532505 - RNA, 19 nt, Homo sapiens
  misc_RNA (1)...(19): siRNA sense strand
aaaguucgcuuccuaaagu

SEQ ID NO: 532506 - RNA, 19 nt, Homo sapiens
  misc_RNA (1)...(19): siRNA sense strand
agacagaccuuguuggaau

SEQ ID NO: 532507 - RNA, 19 nt, Homo sapiens
  misc_RNA (1)...(19): siRNA sense strand
uauggaaucuccugaaaga

SEQ ID NO: 532508 - RNA, 19 nt, Homo sapiens
  misc_RNA (1)...(19): siRNA sense strand
gagaguagaagcuuugaaa

SEQ ID NO: 532509 - RNA, 19 nt, Homo sapiens
  misc_RNA (1)...(19): siRNA sense strand
gaaccagugucuccagaau

SEQ ID NO: 532510 - RNA, 19 nt, Homo sapiens
  misc_RNA (1)...(19): siRNA sense strand
gaauggacuuugugucuuc

SEQ ID NO: 532511 - RNA, 19 nt, Homo sapiens
  misc_RNA (1)...(19): siRNA sense strand
uugaagagcauauggauua

SEQ ID NO: 532512 - RNA, 19 nt, Homo sapiens
  misc_RNA (1)...(19): siRNA sense strand
uaugcuggcuucauccuua

SEQ ID NO: 532513 - RNA, 19 nt, Homo sapiens
  misc_RNA (1)...(19): siRNA sense strand
ccacuuggauucuucacaa

SEQ ID NO: 532514 - RNA, 19 nt, Homo sapiens
  misc_RNA (1)...(19): siRNA sense strand
gaaagacaauacauuacgu

SEQ ID NO: 532515 - RNA, 19 nt, Homo sapiens
  misc_RNA (1)...(19): siRNA sense strand
cagcauuggugacuacaaa

SEQ ID NO: 532516 - RNA, 19 nt, Homo sapiens
  misc_RNA (1)...(19): siRNA sense strand
uuacagggaucuugauaga

SEQ ID NO: 532517 - RNA, 19 nt, Homo sapiens
  misc_RNA (1)...(19): siRNA sense strand
aaacuuaagugguggacaa

SEQ ID NO: 532518 - RNA, 19 nt, Homo sapiens
  misc_RNA (1)...(19): siRNA sense strand
gaucacagauuuucaauag

SEQ ID NO: 532519 - RNA, 19 nt, Homo sapiens
  misc_RNA (1)...(19): siRNA sense strand
ccagaggagauuauauuua

SEQ ID NO: 532520 - RNA, 19 nt, Homo sapiens
  misc_RNA (1)...(19): siRNA sense strand
ggagcugggugaucuugaa

SEQ ID NO: 532521 - RNA, 19 nt, Homo sapiens
  misc_RNA (1)...(19): siRNA sense strand
ugaaaaggaucacagauuu

SEQ ID NO: 532522 - RNA, 19 nt, Homo sapiens
  misc_RNA (1)...(19): siRNA sense strand
cgugaaaggucucaggaaa

SEQ ID NO: 532523 - RNA, 19 nt, Homo sapiens
  misc_RNA (1)...(19): siRNA sense strand
ggaauggacuuugugucuu

SEQ ID NO: 532524 - RNA, 19 nt, Homo sapiens
  misc_RNA (1)...(19): siRNA sense strand
gaaaggauccuguguucag

SEQ ID NO: 532525 - RNA, 19 nt, Homo sapiens
  misc_RNA (1)...(19): siRNA sense strand
gacagaacauagcuauaga

SEQ ID NO: 532526 - RNA, 19 nt, Homo sapiens
  misc_RNA (1)...(19): siRNA sense strand
ugggaacugucuccaaaua

SEQ ID NO: 532527 - RNA, 19 nt, Homo sapiens
  misc_RNA (1)...(19): siRNA sense strand
guacaggaauuagaaaugg

SEQ ID NO: 532528 - RNA, 19 nt, Homo sapiens
  misc_RNA (1)...(19): siRNA sense strand
ggagaaagagguacaacga

SEQ ID NO: 532529 - RNA, 19 nt, Homo sapiens
  misc_RNA (1)...(19): siRNA sense strand
uggcccagcuuauacauuu

SEQ ID NO: 532530 - RNA, 19 nt, Homo sapiens
  misc_RNA (1)...(19): siRNA sense strand
ccucaaaugucuucaaugg

SEQ ID NO: 532531 - RNA, 19 nt, Homo sapiens
  misc_RNA (1)...(19): siRNA sense strand
ggaaggcugagauguauug

SEQ ID NO: 532532 - RNA, 19 nt, Homo sapiens
  misc_RNA (1)...(19): siRNA sense strand
ccaagaagcaacgcuauuu

SEQ ID NO: 532533 - RNA, 19 nt, Homo sapiens
  misc_RNA (1)...(19): siRNA sense strand
ggaagguguucauauccaa

SEQ ID NO: 532534 - RNA, 19 nt, Homo sapiens
  misc_RNA (1)...(19): siRNA sense strand
cacaugaaguggagaaaga

SEQ ID NO: 532535 - RNA, 19 nt, Homo sapiens
  misc_RNA (1)...(19): siRNA sense strand
gaaaucgcaacaaaucauu

SEQ ID NO: 532536 - RNA, 19 nt, Homo sapiens
  misc_RNA (1)...(19): siRNA sense strand
caaaauccauaccucauaa

SEQ ID NO: 532537 - RNA, 19 nt, Homo sapiens
  misc_RNA (1)...(19): siRNA sense strand
caggaaggcugagauguau

SEQ ID NO: 532538 - RNA, 19 nt, Homo sapiens
  misc_RNA (1)...(19): siRNA sense strand
cauuuaaguuugcaucuga

SEQ ID NO: 532539 - RNA, 19 nt, Homo sapiens
  misc_RNA (1)...(19): siRNA sense strand
ggacaggaagguguucaua

SEQ ID NO: 532540 - RNA, 19 nt, Homo sapiens
  misc_RNA (1)...(19): siRNA sense strand
ccagaucacugcccuccuu

SEQ ID NO: 532541 - RNA, 19 nt, Homo sapiens
  misc_RNA (1)...(19): siRNA sense strand
gcugaaggcucccgugaag

SEQ ID NO: 532542 - RNA, 19 nt, Homo sapiens
  misc_RNA (1)...(19): siRNA sense strand
cuuaggagcuucagaaucu

SEQ ID NO: 532543 - RNA, 19 nt, Homo sapiens
  misc_RNA (1)...(19): siRNA sense strand
gaaagagguacaacgaguu

SEQ ID NO: 532544 - RNA, 19 nt, Homo sapiens
  misc_RNA (1)...(19): siRNA sense strand
ucacacacuuucaagaaug

SEQ ID NO: 532545 - RNA, 19 nt, Homo sapiens
  misc_RNA (1)...(19): siRNA sense strand
gccaagcacugguggaugu

SEQ ID NO: 532546 - RNA, 19 nt, Homo sapiens
  misc_RNA (1)...(19): siRNA sense strand
uaaguugccuguugaggau

SEQ ID NO: 532547 - RNA, 19 nt, Homo sapiens
  misc_RNA (1)...(19): siRNA sense strand
cauaauagcuacucuuuuc

SEQ ID NO: 532548 - RNA, 19 nt, Homo sapiens
  misc_RNA (1)...(19): siRNA sense strand
ugagaacagugaaugcuau

SEQ ID NO: 532549 - RNA, 19 nt, Homo sapiens
  misc_RNA (1)...(19): siRNA sense strand
gcaggucugugcaauagca

SEQ ID NO: 532550 - RNA, 19 nt, Homo sapiens
  misc_RNA (1)...(19): siRNA sense strand
gauauaggaagccuuguug

SEQ ID NO: 532551 - RNA, 19 nt, Homo sapiens
  misc_RNA (1)...(19): siRNA sense strand
uaaguuugcaucugaauga

SEQ ID NO: 532552 - RNA, 19 nt, Homo sapiens
  misc_RNA (1)...(19): siRNA sense strand
cccaagagauaaugaacaa

SEQ ID NO: 532553 - RNA, 19 nt, Homo sapiens
  misc_RNA (1)...(19): siRNA sense strand
ggcuaugucucaucucuug

SEQ ID NO: 532554 - RNA, 19 nt, Homo sapiens
  misc_RNA (1)...(19): siRNA sense strand
cagcaggucugugcaauag

SEQ ID NO: 532555 - RNA, 19 nt, Homo sapiens
  misc_RNA (1)...(19): siRNA sense strand
gaaaauaucagcaaguuca

SEQ ID NO: 532556 - RNA, 19 nt, Homo sapiens
  misc_RNA (1)...(19): siRNA sense strand
gcuuauacauuuggacuau

SEQ ID NO: 532557 - RNA, 19 nt, Homo sapiens
  misc_RNA (1)...(19): siRNA sense strand
ucaugacacuccucaaaug

SEQ ID NO: 532558 - RNA, 19 nt, Homo sapiens
  misc_RNA (1)...(19): siRNA sense strand
ugagagucaucuuuacuga

SEQ ID NO: 532559 - RNA, 19 nt, Homo sapiens
  misc_RNA (1)...(19): siRNA sense strand
ccauaacaacuuugaauga

SEQ ID NO: 532560 - RNA, 19 nt, Homo sapiens
  misc_RNA (1)...(19): siRNA sense strand
ucacaggcuuucuucaaau

SEQ ID NO: 532561 - RNA, 19 nt, Homo sapiens
  misc_RNA (1)...(19): siRNA sense strand
guacugcccucaggagaau

SEQ ID NO: 532562 - RNA, 19 nt, Homo sapiens
  misc_RNA (1)...(19): siRNA sense strand
gaaguuauaggacuguuag

SEQ ID NO: 532563 - RNA, 19 nt, Homo sapiens
  misc_RNA (1)...(19): siRNA sense strand
auucaaauccuguguagua

SEQ ID NO: 532564 - RNA, 19 nt, Homo sapiens
  misc_RNA (1)...(19): siRNA sense strand
gcccagaggagauuauauu

SEQ ID NO: 532565 - RNA, 19 nt, Homo sapiens
  misc_RNA (1)...(19): siRNA sense strand
ccuguggacuauauuauug

SEQ ID NO: 532566 - RNA, 19 nt, Homo sapiens
  misc_RNA (1)...(19): siRNA sense strand
gaacauagcuauagaagug

SEQ ID NO: 532567 - RNA, 19 nt, Homo sapiens
  misc_RNA (1)...(19): siRNA sense strand
gaaaugaacugcaggaaga

SEQ ID NO: 532568 - RNA, 19 nt, Homo sapiens
  misc_RNA (1)...(19): siRNA sense strand
ggaagaaacuaaugagaaa

SEQ ID NO: 532569 - RNA, 19 nt, Homo sapiens
  misc_RNA (1)...(19): siRNA sense strand
gaaggaauaugcaggcaaa

SEQ ID NO: 532570 - RNA, 19 nt, Homo sapiens
  misc_RNA (1)...(19): siRNA sense strand
gacaauacauuacgucauu

SEQ ID NO: 532571 - RNA, 19 nt, Homo sapiens
  misc_RNA (1)...(19): siRNA sense strand
gggcauaggcuaccauuua

SEQ ID NO: 532572 - RNA, 19 nt, Homo sapiens
  misc_RNA (1)...(19): siRNA sense strand
gaaaucagacagaguaauu

SEQ ID NO: 532573 - RNA, 19 nt, Homo sapiens
  misc_RNA (1)...(19): siRNA sense strand
ggaaaggacaaacaaauuu

SEQ ID NO: 532574 - RNA, 19 nt, Homo sapiens
  misc_RNA (1)...(19): siRNA sense strand
gagaaaggauccuguguuc

SEQ ID NO: 532575 - RNA, 19 nt, Homo sapiens
  misc_RNA (1)...(19): siRNA sense strand
aagaauggcugauauagaa

SEQ ID NO: 532576 - RNA, 19 nt, Homo sapiens
  misc_RNA (1)...(19): siRNA sense strand
gaugauaacuggagacaca

SEQ ID NO: 532577 - RNA, 19 nt, Homo sapiens
  misc_RNA (1)...(19): siRNA sense strand
gaaagaagccaucagaauc

SEQ ID NO: 532578 - RNA, 19 nt, Homo sapiens
  misc_RNA (1)...(19): siRNA sense strand
gauccuguguucagaauuu

SEQ ID NO: 532579 - RNA, 19 nt, Homo sapiens
  misc_RNA (1)...(19): siRNA sense strand
gcagugagagucaucuuua

SEQ ID NO: 532580 - RNA, 19 nt, Homo sapiens
  misc_RNA (1)...(19): siRNA sense strand
gaaagaaugagaacaguga

SEQ ID NO: 532581 - RNA, 19 nt, Homo sapiens
  misc_RNA (1)...(19): siRNA sense strand
gcucuucucuguuccuuaa

SEQ ID NO: 532582 - RNA, 19 nt, Homo sapiens
  misc_RNA (1)...(19): siRNA sense strand
gaaggaaaaucaacuauug

SEQ ID NO: 532583 - RNA, 19 nt, Homo sapiens
  misc_RNA (1)...(19): siRNA sense strand
caaauccuguguaguauug

SEQ ID NO: 532584 - RNA, 19 nt, Homo sapiens
  misc_RNA (1)...(19): siRNA sense strand
agagucaucuuuacugaua

SEQ ID NO: 532585 - RNA, 19 nt, Homo sapiens
  misc_RNA (1)...(19): siRNA sense strand
ggaggaagauauccagaug

SEQ ID NO: 532586 - RNA, 19 nt, Homo sapiens
  misc_RNA (1)...(19): siRNA sense strand
gcacccaguuuauagauga

SEQ ID NO: 532587 - RNA, 19 nt, Homo sapiens
  misc_RNA (1)...(19): siRNA sense strand
cauuaaugcugcuaucaua

SEQ ID NO: 532588 - RNA, 19 nt, Homo sapiens
  misc_RNA (1)...(19): siRNA sense strand
gcuaauaccuuaccuucau

SEQ ID NO: 532589 - RNA, 19 nt, Homo sapiens
  misc_RNA (1)...(19): siRNA sense strand
ggaaagaagccaucagaau

SEQ ID NO: 532590 - RNA, 19 nt, Homo sapiens
  misc_RNA (1)...(19): siRNA sense strand
ggcauaggcuaccauuuaa

SEQ ID NO: 532591 - RNA, 19 nt, Homo sapiens
  misc_RNA (1)...(19): siRNA sense strand
gaaacuaacuuuugggauu

SEQ ID NO: 532592 - RNA, 19 nt, Homo sapiens
  misc_RNA (1)...(19): siRNA sense strand
ugaaugagguguuucugaa

SEQ ID NO: 532593 - RNA, 19 nt, Homo sapiens
  misc_RNA (1)...(19): siRNA sense strand
gauaguugcuacugaucua

SEQ ID NO: 532594 - RNA, 19 nt, Homo sapiens
  misc_RNA (1)...(19): siRNA sense strand
ucaaaugucuucaauggau

SEQ ID NO: 532595 - RNA, 19 nt, Homo sapiens
  misc_RNA (1)...(19): siRNA sense strand
gaguauggguaccgaagua

SEQ ID NO: 532596 - RNA, 19 nt, Homo sapiens
  misc_RNA (1)...(19): siRNA sense strand
ugaaaggugugguguuuga

SEQ ID NO: 532597 - RNA, 19 nt, Homo sapiens
  misc_RNA (1)...(19): siRNA sense strand
ggaacugucuccaaauaca

SEQ ID NO: 532598 - RNA, 19 nt, Homo sapiens
  misc_RNA (1)...(19): siRNA sense strand
gguguacgcugccgugaaa

SEQ ID NO: 532599 - RNA, 19 nt, Homo sapiens
  misc_RNA (1)...(19): siRNA sense strand
gauuggcucucuauucauu

SEQ ID NO: 532600 - RNA, 19 nt, Homo sapiens
  misc_RNA (1)...(19): siRNA sense strand
guuaauaccucccuucaca

SEQ ID NO: 532601 - RNA, 19 nt, Homo sapiens
  misc_RNA (1)...(19): siRNA sense strand
ucauagaaaucgcaacaaa

SEQ ID NO: 532602 - RNA, 19 nt, Homo sapiens
  misc_RNA (1)...(19): siRNA sense strand
gcaauggacuacuuggaau

SEQ ID NO: 532603 - RNA, 19 nt, Homo sapiens
  misc_RNA (1)...(19): siRNA sense strand
aaaguucgcuuccuaaagu

SEQ ID NO: 532604 - RNA, 19 nt, Homo sapiens
  misc_RNA (1)...(19): siRNA sense strand
uauggaaucuccugaaaga

SEQ ID NO: 532605 - RNA, 19 nt, Homo sapiens
  misc_RNA (1)...(19): siRNA sense strand
gagaguagaagcuuugaaa

SEQ ID NO: 532606 - RNA, 19 nt, Homo sapiens
  misc_RNA (1)...(19): siRNA sense strand
agacagaccuuguuggaau

SEQ ID NO: 532607 - RNA, 19 nt, Homo sapiens
  misc_RNA (1)...(19): siRNA sense strand
gaaccagugucuccagaau

SEQ ID NO: 532608 - RNA, 19 nt, Homo sapiens
  misc_RNA (1)...(19): siRNA sense strand
gaauggacuuugugucuuc

SEQ ID NO: 532609 - RNA, 19 nt, Homo sapiens
  misc_RNA (1)...(19): siRNA sense strand
uugaagagcauauggauua

SEQ ID NO: 532610 - RNA, 19 nt, Homo sapiens
  misc_RNA (1)...(19): siRNA sense strand
uaugcuggcuucauccuua

SEQ ID NO: 532611 - RNA, 19 nt, Homo sapiens
  misc_RNA (1)...(19): siRNA sense strand
ccacuuggauucuucacaa

SEQ ID NO: 532612 - RNA, 19 nt, Homo sapiens
  misc_RNA (1)...(19): siRNA sense strand
gaaagacaauacauuacgu

SEQ ID NO: 532613 - RNA, 19 nt, Homo sapiens
  misc_RNA (1)...(19): siRNA sense strand
cagcauuggugacuacaaa

SEQ ID NO: 532614 - RNA, 19 nt, Homo sapiens
  misc_RNA (1)...(19): siRNA sense strand
uuacagggaucuugauaga

SEQ ID NO: 532615 - RNA, 19 nt, Homo sapiens
  misc_RNA (1)...(19): siRNA sense strand
aaacuuaagugguggacaa

SEQ ID NO: 532616 - RNA, 19 nt, Homo sapiens
  misc_RNA (1)...(19): siRNA sense strand
gaucacagauuuucaauag

SEQ ID NO: 532617 - RNA, 19 nt, Homo sapiens
  misc_RNA (1)...(19): siRNA sense strand
ccagaggagauuauauuua

SEQ ID NO: 532618 - RNA, 19 nt, Homo sapiens
  misc_RNA (1)...(19): siRNA sense strand
ugaaaaggaucacagauuu

SEQ ID NO: 532619 - RNA, 19 nt, Homo sapiens
  misc_RNA (1)...(19): siRNA sense strand
cgugaaaggucucaggaaa

SEQ ID NO: 532620 - RNA, 19 nt, Homo sapiens
  misc_RNA (1)...(19): siRNA sense strand
ggaauggacuuugugucuu

SEQ ID NO: 532621 - RNA, 19 nt, Homo sapiens
  misc_RNA (1)...(19): siRNA sense strand
gaaaggauccuguguucag

SEQ ID NO: 532622 - RNA, 19 nt, Homo sapiens
  misc_RNA (1)...(19): siRNA sense strand
gacagaacauagcuauaga

SEQ ID NO: 532623 - RNA, 19 nt, Homo sapiens
  misc_RNA (1)...(19): siRNA sense strand
ugggaacugucuccaaaua

SEQ ID NO: 532624 - RNA, 19 nt, Homo sapiens
  misc_RNA (1)...(19): siRNA sense strand
guacaggaauuagaaaugg

SEQ ID NO: 532625 - RNA, 19 nt, Homo sapiens
  misc_RNA (1)...(19): siRNA sense strand
ggagaaagagguacaacga

SEQ ID NO: 532626 - RNA, 19 nt, Homo sapiens
  misc_RNA (1)...(19): siRNA sense strand
uggcccagcuuauacauuu

SEQ ID NO: 532627 - RNA, 19 nt, Homo sapiens
  misc_RNA (1)...(19): siRNA sense strand
ccucaaaugucuucaaugg

SEQ ID NO: 532628 - RNA, 19 nt, Homo sapiens
  misc_RNA (1)...(19): siRNA sense strand
ccaagaagcaacgcuauuu

SEQ ID NO: 532629 - RNA, 19 nt, Homo sapiens
  misc_RNA (1)...(19): siRNA sense strand
ggaagguguucauauccaa

SEQ ID NO: 532630 - RNA, 19 nt, Homo sapiens
  misc_RNA (1)...(19): siRNA sense strand
cacaugaaguggagaaaga

SEQ ID NO: 532631 - RNA, 19 nt, Homo sapiens
  misc_RNA (1)...(19): siRNA sense strand
gaaaucgcaacaaaucauu

SEQ ID NO: 532632 - RNA, 19 nt, Homo sapiens
  misc_RNA (1)...(19): siRNA sense strand
caaaauccauaccucauaa

SEQ ID NO: 532633 - RNA, 19 nt, Homo sapiens
  misc_RNA (1)...(19): siRNA sense strand
cauuuaaguuugcaucuga

SEQ ID NO: 532634 - RNA, 19 nt, Homo sapiens
  misc_RNA (1)...(19): siRNA sense strand
ggacaggaagguguucaua

SEQ ID NO: 532635 - RNA, 19 nt, Homo sapiens
  misc_RNA (1)...(19): siRNA sense strand
ccagaucacugcccuccuu

SEQ ID NO: 532636 - RNA, 19 nt, Homo sapiens
  misc_RNA (1)...(19): siRNA sense strand
gcugaaggcucccgugaag

SEQ ID NO: 532637 - RNA, 19 nt, Homo sapiens
  misc_RNA (1)...(19): siRNA sense strand
cuuaggagcuucagaaucu

SEQ ID NO: 532638 - RNA, 19 nt, Homo sapiens
  misc_RNA (1)...(19): siRNA sense strand
gaaagagguacaacgaguu

SEQ ID NO: 532639 - RNA, 19 nt, Homo sapiens
  misc_RNA (1)...(19): siRNA sense strand
ucacacacuuucaagaaug

SEQ ID NO: 532640 - RNA, 19 nt, Homo sapiens
  misc_RNA (1)...(19): siRNA sense strand
gccaagcacugguggaugu

SEQ ID NO: 532641 - RNA, 19 nt, Homo sapiens
  misc_RNA (1)...(19): siRNA sense strand
cauaauagcuacucuuuuc

SEQ ID NO: 532642 - RNA, 19 nt, Homo sapiens
  misc_RNA (1)...(19): siRNA sense strand
ugagaacagugaaugcuau

SEQ ID NO: 532643 - RNA, 19 nt, Homo sapiens
  misc_RNA (1)...(19): siRNA sense strand
gcaggucugugcaauagca

SEQ ID NO: 532644 - RNA, 19 nt, Homo sapiens
  misc_RNA (1)...(19): siRNA sense strand
gauauaggaagccuuguug

SEQ ID NO: 532645 - RNA, 19 nt, Homo sapiens
  misc_RNA (1)...(19): siRNA sense strand
uaaguuugcaucugaauga

SEQ ID NO: 532646 - RNA, 19 nt, Homo sapiens
  misc_RNA (1)...(19): siRNA sense strand
cccaagagauaaugaacaa

SEQ ID NO: 532647 - RNA, 19 nt, Homo sapiens
  misc_RNA (1)...(19): siRNA sense strand
ggcuaugucucaucucuug

SEQ ID NO: 532648 - RNA, 19 nt, Homo sapiens
  misc_RNA (1)...(19): siRNA sense strand
cagcaggucugugcaauag

SEQ ID NO: 532649 - RNA, 19 nt, Homo sapiens
  misc_RNA (1)...(19): siRNA sense strand
ucaugacacuccucaaaug

SEQ ID NO: 532650 - RNA, 19 nt, Homo sapiens
  misc_RNA (1)...(19): siRNA sense strand
gaaaauaucagcaaguuca

SEQ ID NO: 532651 - RNA, 19 nt, Homo sapiens
  misc_RNA (1)...(19): siRNA sense strand
gcuuauacauuuggacuau

SEQ ID NO: 532652 - RNA, 19 nt, Homo sapiens
  misc_RNA (1)...(19): siRNA sense strand
ugagagucaucuuuacuga

SEQ ID NO: 532653 - RNA, 19 nt, Homo sapiens
  misc_RNA (1)...(19): siRNA sense strand
uaucauggccacuuuaaug

SEQ ID NO: 532654 - RNA, 19 nt, Homo sapiens
  misc_RNA (1)...(19): siRNA sense strand
guacugcccucaggagaau

SEQ ID NO: 532655 - RNA, 19 nt, Homo sapiens
  misc_RNA (1)...(19): siRNA sense strand
gaaguuauaggacuguuag

SEQ ID NO: 532656 - RNA, 19 nt, Homo sapiens
  misc_RNA (1)...(19): siRNA sense strand
auucaaauccuguguagua

SEQ ID NO: 532657 - RNA, 19 nt, Homo sapiens
  misc_RNA (1)...(19): siRNA sense strand
gcccagaggagauuauauu

SEQ ID NO: 532658 - RNA, 19 nt, Homo sapiens
  misc_RNA (1)...(19): siRNA sense strand
ccuguggacuauauuauug

SEQ ID NO: 532659 - RNA, 19 nt, Homo sapiens
  misc_RNA (1)...(19): siRNA sense strand
ccauaacaacuuugaauga

SEQ ID NO: 532660 - RNA, 19 nt, Homo sapiens
  misc_RNA (1)...(19): siRNA sense strand
accaaggcauugaggauua

SEQ ID NO: 532661 - RNA, 19 nt, Homo sapiens
  misc_RNA (1)...(19): siRNA sense strand
gaguauaacaucacugguu

SEQ ID NO: 532662 - RNA, 19 nt, Homo sapiens
  misc_RNA (1)...(19): siRNA sense strand
gaauauggaaucuccugaa

SEQ ID NO: 532663 - RNA, 19 nt, Homo sapiens
  misc_RNA (1)...(19): siRNA sense strand
cgugggaacugucuccaaa

SEQ ID NO: 532664 - RNA, 19 nt, Homo sapiens
  misc_RNA (1)...(19): siRNA sense strand
guggaugccuuuggaacua

SEQ ID NO: 532665 - RNA, 19 nt, Homo sapiens
  misc_RNA (1)...(19): siRNA sense strand
cgacagaacauagcuauag

SEQ ID NO: 532666 - RNA, 19 nt, Homo sapiens
  misc_RNA (1)...(19): siRNA sense strand
agagagagcugcaaagauu

SEQ ID NO: 532667 - RNA, 19 nt, Homo sapiens
  misc_RNA (1)...(19): siRNA sense strand
gaagcauccuaaauaauga

SEQ ID NO: 532668 - RNA, 19 nt, Homo sapiens
  misc_RNA (1)...(19): siRNA sense strand
agaagacgcuggauaaguu

SEQ ID NO: 532669 - RNA, 19 nt, Homo sapiens
  misc_RNA (1)...(19): siRNA sense strand
ucaagaggcugaagaagga

SEQ ID NO: 532670 - RNA, 19 nt, Homo sapiens
  misc_RNA (1)...(19): siRNA sense strand
gcaaagauuggaagaagaa

SEQ ID NO: 532671 - RNA, 19 nt, Homo sapiens
  misc_RNA (1)...(19): siRNA sense strand
gacaaaggauacaaacaga

SEQ ID NO: 532672 - RNA, 19 nt, Homo sapiens
  misc_RNA (1)...(19): siRNA sense strand
caaggaaugucaggagaaa

SEQ ID NO: 532673 - RNA, 19 nt, Homo sapiens
  misc_RNA (1)...(19): siRNA sense strand
gguaucaguuacucauuug

SEQ ID NO: 532674 - RNA, 19 nt, Homo sapiens
  misc_RNA (1)...(19): siRNA sense strand
gaaaagaagacgcuggaua

SEQ ID NO: 532675 - RNA, 19 nt, Homo sapiens
  misc_RNA (1)...(19): siRNA sense strand
ugaguggaaucaugaaaug

SEQ ID NO: 532676 - RNA, 19 nt, Homo sapiens
  misc_RNA (1)...(19): siRNA sense strand
acagaacccuugagucuag

SEQ ID NO: 532677 - RNA, 19 nt, Homo sapiens
  misc_RNA (1)...(19): siRNA sense strand
ggaaguaucagguacaaac

SEQ ID NO: 532678 - RNA, 19 nt, Homo sapiens
  misc_RNA (1)...(19): siRNA sense strand
agaagcauccuaaauaaug

SEQ ID NO: 532679 - RNA, 19 nt, Homo sapiens
  misc_RNA (1)...(19): siRNA sense strand
caaaggauacaaacagaau

SEQ ID NO: 532680 - RNA, 19 nt, Homo sapiens
  misc_RNA (1)...(19): siRNA sense strand
gaagacgcuggauaaguuu

SEQ ID NO: 532681 - RNA, 19 nt, Homo sapiens
  misc_RNA (1)...(19): siRNA sense strand
gaagaaggaagaggaggaa

SEQ ID NO: 532682 - RNA, 19 nt, Homo sapiens
  misc_RNA (1)...(19): siRNA sense strand
ugacagaacccuugagucu

SEQ ID NO: 532683 - RNA, 19 nt, Homo sapiens
  misc_RNA (1)...(19): siRNA sense strand
gguacaaacugagagacaa

SEQ ID NO: 532684 - RNA, 19 nt, Homo sapiens
  misc_RNA (1)...(19): siRNA sense strand
gaacaucuacaggcuaauc

SEQ ID NO: 532685 - RNA, 19 nt, Homo sapiens
  misc_RNA (1)...(19): siRNA sense strand
gagagacaaaggauacaaa

SEQ ID NO: 532686 - RNA, 19 nt, Homo sapiens
  misc_RNA (1)...(19): siRNA sense strand
guacaaacugagagacaaa

SEQ ID NO: 532687 - RNA, 19 nt, Homo sapiens
  misc_RNA (1)...(19): siRNA sense strand
agaagcaguuggugagaga

SEQ ID NO: 532688 - RNA, 19 nt, Homo sapiens
  misc_RNA (1)...(19): siRNA sense strand
ugguaucaguuacucauuu

SEQ ID NO: 532689 - RNA, 19 nt, Homo sapiens
  misc_RNA (1)...(19): siRNA sense strand
uugaacaucuacaggcuaa

SEQ ID NO: 532690 - RNA, 19 nt, Homo sapiens
  misc_RNA (1)...(19): siRNA sense strand
ugacaucagagaagagaaa

SEQ ID NO: 532691 - RNA, 19 nt, Homo sapiens
  misc_RNA (1)...(19): siRNA sense strand
aaaagaagacgcuggauaa

SEQ ID NO: 532692 - RNA, 19 nt, Homo sapiens
  misc_RNA (1)...(19): siRNA sense strand
gaauuugaucagcuuagaa

SEQ ID NO: 532693 - RNA, 19 nt, Homo sapiens
  misc_RNA (1)...(19): siRNA sense strand
aaaagcagcuguccugugu

SEQ ID NO: 532694 - RNA, 19 nt, Homo sapiens
  misc_RNA (1)...(19): siRNA sense strand
gacagaacccuugagucua

SEQ ID NO: 532695 - RNA, 19 nt, Homo sapiens
  misc_RNA (1)...(19): siRNA sense strand
aagcagcuguccugugugu

SEQ ID NO: 532696 - RNA, 19 nt, Homo sapiens
  misc_RNA (1)...(19): siRNA sense strand
cggagucaguggucaacaa

SEQ ID NO: 532697 - RNA, 19 nt, Homo sapiens
  misc_RNA (1)...(19): siRNA sense strand
agaauuugaucagcuuaga

SEQ ID NO: 532698 - RNA, 19 nt, Homo sapiens
  misc_RNA (1)...(19): siRNA sense strand
caaguugagcccagacaau

SEQ ID NO: 532699 - RNA, 19 nt, Homo sapiens
  misc_RNA (1)...(19): siRNA sense strand
uugcagaggcugaggauga

SEQ ID NO: 532700 - RNA, 19 nt, Homo sapiens
  misc_RNA (1)...(19): siRNA sense strand
cugcaaagauuggaagaag

SEQ ID NO: 532701 - RNA, 19 nt, Homo sapiens
  misc_RNA (1)...(19): siRNA sense strand
gaaacuccuacucuucugu

SEQ ID NO: 532702 - RNA, 19 nt, Homo sapiens
  misc_RNA (1)...(19): siRNA sense strand
ggagucaguggucaacaau

SEQ ID NO: 532703 - RNA, 19 nt, Homo sapiens
  misc_RNA (1)...(19): siRNA sense strand
gagagagcugcaaagauug

SEQ ID NO: 532704 - RNA, 19 nt, Homo sapiens
  misc_RNA (1)...(19): siRNA sense strand
aaacuccuacucuucugua

SEQ ID NO: 532705 - RNA, 19 nt, Homo sapiens
  misc_RNA (1)...(19): siRNA sense strand
gcaucuggccaacauagug

SEQ ID NO: 532706 - RNA, 19 nt, Homo sapiens
  misc_RNA (1)...(19): siRNA sense strand
agacaaaggauacaaacag

SEQ ID NO: 532707 - RNA, 19 nt, Homo sapiens
  misc_RNA (1)...(19): siRNA sense strand
caaacugagagacaaagga

SEQ ID NO: 532708 - RNA, 19 nt, Homo sapiens
  misc_RNA (1)...(19): siRNA sense strand
aagauuggaagaagaagaa

SEQ ID NO: 532709 - RNA, 19 nt, Homo sapiens
  misc_RNA (1)...(19): siRNA sense strand
aaacugagagacaaaggau

SEQ ID NO: 532710 - RNA, 19 nt, Homo sapiens
  misc_RNA (1)...(19): siRNA sense strand
acaaugggaagaagagaga

SEQ ID NO: 532711 - RNA, 19 nt, Homo sapiens
  misc_RNA (1)...(19): siRNA sense strand
gcagaagcaguuggugaga

SEQ ID NO: 532712 - RNA, 19 nt, Homo sapiens
  misc_RNA (1)...(19): siRNA sense strand
ggaagaagaagaaaagaag

SEQ ID NO: 532713 - RNA, 19 nt, Homo sapiens
  misc_RNA (1)...(19): siRNA sense strand
gagacaaaggauacaaaca

SEQ ID NO: 532714 - RNA, 19 nt, Homo sapiens
  misc_RNA (1)...(19): siRNA sense strand
ucaaggaaugucaggagaa

SEQ ID NO: 532715 - RNA, 19 nt, Homo sapiens
  misc_RNA (1)...(19): siRNA sense strand
agucaguggucaacaaugg

SEQ ID NO: 532716 - RNA, 19 nt, Homo sapiens
  misc_RNA (1)...(19): siRNA sense strand
ugcaaagauuggaagaaga

SEQ ID NO: 532717 - RNA, 19 nt, Homo sapiens
  misc_RNA (1)...(19): siRNA sense strand
auaaugaggagcagagaga

SEQ ID NO: 532718 - RNA, 19 nt, Homo sapiens
  misc_RNA (1)...(19): siRNA sense strand
gaaggaagaggaggaagcu

SEQ ID NO: 532719 - RNA, 19 nt, Homo sapiens
  misc_RNA (1)...(19): siRNA sense strand
gaagaggaggaagcugaga

SEQ ID NO: 532720 - RNA, 19 nt, Homo sapiens
  misc_RNA (1)...(19): siRNA sense strand
ccaucugccuggagcuguu

SEQ ID NO: 532721 - RNA, 19 nt, Homo sapiens
  misc_RNA (1)...(19): siRNA sense strand
aacagaauuugaucagcuu

SEQ ID NO: 532722 - RNA, 19 nt, Homo sapiens
  misc_RNA (1)...(19): siRNA sense strand
gaaguaucagguacaaacu

SEQ ID NO: 532723 - RNA, 19 nt, Homo sapiens
  misc_RNA (1)...(19): siRNA sense strand
aaaucuugcuuaacguaca

SEQ ID NO: 532724 - RNA, 19 nt, Homo sapiens
  misc_RNA (1)...(19): siRNA sense strand
acaaaggauacaaacagaa

SEQ ID NO: 532725 - RNA, 19 nt, Homo sapiens
  misc_RNA (1)...(19): siRNA sense strand
aaucuugcuuaacguacaa

SEQ ID NO: 532726 - RNA, 19 nt, Homo sapiens
  misc_RNA (1)...(19): siRNA sense strand
ugaccagcaugggaggaaa

SEQ ID NO: 532727 - RNA, 19 nt, Homo sapiens
  misc_RNA (1)...(19): siRNA sense strand
ggcugaggaugagcuaguu

SEQ ID NO: 532728 - RNA, 19 nt, Homo sapiens
  misc_RNA (1)...(19): siRNA sense strand
cagagagagcugcaaagau

SEQ ID NO: 532729 - RNA, 19 nt, Homo sapiens
  misc_RNA (1)...(19): siRNA sense strand
acucaaggaggucaaguug

SEQ ID NO: 532730 - RNA, 19 nt, Homo sapiens
  misc_RNA (1)...(19): siRNA sense strand
gaagaagaagaaaagaaga

SEQ ID NO: 532731 - RNA, 19 nt, Homo sapiens
  misc_RNA (1)...(19): siRNA sense strand
ccagacaaugggaagaaga

SEQ ID NO: 532732 - RNA, 19 nt, Homo sapiens
  misc_RNA (1)...(19): siRNA sense strand
cagcaucuggccaacauag

SEQ ID NO: 532733 - RNA, 19 nt, Homo sapiens
  misc_RNA (1)...(19): siRNA sense strand
gacucaaggaggucaaguu

SEQ ID NO: 532734 - RNA, 19 nt, Homo sapiens
  misc_RNA (1)...(19): siRNA sense strand
aaagauuggaagaagaaga

SEQ ID NO: 532735 - RNA, 19 nt, Homo sapiens
  misc_RNA (1)...(19): siRNA sense strand
guuacucauuugaacaucu

SEQ ID NO: 532736 - RNA, 19 nt, Homo sapiens
  misc_RNA (1)...(19): siRNA sense strand
ugaguggaaucaugaaaug

SEQ ID NO: 532737 - RNA, 19 nt, Homo sapiens
  misc_RNA (1)...(19): siRNA sense strand
agagagagcugcaaagauu

SEQ ID NO: 532738 - RNA, 19 nt, Homo sapiens
  misc_RNA (1)...(19): siRNA sense strand
gaagcauccuaaauaauga

SEQ ID NO: 532739 - RNA, 19 nt, Homo sapiens
  misc_RNA (1)...(19): siRNA sense strand
agaagacgcuggauaaguu

SEQ ID NO: 532740 - RNA, 19 nt, Homo sapiens
  misc_RNA (1)...(19): siRNA sense strand
ucaagaggcugaagaagga

SEQ ID NO: 532741 - RNA, 19 nt, Homo sapiens
  misc_RNA (1)...(19): siRNA sense strand
gcaaagauuggaagaagaa

SEQ ID NO: 532742 - RNA, 19 nt, Homo sapiens
  misc_RNA (1)...(19): siRNA sense strand
gacaaaggauacaaacaga

SEQ ID NO: 532743 - RNA, 19 nt, Homo sapiens
  misc_RNA (1)...(19): siRNA sense strand
caaggaaugucaggagaaa

SEQ ID NO: 532744 - RNA, 19 nt, Homo sapiens
  misc_RNA (1)...(19): siRNA sense strand
gguaucaguuacucauuug

SEQ ID NO: 532745 - RNA, 19 nt, Homo sapiens
  misc_RNA (1)...(19): siRNA sense strand
gaaaagaagacgcuggaua

SEQ ID NO: 532746 - RNA, 19 nt, Homo sapiens
  misc_RNA (1)...(19): siRNA sense strand
ugaguggaaucaugaaaug

SEQ ID NO: 532747 - RNA, 19 nt, Homo sapiens
  misc_RNA (1)...(19): siRNA sense strand
acagaacccuugagucuag

SEQ ID NO: 532748 - RNA, 19 nt, Homo sapiens
  misc_RNA (1)...(19): siRNA sense strand
ggaaguaucagguacaaac

SEQ ID NO: 532749 - RNA, 19 nt, Homo sapiens
  misc_RNA (1)...(19): siRNA sense strand
agaagcauccuaaauaaug

SEQ ID NO: 532750 - RNA, 19 nt, Homo sapiens
  misc_RNA (1)...(19): siRNA sense strand
caaaggauacaaacagaau

SEQ ID NO: 532751 - RNA, 19 nt, Homo sapiens
  misc_RNA (1)...(19): siRNA sense strand
gaagacgcuggauaaguuu

SEQ ID NO: 532752 - RNA, 19 nt, Homo sapiens
  misc_RNA (1)...(19): siRNA sense strand
gaagaaggaagaggaggaa

SEQ ID NO: 532753 - RNA, 19 nt, Homo sapiens
  misc_RNA (1)...(19): siRNA sense strand
ugacagaacccuugagucu

SEQ ID NO: 532754 - RNA, 19 nt, Homo sapiens
  misc_RNA (1)...(19): siRNA sense strand
gguacaaacugagagacaa

SEQ ID NO: 532755 - RNA, 19 nt, Homo sapiens
  misc_RNA (1)...(19): siRNA sense strand
gaacaucuacaggcuaauc

SEQ ID NO: 532756 - RNA, 19 nt, Homo sapiens
  misc_RNA (1)...(19): siRNA sense strand
gagagacaaaggauacaaa

SEQ ID NO: 532757 - RNA, 19 nt, Homo sapiens
  misc_RNA (1)...(19): siRNA sense strand
guacaaacugagagacaaa

SEQ ID NO: 532758 - RNA, 19 nt, Homo sapiens
  misc_RNA (1)...(19): siRNA sense strand
agaagcaguuggugagaga

SEQ ID NO: 532759 - RNA, 19 nt, Homo sapiens
  misc_RNA (1)...(19): siRNA sense strand
ugguaucaguuacucauuu

SEQ ID NO: 532760 - RNA, 19 nt, Homo sapiens
  misc_RNA (1)...(19): siRNA sense strand
uugaacaucuacaggcuaa

SEQ ID NO: 532761 - RNA, 19 nt, Homo sapiens
  misc_RNA (1)...(19): siRNA sense strand
ugacaucagagaagagaaa

SEQ ID NO: 532762 - RNA, 19 nt, Homo sapiens
  misc_RNA (1)...(19): siRNA sense strand
aaaagaagacgcuggauaa

SEQ ID NO: 532763 - RNA, 19 nt, Homo sapiens
  misc_RNA (1)...(19): siRNA sense strand
gaauuugaucagcuuagaa

SEQ ID NO: 532764 - RNA, 19 nt, Homo sapiens
  misc_RNA (1)...(19): siRNA sense strand
aaaagcagcuguccugugu

SEQ ID NO: 532765 - RNA, 19 nt, Homo sapiens
  misc_RNA (1)...(19): siRNA sense strand
gacagaacccuugagucua

SEQ ID NO: 532766 - RNA, 19 nt, Homo sapiens
  misc_RNA (1)...(19): siRNA sense strand
aagcagcuguccugugugu

SEQ ID NO: 532767 - RNA, 19 nt, Homo sapiens
  misc_RNA (1)...(19): siRNA sense strand
cggagucaguggucaacaa

SEQ ID NO: 532768 - RNA, 19 nt, Homo sapiens
  misc_RNA (1)...(19): siRNA sense strand
agaauuugaucagcuuaga

SEQ ID NO: 532769 - RNA, 19 nt, Homo sapiens
  misc_RNA (1)...(19): siRNA sense strand
caaguugagcccagacaau

SEQ ID NO: 532770 - RNA, 19 nt, Homo sapiens
  misc_RNA (1)...(19): siRNA sense strand
uugcagaggcugaggauga

SEQ ID NO: 532771 - RNA, 19 nt, Homo sapiens
  misc_RNA (1)...(19): siRNA sense strand
cugcaaagauuggaagaag

SEQ ID NO: 532772 - RNA, 19 nt, Homo sapiens
  misc_RNA (1)...(19): siRNA sense strand
gaaacuccuacucuucugu

SEQ ID NO: 532773 - RNA, 19 nt, Homo sapiens
  misc_RNA (1)...(19): siRNA sense strand
ggagucaguggucaacaau

SEQ ID NO: 532774 - RNA, 19 nt, Homo sapiens
  misc_RNA (1)...(19): siRNA sense strand
gagagagcugcaaagauug

SEQ ID NO: 532775 - RNA, 19 nt, Homo sapiens
  misc_RNA (1)...(19): siRNA sense strand
aaacuccuacucuucugua

SEQ ID NO: 532776 - RNA, 19 nt, Homo sapiens
  misc_RNA (1)...(19): siRNA sense strand
gcaucuggccaacauagug

SEQ ID NO: 532777 - RNA, 19 nt, Homo sapiens
  misc_RNA (1)...(19): siRNA sense strand
agacaaaggauacaaacag

SEQ ID NO: 532778 - RNA, 19 nt, Homo sapiens
  misc_RNA (1)...(19): siRNA sense strand
caaacugagagacaaagga

SEQ ID NO: 532779 - RNA, 19 nt, Homo sapiens
  misc_RNA (1)...(19): siRNA sense strand
aagauuggaagaagaagaa

SEQ ID NO: 532780 - RNA, 19 nt, Homo sapiens
  misc_RNA (1)...(19): siRNA sense strand
aaacugagagacaaaggau

SEQ ID NO: 532781 - RNA, 19 nt, Homo sapiens
  misc_RNA (1)...(19): siRNA sense strand
acaaugggaagaagagaga

SEQ ID NO: 532782 - RNA, 19 nt, Homo sapiens
  misc_RNA (1)...(19): siRNA sense strand
gcagaagcaguuggugaga

SEQ ID NO: 532783 - RNA, 19 nt, Homo sapiens
  misc_RNA (1)...(19): siRNA sense strand
ggaagaagaagaaaagaag

SEQ ID NO: 532784 - RNA, 19 nt, Homo sapiens
  misc_RNA (1)...(19): siRNA sense strand
gagacaaaggauacaaaca

SEQ ID NO: 532785 - RNA, 19 nt, Homo sapiens
  misc_RNA (1)...(19): siRNA sense strand
ucaaggaaugucaggagaa

SEQ ID NO: 532786 - RNA, 19 nt, Homo sapiens
  misc_RNA (1)...(19): siRNA sense strand
agucaguggucaacaaugg

SEQ ID NO: 532787 - RNA, 19 nt, Homo sapiens
  misc_RNA (1)...(19): siRNA sense strand
ugcaaagauuggaagaaga

SEQ ID NO: 532788 - RNA, 19 nt, Homo sapiens
  misc_RNA (1)...(19): siRNA sense strand
auaaugaggagcagagaga

SEQ ID NO: 532789 - RNA, 19 nt, Homo sapiens
  misc_RNA (1)...(19): siRNA sense strand
gaaggaagaggaggaagcu

SEQ ID NO: 532790 - RNA, 19 nt, Homo sapiens
  misc_RNA (1)...(19): siRNA sense strand
gaagaggaggaagcugaga

SEQ ID NO: 532791 - RNA, 19 nt, Homo sapiens
  misc_RNA (1)...(19): siRNA sense strand
ccaucugccuggagcuguu

SEQ ID NO: 532792 - RNA, 19 nt, Homo sapiens
  misc_RNA (1)...(19): siRNA sense strand
aacagaauuugaucagcuu

SEQ ID NO: 532793 - RNA, 19 nt, Homo sapiens
  misc_RNA (1)...(19): siRNA sense strand
gaaguaucagguacaaacu

SEQ ID NO: 532794 - RNA, 19 nt, Homo sapiens
  misc_RNA (1)...(19): siRNA sense strand
aaaucuugcuuaacguaca

SEQ ID NO: 532795 - RNA, 19 nt, Homo sapiens
  misc_RNA (1)...(19): siRNA sense strand
acaaaggauacaaacagaa

SEQ ID NO: 532796 - RNA, 19 nt, Homo sapiens
  misc_RNA (1)...(19): siRNA sense strand
aaucuugcuuaacguacaa

SEQ ID NO: 532797 - RNA, 19 nt, Homo sapiens
  misc_RNA (1)...(19): siRNA sense strand
ugaccagcaugggaggaaa

SEQ ID NO: 532798 - RNA, 19 nt, Homo sapiens
  misc_RNA (1)...(19): siRNA sense strand
ggcugaggaugagcuaguu

SEQ ID NO: 532799 - RNA, 19 nt, Homo sapiens
  misc_RNA (1)...(19): siRNA sense strand
cagagagagcugcaaagau

SEQ ID NO: 532800 - RNA, 19 nt, Homo sapiens
  misc_RNA (1)...(19): siRNA sense strand
acucaaggaggucaaguug

SEQ ID NO: 532801 - RNA, 19 nt, Homo sapiens
  misc_RNA (1)...(19): siRNA sense strand
gaagaagaagaaaagaaga

SEQ ID NO: 532802 - RNA, 19 nt, Homo sapiens
  misc_RNA (1)...(19): siRNA sense strand
ccagacaaugggaagaaga

SEQ ID NO: 532803 - RNA, 19 nt, Homo sapiens
  misc_RNA (1)...(19): siRNA sense strand
cagcaucuggccaacauag

SEQ ID NO: 532804 - RNA, 19 nt, Homo sapiens
  misc_RNA (1)...(19): siRNA sense strand
gacucaaggaggucaaguu

SEQ ID NO: 532805 - RNA, 19 nt, Homo sapiens
  misc_RNA (1)...(19): siRNA sense strand
aaagauuggaagaagaaga

SEQ ID NO: 532806 - RNA, 19 nt, Homo sapiens
  misc_RNA (1)...(19): siRNA sense strand
guuacucauuugaacaucu

SEQ ID NO: 532807 - RNA, 19 nt, Homo sapiens
  misc_RNA (1)...(19): siRNA sense strand
gaauggagcucgaauuuaa

SEQ ID NO: 532808 - RNA, 19 nt, Homo sapiens
  misc_RNA (1)...(19): siRNA sense strand
gaagaaaucucgcgggaaa

SEQ ID NO: 532809 - RNA, 19 nt, Homo sapiens
  misc_RNA (1)...(19): siRNA sense strand
ggagagaaguugaauuaaa

SEQ ID NO: 532810 - RNA, 19 nt, Homo sapiens
  misc_RNA (1)...(19): siRNA sense strand
ccaaacagcuuauacuauu

SEQ ID NO: 532811 - RNA, 19 nt, Homo sapiens
  misc_RNA (1)...(19): siRNA sense strand
cgucauagaugccauguua

SEQ ID NO: 532812 - RNA, 19 nt, Homo sapiens
  misc_RNA (1)...(19): siRNA sense strand
gaaagcaaaugacaacuug

SEQ ID NO: 532813 - RNA, 19 nt, Homo sapiens
  misc_RNA (1)...(19): siRNA sense strand
gaaagaaagucagcaauca

SEQ ID NO: 532814 - RNA, 19 nt, Homo sapiens
  misc_RNA (1)...(19): siRNA sense strand
gaucaagggugaaguguga

SEQ ID NO: 532815 - RNA, 19 nt, Homo sapiens
  misc_RNA (1)...(19): siRNA sense strand
gaauaugucuucuuugugu

SEQ ID NO: 532816 - RNA, 19 nt, Homo sapiens
  misc_RNA (1)...(19): siRNA sense strand
gaacuggucuacaaagaug

SEQ ID NO: 532817 - RNA, 19 nt, Homo sapiens
  misc_RNA (1)...(19): siRNA sense strand
caacuuggauggcaugauu

SEQ ID NO: 532818 - RNA, 19 nt, Homo sapiens
  misc_RNA (1)...(19): siRNA sense strand
gcagaaauaucagcuagaa

SEQ ID NO: 532819 - RNA, 19 nt, Homo sapiens
  misc_RNA (1)...(19): siRNA sense strand
gaacacaauuccaccauag

SEQ ID NO: 532820 - RNA, 19 nt, Homo sapiens
  misc_RNA (1)...(19): siRNA sense strand
caacaacaauggucguauu

SEQ ID NO: 532821 - RNA, 19 nt, Homo sapiens
  misc_RNA (1)...(19): siRNA sense strand
gaaaugugcuagaacugaa

SEQ ID NO: 532822 - RNA, 19 nt, Homo sapiens
  misc_RNA (1)...(19): siRNA sense strand
gaagaaaugugcuagaacu

SEQ ID NO: 532823 - RNA, 19 nt, Homo sapiens
  misc_RNA (1)...(19): siRNA sense strand
gcagugacuuguggaaaua

SEQ ID NO: 532824 - RNA, 19 nt, Homo sapiens
  misc_RNA (1)...(19): siRNA sense strand
ccaaaguggucaagaauau

SEQ ID NO: 532825 - RNA, 19 nt, Homo sapiens
  misc_RNA (1)...(19): siRNA sense strand
gagagaaguugaauuaaag

SEQ ID NO: 532826 - RNA, 19 nt, Homo sapiens
  misc_RNA (1)...(19): siRNA sense strand
gaaaucacuugguuuaaag

SEQ ID NO: 532827 - RNA, 19 nt, Homo sapiens
  misc_RNA (1)...(19): siRNA sense strand
uagaugagcugcuuaagga

SEQ ID NO: 532828 - RNA, 19 nt, Homo sapiens
  misc_RNA (1)...(19): siRNA sense strand
ccagaaaucacuugguuua

SEQ ID NO: 532829 - RNA, 19 nt, Homo sapiens
  misc_RNA (1)...(19): siRNA sense strand
ggaauuagaugagcugcuu

SEQ ID NO: 532830 - RNA, 19 nt, Homo sapiens
  misc_RNA (1)...(19): siRNA sense strand
ggagaggagcaacgaauua

SEQ ID NO: 532831 - RNA, 19 nt, Homo sapiens
  misc_RNA (1)...(19): siRNA sense strand
gaaguaaacaaaccaaaga

SEQ ID NO: 532832 - RNA, 19 nt, Homo sapiens
  misc_RNA (1)...(19): siRNA sense strand
gugccaaucuuccauguaa

SEQ ID NO: 532833 - RNA, 19 nt, Homo sapiens
  misc_RNA (1)...(19): siRNA sense strand
acacagaaguuaauuguca

SEQ ID NO: 532834 - RNA, 19 nt, Homo sapiens
  misc_RNA (1)...(19): siRNA sense strand
ccauguaacuuuaaugaga

SEQ ID NO: 532835 - RNA, 19 nt, Homo sapiens
  misc_RNA (1)...(19): siRNA sense strand
ucagagauuugagguaaua

SEQ ID NO: 532836 - RNA, 19 nt, Homo sapiens
  misc_RNA (1)...(19): siRNA sense strand
gggaugaggccauuuauga

SEQ ID NO: 532837 - RNA, 19 nt, Homo sapiens
  misc_RNA (1)...(19): siRNA sense strand
ggagaaggauuuauugacu

SEQ ID NO: 532838 - RNA, 19 nt, Homo sapiens
  misc_RNA (1)...(19): siRNA sense strand
ccaaggauauagaguuuau

SEQ ID NO: 532839 - RNA, 19 nt, Homo sapiens
  misc_RNA (1)...(19): siRNA sense strand
uaagacagucagcaaauua

SEQ ID NO: 532840 - RNA, 19 nt, Homo sapiens
  misc_RNA (1)...(19): siRNA sense strand
caaauaaugugggagaaau

SEQ ID NO: 532841 - RNA, 19 nt, Homo sapiens
  misc_RNA (1)...(19): siRNA sense strand
gcaguggucuuuaucaucu

SEQ ID NO: 532842 - RNA, 19 nt, Homo sapiens
  misc_RNA (1)...(19): siRNA sense strand
cagaugaaauggaauuaga

SEQ ID NO: 532843 - RNA, 19 nt, Homo sapiens
  misc_RNA (1)...(19): siRNA sense strand
caacaauggucguauuaag

SEQ ID NO: 532844 - RNA, 19 nt, Homo sapiens
  misc_RNA (1)...(19): siRNA sense strand
gaacuggagucuucauaac

SEQ ID NO: 532845 - RNA, 19 nt, Homo sapiens
  misc_RNA (1)...(19): siRNA sense strand
ggaauggagcucgaauuua

SEQ ID NO: 532846 - RNA, 19 nt, Homo sapiens
  misc_RNA (1)...(19): siRNA sense strand
gagagaaugucacaggaau

SEQ ID NO: 532847 - RNA, 19 nt, Homo sapiens
  misc_RNA (1)...(19): siRNA sense strand
cgaauguaaucgcauauga

SEQ ID NO: 532848 - RNA, 19 nt, Homo sapiens
  misc_RNA (1)...(19): siRNA sense strand
guaagacagucagcaaauu

SEQ ID NO: 532849 - RNA, 19 nt, Homo sapiens
  misc_RNA (1)...(19): siRNA sense strand
gaacugaggcgccuuaacu

SEQ ID NO: 532850 - RNA, 19 nt, Homo sapiens
  misc_RNA (1)...(19): siRNA sense strand
agaaggaucugauuacauc

SEQ ID NO: 532851 - RNA, 19 nt, Homo sapiens
  misc_RNA (1)...(19): siRNA sense strand
ggaguugccucuuucaucu

SEQ ID NO: 532852 - RNA, 19 nt, Homo sapiens
  misc_RNA (1)...(19): siRNA sense strand
gagaaggauuuauugacuu

SEQ ID NO: 532853 - RNA, 19 nt, Homo sapiens
  misc_RNA (1)...(19): siRNA sense strand
gaauagauacgcgaaugua

SEQ ID NO: 532854 - RNA, 19 nt, Homo sapiens
  misc_RNA (1)...(19): siRNA sense strand
gauuugagguaauagaguu

SEQ ID NO: 532855 - RNA, 19 nt, Homo sapiens
  misc_RNA (1)...(19): siRNA sense strand
ggaagugacuaugugaaug

SEQ ID NO: 532856 - RNA, 19 nt, Homo sapiens
  misc_RNA (1)...(19): siRNA sense strand
ugaagagucugaccaagga

SEQ ID NO: 532857 - RNA, 19 nt, Homo sapiens
  misc_RNA (1)...(19): siRNA sense strand
gaauguguggccucaaaua

SEQ ID NO: 532858 - RNA, 19 nt, Homo sapiens
  misc_RNA (1)...(19): siRNA sense strand
gaaagaaugagauaugaag

SEQ ID NO: 532859 - RNA, 19 nt, Homo sapiens
  misc_RNA (1)...(19): siRNA sense strand
gaacaugcagagucuaaga

SEQ ID NO: 532860 - RNA, 19 nt, Homo sapiens
  misc_RNA (1)...(19): siRNA sense strand
gagcaacgaauuaccauug

SEQ ID NO: 532861 - RNA, 19 nt, Homo sapiens
  misc_RNA (1)...(19): siRNA sense strand
gaugauaugccaauaggaa

SEQ ID NO: 532862 - RNA, 19 nt, Homo sapiens
  misc_RNA (1)...(19): siRNA sense strand
caagauaccaguacuuugu

SEQ ID NO: 532863 - RNA, 19 nt, Homo sapiens
  misc_RNA (1)...(19): siRNA sense strand
cagauaccauugccaacua

SEQ ID NO: 532864 - RNA, 19 nt, Homo sapiens
  misc_RNA (1)...(19): siRNA sense strand
gaaccugagucugaaacaa

SEQ ID NO: 532865 - RNA, 19 nt, Homo sapiens
  misc_RNA (1)...(19): siRNA sense strand
gaacacaacgaccagcuau

SEQ ID NO: 532866 - RNA, 19 nt, Homo sapiens
  misc_RNA (1)...(19): siRNA sense strand
gagagaaaugucaccaaua

SEQ ID NO: 532867 - RNA, 19 nt, Homo sapiens
  misc_RNA (1)...(19): siRNA sense strand
ugggagagaaguugaauua

SEQ ID NO: 532868 - RNA, 19 nt, Homo sapiens
  misc_RNA (1)...(19): siRNA sense strand
ggaaagaaagucagcaauc

SEQ ID NO: 532869 - RNA, 19 nt, Homo sapiens
  misc_RNA (1)...(19): siRNA sense strand
uuaaggagauaucuaggaa

SEQ ID NO: 532870 - RNA, 19 nt, Homo sapiens
  misc_RNA (1)...(19): siRNA sense strand
ugaaggaguuguagauauc

SEQ ID NO: 532871 - RNA, 19 nt, Homo sapiens
  misc_RNA (1)...(19): siRNA sense strand
gaagcugacacaaauagaa

SEQ ID NO: 532872 - RNA, 19 nt, Homo sapiens
  misc_RNA (1)...(19): siRNA sense strand
guucgaacauuugcacuuu

SEQ ID NO: 532873 - RNA, 19 nt, Homo sapiens
  misc_RNA (1)...(19): siRNA sense strand
cuacucggauuaugaauuc

SEQ ID NO: 532874 - RNA, 19 nt, Homo sapiens
  misc_RNA (1)...(19): siRNA sense strand
gaaaugggcagagagaaau

SEQ ID NO: 532875 - RNA, 19 nt, Homo sapiens
  misc_RNA (1)...(19): siRNA sense strand
uauccaugaugcacuguua

SEQ ID NO: 532876 - RNA, 19 nt, Homo sapiens
  misc_RNA (1)...(19): siRNA sense strand
ggugaagugugaccaguau

SEQ ID NO: 532877 - RNA, 19 nt, Homo sapiens
  misc_RNA (1)...(19): siRNA sense strand
ccaggaauaugagucaauu

SEQ ID NO: 532878 - RNA, 19 nt, Homo sapiens
  misc_RNA (1)...(19): siRNA sense strand
gcagcauaccgaacaauaa

SEQ ID NO: 532879 - RNA, 19 nt, Homo sapiens
  misc_RNA (1)...(19): siRNA sense strand
ugaaguaccugcaaaugag

SEQ ID NO: 532880 - RNA, 19 nt, Homo sapiens
  misc_RNA (1)...(19): siRNA sense strand
gaagcaaaaugccuauauu

SEQ ID NO: 532881 - RNA, 19 nt, Homo sapiens
  misc_RNA (1)...(19): siRNA sense strand
agagaaaugucaccaauac

SEQ ID NO: 532882 - RNA, 19 nt, Homo sapiens
  misc_RNA (1)...(19): siRNA sense strand
ggaguuggccggacugguu

SEQ ID NO: 532883 - RNA, 19 nt, Homo sapiens
  misc_RNA (1)...(19): siRNA sense strand
cauuugcacuuuacaagaa

SEQ ID NO: 532884 - RNA, 19 nt, Homo sapiens
  misc_RNA (1)...(19): siRNA sense strand
gaacauuugcacuuuacaa

SEQ ID NO: 532885 - RNA, 19 nt, Homo sapiens
  misc_RNA (1)...(19): siRNA sense strand
uaacgcugcuugauacugu

SEQ ID NO: 532886 - RNA, 19 nt, Homo sapiens
  misc_RNA (1)...(19): siRNA sense strand
ggucaccaaugccuuaugu

SEQ ID NO: 532887 - RNA, 19 nt, Homo sapiens
  misc_RNA (1)...(19): siRNA sense strand
gaaagucagcaaucagaga

SEQ ID NO: 532888 - RNA, 19 nt, Homo sapiens
  misc_RNA (1)...(19): siRNA sense strand
gaguagaaggaucugauua

SEQ ID NO: 532889 - RNA, 19 nt, Homo sapiens
  misc_RNA (1)...(19): siRNA sense strand
uaccaagccugccuucauu

SEQ ID NO: 532890 - RNA, 19 nt, Homo sapiens
  misc_RNA (1)...(19): siRNA sense strand
ugucaaagccuuacccaaa

SEQ ID NO: 532891 - RNA, 19 nt, Homo sapiens
  misc_RNA (1)...(19): siRNA sense strand
gcuacaagcaucacacuga

SEQ ID NO: 532892 - RNA, 19 nt, Homo sapiens
  misc_RNA (1)...(19): siRNA sense strand
agacagaggaucaauauca

SEQ ID NO: 532893 - RNA, 19 nt, Homo sapiens
  misc_RNA (1)...(19): siRNA sense strand
cagaacacccuacaccuuu

SEQ ID NO: 532894 - RNA, 19 nt, Homo sapiens
  misc_RNA (1)...(19): siRNA sense strand
gaagagagaagugagacaa

SEQ ID NO: 532895 - RNA, 19 nt, Homo sapiens
  misc_RNA (1)...(19): siRNA sense strand
gaagggaucccaggaagug

SEQ ID NO: 532896 - RNA, 19 nt, Homo sapiens
  misc_RNA (1)...(19): siRNA sense strand
aaucacggaugaagaagaa

SEQ ID NO: 532897 - RNA, 19 nt, Homo sapiens
  misc_RNA (1)...(19): siRNA sense strand
caagcauuaugguggauuu

SEQ ID NO: 532898 - RNA, 19 nt, Homo sapiens
  misc_RNA (1)...(19): siRNA sense strand
cugagccuguuucuuauua

SEQ ID NO: 532899 - RNA, 19 nt, Homo sapiens
  misc_RNA (1)...(19): siRNA sense strand
acuaugaacuggucuacaa

SEQ ID NO: 532900 - RNA, 19 nt, Homo sapiens
  misc_RNA (1)...(19): siRNA sense strand
gggcagcuuugaccacuau

SEQ ID NO: 532901 - RNA, 19 nt, Homo sapiens
  misc_RNA (1)...(19): siRNA sense strand
aaugagauaugaaggaguu

SEQ ID NO: 532902 - RNA, 19 nt, Homo sapiens
  misc_RNA (1)...(19): siRNA sense strand
ggaaagaaugagauaugaa

SEQ ID NO: 532903 - RNA, 19 nt, Homo sapiens
  misc_RNA (1)...(19): siRNA sense strand
guaaggcaguuccaguuca

SEQ ID NO: 532904 - RNA, 19 nt, Homo sapiens
  misc_RNA (1)...(19): siRNA sense strand
guagaaggaucugauuaca

SEQ ID NO: 532905 - RNA, 19 nt, Homo sapiens
  misc_RNA (1)...(19): siRNA sense strand
gccaaucuuccauguaaua

SEQ ID NO: 532906 - RNA, 19 nt, Homo sapiens
  misc_RNA (1)...(19): siRNA sense strand
ccacggacucguucaagua

SEQ ID NO: 532907 - RNA, 19 nt, Homo sapiens
  misc_RNA (1)...(19): siRNA sense strand
gaauggagcucgaauuuaa

SEQ ID NO: 532908 - RNA, 19 nt, Homo sapiens
  misc_RNA (1)...(19): siRNA sense strand
gaagaaaucucgcgggaaa

SEQ ID NO: 532909 - RNA, 19 nt, Homo sapiens
  misc_RNA (1)...(19): siRNA sense strand
ggagagaaguugaauuaaa

SEQ ID NO: 532910 - RNA, 19 nt, Homo sapiens
  misc_RNA (1)...(19): siRNA sense strand
ccaaacagcuuauacuauu

SEQ ID NO: 532911 - RNA, 19 nt, Homo sapiens
  misc_RNA (1)...(19): siRNA sense strand
cgucauagaugccauguua

SEQ ID NO: 532912 - RNA, 19 nt, Homo sapiens
  misc_RNA (1)...(19): siRNA sense strand
gaaagcaaaugacaacuug

SEQ ID NO: 532913 - RNA, 19 nt, Homo sapiens
  misc_RNA (1)...(19): siRNA sense strand
gaaagaaagucagcaauca

SEQ ID NO: 532914 - RNA, 19 nt, Homo sapiens
  misc_RNA (1)...(19): siRNA sense strand
gaucaagggugaaguguga

SEQ ID NO: 532915 - RNA, 19 nt, Homo sapiens
  misc_RNA (1)...(19): siRNA sense strand
gaauaugucuucuuugugu

SEQ ID NO: 532916 - RNA, 19 nt, Homo sapiens
  misc_RNA (1)...(19): siRNA sense strand
gaacuggucuacaaagaug

SEQ ID NO: 532917 - RNA, 19 nt, Homo sapiens
  misc_RNA (1)...(19): siRNA sense strand
caacuuggauggcaugauu

SEQ ID NO: 532918 - RNA, 19 nt, Homo sapiens
  misc_RNA (1)...(19): siRNA sense strand
gcagaaauaucagcuagaa

SEQ ID NO: 532919 - RNA, 19 nt, Homo sapiens
  misc_RNA (1)...(19): siRNA sense strand
gaacacaauuccaccauag

SEQ ID NO: 532920 - RNA, 19 nt, Homo sapiens
  misc_RNA (1)...(19): siRNA sense strand
caacaacaauggucguauu

SEQ ID NO: 532921 - RNA, 19 nt, Homo sapiens
  misc_RNA (1)...(19): siRNA sense strand
gaaaugugcuagaacugaa

SEQ ID NO: 532922 - RNA, 19 nt, Homo sapiens
  misc_RNA (1)...(19): siRNA sense strand
gaagaaaugugcuagaacu

SEQ ID NO: 532923 - RNA, 19 nt, Homo sapiens
  misc_RNA (1)...(19): siRNA sense strand
gcagugacuuguggaaaua

SEQ ID NO: 532924 - RNA, 19 nt, Homo sapiens
  misc_RNA (1)...(19): siRNA sense strand
ccaaaguggucaagaauau

SEQ ID NO: 532925 - RNA, 19 nt, Homo sapiens
  misc_RNA (1)...(19): siRNA sense strand
gagagaaguugaauuaaag

SEQ ID NO: 532926 - RNA, 19 nt, Homo sapiens
  misc_RNA (1)...(19): siRNA sense strand
gaaaucacuugguuuaaag

SEQ ID NO: 532927 - RNA, 19 nt, Homo sapiens
  misc_RNA (1)...(19): siRNA sense strand
uagaugagcugcuuaagga

SEQ ID NO: 532928 - RNA, 19 nt, Homo sapiens
  misc_RNA (1)...(19): siRNA sense strand
ccagaaaucacuugguuua

SEQ ID NO: 532929 - RNA, 19 nt, Homo sapiens
  misc_RNA (1)...(19): siRNA sense strand
ggaauuagaugagcugcuu

SEQ ID NO: 532930 - RNA, 19 nt, Homo sapiens
  misc_RNA (1)...(19): siRNA sense strand
ggagaggagcaacgaauua

SEQ ID NO: 532931 - RNA, 19 nt, Homo sapiens
  misc_RNA (1)...(19): siRNA sense strand
gaaguaaacaaaccaaaga

SEQ ID NO: 532932 - RNA, 19 nt, Homo sapiens
  misc_RNA (1)...(19): siRNA sense strand
gugccaaucuuccauguaa

SEQ ID NO: 532933 - RNA, 19 nt, Homo sapiens
  misc_RNA (1)...(19): siRNA sense strand
acacagaaguuaauuguca

SEQ ID NO: 532934 - RNA, 19 nt, Homo sapiens
  misc_RNA (1)...(19): siRNA sense strand
ccauguaacuuuaaugaga

SEQ ID NO: 532935 - RNA, 19 nt, Homo sapiens
  misc_RNA (1)...(19): siRNA sense strand
ucagagauuugagguaaua

SEQ ID NO: 532936 - RNA, 19 nt, Homo sapiens
  misc_RNA (1)...(19): siRNA sense strand
gggaugaggccauuuauga

SEQ ID NO: 532937 - RNA, 19 nt, Homo sapiens
  misc_RNA (1)...(19): siRNA sense strand
ggagaaggauuuauugacu

SEQ ID NO: 532938 - RNA, 19 nt, Homo sapiens
  misc_RNA (1)...(19): siRNA sense strand
ccaaggauauagaguuuau

SEQ ID NO: 532939 - RNA, 19 nt, Homo sapiens
  misc_RNA (1)...(19): siRNA sense strand
uaagacagucagcaaauua

SEQ ID NO: 532940 - RNA, 19 nt, Homo sapiens
  misc_RNA (1)...(19): siRNA sense strand
caaauaaugugggagaaau

SEQ ID NO: 532941 - RNA, 19 nt, Homo sapiens
  misc_RNA (1)...(19): siRNA sense strand
gcaguggucuuuaucaucu

SEQ ID NO: 532942 - RNA, 19 nt, Homo sapiens
  misc_RNA (1)...(19): siRNA sense strand
cagaugaaauggaauuaga

SEQ ID NO: 532943 - RNA, 19 nt, Homo sapiens
  misc_RNA (1)...(19): siRNA sense strand
caacaauggucguauuaag

SEQ ID NO: 532944 - RNA, 19 nt, Homo sapiens
  misc_RNA (1)...(19): siRNA sense strand
gaacuggagucuucauaac

SEQ ID NO: 532945 - RNA, 19 nt, Homo sapiens
  misc_RNA (1)...(19): siRNA sense strand
ggaauggagcucgaauuua

SEQ ID NO: 532946 - RNA, 19 nt, Homo sapiens
  misc_RNA (1)...(19): siRNA sense strand
gagagaaugucacaggaau

SEQ ID NO: 532947 - RNA, 19 nt, Homo sapiens
  misc_RNA (1)...(19): siRNA sense strand
cgaauguaaucgcauauga

SEQ ID NO: 532948 - RNA, 19 nt, Homo sapiens
  misc_RNA (1)...(19): siRNA sense strand
guaagacagucagcaaauu

SEQ ID NO: 532949 - RNA, 19 nt, Homo sapiens
  misc_RNA (1)...(19): siRNA sense strand
gaacugaggcgccuuaacu

SEQ ID NO: 532950 - RNA, 19 nt, Homo sapiens
  misc_RNA (1)...(19): siRNA sense strand
agaaggaucugauuacauc

SEQ ID NO: 532951 - RNA, 19 nt, Homo sapiens
  misc_RNA (1)...(19): siRNA sense strand
ggaguugccucuuucaucu

SEQ ID NO: 532952 - RNA, 19 nt, Homo sapiens
  misc_RNA (1)...(19): siRNA sense strand
gagaaggauuuauugacuu

SEQ ID NO: 532953 - RNA, 19 nt, Homo sapiens
  misc_RNA (1)...(19): siRNA sense strand
gaauagauacgcgaaugua

SEQ ID NO: 532954 - RNA, 19 nt, Homo sapiens
  misc_RNA (1)...(19): siRNA sense strand
gauuugagguaauagaguu

SEQ ID NO: 532955 - RNA, 19 nt, Homo sapiens
  misc_RNA (1)...(19): siRNA sense strand
ggaagugacuaugugaaug

SEQ ID NO: 532956 - RNA, 19 nt, Homo sapiens
  misc_RNA (1)...(19): siRNA sense strand
ugaagagucugaccaagga

SEQ ID NO: 532957 - RNA, 19 nt, Homo sapiens
  misc_RNA (1)...(19): siRNA sense strand
gaauguguggccucaaaua

SEQ ID NO: 532958 - RNA, 19 nt, Homo sapiens
  misc_RNA (1)...(19): siRNA sense strand
gaaagaaugagauaugaag

SEQ ID NO: 532959 - RNA, 19 nt, Homo sapiens
  misc_RNA (1)...(19): siRNA sense strand
gaacaugcagagucuaaga

SEQ ID NO: 532960 - RNA, 19 nt, Homo sapiens
  misc_RNA (1)...(19): siRNA sense strand
gagcaacgaauuaccauug

SEQ ID NO: 532961 - RNA, 19 nt, Homo sapiens
  misc_RNA (1)...(19): siRNA sense strand
gaugauaugccaauaggaa

SEQ ID NO: 532962 - RNA, 19 nt, Homo sapiens
  misc_RNA (1)...(19): siRNA sense strand
caagauaccaguacuuugu

SEQ ID NO: 532963 - RNA, 19 nt, Homo sapiens
  misc_RNA (1)...(19): siRNA sense strand
cagauaccauugccaacua

SEQ ID NO: 532964 - RNA, 19 nt, Homo sapiens
  misc_RNA (1)...(19): siRNA sense strand
gaaccugagucugaaacaa

SEQ ID NO: 532965 - RNA, 19 nt, Homo sapiens
  misc_RNA (1)...(19): siRNA sense strand
gaacacaacgaccagcuau

SEQ ID NO: 532966 - RNA, 19 nt, Homo sapiens
  misc_RNA (1)...(19): siRNA sense strand
gagagaaaugucaccaaua

SEQ ID NO: 532967 - RNA, 19 nt, Homo sapiens
  misc_RNA (1)...(19): siRNA sense strand
ugggagagaaguugaauua

SEQ ID NO: 532968 - RNA, 19 nt, Homo sapiens
  misc_RNA (1)...(19): siRNA sense strand
ggaaagaaagucagcaauc

SEQ ID NO: 532969 - RNA, 19 nt, Homo sapiens
  misc_RNA (1)...(19): siRNA sense strand
uuaaggagauaucuaggaa

SEQ ID NO: 532970 - RNA, 19 nt, Homo sapiens
  misc_RNA (1)...(19): siRNA sense strand
ugaaggaguuguagauauc

SEQ ID NO: 532971 - RNA, 19 nt, Homo sapiens
  misc_RNA (1)...(19): siRNA sense strand
gaagcugacacaaauagaa

SEQ ID NO: 532972 - RNA, 19 nt, Homo sapiens
  misc_RNA (1)...(19): siRNA sense strand
guucgaacauuugcacuuu

SEQ ID NO: 532973 - RNA, 19 nt, Homo sapiens
  misc_RNA (1)...(19): siRNA sense strand
cuacucggauuaugaauuc

SEQ ID NO: 532974 - RNA, 19 nt, Homo sapiens
  misc_RNA (1)...(19): siRNA sense strand
gaaaugggcagagagaaau

SEQ ID NO: 532975 - RNA, 19 nt, Homo sapiens
  misc_RNA (1)...(19): siRNA sense strand
uauccaugaugcacuguua

SEQ ID NO: 532976 - RNA, 19 nt, Homo sapiens
  misc_RNA (1)...(19): siRNA sense strand
ggugaagugugaccaguau

SEQ ID NO: 532977 - RNA, 19 nt, Homo sapiens
  misc_RNA (1)...(19): siRNA sense strand
ccaggaauaugagucaauu

SEQ ID NO: 532978 - RNA, 19 nt, Homo sapiens
  misc_RNA (1)...(19): siRNA sense strand
gcagcauaccgaacaauaa

SEQ ID NO: 532979 - RNA, 19 nt, Homo sapiens
  misc_RNA (1)...(19): siRNA sense strand
ugaaguaccugcaaaugag

SEQ ID NO: 532980 - RNA, 19 nt, Homo sapiens
  misc_RNA (1)...(19): siRNA sense strand
gaagcaaaaugccuauauu

SEQ ID NO: 532981 - RNA, 19 nt, Homo sapiens
  misc_RNA (1)...(19): siRNA sense strand
agagaaaugucaccaauac

SEQ ID NO: 532982 - RNA, 19 nt, Homo sapiens
  misc_RNA (1)...(19): siRNA sense strand
ggaguuggccggacugguu

SEQ ID NO: 532983 - RNA, 19 nt, Homo sapiens
  misc_RNA (1)...(19): siRNA sense strand
cauuugcacuuuacaagaa

SEQ ID NO: 532984 - RNA, 19 nt, Homo sapiens
  misc_RNA (1)...(19): siRNA sense strand
gaacauuugcacuuuacaa

SEQ ID NO: 532985 - RNA, 19 nt, Homo sapiens
  misc_RNA (1)...(19): siRNA sense strand
uaacgcugcuugauacugu

SEQ ID NO: 532986 - RNA, 19 nt, Homo sapiens
  misc_RNA (1)...(19): siRNA sense strand
ggucaccaaugccuuaugu

SEQ ID NO: 532987 - RNA, 19 nt, Homo sapiens
  misc_RNA (1)...(19): siRNA sense strand
gaaagucagcaaucagaga

SEQ ID NO: 532988 - RNA, 19 nt, Homo sapiens
  misc_RNA (1)...(19): siRNA sense strand
gaguagaaggaucugauua

SEQ ID NO: 532989 - RNA, 19 nt, Homo sapiens
  misc_RNA (1)...(19): siRNA sense strand
uaccaagccugccuucauu

SEQ ID NO: 532990 - RNA, 19 nt, Homo sapiens
  misc_RNA (1)...(19): siRNA sense strand
ugucaaagccuuacccaaa

SEQ ID NO: 532991 - RNA, 19 nt, Homo sapiens
  misc_RNA (1)...(19): siRNA sense strand
gcuacaagcaucacacuga

SEQ ID NO: 532992 - RNA, 19 nt, Homo sapiens
  misc_RNA (1)...(19): siRNA sense strand
agacagaggaucaauauca

SEQ ID NO: 532993 - RNA, 19 nt, Homo sapiens
  misc_RNA (1)...(19): siRNA sense strand
cagaacacccuacaccuuu

SEQ ID NO: 532994 - RNA, 19 nt, Homo sapiens
  misc_RNA (1)...(19): siRNA sense strand
gaagagagaagugagacaa

SEQ ID NO: 532995 - RNA, 19 nt, Homo sapiens
  misc_RNA (1)...(19): siRNA sense strand
gaagggaucccaggaagug

SEQ ID NO: 532996 - RNA, 19 nt, Homo sapiens
  misc_RNA (1)...(19): siRNA sense strand
aaucacggaugaagaagaa

SEQ ID NO: 532997 - RNA, 19 nt, Homo sapiens
  misc_RNA (1)...(19): siRNA sense strand
caagcauuaugguggauuu

SEQ ID NO: 532998 - RNA, 19 nt, Homo sapiens
  misc_RNA (1)...(19): siRNA sense strand
cugagccuguuucuuauua

SEQ ID NO: 532999 - RNA, 19 nt, Homo sapiens
  misc_RNA (1)...(19): siRNA sense strand
acuaugaacuggucuacaa

SEQ ID NO: 533000 - RNA, 19 nt, Homo sapiens
  misc_RNA (1)...(19): siRNA sense strand
gggcagcuuugaccacuau

SEQ ID NO: 533001 - RNA, 19 nt, Homo sapiens
  misc_RNA (1)...(19): siRNA sense strand
aaugagauaugaaggaguu

SEQ ID NO: 533002 - RNA, 19 nt, Homo sapiens
  misc_RNA (1)...(19): siRNA sense strand
ggaaagaaugagauaugaa

SEQ ID NO: 533003 - RNA, 19 nt, Homo sapiens
  misc_RNA (1)...(19): siRNA sense strand
guaaggcaguuccaguuca

SEQ ID NO: 533004 - RNA, 19 nt, Homo sapiens
  misc_RNA (1)...(19): siRNA sense strand
guagaaggaucugauuaca

SEQ ID NO: 533005 - RNA, 19 nt, Homo sapiens
  misc_RNA (1)...(19): siRNA sense strand
gccaaucuuccauguaaua

SEQ ID NO: 533006 - RNA, 19 nt, Homo sapiens
  misc_RNA (1)...(19): siRNA sense strand
ccacggacucguucaagua

SEQ ID NO: 533007 - RNA, 19 nt, Homo sapiens
  misc_RNA (1)...(19): siRNA sense strand
gaauggagcucgaauuuaa

SEQ ID NO: 533008 - RNA, 19 nt, Homo sapiens
  misc_RNA (1)...(19): siRNA sense strand
gaagaaaucucgcgggaaa

SEQ ID NO: 533009 - RNA, 19 nt, Homo sapiens
  misc_RNA (1)...(19): siRNA sense strand
ggagagaaguugaauuaaa

SEQ ID NO: 533010 - RNA, 19 nt, Homo sapiens
  misc_RNA (1)...(19): siRNA sense strand
ccaaacagcuuauacuauu

SEQ ID NO: 533011 - RNA, 19 nt, Homo sapiens
  misc_RNA (1)...(19): siRNA sense strand
cgucauagaugccauguua

SEQ ID NO: 533012 - RNA, 19 nt, Homo sapiens
  misc_RNA (1)...(19): siRNA sense strand
gaaagcaaaugacaacuug

SEQ ID NO: 533013 - RNA, 19 nt, Homo sapiens
  misc_RNA (1)...(19): siRNA sense strand
gaaagaaagucagcaauca

SEQ ID NO: 533014 - RNA, 19 nt, Homo sapiens
  misc_RNA (1)...(19): siRNA sense strand
gaucaagggugaaguguga

SEQ ID NO: 533015 - RNA, 19 nt, Homo sapiens
  misc_RNA (1)...(19): siRNA sense strand
gaauaugucuucuuugugu

SEQ ID NO: 533016 - RNA, 19 nt, Homo sapiens
  misc_RNA (1)...(19): siRNA sense strand
gaacuggucuacaaagaug

SEQ ID NO: 533017 - RNA, 19 nt, Homo sapiens
  misc_RNA (1)...(19): siRNA sense strand
caacuuggauggcaugauu

SEQ ID NO: 533018 - RNA, 19 nt, Homo sapiens
  misc_RNA (1)...(19): siRNA sense strand
gcagaaauaucagcuagaa

SEQ ID NO: 533019 - RNA, 19 nt, Homo sapiens
  misc_RNA (1)...(19): siRNA sense strand
gaacacaauuccaccauag

SEQ ID NO: 533020 - RNA, 19 nt, Homo sapiens
  misc_RNA (1)...(19): siRNA sense strand
caacaacaauggucguauu

SEQ ID NO: 533021 - RNA, 19 nt, Homo sapiens
  misc_RNA (1)...(19): siRNA sense strand
gaaaugugcuagaacugaa

SEQ ID NO: 533022 - RNA, 19 nt, Homo sapiens
  misc_RNA (1)...(19): siRNA sense strand
gaagaaaugugcuagaacu

SEQ ID NO: 533023 - RNA, 19 nt, Homo sapiens
  misc_RNA (1)...(19): siRNA sense strand
gcagugacuuguggaaaua

SEQ ID NO: 533024 - RNA, 19 nt, Homo sapiens
  misc_RNA (1)...(19): siRNA sense strand
ccaaaguggucaagaauau

SEQ ID NO: 533025 - RNA, 19 nt, Homo sapiens
  misc_RNA (1)...(19): siRNA sense strand
gagagaaguugaauuaaag

SEQ ID NO: 533026 - RNA, 19 nt, Homo sapiens
  misc_RNA (1)...(19): siRNA sense strand
gaaaucacuugguuuaaag

SEQ ID NO: 533027 - RNA, 19 nt, Homo sapiens
  misc_RNA (1)...(19): siRNA sense strand
uagaugagcugcuuaagga

SEQ ID NO: 533028 - RNA, 19 nt, Homo sapiens
  misc_RNA (1)...(19): siRNA sense strand
ccagaaaucacuugguuua

SEQ ID NO: 533029 - RNA, 19 nt, Homo sapiens
  misc_RNA (1)...(19): siRNA sense strand
ggaauuagaugagcugcuu

SEQ ID NO: 533030 - RNA, 19 nt, Homo sapiens
  misc_RNA (1)...(19): siRNA sense strand
ggagaggagcaacgaauua

SEQ ID NO: 533031 - RNA, 19 nt, Homo sapiens
  misc_RNA (1)...(19): siRNA sense strand
gaaguaaacaaaccaaaga

SEQ ID NO: 533032 - RNA, 19 nt, Homo sapiens
  misc_RNA (1)...(19): siRNA sense strand
gugccaaucuuccauguaa

SEQ ID NO: 533033 - RNA, 19 nt, Homo sapiens
  misc_RNA (1)...(19): siRNA sense strand
acacagaaguuaauuguca

SEQ ID NO: 533034 - RNA, 19 nt, Homo sapiens
  misc_RNA (1)...(19): siRNA sense strand
ccauguaacuuuaaugaga

SEQ ID NO: 533035 - RNA, 19 nt, Homo sapiens
  misc_RNA (1)...(19): siRNA sense strand
ucagagauuugagguaaua

SEQ ID NO: 533036 - RNA, 19 nt, Homo sapiens
  misc_RNA (1)...(19): siRNA sense strand
gggaugaggccauuuauga

SEQ ID NO: 533037 - RNA, 19 nt, Homo sapiens
  misc_RNA (1)...(19): siRNA sense strand
ggagaaggauuuauugacu

SEQ ID NO: 533038 - RNA, 19 nt, Homo sapiens
  misc_RNA (1)...(19): siRNA sense strand
ccaaggauauagaguuuau

SEQ ID NO: 533039 - RNA, 19 nt, Homo sapiens
  misc_RNA (1)...(19): siRNA sense strand
uaagacagucagcaaauua

SEQ ID NO: 533040 - RNA, 19 nt, Homo sapiens
  misc_RNA (1)...(19): siRNA sense strand
caaauaaugugggagaaau

SEQ ID NO: 533041 - RNA, 19 nt, Homo sapiens
  misc_RNA (1)...(19): siRNA sense strand
gcaguggucuuuaucaucu

SEQ ID NO: 533042 - RNA, 19 nt, Homo sapiens
  misc_RNA (1)...(19): siRNA sense strand
cagaugaaauggaauuaga

SEQ ID NO: 533043 - RNA, 19 nt, Homo sapiens
  misc_RNA (1)...(19): siRNA sense strand
caacaauggucguauuaag

SEQ ID NO: 533044 - RNA, 19 nt, Homo sapiens
  misc_RNA (1)...(19): siRNA sense strand
gaacuggagucuucauaac

SEQ ID NO: 533045 - RNA, 19 nt, Homo sapiens
  misc_RNA (1)...(19): siRNA sense strand
ggaauggagcucgaauuua

SEQ ID NO: 533046 - RNA, 19 nt, Homo sapiens
  misc_RNA (1)...(19): siRNA sense strand
gagagaaugucacaggaau

SEQ ID NO: 533047 - RNA, 19 nt, Homo sapiens
  misc_RNA (1)...(19): siRNA sense strand
cgaauguaaucgcauauga

SEQ ID NO: 533048 - RNA, 19 nt, Homo sapiens
  misc_RNA (1)...(19): siRNA sense strand
guaagacagucagcaaauu

SEQ ID NO: 533049 - RNA, 19 nt, Homo sapiens
  misc_RNA (1)...(19): siRNA sense strand
gaacugaggcgccuuaacu

SEQ ID NO: 533050 - RNA, 19 nt, Homo sapiens
  misc_RNA (1)...(19): siRNA sense strand
agaaggaucugauuacauc

SEQ ID NO: 533051 - RNA, 19 nt, Homo sapiens
  misc_RNA (1)...(19): siRNA sense strand
ggaguugccucuuucaucu

SEQ ID NO: 533052 - RNA, 19 nt, Homo sapiens
  misc_RNA (1)...(19): siRNA sense strand
gagaaggauuuauugacuu

SEQ ID NO: 533053 - RNA, 19 nt, Homo sapiens
  misc_RNA (1)...(19): siRNA sense strand
gaauagauacgcgaaugua

SEQ ID NO: 533054 - RNA, 19 nt, Homo sapiens
  misc_RNA (1)...(19): siRNA sense strand
gauuugagguaauagaguu

SEQ ID NO: 533055 - RNA, 19 nt, Homo sapiens
  misc_RNA (1)...(19): siRNA sense strand
ggaagugacuaugugaaug

SEQ ID NO: 533056 - RNA, 19 nt, Homo sapiens
  misc_RNA (1)...(19): siRNA sense strand
ugaagagucugaccaagga

SEQ ID NO: 533057 - RNA, 19 nt, Homo sapiens
  misc_RNA (1)...(19): siRNA sense strand
gaauguguggccucaaaua

SEQ ID NO: 533058 - RNA, 19 nt, Homo sapiens
  misc_RNA (1)...(19): siRNA sense strand
gaaagaaugagauaugaag

SEQ ID NO: 533059 - RNA, 19 nt, Homo sapiens
  misc_RNA (1)...(19): siRNA sense strand
gaacaugcagagucuaaga

SEQ ID NO: 533060 - RNA, 19 nt, Homo sapiens
  misc_RNA (1)...(19): siRNA sense strand
gagcaacgaauuaccauug

SEQ ID NO: 533061 - RNA, 19 nt, Homo sapiens
  misc_RNA (1)...(19): siRNA sense strand
gaugauaugccaauaggaa

SEQ ID NO: 533062 - RNA, 19 nt, Homo sapiens
  misc_RNA (1)...(19): siRNA sense strand
caagauaccaguacuuugu

SEQ ID NO: 533063 - RNA, 19 nt, Homo sapiens
  misc_RNA (1)...(19): siRNA sense strand
cagauaccauugccaacua

SEQ ID NO: 533064 - RNA, 19 nt, Homo sapiens
  misc_RNA (1)...(19): siRNA sense strand
gaaccugagucugaaacaa

SEQ ID NO: 533065 - RNA, 19 nt, Homo sapiens
  misc_RNA (1)...(19): siRNA sense strand
gaacacaacgaccagcuau

SEQ ID NO: 533066 - RNA, 19 nt, Homo sapiens
  misc_RNA (1)...(19): siRNA sense strand
gagagaaaugucaccaaua

SEQ ID NO: 533067 - RNA, 19 nt, Homo sapiens
  misc_RNA (1)...(19): siRNA sense strand
ugggagagaaguugaauua

SEQ ID NO: 533068 - RNA, 19 nt, Homo sapiens
  misc_RNA (1)...(19): siRNA sense strand
ggaaagaaagucagcaauc

SEQ ID NO: 533069 - RNA, 19 nt, Homo sapiens
  misc_RNA (1)...(19): siRNA sense strand
uuaaggagauaucuaggaa

SEQ ID NO: 533070 - RNA, 19 nt, Homo sapiens
  misc_RNA (1)...(19): siRNA sense strand
ugaaggaguuguagauauc

SEQ ID NO: 533071 - RNA, 19 nt, Homo sapiens
  misc_RNA (1)...(19): siRNA sense strand
gaagcugacacaaauagaa

SEQ ID NO: 533072 - RNA, 19 nt, Homo sapiens
  misc_RNA (1)...(19): siRNA sense strand
guucgaacauuugcacuuu

SEQ ID NO: 533073 - RNA, 19 nt, Homo sapiens
  misc_RNA (1)...(19): siRNA sense strand
cuacucggauuaugaauuc

SEQ ID NO: 533074 - RNA, 19 nt, Homo sapiens
  misc_RNA (1)...(19): siRNA sense strand
gaaaugggcagagagaaau

SEQ ID NO: 533075 - RNA, 19 nt, Homo sapiens
  misc_RNA (1)...(19): siRNA sense strand
uauccaugaugcacuguua

SEQ ID NO: 533076 - RNA, 19 nt, Homo sapiens
  misc_RNA (1)...(19): siRNA sense strand
ggugaagugugaccaguau

SEQ ID NO: 533077 - RNA, 19 nt, Homo sapiens
  misc_RNA (1)...(19): siRNA sense strand
ccaggaauaugagucaauu

SEQ ID NO: 533078 - RNA, 19 nt, Homo sapiens
  misc_RNA (1)...(19): siRNA sense strand
gcagcauaccgaacaauaa

SEQ ID NO: 533079 - RNA, 19 nt, Homo sapiens
  misc_RNA (1)...(19): siRNA sense strand
ugaaguaccugcaaaugag

SEQ ID NO: 533080 - RNA, 19 nt, Homo sapiens
  misc_RNA (1)...(19): siRNA sense strand
gaagcaaaaugccuauauu

SEQ ID NO: 533081 - RNA, 19 nt, Homo sapiens
  misc_RNA (1)...(19): siRNA sense strand
agagaaaugucaccaauac

SEQ ID NO: 533082 - RNA, 19 nt, Homo sapiens
  misc_RNA (1)...(19): siRNA sense strand
ggaguuggccggacugguu

SEQ ID NO: 533083 - RNA, 19 nt, Homo sapiens
  misc_RNA (1)...(19): siRNA sense strand
cauuugcacuuuacaagaa

SEQ ID NO: 533084 - RNA, 19 nt, Homo sapiens
  misc_RNA (1)...(19): siRNA sense strand
gaacauuugcacuuuacaa

SEQ ID NO: 533085 - RNA, 19 nt, Homo sapiens
  misc_RNA (1)...(19): siRNA sense strand
uaacgcugcuugauacugu

SEQ ID NO: 533086 - RNA, 19 nt, Homo sapiens
  misc_RNA (1)...(19): siRNA sense strand
ggucaccaaugccuuaugu

SEQ ID NO: 533087 - RNA, 19 nt, Homo sapiens
  misc_RNA (1)...(19): siRNA sense strand
gaaagucagcaaucagaga

SEQ ID NO: 533088 - RNA, 19 nt, Homo sapiens
  misc_RNA (1)...(19): siRNA sense strand
gaguagaaggaucugauua

SEQ ID NO: 533089 - RNA, 19 nt, Homo sapiens
  misc_RNA (1)...(19): siRNA sense strand
uaccaagccugccuucauu

SEQ ID NO: 533090 - RNA, 19 nt, Homo sapiens
  misc_RNA (1)...(19): siRNA sense strand
ugucaaagccuuacccaaa

SEQ ID NO: 533091 - RNA, 19 nt, Homo sapiens
  misc_RNA (1)...(19): siRNA sense strand
gcuacaagcaucacacuga

SEQ ID NO: 533092 - RNA, 19 nt, Homo sapiens
  misc_RNA (1)...(19): siRNA sense strand
agacagaggaucaauauca

SEQ ID NO: 533093 - RNA, 19 nt, Homo sapiens
  misc_RNA (1)...(19): siRNA sense strand
cagaacacccuacaccuuu

SEQ ID NO: 533094 - RNA, 19 nt, Homo sapiens
  misc_RNA (1)...(19): siRNA sense strand
gaagagagaagugagacaa

SEQ ID NO: 533095 - RNA, 19 nt, Homo sapiens
  misc_RNA (1)...(19): siRNA sense strand
gaagggaucccaggaagug

SEQ ID NO: 533096 - RNA, 19 nt, Homo sapiens
  misc_RNA (1)...(19): siRNA sense strand
aaucacggaugaagaagaa

SEQ ID NO: 533097 - RNA, 19 nt, Homo sapiens
  misc_RNA (1)...(19): siRNA sense strand
caagcauuaugguggauuu

SEQ ID NO: 533098 - RNA, 19 nt, Homo sapiens
  misc_RNA (1)...(19): siRNA sense strand
cugagccuguuucuuauua

SEQ ID NO: 533099 - RNA, 19 nt, Homo sapiens
  misc_RNA (1)...(19): siRNA sense strand
acuaugaacuggucuacaa

SEQ ID NO: 533100 - RNA, 19 nt, Homo sapiens
  misc_RNA (1)...(19): siRNA sense strand
gggcagcuuugaccacuau

SEQ ID NO: 533101 - RNA, 19 nt, Homo sapiens
  misc_RNA (1)...(19): siRNA sense strand
aaugagauaugaaggaguu

SEQ ID NO: 533102 - RNA, 19 nt, Homo sapiens
  misc_RNA (1)...(19): siRNA sense strand
ggaaagaaugagauaugaa

SEQ ID NO: 533103 - RNA, 19 nt, Homo sapiens
  misc_RNA (1)...(19): siRNA sense strand
guaaggcaguuccaguuca

SEQ ID NO: 533104 - RNA, 19 nt, Homo sapiens
  misc_RNA (1)...(19): siRNA sense strand
guagaaggaucugauuaca

SEQ ID NO: 533105 - RNA, 19 nt, Homo sapiens
  misc_RNA (1)...(19): siRNA sense strand
gccaaucuuccauguaaua

SEQ ID NO: 533106 - RNA, 19 nt, Homo sapiens
  misc_RNA (1)...(19): siRNA sense strand
ccacggacucguucaagua

SEQ ID NO: 533107 - RNA, 19 nt, Homo sapiens
  misc_RNA (1)...(19): siRNA sense strand
gaauggagcucgaauuuaa

SEQ ID NO: 533108 - RNA, 19 nt, Homo sapiens
  misc_RNA (1)...(19): siRNA sense strand
gaagaaaucucgcgggaaa

SEQ ID NO: 533109 - RNA, 19 nt, Homo sapiens
  misc_RNA (1)...(19): siRNA sense strand
ggagagaaguugaauuaaa

SEQ ID NO: 533110 - RNA, 19 nt, Homo sapiens
  misc_RNA (1)...(19): siRNA sense strand
ccaaacagcuuauacuauu

SEQ ID NO: 533111 - RNA, 19 nt, Homo sapiens
  misc_RNA (1)...(19): siRNA sense strand
cgucauagaugccauguua

SEQ ID NO: 533112 - RNA, 19 nt, Homo sapiens
  misc_RNA (1)...(19): siRNA sense strand
gaaagcaaaugacaacuug

SEQ ID NO: 533113 - RNA, 19 nt, Homo sapiens
  misc_RNA (1)...(19): siRNA sense strand
gaaagaaagucagcaauca

SEQ ID NO: 533114 - RNA, 19 nt, Homo sapiens
  misc_RNA (1)...(19): siRNA sense strand
gaucaagggugaaguguga

SEQ ID NO: 533115 - RNA, 19 nt, Homo sapiens
  misc_RNA (1)...(19): siRNA sense strand
gaauaugucuucuuugugu

SEQ ID NO: 533116 - RNA, 19 nt, Homo sapiens
  misc_RNA (1)...(19): siRNA sense strand
gaacuggucuacaaagaug

SEQ ID NO: 533117 - RNA, 19 nt, Homo sapiens
  misc_RNA (1)...(19): siRNA sense strand
caacuuggauggcaugauu

SEQ ID NO: 533118 - RNA, 19 nt, Homo sapiens
  misc_RNA (1)...(19): siRNA sense strand
gcagaaauaucagcuagaa

SEQ ID NO: 533119 - RNA, 19 nt, Homo sapiens
  misc_RNA (1)...(19): siRNA sense strand
gaacacaauuccaccauag

SEQ ID NO: 533120 - RNA, 19 nt, Homo sapiens
  misc_RNA (1)...(19): siRNA sense strand
caacaacaauggucguauu

SEQ ID NO: 533121 - RNA, 19 nt, Homo sapiens
  misc_RNA (1)...(19): siRNA sense strand
gaaaugugcuagaacugaa

SEQ ID NO: 533122 - RNA, 19 nt, Homo sapiens
  misc_RNA (1)...(19): siRNA sense strand
gaagaaaugugcuagaacu

SEQ ID NO: 533123 - RNA, 19 nt, Homo sapiens
  misc_RNA (1)...(19): siRNA sense strand
gcagugacuuguggaaaua

SEQ ID NO: 533124 - RNA, 19 nt, Homo sapiens
  misc_RNA (1)...(19): siRNA sense strand
ccaaaguggucaagaauau

SEQ ID NO: 533125 - RNA, 19 nt, Homo sapiens
  misc_RNA (1)...(19): siRNA sense strand
gagagaaguugaauuaaag

SEQ ID NO: 533126 - RNA, 19 nt, Homo sapiens
  misc_RNA (1)...(19): siRNA sense strand
gaaaucacuugguuuaaag

SEQ ID NO: 533127 - RNA, 19 nt, Homo sapiens
  misc_RNA (1)...(19): siRNA sense strand
uagaugagcugcuuaagga

SEQ ID NO: 533128 - RNA, 19 nt, Homo sapiens
  misc_RNA (1)...(19): siRNA sense strand
ccagaaaucacuugguuua

SEQ ID NO: 533129 - RNA, 19 nt, Homo sapiens
  misc_RNA (1)...(19): siRNA sense strand
ggaauuagaugagcugcuu

SEQ ID NO: 533130 - RNA, 19 nt, Homo sapiens
  misc_RNA (1)...(19): siRNA sense strand
ggagaggagcaacgaauua

SEQ ID NO: 533131 - RNA, 19 nt, Homo sapiens
  misc_RNA (1)...(19): siRNA sense strand
gaaguaaacaaaccaaaga

SEQ ID NO: 533132 - RNA, 19 nt, Homo sapiens
  misc_RNA (1)...(19): siRNA sense strand
gugccaaucuuccauguaa

SEQ ID NO: 533133 - RNA, 19 nt, Homo sapiens
  misc_RNA (1)...(19): siRNA sense strand
acacagaaguuaauuguca

SEQ ID NO: 533134 - RNA, 19 nt, Homo sapiens
  misc_RNA (1)...(19): siRNA sense strand
ccauguaacuuuaaugaga

SEQ ID NO: 533135 - RNA, 19 nt, Homo sapiens
  misc_RNA (1)...(19): siRNA sense strand
ucagagauuugagguaaua

SEQ ID NO: 533136 - RNA, 19 nt, Homo sapiens
  misc_RNA (1)...(19): siRNA sense strand
gggaugaggccauuuauga

SEQ ID NO: 533137 - RNA, 19 nt, Homo sapiens
  misc_RNA (1)...(19): siRNA sense strand
ggagaaggauuuauugacu

SEQ ID NO: 533138 - RNA, 19 nt, Homo sapiens
  misc_RNA (1)...(19): siRNA sense strand
ccaaggauauagaguuuau

SEQ ID NO: 533139 - RNA, 19 nt, Homo sapiens
  misc_RNA (1)...(19): siRNA sense strand
uaagacagucagcaaauua

SEQ ID NO: 533140 - RNA, 19 nt, Homo sapiens
  misc_RNA (1)...(19): siRNA sense strand
caaauaaugugggagaaau

SEQ ID NO: 533141 - RNA, 19 nt, Homo sapiens
  misc_RNA (1)...(19): siRNA sense strand
gcaguggucuuuaucaucu

SEQ ID NO: 533142 - RNA, 19 nt, Homo sapiens
  misc_RNA (1)...(19): siRNA sense strand
cagaugaaauggaauuaga

SEQ ID NO: 533143 - RNA, 19 nt, Homo sapiens
  misc_RNA (1)...(19): siRNA sense strand
caacaauggucguauuaag

SEQ ID NO: 533144 - RNA, 19 nt, Homo sapiens
  misc_RNA (1)...(19): siRNA sense strand
gaacuggagucuucauaac

SEQ ID NO: 533145 - RNA, 19 nt, Homo sapiens
  misc_RNA (1)...(19): siRNA sense strand
ggaauggagcucgaauuua

SEQ ID NO: 533146 - RNA, 19 nt, Homo sapiens
  misc_RNA (1)...(19): siRNA sense strand
gagagaaugucacaggaau

SEQ ID NO: 533147 - RNA, 19 nt, Homo sapiens
  misc_RNA (1)...(19): siRNA sense strand
cgaauguaaucgcauauga

SEQ ID NO: 533148 - RNA, 19 nt, Homo sapiens
  misc_RNA (1)...(19): siRNA sense strand
guaagacagucagcaaauu

SEQ ID NO: 533149 - RNA, 19 nt, Homo sapiens
  misc_RNA (1)...(19): siRNA sense strand
gaacugaggcgccuuaacu

SEQ ID NO: 533150 - RNA, 19 nt, Homo sapiens
  misc_RNA (1)...(19): siRNA sense strand
agaaggaucugauuacauc

SEQ ID NO: 533151 - RNA, 19 nt, Homo sapiens
  misc_RNA (1)...(19): siRNA sense strand
ggaguugccucuuucaucu

SEQ ID NO: 533152 - RNA, 19 nt, Homo sapiens
  misc_RNA (1)...(19): siRNA sense strand
gagaaggauuuauugacuu

SEQ ID NO: 533153 - RNA, 19 nt, Homo sapiens
  misc_RNA (1)...(19): siRNA sense strand
gaauagauacgcgaaugua

SEQ ID NO: 533154 - RNA, 19 nt, Homo sapiens
  misc_RNA (1)...(19): siRNA sense strand
gauuugagguaauagaguu

SEQ ID NO: 533155 - RNA, 19 nt, Homo sapiens
  misc_RNA (1)...(19): siRNA sense strand
ggaagugacuaugugaaug

SEQ ID NO: 533156 - RNA, 19 nt, Homo sapiens
  misc_RNA (1)...(19): siRNA sense strand
ugaagagucugaccaagga

SEQ ID NO: 533157 - RNA, 19 nt, Homo sapiens
  misc_RNA (1)...(19): siRNA sense strand
gaauguguggccucaaaua

SEQ ID NO: 533158 - RNA, 19 nt, Homo sapiens
  misc_RNA (1)...(19): siRNA sense strand
gaaagaaugagauaugaag

SEQ ID NO: 533159 - RNA, 19 nt, Homo sapiens
  misc_RNA (1)...(19): siRNA sense strand
gaacaugcagagucuaaga

SEQ ID NO: 533160 - RNA, 19 nt, Homo sapiens
  misc_RNA (1)...(19): siRNA sense strand
gagcaacgaauuaccauug

SEQ ID NO: 533161 - RNA, 19 nt, Homo sapiens
  misc_RNA (1)...(19): siRNA sense strand
gaugauaugccaauaggaa

SEQ ID NO: 533162 - RNA, 19 nt, Homo sapiens
  misc_RNA (1)...(19): siRNA sense strand
caagauaccaguacuuugu

SEQ ID NO: 533163 - RNA, 19 nt, Homo sapiens
  misc_RNA (1)...(19): siRNA sense strand
cagauaccauugccaacua

SEQ ID NO: 533164 - RNA, 19 nt, Homo sapiens
  misc_RNA (1)...(19): siRNA sense strand
gaaccugagucugaaacaa

SEQ ID NO: 533165 - RNA, 19 nt, Homo sapiens
  misc_RNA (1)...(19): siRNA sense strand
gaacacaacgaccagcuau

SEQ ID NO: 533166 - RNA, 19 nt, Homo sapiens
  misc_RNA (1)...(19): siRNA sense strand
gagagaaaugucaccaaua

SEQ ID NO: 533167 - RNA, 19 nt, Homo sapiens
  misc_RNA (1)...(19): siRNA sense strand
ugggagagaaguugaauua

SEQ ID NO: 533168 - RNA, 19 nt, Homo sapiens
  misc_RNA (1)...(19): siRNA sense strand
ggaaagaaagucagcaauc

SEQ ID NO: 533169 - RNA, 19 nt, Homo sapiens
  misc_RNA (1)...(19): siRNA sense strand
uuaaggagauaucuaggaa

SEQ ID NO: 533170 - RNA, 19 nt, Homo sapiens
  misc_RNA (1)...(19): siRNA sense strand
ugaaggaguuguagauauc

SEQ ID NO: 533171 - RNA, 19 nt, Homo sapiens
  misc_RNA (1)...(19): siRNA sense strand
gaagcugacacaaauagaa

SEQ ID NO: 533172 - RNA, 19 nt, Homo sapiens
  misc_RNA (1)...(19): siRNA sense strand
guucgaacauuugcacuuu

SEQ ID NO: 533173 - RNA, 19 nt, Homo sapiens
  misc_RNA (1)...(19): siRNA sense strand
cuacucggauuaugaauuc

SEQ ID NO: 533174 - RNA, 19 nt, Homo sapiens
  misc_RNA (1)...(19): siRNA sense strand
gaaaugggcagagagaaau

SEQ ID NO: 533175 - RNA, 19 nt, Homo sapiens
  misc_RNA (1)...(19): siRNA sense strand
uauccaugaugcacuguua

SEQ ID NO: 533176 - RNA, 19 nt, Homo sapiens
  misc_RNA (1)...(19): siRNA sense strand
ggugaagugugaccaguau

SEQ ID NO: 533177 - RNA, 19 nt, Homo sapiens
  misc_RNA (1)...(19): siRNA sense strand
ccaggaauaugagucaauu

SEQ ID NO: 533178 - RNA, 19 nt, Homo sapiens
  misc_RNA (1)...(19): siRNA sense strand
gcagcauaccgaacaauaa

SEQ ID NO: 533179 - RNA, 19 nt, Homo sapiens
  misc_RNA (1)...(19): siRNA sense strand
ugaaguaccugcaaaugag

SEQ ID NO: 533180 - RNA, 19 nt, Homo sapiens
  misc_RNA (1)...(19): siRNA sense strand
gaagcaaaaugccuauauu

SEQ ID NO: 533181 - RNA, 19 nt, Homo sapiens
  misc_RNA (1)...(19): siRNA sense strand
agagaaaugucaccaauac

SEQ ID NO: 533182 - RNA, 19 nt, Homo sapiens
  misc_RNA (1)...(19): siRNA sense strand
ggaguuggccggacugguu

SEQ ID NO: 533183 - RNA, 19 nt, Homo sapiens
  misc_RNA (1)...(19): siRNA sense strand
cauuugcacuuuacaagaa

SEQ ID NO: 533184 - RNA, 19 nt, Homo sapiens
  misc_RNA (1)...(19): siRNA sense strand
gaacauuugcacuuuacaa

SEQ ID NO: 533185 - RNA, 19 nt, Homo sapiens
  misc_RNA (1)...(19): siRNA sense strand
uaacgcugcuugauacugu

SEQ ID NO: 533186 - RNA, 19 nt, Homo sapiens
  misc_RNA (1)...(19): siRNA sense strand
ggucaccaaugccuuaugu

SEQ ID NO: 533187 - RNA, 19 nt, Homo sapiens
  misc_RNA (1)...(19): siRNA sense strand
gaaagucagcaaucagaga

SEQ ID NO: 533188 - RNA, 19 nt, Homo sapiens
  misc_RNA (1)...(19): siRNA sense strand
gaguagaaggaucugauua

SEQ ID NO: 533189 - RNA, 19 nt, Homo sapiens
  misc_RNA (1)...(19): siRNA sense strand
uaccaagccugccuucauu

SEQ ID NO: 533190 - RNA, 19 nt, Homo sapiens
  misc_RNA (1)...(19): siRNA sense strand
ugucaaagccuuacccaaa

SEQ ID NO: 533191 - RNA, 19 nt, Homo sapiens
  misc_RNA (1)...(19): siRNA sense strand
gcuacaagcaucacacuga

SEQ ID NO: 533192 - RNA, 19 nt, Homo sapiens
  misc_RNA (1)...(19): siRNA sense strand
agacagaggaucaauauca

SEQ ID NO: 533193 - RNA, 19 nt, Homo sapiens
  misc_RNA (1)...(19): siRNA sense strand
cagaacacccuacaccuuu

SEQ ID NO: 533194 - RNA, 19 nt, Homo sapiens
  misc_RNA (1)...(19): siRNA sense strand
gaagagagaagugagacaa

SEQ ID NO: 533195 - RNA, 19 nt, Homo sapiens
  misc_RNA (1)...(19): siRNA sense strand
gaagggaucccaggaagug

SEQ ID NO: 533196 - RNA, 19 nt, Homo sapiens
  misc_RNA (1)...(19): siRNA sense strand
aaucacggaugaagaagaa

SEQ ID NO: 533197 - RNA, 19 nt, Homo sapiens
  misc_RNA (1)...(19): siRNA sense strand
caagcauuaugguggauuu

SEQ ID NO: 533198 - RNA, 19 nt, Homo sapiens
  misc_RNA (1)...(19): siRNA sense strand
cugagccuguuucuuauua

SEQ ID NO: 533199 - RNA, 19 nt, Homo sapiens
  misc_RNA (1)...(19): siRNA sense strand
acuaugaacuggucuacaa

SEQ ID NO: 533200 - RNA, 19 nt, Homo sapiens
  misc_RNA (1)...(19): siRNA sense strand
gggcagcuuugaccacuau

SEQ ID NO: 533201 - RNA, 19 nt, Homo sapiens
  misc_RNA (1)...(19): siRNA sense strand
aaugagauaugaaggaguu

SEQ ID NO: 533202 - RNA, 19 nt, Homo sapiens
  misc_RNA (1)...(19): siRNA sense strand
ggaaagaaugagauaugaa

SEQ ID NO: 533203 - RNA, 19 nt, Homo sapiens
  misc_RNA (1)...(19): siRNA sense strand
guaaggcaguuccaguuca

SEQ ID NO: 533204 - RNA, 19 nt, Homo sapiens
  misc_RNA (1)...(19): siRNA sense strand
guagaaggaucugauuaca

SEQ ID NO: 533205 - RNA, 19 nt, Homo sapiens
  misc_RNA (1)...(19): siRNA sense strand
gccaaucuuccauguaaua

SEQ ID NO: 533206 - RNA, 19 nt, Homo sapiens
  misc_RNA (1)...(19): siRNA sense strand
ccacggacucguucaagua

SEQ ID NO: 533207 - RNA, 19 nt, Homo sapiens
  misc_RNA (1)...(19): siRNA sense strand
gaauggagcucgaauuuaa

SEQ ID NO: 533208 - RNA, 19 nt, Homo sapiens
  misc_RNA (1)...(19): siRNA sense strand
gaagaaaucucgcgggaaa

SEQ ID NO: 533209 - RNA, 19 nt, Homo sapiens
  misc_RNA (1)...(19): siRNA sense strand
ggagagaaguugaauuaaa

SEQ ID NO: 533210 - RNA, 19 nt, Homo sapiens
  misc_RNA (1)...(19): siRNA sense strand
ccaaacagcuuauacuauu

SEQ ID NO: 533211 - RNA, 19 nt, Homo sapiens
  misc_RNA (1)...(19): siRNA sense strand
cgucauagaugccauguua

SEQ ID NO: 533212 - RNA, 19 nt, Homo sapiens
  misc_RNA (1)...(19): siRNA sense strand
gaaagcaaaugacaacuug

SEQ ID NO: 533213 - RNA, 19 nt, Homo sapiens
  misc_RNA (1)...(19): siRNA sense strand
gaaagaaagucagcaauca

SEQ ID NO: 533214 - RNA, 19 nt, Homo sapiens
  misc_RNA (1)...(19): siRNA sense strand
gaucaagggugaaguguga

SEQ ID NO: 533215 - RNA, 19 nt, Homo sapiens
  misc_RNA (1)...(19): siRNA sense strand
gaauaugucuucuuugugu

SEQ ID NO: 533216 - RNA, 19 nt, Homo sapiens
  misc_RNA (1)...(19): siRNA sense strand
gaacuggucuacaaagaug

SEQ ID NO: 533217 - RNA, 19 nt, Homo sapiens
  misc_RNA (1)...(19): siRNA sense strand
caacuuggauggcaugauu

SEQ ID NO: 533218 - RNA, 19 nt, Homo sapiens
  misc_RNA (1)...(19): siRNA sense strand
gcagaaauaucagcuagaa

SEQ ID NO: 533219 - RNA, 19 nt, Homo sapiens
  misc_RNA (1)...(19): siRNA sense strand
gaacacaauuccaccauag

SEQ ID NO: 533220 - RNA, 19 nt, Homo sapiens
  misc_RNA (1)...(19): siRNA sense strand
caacaacaauggucguauu

SEQ ID NO: 533221 - RNA, 19 nt, Homo sapiens
  misc_RNA (1)...(19): siRNA sense strand
gaaaugugcuagaacugaa

SEQ ID NO: 533222 - RNA, 19 nt, Homo sapiens
  misc_RNA (1)...(19): siRNA sense strand
gaagaaaugugcuagaacu

SEQ ID NO: 533223 - RNA, 19 nt, Homo sapiens
  misc_RNA (1)...(19): siRNA sense strand
gcagugacuuguggaaaua

SEQ ID NO: 533224 - RNA, 19 nt, Homo sapiens
  misc_RNA (1)...(19): siRNA sense strand
ccaaaguggucaagaauau

SEQ ID NO: 533225 - RNA, 19 nt, Homo sapiens
  misc_RNA (1)...(19): siRNA sense strand
gagagaaguugaauuaaag

SEQ ID NO: 533226 - RNA, 19 nt, Homo sapiens
  misc_RNA (1)...(19): siRNA sense strand
gaaaucacuugguuuaaag

SEQ ID NO: 533227 - RNA, 19 nt, Homo sapiens
  misc_RNA (1)...(19): siRNA sense strand
uagaugagcugcuuaagga

SEQ ID NO: 533228 - RNA, 19 nt, Homo sapiens
  misc_RNA (1)...(19): siRNA sense strand
ccagaaaucacuugguuua

SEQ ID NO: 533229 - RNA, 19 nt, Homo sapiens
  misc_RNA (1)...(19): siRNA sense strand
ggaauuagaugagcugcuu

SEQ ID NO: 533230 - RNA, 19 nt, Homo sapiens
  misc_RNA (1)...(19): siRNA sense strand
ggagaggagcaacgaauua

SEQ ID NO: 533231 - RNA, 19 nt, Homo sapiens
  misc_RNA (1)...(19): siRNA sense strand
gaaguaaacaaaccaaaga

SEQ ID NO: 533232 - RNA, 19 nt, Homo sapiens
  misc_RNA (1)...(19): siRNA sense strand
gugccaaucuuccauguaa

SEQ ID NO: 533233 - RNA, 19 nt, Homo sapiens
  misc_RNA (1)...(19): siRNA sense strand
acacagaaguuaauuguca

SEQ ID NO: 533234 - RNA, 19 nt, Homo sapiens
  misc_RNA (1)...(19): siRNA sense strand
ccauguaacuuuaaugaga

SEQ ID NO: 533235 - RNA, 19 nt, Homo sapiens
  misc_RNA (1)...(19): siRNA sense strand
ucagagauuugagguaaua

SEQ ID NO: 533236 - RNA, 19 nt, Homo sapiens
  misc_RNA (1)...(19): siRNA sense strand
gggaugaggccauuuauga

SEQ ID NO: 533237 - RNA, 19 nt, Homo sapiens
  misc_RNA (1)...(19): siRNA sense strand
ggagaaggauuuauugacu

SEQ ID NO: 533238 - RNA, 19 nt, Homo sapiens
  misc_RNA (1)...(19): siRNA sense strand
ccaaggauauagaguuuau

SEQ ID NO: 533239 - RNA, 19 nt, Homo sapiens
  misc_RNA (1)...(19): siRNA sense strand
uaagacagucagcaaauua

SEQ ID NO: 533240 - RNA, 19 nt, Homo sapiens
  misc_RNA (1)...(19): siRNA sense strand
caaauaaugugggagaaau

SEQ ID NO: 533241 - RNA, 19 nt, Homo sapiens
  misc_RNA (1)...(19): siRNA sense strand
gcaguggucuuuaucaucu

SEQ ID NO: 533242 - RNA, 19 nt, Homo sapiens
  misc_RNA (1)...(19): siRNA sense strand
cagaugaaauggaauuaga

SEQ ID NO: 533243 - RNA, 19 nt, Homo sapiens
  misc_RNA (1)...(19): siRNA sense strand
caacaauggucguauuaag

SEQ ID NO: 533244 - RNA, 19 nt, Homo sapiens
  misc_RNA (1)...(19): siRNA sense strand
gaacuggagucuucauaac

SEQ ID NO: 533245 - RNA, 19 nt, Homo sapiens
  misc_RNA (1)...(19): siRNA sense strand
ggaauggagcucgaauuua

SEQ ID NO: 533246 - RNA, 19 nt, Homo sapiens
  misc_RNA (1)...(19): siRNA sense strand
gagagaaugucacaggaau

SEQ ID NO: 533247 - RNA, 19 nt, Homo sapiens
  misc_RNA (1)...(19): siRNA sense strand
cgaauguaaucgcauauga

SEQ ID NO: 533248 - RNA, 19 nt, Homo sapiens
  misc_RNA (1)...(19): siRNA sense strand
guaagacagucagcaaauu

SEQ ID NO: 533249 - RNA, 19 nt, Homo sapiens
  misc_RNA (1)...(19): siRNA sense strand
gaacugaggcgccuuaacu

SEQ ID NO: 533250 - RNA, 19 nt, Homo sapiens
  misc_RNA (1)...(19): siRNA sense strand
agaaggaucugauuacauc

SEQ ID NO: 533251 - RNA, 19 nt, Homo sapiens
  misc_RNA (1)...(19): siRNA sense strand
ggaguugccucuuucaucu

SEQ ID NO: 533252 - RNA, 19 nt, Homo sapiens
  misc_RNA (1)...(19): siRNA sense strand
gagaaggauuuauugacuu

SEQ ID NO: 533253 - RNA, 19 nt, Homo sapiens
  misc_RNA (1)...(19): siRNA sense strand
gaauagauacgcgaaugua

SEQ ID NO: 533254 - RNA, 19 nt, Homo sapiens
  misc_RNA (1)...(19): siRNA sense strand
gauuugagguaauagaguu

SEQ ID NO: 533255 - RNA, 19 nt, Homo sapiens
  misc_RNA (1)...(19): siRNA sense strand
ggaagugacuaugugaaug

SEQ ID NO: 533256 - RNA, 19 nt, Homo sapiens
  misc_RNA (1)...(19): siRNA sense strand
ugaagagucugaccaagga

SEQ ID NO: 533257 - RNA, 19 nt, Homo sapiens
  misc_RNA (1)...(19): siRNA sense strand
gaauguguggccucaaaua

SEQ ID NO: 533258 - RNA, 19 nt, Homo sapiens
  misc_RNA (1)...(19): siRNA sense strand
gaaagaaugagauaugaag

SEQ ID NO: 533259 - RNA, 19 nt, Homo sapiens
  misc_RNA (1)...(19): siRNA sense strand
gaacaugcagagucuaaga

SEQ ID NO: 533260 - RNA, 19 nt, Homo sapiens
  misc_RNA (1)...(19): siRNA sense strand
gagcaacgaauuaccauug

SEQ ID NO: 533261 - RNA, 19 nt, Homo sapiens
  misc_RNA (1)...(19): siRNA sense strand
gaugauaugccaauaggaa

SEQ ID NO: 533262 - RNA, 19 nt, Homo sapiens
  misc_RNA (1)...(19): siRNA sense strand
caagauaccaguacuuugu

SEQ ID NO: 533263 - RNA, 19 nt, Homo sapiens
  misc_RNA (1)...(19): siRNA sense strand
cagauaccauugccaacua

SEQ ID NO: 533264 - RNA, 19 nt, Homo sapiens
  misc_RNA (1)...(19): siRNA sense strand
gaaccugagucugaaacaa

SEQ ID NO: 533265 - RNA, 19 nt, Homo sapiens
  misc_RNA (1)...(19): siRNA sense strand
gaacacaacgaccagcuau

SEQ ID NO: 533266 - RNA, 19 nt, Homo sapiens
  misc_RNA (1)...(19): siRNA sense strand
gagagaaaugucaccaaua

SEQ ID NO: 533267 - RNA, 19 nt, Homo sapiens
  misc_RNA (1)...(19): siRNA sense strand
ugggagagaaguugaauua

SEQ ID NO: 533268 - RNA, 19 nt, Homo sapiens
  misc_RNA (1)...(19): siRNA sense strand
ggaaagaaagucagcaauc

SEQ ID NO: 533269 - RNA, 19 nt, Homo sapiens
  misc_RNA (1)...(19): siRNA sense strand
uuaaggagauaucuaggaa

SEQ ID NO: 533270 - RNA, 19 nt, Homo sapiens
  misc_RNA (1)...(19): siRNA sense strand
ugaaggaguuguagauauc

SEQ ID NO: 533271 - RNA, 19 nt, Homo sapiens
  misc_RNA (1)...(19): siRNA sense strand
gaagcugacacaaauagaa

SEQ ID NO: 533272 - RNA, 19 nt, Homo sapiens
  misc_RNA (1)...(19): siRNA sense strand
guucgaacauuugcacuuu

SEQ ID NO: 533273 - RNA, 19 nt, Homo sapiens
  misc_RNA (1)...(19): siRNA sense strand
cuacucggauuaugaauuc

SEQ ID NO: 533274 - RNA, 19 nt, Homo sapiens
  misc_RNA (1)...(19): siRNA sense strand
gaaaugggcagagagaaau

SEQ ID NO: 533275 - RNA, 19 nt, Homo sapiens
  misc_RNA (1)...(19): siRNA sense strand
uauccaugaugcacuguua

SEQ ID NO: 533276 - RNA, 19 nt, Homo sapiens
  misc_RNA (1)...(19): siRNA sense strand
ggugaagugugaccaguau

SEQ ID NO: 533277 - RNA, 19 nt, Homo sapiens
  misc_RNA (1)...(19): siRNA sense strand
ccaggaauaugagucaauu

SEQ ID NO: 533278 - RNA, 19 nt, Homo sapiens
  misc_RNA (1)...(19): siRNA sense strand
gcagcauaccgaacaauaa

SEQ ID NO: 533279 - RNA, 19 nt, Homo sapiens
  misc_RNA (1)...(19): siRNA sense strand
ugaaguaccugcaaaugag

SEQ ID NO: 533280 - RNA, 19 nt, Homo sapiens
  misc_RNA (1)...(19): siRNA sense strand
gaagcaaaaugccuauauu

SEQ ID NO: 533281 - RNA, 19 nt, Homo sapiens
  misc_RNA (1)...(19): siRNA sense strand
agagaaaugucaccaauac

SEQ ID NO: 533282 - RNA, 19 nt, Homo sapiens
  misc_RNA (1)...(19): siRNA sense strand
ggaguuggccggacugguu

SEQ ID NO: 533283 - RNA, 19 nt, Homo sapiens
  misc_RNA (1)...(19): siRNA sense strand
cauuugcacuuuacaagaa

SEQ ID NO: 533284 - RNA, 19 nt, Homo sapiens
  misc_RNA (1)...(19): siRNA sense strand
gaacauuugcacuuuacaa

SEQ ID NO: 533285 - RNA, 19 nt, Homo sapiens
  misc_RNA (1)...(19): siRNA sense strand
uaacgcugcuugauacugu

SEQ ID NO: 533286 - RNA, 19 nt, Homo sapiens
  misc_RNA (1)...(19): siRNA sense strand
ggucaccaaugccuuaugu

SEQ ID NO: 533287 - RNA, 19 nt, Homo sapiens
  misc_RNA (1)...(19): siRNA sense strand
gaaagucagcaaucagaga

SEQ ID NO: 533288 - RNA, 19 nt, Homo sapiens
  misc_RNA (1)...(19): siRNA sense strand
gaguagaaggaucugauua

SEQ ID NO: 533289 - RNA, 19 nt, Homo sapiens
  misc_RNA (1)...(19): siRNA sense strand
uaccaagccugccuucauu

SEQ ID NO: 533290 - RNA, 19 nt, Homo sapiens
  misc_RNA (1)...(19): siRNA sense strand
ugucaaagccuuacccaaa

SEQ ID NO: 533291 - RNA, 19 nt, Homo sapiens
  misc_RNA (1)...(19): siRNA sense strand
gcuacaagcaucacacuga

SEQ ID NO: 533292 - RNA, 19 nt, Homo sapiens
  misc_RNA (1)...(19): siRNA sense strand
agacagaggaucaauauca

SEQ ID NO: 533293 - RNA, 19 nt, Homo sapiens
  misc_RNA (1)...(19): siRNA sense strand
cagaacacccuacaccuuu

SEQ ID NO: 533294 - RNA, 19 nt, Homo sapiens
  misc_RNA (1)...(19): siRNA sense strand
gaagagagaagugagacaa

SEQ ID NO: 533295 - RNA, 19 nt, Homo sapiens
  misc_RNA (1)...(19): siRNA sense strand
gaagggaucccaggaagug

SEQ ID NO: 533296 - RNA, 19 nt, Homo sapiens
  misc_RNA (1)...(19): siRNA sense strand
aaucacggaugaagaagaa

SEQ ID NO: 533297 - RNA, 19 nt, Homo sapiens
  misc_RNA (1)...(19): siRNA sense strand
caagcauuaugguggauuu

SEQ ID NO: 533298 - RNA, 19 nt, Homo sapiens
  misc_RNA (1)...(19): siRNA sense strand
cugagccuguuucuuauua

SEQ ID NO: 533299 - RNA, 19 nt, Homo sapiens
  misc_RNA (1)...(19): siRNA sense strand
acuaugaacuggucuacaa

SEQ ID NO: 533300 - RNA, 19 nt, Homo sapiens
  misc_RNA (1)...(19): siRNA sense strand
gggcagcuuugaccacuau

SEQ ID NO: 533301 - RNA, 19 nt, Homo sapiens
  misc_RNA (1)...(19): siRNA sense strand
aaugagauaugaaggaguu

SEQ ID NO: 533302 - RNA, 19 nt, Homo sapiens
  misc_RNA (1)...(19): siRNA sense strand
ggaaagaaugagauaugaa

SEQ ID NO: 533303 - RNA, 19 nt, Homo sapiens
  misc_RNA (1)...(19): siRNA sense strand
guaaggcaguuccaguuca

SEQ ID NO: 533304 - RNA, 19 nt, Homo sapiens
  misc_RNA (1)...(19): siRNA sense strand
guagaaggaucugauuaca

SEQ ID NO: 533305 - RNA, 19 nt, Homo sapiens
  misc_RNA (1)...(19): siRNA sense strand
gccaaucuuccauguaaua

SEQ ID NO: 533306 - RNA, 19 nt, Homo sapiens
  misc_RNA (1)...(19): siRNA sense strand
ccacggacucguucaagua

SEQ ID NO: 533307 - RNA, 19 nt, Homo sapiens
  misc_RNA (1)...(19): siRNA sense strand
gaauggagcucgaauuuaa

SEQ ID NO: 533308 - RNA, 19 nt, Homo sapiens
  misc_RNA (1)...(19): siRNA sense strand
gaagaaaucucgcgggaaa

SEQ ID NO: 533309 - RNA, 19 nt, Homo sapiens
  misc_RNA (1)...(19): siRNA sense strand
ggagagaaguugaauuaaa

SEQ ID NO: 533310 - RNA, 19 nt, Homo sapiens
  misc_RNA (1)...(19): siRNA sense strand
ccaaacagcuuauacuauu

SEQ ID NO: 533311 - RNA, 19 nt, Homo sapiens
  misc_RNA (1)...(19): siRNA sense strand
cgucauagaugccauguua

SEQ ID NO: 533312 - RNA, 19 nt, Homo sapiens
  misc_RNA (1)...(19): siRNA sense strand
gaaagcaaaugacaacuug

SEQ ID NO: 533313 - RNA, 19 nt, Homo sapiens
  misc_RNA (1)...(19): siRNA sense strand
gaaagaaagucagcaauca

SEQ ID NO: 533314 - RNA, 19 nt, Homo sapiens
  misc_RNA (1)...(19): siRNA sense strand
gaucaagggugaaguguga

SEQ ID NO: 533315 - RNA, 19 nt, Homo sapiens
  misc_RNA (1)...(19): siRNA sense strand
gaauaugucuucuuugugu

SEQ ID NO: 533316 - RNA, 19 nt, Homo sapiens
  misc_RNA (1)...(19): siRNA sense strand
gaacuggucuacaaagaug

SEQ ID NO: 533317 - RNA, 19 nt, Homo sapiens
  misc_RNA (1)...(19): siRNA sense strand
caacuuggauggcaugauu

SEQ ID NO: 533318 - RNA, 19 nt, Homo sapiens
  misc_RNA (1)...(19): siRNA sense strand
gcagaaauaucagcuagaa

SEQ ID NO: 533319 - RNA, 19 nt, Homo sapiens
  misc_RNA (1)...(19): siRNA sense strand
gaacacaauuccaccauag

SEQ ID NO: 533320 - RNA, 19 nt, Homo sapiens
  misc_RNA (1)...(19): siRNA sense strand
caacaacaauggucguauu

SEQ ID NO: 533321 - RNA, 19 nt, Homo sapiens
  misc_RNA (1)...(19): siRNA sense strand
gaaaugugcuagaacugaa

SEQ ID NO: 533322 - RNA, 19 nt, Homo sapiens
  misc_RNA (1)...(19): siRNA sense strand
gaagaaaugugcuagaacu

SEQ ID NO: 533323 - RNA, 19 nt, Homo sapiens
  misc_RNA (1)...(19): siRNA sense strand
gcagugacuuguggaaaua

SEQ ID NO: 533324 - RNA, 19 nt, Homo sapiens
  misc_RNA (1)...(19): siRNA sense strand
ccaaaguggucaagaauau

SEQ ID NO: 533325 - RNA, 19 nt, Homo sapiens
  misc_RNA (1)...(19): siRNA sense strand
gagagaaguugaauuaaag

SEQ ID NO: 533326 - RNA, 19 nt, Homo sapiens
  misc_RNA (1)...(19): siRNA sense strand
gaaaucacuugguuuaaag

SEQ ID NO: 533327 - RNA, 19 nt, Homo sapiens
  misc_RNA (1)...(19): siRNA sense strand
uagaugagcugcuuaagga

SEQ ID NO: 533328 - RNA, 19 nt, Homo sapiens
  misc_RNA (1)...(19): siRNA sense strand
ccagaaaucacuugguuua

SEQ ID NO: 533329 - RNA, 19 nt, Homo sapiens
  misc_RNA (1)...(19): siRNA sense strand
ggaauuagaugagcugcuu

SEQ ID NO: 533330 - RNA, 19 nt, Homo sapiens
  misc_RNA (1)...(19): siRNA sense strand
ggagaggagcaacgaauua

SEQ ID NO: 533331 - RNA, 19 nt, Homo sapiens
  misc_RNA (1)...(19): siRNA sense strand
gaaguaaacaaaccaaaga

SEQ ID NO: 533332 - RNA, 19 nt, Homo sapiens
  misc_RNA (1)...(19): siRNA sense strand
gugccaaucuuccauguaa

SEQ ID NO: 533333 - RNA, 19 nt, Homo sapiens
  misc_RNA (1)...(19): siRNA sense strand
acacagaaguuaauuguca

SEQ ID NO: 533334 - RNA, 19 nt, Homo sapiens
  misc_RNA (1)...(19): siRNA sense strand
ccauguaacuuuaaugaga

SEQ ID NO: 533335 - RNA, 19 nt, Homo sapiens
  misc_RNA (1)...(19): siRNA sense strand
ucagagauuugagguaaua

SEQ ID NO: 533336 - RNA, 19 nt, Homo sapiens
  misc_RNA (1)...(19): siRNA sense strand
gggaugaggccauuuauga

SEQ ID NO: 533337 - RNA, 19 nt, Homo sapiens
  misc_RNA (1)...(19): siRNA sense strand
ggagaaggauuuauugacu

SEQ ID NO: 533338 - RNA, 19 nt, Homo sapiens
  misc_RNA (1)...(19): siRNA sense strand
ccaaggauauagaguuuau

SEQ ID NO: 533339 - RNA, 19 nt, Homo sapiens
  misc_RNA (1)...(19): siRNA sense strand
uaagacagucagcaaauua

SEQ ID NO: 533340 - RNA, 19 nt, Homo sapiens
  misc_RNA (1)...(19): siRNA sense strand
caaauaaugugggagaaau

SEQ ID NO: 533341 - RNA, 19 nt, Homo sapiens
  misc_RNA (1)...(19): siRNA sense strand
gcaguggucuuuaucaucu

SEQ ID NO: 533342 - RNA, 19 nt, Homo sapiens
  misc_RNA (1)...(19): siRNA sense strand
cagaugaaauggaauuaga

SEQ ID NO: 533343 - RNA, 19 nt, Homo sapiens
  misc_RNA (1)...(19): siRNA sense strand
caacaauggucguauuaag

SEQ ID NO: 533344 - RNA, 19 nt, Homo sapiens
  misc_RNA (1)...(19): siRNA sense strand
gaacuggagucuucauaac

SEQ ID NO: 533345 - RNA, 19 nt, Homo sapiens
  misc_RNA (1)...(19): siRNA sense strand
ggaauggagcucgaauuua

SEQ ID NO: 533346 - RNA, 19 nt, Homo sapiens
  misc_RNA (1)...(19): siRNA sense strand
gagagaaugucacaggaau

SEQ ID NO: 533347 - RNA, 19 nt, Homo sapiens
  misc_RNA (1)...(19): siRNA sense strand
cgaauguaaucgcauauga

SEQ ID NO: 533348 - RNA, 19 nt, Homo sapiens
  misc_RNA (1)...(19): siRNA sense strand
guaagacagucagcaaauu

SEQ ID NO: 533349 - RNA, 19 nt, Homo sapiens
  misc_RNA (1)...(19): siRNA sense strand
gaacugaggcgccuuaacu

SEQ ID NO: 533350 - RNA, 19 nt, Homo sapiens
  misc_RNA (1)...(19): siRNA sense strand
agaaggaucugauuacauc

SEQ ID NO: 533351 - RNA, 19 nt, Homo sapiens
  misc_RNA (1)...(19): siRNA sense strand
ggaguugccucuuucaucu

SEQ ID NO: 533352 - RNA, 19 nt, Homo sapiens
  misc_RNA (1)...(19): siRNA sense strand
gagaaggauuuauugacuu

SEQ ID NO: 533353 - RNA, 19 nt, Homo sapiens
  misc_RNA (1)...(19): siRNA sense strand
gaauagauacgcgaaugua

SEQ ID NO: 533354 - RNA, 19 nt, Homo sapiens
  misc_RNA (1)...(19): siRNA sense strand
gauuugagguaauagaguu

SEQ ID NO: 533355 - RNA, 19 nt, Homo sapiens
  misc_RNA (1)...(19): siRNA sense strand
ggaagugacuaugugaaug

SEQ ID NO: 533356 - RNA, 19 nt, Homo sapiens
  misc_RNA (1)...(19): siRNA sense strand
ugaagagucugaccaagga

SEQ ID NO: 533357 - RNA, 19 nt, Homo sapiens
  misc_RNA (1)...(19): siRNA sense strand
gaauguguggccucaaaua

SEQ ID NO: 533358 - RNA, 19 nt, Homo sapiens
  misc_RNA (1)...(19): siRNA sense strand
gaaagaaugagauaugaag

SEQ ID NO: 533359 - RNA, 19 nt, Homo sapiens
  misc_RNA (1)...(19): siRNA sense strand
gaacaugcagagucuaaga

SEQ ID NO: 533360 - RNA, 19 nt, Homo sapiens
  misc_RNA (1)...(19): siRNA sense strand
gagcaacgaauuaccauug

SEQ ID NO: 533361 - RNA, 19 nt, Homo sapiens
  misc_RNA (1)...(19): siRNA sense strand
gaugauaugccaauaggaa

SEQ ID NO: 533362 - RNA, 19 nt, Homo sapiens
  misc_RNA (1)...(19): siRNA sense strand
caagauaccaguacuuugu

SEQ ID NO: 533363 - RNA, 19 nt, Homo sapiens
  misc_RNA (1)...(19): siRNA sense strand
cagauaccauugccaacua

SEQ ID NO: 533364 - RNA, 19 nt, Homo sapiens
  misc_RNA (1)...(19): siRNA sense strand
gaaccugagucugaaacaa

SEQ ID NO: 533365 - RNA, 19 nt, Homo sapiens
  misc_RNA (1)...(19): siRNA sense strand
gaacacaacgaccagcuau

SEQ ID NO: 533366 - RNA, 19 nt, Homo sapiens
  misc_RNA (1)...(19): siRNA sense strand
gagagaaaugucaccaaua

SEQ ID NO: 533367 - RNA, 19 nt, Homo sapiens
  misc_RNA (1)...(19): siRNA sense strand
ugggagagaaguugaauua

SEQ ID NO: 533368 - RNA, 19 nt, Homo sapiens
  misc_RNA (1)...(19): siRNA sense strand
ggaaagaaagucagcaauc

SEQ ID NO: 533369 - RNA, 19 nt, Homo sapiens
  misc_RNA (1)...(19): siRNA sense strand
uuaaggagauaucuaggaa

SEQ ID NO: 533370 - RNA, 19 nt, Homo sapiens
  misc_RNA (1)...(19): siRNA sense strand
ugaaggaguuguagauauc

SEQ ID NO: 533371 - RNA, 19 nt, Homo sapiens
  misc_RNA (1)...(19): siRNA sense strand
gaagcugacacaaauagaa

SEQ ID NO: 533372 - RNA, 19 nt, Homo sapiens
  misc_RNA (1)...(19): siRNA sense strand
guucgaacauuugcacuuu

SEQ ID NO: 533373 - RNA, 19 nt, Homo sapiens
  misc_RNA (1)...(19): siRNA sense strand
cuacucggauuaugaauuc

SEQ ID NO: 533374 - RNA, 19 nt, Homo sapiens
  misc_RNA (1)...(19): siRNA sense strand
gaaaugggcagagagaaau

SEQ ID NO: 533375 - RNA, 19 nt, Homo sapiens
  misc_RNA (1)...(19): siRNA sense strand
uauccaugaugcacuguua

SEQ ID NO: 533376 - RNA, 19 nt, Homo sapiens
  misc_RNA (1)...(19): siRNA sense strand
ggugaagugugaccaguau

SEQ ID NO: 533377 - RNA, 19 nt, Homo sapiens
  misc_RNA (1)...(19): siRNA sense strand
ccaggaauaugagucaauu

SEQ ID NO: 533378 - RNA, 19 nt, Homo sapiens
  misc_RNA (1)...(19): siRNA sense strand
gcagcauaccgaacaauaa

SEQ ID NO: 533379 - RNA, 19 nt, Homo sapiens
  misc_RNA (1)...(19): siRNA sense strand
ugaaguaccugcaaaugag

SEQ ID NO: 533380 - RNA, 19 nt, Homo sapiens
  misc_RNA (1)...(19): siRNA sense strand
gaagcaaaaugccuauauu

SEQ ID NO: 533381 - RNA, 19 nt, Homo sapiens
  misc_RNA (1)...(19): siRNA sense strand
agagaaaugucaccaauac

SEQ ID NO: 533382 - RNA, 19 nt, Homo sapiens
  misc_RNA (1)...(19): siRNA sense strand
ggaguuggccggacugguu

SEQ ID NO: 533383 - RNA, 19 nt, Homo sapiens
  misc_RNA (1)...(19): siRNA sense strand
cauuugcacuuuacaagaa

SEQ ID NO: 533384 - RNA, 19 nt, Homo sapiens
  misc_RNA (1)...(19): siRNA sense strand
gaacauuugcacuuuacaa

SEQ ID NO: 533385 - RNA, 19 nt, Homo sapiens
  misc_RNA (1)...(19): siRNA sense strand
uaacgcugcuugauacugu

SEQ ID NO: 533386 - RNA, 19 nt, Homo sapiens
  misc_RNA (1)...(19): siRNA sense strand
ggucaccaaugccuuaugu

SEQ ID NO: 533387 - RNA, 19 nt, Homo sapiens
  misc_RNA (1)...(19): siRNA sense strand
gaaagucagcaaucagaga

SEQ ID NO: 533388 - RNA, 19 nt, Homo sapiens
  misc_RNA (1)...(19): siRNA sense strand
gaguagaaggaucugauua

SEQ ID NO: 533389 - RNA, 19 nt, Homo sapiens
  misc_RNA (1)...(19): siRNA sense strand
uaccaagccugccuucauu

SEQ ID NO: 533390 - RNA, 19 nt, Homo sapiens
  misc_RNA (1)...(19): siRNA sense strand
ugucaaagccuuacccaaa

SEQ ID NO: 533391 - RNA, 19 nt, Homo sapiens
  misc_RNA (1)...(19): siRNA sense strand
gcuacaagcaucacacuga

SEQ ID NO: 533392 - RNA, 19 nt, Homo sapiens
  misc_RNA (1)...(19): siRNA sense strand
agacagaggaucaauauca

SEQ ID NO: 533393 - RNA, 19 nt, Homo sapiens
  misc_RNA (1)...(19): siRNA sense strand
cagaacacccuacaccuuu

SEQ ID NO: 533394 - RNA, 19 nt, Homo sapiens
  misc_RNA (1)...(19): siRNA sense strand
gaagagagaagugagacaa

SEQ ID NO: 533395 - RNA, 19 nt, Homo sapiens
  misc_RNA (1)...(19): siRNA sense strand
gaagggaucccaggaagug

SEQ ID NO: 533396 - RNA, 19 nt, Homo sapiens
  misc_RNA (1)...(19): siRNA sense strand
aaucacggaugaagaagaa

SEQ ID NO: 533397 - RNA, 19 nt, Homo sapiens
  misc_RNA (1)...(19): siRNA sense strand
caagcauuaugguggauuu

SEQ ID NO: 533398 - RNA, 19 nt, Homo sapiens
  misc_RNA (1)...(19): siRNA sense strand
cugagccuguuucuuauua

SEQ ID NO: 533399 - RNA, 19 nt, Homo sapiens
  misc_RNA (1)...(19): siRNA sense strand
acuaugaacuggucuacaa

SEQ ID NO: 533400 - RNA, 19 nt, Homo sapiens
  misc_RNA (1)...(19): siRNA sense strand
gggcagcuuugaccacuau

SEQ ID NO: 533401 - RNA, 19 nt, Homo sapiens
  misc_RNA (1)...(19): siRNA sense strand
aaugagauaugaaggaguu

SEQ ID NO: 533402 - RNA, 19 nt, Homo sapiens
  misc_RNA (1)...(19): siRNA sense strand
ggaaagaaugagauaugaa

SEQ ID NO: 533403 - RNA, 19 nt, Homo sapiens
  misc_RNA (1)...(19): siRNA sense strand
guaaggcaguuccaguuca

SEQ ID NO: 533404 - RNA, 19 nt, Homo sapiens
  misc_RNA (1)...(19): siRNA sense strand
guagaaggaucugauuaca

SEQ ID NO: 533405 - RNA, 19 nt, Homo sapiens
  misc_RNA (1)...(19): siRNA sense strand
gccaaucuuccauguaaua

SEQ ID NO: 533406 - RNA, 19 nt, Homo sapiens
  misc_RNA (1)...(19): siRNA sense strand
ccacggacucguucaagua

SEQ ID NO: 533407 - RNA, 19 nt, Homo sapiens
  misc_RNA (1)...(19): siRNA sense strand
gaauggagcucgaauuuaa

SEQ ID NO: 533408 - RNA, 19 nt, Homo sapiens
  misc_RNA (1)...(19): siRNA sense strand
gaagaaaucucgcgggaaa

SEQ ID NO: 533409 - RNA, 19 nt, Homo sapiens
  misc_RNA (1)...(19): siRNA sense strand
ggagagaaguugaauuaaa

SEQ ID NO: 533410 - RNA, 19 nt, Homo sapiens
  misc_RNA (1)...(19): siRNA sense strand
ccaaacagcuuauacuauu

SEQ ID NO: 533411 - RNA, 19 nt, Homo sapiens
  misc_RNA (1)...(19): siRNA sense strand
cgucauagaugccauguua

SEQ ID NO: 533412 - RNA, 19 nt, Homo sapiens
  misc_RNA (1)...(19): siRNA sense strand
gaaagcaaaugacaacuug

SEQ ID NO: 533413 - RNA, 19 nt, Homo sapiens
  misc_RNA (1)...(19): siRNA sense strand
gaaagaaagucagcaauca

SEQ ID NO: 533414 - RNA, 19 nt, Homo sapiens
  misc_RNA (1)...(19): siRNA sense strand
gaucaagggugaaguguga

SEQ ID NO: 533415 - RNA, 19 nt, Homo sapiens
  misc_RNA (1)...(19): siRNA sense strand
gaauaugucuucuuugugu

SEQ ID NO: 533416 - RNA, 19 nt, Homo sapiens
  misc_RNA (1)...(19): siRNA sense strand
gaacuggucuacaaagaug

SEQ ID NO: 533417 - RNA, 19 nt, Homo sapiens
  misc_RNA (1)...(19): siRNA sense strand
caacuuggauggcaugauu

SEQ ID NO: 533418 - RNA, 19 nt, Homo sapiens
  misc_RNA (1)...(19): siRNA sense strand
gcagaaauaucagcuagaa

SEQ ID NO: 533419 - RNA, 19 nt, Homo sapiens
  misc_RNA (1)...(19): siRNA sense strand
gaacacaauuccaccauag

SEQ ID NO: 533420 - RNA, 19 nt, Homo sapiens
  misc_RNA (1)...(19): siRNA sense strand
caacaacaauggucguauu

SEQ ID NO: 533421 - RNA, 19 nt, Homo sapiens
  misc_RNA (1)...(19): siRNA sense strand
gaaaugugcuagaacugaa

SEQ ID NO: 533422 - RNA, 19 nt, Homo sapiens
  misc_RNA (1)...(19): siRNA sense strand
gaagaaaugugcuagaacu

SEQ ID NO: 533423 - RNA, 19 nt, Homo sapiens
  misc_RNA (1)...(19): siRNA sense strand
gcagugacuuguggaaaua

SEQ ID NO: 533424 - RNA, 19 nt, Homo sapiens
  misc_RNA (1)...(19): siRNA sense strand
ccaaaguggucaagaauau

SEQ ID NO: 533425 - RNA, 19 nt, Homo sapiens
  misc_RNA (1)...(19): siRNA sense strand
gagagaaguugaauuaaag

SEQ ID NO: 533426 - RNA, 19 nt, Homo sapiens
  misc_RNA (1)...(19): siRNA sense strand
gaaaucacuugguuuaaag

SEQ ID NO: 533427 - RNA, 19 nt, Homo sapiens
  misc_RNA (1)...(19): siRNA sense strand
uagaugagcugcuuaagga

SEQ ID NO: 533428 - RNA, 19 nt, Homo sapiens
  misc_RNA (1)...(19): siRNA sense strand
ccagaaaucacuugguuua

SEQ ID NO: 533429 - RNA, 19 nt, Homo sapiens
  misc_RNA (1)...(19): siRNA sense strand
ggaauuagaugagcugcuu

SEQ ID NO: 533430 - RNA, 19 nt, Homo sapiens
  misc_RNA (1)...(19): siRNA sense strand
ggagaggagcaacgaauua

SEQ ID NO: 533431 - RNA, 19 nt, Homo sapiens
  misc_RNA (1)...(19): siRNA sense strand
gaaguaaacaaaccaaaga

SEQ ID NO: 533432 - RNA, 19 nt, Homo sapiens
  misc_RNA (1)...(19): siRNA sense strand
gugccaaucuuccauguaa

SEQ ID NO: 533433 - RNA, 19 nt, Homo sapiens
  misc_RNA (1)...(19): siRNA sense strand
acacagaaguuaauuguca

SEQ ID NO: 533434 - RNA, 19 nt, Homo sapiens
  misc_RNA (1)...(19): siRNA sense strand
ccauguaacuuuaaugaga

SEQ ID NO: 533435 - RNA, 19 nt, Homo sapiens
  misc_RNA (1)...(19): siRNA sense strand
ucagagauuugagguaaua

SEQ ID NO: 533436 - RNA, 19 nt, Homo sapiens
  misc_RNA (1)...(19): siRNA sense strand
gggaugaggccauuuauga

SEQ ID NO: 533437 - RNA, 19 nt, Homo sapiens
  misc_RNA (1)...(19): siRNA sense strand
ggagaaggauuuauugacu

SEQ ID NO: 533438 - RNA, 19 nt, Homo sapiens
  misc_RNA (1)...(19): siRNA sense strand
ccaaggauauagaguuuau

SEQ ID NO: 533439 - RNA, 19 nt, Homo sapiens
  misc_RNA (1)...(19): siRNA sense strand
uaagacagucagcaaauua

SEQ ID NO: 533440 - RNA, 19 nt, Homo sapiens
  misc_RNA (1)...(19): siRNA sense strand
caaauaaugugggagaaau

SEQ ID NO: 533441 - RNA, 19 nt, Homo sapiens
  misc_RNA (1)...(19): siRNA sense strand
gcaguggucuuuaucaucu

SEQ ID NO: 533442 - RNA, 19 nt, Homo sapiens
  misc_RNA (1)...(19): siRNA sense strand
cagaugaaauggaauuaga

SEQ ID NO: 533443 - RNA, 19 nt, Homo sapiens
  misc_RNA (1)...(19): siRNA sense strand
caacaauggucguauuaag

SEQ ID NO: 533444 - RNA, 19 nt, Homo sapiens
  misc_RNA (1)...(19): siRNA sense strand
gaacuggagucuucauaac

SEQ ID NO: 533445 - RNA, 19 nt, Homo sapiens
  misc_RNA (1)...(19): siRNA sense strand
ggaauggagcucgaauuua

SEQ ID NO: 533446 - RNA, 19 nt, Homo sapiens
  misc_RNA (1)...(19): siRNA sense strand
gagagaaugucacaggaau

SEQ ID NO: 533447 - RNA, 19 nt, Homo sapiens
  misc_RNA (1)...(19): siRNA sense strand
cgaauguaaucgcauauga

SEQ ID NO: 533448 - RNA, 19 nt, Homo sapiens
  misc_RNA (1)...(19): siRNA sense strand
guaagacagucagcaaauu

SEQ ID NO: 533449 - RNA, 19 nt, Homo sapiens
  misc_RNA (1)...(19): siRNA sense strand
gaacugaggcgccuuaacu

SEQ ID NO: 533450 - RNA, 19 nt, Homo sapiens
  misc_RNA (1)...(19): siRNA sense strand
agaaggaucugauuacauc

SEQ ID NO: 533451 - RNA, 19 nt, Homo sapiens
  misc_RNA (1)...(19): siRNA sense strand
ggaguugccucuuucaucu

SEQ ID NO: 533452 - RNA, 19 nt, Homo sapiens
  misc_RNA (1)...(19): siRNA sense strand
gagaaggauuuauugacuu

SEQ ID NO: 533453 - RNA, 19 nt, Homo sapiens
  misc_RNA (1)...(19): siRNA sense strand
gaauagauacgcgaaugua

SEQ ID NO: 533454 - RNA, 19 nt, Homo sapiens
  misc_RNA (1)...(19): siRNA sense strand
gauuugagguaauagaguu

SEQ ID NO: 533455 - RNA, 19 nt, Homo sapiens
  misc_RNA (1)...(19): siRNA sense strand
ggaagugacuaugugaaug

SEQ ID NO: 533456 - RNA, 19 nt, Homo sapiens
  misc_RNA (1)...(19): siRNA sense strand
ugaagagucugaccaagga

SEQ ID NO: 533457 - RNA, 19 nt, Homo sapiens
  misc_RNA (1)...(19): siRNA sense strand
gaauguguggccucaaaua

SEQ ID NO: 533458 - RNA, 19 nt, Homo sapiens
  misc_RNA (1)...(19): siRNA sense strand
gaaagaaugagauaugaag

SEQ ID NO: 533459 - RNA, 19 nt, Homo sapiens
  misc_RNA (1)...(19): siRNA sense strand
gaacaugcagagucuaaga

SEQ ID NO: 533460 - RNA, 19 nt, Homo sapiens
  misc_RNA (1)...(19): siRNA sense strand
gagcaacgaauuaccauug

SEQ ID NO: 533461 - RNA, 19 nt, Homo sapiens
  misc_RNA (1)...(19): siRNA sense strand
gaugauaugccaauaggaa

SEQ ID NO: 533462 - RNA, 19 nt, Homo sapiens
  misc_RNA (1)...(19): siRNA sense strand
caagauaccaguacuuugu

SEQ ID NO: 533463 - RNA, 19 nt, Homo sapiens
  misc_RNA (1)...(19): siRNA sense strand
cagauaccauugccaacua

SEQ ID NO: 533464 - RNA, 19 nt, Homo sapiens
  misc_RNA (1)...(19): siRNA sense strand
gaaccugagucugaaacaa

SEQ ID NO: 533465 - RNA, 19 nt, Homo sapiens
  misc_RNA (1)...(19): siRNA sense strand
gaacacaacgaccagcuau

SEQ ID NO: 533466 - RNA, 19 nt, Homo sapiens
  misc_RNA (1)...(19): siRNA sense strand
gagagaaaugucaccaaua

SEQ ID NO: 533467 - RNA, 19 nt, Homo sapiens
  misc_RNA (1)...(19): siRNA sense strand
ugggagagaaguugaauua

SEQ ID NO: 533468 - RNA, 19 nt, Homo sapiens
  misc_RNA (1)...(19): siRNA sense strand
ggaaagaaagucagcaauc

SEQ ID NO: 533469 - RNA, 19 nt, Homo sapiens
  misc_RNA (1)...(19): siRNA sense strand
uuaaggagauaucuaggaa

SEQ ID NO: 533470 - RNA, 19 nt, Homo sapiens
  misc_RNA (1)...(19): siRNA sense strand
ugaaggaguuguagauauc

SEQ ID NO: 533471 - RNA, 19 nt, Homo sapiens
  misc_RNA (1)...(19): siRNA sense strand
gaagcugacacaaauagaa

SEQ ID NO: 533472 - RNA, 19 nt, Homo sapiens
  misc_RNA (1)...(19): siRNA sense strand
guucgaacauuugcacuuu

SEQ ID NO: 533473 - RNA, 19 nt, Homo sapiens
  misc_RNA (1)...(19): siRNA sense strand
cuacucggauuaugaauuc

SEQ ID NO: 533474 - RNA, 19 nt, Homo sapiens
  misc_RNA (1)...(19): siRNA sense strand
gaaaugggcagagagaaau

SEQ ID NO: 533475 - RNA, 19 nt, Homo sapiens
  misc_RNA (1)...(19): siRNA sense strand
uauccaugaugcacuguua

SEQ ID NO: 533476 - RNA, 19 nt, Homo sapiens
  misc_RNA (1)...(19): siRNA sense strand
ggugaagugugaccaguau

SEQ ID NO: 533477 - RNA, 19 nt, Homo sapiens
  misc_RNA (1)...(19): siRNA sense strand
ccaggaauaugagucaauu

SEQ ID NO: 533478 - RNA, 19 nt, Homo sapiens
  misc_RNA (1)...(19): siRNA sense strand
gcagcauaccgaacaauaa

SEQ ID NO: 533479 - RNA, 19 nt, Homo sapiens
  misc_RNA (1)...(19): siRNA sense strand
ugaaguaccugcaaaugag

SEQ ID NO: 533480 - RNA, 19 nt, Homo sapiens
  misc_RNA (1)...(19): siRNA sense strand
gaagcaaaaugccuauauu

SEQ ID NO: 533481 - RNA, 19 nt, Homo sapiens
  misc_RNA (1)...(19): siRNA sense strand
agagaaaugucaccaauac

SEQ ID NO: 533482 - RNA, 19 nt, Homo sapiens
  misc_RNA (1)...(19): siRNA sense strand
ggaguuggccggacugguu

SEQ ID NO: 533483 - RNA, 19 nt, Homo sapiens
  misc_RNA (1)...(19): siRNA sense strand
cauuugcacuuuacaagaa

SEQ ID NO: 533484 - RNA, 19 nt, Homo sapiens
  misc_RNA (1)...(19): siRNA sense strand
gaacauuugcacuuuacaa

SEQ ID NO: 533485 - RNA, 19 nt, Homo sapiens
  misc_RNA (1)...(19): siRNA sense strand
uaacgcugcuugauacugu

SEQ ID NO: 533486 - RNA, 19 nt, Homo sapiens
  misc_RNA (1)...(19): siRNA sense strand
ggucaccaaugccuuaugu

SEQ ID NO: 533487 - RNA, 19 nt, Homo sapiens
  misc_RNA (1)...(19): siRNA sense strand
gaaagucagcaaucagaga

SEQ ID NO: 533488 - RNA, 19 nt, Homo sapiens
  misc_RNA (1)...(19): siRNA sense strand
gaguagaaggaucugauua

SEQ ID NO: 533489 - RNA, 19 nt, Homo sapiens
  misc_RNA (1)...(19): siRNA sense strand
uaccaagccugccuucauu

SEQ ID NO: 533490 - RNA, 19 nt, Homo sapiens
  misc_RNA (1)...(19): siRNA sense strand
ugucaaagccuuacccaaa

SEQ ID NO: 533491 - RNA, 19 nt, Homo sapiens
  misc_RNA (1)...(19): siRNA sense strand
gcuacaagcaucacacuga

SEQ ID NO: 533492 - RNA, 19 nt, Homo sapiens
  misc_RNA (1)...(19): siRNA sense strand
agacagaggaucaauauca

SEQ ID NO: 533493 - RNA, 19 nt, Homo sapiens
  misc_RNA (1)...(19): siRNA sense strand
cagaacacccuacaccuuu

SEQ ID NO: 533494 - RNA, 19 nt, Homo sapiens
  misc_RNA (1)...(19): siRNA sense strand
gaagagagaagugagacaa

SEQ ID NO: 533495 - RNA, 19 nt, Homo sapiens
  misc_RNA (1)...(19): siRNA sense strand
gaagggaucccaggaagug

SEQ ID NO: 533496 - RNA, 19 nt, Homo sapiens
  misc_RNA (1)...(19): siRNA sense strand
aaucacggaugaagaagaa

SEQ ID NO: 533497 - RNA, 19 nt, Homo sapiens
  misc_RNA (1)...(19): siRNA sense strand
caagcauuaugguggauuu

SEQ ID NO: 533498 - RNA, 19 nt, Homo sapiens
  misc_RNA (1)...(19): siRNA sense strand
cugagccuguuucuuauua

SEQ ID NO: 533499 - RNA, 19 nt, Homo sapiens
  misc_RNA (1)...(19): siRNA sense strand
acuaugaacuggucuacaa

SEQ ID NO: 533500 - RNA, 19 nt, Homo sapiens
  misc_RNA (1)...(19): siRNA sense strand
gggcagcuuugaccacuau

SEQ ID NO: 533501 - RNA, 19 nt, Homo sapiens
  misc_RNA (1)...(19): siRNA sense strand
aaugagauaugaaggaguu

SEQ ID NO: 533502 - RNA, 19 nt, Homo sapiens
  misc_RNA (1)...(19): siRNA sense strand
ggaaagaaugagauaugaa

SEQ ID NO: 533503 - RNA, 19 nt, Homo sapiens
  misc_RNA (1)...(19): siRNA sense strand
guaaggcaguuccaguuca

SEQ ID NO: 533504 - RNA, 19 nt, Homo sapiens
  misc_RNA (1)...(19): siRNA sense strand
guagaaggaucugauuaca

SEQ ID NO: 533505 - RNA, 19 nt, Homo sapiens
  misc_RNA (1)...(19): siRNA sense strand
gccaaucuuccauguaaua

SEQ ID NO: 533506 - RNA, 19 nt, Homo sapiens
  misc_RNA (1)...(19): siRNA sense strand
ccacggacucguucaagua

SEQ ID NO: 533507 - RNA, 19 nt, Homo sapiens
  misc_RNA (1)...(19): siRNA sense strand
gaauggagcucgaauuuaa

SEQ ID NO: 533508 - RNA, 19 nt, Homo sapiens
  misc_RNA (1)...(19): siRNA sense strand
gaagaaaucucgcgggaaa

SEQ ID NO: 533509 - RNA, 19 nt, Homo sapiens
  misc_RNA (1)...(19): siRNA sense strand
ggagagaaguugaauuaaa

SEQ ID NO: 533510 - RNA, 19 nt, Homo sapiens
  misc_RNA (1)...(19): siRNA sense strand
ccaaacagcuuauacuauu

SEQ ID NO: 533511 - RNA, 19 nt, Homo sapiens
  misc_RNA (1)...(19): siRNA sense strand
cgucauagaugccauguua

SEQ ID NO: 533512 - RNA, 19 nt, Homo sapiens
  misc_RNA (1)...(19): siRNA sense strand
gaaagcaaaugacaacuug

SEQ ID NO: 533513 - RNA, 19 nt, Homo sapiens
  misc_RNA (1)...(19): siRNA sense strand
gaaagaaagucagcaauca

SEQ ID NO: 533514 - RNA, 19 nt, Homo sapiens
  misc_RNA (1)...(19): siRNA sense strand
gaucaagggugaaguguga

SEQ ID NO: 533515 - RNA, 19 nt, Homo sapiens
  misc_RNA (1)...(19): siRNA sense strand
gaauaugucuucuuugugu

SEQ ID NO: 533516 - RNA, 19 nt, Homo sapiens
  misc_RNA (1)...(19): siRNA sense strand
gaacuggucuacaaagaug

SEQ ID NO: 533517 - RNA, 19 nt, Homo sapiens
  misc_RNA (1)...(19): siRNA sense strand
caacuuggauggcaugauu

SEQ ID NO: 533518 - RNA, 19 nt, Homo sapiens
  misc_RNA (1)...(19): siRNA sense strand
gcagaaauaucagcuagaa

SEQ ID NO: 533519 - RNA, 19 nt, Homo sapiens
  misc_RNA (1)...(19): siRNA sense strand
gaacacaauuccaccauag

SEQ ID NO: 533520 - RNA, 19 nt, Homo sapiens
  misc_RNA (1)...(19): siRNA sense strand
caacaacaauggucguauu

SEQ ID NO: 533521 - RNA, 19 nt, Homo sapiens
  misc_RNA (1)...(19): siRNA sense strand
gaaaugugcuagaacugaa

SEQ ID NO: 533522 - RNA, 19 nt, Homo sapiens
  misc_RNA (1)...(19): siRNA sense strand
gaagaaaugugcuagaacu

SEQ ID NO: 533523 - RNA, 19 nt, Homo sapiens
  misc_RNA (1)...(19): siRNA sense strand
gcagugacuuguggaaaua

SEQ ID NO: 533524 - RNA, 19 nt, Homo sapiens
  misc_RNA (1)...(19): siRNA sense strand
ccaaaguggucaagaauau

SEQ ID NO: 533525 - RNA, 19 nt, Homo sapiens
  misc_RNA (1)...(19): siRNA sense strand
gagagaaguugaauuaaag

SEQ ID NO: 533526 - RNA, 19 nt, Homo sapiens
  misc_RNA (1)...(19): siRNA sense strand
gaaaucacuugguuuaaag

SEQ ID NO: 533527 - RNA, 19 nt, Homo sapiens
  misc_RNA (1)...(19): siRNA sense strand
uagaugagcugcuuaagga

SEQ ID NO: 533528 - RNA, 19 nt, Homo sapiens
  misc_RNA (1)...(19): siRNA sense strand
ccagaaaucacuugguuua

SEQ ID NO: 533529 - RNA, 19 nt, Homo sapiens
  misc_RNA (1)...(19): siRNA sense strand
ggaauuagaugagcugcuu

SEQ ID NO: 533530 - RNA, 19 nt, Homo sapiens
  misc_RNA (1)...(19): siRNA sense strand
ggagaggagcaacgaauua

SEQ ID NO: 533531 - RNA, 19 nt, Homo sapiens
  misc_RNA (1)...(19): siRNA sense strand
gaaguaaacaaaccaaaga

SEQ ID NO: 533532 - RNA, 19 nt, Homo sapiens
  misc_RNA (1)...(19): siRNA sense strand
gugccaaucuuccauguaa

SEQ ID NO: 533533 - RNA, 19 nt, Homo sapiens
  misc_RNA (1)...(19): siRNA sense strand
acacagaaguuaauuguca

SEQ ID NO: 533534 - RNA, 19 nt, Homo sapiens
  misc_RNA (1)...(19): siRNA sense strand
ccauguaacuuuaaugaga

SEQ ID NO: 533535 - RNA, 19 nt, Homo sapiens
  misc_RNA (1)...(19): siRNA sense strand
ucagagauuugagguaaua

SEQ ID NO: 533536 - RNA, 19 nt, Homo sapiens
  misc_RNA (1)...(19): siRNA sense strand
gggaugaggccauuuauga

SEQ ID NO: 533537 - RNA, 19 nt, Homo sapiens
  misc_RNA (1)...(19): siRNA sense strand
ggagaaggauuuauugacu

SEQ ID NO: 533538 - RNA, 19 nt, Homo sapiens
  misc_RNA (1)...(19): siRNA sense strand
ccaaggauauagaguuuau

SEQ ID NO: 533539 - RNA, 19 nt, Homo sapiens
  misc_RNA (1)...(19): siRNA sense strand
uaagacagucagcaaauua

SEQ ID NO: 533540 - RNA, 19 nt, Homo sapiens
  misc_RNA (1)...(19): siRNA sense strand
caaauaaugugggagaaau

SEQ ID NO: 533541 - RNA, 19 nt, Homo sapiens
  misc_RNA (1)...(19): siRNA sense strand
gcaguggucuuuaucaucu

SEQ ID NO: 533542 - RNA, 19 nt, Homo sapiens
  misc_RNA (1)...(19): siRNA sense strand
cagaugaaauggaauuaga

SEQ ID NO: 533543 - RNA, 19 nt, Homo sapiens
  misc_RNA (1)...(19): siRNA sense strand
caacaauggucguauuaag

SEQ ID NO: 533544 - RNA, 19 nt, Homo sapiens
  misc_RNA (1)...(19): siRNA sense strand
gaacuggagucuucauaac

SEQ ID NO: 533545 - RNA, 19 nt, Homo sapiens
  misc_RNA (1)...(19): siRNA sense strand
ggaauggagcucgaauuua

SEQ ID NO: 533546 - RNA, 19 nt, Homo sapiens
  misc_RNA (1)...(19): siRNA sense strand
gagagaaugucacaggaau

SEQ ID NO: 533547 - RNA, 19 nt, Homo sapiens
  misc_RNA (1)...(19): siRNA sense strand
cgaauguaaucgcauauga

SEQ ID NO: 533548 - RNA, 19 nt, Homo sapiens
  misc_RNA (1)...(19): siRNA sense strand
guaagacagucagcaaauu

SEQ ID NO: 533549 - RNA, 19 nt, Homo sapiens
  misc_RNA (1)...(19): siRNA sense strand
gaacugaggcgccuuaacu

SEQ ID NO: 533550 - RNA, 19 nt, Homo sapiens
  misc_RNA (1)...(19): siRNA sense strand
agaaggaucugauuacauc

SEQ ID NO: 533551 - RNA, 19 nt, Homo sapiens
  misc_RNA (1)...(19): siRNA sense strand
ggaguugccucuuucaucu

SEQ ID NO: 533552 - RNA, 19 nt, Homo sapiens
  misc_RNA (1)...(19): siRNA sense strand
gagaaggauuuauugacuu

SEQ ID NO: 533553 - RNA, 19 nt, Homo sapiens
  misc_RNA (1)...(19): siRNA sense strand
gaauagauacgcgaaugua

SEQ ID NO: 533554 - RNA, 19 nt, Homo sapiens
  misc_RNA (1)...(19): siRNA sense strand
gauuugagguaauagaguu

SEQ ID NO: 533555 - RNA, 19 nt, Homo sapiens
  misc_RNA (1)...(19): siRNA sense strand
ggaagugacuaugugaaug

SEQ ID NO: 533556 - RNA, 19 nt, Homo sapiens
  misc_RNA (1)...(19): siRNA sense strand
ugaagagucugaccaagga

SEQ ID NO: 533557 - RNA, 19 nt, Homo sapiens
  misc_RNA (1)...(19): siRNA sense strand
gaauguguggccucaaaua

SEQ ID NO: 533558 - RNA, 19 nt, Homo sapiens
  misc_RNA (1)...(19): siRNA sense strand
gaaagaaugagauaugaag

SEQ ID NO: 533559 - RNA, 19 nt, Homo sapiens
  misc_RNA (1)...(19): siRNA sense strand
gaacaugcagagucuaaga

SEQ ID NO: 533560 - RNA, 19 nt, Homo sapiens
  misc_RNA (1)...(19): siRNA sense strand
gagcaacgaauuaccauug

SEQ ID NO: 533561 - RNA, 19 nt, Homo sapiens
  misc_RNA (1)...(19): siRNA sense strand
gaugauaugccaauaggaa

SEQ ID NO: 533562 - RNA, 19 nt, Homo sapiens
  misc_RNA (1)...(19): siRNA sense strand
caagauaccaguacuuugu

SEQ ID NO: 533563 - RNA, 19 nt, Homo sapiens
  misc_RNA (1)...(19): siRNA sense strand
cagauaccauugccaacua

SEQ ID NO: 533564 - RNA, 19 nt, Homo sapiens
  misc_RNA (1)...(19): siRNA sense strand
gaaccugagucugaaacaa

SEQ ID NO: 533565 - RNA, 19 nt, Homo sapiens
  misc_RNA (1)...(19): siRNA sense strand
gaacacaacgaccagcuau

SEQ ID NO: 533566 - RNA, 19 nt, Homo sapiens
  misc_RNA (1)...(19): siRNA sense strand
gagagaaaugucaccaaua

SEQ ID NO: 533567 - RNA, 19 nt, Homo sapiens
  misc_RNA (1)...(19): siRNA sense strand
ugggagagaaguugaauua

SEQ ID NO: 533568 - RNA, 19 nt, Homo sapiens
  misc_RNA (1)...(19): siRNA sense strand
ggaaagaaagucagcaauc

SEQ ID NO: 533569 - RNA, 19 nt, Homo sapiens
  misc_RNA (1)...(19): siRNA sense strand
uuaaggagauaucuaggaa

SEQ ID NO: 533570 - RNA, 19 nt, Homo sapiens
  misc_RNA (1)...(19): siRNA sense strand
ugaaggaguuguagauauc

SEQ ID NO: 533571 - RNA, 19 nt, Homo sapiens
  misc_RNA (1)...(19): siRNA sense strand
gaagcugacacaaauagaa

SEQ ID NO: 533572 - RNA, 19 nt, Homo sapiens
  misc_RNA (1)...(19): siRNA sense strand
guucgaacauuugcacuuu

SEQ ID NO: 533573 - RNA, 19 nt, Homo sapiens
  misc_RNA (1)...(19): siRNA sense strand
cuacucggauuaugaauuc

SEQ ID NO: 533574 - RNA, 19 nt, Homo sapiens
  misc_RNA (1)...(19): siRNA sense strand
gaaaugggcagagagaaau

SEQ ID NO: 533575 - RNA, 19 nt, Homo sapiens
  misc_RNA (1)...(19): siRNA sense strand
uauccaugaugcacuguua

SEQ ID NO: 533576 - RNA, 19 nt, Homo sapiens
  misc_RNA (1)...(19): siRNA sense strand
ggugaagugugaccaguau

SEQ ID NO: 533577 - RNA, 19 nt, Homo sapiens
  misc_RNA (1)...(19): siRNA sense strand
ccaggaauaugagucaauu

SEQ ID NO: 533578 - RNA, 19 nt, Homo sapiens
  misc_RNA (1)...(19): siRNA sense strand
gcagcauaccgaacaauaa

SEQ ID NO: 533579 - RNA, 19 nt, Homo sapiens
  misc_RNA (1)...(19): siRNA sense strand
ugaaguaccugcaaaugag

SEQ ID NO: 533580 - RNA, 19 nt, Homo sapiens
  misc_RNA (1)...(19): siRNA sense strand
gaagcaaaaugccuauauu

SEQ ID NO: 533581 - RNA, 19 nt, Homo sapiens
  misc_RNA (1)...(19): siRNA sense strand
agagaaaugucaccaauac

SEQ ID NO: 533582 - RNA, 19 nt, Homo sapiens
  misc_RNA (1)...(19): siRNA sense strand
ggaguuggccggacugguu

SEQ ID NO: 533583 - RNA, 19 nt, Homo sapiens
  misc_RNA (1)...(19): siRNA sense strand
cauuugcacuuuacaagaa

SEQ ID NO: 533584 - RNA, 19 nt, Homo sapiens
  misc_RNA (1)...(19): siRNA sense strand
gaacauuugcacuuuacaa

SEQ ID NO: 533585 - RNA, 19 nt, Homo sapiens
  misc_RNA (1)...(19): siRNA sense strand
uaacgcugcuugauacugu

SEQ ID NO: 533586 - RNA, 19 nt, Homo sapiens
  misc_RNA (1)...(19): siRNA sense strand
ggucaccaaugccuuaugu

SEQ ID NO: 533587 - RNA, 19 nt, Homo sapiens
  misc_RNA (1)...(19): siRNA sense strand
gaaagucagcaaucagaga

SEQ ID NO: 533588 - RNA, 19 nt, Homo sapiens
  misc_RNA (1)...(19): siRNA sense strand
gaguagaaggaucugauua

SEQ ID NO: 533589 - RNA, 19 nt, Homo sapiens
  misc_RNA (1)...(19): siRNA sense strand
uaccaagccugccuucauu

SEQ ID NO: 533590 - RNA, 19 nt, Homo sapiens
  misc_RNA (1)...(19): siRNA sense strand
ugucaaagccuuacccaaa

SEQ ID NO: 533591 - RNA, 19 nt, Homo sapiens
  misc_RNA (1)...(19): siRNA sense strand
gcuacaagcaucacacuga

SEQ ID NO: 533592 - RNA, 19 nt, Homo sapiens
  misc_RNA (1)...(19): siRNA sense strand
agacagaggaucaauauca

SEQ ID NO: 533593 - RNA, 19 nt, Homo sapiens
  misc_RNA (1)...(19): siRNA sense strand
cagaacacccuacaccuuu

SEQ ID NO: 533594 - RNA, 19 nt, Homo sapiens
  misc_RNA (1)...(19): siRNA sense strand
gaagagagaagugagacaa

SEQ ID NO: 533595 - RNA, 19 nt, Homo sapiens
  misc_RNA (1)...(19): siRNA sense strand
gaagggaucccaggaagug

SEQ ID NO: 533596 - RNA, 19 nt, Homo sapiens
  misc_RNA (1)...(19): siRNA sense strand
aaucacggaugaagaagaa

SEQ ID NO: 533597 - RNA, 19 nt, Homo sapiens
  misc_RNA (1)...(19): siRNA sense strand
caagcauuaugguggauuu

SEQ ID NO: 533598 - RNA, 19 nt, Homo sapiens
  misc_RNA (1)...(19): siRNA sense strand
cugagccuguuucuuauua

SEQ ID NO: 533599 - RNA, 19 nt, Homo sapiens
  misc_RNA (1)...(19): siRNA sense strand
acuaugaacuggucuacaa

SEQ ID NO: 533600 - RNA, 19 nt, Homo sapiens
  misc_RNA (1)...(19): siRNA sense strand
gggcagcuuugaccacuau

SEQ ID NO: 533601 - RNA, 19 nt, Homo sapiens
  misc_RNA (1)...(19): siRNA sense strand
aaugagauaugaaggaguu

SEQ ID NO: 533602 - RNA, 19 nt, Homo sapiens
  misc_RNA (1)...(19): siRNA sense strand
ggaaagaaugagauaugaa

SEQ ID NO: 533603 - RNA, 19 nt, Homo sapiens
  misc_RNA (1)...(19): siRNA sense strand
guaaggcaguuccaguuca

SEQ ID NO: 533604 - RNA, 19 nt, Homo sapiens
  misc_RNA (1)...(19): siRNA sense strand
guagaaggaucugauuaca

SEQ ID NO: 533605 - RNA, 19 nt, Homo sapiens
  misc_RNA (1)...(19): siRNA sense strand
gccaaucuuccauguaaua

SEQ ID NO: 533606 - RNA, 19 nt, Homo sapiens
  misc_RNA (1)...(19): siRNA sense strand
ccacggacucguucaagua

SEQ ID NO: 533607 - RNA, 19 nt, Homo sapiens
  misc_RNA (1)...(19): siRNA sense strand
gaauggagcucgaauuuaa

SEQ ID NO: 533608 - RNA, 19 nt, Homo sapiens
  misc_RNA (1)...(19): siRNA sense strand
gaagaaaucucgcgggaaa

SEQ ID NO: 533609 - RNA, 19 nt, Homo sapiens
  misc_RNA (1)...(19): siRNA sense strand
ggagagaaguugaauuaaa

SEQ ID NO: 533610 - RNA, 19 nt, Homo sapiens
  misc_RNA (1)...(19): siRNA sense strand
ccaaacagcuuauacuauu

SEQ ID NO: 533611 - RNA, 19 nt, Homo sapiens
  misc_RNA (1)...(19): siRNA sense strand
cgucauagaugccauguua

SEQ ID NO: 533612 - RNA, 19 nt, Homo sapiens
  misc_RNA (1)...(19): siRNA sense strand
gaaagcaaaugacaacuug

SEQ ID NO: 533613 - RNA, 19 nt, Homo sapiens
  misc_RNA (1)...(19): siRNA sense strand
gaaagaaagucagcaauca

SEQ ID NO: 533614 - RNA, 19 nt, Homo sapiens
  misc_RNA (1)...(19): siRNA sense strand
gaucaagggugaaguguga

SEQ ID NO: 533615 - RNA, 19 nt, Homo sapiens
  misc_RNA (1)...(19): siRNA sense strand
gaauaugucuucuuugugu

SEQ ID NO: 533616 - RNA, 19 nt, Homo sapiens
  misc_RNA (1)...(19): siRNA sense strand
gaacuggucuacaaagaug

SEQ ID NO: 533617 - RNA, 19 nt, Homo sapiens
  misc_RNA (1)...(19): siRNA sense strand
caacuuggauggcaugauu

SEQ ID NO: 533618 - RNA, 19 nt, Homo sapiens
  misc_RNA (1)...(19): siRNA sense strand
gcagaaauaucagcuagaa

SEQ ID NO: 533619 - RNA, 19 nt, Homo sapiens
  misc_RNA (1)...(19): siRNA sense strand
gaacacaauuccaccauag

SEQ ID NO: 533620 - RNA, 19 nt, Homo sapiens
  misc_RNA (1)...(19): siRNA sense strand
caacaacaauggucguauu

SEQ ID NO: 533621 - RNA, 19 nt, Homo sapiens
  misc_RNA (1)...(19): siRNA sense strand
gaaaugugcuagaacugaa

SEQ ID NO: 533622 - RNA, 19 nt, Homo sapiens
  misc_RNA (1)...(19): siRNA sense strand
gaagaaaugugcuagaacu

SEQ ID NO: 533623 - RNA, 19 nt, Homo sapiens
  misc_RNA (1)...(19): siRNA sense strand
gcagugacuuguggaaaua

SEQ ID NO: 533624 - RNA, 19 nt, Homo sapiens
  misc_RNA (1)...(19): siRNA sense strand
ccaaaguggucaagaauau

SEQ ID NO: 533625 - RNA, 19 nt, Homo sapiens
  misc_RNA (1)...(19): siRNA sense strand
gagagaaguugaauuaaag

SEQ ID NO: 533626 - RNA, 19 nt, Homo sapiens
  misc_RNA (1)...(19): siRNA sense strand
gaaaucacuugguuuaaag

SEQ ID NO: 533627 - RNA, 19 nt, Homo sapiens
  misc_RNA (1)...(19): siRNA sense strand
uagaugagcugcuuaagga

SEQ ID NO: 533628 - RNA, 19 nt, Homo sapiens
  misc_RNA (1)...(19): siRNA sense strand
ccagaaaucacuugguuua

SEQ ID NO: 533629 - RNA, 19 nt, Homo sapiens
  misc_RNA (1)...(19): siRNA sense strand
ggaauuagaugagcugcuu

SEQ ID NO: 533630 - RNA, 19 nt, Homo sapiens
  misc_RNA (1)...(19): siRNA sense strand
ggagaggagcaacgaauua

SEQ ID NO: 533631 - RNA, 19 nt, Homo sapiens
  misc_RNA (1)...(19): siRNA sense strand
gaaguaaacaaaccaaaga

SEQ ID NO: 533632 - RNA, 19 nt, Homo sapiens
  misc_RNA (1)...(19): siRNA sense strand
gugccaaucuuccauguaa

SEQ ID NO: 533633 - RNA, 19 nt, Homo sapiens
  misc_RNA (1)...(19): siRNA sense strand
acacagaaguuaauuguca

SEQ ID NO: 533634 - RNA, 19 nt, Homo sapiens
  misc_RNA (1)...(19): siRNA sense strand
ccauguaacuuuaaugaga

SEQ ID NO: 533635 - RNA, 19 nt, Homo sapiens
  misc_RNA (1)...(19): siRNA sense strand
ucagagauuugagguaaua

SEQ ID NO: 533636 - RNA, 19 nt, Homo sapiens
  misc_RNA (1)...(19): siRNA sense strand
gggaugaggccauuuauga

SEQ ID NO: 533637 - RNA, 19 nt, Homo sapiens
  misc_RNA (1)...(19): siRNA sense strand
ggagaaggauuuauugacu

SEQ ID NO: 533638 - RNA, 19 nt, Homo sapiens
  misc_RNA (1)...(19): siRNA sense strand
ccaaggauauagaguuuau

SEQ ID NO: 533639 - RNA, 19 nt, Homo sapiens
  misc_RNA (1)...(19): siRNA sense strand
uaagacagucagcaaauua

SEQ ID NO: 533640 - RNA, 19 nt, Homo sapiens
  misc_RNA (1)...(19): siRNA sense strand
caaauaaugugggagaaau

SEQ ID NO: 533641 - RNA, 19 nt, Homo sapiens
  misc_RNA (1)...(19): siRNA sense strand
gcaguggucuuuaucaucu

SEQ ID NO: 533642 - RNA, 19 nt, Homo sapiens
  misc_RNA (1)...(19): siRNA sense strand
cagaugaaauggaauuaga

SEQ ID NO: 533643 - RNA, 19 nt, Homo sapiens
  misc_RNA (1)...(19): siRNA sense strand
caacaauggucguauuaag

SEQ ID NO: 533644 - RNA, 19 nt, Homo sapiens
  misc_RNA (1)...(19): siRNA sense strand
gaacuggagucuucauaac

SEQ ID NO: 533645 - RNA, 19 nt, Homo sapiens
  misc_RNA (1)...(19): siRNA sense strand
ggaauggagcucgaauuua

SEQ ID NO: 533646 - RNA, 19 nt, Homo sapiens
  misc_RNA (1)...(19): siRNA sense strand
gagagaaugucacaggaau

SEQ ID NO: 533647 - RNA, 19 nt, Homo sapiens
  misc_RNA (1)...(19): siRNA sense strand
cgaauguaaucgcauauga

SEQ ID NO: 533648 - RNA, 19 nt, Homo sapiens
  misc_RNA (1)...(19): siRNA sense strand
guaagacagucagcaaauu

SEQ ID NO: 533649 - RNA, 19 nt, Homo sapiens
  misc_RNA (1)...(19): siRNA sense strand
gaacugaggcgccuuaacu

SEQ ID NO: 533650 - RNA, 19 nt, Homo sapiens
  misc_RNA (1)...(19): siRNA sense strand
agaaggaucugauuacauc

SEQ ID NO: 533651 - RNA, 19 nt, Homo sapiens
  misc_RNA (1)...(19): siRNA sense strand
ggaguugccucuuucaucu

SEQ ID NO: 533652 - RNA, 19 nt, Homo sapiens
  misc_RNA (1)...(19): siRNA sense strand
gagaaggauuuauugacuu

SEQ ID NO: 533653 - RNA, 19 nt, Homo sapiens
  misc_RNA (1)...(19): siRNA sense strand
gaauagauacgcgaaugua

SEQ ID NO: 533654 - RNA, 19 nt, Homo sapiens
  misc_RNA (1)...(19): siRNA sense strand
gauuugagguaauagaguu

SEQ ID NO: 533655 - RNA, 19 nt, Homo sapiens
  misc_RNA (1)...(19): siRNA sense strand
ggaagugacuaugugaaug

SEQ ID NO: 533656 - RNA, 19 nt, Homo sapiens
  misc_RNA (1)...(19): siRNA sense strand
ugaagagucugaccaagga

SEQ ID NO: 533657 - RNA, 19 nt, Homo sapiens
  misc_RNA (1)...(19): siRNA sense strand
gaauguguggccucaaaua

SEQ ID NO: 533658 - RNA, 19 nt, Homo sapiens
  misc_RNA (1)...(19): siRNA sense strand
gaaagaaugagauaugaag

SEQ ID NO: 533659 - RNA, 19 nt, Homo sapiens
  misc_RNA (1)...(19): siRNA sense strand
gaacaugcagagucuaaga

SEQ ID NO: 533660 - RNA, 19 nt, Homo sapiens
  misc_RNA (1)...(19): siRNA sense strand
gagcaacgaauuaccauug

SEQ ID NO: 533661 - RNA, 19 nt, Homo sapiens
  misc_RNA (1)...(19): siRNA sense strand
gaugauaugccaauaggaa

SEQ ID NO: 533662 - RNA, 19 nt, Homo sapiens
  misc_RNA (1)...(19): siRNA sense strand
caagauaccaguacuuugu

SEQ ID NO: 533663 - RNA, 19 nt, Homo sapiens
  misc_RNA (1)...(19): siRNA sense strand
cagauaccauugccaacua

SEQ ID NO: 533664 - RNA, 19 nt, Homo sapiens
  misc_RNA (1)...(19): siRNA sense strand
gaaccugagucugaaacaa

SEQ ID NO: 533665 - RNA, 19 nt, Homo sapiens
  misc_RNA (1)...(19): siRNA sense strand
gaacacaacgaccagcuau

SEQ ID NO: 533666 - RNA, 19 nt, Homo sapiens
  misc_RNA (1)...(19): siRNA sense strand
gagagaaaugucaccaaua

SEQ ID NO: 533667 - RNA, 19 nt, Homo sapiens
  misc_RNA (1)...(19): siRNA sense strand
ugggagagaaguugaauua

SEQ ID NO: 533668 - RNA, 19 nt, Homo sapiens
  misc_RNA (1)...(19): siRNA sense strand
ggaaagaaagucagcaauc

SEQ ID NO: 533669 - RNA, 19 nt, Homo sapiens
  misc_RNA (1)...(19): siRNA sense strand
uuaaggagauaucuaggaa

SEQ ID NO: 533670 - RNA, 19 nt, Homo sapiens
  misc_RNA (1)...(19): siRNA sense strand
ugaaggaguuguagauauc

SEQ ID NO: 533671 - RNA, 19 nt, Homo sapiens
  misc_RNA (1)...(19): siRNA sense strand
gaagcugacacaaauagaa

SEQ ID NO: 533672 - RNA, 19 nt, Homo sapiens
  misc_RNA (1)...(19): siRNA sense strand
guucgaacauuugcacuuu

SEQ ID NO: 533673 - RNA, 19 nt, Homo sapiens
  misc_RNA (1)...(19): siRNA sense strand
cuacucggauuaugaauuc

SEQ ID NO: 533674 - RNA, 19 nt, Homo sapiens
  misc_RNA (1)...(19): siRNA sense strand
gaaaugggcagagagaaau

SEQ ID NO: 533675 - RNA, 19 nt, Homo sapiens
  misc_RNA (1)...(19): siRNA sense strand
uauccaugaugcacuguua

SEQ ID NO: 533676 - RNA, 19 nt, Homo sapiens
  misc_RNA (1)...(19): siRNA sense strand
ggugaagugugaccaguau

SEQ ID NO: 533677 - RNA, 19 nt, Homo sapiens
  misc_RNA (1)...(19): siRNA sense strand
ccaggaauaugagucaauu

SEQ ID NO: 533678 - RNA, 19 nt, Homo sapiens
  misc_RNA (1)...(19): siRNA sense strand
gcagcauaccgaacaauaa

SEQ ID NO: 533679 - RNA, 19 nt, Homo sapiens
  misc_RNA (1)...(19): siRNA sense strand
ugaaguaccugcaaaugag

SEQ ID NO: 533680 - RNA, 19 nt, Homo sapiens
  misc_RNA (1)...(19): siRNA sense strand
gaagcaaaaugccuauauu

SEQ ID NO: 533681 - RNA, 19 nt, Homo sapiens
  misc_RNA (1)...(19): siRNA sense strand
agagaaaugucaccaauac

SEQ ID NO: 533682 - RNA, 19 nt, Homo sapiens
  misc_RNA (1)...(19): siRNA sense strand
ggaguuggccggacugguu

SEQ ID NO: 533683 - RNA, 19 nt, Homo sapiens
  misc_RNA (1)...(19): siRNA sense strand
cauuugcacuuuacaagaa

SEQ ID NO: 533684 - RNA, 19 nt, Homo sapiens
  misc_RNA (1)...(19): siRNA sense strand
gaacauuugcacuuuacaa

SEQ ID NO: 533685 - RNA, 19 nt, Homo sapiens
  misc_RNA (1)...(19): siRNA sense strand
uaacgcugcuugauacugu

SEQ ID NO: 533686 - RNA, 19 nt, Homo sapiens
  misc_RNA (1)...(19): siRNA sense strand
ggucaccaaugccuuaugu

SEQ ID NO: 533687 - RNA, 19 nt, Homo sapiens
  misc_RNA (1)...(19): siRNA sense strand
gaaagucagcaaucagaga

SEQ ID NO: 533688 - RNA, 19 nt, Homo sapiens
  misc_RNA (1)...(19): siRNA sense strand
gaguagaaggaucugauua

SEQ ID NO: 533689 - RNA, 19 nt, Homo sapiens
  misc_RNA (1)...(19): siRNA sense strand
uaccaagccugccuucauu

SEQ ID NO: 533690 - RNA, 19 nt, Homo sapiens
  misc_RNA (1)...(19): siRNA sense strand
ugucaaagccuuacccaaa

SEQ ID NO: 533691 - RNA, 19 nt, Homo sapiens
  misc_RNA (1)...(19): siRNA sense strand
gcuacaagcaucacacuga

SEQ ID NO: 533692 - RNA, 19 nt, Homo sapiens
  misc_RNA (1)...(19): siRNA sense strand
agacagaggaucaauauca

SEQ ID NO: 533693 - RNA, 19 nt, Homo sapiens
  misc_RNA (1)...(19): siRNA sense strand
cagaacacccuacaccuuu

SEQ ID NO: 533694 - RNA, 19 nt, Homo sapiens
  misc_RNA (1)...(19): siRNA sense strand
gaagagagaagugagacaa

SEQ ID NO: 533695 - RNA, 19 nt, Homo sapiens
  misc_RNA (1)...(19): siRNA sense strand
gaagggaucccaggaagug

SEQ ID NO: 533696 - RNA, 19 nt, Homo sapiens
  misc_RNA (1)...(19): siRNA sense strand
aaucacggaugaagaagaa

SEQ ID NO: 533697 - RNA, 19 nt, Homo sapiens
  misc_RNA (1)...(19): siRNA sense strand
caagcauuaugguggauuu

SEQ ID NO: 533698 - RNA, 19 nt, Homo sapiens
  misc_RNA (1)...(19): siRNA sense strand
cugagccuguuucuuauua

SEQ ID NO: 533699 - RNA, 19 nt, Homo sapiens
  misc_RNA (1)...(19): siRNA sense strand
acuaugaacuggucuacaa

SEQ ID NO: 533700 - RNA, 19 nt, Homo sapiens
  misc_RNA (1)...(19): siRNA sense strand
gggcagcuuugaccacuau

SEQ ID NO: 533701 - RNA, 19 nt, Homo sapiens
  misc_RNA (1)...(19): siRNA sense strand
aaugagauaugaaggaguu

SEQ ID NO: 533702 - RNA, 19 nt, Homo sapiens
  misc_RNA (1)...(19): siRNA sense strand
ggaaagaaugagauaugaa

SEQ ID NO: 533703 - RNA, 19 nt, Homo sapiens
  misc_RNA (1)...(19): siRNA sense strand
guaaggcaguuccaguuca

SEQ ID NO: 533704 - RNA, 19 nt, Homo sapiens
  misc_RNA (1)...(19): siRNA sense strand
guagaaggaucugauuaca

SEQ ID NO: 533705 - RNA, 19 nt, Homo sapiens
  misc_RNA (1)...(19): siRNA sense strand
gccaaucuuccauguaaua

SEQ ID NO: 533706 - RNA, 19 nt, Homo sapiens
  misc_RNA (1)...(19): siRNA sense strand
ccacggacucguucaagua

SEQ ID NO: 533707 - RNA, 19 nt, Homo sapiens
  misc_RNA (1)...(19): siRNA sense strand
gaauggagcucgaauuuaa

SEQ ID NO: 533708 - RNA, 19 nt, Homo sapiens
  misc_RNA (1)...(19): siRNA sense strand
gaagaaaucucgcgggaaa

SEQ ID NO: 533709 - RNA, 19 nt, Homo sapiens
  misc_RNA (1)...(19): siRNA sense strand
ggagagaaguugaauuaaa

SEQ ID NO: 533710 - RNA, 19 nt, Homo sapiens
  misc_RNA (1)...(19): siRNA sense strand
ccaaacagcuuauacuauu

SEQ ID NO: 533711 - RNA, 19 nt, Homo sapiens
  misc_RNA (1)...(19): siRNA sense strand
cgucauagaugccauguua

SEQ ID NO: 533712 - RNA, 19 nt, Homo sapiens
  misc_RNA (1)...(19): siRNA sense strand
gaaagcaaaugacaacuug

SEQ ID NO: 533713 - RNA, 19 nt, Homo sapiens
  misc_RNA (1)...(19): siRNA sense strand
gaaagaaagucagcaauca

SEQ ID NO: 533714 - RNA, 19 nt, Homo sapiens
  misc_RNA (1)...(19): siRNA sense strand
gaucaagggugaaguguga

SEQ ID NO: 533715 - RNA, 19 nt, Homo sapiens
  misc_RNA (1)...(19): siRNA sense strand
gaauaugucuucuuugugu

SEQ ID NO: 533716 - RNA, 19 nt, Homo sapiens
  misc_RNA (1)...(19): siRNA sense strand
gaacuggucuacaaagaug

SEQ ID NO: 533717 - RNA, 19 nt, Homo sapiens
  misc_RNA (1)...(19): siRNA sense strand
caacuuggauggcaugauu

SEQ ID NO: 533718 - RNA, 19 nt, Homo sapiens
  misc_RNA (1)...(19): siRNA sense strand
gcagaaauaucagcuagaa

SEQ ID NO: 533719 - RNA, 19 nt, Homo sapiens
  misc_RNA (1)...(19): siRNA sense strand
gaacacaauuccaccauag

SEQ ID NO: 533720 - RNA, 19 nt, Homo sapiens
  misc_RNA (1)...(19): siRNA sense strand
caacaacaauggucguauu

SEQ ID NO: 533721 - RNA, 19 nt, Homo sapiens
  misc_RNA (1)...(19): siRNA sense strand
gaaaugugcuagaacugaa

SEQ ID NO: 533722 - RNA, 19 nt, Homo sapiens
  misc_RNA (1)...(19): siRNA sense strand
gaagaaaugugcuagaacu

SEQ ID NO: 533723 - RNA, 19 nt, Homo sapiens
  misc_RNA (1)...(19): siRNA sense strand
gcagugacuuguggaaaua

SEQ ID NO: 533724 - RNA, 19 nt, Homo sapiens
  misc_RNA (1)...(19): siRNA sense strand
ccaaaguggucaagaauau

SEQ ID NO: 533725 - RNA, 19 nt, Homo sapiens
  misc_RNA (1)...(19): siRNA sense strand
gagagaaguugaauuaaag

SEQ ID NO: 533726 - RNA, 19 nt, Homo sapiens
  misc_RNA (1)...(19): siRNA sense strand
gaaaucacuugguuuaaag

SEQ ID NO: 533727 - RNA, 19 nt, Homo sapiens
  misc_RNA (1)...(19): siRNA sense strand
uagaugagcugcuuaagga

SEQ ID NO: 533728 - RNA, 19 nt, Homo sapiens
  misc_RNA (1)...(19): siRNA sense strand
ccagaaaucacuugguuua

SEQ ID NO: 533729 - RNA, 19 nt, Homo sapiens
  misc_RNA (1)...(19): siRNA sense strand
ggaauuagaugagcugcuu

SEQ ID NO: 533730 - RNA, 19 nt, Homo sapiens
  misc_RNA (1)...(19): siRNA sense strand
ggagaggagcaacgaauua

SEQ ID NO: 533731 - RNA, 19 nt, Homo sapiens
  misc_RNA (1)...(19): siRNA sense strand
gaaguaaacaaaccaaaga

SEQ ID NO: 533732 - RNA, 19 nt, Homo sapiens
  misc_RNA (1)...(19): siRNA sense strand
gugccaaucuuccauguaa

SEQ ID NO: 533733 - RNA, 19 nt, Homo sapiens
  misc_RNA (1)...(19): siRNA sense strand
acacagaaguuaauuguca

SEQ ID NO: 533734 - RNA, 19 nt, Homo sapiens
  misc_RNA (1)...(19): siRNA sense strand
ccauguaacuuuaaugaga

SEQ ID NO: 533735 - RNA, 19 nt, Homo sapiens
  misc_RNA (1)...(19): siRNA sense strand
ucagagauuugagguaaua

SEQ ID NO: 533736 - RNA, 19 nt, Homo sapiens
  misc_RNA (1)...(19): siRNA sense strand
gggaugaggccauuuauga

SEQ ID NO: 533737 - RNA, 19 nt, Homo sapiens
  misc_RNA (1)...(19): siRNA sense strand
ggagaaggauuuauugacu

SEQ ID NO: 533738 - RNA, 19 nt, Homo sapiens
  misc_RNA (1)...(19): siRNA sense strand
ccaaggauauagaguuuau

SEQ ID NO: 533739 - RNA, 19 nt, Homo sapiens
  misc_RNA (1)...(19): siRNA sense strand
uaagacagucagcaaauua

SEQ ID NO: 533740 - RNA, 19 nt, Homo sapiens
  misc_RNA (1)...(19): siRNA sense strand
caaauaaugugggagaaau

SEQ ID NO: 533741 - RNA, 19 nt, Homo sapiens
  misc_RNA (1)...(19): siRNA sense strand
gcaguggucuuuaucaucu

SEQ ID NO: 533742 - RNA, 19 nt, Homo sapiens
  misc_RNA (1)...(19): siRNA sense strand
cagaugaaauggaauuaga

SEQ ID NO: 533743 - RNA, 19 nt, Homo sapiens
  misc_RNA (1)...(19): siRNA sense strand
caacaauggucguauuaag

SEQ ID NO: 533744 - RNA, 19 nt, Homo sapiens
  misc_RNA (1)...(19): siRNA sense strand
gaacuggagucuucauaac

SEQ ID NO: 533745 - RNA, 19 nt, Homo sapiens
  misc_RNA (1)...(19): siRNA sense strand
ggaauggagcucgaauuua

SEQ ID NO: 533746 - RNA, 19 nt, Homo sapiens
  misc_RNA (1)...(19): siRNA sense strand
gagagaaugucacaggaau

SEQ ID NO: 533747 - RNA, 19 nt, Homo sapiens
  misc_RNA (1)...(19): siRNA sense strand
cgaauguaaucgcauauga

SEQ ID NO: 533748 - RNA, 19 nt, Homo sapiens
  misc_RNA (1)...(19): siRNA sense strand
guaagacagucagcaaauu

SEQ ID NO: 533749 - RNA, 19 nt, Homo sapiens
  misc_RNA (1)...(19): siRNA sense strand
gaacugaggcgccuuaacu

SEQ ID NO: 533750 - RNA, 19 nt, Homo sapiens
  misc_RNA (1)...(19): siRNA sense strand
agaaggaucugauuacauc

SEQ ID NO: 533751 - RNA, 19 nt, Homo sapiens
  misc_RNA (1)...(19): siRNA sense strand
ggaguugccucuuucaucu

SEQ ID NO: 533752 - RNA, 19 nt, Homo sapiens
  misc_RNA (1)...(19): siRNA sense strand
gagaaggauuuauugacuu

SEQ ID NO: 533753 - RNA, 19 nt, Homo sapiens
  misc_RNA (1)...(19): siRNA sense strand
gaauagauacgcgaaugua

SEQ ID NO: 533754 - RNA, 19 nt, Homo sapiens
  misc_RNA (1)...(19): siRNA sense strand
gauuugagguaauagaguu

SEQ ID NO: 533755 - RNA, 19 nt, Homo sapiens
  misc_RNA (1)...(19): siRNA sense strand
ggaagugacuaugugaaug

SEQ ID NO: 533756 - RNA, 19 nt, Homo sapiens
  misc_RNA (1)...(19): siRNA sense strand
ugaagagucugaccaagga

SEQ ID NO: 533757 - RNA, 19 nt, Homo sapiens
  misc_RNA (1)...(19): siRNA sense strand
gaauguguggccucaaaua

SEQ ID NO: 533758 - RNA, 19 nt, Homo sapiens
  misc_RNA (1)...(19): siRNA sense strand
gaaagaaugagauaugaag

SEQ ID NO: 533759 - RNA, 19 nt, Homo sapiens
  misc_RNA (1)...(19): siRNA sense strand
gaacaugcagagucuaaga

SEQ ID NO: 533760 - RNA, 19 nt, Homo sapiens
  misc_RNA (1)...(19): siRNA sense strand
gagcaacgaauuaccauug

SEQ ID NO: 533761 - RNA, 19 nt, Homo sapiens
  misc_RNA (1)...(19): siRNA sense strand
gaugauaugccaauaggaa

SEQ ID NO: 533762 - RNA, 19 nt, Homo sapiens
  misc_RNA (1)...(19): siRNA sense strand
caagauaccaguacuuugu

SEQ ID NO: 533763 - RNA, 19 nt, Homo sapiens
  misc_RNA (1)...(19): siRNA sense strand
cagauaccauugccaacua

SEQ ID NO: 533764 - RNA, 19 nt, Homo sapiens
  misc_RNA (1)...(19): siRNA sense strand
gaaccugagucugaaacaa

SEQ ID NO: 533765 - RNA, 19 nt, Homo sapiens
  misc_RNA (1)...(19): siRNA sense strand
gaacacaacgaccagcuau

SEQ ID NO: 533766 - RNA, 19 nt, Homo sapiens
  misc_RNA (1)...(19): siRNA sense strand
gagagaaaugucaccaaua

SEQ ID NO: 533767 - RNA, 19 nt, Homo sapiens
  misc_RNA (1)...(19): siRNA sense strand
ugggagagaaguugaauua

SEQ ID NO: 533768 - RNA, 19 nt, Homo sapiens
  misc_RNA (1)...(19): siRNA sense strand
ggaaagaaagucagcaauc

SEQ ID NO: 533769 - RNA, 19 nt, Homo sapiens
  misc_RNA (1)...(19): siRNA sense strand
uuaaggagauaucuaggaa

SEQ ID NO: 533770 - RNA, 19 nt, Homo sapiens
  misc_RNA (1)...(19): siRNA sense strand
ugaaggaguuguagauauc

SEQ ID NO: 533771 - RNA, 19 nt, Homo sapiens
  misc_RNA (1)...(19): siRNA sense strand
gaagcugacacaaauagaa

SEQ ID NO: 533772 - RNA, 19 nt, Homo sapiens
  misc_RNA (1)...(19): siRNA sense strand
guucgaacauuugcacuuu

SEQ ID NO: 533773 - RNA, 19 nt, Homo sapiens
  misc_RNA (1)...(19): siRNA sense strand
cuacucggauuaugaauuc

SEQ ID NO: 533774 - RNA, 19 nt, Homo sapiens
  misc_RNA (1)...(19): siRNA sense strand
gaaaugggcagagagaaau

SEQ ID NO: 533775 - RNA, 19 nt, Homo sapiens
  misc_RNA (1)...(19): siRNA sense strand
uauccaugaugcacuguua

SEQ ID NO: 533776 - RNA, 19 nt, Homo sapiens
  misc_RNA (1)...(19): siRNA sense strand
ggugaagugugaccaguau

SEQ ID NO: 533777 - RNA, 19 nt, Homo sapiens
  misc_RNA (1)...(19): siRNA sense strand
ccaggaauaugagucaauu

SEQ ID NO: 533778 - RNA, 19 nt, Homo sapiens
  misc_RNA (1)...(19): siRNA sense strand
gcagcauaccgaacaauaa

SEQ ID NO: 533779 - RNA, 19 nt, Homo sapiens
  misc_RNA (1)...(19): siRNA sense strand
ugaaguaccugcaaaugag

SEQ ID NO: 533780 - RNA, 19 nt, Homo sapiens
  misc_RNA (1)...(19): siRNA sense strand
gaagcaaaaugccuauauu

SEQ ID NO: 533781 - RNA, 19 nt, Homo sapiens
  misc_RNA (1)...(19): siRNA sense strand
agagaaaugucaccaauac

SEQ ID NO: 533782 - RNA, 19 nt, Homo sapiens
  misc_RNA (1)...(19): siRNA sense strand
ggaguuggccggacugguu

SEQ ID NO: 533783 - RNA, 19 nt, Homo sapiens
  misc_RNA (1)...(19): siRNA sense strand
cauuugcacuuuacaagaa

SEQ ID NO: 533784 - RNA, 19 nt, Homo sapiens
  misc_RNA (1)...(19): siRNA sense strand
gaacauuugcacuuuacaa

SEQ ID NO: 533785 - RNA, 19 nt, Homo sapiens
  misc_RNA (1)...(19): siRNA sense strand
uaacgcugcuugauacugu

SEQ ID NO: 533786 - RNA, 19 nt, Homo sapiens
  misc_RNA (1)...(19): siRNA sense strand
ggucaccaaugccuuaugu

SEQ ID NO: 533787 - RNA, 19 nt, Homo sapiens
  misc_RNA (1)...(19): siRNA sense strand
gaaagucagcaaucagaga

SEQ ID NO: 533788 - RNA, 19 nt, Homo sapiens
  misc_RNA (1)...(19): siRNA sense strand
gaguagaaggaucugauua

SEQ ID NO: 533789 - RNA, 19 nt, Homo sapiens
  misc_RNA (1)...(19): siRNA sense strand
uaccaagccugccuucauu

SEQ ID NO: 533790 - RNA, 19 nt, Homo sapiens
  misc_RNA (1)...(19): siRNA sense strand
ugucaaagccuuacccaaa

SEQ ID NO: 533791 - RNA, 19 nt, Homo sapiens
  misc_RNA (1)...(19): siRNA sense strand
gcuacaagcaucacacuga

SEQ ID NO: 533792 - RNA, 19 nt, Homo sapiens
  misc_RNA (1)...(19): siRNA sense strand
agacagaggaucaauauca

SEQ ID NO: 533793 - RNA, 19 nt, Homo sapiens
  misc_RNA (1)...(19): siRNA sense strand
cagaacacccuacaccuuu

SEQ ID NO: 533794 - RNA, 19 nt, Homo sapiens
  misc_RNA (1)...(19): siRNA sense strand
gaagagagaagugagacaa

SEQ ID NO: 533795 - RNA, 19 nt, Homo sapiens
  misc_RNA (1)...(19): siRNA sense strand
gaagggaucccaggaagug

SEQ ID NO: 533796 - RNA, 19 nt, Homo sapiens
  misc_RNA (1)...(19): siRNA sense strand
aaucacggaugaagaagaa

SEQ ID NO: 533797 - RNA, 19 nt, Homo sapiens
  misc_RNA (1)...(19): siRNA sense strand
caagcauuaugguggauuu

SEQ ID NO: 533798 - RNA, 19 nt, Homo sapiens
  misc_RNA (1)...(19): siRNA sense strand
cugagccuguuucuuauua

SEQ ID NO: 533799 - RNA, 19 nt, Homo sapiens
  misc_RNA (1)...(19): siRNA sense strand
acuaugaacuggucuacaa

SEQ ID NO: 533800 - RNA, 19 nt, Homo sapiens
  misc_RNA (1)...(19): siRNA sense strand
gggcagcuuugaccacuau

SEQ ID NO: 533801 - RNA, 19 nt, Homo sapiens
  misc_RNA (1)...(19): siRNA sense strand
aaugagauaugaaggaguu

SEQ ID NO: 533802 - RNA, 19 nt, Homo sapiens
  misc_RNA (1)...(19): siRNA sense strand
ggaaagaaugagauaugaa

SEQ ID NO: 533803 - RNA, 19 nt, Homo sapiens
  misc_RNA (1)...(19): siRNA sense strand
guaaggcaguuccaguuca

SEQ ID NO: 533804 - RNA, 19 nt, Homo sapiens
  misc_RNA (1)...(19): siRNA sense strand
guagaaggaucugauuaca

SEQ ID NO: 533805 - RNA, 19 nt, Homo sapiens
  misc_RNA (1)...(19): siRNA sense strand
gccaaucuuccauguaaua

SEQ ID NO: 533806 - RNA, 19 nt, Homo sapiens
  misc_RNA (1)...(19): siRNA sense strand
ccacggacucguucaagua

SEQ ID NO: 533807 - RNA, 19 nt, Homo sapiens
  misc_RNA (1)...(19): siRNA sense strand
gaauggagcucgaauuuaa

SEQ ID NO: 533808 - RNA, 19 nt, Homo sapiens
  misc_RNA (1)...(19): siRNA sense strand
gaagaaaucucgcgggaaa

SEQ ID NO: 533809 - RNA, 19 nt, Homo sapiens
  misc_RNA (1)...(19): siRNA sense strand
ggagagaaguugaauuaaa

SEQ ID NO: 533810 - RNA, 19 nt, Homo sapiens
  misc_RNA (1)...(19): siRNA sense strand
ccaaacagcuuauacuauu

SEQ ID NO: 533811 - RNA, 19 nt, Homo sapiens
  misc_RNA (1)...(19): siRNA sense strand
cgucauagaugccauguua

SEQ ID NO: 533812 - RNA, 19 nt, Homo sapiens
  misc_RNA (1)...(19): siRNA sense strand
gaaagcaaaugacaacuug

SEQ ID NO: 533813 - RNA, 19 nt, Homo sapiens
  misc_RNA (1)...(19): siRNA sense strand
gaaagaaagucagcaauca

SEQ ID NO: 533814 - RNA, 19 nt, Homo sapiens
  misc_RNA (1)...(19): siRNA sense strand
gaucaagggugaaguguga

SEQ ID NO: 533815 - RNA, 19 nt, Homo sapiens
  misc_RNA (1)...(19): siRNA sense strand
gaauaugucuucuuugugu

SEQ ID NO: 533816 - RNA, 19 nt, Homo sapiens
  misc_RNA (1)...(19): siRNA sense strand
gaacuggucuacaaagaug

SEQ ID NO: 533817 - RNA, 19 nt, Homo sapiens
  misc_RNA (1)...(19): siRNA sense strand
caacuuggauggcaugauu

SEQ ID NO: 533818 - RNA, 19 nt, Homo sapiens
  misc_RNA (1)...(19): siRNA sense strand
gcagaaauaucagcuagaa

SEQ ID NO: 533819 - RNA, 19 nt, Homo sapiens
  misc_RNA (1)...(19): siRNA sense strand
gaacacaauuccaccauag

SEQ ID NO: 533820 - RNA, 19 nt, Homo sapiens
  misc_RNA (1)...(19): siRNA sense strand
caacaacaauggucguauu

SEQ ID NO: 533821 - RNA, 19 nt, Homo sapiens
  misc_RNA (1)...(19): siRNA sense strand
gaaaugugcuagaacugaa

SEQ ID NO: 533822 - RNA, 19 nt, Homo sapiens
  misc_RNA (1)...(19): siRNA sense strand
gaagaaaugugcuagaacu

SEQ ID NO: 533823 - RNA, 19 nt, Homo sapiens
  misc_RNA (1)...(19): siRNA sense strand
gcagugacuuguggaaaua

SEQ ID NO: 533824 - RNA, 19 nt, Homo sapiens
  misc_RNA (1)...(19): siRNA sense strand
ccaaaguggucaagaauau

SEQ ID NO: 533825 - RNA, 19 nt, Homo sapiens
  misc_RNA (1)...(19): siRNA sense strand
gagagaaguugaauuaaag

SEQ ID NO: 533826 - RNA, 19 nt, Homo sapiens
  misc_RNA (1)...(19): siRNA sense strand
gaaaucacuugguuuaaag

SEQ ID NO: 533827 - RNA, 19 nt, Homo sapiens
  misc_RNA (1)...(19): siRNA sense strand
uagaugagcugcuuaagga

SEQ ID NO: 533828 - RNA, 19 nt, Homo sapiens
  misc_RNA (1)...(19): siRNA sense strand
ccagaaaucacuugguuua

SEQ ID NO: 533829 - RNA, 19 nt, Homo sapiens
  misc_RNA (1)...(19): siRNA sense strand
ggaauuagaugagcugcuu

SEQ ID NO: 533830 - RNA, 19 nt, Homo sapiens
  misc_RNA (1)...(19): siRNA sense strand
ggagaggagcaacgaauua

SEQ ID NO: 533831 - RNA, 19 nt, Homo sapiens
  misc_RNA (1)...(19): siRNA sense strand
gaaguaaacaaaccaaaga

SEQ ID NO: 533832 - RNA, 19 nt, Homo sapiens
  misc_RNA (1)...(19): siRNA sense strand
gugccaaucuuccauguaa

SEQ ID NO: 533833 - RNA, 19 nt, Homo sapiens
  misc_RNA (1)...(19): siRNA sense strand
acacagaaguuaauuguca

SEQ ID NO: 533834 - RNA, 19 nt, Homo sapiens
  misc_RNA (1)...(19): siRNA sense strand
ccauguaacuuuaaugaga

SEQ ID NO: 533835 - RNA, 19 nt, Homo sapiens
  misc_RNA (1)...(19): siRNA sense strand
ucagagauuugagguaaua

SEQ ID NO: 533836 - RNA, 19 nt, Homo sapiens
  misc_RNA (1)...(19): siRNA sense strand
gggaugaggccauuuauga

SEQ ID NO: 533837 - RNA, 19 nt, Homo sapiens
  misc_RNA (1)...(19): siRNA sense strand
ggagaaggauuuauugacu

SEQ ID NO: 533838 - RNA, 19 nt, Homo sapiens
  misc_RNA (1)...(19): siRNA sense strand
ccaaggauauagaguuuau

SEQ ID NO: 533839 - RNA, 19 nt, Homo sapiens
  misc_RNA (1)...(19): siRNA sense strand
uaagacagucagcaaauua

SEQ ID NO: 533840 - RNA, 19 nt, Homo sapiens
  misc_RNA (1)...(19): siRNA sense strand
caaauaaugugggagaaau

SEQ ID NO: 533841 - RNA, 19 nt, Homo sapiens
  misc_RNA (1)...(19): siRNA sense strand
gcaguggucuuuaucaucu

SEQ ID NO: 533842 - RNA, 19 nt, Homo sapiens
  misc_RNA (1)...(19): siRNA sense strand
cagaugaaauggaauuaga

SEQ ID NO: 533843 - RNA, 19 nt, Homo sapiens
  misc_RNA (1)...(19): siRNA sense strand
caacaauggucguauuaag

SEQ ID NO: 533844 - RNA, 19 nt, Homo sapiens
  misc_RNA (1)...(19): siRNA sense strand
gaacuggagucuucauaac

SEQ ID NO: 533845 - RNA, 19 nt, Homo sapiens
  misc_RNA (1)...(19): siRNA sense strand
ggaauggagcucgaauuua

SEQ ID NO: 533846 - RNA, 19 nt, Homo sapiens
  misc_RNA (1)...(19): siRNA sense strand
gagagaaugucacaggaau

SEQ ID NO: 533847 - RNA, 19 nt, Homo sapiens
  misc_RNA (1)...(19): siRNA sense strand
cgaauguaaucgcauauga

SEQ ID NO: 533848 - RNA, 19 nt, Homo sapiens
  misc_RNA (1)...(19): siRNA sense strand
guaagacagucagcaaauu

SEQ ID NO: 533849 - RNA, 19 nt, Homo sapiens
  misc_RNA (1)...(19): siRNA sense strand
gaacugaggcgccuuaacu

SEQ ID NO: 533850 - RNA, 19 nt, Homo sapiens
  misc_RNA (1)...(19): siRNA sense strand
agaaggaucugauuacauc

SEQ ID NO: 533851 - RNA, 19 nt, Homo sapiens
  misc_RNA (1)...(19): siRNA sense strand
ggaguugccucuuucaucu

SEQ ID NO: 533852 - RNA, 19 nt, Homo sapiens
  misc_RNA (1)...(19): siRNA sense strand
gagaaggauuuauugacuu

SEQ ID NO: 533853 - RNA, 19 nt, Homo sapiens
  misc_RNA (1)...(19): siRNA sense strand
gaauagauacgcgaaugua

SEQ ID NO: 533854 - RNA, 19 nt, Homo sapiens
  misc_RNA (1)...(19): siRNA sense strand
gauuugagguaauagaguu

SEQ ID NO: 533855 - RNA, 19 nt, Homo sapiens
  misc_RNA (1)...(19): siRNA sense strand
ggaagugacuaugugaaug

SEQ ID NO: 533856 - RNA, 19 nt, Homo sapiens
  misc_RNA (1)...(19): siRNA sense strand
ugaagagucugaccaagga

SEQ ID NO: 533857 - RNA, 19 nt, Homo sapiens
  misc_RNA (1)...(19): siRNA sense strand
gaauguguggccucaaaua

SEQ ID NO: 533858 - RNA, 19 nt, Homo sapiens
  misc_RNA (1)...(19): siRNA sense strand
gaaagaaugagauaugaag

SEQ ID NO: 533859 - RNA, 19 nt, Homo sapiens
  misc_RNA (1)...(19): siRNA sense strand
gaacaugcagagucuaaga

SEQ ID NO: 533860 - RNA, 19 nt, Homo sapiens
  misc_RNA (1)...(19): siRNA sense strand
gagcaacgaauuaccauug

SEQ ID NO: 533861 - RNA, 19 nt, Homo sapiens
  misc_RNA (1)...(19): siRNA sense strand
gaugauaugccaauaggaa

SEQ ID NO: 533862 - RNA, 19 nt, Homo sapiens
  misc_RNA (1)...(19): siRNA sense strand
caagauaccaguacuuugu

SEQ ID NO: 533863 - RNA, 19 nt, Homo sapiens
  misc_RNA (1)...(19): siRNA sense strand
cagauaccauugccaacua

SEQ ID NO: 533864 - RNA, 19 nt, Homo sapiens
  misc_RNA (1)...(19): siRNA sense strand
gaaccugagucugaaacaa

SEQ ID NO: 533865 - RNA, 19 nt, Homo sapiens
  misc_RNA (1)...(19): siRNA sense strand
gaacacaacgaccagcuau

SEQ ID NO: 533866 - RNA, 19 nt, Homo sapiens
  misc_RNA (1)...(19): siRNA sense strand
gagagaaaugucaccaaua

SEQ ID NO: 533867 - RNA, 19 nt, Homo sapiens
  misc_RNA (1)...(19): siRNA sense strand
ugggagagaaguugaauua

SEQ ID NO: 533868 - RNA, 19 nt, Homo sapiens
  misc_RNA (1)...(19): siRNA sense strand
ggaaagaaagucagcaauc

SEQ ID NO: 533869 - RNA, 19 nt, Homo sapiens
  misc_RNA (1)...(19): siRNA sense strand
uuaaggagauaucuaggaa

SEQ ID NO: 533870 - RNA, 19 nt, Homo sapiens
  misc_RNA (1)...(19): siRNA sense strand
ugaaggaguuguagauauc

SEQ ID NO: 533871 - RNA, 19 nt, Homo sapiens
  misc_RNA (1)...(19): siRNA sense strand
gaagcugacacaaauagaa

SEQ ID NO: 533872 - RNA, 19 nt, Homo sapiens
  misc_RNA (1)...(19): siRNA sense strand
guucgaacauuugcacuuu

SEQ ID NO: 533873 - RNA, 19 nt, Homo sapiens
  misc_RNA (1)...(19): siRNA sense strand
cuacucggauuaugaauuc

SEQ ID NO: 533874 - RNA, 19 nt, Homo sapiens
  misc_RNA (1)...(19): siRNA sense strand
gaaaugggcagagagaaau

SEQ ID NO: 533875 - RNA, 19 nt, Homo sapiens
  misc_RNA (1)...(19): siRNA sense strand
uauccaugaugcacuguua

SEQ ID NO: 533876 - RNA, 19 nt, Homo sapiens
  misc_RNA (1)...(19): siRNA sense strand
ggugaagugugaccaguau

SEQ ID NO: 533877 - RNA, 19 nt, Homo sapiens
  misc_RNA (1)...(19): siRNA sense strand
ccaggaauaugagucaauu

SEQ ID NO: 533878 - RNA, 19 nt, Homo sapiens
  misc_RNA (1)...(19): siRNA sense strand
gcagcauaccgaacaauaa

SEQ ID NO: 533879 - RNA, 19 nt, Homo sapiens
  misc_RNA (1)...(19): siRNA sense strand
ugaaguaccugcaaaugag

SEQ ID NO: 533880 - RNA, 19 nt, Homo sapiens
  misc_RNA (1)...(19): siRNA sense strand
gaagcaaaaugccuauauu

SEQ ID NO: 533881 - RNA, 19 nt, Homo sapiens
  misc_RNA (1)...(19): siRNA sense strand
agagaaaugucaccaauac

SEQ ID NO: 533882 - RNA, 19 nt, Homo sapiens
  misc_RNA (1)...(19): siRNA sense strand
ggaguuggccggacugguu

SEQ ID NO: 533883 - RNA, 19 nt, Homo sapiens
  misc_RNA (1)...(19): siRNA sense strand
cauuugcacuuuacaagaa

SEQ ID NO: 533884 - RNA, 19 nt, Homo sapiens
  misc_RNA (1)...(19): siRNA sense strand
gaacauuugcacuuuacaa

SEQ ID NO: 533885 - RNA, 19 nt, Homo sapiens
  misc_RNA (1)...(19): siRNA sense strand
uaacgcugcuugauacugu

SEQ ID NO: 533886 - RNA, 19 nt, Homo sapiens
  misc_RNA (1)...(19): siRNA sense strand
ggucaccaaugccuuaugu

SEQ ID NO: 533887 - RNA, 19 nt, Homo sapiens
  misc_RNA (1)...(19): siRNA sense strand
gaaagucagcaaucagaga

SEQ ID NO: 533888 - RNA, 19 nt, Homo sapiens
  misc_RNA (1)...(19): siRNA sense strand
gaguagaaggaucugauua

SEQ ID NO: 533889 - RNA, 19 nt, Homo sapiens
  misc_RNA (1)...(19): siRNA sense strand
uaccaagccugccuucauu

SEQ ID NO: 533890 - RNA, 19 nt, Homo sapiens
  misc_RNA (1)...(19): siRNA sense strand
ugucaaagccuuacccaaa

SEQ ID NO: 533891 - RNA, 19 nt, Homo sapiens
  misc_RNA (1)...(19): siRNA sense strand
gcuacaagcaucacacuga

SEQ ID NO: 533892 - RNA, 19 nt, Homo sapiens
  misc_RNA (1)...(19): siRNA sense strand
agacagaggaucaauauca

SEQ ID NO: 533893 - RNA, 19 nt, Homo sapiens
  misc_RNA (1)...(19): siRNA sense strand
cagaacacccuacaccuuu

SEQ ID NO: 533894 - RNA, 19 nt, Homo sapiens
  misc_RNA (1)...(19): siRNA sense strand
gaagagagaagugagacaa

SEQ ID NO: 533895 - RNA, 19 nt, Homo sapiens
  misc_RNA (1)...(19): siRNA sense strand
gaagggaucccaggaagug

SEQ ID NO: 533896 - RNA, 19 nt, Homo sapiens
  misc_RNA (1)...(19): siRNA sense strand
aaucacggaugaagaagaa

SEQ ID NO: 533897 - RNA, 19 nt, Homo sapiens
  misc_RNA (1)...(19): siRNA sense strand
caagcauuaugguggauuu

SEQ ID NO: 533898 - RNA, 19 nt, Homo sapiens
  misc_RNA (1)...(19): siRNA sense strand
cugagccuguuucuuauua

SEQ ID NO: 533899 - RNA, 19 nt, Homo sapiens
  misc_RNA (1)...(19): siRNA sense strand
acuaugaacuggucuacaa

SEQ ID NO: 533900 - RNA, 19 nt, Homo sapiens
  misc_RNA (1)...(19): siRNA sense strand
gggcagcuuugaccacuau

SEQ ID NO: 533901 - RNA, 19 nt, Homo sapiens
  misc_RNA (1)...(19): siRNA sense strand
aaugagauaugaaggaguu

SEQ ID NO: 533902 - RNA, 19 nt, Homo sapiens
  misc_RNA (1)...(19): siRNA sense strand
ggaaagaaugagauaugaa

SEQ ID NO: 533903 - RNA, 19 nt, Homo sapiens
  misc_RNA (1)...(19): siRNA sense strand
guaaggcaguuccaguuca

SEQ ID NO: 533904 - RNA, 19 nt, Homo sapiens
  misc_RNA (1)...(19): siRNA sense strand
guagaaggaucugauuaca

SEQ ID NO: 533905 - RNA, 19 nt, Homo sapiens
  misc_RNA (1)...(19): siRNA sense strand
gccaaucuuccauguaaua

SEQ ID NO: 533906 - RNA, 19 nt, Homo sapiens
  misc_RNA (1)...(19): siRNA sense strand
ccacggacucguucaagua

SEQ ID NO: 533907 - RNA, 19 nt, Homo sapiens
  misc_RNA (1)...(19): siRNA sense strand
gaauggagcucgaauuuaa

SEQ ID NO: 533908 - RNA, 19 nt, Homo sapiens
  misc_RNA (1)...(19): siRNA sense strand
gaagaaaucucgcgggaaa

SEQ ID NO: 533909 - RNA, 19 nt, Homo sapiens
  misc_RNA (1)...(19): siRNA sense strand
ggagagaaguugaauuaaa

SEQ ID NO: 533910 - RNA, 19 nt, Homo sapiens
  misc_RNA (1)...(19): siRNA sense strand
ccaaacagcuuauacuauu

SEQ ID NO: 533911 - RNA, 19 nt, Homo sapiens
  misc_RNA (1)...(19): siRNA sense strand
cgucauagaugccauguua

SEQ ID NO: 533912 - RNA, 19 nt, Homo sapiens
  misc_RNA (1)...(19): siRNA sense strand
gaaagcaaaugacaacuug

SEQ ID NO: 533913 - RNA, 19 nt, Homo sapiens
  misc_RNA (1)...(19): siRNA sense strand
gaaagaaagucagcaauca

SEQ ID NO: 533914 - RNA, 19 nt, Homo sapiens
  misc_RNA (1)...(19): siRNA sense strand
gaucaagggugaaguguga

SEQ ID NO: 533915 - RNA, 19 nt, Homo sapiens
  misc_RNA (1)...(19): siRNA sense strand
gaauaugucuucuuugugu

SEQ ID NO: 533916 - RNA, 19 nt, Homo sapiens
  misc_RNA (1)...(19): siRNA sense strand
gaacuggucuacaaagaug

SEQ ID NO: 533917 - RNA, 19 nt, Homo sapiens
  misc_RNA (1)...(19): siRNA sense strand
caacuuggauggcaugauu

SEQ ID NO: 533918 - RNA, 19 nt, Homo sapiens
  misc_RNA (1)...(19): siRNA sense strand
gcagaaauaucagcuagaa

SEQ ID NO: 533919 - RNA, 19 nt, Homo sapiens
  misc_RNA (1)...(19): siRNA sense strand
gaacacaauuccaccauag

SEQ ID NO: 533920 - RNA, 19 nt, Homo sapiens
  misc_RNA (1)...(19): siRNA sense strand
caacaacaauggucguauu

SEQ ID NO: 533921 - RNA, 19 nt, Homo sapiens
  misc_RNA (1)...(19): siRNA sense strand
gaaaugugcuagaacugaa

SEQ ID NO: 533922 - RNA, 19 nt, Homo sapiens
  misc_RNA (1)...(19): siRNA sense strand
gaagaaaugugcuagaacu

SEQ ID NO: 533923 - RNA, 19 nt, Homo sapiens
  misc_RNA (1)...(19): siRNA sense strand
gcagugacuuguggaaaua

SEQ ID NO: 533924 - RNA, 19 nt, Homo sapiens
  misc_RNA (1)...(19): siRNA sense strand
ccaaaguggucaagaauau

SEQ ID NO: 533925 - RNA, 19 nt, Homo sapiens
  misc_RNA (1)...(19): siRNA sense strand
gagagaaguugaauuaaag

SEQ ID NO: 533926 - RNA, 19 nt, Homo sapiens
  misc_RNA (1)...(19): siRNA sense strand
gaaaucacuugguuuaaag

SEQ ID NO: 533927 - RNA, 19 nt, Homo sapiens
  misc_RNA (1)...(19): siRNA sense strand
uagaugagcugcuuaagga

SEQ ID NO: 533928 - RNA, 19 nt, Homo sapiens
  misc_RNA (1)...(19): siRNA sense strand
ccagaaaucacuugguuua

SEQ ID NO: 533929 - RNA, 19 nt, Homo sapiens
  misc_RNA (1)...(19): siRNA sense strand
ggaauuagaugagcugcuu

SEQ ID NO: 533930 - RNA, 19 nt, Homo sapiens
  misc_RNA (1)...(19): siRNA sense strand
ggagaggagcaacgaauua

SEQ ID NO: 533931 - RNA, 19 nt, Homo sapiens
  misc_RNA (1)...(19): siRNA sense strand
gaaguaaacaaaccaaaga

SEQ ID NO: 533932 - RNA, 19 nt, Homo sapiens
  misc_RNA (1)...(19): siRNA sense strand
gugccaaucuuccauguaa

SEQ ID NO: 533933 - RNA, 19 nt, Homo sapiens
  misc_RNA (1)...(19): siRNA sense strand
acacagaaguuaauuguca

SEQ ID NO: 533934 - RNA, 19 nt, Homo sapiens
  misc_RNA (1)...(19): siRNA sense strand
ccauguaacuuuaaugaga

SEQ ID NO: 533935 - RNA, 19 nt, Homo sapiens
  misc_RNA (1)...(19): siRNA sense strand
ucagagauuugagguaaua

SEQ ID NO: 533936 - RNA, 19 nt, Homo sapiens
  misc_RNA (1)...(19): siRNA sense strand
gggaugaggccauuuauga

SEQ ID NO: 533937 - RNA, 19 nt, Homo sapiens
  misc_RNA (1)...(19): siRNA sense strand
ggagaaggauuuauugacu

SEQ ID NO: 533938 - RNA, 19 nt, Homo sapiens
  misc_RNA (1)...(19): siRNA sense strand
ccaaggauauagaguuuau

SEQ ID NO: 533939 - RNA, 19 nt, Homo sapiens
  misc_RNA (1)...(19): siRNA sense strand
uaagacagucagcaaauua

SEQ ID NO: 533940 - RNA, 19 nt, Homo sapiens
  misc_RNA (1)...(19): siRNA sense strand
caaauaaugugggagaaau

SEQ ID NO: 533941 - RNA, 19 nt, Homo sapiens
  misc_RNA (1)...(19): siRNA sense strand
gcaguggucuuuaucaucu

SEQ ID NO: 533942 - RNA, 19 nt, Homo sapiens
  misc_RNA (1)...(19): siRNA sense strand
cagaugaaauggaauuaga

SEQ ID NO: 533943 - RNA, 19 nt, Homo sapiens
  misc_RNA (1)...(19): siRNA sense strand
caacaauggucguauuaag

SEQ ID NO: 533944 - RNA, 19 nt, Homo sapiens
  misc_RNA (1)...(19): siRNA sense strand
gaacuggagucuucauaac

SEQ ID NO: 533945 - RNA, 19 nt, Homo sapiens
  misc_RNA (1)...(19): siRNA sense strand
ggaauggagcucgaauuua

SEQ ID NO: 533946 - RNA, 19 nt, Homo sapiens
  misc_RNA (1)...(19): siRNA sense strand
gagagaaugucacaggaau

SEQ ID NO: 533947 - RNA, 19 nt, Homo sapiens
  misc_RNA (1)...(19): siRNA sense strand
cgaauguaaucgcauauga

SEQ ID NO: 533948 - RNA, 19 nt, Homo sapiens
  misc_RNA (1)...(19): siRNA sense strand
guaagacagucagcaaauu

SEQ ID NO: 533949 - RNA, 19 nt, Homo sapiens
  misc_RNA (1)...(19): siRNA sense strand
gaacugaggcgccuuaacu

SEQ ID NO: 533950 - RNA, 19 nt, Homo sapiens
  misc_RNA (1)...(19): siRNA sense strand
agaaggaucugauuacauc

SEQ ID NO: 533951 - RNA, 19 nt, Homo sapiens
  misc_RNA (1)...(19): siRNA sense strand
ggaguugccucuuucaucu

SEQ ID NO: 533952 - RNA, 19 nt, Homo sapiens
  misc_RNA (1)...(19): siRNA sense strand
gagaaggauuuauugacuu

SEQ ID NO: 533953 - RNA, 19 nt, Homo sapiens
  misc_RNA (1)...(19): siRNA sense strand
gaauagauacgcgaaugua

SEQ ID NO: 533954 - RNA, 19 nt, Homo sapiens
  misc_RNA (1)...(19): siRNA sense strand
gauuugagguaauagaguu

SEQ ID NO: 533955 - RNA, 19 nt, Homo sapiens
  misc_RNA (1)...(19): siRNA sense strand
ggaagugacuaugugaaug

SEQ ID NO: 533956 - RNA, 19 nt, Homo sapiens
  misc_RNA (1)...(19): siRNA sense strand
ugaagagucugaccaagga

SEQ ID NO: 533957 - RNA, 19 nt, Homo sapiens
  misc_RNA (1)...(19): siRNA sense strand
gaauguguggccucaaaua

SEQ ID NO: 533958 - RNA, 19 nt, Homo sapiens
  misc_RNA (1)...(19): siRNA sense strand
gaaagaaugagauaugaag

SEQ ID NO: 533959 - RNA, 19 nt, Homo sapiens
  misc_RNA (1)...(19): siRNA sense strand
gaacaugcagagucuaaga

SEQ ID NO: 533960 - RNA, 19 nt, Homo sapiens
  misc_RNA (1)...(19): siRNA sense strand
gagcaacgaauuaccauug

SEQ ID NO: 533961 - RNA, 19 nt, Homo sapiens
  misc_RNA (1)...(19): siRNA sense strand
gaugauaugccaauaggaa

SEQ ID NO: 533962 - RNA, 19 nt, Homo sapiens
  misc_RNA (1)...(19): siRNA sense strand
caagauaccaguacuuugu

SEQ ID NO: 533963 - RNA, 19 nt, Homo sapiens
  misc_RNA (1)...(19): siRNA sense strand
cagauaccauugccaacua

SEQ ID NO: 533964 - RNA, 19 nt, Homo sapiens
  misc_RNA (1)...(19): siRNA sense strand
gaaccugagucugaaacaa

SEQ ID NO: 533965 - RNA, 19 nt, Homo sapiens
  misc_RNA (1)...(19): siRNA sense strand
gaacacaacgaccagcuau

SEQ ID NO: 533966 - RNA, 19 nt, Homo sapiens
  misc_RNA (1)...(19): siRNA sense strand
gagagaaaugucaccaaua

SEQ ID NO: 533967 - RNA, 19 nt, Homo sapiens
  misc_RNA (1)...(19): siRNA sense strand
ugggagagaaguugaauua

SEQ ID NO: 533968 - RNA, 19 nt, Homo sapiens
  misc_RNA (1)...(19): siRNA sense strand
ggaaagaaagucagcaauc

SEQ ID NO: 533969 - RNA, 19 nt, Homo sapiens
  misc_RNA (1)...(19): siRNA sense strand
uuaaggagauaucuaggaa

SEQ ID NO: 533970 - RNA, 19 nt, Homo sapiens
  misc_RNA (1)...(19): siRNA sense strand
ugaaggaguuguagauauc

SEQ ID NO: 533971 - RNA, 19 nt, Homo sapiens
  misc_RNA (1)...(19): siRNA sense strand
gaagcugacacaaauagaa

SEQ ID NO: 533972 - RNA, 19 nt, Homo sapiens
  misc_RNA (1)...(19): siRNA sense strand
guucgaacauuugcacuuu

SEQ ID NO: 533973 - RNA, 19 nt, Homo sapiens
  misc_RNA (1)...(19): siRNA sense strand
cuacucggauuaugaauuc

SEQ ID NO: 533974 - RNA, 19 nt, Homo sapiens
  misc_RNA (1)...(19): siRNA sense strand
gaaaugggcagagagaaau

SEQ ID NO: 533975 - RNA, 19 nt, Homo sapiens
  misc_RNA (1)...(19): siRNA sense strand
uauccaugaugcacuguua

SEQ ID NO: 533976 - RNA, 19 nt, Homo sapiens
  misc_RNA (1)...(19): siRNA sense strand
ggugaagugugaccaguau

SEQ ID NO: 533977 - RNA, 19 nt, Homo sapiens
  misc_RNA (1)...(19): siRNA sense strand
ccaggaauaugagucaauu

SEQ ID NO: 533978 - RNA, 19 nt, Homo sapiens
  misc_RNA (1)...(19): siRNA sense strand
gcagcauaccgaacaauaa

SEQ ID NO: 533979 - RNA, 19 nt, Homo sapiens
  misc_RNA (1)...(19): siRNA sense strand
ugaaguaccugcaaaugag

SEQ ID NO: 533980 - RNA, 19 nt, Homo sapiens
  misc_RNA (1)...(19): siRNA sense strand
gaagcaaaaugccuauauu

SEQ ID NO: 533981 - RNA, 19 nt, Homo sapiens
  misc_RNA (1)...(19): siRNA sense strand
agagaaaugucaccaauac

SEQ ID NO: 533982 - RNA, 19 nt, Homo sapiens
  misc_RNA (1)...(19): siRNA sense strand
ggaguuggccggacugguu

SEQ ID NO: 533983 - RNA, 19 nt, Homo sapiens
  misc_RNA (1)...(19): siRNA sense strand
cauuugcacuuuacaagaa

SEQ ID NO: 533984 - RNA, 19 nt, Homo sapiens
  misc_RNA (1)...(19): siRNA sense strand
gaacauuugcacuuuacaa

SEQ ID NO: 533985 - RNA, 19 nt, Homo sapiens
  misc_RNA (1)...(19): siRNA sense strand
uaacgcugcuugauacugu

SEQ ID NO: 533986 - RNA, 19 nt, Homo sapiens
  misc_RNA (1)...(19): siRNA sense strand
ggucaccaaugccuuaugu

SEQ ID NO: 533987 - RNA, 19 nt, Homo sapiens
  misc_RNA (1)...(19): siRNA sense strand
gaaagucagcaaucagaga

SEQ ID NO: 533988 - RNA, 19 nt, Homo sapiens
  misc_RNA (1)...(19): siRNA sense strand
gaguagaaggaucugauua

SEQ ID NO: 533989 - RNA, 19 nt, Homo sapiens
  misc_RNA (1)...(19): siRNA sense strand
uaccaagccugccuucauu

SEQ ID NO: 533990 - RNA, 19 nt, Homo sapiens
  misc_RNA (1)...(19): siRNA sense strand
ugucaaagccuuacccaaa

SEQ ID NO: 533991 - RNA, 19 nt, Homo sapiens
  misc_RNA (1)...(19): siRNA sense strand
gcuacaagcaucacacuga

SEQ ID NO: 533992 - RNA, 19 nt, Homo sapiens
  misc_RNA (1)...(19): siRNA sense strand
agacagaggaucaauauca

SEQ ID NO: 533993 - RNA, 19 nt, Homo sapiens
  misc_RNA (1)...(19): siRNA sense strand
cagaacacccuacaccuuu

SEQ ID NO: 533994 - RNA, 19 nt, Homo sapiens
  misc_RNA (1)...(19): siRNA sense strand
gaagagagaagugagacaa

SEQ ID NO: 533995 - RNA, 19 nt, Homo sapiens
  misc_RNA (1)...(19): siRNA sense strand
gaagggaucccaggaagug

SEQ ID NO: 533996 - RNA, 19 nt, Homo sapiens
  misc_RNA (1)...(19): siRNA sense strand
aaucacggaugaagaagaa

SEQ ID NO: 533997 - RNA, 19 nt, Homo sapiens
  misc_RNA (1)...(19): siRNA sense strand
caagcauuaugguggauuu

SEQ ID NO: 533998 - RNA, 19 nt, Homo sapiens
  misc_RNA (1)...(19): siRNA sense strand
cugagccuguuucuuauua

SEQ ID NO: 533999 - RNA, 19 nt, Homo sapiens
  misc_RNA (1)...(19): siRNA sense strand
acuaugaacuggucuacaa

SEQ ID NO: 534000 - RNA, 19 nt, Homo sapiens
  misc_RNA (1)...(19): siRNA sense strand
gggcagcuuugaccacuau

SEQ ID NO: 534001 - RNA, 19 nt, Homo sapiens
  misc_RNA (1)...(19): siRNA sense strand
aaugagauaugaaggaguu

SEQ ID NO: 534002 - RNA, 19 nt, Homo sapiens
  misc_RNA (1)...(19): siRNA sense strand
ggaaagaaugagauaugaa

SEQ ID NO: 534003 - RNA, 19 nt, Homo sapiens
  misc_RNA (1)...(19): siRNA sense strand
guaaggcaguuccaguuca

SEQ ID NO: 534004 - RNA, 19 nt, Homo sapiens
  misc_RNA (1)...(19): siRNA sense strand
guagaaggaucugauuaca

SEQ ID NO: 534005 - RNA, 19 nt, Homo sapiens
  misc_RNA (1)...(19): siRNA sense strand
gccaaucuuccauguaaua

SEQ ID NO: 534006 - RNA, 19 nt, Homo sapiens
  misc_RNA (1)...(19): siRNA sense strand
ccacggacucguucaagua

SEQ ID NO: 534007 - RNA, 19 nt, Homo sapiens
  misc_RNA (1)...(19): siRNA sense strand
gaaaguagcucaauacaug

SEQ ID NO: 534008 - RNA, 19 nt, Homo sapiens
  misc_RNA (1)...(19): siRNA sense strand
gaaaggaaaucuucagaau

SEQ ID NO: 534009 - RNA, 19 nt, Homo sapiens
  misc_RNA (1)...(19): siRNA sense strand
gaaagcagauaaagaagaa

SEQ ID NO: 534010 - RNA, 19 nt, Homo sapiens
  misc_RNA (1)...(19): siRNA sense strand
gaagaaggaugacuuuguu

SEQ ID NO: 534011 - RNA, 19 nt, Homo sapiens
  misc_RNA (1)...(19): siRNA sense strand
gguaguaguucccaaguua

SEQ ID NO: 534012 - RNA, 19 nt, Homo sapiens
  misc_RNA (1)...(19): siRNA sense strand
ggacuugguuacuuauaua

SEQ ID NO: 534013 - RNA, 19 nt, Homo sapiens
  misc_RNA (1)...(19): siRNA sense strand
gaaacugagagaaguauua

SEQ ID NO: 534014 - RNA, 19 nt, Homo sapiens
  misc_RNA (1)...(19): siRNA sense strand
gaugaaagcagauaaagaa

SEQ ID NO: 534015 - RNA, 19 nt, Homo sapiens
  misc_RNA (1)...(19): siRNA sense strand
cagaguaucucgucacauu

SEQ ID NO: 534016 - RNA, 19 nt, Homo sapiens
  misc_RNA (1)...(19): siRNA sense strand
uaaacuggaugcauuugua

SEQ ID NO: 534017 - RNA, 19 nt, Homo sapiens
  misc_RNA (1)...(19): siRNA sense strand
acaauaaccugaaaggaaa

SEQ ID NO: 534018 - RNA, 19 nt, Homo sapiens
  misc_RNA (1)...(19): siRNA sense strand
uagcagaaauugugaagaa

SEQ ID NO: 534019 - RNA, 19 nt, Homo sapiens
  misc_RNA (1)...(19): siRNA sense strand
gaguggacuugguuacuua

SEQ ID NO: 534020 - RNA, 19 nt, Homo sapiens
  misc_RNA (1)...(19): siRNA sense strand
ugaacaggcuuucuacuga

SEQ ID NO: 534021 - RNA, 19 nt, Homo sapiens
  misc_RNA (1)...(19): siRNA sense strand
aagagaaucuguuggcuaa

SEQ ID NO: 534022 - RNA, 19 nt, Homo sapiens
  misc_RNA (1)...(19): siRNA sense strand
agacaaaguucaagagaau

SEQ ID NO: 534023 - RNA, 19 nt, Homo sapiens
  misc_RNA (1)...(19): siRNA sense strand
ugagagaaguauuacauga

SEQ ID NO: 534024 - RNA, 19 nt, Homo sapiens
  misc_RNA (1)...(19): siRNA sense strand
gaagaaacugagagaagua

SEQ ID NO: 534025 - RNA, 19 nt, Homo sapiens
  misc_RNA (1)...(19): siRNA sense strand
guucgugacuuccaguaua

SEQ ID NO: 534026 - RNA, 19 nt, Homo sapiens
  misc_RNA (1)...(19): siRNA sense strand
gagcaucugcauacaauaa

SEQ ID NO: 534027 - RNA, 19 nt, Homo sapiens
  misc_RNA (1)...(19): siRNA sense strand
gaaagaaugcaggaaguuu

SEQ ID NO: 534028 - RNA, 19 nt, Homo sapiens
  misc_RNA (1)...(19): siRNA sense strand
gagaaucuguuggcuaaug

SEQ ID NO: 534029 - RNA, 19 nt, Homo sapiens
  misc_RNA (1)...(19): siRNA sense strand
gaacaggcuuucuacugau

SEQ ID NO: 534030 - RNA, 19 nt, Homo sapiens
  misc_RNA (1)...(19): siRNA sense strand
gaagaaaugaacaggcuuu

SEQ ID NO: 534031 - RNA, 19 nt, Homo sapiens
  misc_RNA (1)...(19): siRNA sense strand
gagaaaaccugucagcaaa

SEQ ID NO: 534032 - RNA, 19 nt, Homo sapiens
  misc_RNA (1)...(19): siRNA sense strand
ggaaggcaguugaugacuu

SEQ ID NO: 534033 - RNA, 19 nt, Homo sapiens
  misc_RNA (1)...(19): siRNA sense strand
ccagugaacuuccaagcaa

SEQ ID NO: 534034 - RNA, 19 nt, Homo sapiens
  misc_RNA (1)...(19): siRNA sense strand
guucaauauuccugacuua

SEQ ID NO: 534035 - RNA, 19 nt, Homo sapiens
  misc_RNA (1)...(19): siRNA sense strand
gcugauguauuggaagaua

SEQ ID NO: 534036 - RNA, 19 nt, Homo sapiens
  misc_RNA (1)...(19): siRNA sense strand
uagaaggagugguuaagaa

SEQ ID NO: 534037 - RNA, 19 nt, Homo sapiens
  misc_RNA (1)...(19): siRNA sense strand
gugaaagcauuacggguuu

SEQ ID NO: 534038 - RNA, 19 nt, Homo sapiens
  misc_RNA (1)...(19): siRNA sense strand
ggaguggacuugguuacuu

SEQ ID NO: 534039 - RNA, 19 nt, Homo sapiens
  misc_RNA (1)...(19): siRNA sense strand
caauauuccugacuuaaag

SEQ ID NO: 534040 - RNA, 19 nt, Homo sapiens
  misc_RNA (1)...(19): siRNA sense strand
gcaaagacaaaguucaaga

SEQ ID NO: 534041 - RNA, 19 nt, Homo sapiens
  misc_RNA (1)...(19): siRNA sense strand
cagaugaacuggcuaaacu

SEQ ID NO: 534042 - RNA, 19 nt, Homo sapiens
  misc_RNA (1)...(19): siRNA sense strand
uggcuaaacuggaugcauu

SEQ ID NO: 534043 - RNA, 19 nt, Homo sapiens
  misc_RNA (1)...(19): siRNA sense strand
ggagaugaaagcagauaaa

SEQ ID NO: 534044 - RNA, 19 nt, Homo sapiens
  misc_RNA (1)...(19): siRNA sense strand
ggccaaauauccaaucaag

SEQ ID NO: 534045 - RNA, 19 nt, Homo sapiens
  misc_RNA (1)...(19): siRNA sense strand
aaaccugagucaacaagaa

SEQ ID NO: 534046 - RNA, 19 nt, Homo sapiens
  misc_RNA (1)...(19): siRNA sense strand
gcaaacaugggagaaauug

SEQ ID NO: 534047 - RNA, 19 nt, Homo sapiens
  misc_RNA (1)...(19): siRNA sense strand
ccaaauauccaaucaagca

SEQ ID NO: 534048 - RNA, 19 nt, Homo sapiens
  misc_RNA (1)...(19): siRNA sense strand
gaagauagcaaagacaaag

SEQ ID NO: 534049 - RNA, 19 nt, Homo sapiens
  misc_RNA (1)...(19): siRNA sense strand
gcagauaaagaagaaauga

SEQ ID NO: 534050 - RNA, 19 nt, Homo sapiens
  misc_RNA (1)...(19): siRNA sense strand
cagaggaccaagacaguua

SEQ ID NO: 534051 - RNA, 19 nt, Homo sapiens
  misc_RNA (1)...(19): siRNA sense strand
uaagcaguaugaaacacua

SEQ ID NO: 534052 - RNA, 19 nt, Homo sapiens
  misc_RNA (1)...(19): siRNA sense strand
gagagaaguauuacaugaa

SEQ ID NO: 534053 - RNA, 19 nt, Homo sapiens
  misc_RNA (1)...(19): siRNA sense strand
ugaagaaacugagagaagu

SEQ ID NO: 534054 - RNA, 19 nt, Homo sapiens
  misc_RNA (1)...(19): siRNA sense strand
guuccaaggucuagcaaug

SEQ ID NO: 534055 - RNA, 19 nt, Homo sapiens
  misc_RNA (1)...(19): siRNA sense strand
agugggacauggccaaaua

SEQ ID NO: 534056 - RNA, 19 nt, Homo sapiens
  misc_RNA (1)...(19): siRNA sense strand
cagcaaacaugggagaaau

SEQ ID NO: 534057 - RNA, 19 nt, Homo sapiens
  misc_RNA (1)...(19): siRNA sense strand
cagaaauugugaagaagga

SEQ ID NO: 534058 - RNA, 19 nt, Homo sapiens
  misc_RNA (1)...(19): siRNA sense strand
uacaauaaccugaaaggaa

SEQ ID NO: 534059 - RNA, 19 nt, Homo sapiens
  misc_RNA (1)...(19): siRNA sense strand
ggaugcauuuguagaagga

SEQ ID NO: 534060 - RNA, 19 nt, Homo sapiens
  misc_RNA (1)...(19): siRNA sense strand
guugaugacuucagacaca

SEQ ID NO: 534061 - RNA, 19 nt, Homo sapiens
  misc_RNA (1)...(19): siRNA sense strand
uguaaugucaccuuguuua

SEQ ID NO: 534062 - RNA, 19 nt, Homo sapiens
  misc_RNA (1)...(19): siRNA sense strand
ggacauggccaaauaucca

SEQ ID NO: 534063 - RNA, 19 nt, Homo sapiens
  misc_RNA (1)...(19): siRNA sense strand
gauugauaaugaccugaaa

SEQ ID NO: 534064 - RNA, 19 nt, Homo sapiens
  misc_RNA (1)...(19): siRNA sense strand
gaaggaugacuuuguucuu

SEQ ID NO: 534065 - RNA, 19 nt, Homo sapiens
  misc_RNA (1)...(19): siRNA sense strand
gaauuuggaacgaaagaau

SEQ ID NO: 534066 - RNA, 19 nt, Homo sapiens
  misc_RNA (1)...(19): siRNA sense strand
ccugaaaucucgagcaucu

SEQ ID NO: 534067 - RNA, 19 nt, Homo sapiens
  misc_RNA (1)...(19): siRNA sense strand
gauaaugaccugaaaucuc

SEQ ID NO: 534068 - RNA, 19 nt, Homo sapiens
  misc_RNA (1)...(19): siRNA sense strand
gaaaugguaguuccaaggu

SEQ ID NO: 534069 - RNA, 19 nt, Homo sapiens
  misc_RNA (1)...(19): siRNA sense strand
uaagaaaguagcucaauac

SEQ ID NO: 534070 - RNA, 19 nt, Homo sapiens
  misc_RNA (1)...(19): siRNA sense strand
cuagcaauguucuuucaga

SEQ ID NO: 534071 - RNA, 19 nt, Homo sapiens
  misc_RNA (1)...(19): siRNA sense strand
ggauuaagcaguaugaaac

SEQ ID NO: 534072 - RNA, 19 nt, Homo sapiens
  misc_RNA (1)...(19): siRNA sense strand
ugacuuuguucuugauuca

SEQ ID NO: 534073 - RNA, 19 nt, Homo sapiens
  misc_RNA (1)...(19): siRNA sense strand
gaccugaaaucucgagcau

SEQ ID NO: 534074 - RNA, 19 nt, Homo sapiens
  misc_RNA (1)...(19): siRNA sense strand
ggaagauagcaaagacaaa

SEQ ID NO: 534075 - RNA, 19 nt, Homo sapiens
  misc_RNA (1)...(19): siRNA sense strand
guacgguggcugaaaguga

SEQ ID NO: 534076 - RNA, 19 nt, Homo sapiens
  misc_RNA (1)...(19): siRNA sense strand
aaugucaccuuguuuagga

SEQ ID NO: 534077 - RNA, 19 nt, Homo sapiens
  misc_RNA (1)...(19): siRNA sense strand
aaggaugacuuuguucuug

SEQ ID NO: 534078 - RNA, 19 nt, Homo sapiens
  misc_RNA (1)...(19): siRNA sense strand
aagacaaaguucaagagaa

SEQ ID NO: 534079 - RNA, 19 nt, Homo sapiens
  misc_RNA (1)...(19): siRNA sense strand
ugaacuggcuaaacuggau

SEQ ID NO: 534080 - RNA, 19 nt, Homo sapiens
  misc_RNA (1)...(19): siRNA sense strand
ugaagaaggaugacuuugu

SEQ ID NO: 534081 - RNA, 19 nt, Homo sapiens
  misc_RNA (1)...(19): siRNA sense strand
ucgagcaucugcauacaau

SEQ ID NO: 534082 - RNA, 19 nt, Homo sapiens
  misc_RNA (1)...(19): siRNA sense strand
gugcagcagcuauuauuga

SEQ ID NO: 534083 - RNA, 19 nt, Homo sapiens
  misc_RNA (1)...(19): siRNA sense strand
ggcaguugaugacuucaga

SEQ ID NO: 534084 - RNA, 19 nt, Homo sapiens
  misc_RNA (1)...(19): siRNA sense strand
gaacgaaagaaugcaggaa

SEQ ID NO: 534085 - RNA, 19 nt, Homo sapiens
  misc_RNA (1)...(19): siRNA sense strand
agaaggagugguuaagaaa

SEQ ID NO: 534086 - RNA, 19 nt, Homo sapiens
  misc_RNA (1)...(19): siRNA sense strand
acugaguucuggcuuauau

SEQ ID NO: 534087 - RNA, 19 nt, Homo sapiens
  misc_RNA (1)...(19): siRNA sense strand
ugaaagcagauaaagaaga

SEQ ID NO: 534088 - RNA, 19 nt, Homo sapiens
  misc_RNA (1)...(19): siRNA sense strand
gaggagaugaaagcagaua

SEQ ID NO: 534089 - RNA, 19 nt, Homo sapiens
  misc_RNA (1)...(19): siRNA sense strand
ggaugacuuuguucuugau

SEQ ID NO: 534090 - RNA, 19 nt, Homo sapiens
  misc_RNA (1)...(19): siRNA sense strand
gaaugcaggaaguuugcua

SEQ ID NO: 534091 - RNA, 19 nt, Homo sapiens
  misc_RNA (1)...(19): siRNA sense strand
uagcaaagacaaaguucaa

SEQ ID NO: 534092 - RNA, 19 nt, Homo sapiens
  misc_RNA (1)...(19): siRNA sense strand
guagaaggagugguuaaga

SEQ ID NO: 534093 - RNA, 19 nt, Homo sapiens
  misc_RNA (1)...(19): siRNA sense strand
uguguaaugucaccuuguu

SEQ ID NO: 534094 - RNA, 19 nt, Homo sapiens
  misc_RNA (1)...(19): siRNA sense strand
aacacuagccgaaauggua

SEQ ID NO: 534095 - RNA, 19 nt, Homo sapiens
  misc_RNA (1)...(19): siRNA sense strand
gcaacuucaaagaacaaua

SEQ ID NO: 534096 - RNA, 19 nt, Homo sapiens
  misc_RNA (1)...(19): siRNA sense strand
acuacaagauugauugcaa

SEQ ID NO: 534097 - RNA, 19 nt, Homo sapiens
  misc_RNA (1)...(19): siRNA sense strand
guuuaaaccugagucaaca

SEQ ID NO: 534098 - RNA, 19 nt, Homo sapiens
  misc_RNA (1)...(19): siRNA sense strand
ggagaaaaccugucagcaa

SEQ ID NO: 534099 - RNA, 19 nt, Homo sapiens
  misc_RNA (1)...(19): siRNA sense strand
gaaggagugguuaagaaag

SEQ ID NO: 534100 - RNA, 19 nt, Homo sapiens
  misc_RNA (1)...(19): siRNA sense strand
aacaggcuuucuacugaua

SEQ ID NO: 534101 - RNA, 19 nt, Homo sapiens
  misc_RNA (1)...(19): siRNA sense strand
cacguuggaugucuugguu

SEQ ID NO: 534102 - RNA, 19 nt, Homo sapiens
  misc_RNA (1)...(19): siRNA sense strand
guaguaguucccaaguuaa

SEQ ID NO: 534103 - RNA, 19 nt, Homo sapiens
  misc_RNA (1)...(19): siRNA sense strand
aaagaaugcaggaaguuug

SEQ ID NO: 534104 - RNA, 19 nt, Homo sapiens
  misc_RNA (1)...(19): siRNA sense strand
uggacuugguuacuuauau

SEQ ID NO: 534105 - RNA, 19 nt, Homo sapiens
  misc_RNA (1)...(19): siRNA sense strand
gcagugcagcagcuauuau

SEQ ID NO: 534106 - RNA, 19 nt, Homo sapiens
  misc_RNA (1)...(19): siRNA sense strand
cuacuucagcccaauaaga

SEQ ID NO: 534107 - RNA, 19 nt, Homo sapiens
  misc_RNA (1)...(19): siRNA sense strand
gacauuaucugcaacaaau

SEQ ID NO: 534108 - RNA, 19 nt, Homo sapiens
  misc_RNA (1)...(19): siRNA sense strand
caacaaaugccaagacaaa

SEQ ID NO: 534109 - RNA, 19 nt, Homo sapiens
  misc_RNA (1)...(19): siRNA sense strand
cuaggaagauguucuguaa

SEQ ID NO: 534110 - RNA, 19 nt, Homo sapiens
  misc_RNA (1)...(19): siRNA sense strand
cuacagcgaucccacauuu

SEQ ID NO: 534111 - RNA, 19 nt, Homo sapiens
  misc_RNA (1)...(19): siRNA sense strand
ccacuaggcugaugaagga

SEQ ID NO: 534112 - RNA, 19 nt, Homo sapiens
  misc_RNA (1)...(19): siRNA sense strand
gcauaagguuugugacauu

SEQ ID NO: 534113 - RNA, 19 nt, Homo sapiens
  misc_RNA (1)...(19): siRNA sense strand
caaaguccauugaggugua

SEQ ID NO: 534114 - RNA, 19 nt, Homo sapiens
  misc_RNA (1)...(19): siRNA sense strand
guaccugccugaagaguug

SEQ ID NO: 534115 - RNA, 19 nt, Homo sapiens
  misc_RNA (1)...(19): siRNA sense strand
cauaagguuugugacauua

SEQ ID NO: 534116 - RNA, 19 nt, Homo sapiens
  misc_RNA (1)...(19): siRNA sense strand
cauagaggauaaagcagua

SEQ ID NO: 534117 - RNA, 19 nt, Homo sapiens
  misc_RNA (1)...(19): siRNA sense strand
ggucaacgcugcucuucug

SEQ ID NO: 534118 - RNA, 19 nt, Homo sapiens
  misc_RNA (1)...(19): siRNA sense strand
caagaaacauagcauaagg

SEQ ID NO: 534119 - RNA, 19 nt, Homo sapiens
  misc_RNA (1)...(19): siRNA sense strand
caaaugaugugcgagaugu

SEQ ID NO: 534120 - RNA, 19 nt, Homo sapiens
  misc_RNA (1)...(19): siRNA sense strand
cugacacgcugcaggauua

SEQ ID NO: 534121 - RNA, 19 nt, Homo sapiens
  misc_RNA (1)...(19): siRNA sense strand
caaaugccaagacaaauga

SEQ ID NO: 534122 - RNA, 19 nt, Homo sapiens
  misc_RNA (1)...(19): siRNA sense strand
gaugaaggauuugggcuau

SEQ ID NO: 534123 - RNA, 19 nt, Homo sapiens
  misc_RNA (1)...(19): siRNA sense strand
uaccaaggcugucauuuua

SEQ ID NO: 534124 - RNA, 19 nt, Homo sapiens
  misc_RNA (1)...(19): siRNA sense strand
aggaagauguucuguaaga

SEQ ID NO: 534125 - RNA, 19 nt, Homo sapiens
  misc_RNA (1)...(19): siRNA sense strand
gagauucaucgguucaaua

SEQ ID NO: 534126 - RNA, 19 nt, Homo sapiens
  misc_RNA (1)...(19): siRNA sense strand
gagccgcugucgagugauu

SEQ ID NO: 534127 - RNA, 19 nt, Homo sapiens
  misc_RNA (1)...(19): siRNA sense strand
gggcaggugaggagcauua

SEQ ID NO: 534128 - RNA, 19 nt, Homo sapiens
  misc_RNA (1)...(19): siRNA sense strand
guacagcgccuacaacaac

SEQ ID NO: 534129 - RNA, 19 nt, Homo sapiens
  misc_RNA (1)...(19): siRNA sense strand
gaggcaauggugacuauuu

SEQ ID NO: 534130 - RNA, 19 nt, Homo sapiens
  misc_RNA (1)...(19): siRNA sense strand
ccaaggcugucauuuuaua

SEQ ID NO: 534131 - RNA, 19 nt, Homo sapiens
  misc_RNA (1)...(19): siRNA sense strand
uugagaagcuuccaguaga

SEQ ID NO: 534132 - RNA, 19 nt, Homo sapiens
  misc_RNA (1)...(19): siRNA sense strand
gaagagugggcaauccuau

SEQ ID NO: 534133 - RNA, 19 nt, Homo sapiens
  misc_RNA (1)...(19): siRNA sense strand
ggcaaaggcuacaaguaca

SEQ ID NO: 534134 - RNA, 19 nt, Homo sapiens
  misc_RNA (1)...(19): siRNA sense strand
cacucuggcucacaucaua

SEQ ID NO: 534135 - RNA, 19 nt, Homo sapiens
  misc_RNA (1)...(19): siRNA sense strand
gcaaaggcuacaaguacaa

SEQ ID NO: 534136 - RNA, 19 nt, Homo sapiens
  misc_RNA (1)...(19): siRNA sense strand
uagaggcaauggugacuau

SEQ ID NO: 534137 - RNA, 19 nt, Homo sapiens
  misc_RNA (1)...(19): siRNA sense strand
gcaagaaacauagcauaag

SEQ ID NO: 534138 - RNA, 19 nt, Homo sapiens
  misc_RNA (1)...(19): siRNA sense strand
gaucccacauuuuauauga

SEQ ID NO: 534139 - RNA, 19 nt, Homo sapiens
  misc_RNA (1)...(19): siRNA sense strand
aggaguaccugccugaaga

SEQ ID NO: 534140 - RNA, 19 nt, Homo sapiens
  misc_RNA (1)...(19): siRNA sense strand
cagcaagaaacauagcaua

SEQ ID NO: 534141 - RNA, 19 nt, Homo sapiens
  misc_RNA (1)...(19): siRNA sense strand
caguagacacccuggcuua

SEQ ID NO: 534142 - RNA, 19 nt, Homo sapiens
  misc_RNA (1)...(19): siRNA sense strand
cacggaggcuugucagguu

SEQ ID NO: 534143 - RNA, 19 nt, Homo sapiens
  misc_RNA (1)...(19): siRNA sense strand
agguuaagcucuaggaaga

SEQ ID NO: 534144 - RNA, 19 nt, Homo sapiens
  misc_RNA (1)...(19): siRNA sense strand
guucauagaggauaaagca

SEQ ID NO: 534145 - RNA, 19 nt, Homo sapiens
  misc_RNA (1)...(19): siRNA sense strand
cuaggcugaugaaggauuu

SEQ ID NO: 534146 - RNA, 19 nt, Homo sapiens
  misc_RNA (1)...(19): siRNA sense strand
guuaagcucuaggaagaug

SEQ ID NO: 534147 - RNA, 19 nt, Homo sapiens
  misc_RNA (1)...(19): siRNA sense strand
ggguagauuucuucaagca

SEQ ID NO: 534148 - RNA, 19 nt, Homo sapiens
  misc_RNA (1)...(19): siRNA sense strand
uaagguuugugacauuauc

SEQ ID NO: 534149 - RNA, 19 nt, Homo sapiens
  misc_RNA (1)...(19): siRNA sense strand
ccagaacgccucccucuac

SEQ ID NO: 534150 - RNA, 19 nt, Homo sapiens
  misc_RNA (1)...(19): siRNA sense strand
agauucaucgguucaauaa

SEQ ID NO: 534151 - RNA, 19 nt, Homo sapiens
  misc_RNA (1)...(19): siRNA sense strand
gugaggagcauuacaacug

SEQ ID NO: 534152 - RNA, 19 nt, Homo sapiens
  misc_RNA (1)...(19): siRNA sense strand
acaaaugccaagacaaaug

SEQ ID NO: 534153 - RNA, 19 nt, Homo sapiens
  misc_RNA (1)...(19): siRNA sense strand
ccauguucauagaggauaa

SEQ ID NO: 534154 - RNA, 19 nt, Homo sapiens
  misc_RNA (1)...(19): siRNA sense strand
cugagccgcugucgaguga

SEQ ID NO: 534155 - RNA, 19 nt, Homo sapiens
  misc_RNA (1)...(19): siRNA sense strand
gacaaaugaugugcgagau

SEQ ID NO: 534156 - RNA, 19 nt, Homo sapiens
  misc_RNA (1)...(19): siRNA sense strand
gcaauggugacuauuuuaa

SEQ ID NO: 534157 - RNA, 19 nt, Homo sapiens
  misc_RNA (1)...(19): siRNA sense strand
agaaacauagcauaagguu

SEQ ID NO: 534158 - RNA, 19 nt, Homo sapiens
  misc_RNA (1)...(19): siRNA sense strand
ugaaggauuugggcuaugg

SEQ ID NO: 534159 - RNA, 19 nt, Homo sapiens
  misc_RNA (1)...(19): siRNA sense strand
gucgagugauuguucuuga

SEQ ID NO: 534160 - RNA, 19 nt, Homo sapiens
  misc_RNA (1)...(19): siRNA sense strand
ugacauuaucugcaacaaa

SEQ ID NO: 534161 - RNA, 19 nt, Homo sapiens
  misc_RNA (1)...(19): siRNA sense strand
gcaacagcaagaaacauag

SEQ ID NO: 534162 - RNA, 19 nt, Homo sapiens
  misc_RNA (1)...(19): siRNA sense strand
cauagcauaagguuuguga

SEQ ID NO: 534163 - RNA, 19 nt, Homo sapiens
  misc_RNA (1)...(19): siRNA sense strand
gcaacaaaugccaagacaa

SEQ ID NO: 534164 - RNA, 19 nt, Homo sapiens
  misc_RNA (1)...(19): siRNA sense strand
guaagaagagugggcaauc

SEQ ID NO: 534165 - RNA, 19 nt, Homo sapiens
  misc_RNA (1)...(19): siRNA sense strand
ugagaagcuuccaguagag

SEQ ID NO: 534166 - RNA, 19 nt, Homo sapiens
  misc_RNA (1)...(19): siRNA sense strand
ggagauccgacagaugcua

SEQ ID NO: 534167 - RNA, 19 nt, Homo sapiens
  misc_RNA (1)...(19): siRNA sense strand
uggcggugcuggcuagguu

SEQ ID NO: 534168 - RNA, 19 nt, Homo sapiens
  misc_RNA (1)...(19): siRNA sense strand
cacccuggcuuaccucagu

SEQ ID NO: 534169 - RNA, 19 nt, Homo sapiens
  misc_RNA (1)...(19): siRNA sense strand
cagagaaugacgugaagga

SEQ ID NO: 534170 - RNA, 19 nt, Homo sapiens
  misc_RNA (1)...(19): siRNA sense strand
uggcaaaggcuacaaguac

SEQ ID NO: 534171 - RNA, 19 nt, Homo sapiens
  misc_RNA (1)...(19): siRNA sense strand
caggugaggagcauuacaa

SEQ ID NO: 534172 - RNA, 19 nt, Homo sapiens
  misc_RNA (1)...(19): siRNA sense strand
gaugugcgagaugucauaa

SEQ ID NO: 534173 - RNA, 19 nt, Homo sapiens
  misc_RNA (1)...(19): siRNA sense strand
gaaauccccucgcuuaucc

SEQ ID NO: 534174 - RNA, 19 nt, Homo sapiens
  misc_RNA (1)...(19): siRNA sense strand
uagcauaagguuugugaca

SEQ ID NO: 534175 - RNA, 19 nt, Homo sapiens
  misc_RNA (1)...(19): siRNA sense strand
agcaacagcaagaaacaua

SEQ ID NO: 534176 - RNA, 19 nt, Homo sapiens
  misc_RNA (1)...(19): siRNA sense strand
ccgaggagauccgacagau

SEQ ID NO: 534177 - RNA, 19 nt, Homo sapiens
  misc_RNA (1)...(19): siRNA sense strand
caguagaguucugaucaca

SEQ ID NO: 534178 - RNA, 19 nt, Homo sapiens
  misc_RNA (1)...(19): siRNA sense strand
agcaagaaacauagcauaa

SEQ ID NO: 534179 - RNA, 19 nt, Homo sapiens
  misc_RNA (1)...(19): siRNA sense strand
cgagugauuguucuugaga

SEQ ID NO: 534180 - RNA, 19 nt, Homo sapiens
  misc_RNA (1)...(19): siRNA sense strand
cacagagaaugacgugaag

SEQ ID NO: 534181 - RNA, 19 nt, Homo sapiens
  misc_RNA (1)...(19): siRNA sense strand
ugagauucaucgguucaau

SEQ ID NO: 534182 - RNA, 19 nt, Homo sapiens
  misc_RNA (1)...(19): siRNA sense strand
uuugugacauuaucugcaa

SEQ ID NO: 534183 - RNA, 19 nt, Homo sapiens
  misc_RNA (1)...(19): siRNA sense strand
cuggcuagguuaagcucua

SEQ ID NO: 534184 - RNA, 19 nt, Homo sapiens
  misc_RNA (1)...(19): siRNA sense strand
gaggauaaagcaguagaca

SEQ ID NO: 534185 - RNA, 19 nt, Homo sapiens
  misc_RNA (1)...(19): siRNA sense strand
uaagaagagugggcaaucc

SEQ ID NO: 534186 - RNA, 19 nt, Homo sapiens
  misc_RNA (1)...(19): siRNA sense strand
cccaguguguggucuacuu

SEQ ID NO: 534187 - RNA, 19 nt, Homo sapiens
  misc_RNA (1)...(19): siRNA sense strand
agaccacucuggcucacau

SEQ ID NO: 534188 - RNA, 19 nt, Homo sapiens
  misc_RNA (1)...(19): siRNA sense strand
ugcaacaaaugccaagaca

SEQ ID NO: 534189 - RNA, 19 nt, Homo sapiens
  misc_RNA (1)...(19): siRNA sense strand
ugaugugcgagaugucaua

SEQ ID NO: 534190 - RNA, 19 nt, Homo sapiens
  misc_RNA (1)...(19): siRNA sense strand
cagaacgccucccucuacu

SEQ ID NO: 534191 - RNA, 19 nt, Homo sapiens
  misc_RNA (1)...(19): siRNA sense strand
acagcgaucccacauuuua

SEQ ID NO: 534192 - RNA, 19 nt, Homo sapiens
  misc_RNA (1)...(19): siRNA sense strand
agagugggcaauccuauuc

SEQ ID NO: 534193 - RNA, 19 nt, Homo sapiens
  misc_RNA (1)...(19): siRNA sense strand
ucuaggaagauguucugua

SEQ ID NO: 534194 - RNA, 19 nt, Homo sapiens
  misc_RNA (1)...(19): siRNA sense strand
ggaauccacguccuagacu

SEQ ID NO: 534195 - RNA, 19 nt, Homo sapiens
  misc_RNA (1)...(19): siRNA sense strand
guagaggcaauggugacua

SEQ ID NO: 534196 - RNA, 19 nt, Homo sapiens
  misc_RNA (1)...(19): siRNA sense strand
ccaguguguggucuacuuu

SEQ ID NO: 534197 - RNA, 19 nt, Homo sapiens
  misc_RNA (1)...(19): siRNA sense strand
ugugcgagaugucauaaaa

SEQ ID NO: 534198 - RNA, 19 nt, Homo sapiens
  misc_RNA (1)...(19): siRNA sense strand
gagcauuacaacugcaucu

SEQ ID NO: 534199 - RNA, 19 nt, Homo sapiens
  misc_RNA (1)...(19): siRNA sense strand
gcucuaggaagauguucug

SEQ ID NO: 534200 - RNA, 19 nt, Homo sapiens
  misc_RNA (1)...(19): siRNA sense strand
cuaccaaggcugucauuuu

SEQ ID NO: 534201 - RNA, 19 nt, Homo sapiens
  misc_RNA (1)...(19): siRNA sense strand
acggaggcuugucagguuu

SEQ ID NO: 534202 - RNA, 19 nt, Homo sapiens
  misc_RNA (1)...(19): siRNA sense strand
agaagagugggcaauccua

SEQ ID NO: 534203 - RNA, 19 nt, Homo sapiens
  misc_RNA (1)...(19): siRNA sense strand
gacauuaucugcaacaaau

SEQ ID NO: 534204 - RNA, 19 nt, Homo sapiens
  misc_RNA (1)...(19): siRNA sense strand
caacaaaugccaagacaaa

SEQ ID NO: 534205 - RNA, 19 nt, Homo sapiens
  misc_RNA (1)...(19): siRNA sense strand
cuaggaagauguucuguaa

SEQ ID NO: 534206 - RNA, 19 nt, Homo sapiens
  misc_RNA (1)...(19): siRNA sense strand
cuacagcgaucccacauuu

SEQ ID NO: 534207 - RNA, 19 nt, Homo sapiens
  misc_RNA (1)...(19): siRNA sense strand
ccacuaggcugaugaagga

SEQ ID NO: 534208 - RNA, 19 nt, Homo sapiens
  misc_RNA (1)...(19): siRNA sense strand
gcauaagguuugugacauu

SEQ ID NO: 534209 - RNA, 19 nt, Homo sapiens
  misc_RNA (1)...(19): siRNA sense strand
caaaguccauugaggugua

SEQ ID NO: 534210 - RNA, 19 nt, Homo sapiens
  misc_RNA (1)...(19): siRNA sense strand
guaccugccugaagaguug

SEQ ID NO: 534211 - RNA, 19 nt, Homo sapiens
  misc_RNA (1)...(19): siRNA sense strand
cauaagguuugugacauua

SEQ ID NO: 534212 - RNA, 19 nt, Homo sapiens
  misc_RNA (1)...(19): siRNA sense strand
cauagaggauaaagcagua

SEQ ID NO: 534213 - RNA, 19 nt, Homo sapiens
  misc_RNA (1)...(19): siRNA sense strand
ggucaacgcugcucuucug

SEQ ID NO: 534214 - RNA, 19 nt, Homo sapiens
  misc_RNA (1)...(19): siRNA sense strand
caagaaacauagcauaagg

SEQ ID NO: 534215 - RNA, 19 nt, Homo sapiens
  misc_RNA (1)...(19): siRNA sense strand
caaaugaugugcgagaugu

SEQ ID NO: 534216 - RNA, 19 nt, Homo sapiens
  misc_RNA (1)...(19): siRNA sense strand
cugacacgcugcaggauua

SEQ ID NO: 534217 - RNA, 19 nt, Homo sapiens
  misc_RNA (1)...(19): siRNA sense strand
caaaugccaagacaaauga

SEQ ID NO: 534218 - RNA, 19 nt, Homo sapiens
  misc_RNA (1)...(19): siRNA sense strand
gaugaaggauuugggcuau

SEQ ID NO: 534219 - RNA, 19 nt, Homo sapiens
  misc_RNA (1)...(19): siRNA sense strand
uaccaaggcugucauuuua

SEQ ID NO: 534220 - RNA, 19 nt, Homo sapiens
  misc_RNA (1)...(19): siRNA sense strand
aggaagauguucuguaaga

SEQ ID NO: 534221 - RNA, 19 nt, Homo sapiens
  misc_RNA (1)...(19): siRNA sense strand
gagauucaucgguucaaua

SEQ ID NO: 534222 - RNA, 19 nt, Homo sapiens
  misc_RNA (1)...(19): siRNA sense strand
gagccgcugucgagugauu

SEQ ID NO: 534223 - RNA, 19 nt, Homo sapiens
  misc_RNA (1)...(19): siRNA sense strand
gggcaggugaggagcauua

SEQ ID NO: 534224 - RNA, 19 nt, Homo sapiens
  misc_RNA (1)...(19): siRNA sense strand
guacagcgccuacaacaac

SEQ ID NO: 534225 - RNA, 19 nt, Homo sapiens
  misc_RNA (1)...(19): siRNA sense strand
gaggcaauggugacuauuu

SEQ ID NO: 534226 - RNA, 19 nt, Homo sapiens
  misc_RNA (1)...(19): siRNA sense strand
ccaaggcugucauuuuaua

SEQ ID NO: 534227 - RNA, 19 nt, Homo sapiens
  misc_RNA (1)...(19): siRNA sense strand
uugagaagcuuccaguaga

SEQ ID NO: 534228 - RNA, 19 nt, Homo sapiens
  misc_RNA (1)...(19): siRNA sense strand
gaagagugggcaauccuau

SEQ ID NO: 534229 - RNA, 19 nt, Homo sapiens
  misc_RNA (1)...(19): siRNA sense strand
ggcaaaggcuacaaguaca

SEQ ID NO: 534230 - RNA, 19 nt, Homo sapiens
  misc_RNA (1)...(19): siRNA sense strand
cacucuggcucacaucaua

SEQ ID NO: 534231 - RNA, 19 nt, Homo sapiens
  misc_RNA (1)...(19): siRNA sense strand
gcaaaggcuacaaguacaa

SEQ ID NO: 534232 - RNA, 19 nt, Homo sapiens
  misc_RNA (1)...(19): siRNA sense strand
uagaggcaauggugacuau

SEQ ID NO: 534233 - RNA, 19 nt, Homo sapiens
  misc_RNA (1)...(19): siRNA sense strand
gcaagaaacauagcauaag

SEQ ID NO: 534234 - RNA, 19 nt, Homo sapiens
  misc_RNA (1)...(19): siRNA sense strand
gaucccacauuuuauauga

SEQ ID NO: 534235 - RNA, 19 nt, Homo sapiens
  misc_RNA (1)...(19): siRNA sense strand
aggaguaccugccugaaga

SEQ ID NO: 534236 - RNA, 19 nt, Homo sapiens
  misc_RNA (1)...(19): siRNA sense strand
cagcaagaaacauagcaua

SEQ ID NO: 534237 - RNA, 19 nt, Homo sapiens
  misc_RNA (1)...(19): siRNA sense strand
caguagacacccuggcuua

SEQ ID NO: 534238 - RNA, 19 nt, Homo sapiens
  misc_RNA (1)...(19): siRNA sense strand
cacggaggcuugucagguu

SEQ ID NO: 534239 - RNA, 19 nt, Homo sapiens
  misc_RNA (1)...(19): siRNA sense strand
agguuaagcucuaggaaga

SEQ ID NO: 534240 - RNA, 19 nt, Homo sapiens
  misc_RNA (1)...(19): siRNA sense strand
guucauagaggauaaagca

SEQ ID NO: 534241 - RNA, 19 nt, Homo sapiens
  misc_RNA (1)...(19): siRNA sense strand
cuaggcugaugaaggauuu

SEQ ID NO: 534242 - RNA, 19 nt, Homo sapiens
  misc_RNA (1)...(19): siRNA sense strand
guuaagcucuaggaagaug

SEQ ID NO: 534243 - RNA, 19 nt, Homo sapiens
  misc_RNA (1)...(19): siRNA sense strand
ggguagauuucuucaagca

SEQ ID NO: 534244 - RNA, 19 nt, Homo sapiens
  misc_RNA (1)...(19): siRNA sense strand
uaagguuugugacauuauc

SEQ ID NO: 534245 - RNA, 19 nt, Homo sapiens
  misc_RNA (1)...(19): siRNA sense strand
ccagaacgccucccucuac

SEQ ID NO: 534246 - RNA, 19 nt, Homo sapiens
  misc_RNA (1)...(19): siRNA sense strand
agauucaucgguucaauaa

SEQ ID NO: 534247 - RNA, 19 nt, Homo sapiens
  misc_RNA (1)...(19): siRNA sense strand
gugaggagcauuacaacug

SEQ ID NO: 534248 - RNA, 19 nt, Homo sapiens
  misc_RNA (1)...(19): siRNA sense strand
acaaaugccaagacaaaug

SEQ ID NO: 534249 - RNA, 19 nt, Homo sapiens
  misc_RNA (1)...(19): siRNA sense strand
ccauguucauagaggauaa

SEQ ID NO: 534250 - RNA, 19 nt, Homo sapiens
  misc_RNA (1)...(19): siRNA sense strand
cugagccgcugucgaguga

SEQ ID NO: 534251 - RNA, 19 nt, Homo sapiens
  misc_RNA (1)...(19): siRNA sense strand
gacaaaugaugugcgagau

SEQ ID NO: 534252 - RNA, 19 nt, Homo sapiens
  misc_RNA (1)...(19): siRNA sense strand
gcaauggugacuauuuuaa

SEQ ID NO: 534253 - RNA, 19 nt, Homo sapiens
  misc_RNA (1)...(19): siRNA sense strand
agaaacauagcauaagguu

SEQ ID NO: 534254 - RNA, 19 nt, Homo sapiens
  misc_RNA (1)...(19): siRNA sense strand
ugaaggauuugggcuaugg

SEQ ID NO: 534255 - RNA, 19 nt, Homo sapiens
  misc_RNA (1)...(19): siRNA sense strand
gucgagugauuguucuuga

SEQ ID NO: 534256 - RNA, 19 nt, Homo sapiens
  misc_RNA (1)...(19): siRNA sense strand
ugacauuaucugcaacaaa

SEQ ID NO: 534257 - RNA, 19 nt, Homo sapiens
  misc_RNA (1)...(19): siRNA sense strand
gcaacagcaagaaacauag

SEQ ID NO: 534258 - RNA, 19 nt, Homo sapiens
  misc_RNA (1)...(19): siRNA sense strand
cauagcauaagguuuguga

SEQ ID NO: 534259 - RNA, 19 nt, Homo sapiens
  misc_RNA (1)...(19): siRNA sense strand
gcaacaaaugccaagacaa

SEQ ID NO: 534260 - RNA, 19 nt, Homo sapiens
  misc_RNA (1)...(19): siRNA sense strand
guaagaagagugggcaauc

SEQ ID NO: 534261 - RNA, 19 nt, Homo sapiens
  misc_RNA (1)...(19): siRNA sense strand
ugagaagcuuccaguagag

SEQ ID NO: 534262 - RNA, 19 nt, Homo sapiens
  misc_RNA (1)...(19): siRNA sense strand
ggagauccgacagaugcua

SEQ ID NO: 534263 - RNA, 19 nt, Homo sapiens
  misc_RNA (1)...(19): siRNA sense strand
uggcggugcuggcuagguu

SEQ ID NO: 534264 - RNA, 19 nt, Homo sapiens
  misc_RNA (1)...(19): siRNA sense strand
cacccuggcuuaccucagu

SEQ ID NO: 534265 - RNA, 19 nt, Homo sapiens
  misc_RNA (1)...(19): siRNA sense strand
cagagaaugacgugaagga

SEQ ID NO: 534266 - RNA, 19 nt, Homo sapiens
  misc_RNA (1)...(19): siRNA sense strand
uggcaaaggcuacaaguac

SEQ ID NO: 534267 - RNA, 19 nt, Homo sapiens
  misc_RNA (1)...(19): siRNA sense strand
caggugaggagcauuacaa

SEQ ID NO: 534268 - RNA, 19 nt, Homo sapiens
  misc_RNA (1)...(19): siRNA sense strand
gaugugcgagaugucauaa

SEQ ID NO: 534269 - RNA, 19 nt, Homo sapiens
  misc_RNA (1)...(19): siRNA sense strand
gaaauccccucgcuuaucc

SEQ ID NO: 534270 - RNA, 19 nt, Homo sapiens
  misc_RNA (1)...(19): siRNA sense strand
uagcauaagguuugugaca

SEQ ID NO: 534271 - RNA, 19 nt, Homo sapiens
  misc_RNA (1)...(19): siRNA sense strand
agcaacagcaagaaacaua

SEQ ID NO: 534272 - RNA, 19 nt, Homo sapiens
  misc_RNA (1)...(19): siRNA sense strand
ccgaggagauccgacagau

SEQ ID NO: 534273 - RNA, 19 nt, Homo sapiens
  misc_RNA (1)...(19): siRNA sense strand
caguagaguucugaucaca

SEQ ID NO: 534274 - RNA, 19 nt, Homo sapiens
  misc_RNA (1)...(19): siRNA sense strand
agcaagaaacauagcauaa

SEQ ID NO: 534275 - RNA, 19 nt, Homo sapiens
  misc_RNA (1)...(19): siRNA sense strand
cgagugauuguucuugaga

SEQ ID NO: 534276 - RNA, 19 nt, Homo sapiens
  misc_RNA (1)...(19): siRNA sense strand
cacagagaaugacgugaag

SEQ ID NO: 534277 - RNA, 19 nt, Homo sapiens
  misc_RNA (1)...(19): siRNA sense strand
ugagauucaucgguucaau

SEQ ID NO: 534278 - RNA, 19 nt, Homo sapiens
  misc_RNA (1)...(19): siRNA sense strand
uuugugacauuaucugcaa

SEQ ID NO: 534279 - RNA, 19 nt, Homo sapiens
  misc_RNA (1)...(19): siRNA sense strand
cuggcuagguuaagcucua

SEQ ID NO: 534280 - RNA, 19 nt, Homo sapiens
  misc_RNA (1)...(19): siRNA sense strand
gaggauaaagcaguagaca

SEQ ID NO: 534281 - RNA, 19 nt, Homo sapiens
  misc_RNA (1)...(19): siRNA sense strand
uaagaagagugggcaaucc

SEQ ID NO: 534282 - RNA, 19 nt, Homo sapiens
  misc_RNA (1)...(19): siRNA sense strand
cccaguguguggucuacuu

SEQ ID NO: 534283 - RNA, 19 nt, Homo sapiens
  misc_RNA (1)...(19): siRNA sense strand
agaccacucuggcucacau

SEQ ID NO: 534284 - RNA, 19 nt, Homo sapiens
  misc_RNA (1)...(19): siRNA sense strand
ugcaacaaaugccaagaca

SEQ ID NO: 534285 - RNA, 19 nt, Homo sapiens
  misc_RNA (1)...(19): siRNA sense strand
ugaugugcgagaugucaua

SEQ ID NO: 534286 - RNA, 19 nt, Homo sapiens
  misc_RNA (1)...(19): siRNA sense strand
cagaacgccucccucuacu

SEQ ID NO: 534287 - RNA, 19 nt, Homo sapiens
  misc_RNA (1)...(19): siRNA sense strand
acagcgaucccacauuuua

SEQ ID NO: 534288 - RNA, 19 nt, Homo sapiens
  misc_RNA (1)...(19): siRNA sense strand
agagugggcaauccuauuc

SEQ ID NO: 534289 - RNA, 19 nt, Homo sapiens
  misc_RNA (1)...(19): siRNA sense strand
ucuaggaagauguucugua

SEQ ID NO: 534290 - RNA, 19 nt, Homo sapiens
  misc_RNA (1)...(19): siRNA sense strand
ggaauccacguccuagacu

SEQ ID NO: 534291 - RNA, 19 nt, Homo sapiens
  misc_RNA (1)...(19): siRNA sense strand
guagaggcaauggugacua

SEQ ID NO: 534292 - RNA, 19 nt, Homo sapiens
  misc_RNA (1)...(19): siRNA sense strand
ccaguguguggucuacuuu

SEQ ID NO: 534293 - RNA, 19 nt, Homo sapiens
  misc_RNA (1)...(19): siRNA sense strand
ugugcgagaugucauaaaa

SEQ ID NO: 534294 - RNA, 19 nt, Homo sapiens
  misc_RNA (1)...(19): siRNA sense strand
gagcauuacaacugcaucu

SEQ ID NO: 534295 - RNA, 19 nt, Homo sapiens
  misc_RNA (1)...(19): siRNA sense strand
gcucuaggaagauguucug

SEQ ID NO: 534296 - RNA, 19 nt, Homo sapiens
  misc_RNA (1)...(19): siRNA sense strand
cuaccaaggcugucauuuu

SEQ ID NO: 534297 - RNA, 19 nt, Homo sapiens
  misc_RNA (1)...(19): siRNA sense strand
acggaggcuugucagguuu

SEQ ID NO: 534298 - RNA, 19 nt, Homo sapiens
  misc_RNA (1)...(19): siRNA sense strand
agaagagugggcaauccua

SEQ ID NO: 534299 - RNA, 19 nt, Homo sapiens
  misc_RNA (1)...(19): siRNA sense strand
ggcaucaucuuguuuauaa

SEQ ID NO: 534300 - RNA, 19 nt, Homo sapiens
  misc_RNA (1)...(19): siRNA sense strand
gaacauggcccgugacugu

SEQ ID NO: 534301 - RNA, 19 nt, Homo sapiens
  misc_RNA (1)...(19): siRNA sense strand
gaacuucaccgcccacaug

SEQ ID NO: 534302 - RNA, 19 nt, Homo sapiens
  misc_RNA (1)...(19): siRNA sense strand
caagcacucugacuucuuc

SEQ ID NO: 534303 - RNA, 19 nt, Homo sapiens
  misc_RNA (1)...(19): siRNA sense strand
gcaccgauuucaacgacaa

SEQ ID NO: 534304 - RNA, 19 nt, Homo sapiens
  misc_RNA (1)...(19): siRNA sense strand
gcaguucucguaccugauu

SEQ ID NO: 534305 - RNA, 19 nt, Homo sapiens
  misc_RNA (1)...(19): siRNA sense strand
ggacagcaccgauuucaac

SEQ ID NO: 534306 - RNA, 19 nt, Homo sapiens
  misc_RNA (1)...(19): siRNA sense strand
gcaaccggcaguucucgua

SEQ ID NO: 534307 - RNA, 19 nt, Homo sapiens
  misc_RNA (1)...(19): siRNA sense strand
gagagacgcagccaagaug

SEQ ID NO: 534308 - RNA, 19 nt, Homo sapiens
  misc_RNA (1)...(19): siRNA sense strand
gggcaucaucuuguuuaua

SEQ ID NO: 534309 - RNA, 19 nt, Homo sapiens
  misc_RNA (1)...(19): siRNA sense strand
gauuucaacgacaagauuu

SEQ ID NO: 534310 - RNA, 19 nt, Homo sapiens
  misc_RNA (1)...(19): siRNA sense strand
ccucaucaccuacccugua

SEQ ID NO: 534311 - RNA, 19 nt, Homo sapiens
  misc_RNA (1)...(19): siRNA sense strand
gcacucugacuucuucaau

SEQ ID NO: 534312 - RNA, 19 nt, Homo sapiens
  misc_RNA (1)...(19): siRNA sense strand
gaagcgcgacggcccuuau

SEQ ID NO: 534313 - RNA, 19 nt, Homo sapiens
  misc_RNA (1)...(19): siRNA sense strand
caaugucaaggaacuguuu

SEQ ID NO: 534314 - RNA, 19 nt, Homo sapiens
  misc_RNA (1)...(19): siRNA sense strand
acucugacuucuucaaugu

SEQ ID NO: 534315 - RNA, 19 nt, Homo sapiens
  misc_RNA (1)...(19): siRNA sense strand
cuucuucaaugucaaggaa

SEQ ID NO: 534316 - RNA, 19 nt, Homo sapiens
  misc_RNA (1)...(19): siRNA sense strand
gaggacagcaccgauuuca

SEQ ID NO: 534317 - RNA, 19 nt, Homo sapiens
  misc_RNA (1)...(19): siRNA sense strand
cgacaucaucgaccuggaa

SEQ ID NO: 534318 - RNA, 19 nt, Homo sapiens
  misc_RNA (1)...(19): siRNA sense strand
gcagguugaggcucucuau

SEQ ID NO: 534319 - RNA, 19 nt, Homo sapiens
  misc_RNA (1)...(19): siRNA sense strand
uauggagccguacaucuuu

SEQ ID NO: 534320 - RNA, 19 nt, Homo sapiens
  misc_RNA (1)...(19): siRNA sense strand
ugccggaccucaucaucuu

SEQ ID NO: 534321 - RNA, 19 nt, Homo sapiens
  misc_RNA (1)...(19): siRNA sense strand
cgauuucaacgacaagauu

SEQ ID NO: 534322 - RNA, 19 nt, Homo sapiens
  misc_RNA (1)...(19): siRNA sense strand
aagggcaucaucuuguuua

SEQ ID NO: 534323 - RNA, 19 nt, Homo sapiens
  misc_RNA (1)...(19): siRNA sense strand
guaccugauugagaacaug

SEQ ID NO: 534324 - RNA, 19 nt, Homo sapiens
  misc_RNA (1)...(19): siRNA sense strand
gagacgcagccaagaugaa

SEQ ID NO: 534325 - RNA, 19 nt, Homo sapiens
  misc_RNA (1)...(19): siRNA sense strand
cggaggacagcaccgauuu

SEQ ID NO: 534326 - RNA, 19 nt, Homo sapiens
  misc_RNA (1)...(19): siRNA sense strand
ggaggacagcaccgauuuc

SEQ ID NO: 534327 - RNA, 19 nt, Homo sapiens
  misc_RNA (1)...(19): siRNA sense strand
acgacaagauuuugaauga

SEQ ID NO: 534328 - RNA, 19 nt, Homo sapiens
  misc_RNA (1)...(19): siRNA sense strand
uuauggagccguacaucuu

SEQ ID NO: 534329 - RNA, 19 nt, Homo sapiens
  misc_RNA (1)...(19): siRNA sense strand
ccucaagcacucugacuuc

SEQ ID NO: 534330 - RNA, 19 nt, Homo sapiens
  misc_RNA (1)...(19): siRNA sense strand
ugagagacgcagccaagau

SEQ ID NO: 534331 - RNA, 19 nt, Homo sapiens
  misc_RNA (1)...(19): siRNA sense strand
gcgcgacggcccuuaugau

SEQ ID NO: 534332 - RNA, 19 nt, Homo sapiens
  misc_RNA (1)...(19): siRNA sense strand
cacucugacuucuucaaug

SEQ ID NO: 534333 - RNA, 19 nt, Homo sapiens
  misc_RNA (1)...(19): siRNA sense strand
gcacacgcucaacaacauc

SEQ ID NO: 534334 - RNA, 19 nt, Homo sapiens
  misc_RNA (1)...(19): siRNA sense strand
ggagaagcggcagcagguu

SEQ ID NO: 534335 - RNA, 19 nt, Homo sapiens
  misc_RNA (1)...(19): siRNA sense strand
gcaucaucuuguuuauaag

SEQ ID NO: 534336 - RNA, 19 nt, Homo sapiens
  misc_RNA (1)...(19): siRNA sense strand
agaagcggcagcagguuga

SEQ ID NO: 534337 - RNA, 19 nt, Homo sapiens
  misc_RNA (1)...(19): siRNA sense strand
ugcacacgcucaacaacau

SEQ ID NO: 534338 - RNA, 19 nt, Homo sapiens
  misc_RNA (1)...(19): siRNA sense strand
cgcccacacucgcuacuuc

SEQ ID NO: 534339 - RNA, 19 nt, Homo sapiens
  misc_RNA (1)...(19): siRNA sense strand
gcagaaggcucaguagcua

SEQ ID NO: 534340 - RNA, 19 nt, Homo sapiens
  misc_RNA (1)...(19): siRNA sense strand
gagaagaaauccaucauac

SEQ ID NO: 534341 - RNA, 19 nt, Homo sapiens
  misc_RNA (1)...(19): siRNA sense strand
gaaauccaucauaccauua

SEQ ID NO: 534342 - RNA, 19 nt, Homo sapiens
  misc_RNA (1)...(19): siRNA sense strand
uaacuuggauccacuuaca

SEQ ID NO: 534343 - RNA, 19 nt, Homo sapiens
  misc_RNA (1)...(19): siRNA sense strand
gaagaaauccaucauacca

SEQ ID NO: 534344 - RNA, 19 nt, Homo sapiens
  misc_RNA (1)...(19): siRNA sense strand
agaaauccaucauaccauu

SEQ ID NO: 534345 - RNA, 19 nt, Homo sapiens
  misc_RNA (1)...(19): siRNA sense strand
uacagaaacuuaugggauu

SEQ ID NO: 534346 - RNA, 19 nt, Homo sapiens
  misc_RNA (1)...(19): siRNA sense strand
guggagaauuaauggguua

SEQ ID NO: 534347 - RNA, 19 nt, Homo sapiens
  misc_RNA (1)...(19): siRNA sense strand
uaaagcagaaggcucagua

SEQ ID NO: 534348 - RNA, 19 nt, Homo sapiens
  misc_RNA (1)...(19): siRNA sense strand
gaauuucgacgccuugguu

SEQ ID NO: 534349 - RNA, 19 nt, Homo sapiens
  misc_RNA (1)...(19): siRNA sense strand
aaacuuaugggauuccuuu

SEQ ID NO: 534350 - RNA, 19 nt, Homo sapiens
  misc_RNA (1)...(19): siRNA sense strand
uggguuauauuauggguaa

SEQ ID NO: 534351 - RNA, 19 nt, Homo sapiens
  misc_RNA (1)...(19): siRNA sense strand
ugugaggccugaagacauu

SEQ ID NO: 534352 - RNA, 19 nt, Homo sapiens
  misc_RNA (1)...(19): siRNA sense strand
ugagaagaaauccaucaua

SEQ ID NO: 534353 - RNA, 19 nt, Homo sapiens
  misc_RNA (1)...(19): siRNA sense strand
ccagggauacugagaagaa

SEQ ID NO: 534354 - RNA, 19 nt, Homo sapiens
  misc_RNA (1)...(19): siRNA sense strand
cuuaugggauuccuuucua

SEQ ID NO: 534355 - RNA, 19 nt, Homo sapiens
  misc_RNA (1)...(19): siRNA sense strand
ggccugaagacauugaaua

SEQ ID NO: 534356 - RNA, 19 nt, Homo sapiens
  misc_RNA (1)...(19): siRNA sense strand
ggagaauuaauggguuaua

SEQ ID NO: 534357 - RNA, 19 nt, Homo sapiens
  misc_RNA (1)...(19): siRNA sense strand
gccugaagacauugaauaa

SEQ ID NO: 534358 - RNA, 19 nt, Homo sapiens
  misc_RNA (1)...(19): siRNA sense strand
uauuauggguaaagcagaa

SEQ ID NO: 534359 - RNA, 19 nt, Homo sapiens
  misc_RNA (1)...(19): siRNA sense strand
ugggauuccuuucuaccua

SEQ ID NO: 534360 - RNA, 19 nt, Homo sapiens
  misc_RNA (1)...(19): siRNA sense strand
ccacuuacagaaacuuaug

SEQ ID NO: 534361 - RNA, 19 nt, Homo sapiens
  misc_RNA (1)...(19): siRNA sense strand
cagggauacugagaagaaa

SEQ ID NO: 534362 - RNA, 19 nt, Homo sapiens
  misc_RNA (1)...(19): siRNA sense strand
ggaguuacuagaggagauu

SEQ ID NO: 534363 - RNA, 19 nt, Homo sapiens
  misc_RNA (1)...(19): siRNA sense strand
cucaguagcuagggaagaa

SEQ ID NO: 534364 - RNA, 19 nt, Homo sapiens
  misc_RNA (1)...(19): siRNA sense strand
caucauaccauuaccucau

SEQ ID NO: 534365 - RNA, 19 nt, Homo sapiens
  misc_RNA (1)...(19): siRNA sense strand
gggauacugagaagaaauc

SEQ ID NO: 534366 - RNA, 19 nt, Homo sapiens
  misc_RNA (1)...(19): siRNA sense strand
acagaaacuuaugggauuc

SEQ ID NO: 534367 - RNA, 19 nt, Homo sapiens
  misc_RNA (1)...(19): siRNA sense strand
ggauuccuuucuaccuaca

SEQ ID NO: 534368 - RNA, 19 nt, Homo sapiens
  misc_RNA (1)...(19): siRNA sense strand
gccuugguuuggcugcuaa

SEQ ID NO: 534369 - RNA, 19 nt, Homo sapiens
  misc_RNA (1)...(19): siRNA sense strand
gaaacuuaugggauuccuu

SEQ ID NO: 534370 - RNA, 19 nt, Homo sapiens
  misc_RNA (1)...(19): siRNA sense strand
gcagaaggcucaguagcua

SEQ ID NO: 534371 - RNA, 19 nt, Homo sapiens
  misc_RNA (1)...(19): siRNA sense strand
gagaagaaauccaucauac

SEQ ID NO: 534372 - RNA, 19 nt, Homo sapiens
  misc_RNA (1)...(19): siRNA sense strand
gaaauccaucauaccauua

SEQ ID NO: 534373 - RNA, 19 nt, Homo sapiens
  misc_RNA (1)...(19): siRNA sense strand
uaacuuggauccacuuaca

SEQ ID NO: 534374 - RNA, 19 nt, Homo sapiens
  misc_RNA (1)...(19): siRNA sense strand
gaagaaauccaucauacca

SEQ ID NO: 534375 - RNA, 19 nt, Homo sapiens
  misc_RNA (1)...(19): siRNA sense strand
agaaauccaucauaccauu

SEQ ID NO: 534376 - RNA, 19 nt, Homo sapiens
  misc_RNA (1)...(19): siRNA sense strand
uacagaaacuuaugggauu

SEQ ID NO: 534377 - RNA, 19 nt, Homo sapiens
  misc_RNA (1)...(19): siRNA sense strand
guggagaauuaauggguua

SEQ ID NO: 534378 - RNA, 19 nt, Homo sapiens
  misc_RNA (1)...(19): siRNA sense strand
uaaagcagaaggcucagua

SEQ ID NO: 534379 - RNA, 19 nt, Homo sapiens
  misc_RNA (1)...(19): siRNA sense strand
gaauuucgacgccuugguu

SEQ ID NO: 534380 - RNA, 19 nt, Homo sapiens
  misc_RNA (1)...(19): siRNA sense strand
aaacuuaugggauuccuuu

SEQ ID NO: 534381 - RNA, 19 nt, Homo sapiens
  misc_RNA (1)...(19): siRNA sense strand
uggguuauauuauggguaa

SEQ ID NO: 534382 - RNA, 19 nt, Homo sapiens
  misc_RNA (1)...(19): siRNA sense strand
ugugaggccugaagacauu

SEQ ID NO: 534383 - RNA, 19 nt, Homo sapiens
  misc_RNA (1)...(19): siRNA sense strand
ugagaagaaauccaucaua

SEQ ID NO: 534384 - RNA, 19 nt, Homo sapiens
  misc_RNA (1)...(19): siRNA sense strand
ccagggauacugagaagaa

SEQ ID NO: 534385 - RNA, 19 nt, Homo sapiens
  misc_RNA (1)...(19): siRNA sense strand
cuuaugggauuccuuucua

SEQ ID NO: 534386 - RNA, 19 nt, Homo sapiens
  misc_RNA (1)...(19): siRNA sense strand
ggccugaagacauugaaua

SEQ ID NO: 534387 - RNA, 19 nt, Homo sapiens
  misc_RNA (1)...(19): siRNA sense strand
ggagaauuaauggguuaua

SEQ ID NO: 534388 - RNA, 19 nt, Homo sapiens
  misc_RNA (1)...(19): siRNA sense strand
gccugaagacauugaauaa

SEQ ID NO: 534389 - RNA, 19 nt, Homo sapiens
  misc_RNA (1)...(19): siRNA sense strand
uauuauggguaaagcagaa

SEQ ID NO: 534390 - RNA, 19 nt, Homo sapiens
  misc_RNA (1)...(19): siRNA sense strand
ugggauuccuuucuaccua

SEQ ID NO: 534391 - RNA, 19 nt, Homo sapiens
  misc_RNA (1)...(19): siRNA sense strand
ccacuuacagaaacuuaug

SEQ ID NO: 534392 - RNA, 19 nt, Homo sapiens
  misc_RNA (1)...(19): siRNA sense strand
cagggauacugagaagaaa

SEQ ID NO: 534393 - RNA, 19 nt, Homo sapiens
  misc_RNA (1)...(19): siRNA sense strand
ggaguuacuagaggagauu

SEQ ID NO: 534394 - RNA, 19 nt, Homo sapiens
  misc_RNA (1)...(19): siRNA sense strand
cucaguagcuagggaagaa

SEQ ID NO: 534395 - RNA, 19 nt, Homo sapiens
  misc_RNA (1)...(19): siRNA sense strand
caucauaccauuaccucau

SEQ ID NO: 534396 - RNA, 19 nt, Homo sapiens
  misc_RNA (1)...(19): siRNA sense strand
gggauacugagaagaaauc

SEQ ID NO: 534397 - RNA, 19 nt, Homo sapiens
  misc_RNA (1)...(19): siRNA sense strand
acagaaacuuaugggauuc

SEQ ID NO: 534398 - RNA, 19 nt, Homo sapiens
  misc_RNA (1)...(19): siRNA sense strand
ggauuccuuucuaccuaca

SEQ ID NO: 534399 - RNA, 19 nt, Homo sapiens
  misc_RNA (1)...(19): siRNA sense strand
gccuugguuuggcugcuaa

SEQ ID NO: 534400 - RNA, 19 nt, Homo sapiens
  misc_RNA (1)...(19): siRNA sense strand
gaaacuuaugggauuccuu

SEQ ID NO: 534401 - RNA, 19 nt, Homo sapiens
  misc_RNA (1)...(19): siRNA sense strand
gcagaaggcucaguagcua

SEQ ID NO: 534402 - RNA, 19 nt, Homo sapiens
  misc_RNA (1)...(19): siRNA sense strand
uaacuuggauccacuuaca

SEQ ID NO: 534403 - RNA, 19 nt, Homo sapiens
  misc_RNA (1)...(19): siRNA sense strand
uacagaaacuuaugggauu

SEQ ID NO: 534404 - RNA, 19 nt, Homo sapiens
  misc_RNA (1)...(19): siRNA sense strand
guggagaauuaauggguua

SEQ ID NO: 534405 - RNA, 19 nt, Homo sapiens
  misc_RNA (1)...(19): siRNA sense strand
uaaagcagaaggcucagua

SEQ ID NO: 534406 - RNA, 19 nt, Homo sapiens
  misc_RNA (1)...(19): siRNA sense strand
gaauuucgacgccuugguu

SEQ ID NO: 534407 - RNA, 19 nt, Homo sapiens
  misc_RNA (1)...(19): siRNA sense strand
aaacuuaugggauuccuuu

SEQ ID NO: 534408 - RNA, 19 nt, Homo sapiens
  misc_RNA (1)...(19): siRNA sense strand
uggguuauauuauggguaa

SEQ ID NO: 534409 - RNA, 19 nt, Homo sapiens
  misc_RNA (1)...(19): siRNA sense strand
cuuaugggauuccuuucua

SEQ ID NO: 534410 - RNA, 19 nt, Homo sapiens
  misc_RNA (1)...(19): siRNA sense strand
ggagaauuaauggguuaua

SEQ ID NO: 534411 - RNA, 19 nt, Homo sapiens
  misc_RNA (1)...(19): siRNA sense strand
uauuauggguaaagcagaa

SEQ ID NO: 534412 - RNA, 19 nt, Homo sapiens
  misc_RNA (1)...(19): siRNA sense strand
ugggauuccuuucuaccua

SEQ ID NO: 534413 - RNA, 19 nt, Homo sapiens
  misc_RNA (1)...(19): siRNA sense strand
ccacuuacagaaacuuaug

SEQ ID NO: 534414 - RNA, 19 nt, Homo sapiens
  misc_RNA (1)...(19): siRNA sense strand
ggaguuacuagaggagauu

SEQ ID NO: 534415 - RNA, 19 nt, Homo sapiens
  misc_RNA (1)...(19): siRNA sense strand
cucaguagcuagggaagaa

SEQ ID NO: 534416 - RNA, 19 nt, Homo sapiens
  misc_RNA (1)...(19): siRNA sense strand
acagaaacuuaugggauuc

SEQ ID NO: 534417 - RNA, 19 nt, Homo sapiens
  misc_RNA (1)...(19): siRNA sense strand
ggauuccuuucuaccuaca

SEQ ID NO: 534418 - RNA, 19 nt, Homo sapiens
  misc_RNA (1)...(19): siRNA sense strand
gccuugguuuggcugcuaa

SEQ ID NO: 534419 - RNA, 19 nt, Homo sapiens
  misc_RNA (1)...(19): siRNA sense strand
gaaacuuaugggauuccuu

SEQ ID NO: 534420 - RNA, 19 nt, Homo sapiens
  misc_RNA (1)...(19): siRNA sense strand
caacccagcugugucuuua

SEQ ID NO: 534421 - RNA, 19 nt, Homo sapiens
  misc_RNA (1)...(19): siRNA sense strand
ggacaaaccagagaaauau

SEQ ID NO: 534422 - RNA, 19 nt, Homo sapiens
  misc_RNA (1)...(19): siRNA sense strand
ggucaucacuaucaauguu

SEQ ID NO: 534423 - RNA, 19 nt, Homo sapiens
  misc_RNA (1)...(19): siRNA sense strand
gaacgcauuugcagaucaa

SEQ ID NO: 534424 - RNA, 19 nt, Homo sapiens
  misc_RNA (1)...(19): siRNA sense strand
cgaaagaaacccucucuga

SEQ ID NO: 534425 - RNA, 19 nt, Homo sapiens
  misc_RNA (1)...(19): siRNA sense strand
gaagagcagcuuagcgaaa

SEQ ID NO: 534426 - RNA, 19 nt, Homo sapiens
  misc_RNA (1)...(19): siRNA sense strand
gcaaccgucuuuggcauuu

SEQ ID NO: 534427 - RNA, 19 nt, Homo sapiens
  misc_RNA (1)...(19): siRNA sense strand
gcacguucaucuugauugu

SEQ ID NO: 534428 - RNA, 19 nt, Homo sapiens
  misc_RNA (1)...(19): siRNA sense strand
aagaaacccucucugaguu

SEQ ID NO: 534429 - RNA, 19 nt, Homo sapiens
  misc_RNA (1)...(19): siRNA sense strand
agaacaaucugaggacaaa

SEQ ID NO: 534430 - RNA, 19 nt, Homo sapiens
  misc_RNA (1)...(19): siRNA sense strand
gccaucggccuccugauua

SEQ ID NO: 534431 - RNA, 19 nt, Homo sapiens
  misc_RNA (1)...(19): siRNA sense strand
gaacucagugucaucaugu

SEQ ID NO: 534432 - RNA, 19 nt, Homo sapiens
  misc_RNA (1)...(19): siRNA sense strand
agagaaauaugaacucagu

SEQ ID NO: 534433 - RNA, 19 nt, Homo sapiens
  misc_RNA (1)...(19): siRNA sense strand
gaaacaacuucugguggau

SEQ ID NO: 534434 - RNA, 19 nt, Homo sapiens
  misc_RNA (1)...(19): siRNA sense strand
caucuauguucuugucauu

SEQ ID NO: 534435 - RNA, 19 nt, Homo sapiens
  misc_RNA (1)...(19): siRNA sense strand
cacuaucaauguuggauuu

SEQ ID NO: 534436 - RNA, 19 nt, Homo sapiens
  misc_RNA (1)...(19): siRNA sense strand
cuucagagcuggaaacaac

SEQ ID NO: 534437 - RNA, 19 nt, Homo sapiens
  misc_RNA (1)...(19): siRNA sense strand
ccagagaaauaugaacuca

SEQ ID NO: 534438 - RNA, 19 nt, Homo sapiens
  misc_RNA (1)...(19): siRNA sense strand
aaagaaacccucucugagu

SEQ ID NO: 534439 - RNA, 19 nt, Homo sapiens
  misc_RNA (1)...(19): siRNA sense strand
ucuauguucuugucauuga

SEQ ID NO: 534440 - RNA, 19 nt, Homo sapiens
  misc_RNA (1)...(19): siRNA sense strand
caaccgucuuuggcauuua

SEQ ID NO: 534441 - RNA, 19 nt, Homo sapiens
  misc_RNA (1)...(19): siRNA sense strand
uuacuaugauggacuuaug

SEQ ID NO: 534442 - RNA, 19 nt, Homo sapiens
  misc_RNA (1)...(19): siRNA sense strand
ugaacucagugucaucaug

SEQ ID NO: 534443 - RNA, 19 nt, Homo sapiens
  misc_RNA (1)...(19): siRNA sense strand
cauaaucgucuuugccauu

SEQ ID NO: 534444 - RNA, 19 nt, Homo sapiens
  misc_RNA (1)...(19): siRNA sense strand
auaaucgucuuugccauuu

SEQ ID NO: 534445 - RNA, 19 nt, Homo sapiens
  misc_RNA (1)...(19): siRNA sense strand
ccaucggccuccugauuau

SEQ ID NO: 534446 - RNA, 19 nt, Homo sapiens
  misc_RNA (1)...(19): siRNA sense strand
gaaacccucucugaguucu

SEQ ID NO: 534447 - RNA, 19 nt, Homo sapiens
  misc_RNA (1)...(19): siRNA sense strand
ggccucaucuauguucuug

SEQ ID NO: 534448 - RNA, 19 nt, Homo sapiens
  misc_RNA (1)...(19): siRNA sense strand
uuagcaaugugucucuuug

SEQ ID NO: 534449 - RNA, 19 nt, Homo sapiens
  misc_RNA (1)...(19): siRNA sense strand
acaaaccagagaaauauga

SEQ ID NO: 534450 - RNA, 19 nt, Homo sapiens
  misc_RNA (1)...(19): siRNA sense strand
aggacaaaccagagaaaua

SEQ ID NO: 534451 - RNA, 19 nt, Homo sapiens
  misc_RNA (1)...(19): siRNA sense strand
cgaacgcauuugcagauca

SEQ ID NO: 534452 - RNA, 19 nt, Homo sapiens
  misc_RNA (1)...(19): siRNA sense strand
ucuuuggcauuuacuauga

SEQ ID NO: 534453 - RNA, 19 nt, Homo sapiens
  misc_RNA (1)...(19): siRNA sense strand
ccucaucuauguucuuguc

SEQ ID NO: 534454 - RNA, 19 nt, Homo sapiens
  misc_RNA (1)...(19): siRNA sense strand
caaaccagagaaauaugaa

SEQ ID NO: 534455 - RNA, 19 nt, Homo sapiens
  misc_RNA (1)...(19): siRNA sense strand
caucuugauuguccuugga

SEQ ID NO: 534456 - RNA, 19 nt, Homo sapiens
  misc_RNA (1)...(19): siRNA sense strand
uuggaggccucaucuaugu

SEQ ID NO: 534457 - RNA, 19 nt, Homo sapiens
  misc_RNA (1)...(19): siRNA sense strand
gguuggugcugucauugga

SEQ ID NO: 534458 - RNA, 19 nt, Homo sapiens
  misc_RNA (1)...(19): siRNA sense strand
ggaggccucaucuauguuc

SEQ ID NO: 534459 - RNA, 19 nt, Homo sapiens
  misc_RNA (1)...(19): siRNA sense strand
ccagcugugucuuuagcaa

SEQ ID NO: 534460 - RNA, 19 nt, Homo sapiens
  misc_RNA (1)...(19): siRNA sense strand
cauuggaggccucaucuau

SEQ ID NO: 534461 - RNA, 19 nt, Homo sapiens
  misc_RNA (1)...(19): siRNA sense strand
cauuuacuaugauggacuu

SEQ ID NO: 534462 - RNA, 19 nt, Homo sapiens
  misc_RNA (1)...(19): siRNA sense strand
aaauaugaacucaguguca

SEQ ID NO: 534463 - RNA, 19 nt, Homo sapiens
  misc_RNA (1)...(19): siRNA sense strand
aagagcagcuuagcgaaag

SEQ ID NO: 534464 - RNA, 19 nt, Homo sapiens
  misc_RNA (1)...(19): siRNA sense strand
agaaauaugaacucagugu

SEQ ID NO: 534465 - RNA, 19 nt, Homo sapiens
  misc_RNA (1)...(19): siRNA sense strand
gcgaacgcauuugcagauc

SEQ ID NO: 534466 - RNA, 19 nt, Homo sapiens
  misc_RNA (1)...(19): siRNA sense strand
gacaaaccagagaaauaug

SEQ ID NO: 534467 - RNA, 19 nt, Homo sapiens
  misc_RNA (1)...(19): siRNA sense strand
gaggacaaaccagagaaau

SEQ ID NO: 534468 - RNA, 19 nt, Homo sapiens
  misc_RNA (1)...(19): siRNA sense strand
gagcagcuuagcgaaagaa

SEQ ID NO: 534469 - RNA, 19 nt, Homo sapiens
  misc_RNA (1)...(19): siRNA sense strand
ucaacccagcugugucuuu

SEQ ID NO: 534470 - RNA, 19 nt, Homo sapiens
  misc_RNA (1)...(19): siRNA sense strand
ugaggacaaaccagagaaa

SEQ ID NO: 534471 - RNA, 19 nt, Homo sapiens
  misc_RNA (1)...(19): siRNA sense strand
aacaacuucugguggauuc

SEQ ID NO: 534472 - RNA, 19 nt, Homo sapiens
  misc_RNA (1)...(19): siRNA sense strand
aaacaacuucugguggauu

SEQ ID NO: 534473 - RNA, 19 nt, Homo sapiens
  misc_RNA (1)...(19): siRNA sense strand
caucaacccagcugugucu

SEQ ID NO: 534474 - RNA, 19 nt, Homo sapiens
  misc_RNA (1)...(19): siRNA sense strand
ggcgaacgcauuugcagau

SEQ ID NO: 534475 - RNA, 19 nt, Homo sapiens
  misc_RNA (1)...(19): siRNA sense strand
uuggacggaugaaaugguu

SEQ ID NO: 534476 - RNA, 19 nt, Homo sapiens
  misc_RNA (1)...(19): siRNA sense strand
ccuccugauuauugucauu

SEQ ID NO: 534477 - RNA, 19 nt, Homo sapiens
  misc_RNA (1)...(19): siRNA sense strand
ugcccaagcuauucucagu

SEQ ID NO: 534478 - RNA, 19 nt, Homo sapiens
  misc_RNA (1)...(19): siRNA sense strand
agcaaugugucucuuugga

SEQ ID NO: 534479 - RNA, 19 nt, Homo sapiens
  misc_RNA (1)...(19): siRNA sense strand
ccuuggauguggcuguguu

SEQ ID NO: 534480 - RNA, 19 nt, Homo sapiens
  misc_RNA (1)...(19): siRNA sense strand
gaacagcucagagaaagua

SEQ ID NO: 534481 - RNA, 19 nt, Homo sapiens
  misc_RNA (1)...(19): siRNA sense strand
gcaaaugggagaagaaaug

SEQ ID NO: 534482 - RNA, 19 nt, Homo sapiens
  misc_RNA (1)...(19): siRNA sense strand
ggccaaagaugauaucaag

SEQ ID NO: 534483 - RNA, 19 nt, Homo sapiens
  misc_RNA (1)...(19): siRNA sense strand
ggacaugcaugacgauaac

SEQ ID NO: 534484 - RNA, 19 nt, Homo sapiens
  misc_RNA (1)...(19): siRNA sense strand
gcccaagguugaugacaaa

SEQ ID NO: 534485 - RNA, 19 nt, Homo sapiens
  misc_RNA (1)...(19): siRNA sense strand
ugacggagcccaagguuga

SEQ ID NO: 534486 - RNA, 19 nt, Homo sapiens
  misc_RNA (1)...(19): siRNA sense strand
caacaaaacuccgaagaga

SEQ ID NO: 534487 - RNA, 19 nt, Homo sapiens
  misc_RNA (1)...(19): siRNA sense strand
gaugaacagcucagagaaa

SEQ ID NO: 534488 - RNA, 19 nt, Homo sapiens
  misc_RNA (1)...(19): siRNA sense strand
ggugacacaucccuacgaa

SEQ ID NO: 534489 - RNA, 19 nt, Homo sapiens
  misc_RNA (1)...(19): siRNA sense strand
acacaucccuacgaaucua

SEQ ID NO: 534490 - RNA, 19 nt, Homo sapiens
  misc_RNA (1)...(19): siRNA sense strand
gaaggagugccacccucua

SEQ ID NO: 534491 - RNA, 19 nt, Homo sapiens
  misc_RNA (1)...(19): siRNA sense strand
ugacacaucccuacgaauc

SEQ ID NO: 534492 - RNA, 19 nt, Homo sapiens
  misc_RNA (1)...(19): siRNA sense strand
cuggaggccucucaacaaa

SEQ ID NO: 534493 - RNA, 19 nt, Homo sapiens
  misc_RNA (1)...(19): siRNA sense strand
ccaaagaugauaucaagag

SEQ ID NO: 534494 - RNA, 19 nt, Homo sapiens
  misc_RNA (1)...(19): siRNA sense strand
gcgcaaaugggagaagaaa

SEQ ID NO: 534495 - RNA, 19 nt, Homo sapiens
  misc_RNA (1)...(19): siRNA sense strand
gauggaacauucgaugaac

SEQ ID NO: 534496 - RNA, 19 nt, Homo sapiens
  misc_RNA (1)...(19): siRNA sense strand
gaaacuggaggccucucaa

SEQ ID NO: 534497 - RNA, 19 nt, Homo sapiens
  misc_RNA (1)...(19): siRNA sense strand
cgauggaacauucgaugaa

SEQ ID NO: 534498 - RNA, 19 nt, Homo sapiens
  misc_RNA (1)...(19): siRNA sense strand
ucgagaaagugcgcaaaug

SEQ ID NO: 534499 - RNA, 19 nt, Homo sapiens
  misc_RNA (1)...(19): siRNA sense strand
cgagaaagugcgcaaaugg

SEQ ID NO: 534500 - RNA, 19 nt, Homo sapiens
  misc_RNA (1)...(19): siRNA sense strand
gcacccaggagcugaagau

SEQ ID NO: 534501 - RNA, 19 nt, Homo sapiens
  misc_RNA (1)...(19): siRNA sense strand
ggaugauggacaugcauga

SEQ ID NO: 534502 - RNA, 19 nt, Homo sapiens
  misc_RNA (1)...(19): siRNA sense strand
ggugaccguuggugacaca

SEQ ID NO: 534503 - RNA, 19 nt, Homo sapiens
  misc_RNA (1)...(19): siRNA sense strand
gugcgcaaaugggagaaga

SEQ ID NO: 534504 - RNA, 19 nt, Homo sapiens
  misc_RNA (1)...(19): siRNA sense strand
cccaggagcugaagaugcu

SEQ ID NO: 534505 - RNA, 19 nt, Homo sapiens
  misc_RNA (1)...(19): siRNA sense strand
ucgaugaacagcucagaga

SEQ ID NO: 534506 - RNA, 19 nt, Homo sapiens
  misc_RNA (1)...(19): siRNA sense strand
cugaugagcagaauucaca

SEQ ID NO: 534507 - RNA, 19 nt, Homo sapiens
  misc_RNA (1)...(19): siRNA sense strand
ggagugccacccucuaaaa

SEQ ID NO: 534508 - RNA, 19 nt, Homo sapiens
  misc_RNA (1)...(19): siRNA sense strand
aguccucgauggaacauuc

SEQ ID NO: 534509 - RNA, 19 nt, Homo sapiens
  misc_RNA (1)...(19): siRNA sense strand
aaggagugccacccucuaa

SEQ ID NO: 534510 - RNA, 19 nt, Homo sapiens
  misc_RNA (1)...(19): siRNA sense strand
ccagagcuccaucgcagau

SEQ ID NO: 534511 - RNA, 19 nt, Homo sapiens
  misc_RNA (1)...(19): siRNA sense strand
cgaugaacagcucagagaa

SEQ ID NO: 534512 - RNA, 19 nt, Homo sapiens
  misc_RNA (1)...(19): siRNA sense strand
caaaugggagaagaaaugg

SEQ ID NO: 534513 - RNA, 19 nt, Homo sapiens
  misc_RNA (1)...(19): siRNA sense strand
gaaaugggugaccguuggu

SEQ ID NO: 534514 - RNA, 19 nt, Homo sapiens
  misc_RNA (1)...(19): siRNA sense strand
ggagcacccaggagcugaa

SEQ ID NO: 534515 - RNA, 19 nt, Homo sapiens
  misc_RNA (1)...(19): siRNA sense strand
augaacagcucagagaaag

SEQ ID NO: 534516 - RNA, 19 nt, Homo sapiens
  misc_RNA (1)...(19): siRNA sense strand
gggccaaagaugauaucaa

SEQ ID NO: 534517 - RNA, 19 nt, Homo sapiens
  misc_RNA (1)...(19): siRNA sense strand
gaugaggcccaggcugaug

SEQ ID NO: 534518 - RNA, 19 nt, Homo sapiens
  misc_RNA (1)...(19): siRNA sense strand
gaucgagaaagugcgcaaa

SEQ ID NO: 534519 - RNA, 19 nt, Homo sapiens
  misc_RNA (1)...(19): siRNA sense strand
ggaggccucucaacaaaac

SEQ ID NO: 534520 - RNA, 19 nt, Homo sapiens
  misc_RNA (1)...(19): siRNA sense strand
ggaguaaacuauuugauug

SEQ ID NO: 534521 - RNA, 19 nt, Homo sapiens
  misc_RNA (1)...(19): siRNA sense strand
ggaaugagcguuugggaua

SEQ ID NO: 534522 - RNA, 19 nt, Homo sapiens
  misc_RNA (1)...(19): siRNA sense strand
gguauuugcugaccuguuu

SEQ ID NO: 534523 - RNA, 19 nt, Homo sapiens
  misc_RNA (1)...(19): siRNA sense strand
ggagaagggugguaacaug

SEQ ID NO: 534524 - RNA, 19 nt, Homo sapiens
  misc_RNA (1)...(19): siRNA sense strand
gaagagaguguuugaaaga

SEQ ID NO: 534525 - RNA, 19 nt, Homo sapiens
  misc_RNA (1)...(19): siRNA sense strand
gauagccgcuucccaaaga

SEQ ID NO: 534526 - RNA, 19 nt, Homo sapiens
  misc_RNA (1)...(19): siRNA sense strand
gaauuuggcacaacaauga

SEQ ID NO: 534527 - RNA, 19 nt, Homo sapiens
  misc_RNA (1)...(19): siRNA sense strand
ggagagacuuauccaagaa

SEQ ID NO: 534528 - RNA, 19 nt, Homo sapiens
  misc_RNA (1)...(19): siRNA sense strand
gaacagcagcagcuuauug

SEQ ID NO: 534529 - RNA, 19 nt, Homo sapiens
  misc_RNA (1)...(19): siRNA sense strand
gagaugaggagaccuauga

SEQ ID NO: 534530 - RNA, 19 nt, Homo sapiens
  misc_RNA (1)...(19): siRNA sense strand
ggaucuagaugccaguaaa

SEQ ID NO: 534531 - RNA, 19 nt, Homo sapiens
  misc_RNA (1)...(19): siRNA sense strand
gaugaccacuuucuguuug

SEQ ID NO: 534532 - RNA, 19 nt, Homo sapiens
  misc_RNA (1)...(19): siRNA sense strand
gcacggcucugcgacaaga

SEQ ID NO: 534533 - RNA, 19 nt, Homo sapiens
  misc_RNA (1)...(19): siRNA sense strand
gcuuauugaugaccacuuu

SEQ ID NO: 534534 - RNA, 19 nt, Homo sapiens
  misc_RNA (1)...(19): siRNA sense strand
ggucaucgauggaguaaac

SEQ ID NO: 534535 - RNA, 19 nt, Homo sapiens
  misc_RNA (1)...(19): siRNA sense strand
gaugagagguauguauugu

SEQ ID NO: 534536 - RNA, 19 nt, Homo sapiens
  misc_RNA (1)...(19): siRNA sense strand
gagaguguuugaaagauuc

SEQ ID NO: 534537 - RNA, 19 nt, Homo sapiens
  misc_RNA (1)...(19): siRNA sense strand
ucaaagagguggagagacu

SEQ ID NO: 534538 - RNA, 19 nt, Homo sapiens
  misc_RNA (1)...(19): siRNA sense strand
gcucgagacuggccagaug

SEQ ID NO: 534539 - RNA, 19 nt, Homo sapiens
  misc_RNA (1)...(19): siRNA sense strand
gccagaugcucguggaauu

SEQ ID NO: 534540 - RNA, 19 nt, Homo sapiens
  misc_RNA (1)...(19): siRNA sense strand
ggcggugucuuugauauuu

SEQ ID NO: 534541 - RNA, 19 nt, Homo sapiens
  misc_RNA (1)...(19): siRNA sense strand
gcugggaguucauguggaa

SEQ ID NO: 534542 - RNA, 19 nt, Homo sapiens
  misc_RNA (1)...(19): siRNA sense strand
gagaagggugguaacauga

SEQ ID NO: 534543 - RNA, 19 nt, Homo sapiens
  misc_RNA (1)...(19): siRNA sense strand
ucccaaagauccuggagaa

SEQ ID NO: 534544 - RNA, 19 nt, Homo sapiens
  misc_RNA (1)...(19): siRNA sense strand
ucgauggaguaaacuauuu

SEQ ID NO: 534545 - RNA, 19 nt, Homo sapiens
  misc_RNA (1)...(19): siRNA sense strand
gaagggugguaacaugaag

SEQ ID NO: 534546 - RNA, 19 nt, Homo sapiens
  misc_RNA (1)...(19): siRNA sense strand
gggcaggagugcacaucaa

SEQ ID NO: 534547 - RNA, 19 nt, Homo sapiens
  misc_RNA (1)...(19): siRNA sense strand
gcacaccacggaucuagau

SEQ ID NO: 534548 - RNA, 19 nt, Homo sapiens
  misc_RNA (1)...(19): siRNA sense strand
agagaguguuugaaagauu

SEQ ID NO: 534549 - RNA, 19 nt, Homo sapiens
  misc_RNA (1)...(19): siRNA sense strand
agcagcagcuuauugauga

SEQ ID NO: 534550 - RNA, 19 nt, Homo sapiens
  misc_RNA (1)...(19): siRNA sense strand
ugaagagaguguuugaaag

SEQ ID NO: 534551 - RNA, 19 nt, Homo sapiens
  misc_RNA (1)...(19): siRNA sense strand
guauuguccucuagaguca

SEQ ID NO: 534552 - RNA, 19 nt, Homo sapiens
  misc_RNA (1)...(19): siRNA sense strand
ggagagaggccaggauauc

SEQ ID NO: 534553 - RNA, 19 nt, Homo sapiens
  misc_RNA (1)...(19): siRNA sense strand
ggaauuuggcacaacaaug

SEQ ID NO: 534554 - RNA, 19 nt, Homo sapiens
  misc_RNA (1)...(19): siRNA sense strand
uguacgagcugccagugaa

SEQ ID NO: 534555 - RNA, 19 nt, Homo sapiens
  misc_RNA (1)...(19): siRNA sense strand
aaagagguggagagacuua

SEQ ID NO: 534556 - RNA, 19 nt, Homo sapiens
  misc_RNA (1)...(19): siRNA sense strand
gaacgacggaggcuguauc

SEQ ID NO: 534557 - RNA, 19 nt, Homo sapiens
  misc_RNA (1)...(19): siRNA sense strand
gauccaagagcgacacaau

SEQ ID NO: 534558 - RNA, 19 nt, Homo sapiens
  misc_RNA (1)...(19): siRNA sense strand
aauccguucuggcuacuuu

SEQ ID NO: 534559 - RNA, 19 nt, Homo sapiens
  misc_RNA (1)...(19): siRNA sense strand
gugguaacaugaagagagu

SEQ ID NO: 534560 - RNA, 19 nt, Homo sapiens
  misc_RNA (1)...(19): siRNA sense strand
caaagauccuggagaaccu

SEQ ID NO: 534561 - RNA, 19 nt, Homo sapiens
  misc_RNA (1)...(19): siRNA sense strand
gaaagcacaacaacugcau

SEQ ID NO: 534562 - RNA, 19 nt, Homo sapiens
  misc_RNA (1)...(19): siRNA sense strand
gaaugagcguuugggauac

SEQ ID NO: 534563 - RNA, 19 nt, Homo sapiens
  misc_RNA (1)...(19): siRNA sense strand
ugaccuggcuggacguuac

SEQ ID NO: 534564 - RNA, 19 nt, Homo sapiens
  misc_RNA (1)...(19): siRNA sense strand
ggaccgacuaggcaaauca

SEQ ID NO: 534565 - RNA, 19 nt, Homo sapiens
  misc_RNA (1)...(19): siRNA sense strand
caugguggcuggagaugag

SEQ ID NO: 534566 - RNA, 19 nt, Homo sapiens
  misc_RNA (1)...(19): siRNA sense strand
gagaaccuaagacuccaaa

SEQ ID NO: 534567 - RNA, 19 nt, Homo sapiens
  misc_RNA (1)...(19): siRNA sense strand
cagcagcagcuuauugaug

SEQ ID NO: 534568 - RNA, 19 nt, Homo sapiens
  misc_RNA (1)...(19): siRNA sense strand
caagagcgacacaauggau

SEQ ID NO: 534569 - RNA, 19 nt, Homo sapiens
  misc_RNA (1)...(19): siRNA sense strand
ccagaugcucguggaauuu

SEQ ID NO: 534570 - RNA, 19 nt, Homo sapiens
  misc_RNA (1)...(19): siRNA sense strand
gguauguauuguccucuag

SEQ ID NO: 534571 - RNA, 19 nt, Homo sapiens
  misc_RNA (1)...(19): siRNA sense strand
gaccacuuucuguuugaua

SEQ ID NO: 534572 - RNA, 19 nt, Homo sapiens
  misc_RNA (1)...(19): siRNA sense strand
cuacuuugaugagagguau

SEQ ID NO: 534573 - RNA, 19 nt, Homo sapiens
  misc_RNA (1)...(19): siRNA sense strand
gauggaguaaacuauuuga

SEQ ID NO: 534574 - RNA, 19 nt, Homo sapiens
  misc_RNA (1)...(19): siRNA sense strand
caggcggugucuuugauau

SEQ ID NO: 534575 - RNA, 19 nt, Homo sapiens
  misc_RNA (1)...(19): siRNA sense strand
ugaugaccacuuucuguuu

SEQ ID NO: 534576 - RNA, 19 nt, Homo sapiens
  misc_RNA (1)...(19): siRNA sense strand
augaagagaguguuugaaa

SEQ ID NO: 534577 - RNA, 19 nt, Homo sapiens
  misc_RNA (1)...(19): siRNA sense strand
gauccuggagaaccuaaga

SEQ ID NO: 534578 - RNA, 19 nt, Homo sapiens
  misc_RNA (1)...(19): siRNA sense strand
ggcaggagugcacaucaaa

SEQ ID NO: 534579 - RNA, 19 nt, Homo sapiens
  misc_RNA (1)...(19): siRNA sense strand
gaagcacaccacggaucua

SEQ ID NO: 534580 - RNA, 19 nt, Homo sapiens
  misc_RNA (1)...(19): siRNA sense strand
ucauccacaccaagcauua

SEQ ID NO: 534581 - RNA, 19 nt, Homo sapiens
  misc_RNA (1)...(19): siRNA sense strand
cgaagcauccgaggacuca

SEQ ID NO: 534582 - RNA, 19 nt, Homo sapiens
  misc_RNA (1)...(19): siRNA sense strand
accacuuucuguuugauaa

SEQ ID NO: 534583 - RNA, 19 nt, Homo sapiens
  misc_RNA (1)...(19): siRNA sense strand
guuacuauaggcucaguga

SEQ ID NO: 534584 - RNA, 19 nt, Homo sapiens
  misc_RNA (1)...(19): siRNA sense strand
gcggugucuuugauauuuc

SEQ ID NO: 534585 - RNA, 19 nt, Homo sapiens
  misc_RNA (1)...(19): siRNA sense strand
caucuugaccuguccaucu

SEQ ID NO: 534586 - RNA, 19 nt, Homo sapiens
  misc_RNA (1)...(19): siRNA sense strand
aacagcagcagcuuauuga

SEQ ID NO: 534587 - RNA, 19 nt, Homo sapiens
  misc_RNA (1)...(19): siRNA sense strand
gacgcuagaucaguguauc

SEQ ID NO: 534588 - RNA, 19 nt, Homo sapiens
  misc_RNA (1)...(19): siRNA sense strand
caucgauggaguaaacuau

SEQ ID NO: 534589 - RNA, 19 nt, Homo sapiens
  misc_RNA (1)...(19): siRNA sense strand
ggacgcuagaucaguguau

SEQ ID NO: 534590 - RNA, 19 nt, Homo sapiens
  misc_RNA (1)...(19): siRNA sense strand
ggagaugaggagaccuaug

SEQ ID NO: 534591 - RNA, 19 nt, Homo sapiens
  misc_RNA (1)...(19): siRNA sense strand
cauguggaaugagcguuug

SEQ ID NO: 534592 - RNA, 19 nt, Homo sapiens
  misc_RNA (1)...(19): siRNA sense strand
aagagaguguuugaaagau

SEQ ID NO: 534593 - RNA, 19 nt, Homo sapiens
  misc_RNA (1)...(19): siRNA sense strand
guacccagaccuccgaaag

SEQ ID NO: 534594 - RNA, 19 nt, Homo sapiens
  misc_RNA (1)...(19): siRNA sense strand
ugaugagagguauguauug

SEQ ID NO: 534595 - RNA, 19 nt, Homo sapiens
  misc_RNA (1)...(19): siRNA sense strand
gcaacuggucaucgaugga

SEQ ID NO: 534596 - RNA, 19 nt, Homo sapiens
  misc_RNA (1)...(19): siRNA sense strand
cguuugggauacaucuuga

SEQ ID NO: 534597 - RNA, 19 nt, Homo sapiens
  misc_RNA (1)...(19): siRNA sense strand
gcguuugggauacaucuug

SEQ ID NO: 534598 - RNA, 19 nt, Homo sapiens
  misc_RNA (1)...(19): siRNA sense strand
gguaacaugaagagagugu

SEQ ID NO: 534599 - RNA, 19 nt, Homo sapiens
  misc_RNA (1)...(19): siRNA sense strand
cguggaauuuggcacaaca

SEQ ID NO: 534600 - RNA, 19 nt, Homo sapiens
  misc_RNA (1)...(19): siRNA sense strand
cugaacagcagcagcuuau

SEQ ID NO: 534601 - RNA, 19 nt, Homo sapiens
  misc_RNA (1)...(19): siRNA sense strand
gaugacagaggcugaacag

SEQ ID NO: 534602 - RNA, 19 nt, Homo sapiens
  misc_RNA (1)...(19): siRNA sense strand
ggaacguguugugguggau

SEQ ID NO: 534603 - RNA, 19 nt, Homo sapiens
  misc_RNA (1)...(19): siRNA sense strand
cgauggaguaaacuauuug

SEQ ID NO: 534604 - RNA, 19 nt, Homo sapiens
  misc_RNA (1)...(19): siRNA sense strand
auacacgggugaucuccau

SEQ ID NO: 534605 - RNA, 19 nt, Homo sapiens
  misc_RNA (1)...(19): siRNA sense strand
cagaugcucguggaauuug

SEQ ID NO: 534606 - RNA, 19 nt, Homo sapiens
  misc_RNA (1)...(19): siRNA sense strand
gcaggaauggcucgagacu

SEQ ID NO: 534607 - RNA, 19 nt, Homo sapiens
  misc_RNA (1)...(19): siRNA sense strand
cguucuggcuacuuugaug

SEQ ID NO: 534608 - RNA, 19 nt, Homo sapiens
  misc_RNA (1)...(19): siRNA sense strand
cauccacaccaagcauuaa

SEQ ID NO: 534609 - RNA, 19 nt, Homo sapiens
  misc_RNA (1)...(19): siRNA sense strand
ugaacggcgucuggagaga

SEQ ID NO: 534610 - RNA, 19 nt, Homo sapiens
  misc_RNA (1)...(19): siRNA sense strand
acaugaagagaguguuuga

SEQ ID NO: 534611 - RNA, 19 nt, Homo sapiens
  misc_RNA (1)...(19): siRNA sense strand
ccauggagaagggugguaa

SEQ ID NO: 534612 - RNA, 19 nt, Homo sapiens
  misc_RNA (1)...(19): siRNA sense strand
aagagcgacacaauggaua

SEQ ID NO: 534613 - RNA, 19 nt, Homo sapiens
  misc_RNA (1)...(19): siRNA sense strand
cgagagguggaacguguug

SEQ ID NO: 534614 - RNA, 19 nt, Homo sapiens
  misc_RNA (1)...(19): siRNA sense strand
uugaugagagguauguauu

SEQ ID NO: 534615 - RNA, 19 nt, Homo sapiens
  misc_RNA (1)...(19): siRNA sense strand
ggagagugguggauuugua

SEQ ID NO: 534616 - RNA, 19 nt, Homo sapiens
  misc_RNA (1)...(19): siRNA sense strand
ccacaaaggccucaugaug

SEQ ID NO: 534617 - RNA, 19 nt, Homo sapiens
  misc_RNA (1)...(19): siRNA sense strand
acaaaggccucaugaugga

SEQ ID NO: 534618 - RNA, 19 nt, Homo sapiens
  misc_RNA (1)...(19): siRNA sense strand
gcugcuggaugcucuauga

SEQ ID NO: 534619 - RNA, 19 nt, Homo sapiens
  misc_RNA (1)...(19): siRNA sense strand
cuaccaaggucaacaauac

SEQ ID NO: 534620 - RNA, 19 nt, Homo sapiens
  misc_RNA (1)...(19): siRNA sense strand
ugauggagcugagugaaga

SEQ ID NO: 534621 - RNA, 19 nt, Homo sapiens
  misc_RNA (1)...(19): siRNA sense strand
gagugguggauuuguauua

SEQ ID NO: 534622 - RNA, 19 nt, Homo sapiens
  misc_RNA (1)...(19): siRNA sense strand
ucuaugagcgucccaacua

SEQ ID NO: 534623 - RNA, 19 nt, Homo sapiens
  misc_RNA (1)...(19): siRNA sense strand
cgagagggaagaccacaaa

SEQ ID NO: 534624 - RNA, 19 nt, Homo sapiens
  misc_RNA (1)...(19): siRNA sense strand
gagagugguggauuuguau

SEQ ID NO: 534625 - RNA, 19 nt, Homo sapiens
  misc_RNA (1)...(19): siRNA sense strand
caacuaccaaggucaacaa

SEQ ID NO: 534626 - RNA, 19 nt, Homo sapiens
  misc_RNA (1)...(19): siRNA sense strand
gcuacgaaaccaccacuga

SEQ ID NO: 534627 - RNA, 19 nt, Homo sapiens
  misc_RNA (1)...(19): siRNA sense strand
gaccacaaaggccucauga

SEQ ID NO: 534628 - RNA, 19 nt, Homo sapiens
  misc_RNA (1)...(19): siRNA sense strand
agugguggauuuguauuaa

SEQ ID NO: 534629 - RNA, 19 nt, Homo sapiens
  misc_RNA (1)...(19): siRNA sense strand
ccaaccugcagccguauuu

SEQ ID NO: 534630 - RNA, 19 nt, Homo sapiens
  misc_RNA (1)...(19): siRNA sense strand
gcugcuggguccucuacga

SEQ ID NO: 534631 - RNA, 19 nt, Homo sapiens
  misc_RNA (1)...(19): siRNA sense strand
ugcggagagugguggauuu

SEQ ID NO: 534632 - RNA, 19 nt, Homo sapiens
  misc_RNA (1)...(19): siRNA sense strand
gcggagagugguggauuug

SEQ ID NO: 534633 - RNA, 19 nt, Homo sapiens
  misc_RNA (1)...(19): siRNA sense strand
ggaaggacauggacaaggu

SEQ ID NO: 534634 - RNA, 19 nt, Homo sapiens
  misc_RNA (1)...(19): siRNA sense strand
caaacucacacaaccauga

SEQ ID NO: 534635 - RNA, 19 nt, Homo sapiens
  misc_RNA (1)...(19): siRNA sense strand
uggacaaggucgagacauu

SEQ ID NO: 534636 - RNA, 19 nt, Homo sapiens
  misc_RNA (1)...(19): siRNA sense strand
gcagaccuacagcaaguuu

SEQ ID NO: 534637 - RNA, 19 nt, Homo sapiens
  misc_RNA (1)...(19): siRNA sense strand
ggacugggcagauccucaa

SEQ ID NO: 534638 - RNA, 19 nt, Homo sapiens
  misc_RNA (1)...(19): siRNA sense strand
gaggguagcuguggcuucu

SEQ ID NO: 534639 - RNA, 19 nt, Homo sapiens
  misc_RNA (1)...(19): siRNA sense strand
ggacaaggucgagacauuc

SEQ ID NO: 534640 - RNA, 19 nt, Homo sapiens
  misc_RNA (1)...(19): siRNA sense strand
aagcagaccuacagcaagu

SEQ ID NO: 534641 - RNA, 19 nt, Homo sapiens
  misc_RNA (1)...(19): siRNA sense strand
acgcacugcucaagaacua

SEQ ID NO: 534642 - RNA, 19 nt, Homo sapiens
  misc_RNA (1)...(19): siRNA sense strand
gggcugcucuacugcuuca

SEQ ID NO: 534643 - RNA, 19 nt, Homo sapiens
  misc_RNA (1)...(19): siRNA sense strand
ggguagcuguggcuucuag

SEQ ID NO: 534644 - RNA, 19 nt, Homo sapiens
  misc_RNA (1)...(19): siRNA sense strand
ucaagcagaccuacagcaa

SEQ ID NO: 534645 - RNA, 19 nt, Homo sapiens
  misc_RNA (1)...(19): siRNA sense strand
gaacuacgggcugcucuac

SEQ ID NO: 534646 - RNA, 19 nt, Homo sapiens
  misc_RNA (1)...(19): siRNA sense strand
gugcagugccgcucuguag

SEQ ID NO: 534647 - RNA, 19 nt, Homo sapiens
  misc_RNA (1)...(19): siRNA sense strand
ucaggaaggacauggacaa

SEQ ID NO: 534648 - RNA, 19 nt, Homo sapiens
  misc_RNA (1)...(19): siRNA sense strand
agaccuacagcaaguuuga

SEQ ID NO: 534649 - RNA, 19 nt, Homo sapiens
  misc_RNA (1)...(19): siRNA sense strand
ugacacaaacucacacaac

SEQ ID NO: 534650 - RNA, 19 nt, Homo sapiens
  misc_RNA (1)...(19): siRNA sense strand
augacgcacugcucaagaa

SEQ ID NO: 534651 - RNA, 19 nt, Homo sapiens
  misc_RNA (1)...(19): siRNA sense strand
acuacgggcugcucuacug

SEQ ID NO: 534652 - RNA, 19 nt, Homo sapiens
  misc_RNA (1)...(19): siRNA sense strand
cuacagcaaguuugacaca

SEQ ID NO: 534653 - RNA, 19 nt, Homo sapiens
  misc_RNA (1)...(19): siRNA sense strand
ggaaggacauggacaaggu

SEQ ID NO: 534654 - RNA, 19 nt, Homo sapiens
  misc_RNA (1)...(19): siRNA sense strand
caaacucacacaaccauga

SEQ ID NO: 534655 - RNA, 19 nt, Homo sapiens
  misc_RNA (1)...(19): siRNA sense strand
uggacaaggucgagacauu

SEQ ID NO: 534656 - RNA, 19 nt, Homo sapiens
  misc_RNA (1)...(19): siRNA sense strand
gcagaccuacagcaaguuu

SEQ ID NO: 534657 - RNA, 19 nt, Homo sapiens
  misc_RNA (1)...(19): siRNA sense strand
ggacugggcagauccucaa

SEQ ID NO: 534658 - RNA, 19 nt, Homo sapiens
  misc_RNA (1)...(19): siRNA sense strand
gaggguagcuguggcuucu

SEQ ID NO: 534659 - RNA, 19 nt, Homo sapiens
  misc_RNA (1)...(19): siRNA sense strand
ggacaaggucgagacauuc

SEQ ID NO: 534660 - RNA, 19 nt, Homo sapiens
  misc_RNA (1)...(19): siRNA sense strand
aagcagaccuacagcaagu

SEQ ID NO: 534661 - RNA, 19 nt, Homo sapiens
  misc_RNA (1)...(19): siRNA sense strand
acgcacugcucaagaacua

SEQ ID NO: 534662 - RNA, 19 nt, Homo sapiens
  misc_RNA (1)...(19): siRNA sense strand
gggcugcucuacugcuuca

SEQ ID NO: 534663 - RNA, 19 nt, Homo sapiens
  misc_RNA (1)...(19): siRNA sense strand
ggguagcuguggcuucuag

SEQ ID NO: 534664 - RNA, 19 nt, Homo sapiens
  misc_RNA (1)...(19): siRNA sense strand
ucaagcagaccuacagcaa

SEQ ID NO: 534665 - RNA, 19 nt, Homo sapiens
  misc_RNA (1)...(19): siRNA sense strand
gaacuacgggcugcucuac

SEQ ID NO: 534666 - RNA, 19 nt, Homo sapiens
  misc_RNA (1)...(19): siRNA sense strand
gugcagugccgcucuguag

SEQ ID NO: 534667 - RNA, 19 nt, Homo sapiens
  misc_RNA (1)...(19): siRNA sense strand
ucaggaaggacauggacaa

SEQ ID NO: 534668 - RNA, 19 nt, Homo sapiens
  misc_RNA (1)...(19): siRNA sense strand
agaccuacagcaaguuuga

SEQ ID NO: 534669 - RNA, 19 nt, Homo sapiens
  misc_RNA (1)...(19): siRNA sense strand
ugacacaaacucacacaac

SEQ ID NO: 534670 - RNA, 19 nt, Homo sapiens
  misc_RNA (1)...(19): siRNA sense strand
augacgcacugcucaagaa

SEQ ID NO: 534671 - RNA, 19 nt, Homo sapiens
  misc_RNA (1)...(19): siRNA sense strand
acuacgggcugcucuacug

SEQ ID NO: 534672 - RNA, 19 nt, Homo sapiens
  misc_RNA (1)...(19): siRNA sense strand
cuacagcaaguuugacaca

SEQ ID NO: 534673 - RNA, 19 nt, Homo sapiens
  misc_RNA (1)...(19): siRNA sense strand
ggacugggcagauccucaa

SEQ ID NO: 534674 - RNA, 19 nt, Homo sapiens
  misc_RNA (1)...(19): siRNA sense strand
aagcagaccuacagcaagu

SEQ ID NO: 534675 - RNA, 19 nt, Homo sapiens
  misc_RNA (1)...(19): siRNA sense strand
ucaagcagaccuacagcaa

SEQ ID NO: 534676 - RNA, 19 nt, Homo sapiens
  misc_RNA (1)...(19): siRNA sense strand
ggaccuugcuaucuccuuu

SEQ ID NO: 534677 - RNA, 19 nt, Homo sapiens
  misc_RNA (1)...(19): siRNA sense strand
gcaagagccaccugcuauu

SEQ ID NO: 534678 - RNA, 19 nt, Homo sapiens
  misc_RNA (1)...(19): siRNA sense strand
aauggacucucugcucuua

SEQ ID NO: 534679 - RNA, 19 nt, Homo sapiens
  misc_RNA (1)...(19): siRNA sense strand
ggcaagagccaccugcuau

SEQ ID NO: 534680 - RNA, 19 nt, Homo sapiens
  misc_RNA (1)...(19): siRNA sense strand
caagagccaccugcuauug

SEQ ID NO: 534681 - RNA, 19 nt, Homo sapiens
  misc_RNA (1)...(19): siRNA sense strand
uggacucucugcucuuaga

SEQ ID NO: 534682 - RNA, 19 nt, Homo sapiens
  misc_RNA (1)...(19): siRNA sense strand
ggaagacaaccaggaccuu

SEQ ID NO: 534683 - RNA, 19 nt, Homo sapiens
  misc_RNA (1)...(19): siRNA sense strand
caaccaggaccuugcuauc

SEQ ID NO: 534684 - RNA, 19 nt, Homo sapiens
  misc_RNA (1)...(19): siRNA sense strand
gagcugaugaggcuacaac

SEQ ID NO: 534685 - RNA, 19 nt, Homo sapiens
  misc_RNA (1)...(19): siRNA sense strand
cgccauccuugcugccauu

SEQ ID NO: 534686 - RNA, 19 nt, Homo sapiens
  misc_RNA (1)...(19): siRNA sense strand
ggacucucugcucuuagaa

SEQ ID NO: 534687 - RNA, 19 nt, Homo sapiens
  misc_RNA (1)...(19): siRNA sense strand
cauccuugcugccauucuc

SEQ ID NO: 534688 - RNA, 19 nt, Homo sapiens
  misc_RNA (1)...(19): siRNA sense strand
agacagauauggcgaaauu

SEQ ID NO: 534689 - RNA, 19 nt, Homo sapiens
  misc_RNA (1)...(19): siRNA sense strand
ggaaguggagcuacagaua

SEQ ID NO: 534690 - RNA, 19 nt, Homo sapiens
  misc_RNA (1)...(19): siRNA sense strand
ugccaagucuuccaucuua

SEQ ID NO: 534691 - RNA, 19 nt, Homo sapiens
  misc_RNA (1)...(19): siRNA sense strand
ggaggaaagugaagaagca

SEQ ID NO: 534692 - RNA, 19 nt, Homo sapiens
  misc_RNA (1)...(19): siRNA sense strand
gggcucaucuaaacuaguu

SEQ ID NO: 534693 - RNA, 19 nt, Homo sapiens
  misc_RNA (1)...(19): siRNA sense strand
ccagugggauacggaauua

SEQ ID NO: 534694 - RNA, 19 nt, Homo sapiens
  misc_RNA (1)...(19): siRNA sense strand
ggaagacacuacaggaagu

SEQ ID NO: 534695 - RNA, 19 nt, Homo sapiens
  misc_RNA (1)...(19): siRNA sense strand
caaagaggcuaagggaaga

SEQ ID NO: 534696 - RNA, 19 nt, Homo sapiens
  misc_RNA (1)...(19): siRNA sense strand
gauaaaguuggaacagaua

SEQ ID NO: 534697 - RNA, 19 nt, Homo sapiens
  misc_RNA (1)...(19): siRNA sense strand
aagcagauguggcaguauu

SEQ ID NO: 534698 - RNA, 19 nt, Homo sapiens
  misc_RNA (1)...(19): siRNA sense strand
ggauguggcugcuuucaac

SEQ ID NO: 534699 - RNA, 19 nt, Homo sapiens
  misc_RNA (1)...(19): siRNA sense strand
uccaggugcucaacgauua

SEQ ID NO: 534700 - RNA, 19 nt, Homo sapiens
  misc_RNA (1)...(19): siRNA sense strand
cuacagauaguaaagauga

SEQ ID NO: 534701 - RNA, 19 nt, Homo sapiens
  misc_RNA (1)...(19): siRNA sense strand
gaagaagcaaagaggcuaa

SEQ ID NO: 534702 - RNA, 19 nt, Homo sapiens
  misc_RNA (1)...(19): siRNA sense strand
ccauggauguggcugcuuu

SEQ ID NO: 534703 - RNA, 19 nt, Homo sapiens
  misc_RNA (1)...(19): siRNA sense strand
acaagcagauguggcagua

SEQ ID NO: 534704 - RNA, 19 nt, Homo sapiens
  misc_RNA (1)...(19): siRNA sense strand
gaaguggagcuacagauag

SEQ ID NO: 534705 - RNA, 19 nt, Homo sapiens
  misc_RNA (1)...(19): siRNA sense strand
ugauaaaguuggaacagau

SEQ ID NO: 534706 - RNA, 19 nt, Homo sapiens
  misc_RNA (1)...(19): siRNA sense strand
gauacggaauuaagaaacu

SEQ ID NO: 534707 - RNA, 19 nt, Homo sapiens
  misc_RNA (1)...(19): siRNA sense strand
gguauaaucacaucaaguc

SEQ ID NO: 534708 - RNA, 19 nt, Homo sapiens
  misc_RNA (1)...(19): siRNA sense strand
gaacgucuugcacaauaug

SEQ ID NO: 534709 - RNA, 19 nt, Homo sapiens
  misc_RNA (1)...(19): siRNA sense strand
cacaucaagucuuacgaaa

SEQ ID NO: 534710 - RNA, 19 nt, Homo sapiens
  misc_RNA (1)...(19): siRNA sense strand
gcccuacguugguauaauc

SEQ ID NO: 534711 - RNA, 19 nt, Homo sapiens
  misc_RNA (1)...(19): siRNA sense strand
guaaagaugaugaugacau

SEQ ID NO: 534712 - RNA, 19 nt, Homo sapiens
  misc_RNA (1)...(19): siRNA sense strand
ugaugacauugaccucuuu

SEQ ID NO: 534713 - RNA, 19 nt, Homo sapiens
  misc_RNA (1)...(19): siRNA sense strand
gggaugaugagacagauau

SEQ ID NO: 534714 - RNA, 19 nt, Homo sapiens
  misc_RNA (1)...(19): siRNA sense strand
gaaagugaagaagcaaaga

SEQ ID NO: 534715 - RNA, 19 nt, Homo sapiens
  misc_RNA (1)...(19): siRNA sense strand
ggaaagugaagaagcaaag

SEQ ID NO: 534716 - RNA, 19 nt, Homo sapiens
  misc_RNA (1)...(19): siRNA sense strand
ugaagaugauaaaguugga

SEQ ID NO: 534717 - RNA, 19 nt, Homo sapiens
  misc_RNA (1)...(19): siRNA sense strand
ugagacagauauggcgaaa

SEQ ID NO: 534718 - RNA, 19 nt, Homo sapiens
  misc_RNA (1)...(19): siRNA sense strand
ucacaucaagucuuacgaa

SEQ ID NO: 534719 - RNA, 19 nt, Homo sapiens
  misc_RNA (1)...(19): siRNA sense strand
gggauacggaauuaagaaa

SEQ ID NO: 534720 - RNA, 19 nt, Homo sapiens
  misc_RNA (1)...(19): siRNA sense strand
gcacaauaugaaucaaaga

SEQ ID NO: 534721 - RNA, 19 nt, Homo sapiens
  misc_RNA (1)...(19): siRNA sense strand
acgauuaccuggcggacaa

SEQ ID NO: 534722 - RNA, 19 nt, Homo sapiens
  misc_RNA (1)...(19): siRNA sense strand
caucaagucuuacgaaaag

SEQ ID NO: 534723 - RNA, 19 nt, Homo sapiens
  misc_RNA (1)...(19): siRNA sense strand
gcagauguggcaguauuug

SEQ ID NO: 534724 - RNA, 19 nt, Homo sapiens
  misc_RNA (1)...(19): siRNA sense strand
gacauugaccucuuuggau

SEQ ID NO: 534725 - RNA, 19 nt, Homo sapiens
  misc_RNA (1)...(19): siRNA sense strand
uaguaaagaugaugaugac

SEQ ID NO: 534726 - RNA, 19 nt, Homo sapiens
  misc_RNA (1)...(19): siRNA sense strand
gagcuacagauaguaaaga

SEQ ID NO: 534727 - RNA, 19 nt, Homo sapiens
  misc_RNA (1)...(19): siRNA sense strand
caagucuuccaucuuacua

SEQ ID NO: 534728 - RNA, 19 nt, Homo sapiens
  misc_RNA (1)...(19): siRNA sense strand
ugacauugaccucuuugga

SEQ ID NO: 534729 - RNA, 19 nt, Homo sapiens
  misc_RNA (1)...(19): siRNA sense strand
aagaugaugaugacauuga

SEQ ID NO: 534730 - RNA, 19 nt, Homo sapiens
  misc_RNA (1)...(19): siRNA sense strand
ggagugcgucagaagcauu

SEQ ID NO: 534731 - RNA, 19 nt, Homo sapiens
  misc_RNA (1)...(19): siRNA sense strand
guggagcuacagauaguaa

SEQ ID NO: 534732 - RNA, 19 nt, Homo sapiens
  misc_RNA (1)...(19): siRNA sense strand
cagauauggcgaaauuaga

SEQ ID NO: 534733 - RNA, 19 nt, Homo sapiens
  misc_RNA (1)...(19): siRNA sense strand
ugugaaaccuugggaugau

SEQ ID NO: 534734 - RNA, 19 nt, Homo sapiens
  misc_RNA (1)...(19): siRNA sense strand
cuacguugguauaaucaca

SEQ ID NO: 534735 - RNA, 19 nt, Homo sapiens
  misc_RNA (1)...(19): siRNA sense strand
gauaguaaagaugaugaug

SEQ ID NO: 534736 - RNA, 19 nt, Homo sapiens
  misc_RNA (1)...(19): siRNA sense strand
guguguaguugaagaugau

SEQ ID NO: 534737 - RNA, 19 nt, Homo sapiens
  misc_RNA (1)...(19): siRNA sense strand
acagauauggcgaaauuag

SEQ ID NO: 534738 - RNA, 19 nt, Homo sapiens
  misc_RNA (1)...(19): siRNA sense strand
gaagaugauaaaguuggaa

SEQ ID NO: 534739 - RNA, 19 nt, Homo sapiens
  misc_RNA (1)...(19): siRNA sense strand
gaggagugcgucagaagca

SEQ ID NO: 534740 - RNA, 19 nt, Homo sapiens
  misc_RNA (1)...(19): siRNA sense strand
gucaugcccuacguuggua

SEQ ID NO: 534741 - RNA, 19 nt, Homo sapiens
  misc_RNA (1)...(19): siRNA sense strand
gugaaaccuugggaugaug

SEQ ID NO: 534742 - RNA, 19 nt, Homo sapiens
  misc_RNA (1)...(19): siRNA sense strand
agaacgucuugcacaauau

SEQ ID NO: 534743 - RNA, 19 nt, Homo sapiens
  misc_RNA (1)...(19): siRNA sense strand
aaguggagcuacagauagu

SEQ ID NO: 534744 - RNA, 19 nt, Homo sapiens
  misc_RNA (1)...(19): siRNA sense strand
guggaagacacuacaggaa

SEQ ID NO: 534745 - RNA, 19 nt, Homo sapiens
  misc_RNA (1)...(19): siRNA sense strand
caggagugaagaaagcuuu

SEQ ID NO: 534746 - RNA, 19 nt, Homo sapiens
  misc_RNA (1)...(19): siRNA sense strand
gaaacuucaaauacagugu

SEQ ID NO: 534747 - RNA, 19 nt, Homo sapiens
  misc_RNA (1)...(19): siRNA sense strand
uuagaggagugcgucagaa

SEQ ID NO: 534748 - RNA, 19 nt, Homo sapiens
  misc_RNA (1)...(19): siRNA sense strand
gacagauauggcgaaauua

SEQ ID NO: 534749 - RNA, 19 nt, Homo sapiens
  misc_RNA (1)...(19): siRNA sense strand
agucuuccaucuuacuaga

SEQ ID NO: 534750 - RNA, 19 nt, Homo sapiens
  misc_RNA (1)...(19): siRNA sense strand
cagauaguaaagaugauga

SEQ ID NO: 534751 - RNA, 19 nt, Homo sapiens
  misc_RNA (1)...(19): siRNA sense strand
ggagcuacagauaguaaag

SEQ ID NO: 534752 - RNA, 19 nt, Homo sapiens
  misc_RNA (1)...(19): siRNA sense strand
uacaggaaguggagcuaca

SEQ ID NO: 534753 - RNA, 19 nt, Homo sapiens
  misc_RNA (1)...(19): siRNA sense strand
uaaaguuggaacagauaug

SEQ ID NO: 534754 - RNA, 19 nt, Homo sapiens
  misc_RNA (1)...(19): siRNA sense strand
cagauguggcaguauuuga

SEQ ID NO: 534755 - RNA, 19 nt, Homo sapiens
  misc_RNA (1)...(19): siRNA sense strand
agauguggcaguauuugaa

SEQ ID NO: 534756 - RNA, 19 nt, Homo sapiens
  misc_RNA (1)...(19): siRNA sense strand
aauaugguccugccgaugu

SEQ ID NO: 534757 - RNA, 19 nt, Homo sapiens
  misc_RNA (1)...(19): siRNA sense strand
ugaaaccuugggaugauga

SEQ ID NO: 534758 - RNA, 19 nt, Homo sapiens
  misc_RNA (1)...(19): siRNA sense strand
ugaaucaaagaaagccaaa

SEQ ID NO: 534759 - RNA, 19 nt, Homo sapiens
  misc_RNA (1)...(19): siRNA sense strand
ugaggaggaaagugaagaa

SEQ ID NO: 534760 - RNA, 19 nt, Homo sapiens
  misc_RNA (1)...(19): siRNA sense strand
ggauacggaauuaagaaac

SEQ ID NO: 534761 - RNA, 19 nt, Homo sapiens
  misc_RNA (1)...(19): siRNA sense strand
uggcugcuuucaacaagau

SEQ ID NO: 534762 - RNA, 19 nt, Homo sapiens
  misc_RNA (1)...(19): siRNA sense strand
ugcacaauaugaaucaaag

SEQ ID NO: 534763 - RNA, 19 nt, Homo sapiens
  misc_RNA (1)...(19): siRNA sense strand
augauaaaguuggaacaga

SEQ ID NO: 534764 - RNA, 19 nt, Homo sapiens
  misc_RNA (1)...(19): siRNA sense strand
agacagauauggcgaaauu

SEQ ID NO: 534765 - RNA, 19 nt, Homo sapiens
  misc_RNA (1)...(19): siRNA sense strand
ggaaguggagcuacagaua

SEQ ID NO: 534766 - RNA, 19 nt, Homo sapiens
  misc_RNA (1)...(19): siRNA sense strand
ugccaagucuuccaucuua

SEQ ID NO: 534767 - RNA, 19 nt, Homo sapiens
  misc_RNA (1)...(19): siRNA sense strand
ggaggaaagugaagaagca

SEQ ID NO: 534768 - RNA, 19 nt, Homo sapiens
  misc_RNA (1)...(19): siRNA sense strand
gggcucaucuaaacuaguu

SEQ ID NO: 534769 - RNA, 19 nt, Homo sapiens
  misc_RNA (1)...(19): siRNA sense strand
ccagugggauacggaauua

SEQ ID NO: 534770 - RNA, 19 nt, Homo sapiens
  misc_RNA (1)...(19): siRNA sense strand
ggaagacacuacaggaagu

SEQ ID NO: 534771 - RNA, 19 nt, Homo sapiens
  misc_RNA (1)...(19): siRNA sense strand
caaagaggcuaagggaaga

SEQ ID NO: 534772 - RNA, 19 nt, Homo sapiens
  misc_RNA (1)...(19): siRNA sense strand
gauaaaguuggaacagaua

SEQ ID NO: 534773 - RNA, 19 nt, Homo sapiens
  misc_RNA (1)...(19): siRNA sense strand
aagcagauguggcaguauu

SEQ ID NO: 534774 - RNA, 19 nt, Homo sapiens
  misc_RNA (1)...(19): siRNA sense strand
ggauguggcugcuuucaac

SEQ ID NO: 534775 - RNA, 19 nt, Homo sapiens
  misc_RNA (1)...(19): siRNA sense strand
uccaggugcucaacgauua

SEQ ID NO: 534776 - RNA, 19 nt, Homo sapiens
  misc_RNA (1)...(19): siRNA sense strand
cuacagauaguaaagauga

SEQ ID NO: 534777 - RNA, 19 nt, Homo sapiens
  misc_RNA (1)...(19): siRNA sense strand
gaagaagcaaagaggcuaa

SEQ ID NO: 534778 - RNA, 19 nt, Homo sapiens
  misc_RNA (1)...(19): siRNA sense strand
ccauggauguggcugcuuu

SEQ ID NO: 534779 - RNA, 19 nt, Homo sapiens
  misc_RNA (1)...(19): siRNA sense strand
acaagcagauguggcagua

SEQ ID NO: 534780 - RNA, 19 nt, Homo sapiens
  misc_RNA (1)...(19): siRNA sense strand
gaaguggagcuacagauag

SEQ ID NO: 534781 - RNA, 19 nt, Homo sapiens
  misc_RNA (1)...(19): siRNA sense strand
ugauaaaguuggaacagau

SEQ ID NO: 534782 - RNA, 19 nt, Homo sapiens
  misc_RNA (1)...(19): siRNA sense strand
gauacggaauuaagaaacu

SEQ ID NO: 534783 - RNA, 19 nt, Homo sapiens
  misc_RNA (1)...(19): siRNA sense strand
gguauaaucacaucaaguc

SEQ ID NO: 534784 - RNA, 19 nt, Homo sapiens
  misc_RNA (1)...(19): siRNA sense strand
gaacgucuugcacaauaug

SEQ ID NO: 534785 - RNA, 19 nt, Homo sapiens
  misc_RNA (1)...(19): siRNA sense strand
cacaucaagucuuacgaaa

SEQ ID NO: 534786 - RNA, 19 nt, Homo sapiens
  misc_RNA (1)...(19): siRNA sense strand
gcccuacguugguauaauc

SEQ ID NO: 534787 - RNA, 19 nt, Homo sapiens
  misc_RNA (1)...(19): siRNA sense strand
guaaagaugaugaugacau

SEQ ID NO: 534788 - RNA, 19 nt, Homo sapiens
  misc_RNA (1)...(19): siRNA sense strand
ugaugacauugaccucuuu

SEQ ID NO: 534789 - RNA, 19 nt, Homo sapiens
  misc_RNA (1)...(19): siRNA sense strand
gggaugaugagacagauau

SEQ ID NO: 534790 - RNA, 19 nt, Homo sapiens
  misc_RNA (1)...(19): siRNA sense strand
gaaagugaagaagcaaaga

SEQ ID NO: 534791 - RNA, 19 nt, Homo sapiens
  misc_RNA (1)...(19): siRNA sense strand
ggaaagugaagaagcaaag

SEQ ID NO: 534792 - RNA, 19 nt, Homo sapiens
  misc_RNA (1)...(19): siRNA sense strand
ugaagaugauaaaguugga

SEQ ID NO: 534793 - RNA, 19 nt, Homo sapiens
  misc_RNA (1)...(19): siRNA sense strand
ugagacagauauggcgaaa

SEQ ID NO: 534794 - RNA, 19 nt, Homo sapiens
  misc_RNA (1)...(19): siRNA sense strand
ucacaucaagucuuacgaa

SEQ ID NO: 534795 - RNA, 19 nt, Homo sapiens
  misc_RNA (1)...(19): siRNA sense strand
gggauacggaauuaagaaa

SEQ ID NO: 534796 - RNA, 19 nt, Homo sapiens
  misc_RNA (1)...(19): siRNA sense strand
gcacaauaugaaucaaaga

SEQ ID NO: 534797 - RNA, 19 nt, Homo sapiens
  misc_RNA (1)...(19): siRNA sense strand
acgauuaccuggcggacaa

SEQ ID NO: 534798 - RNA, 19 nt, Homo sapiens
  misc_RNA (1)...(19): siRNA sense strand
caucaagucuuacgaaaag

SEQ ID NO: 534799 - RNA, 19 nt, Homo sapiens
  misc_RNA (1)...(19): siRNA sense strand
gcagauguggcaguauuug

SEQ ID NO: 534800 - RNA, 19 nt, Homo sapiens
  misc_RNA (1)...(19): siRNA sense strand
gacauugaccucuuuggau

SEQ ID NO: 534801 - RNA, 19 nt, Homo sapiens
  misc_RNA (1)...(19): siRNA sense strand
uaguaaagaugaugaugac

SEQ ID NO: 534802 - RNA, 19 nt, Homo sapiens
  misc_RNA (1)...(19): siRNA sense strand
gagcuacagauaguaaaga

SEQ ID NO: 534803 - RNA, 19 nt, Homo sapiens
  misc_RNA (1)...(19): siRNA sense strand
caagucuuccaucuuacua

SEQ ID NO: 534804 - RNA, 19 nt, Homo sapiens
  misc_RNA (1)...(19): siRNA sense strand
ugacauugaccucuuugga

SEQ ID NO: 534805 - RNA, 19 nt, Homo sapiens
  misc_RNA (1)...(19): siRNA sense strand
aagaugaugaugacauuga

SEQ ID NO: 534806 - RNA, 19 nt, Homo sapiens
  misc_RNA (1)...(19): siRNA sense strand
ggagugcgucagaagcauu

SEQ ID NO: 534807 - RNA, 19 nt, Homo sapiens
  misc_RNA (1)...(19): siRNA sense strand
guggagcuacagauaguaa

SEQ ID NO: 534808 - RNA, 19 nt, Homo sapiens
  misc_RNA (1)...(19): siRNA sense strand
cagauauggcgaaauuaga

SEQ ID NO: 534809 - RNA, 19 nt, Homo sapiens
  misc_RNA (1)...(19): siRNA sense strand
ugugaaaccuugggaugau

SEQ ID NO: 534810 - RNA, 19 nt, Homo sapiens
  misc_RNA (1)...(19): siRNA sense strand
cuacguugguauaaucaca

SEQ ID NO: 534811 - RNA, 19 nt, Homo sapiens
  misc_RNA (1)...(19): siRNA sense strand
gauaguaaagaugaugaug

SEQ ID NO: 534812 - RNA, 19 nt, Homo sapiens
  misc_RNA (1)...(19): siRNA sense strand
guguguaguugaagaugau

SEQ ID NO: 534813 - RNA, 19 nt, Homo sapiens
  misc_RNA (1)...(19): siRNA sense strand
acagauauggcgaaauuag

SEQ ID NO: 534814 - RNA, 19 nt, Homo sapiens
  misc_RNA (1)...(19): siRNA sense strand
gaagaugauaaaguuggaa

SEQ ID NO: 534815 - RNA, 19 nt, Homo sapiens
  misc_RNA (1)...(19): siRNA sense strand
gaggagugcgucagaagca

SEQ ID NO: 534816 - RNA, 19 nt, Homo sapiens
  misc_RNA (1)...(19): siRNA sense strand
gucaugcccuacguuggua

SEQ ID NO: 534817 - RNA, 19 nt, Homo sapiens
  misc_RNA (1)...(19): siRNA sense strand
gugaaaccuugggaugaug

SEQ ID NO: 534818 - RNA, 19 nt, Homo sapiens
  misc_RNA (1)...(19): siRNA sense strand
agaacgucuugcacaauau

SEQ ID NO: 534819 - RNA, 19 nt, Homo sapiens
  misc_RNA (1)...(19): siRNA sense strand
aaguggagcuacagauagu

SEQ ID NO: 534820 - RNA, 19 nt, Homo sapiens
  misc_RNA (1)...(19): siRNA sense strand
guggaagacacuacaggaa

SEQ ID NO: 534821 - RNA, 19 nt, Homo sapiens
  misc_RNA (1)...(19): siRNA sense strand
caggagugaagaaagcuuu

SEQ ID NO: 534822 - RNA, 19 nt, Homo sapiens
  misc_RNA (1)...(19): siRNA sense strand
gaaacuucaaauacagugu

SEQ ID NO: 534823 - RNA, 19 nt, Homo sapiens
  misc_RNA (1)...(19): siRNA sense strand
uuagaggagugcgucagaa

SEQ ID NO: 534824 - RNA, 19 nt, Homo sapiens
  misc_RNA (1)...(19): siRNA sense strand
gacagauauggcgaaauua

SEQ ID NO: 534825 - RNA, 19 nt, Homo sapiens
  misc_RNA (1)...(19): siRNA sense strand
agucuuccaucuuacuaga

SEQ ID NO: 534826 - RNA, 19 nt, Homo sapiens
  misc_RNA (1)...(19): siRNA sense strand
cagauaguaaagaugauga

SEQ ID NO: 534827 - RNA, 19 nt, Homo sapiens
  misc_RNA (1)...(19): siRNA sense strand
ggagcuacagauaguaaag

SEQ ID NO: 534828 - RNA, 19 nt, Homo sapiens
  misc_RNA (1)...(19): siRNA sense strand
uacaggaaguggagcuaca

SEQ ID NO: 534829 - RNA, 19 nt, Homo sapiens
  misc_RNA (1)...(19): siRNA sense strand
uaaaguuggaacagauaug

SEQ ID NO: 534830 - RNA, 19 nt, Homo sapiens
  misc_RNA (1)...(19): siRNA sense strand
cagauguggcaguauuuga

SEQ ID NO: 534831 - RNA, 19 nt, Homo sapiens
  misc_RNA (1)...(19): siRNA sense strand
agauguggcaguauuugaa

SEQ ID NO: 534832 - RNA, 19 nt, Homo sapiens
  misc_RNA (1)...(19): siRNA sense strand
aauaugguccugccgaugu

SEQ ID NO: 534833 - RNA, 19 nt, Homo sapiens
  misc_RNA (1)...(19): siRNA sense strand
ugaaaccuugggaugauga

SEQ ID NO: 534834 - RNA, 19 nt, Homo sapiens
  misc_RNA (1)...(19): siRNA sense strand
ugaaucaaagaaagccaaa

SEQ ID NO: 534835 - RNA, 19 nt, Homo sapiens
  misc_RNA (1)...(19): siRNA sense strand
ugaggaggaaagugaagaa

SEQ ID NO: 534836 - RNA, 19 nt, Homo sapiens
  misc_RNA (1)...(19): siRNA sense strand
ggauacggaauuaagaaac

SEQ ID NO: 534837 - RNA, 19 nt, Homo sapiens
  misc_RNA (1)...(19): siRNA sense strand
uggcugcuuucaacaagau

SEQ ID NO: 534838 - RNA, 19 nt, Homo sapiens
  misc_RNA (1)...(19): siRNA sense strand
ugcacaauaugaaucaaag

SEQ ID NO: 534839 - RNA, 19 nt, Homo sapiens
  misc_RNA (1)...(19): siRNA sense strand
augauaaaguuggaacaga

SEQ ID NO: 534840 - RNA, 19 nt, Homo sapiens
  misc_RNA (1)...(19): siRNA sense strand
gaauacaggugucaaauaa

SEQ ID NO: 534841 - RNA, 19 nt, Homo sapiens
  misc_RNA (1)...(19): siRNA sense strand
ggacaaagacggcugguua

SEQ ID NO: 534842 - RNA, 19 nt, Homo sapiens
  misc_RNA (1)...(19): siRNA sense strand
caacaaagcugaacucucu

SEQ ID NO: 534843 - RNA, 19 nt, Homo sapiens
  misc_RNA (1)...(19): siRNA sense strand
gaacaaggaugcuuugcuu

SEQ ID NO: 534844 - RNA, 19 nt, Homo sapiens
  misc_RNA (1)...(19): siRNA sense strand
gaggaacugugcagaaaua

SEQ ID NO: 534845 - RNA, 19 nt, Homo sapiens
  misc_RNA (1)...(19): siRNA sense strand
gaaaugaagccaucacgua

SEQ ID NO: 534846 - RNA, 19 nt, Homo sapiens
  misc_RNA (1)...(19): siRNA sense strand
gaaggauucuggucugaaa

SEQ ID NO: 534847 - RNA, 19 nt, Homo sapiens
  misc_RNA (1)...(19): siRNA sense strand
ggaauacaggugucaaaua

SEQ ID NO: 534848 - RNA, 19 nt, Homo sapiens
  misc_RNA (1)...(19): siRNA sense strand
gaagauauggugagacuug

SEQ ID NO: 534849 - RNA, 19 nt, Homo sapiens
  misc_RNA (1)...(19): siRNA sense strand
gcugaacucucucugguuu

SEQ ID NO: 534850 - RNA, 19 nt, Homo sapiens
  misc_RNA (1)...(19): siRNA sense strand
gaaggccaaacucuuauua

SEQ ID NO: 534851 - RNA, 19 nt, Homo sapiens
  misc_RNA (1)...(19): siRNA sense strand
ggccagagcugcggaacua

SEQ ID NO: 534852 - RNA, 19 nt, Homo sapiens
  misc_RNA (1)...(19): siRNA sense strand
caaauaauggcccuuguuu

SEQ ID NO: 534853 - RNA, 19 nt, Homo sapiens
  misc_RNA (1)...(19): siRNA sense strand
uaaacagguugcagaauug

SEQ ID NO: 534854 - RNA, 19 nt, Homo sapiens
  misc_RNA (1)...(19): siRNA sense strand
auaaacagguugcagaauu

SEQ ID NO: 534855 - RNA, 19 nt, Homo sapiens
  misc_RNA (1)...(19): siRNA sense strand
caaggaugcuuugcuuauu

SEQ ID NO: 534856 - RNA, 19 nt, Homo sapiens
  misc_RNA (1)...(19): siRNA sense strand
gcacgaagauccgcacuac

SEQ ID NO: 534857 - RNA, 19 nt, Homo sapiens
  misc_RNA (1)...(19): siRNA sense strand
ugagagaguuguagagugu

SEQ ID NO: 534858 - RNA, 19 nt, Homo sapiens
  misc_RNA (1)...(19): siRNA sense strand
gaugaccucuauuccacua

SEQ ID NO: 534859 - RNA, 19 nt, Homo sapiens
  misc_RNA (1)...(19): siRNA sense strand
ggugaucguuccacuuuau

SEQ ID NO: 534860 - RNA, 19 nt, Homo sapiens
  misc_RNA (1)...(19): siRNA sense strand
ggucaaaggcaucacauug

SEQ ID NO: 534861 - RNA, 19 nt, Homo sapiens
  misc_RNA (1)...(19): siRNA sense strand
gaagaucuugcaguaauuu

SEQ ID NO: 534862 - RNA, 19 nt, Homo sapiens
  misc_RNA (1)...(19): siRNA sense strand
gcagcggcaucaucagaaa

SEQ ID NO: 534863 - RNA, 19 nt, Homo sapiens
  misc_RNA (1)...(19): siRNA sense strand
gaaaccagaccaacccuau

SEQ ID NO: 534864 - RNA, 19 nt, Homo sapiens
  misc_RNA (1)...(19): siRNA sense strand
caacagagaauacagucaa

SEQ ID NO: 534865 - RNA, 19 nt, Homo sapiens
  misc_RNA (1)...(19): siRNA sense strand
auacaggugucaaauaaug

SEQ ID NO: 534866 - RNA, 19 nt, Homo sapiens
  misc_RNA (1)...(19): siRNA sense strand
ucacguacauagucaacaa

SEQ ID NO: 534867 - RNA, 19 nt, Homo sapiens
  misc_RNA (1)...(19): siRNA sense strand
gaaacauagugagcgauug

SEQ ID NO: 534868 - RNA, 19 nt, Homo sapiens
  misc_RNA (1)...(19): siRNA sense strand
aaagacggcugguuacaca

SEQ ID NO: 534869 - RNA, 19 nt, Homo sapiens
  misc_RNA (1)...(19): siRNA sense strand
ugaaagggccaaauguauu

SEQ ID NO: 534870 - RNA, 19 nt, Homo sapiens
  misc_RNA (1)...(19): siRNA sense strand
gaaaacagcagaagcuuug

SEQ ID NO: 534871 - RNA, 19 nt, Homo sapiens
  misc_RNA (1)...(19): siRNA sense strand
gaacugugcagaaauaagg

SEQ ID NO: 534872 - RNA, 19 nt, Homo sapiens
  misc_RNA (1)...(19): siRNA sense strand
gaagauccgcacuacuuga

SEQ ID NO: 534873 - RNA, 19 nt, Homo sapiens
  misc_RNA (1)...(19): siRNA sense strand
gcacaaggagaauacauag

SEQ ID NO: 534874 - RNA, 19 nt, Homo sapiens
  misc_RNA (1)...(19): siRNA sense strand
gagaauacagucaauccuu

SEQ ID NO: 534875 - RNA, 19 nt, Homo sapiens
  misc_RNA (1)...(19): siRNA sense strand
cugaagaucuugcaguaau

SEQ ID NO: 534876 - RNA, 19 nt, Homo sapiens
  misc_RNA (1)...(19): siRNA sense strand
ucaguucauuggcaucuuu

SEQ ID NO: 534877 - RNA, 19 nt, Homo sapiens
  misc_RNA (1)...(19): siRNA sense strand
gaauggcuuucauauaaac

SEQ ID NO: 534878 - RNA, 19 nt, Homo sapiens
  misc_RNA (1)...(19): siRNA sense strand
cacauugcacccugaauua

SEQ ID NO: 534879 - RNA, 19 nt, Homo sapiens
  misc_RNA (1)...(19): siRNA sense strand
aaucauaguugucauggau

SEQ ID NO: 534880 - RNA, 19 nt, Homo sapiens
  misc_RNA (1)...(19): siRNA sense strand
gcgacgagcccuuggugua

SEQ ID NO: 534881 - RNA, 19 nt, Homo sapiens
  misc_RNA (1)...(19): siRNA sense strand
ugaagaucuugcaguaauu

SEQ ID NO: 534882 - RNA, 19 nt, Homo sapiens
  misc_RNA (1)...(19): siRNA sense strand
cugagugggugauuauuga

SEQ ID NO: 534883 - RNA, 19 nt, Homo sapiens
  misc_RNA (1)...(19): siRNA sense strand
ucacauugcacccugaauu

SEQ ID NO: 534884 - RNA, 19 nt, Homo sapiens
  misc_RNA (1)...(19): siRNA sense strand
gcagaaauaaggaugucaa

SEQ ID NO: 534885 - RNA, 19 nt, Homo sapiens
  misc_RNA (1)...(19): siRNA sense strand
gugaaagggccaaauguau

SEQ ID NO: 534886 - RNA, 19 nt, Homo sapiens
  misc_RNA (1)...(19): siRNA sense strand
cggcugaucuuccacaaag

SEQ ID NO: 534887 - RNA, 19 nt, Homo sapiens
  misc_RNA (1)...(19): siRNA sense strand
aaauaauggcccuuguuua

SEQ ID NO: 534888 - RNA, 19 nt, Homo sapiens
  misc_RNA (1)...(19): siRNA sense strand
ucaaaggcaucacauugca

SEQ ID NO: 534889 - RNA, 19 nt, Homo sapiens
  misc_RNA (1)...(19): siRNA sense strand
gaacaggucaaaggcauca

SEQ ID NO: 534890 - RNA, 19 nt, Homo sapiens
  misc_RNA (1)...(19): siRNA sense strand
aauggcaccuugaaaauua

SEQ ID NO: 534891 - RNA, 19 nt, Homo sapiens
  misc_RNA (1)...(19): siRNA sense strand
gcugaucuuccacaaagua

SEQ ID NO: 534892 - RNA, 19 nt, Homo sapiens
  misc_RNA (1)...(19): siRNA sense strand
gaaagcaacagagaauaca

SEQ ID NO: 534893 - RNA, 19 nt, Homo sapiens
  misc_RNA (1)...(19): siRNA sense strand
caugagcuguuccgguauu

SEQ ID NO: 534894 - RNA, 19 nt, Homo sapiens
  misc_RNA (1)...(19): siRNA sense strand
gacgagcccuugguguauu

SEQ ID NO: 534895 - RNA, 19 nt, Homo sapiens
  misc_RNA (1)...(19): siRNA sense strand
gguaccagauguugagaca

SEQ ID NO: 534896 - RNA, 19 nt, Homo sapiens
  misc_RNA (1)...(19): siRNA sense strand
gcaauugugguaccagaug

SEQ ID NO: 534897 - RNA, 19 nt, Homo sapiens
  misc_RNA (1)...(19): siRNA sense strand
ggcacaaggagaauacaua

SEQ ID NO: 534898 - RNA, 19 nt, Homo sapiens
  misc_RNA (1)...(19): siRNA sense strand
ggaagaaaugaauuacaug

SEQ ID NO: 534899 - RNA, 19 nt, Homo sapiens
  misc_RNA (1)...(19): siRNA sense strand
aauaauggcccuuguuuag

SEQ ID NO: 534900 - RNA, 19 nt, Homo sapiens
  misc_RNA (1)...(19): siRNA sense strand
agaccugagugggugauua

SEQ ID NO: 534901 - RNA, 19 nt, Homo sapiens
  misc_RNA (1)...(19): siRNA sense strand
gggaaggauucuggucuga

SEQ ID NO: 534902 - RNA, 19 nt, Homo sapiens
  misc_RNA (1)...(19): siRNA sense strand
aggccaaacucuuauuaga

SEQ ID NO: 534903 - RNA, 19 nt, Homo sapiens
  misc_RNA (1)...(19): siRNA sense strand
cugcaggcauuucucauug

SEQ ID NO: 534904 - RNA, 19 nt, Homo sapiens
  misc_RNA (1)...(19): siRNA sense strand
gauaaaacuuguugaugug

SEQ ID NO: 534905 - RNA, 19 nt, Homo sapiens
  misc_RNA (1)...(19): siRNA sense strand
ccgaugccgugcaauuuga

SEQ ID NO: 534906 - RNA, 19 nt, Homo sapiens
  misc_RNA (1)...(19): siRNA sense strand
gaucuugcaguaauuuguu

SEQ ID NO: 534907 - RNA, 19 nt, Homo sapiens
  misc_RNA (1)...(19): siRNA sense strand
gcaagcccaugagcuguuc

SEQ ID NO: 534908 - RNA, 19 nt, Homo sapiens
  misc_RNA (1)...(19): siRNA sense strand
ucaggucgcagauagauga

SEQ ID NO: 534909 - RNA, 19 nt, Homo sapiens
  misc_RNA (1)...(19): siRNA sense strand
gcauuucucauugcaauug

SEQ ID NO: 534910 - RNA, 19 nt, Homo sapiens
  misc_RNA (1)...(19): siRNA sense strand
gagaaggccaaacucuuau

SEQ ID NO: 534911 - RNA, 19 nt, Homo sapiens
  misc_RNA (1)...(19): siRNA sense strand
gaagccaucacguacauag

SEQ ID NO: 534912 - RNA, 19 nt, Homo sapiens
  misc_RNA (1)...(19): siRNA sense strand
ggaagucaccagcaugaag

SEQ ID NO: 534913 - RNA, 19 nt, Homo sapiens
  misc_RNA (1)...(19): siRNA sense strand
cgaaacauagugagcgauu

SEQ ID NO: 534914 - RNA, 19 nt, Homo sapiens
  misc_RNA (1)...(19): siRNA sense strand
caacauuauacgaagguuu

SEQ ID NO: 534915 - RNA, 19 nt, Homo sapiens
  misc_RNA (1)...(19): siRNA sense strand
gcaggcauuucucauugca

SEQ ID NO: 534916 - RNA, 19 nt, Homo sapiens
  misc_RNA (1)...(19): siRNA sense strand
cagcagaagcuuuggacaa

SEQ ID NO: 534917 - RNA, 19 nt, Homo sapiens
  misc_RNA (1)...(19): siRNA sense strand
uaugauacccuuggaaaug

SEQ ID NO: 534918 - RNA, 19 nt, Homo sapiens
  misc_RNA (1)...(19): siRNA sense strand
ggugauuauugaacaagga

SEQ ID NO: 534919 - RNA, 19 nt, Homo sapiens
  misc_RNA (1)...(19): siRNA sense strand
cccagaugauacuuugaua

SEQ ID NO: 534920 - RNA, 19 nt, Homo sapiens
  misc_RNA (1)...(19): siRNA sense strand
guauuucuaugaugauguc

SEQ ID NO: 534921 - RNA, 19 nt, Homo sapiens
  misc_RNA (1)...(19): siRNA sense strand
uugaggaacugugcagaaa

SEQ ID NO: 534922 - RNA, 19 nt, Homo sapiens
  misc_RNA (1)...(19): siRNA sense strand
ggucacucaccgaaacaua

SEQ ID NO: 534923 - RNA, 19 nt, Homo sapiens
  misc_RNA (1)...(19): siRNA sense strand
ucaaauaauggcccuuguu

SEQ ID NO: 534924 - RNA, 19 nt, Homo sapiens
  misc_RNA (1)...(19): siRNA sense strand
cagagcugcggaacuauuu

SEQ ID NO: 534925 - RNA, 19 nt, Homo sapiens
  misc_RNA (1)...(19): siRNA sense strand
gauuugaagggucguuuga

SEQ ID NO: 534926 - RNA, 19 nt, Homo sapiens
  misc_RNA (1)...(19): siRNA sense strand
ccaaauggcaccuugaaaa

SEQ ID NO: 534927 - RNA, 19 nt, Homo sapiens
  misc_RNA (1)...(19): siRNA sense strand
ugugaaagggccaaaugua

SEQ ID NO: 534928 - RNA, 19 nt, Homo sapiens
  misc_RNA (1)...(19): siRNA sense strand
guacauagucaacaaagcu

SEQ ID NO: 534929 - RNA, 19 nt, Homo sapiens
  misc_RNA (1)...(19): siRNA sense strand
aaggaugcuuugcuuauuc

SEQ ID NO: 534930 - RNA, 19 nt, Homo sapiens
  misc_RNA (1)...(19): siRNA sense strand
acaaggaugcuuugcuuau

SEQ ID NO: 534931 - RNA, 19 nt, Homo sapiens
  misc_RNA (1)...(19): siRNA sense strand
gaccugagugggugauuau

SEQ ID NO: 534932 - RNA, 19 nt, Homo sapiens
  misc_RNA (1)...(19): siRNA sense strand
ccggauguuugaccgaauu

SEQ ID NO: 534933 - RNA, 19 nt, Homo sapiens
  misc_RNA (1)...(19): siRNA sense strand
auugcacccugaauuauuu

SEQ ID NO: 534934 - RNA, 19 nt, Homo sapiens
  misc_RNA (1)...(19): siRNA sense strand
gcuuucauauaaacagguu

SEQ ID NO: 534935 - RNA, 19 nt, Homo sapiens
  misc_RNA (1)...(19): siRNA sense strand
ccucgaagauauggugaga

SEQ ID NO: 534936 - RNA, 19 nt, Homo sapiens
  misc_RNA (1)...(19): siRNA sense strand
ugaagggucguuugaggaa

SEQ ID NO: 534937 - RNA, 19 nt, Homo sapiens
  misc_RNA (1)...(19): siRNA sense strand
aaacauagugagcgauugu

SEQ ID NO: 534938 - RNA, 19 nt, Homo sapiens
  misc_RNA (1)...(19): siRNA sense strand
acgaagauccgcacuacuu

SEQ ID NO: 534939 - RNA, 19 nt, Homo sapiens
  misc_RNA (1)...(19): siRNA sense strand
ccagagcugcggaacuauu

SEQ ID NO: 534940 - RNA, 19 nt, Homo sapiens
  misc_RNA (1)...(19): siRNA sense strand
gaaugcaaguucagagaaa

SEQ ID NO: 534941 - RNA, 19 nt, Homo sapiens
  misc_RNA (1)...(19): siRNA sense strand
cagaaacuguucaucacua

SEQ ID NO: 534942 - RNA, 19 nt, Homo sapiens
  misc_RNA (1)...(19): siRNA sense strand
caagaagaaugcaaguuca

SEQ ID NO: 534943 - RNA, 19 nt, Homo sapiens
  misc_RNA (1)...(19): siRNA sense strand
gaacaguaaaggaagauug

SEQ ID NO: 534944 - RNA, 19 nt, Homo sapiens
  misc_RNA (1)...(19): siRNA sense strand
gcugugggcucucgucuuc

SEQ ID NO: 534945 - RNA, 19 nt, Homo sapiens
  misc_RNA (1)...(19): siRNA sense strand
ccaagaagaaugcaaguuc

SEQ ID NO: 534946 - RNA, 19 nt, Homo sapiens
  misc_RNA (1)...(19): siRNA sense strand
gaacugggaaaguggcuau

SEQ ID NO: 534947 - RNA, 19 nt, Homo sapiens
  misc_RNA (1)...(19): siRNA sense strand
gugagucucuuuggaguga

SEQ ID NO: 534948 - RNA, 19 nt, Homo sapiens
  misc_RNA (1)...(19): siRNA sense strand
caacgugggcaucggcuuu

SEQ ID NO: 534949 - RNA, 19 nt, Homo sapiens
  misc_RNA (1)...(19): siRNA sense strand
caugaacaguaaaggaaga

SEQ ID NO: 534950 - RNA, 19 nt, Homo sapiens
  misc_RNA (1)...(19): siRNA sense strand
agaaacuguucaucacuau

SEQ ID NO: 534951 - RNA, 19 nt, Homo sapiens
  misc_RNA (1)...(19): siRNA sense strand
gccaugaacaguaaaggaa

SEQ ID NO: 534952 - RNA, 19 nt, Homo sapiens
  misc_RNA (1)...(19): siRNA sense strand
gacugucacucauuuccuu

SEQ ID NO: 534953 - RNA, 19 nt, Homo sapiens
  misc_RNA (1)...(19): siRNA sense strand
guaccaagggaccuacauu

SEQ ID NO: 534954 - RNA, 19 nt, Homo sapiens
  misc_RNA (1)...(19): siRNA sense strand
gcaaauacggacggguaaa

SEQ ID NO: 534955 - RNA, 19 nt, Homo sapiens
  misc_RNA (1)...(19): siRNA sense strand
gaaacccuccugcccaaca

SEQ ID NO: 534956 - RNA, 19 nt, Homo sapiens
  misc_RNA (1)...(19): siRNA sense strand
uuacaaugccuacgaguca

SEQ ID NO: 534957 - RNA, 19 nt, Homo sapiens
  misc_RNA (1)...(19): siRNA sense strand
cugggaaaguggcuauuug

SEQ ID NO: 534958 - RNA, 19 nt, Homo sapiens
  misc_RNA (1)...(19): siRNA sense strand
ggggcuagcuggagagauu

SEQ ID NO: 534959 - RNA, 19 nt, Homo sapiens
  misc_RNA (1)...(19): siRNA sense strand
aaacuguucaucacuaugu

SEQ ID NO: 534960 - RNA, 19 nt, Homo sapiens
  misc_RNA (1)...(19): siRNA sense strand
ucguugccaugaacaguaa

SEQ ID NO: 534961 - RNA, 19 nt, Homo sapiens
  misc_RNA (1)...(19): siRNA sense strand
gaaacuguucaucacuaug

SEQ ID NO: 534962 - RNA, 19 nt, Homo sapiens
  misc_RNA (1)...(19): siRNA sense strand
aaacccuccugcccaacaa

SEQ ID NO: 534963 - RNA, 19 nt, Homo sapiens
  misc_RNA (1)...(19): siRNA sense strand
caaauacggacggguaaag

SEQ ID NO: 534964 - RNA, 19 nt, Homo sapiens
  misc_RNA (1)...(19): siRNA sense strand
acaauuacaaugccuacga

SEQ ID NO: 534965 - RNA, 19 nt, Homo sapiens
  misc_RNA (1)...(19): siRNA sense strand
uaccaagggaccuacauug

SEQ ID NO: 534966 - RNA, 19 nt, Homo sapiens
  misc_RNA (1)...(19): siRNA sense strand
agaaugcaaguucagagaa

SEQ ID NO: 534967 - RNA, 19 nt, Homo sapiens
  misc_RNA (1)...(19): siRNA sense strand
caacgcccagcuuccaaga

SEQ ID NO: 534968 - RNA, 19 nt, Homo sapiens
  misc_RNA (1)...(19): siRNA sense strand
cguggugagucucuuugga

SEQ ID NO: 534969 - RNA, 19 nt, Homo sapiens
  misc_RNA (1)...(19): siRNA sense strand
aagaaugcaaguucagaga

SEQ ID NO: 534970 - RNA, 19 nt, Homo sapiens
  misc_RNA (1)...(19): siRNA sense strand
gcaaaguugugaaucaaga

SEQ ID NO: 534971 - RNA, 19 nt, Homo sapiens
  misc_RNA (1)...(19): siRNA sense strand
caaggaaucuguguuugaa

SEQ ID NO: 534972 - RNA, 19 nt, Homo sapiens
  misc_RNA (1)...(19): siRNA sense strand
cgacuacacucucuucaau

SEQ ID NO: 534973 - RNA, 19 nt, Homo sapiens
  misc_RNA (1)...(19): siRNA sense strand
gaggcaaaguugugaauca

SEQ ID NO: 534974 - RNA, 19 nt, Homo sapiens
  misc_RNA (1)...(19): siRNA sense strand
uacacucucuucaaucuaa

SEQ ID NO: 534975 - RNA, 19 nt, Homo sapiens
  misc_RNA (1)...(19): siRNA sense strand
aaacaagggcguucaagga

SEQ ID NO: 534976 - RNA, 19 nt, Homo sapiens
  misc_RNA (1)...(19): siRNA sense strand
ggugaaggcuaucucuaca

SEQ ID NO: 534977 - RNA, 19 nt, Homo sapiens
  misc_RNA (1)...(19): siRNA sense strand
gaaccaucgcuacaugaaa

SEQ ID NO: 534978 - RNA, 19 nt, Homo sapiens
  misc_RNA (1)...(19): siRNA sense strand
aaaccaagcccucaucaca

SEQ ID NO: 534979 - RNA, 19 nt, Homo sapiens
  misc_RNA (1)...(19): siRNA sense strand
gaauggaggcaaaguugug

SEQ ID NO: 534980 - RNA, 19 nt, Homo sapiens
  misc_RNA (1)...(19): siRNA sense strand
acaagggcguucaaggaaa

SEQ ID NO: 534981 - RNA, 19 nt, Homo sapiens
  misc_RNA (1)...(19): siRNA sense strand
caugaauggugaaggcuau

SEQ ID NO: 534982 - RNA, 19 nt, Homo sapiens
  misc_RNA (1)...(19): siRNA sense strand
aaccaucgcuacaugaaau

SEQ ID NO: 534983 - RNA, 19 nt, Homo sapiens
  misc_RNA (1)...(19): siRNA sense strand
agagaaccaucgcuacaug

SEQ ID NO: 534984 - RNA, 19 nt, Homo sapiens
  misc_RNA (1)...(19): siRNA sense strand
ugaaggcuaucucuacagu

SEQ ID NO: 534985 - RNA, 19 nt, Homo sapiens
  misc_RNA (1)...(19): siRNA sense strand
cuauugaaguguguaugua

SEQ ID NO: 534986 - RNA, 19 nt, Homo sapiens
  misc_RNA (1)...(19): siRNA sense strand
gaaaccuauugaagugugu

SEQ ID NO: 534987 - RNA, 19 nt, Homo sapiens
  misc_RNA (1)...(19): siRNA sense strand
acuacuaugugaucuauuc

SEQ ID NO: 534988 - RNA, 19 nt, Homo sapiens
  misc_RNA (1)...(19): siRNA sense strand
accaagcccucaucacauu

SEQ ID NO: 534989 - RNA, 19 nt, Homo sapiens
  misc_RNA (1)...(19): siRNA sense strand
aaggcuaucucuacaguuc

SEQ ID NO: 534990 - RNA, 19 nt, Homo sapiens
  misc_RNA (1)...(19): siRNA sense strand
gagaaccaucgcuacauga

SEQ ID NO: 534991 - RNA, 19 nt, Homo sapiens
  misc_RNA (1)...(19): siRNA sense strand
ucucuacaguucagauguu

SEQ ID NO: 534992 - RNA, 19 nt, Homo sapiens
  misc_RNA (1)...(19): siRNA sense strand
gcucaaagggauugugaca

SEQ ID NO: 534993 - RNA, 19 nt, Homo sapiens
  misc_RNA (1)...(19): siRNA sense strand
guaccgaaaccuauugaag

SEQ ID NO: 534994 - RNA, 19 nt, Homo sapiens
  misc_RNA (1)...(19): siRNA sense strand
caagggcguucaaggaaaa

SEQ ID NO: 534995 - RNA, 19 nt, Homo sapiens
  misc_RNA (1)...(19): siRNA sense strand
ggaacaccaaccaugaaug

SEQ ID NO: 534996 - RNA, 19 nt, Homo sapiens
  misc_RNA (1)...(19): siRNA sense strand
cagaugcacccagauggua

SEQ ID NO: 534997 - RNA, 19 nt, Homo sapiens
  misc_RNA (1)...(19): siRNA sense strand
acuaugugaucuauucuuc

SEQ ID NO: 534998 - RNA, 19 nt, Homo sapiens
  misc_RNA (1)...(19): siRNA sense strand
uaugugaucuauucuucca

SEQ ID NO: 534999 - RNA, 19 nt, Homo sapiens
  misc_RNA (1)...(19): siRNA sense strand
gcagaugcacccagauggu

SEQ ID NO: 535000 - RNA, 19 nt, Homo sapiens
  misc_RNA (1)...(19): siRNA sense strand
accgaaaccuauugaagug

SEQ ID NO: 535001 - RNA, 19 nt, Homo sapiens
  misc_RNA (1)...(19): siRNA sense strand
aggcaaaguugugaaucaa

SEQ ID NO: 535002 - RNA, 19 nt, Homo sapiens
  misc_RNA (1)...(19): siRNA sense strand
cagcucaaagggauuguga

SEQ ID NO: 535003 - RNA, 19 nt, Homo sapiens
  misc_RNA (1)...(19): siRNA sense strand
cuacaugaaauuggagaaa

SEQ ID NO: 535004 - RNA, 19 nt, Homo sapiens
  misc_RNA (1)...(19): siRNA sense strand
uaccgaaaccuauugaagu

SEQ ID NO: 535005 - RNA, 19 nt, Homo sapiens
  misc_RNA (1)...(19): siRNA sense strand
gcgacuacacucucuucaa

SEQ ID NO: 535006 - RNA, 19 nt, Homo sapiens
  misc_RNA (1)...(19): siRNA sense strand
acuacacucucuucaaucu

SEQ ID NO: 535007 - RNA, 19 nt, Homo sapiens
  misc_RNA (1)...(19): siRNA sense strand
gggacucaauaaagaaggu

SEQ ID NO: 535008 - RNA, 19 nt, Homo sapiens
  misc_RNA (1)...(19): siRNA sense strand
guaccgccagcaagaauca

SEQ ID NO: 535009 - RNA, 19 nt, Homo sapiens
  misc_RNA (1)...(19): siRNA sense strand
aacaagggcguucaaggaa

SEQ ID NO: 535010 - RNA, 19 nt, Homo sapiens
  misc_RNA (1)...(19): siRNA sense strand
gaaggcuaucucuacaguu

SEQ ID NO: 535011 - RNA, 19 nt, Homo sapiens
  misc_RNA (1)...(19): siRNA sense strand
caugaauggaggcaaaguu

SEQ ID NO: 535012 - RNA, 19 nt, Homo sapiens
  misc_RNA (1)...(19): siRNA sense strand
gggaacagagugaagaaaa

SEQ ID NO: 535013 - RNA, 19 nt, Homo sapiens
  misc_RNA (1)...(19): siRNA sense strand
ggaacagagugaagaaaac

SEQ ID NO: 535014 - RNA, 19 nt, Homo sapiens
  misc_RNA (1)...(19): siRNA sense strand
gccucuauguggccaugaa

SEQ ID NO: 535015 - RNA, 19 nt, Homo sapiens
  misc_RNA (1)...(19): siRNA sense strand
ucuggaacaccaaccauga

SEQ ID NO: 535016 - RNA, 19 nt, Homo sapiens
  misc_RNA (1)...(19): siRNA sense strand
ccaagcccucaucacauuu

SEQ ID NO: 535017 - RNA, 19 nt, Homo sapiens
  misc_RNA (1)...(19): siRNA sense strand
gaugggaccaaggacgaaa

SEQ ID NO: 535018 - RNA, 19 nt, Homo sapiens
  misc_RNA (1)...(19): siRNA sense strand
caaaguugugaaucaagau

SEQ ID NO: 535019 - RNA, 19 nt, Homo sapiens
  misc_RNA (1)...(19): siRNA sense strand
agaaccaucgcuacaugaa

SEQ ID NO: 535020 - RNA, 19 nt, Homo sapiens
  misc_RNA (1)...(19): siRNA sense strand
acagagaaccaucgcuaca

SEQ ID NO: 535021 - RNA, 19 nt, Homo sapiens
  misc_RNA (1)...(19): siRNA sense strand
ccuauugaaguguguaugu

SEQ ID NO: 535022 - RNA, 19 nt, Homo sapiens
  misc_RNA (1)...(19): siRNA sense strand
uguaguggccauccaagga

SEQ ID NO: 535023 - RNA, 19 nt, Homo sapiens
  misc_RNA (1)...(19): siRNA sense strand
gcaaaguugugaaucaaga

SEQ ID NO: 535024 - RNA, 19 nt, Homo sapiens
  misc_RNA (1)...(19): siRNA sense strand
caaggaaucuguguuugaa

SEQ ID NO: 535025 - RNA, 19 nt, Homo sapiens
  misc_RNA (1)...(19): siRNA sense strand
cgacuacacucucuucaau

SEQ ID NO: 535026 - RNA, 19 nt, Homo sapiens
  misc_RNA (1)...(19): siRNA sense strand
gaggcaaaguugugaauca

SEQ ID NO: 535027 - RNA, 19 nt, Homo sapiens
  misc_RNA (1)...(19): siRNA sense strand
uacacucucuucaaucuaa

SEQ ID NO: 535028 - RNA, 19 nt, Homo sapiens
  misc_RNA (1)...(19): siRNA sense strand
aaacaagggcguucaagga

SEQ ID NO: 535029 - RNA, 19 nt, Homo sapiens
  misc_RNA (1)...(19): siRNA sense strand
ggugaaggcuaucucuaca

SEQ ID NO: 535030 - RNA, 19 nt, Homo sapiens
  misc_RNA (1)...(19): siRNA sense strand
gaaccaucgcuacaugaaa

SEQ ID NO: 535031 - RNA, 19 nt, Homo sapiens
  misc_RNA (1)...(19): siRNA sense strand
aaaccaagcccucaucaca

SEQ ID NO: 535032 - RNA, 19 nt, Homo sapiens
  misc_RNA (1)...(19): siRNA sense strand
gaauggaggcaaaguugug

SEQ ID NO: 535033 - RNA, 19 nt, Homo sapiens
  misc_RNA (1)...(19): siRNA sense strand
acaagggcguucaaggaaa

SEQ ID NO: 535034 - RNA, 19 nt, Homo sapiens
  misc_RNA (1)...(19): siRNA sense strand
caugaauggugaaggcuau

SEQ ID NO: 535035 - RNA, 19 nt, Homo sapiens
  misc_RNA (1)...(19): siRNA sense strand
aaccaucgcuacaugaaau

SEQ ID NO: 535036 - RNA, 19 nt, Homo sapiens
  misc_RNA (1)...(19): siRNA sense strand
agagaaccaucgcuacaug

SEQ ID NO: 535037 - RNA, 19 nt, Homo sapiens
  misc_RNA (1)...(19): siRNA sense strand
ugaaggcuaucucuacagu

SEQ ID NO: 535038 - RNA, 19 nt, Homo sapiens
  misc_RNA (1)...(19): siRNA sense strand
cuauugaaguguguaugua

SEQ ID NO: 535039 - RNA, 19 nt, Homo sapiens
  misc_RNA (1)...(19): siRNA sense strand
gaaaccuauugaagugugu

SEQ ID NO: 535040 - RNA, 19 nt, Homo sapiens
  misc_RNA (1)...(19): siRNA sense strand
acuacuaugugaucuauuc

SEQ ID NO: 535041 - RNA, 19 nt, Homo sapiens
  misc_RNA (1)...(19): siRNA sense strand
accaagcccucaucacauu

SEQ ID NO: 535042 - RNA, 19 nt, Homo sapiens
  misc_RNA (1)...(19): siRNA sense strand
aaggcuaucucuacaguuc

SEQ ID NO: 535043 - RNA, 19 nt, Homo sapiens
  misc_RNA (1)...(19): siRNA sense strand
gagaaccaucgcuacauga

SEQ ID NO: 535044 - RNA, 19 nt, Homo sapiens
  misc_RNA (1)...(19): siRNA sense strand
ucucuacaguucagauguu

SEQ ID NO: 535045 - RNA, 19 nt, Homo sapiens
  misc_RNA (1)...(19): siRNA sense strand
gcucaaagggauugugaca

SEQ ID NO: 535046 - RNA, 19 nt, Homo sapiens
  misc_RNA (1)...(19): siRNA sense strand
guaccgaaaccuauugaag

SEQ ID NO: 535047 - RNA, 19 nt, Homo sapiens
  misc_RNA (1)...(19): siRNA sense strand
caagggcguucaaggaaaa

SEQ ID NO: 535048 - RNA, 19 nt, Homo sapiens
  misc_RNA (1)...(19): siRNA sense strand
ggaacaccaaccaugaaug

SEQ ID NO: 535049 - RNA, 19 nt, Homo sapiens
  misc_RNA (1)...(19): siRNA sense strand
cagaugcacccagauggua

SEQ ID NO: 535050 - RNA, 19 nt, Homo sapiens
  misc_RNA (1)...(19): siRNA sense strand
acuaugugaucuauucuuc

SEQ ID NO: 535051 - RNA, 19 nt, Homo sapiens
  misc_RNA (1)...(19): siRNA sense strand
uaugugaucuauucuucca

SEQ ID NO: 535052 - RNA, 19 nt, Homo sapiens
  misc_RNA (1)...(19): siRNA sense strand
gcagaugcacccagauggu

SEQ ID NO: 535053 - RNA, 19 nt, Homo sapiens
  misc_RNA (1)...(19): siRNA sense strand
accgaaaccuauugaagug

SEQ ID NO: 535054 - RNA, 19 nt, Homo sapiens
  misc_RNA (1)...(19): siRNA sense strand
aggcaaaguugugaaucaa

SEQ ID NO: 535055 - RNA, 19 nt, Homo sapiens
  misc_RNA (1)...(19): siRNA sense strand
cagcucaaagggauuguga

SEQ ID NO: 535056 - RNA, 19 nt, Homo sapiens
  misc_RNA (1)...(19): siRNA sense strand
cuacaugaaauuggagaaa

SEQ ID NO: 535057 - RNA, 19 nt, Homo sapiens
  misc_RNA (1)...(19): siRNA sense strand
uaccgaaaccuauugaagu

SEQ ID NO: 535058 - RNA, 19 nt, Homo sapiens
  misc_RNA (1)...(19): siRNA sense strand
gcgacuacacucucuucaa

SEQ ID NO: 535059 - RNA, 19 nt, Homo sapiens
  misc_RNA (1)...(19): siRNA sense strand
acuacacucucuucaaucu

SEQ ID NO: 535060 - RNA, 19 nt, Homo sapiens
  misc_RNA (1)...(19): siRNA sense strand
gggacucaauaaagaaggu

SEQ ID NO: 535061 - RNA, 19 nt, Homo sapiens
  misc_RNA (1)...(19): siRNA sense strand
guaccgccagcaagaauca

SEQ ID NO: 535062 - RNA, 19 nt, Homo sapiens
  misc_RNA (1)...(19): siRNA sense strand
aacaagggcguucaaggaa

SEQ ID NO: 535063 - RNA, 19 nt, Homo sapiens
  misc_RNA (1)...(19): siRNA sense strand
gaaggcuaucucuacaguu

SEQ ID NO: 535064 - RNA, 19 nt, Homo sapiens
  misc_RNA (1)...(19): siRNA sense strand
caugaauggaggcaaaguu

SEQ ID NO: 535065 - RNA, 19 nt, Homo sapiens
  misc_RNA (1)...(19): siRNA sense strand
gggaacagagugaagaaaa

SEQ ID NO: 535066 - RNA, 19 nt, Homo sapiens
  misc_RNA (1)...(19): siRNA sense strand
ggaacagagugaagaaaac

SEQ ID NO: 535067 - RNA, 19 nt, Homo sapiens
  misc_RNA (1)...(19): siRNA sense strand
gccucuauguggccaugaa

SEQ ID NO: 535068 - RNA, 19 nt, Homo sapiens
  misc_RNA (1)...(19): siRNA sense strand
ucuggaacaccaaccauga

SEQ ID NO: 535069 - RNA, 19 nt, Homo sapiens
  misc_RNA (1)...(19): siRNA sense strand
ccaagcccucaucacauuu

SEQ ID NO: 535070 - RNA, 19 nt, Homo sapiens
  misc_RNA (1)...(19): siRNA sense strand
gaugggaccaaggacgaaa

SEQ ID NO: 535071 - RNA, 19 nt, Homo sapiens
  misc_RNA (1)...(19): siRNA sense strand
caaaguugugaaucaagau

SEQ ID NO: 535072 - RNA, 19 nt, Homo sapiens
  misc_RNA (1)...(19): siRNA sense strand
agaaccaucgcuacaugaa

SEQ ID NO: 535073 - RNA, 19 nt, Homo sapiens
  misc_RNA (1)...(19): siRNA sense strand
acagagaaccaucgcuaca

SEQ ID NO: 535074 - RNA, 19 nt, Homo sapiens
  misc_RNA (1)...(19): siRNA sense strand
ccuauugaaguguguaugu

SEQ ID NO: 535075 - RNA, 19 nt, Homo sapiens
  misc_RNA (1)...(19): siRNA sense strand
uguaguggccauccaagga

SEQ ID NO: 535076 - RNA, 19 nt, Homo sapiens
  misc_RNA (1)...(19): siRNA sense strand
ggucuucaguuuccaguug

SEQ ID NO: 535077 - RNA, 19 nt, Homo sapiens
  misc_RNA (1)...(19): siRNA sense strand
caacauccaggccguauug

SEQ ID NO: 535078 - RNA, 19 nt, Homo sapiens
  misc_RNA (1)...(19): siRNA sense strand
agacggagagccaccauaa

SEQ ID NO: 535079 - RNA, 19 nt, Homo sapiens
  misc_RNA (1)...(19): siRNA sense strand
ccguauugcugccuaagaa

SEQ ID NO: 535080 - RNA, 19 nt, Homo sapiens
  misc_RNA (1)...(19): siRNA sense strand
uaagaagacccgcaucauc

SEQ ID NO: 535081 - RNA, 19 nt, Homo sapiens
  misc_RNA (1)...(19): siRNA sense strand
gcaacgacgaggagcuaaa

SEQ ID NO: 535082 - RNA, 19 nt, Homo sapiens
  misc_RNA (1)...(19): siRNA sense strand
caacgacgaggagcuaaau

SEQ ID NO: 535083 - RNA, 19 nt, Homo sapiens
  misc_RNA (1)...(19): siRNA sense strand
cggcaaagcucgggcaaaa

SEQ ID NO: 535084 - RNA, 19 nt, Homo sapiens
  misc_RNA (1)...(19): siRNA sense strand
ucugacggccgagaucuua

SEQ ID NO: 535085 - RNA, 19 nt, Homo sapiens
  misc_RNA (1)...(19): siRNA sense strand
acgacgaggagcuaaauaa

SEQ ID NO: 535086 - RNA, 19 nt, Homo sapiens
  misc_RNA (1)...(19): siRNA sense strand
cgacgaggagcuaaauaag

SEQ ID NO: 535087 - RNA, 19 nt, Homo sapiens
  misc_RNA (1)...(19): siRNA sense strand
guauugcugccuaagaaga

SEQ ID NO: 535088 - RNA, 19 nt, Homo sapiens
  misc_RNA (1)...(19): siRNA sense strand
aauaagaagacccgcauca

SEQ ID NO: 535089 - RNA, 19 nt, Homo sapiens
  misc_RNA (1)...(19): siRNA sense strand
gcgguguccugcccaacau

SEQ ID NO: 535090 - RNA, 19 nt, Homo sapiens
  misc_RNA (1)...(19): siRNA sense strand
ggaaagcaaggcggcaaag

SEQ ID NO: 535091 - RNA, 19 nt, Homo sapiens
  misc_RNA (1)...(19): siRNA sense strand
uaaacaaguugcuggguaa

SEQ ID NO: 535092 - RNA, 19 nt, Homo sapiens
  misc_RNA (1)...(19): siRNA sense strand
acgaggagcuaaacaaguu

SEQ ID NO: 535093 - RNA, 19 nt, Homo sapiens
  misc_RNA (1)...(19): siRNA sense strand
caagaagacccgcaucauc

SEQ ID NO: 535094 - RNA, 19 nt, Homo sapiens
  misc_RNA (1)...(19): siRNA sense strand
gcaacgacgaggagcuaaa

SEQ ID NO: 535095 - RNA, 19 nt, Homo sapiens
  misc_RNA (1)...(19): siRNA sense strand
ggaaaggcccgagcuaagg

SEQ ID NO: 535096 - RNA, 19 nt, Homo sapiens
  misc_RNA (1)...(19): siRNA sense strand
gcggaaaggcccgagcuaa

SEQ ID NO: 535097 - RNA, 19 nt, Homo sapiens
  misc_RNA (1)...(19): siRNA sense strand
acaaguugcuggguaaagu

SEQ ID NO: 535098 - RNA, 19 nt, Homo sapiens
  misc_RNA (1)...(19): siRNA sense strand
caacauccaggcuguacug

SEQ ID NO: 535099 - RNA, 19 nt, Homo sapiens
  misc_RNA (1)...(19): siRNA sense strand
caaggccaagggcaaguaa

SEQ ID NO: 535100 - RNA, 19 nt, Homo sapiens
  misc_RNA (1)...(19): siRNA sense strand
guaccugaccgccgagauc

SEQ ID NO: 535101 - RNA, 19 nt, Homo sapiens
  misc_RNA (1)...(19): siRNA sense strand
cgacgaggagcuaaacaag

SEQ ID NO: 535102 - RNA, 19 nt, Homo sapiens
  misc_RNA (1)...(19): siRNA sense strand
gacgaggagcuaaacaagu

SEQ ID NO: 535103 - RNA, 19 nt, Homo sapiens
  misc_RNA (1)...(19): siRNA sense strand
cggaaaggcccgagcuaag

SEQ ID NO: 535104 - RNA, 19 nt, Homo sapiens
  misc_RNA (1)...(19): siRNA sense strand
guacugcuccccaagaaga

SEQ ID NO: 535105 - RNA, 19 nt, Homo sapiens
  misc_RNA (1)...(19): siRNA sense strand
gcaaugggcuacuucaaau

SEQ ID NO: 535106 - RNA, 19 nt, Homo sapiens
  misc_RNA (1)...(19): siRNA sense strand
ucacagaccuuucacaaau

SEQ ID NO: 535107 - RNA, 19 nt, Homo sapiens
  misc_RNA (1)...(19): siRNA sense strand
ggauggauauggugaguuu

SEQ ID NO: 535108 - RNA, 19 nt, Homo sapiens
  misc_RNA (1)...(19): siRNA sense strand
gacgucagcuucuucauuu

SEQ ID NO: 535109 - RNA, 19 nt, Homo sapiens
  misc_RNA (1)...(19): siRNA sense strand
caaacuggauuauaacuug

SEQ ID NO: 535110 - RNA, 19 nt, Homo sapiens
  misc_RNA (1)...(19): siRNA sense strand
gaggaaaucagaaagauaa

SEQ ID NO: 535111 - RNA, 19 nt, Homo sapiens
  misc_RNA (1)...(19): siRNA sense strand
gaagauuucucagcucauu

SEQ ID NO: 535112 - RNA, 19 nt, Homo sapiens
  misc_RNA (1)...(19): siRNA sense strand
caugagaaauguccaguuu

SEQ ID NO: 535113 - RNA, 19 nt, Homo sapiens
  misc_RNA (1)...(19): siRNA sense strand
gaaaggaacaagugucauu

SEQ ID NO: 535114 - RNA, 19 nt, Homo sapiens
  misc_RNA (1)...(19): siRNA sense strand
aaagaucgauugggaauuu

SEQ ID NO: 535115 - RNA, 19 nt, Homo sapiens
  misc_RNA (1)...(19): siRNA sense strand
uaaaggaaguggaacaaga

SEQ ID NO: 535116 - RNA, 19 nt, Homo sapiens
  misc_RNA (1)...(19): siRNA sense strand
ggauauaacaguccacuuu

SEQ ID NO: 535117 - RNA, 19 nt, Homo sapiens
  misc_RNA (1)...(19): siRNA sense strand
ucagaaagccucaaugaaa

SEQ ID NO: 535118 - RNA, 19 nt, Homo sapiens
  misc_RNA (1)...(19): siRNA sense strand
aaagauaacuggcgucugu

SEQ ID NO: 535119 - RNA, 19 nt, Homo sapiens
  misc_RNA (1)...(19): siRNA sense strand
gaaauuaacagcaggaauc

SEQ ID NO: 535120 - RNA, 19 nt, Homo sapiens
  misc_RNA (1)...(19): siRNA sense strand
gagaugagcgccauuauuc

SEQ ID NO: 535121 - RNA, 19 nt, Homo sapiens
  misc_RNA (1)...(19): siRNA sense strand
gaacaaguggagaugauaa

SEQ ID NO: 535122 - RNA, 19 nt, Homo sapiens
  misc_RNA (1)...(19): siRNA sense strand
gaacaaauaacauccuuca

SEQ ID NO: 535123 - RNA, 19 nt, Homo sapiens
  misc_RNA (1)...(19): siRNA sense strand
agagagagcuuauuggaau

SEQ ID NO: 535124 - RNA, 19 nt, Homo sapiens
  misc_RNA (1)...(19): siRNA sense strand
gaucaucaauaacacagaa

SEQ ID NO: 535125 - RNA, 19 nt, Homo sapiens
  misc_RNA (1)...(19): siRNA sense strand
ucagaaauguuaagaagga

SEQ ID NO: 535126 - RNA, 19 nt, Homo sapiens
  misc_RNA (1)...(19): siRNA sense strand
gaagacauuaccuuucaua

SEQ ID NO: 535127 - RNA, 19 nt, Homo sapiens
  misc_RNA (1)...(19): siRNA sense strand
gacauuaccuuucauaacu

SEQ ID NO: 535128 - RNA, 19 nt, Homo sapiens
  misc_RNA (1)...(19): siRNA sense strand
gcuauuggcauuauacuuu

SEQ ID NO: 535129 - RNA, 19 nt, Homo sapiens
  misc_RNA (1)...(19): siRNA sense strand
gcagugaagcauaacuuua

SEQ ID NO: 535130 - RNA, 19 nt, Homo sapiens
  misc_RNA (1)...(19): siRNA sense strand
uagaagcagugaagcauaa

SEQ ID NO: 535131 - RNA, 19 nt, Homo sapiens
  misc_RNA (1)...(19): siRNA sense strand
gaugagaaaccuguuauaa

SEQ ID NO: 535132 - RNA, 19 nt, Homo sapiens
  misc_RNA (1)...(19): siRNA sense strand
cagaagaacccauagauga

SEQ ID NO: 535133 - RNA, 19 nt, Homo sapiens
  misc_RNA (1)...(19): siRNA sense strand
cagaaagccucaaugaaau

SEQ ID NO: 535134 - RNA, 19 nt, Homo sapiens
  misc_RNA (1)...(19): siRNA sense strand
ugaaauauguaacccagaa

SEQ ID NO: 535135 - RNA, 19 nt, Homo sapiens
  misc_RNA (1)...(19): siRNA sense strand
gaucaguuaccaucuauaa

SEQ ID NO: 535136 - RNA, 19 nt, Homo sapiens
  misc_RNA (1)...(19): siRNA sense strand
uggcaaaucuucacugcua

SEQ ID NO: 535137 - RNA, 19 nt, Homo sapiens
  misc_RNA (1)...(19): siRNA sense strand
ggaaggguagauaaauuua

SEQ ID NO: 535138 - RNA, 19 nt, Homo sapiens
  misc_RNA (1)...(19): siRNA sense strand
uaagaugcauggaacuaaa

SEQ ID NO: 535139 - RNA, 19 nt, Homo sapiens
  misc_RNA (1)...(19): siRNA sense strand
ucaagcccauuuccucuua

SEQ ID NO: 535140 - RNA, 19 nt, Homo sapiens
  misc_RNA (1)...(19): siRNA sense strand
ucagugaucuggauaagug

SEQ ID NO: 535141 - RNA, 19 nt, Homo sapiens
  misc_RNA (1)...(19): siRNA sense strand
ggaaacuccucccucauuc

SEQ ID NO: 535142 - RNA, 19 nt, Homo sapiens
  misc_RNA (1)...(19): siRNA sense strand
gaaggaaacgucucaagug

SEQ ID NO: 535143 - RNA, 19 nt, Homo sapiens
  misc_RNA (1)...(19): siRNA sense strand
uaugcuggcuucaucuuua

SEQ ID NO: 535144 - RNA, 19 nt, Homo sapiens
  misc_RNA (1)...(19): siRNA sense strand
gaacaggaaguaggaaauu

SEQ ID NO: 535145 - RNA, 19 nt, Homo sapiens
  misc_RNA (1)...(19): siRNA sense strand
gaaaauagcagcaagaaau

SEQ ID NO: 535146 - RNA, 19 nt, Homo sapiens
  misc_RNA (1)...(19): siRNA sense strand
uaacauccuucauuacuca

SEQ ID NO: 535147 - RNA, 19 nt, Homo sapiens
  misc_RNA (1)...(19): siRNA sense strand
gaacaagagguacaacgaa

SEQ ID NO: 535148 - RNA, 19 nt, Homo sapiens
  misc_RNA (1)...(19): siRNA sense strand
ggacuaaugcuaagguuau

SEQ ID NO: 535149 - RNA, 19 nt, Homo sapiens
  misc_RNA (1)...(19): siRNA sense strand
ggaaguggaacaagaggua

SEQ ID NO: 535150 - RNA, 19 nt, Homo sapiens
  misc_RNA (1)...(19): siRNA sense strand
gaauacagccuuucucagu

SEQ ID NO: 535151 - RNA, 19 nt, Homo sapiens
  misc_RNA (1)...(19): siRNA sense strand
acagaccuuucacaaauua

SEQ ID NO: 535152 - RNA, 19 nt, Homo sapiens
  misc_RNA (1)...(19): siRNA sense strand
ccaagagauugcacuguuu

SEQ ID NO: 535153 - RNA, 19 nt, Homo sapiens
  misc_RNA (1)...(19): siRNA sense strand
ggucuuggauaucaccuaa

SEQ ID NO: 535154 - RNA, 19 nt, Homo sapiens
  misc_RNA (1)...(19): siRNA sense strand
ugagugugcuguuaaagaa

SEQ ID NO: 535155 - RNA, 19 nt, Homo sapiens
  misc_RNA (1)...(19): siRNA sense strand
ucugaccacuucaaucuua

SEQ ID NO: 535156 - RNA, 19 nt, Homo sapiens
  misc_RNA (1)...(19): siRNA sense strand
gguauugguuccuucauau

SEQ ID NO: 535157 - RNA, 19 nt, Homo sapiens
  misc_RNA (1)...(19): siRNA sense strand
aaacacacauggacgaaau

SEQ ID NO: 535158 - RNA, 19 nt, Homo sapiens
  misc_RNA (1)...(19): siRNA sense strand
ggaaacgucucaagugacu

SEQ ID NO: 535159 - RNA, 19 nt, Homo sapiens
  misc_RNA (1)...(19): siRNA sense strand
cagcaggaaucacgagaaa

SEQ ID NO: 535160 - RNA, 19 nt, Homo sapiens
  misc_RNA (1)...(19): siRNA sense strand
ccacugcucugaccacuuc

SEQ ID NO: 535161 - RNA, 19 nt, Homo sapiens
  misc_RNA (1)...(19): siRNA sense strand
gaacuaaaauguggaaaga

SEQ ID NO: 535162 - RNA, 19 nt, Homo sapiens
  misc_RNA (1)...(19): siRNA sense strand
aaacagaaaugguacugau

SEQ ID NO: 535163 - RNA, 19 nt, Homo sapiens
  misc_RNA (1)...(19): siRNA sense strand
aagauaaccuugcuaaaca

SEQ ID NO: 535164 - RNA, 19 nt, Homo sapiens
  misc_RNA (1)...(19): siRNA sense strand
cauguacauugaccaaaua

SEQ ID NO: 535165 - RNA, 19 nt, Homo sapiens
  misc_RNA (1)...(19): siRNA sense strand
gaacaagauuucgaacaag

SEQ ID NO: 535166 - RNA, 19 nt, Homo sapiens
  misc_RNA (1)...(19): siRNA sense strand
guacugauggccucucaua

SEQ ID NO: 535167 - RNA, 19 nt, Homo sapiens
  misc_RNA (1)...(19): siRNA sense strand
cuuaagaaauggaggauga

SEQ ID NO: 535168 - RNA, 19 nt, Homo sapiens
  misc_RNA (1)...(19): siRNA sense strand
gaaggacagucaacuaucg

SEQ ID NO: 535169 - RNA, 19 nt, Homo sapiens
  misc_RNA (1)...(19): siRNA sense strand
gggaaggguagauaaauuu

SEQ ID NO: 535170 - RNA, 19 nt, Homo sapiens
  misc_RNA (1)...(19): siRNA sense strand
ggacgucagcuucuucauu

SEQ ID NO: 535171 - RNA, 19 nt, Homo sapiens
  misc_RNA (1)...(19): siRNA sense strand
uauguagcauuucuccuua

SEQ ID NO: 535172 - RNA, 19 nt, Homo sapiens
  misc_RNA (1)...(19): siRNA sense strand
caugucaacucuaaaugaa

SEQ ID NO: 535173 - RNA, 19 nt, Homo sapiens
  misc_RNA (1)...(19): siRNA sense strand
ggaggaaaucagaaagaua

SEQ ID NO: 535174 - RNA, 19 nt, Homo sapiens
  misc_RNA (1)...(19): siRNA sense strand
ucaggagacucauauacaa

SEQ ID NO: 535175 - RNA, 19 nt, Homo sapiens
  misc_RNA (1)...(19): siRNA sense strand
gaaaagagagagcuuauug

SEQ ID NO: 535176 - RNA, 19 nt, Homo sapiens
  misc_RNA (1)...(19): siRNA sense strand
gcuaugggaaucaucuuua

SEQ ID NO: 535177 - RNA, 19 nt, Homo sapiens
  misc_RNA (1)...(19): siRNA sense strand
uggcaaggauuacauucua

SEQ ID NO: 535178 - RNA, 19 nt, Homo sapiens
  misc_RNA (1)...(19): siRNA sense strand
ggagaugagcgccauuauu

SEQ ID NO: 535179 - RNA, 19 nt, Homo sapiens
  misc_RNA (1)...(19): siRNA sense strand
agagguacaacgaauauua

SEQ ID NO: 535180 - RNA, 19 nt, Homo sapiens
  misc_RNA (1)...(19): siRNA sense strand
gaauguuccugugcagaaa

SEQ ID NO: 535181 - RNA, 19 nt, Homo sapiens
  misc_RNA (1)...(19): siRNA sense strand
ucauauaccuugcuuggau

SEQ ID NO: 535182 - RNA, 19 nt, Homo sapiens
  misc_RNA (1)...(19): siRNA sense strand
guuauugacccuauuauug

SEQ ID NO: 535183 - RNA, 19 nt, Homo sapiens
  misc_RNA (1)...(19): siRNA sense strand
uggaauggcuccucagaau

SEQ ID NO: 535184 - RNA, 19 nt, Homo sapiens
  misc_RNA (1)...(19): siRNA sense strand
gagaaaccuguuauaauug

SEQ ID NO: 535185 - RNA, 19 nt, Homo sapiens
  misc_RNA (1)...(19): siRNA sense strand
guagagaugcuaagccaaa

SEQ ID NO: 535186 - RNA, 19 nt, Homo sapiens
  misc_RNA (1)...(19): siRNA sense strand
gauaagagacucagaaagc

SEQ ID NO: 535187 - RNA, 19 nt, Homo sapiens
  misc_RNA (1)...(19): siRNA sense strand
aagcuguccucaccaauuu

SEQ ID NO: 535188 - RNA, 19 nt, Homo sapiens
  misc_RNA (1)...(19): siRNA sense strand
acuuuaaccuggaagaaua

SEQ ID NO: 535189 - RNA, 19 nt, Homo sapiens
  misc_RNA (1)...(19): siRNA sense strand
ugacuuugguccacacuga

SEQ ID NO: 535190 - RNA, 19 nt, Homo sapiens
  misc_RNA (1)...(19): siRNA sense strand
aaggaaacgucucaaguga

SEQ ID NO: 535191 - RNA, 19 nt, Homo sapiens
  misc_RNA (1)...(19): siRNA sense strand
ggauuacauucuagagcua

SEQ ID NO: 535192 - RNA, 19 nt, Homo sapiens
  misc_RNA (1)...(19): siRNA sense strand
ucucuugucuucuucauau

SEQ ID NO: 535193 - RNA, 19 nt, Homo sapiens
  misc_RNA (1)...(19): siRNA sense strand
gauggccucucauacaaug

SEQ ID NO: 535194 - RNA, 19 nt, Homo sapiens
  misc_RNA (1)...(19): siRNA sense strand
uaaaaucacugaagcauca

SEQ ID NO: 535195 - RNA, 19 nt, Homo sapiens
  misc_RNA (1)...(19): siRNA sense strand
ccacuggaaaggacaaaua

SEQ ID NO: 535196 - RNA, 19 nt, Homo sapiens
  misc_RNA (1)...(19): siRNA sense strand
gaaaagugaucauguccaa

SEQ ID NO: 535197 - RNA, 19 nt, Homo sapiens
  misc_RNA (1)...(19): siRNA sense strand
ggucucaucuacuugcuau

SEQ ID NO: 535198 - RNA, 19 nt, Homo sapiens
  misc_RNA (1)...(19): siRNA sense strand
uaauuuaacccagcagaua

SEQ ID NO: 535199 - RNA, 19 nt, Homo sapiens
  misc_RNA (1)...(19): siRNA sense strand
ucaagaaggugaaauuuug

SEQ ID NO: 535200 - RNA, 19 nt, Homo sapiens
  misc_RNA (1)...(19): siRNA sense strand
caacauauucgaauugagu

SEQ ID NO: 535201 - RNA, 19 nt, Homo sapiens
  misc_RNA (1)...(19): siRNA sense strand
cccagcagauaaugaauaa

SEQ ID NO: 535202 - RNA, 19 nt, Homo sapiens
  misc_RNA (1)...(19): siRNA sense strand
gcaggaaucacgagaaagu

SEQ ID NO: 535203 - RNA, 19 nt, Homo sapiens
  misc_RNA (1)...(19): siRNA sense strand
gaagguauucuuagagcuu

SEQ ID NO: 535204 - RNA, 19 nt, Homo sapiens
  misc_RNA (1)...(19): siRNA sense strand
cagugaagcauaacuuuaa

SEQ ID NO: 535205 - RNA, 19 nt, Homo sapiens
  misc_RNA (1)...(19): siRNA sense strand
ggauggauauggugaguuu

SEQ ID NO: 535206 - RNA, 19 nt, Homo sapiens
  misc_RNA (1)...(19): siRNA sense strand
caaacuggauuauaacuug

SEQ ID NO: 535207 - RNA, 19 nt, Homo sapiens
  misc_RNA (1)...(19): siRNA sense strand
gaggaaaucagaaagauaa

SEQ ID NO: 535208 - RNA, 19 nt, Homo sapiens
  misc_RNA (1)...(19): siRNA sense strand
gaagauuucucagcucauu

SEQ ID NO: 535209 - RNA, 19 nt, Homo sapiens
  misc_RNA (1)...(19): siRNA sense strand
caugagaaauguccaguuu

SEQ ID NO: 535210 - RNA, 19 nt, Homo sapiens
  misc_RNA (1)...(19): siRNA sense strand
gaaaggaacaagugucauu

SEQ ID NO: 535211 - RNA, 19 nt, Homo sapiens
  misc_RNA (1)...(19): siRNA sense strand
uaaaggaaguggaacaaga

SEQ ID NO: 535212 - RNA, 19 nt, Homo sapiens
  misc_RNA (1)...(19): siRNA sense strand
ggauauaacaguccacuuu

SEQ ID NO: 535213 - RNA, 19 nt, Homo sapiens
  misc_RNA (1)...(19): siRNA sense strand
aaagauaacuggcgucugu

SEQ ID NO: 535214 - RNA, 19 nt, Homo sapiens
  misc_RNA (1)...(19): siRNA sense strand
gagaugagcgccauuauuc

SEQ ID NO: 535215 - RNA, 19 nt, Homo sapiens
  misc_RNA (1)...(19): siRNA sense strand
agagagagcuuauuggaau

SEQ ID NO: 535216 - RNA, 19 nt, Homo sapiens
  misc_RNA (1)...(19): siRNA sense strand
ucagaaauguuaagaagga

SEQ ID NO: 535217 - RNA, 19 nt, Homo sapiens
  misc_RNA (1)...(19): siRNA sense strand
gaagacauuaccuuucaua

SEQ ID NO: 535218 - RNA, 19 nt, Homo sapiens
  misc_RNA (1)...(19): siRNA sense strand
gacauuaccuuucauaacu

SEQ ID NO: 535219 - RNA, 19 nt, Homo sapiens
  misc_RNA (1)...(19): siRNA sense strand
gcuauuggcauuauacuuu

SEQ ID NO: 535220 - RNA, 19 nt, Homo sapiens
  misc_RNA (1)...(19): siRNA sense strand
gaucaguuaccaucuauaa

SEQ ID NO: 535221 - RNA, 19 nt, Homo sapiens
  misc_RNA (1)...(19): siRNA sense strand
uggcaaaucuucacugcua

SEQ ID NO: 535222 - RNA, 19 nt, Homo sapiens
  misc_RNA (1)...(19): siRNA sense strand
ggaaggguagauaaauuua

SEQ ID NO: 535223 - RNA, 19 nt, Homo sapiens
  misc_RNA (1)...(19): siRNA sense strand
uaugcuggcuucaucuuua

SEQ ID NO: 535224 - RNA, 19 nt, Homo sapiens
  misc_RNA (1)...(19): siRNA sense strand
gaacaagagguacaacgaa

SEQ ID NO: 535225 - RNA, 19 nt, Homo sapiens
  misc_RNA (1)...(19): siRNA sense strand
ggacuaaugcuaagguuau

SEQ ID NO: 535226 - RNA, 19 nt, Homo sapiens
  misc_RNA (1)...(19): siRNA sense strand
ggaaguggaacaagaggua

SEQ ID NO: 535227 - RNA, 19 nt, Homo sapiens
  misc_RNA (1)...(19): siRNA sense strand
ugagugugcuguuaaagaa

SEQ ID NO: 535228 - RNA, 19 nt, Homo sapiens
  misc_RNA (1)...(19): siRNA sense strand
aaacacacauggacgaaau

SEQ ID NO: 535229 - RNA, 19 nt, Homo sapiens
  misc_RNA (1)...(19): siRNA sense strand
aagauaaccuugcuaaaca

SEQ ID NO: 535230 - RNA, 19 nt, Homo sapiens
  misc_RNA (1)...(19): siRNA sense strand
cauguacauugaccaaaua

SEQ ID NO: 535231 - RNA, 19 nt, Homo sapiens
  misc_RNA (1)...(19): siRNA sense strand
cuuaagaaauggaggauga

SEQ ID NO: 535232 - RNA, 19 nt, Homo sapiens
  misc_RNA (1)...(19): siRNA sense strand
gaaaagagagagcuuauug

SEQ ID NO: 535233 - RNA, 19 nt, Homo sapiens
  misc_RNA (1)...(19): siRNA sense strand
ggaggaaaucagaaagaua

SEQ ID NO: 535234 - RNA, 19 nt, Homo sapiens
  misc_RNA (1)...(19): siRNA sense strand
ucaggagacucauauacaa

SEQ ID NO: 535235 - RNA, 19 nt, Homo sapiens
  misc_RNA (1)...(19): siRNA sense strand
gggaaggguagauaaauuu

SEQ ID NO: 535236 - RNA, 19 nt, Homo sapiens
  misc_RNA (1)...(19): siRNA sense strand
gcuaugggaaucaucuuua

SEQ ID NO: 535237 - RNA, 19 nt, Homo sapiens
  misc_RNA (1)...(19): siRNA sense strand
ggagaugagcgccauuauu

SEQ ID NO: 535238 - RNA, 19 nt, Homo sapiens
  misc_RNA (1)...(19): siRNA sense strand
agagguacaacgaauauua

SEQ ID NO: 535239 - RNA, 19 nt, Homo sapiens
  misc_RNA (1)...(19): siRNA sense strand
uggaauggcuccucagaau

SEQ ID NO: 535240 - RNA, 19 nt, Homo sapiens
  misc_RNA (1)...(19): siRNA sense strand
aagcuguccucaccaauuu

SEQ ID NO: 535241 - RNA, 19 nt, Homo sapiens
  misc_RNA (1)...(19): siRNA sense strand
ggucucaucuacuugcuau

SEQ ID NO: 535242 - RNA, 19 nt, Homo sapiens
  misc_RNA (1)...(19): siRNA sense strand
uaauuuaacccagcagaua

SEQ ID NO: 535243 - RNA, 19 nt, Homo sapiens
  misc_RNA (1)...(19): siRNA sense strand
cccagcagauaaugaauaa

SEQ ID NO: 535244 - RNA, 19 nt, Homo sapiens
  misc_RNA (1)...(19): siRNA sense strand
gaaaucagaaagauaacug

SEQ ID NO: 535245 - RNA, 19 nt, Homo sapiens
  misc_RNA (1)...(19): siRNA sense strand
gcgccauuauucuccuuua

SEQ ID NO: 535246 - RNA, 19 nt, Homo sapiens
  misc_RNA (1)...(19): siRNA sense strand
accaguagcuccugaauuc

SEQ ID NO: 535247 - RNA, 19 nt, Homo sapiens
  misc_RNA (1)...(19): siRNA sense strand
ccaaaggacuaaugcuaag

SEQ ID NO: 535248 - RNA, 19 nt, Homo sapiens
  misc_RNA (1)...(19): siRNA sense strand
gauauaacaguccacuuug

SEQ ID NO: 535249 - RNA, 19 nt, Homo sapiens
  misc_RNA (1)...(19): siRNA sense strand
caagagguacaacgaauau

SEQ ID NO: 535250 - RNA, 19 nt, Homo sapiens
  misc_RNA (1)...(19): siRNA sense strand
ggauucaucuaaaggaagu

SEQ ID NO: 535251 - RNA, 19 nt, Homo sapiens
  misc_RNA (1)...(19): siRNA sense strand
cuuaauggauugucuguuc

SEQ ID NO: 535252 - RNA, 19 nt, Homo sapiens
  misc_RNA (1)...(19): siRNA sense strand
gaaaagaagccaucagaau

SEQ ID NO: 535253 - RNA, 19 nt, Homo sapiens
  misc_RNA (1)...(19): siRNA sense strand
gacgaaauacuucuggaaa

SEQ ID NO: 535254 - RNA, 19 nt, Homo sapiens
  misc_RNA (1)...(19): siRNA sense strand
caguggagcuggcaaaucu

SEQ ID NO: 535255 - RNA, 19 nt, Homo sapiens
  misc_RNA (1)...(19): siRNA sense strand
cuaagguuauugagaaaga

SEQ ID NO: 535256 - RNA, 19 nt, Homo sapiens
  misc_RNA (1)...(19): siRNA sense strand
uagaggauuuguggcuuua

SEQ ID NO: 535257 - RNA, 19 nt, Homo sapiens
  misc_RNA (1)...(19): siRNA sense strand
cuaugggaaucaucuuuaa

SEQ ID NO: 535258 - RNA, 19 nt, Homo sapiens
  misc_RNA (1)...(19): siRNA sense strand
ugggaaggguagauaaauu

SEQ ID NO: 535259 - RNA, 19 nt, Homo sapiens
  misc_RNA (1)...(19): siRNA sense strand
gaagccaucagaaucagaa

SEQ ID NO: 535260 - RNA, 19 nt, Homo sapiens
  misc_RNA (1)...(19): siRNA sense strand
ccugaugagugugcuguua

SEQ ID NO: 535261 - RNA, 19 nt, Homo sapiens
  misc_RNA (1)...(19): siRNA sense strand
gaggaguugaugucaguua

SEQ ID NO: 535262 - RNA, 19 nt, Homo sapiens
  misc_RNA (1)...(19): siRNA sense strand
ggacgaaauacuucuggaa

SEQ ID NO: 535263 - RNA, 19 nt, Homo sapiens
  misc_RNA (1)...(19): siRNA sense strand
gaauggcuccucagaaucu

SEQ ID NO: 535264 - RNA, 19 nt, Homo sapiens
  misc_RNA (1)...(19): siRNA sense strand
ggaacaagagguacaacga

SEQ ID NO: 535265 - RNA, 19 nt, Homo sapiens
  misc_RNA (1)...(19): siRNA sense strand
gcaaaucuucacugcuaaa

SEQ ID NO: 535266 - RNA, 19 nt, Homo sapiens
  misc_RNA (1)...(19): siRNA sense strand
gcuuaucuuugguagcuuu

SEQ ID NO: 535267 - RNA, 19 nt, Homo sapiens
  misc_RNA (1)...(19): siRNA sense strand
uuauauggcuuaucuuugg

SEQ ID NO: 535268 - RNA, 19 nt, Homo sapiens
  misc_RNA (1)...(19): siRNA sense strand
acacauggacgaaauacuu

SEQ ID NO: 535269 - RNA, 19 nt, Homo sapiens
  misc_RNA (1)...(19): siRNA sense strand
ccaacagaaggaucaguua

SEQ ID NO: 535270 - RNA, 19 nt, Homo sapiens
  misc_RNA (1)...(19): siRNA sense strand
gaauucaucaucuuguuuc

SEQ ID NO: 535271 - RNA, 19 nt, Homo sapiens
  misc_RNA (1)...(19): siRNA sense strand
ugucugggauucacuguau

SEQ ID NO: 535272 - RNA, 19 nt, Homo sapiens
  misc_RNA (1)...(19): siRNA sense strand
ucauguacauugaccaaau

SEQ ID NO: 535273 - RNA, 19 nt, Homo sapiens
  misc_RNA (1)...(19): siRNA sense strand
uaacccagcagauaaugaa

SEQ ID NO: 535274 - RNA, 19 nt, Homo sapiens
  misc_RNA (1)...(19): siRNA sense strand
gcugacauccuggcugaua

SEQ ID NO: 535275 - RNA, 19 nt, Homo sapiens
  misc_RNA (1)...(19): siRNA sense strand
gagguacaacgaauauuau

SEQ ID NO: 535276 - RNA, 19 nt, Homo sapiens
  misc_RNA (1)...(19): siRNA sense strand
ggaauggggccucucaaua

SEQ ID NO: 535277 - RNA, 19 nt, Homo sapiens
  misc_RNA (1)...(19): siRNA sense strand
gagagagcuuauuggaaug

SEQ ID NO: 535278 - RNA, 19 nt, Homo sapiens
  misc_RNA (1)...(19): siRNA sense strand
aaagaagccaucagaauca

SEQ ID NO: 535279 - RNA, 19 nt, Homo sapiens
  misc_RNA (1)...(19): siRNA sense strand
gggauucacuguauuuuau

SEQ ID NO: 535280 - RNA, 19 nt, Homo sapiens
  misc_RNA (1)...(19): siRNA sense strand
agaaagcuguccucaccaa

SEQ ID NO: 535281 - RNA, 19 nt, Homo sapiens
  misc_RNA (1)...(19): siRNA sense strand
guacauugaccaaauacug

SEQ ID NO: 535282 - RNA, 19 nt, Homo sapiens
  misc_RNA (1)...(19): siRNA sense strand
auacuggaauagaggauuu

SEQ ID NO: 535283 - RNA, 19 nt, Homo sapiens
  misc_RNA (1)...(19): siRNA sense strand
gaggauuuguggcuuuaca

SEQ ID NO: 535284 - RNA, 19 nt, Homo sapiens
  misc_RNA (1)...(19): siRNA sense strand
augcuaagguuauugagaa

SEQ ID NO: 535285 - RNA, 19 nt, Homo sapiens
  misc_RNA (1)...(19): siRNA sense strand
caacaccaaaggacuaaug

SEQ ID NO: 535286 - RNA, 19 nt, Homo sapiens
  misc_RNA (1)...(19): siRNA sense strand
aaagagagagcuuauugga

SEQ ID NO: 535287 - RNA, 19 nt, Homo sapiens
  misc_RNA (1)...(19): siRNA sense strand
ugaugagugugcuguuaaa

SEQ ID NO: 535288 - RNA, 19 nt, Homo sapiens
  misc_RNA (1)...(19): siRNA sense strand
gcuuugguguuccugauga

SEQ ID NO: 535289 - RNA, 19 nt, Homo sapiens
  misc_RNA (1)...(19): siRNA sense strand
ucuccaagauucagcauuc

SEQ ID NO: 535290 - RNA, 19 nt, Homo sapiens
  misc_RNA (1)...(19): siRNA sense strand
gcucauugcugggauggau

SEQ ID NO: 535291 - RNA, 19 nt, Homo sapiens
  misc_RNA (1)...(19): siRNA sense strand
aaggaucaguuaccaucua

SEQ ID NO: 535292 - RNA, 19 nt, Homo sapiens
  misc_RNA (1)...(19): siRNA sense strand
caccaaaggacuaaugcua

SEQ ID NO: 535293 - RNA, 19 nt, Homo sapiens
  misc_RNA (1)...(19): siRNA sense strand
gcuggcuucaucuuuauua

SEQ ID NO: 535294 - RNA, 19 nt, Homo sapiens
  misc_RNA (1)...(19): siRNA sense strand
ugaugggucuccaagauuc

SEQ ID NO: 535295 - RNA, 19 nt, Homo sapiens
  misc_RNA (1)...(19): siRNA sense strand
gaccaaauacuggaauaga

SEQ ID NO: 535296 - RNA, 19 nt, Homo sapiens
  misc_RNA (1)...(19): siRNA sense strand
aaugaugggucuccaagau

SEQ ID NO: 535297 - RNA, 19 nt, Homo sapiens
  misc_RNA (1)...(19): siRNA sense strand
ggcaaaucuucacugcuaa

SEQ ID NO: 535298 - RNA, 19 nt, Homo sapiens
  misc_RNA (1)...(19): siRNA sense strand
gaacaacuuccuucaucuc

SEQ ID NO: 535299 - RNA, 19 nt, Homo sapiens
  misc_RNA (1)...(19): siRNA sense strand
ccaguuccaugagaaaugu

SEQ ID NO: 535300 - RNA, 19 nt, Homo sapiens
  misc_RNA (1)...(19): siRNA sense strand
ucucugaaaugcaagacuu

SEQ ID NO: 535301 - RNA, 19 nt, Homo sapiens
  misc_RNA (1)...(19): siRNA sense strand
gccauuauucuccuuuauu

SEQ ID NO: 535302 - RNA, 19 nt, Homo sapiens
  misc_RNA (1)...(19): siRNA sense strand
gacuaaugcuaagguuauu

SEQ ID NO: 535303 - RNA, 19 nt, Homo sapiens
  misc_RNA (1)...(19): siRNA sense strand
acaagagguacaacgaaua

SEQ ID NO: 535304 - RNA, 19 nt, Homo sapiens
  misc_RNA (1)...(19): siRNA sense strand
gauaaccuugcuaaacauu

SEQ ID NO: 535305 - RNA, 19 nt, Homo sapiens
  misc_RNA (1)...(19): siRNA sense strand
gcauugugcuggaguuuga

SEQ ID NO: 535306 - RNA, 19 nt, Homo sapiens
  misc_RNA (1)...(19): siRNA sense strand
ccaugugggugaaaggaua

SEQ ID NO: 535307 - RNA, 19 nt, Homo sapiens
  misc_RNA (1)...(19): siRNA sense strand
gaagcuacgugcuccaucu

SEQ ID NO: 535308 - RNA, 19 nt, Homo sapiens
  misc_RNA (1)...(19): siRNA sense strand
gcuaagaggcuuucuagag

SEQ ID NO: 535309 - RNA, 19 nt, Homo sapiens
  misc_RNA (1)...(19): siRNA sense strand
ggaagaacaacgugagugu

SEQ ID NO: 535310 - RNA, 19 nt, Homo sapiens
  misc_RNA (1)...(19): siRNA sense strand
ggucccaccugcacaccua

SEQ ID NO: 535311 - RNA, 19 nt, Homo sapiens
  misc_RNA (1)...(19): siRNA sense strand
gagcggagagaacgcauug

SEQ ID NO: 535312 - RNA, 19 nt, Homo sapiens
  misc_RNA (1)...(19): siRNA sense strand
ccaaguacuuauccaccuu

SEQ ID NO: 535313 - RNA, 19 nt, Homo sapiens
  misc_RNA (1)...(19): siRNA sense strand
guacuuauccaccuucucu

SEQ ID NO: 535314 - RNA, 19 nt, Homo sapiens
  misc_RNA (1)...(19): siRNA sense strand
ugaccaagguggccgagau

SEQ ID NO: 535315 - RNA, 19 nt, Homo sapiens
  misc_RNA (1)...(19): siRNA sense strand
uugagaagaugaaccucua

SEQ ID NO: 535316 - RNA, 19 nt, Homo sapiens
  misc_RNA (1)...(19): siRNA sense strand
ccaucugucuggauuacuu

SEQ ID NO: 535317 - RNA, 19 nt, Homo sapiens
  misc_RNA (1)...(19): siRNA sense strand
gaggugggcaugaacauca

SEQ ID NO: 535318 - RNA, 19 nt, Homo sapiens
  misc_RNA (1)...(19): siRNA sense strand
ccaaccggcugcugaccaa

SEQ ID NO: 535319 - RNA, 19 nt, Homo sapiens
  misc_RNA (1)...(19): siRNA sense strand
ggacagauugaagugcuaa

SEQ ID NO: 535320 - RNA, 19 nt, Homo sapiens
  misc_RNA (1)...(19): siRNA sense strand
ggacaacgugagccggaaa

SEQ ID NO: 535321 - RNA, 19 nt, Homo sapiens
  misc_RNA (1)...(19): siRNA sense strand
gaaccucuaccugguggaa

SEQ ID NO: 535322 - RNA, 19 nt, Homo sapiens
  misc_RNA (1)...(19): siRNA sense strand
cuguggaacucgccagaaa

SEQ ID NO: 535323 - RNA, 19 nt, Homo sapiens
  misc_RNA (1)...(19): siRNA sense strand
cagcaaggaccgauuugug

SEQ ID NO: 535324 - RNA, 19 nt, Homo sapiens
  misc_RNA (1)...(19): siRNA sense strand
gcggagagaacgcauugug

SEQ ID NO: 535325 - RNA, 19 nt, Homo sapiens
  misc_RNA (1)...(19): siRNA sense strand
gugcuaagaggcuuucuag

SEQ ID NO: 535326 - RNA, 19 nt, Homo sapiens
  misc_RNA (1)...(19): siRNA sense strand
uggaggaggacauggagua

SEQ ID NO: 535327 - RNA, 19 nt, Homo sapiens
  misc_RNA (1)...(19): siRNA sense strand
gugcuggaguuugagaaga

SEQ ID NO: 535328 - RNA, 19 nt, Homo sapiens
  misc_RNA (1)...(19): siRNA sense strand
gaggcuuucuagaggaugu

SEQ ID NO: 535329 - RNA, 19 nt, Homo sapiens
  misc_RNA (1)...(19): siRNA sense strand
cagaguucccggacagauu

SEQ ID NO: 535330 - RNA, 19 nt, Homo sapiens
  misc_RNA (1)...(19): siRNA sense strand
gaggauguggugccugaug

SEQ ID NO: 535331 - RNA, 19 nt, Homo sapiens
  misc_RNA (1)...(19): siRNA sense strand
ggaccgauuuguggcuuac

SEQ ID NO: 535332 - RNA, 19 nt, Homo sapiens
  misc_RNA (1)...(19): siRNA sense strand
ccuaccuccuccuguauga

SEQ ID NO: 535333 - RNA, 19 nt, Homo sapiens
  misc_RNA (1)...(19): siRNA sense strand
gcaucuuccuggacuucga

SEQ ID NO: 535334 - RNA, 19 nt, Homo sapiens
  misc_RNA (1)...(19): siRNA sense strand
auggucaucuccacaguga

SEQ ID NO: 535335 - RNA, 19 nt, Homo sapiens
  misc_RNA (1)...(19): siRNA sense strand
gaagcuggaggaggacaug

SEQ ID NO: 535336 - RNA, 19 nt, Homo sapiens
  misc_RNA (1)...(19): siRNA sense strand
gcagcaaggaccgauuugu

SEQ ID NO: 535337 - RNA, 19 nt, Homo sapiens
  misc_RNA (1)...(19): siRNA sense strand
cggacagauugaagugcua

SEQ ID NO: 535338 - RNA, 19 nt, Homo sapiens
  misc_RNA (1)...(19): siRNA sense strand
agaguucccggacagauug

SEQ ID NO: 535339 - RNA, 19 nt, Homo sapiens
  misc_RNA (1)...(19): siRNA sense strand
caaccagacccaggacugu

SEQ ID NO: 535340 - RNA, 19 nt, Homo sapiens
  misc_RNA (1)...(19): siRNA sense strand
gaccaagguggccgagaug

SEQ ID NO: 535341 - RNA, 19 nt, Homo sapiens
  misc_RNA (1)...(19): siRNA sense strand
ccagggaggagcagagcuu

SEQ ID NO: 535342 - RNA, 19 nt, Homo sapiens
  misc_RNA (1)...(19): siRNA sense strand
gcuggaguuugagaagaug

SEQ ID NO: 535343 - RNA, 19 nt, Homo sapiens
  misc_RNA (1)...(19): siRNA sense strand
gaagugcuaagaggcuuuc

SEQ ID NO: 535344 - RNA, 19 nt, Homo sapiens
  misc_RNA (1)...(19): siRNA sense strand
gcagaguucccggacagau

SEQ ID NO: 535345 - RNA, 19 nt, Homo sapiens
  misc_RNA (1)...(19): siRNA sense strand
gauggaggcuggacaguaa

SEQ ID NO: 535346 - RNA, 19 nt, Homo sapiens
  misc_RNA (1)...(19): siRNA sense strand
gaaagaggcugcccgagau

SEQ ID NO: 535347 - RNA, 19 nt, Homo sapiens
  misc_RNA (1)...(19): siRNA sense strand
gacaagaacugcgccaaga

SEQ ID NO: 535348 - RNA, 19 nt, Homo sapiens
  misc_RNA (1)...(19): siRNA sense strand
gaggcagaguggacuauuu

SEQ ID NO: 535349 - RNA, 19 nt, Homo sapiens
  misc_RNA (1)...(19): siRNA sense strand
acaagcaccuagaccauga

SEQ ID NO: 535350 - RNA, 19 nt, Homo sapiens
  misc_RNA (1)...(19): siRNA sense strand
caagaugaccucagaugga

SEQ ID NO: 535351 - RNA, 19 nt, Homo sapiens
  misc_RNA (1)...(19): siRNA sense strand
cagaguggacuauuugaaa

SEQ ID NO: 535352 - RNA, 19 nt, Homo sapiens
  misc_RNA (1)...(19): siRNA sense strand
gaauucagcaucugcaaag

SEQ ID NO: 535353 - RNA, 19 nt, Homo sapiens
  misc_RNA (1)...(19): siRNA sense strand
cagcagcggcagaagcuua

SEQ ID NO: 535354 - RNA, 19 nt, Homo sapiens
  misc_RNA (1)...(19): siRNA sense strand
uuggugaacugcaagauga

SEQ ID NO: 535355 - RNA, 19 nt, Homo sapiens
  misc_RNA (1)...(19): siRNA sense strand
gcagaguggacuauuugaa

SEQ ID NO: 535356 - RNA, 19 nt, Homo sapiens
  misc_RNA (1)...(19): siRNA sense strand
gaacagcaggauccagcaa

SEQ ID NO: 535357 - RNA, 19 nt, Homo sapiens
  misc_RNA (1)...(19): siRNA sense strand
gagaaggugcauagcauca

SEQ ID NO: 535358 - RNA, 19 nt, Homo sapiens
  misc_RNA (1)...(19): siRNA sense strand
gcgaggacacggccuauag

SEQ ID NO: 535359 - RNA, 19 nt, Homo sapiens
  misc_RNA (1)...(19): siRNA sense strand
ucuggaggcuggugguuug

SEQ ID NO: 535360 - RNA, 19 nt, Homo sapiens
  misc_RNA (1)...(19): siRNA sense strand
uggagaaggugcauagcau

SEQ ID NO: 535361 - RNA, 19 nt, Homo sapiens
  misc_RNA (1)...(19): siRNA sense strand
gcaggccaccaccauguug

SEQ ID NO: 535362 - RNA, 19 nt, Homo sapiens
  misc_RNA (1)...(19): siRNA sense strand
ggagaggcagaguggacua

SEQ ID NO: 535363 - RNA, 19 nt, Homo sapiens
  misc_RNA (1)...(19): siRNA sense strand
cgaauucagcaucugcaaa

SEQ ID NO: 535364 - RNA, 19 nt, Homo sapiens
  misc_RNA (1)...(19): siRNA sense strand
ccacuugggaccaggauca

SEQ ID NO: 535365 - RNA, 19 nt, Homo sapiens
  misc_RNA (1)...(19): siRNA sense strand
guccaccgaccucccguua

SEQ ID NO: 535366 - RNA, 19 nt, Homo sapiens
  misc_RNA (1)...(19): siRNA sense strand
caacucaaggcucagaaca

SEQ ID NO: 535367 - RNA, 19 nt, Homo sapiens
  misc_RNA (1)...(19): siRNA sense strand
ugacccggcucacaauguc

SEQ ID NO: 535368 - RNA, 19 nt, Homo sapiens
  misc_RNA (1)...(19): siRNA sense strand
acugcaagaugaccucaga

SEQ ID NO: 535369 - RNA, 19 nt, Homo sapiens
  misc_RNA (1)...(19): siRNA sense strand
uccagcaacucuuccacaa

SEQ ID NO: 535370 - RNA, 19 nt, Homo sapiens
  misc_RNA (1)...(19): siRNA sense strand
ccacaagcaccuagaccau

SEQ ID NO: 535371 - RNA, 19 nt, Homo sapiens
  misc_RNA (1)...(19): siRNA sense strand
gggauugccaggagcuguu

SEQ ID NO: 535372 - RNA, 19 nt, Homo sapiens
  misc_RNA (1)...(19): siRNA sense strand
aggcagaguggacuauuug

SEQ ID NO: 535373 - RNA, 19 nt, Homo sapiens
  misc_RNA (1)...(19): siRNA sense strand
gcaccugcagccauuccaa

SEQ ID NO: 535374 - RNA, 19 nt, Homo sapiens
  misc_RNA (1)...(19): siRNA sense strand
gaggcuggacaguaauuca

SEQ ID NO: 535375 - RNA, 19 nt, Homo sapiens
  misc_RNA (1)...(19): siRNA sense strand
ccaccaccauguugaucca

SEQ ID NO: 535376 - RNA, 19 nt, Homo sapiens
  misc_RNA (1)...(19): siRNA sense strand
gauggaggcuggacaguaa

SEQ ID NO: 535377 - RNA, 19 nt, Homo sapiens
  misc_RNA (1)...(19): siRNA sense strand
gaaagaggcugcccgagau

SEQ ID NO: 535378 - RNA, 19 nt, Homo sapiens
  misc_RNA (1)...(19): siRNA sense strand
gacaagaacugcgccaaga

SEQ ID NO: 535379 - RNA, 19 nt, Homo sapiens
  misc_RNA (1)...(19): siRNA sense strand
gaggcagaguggacuauuu

SEQ ID NO: 535380 - RNA, 19 nt, Homo sapiens
  misc_RNA (1)...(19): siRNA sense strand
acaagcaccuagaccauga

SEQ ID NO: 535381 - RNA, 19 nt, Homo sapiens
  misc_RNA (1)...(19): siRNA sense strand
caagaugaccucagaugga

SEQ ID NO: 535382 - RNA, 19 nt, Homo sapiens
  misc_RNA (1)...(19): siRNA sense strand
cagaguggacuauuugaaa

SEQ ID NO: 535383 - RNA, 19 nt, Homo sapiens
  misc_RNA (1)...(19): siRNA sense strand
gaauucagcaucugcaaag

SEQ ID NO: 535384 - RNA, 19 nt, Homo sapiens
  misc_RNA (1)...(19): siRNA sense strand
cagcagcggcagaagcuua

SEQ ID NO: 535385 - RNA, 19 nt, Homo sapiens
  misc_RNA (1)...(19): siRNA sense strand
uuggugaacugcaagauga

SEQ ID NO: 535386 - RNA, 19 nt, Homo sapiens
  misc_RNA (1)...(19): siRNA sense strand
gcagaguggacuauuugaa

SEQ ID NO: 535387 - RNA, 19 nt, Homo sapiens
  misc_RNA (1)...(19): siRNA sense strand
gaacagcaggauccagcaa

SEQ ID NO: 535388 - RNA, 19 nt, Homo sapiens
  misc_RNA (1)...(19): siRNA sense strand
gagaaggugcauagcauca

SEQ ID NO: 535389 - RNA, 19 nt, Homo sapiens
  misc_RNA (1)...(19): siRNA sense strand
gcgaggacacggccuauag

SEQ ID NO: 535390 - RNA, 19 nt, Homo sapiens
  misc_RNA (1)...(19): siRNA sense strand
ucuggaggcuggugguuug

SEQ ID NO: 535391 - RNA, 19 nt, Homo sapiens
  misc_RNA (1)...(19): siRNA sense strand
uggagaaggugcauagcau

SEQ ID NO: 535392 - RNA, 19 nt, Homo sapiens
  misc_RNA (1)...(19): siRNA sense strand
gcaggccaccaccauguug

SEQ ID NO: 535393 - RNA, 19 nt, Homo sapiens
  misc_RNA (1)...(19): siRNA sense strand
ggagaggcagaguggacua

SEQ ID NO: 535394 - RNA, 19 nt, Homo sapiens
  misc_RNA (1)...(19): siRNA sense strand
cgaauucagcaucugcaaa

SEQ ID NO: 535395 - RNA, 19 nt, Homo sapiens
  misc_RNA (1)...(19): siRNA sense strand
ccacuugggaccaggauca

SEQ ID NO: 535396 - RNA, 19 nt, Homo sapiens
  misc_RNA (1)...(19): siRNA sense strand
guccaccgaccucccguua

SEQ ID NO: 535397 - RNA, 19 nt, Homo sapiens
  misc_RNA (1)...(19): siRNA sense strand
caacucaaggcucagaaca

SEQ ID NO: 535398 - RNA, 19 nt, Homo sapiens
  misc_RNA (1)...(19): siRNA sense strand
ugacccggcucacaauguc

SEQ ID NO: 535399 - RNA, 19 nt, Homo sapiens
  misc_RNA (1)...(19): siRNA sense strand
acugcaagaugaccucaga

SEQ ID NO: 535400 - RNA, 19 nt, Homo sapiens
  misc_RNA (1)...(19): siRNA sense strand
uccagcaacucuuccacaa

SEQ ID NO: 535401 - RNA, 19 nt, Homo sapiens
  misc_RNA (1)...(19): siRNA sense strand
ccacaagcaccuagaccau

SEQ ID NO: 535402 - RNA, 19 nt, Homo sapiens
  misc_RNA (1)...(19): siRNA sense strand
gggauugccaggagcuguu

SEQ ID NO: 535403 - RNA, 19 nt, Homo sapiens
  misc_RNA (1)...(19): siRNA sense strand
aggcagaguggacuauuug

SEQ ID NO: 535404 - RNA, 19 nt, Homo sapiens
  misc_RNA (1)...(19): siRNA sense strand
gcaccugcagccauuccaa

SEQ ID NO: 535405 - RNA, 19 nt, Homo sapiens
  misc_RNA (1)...(19): siRNA sense strand
gaggcuggacaguaauuca

SEQ ID NO: 535406 - RNA, 19 nt, Homo sapiens
  misc_RNA (1)...(19): siRNA sense strand
ccaccaccauguugaucca

SEQ ID NO: 535407 - RNA, 19 nt, Homo sapiens
  misc_RNA (1)...(19): siRNA sense strand
gaacagacaccuuuacaua

SEQ ID NO: 535408 - RNA, 19 nt, Homo sapiens
  misc_RNA (1)...(19): siRNA sense strand
gcacauagcugcacauuac

SEQ ID NO: 535409 - RNA, 19 nt, Homo sapiens
  misc_RNA (1)...(19): siRNA sense strand
gagcaaauguuaacgcaaa

SEQ ID NO: 535410 - RNA, 19 nt, Homo sapiens
  misc_RNA (1)...(19): siRNA sense strand
uaaagaagguuacuaggaa

SEQ ID NO: 535411 - RNA, 19 nt, Homo sapiens
  misc_RNA (1)...(19): siRNA sense strand
ggagcaagcuguuucuaaa

SEQ ID NO: 535412 - RNA, 19 nt, Homo sapiens
  misc_RNA (1)...(19): siRNA sense strand
gaaauuaucugcguaccuu

SEQ ID NO: 535413 - RNA, 19 nt, Homo sapiens
  misc_RNA (1)...(19): siRNA sense strand
gaaauugaacagaccauua

SEQ ID NO: 535414 - RNA, 19 nt, Homo sapiens
  misc_RNA (1)...(19): siRNA sense strand
gaacuacgccauuaacauu

SEQ ID NO: 535415 - RNA, 19 nt, Homo sapiens
  misc_RNA (1)...(19): siRNA sense strand
gaagauaaagugaauguug

SEQ ID NO: 535416 - RNA, 19 nt, Homo sapiens
  misc_RNA (1)...(19): siRNA sense strand
gaagaagaauacauugaug

SEQ ID NO: 535417 - RNA, 19 nt, Homo sapiens
  misc_RNA (1)...(19): siRNA sense strand
acagugagcugguuaagaa

SEQ ID NO: 535418 - RNA, 19 nt, Homo sapiens
  misc_RNA (1)...(19): siRNA sense strand
gcaccaaccuuaagauuac

SEQ ID NO: 535419 - RNA, 19 nt, Homo sapiens
  misc_RNA (1)...(19): siRNA sense strand
ggacagaauuagcaagaga

SEQ ID NO: 535420 - RNA, 19 nt, Homo sapiens
  misc_RNA (1)...(19): siRNA sense strand
ggaaggagccaauauuaau

SEQ ID NO: 535421 - RNA, 19 nt, Homo sapiens
  misc_RNA (1)...(19): siRNA sense strand
ccacaaugcugacguacaa

SEQ ID NO: 535422 - RNA, 19 nt, Homo sapiens
  misc_RNA (1)...(19): siRNA sense strand
caaugaauguguuuccuuu

SEQ ID NO: 535423 - RNA, 19 nt, Homo sapiens
  misc_RNA (1)...(19): siRNA sense strand
caagugaugucauguugaa

SEQ ID NO: 535424 - RNA, 19 nt, Homo sapiens
  misc_RNA (1)...(19): siRNA sense strand
gaauggcuauacuccguua

SEQ ID NO: 535425 - RNA, 19 nt, Homo sapiens
  misc_RNA (1)...(19): siRNA sense strand
ccagagcccugaaugguuu

SEQ ID NO: 535426 - RNA, 19 nt, Homo sapiens
  misc_RNA (1)...(19): siRNA sense strand
ggccaaauuuguaguguuu

SEQ ID NO: 535427 - RNA, 19 nt, Homo sapiens
  misc_RNA (1)...(19): siRNA sense strand
aaacgaaucugccgcauca

SEQ ID NO: 535428 - RNA, 19 nt, Homo sapiens
  misc_RNA (1)...(19): siRNA sense strand
cagaauggcuuuacuccuu

SEQ ID NO: 535429 - RNA, 19 nt, Homo sapiens
  misc_RNA (1)...(19): siRNA sense strand
gcauggagcugaucaggau

SEQ ID NO: 535430 - RNA, 19 nt, Homo sapiens
  misc_RNA (1)...(19): siRNA sense strand
uauaaagcguguuguauug

SEQ ID NO: 535431 - RNA, 19 nt, Homo sapiens
  misc_RNA (1)...(19): siRNA sense strand
acagacaccuuuacauauu

SEQ ID NO: 535432 - RNA, 19 nt, Homo sapiens
  misc_RNA (1)...(19): siRNA sense strand
gaauggauauuguucaucu

SEQ ID NO: 535433 - RNA, 19 nt, Homo sapiens
  misc_RNA (1)...(19): siRNA sense strand
gaaaggcuggcuuauauug

SEQ ID NO: 535434 - RNA, 19 nt, Homo sapiens
  misc_RNA (1)...(19): siRNA sense strand
ugacugagguucuugaugu

SEQ ID NO: 535435 - RNA, 19 nt, Homo sapiens
  misc_RNA (1)...(19): siRNA sense strand
caagaagucugacagcaau

SEQ ID NO: 535436 - RNA, 19 nt, Homo sapiens
  misc_RNA (1)...(19): siRNA sense strand
gaagguggcgcugcuguua

SEQ ID NO: 535437 - RNA, 19 nt, Homo sapiens
  misc_RNA (1)...(19): siRNA sense strand
caagacaccugaggaaguu

SEQ ID NO: 535438 - RNA, 19 nt, Homo sapiens
  misc_RNA (1)...(19): siRNA sense strand
ucaaaguucuuguuaagga

SEQ ID NO: 535439 - RNA, 19 nt, Homo sapiens
  misc_RNA (1)...(19): siRNA sense strand
ugacuacacugaagaugaa

SEQ ID NO: 535440 - RNA, 19 nt, Homo sapiens
  misc_RNA (1)...(19): siRNA sense strand
ggaaauaccgcucuucaca

SEQ ID NO: 535441 - RNA, 19 nt, Homo sapiens
  misc_RNA (1)...(19): siRNA sense strand
gugaaagacucgaugaaga

SEQ ID NO: 535442 - RNA, 19 nt, Homo sapiens
  misc_RNA (1)...(19): siRNA sense strand
aggaaaggcuggcuuauau

SEQ ID NO: 535443 - RNA, 19 nt, Homo sapiens
  misc_RNA (1)...(19): siRNA sense strand
gcaguggugucucguauca

SEQ ID NO: 535444 - RNA, 19 nt, Homo sapiens
  misc_RNA (1)...(19): siRNA sense strand
caacguggcucuuucuucu

SEQ ID NO: 535445 - RNA, 19 nt, Homo sapiens
  misc_RNA (1)...(19): siRNA sense strand
gagaaauggugcccuuguu

SEQ ID NO: 535446 - RNA, 19 nt, Homo sapiens
  misc_RNA (1)...(19): siRNA sense strand
gaauggcuuuacuccuuua

SEQ ID NO: 535447 - RNA, 19 nt, Homo sapiens
  misc_RNA (1)...(19): siRNA sense strand
aaauaccgcucuucacauu

SEQ ID NO: 535448 - RNA, 19 nt, Homo sapiens
  misc_RNA (1)...(19): siRNA sense strand
gucaugcacuguugaagua

SEQ ID NO: 535449 - RNA, 19 nt, Homo sapiens
  misc_RNA (1)...(19): siRNA sense strand
gaggaaaggcuggcuuaua

SEQ ID NO: 535450 - RNA, 19 nt, Homo sapiens
  misc_RNA (1)...(19): siRNA sense strand
caagcuauuugcaacuuaa

SEQ ID NO: 535451 - RNA, 19 nt, Homo sapiens
  misc_RNA (1)...(19): siRNA sense strand
ucacaaguauacagagaaa

SEQ ID NO: 535452 - RNA, 19 nt, Homo sapiens
  misc_RNA (1)...(19): siRNA sense strand
uggaacugcuggugaaaua

SEQ ID NO: 535453 - RNA, 19 nt, Homo sapiens
  misc_RNA (1)...(19): siRNA sense strand
aaacaucacuuugccgauu

SEQ ID NO: 535454 - RNA, 19 nt, Homo sapiens
  misc_RNA (1)...(19): siRNA sense strand
ggauggcuauuccaaaguu

SEQ ID NO: 535455 - RNA, 19 nt, Homo sapiens
  misc_RNA (1)...(19): siRNA sense strand
gaagacauuucuguugguu

SEQ ID NO: 535456 - RNA, 19 nt, Homo sapiens
  misc_RNA (1)...(19): siRNA sense strand
gaaauggugcccuuguuga

SEQ ID NO: 535457 - RNA, 19 nt, Homo sapiens
  misc_RNA (1)...(19): siRNA sense strand
gaauguguuuccuuuacaa

SEQ ID NO: 535458 - RNA, 19 nt, Homo sapiens
  misc_RNA (1)...(19): siRNA sense strand
ggaaagacgacaccaaauc

SEQ ID NO: 535459 - RNA, 19 nt, Homo sapiens
  misc_RNA (1)...(19): siRNA sense strand
gagacgauaugccugaaau

SEQ ID NO: 535460 - RNA, 19 nt, Homo sapiens
  misc_RNA (1)...(19): siRNA sense strand
gcgcaucagucauaguuau

SEQ ID NO: 535461 - RNA, 19 nt, Homo sapiens
  misc_RNA (1)...(19): siRNA sense strand
gcagggauguggagguguu

SEQ ID NO: 535462 - RNA, 19 nt, Homo sapiens
  misc_RNA (1)...(19): siRNA sense strand
gaagccagguugagguguu

SEQ ID NO: 535463 - RNA, 19 nt, Homo sapiens
  misc_RNA (1)...(19): siRNA sense strand
uaccuuauauggccaaauu

SEQ ID NO: 535464 - RNA, 19 nt, Homo sapiens
  misc_RNA (1)...(19): siRNA sense strand
acacagauaugguuaccuu

SEQ ID NO: 535465 - RNA, 19 nt, Homo sapiens
  misc_RNA (1)...(19): siRNA sense strand
ccaagaugauggugaauag

SEQ ID NO: 535466 - RNA, 19 nt, Homo sapiens
  misc_RNA (1)...(19): siRNA sense strand
ggagaugcaccaaccuuaa

SEQ ID NO: 535467 - RNA, 19 nt, Homo sapiens
  misc_RNA (1)...(19): siRNA sense strand
gaugucauguugaaugguu

SEQ ID NO: 535468 - RNA, 19 nt, Homo sapiens
  misc_RNA (1)...(19): siRNA sense strand
gcacugagaacuuagacaa

SEQ ID NO: 535469 - RNA, 19 nt, Homo sapiens
  misc_RNA (1)...(19): siRNA sense strand
ccaggaagauaaagugaau

SEQ ID NO: 535470 - RNA, 19 nt, Homo sapiens
  misc_RNA (1)...(19): siRNA sense strand
gcauguagcagccaaguau

SEQ ID NO: 535471 - RNA, 19 nt, Homo sapiens
  misc_RNA (1)...(19): siRNA sense strand
cagaaacagucacagaaga

SEQ ID NO: 535472 - RNA, 19 nt, Homo sapiens
  misc_RNA (1)...(19): siRNA sense strand
cugcaugacugaugauaaa

SEQ ID NO: 535473 - RNA, 19 nt, Homo sapiens
  misc_RNA (1)...(19): siRNA sense strand
gcacaaggcaccuguugau

SEQ ID NO: 535474 - RNA, 19 nt, Homo sapiens
  misc_RNA (1)...(19): siRNA sense strand
caagagaacuggauuucac

SEQ ID NO: 535475 - RNA, 19 nt, Homo sapiens
  misc_RNA (1)...(19): siRNA sense strand
gaagggaaauaccgcucuu

SEQ ID NO: 535476 - RNA, 19 nt, Homo sapiens
  misc_RNA (1)...(19): siRNA sense strand
cgagaggccuggugcauca

SEQ ID NO: 535477 - RNA, 19 nt, Homo sapiens
  misc_RNA (1)...(19): siRNA sense strand
ccaucuacguugauuguuu

SEQ ID NO: 535478 - RNA, 19 nt, Homo sapiens
  misc_RNA (1)...(19): siRNA sense strand
gaagauauuacaggaacua

SEQ ID NO: 535479 - RNA, 19 nt, Homo sapiens
  misc_RNA (1)...(19): siRNA sense strand
ccacuaccguguaaccaaa

SEQ ID NO: 535480 - RNA, 19 nt, Homo sapiens
  misc_RNA (1)...(19): siRNA sense strand
gaaggagccaauauuaaug

SEQ ID NO: 535481 - RNA, 19 nt, Homo sapiens
  misc_RNA (1)...(19): siRNA sense strand
uaaagcguguuguauugaa

SEQ ID NO: 535482 - RNA, 19 nt, Homo sapiens
  misc_RNA (1)...(19): siRNA sense strand
ggauaagacccuugaacaa

SEQ ID NO: 535483 - RNA, 19 nt, Homo sapiens
  misc_RNA (1)...(19): siRNA sense strand
uaaaagaacugggugauga

SEQ ID NO: 535484 - RNA, 19 nt, Homo sapiens
  misc_RNA (1)...(19): siRNA sense strand
uuaccuugcuucuggauaa

SEQ ID NO: 535485 - RNA, 19 nt, Homo sapiens
  misc_RNA (1)...(19): siRNA sense strand
caaggcaccuguugaugau

SEQ ID NO: 535486 - RNA, 19 nt, Homo sapiens
  misc_RNA (1)...(19): siRNA sense strand
uggcaacucuucuucuaaa

SEQ ID NO: 535487 - RNA, 19 nt, Homo sapiens
  misc_RNA (1)...(19): siRNA sense strand
gaaagacgacaccaaaucu

SEQ ID NO: 535488 - RNA, 19 nt, Homo sapiens
  misc_RNA (1)...(19): siRNA sense strand
caccaaaucugccgcacuu

SEQ ID NO: 535489 - RNA, 19 nt, Homo sapiens
  misc_RNA (1)...(19): siRNA sense strand
uggaauaucagcaggaaua

SEQ ID NO: 535490 - RNA, 19 nt, Homo sapiens
  misc_RNA (1)...(19): siRNA sense strand
agucaucucuggaauauca

SEQ ID NO: 535491 - RNA, 19 nt, Homo sapiens
  misc_RNA (1)...(19): siRNA sense strand
agacauuucuguugguuau

SEQ ID NO: 535492 - RNA, 19 nt, Homo sapiens
  misc_RNA (1)...(19): siRNA sense strand
ggauauuguucaucucaug

SEQ ID NO: 535493 - RNA, 19 nt, Homo sapiens
  misc_RNA (1)...(19): siRNA sense strand
gacguacaauccaagauga

SEQ ID NO: 535494 - RNA, 19 nt, Homo sapiens
  misc_RNA (1)...(19): siRNA sense strand
gaaaaccagccucguaaua

SEQ ID NO: 535495 - RNA, 19 nt, Homo sapiens
  misc_RNA (1)...(19): siRNA sense strand
gaggaagacauuucuguug

SEQ ID NO: 535496 - RNA, 19 nt, Homo sapiens
  misc_RNA (1)...(19): siRNA sense strand
gaaagaggagcaagcuguu

SEQ ID NO: 535497 - RNA, 19 nt, Homo sapiens
  misc_RNA (1)...(19): siRNA sense strand
caacuuaaacaucacuuug

SEQ ID NO: 535498 - RNA, 19 nt, Homo sapiens
  misc_RNA (1)...(19): siRNA sense strand
gcuauacuccguuacauau

SEQ ID NO: 535499 - RNA, 19 nt, Homo sapiens
  misc_RNA (1)...(19): siRNA sense strand
gaacugcuggugaaauaug

SEQ ID NO: 535500 - RNA, 19 nt, Homo sapiens
  misc_RNA (1)...(19): siRNA sense strand
gaaauacaaacauggugaa

SEQ ID NO: 535501 - RNA, 19 nt, Homo sapiens
  misc_RNA (1)...(19): siRNA sense strand
aaacaggacagcaaucuga

SEQ ID NO: 535502 - RNA, 19 nt, Homo sapiens
  misc_RNA (1)...(19): siRNA sense strand
gcacagagaaagaagagau

SEQ ID NO: 535503 - RNA, 19 nt, Homo sapiens
  misc_RNA (1)...(19): siRNA sense strand
ggacacaccgugguaaaga

SEQ ID NO: 535504 - RNA, 19 nt, Homo sapiens
  misc_RNA (1)...(19): siRNA sense strand
ggagcaaguucaacaggau

SEQ ID NO: 535505 - RNA, 19 nt, Homo sapiens
  misc_RNA (1)...(19): siRNA sense strand
ggaaacaugcuacagauac

SEQ ID NO: 535506 - RNA, 19 nt, Homo sapiens
  misc_RNA (1)...(19): siRNA sense strand
uacaggaacuacgccauua

SEQ ID NO: 535507 - RNA, 19 nt, Homo sapiens
  misc_RNA (1)...(19): siRNA sense strand
gaacagacaccuuuacaua

SEQ ID NO: 535508 - RNA, 19 nt, Homo sapiens
  misc_RNA (1)...(19): siRNA sense strand
gcacauagcugcacauuac

SEQ ID NO: 535509 - RNA, 19 nt, Homo sapiens
  misc_RNA (1)...(19): siRNA sense strand
gagcaaauguuaacgcaaa

SEQ ID NO: 535510 - RNA, 19 nt, Homo sapiens
  misc_RNA (1)...(19): siRNA sense strand
uaaagaagguuacuaggaa

SEQ ID NO: 535511 - RNA, 19 nt, Homo sapiens
  misc_RNA (1)...(19): siRNA sense strand
ggagcaagcuguuucuaaa

SEQ ID NO: 535512 - RNA, 19 nt, Homo sapiens
  misc_RNA (1)...(19): siRNA sense strand
gaaauuaucugcguaccuu

SEQ ID NO: 535513 - RNA, 19 nt, Homo sapiens
  misc_RNA (1)...(19): siRNA sense strand
gaaauugaacagaccauua

SEQ ID NO: 535514 - RNA, 19 nt, Homo sapiens
  misc_RNA (1)...(19): siRNA sense strand
gaacuacgccauuaacauu

SEQ ID NO: 535515 - RNA, 19 nt, Homo sapiens
  misc_RNA (1)...(19): siRNA sense strand
gaagauaaagugaauguug

SEQ ID NO: 535516 - RNA, 19 nt, Homo sapiens
  misc_RNA (1)...(19): siRNA sense strand
gaagaagaauacauugaug

SEQ ID NO: 535517 - RNA, 19 nt, Homo sapiens
  misc_RNA (1)...(19): siRNA sense strand
acagugagcugguuaagaa

SEQ ID NO: 535518 - RNA, 19 nt, Homo sapiens
  misc_RNA (1)...(19): siRNA sense strand
gcaccaaccuuaagauuac

SEQ ID NO: 535519 - RNA, 19 nt, Homo sapiens
  misc_RNA (1)...(19): siRNA sense strand
ggacagaauuagcaagaga

SEQ ID NO: 535520 - RNA, 19 nt, Homo sapiens
  misc_RNA (1)...(19): siRNA sense strand
ggaaggagccaauauuaau

SEQ ID NO: 535521 - RNA, 19 nt, Homo sapiens
  misc_RNA (1)...(19): siRNA sense strand
ccacaaugcugacguacaa

SEQ ID NO: 535522 - RNA, 19 nt, Homo sapiens
  misc_RNA (1)...(19): siRNA sense strand
caaugaauguguuuccuuu

SEQ ID NO: 535523 - RNA, 19 nt, Homo sapiens
  misc_RNA (1)...(19): siRNA sense strand
caagugaugucauguugaa

SEQ ID NO: 535524 - RNA, 19 nt, Homo sapiens
  misc_RNA (1)...(19): siRNA sense strand
gaauggcuauacuccguua

SEQ ID NO: 535525 - RNA, 19 nt, Homo sapiens
  misc_RNA (1)...(19): siRNA sense strand
ccagagcccugaaugguuu

SEQ ID NO: 535526 - RNA, 19 nt, Homo sapiens
  misc_RNA (1)...(19): siRNA sense strand
ggccaaauuuguaguguuu

SEQ ID NO: 535527 - RNA, 19 nt, Homo sapiens
  misc_RNA (1)...(19): siRNA sense strand
aaacgaaucugccgcauca

SEQ ID NO: 535528 - RNA, 19 nt, Homo sapiens
  misc_RNA (1)...(19): siRNA sense strand
cagaauggcuuuacuccuu

SEQ ID NO: 535529 - RNA, 19 nt, Homo sapiens
  misc_RNA (1)...(19): siRNA sense strand
gcauggagcugaucaggau

SEQ ID NO: 535530 - RNA, 19 nt, Homo sapiens
  misc_RNA (1)...(19): siRNA sense strand
uauaaagcguguuguauug

SEQ ID NO: 535531 - RNA, 19 nt, Homo sapiens
  misc_RNA (1)...(19): siRNA sense strand
acagacaccuuuacauauu

SEQ ID NO: 535532 - RNA, 19 nt, Homo sapiens
  misc_RNA (1)...(19): siRNA sense strand
gaauggauauuguucaucu

SEQ ID NO: 535533 - RNA, 19 nt, Homo sapiens
  misc_RNA (1)...(19): siRNA sense strand
gaaaggcuggcuuauauug

SEQ ID NO: 535534 - RNA, 19 nt, Homo sapiens
  misc_RNA (1)...(19): siRNA sense strand
ugacugagguucuugaugu

SEQ ID NO: 535535 - RNA, 19 nt, Homo sapiens
  misc_RNA (1)...(19): siRNA sense strand
caagaagucugacagcaau

SEQ ID NO: 535536 - RNA, 19 nt, Homo sapiens
  misc_RNA (1)...(19): siRNA sense strand
gaagguggcgcugcuguua

SEQ ID NO: 535537 - RNA, 19 nt, Homo sapiens
  misc_RNA (1)...(19): siRNA sense strand
caagacaccugaggaaguu

SEQ ID NO: 535538 - RNA, 19 nt, Homo sapiens
  misc_RNA (1)...(19): siRNA sense strand
ucaaaguucuuguuaagga

SEQ ID NO: 535539 - RNA, 19 nt, Homo sapiens
  misc_RNA (1)...(19): siRNA sense strand
ugacuacacugaagaugaa

SEQ ID NO: 535540 - RNA, 19 nt, Homo sapiens
  misc_RNA (1)...(19): siRNA sense strand
ggaaauaccgcucuucaca

SEQ ID NO: 535541 - RNA, 19 nt, Homo sapiens
  misc_RNA (1)...(19): siRNA sense strand
gugaaagacucgaugaaga

SEQ ID NO: 535542 - RNA, 19 nt, Homo sapiens
  misc_RNA (1)...(19): siRNA sense strand
aggaaaggcuggcuuauau

SEQ ID NO: 535543 - RNA, 19 nt, Homo sapiens
  misc_RNA (1)...(19): siRNA sense strand
gcaguggugucucguauca

SEQ ID NO: 535544 - RNA, 19 nt, Homo sapiens
  misc_RNA (1)...(19): siRNA sense strand
caacguggcucuuucuucu

SEQ ID NO: 535545 - RNA, 19 nt, Homo sapiens
  misc_RNA (1)...(19): siRNA sense strand
gagaaauggugcccuuguu

SEQ ID NO: 535546 - RNA, 19 nt, Homo sapiens
  misc_RNA (1)...(19): siRNA sense strand
gaauggcuuuacuccuuua

SEQ ID NO: 535547 - RNA, 19 nt, Homo sapiens
  misc_RNA (1)...(19): siRNA sense strand
aaauaccgcucuucacauu

SEQ ID NO: 535548 - RNA, 19 nt, Homo sapiens
  misc_RNA (1)...(19): siRNA sense strand
gucaugcacuguugaagua

SEQ ID NO: 535549 - RNA, 19 nt, Homo sapiens
  misc_RNA (1)...(19): siRNA sense strand
gaggaaaggcuggcuuaua

SEQ ID NO: 535550 - RNA, 19 nt, Homo sapiens
  misc_RNA (1)...(19): siRNA sense strand
caagcuauuugcaacuuaa

SEQ ID NO: 535551 - RNA, 19 nt, Homo sapiens
  misc_RNA (1)...(19): siRNA sense strand
ucacaaguauacagagaaa

SEQ ID NO: 535552 - RNA, 19 nt, Homo sapiens
  misc_RNA (1)...(19): siRNA sense strand
uggaacugcuggugaaaua

SEQ ID NO: 535553 - RNA, 19 nt, Homo sapiens
  misc_RNA (1)...(19): siRNA sense strand
aaacaucacuuugccgauu

SEQ ID NO: 535554 - RNA, 19 nt, Homo sapiens
  misc_RNA (1)...(19): siRNA sense strand
ggauggcuauuccaaaguu

SEQ ID NO: 535555 - RNA, 19 nt, Homo sapiens
  misc_RNA (1)...(19): siRNA sense strand
gaagacauuucuguugguu

SEQ ID NO: 535556 - RNA, 19 nt, Homo sapiens
  misc_RNA (1)...(19): siRNA sense strand
gaaauggugcccuuguuga

SEQ ID NO: 535557 - RNA, 19 nt, Homo sapiens
  misc_RNA (1)...(19): siRNA sense strand
gaauguguuuccuuuacaa

SEQ ID NO: 535558 - RNA, 19 nt, Homo sapiens
  misc_RNA (1)...(19): siRNA sense strand
ggaaagacgacaccaaauc

SEQ ID NO: 535559 - RNA, 19 nt, Homo sapiens
  misc_RNA (1)...(19): siRNA sense strand
gagacgauaugccugaaau

SEQ ID NO: 535560 - RNA, 19 nt, Homo sapiens
  misc_RNA (1)...(19): siRNA sense strand
gcgcaucagucauaguuau

SEQ ID NO: 535561 - RNA, 19 nt, Homo sapiens
  misc_RNA (1)...(19): siRNA sense strand
gcagggauguggagguguu

SEQ ID NO: 535562 - RNA, 19 nt, Homo sapiens
  misc_RNA (1)...(19): siRNA sense strand
gaagccagguugagguguu

SEQ ID NO: 535563 - RNA, 19 nt, Homo sapiens
  misc_RNA (1)...(19): siRNA sense strand
uaccuuauauggccaaauu

SEQ ID NO: 535564 - RNA, 19 nt, Homo sapiens
  misc_RNA (1)...(19): siRNA sense strand
acacagauaugguuaccuu

SEQ ID NO: 535565 - RNA, 19 nt, Homo sapiens
  misc_RNA (1)...(19): siRNA sense strand
ccaagaugauggugaauag

SEQ ID NO: 535566 - RNA, 19 nt, Homo sapiens
  misc_RNA (1)...(19): siRNA sense strand
ggagaugcaccaaccuuaa

SEQ ID NO: 535567 - RNA, 19 nt, Homo sapiens
  misc_RNA (1)...(19): siRNA sense strand
gaugucauguugaaugguu

SEQ ID NO: 535568 - RNA, 19 nt, Homo sapiens
  misc_RNA (1)...(19): siRNA sense strand
gcacugagaacuuagacaa

SEQ ID NO: 535569 - RNA, 19 nt, Homo sapiens
  misc_RNA (1)...(19): siRNA sense strand
ccaggaagauaaagugaau

SEQ ID NO: 535570 - RNA, 19 nt, Homo sapiens
  misc_RNA (1)...(19): siRNA sense strand
gcauguagcagccaaguau

SEQ ID NO: 535571 - RNA, 19 nt, Homo sapiens
  misc_RNA (1)...(19): siRNA sense strand
cagaaacagucacagaaga

SEQ ID NO: 535572 - RNA, 19 nt, Homo sapiens
  misc_RNA (1)...(19): siRNA sense strand
cugcaugacugaugauaaa

SEQ ID NO: 535573 - RNA, 19 nt, Homo sapiens
  misc_RNA (1)...(19): siRNA sense strand
gcacaaggcaccuguugau

SEQ ID NO: 535574 - RNA, 19 nt, Homo sapiens
  misc_RNA (1)...(19): siRNA sense strand
caagagaacuggauuucac

SEQ ID NO: 535575 - RNA, 19 nt, Homo sapiens
  misc_RNA (1)...(19): siRNA sense strand
gaagggaaauaccgcucuu

SEQ ID NO: 535576 - RNA, 19 nt, Homo sapiens
  misc_RNA (1)...(19): siRNA sense strand
cgagaggccuggugcauca

SEQ ID NO: 535577 - RNA, 19 nt, Homo sapiens
  misc_RNA (1)...(19): siRNA sense strand
ccaucuacguugauuguuu

SEQ ID NO: 535578 - RNA, 19 nt, Homo sapiens
  misc_RNA (1)...(19): siRNA sense strand
gaagauauuacaggaacua

SEQ ID NO: 535579 - RNA, 19 nt, Homo sapiens
  misc_RNA (1)...(19): siRNA sense strand
ccacuaccguguaaccaaa

SEQ ID NO: 535580 - RNA, 19 nt, Homo sapiens
  misc_RNA (1)...(19): siRNA sense strand
gaaggagccaauauuaaug

SEQ ID NO: 535581 - RNA, 19 nt, Homo sapiens
  misc_RNA (1)...(19): siRNA sense strand
uaaagcguguuguauugaa

SEQ ID NO: 535582 - RNA, 19 nt, Homo sapiens
  misc_RNA (1)...(19): siRNA sense strand
ggauaagacccuugaacaa

SEQ ID NO: 535583 - RNA, 19 nt, Homo sapiens
  misc_RNA (1)...(19): siRNA sense strand
uaaaagaacugggugauga

SEQ ID NO: 535584 - RNA, 19 nt, Homo sapiens
  misc_RNA (1)...(19): siRNA sense strand
uuaccuugcuucuggauaa

SEQ ID NO: 535585 - RNA, 19 nt, Homo sapiens
  misc_RNA (1)...(19): siRNA sense strand
caaggcaccuguugaugau

SEQ ID NO: 535586 - RNA, 19 nt, Homo sapiens
  misc_RNA (1)...(19): siRNA sense strand
uggcaacucuucuucuaaa

SEQ ID NO: 535587 - RNA, 19 nt, Homo sapiens
  misc_RNA (1)...(19): siRNA sense strand
gaaagacgacaccaaaucu

SEQ ID NO: 535588 - RNA, 19 nt, Homo sapiens
  misc_RNA (1)...(19): siRNA sense strand
caccaaaucugccgcacuu

SEQ ID NO: 535589 - RNA, 19 nt, Homo sapiens
  misc_RNA (1)...(19): siRNA sense strand
uggaauaucagcaggaaua

SEQ ID NO: 535590 - RNA, 19 nt, Homo sapiens
  misc_RNA (1)...(19): siRNA sense strand
agucaucucuggaauauca

SEQ ID NO: 535591 - RNA, 19 nt, Homo sapiens
  misc_RNA (1)...(19): siRNA sense strand
agacauuucuguugguuau

SEQ ID NO: 535592 - RNA, 19 nt, Homo sapiens
  misc_RNA (1)...(19): siRNA sense strand
ggauauuguucaucucaug

SEQ ID NO: 535593 - RNA, 19 nt, Homo sapiens
  misc_RNA (1)...(19): siRNA sense strand
gacguacaauccaagauga

SEQ ID NO: 535594 - RNA, 19 nt, Homo sapiens
  misc_RNA (1)...(19): siRNA sense strand
gaaaaccagccucguaaua

SEQ ID NO: 535595 - RNA, 19 nt, Homo sapiens
  misc_RNA (1)...(19): siRNA sense strand
gaggaagacauuucuguug

SEQ ID NO: 535596 - RNA, 19 nt, Homo sapiens
  misc_RNA (1)...(19): siRNA sense strand
gaaagaggagcaagcuguu

SEQ ID NO: 535597 - RNA, 19 nt, Homo sapiens
  misc_RNA (1)...(19): siRNA sense strand
caacuuaaacaucacuuug

SEQ ID NO: 535598 - RNA, 19 nt, Homo sapiens
  misc_RNA (1)...(19): siRNA sense strand
gcuauacuccguuacauau

SEQ ID NO: 535599 - RNA, 19 nt, Homo sapiens
  misc_RNA (1)...(19): siRNA sense strand
gaacugcuggugaaauaug

SEQ ID NO: 535600 - RNA, 19 nt, Homo sapiens
  misc_RNA (1)...(19): siRNA sense strand
gaaauacaaacauggugaa

SEQ ID NO: 535601 - RNA, 19 nt, Homo sapiens
  misc_RNA (1)...(19): siRNA sense strand
aaacaggacagcaaucuga

SEQ ID NO: 535602 - RNA, 19 nt, Homo sapiens
  misc_RNA (1)...(19): siRNA sense strand
gcacagagaaagaagagau

SEQ ID NO: 535603 - RNA, 19 nt, Homo sapiens
  misc_RNA (1)...(19): siRNA sense strand
ggacacaccgugguaaaga

SEQ ID NO: 535604 - RNA, 19 nt, Homo sapiens
  misc_RNA (1)...(19): siRNA sense strand
ggagcaaguucaacaggau

SEQ ID NO: 535605 - RNA, 19 nt, Homo sapiens
  misc_RNA (1)...(19): siRNA sense strand
ggaaacaugcuacagauac

SEQ ID NO: 535606 - RNA, 19 nt, Homo sapiens
  misc_RNA (1)...(19): siRNA sense strand
uacaggaacuacgccauua

SEQ ID NO: 535607 - RNA, 19 nt, Homo sapiens
  misc_RNA (1)...(19): siRNA sense strand
ggaaacggcucccaaauca

SEQ ID NO: 535608 - RNA, 19 nt, Homo sapiens
  misc_RNA (1)...(19): siRNA sense strand
cauccuggcugccuuauuu

SEQ ID NO: 535609 - RNA, 19 nt, Homo sapiens
  misc_RNA (1)...(19): siRNA sense strand
gaaaucaacuaccagucuu

SEQ ID NO: 535610 - RNA, 19 nt, Homo sapiens
  misc_RNA (1)...(19): siRNA sense strand
guacaucagccgccucuua

SEQ ID NO: 535611 - RNA, 19 nt, Homo sapiens
  misc_RNA (1)...(19): siRNA sense strand
gaacauggaccucuacuac

SEQ ID NO: 535612 - RNA, 19 nt, Homo sapiens
  misc_RNA (1)...(19): siRNA sense strand
gcacucgcgucaacaggua

SEQ ID NO: 535613 - RNA, 19 nt, Homo sapiens
  misc_RNA (1)...(19): siRNA sense strand
ggacucgacaugauugaua

SEQ ID NO: 535614 - RNA, 19 nt, Homo sapiens
  misc_RNA (1)...(19): siRNA sense strand
caacuucaaugacuucuac

SEQ ID NO: 535615 - RNA, 19 nt, Homo sapiens
  misc_RNA (1)...(19): siRNA sense strand
gaacauguauggggucuuu

SEQ ID NO: 535616 - RNA, 19 nt, Homo sapiens
  misc_RNA (1)...(19): siRNA sense strand
ucagaaaccgcucaucuuu

SEQ ID NO: 535617 - RNA, 19 nt, Homo sapiens
  misc_RNA (1)...(19): siRNA sense strand
gacaugagaggaacaguuu

SEQ ID NO: 535618 - RNA, 19 nt, Homo sapiens
  misc_RNA (1)...(19): siRNA sense strand
gagaggaacaguuucuuga

SEQ ID NO: 535619 - RNA, 19 nt, Homo sapiens
  misc_RNA (1)...(19): siRNA sense strand
gagaggacauggagaaggu

SEQ ID NO: 535620 - RNA, 19 nt, Homo sapiens
  misc_RNA (1)...(19): siRNA sense strand
ggccuugucuaccuucuaa

SEQ ID NO: 535621 - RNA, 19 nt, Homo sapiens
  misc_RNA (1)...(19): siRNA sense strand
gaugugaccuuggccaaug

SEQ ID NO: 535622 - RNA, 19 nt, Homo sapiens
  misc_RNA (1)...(19): siRNA sense strand
gacugaggcuggaggauga

SEQ ID NO: 535623 - RNA, 19 nt, Homo sapiens
  misc_RNA (1)...(19): siRNA sense strand
ggaagguucauaucacaaa

SEQ ID NO: 535624 - RNA, 19 nt, Homo sapiens
  misc_RNA (1)...(19): siRNA sense strand
gcccagcacuuccucaugu

SEQ ID NO: 535625 - RNA, 19 nt, Homo sapiens
  misc_RNA (1)...(19): siRNA sense strand
uggcagaccugaacuucuu

SEQ ID NO: 535626 - RNA, 19 nt, Homo sapiens
  misc_RNA (1)...(19): siRNA sense strand
uggugaaacuccucaauga

SEQ ID NO: 535627 - RNA, 19 nt, Homo sapiens
  misc_RNA (1)...(19): siRNA sense strand
ggaccaaggcuaagaaguc

SEQ ID NO: 535628 - RNA, 19 nt, Homo sapiens
  misc_RNA (1)...(19): siRNA sense strand
ggacaugagaggaacaguu

SEQ ID NO: 535629 - RNA, 19 nt, Homo sapiens
  misc_RNA (1)...(19): siRNA sense strand
cggcaaguucgaugaauua

SEQ ID NO: 535630 - RNA, 19 nt, Homo sapiens
  misc_RNA (1)...(19): siRNA sense strand
gaaguacaaacaugucgaa

SEQ ID NO: 535631 - RNA, 19 nt, Homo sapiens
  misc_RNA (1)...(19): siRNA sense strand
ggacuuugccauugagaug

SEQ ID NO: 535632 - RNA, 19 nt, Homo sapiens
  misc_RNA (1)...(19): siRNA sense strand
ucauaguggucuuaaucua

SEQ ID NO: 535633 - RNA, 19 nt, Homo sapiens
  misc_RNA (1)...(19): siRNA sense strand
gggcaaaggcgagauguug

SEQ ID NO: 535634 - RNA, 19 nt, Homo sapiens
  misc_RNA (1)...(19): siRNA sense strand
gcgcugcucugcuguccuu

SEQ ID NO: 535635 - RNA, 19 nt, Homo sapiens
  misc_RNA (1)...(19): siRNA sense strand
gcuccaagcccaacaguuc

SEQ ID NO: 535636 - RNA, 19 nt, Homo sapiens
  misc_RNA (1)...(19): siRNA sense strand
uagagaagaucaagaccau

SEQ ID NO: 535637 - RNA, 19 nt, Homo sapiens
  misc_RNA (1)...(19): siRNA sense strand
gcagaauccaggugacuga

SEQ ID NO: 535638 - RNA, 19 nt, Homo sapiens
  misc_RNA (1)...(19): siRNA sense strand
cgaguuggcaucaauguug

SEQ ID NO: 535639 - RNA, 19 nt, Homo sapiens
  misc_RNA (1)...(19): siRNA sense strand
ggagaugggacucgacaug

SEQ ID NO: 535640 - RNA, 19 nt, Homo sapiens
  misc_RNA (1)...(19): siRNA sense strand
ugugguggcuggagugauu

SEQ ID NO: 535641 - RNA, 19 nt, Homo sapiens
  misc_RNA (1)...(19): siRNA sense strand
gaagguucauaucacaaag

SEQ ID NO: 535642 - RNA, 19 nt, Homo sapiens
  misc_RNA (1)...(19): siRNA sense strand
gauggaaacggcucccaaa

SEQ ID NO: 535643 - RNA, 19 nt, Homo sapiens
  misc_RNA (1)...(19): siRNA sense strand
acaaggacauagagaagau

SEQ ID NO: 535644 - RNA, 19 nt, Homo sapiens
  misc_RNA (1)...(19): siRNA sense strand
ccaggugggcgucauguuu

SEQ ID NO: 535645 - RNA, 19 nt, Homo sapiens
  misc_RNA (1)...(19): siRNA sense strand
ucacccggguccaguguuu

SEQ ID NO: 535646 - RNA, 19 nt, Homo sapiens
  misc_RNA (1)...(19): siRNA sense strand
cuucuaauauucccacaga

SEQ ID NO: 535647 - RNA, 19 nt, Homo sapiens
  misc_RNA (1)...(19): siRNA sense strand
gcagaccugaacuucuuua

SEQ ID NO: 535648 - RNA, 19 nt, Homo sapiens
  misc_RNA (1)...(19): siRNA sense strand
gaucaucgccgacuuugac

SEQ ID NO: 535649 - RNA, 19 nt, Homo sapiens
  misc_RNA (1)...(19): siRNA sense strand
ucaaugacuucuacaucga

SEQ ID NO: 535650 - RNA, 19 nt, Homo sapiens
  misc_RNA (1)...(19): siRNA sense strand
ucacccagcccaagacuga

SEQ ID NO: 535651 - RNA, 19 nt, Homo sapiens
  misc_RNA (1)...(19): siRNA sense strand
gagaugggacucgacauga

SEQ ID NO: 535652 - RNA, 19 nt, Homo sapiens
  misc_RNA (1)...(19): siRNA sense strand
gaacguugccauggagaug

SEQ ID NO: 535653 - RNA, 19 nt, Homo sapiens
  misc_RNA (1)...(19): siRNA sense strand
ugaaggcgcuggccguucu

SEQ ID NO: 535654 - RNA, 19 nt, Homo sapiens
  misc_RNA (1)...(19): siRNA sense strand
gcacuguccuguguauuuu

SEQ ID NO: 535655 - RNA, 19 nt, Homo sapiens
  misc_RNA (1)...(19): siRNA sense strand
gauauuuccaggccugauu

SEQ ID NO: 535656 - RNA, 19 nt, Homo sapiens
  misc_RNA (1)...(19): siRNA sense strand
gaugggacucgacaugauu

SEQ ID NO: 535657 - RNA, 19 nt, Homo sapiens
  misc_RNA (1)...(19): siRNA sense strand
cgagguggaucugaacaug

SEQ ID NO: 535658 - RNA, 19 nt, Homo sapiens
  misc_RNA (1)...(19): siRNA sense strand
ggacauagagaagaucaag

SEQ ID NO: 535659 - RNA, 19 nt, Homo sapiens
  misc_RNA (1)...(19): siRNA sense strand
ggaacauggaccucuacua

SEQ ID NO: 535660 - RNA, 19 nt, Homo sapiens
  misc_RNA (1)...(19): siRNA sense strand
ggagauggcagaccugaac

SEQ ID NO: 535661 - RNA, 19 nt, Homo sapiens
  misc_RNA (1)...(19): siRNA sense strand
gaccuuggccaaugucaug

SEQ ID NO: 535662 - RNA, 19 nt, Homo sapiens
  misc_RNA (1)...(19): siRNA sense strand
cagcugggaaggaggcuua

SEQ ID NO: 535663 - RNA, 19 nt, Homo sapiens
  misc_RNA (1)...(19): siRNA sense strand
guugacauacuuucuagaa

SEQ ID NO: 535664 - RNA, 19 nt, Homo sapiens
  misc_RNA (1)...(19): siRNA sense strand
caucagccgccucuuagaa

SEQ ID NO: 535665 - RNA, 19 nt, Homo sapiens
  misc_RNA (1)...(19): siRNA sense strand
gauucgcacuguccugugu

SEQ ID NO: 535666 - RNA, 19 nt, Homo sapiens
  misc_RNA (1)...(19): siRNA sense strand
ucaacuaccagucuuacaa

SEQ ID NO: 535667 - RNA, 19 nt, Homo sapiens
  misc_RNA (1)...(19): siRNA sense strand
cgagaucaucgccgacuuu

SEQ ID NO: 535668 - RNA, 19 nt, Homo sapiens
  misc_RNA (1)...(19): siRNA sense strand
uugcugacaucguggguuu

SEQ ID NO: 535669 - RNA, 19 nt, Homo sapiens
  misc_RNA (1)...(19): siRNA sense strand
caacaggcgcauccucuuc

SEQ ID NO: 535670 - RNA, 19 nt, Homo sapiens
  misc_RNA (1)...(19): siRNA sense strand
ugucuaccuucuaauauuc

SEQ ID NO: 535671 - RNA, 19 nt, Homo sapiens
  misc_RNA (1)...(19): siRNA sense strand
gcucaugcacugccggaaa

SEQ ID NO: 535672 - RNA, 19 nt, Homo sapiens
  misc_RNA (1)...(19): siRNA sense strand
gacccuagcgugcuugaau

SEQ ID NO: 535673 - RNA, 19 nt, Homo sapiens
  misc_RNA (1)...(19): siRNA sense strand
gacgugugguccaaugaug

SEQ ID NO: 535674 - RNA, 19 nt, Homo sapiens
  misc_RNA (1)...(19): siRNA sense strand
gagaggauuuuccacaaga

SEQ ID NO: 535675 - RNA, 19 nt, Homo sapiens
  misc_RNA (1)...(19): siRNA sense strand
gaaggcaggacugauggaa

SEQ ID NO: 535676 - RNA, 19 nt, Homo sapiens
  misc_RNA (1)...(19): siRNA sense strand
gacaagcggagggcauuaa

SEQ ID NO: 535677 - RNA, 19 nt, Homo sapiens
  misc_RNA (1)...(19): siRNA sense strand
ccagggaagguucauauca

SEQ ID NO: 535678 - RNA, 19 nt, Homo sapiens
  misc_RNA (1)...(19): siRNA sense strand
gaaaacucauaacaucgaa

SEQ ID NO: 535679 - RNA, 19 nt, Homo sapiens
  misc_RNA (1)...(19): siRNA sense strand
ugagcacgcuggcggacuu

SEQ ID NO: 535680 - RNA, 19 nt, Homo sapiens
  misc_RNA (1)...(19): siRNA sense strand
gcggagggcauuaagaaca

SEQ ID NO: 535681 - RNA, 19 nt, Homo sapiens
  misc_RNA (1)...(19): siRNA sense strand
cuagaaggcaggacugaug

SEQ ID NO: 535682 - RNA, 19 nt, Homo sapiens
  misc_RNA (1)...(19): siRNA sense strand
uguuugacguucuggauga

SEQ ID NO: 535683 - RNA, 19 nt, Homo sapiens
  misc_RNA (1)...(19): siRNA sense strand
caaugugagcauccuguuu

SEQ ID NO: 535684 - RNA, 19 nt, Homo sapiens
  misc_RNA (1)...(19): siRNA sense strand
ucccaucgccgaaagauau

SEQ ID NO: 535685 - RNA, 19 nt, Homo sapiens
  misc_RNA (1)...(19): siRNA sense strand
ucggcaaguucgaugaauu

SEQ ID NO: 535686 - RNA, 19 nt, Homo sapiens
  misc_RNA (1)...(19): siRNA sense strand
ggcaaaggcgagauguuga

SEQ ID NO: 535687 - RNA, 19 nt, Homo sapiens
  misc_RNA (1)...(19): siRNA sense strand
ugaaaucaacuaccagucu

SEQ ID NO: 535688 - RNA, 19 nt, Homo sapiens
  misc_RNA (1)...(19): siRNA sense strand
uggaugaaaucaacuacca

SEQ ID NO: 535689 - RNA, 19 nt, Homo sapiens
  misc_RNA (1)...(19): siRNA sense strand
aagcggagggcauuaagaa

SEQ ID NO: 535690 - RNA, 19 nt, Homo sapiens
  misc_RNA (1)...(19): siRNA sense strand
agacgacccuagcgugcuu

SEQ ID NO: 535691 - RNA, 19 nt, Homo sapiens
  misc_RNA (1)...(19): siRNA sense strand
ccuccgaguuggcaucaau

SEQ ID NO: 535692 - RNA, 19 nt, Homo sapiens
  misc_RNA (1)...(19): siRNA sense strand
gagcuggacggcaacaaca

SEQ ID NO: 535693 - RNA, 19 nt, Homo sapiens
  misc_RNA (1)...(19): siRNA sense strand
acauggaccucuacuacca

SEQ ID NO: 535694 - RNA, 19 nt, Homo sapiens
  misc_RNA (1)...(19): siRNA sense strand
guccaacccucggaacaug

SEQ ID NO: 535695 - RNA, 19 nt, Homo sapiens
  misc_RNA (1)...(19): siRNA sense strand
aaugugagcauccuguuug

SEQ ID NO: 535696 - RNA, 19 nt, Homo sapiens
  misc_RNA (1)...(19): siRNA sense strand
cgauucagauucgcacugu

SEQ ID NO: 535697 - RNA, 19 nt, Homo sapiens
  misc_RNA (1)...(19): siRNA sense strand
ccuugucuaccuucuaaua

SEQ ID NO: 535698 - RNA, 19 nt, Homo sapiens
  misc_RNA (1)...(19): siRNA sense strand
ucuuuacccugaaguacaa

SEQ ID NO: 535699 - RNA, 19 nt, Homo sapiens
  misc_RNA (1)...(19): siRNA sense strand
ugagaggaacaguuucuug

SEQ ID NO: 535700 - RNA, 19 nt, Homo sapiens
  misc_RNA (1)...(19): siRNA sense strand
gaauggggacuacgaggua

SEQ ID NO: 535701 - RNA, 19 nt, Homo sapiens
  misc_RNA (1)...(19): siRNA sense strand
gacuuuguccuccgaguug

SEQ ID NO: 535702 - RNA, 19 nt, Homo sapiens
  misc_RNA (1)...(19): siRNA sense strand
aaaucaacuaccagucuua

SEQ ID NO: 535703 - RNA, 19 nt, Homo sapiens
  misc_RNA (1)...(19): siRNA sense strand
ugagauguuugacguucug

SEQ ID NO: 535704 - RNA, 19 nt, Homo sapiens
  misc_RNA (1)...(19): siRNA sense strand
cgcacuguccuguguauuu

SEQ ID NO: 535705 - RNA, 19 nt, Homo sapiens
  misc_RNA (1)...(19): siRNA sense strand
gagaucaucgccgacuuug

SEQ ID NO: 535706 - RNA, 19 nt, Homo sapiens
  misc_RNA (1)...(19): siRNA sense strand
ugggagagcuggccuucag

SEQ ID NO: 535707 - RNA, 19 nt, Homo sapiens
  misc_RNA (1)...(19): siRNA sense strand
agaaggcaaugaccgcuaa

SEQ ID NO: 535708 - RNA, 19 nt, Homo sapiens
  misc_RNA (1)...(19): siRNA sense strand
uaaaggaggcgauaucucu

SEQ ID NO: 535709 - RNA, 19 nt, Homo sapiens
  misc_RNA (1)...(19): siRNA sense strand
ggcaaugaccgcuaaagga

SEQ ID NO: 535710 - RNA, 19 nt, Homo sapiens
  misc_RNA (1)...(19): siRNA sense strand
gcagaacuaccuggacuuc

SEQ ID NO: 535711 - RNA, 19 nt, Homo sapiens
  misc_RNA (1)...(19): siRNA sense strand
aaccagaaccagacuagaa

SEQ ID NO: 535712 - RNA, 19 nt, Homo sapiens
  misc_RNA (1)...(19): siRNA sense strand
agaccaaaaucaagaacua

SEQ ID NO: 535713 - RNA, 19 nt, Homo sapiens
  misc_RNA (1)...(19): siRNA sense strand
gaaggcaaugaccgcuaaa

SEQ ID NO: 535714 - RNA, 19 nt, Homo sapiens
  misc_RNA (1)...(19): siRNA sense strand
gaaugguaccagcgugugu

SEQ ID NO: 535715 - RNA, 19 nt, Homo sapiens
  misc_RNA (1)...(19): siRNA sense strand
gcuaaaggaggcgauaucu

SEQ ID NO: 535716 - RNA, 19 nt, Homo sapiens
  misc_RNA (1)...(19): siRNA sense strand
ccacauccugggucacaga

SEQ ID NO: 535717 - RNA, 19 nt, Homo sapiens
  misc_RNA (1)...(19): siRNA sense strand
ccaaccagaaccagacuag

SEQ ID NO: 535718 - RNA, 19 nt, Homo sapiens
  misc_RNA (1)...(19): siRNA sense strand
ccaaacagcugcuuuauuu

SEQ ID NO: 535719 - RNA, 19 nt, Homo sapiens
  misc_RNA (1)...(19): siRNA sense strand
cgauuacgcuucagagaua

SEQ ID NO: 535720 - RNA, 19 nt, Homo sapiens
  misc_RNA (1)...(19): siRNA sense strand
ugauaaagcuccaguugaa

SEQ ID NO: 535721 - RNA, 19 nt, Homo sapiens
  misc_RNA (1)...(19): siRNA sense strand
gagaaauaccgaccuaaga

SEQ ID NO: 535722 - RNA, 19 nt, Homo sapiens
  misc_RNA (1)...(19): siRNA sense strand
gaaauaccgaccuaagaug

SEQ ID NO: 535723 - RNA, 19 nt, Homo sapiens
  misc_RNA (1)...(19): siRNA sense strand
ucacagaggaacuuaagaa

SEQ ID NO: 535724 - RNA, 19 nt, Homo sapiens
  misc_RNA (1)...(19): siRNA sense strand
gcauugcuguguucaguag

SEQ ID NO: 535725 - RNA, 19 nt, Homo sapiens
  misc_RNA (1)...(19): siRNA sense strand
ggagaaauaccgaccuaag

SEQ ID NO: 535726 - RNA, 19 nt, Homo sapiens
  misc_RNA (1)...(19): siRNA sense strand
gggcauugcuguguucagu

SEQ ID NO: 535727 - RNA, 19 nt, Homo sapiens
  misc_RNA (1)...(19): siRNA sense strand
aguauggagugacgacuuu

SEQ ID NO: 535728 - RNA, 19 nt, Homo sapiens
  misc_RNA (1)...(19): siRNA sense strand
ccaaugcuacucucaacaa

SEQ ID NO: 535729 - RNA, 19 nt, Homo sapiens
  misc_RNA (1)...(19): siRNA sense strand
gauaaagcuccaguugaaa

SEQ ID NO: 535730 - RNA, 19 nt, Homo sapiens
  misc_RNA (1)...(19): siRNA sense strand
cgacuuugguucgaguuug

SEQ ID NO: 535731 - RNA, 19 nt, Homo sapiens
  misc_RNA (1)...(19): siRNA sense strand
caacaaguucacagaggaa

SEQ ID NO: 535732 - RNA, 19 nt, Homo sapiens
  misc_RNA (1)...(19): siRNA sense strand
gaguuugugaugcuacaua

SEQ ID NO: 535733 - RNA, 19 nt, Homo sapiens
  misc_RNA (1)...(19): siRNA sense strand
augcuacucucaacaaguu

SEQ ID NO: 535734 - RNA, 19 nt, Homo sapiens
  misc_RNA (1)...(19): siRNA sense strand
aagaugcgauuacgcuuca

SEQ ID NO: 535735 - RNA, 19 nt, Homo sapiens
  misc_RNA (1)...(19): siRNA sense strand
agaaauaccgaccuaagau

SEQ ID NO: 535736 - RNA, 19 nt, Homo sapiens
  misc_RNA (1)...(19): siRNA sense strand
gugaugcuacauaugauaa

SEQ ID NO: 535737 - RNA, 19 nt, Homo sapiens
  misc_RNA (1)...(19): siRNA sense strand
aaacagcugcuuuauuugg

SEQ ID NO: 535738 - RNA, 19 nt, Homo sapiens
  misc_RNA (1)...(19): siRNA sense strand
cuuaagaaguauggaguga

SEQ ID NO: 535739 - RNA, 19 nt, Homo sapiens
  misc_RNA (1)...(19): siRNA sense strand
uaugauaaagcuccaguug

SEQ ID NO: 535740 - RNA, 19 nt, Homo sapiens
  misc_RNA (1)...(19): siRNA sense strand
gaugcuacauaugauaaag

SEQ ID NO: 535741 - RNA, 19 nt, Homo sapiens
  misc_RNA (1)...(19): siRNA sense strand
gcgauuacgcuucagagau

SEQ ID NO: 535742 - RNA, 19 nt, Homo sapiens
  misc_RNA (1)...(19): siRNA sense strand
ucacaacccuaccaaugcu

SEQ ID NO: 535743 - RNA, 19 nt, Homo sapiens
  misc_RNA (1)...(19): siRNA sense strand
gacuuugguucgaguuugu

SEQ ID NO: 535744 - RNA, 19 nt, Homo sapiens
  misc_RNA (1)...(19): siRNA sense strand
gaccuaagaugcgauuacg

SEQ ID NO: 535745 - RNA, 19 nt, Homo sapiens
  misc_RNA (1)...(19): siRNA sense strand
caaugcuacucucaacaag

SEQ ID NO: 535746 - RNA, 19 nt, Homo sapiens
  misc_RNA (1)...(19): siRNA sense strand
uuggagaaauaccgaccua

SEQ ID NO: 535747 - RNA, 19 nt, Homo sapiens
  misc_RNA (1)...(19): siRNA sense strand
guucgaguuugugaugcua

SEQ ID NO: 535748 - RNA, 19 nt, Homo sapiens
  misc_RNA (1)...(19): siRNA sense strand
uuugugaugcuacauauga

SEQ ID NO: 535749 - RNA, 19 nt, Homo sapiens
  misc_RNA (1)...(19): siRNA sense strand
uaacucacaacccuaccaa

SEQ ID NO: 535750 - RNA, 19 nt, Homo sapiens
  misc_RNA (1)...(19): siRNA sense strand
gaaggggagcguucaauuc

SEQ ID NO: 535751 - RNA, 19 nt, Homo sapiens
  misc_RNA (1)...(19): siRNA sense strand
acucacaacccuaccaaug

SEQ ID NO: 535752 - RNA, 19 nt, Homo sapiens
  misc_RNA (1)...(19): siRNA sense strand
gagcguucaauuccaaaca

SEQ ID NO: 535753 - RNA, 19 nt, Homo sapiens
  misc_RNA (1)...(19): siRNA sense strand
gcugcuuuauuuggagaaa

SEQ ID NO: 535754 - RNA, 19 nt, Homo sapiens
  misc_RNA (1)...(19): siRNA sense strand
uccaaacagcugcuuuauu

SEQ ID NO: 535755 - RNA, 19 nt, Homo sapiens
  misc_RNA (1)...(19): siRNA sense strand
uaccaaugcuacucucaac

SEQ ID NO: 535756 - RNA, 19 nt, Homo sapiens
  misc_RNA (1)...(19): siRNA sense strand
aacagcugcuuuauuugga

SEQ ID NO: 535757 - RNA, 19 nt, Homo sapiens
  misc_RNA (1)...(19): siRNA sense strand
ugugaugcuacauaugaua

SEQ ID NO: 535758 - RNA, 19 nt, Homo sapiens
  misc_RNA (1)...(19): siRNA sense strand
auuccaaacagcugcuuua

SEQ ID NO: 535759 - RNA, 19 nt, Homo sapiens
  misc_RNA (1)...(19): siRNA sense strand
ccaaacagcugcuuuauuu

SEQ ID NO: 535760 - RNA, 19 nt, Homo sapiens
  misc_RNA (1)...(19): siRNA sense strand
cgauuacgcuucagagaua

SEQ ID NO: 535761 - RNA, 19 nt, Homo sapiens
  misc_RNA (1)...(19): siRNA sense strand
ugauaaagcuccaguugaa

SEQ ID NO: 535762 - RNA, 19 nt, Homo sapiens
  misc_RNA (1)...(19): siRNA sense strand
gagaaauaccgaccuaaga

SEQ ID NO: 535763 - RNA, 19 nt, Homo sapiens
  misc_RNA (1)...(19): siRNA sense strand
gaaauaccgaccuaagaug

SEQ ID NO: 535764 - RNA, 19 nt, Homo sapiens
  misc_RNA (1)...(19): siRNA sense strand
ucacagaggaacuuaagaa

SEQ ID NO: 535765 - RNA, 19 nt, Homo sapiens
  misc_RNA (1)...(19): siRNA sense strand
gcauugcuguguucaguag

SEQ ID NO: 535766 - RNA, 19 nt, Homo sapiens
  misc_RNA (1)...(19): siRNA sense strand
ggagaaauaccgaccuaag

SEQ ID NO: 535767 - RNA, 19 nt, Homo sapiens
  misc_RNA (1)...(19): siRNA sense strand
gggcauugcuguguucagu

SEQ ID NO: 535768 - RNA, 19 nt, Homo sapiens
  misc_RNA (1)...(19): siRNA sense strand
aguauggagugacgacuuu

SEQ ID NO: 535769 - RNA, 19 nt, Homo sapiens
  misc_RNA (1)...(19): siRNA sense strand
ccaaugcuacucucaacaa

SEQ ID NO: 535770 - RNA, 19 nt, Homo sapiens
  misc_RNA (1)...(19): siRNA sense strand
gauaaagcuccaguugaaa

SEQ ID NO: 535771 - RNA, 19 nt, Homo sapiens
  misc_RNA (1)...(19): siRNA sense strand
cgacuuugguucgaguuug

SEQ ID NO: 535772 - RNA, 19 nt, Homo sapiens
  misc_RNA (1)...(19): siRNA sense strand
caacaaguucacagaggaa

SEQ ID NO: 535773 - RNA, 19 nt, Homo sapiens
  misc_RNA (1)...(19): siRNA sense strand
gaguuugugaugcuacaua

SEQ ID NO: 535774 - RNA, 19 nt, Homo sapiens
  misc_RNA (1)...(19): siRNA sense strand
augcuacucucaacaaguu

SEQ ID NO: 535775 - RNA, 19 nt, Homo sapiens
  misc_RNA (1)...(19): siRNA sense strand
aagaugcgauuacgcuuca

SEQ ID NO: 535776 - RNA, 19 nt, Homo sapiens
  misc_RNA (1)...(19): siRNA sense strand
agaaauaccgaccuaagau

SEQ ID NO: 535777 - RNA, 19 nt, Homo sapiens
  misc_RNA (1)...(19): siRNA sense strand
gugaugcuacauaugauaa

SEQ ID NO: 535778 - RNA, 19 nt, Homo sapiens
  misc_RNA (1)...(19): siRNA sense strand
aaacagcugcuuuauuugg

SEQ ID NO: 535779 - RNA, 19 nt, Homo sapiens
  misc_RNA (1)...(19): siRNA sense strand
cuuaagaaguauggaguga

SEQ ID NO: 535780 - RNA, 19 nt, Homo sapiens
  misc_RNA (1)...(19): siRNA sense strand
uaugauaaagcuccaguug

SEQ ID NO: 535781 - RNA, 19 nt, Homo sapiens
  misc_RNA (1)...(19): siRNA sense strand
gaugcuacauaugauaaag

SEQ ID NO: 535782 - RNA, 19 nt, Homo sapiens
  misc_RNA (1)...(19): siRNA sense strand
gcgauuacgcuucagagau

SEQ ID NO: 535783 - RNA, 19 nt, Homo sapiens
  misc_RNA (1)...(19): siRNA sense strand
ucacaacccuaccaaugcu

SEQ ID NO: 535784 - RNA, 19 nt, Homo sapiens
  misc_RNA (1)...(19): siRNA sense strand
gacuuugguucgaguuugu

SEQ ID NO: 535785 - RNA, 19 nt, Homo sapiens
  misc_RNA (1)...(19): siRNA sense strand
gaccuaagaugcgauuacg

SEQ ID NO: 535786 - RNA, 19 nt, Homo sapiens
  misc_RNA (1)...(19): siRNA sense strand
caaugcuacucucaacaag

SEQ ID NO: 535787 - RNA, 19 nt, Homo sapiens
  misc_RNA (1)...(19): siRNA sense strand
uuggagaaauaccgaccua

SEQ ID NO: 535788 - RNA, 19 nt, Homo sapiens
  misc_RNA (1)...(19): siRNA sense strand
guucgaguuugugaugcua

SEQ ID NO: 535789 - RNA, 19 nt, Homo sapiens
  misc_RNA (1)...(19): siRNA sense strand
uuugugaugcuacauauga

SEQ ID NO: 535790 - RNA, 19 nt, Homo sapiens
  misc_RNA (1)...(19): siRNA sense strand
uaacucacaacccuaccaa

SEQ ID NO: 535791 - RNA, 19 nt, Homo sapiens
  misc_RNA (1)...(19): siRNA sense strand
gaaggggagcguucaauuc

SEQ ID NO: 535792 - RNA, 19 nt, Homo sapiens
  misc_RNA (1)...(19): siRNA sense strand
acucacaacccuaccaaug

SEQ ID NO: 535793 - RNA, 19 nt, Homo sapiens
  misc_RNA (1)...(19): siRNA sense strand
gagcguucaauuccaaaca

SEQ ID NO: 535794 - RNA, 19 nt, Homo sapiens
  misc_RNA (1)...(19): siRNA sense strand
gcugcuuuauuuggagaaa

SEQ ID NO: 535795 - RNA, 19 nt, Homo sapiens
  misc_RNA (1)...(19): siRNA sense strand
uccaaacagcugcuuuauu

SEQ ID NO: 535796 - RNA, 19 nt, Homo sapiens
  misc_RNA (1)...(19): siRNA sense strand
uaccaaugcuacucucaac

SEQ ID NO: 535797 - RNA, 19 nt, Homo sapiens
  misc_RNA (1)...(19): siRNA sense strand
aacagcugcuuuauuugga

SEQ ID NO: 535798 - RNA, 19 nt, Homo sapiens
  misc_RNA (1)...(19): siRNA sense strand
ugugaugcuacauaugaua

SEQ ID NO: 535799 - RNA, 19 nt, Homo sapiens
  misc_RNA (1)...(19): siRNA sense strand
auuccaaacagcugcuuua

SEQ ID NO: 535800 - RNA, 19 nt, Homo sapiens
  misc_RNA (1)...(19): siRNA sense strand
ccaaacagcugcuuuauuu

SEQ ID NO: 535801 - RNA, 19 nt, Homo sapiens
  misc_RNA (1)...(19): siRNA sense strand
ugauaaagcuccaguugaa

SEQ ID NO: 535802 - RNA, 19 nt, Homo sapiens
  misc_RNA (1)...(19): siRNA sense strand
ucacagaggaacuuaagaa

SEQ ID NO: 535803 - RNA, 19 nt, Homo sapiens
  misc_RNA (1)...(19): siRNA sense strand
aguauggagugacgacuuu

SEQ ID NO: 535804 - RNA, 19 nt, Homo sapiens
  misc_RNA (1)...(19): siRNA sense strand
ccaaugcuacucucaacaa

SEQ ID NO: 535805 - RNA, 19 nt, Homo sapiens
  misc_RNA (1)...(19): siRNA sense strand
gauaaagcuccaguugaaa

SEQ ID NO: 535806 - RNA, 19 nt, Homo sapiens
  misc_RNA (1)...(19): siRNA sense strand
cgacuuugguucgaguuug

SEQ ID NO: 535807 - RNA, 19 nt, Homo sapiens
  misc_RNA (1)...(19): siRNA sense strand
caacaaguucacagaggaa

SEQ ID NO: 535808 - RNA, 19 nt, Homo sapiens
  misc_RNA (1)...(19): siRNA sense strand
gaguuugugaugcuacaua

SEQ ID NO: 535809 - RNA, 19 nt, Homo sapiens
  misc_RNA (1)...(19): siRNA sense strand
augcuacucucaacaaguu

SEQ ID NO: 535810 - RNA, 19 nt, Homo sapiens
  misc_RNA (1)...(19): siRNA sense strand
gugaugcuacauaugauaa

SEQ ID NO: 535811 - RNA, 19 nt, Homo sapiens
  misc_RNA (1)...(19): siRNA sense strand
aaacagcugcuuuauuugg

SEQ ID NO: 535812 - RNA, 19 nt, Homo sapiens
  misc_RNA (1)...(19): siRNA sense strand
cuuaagaaguauggaguga

SEQ ID NO: 535813 - RNA, 19 nt, Homo sapiens
  misc_RNA (1)...(19): siRNA sense strand
uaugauaaagcuccaguug

SEQ ID NO: 535814 - RNA, 19 nt, Homo sapiens
  misc_RNA (1)...(19): siRNA sense strand
gaugcuacauaugauaaag

SEQ ID NO: 535815 - RNA, 19 nt, Homo sapiens
  misc_RNA (1)...(19): siRNA sense strand
ucacaacccuaccaaugcu

SEQ ID NO: 535816 - RNA, 19 nt, Homo sapiens
  misc_RNA (1)...(19): siRNA sense strand
gacuuugguucgaguuugu

SEQ ID NO: 535817 - RNA, 19 nt, Homo sapiens
  misc_RNA (1)...(19): siRNA sense strand
caaugcuacucucaacaag

SEQ ID NO: 535818 - RNA, 19 nt, Homo sapiens
  misc_RNA (1)...(19): siRNA sense strand
uuggagaaauaccgaccua

SEQ ID NO: 535819 - RNA, 19 nt, Homo sapiens
  misc_RNA (1)...(19): siRNA sense strand
guucgaguuugugaugcua

SEQ ID NO: 535820 - RNA, 19 nt, Homo sapiens
  misc_RNA (1)...(19): siRNA sense strand
uaacucacaacccuaccaa

SEQ ID NO: 535821 - RNA, 19 nt, Homo sapiens
  misc_RNA (1)...(19): siRNA sense strand
uuugugaugcuacauauga

SEQ ID NO: 535822 - RNA, 19 nt, Homo sapiens
  misc_RNA (1)...(19): siRNA sense strand
acucacaacccuaccaaug

SEQ ID NO: 535823 - RNA, 19 nt, Homo sapiens
  misc_RNA (1)...(19): siRNA sense strand
gaaggggagcguucaauuc

SEQ ID NO: 535824 - RNA, 19 nt, Homo sapiens
  misc_RNA (1)...(19): siRNA sense strand
gagcguucaauuccaaaca

SEQ ID NO: 535825 - RNA, 19 nt, Homo sapiens
  misc_RNA (1)...(19): siRNA sense strand
gcugcuuuauuuggagaaa

SEQ ID NO: 535826 - RNA, 19 nt, Homo sapiens
  misc_RNA (1)...(19): siRNA sense strand
uaccaaugcuacucucaac

SEQ ID NO: 535827 - RNA, 19 nt, Homo sapiens
  misc_RNA (1)...(19): siRNA sense strand
aacagcugcuuuauuugga

SEQ ID NO: 535828 - RNA, 19 nt, Homo sapiens
  misc_RNA (1)...(19): siRNA sense strand
uccaaacagcugcuuuauu

SEQ ID NO: 535829 - RNA, 19 nt, Homo sapiens
  misc_RNA (1)...(19): siRNA sense strand
ugugaugcuacauaugaua

SEQ ID NO: 535830 - RNA, 19 nt, Homo sapiens
  misc_RNA (1)...(19): siRNA sense strand
auuccaaacagcugcuuua

SEQ ID NO: 535831 - RNA, 19 nt, Homo sapiens
  misc_RNA (1)...(19): siRNA sense strand
ccaaacagcugcuuuauuu

SEQ ID NO: 535832 - RNA, 19 nt, Homo sapiens
  misc_RNA (1)...(19): siRNA sense strand
cgauuacgcuucagagaua

SEQ ID NO: 535833 - RNA, 19 nt, Homo sapiens
  misc_RNA (1)...(19): siRNA sense strand
ugauaaagcuccaguugaa

SEQ ID NO: 535834 - RNA, 19 nt, Homo sapiens
  misc_RNA (1)...(19): siRNA sense strand
gagaaauaccgaccuaaga

SEQ ID NO: 535835 - RNA, 19 nt, Homo sapiens
  misc_RNA (1)...(19): siRNA sense strand
gaaauaccgaccuaagaug

SEQ ID NO: 535836 - RNA, 19 nt, Homo sapiens
  misc_RNA (1)...(19): siRNA sense strand
ucacagaggaacuuaagaa

SEQ ID NO: 535837 - RNA, 19 nt, Homo sapiens
  misc_RNA (1)...(19): siRNA sense strand
gcauugcuguguucaguag

SEQ ID NO: 535838 - RNA, 19 nt, Homo sapiens
  misc_RNA (1)...(19): siRNA sense strand
ggagaaauaccgaccuaag

SEQ ID NO: 535839 - RNA, 19 nt, Homo sapiens
  misc_RNA (1)...(19): siRNA sense strand
gggcauugcuguguucagu

SEQ ID NO: 535840 - RNA, 19 nt, Homo sapiens
  misc_RNA (1)...(19): siRNA sense strand
aguauggagugacgacuuu

SEQ ID NO: 535841 - RNA, 19 nt, Homo sapiens
  misc_RNA (1)...(19): siRNA sense strand
ccaaugcuacucucaacaa

SEQ ID NO: 535842 - RNA, 19 nt, Homo sapiens
  misc_RNA (1)...(19): siRNA sense strand
gauaaagcuccaguugaaa

SEQ ID NO: 535843 - RNA, 19 nt, Homo sapiens
  misc_RNA (1)...(19): siRNA sense strand
cgacuuugguucgaguuug

SEQ ID NO: 535844 - RNA, 19 nt, Homo sapiens
  misc_RNA (1)...(19): siRNA sense strand
caacaaguucacagaggaa

SEQ ID NO: 535845 - RNA, 19 nt, Homo sapiens
  misc_RNA (1)...(19): siRNA sense strand
gaguuugugaugcuacaua

SEQ ID NO: 535846 - RNA, 19 nt, Homo sapiens
  misc_RNA (1)...(19): siRNA sense strand
augcuacucucaacaaguu

SEQ ID NO: 535847 - RNA, 19 nt, Homo sapiens
  misc_RNA (1)...(19): siRNA sense strand
aagaugcgauuacgcuuca

SEQ ID NO: 535848 - RNA, 19 nt, Homo sapiens
  misc_RNA (1)...(19): siRNA sense strand
agaaauaccgaccuaagau

SEQ ID NO: 535849 - RNA, 19 nt, Homo sapiens
  misc_RNA (1)...(19): siRNA sense strand
gugaugcuacauaugauaa

SEQ ID NO: 535850 - RNA, 19 nt, Homo sapiens
  misc_RNA (1)...(19): siRNA sense strand
aaacagcugcuuuauuugg

SEQ ID NO: 535851 - RNA, 19 nt, Homo sapiens
  misc_RNA (1)...(19): siRNA sense strand
cuuaagaaguauggaguga

SEQ ID NO: 535852 - RNA, 19 nt, Homo sapiens
  misc_RNA (1)...(19): siRNA sense strand
uaugauaaagcuccaguug

SEQ ID NO: 535853 - RNA, 19 nt, Homo sapiens
  misc_RNA (1)...(19): siRNA sense strand
gaugcuacauaugauaaag

SEQ ID NO: 535854 - RNA, 19 nt, Homo sapiens
  misc_RNA (1)...(19): siRNA sense strand
gcgauuacgcuucagagau

SEQ ID NO: 535855 - RNA, 19 nt, Homo sapiens
  misc_RNA (1)...(19): siRNA sense strand
ucacaacccuaccaaugcu

SEQ ID NO: 535856 - RNA, 19 nt, Homo sapiens
  misc_RNA (1)...(19): siRNA sense strand
gacuuugguucgaguuugu

SEQ ID NO: 535857 - RNA, 19 nt, Homo sapiens
  misc_RNA (1)...(19): siRNA sense strand
gaccuaagaugcgauuacg

SEQ ID NO: 535858 - RNA, 19 nt, Homo sapiens
  misc_RNA (1)...(19): siRNA sense strand
caaugcuacucucaacaag

SEQ ID NO: 535859 - RNA, 19 nt, Homo sapiens
  misc_RNA (1)...(19): siRNA sense strand
uuggagaaauaccgaccua

SEQ ID NO: 535860 - RNA, 19 nt, Homo sapiens
  misc_RNA (1)...(19): siRNA sense strand
guucgaguuugugaugcua

SEQ ID NO: 535861 - RNA, 19 nt, Homo sapiens
  misc_RNA (1)...(19): siRNA sense strand
uuugugaugcuacauauga

SEQ ID NO: 535862 - RNA, 19 nt, Homo sapiens
  misc_RNA (1)...(19): siRNA sense strand
uaacucacaacccuaccaa

SEQ ID NO: 535863 - RNA, 19 nt, Homo sapiens
  misc_RNA (1)...(19): siRNA sense strand
gaaggggagcguucaauuc

SEQ ID NO: 535864 - RNA, 19 nt, Homo sapiens
  misc_RNA (1)...(19): siRNA sense strand
acucacaacccuaccaaug

SEQ ID NO: 535865 - RNA, 19 nt, Homo sapiens
  misc_RNA (1)...(19): siRNA sense strand
gagcguucaauuccaaaca

SEQ ID NO: 535866 - RNA, 19 nt, Homo sapiens
  misc_RNA (1)...(19): siRNA sense strand
gcugcuuuauuuggagaaa

SEQ ID NO: 535867 - RNA, 19 nt, Homo sapiens
  misc_RNA (1)...(19): siRNA sense strand
uccaaacagcugcuuuauu

SEQ ID NO: 535868 - RNA, 19 nt, Homo sapiens
  misc_RNA (1)...(19): siRNA sense strand
uaccaaugcuacucucaac

SEQ ID NO: 535869 - RNA, 19 nt, Homo sapiens
  misc_RNA (1)...(19): siRNA sense strand
aacagcugcuuuauuugga

SEQ ID NO: 535870 - RNA, 19 nt, Homo sapiens
  misc_RNA (1)...(19): siRNA sense strand
ugugaugcuacauaugaua

SEQ ID NO: 535871 - RNA, 19 nt, Homo sapiens
  misc_RNA (1)...(19): siRNA sense strand
auuccaaacagcugcuuua

SEQ ID NO: 535872 - RNA, 19 nt, Homo sapiens
  misc_RNA (1)...(19): siRNA sense strand
ccaaacagcugcuuuauuu

SEQ ID NO: 535873 - RNA, 19 nt, Homo sapiens
  misc_RNA (1)...(19): siRNA sense strand
cgauuacgcuucagagaua

SEQ ID NO: 535874 - RNA, 19 nt, Homo sapiens
  misc_RNA (1)...(19): siRNA sense strand
ugauaaagcuccaguugaa

SEQ ID NO: 535875 - RNA, 19 nt, Homo sapiens
  misc_RNA (1)...(19): siRNA sense strand
gagaaauaccgaccuaaga

SEQ ID NO: 535876 - RNA, 19 nt, Homo sapiens
  misc_RNA (1)...(19): siRNA sense strand
gaaauaccgaccuaagaug

SEQ ID NO: 535877 - RNA, 19 nt, Homo sapiens
  misc_RNA (1)...(19): siRNA sense strand
ucacagaggaacuuaagaa

SEQ ID NO: 535878 - RNA, 19 nt, Homo sapiens
  misc_RNA (1)...(19): siRNA sense strand
gcauugcuguguucaguag

SEQ ID NO: 535879 - RNA, 19 nt, Homo sapiens
  misc_RNA (1)...(19): siRNA sense strand
ggagaaauaccgaccuaag

SEQ ID NO: 535880 - RNA, 19 nt, Homo sapiens
  misc_RNA (1)...(19): siRNA sense strand
gggcauugcuguguucagu

SEQ ID NO: 535881 - RNA, 19 nt, Homo sapiens
  misc_RNA (1)...(19): siRNA sense strand
aguauggagugacgacuuu

SEQ ID NO: 535882 - RNA, 19 nt, Homo sapiens
  misc_RNA (1)...(19): siRNA sense strand
ccaaugcuacucucaacaa

SEQ ID NO: 535883 - RNA, 19 nt, Homo sapiens
  misc_RNA (1)...(19): siRNA sense strand
gauaaagcuccaguugaaa

SEQ ID NO: 535884 - RNA, 19 nt, Homo sapiens
  misc_RNA (1)...(19): siRNA sense strand
cgacuuugguucgaguuug

SEQ ID NO: 535885 - RNA, 19 nt, Homo sapiens
  misc_RNA (1)...(19): siRNA sense strand
caacaaguucacagaggaa

SEQ ID NO: 535886 - RNA, 19 nt, Homo sapiens
  misc_RNA (1)...(19): siRNA sense strand
gaguuugugaugcuacaua

SEQ ID NO: 535887 - RNA, 19 nt, Homo sapiens
  misc_RNA (1)...(19): siRNA sense strand
augcuacucucaacaaguu

SEQ ID NO: 535888 - RNA, 19 nt, Homo sapiens
  misc_RNA (1)...(19): siRNA sense strand
aagaugcgauuacgcuuca

SEQ ID NO: 535889 - RNA, 19 nt, Homo sapiens
  misc_RNA (1)...(19): siRNA sense strand
agaaauaccgaccuaagau

SEQ ID NO: 535890 - RNA, 19 nt, Homo sapiens
  misc_RNA (1)...(19): siRNA sense strand
gugaugcuacauaugauaa

SEQ ID NO: 535891 - RNA, 19 nt, Homo sapiens
  misc_RNA (1)...(19): siRNA sense strand
aaacagcugcuuuauuugg

SEQ ID NO: 535892 - RNA, 19 nt, Homo sapiens
  misc_RNA (1)...(19): siRNA sense strand
cuuaagaaguauggaguga

SEQ ID NO: 535893 - RNA, 19 nt, Homo sapiens
  misc_RNA (1)...(19): siRNA sense strand
uaugauaaagcuccaguug

SEQ ID NO: 535894 - RNA, 19 nt, Homo sapiens
  misc_RNA (1)...(19): siRNA sense strand
gaugcuacauaugauaaag

SEQ ID NO: 535895 - RNA, 19 nt, Homo sapiens
  misc_RNA (1)...(19): siRNA sense strand
gcgauuacgcuucagagau

SEQ ID NO: 535896 - RNA, 19 nt, Homo sapiens
  misc_RNA (1)...(19): siRNA sense strand
ucacaacccuaccaaugcu

SEQ ID NO: 535897 - RNA, 19 nt, Homo sapiens
  misc_RNA (1)...(19): siRNA sense strand
gacuuugguucgaguuugu

SEQ ID NO: 535898 - RNA, 19 nt, Homo sapiens
  misc_RNA (1)...(19): siRNA sense strand
gaccuaagaugcgauuacg

SEQ ID NO: 535899 - RNA, 19 nt, Homo sapiens
  misc_RNA (1)...(19): siRNA sense strand
caaugcuacucucaacaag

SEQ ID NO: 535900 - RNA, 19 nt, Homo sapiens
  misc_RNA (1)...(19): siRNA sense strand
uuggagaaauaccgaccua

SEQ ID NO: 535901 - RNA, 19 nt, Homo sapiens
  misc_RNA (1)...(19): siRNA sense strand
guucgaguuugugaugcua

SEQ ID NO: 535902 - RNA, 19 nt, Homo sapiens
  misc_RNA (1)...(19): siRNA sense strand
uuugugaugcuacauauga

SEQ ID NO: 535903 - RNA, 19 nt, Homo sapiens
  misc_RNA (1)...(19): siRNA sense strand
uaacucacaacccuaccaa

SEQ ID NO: 535904 - RNA, 19 nt, Homo sapiens
  misc_RNA (1)...(19): siRNA sense strand
gaaggggagcguucaauuc

SEQ ID NO: 535905 - RNA, 19 nt, Homo sapiens
  misc_RNA (1)...(19): siRNA sense strand
acucacaacccuaccaaug

SEQ ID NO: 535906 - RNA, 19 nt, Homo sapiens
  misc_RNA (1)...(19): siRNA sense strand
gagcguucaauuccaaaca

SEQ ID NO: 535907 - RNA, 19 nt, Homo sapiens
  misc_RNA (1)...(19): siRNA sense strand
gcugcuuuauuuggagaaa

SEQ ID NO: 535908 - RNA, 19 nt, Homo sapiens
  misc_RNA (1)...(19): siRNA sense strand
uccaaacagcugcuuuauu

SEQ ID NO: 535909 - RNA, 19 nt, Homo sapiens
  misc_RNA (1)...(19): siRNA sense strand
uaccaaugcuacucucaac

SEQ ID NO: 535910 - RNA, 19 nt, Homo sapiens
  misc_RNA (1)...(19): siRNA sense strand
aacagcugcuuuauuugga

SEQ ID NO: 535911 - RNA, 19 nt, Homo sapiens
  misc_RNA (1)...(19): siRNA sense strand
ugugaugcuacauaugaua

SEQ ID NO: 535912 - RNA, 19 nt, Homo sapiens
  misc_RNA (1)...(19): siRNA sense strand
auuccaaacagcugcuuua

SEQ ID NO: 535913 - RNA, 19 nt, Homo sapiens
  misc_RNA (1)...(19): siRNA sense strand
ccaaacagcugcuuuauuu

SEQ ID NO: 535914 - RNA, 19 nt, Homo sapiens
  misc_RNA (1)...(19): siRNA sense strand
ugauaaagcuccaguugaa

SEQ ID NO: 535915 - RNA, 19 nt, Homo sapiens
  misc_RNA (1)...(19): siRNA sense strand
ucacagaggaacuuaagaa

SEQ ID NO: 535916 - RNA, 19 nt, Homo sapiens
  misc_RNA (1)...(19): siRNA sense strand
aguauggagugacgacuuu

SEQ ID NO: 535917 - RNA, 19 nt, Homo sapiens
  misc_RNA (1)...(19): siRNA sense strand
ccaaugcuacucucaacaa

SEQ ID NO: 535918 - RNA, 19 nt, Homo sapiens
  misc_RNA (1)...(19): siRNA sense strand
gauaaagcuccaguugaaa

SEQ ID NO: 535919 - RNA, 19 nt, Homo sapiens
  misc_RNA (1)...(19): siRNA sense strand
cgacuuugguucgaguuug

SEQ ID NO: 535920 - RNA, 19 nt, Homo sapiens
  misc_RNA (1)...(19): siRNA sense strand
caacaaguucacagaggaa

SEQ ID NO: 535921 - RNA, 19 nt, Homo sapiens
  misc_RNA (1)...(19): siRNA sense strand
gaguuugugaugcuacaua

SEQ ID NO: 535922 - RNA, 19 nt, Homo sapiens
  misc_RNA (1)...(19): siRNA sense strand
augcuacucucaacaaguu

SEQ ID NO: 535923 - RNA, 19 nt, Homo sapiens
  misc_RNA (1)...(19): siRNA sense strand
gugaugcuacauaugauaa

SEQ ID NO: 535924 - RNA, 19 nt, Homo sapiens
  misc_RNA (1)...(19): siRNA sense strand
aaacagcugcuuuauuugg

SEQ ID NO: 535925 - RNA, 19 nt, Homo sapiens
  misc_RNA (1)...(19): siRNA sense strand
cuuaagaaguauggaguga

SEQ ID NO: 535926 - RNA, 19 nt, Homo sapiens
  misc_RNA (1)...(19): siRNA sense strand
uaugauaaagcuccaguug

SEQ ID NO: 535927 - RNA, 19 nt, Homo sapiens
  misc_RNA (1)...(19): siRNA sense strand
gaugcuacauaugauaaag

SEQ ID NO: 535928 - RNA, 19 nt, Homo sapiens
  misc_RNA (1)...(19): siRNA sense strand
ucacaacccuaccaaugcu

SEQ ID NO: 535929 - RNA, 19 nt, Homo sapiens
  misc_RNA (1)...(19): siRNA sense strand
gacuuugguucgaguuugu

SEQ ID NO: 535930 - RNA, 19 nt, Homo sapiens
  misc_RNA (1)...(19): siRNA sense strand
caaugcuacucucaacaag

SEQ ID NO: 535931 - RNA, 19 nt, Homo sapiens
  misc_RNA (1)...(19): siRNA sense strand
uuggagaaauaccgaccua

SEQ ID NO: 535932 - RNA, 19 nt, Homo sapiens
  misc_RNA (1)...(19): siRNA sense strand
guucgaguuugugaugcua

SEQ ID NO: 535933 - RNA, 19 nt, Homo sapiens
  misc_RNA (1)...(19): siRNA sense strand
uaacucacaacccuaccaa

SEQ ID NO: 535934 - RNA, 19 nt, Homo sapiens
  misc_RNA (1)...(19): siRNA sense strand
uuugugaugcuacauauga

SEQ ID NO: 535935 - RNA, 19 nt, Homo sapiens
  misc_RNA (1)...(19): siRNA sense strand
acucacaacccuaccaaug

SEQ ID NO: 535936 - RNA, 19 nt, Homo sapiens
  misc_RNA (1)...(19): siRNA sense strand
gaaggggagcguucaauuc

SEQ ID NO: 535937 - RNA, 19 nt, Homo sapiens
  misc_RNA (1)...(19): siRNA sense strand
gagcguucaauuccaaaca

SEQ ID NO: 535938 - RNA, 19 nt, Homo sapiens
  misc_RNA (1)...(19): siRNA sense strand
gcugcuuuauuuggagaaa

SEQ ID NO: 535939 - RNA, 19 nt, Homo sapiens
  misc_RNA (1)...(19): siRNA sense strand
uaccaaugcuacucucaac

SEQ ID NO: 535940 - RNA, 19 nt, Homo sapiens
  misc_RNA (1)...(19): siRNA sense strand
aacagcugcuuuauuugga

SEQ ID NO: 535941 - RNA, 19 nt, Homo sapiens
  misc_RNA (1)...(19): siRNA sense strand
uccaaacagcugcuuuauu

SEQ ID NO: 535942 - RNA, 19 nt, Homo sapiens
  misc_RNA (1)...(19): siRNA sense strand
ugugaugcuacauaugaua

SEQ ID NO: 535943 - RNA, 19 nt, Homo sapiens
  misc_RNA (1)...(19): siRNA sense strand
auuccaaacagcugcuuua

SEQ ID NO: 535944 - RNA, 19 nt, Homo sapiens
  misc_RNA (1)...(19): siRNA sense strand
gaaacggucgcccagauca

SEQ ID NO: 535945 - RNA, 19 nt, Homo sapiens
  misc_RNA (1)...(19): siRNA sense strand
ggagguaaaguccaugguu

SEQ ID NO: 535946 - RNA, 19 nt, Homo sapiens
  misc_RNA (1)...(19): siRNA sense strand
ugagaggucagacuccuaa

SEQ ID NO: 535947 - RNA, 19 nt, Homo sapiens
  misc_RNA (1)...(19): siRNA sense strand
ccagaucaaggcucaugua

SEQ ID NO: 535948 - RNA, 19 nt, Homo sapiens
  misc_RNA (1)...(19): siRNA sense strand
gaggugaccggccaggaaa

SEQ ID NO: 535949 - RNA, 19 nt, Homo sapiens
  misc_RNA (1)...(19): siRNA sense strand
cccaggagcuacacaccuu

SEQ ID NO: 535950 - RNA, 19 nt, Homo sapiens
  misc_RNA (1)...(19): siRNA sense strand
ggaaacggucgcccagauc

SEQ ID NO: 535951 - RNA, 19 nt, Homo sapiens
  misc_RNA (1)...(19): siRNA sense strand
gaggucagacuccuaaggu

SEQ ID NO: 535952 - RNA, 19 nt, Homo sapiens
  misc_RNA (1)...(19): siRNA sense strand
aggaaacggucgcccagau

SEQ ID NO: 535953 - RNA, 19 nt, Homo sapiens
  misc_RNA (1)...(19): siRNA sense strand
ggcccugacuacccuggaa

SEQ ID NO: 535954 - RNA, 19 nt, Homo sapiens
  misc_RNA (1)...(19): siRNA sense strand
ccaaacagcugcuuuauuu

SEQ ID NO: 535955 - RNA, 19 nt, Homo sapiens
  misc_RNA (1)...(19): siRNA sense strand
cgauuacgcuucagagaua

SEQ ID NO: 535956 - RNA, 19 nt, Homo sapiens
  misc_RNA (1)...(19): siRNA sense strand
ugauaaagcuccaguugaa

SEQ ID NO: 535957 - RNA, 19 nt, Homo sapiens
  misc_RNA (1)...(19): siRNA sense strand
gagaaauaccgaccuaaga

SEQ ID NO: 535958 - RNA, 19 nt, Homo sapiens
  misc_RNA (1)...(19): siRNA sense strand
gaaauaccgaccuaagaug

SEQ ID NO: 535959 - RNA, 19 nt, Homo sapiens
  misc_RNA (1)...(19): siRNA sense strand
ucacagaggaacuuaagaa

SEQ ID NO: 535960 - RNA, 19 nt, Homo sapiens
  misc_RNA (1)...(19): siRNA sense strand
gcauugcuguguucaguag

SEQ ID NO: 535961 - RNA, 19 nt, Homo sapiens
  misc_RNA (1)...(19): siRNA sense strand
ggagaaauaccgaccuaag

SEQ ID NO: 535962 - RNA, 19 nt, Homo sapiens
  misc_RNA (1)...(19): siRNA sense strand
gggcauugcuguguucagu

SEQ ID NO: 535963 - RNA, 19 nt, Homo sapiens
  misc_RNA (1)...(19): siRNA sense strand
aguauggagugacgacuuu

SEQ ID NO: 535964 - RNA, 19 nt, Homo sapiens
  misc_RNA (1)...(19): siRNA sense strand
ccaaugcuacucucaacaa

SEQ ID NO: 535965 - RNA, 19 nt, Homo sapiens
  misc_RNA (1)...(19): siRNA sense strand
gauaaagcuccaguugaaa

SEQ ID NO: 535966 - RNA, 19 nt, Homo sapiens
  misc_RNA (1)...(19): siRNA sense strand
cgacuuugguucgaguuug

SEQ ID NO: 535967 - RNA, 19 nt, Homo sapiens
  misc_RNA (1)...(19): siRNA sense strand
caacaaguucacagaggaa

SEQ ID NO: 535968 - RNA, 19 nt, Homo sapiens
  misc_RNA (1)...(19): siRNA sense strand
gaguuugugaugcuacaua

SEQ ID NO: 535969 - RNA, 19 nt, Homo sapiens
  misc_RNA (1)...(19): siRNA sense strand
augcuacucucaacaaguu

SEQ ID NO: 535970 - RNA, 19 nt, Homo sapiens
  misc_RNA (1)...(19): siRNA sense strand
aagaugcgauuacgcuuca

SEQ ID NO: 535971 - RNA, 19 nt, Homo sapiens
  misc_RNA (1)...(19): siRNA sense strand
agaaauaccgaccuaagau

SEQ ID NO: 535972 - RNA, 19 nt, Homo sapiens
  misc_RNA (1)...(19): siRNA sense strand
gugaugcuacauaugauaa

SEQ ID NO: 535973 - RNA, 19 nt, Homo sapiens
  misc_RNA (1)...(19): siRNA sense strand
aaacagcugcuuuauuugg

SEQ ID NO: 535974 - RNA, 19 nt, Homo sapiens
  misc_RNA (1)...(19): siRNA sense strand
cuuaagaaguauggaguga

SEQ ID NO: 535975 - RNA, 19 nt, Homo sapiens
  misc_RNA (1)...(19): siRNA sense strand
uaugauaaagcuccaguug

SEQ ID NO: 535976 - RNA, 19 nt, Homo sapiens
  misc_RNA (1)...(19): siRNA sense strand
gaugcuacauaugauaaag

SEQ ID NO: 535977 - RNA, 19 nt, Homo sapiens
  misc_RNA (1)...(19): siRNA sense strand
gcgauuacgcuucagagau

SEQ ID NO: 535978 - RNA, 19 nt, Homo sapiens
  misc_RNA (1)...(19): siRNA sense strand
ucacaacccuaccaaugcu

SEQ ID NO: 535979 - RNA, 19 nt, Homo sapiens
  misc_RNA (1)...(19): siRNA sense strand
gacuuugguucgaguuugu

SEQ ID NO: 535980 - RNA, 19 nt, Homo sapiens
  misc_RNA (1)...(19): siRNA sense strand
gaccuaagaugcgauuacg

SEQ ID NO: 535981 - RNA, 19 nt, Homo sapiens
  misc_RNA (1)...(19): siRNA sense strand
caaugcuacucucaacaag

SEQ ID NO: 535982 - RNA, 19 nt, Homo sapiens
  misc_RNA (1)...(19): siRNA sense strand
uuggagaaauaccgaccua

SEQ ID NO: 535983 - RNA, 19 nt, Homo sapiens
  misc_RNA (1)...(19): siRNA sense strand
guucgaguuugugaugcua

SEQ ID NO: 535984 - RNA, 19 nt, Homo sapiens
  misc_RNA (1)...(19): siRNA sense strand
uuugugaugcuacauauga

SEQ ID NO: 535985 - RNA, 19 nt, Homo sapiens
  misc_RNA (1)...(19): siRNA sense strand
uaacucacaacccuaccaa

SEQ ID NO: 535986 - RNA, 19 nt, Homo sapiens
  misc_RNA (1)...(19): siRNA sense strand
gaaggggagcguucaauuc

SEQ ID NO: 535987 - RNA, 19 nt, Homo sapiens
  misc_RNA (1)...(19): siRNA sense strand
acucacaacccuaccaaug

SEQ ID NO: 535988 - RNA, 19 nt, Homo sapiens
  misc_RNA (1)...(19): siRNA sense strand
gagcguucaauuccaaaca

SEQ ID NO: 535989 - RNA, 19 nt, Homo sapiens
  misc_RNA (1)...(19): siRNA sense strand
gcugcuuuauuuggagaaa

SEQ ID NO: 535990 - RNA, 19 nt, Homo sapiens
  misc_RNA (1)...(19): siRNA sense strand
uccaaacagcugcuuuauu

SEQ ID NO: 535991 - RNA, 19 nt, Homo sapiens
  misc_RNA (1)...(19): siRNA sense strand
uaccaaugcuacucucaac

SEQ ID NO: 535992 - RNA, 19 nt, Homo sapiens
  misc_RNA (1)...(19): siRNA sense strand
aacagcugcuuuauuugga

SEQ ID NO: 535993 - RNA, 19 nt, Homo sapiens
  misc_RNA (1)...(19): siRNA sense strand
ugugaugcuacauaugaua

SEQ ID NO: 535994 - RNA, 19 nt, Homo sapiens
  misc_RNA (1)...(19): siRNA sense strand
auuccaaacagcugcuuua

SEQ ID NO: 535995 - RNA, 19 nt, Homo sapiens
  misc_RNA (1)...(19): siRNA sense strand
ccaaacagcugcuuuauuu

SEQ ID NO: 535996 - RNA, 19 nt, Homo sapiens
  misc_RNA (1)...(19): siRNA sense strand
cgauuacgcuucagagaua

SEQ ID NO: 535997 - RNA, 19 nt, Homo sapiens
  misc_RNA (1)...(19): siRNA sense strand
ugauaaagcuccaguugaa

SEQ ID NO: 535998 - RNA, 19 nt, Homo sapiens
  misc_RNA (1)...(19): siRNA sense strand
gagaaauaccgaccuaaga

SEQ ID NO: 535999 - RNA, 19 nt, Homo sapiens
  misc_RNA (1)...(19): siRNA sense strand
gaaauaccgaccuaagaug

SEQ ID NO: 536000 - RNA, 19 nt, Homo sapiens
  misc_RNA (1)...(19): siRNA sense strand
ucacagaggaacuuaagaa

SEQ ID NO: 536001 - RNA, 19 nt, Homo sapiens
  misc_RNA (1)...(19): siRNA sense strand
gcauugcuguguucaguag

SEQ ID NO: 536002 - RNA, 19 nt, Homo sapiens
  misc_RNA (1)...(19): siRNA sense strand
ggagaaauaccgaccuaag

SEQ ID NO: 536003 - RNA, 19 nt, Homo sapiens
  misc_RNA (1)...(19): siRNA sense strand
gggcauugcuguguucagu

SEQ ID NO: 536004 - RNA, 19 nt, Homo sapiens
  misc_RNA (1)...(19): siRNA sense strand
aguauggagugacgacuuu

SEQ ID NO: 536005 - RNA, 19 nt, Homo sapiens
  misc_RNA (1)...(19): siRNA sense strand
ccaaugcuacucucaacaa

SEQ ID NO: 536006 - RNA, 19 nt, Homo sapiens
  misc_RNA (1)...(19): siRNA sense strand
gauaaagcuccaguugaaa

SEQ ID NO: 536007 - RNA, 19 nt, Homo sapiens
  misc_RNA (1)...(19): siRNA sense strand
cgacuuugguucgaguuug

SEQ ID NO: 536008 - RNA, 19 nt, Homo sapiens
  misc_RNA (1)...(19): siRNA sense strand
caacaaguucacagaggaa

SEQ ID NO: 536009 - RNA, 19 nt, Homo sapiens
  misc_RNA (1)...(19): siRNA sense strand
gaguuugugaugcuacaua

SEQ ID NO: 536010 - RNA, 19 nt, Homo sapiens
  misc_RNA (1)...(19): siRNA sense strand
augcuacucucaacaaguu

SEQ ID NO: 536011 - RNA, 19 nt, Homo sapiens
  misc_RNA (1)...(19): siRNA sense strand
aagaugcgauuacgcuuca

SEQ ID NO: 536012 - RNA, 19 nt, Homo sapiens
  misc_RNA (1)...(19): siRNA sense strand
agaaauaccgaccuaagau

SEQ ID NO: 536013 - RNA, 19 nt, Homo sapiens
  misc_RNA (1)...(19): siRNA sense strand
gugaugcuacauaugauaa

SEQ ID NO: 536014 - RNA, 19 nt, Homo sapiens
  misc_RNA (1)...(19): siRNA sense strand
aaacagcugcuuuauuugg

SEQ ID NO: 536015 - RNA, 19 nt, Homo sapiens
  misc_RNA (1)...(19): siRNA sense strand
cuuaagaaguauggaguga

SEQ ID NO: 536016 - RNA, 19 nt, Homo sapiens
  misc_RNA (1)...(19): siRNA sense strand
uaugauaaagcuccaguug

SEQ ID NO: 536017 - RNA, 19 nt, Homo sapiens
  misc_RNA (1)...(19): siRNA sense strand
gaugcuacauaugauaaag

SEQ ID NO: 536018 - RNA, 19 nt, Homo sapiens
  misc_RNA (1)...(19): siRNA sense strand
gcgauuacgcuucagagau

SEQ ID NO: 536019 - RNA, 19 nt, Homo sapiens
  misc_RNA (1)...(19): siRNA sense strand
ucacaacccuaccaaugcu

SEQ ID NO: 536020 - RNA, 19 nt, Homo sapiens
  misc_RNA (1)...(19): siRNA sense strand
gacuuugguucgaguuugu

SEQ ID NO: 536021 - RNA, 19 nt, Homo sapiens
  misc_RNA (1)...(19): siRNA sense strand
gaccuaagaugcgauuacg

SEQ ID NO: 536022 - RNA, 19 nt, Homo sapiens
  misc_RNA (1)...(19): siRNA sense strand
caaugcuacucucaacaag

SEQ ID NO: 536023 - RNA, 19 nt, Homo sapiens
  misc_RNA (1)...(19): siRNA sense strand
uuggagaaauaccgaccua

SEQ ID NO: 536024 - RNA, 19 nt, Homo sapiens
  misc_RNA (1)...(19): siRNA sense strand
guucgaguuugugaugcua

SEQ ID NO: 536025 - RNA, 19 nt, Homo sapiens
  misc_RNA (1)...(19): siRNA sense strand
uuugugaugcuacauauga

SEQ ID NO: 536026 - RNA, 19 nt, Homo sapiens
  misc_RNA (1)...(19): siRNA sense strand
uaacucacaacccuaccaa

SEQ ID NO: 536027 - RNA, 19 nt, Homo sapiens
  misc_RNA (1)...(19): siRNA sense strand
gaaggggagcguucaauuc

SEQ ID NO: 536028 - RNA, 19 nt, Homo sapiens
  misc_RNA (1)...(19): siRNA sense strand
acucacaacccuaccaaug

SEQ ID NO: 536029 - RNA, 19 nt, Homo sapiens
  misc_RNA (1)...(19): siRNA sense strand
gagcguucaauuccaaaca

SEQ ID NO: 536030 - RNA, 19 nt, Homo sapiens
  misc_RNA (1)...(19): siRNA sense strand
gcugcuuuauuuggagaaa

SEQ ID NO: 536031 - RNA, 19 nt, Homo sapiens
  misc_RNA (1)...(19): siRNA sense strand
uccaaacagcugcuuuauu

SEQ ID NO: 536032 - RNA, 19 nt, Homo sapiens
  misc_RNA (1)...(19): siRNA sense strand
uaccaaugcuacucucaac

SEQ ID NO: 536033 - RNA, 19 nt, Homo sapiens
  misc_RNA (1)...(19): siRNA sense strand
aacagcugcuuuauuugga

SEQ ID NO: 536034 - RNA, 19 nt, Homo sapiens
  misc_RNA (1)...(19): siRNA sense strand
ugugaugcuacauaugaua

SEQ ID NO: 536035 - RNA, 19 nt, Homo sapiens
  misc_RNA (1)...(19): siRNA sense strand
auuccaaacagcugcuuua

SEQ ID NO: 536036 - RNA, 19 nt, Homo sapiens
  misc_RNA (1)...(19): siRNA sense strand
ccaaacagcugcuuuauuu

SEQ ID NO: 536037 - RNA, 19 nt, Homo sapiens
  misc_RNA (1)...(19): siRNA sense strand
ugauaaagcuccaguugaa

SEQ ID NO: 536038 - RNA, 19 nt, Homo sapiens
  misc_RNA (1)...(19): siRNA sense strand
ucacagaggaacuuaagaa

SEQ ID NO: 536039 - RNA, 19 nt, Homo sapiens
  misc_RNA (1)...(19): siRNA sense strand
aguauggagugacgacuuu

SEQ ID NO: 536040 - RNA, 19 nt, Homo sapiens
  misc_RNA (1)...(19): siRNA sense strand
ccaaugcuacucucaacaa

SEQ ID NO: 536041 - RNA, 19 nt, Homo sapiens
  misc_RNA (1)...(19): siRNA sense strand
gauaaagcuccaguugaaa

SEQ ID NO: 536042 - RNA, 19 nt, Homo sapiens
  misc_RNA (1)...(19): siRNA sense strand
cgacuuugguucgaguuug

SEQ ID NO: 536043 - RNA, 19 nt, Homo sapiens
  misc_RNA (1)...(19): siRNA sense strand
caacaaguucacagaggaa

SEQ ID NO: 536044 - RNA, 19 nt, Homo sapiens
  misc_RNA (1)...(19): siRNA sense strand
gaguuugugaugcuacaua

SEQ ID NO: 536045 - RNA, 19 nt, Homo sapiens
  misc_RNA (1)...(19): siRNA sense strand
augcuacucucaacaaguu

SEQ ID NO: 536046 - RNA, 19 nt, Homo sapiens
  misc_RNA (1)...(19): siRNA sense strand
gugaugcuacauaugauaa

SEQ ID NO: 536047 - RNA, 19 nt, Homo sapiens
  misc_RNA (1)...(19): siRNA sense strand
aaacagcugcuuuauuugg

SEQ ID NO: 536048 - RNA, 19 nt, Homo sapiens
  misc_RNA (1)...(19): siRNA sense strand
cuuaagaaguauggaguga

SEQ ID NO: 536049 - RNA, 19 nt, Homo sapiens
  misc_RNA (1)...(19): siRNA sense strand
uaugauaaagcuccaguug

SEQ ID NO: 536050 - RNA, 19 nt, Homo sapiens
  misc_RNA (1)...(19): siRNA sense strand
gaugcuacauaugauaaag

SEQ ID NO: 536051 - RNA, 19 nt, Homo sapiens
  misc_RNA (1)...(19): siRNA sense strand
ucacaacccuaccaaugcu

SEQ ID NO: 536052 - RNA, 19 nt, Homo sapiens
  misc_RNA (1)...(19): siRNA sense strand
gacuuugguucgaguuugu

SEQ ID NO: 536053 - RNA, 19 nt, Homo sapiens
  misc_RNA (1)...(19): siRNA sense strand
caaugcuacucucaacaag

SEQ ID NO: 536054 - RNA, 19 nt, Homo sapiens
  misc_RNA (1)...(19): siRNA sense strand
uuggagaaauaccgaccua

SEQ ID NO: 536055 - RNA, 19 nt, Homo sapiens
  misc_RNA (1)...(19): siRNA sense strand
guucgaguuugugaugcua

SEQ ID NO: 536056 - RNA, 19 nt, Homo sapiens
  misc_RNA (1)...(19): siRNA sense strand
uaacucacaacccuaccaa

SEQ ID NO: 536057 - RNA, 19 nt, Homo sapiens
  misc_RNA (1)...(19): siRNA sense strand
uuugugaugcuacauauga

SEQ ID NO: 536058 - RNA, 19 nt, Homo sapiens
  misc_RNA (1)...(19): siRNA sense strand
acucacaacccuaccaaug

SEQ ID NO: 536059 - RNA, 19 nt, Homo sapiens
  misc_RNA (1)...(19): siRNA sense strand
gaaggggagcguucaauuc

SEQ ID NO: 536060 - RNA, 19 nt, Homo sapiens
  misc_RNA (1)...(19): siRNA sense strand
gagcguucaauuccaaaca

SEQ ID NO: 536061 - RNA, 19 nt, Homo sapiens
  misc_RNA (1)...(19): siRNA sense strand
gcugcuuuauuuggagaaa

SEQ ID NO: 536062 - RNA, 19 nt, Homo sapiens
  misc_RNA (1)...(19): siRNA sense strand
uaccaaugcuacucucaac

SEQ ID NO: 536063 - RNA, 19 nt, Homo sapiens
  misc_RNA (1)...(19): siRNA sense strand
aacagcugcuuuauuugga

SEQ ID NO: 536064 - RNA, 19 nt, Homo sapiens
  misc_RNA (1)...(19): siRNA sense strand
uccaaacagcugcuuuauu

SEQ ID NO: 536065 - RNA, 19 nt, Homo sapiens
  misc_RNA (1)...(19): siRNA sense strand
ugugaugcuacauaugaua

SEQ ID NO: 536066 - RNA, 19 nt, Homo sapiens
  misc_RNA (1)...(19): siRNA sense strand
auuccaaacagcugcuuua

SEQ ID NO: 536067 - RNA, 19 nt, Homo sapiens
  misc_RNA (1)...(19): siRNA sense strand
guagaaaccucgauauuga

SEQ ID NO: 536068 - RNA, 19 nt, Homo sapiens
  misc_RNA (1)...(19): siRNA sense strand
gaacgucucucaguugauu

SEQ ID NO: 536069 - RNA, 19 nt, Homo sapiens
  misc_RNA (1)...(19): siRNA sense strand
ggacauggcugcccuugag

SEQ ID NO: 536070 - RNA, 19 nt, Homo sapiens
  misc_RNA (1)...(19): siRNA sense strand
guuaauaggucaaauugug

SEQ ID NO: 536071 - RNA, 19 nt, Homo sapiens
  misc_RNA (1)...(19): siRNA sense strand
gaucaccaaugcuugcuuu

SEQ ID NO: 536072 - RNA, 19 nt, Homo sapiens
  misc_RNA (1)...(19): siRNA sense strand
caaauuguguccuccauca

SEQ ID NO: 536073 - RNA, 19 nt, Homo sapiens
  misc_RNA (1)...(19): siRNA sense strand
acaaugaggccaucuauga

SEQ ID NO: 536074 - RNA, 19 nt, Homo sapiens
  misc_RNA (1)...(19): siRNA sense strand
ggagaugauuccuucaaca

SEQ ID NO: 536075 - RNA, 19 nt, Homo sapiens
  misc_RNA (1)...(19): siRNA sense strand
gcagagaucaccaaugcuu

SEQ ID NO: 536076 - RNA, 19 nt, Homo sapiens
  misc_RNA (1)...(19): siRNA sense strand
uagcagagaucaccaaugc

SEQ ID NO: 536077 - RNA, 19 nt, Homo sapiens
  misc_RNA (1)...(19): siRNA sense strand
ugacagaauuccagaccaa

SEQ ID NO: 536078 - RNA, 19 nt, Homo sapiens
  misc_RNA (1)...(19): siRNA sense strand
ccacaaguuugaccugaug

SEQ ID NO: 536079 - RNA, 19 nt, Homo sapiens
  misc_RNA (1)...(19): siRNA sense strand
cgagggcacuacaccauug

SEQ ID NO: 536080 - RNA, 19 nt, Homo sapiens
  misc_RNA (1)...(19): siRNA sense strand
caucacugcuucccugaga

SEQ ID NO: 536081 - RNA, 19 nt, Homo sapiens
  misc_RNA (1)...(19): siRNA sense strand
gauggagcccugaauguug

SEQ ID NO: 536082 - RNA, 19 nt, Homo sapiens
  misc_RNA (1)...(19): siRNA sense strand
cauggaacgucucucaguu

SEQ ID NO: 536083 - RNA, 19 nt, Homo sapiens
  misc_RNA (1)...(19): siRNA sense strand
gaaggauuaugaggagguu

SEQ ID NO: 536084 - RNA, 19 nt, Homo sapiens
  misc_RNA (1)...(19): siRNA sense strand
ggccaucuaugacaucugu

SEQ ID NO: 536085 - RNA, 19 nt, Homo sapiens
  misc_RNA (1)...(19): siRNA sense strand
caaccuauacuaaccugaa

SEQ ID NO: 536086 - RNA, 19 nt, Homo sapiens
  misc_RNA (1)...(19): siRNA sense strand
ugacgugguucccaaagau

SEQ ID NO: 536087 - RNA, 19 nt, Homo sapiens
  misc_RNA (1)...(19): siRNA sense strand
gagcguccaaccuauacua

SEQ ID NO: 536088 - RNA, 19 nt, Homo sapiens
  misc_RNA (1)...(19): siRNA sense strand
gggcaguguuuguagacuu

SEQ ID NO: 536089 - RNA, 19 nt, Homo sapiens
  misc_RNA (1)...(19): siRNA sense strand
cguagaaaccucgauauug

SEQ ID NO: 536090 - RNA, 19 nt, Homo sapiens
  misc_RNA (1)...(19): siRNA sense strand
gaacccacagucauugaug

SEQ ID NO: 536091 - RNA, 19 nt, Homo sapiens
  misc_RNA (1)...(19): siRNA sense strand
ucaacaccuucuucaguga

SEQ ID NO: 536092 - RNA, 19 nt, Homo sapiens
  misc_RNA (1)...(19): siRNA sense strand
uggaacgucucucaguuga

SEQ ID NO: 536093 - RNA, 19 nt, Homo sapiens
  misc_RNA (1)...(19): siRNA sense strand
ggcaguguuuguagacuug

SEQ ID NO: 536094 - RNA, 19 nt, Homo sapiens
  misc_RNA (1)...(19): siRNA sense strand
ugaaggagagggugaggaa

SEQ ID NO: 536095 - RNA, 19 nt, Homo sapiens
  misc_RNA (1)...(19): siRNA sense strand
gcucauggaacgucucuca

SEQ ID NO: 536096 - RNA, 19 nt, Homo sapiens
  misc_RNA (1)...(19): siRNA sense strand
ccaagugacaagaccauug

SEQ ID NO: 536097 - RNA, 19 nt, Homo sapiens
  misc_RNA (1)...(19): siRNA sense strand
caccaaugcuugcuuugag

SEQ ID NO: 536098 - RNA, 19 nt, Homo sapiens
  misc_RNA (1)...(19): siRNA sense strand
ugauugugccuucauggua

SEQ ID NO: 536099 - RNA, 19 nt, Homo sapiens
  misc_RNA (1)...(19): siRNA sense strand
gaagaugcugccaauaacu

SEQ ID NO: 536100 - RNA, 19 nt, Homo sapiens
  misc_RNA (1)...(19): siRNA sense strand
gugacgugguucccaaaga

SEQ ID NO: 536101 - RNA, 19 nt, Homo sapiens
  misc_RNA (1)...(19): siRNA sense strand
cugcuucccugagauuuga

SEQ ID NO: 536102 - RNA, 19 nt, Homo sapiens
  misc_RNA (1)...(19): siRNA sense strand
gugccuuuguucacuggua

SEQ ID NO: 536103 - RNA, 19 nt, Homo sapiens
  misc_RNA (1)...(19): siRNA sense strand
aagaugcugccaauaacua

SEQ ID NO: 536104 - RNA, 19 nt, Homo sapiens
  misc_RNA (1)...(19): siRNA sense strand
ggagguugguguggauucu

SEQ ID NO: 536105 - RNA, 19 nt, Homo sapiens
  misc_RNA (1)...(19): siRNA sense strand
gugcaucuccauccacguu

SEQ ID NO: 536106 - RNA, 19 nt, Homo sapiens
  misc_RNA (1)...(19): siRNA sense strand
caaguuugaccugauguau

SEQ ID NO: 536107 - RNA, 19 nt, Homo sapiens
  misc_RNA (1)...(19): siRNA sense strand
auguugaccugacagaauu

SEQ ID NO: 536108 - RNA, 19 nt, Homo sapiens
  misc_RNA (1)...(19): siRNA sense strand
gaauguugaccugacagaa

SEQ ID NO: 536109 - RNA, 19 nt, Homo sapiens
  misc_RNA (1)...(19): siRNA sense strand
ggagcucuacugccuggaa

SEQ ID NO: 536110 - RNA, 19 nt, Homo sapiens
  misc_RNA (1)...(19): siRNA sense strand
caagugacaagaccauugg

SEQ ID NO: 536111 - RNA, 19 nt, Homo sapiens
  misc_RNA (1)...(19): siRNA sense strand
ugaggagguugguguggau

SEQ ID NO: 536112 - RNA, 19 nt, Homo sapiens
  misc_RNA (1)...(19): siRNA sense strand
ggccagaugccaagugaca

SEQ ID NO: 536113 - RNA, 19 nt, Homo sapiens
  misc_RNA (1)...(19): siRNA sense strand
agacaaugaggccaucuau

SEQ ID NO: 536114 - RNA, 19 nt, Homo sapiens
  misc_RNA (1)...(19): siRNA sense strand
ugauggagcccugaauguu

SEQ ID NO: 536115 - RNA, 19 nt, Homo sapiens
  misc_RNA (1)...(19): siRNA sense strand
ucacugcuucccugagauu

SEQ ID NO: 536116 - RNA, 19 nt, Homo sapiens
  misc_RNA (1)...(19): siRNA sense strand
ugucguagaaaccucgaua

SEQ ID NO: 536117 - RNA, 19 nt, Homo sapiens
  misc_RNA (1)...(19): siRNA sense strand
uguggauucuguugaagga

SEQ ID NO: 536118 - RNA, 19 nt, Homo sapiens
  misc_RNA (1)...(19): siRNA sense strand
ucaccaaugcuugcuuuga

SEQ ID NO: 536119 - RNA, 19 nt, Homo sapiens
  misc_RNA (1)...(19): siRNA sense strand
auggagcccugaauguuga

SEQ ID NO: 536120 - RNA, 19 nt, Homo sapiens
  misc_RNA (1)...(19): siRNA sense strand
gacaaugaggccaucuaug

SEQ ID NO: 536121 - RNA, 19 nt, Homo sapiens
  misc_RNA (1)...(19): siRNA sense strand
ugguguggauucuguugaa

SEQ ID NO: 536122 - RNA, 19 nt, Homo sapiens
  misc_RNA (1)...(19): siRNA sense strand
ucccaaagaugucaaugcu

SEQ ID NO: 536123 - RNA, 19 nt, Homo sapiens
  misc_RNA (1)...(19): siRNA sense strand
auauugagcguccaaccua

SEQ ID NO: 536124 - RNA, 19 nt, Homo sapiens
  misc_RNA (1)...(19): siRNA sense strand
ucguagaaaccucgauauu

SEQ ID NO: 536125 - RNA, 19 nt, Homo sapiens
  misc_RNA (1)...(19): siRNA sense strand
ggaacccacagucauugau

SEQ ID NO: 536126 - RNA, 19 nt, Homo sapiens
  misc_RNA (1)...(19): siRNA sense strand
gagaugauuccuucaacac

SEQ ID NO: 536127 - RNA, 19 nt, Homo sapiens
  misc_RNA (1)...(19): siRNA sense strand
gccuggaccacaaguuuga

SEQ ID NO: 536128 - RNA, 19 nt, Homo sapiens
  misc_RNA (1)...(19): siRNA sense strand
uuccacagcuguaguugag

SEQ ID NO: 536129 - RNA, 19 nt, Homo sapiens
  misc_RNA (1)...(19): siRNA sense strand
aguuugaccugauguaugc

SEQ ID NO: 536130 - RNA, 19 nt, Homo sapiens
  misc_RNA (1)...(19): siRNA sense strand
ucgccuggaccacaaguuu

SEQ ID NO: 536131 - RNA, 19 nt, Homo sapiens
  misc_RNA (1)...(19): siRNA sense strand
uauugagcguccaaccuau

SEQ ID NO: 536132 - RNA, 19 nt, Homo sapiens
  misc_RNA (1)...(19): siRNA sense strand
cuucaacaccuucuucagu

SEQ ID NO: 536133 - RNA, 19 nt, Homo sapiens
  misc_RNA (1)...(19): siRNA sense strand
ugagauaguucacuguuua

SEQ ID NO: 536134 - RNA, 19 nt, Homo sapiens
  misc_RNA (1)...(19): siRNA sense strand
caauaagacuuccuaacaa

SEQ ID NO: 536135 - RNA, 19 nt, Homo sapiens
  misc_RNA (1)...(19): siRNA sense strand
caagugaguucaagaaucu

SEQ ID NO: 536136 - RNA, 19 nt, Homo sapiens
  misc_RNA (1)...(19): siRNA sense strand
ccacaacucuauuuucaua

SEQ ID NO: 536137 - RNA, 19 nt, Homo sapiens
  misc_RNA (1)...(19): siRNA sense strand
gaacacacagagguuuaua

SEQ ID NO: 536138 - RNA, 19 nt, Homo sapiens
  misc_RNA (1)...(19): siRNA sense strand
acacacagagguuuauaua

SEQ ID NO: 536139 - RNA, 19 nt, Homo sapiens
  misc_RNA (1)...(19): siRNA sense strand
gcuauuccuucuacacauu

SEQ ID NO: 536140 - RNA, 19 nt, Homo sapiens
  misc_RNA (1)...(19): siRNA sense strand
ucaauaagacuuccuaaca

SEQ ID NO: 536141 - RNA, 19 nt, Homo sapiens
  misc_RNA (1)...(19): siRNA sense strand
caucuuauauccuguugga

SEQ ID NO: 536142 - RNA, 19 nt, Homo sapiens
  misc_RNA (1)...(19): siRNA sense strand
gaagagaguguggugcuuu

SEQ ID NO: 536143 - RNA, 19 nt, Homo sapiens
  misc_RNA (1)...(19): siRNA sense strand
uuauaaccauggcaucaua

SEQ ID NO: 536144 - RNA, 19 nt, Homo sapiens
  misc_RNA (1)...(19): siRNA sense strand
ccaagugaguucaagaauc

SEQ ID NO: 536145 - RNA, 19 nt, Homo sapiens
  misc_RNA (1)...(19): siRNA sense strand
uaaaugggccagauauaau

SEQ ID NO: 536146 - RNA, 19 nt, Homo sapiens
  misc_RNA (1)...(19): siRNA sense strand
uuaaaugggccagauauaa

SEQ ID NO: 536147 - RNA, 19 nt, Homo sapiens
  misc_RNA (1)...(19): siRNA sense strand
uauguuacgucaaagaaga

SEQ ID NO: 536148 - RNA, 19 nt, Homo sapiens
  misc_RNA (1)...(19): siRNA sense strand
uuuaugguguggcucauua

SEQ ID NO: 536149 - RNA, 19 nt, Homo sapiens
  misc_RNA (1)...(19): siRNA sense strand
uaaaaccaauccagaauga

SEQ ID NO: 536150 - RNA, 19 nt, Homo sapiens
  misc_RNA (1)...(19): siRNA sense strand
aaccauggcaucauauaua

SEQ ID NO: 536151 - RNA, 19 nt, Homo sapiens
  misc_RNA (1)...(19): siRNA sense strand
ccacuugccauacuucauu

SEQ ID NO: 536152 - RNA, 19 nt, Homo sapiens
  misc_RNA (1)...(19): siRNA sense strand
guaccuacuucugugauug

SEQ ID NO: 536153 - RNA, 19 nt, Homo sapiens
  misc_RNA (1)...(19): siRNA sense strand
gagauaguucacuguuuaa

SEQ ID NO: 536154 - RNA, 19 nt, Homo sapiens
  misc_RNA (1)...(19): siRNA sense strand
gaauuguaccuacuucugu

SEQ ID NO: 536155 - RNA, 19 nt, Homo sapiens
  misc_RNA (1)...(19): siRNA sense strand
ggugaacuucuuacaauau

SEQ ID NO: 536156 - RNA, 19 nt, Homo sapiens
  misc_RNA (1)...(19): siRNA sense strand
cuggugaacuucuuacaau

SEQ ID NO: 536157 - RNA, 19 nt, Homo sapiens
  misc_RNA (1)...(19): siRNA sense strand
ccgccuggcucaccuucua

SEQ ID NO: 536158 - RNA, 19 nt, Homo sapiens
  misc_RNA (1)...(19): siRNA sense strand
ggaauuguaccuacuucug

SEQ ID NO: 536159 - RNA, 19 nt, Homo sapiens
  misc_RNA (1)...(19): siRNA sense strand
gagaggugauuguagaaaa

SEQ ID NO: 536160 - RNA, 19 nt, Homo sapiens
  misc_RNA (1)...(19): siRNA sense strand
ccagacauuugccuugcuu

SEQ ID NO: 536161 - RNA, 19 nt, Homo sapiens
  misc_RNA (1)...(19): siRNA sense strand
uggugaacuucuuacaaua

SEQ ID NO: 536162 - RNA, 19 nt, Homo sapiens
  misc_RNA (1)...(19): siRNA sense strand
acauuugccuugcuugaga

SEQ ID NO: 536163 - RNA, 19 nt, Homo sapiens
  misc_RNA (1)...(19): siRNA sense strand
ggugguugguucuagcuau

SEQ ID NO: 536164 - RNA, 19 nt, Homo sapiens
  misc_RNA (1)...(19): siRNA sense strand
ggagaggugauuguagaaa

SEQ ID NO: 536165 - RNA, 19 nt, Homo sapiens
  misc_RNA (1)...(19): siRNA sense strand
ggcaucauauauaccuuug

SEQ ID NO: 536166 - RNA, 19 nt, Homo sapiens
  misc_RNA (1)...(19): siRNA sense strand
guauucagaagacacuuaa

SEQ ID NO: 536167 - RNA, 19 nt, Homo sapiens
  misc_RNA (1)...(19): siRNA sense strand
guucacuguuuaauuggaa

SEQ ID NO: 536168 - RNA, 19 nt, Homo sapiens
  misc_RNA (1)...(19): siRNA sense strand
cacuugccauacuucauua

SEQ ID NO: 536169 - RNA, 19 nt, Homo sapiens
  misc_RNA (1)...(19): siRNA sense strand
acagagaucacucgcuauu

SEQ ID NO: 536170 - RNA, 19 nt, Homo sapiens
  misc_RNA (1)...(19): siRNA sense strand
cuauugccaugguacguuu

SEQ ID NO: 536171 - RNA, 19 nt, Homo sapiens
  misc_RNA (1)...(19): siRNA sense strand
aaaugggccagauauaauu

SEQ ID NO: 536172 - RNA, 19 nt, Homo sapiens
  misc_RNA (1)...(19): siRNA sense strand
gugguugguucuagcuauu

SEQ ID NO: 536173 - RNA, 19 nt, Homo sapiens
  misc_RNA (1)...(19): siRNA sense strand
ggaacacacagagguuuau

SEQ ID NO: 536174 - RNA, 19 nt, Homo sapiens
  misc_RNA (1)...(19): siRNA sense strand
ccuaacaaauacaaugucu

SEQ ID NO: 536175 - RNA, 19 nt, Homo sapiens
  misc_RNA (1)...(19): siRNA sense strand
uaaccauggcaucauauau

SEQ ID NO: 536176 - RNA, 19 nt, Homo sapiens
  misc_RNA (1)...(19): siRNA sense strand
ugguguggcucauuacuca

SEQ ID NO: 536177 - RNA, 19 nt, Homo sapiens
  misc_RNA (1)...(19): siRNA sense strand
cuuauauccuguuggaguu

SEQ ID NO: 536178 - RNA, 19 nt, Homo sapiens
  misc_RNA (1)...(19): siRNA sense strand
cauauguuacgucaaagaa

SEQ ID NO: 536179 - RNA, 19 nt, Homo sapiens
  misc_RNA (1)...(19): siRNA sense strand
uugagauaguucacuguuu

SEQ ID NO: 536180 - RNA, 19 nt, Homo sapiens
  misc_RNA (1)...(19): siRNA sense strand
auggagaggugauuguaga

SEQ ID NO: 536181 - RNA, 19 nt, Homo sapiens
  misc_RNA (1)...(19): siRNA sense strand
aaaccaauccagaaugaag

SEQ ID NO: 536182 - RNA, 19 nt, Homo sapiens
  misc_RNA (1)...(19): siRNA sense strand
gcuggugaacuucuuacaa

SEQ ID NO: 536183 - RNA, 19 nt, Homo sapiens
  misc_RNA (1)...(19): siRNA sense strand
cacacagagguuuauauaa

SEQ ID NO: 536184 - RNA, 19 nt, Homo sapiens
  misc_RNA (1)...(19): siRNA sense strand
agagaucacucgcuauucc

SEQ ID NO: 536185 - RNA, 19 nt, Homo sapiens
  misc_RNA (1)...(19): siRNA sense strand
ugaagagaguguggugcuu

SEQ ID NO: 536186 - RNA, 19 nt, Homo sapiens
  misc_RNA (1)...(19): siRNA sense strand
aaaggaacacacagagguu

SEQ ID NO: 536187 - RNA, 19 nt, Homo sapiens
  misc_RNA (1)...(19): siRNA sense strand
gaacuucuuacaauauacg

SEQ ID NO: 536188 - RNA, 19 nt, Homo sapiens
  misc_RNA (1)...(19): siRNA sense strand
agacauuugccuugcuuga

SEQ ID NO: 536189 - RNA, 19 nt, Homo sapiens
  misc_RNA (1)...(19): siRNA sense strand
aggaacacacagagguuua

SEQ ID NO: 536190 - RNA, 19 nt, Homo sapiens
  misc_RNA (1)...(19): siRNA sense strand
caaugucucuuuugacuac

SEQ ID NO: 536191 - RNA, 19 nt, Homo sapiens
  misc_RNA (1)...(19): siRNA sense strand
uguaccuacuucugugauu

SEQ ID NO: 536192 - RNA, 19 nt, Homo sapiens
  misc_RNA (1)...(19): siRNA sense strand
ucauggagaggugauugua

SEQ ID NO: 536193 - RNA, 19 nt, Homo sapiens
  misc_RNA (1)...(19): siRNA sense strand
gcuauugccaugguacguu

SEQ ID NO: 536194 - RNA, 19 nt, Homo sapiens
  misc_RNA (1)...(19): siRNA sense strand
guauaaaaccaauccagaa

SEQ ID NO: 536195 - RNA, 19 nt, Homo sapiens
  misc_RNA (1)...(19): siRNA sense strand
guccaagugaguucaagaa

SEQ ID NO: 536196 - RNA, 19 nt, Homo sapiens
  misc_RNA (1)...(19): siRNA sense strand
auaaccauggcaucauaua

SEQ ID NO: 536197 - RNA, 19 nt, Homo sapiens
  misc_RNA (1)...(19): siRNA sense strand
aguauucagaagacacuua

SEQ ID NO: 536198 - RNA, 19 nt, Homo sapiens
  misc_RNA (1)...(19): siRNA sense strand
gaggaaggcugguaucuuu

SEQ ID NO: 536199 - RNA, 19 nt, Homo sapiens
  misc_RNA (1)...(19): siRNA sense strand
aaacuacgaugucaugaaa

SEQ ID NO: 536200 - RNA, 19 nt, Homo sapiens
  misc_RNA (1)...(19): siRNA sense strand
ucauauggcuguagcauuc

SEQ ID NO: 536201 - RNA, 19 nt, Homo sapiens
  misc_RNA (1)...(19): siRNA sense strand
gaaacuacgaugucaugaa

SEQ ID NO: 536202 - RNA, 19 nt, Homo sapiens
  misc_RNA (1)...(19): siRNA sense strand
gaaggcauacgcagauuuc

SEQ ID NO: 536203 - RNA, 19 nt, Homo sapiens
  misc_RNA (1)...(19): siRNA sense strand
auacgcagauuucuacaga

SEQ ID NO: 536204 - RNA, 19 nt, Homo sapiens
  misc_RNA (1)...(19): siRNA sense strand
ggaaggcugguaucuuuca

SEQ ID NO: 536205 - RNA, 19 nt, Homo sapiens
  misc_RNA (1)...(19): siRNA sense strand
ucguguggcugaucaaaga

SEQ ID NO: 536206 - RNA, 19 nt, Homo sapiens
  misc_RNA (1)...(19): siRNA sense strand
ggguugcagcuuuguauaa

SEQ ID NO: 536207 - RNA, 19 nt, Homo sapiens
  misc_RNA (1)...(19): siRNA sense strand
cagaaacuacgaugucaug

SEQ ID NO: 536208 - RNA, 19 nt, Homo sapiens
  misc_RNA (1)...(19): siRNA sense strand
acuacgaugucaugaaaga

SEQ ID NO: 536209 - RNA, 19 nt, Homo sapiens
  misc_RNA (1)...(19): siRNA sense strand
aaagaaggcauacgcagau

SEQ ID NO: 536210 - RNA, 19 nt, Homo sapiens
  misc_RNA (1)...(19): siRNA sense strand
gagaugaggaaggcuggua

SEQ ID NO: 536211 - RNA, 19 nt, Homo sapiens
  misc_RNA (1)...(19): siRNA sense strand
acgaugucaugaaagauuu

SEQ ID NO: 536212 - RNA, 19 nt, Homo sapiens
  misc_RNA (1)...(19): siRNA sense strand
uugcagcuuuguauaaguu

SEQ ID NO: 536213 - RNA, 19 nt, Homo sapiens
  misc_RNA (1)...(19): siRNA sense strand
ccaggcgucugcgaaauca

SEQ ID NO: 536214 - RNA, 19 nt, Homo sapiens
  misc_RNA (1)...(19): siRNA sense strand
gguugcagcuuuguauaag

SEQ ID NO: 536215 - RNA, 19 nt, Homo sapiens
  misc_RNA (1)...(19): siRNA sense strand
cuacagaaacuacgauguc

SEQ ID NO: 536216 - RNA, 19 nt, Homo sapiens
  misc_RNA (1)...(19): siRNA sense strand
gcgaaaucauauggcugua

SEQ ID NO: 536217 - RNA, 19 nt, Homo sapiens
  misc_RNA (1)...(19): siRNA sense strand
uacagaaacuacgauguca

SEQ ID NO: 536218 - RNA, 19 nt, Homo sapiens
  misc_RNA (1)...(19): siRNA sense strand
gcagcuuuguauaaguuuc

SEQ ID NO: 536219 - RNA, 19 nt, Homo sapiens
  misc_RNA (1)...(19): siRNA sense strand
uacgaugucaugaaagauu

SEQ ID NO: 536220 - RNA, 19 nt, Homo sapiens
  misc_RNA (1)...(19): siRNA sense strand
ugaaagauuuugaggagau

SEQ ID NO: 536221 - RNA, 19 nt, Homo sapiens
  misc_RNA (1)...(19): siRNA sense strand
aagaaggcauacgcagauu

SEQ ID NO: 536222 - RNA, 19 nt, Homo sapiens
  misc_RNA (1)...(19): siRNA sense strand
ggcauacgcagauuucuac

SEQ ID NO: 536223 - RNA, 19 nt, Homo sapiens
  misc_RNA (1)...(19): siRNA sense strand
ggccaggcgucugcgaaau

SEQ ID NO: 536224 - RNA, 19 nt, Homo sapiens
  misc_RNA (1)...(19): siRNA sense strand
gaaggcugguaucuuucag

SEQ ID NO: 536225 - RNA, 19 nt, Homo sapiens
  misc_RNA (1)...(19): siRNA sense strand
aggcgucugcgaaaucaua

SEQ ID NO: 536226 - RNA, 19 nt, Homo sapiens
  misc_RNA (1)...(19): siRNA sense strand
agaaggcauacgcagauuu

SEQ ID NO: 536227 - RNA, 19 nt, Homo sapiens
  misc_RNA (1)...(19): siRNA sense strand
aggcauacgcagauuucua

SEQ ID NO: 536228 - RNA, 19 nt, Homo sapiens
  misc_RNA (1)...(19): siRNA sense strand
gaaagauuuugaggagaug

SEQ ID NO: 536229 - RNA, 19 nt, Homo sapiens
  misc_RNA (1)...(19): siRNA sense strand
gggaagagcuagagaaguu

SEQ ID NO: 536230 - RNA, 19 nt, Homo sapiens
  misc_RNA (1)...(19): siRNA sense strand
gcacggagcuggccaucaa

SEQ ID NO: 536231 - RNA, 19 nt, Homo sapiens
  misc_RNA (1)...(19): siRNA sense strand
ggccacagcugacaagauu

SEQ ID NO: 536232 - RNA, 19 nt, Homo sapiens
  misc_RNA (1)...(19): siRNA sense strand
agaaggaugucucagauga

SEQ ID NO: 536233 - RNA, 19 nt, Homo sapiens
  misc_RNA (1)...(19): siRNA sense strand
ggucaaggcuuugcuucuu

SEQ ID NO: 536234 - RNA, 19 nt, Homo sapiens
  misc_RNA (1)...(19): siRNA sense strand
ggagcaaacuggcacuaag

SEQ ID NO: 536235 - RNA, 19 nt, Homo sapiens
  misc_RNA (1)...(19): siRNA sense strand
ggaugacaaucaccaggaa

SEQ ID NO: 536236 - RNA, 19 nt, Homo sapiens
  misc_RNA (1)...(19): siRNA sense strand
gagcugaaccgaggagauu

SEQ ID NO: 536237 - RNA, 19 nt, Homo sapiens
  misc_RNA (1)...(19): siRNA sense strand
gagcugagccucguauugu

SEQ ID NO: 536238 - RNA, 19 nt, Homo sapiens
  misc_RNA (1)...(19): siRNA sense strand
uggcagauuuggaagauug

SEQ ID NO: 536239 - RNA, 19 nt, Homo sapiens
  misc_RNA (1)...(19): siRNA sense strand
guggagaucugcaugaaac

SEQ ID NO: 536240 - RNA, 19 nt, Homo sapiens
  misc_RNA (1)...(19): siRNA sense strand
gcacgagccuaugguugug

SEQ ID NO: 536241 - RNA, 19 nt, Homo sapiens
  misc_RNA (1)...(19): siRNA sense strand
gcaugaaacaacauaacaa

SEQ ID NO: 536242 - RNA, 19 nt, Homo sapiens
  misc_RNA (1)...(19): siRNA sense strand
acagaaggaugucucagau

SEQ ID NO: 536243 - RNA, 19 nt, Homo sapiens
  misc_RNA (1)...(19): siRNA sense strand
gagcaagaaaucacccauu

SEQ ID NO: 536244 - RNA, 19 nt, Homo sapiens
  misc_RNA (1)...(19): siRNA sense strand
gcccauggcccucaguuug

SEQ ID NO: 536245 - RNA, 19 nt, Homo sapiens
  misc_RNA (1)...(19): siRNA sense strand
agcaagaaaucacccauug

SEQ ID NO: 536246 - RNA, 19 nt, Homo sapiens
  misc_RNA (1)...(19): siRNA sense strand
ccauggcccucaguuugua

SEQ ID NO: 536247 - RNA, 19 nt, Homo sapiens
  misc_RNA (1)...(19): siRNA sense strand
agcagaaggucaaggcuuu

SEQ ID NO: 536248 - RNA, 19 nt, Homo sapiens
  misc_RNA (1)...(19): siRNA sense strand
ucuacaaggccaagaauga

SEQ ID NO: 536249 - RNA, 19 nt, Homo sapiens
  misc_RNA (1)...(19): siRNA sense strand
caaauacgaagccaagaag

SEQ ID NO: 536250 - RNA, 19 nt, Homo sapiens
  misc_RNA (1)...(19): siRNA sense strand
guaagcaucaggagcuaga

SEQ ID NO: 536251 - RNA, 19 nt, Homo sapiens
  misc_RNA (1)...(19): siRNA sense strand
gaaggucaaggcuuugcuu

SEQ ID NO: 536252 - RNA, 19 nt, Homo sapiens
  misc_RNA (1)...(19): siRNA sense strand
aauacgaagccaagaagua

SEQ ID NO: 536253 - RNA, 19 nt, Homo sapiens
  misc_RNA (1)...(19): siRNA sense strand
gcagcuggcacgugacuuc

SEQ ID NO: 536254 - RNA, 19 nt, Homo sapiens
  misc_RNA (1)...(19): siRNA sense strand
acaaauacgaagccaagaa

SEQ ID NO: 536255 - RNA, 19 nt, Homo sapiens
  misc_RNA (1)...(19): siRNA sense strand
ggaagagcuagagaaguuu

SEQ ID NO: 536256 - RNA, 19 nt, Homo sapiens
  misc_RNA (1)...(19): siRNA sense strand
ggaagauugggaagagcua

SEQ ID NO: 536257 - RNA, 19 nt, Homo sapiens
  misc_RNA (1)...(19): siRNA sense strand
acaaucaggaugacaauca

SEQ ID NO: 536258 - RNA, 19 nt, Homo sapiens
  misc_RNA (1)...(19): siRNA sense strand
ccacagcugacaagauuca

SEQ ID NO: 536259 - RNA, 19 nt, Homo sapiens
  misc_RNA (1)...(19): siRNA sense strand
gcaacagaaggaugucuca

SEQ ID NO: 536260 - RNA, 19 nt, Homo sapiens
  misc_RNA (1)...(19): siRNA sense strand
gcaagaaaucacccauugg

SEQ ID NO: 536261 - RNA, 19 nt, Homo sapiens
  misc_RNA (1)...(19): siRNA sense strand
gcagguaccccuucuccua

SEQ ID NO: 536262 - RNA, 19 nt, Homo sapiens
  misc_RNA (1)...(19): siRNA sense strand
ucaugacccuucggaauca

SEQ ID NO: 536263 - RNA, 19 nt, Homo sapiens
  misc_RNA (1)...(19): siRNA sense strand
cuagagaaguuuuccaaga

SEQ ID NO: 536264 - RNA, 19 nt, Homo sapiens
  misc_RNA (1)...(19): siRNA sense strand
gcaaacuggcacuaagcaa

SEQ ID NO: 536265 - RNA, 19 nt, Homo sapiens
  misc_RNA (1)...(19): siRNA sense strand
ggagaucugcaugaaacaa

SEQ ID NO: 536266 - RNA, 19 nt, Homo sapiens
  misc_RNA (1)...(19): siRNA sense strand
guuaccacccucauucuug

SEQ ID NO: 536267 - RNA, 19 nt, Homo sapiens
  misc_RNA (1)...(19): siRNA sense strand
acaguuaccacccucauuc

SEQ ID NO: 536268 - RNA, 19 nt, Homo sapiens
  misc_RNA (1)...(19): siRNA sense strand
ccacauccgagccagcuau

SEQ ID NO: 536269 - RNA, 19 nt, Homo sapiens
  misc_RNA (1)...(19): siRNA sense strand
caaggccaagaaugaguuu

SEQ ID NO: 536270 - RNA, 19 nt, Homo sapiens
  misc_RNA (1)...(19): siRNA sense strand
gcagaaggucaaggcuuug

SEQ ID NO: 536271 - RNA, 19 nt, Homo sapiens
  misc_RNA (1)...(19): siRNA sense strand
gaagagcuagagaaguuuu

SEQ ID NO: 536272 - RNA, 19 nt, Homo sapiens
  misc_RNA (1)...(19): siRNA sense strand
gagcaaacuggcacuaagc

SEQ ID NO: 536273 - RNA, 19 nt, Homo sapiens
  misc_RNA (1)...(19): siRNA sense strand
ccaaggcuacagaggauca

SEQ ID NO: 536274 - RNA, 19 nt, Homo sapiens
  misc_RNA (1)...(19): siRNA sense strand
ggccaagaaugaguuugca

SEQ ID NO: 536275 - RNA, 19 nt, Homo sapiens
  misc_RNA (1)...(19): siRNA sense strand
ugagcugagccucguauug

SEQ ID NO: 536276 - RNA, 19 nt, Homo sapiens
  misc_RNA (1)...(19): siRNA sense strand
ggcuacagaggaucaaaug

SEQ ID NO: 536277 - RNA, 19 nt, Homo sapiens
  misc_RNA (1)...(19): siRNA sense strand
ccuggcagauuuggaagau

SEQ ID NO: 536278 - RNA, 19 nt, Homo sapiens
  misc_RNA (1)...(19): siRNA sense strand
gaggagcaaacuggcacua

SEQ ID NO: 536279 - RNA, 19 nt, Homo sapiens
  misc_RNA (1)...(19): siRNA sense strand
gggaagagcuagagaaguu

SEQ ID NO: 536280 - RNA, 19 nt, Homo sapiens
  misc_RNA (1)...(19): siRNA sense strand
gcacggagcuggccaucaa

SEQ ID NO: 536281 - RNA, 19 nt, Homo sapiens
  misc_RNA (1)...(19): siRNA sense strand
ggccacagcugacaagauu

SEQ ID NO: 536282 - RNA, 19 nt, Homo sapiens
  misc_RNA (1)...(19): siRNA sense strand
agaaggaugucucagauga

SEQ ID NO: 536283 - RNA, 19 nt, Homo sapiens
  misc_RNA (1)...(19): siRNA sense strand
ggucaaggcuuugcuucuu

SEQ ID NO: 536284 - RNA, 19 nt, Homo sapiens
  misc_RNA (1)...(19): siRNA sense strand
ggagcaaacuggcacuaag

SEQ ID NO: 536285 - RNA, 19 nt, Homo sapiens
  misc_RNA (1)...(19): siRNA sense strand
ggaugacaaucaccaggaa

SEQ ID NO: 536286 - RNA, 19 nt, Homo sapiens
  misc_RNA (1)...(19): siRNA sense strand
gagcugaaccgaggagauu

SEQ ID NO: 536287 - RNA, 19 nt, Homo sapiens
  misc_RNA (1)...(19): siRNA sense strand
gagcugagccucguauugu

SEQ ID NO: 536288 - RNA, 19 nt, Homo sapiens
  misc_RNA (1)...(19): siRNA sense strand
uggcagauuuggaagauug

SEQ ID NO: 536289 - RNA, 19 nt, Homo sapiens
  misc_RNA (1)...(19): siRNA sense strand
guggagaucugcaugaaac

SEQ ID NO: 536290 - RNA, 19 nt, Homo sapiens
  misc_RNA (1)...(19): siRNA sense strand
gcacgagccuaugguugug

SEQ ID NO: 536291 - RNA, 19 nt, Homo sapiens
  misc_RNA (1)...(19): siRNA sense strand
gcaugaaacaacauaacaa

SEQ ID NO: 536292 - RNA, 19 nt, Homo sapiens
  misc_RNA (1)...(19): siRNA sense strand
acagaaggaugucucagau

SEQ ID NO: 536293 - RNA, 19 nt, Homo sapiens
  misc_RNA (1)...(19): siRNA sense strand
gagcaagaaaucacccauu

SEQ ID NO: 536294 - RNA, 19 nt, Homo sapiens
  misc_RNA (1)...(19): siRNA sense strand
gcccauggcccucaguuug

SEQ ID NO: 536295 - RNA, 19 nt, Homo sapiens
  misc_RNA (1)...(19): siRNA sense strand
agcaagaaaucacccauug

SEQ ID NO: 536296 - RNA, 19 nt, Homo sapiens
  misc_RNA (1)...(19): siRNA sense strand
ccauggcccucaguuugua

SEQ ID NO: 536297 - RNA, 19 nt, Homo sapiens
  misc_RNA (1)...(19): siRNA sense strand
agcagaaggucaaggcuuu

SEQ ID NO: 536298 - RNA, 19 nt, Homo sapiens
  misc_RNA (1)...(19): siRNA sense strand
ucuacaaggccaagaauga

SEQ ID NO: 536299 - RNA, 19 nt, Homo sapiens
  misc_RNA (1)...(19): siRNA sense strand
caaauacgaagccaagaag

SEQ ID NO: 536300 - RNA, 19 nt, Homo sapiens
  misc_RNA (1)...(19): siRNA sense strand
guaagcaucaggagcuaga

SEQ ID NO: 536301 - RNA, 19 nt, Homo sapiens
  misc_RNA (1)...(19): siRNA sense strand
gaaggucaaggcuuugcuu

SEQ ID NO: 536302 - RNA, 19 nt, Homo sapiens
  misc_RNA (1)...(19): siRNA sense strand
aauacgaagccaagaagua

SEQ ID NO: 536303 - RNA, 19 nt, Homo sapiens
  misc_RNA (1)...(19): siRNA sense strand
gcagcuggcacgugacuuc

SEQ ID NO: 536304 - RNA, 19 nt, Homo sapiens
  misc_RNA (1)...(19): siRNA sense strand
acaaauacgaagccaagaa

SEQ ID NO: 536305 - RNA, 19 nt, Homo sapiens
  misc_RNA (1)...(19): siRNA sense strand
ggaagagcuagagaaguuu

SEQ ID NO: 536306 - RNA, 19 nt, Homo sapiens
  misc_RNA (1)...(19): siRNA sense strand
ggaagauugggaagagcua

SEQ ID NO: 536307 - RNA, 19 nt, Homo sapiens
  misc_RNA (1)...(19): siRNA sense strand
acaaucaggaugacaauca

SEQ ID NO: 536308 - RNA, 19 nt, Homo sapiens
  misc_RNA (1)...(19): siRNA sense strand
ccacagcugacaagauuca

SEQ ID NO: 536309 - RNA, 19 nt, Homo sapiens
  misc_RNA (1)...(19): siRNA sense strand
gcaacagaaggaugucuca

SEQ ID NO: 536310 - RNA, 19 nt, Homo sapiens
  misc_RNA (1)...(19): siRNA sense strand
gcaagaaaucacccauugg

SEQ ID NO: 536311 - RNA, 19 nt, Homo sapiens
  misc_RNA (1)...(19): siRNA sense strand
gcagguaccccuucuccua

SEQ ID NO: 536312 - RNA, 19 nt, Homo sapiens
  misc_RNA (1)...(19): siRNA sense strand
ucaugacccuucggaauca

SEQ ID NO: 536313 - RNA, 19 nt, Homo sapiens
  misc_RNA (1)...(19): siRNA sense strand
cuagagaaguuuuccaaga

SEQ ID NO: 536314 - RNA, 19 nt, Homo sapiens
  misc_RNA (1)...(19): siRNA sense strand
gcaaacuggcacuaagcaa

SEQ ID NO: 536315 - RNA, 19 nt, Homo sapiens
  misc_RNA (1)...(19): siRNA sense strand
ggagaucugcaugaaacaa

SEQ ID NO: 536316 - RNA, 19 nt, Homo sapiens
  misc_RNA (1)...(19): siRNA sense strand
guuaccacccucauucuug

SEQ ID NO: 536317 - RNA, 19 nt, Homo sapiens
  misc_RNA (1)...(19): siRNA sense strand
acaguuaccacccucauuc

SEQ ID NO: 536318 - RNA, 19 nt, Homo sapiens
  misc_RNA (1)...(19): siRNA sense strand
ccacauccgagccagcuau

SEQ ID NO: 536319 - RNA, 19 nt, Homo sapiens
  misc_RNA (1)...(19): siRNA sense strand
caaggccaagaaugaguuu

SEQ ID NO: 536320 - RNA, 19 nt, Homo sapiens
  misc_RNA (1)...(19): siRNA sense strand
gcagaaggucaaggcuuug

SEQ ID NO: 536321 - RNA, 19 nt, Homo sapiens
  misc_RNA (1)...(19): siRNA sense strand
gaagagcuagagaaguuuu

SEQ ID NO: 536322 - RNA, 19 nt, Homo sapiens
  misc_RNA (1)...(19): siRNA sense strand
gagcaaacuggcacuaagc

SEQ ID NO: 536323 - RNA, 19 nt, Homo sapiens
  misc_RNA (1)...(19): siRNA sense strand
ccaaggcuacagaggauca

SEQ ID NO: 536324 - RNA, 19 nt, Homo sapiens
  misc_RNA (1)...(19): siRNA sense strand
ggccaagaaugaguuugca

SEQ ID NO: 536325 - RNA, 19 nt, Homo sapiens
  misc_RNA (1)...(19): siRNA sense strand
ugagcugagccucguauug

SEQ ID NO: 536326 - RNA, 19 nt, Homo sapiens
  misc_RNA (1)...(19): siRNA sense strand
ggcuacagaggaucaaaug

SEQ ID NO: 536327 - RNA, 19 nt, Homo sapiens
  misc_RNA (1)...(19): siRNA sense strand
ccuggcagauuuggaagau

SEQ ID NO: 536328 - RNA, 19 nt, Homo sapiens
  misc_RNA (1)...(19): siRNA sense strand
gaggagcaaacuggcacua

SEQ ID NO: 536329 - RNA, 19 nt, Homo sapiens
  misc_RNA (1)...(19): siRNA sense strand
gggaagagcuagagaaguu

SEQ ID NO: 536330 - RNA, 19 nt, Homo sapiens
  misc_RNA (1)...(19): siRNA sense strand
ggccacagcugacaagauu

SEQ ID NO: 536331 - RNA, 19 nt, Homo sapiens
  misc_RNA (1)...(19): siRNA sense strand
ggucaaggcuuugcuucuu

SEQ ID NO: 536332 - RNA, 19 nt, Homo sapiens
  misc_RNA (1)...(19): siRNA sense strand
ggagcaaacuggcacuaag

SEQ ID NO: 536333 - RNA, 19 nt, Homo sapiens
  misc_RNA (1)...(19): siRNA sense strand
ggaugacaaucaccaggaa

SEQ ID NO: 536334 - RNA, 19 nt, Homo sapiens
  misc_RNA (1)...(19): siRNA sense strand
gagcugaaccgaggagauu

SEQ ID NO: 536335 - RNA, 19 nt, Homo sapiens
  misc_RNA (1)...(19): siRNA sense strand
gagcugagccucguauugu

SEQ ID NO: 536336 - RNA, 19 nt, Homo sapiens
  misc_RNA (1)...(19): siRNA sense strand
uggcagauuuggaagauug

SEQ ID NO: 536337 - RNA, 19 nt, Homo sapiens
  misc_RNA (1)...(19): siRNA sense strand
guggagaucugcaugaaac

SEQ ID NO: 536338 - RNA, 19 nt, Homo sapiens
  misc_RNA (1)...(19): siRNA sense strand
gcaugaaacaacauaacaa

SEQ ID NO: 536339 - RNA, 19 nt, Homo sapiens
  misc_RNA (1)...(19): siRNA sense strand
gagcaagaaaucacccauu

SEQ ID NO: 536340 - RNA, 19 nt, Homo sapiens
  misc_RNA (1)...(19): siRNA sense strand
gcccauggcccucaguuug

SEQ ID NO: 536341 - RNA, 19 nt, Homo sapiens
  misc_RNA (1)...(19): siRNA sense strand
agcaagaaaucacccauug

SEQ ID NO: 536342 - RNA, 19 nt, Homo sapiens
  misc_RNA (1)...(19): siRNA sense strand
ccauggcccucaguuugua

SEQ ID NO: 536343 - RNA, 19 nt, Homo sapiens
  misc_RNA (1)...(19): siRNA sense strand
agcagaaggucaaggcuuu

SEQ ID NO: 536344 - RNA, 19 nt, Homo sapiens
  misc_RNA (1)...(19): siRNA sense strand
ucuacaaggccaagaauga

SEQ ID NO: 536345 - RNA, 19 nt, Homo sapiens
  misc_RNA (1)...(19): siRNA sense strand
caaauacgaagccaagaag

SEQ ID NO: 536346 - RNA, 19 nt, Homo sapiens
  misc_RNA (1)...(19): siRNA sense strand
guaagcaucaggagcuaga

SEQ ID NO: 536347 - RNA, 19 nt, Homo sapiens
  misc_RNA (1)...(19): siRNA sense strand
gaaggucaaggcuuugcuu

SEQ ID NO: 536348 - RNA, 19 nt, Homo sapiens
  misc_RNA (1)...(19): siRNA sense strand
aauacgaagccaagaagua

SEQ ID NO: 536349 - RNA, 19 nt, Homo sapiens
  misc_RNA (1)...(19): siRNA sense strand
gcagcuggcacgugacuuc

SEQ ID NO: 536350 - RNA, 19 nt, Homo sapiens
  misc_RNA (1)...(19): siRNA sense strand
acaaauacgaagccaagaa

SEQ ID NO: 536351 - RNA, 19 nt, Homo sapiens
  misc_RNA (1)...(19): siRNA sense strand
ggaagagcuagagaaguuu

SEQ ID NO: 536352 - RNA, 19 nt, Homo sapiens
  misc_RNA (1)...(19): siRNA sense strand
ggaagauugggaagagcua

SEQ ID NO: 536353 - RNA, 19 nt, Homo sapiens
  misc_RNA (1)...(19): siRNA sense strand
acaaucaggaugacaauca

SEQ ID NO: 536354 - RNA, 19 nt, Homo sapiens
  misc_RNA (1)...(19): siRNA sense strand
ccacagcugacaagauuca

SEQ ID NO: 536355 - RNA, 19 nt, Homo sapiens
  misc_RNA (1)...(19): siRNA sense strand
ucaugacccuucggaauca

SEQ ID NO: 536356 - RNA, 19 nt, Homo sapiens
  misc_RNA (1)...(19): siRNA sense strand
gcagguaccccuucuccua

SEQ ID NO: 536357 - RNA, 19 nt, Homo sapiens
  misc_RNA (1)...(19): siRNA sense strand
gcaagaaaucacccauugg

SEQ ID NO: 536358 - RNA, 19 nt, Homo sapiens
  misc_RNA (1)...(19): siRNA sense strand
cuagagaaguuuuccaaga

SEQ ID NO: 536359 - RNA, 19 nt, Homo sapiens
  misc_RNA (1)...(19): siRNA sense strand
guuaccacccucauucuug

SEQ ID NO: 536360 - RNA, 19 nt, Homo sapiens
  misc_RNA (1)...(19): siRNA sense strand
ggagaucugcaugaaacaa

SEQ ID NO: 536361 - RNA, 19 nt, Homo sapiens
  misc_RNA (1)...(19): siRNA sense strand
gcaaacuggcacuaagcaa

SEQ ID NO: 536362 - RNA, 19 nt, Homo sapiens
  misc_RNA (1)...(19): siRNA sense strand
acaguuaccacccucauuc

SEQ ID NO: 536363 - RNA, 19 nt, Homo sapiens
  misc_RNA (1)...(19): siRNA sense strand
ccacauccgagccagcuau

SEQ ID NO: 536364 - RNA, 19 nt, Homo sapiens
  misc_RNA (1)...(19): siRNA sense strand
caaggccaagaaugaguuu

SEQ ID NO: 536365 - RNA, 19 nt, Homo sapiens
  misc_RNA (1)...(19): siRNA sense strand
gcagaaggucaaggcuuug

SEQ ID NO: 536366 - RNA, 19 nt, Homo sapiens
  misc_RNA (1)...(19): siRNA sense strand
gaagagcuagagaaguuuu

SEQ ID NO: 536367 - RNA, 19 nt, Homo sapiens
  misc_RNA (1)...(19): siRNA sense strand
ccaaggcuacagaggauca

SEQ ID NO: 536368 - RNA, 19 nt, Homo sapiens
  misc_RNA (1)...(19): siRNA sense strand
gagcaaacuggcacuaagc

SEQ ID NO: 536369 - RNA, 19 nt, Homo sapiens
  misc_RNA (1)...(19): siRNA sense strand
ggccaagaaugaguuugca

SEQ ID NO: 536370 - RNA, 19 nt, Homo sapiens
  misc_RNA (1)...(19): siRNA sense strand
ugagcugagccucguauug

SEQ ID NO: 536371 - RNA, 19 nt, Homo sapiens
  misc_RNA (1)...(19): siRNA sense strand
ggcuacagaggaucaaaug

SEQ ID NO: 536372 - RNA, 19 nt, Homo sapiens
  misc_RNA (1)...(19): siRNA sense strand
ccuggcagauuuggaagau

SEQ ID NO: 536373 - RNA, 19 nt, Homo sapiens
  misc_RNA (1)...(19): siRNA sense strand
gaggagcaaacuggcacua

SEQ ID NO: 536374 - RNA, 19 nt, Homo sapiens
  misc_RNA (1)...(19): siRNA sense strand
gggaagagcuagagaaguu

SEQ ID NO: 536375 - RNA, 19 nt, Homo sapiens
  misc_RNA (1)...(19): siRNA sense strand
gcacggagcuggccaucaa

SEQ ID NO: 536376 - RNA, 19 nt, Homo sapiens
  misc_RNA (1)...(19): siRNA sense strand
ggccacagcugacaagauu

SEQ ID NO: 536377 - RNA, 19 nt, Homo sapiens
  misc_RNA (1)...(19): siRNA sense strand
agaaggaugucucagauga

SEQ ID NO: 536378 - RNA, 19 nt, Homo sapiens
  misc_RNA (1)...(19): siRNA sense strand
ggucaaggcuuugcuucuu

SEQ ID NO: 536379 - RNA, 19 nt, Homo sapiens
  misc_RNA (1)...(19): siRNA sense strand
ggagcaaacuggcacuaag

SEQ ID NO: 536380 - RNA, 19 nt, Homo sapiens
  misc_RNA (1)...(19): siRNA sense strand
ggaugacaaucaccaggaa

SEQ ID NO: 536381 - RNA, 19 nt, Homo sapiens
  misc_RNA (1)...(19): siRNA sense strand
gagcugaaccgaggagauu

SEQ ID NO: 536382 - RNA, 19 nt, Homo sapiens
  misc_RNA (1)...(19): siRNA sense strand
gagcugagccucguauugu

SEQ ID NO: 536383 - RNA, 19 nt, Homo sapiens
  misc_RNA (1)...(19): siRNA sense strand
uggcagauuuggaagauug

SEQ ID NO: 536384 - RNA, 19 nt, Homo sapiens
  misc_RNA (1)...(19): siRNA sense strand
guggagaucugcaugaaac

SEQ ID NO: 536385 - RNA, 19 nt, Homo sapiens
  misc_RNA (1)...(19): siRNA sense strand
gcacgagccuaugguugug

SEQ ID NO: 536386 - RNA, 19 nt, Homo sapiens
  misc_RNA (1)...(19): siRNA sense strand
gcaugaaacaacauaacaa

SEQ ID NO: 536387 - RNA, 19 nt, Homo sapiens
  misc_RNA (1)...(19): siRNA sense strand
acagaaggaugucucagau

SEQ ID NO: 536388 - RNA, 19 nt, Homo sapiens
  misc_RNA (1)...(19): siRNA sense strand
gagcaagaaaucacccauu

SEQ ID NO: 536389 - RNA, 19 nt, Homo sapiens
  misc_RNA (1)...(19): siRNA sense strand
gcccauggcccucaguuug

SEQ ID NO: 536390 - RNA, 19 nt, Homo sapiens
  misc_RNA (1)...(19): siRNA sense strand
agcaagaaaucacccauug

SEQ ID NO: 536391 - RNA, 19 nt, Homo sapiens
  misc_RNA (1)...(19): siRNA sense strand
ccauggcccucaguuugua

SEQ ID NO: 536392 - RNA, 19 nt, Homo sapiens
  misc_RNA (1)...(19): siRNA sense strand
agcagaaggucaaggcuuu

SEQ ID NO: 536393 - RNA, 19 nt, Homo sapiens
  misc_RNA (1)...(19): siRNA sense strand
ucuacaaggccaagaauga

SEQ ID NO: 536394 - RNA, 19 nt, Homo sapiens
  misc_RNA (1)...(19): siRNA sense strand
caaauacgaagccaagaag

SEQ ID NO: 536395 - RNA, 19 nt, Homo sapiens
  misc_RNA (1)...(19): siRNA sense strand
guaagcaucaggagcuaga

SEQ ID NO: 536396 - RNA, 19 nt, Homo sapiens
  misc_RNA (1)...(19): siRNA sense strand
gaaggucaaggcuuugcuu

SEQ ID NO: 536397 - RNA, 19 nt, Homo sapiens
  misc_RNA (1)...(19): siRNA sense strand
aauacgaagccaagaagua

SEQ ID NO: 536398 - RNA, 19 nt, Homo sapiens
  misc_RNA (1)...(19): siRNA sense strand
gcagcuggcacgugacuuc

SEQ ID NO: 536399 - RNA, 19 nt, Homo sapiens
  misc_RNA (1)...(19): siRNA sense strand
acaaauacgaagccaagaa

SEQ ID NO: 536400 - RNA, 19 nt, Homo sapiens
  misc_RNA (1)...(19): siRNA sense strand
ggaagagcuagagaaguuu

SEQ ID NO: 536401 - RNA, 19 nt, Homo sapiens
  misc_RNA (1)...(19): siRNA sense strand
ggaagauugggaagagcua

SEQ ID NO: 536402 - RNA, 19 nt, Homo sapiens
  misc_RNA (1)...(19): siRNA sense strand
acaaucaggaugacaauca

SEQ ID NO: 536403 - RNA, 19 nt, Homo sapiens
  misc_RNA (1)...(19): siRNA sense strand
ccacagcugacaagauuca

SEQ ID NO: 536404 - RNA, 19 nt, Homo sapiens
  misc_RNA (1)...(19): siRNA sense strand
gcaacagaaggaugucuca

SEQ ID NO: 536405 - RNA, 19 nt, Homo sapiens
  misc_RNA (1)...(19): siRNA sense strand
gcaagaaaucacccauugg

SEQ ID NO: 536406 - RNA, 19 nt, Homo sapiens
  misc_RNA (1)...(19): siRNA sense strand
gcagguaccccuucuccua

SEQ ID NO: 536407 - RNA, 19 nt, Homo sapiens
  misc_RNA (1)...(19): siRNA sense strand
ucaugacccuucggaauca

SEQ ID NO: 536408 - RNA, 19 nt, Homo sapiens
  misc_RNA (1)...(19): siRNA sense strand
cuagagaaguuuuccaaga

SEQ ID NO: 536409 - RNA, 19 nt, Homo sapiens
  misc_RNA (1)...(19): siRNA sense strand
gcaaacuggcacuaagcaa

SEQ ID NO: 536410 - RNA, 19 nt, Homo sapiens
  misc_RNA (1)...(19): siRNA sense strand
ggagaucugcaugaaacaa

SEQ ID NO: 536411 - RNA, 19 nt, Homo sapiens
  misc_RNA (1)...(19): siRNA sense strand
guuaccacccucauucuug

SEQ ID NO: 536412 - RNA, 19 nt, Homo sapiens
  misc_RNA (1)...(19): siRNA sense strand
acaguuaccacccucauuc

SEQ ID NO: 536413 - RNA, 19 nt, Homo sapiens
  misc_RNA (1)...(19): siRNA sense strand
ccacauccgagccagcuau

SEQ ID NO: 536414 - RNA, 19 nt, Homo sapiens
  misc_RNA (1)...(19): siRNA sense strand
caaggccaagaaugaguuu

SEQ ID NO: 536415 - RNA, 19 nt, Homo sapiens
  misc_RNA (1)...(19): siRNA sense strand
gcagaaggucaaggcuuug

SEQ ID NO: 536416 - RNA, 19 nt, Homo sapiens
  misc_RNA (1)...(19): siRNA sense strand
gaagagcuagagaaguuuu

SEQ ID NO: 536417 - RNA, 19 nt, Homo sapiens
  misc_RNA (1)...(19): siRNA sense strand
gagcaaacuggcacuaagc

SEQ ID NO: 536418 - RNA, 19 nt, Homo sapiens
  misc_RNA (1)...(19): siRNA sense strand
ccaaggcuacagaggauca

SEQ ID NO: 536419 - RNA, 19 nt, Homo sapiens
  misc_RNA (1)...(19): siRNA sense strand
ggccaagaaugaguuugca

SEQ ID NO: 536420 - RNA, 19 nt, Homo sapiens
  misc_RNA (1)...(19): siRNA sense strand
ugagcugagccucguauug

SEQ ID NO: 536421 - RNA, 19 nt, Homo sapiens
  misc_RNA (1)...(19): siRNA sense strand
ggcuacagaggaucaaaug

SEQ ID NO: 536422 - RNA, 19 nt, Homo sapiens
  misc_RNA (1)...(19): siRNA sense strand
ccuggcagauuuggaagau

SEQ ID NO: 536423 - RNA, 19 nt, Homo sapiens
  misc_RNA (1)...(19): siRNA sense strand
gaggagcaaacuggcacua

SEQ ID NO: 536424 - RNA, 19 nt, Homo sapiens
  misc_RNA (1)...(19): siRNA sense strand
gggaagagcuagagaaguu

SEQ ID NO: 536425 - RNA, 19 nt, Homo sapiens
  misc_RNA (1)...(19): siRNA sense strand
gcacggagcuggccaucaa

SEQ ID NO: 536426 - RNA, 19 nt, Homo sapiens
  misc_RNA (1)...(19): siRNA sense strand
ggccacagcugacaagauu

SEQ ID NO: 536427 - RNA, 19 nt, Homo sapiens
  misc_RNA (1)...(19): siRNA sense strand
agaaggaugucucagauga

SEQ ID NO: 536428 - RNA, 19 nt, Homo sapiens
  misc_RNA (1)...(19): siRNA sense strand
ggucaaggcuuugcuucuu

SEQ ID NO: 536429 - RNA, 19 nt, Homo sapiens
  misc_RNA (1)...(19): siRNA sense strand
ggagcaaacuggcacuaag

SEQ ID NO: 536430 - RNA, 19 nt, Homo sapiens
  misc_RNA (1)...(19): siRNA sense strand
ggaugacaaucaccaggaa

SEQ ID NO: 536431 - RNA, 19 nt, Homo sapiens
  misc_RNA (1)...(19): siRNA sense strand
gagcugaaccgaggagauu

SEQ ID NO: 536432 - RNA, 19 nt, Homo sapiens
  misc_RNA (1)...(19): siRNA sense strand
gagcugagccucguauugu

SEQ ID NO: 536433 - RNA, 19 nt, Homo sapiens
  misc_RNA (1)...(19): siRNA sense strand
uggcagauuuggaagauug

SEQ ID NO: 536434 - RNA, 19 nt, Homo sapiens
  misc_RNA (1)...(19): siRNA sense strand
guggagaucugcaugaaac

SEQ ID NO: 536435 - RNA, 19 nt, Homo sapiens
  misc_RNA (1)...(19): siRNA sense strand
gcacgagccuaugguugug

SEQ ID NO: 536436 - RNA, 19 nt, Homo sapiens
  misc_RNA (1)...(19): siRNA sense strand
gcaugaaacaacauaacaa

SEQ ID NO: 536437 - RNA, 19 nt, Homo sapiens
  misc_RNA (1)...(19): siRNA sense strand
acagaaggaugucucagau

SEQ ID NO: 536438 - RNA, 19 nt, Homo sapiens
  misc_RNA (1)...(19): siRNA sense strand
gagcaagaaaucacccauu

SEQ ID NO: 536439 - RNA, 19 nt, Homo sapiens
  misc_RNA (1)...(19): siRNA sense strand
gcccauggcccucaguuug

SEQ ID NO: 536440 - RNA, 19 nt, Homo sapiens
  misc_RNA (1)...(19): siRNA sense strand
agcaagaaaucacccauug

SEQ ID NO: 536441 - RNA, 19 nt, Homo sapiens
  misc_RNA (1)...(19): siRNA sense strand
ccauggcccucaguuugua

SEQ ID NO: 536442 - RNA, 19 nt, Homo sapiens
  misc_RNA (1)...(19): siRNA sense strand
agcagaaggucaaggcuuu

SEQ ID NO: 536443 - RNA, 19 nt, Homo sapiens
  misc_RNA (1)...(19): siRNA sense strand
ucuacaaggccaagaauga

SEQ ID NO: 536444 - RNA, 19 nt, Homo sapiens
  misc_RNA (1)...(19): siRNA sense strand
caaauacgaagccaagaag

SEQ ID NO: 536445 - RNA, 19 nt, Homo sapiens
  misc_RNA (1)...(19): siRNA sense strand
guaagcaucaggagcuaga

SEQ ID NO: 536446 - RNA, 19 nt, Homo sapiens
  misc_RNA (1)...(19): siRNA sense strand
gaaggucaaggcuuugcuu

SEQ ID NO: 536447 - RNA, 19 nt, Homo sapiens
  misc_RNA (1)...(19): siRNA sense strand
aauacgaagccaagaagua

SEQ ID NO: 536448 - RNA, 19 nt, Homo sapiens
  misc_RNA (1)...(19): siRNA sense strand
gcagcuggcacgugacuuc

SEQ ID NO: 536449 - RNA, 19 nt, Homo sapiens
  misc_RNA (1)...(19): siRNA sense strand
acaaauacgaagccaagaa

SEQ ID NO: 536450 - RNA, 19 nt, Homo sapiens
  misc_RNA (1)...(19): siRNA sense strand
ggaagagcuagagaaguuu

SEQ ID NO: 536451 - RNA, 19 nt, Homo sapiens
  misc_RNA (1)...(19): siRNA sense strand
ggaagauugggaagagcua

SEQ ID NO: 536452 - RNA, 19 nt, Homo sapiens
  misc_RNA (1)...(19): siRNA sense strand
acaaucaggaugacaauca

SEQ ID NO: 536453 - RNA, 19 nt, Homo sapiens
  misc_RNA (1)...(19): siRNA sense strand
ccacagcugacaagauuca

SEQ ID NO: 536454 - RNA, 19 nt, Homo sapiens
  misc_RNA (1)...(19): siRNA sense strand
gcaacagaaggaugucuca

SEQ ID NO: 536455 - RNA, 19 nt, Homo sapiens
  misc_RNA (1)...(19): siRNA sense strand
gcaagaaaucacccauugg

SEQ ID NO: 536456 - RNA, 19 nt, Homo sapiens
  misc_RNA (1)...(19): siRNA sense strand
gcagguaccccuucuccua

SEQ ID NO: 536457 - RNA, 19 nt, Homo sapiens
  misc_RNA (1)...(19): siRNA sense strand
ucaugacccuucggaauca

SEQ ID NO: 536458 - RNA, 19 nt, Homo sapiens
  misc_RNA (1)...(19): siRNA sense strand
cuagagaaguuuuccaaga

SEQ ID NO: 536459 - RNA, 19 nt, Homo sapiens
  misc_RNA (1)...(19): siRNA sense strand
gcaaacuggcacuaagcaa

SEQ ID NO: 536460 - RNA, 19 nt, Homo sapiens
  misc_RNA (1)...(19): siRNA sense strand
ggagaucugcaugaaacaa

SEQ ID NO: 536461 - RNA, 19 nt, Homo sapiens
  misc_RNA (1)...(19): siRNA sense strand
guuaccacccucauucuug

SEQ ID NO: 536462 - RNA, 19 nt, Homo sapiens
  misc_RNA (1)...(19): siRNA sense strand
acaguuaccacccucauuc

SEQ ID NO: 536463 - RNA, 19 nt, Homo sapiens
  misc_RNA (1)...(19): siRNA sense strand
ccacauccgagccagcuau

SEQ ID NO: 536464 - RNA, 19 nt, Homo sapiens
  misc_RNA (1)...(19): siRNA sense strand
caaggccaagaaugaguuu

SEQ ID NO: 536465 - RNA, 19 nt, Homo sapiens
  misc_RNA (1)...(19): siRNA sense strand
gcagaaggucaaggcuuug

SEQ ID NO: 536466 - RNA, 19 nt, Homo sapiens
  misc_RNA (1)...(19): siRNA sense strand
gaagagcuagagaaguuuu

SEQ ID NO: 536467 - RNA, 19 nt, Homo sapiens
  misc_RNA (1)...(19): siRNA sense strand
gagcaaacuggcacuaagc

SEQ ID NO: 536468 - RNA, 19 nt, Homo sapiens
  misc_RNA (1)...(19): siRNA sense strand
ccaaggcuacagaggauca

SEQ ID NO: 536469 - RNA, 19 nt, Homo sapiens
  misc_RNA (1)...(19): siRNA sense strand
ggccaagaaugaguuugca

SEQ ID NO: 536470 - RNA, 19 nt, Homo sapiens
  misc_RNA (1)...(19): siRNA sense strand
ugagcugagccucguauug

SEQ ID NO: 536471 - RNA, 19 nt, Homo sapiens
  misc_RNA (1)...(19): siRNA sense strand
ggcuacagaggaucaaaug

SEQ ID NO: 536472 - RNA, 19 nt, Homo sapiens
  misc_RNA (1)...(19): siRNA sense strand
ccuggcagauuuggaagau

SEQ ID NO: 536473 - RNA, 19 nt, Homo sapiens
  misc_RNA (1)...(19): siRNA sense strand
gaggagcaaacuggcacua

SEQ ID NO: 536474 - RNA, 19 nt, Homo sapiens
  misc_RNA (1)...(19): siRNA sense strand
gggaagagcuagagaaguu

SEQ ID NO: 536475 - RNA, 19 nt, Homo sapiens
  misc_RNA (1)...(19): siRNA sense strand
ggccacagcugacaagauu

SEQ ID NO: 536476 - RNA, 19 nt, Homo sapiens
  misc_RNA (1)...(19): siRNA sense strand
ggucaaggcuuugcuucuu

SEQ ID NO: 536477 - RNA, 19 nt, Homo sapiens
  misc_RNA (1)...(19): siRNA sense strand
ggagcaaacuggcacuaag

SEQ ID NO: 536478 - RNA, 19 nt, Homo sapiens
  misc_RNA (1)...(19): siRNA sense strand
ggaugacaaucaccaggaa

SEQ ID NO: 536479 - RNA, 19 nt, Homo sapiens
  misc_RNA (1)...(19): siRNA sense strand
gagcugaaccgaggagauu

SEQ ID NO: 536480 - RNA, 19 nt, Homo sapiens
  misc_RNA (1)...(19): siRNA sense strand
gagcugagccucguauugu

SEQ ID NO: 536481 - RNA, 19 nt, Homo sapiens
  misc_RNA (1)...(19): siRNA sense strand
uggcagauuuggaagauug

SEQ ID NO: 536482 - RNA, 19 nt, Homo sapiens
  misc_RNA (1)...(19): siRNA sense strand
guggagaucugcaugaaac

SEQ ID NO: 536483 - RNA, 19 nt, Homo sapiens
  misc_RNA (1)...(19): siRNA sense strand
gcaugaaacaacauaacaa

SEQ ID NO: 536484 - RNA, 19 nt, Homo sapiens
  misc_RNA (1)...(19): siRNA sense strand
gagcaagaaaucacccauu

SEQ ID NO: 536485 - RNA, 19 nt, Homo sapiens
  misc_RNA (1)...(19): siRNA sense strand
gcccauggcccucaguuug

SEQ ID NO: 536486 - RNA, 19 nt, Homo sapiens
  misc_RNA (1)...(19): siRNA sense strand
agcaagaaaucacccauug

SEQ ID NO: 536487 - RNA, 19 nt, Homo sapiens
  misc_RNA (1)...(19): siRNA sense strand
ccauggcccucaguuugua

SEQ ID NO: 536488 - RNA, 19 nt, Homo sapiens
  misc_RNA (1)...(19): siRNA sense strand
agcagaaggucaaggcuuu

SEQ ID NO: 536489 - RNA, 19 nt, Homo sapiens
  misc_RNA (1)...(19): siRNA sense strand
ucuacaaggccaagaauga

SEQ ID NO: 536490 - RNA, 19 nt, Homo sapiens
  misc_RNA (1)...(19): siRNA sense strand
caaauacgaagccaagaag

SEQ ID NO: 536491 - RNA, 19 nt, Homo sapiens
  misc_RNA (1)...(19): siRNA sense strand
guaagcaucaggagcuaga

SEQ ID NO: 536492 - RNA, 19 nt, Homo sapiens
  misc_RNA (1)...(19): siRNA sense strand
gaaggucaaggcuuugcuu

SEQ ID NO: 536493 - RNA, 19 nt, Homo sapiens
  misc_RNA (1)...(19): siRNA sense strand
aauacgaagccaagaagua

SEQ ID NO: 536494 - RNA, 19 nt, Homo sapiens
  misc_RNA (1)...(19): siRNA sense strand
gcagcuggcacgugacuuc

SEQ ID NO: 536495 - RNA, 19 nt, Homo sapiens
  misc_RNA (1)...(19): siRNA sense strand
acaaauacgaagccaagaa

SEQ ID NO: 536496 - RNA, 19 nt, Homo sapiens
  misc_RNA (1)...(19): siRNA sense strand
ggaagagcuagagaaguuu

SEQ ID NO: 536497 - RNA, 19 nt, Homo sapiens
  misc_RNA (1)...(19): siRNA sense strand
ggaagauugggaagagcua

SEQ ID NO: 536498 - RNA, 19 nt, Homo sapiens
  misc_RNA (1)...(19): siRNA sense strand
acaaucaggaugacaauca

SEQ ID NO: 536499 - RNA, 19 nt, Homo sapiens
  misc_RNA (1)...(19): siRNA sense strand
ccacagcugacaagauuca

SEQ ID NO: 536500 - RNA, 19 nt, Homo sapiens
  misc_RNA (1)...(19): siRNA sense strand
ucaugacccuucggaauca

SEQ ID NO: 536501 - RNA, 19 nt, Homo sapiens
  misc_RNA (1)...(19): siRNA sense strand
gcagguaccccuucuccua

SEQ ID NO: 536502 - RNA, 19 nt, Homo sapiens
  misc_RNA (1)...(19): siRNA sense strand
gcaagaaaucacccauugg

SEQ ID NO: 536503 - RNA, 19 nt, Homo sapiens
  misc_RNA (1)...(19): siRNA sense strand
cuagagaaguuuuccaaga

SEQ ID NO: 536504 - RNA, 19 nt, Homo sapiens
  misc_RNA (1)...(19): siRNA sense strand
guuaccacccucauucuug

SEQ ID NO: 536505 - RNA, 19 nt, Homo sapiens
  misc_RNA (1)...(19): siRNA sense strand
ggagaucugcaugaaacaa

SEQ ID NO: 536506 - RNA, 19 nt, Homo sapiens
  misc_RNA (1)...(19): siRNA sense strand
gcaaacuggcacuaagcaa

SEQ ID NO: 536507 - RNA, 19 nt, Homo sapiens
  misc_RNA (1)...(19): siRNA sense strand
acaguuaccacccucauuc

SEQ ID NO: 536508 - RNA, 19 nt, Homo sapiens
  misc_RNA (1)...(19): siRNA sense strand
ccacauccgagccagcuau

SEQ ID NO: 536509 - RNA, 19 nt, Homo sapiens
  misc_RNA (1)...(19): siRNA sense strand
caaggccaagaaugaguuu

SEQ ID NO: 536510 - RNA, 19 nt, Homo sapiens
  misc_RNA (1)...(19): siRNA sense strand
gcagaaggucaaggcuuug

SEQ ID NO: 536511 - RNA, 19 nt, Homo sapiens
  misc_RNA (1)...(19): siRNA sense strand
gaagagcuagagaaguuuu

SEQ ID NO: 536512 - RNA, 19 nt, Homo sapiens
  misc_RNA (1)...(19): siRNA sense strand
ccaaggcuacagaggauca

SEQ ID NO: 536513 - RNA, 19 nt, Homo sapiens
  misc_RNA (1)...(19): siRNA sense strand
gagcaaacuggcacuaagc

SEQ ID NO: 536514 - RNA, 19 nt, Homo sapiens
  misc_RNA (1)...(19): siRNA sense strand
ggccaagaaugaguuugca

SEQ ID NO: 536515 - RNA, 19 nt, Homo sapiens
  misc_RNA (1)...(19): siRNA sense strand
ugagcugagccucguauug

SEQ ID NO: 536516 - RNA, 19 nt, Homo sapiens
  misc_RNA (1)...(19): siRNA sense strand
ggcuacagaggaucaaaug

SEQ ID NO: 536517 - RNA, 19 nt, Homo sapiens
  misc_RNA (1)...(19): siRNA sense strand
ccuggcagauuuggaagau

SEQ ID NO: 536518 - RNA, 19 nt, Homo sapiens
  misc_RNA (1)...(19): siRNA sense strand
gaggagcaaacuggcacua

SEQ ID NO: 536519 - RNA, 19 nt, Homo sapiens
  misc_RNA (1)...(19): siRNA sense strand
gaaccgagugcgcgagaaa

SEQ ID NO: 536520 - RNA, 19 nt, Homo sapiens
  misc_RNA (1)...(19): siRNA sense strand
gcgcugauccgcuccuuca

SEQ ID NO: 536521 - RNA, 19 nt, Homo sapiens
  misc_RNA (1)...(19): siRNA sense strand
gcccggaaccgcuuucaga

SEQ ID NO: 536522 - RNA, 19 nt, Homo sapiens
  misc_RNA (1)...(19): siRNA sense strand
gcgagaaacagaagcucuu

SEQ ID NO: 536523 - RNA, 19 nt, Homo sapiens
  misc_RNA (1)...(19): siRNA sense strand
cgagugcgcgagaaacaga

SEQ ID NO: 536524 - RNA, 19 nt, Homo sapiens
  misc_RNA (1)...(19): siRNA sense strand
caucaaagccuacuuauuu

SEQ ID NO: 536525 - RNA, 19 nt, Homo sapiens
  misc_RNA (1)...(19): siRNA sense strand
gaacaugccuccucacuac

SEQ ID NO: 536526 - RNA, 19 nt, Homo sapiens
  misc_RNA (1)...(19): siRNA sense strand
ccacagaguuucucaucua

SEQ ID NO: 536527 - RNA, 19 nt, Homo sapiens
  misc_RNA (1)...(19): siRNA sense strand
cagauggaauguacgagua

SEQ ID NO: 536528 - RNA, 19 nt, Homo sapiens
  misc_RNA (1)...(19): siRNA sense strand
gaguaugguucuaucaaga

SEQ ID NO: 536529 - RNA, 19 nt, Homo sapiens
  misc_RNA (1)...(19): siRNA sense strand
gaagcugguuugggccaua

SEQ ID NO: 536530 - RNA, 19 nt, Homo sapiens
  misc_RNA (1)...(19): siRNA sense strand
ccuuuaaccucauuacuga

SEQ ID NO: 536531 - RNA, 19 nt, Homo sapiens
  misc_RNA (1)...(19): siRNA sense strand
auaaaucccuagcugauga

SEQ ID NO: 536532 - RNA, 19 nt, Homo sapiens
  misc_RNA (1)...(19): siRNA sense strand
cgaaagaggagucgagguu

SEQ ID NO: 536533 - RNA, 19 nt, Homo sapiens
  misc_RNA (1)...(19): siRNA sense strand
ccacuaccaugcccucuuc

SEQ ID NO: 536534 - RNA, 19 nt, Homo sapiens
  misc_RNA (1)...(19): siRNA sense strand
guacgaguaugguucuauc

SEQ ID NO: 536535 - RNA, 19 nt, Homo sapiens
  misc_RNA (1)...(19): siRNA sense strand
ugagagcacuggugaacau

SEQ ID NO: 536536 - RNA, 19 nt, Homo sapiens
  misc_RNA (1)...(19): siRNA sense strand
gcauggcucuguaccucaa

SEQ ID NO: 536537 - RNA, 19 nt, Homo sapiens
  misc_RNA (1)...(19): siRNA sense strand
ucaggacccuccauuguca

SEQ ID NO: 536538 - RNA, 19 nt, Homo sapiens
  misc_RNA (1)...(19): siRNA sense strand
guacagaauuccaggucau

SEQ ID NO: 536539 - RNA, 19 nt, Homo sapiens
  misc_RNA (1)...(19): siRNA sense strand
gcccaucaaagccuacuua

SEQ ID NO: 536540 - RNA, 19 nt, Homo sapiens
  misc_RNA (1)...(19): siRNA sense strand
gauaggcuguugcuuuguc

SEQ ID NO: 536541 - RNA, 19 nt, Homo sapiens
  misc_RNA (1)...(19): siRNA sense strand
cugauaggcuguugcuuug

SEQ ID NO: 536542 - RNA, 19 nt, Homo sapiens
  misc_RNA (1)...(19): siRNA sense strand
guucaucugugcaguaucu

SEQ ID NO: 536543 - RNA, 19 nt, Homo sapiens
  misc_RNA (1)...(19): siRNA sense strand
gauaggugucguucucuuu

SEQ ID NO: 536544 - RNA, 19 nt, Homo sapiens
  misc_RNA (1)...(19): siRNA sense strand
cugcauuggugcucacuuu

SEQ ID NO: 536545 - RNA, 19 nt, Homo sapiens
  misc_RNA (1)...(19): siRNA sense strand
caugauaggugucguucuc

SEQ ID NO: 536546 - RNA, 19 nt, Homo sapiens
  misc_RNA (1)...(19): siRNA sense strand
gugcaucaacuccguguuu

SEQ ID NO: 536547 - RNA, 19 nt, Homo sapiens
  misc_RNA (1)...(19): siRNA sense strand
cagaguuucucaucuacga

SEQ ID NO: 536548 - RNA, 19 nt, Homo sapiens
  misc_RNA (1)...(19): siRNA sense strand
gagucgagguuggauguug

SEQ ID NO: 536549 - RNA, 19 nt, Homo sapiens
  misc_RNA (1)...(19): siRNA sense strand
ccaaggaggaagcugguuu

SEQ ID NO: 536550 - RNA, 19 nt, Homo sapiens
  misc_RNA (1)...(19): siRNA sense strand
cacgggauauuugcuguuu

SEQ ID NO: 536551 - RNA, 19 nt, Homo sapiens
  misc_RNA (1)...(19): siRNA sense strand
ccagcacccuguacacugu

SEQ ID NO: 536552 - RNA, 19 nt, Homo sapiens
  misc_RNA (1)...(19): siRNA sense strand
ccauaagugucaccaugau

SEQ ID NO: 536553 - RNA, 19 nt, Homo sapiens
  misc_RNA (1)...(19): siRNA sense strand
cgaguaugguucuaucaag

SEQ ID NO: 536554 - RNA, 19 nt, Homo sapiens
  misc_RNA (1)...(19): siRNA sense strand
uguacacugugcccuuuaa

SEQ ID NO: 536555 - RNA, 19 nt, Homo sapiens
  misc_RNA (1)...(19): siRNA sense strand
caauggggcuacuguugua

SEQ ID NO: 536556 - RNA, 19 nt, Homo sapiens
  misc_RNA (1)...(19): siRNA sense strand
ggaauguacgaguaugguu

SEQ ID NO: 536557 - RNA, 19 nt, Homo sapiens
  misc_RNA (1)...(19): siRNA sense strand
cauaagugucaccaugaua

SEQ ID NO: 536558 - RNA, 19 nt, Homo sapiens
  misc_RNA (1)...(19): siRNA sense strand
gauggaauguacgaguaug

SEQ ID NO: 536559 - RNA, 19 nt, Homo sapiens
  misc_RNA (1)...(19): siRNA sense strand
acugauaggcuguugcuuu

SEQ ID NO: 536560 - RNA, 19 nt, Homo sapiens
  misc_RNA (1)...(19): siRNA sense strand
caaggaggaagcugguuug

SEQ ID NO: 536561 - RNA, 19 nt, Homo sapiens
  misc_RNA (1)...(19): siRNA sense strand
uuacuucacgggauauuug

SEQ ID NO: 536562 - RNA, 19 nt, Homo sapiens
  misc_RNA (1)...(19): siRNA sense strand
gccauaagugucaccauga

SEQ ID NO: 536563 - RNA, 19 nt, Homo sapiens
  misc_RNA (1)...(19): siRNA sense strand
gcugccgacuucauugaug

SEQ ID NO: 536564 - RNA, 19 nt, Homo sapiens
  misc_RNA (1)...(19): siRNA sense strand
cagccuguuugguguaaug

SEQ ID NO: 536565 - RNA, 19 nt, Homo sapiens
  misc_RNA (1)...(19): siRNA sense strand
agaagggccuccacuacca

SEQ ID NO: 536566 - RNA, 19 nt, Homo sapiens
  misc_RNA (1)...(19): siRNA sense strand
gugucguucucuuugauuu

SEQ ID NO: 536567 - RNA, 19 nt, Homo sapiens
  misc_RNA (1)...(19): siRNA sense strand
ugaacaugccuccucacua

SEQ ID NO: 536568 - RNA, 19 nt, Homo sapiens
  misc_RNA (1)...(19): siRNA sense strand
gugcucacuuuguguuuua

SEQ ID NO: 536569 - RNA, 19 nt, Homo sapiens
  misc_RNA (1)...(19): siRNA sense strand
aaagccuacuuauuugaug

SEQ ID NO: 536570 - RNA, 19 nt, Homo sapiens
  misc_RNA (1)...(19): siRNA sense strand
cuuugucgcucucuuuguu

SEQ ID NO: 536571 - RNA, 19 nt, Homo sapiens
  misc_RNA (1)...(19): siRNA sense strand
ccuguacacugugcccuuu

SEQ ID NO: 536572 - RNA, 19 nt, Homo sapiens
  misc_RNA (1)...(19): siRNA sense strand
guucuucacagauuucaug

SEQ ID NO: 536573 - RNA, 19 nt, Homo sapiens
  misc_RNA (1)...(19): siRNA sense strand
ccagcagacucaucaugca

SEQ ID NO: 536574 - RNA, 19 nt, Homo sapiens
  misc_RNA (1)...(19): siRNA sense strand
ccaucaaagccuacuuauu

SEQ ID NO: 536575 - RNA, 19 nt, Homo sapiens
  misc_RNA (1)...(19): siRNA sense strand
gcauuggugcucacuuugu

SEQ ID NO: 536576 - RNA, 19 nt, Homo sapiens
  misc_RNA (1)...(19): siRNA sense strand
uaggugucguucucuuuga

SEQ ID NO: 536577 - RNA, 19 nt, Homo sapiens
  misc_RNA (1)...(19): siRNA sense strand
cgggauauuugcuguuugg

SEQ ID NO: 536578 - RNA, 19 nt, Homo sapiens
  misc_RNA (1)...(19): siRNA sense strand
gucuuuacuucacgggaua

SEQ ID NO: 536579 - RNA, 19 nt, Homo sapiens
  misc_RNA (1)...(19): siRNA sense strand
cauuggugcucacuuugug

SEQ ID NO: 536580 - RNA, 19 nt, Homo sapiens
  misc_RNA (1)...(19): siRNA sense strand
ugauaggugucguucucuu

SEQ ID NO: 536581 - RNA, 19 nt, Homo sapiens
  misc_RNA (1)...(19): siRNA sense strand
gagguggccugggcuuucu

SEQ ID NO: 536582 - RNA, 19 nt, Homo sapiens
  misc_RNA (1)...(19): siRNA sense strand
gcgccacccucacaugcau

SEQ ID NO: 536583 - RNA, 19 nt, Homo sapiens
  misc_RNA (1)...(19): siRNA sense strand
ccucaggacccuccauugu

SEQ ID NO: 536584 - RNA, 19 nt, Homo sapiens
  misc_RNA (1)...(19): siRNA sense strand
uguuguagcagcuuugauu

SEQ ID NO: 536585 - RNA, 19 nt, Homo sapiens
  misc_RNA (1)...(19): siRNA sense strand
cagaauuccaggucauguu

SEQ ID NO: 536586 - RNA, 19 nt, Homo sapiens
  misc_RNA (1)...(19): siRNA sense strand
caugcccucuucacagguu

SEQ ID NO: 536587 - RNA, 19 nt, Homo sapiens
  misc_RNA (1)...(19): siRNA sense strand
caucagccaccucauugga

SEQ ID NO: 536588 - RNA, 19 nt, Homo sapiens
  misc_RNA (1)...(19): siRNA sense strand
ccagcagccuguacagcau

SEQ ID NO: 536589 - RNA, 19 nt, Homo sapiens
  misc_RNA (1)...(19): siRNA sense strand
cuauaaaucccuagcugau

SEQ ID NO: 536590 - RNA, 19 nt, Homo sapiens
  misc_RNA (1)...(19): siRNA sense strand
ggagcugggaagacuguug

SEQ ID NO: 536591 - RNA, 19 nt, Homo sapiens
  misc_RNA (1)...(19): siRNA sense strand
gcacugauaggcuguugcu

SEQ ID NO: 536592 - RNA, 19 nt, Homo sapiens
  misc_RNA (1)...(19): siRNA sense strand
aagcugguuugggccauaa

SEQ ID NO: 536593 - RNA, 19 nt, Homo sapiens
  misc_RNA (1)...(19): siRNA sense strand
uguacagcauugugugguu

SEQ ID NO: 536594 - RNA, 19 nt, Homo sapiens
  misc_RNA (1)...(19): siRNA sense strand
guucuucuucucugcauug

SEQ ID NO: 536595 - RNA, 19 nt, Homo sapiens
  misc_RNA (1)...(19): siRNA sense strand
ggucauguucuucuucucu

SEQ ID NO: 536596 - RNA, 19 nt, Homo sapiens
  misc_RNA (1)...(19): siRNA sense strand
gccgccacaucuauaaauc

SEQ ID NO: 536597 - RNA, 19 nt, Homo sapiens
  misc_RNA (1)...(19): siRNA sense strand
gauuucaugggccagauug

SEQ ID NO: 536598 - RNA, 19 nt, Homo sapiens
  misc_RNA (1)...(19): siRNA sense strand
ucgcucucuuuguuagaua

SEQ ID NO: 536599 - RNA, 19 nt, Homo sapiens
  misc_RNA (1)...(19): siRNA sense strand
caggucauguucuucuucu

SEQ ID NO: 536600 - RNA, 19 nt, Homo sapiens
  misc_RNA (1)...(19): siRNA sense strand
uguuagauauguggauuag

SEQ ID NO: 536601 - RNA, 19 nt, Homo sapiens
  misc_RNA (1)...(19): siRNA sense strand
cagacucgcagggcaauga

SEQ ID NO: 536602 - RNA, 19 nt, Homo sapiens
  misc_RNA (1)...(19): siRNA sense strand
gcucccaucaggacaagga

SEQ ID NO: 536603 - RNA, 19 nt, Homo sapiens
  misc_RNA (1)...(19): siRNA sense strand
cgucugcgguggcacugau

SEQ ID NO: 536604 - RNA, 19 nt, Homo sapiens
  misc_RNA (1)...(19): siRNA sense strand
gguccugugcagccuguuu

SEQ ID NO: 536605 - RNA, 19 nt, Homo sapiens
  misc_RNA (1)...(19): siRNA sense strand
aagccuacuuauuugaugu

SEQ ID NO: 536606 - RNA, 19 nt, Homo sapiens
  misc_RNA (1)...(19): siRNA sense strand
cacagaguuucucaucuac

SEQ ID NO: 536607 - RNA, 19 nt, Homo sapiens
  misc_RNA (1)...(19): siRNA sense strand
gugcacacaacuccacaga

SEQ ID NO: 536608 - RNA, 19 nt, Homo sapiens
  misc_RNA (1)...(19): siRNA sense strand
ccucacuaccgcuaccuuu

SEQ ID NO: 536609 - RNA, 19 nt, Homo sapiens
  misc_RNA (1)...(19): siRNA sense strand
gaagggccuccacuaccau

SEQ ID NO: 536610 - RNA, 19 nt, Homo sapiens
  misc_RNA (1)...(19): siRNA sense strand
ggauacaacuuacguuuga

SEQ ID NO: 536611 - RNA, 19 nt, Homo sapiens
  misc_RNA (1)...(19): siRNA sense strand
gaacuaaagagaaccgaua

SEQ ID NO: 536612 - RNA, 19 nt, Homo sapiens
  misc_RNA (1)...(19): siRNA sense strand
uggaagaccuuauucgaua

SEQ ID NO: 536613 - RNA, 19 nt, Homo sapiens
  misc_RNA (1)...(19): siRNA sense strand
caacuuacguuugaugaaa

SEQ ID NO: 536614 - RNA, 19 nt, Homo sapiens
  misc_RNA (1)...(19): siRNA sense strand
ccacuggaccugcuuaaua

SEQ ID NO: 536615 - RNA, 19 nt, Homo sapiens
  misc_RNA (1)...(19): siRNA sense strand
uaacagaggagguaagauu

SEQ ID NO: 536616 - RNA, 19 nt, Homo sapiens
  misc_RNA (1)...(19): siRNA sense strand
caagguuuccucauacuua

SEQ ID NO: 536617 - RNA, 19 nt, Homo sapiens
  misc_RNA (1)...(19): siRNA sense strand
cagcaugagagaauuauua

SEQ ID NO: 536618 - RNA, 19 nt, Homo sapiens
  misc_RNA (1)...(19): siRNA sense strand
gaauccaaccugaguagua

SEQ ID NO: 536619 - RNA, 19 nt, Homo sapiens
  misc_RNA (1)...(19): siRNA sense strand
cagaggagguaagauuaua

SEQ ID NO: 536620 - RNA, 19 nt, Homo sapiens
  misc_RNA (1)...(19): siRNA sense strand
cacuggaccugcuuaauaa

SEQ ID NO: 536621 - RNA, 19 nt, Homo sapiens
  misc_RNA (1)...(19): siRNA sense strand
ggaagaccuuauucgauau

SEQ ID NO: 536622 - RNA, 19 nt, Homo sapiens
  misc_RNA (1)...(19): siRNA sense strand
aaagagaaccgauaccauu

SEQ ID NO: 536623 - RNA, 19 nt, Homo sapiens
  misc_RNA (1)...(19): siRNA sense strand
gaagaugacauaugcaagu

SEQ ID NO: 536624 - RNA, 19 nt, Homo sapiens
  misc_RNA (1)...(19): siRNA sense strand
gggaagaacuaaagagaac

SEQ ID NO: 536625 - RNA, 19 nt, Homo sapiens
  misc_RNA (1)...(19): siRNA sense strand
gaacagaacggaguacaag

SEQ ID NO: 536626 - RNA, 19 nt, Homo sapiens
  misc_RNA (1)...(19): siRNA sense strand
caaccugaguaguaaauuc

SEQ ID NO: 536627 - RNA, 19 nt, Homo sapiens
  misc_RNA (1)...(19): siRNA sense strand
ccucguaacuucucagugu

SEQ ID NO: 536628 - RNA, 19 nt, Homo sapiens
  misc_RNA (1)...(19): siRNA sense strand
gauggcaguuggacuuaga

SEQ ID NO: 536629 - RNA, 19 nt, Homo sapiens
  misc_RNA (1)...(19): siRNA sense strand
gcaguuggacuuagaagau

SEQ ID NO: 536630 - RNA, 19 nt, Homo sapiens
  misc_RNA (1)...(19): siRNA sense strand
uacaagauccucagcauga

SEQ ID NO: 536631 - RNA, 19 nt, Homo sapiens
  misc_RNA (1)...(19): siRNA sense strand
aauccaaccugaguaguaa

SEQ ID NO: 536632 - RNA, 19 nt, Homo sapiens
  misc_RNA (1)...(19): siRNA sense strand
gcuauaacugccuuuagua

SEQ ID NO: 536633 - RNA, 19 nt, Homo sapiens
  misc_RNA (1)...(19): siRNA sense strand
ugaaagauuugggcuugaa

SEQ ID NO: 536634 - RNA, 19 nt, Homo sapiens
  misc_RNA (1)...(19): siRNA sense strand
ccucauacuuauccaagaa

SEQ ID NO: 536635 - RNA, 19 nt, Homo sapiens
  misc_RNA (1)...(19): siRNA sense strand
ggacucaggcggaauccaa

SEQ ID NO: 536636 - RNA, 19 nt, Homo sapiens
  misc_RNA (1)...(19): siRNA sense strand
gaucugaaccuucuaacag

SEQ ID NO: 536637 - RNA, 19 nt, Homo sapiens
  misc_RNA (1)...(19): siRNA sense strand
gcaaugaaugucaaugugu

SEQ ID NO: 536638 - RNA, 19 nt, Homo sapiens
  misc_RNA (1)...(19): siRNA sense strand
ggagauuaguagcaguaga

SEQ ID NO: 536639 - RNA, 19 nt, Homo sapiens
  misc_RNA (1)...(19): siRNA sense strand
gaccuuauucgauaucuug

SEQ ID NO: 536640 - RNA, 19 nt, Homo sapiens
  misc_RNA (1)...(19): siRNA sense strand
aagaugacauaugcaagua

SEQ ID NO: 536641 - RNA, 19 nt, Homo sapiens
  misc_RNA (1)...(19): siRNA sense strand
uuagggcgcuggugugguu

SEQ ID NO: 536642 - RNA, 19 nt, Homo sapiens
  misc_RNA (1)...(19): siRNA sense strand
gagauggcaguuggacuua

SEQ ID NO: 536643 - RNA, 19 nt, Homo sapiens
  misc_RNA (1)...(19): siRNA sense strand
cugcacaccucguaacuuc

SEQ ID NO: 536644 - RNA, 19 nt, Homo sapiens
  misc_RNA (1)...(19): siRNA sense strand
uaacuucucaguguccaua

SEQ ID NO: 536645 - RNA, 19 nt, Homo sapiens
  misc_RNA (1)...(19): siRNA sense strand
ggaacagaacggaguacaa

SEQ ID NO: 536646 - RNA, 19 nt, Homo sapiens
  misc_RNA (1)...(19): siRNA sense strand
caauugcaaugaaugucaa

SEQ ID NO: 536647 - RNA, 19 nt, Homo sapiens
  misc_RNA (1)...(19): siRNA sense strand
agcccaagguuuccucaua

SEQ ID NO: 536648 - RNA, 19 nt, Homo sapiens
  misc_RNA (1)...(19): siRNA sense strand
caaggaacagaacggagua

SEQ ID NO: 536649 - RNA, 19 nt, Homo sapiens
  misc_RNA (1)...(19): siRNA sense strand
gagagaauuauuacugugu

SEQ ID NO: 536650 - RNA, 19 nt, Homo sapiens
  misc_RNA (1)...(19): siRNA sense strand
caugagagaauuauuacug

SEQ ID NO: 536651 - RNA, 19 nt, Homo sapiens
  misc_RNA (1)...(19): siRNA sense strand
ggugggaacugugccuguu

SEQ ID NO: 536652 - RNA, 19 nt, Homo sapiens
  misc_RNA (1)...(19): siRNA sense strand
gcccaagguuuccucauac

SEQ ID NO: 536653 - RNA, 19 nt, Homo sapiens
  misc_RNA (1)...(19): siRNA sense strand
ccacgagguccuucaguug

SEQ ID NO: 536654 - RNA, 19 nt, Homo sapiens
  misc_RNA (1)...(19): siRNA sense strand
ggucuugguauggagauua

SEQ ID NO: 536655 - RNA, 19 nt, Homo sapiens
  misc_RNA (1)...(19): siRNA sense strand
cccagaagaugacauaugc

SEQ ID NO: 536656 - RNA, 19 nt, Homo sapiens
  misc_RNA (1)...(19): siRNA sense strand
cauaagggaagaacuaaag

SEQ ID NO: 536657 - RNA, 19 nt, Homo sapiens
  misc_RNA (1)...(19): siRNA sense strand
gagauuaguagcaguagag

SEQ ID NO: 536658 - RNA, 19 nt, Homo sapiens
  misc_RNA (1)...(19): siRNA sense strand
aagagaaccgauaccauuu

SEQ ID NO: 536659 - RNA, 19 nt, Homo sapiens
  misc_RNA (1)...(19): siRNA sense strand
guccauaagggaagaacua

SEQ ID NO: 536660 - RNA, 19 nt, Homo sapiens
  misc_RNA (1)...(19): siRNA sense strand
cagaagaugacauaugcaa

SEQ ID NO: 536661 - RNA, 19 nt, Homo sapiens
  misc_RNA (1)...(19): siRNA sense strand
gagaauuauuacugugucu

SEQ ID NO: 536662 - RNA, 19 nt, Homo sapiens
  misc_RNA (1)...(19): siRNA sense strand
aacagaggagguaagauua

SEQ ID NO: 536663 - RNA, 19 nt, Homo sapiens
  misc_RNA (1)...(19): siRNA sense strand
agaggaaaauguauggaua

SEQ ID NO: 536664 - RNA, 19 nt, Homo sapiens
  misc_RNA (1)...(19): siRNA sense strand
agacccagaagaugacaua

SEQ ID NO: 536665 - RNA, 19 nt, Homo sapiens
  misc_RNA (1)...(19): siRNA sense strand
gucaaugugucccaagcaa

SEQ ID NO: 536666 - RNA, 19 nt, Homo sapiens
  misc_RNA (1)...(19): siRNA sense strand
ugugaguccuucagugcua

SEQ ID NO: 536667 - RNA, 19 nt, Homo sapiens
  misc_RNA (1)...(19): siRNA sense strand
gaguaguaaauuccaguuu

SEQ ID NO: 536668 - RNA, 19 nt, Homo sapiens
  misc_RNA (1)...(19): siRNA sense strand
uaacugccuuuaguaccuu

SEQ ID NO: 536669 - RNA, 19 nt, Homo sapiens
  misc_RNA (1)...(19): siRNA sense strand
acccagugauggaacuaua

SEQ ID NO: 536670 - RNA, 19 nt, Homo sapiens
  misc_RNA (1)...(19): siRNA sense strand
ccagugauggaacuauauu

SEQ ID NO: 536671 - RNA, 19 nt, Homo sapiens
  misc_RNA (1)...(19): siRNA sense strand
ccacaauugcaaugaaugu

SEQ ID NO: 536672 - RNA, 19 nt, Homo sapiens
  misc_RNA (1)...(19): siRNA sense strand
gcuugaagacccagaagau

SEQ ID NO: 536673 - RNA, 19 nt, Homo sapiens
  misc_RNA (1)...(19): siRNA sense strand
guaguaaauuccaguuuuc

SEQ ID NO: 536674 - RNA, 19 nt, Homo sapiens
  misc_RNA (1)...(19): siRNA sense strand
uugaagacccagaagauga

SEQ ID NO: 536675 - RNA, 19 nt, Homo sapiens
  misc_RNA (1)...(19): siRNA sense strand
gaagaccuuauucgauauc

SEQ ID NO: 536676 - RNA, 19 nt, Homo sapiens
  misc_RNA (1)...(19): siRNA sense strand
ggagcaccaugaggagugu

SEQ ID NO: 536677 - RNA, 19 nt, Homo sapiens
  misc_RNA (1)...(19): siRNA sense strand
gagaaccgauaccauuuuc

SEQ ID NO: 536678 - RNA, 19 nt, Homo sapiens
  misc_RNA (1)...(19): siRNA sense strand
gaggagguaagauuauaca

SEQ ID NO: 536679 - RNA, 19 nt, Homo sapiens
  misc_RNA (1)...(19): siRNA sense strand
aagguuuccucauacuuau

SEQ ID NO: 536680 - RNA, 19 nt, Homo sapiens
  misc_RNA (1)...(19): siRNA sense strand
gaauuauuacugugucuac

SEQ ID NO: 536681 - RNA, 19 nt, Homo sapiens
  misc_RNA (1)...(19): siRNA sense strand
gcacaccucguaacuucuc

SEQ ID NO: 536682 - RNA, 19 nt, Homo sapiens
  misc_RNA (1)...(19): siRNA sense strand
ggaacccagugauggaacu

SEQ ID NO: 536683 - RNA, 19 nt, Homo sapiens
  misc_RNA (1)...(19): siRNA sense strand
gaggaacccagugauggaa

SEQ ID NO: 536684 - RNA, 19 nt, Homo sapiens
  misc_RNA (1)...(19): siRNA sense strand
caaugugucccaagcaaag

SEQ ID NO: 536685 - RNA, 19 nt, Homo sapiens
  misc_RNA (1)...(19): siRNA sense strand
ugcaaugaaugucaaugug

SEQ ID NO: 536686 - RNA, 19 nt, Homo sapiens
  misc_RNA (1)...(19): siRNA sense strand
agagauggcaguuggacuu

SEQ ID NO: 536687 - RNA, 19 nt, Homo sapiens
  misc_RNA (1)...(19): siRNA sense strand
gaacggaguacaagauccu

SEQ ID NO: 536688 - RNA, 19 nt, Homo sapiens
  misc_RNA (1)...(19): siRNA sense strand
gaacccagugauggaacua

SEQ ID NO: 536689 - RNA, 19 nt, Homo sapiens
  misc_RNA (1)...(19): siRNA sense strand
gugugguucugguacugua

SEQ ID NO: 536690 - RNA, 19 nt, Homo sapiens
  misc_RNA (1)...(19): siRNA sense strand
ucuccacaauugcaaugaa

SEQ ID NO: 536691 - RNA, 19 nt, Homo sapiens
  misc_RNA (1)...(19): siRNA sense strand
uaaagagaaccgauaccau

SEQ ID NO: 536692 - RNA, 19 nt, Homo sapiens
  misc_RNA (1)...(19): siRNA sense strand
ugcuauaacugccuuuagu

SEQ ID NO: 536693 - RNA, 19 nt, Homo sapiens
  misc_RNA (1)...(19): siRNA sense strand
gauacaacuuacguuugau

SEQ ID NO: 536694 - RNA, 19 nt, Homo sapiens
  misc_RNA (1)...(19): siRNA sense strand
guccuucaguugagaccaa

SEQ ID NO: 536695 - RNA, 19 nt, Homo sapiens
  misc_RNA (1)...(19): siRNA sense strand
cacgagguccuucaguuga

SEQ ID NO: 536696 - RNA, 19 nt, Homo sapiens
  misc_RNA (1)...(19): siRNA sense strand
cagugauggaacuauauua

SEQ ID NO: 536697 - RNA, 19 nt, Homo sapiens
  misc_RNA (1)...(19): siRNA sense strand
gcaaguaugauuuuguaga

SEQ ID NO: 536698 - RNA, 19 nt, Homo sapiens
  misc_RNA (1)...(19): siRNA sense strand
gguucugcauccacuacaa

SEQ ID NO: 536699 - RNA, 19 nt, Homo sapiens
  misc_RNA (1)...(19): siRNA sense strand
ggaucugaaccuucuaaca

SEQ ID NO: 536700 - RNA, 19 nt, Homo sapiens
  misc_RNA (1)...(19): siRNA sense strand
cugcauccacuacaacauu

SEQ ID NO: 536701 - RNA, 19 nt, Homo sapiens
  misc_RNA (1)...(19): siRNA sense strand
gaaagauuugggcuugaag

SEQ ID NO: 536702 - RNA, 19 nt, Homo sapiens
  misc_RNA (1)...(19): siRNA sense strand
acagaggagguaagauuau

SEQ ID NO: 536703 - RNA, 19 nt, Homo sapiens
  misc_RNA (1)...(19): siRNA sense strand
ugaggaacccagugaugga

SEQ ID NO: 536704 - RNA, 19 nt, Homo sapiens
  misc_RNA (1)...(19): siRNA sense strand
auuaguagcaguagaggaa

SEQ ID NO: 536705 - RNA, 19 nt, Homo sapiens
  misc_RNA (1)...(19): siRNA sense strand
cgagguccuucaguugaga

SEQ ID NO: 536706 - RNA, 19 nt, Homo sapiens
  misc_RNA (1)...(19): siRNA sense strand
acagaacggaguacaagau

SEQ ID NO: 536707 - RNA, 19 nt, Homo sapiens
  misc_RNA (1)...(19): siRNA sense strand
acaauugcaaugaauguca

SEQ ID NO: 536708 - RNA, 19 nt, Homo sapiens
  misc_RNA (1)...(19): siRNA sense strand
aagggaagaacuaaagaga

SEQ ID NO: 536709 - RNA, 19 nt, Homo sapiens
  misc_RNA (1)...(19): siRNA sense strand
ccauaagggaagaacuaaa

SEQ ID NO: 536710 - RNA, 19 nt, Homo sapiens
  misc_RNA (1)...(19): siRNA sense strand
gaagugagauuccgaaaga

SEQ ID NO: 536711 - RNA, 19 nt, Homo sapiens
  misc_RNA (1)...(19): siRNA sense strand
ggaaagaaauccagagaug

SEQ ID NO: 536712 - RNA, 19 nt, Homo sapiens
  misc_RNA (1)...(19): siRNA sense strand
ccaaagacgucacagauaa

SEQ ID NO: 536713 - RNA, 19 nt, Homo sapiens
  misc_RNA (1)...(19): siRNA sense strand
ccaaauggcuucagugcua

SEQ ID NO: 536714 - RNA, 19 nt, Homo sapiens
  misc_RNA (1)...(19): siRNA sense strand
ccauagagauuacuaaaga

SEQ ID NO: 536715 - RNA, 19 nt, Homo sapiens
  misc_RNA (1)...(19): siRNA sense strand
ccaccaagcucuauauuuc

SEQ ID NO: 536716 - RNA, 19 nt, Homo sapiens
  misc_RNA (1)...(19): siRNA sense strand
ggauguagaugcuuccaaa

SEQ ID NO: 536717 - RNA, 19 nt, Homo sapiens
  misc_RNA (1)...(19): siRNA sense strand
gaaccgaguuucaaagcaa

SEQ ID NO: 536718 - RNA, 19 nt, Homo sapiens
  misc_RNA (1)...(19): siRNA sense strand
ggaaacaucgucuauucua

SEQ ID NO: 536719 - RNA, 19 nt, Homo sapiens
  misc_RNA (1)...(19): siRNA sense strand
gagaagaaccagaugcuaa

SEQ ID NO: 536720 - RNA, 19 nt, Homo sapiens
  misc_RNA (1)...(19): siRNA sense strand
ggaaaauccuuguaaauga

SEQ ID NO: 536721 - RNA, 19 nt, Homo sapiens
  misc_RNA (1)...(19): siRNA sense strand
gaaaccacaccauccguua

SEQ ID NO: 536722 - RNA, 19 nt, Homo sapiens
  misc_RNA (1)...(19): siRNA sense strand
caucuaagcuggcaaagag

SEQ ID NO: 536723 - RNA, 19 nt, Homo sapiens
  misc_RNA (1)...(19): siRNA sense strand
ggaaaugguugugcuaucu

SEQ ID NO: 536724 - RNA, 19 nt, Homo sapiens
  misc_RNA (1)...(19): siRNA sense strand
ggacugggcucagagaaag

SEQ ID NO: 536725 - RNA, 19 nt, Homo sapiens
  misc_RNA (1)...(19): siRNA sense strand
gaaacuagcagcaccaagu

SEQ ID NO: 536726 - RNA, 19 nt, Homo sapiens
  misc_RNA (1)...(19): siRNA sense strand
gaaacaucgucuauucuag

SEQ ID NO: 536727 - RNA, 19 nt, Homo sapiens
  misc_RNA (1)...(19): siRNA sense strand
caacaucaauggugcuagu

SEQ ID NO: 536728 - RNA, 19 nt, Homo sapiens
  misc_RNA (1)...(19): siRNA sense strand
cuauagaucugaaaucauc

SEQ ID NO: 536729 - RNA, 19 nt, Homo sapiens
  misc_RNA (1)...(19): siRNA sense strand
cagcucaccuccucuguug

SEQ ID NO: 536730 - RNA, 19 nt, Homo sapiens
  misc_RNA (1)...(19): siRNA sense strand
caaugcagauggcaccaaa

SEQ ID NO: 536731 - RNA, 19 nt, Homo sapiens
  misc_RNA (1)...(19): siRNA sense strand
ggaagagaaucccuugaac

SEQ ID NO: 536732 - RNA, 19 nt, Homo sapiens
  misc_RNA (1)...(19): siRNA sense strand
ggagaucccggucccauga

SEQ ID NO: 536733 - RNA, 19 nt, Homo sapiens
  misc_RNA (1)...(19): siRNA sense strand
guccagaguuugugaccua

SEQ ID NO: 536734 - RNA, 19 nt, Homo sapiens
  misc_RNA (1)...(19): siRNA sense strand
gaagcagaccguuaccaaa

SEQ ID NO: 536735 - RNA, 19 nt, Homo sapiens
  misc_RNA (1)...(19): siRNA sense strand
cgggaaacaucgucuauuc

SEQ ID NO: 536736 - RNA, 19 nt, Homo sapiens
  misc_RNA (1)...(19): siRNA sense strand
caucaauggugcuaguuau

SEQ ID NO: 536737 - RNA, 19 nt, Homo sapiens
  misc_RNA (1)...(19): siRNA sense strand
gaagacagcgguucaagac

SEQ ID NO: 536738 - RNA, 19 nt, Homo sapiens
  misc_RNA (1)...(19): siRNA sense strand
cagccagucuucaccguaa

SEQ ID NO: 536739 - RNA, 19 nt, Homo sapiens
  misc_RNA (1)...(19): siRNA sense strand
gaaaugguugugcuaucua

SEQ ID NO: 536740 - RNA, 19 nt, Homo sapiens
  misc_RNA (1)...(19): siRNA sense strand
ggaagacagcgguucaaga

SEQ ID NO: 536741 - RNA, 19 nt, Homo sapiens
  misc_RNA (1)...(19): siRNA sense strand
caaagagaaucgccaacuc

SEQ ID NO: 536742 - RNA, 19 nt, Homo sapiens
  misc_RNA (1)...(19): siRNA sense strand
cuucagugcuauauacaaa

SEQ ID NO: 536743 - RNA, 19 nt, Homo sapiens
  misc_RNA (1)...(19): siRNA sense strand
uuccaaagcugaccacaug

SEQ ID NO: 536744 - RNA, 19 nt, Homo sapiens
  misc_RNA (1)...(19): siRNA sense strand
gagaacggccuuccaccaa

SEQ ID NO: 536745 - RNA, 19 nt, Homo sapiens
  misc_RNA (1)...(19): siRNA sense strand
cuaaagugguggauguaga

SEQ ID NO: 536746 - RNA, 19 nt, Homo sapiens
  misc_RNA (1)...(19): siRNA sense strand
ccaagaggaucccaaacca

SEQ ID NO: 536747 - RNA, 19 nt, Homo sapiens
  misc_RNA (1)...(19): siRNA sense strand
gcagguaccaacaaagaga

SEQ ID NO: 536748 - RNA, 19 nt, Homo sapiens
  misc_RNA (1)...(19): siRNA sense strand
gcucuccaauggcaaguau

SEQ ID NO: 536749 - RNA, 19 nt, Homo sapiens
  misc_RNA (1)...(19): siRNA sense strand
agggaagacuguugucaaa

SEQ ID NO: 536750 - RNA, 19 nt, Homo sapiens
  misc_RNA (1)...(19): siRNA sense strand
ccaaagauggagcugauga

SEQ ID NO: 536751 - RNA, 19 nt, Homo sapiens
  misc_RNA (1)...(19): siRNA sense strand
ggugaccgauucaaaugug

SEQ ID NO: 536752 - RNA, 19 nt, Homo sapiens
  misc_RNA (1)...(19): siRNA sense strand
ugaaaccgaagccaucuaa

SEQ ID NO: 536753 - RNA, 19 nt, Homo sapiens
  misc_RNA (1)...(19): siRNA sense strand
gaaauccagagaugcaguu

SEQ ID NO: 536754 - RNA, 19 nt, Homo sapiens
  misc_RNA (1)...(19): siRNA sense strand
uuacgugggugaccgauuc

SEQ ID NO: 536755 - RNA, 19 nt, Homo sapiens
  misc_RNA (1)...(19): siRNA sense strand
cuauauuucugucuccaaa

SEQ ID NO: 536756 - RNA, 19 nt, Homo sapiens
  misc_RNA (1)...(19): siRNA sense strand
ugucaucacuaacguuuca

SEQ ID NO: 536757 - RNA, 19 nt, Homo sapiens
  misc_RNA (1)...(19): siRNA sense strand
caaaacaccgccuggaaua

SEQ ID NO: 536758 - RNA, 19 nt, Homo sapiens
  misc_RNA (1)...(19): siRNA sense strand
gcagcaccgugauuucauc

SEQ ID NO: 536759 - RNA, 19 nt, Homo sapiens
  misc_RNA (1)...(19): siRNA sense strand
gcaaaagcaugucgcugaa

SEQ ID NO: 536760 - RNA, 19 nt, Homo sapiens
  misc_RNA (1)...(19): siRNA sense strand
cagauaagccacuagacuu

SEQ ID NO: 536761 - RNA, 19 nt, Homo sapiens
  misc_RNA (1)...(19): siRNA sense strand
caaagcugaccacaugaaa

SEQ ID NO: 536762 - RNA, 19 nt, Homo sapiens
  misc_RNA (1)...(19): siRNA sense strand
uaccaaagauggagcugau

SEQ ID NO: 536763 - RNA, 19 nt, Homo sapiens
  misc_RNA (1)...(19): siRNA sense strand
agaagaaccagaugcuaaa

SEQ ID NO: 536764 - RNA, 19 nt, Homo sapiens
  misc_RNA (1)...(19): siRNA sense strand
caaauggcuucagugcuau

SEQ ID NO: 536765 - RNA, 19 nt, Homo sapiens
  misc_RNA (1)...(19): siRNA sense strand
ggaaucaagggaagacugu

SEQ ID NO: 536766 - RNA, 19 nt, Homo sapiens
  misc_RNA (1)...(19): siRNA sense strand
ggccaaguccuaacgaaga

SEQ ID NO: 536767 - RNA, 19 nt, Homo sapiens
  misc_RNA (1)...(19): siRNA sense strand
ccacacacgcccauagaga

SEQ ID NO: 536768 - RNA, 19 nt, Homo sapiens
  misc_RNA (1)...(19): siRNA sense strand
gaacugagggaagagaauc

SEQ ID NO: 536769 - RNA, 19 nt, Homo sapiens
  misc_RNA (1)...(19): siRNA sense strand
ggaagacuguugucaaaag

SEQ ID NO: 536770 - RNA, 19 nt, Homo sapiens
  misc_RNA (1)...(19): siRNA sense strand
ccucacauccagaacagua

SEQ ID NO: 536771 - RNA, 19 nt, Homo sapiens
  misc_RNA (1)...(19): siRNA sense strand
gcccauagagauuacuaaa

SEQ ID NO: 536772 - RNA, 19 nt, Homo sapiens
  misc_RNA (1)...(19): siRNA sense strand
ugucuacccucacccaguu

SEQ ID NO: 536773 - RNA, 19 nt, Homo sapiens
  misc_RNA (1)...(19): siRNA sense strand
cagcaggagcucuguagaa

SEQ ID NO: 536774 - RNA, 19 nt, Homo sapiens
  misc_RNA (1)...(19): siRNA sense strand
gacagcgguucaagacaga

SEQ ID NO: 536775 - RNA, 19 nt, Homo sapiens
  misc_RNA (1)...(19): siRNA sense strand
gcugucaucacuaacguuu

SEQ ID NO: 536776 - RNA, 19 nt, Homo sapiens
  misc_RNA (1)...(19): siRNA sense strand
aagaggaucccaaaccauu

SEQ ID NO: 536777 - RNA, 19 nt, Homo sapiens
  misc_RNA (1)...(19): siRNA sense strand
gacuggaacugagggaaga

SEQ ID NO: 536778 - RNA, 19 nt, Homo sapiens
  misc_RNA (1)...(19): siRNA sense strand
agcaggagcucuguagaaa

SEQ ID NO: 536779 - RNA, 19 nt, Homo sapiens
  misc_RNA (1)...(19): siRNA sense strand
cgccagccaucuacccuuu

SEQ ID NO: 536780 - RNA, 19 nt, Homo sapiens
  misc_RNA (1)...(19): siRNA sense strand
gcaaagagaaucgccaacu

SEQ ID NO: 536781 - RNA, 19 nt, Homo sapiens
  misc_RNA (1)...(19): siRNA sense strand
cuucuaaagugguggaugu

SEQ ID NO: 536782 - RNA, 19 nt, Homo sapiens
  misc_RNA (1)...(19): siRNA sense strand
ucacagauaagccacuaga

SEQ ID NO: 536783 - RNA, 19 nt, Homo sapiens
  misc_RNA (1)...(19): siRNA sense strand
ccaaagcugaccacaugaa

SEQ ID NO: 536784 - RNA, 19 nt, Homo sapiens
  misc_RNA (1)...(19): siRNA sense strand
cgaauacacccgagacagu

SEQ ID NO: 536785 - RNA, 19 nt, Homo sapiens
  misc_RNA (1)...(19): siRNA sense strand
aaagagaaucgccaacuca

SEQ ID NO: 536786 - RNA, 19 nt, Homo sapiens
  misc_RNA (1)...(19): siRNA sense strand
cgucacagauaagccacua

SEQ ID NO: 536787 - RNA, 19 nt, Homo sapiens
  misc_RNA (1)...(19): siRNA sense strand
ugcccugggucaauccuua

SEQ ID NO: 536788 - RNA, 19 nt, Homo sapiens
  misc_RNA (1)...(19): siRNA sense strand
aaagaaauccagagaugca

SEQ ID NO: 536789 - RNA, 19 nt, Homo sapiens
  misc_RNA (1)...(19): siRNA sense strand
cgauucaaaugugucacua

SEQ ID NO: 536790 - RNA, 19 nt, Homo sapiens
  misc_RNA (1)...(19): siRNA sense strand
caaaugauggcaaaguucu

SEQ ID NO: 536791 - RNA, 19 nt, Homo sapiens
  misc_RNA (1)...(19): siRNA sense strand
gagcgauggcccugcugua

SEQ ID NO: 536792 - RNA, 19 nt, Homo sapiens
  misc_RNA (1)...(19): siRNA sense strand
ggacccaacccuccggaau

SEQ ID NO: 536793 - RNA, 19 nt, Homo sapiens
  misc_RNA (1)...(19): siRNA sense strand
gcauuggacugggcgauac

SEQ ID NO: 536794 - RNA, 19 nt, Homo sapiens
  misc_RNA (1)...(19): siRNA sense strand
aaaagcaugucgcugaaaa

SEQ ID NO: 536795 - RNA, 19 nt, Homo sapiens
  misc_RNA (1)...(19): siRNA sense strand
uuccucgacucgccaaaua

SEQ ID NO: 536796 - RNA, 19 nt, Homo sapiens
  misc_RNA (1)...(19): siRNA sense strand
caauggugcuaguuaucug

SEQ ID NO: 536797 - RNA, 19 nt, Homo sapiens
  misc_RNA (1)...(19): siRNA sense strand
gagcugaugaggcugaauc

SEQ ID NO: 536798 - RNA, 19 nt, Homo sapiens
  misc_RNA (1)...(19): siRNA sense strand
caucagugacuuccacgaa

SEQ ID NO: 536799 - RNA, 19 nt, Homo sapiens
  misc_RNA (1)...(19): siRNA sense strand
aaaugguugugcuaucuau

SEQ ID NO: 536800 - RNA, 19 nt, Homo sapiens
  misc_RNA (1)...(19): siRNA sense strand
gaugcgagcacggcccaua

SEQ ID NO: 536801 - RNA, 19 nt, Homo sapiens
  misc_RNA (1)...(19): siRNA sense strand
ccacgccuauccucacauc

SEQ ID NO: 536802 - RNA, 19 nt, Homo sapiens
  misc_RNA (1)...(19): siRNA sense strand
ucgacucgccaaauaagua

SEQ ID NO: 536803 - RNA, 19 nt, Homo sapiens
  misc_RNA (1)...(19): siRNA sense strand
ugacuuccacgaaacuuau

SEQ ID NO: 536804 - RNA, 19 nt, Homo sapiens
  misc_RNA (1)...(19): siRNA sense strand
uaaagugguggauguagau

SEQ ID NO: 536805 - RNA, 19 nt, Homo sapiens
  misc_RNA (1)...(19): siRNA sense strand
gcagcucaccuccucuguu

SEQ ID NO: 536806 - RNA, 19 nt, Homo sapiens
  misc_RNA (1)...(19): siRNA sense strand
gaucuccaccucuccuuca

SEQ ID NO: 536807 - RNA, 19 nt, Homo sapiens
  misc_RNA (1)...(19): siRNA sense strand
ggaggcuucugccgucucu

SEQ ID NO: 536808 - RNA, 19 nt, Homo sapiens
  misc_RNA (1)...(19): siRNA sense strand
gaagagaacaauggcaaaa

SEQ ID NO: 536809 - RNA, 19 nt, Homo sapiens
  misc_RNA (1)...(19): siRNA sense strand
cgaagagaacaauggcaaa

SEQ ID NO: 536810 - RNA, 19 nt, Homo sapiens
  misc_RNA (1)...(19): siRNA sense strand
gaagugagauuccgaaaga

SEQ ID NO: 536811 - RNA, 19 nt, Homo sapiens
  misc_RNA (1)...(19): siRNA sense strand
ggaaagaaauccagagaug

SEQ ID NO: 536812 - RNA, 19 nt, Homo sapiens
  misc_RNA (1)...(19): siRNA sense strand
ccaaagacgucacagauaa

SEQ ID NO: 536813 - RNA, 19 nt, Homo sapiens
  misc_RNA (1)...(19): siRNA sense strand
ccaaauggcuucagugcua

SEQ ID NO: 536814 - RNA, 19 nt, Homo sapiens
  misc_RNA (1)...(19): siRNA sense strand
ccauagagauuacuaaaga

SEQ ID NO: 536815 - RNA, 19 nt, Homo sapiens
  misc_RNA (1)...(19): siRNA sense strand
ccaccaagcucuauauuuc

SEQ ID NO: 536816 - RNA, 19 nt, Homo sapiens
  misc_RNA (1)...(19): siRNA sense strand
ggauguagaugcuuccaaa

SEQ ID NO: 536817 - RNA, 19 nt, Homo sapiens
  misc_RNA (1)...(19): siRNA sense strand
gaaccgaguuucaaagcaa

SEQ ID NO: 536818 - RNA, 19 nt, Homo sapiens
  misc_RNA (1)...(19): siRNA sense strand
ggaaacaucgucuauucua

SEQ ID NO: 536819 - RNA, 19 nt, Homo sapiens
  misc_RNA (1)...(19): siRNA sense strand
gagaagaaccagaugcuaa

SEQ ID NO: 536820 - RNA, 19 nt, Homo sapiens
  misc_RNA (1)...(19): siRNA sense strand
ggaaaauccuuguaaauga

SEQ ID NO: 536821 - RNA, 19 nt, Homo sapiens
  misc_RNA (1)...(19): siRNA sense strand
gaaaccacaccauccguua

SEQ ID NO: 536822 - RNA, 19 nt, Homo sapiens
  misc_RNA (1)...(19): siRNA sense strand
caucuaagcuggcaaagag

SEQ ID NO: 536823 - RNA, 19 nt, Homo sapiens
  misc_RNA (1)...(19): siRNA sense strand
ggaaaugguugugcuaucu

SEQ ID NO: 536824 - RNA, 19 nt, Homo sapiens
  misc_RNA (1)...(19): siRNA sense strand
ggacugggcucagagaaag

SEQ ID NO: 536825 - RNA, 19 nt, Homo sapiens
  misc_RNA (1)...(19): siRNA sense strand
gaaacuagcagcaccaagu

SEQ ID NO: 536826 - RNA, 19 nt, Homo sapiens
  misc_RNA (1)...(19): siRNA sense strand
gaaacaucgucuauucuag

SEQ ID NO: 536827 - RNA, 19 nt, Homo sapiens
  misc_RNA (1)...(19): siRNA sense strand
caacaucaauggugcuagu

SEQ ID NO: 536828 - RNA, 19 nt, Homo sapiens
  misc_RNA (1)...(19): siRNA sense strand
cuauagaucugaaaucauc

SEQ ID NO: 536829 - RNA, 19 nt, Homo sapiens
  misc_RNA (1)...(19): siRNA sense strand
cagcucaccuccucuguug

SEQ ID NO: 536830 - RNA, 19 nt, Homo sapiens
  misc_RNA (1)...(19): siRNA sense strand
caaugcagauggcaccaaa

SEQ ID NO: 536831 - RNA, 19 nt, Homo sapiens
  misc_RNA (1)...(19): siRNA sense strand
ggaagagaaucccuugaac

SEQ ID NO: 536832 - RNA, 19 nt, Homo sapiens
  misc_RNA (1)...(19): siRNA sense strand
ggagaucccggucccauga

SEQ ID NO: 536833 - RNA, 19 nt, Homo sapiens
  misc_RNA (1)...(19): siRNA sense strand
guccagaguuugugaccua

SEQ ID NO: 536834 - RNA, 19 nt, Homo sapiens
  misc_RNA (1)...(19): siRNA sense strand
gaagcagaccguuaccaaa

SEQ ID NO: 536835 - RNA, 19 nt, Homo sapiens
  misc_RNA (1)...(19): siRNA sense strand
cgggaaacaucgucuauuc

SEQ ID NO: 536836 - RNA, 19 nt, Homo sapiens
  misc_RNA (1)...(19): siRNA sense strand
caucaauggugcuaguuau

SEQ ID NO: 536837 - RNA, 19 nt, Homo sapiens
  misc_RNA (1)...(19): siRNA sense strand
gaagacagcgguucaagac

SEQ ID NO: 536838 - RNA, 19 nt, Homo sapiens
  misc_RNA (1)...(19): siRNA sense strand
cagccagucuucaccguaa

SEQ ID NO: 536839 - RNA, 19 nt, Homo sapiens
  misc_RNA (1)...(19): siRNA sense strand
gaaaugguugugcuaucua

SEQ ID NO: 536840 - RNA, 19 nt, Homo sapiens
  misc_RNA (1)...(19): siRNA sense strand
ggaagacagcgguucaaga

SEQ ID NO: 536841 - RNA, 19 nt, Homo sapiens
  misc_RNA (1)...(19): siRNA sense strand
caaagagaaucgccaacuc

SEQ ID NO: 536842 - RNA, 19 nt, Homo sapiens
  misc_RNA (1)...(19): siRNA sense strand
cuucagugcuauauacaaa

SEQ ID NO: 536843 - RNA, 19 nt, Homo sapiens
  misc_RNA (1)...(19): siRNA sense strand
uuccaaagcugaccacaug

SEQ ID NO: 536844 - RNA, 19 nt, Homo sapiens
  misc_RNA (1)...(19): siRNA sense strand
gagaacggccuuccaccaa

SEQ ID NO: 536845 - RNA, 19 nt, Homo sapiens
  misc_RNA (1)...(19): siRNA sense strand
cuaaagugguggauguaga

SEQ ID NO: 536846 - RNA, 19 nt, Homo sapiens
  misc_RNA (1)...(19): siRNA sense strand
ccaagaggaucccaaacca

SEQ ID NO: 536847 - RNA, 19 nt, Homo sapiens
  misc_RNA (1)...(19): siRNA sense strand
gcagguaccaacaaagaga

SEQ ID NO: 536848 - RNA, 19 nt, Homo sapiens
  misc_RNA (1)...(19): siRNA sense strand
gcucuccaauggcaaguau

SEQ ID NO: 536849 - RNA, 19 nt, Homo sapiens
  misc_RNA (1)...(19): siRNA sense strand
agggaagacuguugucaaa

SEQ ID NO: 536850 - RNA, 19 nt, Homo sapiens
  misc_RNA (1)...(19): siRNA sense strand
ccaaagauggagcugauga

SEQ ID NO: 536851 - RNA, 19 nt, Homo sapiens
  misc_RNA (1)...(19): siRNA sense strand
ggugaccgauucaaaugug

SEQ ID NO: 536852 - RNA, 19 nt, Homo sapiens
  misc_RNA (1)...(19): siRNA sense strand
ugaaaccgaagccaucuaa

SEQ ID NO: 536853 - RNA, 19 nt, Homo sapiens
  misc_RNA (1)...(19): siRNA sense strand
gaaauccagagaugcaguu

SEQ ID NO: 536854 - RNA, 19 nt, Homo sapiens
  misc_RNA (1)...(19): siRNA sense strand
uuacgugggugaccgauuc

SEQ ID NO: 536855 - RNA, 19 nt, Homo sapiens
  misc_RNA (1)...(19): siRNA sense strand
cuauauuucugucuccaaa

SEQ ID NO: 536856 - RNA, 19 nt, Homo sapiens
  misc_RNA (1)...(19): siRNA sense strand
ugucaucacuaacguuuca

SEQ ID NO: 536857 - RNA, 19 nt, Homo sapiens
  misc_RNA (1)...(19): siRNA sense strand
caaaacaccgccuggaaua

SEQ ID NO: 536858 - RNA, 19 nt, Homo sapiens
  misc_RNA (1)...(19): siRNA sense strand
gcagcaccgugauuucauc

SEQ ID NO: 536859 - RNA, 19 nt, Homo sapiens
  misc_RNA (1)...(19): siRNA sense strand
gcaaaagcaugucgcugaa

SEQ ID NO: 536860 - RNA, 19 nt, Homo sapiens
  misc_RNA (1)...(19): siRNA sense strand
cagauaagccacuagacuu

SEQ ID NO: 536861 - RNA, 19 nt, Homo sapiens
  misc_RNA (1)...(19): siRNA sense strand
caaagcugaccacaugaaa

SEQ ID NO: 536862 - RNA, 19 nt, Homo sapiens
  misc_RNA (1)...(19): siRNA sense strand
uaccaaagauggagcugau

SEQ ID NO: 536863 - RNA, 19 nt, Homo sapiens
  misc_RNA (1)...(19): siRNA sense strand
agaagaaccagaugcuaaa

SEQ ID NO: 536864 - RNA, 19 nt, Homo sapiens
  misc_RNA (1)...(19): siRNA sense strand
caaauggcuucagugcuau

SEQ ID NO: 536865 - RNA, 19 nt, Homo sapiens
  misc_RNA (1)...(19): siRNA sense strand
ggaaucaagggaagacugu

SEQ ID NO: 536866 - RNA, 19 nt, Homo sapiens
  misc_RNA (1)...(19): siRNA sense strand
ggccaaguccuaacgaaga

SEQ ID NO: 536867 - RNA, 19 nt, Homo sapiens
  misc_RNA (1)...(19): siRNA sense strand
ccacacacgcccauagaga

SEQ ID NO: 536868 - RNA, 19 nt, Homo sapiens
  misc_RNA (1)...(19): siRNA sense strand
gaacugagggaagagaauc

SEQ ID NO: 536869 - RNA, 19 nt, Homo sapiens
  misc_RNA (1)...(19): siRNA sense strand
ggaagacuguugucaaaag

SEQ ID NO: 536870 - RNA, 19 nt, Homo sapiens
  misc_RNA (1)...(19): siRNA sense strand
ccucacauccagaacagua

SEQ ID NO: 536871 - RNA, 19 nt, Homo sapiens
  misc_RNA (1)...(19): siRNA sense strand
gcccauagagauuacuaaa

SEQ ID NO: 536872 - RNA, 19 nt, Homo sapiens
  misc_RNA (1)...(19): siRNA sense strand
ugucuacccucacccaguu

SEQ ID NO: 536873 - RNA, 19 nt, Homo sapiens
  misc_RNA (1)...(19): siRNA sense strand
cagcaggagcucuguagaa

SEQ ID NO: 536874 - RNA, 19 nt, Homo sapiens
  misc_RNA (1)...(19): siRNA sense strand
gacagcgguucaagacaga

SEQ ID NO: 536875 - RNA, 19 nt, Homo sapiens
  misc_RNA (1)...(19): siRNA sense strand
gcugucaucacuaacguuu

SEQ ID NO: 536876 - RNA, 19 nt, Homo sapiens
  misc_RNA (1)...(19): siRNA sense strand
aagaggaucccaaaccauu

SEQ ID NO: 536877 - RNA, 19 nt, Homo sapiens
  misc_RNA (1)...(19): siRNA sense strand
gacuggaacugagggaaga

SEQ ID NO: 536878 - RNA, 19 nt, Homo sapiens
  misc_RNA (1)...(19): siRNA sense strand
agcaggagcucuguagaaa

SEQ ID NO: 536879 - RNA, 19 nt, Homo sapiens
  misc_RNA (1)...(19): siRNA sense strand
cgccagccaucuacccuuu

SEQ ID NO: 536880 - RNA, 19 nt, Homo sapiens
  misc_RNA (1)...(19): siRNA sense strand
gcaaagagaaucgccaacu

SEQ ID NO: 536881 - RNA, 19 nt, Homo sapiens
  misc_RNA (1)...(19): siRNA sense strand
cuucuaaagugguggaugu

SEQ ID NO: 536882 - RNA, 19 nt, Homo sapiens
  misc_RNA (1)...(19): siRNA sense strand
ucacagauaagccacuaga

SEQ ID NO: 536883 - RNA, 19 nt, Homo sapiens
  misc_RNA (1)...(19): siRNA sense strand
ccaaagcugaccacaugaa

SEQ ID NO: 536884 - RNA, 19 nt, Homo sapiens
  misc_RNA (1)...(19): siRNA sense strand
cgaauacacccgagacagu

SEQ ID NO: 536885 - RNA, 19 nt, Homo sapiens
  misc_RNA (1)...(19): siRNA sense strand
aaagagaaucgccaacuca

SEQ ID NO: 536886 - RNA, 19 nt, Homo sapiens
  misc_RNA (1)...(19): siRNA sense strand
cgucacagauaagccacua

SEQ ID NO: 536887 - RNA, 19 nt, Homo sapiens
  misc_RNA (1)...(19): siRNA sense strand
ugcccugggucaauccuua

SEQ ID NO: 536888 - RNA, 19 nt, Homo sapiens
  misc_RNA (1)...(19): siRNA sense strand
aaagaaauccagagaugca

SEQ ID NO: 536889 - RNA, 19 nt, Homo sapiens
  misc_RNA (1)...(19): siRNA sense strand
cgauucaaaugugucacua

SEQ ID NO: 536890 - RNA, 19 nt, Homo sapiens
  misc_RNA (1)...(19): siRNA sense strand
caaaugauggcaaaguucu

SEQ ID NO: 536891 - RNA, 19 nt, Homo sapiens
  misc_RNA (1)...(19): siRNA sense strand
gagcgauggcccugcugua

SEQ ID NO: 536892 - RNA, 19 nt, Homo sapiens
  misc_RNA (1)...(19): siRNA sense strand
ggacccaacccuccggaau

SEQ ID NO: 536893 - RNA, 19 nt, Homo sapiens
  misc_RNA (1)...(19): siRNA sense strand
gcauuggacugggcgauac

SEQ ID NO: 536894 - RNA, 19 nt, Homo sapiens
  misc_RNA (1)...(19): siRNA sense strand
aaaagcaugucgcugaaaa

SEQ ID NO: 536895 - RNA, 19 nt, Homo sapiens
  misc_RNA (1)...(19): siRNA sense strand
uuccucgacucgccaaaua

SEQ ID NO: 536896 - RNA, 19 nt, Homo sapiens
  misc_RNA (1)...(19): siRNA sense strand
caauggugcuaguuaucug

SEQ ID NO: 536897 - RNA, 19 nt, Homo sapiens
  misc_RNA (1)...(19): siRNA sense strand
gagcugaugaggcugaauc

SEQ ID NO: 536898 - RNA, 19 nt, Homo sapiens
  misc_RNA (1)...(19): siRNA sense strand
caucagugacuuccacgaa

SEQ ID NO: 536899 - RNA, 19 nt, Homo sapiens
  misc_RNA (1)...(19): siRNA sense strand
aaaugguugugcuaucuau

SEQ ID NO: 536900 - RNA, 19 nt, Homo sapiens
  misc_RNA (1)...(19): siRNA sense strand
gaugcgagcacggcccaua

SEQ ID NO: 536901 - RNA, 19 nt, Homo sapiens
  misc_RNA (1)...(19): siRNA sense strand
ccacgccuauccucacauc

SEQ ID NO: 536902 - RNA, 19 nt, Homo sapiens
  misc_RNA (1)...(19): siRNA sense strand
ucgacucgccaaauaagua

SEQ ID NO: 536903 - RNA, 19 nt, Homo sapiens
  misc_RNA (1)...(19): siRNA sense strand
ugacuuccacgaaacuuau

SEQ ID NO: 536904 - RNA, 19 nt, Homo sapiens
  misc_RNA (1)...(19): siRNA sense strand
uaaagugguggauguagau

SEQ ID NO: 536905 - RNA, 19 nt, Homo sapiens
  misc_RNA (1)...(19): siRNA sense strand
gcagcucaccuccucuguu

SEQ ID NO: 536906 - RNA, 19 nt, Homo sapiens
  misc_RNA (1)...(19): siRNA sense strand
gaucuccaccucuccuuca

SEQ ID NO: 536907 - RNA, 19 nt, Homo sapiens
  misc_RNA (1)...(19): siRNA sense strand
ggaggcuucugccgucucu

SEQ ID NO: 536908 - RNA, 19 nt, Homo sapiens
  misc_RNA (1)...(19): siRNA sense strand
gaagagaacaauggcaaaa

SEQ ID NO: 536909 - RNA, 19 nt, Homo sapiens
  misc_RNA (1)...(19): siRNA sense strand
cgaagagaacaauggcaaa

SEQ ID NO: 536910 - RNA, 19 nt, Homo sapiens
  misc_RNA (1)...(19): siRNA sense strand
gcaaguucauuguggauua

SEQ ID NO: 536911 - RNA, 19 nt, Homo sapiens
  misc_RNA (1)...(19): siRNA sense strand
ccaacaagcuggacaagaa

SEQ ID NO: 536912 - RNA, 19 nt, Homo sapiens
  misc_RNA (1)...(19): siRNA sense strand
caacaucuaugagguggua

SEQ ID NO: 536913 - RNA, 19 nt, Homo sapiens
  misc_RNA (1)...(19): siRNA sense strand
caacugguguccuacauga

SEQ ID NO: 536914 - RNA, 19 nt, Homo sapiens
  misc_RNA (1)...(19): siRNA sense strand
gcaccgaagucaucgacaa

SEQ ID NO: 536915 - RNA, 19 nt, Homo sapiens
  misc_RNA (1)...(19): siRNA sense strand
caacuucacuguggccauu

SEQ ID NO: 536916 - RNA, 19 nt, Homo sapiens
  misc_RNA (1)...(19): siRNA sense strand
ccacaucccugcacuacau

SEQ ID NO: 536917 - RNA, 19 nt, Homo sapiens
  misc_RNA (1)...(19): siRNA sense strand
uauacgacguugacucuaa

SEQ ID NO: 536918 - RNA, 19 nt, Homo sapiens
  misc_RNA (1)...(19): siRNA sense strand
ggaaccuccuggacaaaga

SEQ ID NO: 536919 - RNA, 19 nt, Homo sapiens
  misc_RNA (1)...(19): siRNA sense strand
gagagaucauccagcacua

SEQ ID NO: 536920 - RNA, 19 nt, Homo sapiens
  misc_RNA (1)...(19): siRNA sense strand
gaagaacacccuaaaucca

SEQ ID NO: 536921 - RNA, 19 nt, Homo sapiens
  misc_RNA (1)...(19): siRNA sense strand
gggcagagccaauucaaca

SEQ ID NO: 536922 - RNA, 19 nt, Homo sapiens
  misc_RNA (1)...(19): siRNA sense strand
gcaguucugugccaacaag

SEQ ID NO: 536923 - RNA, 19 nt, Homo sapiens
  misc_RNA (1)...(19): siRNA sense strand
ggaaaagccccucacgaua

SEQ ID NO: 536924 - RNA, 19 nt, Homo sapiens
  misc_RNA (1)...(19): siRNA sense strand
gcaccuuccuugacuacau

SEQ ID NO: 536925 - RNA, 19 nt, Homo sapiens
  misc_RNA (1)...(19): siRNA sense strand
ccaucaagguggaggugua

SEQ ID NO: 536926 - RNA, 19 nt, Homo sapiens
  misc_RNA (1)...(19): siRNA sense strand
ccacugugcgucauguaua

SEQ ID NO: 536927 - RNA, 19 nt, Homo sapiens
  misc_RNA (1)...(19): siRNA sense strand
caacaagcuggacaagaaa

SEQ ID NO: 536928 - RNA, 19 nt, Homo sapiens
  misc_RNA (1)...(19): siRNA sense strand
gaaccuccguuuugaucua

SEQ ID NO: 536929 - RNA, 19 nt, Homo sapiens
  misc_RNA (1)...(19): siRNA sense strand
cuacgacagugacaagaug

SEQ ID NO: 536930 - RNA, 19 nt, Homo sapiens
  misc_RNA (1)...(19): siRNA sense strand
gaggagcucagcaacugua

SEQ ID NO: 536931 - RNA, 19 nt, Homo sapiens
  misc_RNA (1)...(19): siRNA sense strand
agagaucccugaccaacug

SEQ ID NO: 536932 - RNA, 19 nt, Homo sapiens
  misc_RNA (1)...(19): siRNA sense strand
uaagaguccugauuuaucc

SEQ ID NO: 536933 - RNA, 19 nt, Homo sapiens
  misc_RNA (1)...(19): siRNA sense strand
gagacgugcuggcagagau

SEQ ID NO: 536934 - RNA, 19 nt, Homo sapiens
  misc_RNA (1)...(19): siRNA sense strand
ucacuguggccauugauuu

SEQ ID NO: 536935 - RNA, 19 nt, Homo sapiens
  misc_RNA (1)...(19): siRNA sense strand
gggaguucaccaccaguua

SEQ ID NO: 536936 - RNA, 19 nt, Homo sapiens
  misc_RNA (1)...(19): siRNA sense strand
ggacggcagccaugacuuc

SEQ ID NO: 536937 - RNA, 19 nt, Homo sapiens
  misc_RNA (1)...(19): siRNA sense strand
uggcaaacuuucuccauuc

SEQ ID NO: 536938 - RNA, 19 nt, Homo sapiens
  misc_RNA (1)...(19): siRNA sense strand
gaaaagccccucacgauag

SEQ ID NO: 536939 - RNA, 19 nt, Homo sapiens
  misc_RNA (1)...(19): siRNA sense strand
cccaagggauggagaacaa

SEQ ID NO: 536940 - RNA, 19 nt, Homo sapiens
  misc_RNA (1)...(19): siRNA sense strand
ggagcagccugaggacaug

SEQ ID NO: 536941 - RNA, 19 nt, Homo sapiens
  misc_RNA (1)...(19): siRNA sense strand
cgacaucguccaguuugua

SEQ ID NO: 536942 - RNA, 19 nt, Homo sapiens
  misc_RNA (1)...(19): siRNA sense strand
gaaauguggcaccaucauc

SEQ ID NO: 536943 - RNA, 19 nt, Homo sapiens
  misc_RNA (1)...(19): siRNA sense strand
ccaaggaggccauugucaa

SEQ ID NO: 536944 - RNA, 19 nt, Homo sapiens
  misc_RNA (1)...(19): siRNA sense strand
guagggaugucgccaccau

SEQ ID NO: 536945 - RNA, 19 nt, Homo sapiens
  misc_RNA (1)...(19): siRNA sense strand
gcagagccaauucaacauc

SEQ ID NO: 536946 - RNA, 19 nt, Homo sapiens
  misc_RNA (1)...(19): siRNA sense strand
ggacccagaucaacuucac

SEQ ID NO: 536947 - RNA, 19 nt, Homo sapiens
  misc_RNA (1)...(19): siRNA sense strand
cuaagaguccugauuuauc

SEQ ID NO: 536948 - RNA, 19 nt, Homo sapiens
  misc_RNA (1)...(19): siRNA sense strand
ugauuucacugccuccaau

SEQ ID NO: 536949 - RNA, 19 nt, Homo sapiens
  misc_RNA (1)...(19): siRNA sense strand
gcacagucacccugcuuuc

SEQ ID NO: 536950 - RNA, 19 nt, Homo sapiens
  misc_RNA (1)...(19): siRNA sense strand
acaaagacauguuuuccaa

SEQ ID NO: 536951 - RNA, 19 nt, Homo sapiens
  misc_RNA (1)...(19): siRNA sense strand
caggauggcucccaguacu

SEQ ID NO: 536952 - RNA, 19 nt, Homo sapiens
  misc_RNA (1)...(19): siRNA sense strand
gcagagugucccacgaguu

SEQ ID NO: 536953 - RNA, 19 nt, Homo sapiens
  misc_RNA (1)...(19): siRNA sense strand
guucauuguggauuacuuu

SEQ ID NO: 536954 - RNA, 19 nt, Homo sapiens
  misc_RNA (1)...(19): siRNA sense strand
caaaggagggacccagauc

SEQ ID NO: 536955 - RNA, 19 nt, Homo sapiens
  misc_RNA (1)...(19): siRNA sense strand
cuggcaaacuuucuccauu

SEQ ID NO: 536956 - RNA, 19 nt, Homo sapiens
  misc_RNA (1)...(19): siRNA sense strand
gagccaauucaacaucuau

SEQ ID NO: 536957 - RNA, 19 nt, Homo sapiens
  misc_RNA (1)...(19): siRNA sense strand
cagagugucccacgaguuc

SEQ ID NO: 536958 - RNA, 19 nt, Homo sapiens
  misc_RNA (1)...(19): siRNA sense strand
gagggacccagaucaacuu

SEQ ID NO: 536959 - RNA, 19 nt, Homo sapiens
  misc_RNA (1)...(19): siRNA sense strand
gagugcaccuuccuugacu

SEQ ID NO: 536960 - RNA, 19 nt, Homo sapiens
  misc_RNA (1)...(19): siRNA sense strand
agaagcagaaccuccguuu

SEQ ID NO: 536961 - RNA, 19 nt, Homo sapiens
  misc_RNA (1)...(19): siRNA sense strand
ucacccacguggccaggaa

SEQ ID NO: 536962 - RNA, 19 nt, Homo sapiens
  misc_RNA (1)...(19): siRNA sense strand
gccaauucaacaucuauga

SEQ ID NO: 536963 - RNA, 19 nt, Homo sapiens
  misc_RNA (1)...(19): siRNA sense strand
ggagggacccagaucaacu

SEQ ID NO: 536964 - RNA, 19 nt, Homo sapiens
  misc_RNA (1)...(19): siRNA sense strand
caaguucauuguggauuac

SEQ ID NO: 536965 - RNA, 19 nt, Homo sapiens
  misc_RNA (1)...(19): siRNA sense strand
ucggugcugcucaucauua

SEQ ID NO: 536966 - RNA, 19 nt, Homo sapiens
  misc_RNA (1)...(19): siRNA sense strand
ucaugaagaacacccuaaa

SEQ ID NO: 536967 - RNA, 19 nt, Homo sapiens
  misc_RNA (1)...(19): siRNA sense strand
ucuaagaguccugauuuau

SEQ ID NO: 536968 - RNA, 19 nt, Homo sapiens
  misc_RNA (1)...(19): siRNA sense strand
caaggaggccauugucaac

SEQ ID NO: 536969 - RNA, 19 nt, Homo sapiens
  misc_RNA (1)...(19): siRNA sense strand
cagagccaauucaacaucu

SEQ ID NO: 536970 - RNA, 19 nt, Homo sapiens
  misc_RNA (1)...(19): siRNA sense strand
guccugauuuauccaaaca

SEQ ID NO: 536971 - RNA, 19 nt, Homo sapiens
  misc_RNA (1)...(19): siRNA sense strand
gaguccugauuuauccaaa

SEQ ID NO: 536972 - RNA, 19 nt, Homo sapiens
  misc_RNA (1)...(19): siRNA sense strand
gaaagaaauguggcaccau

SEQ ID NO: 536973 - RNA, 19 nt, Homo sapiens
  misc_RNA (1)...(19): siRNA sense strand
cagagugcaccuuccuuga

SEQ ID NO: 536974 - RNA, 19 nt, Homo sapiens
  misc_RNA (1)...(19): siRNA sense strand
agagccaauucaacaucua

SEQ ID NO: 536975 - RNA, 19 nt, Homo sapiens
  misc_RNA (1)...(19): siRNA sense strand
ggaguucaccaccaguuac

SEQ ID NO: 536976 - RNA, 19 nt, Homo sapiens
  misc_RNA (1)...(19): siRNA sense strand
caugaagaacacccuaaau

SEQ ID NO: 536977 - RNA, 19 nt, Homo sapiens
  misc_RNA (1)...(19): siRNA sense strand
gguggugucccaggaaaga

SEQ ID NO: 536978 - RNA, 19 nt, Homo sapiens
  misc_RNA (1)...(19): siRNA sense strand
gcgacaucguccaguuugu

SEQ ID NO: 536979 - RNA, 19 nt, Homo sapiens
  misc_RNA (1)...(19): siRNA sense strand
ugaagaacacccuaaaucc

SEQ ID NO: 536980 - RNA, 19 nt, Homo sapiens
  misc_RNA (1)...(19): siRNA sense strand
cuacagaagcaacgaggau

SEQ ID NO: 536981 - RNA, 19 nt, Homo sapiens
  misc_RNA (1)...(19): siRNA sense strand
gaaaucugaccccuucuug

SEQ ID NO: 536982 - RNA, 19 nt, Homo sapiens
  misc_RNA (1)...(19): siRNA sense strand
ugauuuauccaaacacgau

SEQ ID NO: 536983 - RNA, 19 nt, Homo sapiens
  misc_RNA (1)...(19): siRNA sense strand
gcaggauggcucccaguac

SEQ ID NO: 536984 - RNA, 19 nt, Homo sapiens
  misc_RNA (1)...(19): siRNA sense strand
ugaauggcaaccaggagaa

SEQ ID NO: 536985 - RNA, 19 nt, Homo sapiens
  misc_RNA (1)...(19): siRNA sense strand
guucaccauuugccacaag

SEQ ID NO: 536986 - RNA, 19 nt, Homo sapiens
  misc_RNA (1)...(19): siRNA sense strand
caugaaggcacagggcauu

SEQ ID NO: 536987 - RNA, 19 nt, Homo sapiens
  misc_RNA (1)...(19): siRNA sense strand
gaccaaggaggccauuguc

SEQ ID NO: 536988 - RNA, 19 nt, Homo sapiens
  misc_RNA (1)...(19): siRNA sense strand
ccacgaguucccacugaau

SEQ ID NO: 536989 - RNA, 19 nt, Homo sapiens
  misc_RNA (1)...(19): siRNA sense strand
ucccacgaguucccacuga

SEQ ID NO: 536990 - RNA, 19 nt, Homo sapiens
  misc_RNA (1)...(19): siRNA sense strand
aaagacauguuuuccaagu

SEQ ID NO: 536991 - RNA, 19 nt, Homo sapiens
  misc_RNA (1)...(19): siRNA sense strand
aaaggagggacccagauca

SEQ ID NO: 536992 - RNA, 19 nt, Homo sapiens
  misc_RNA (1)...(19): siRNA sense strand
caccuuccuugacuacauc

SEQ ID NO: 536993 - RNA, 19 nt, Homo sapiens
  misc_RNA (1)...(19): siRNA sense strand
augaagaacacccuaaauc

SEQ ID NO: 536994 - RNA, 19 nt, Homo sapiens
  misc_RNA (1)...(19): siRNA sense strand
ggaaaacccuuuagaaaua

SEQ ID NO: 536995 - RNA, 19 nt, Homo sapiens
  misc_RNA (1)...(19): siRNA sense strand
gaacugagggugauagaua

SEQ ID NO: 536996 - RNA, 19 nt, Homo sapiens
  misc_RNA (1)...(19): siRNA sense strand
gaacucgccugagauagua

SEQ ID NO: 536997 - RNA, 19 nt, Homo sapiens
  misc_RNA (1)...(19): siRNA sense strand
gaccuucccuuucuucuaa

SEQ ID NO: 536998 - RNA, 19 nt, Homo sapiens
  misc_RNA (1)...(19): siRNA sense strand
gaaauacccugagcuagug

SEQ ID NO: 536999 - RNA, 19 nt, Homo sapiens
  misc_RNA (1)...(19): siRNA sense strand
ugauaacgcuccugaguuu

SEQ ID NO: 537000 - RNA, 19 nt, Homo sapiens
  misc_RNA (1)...(19): siRNA sense strand
caacauaacagugcagaua

SEQ ID NO: 537001 - RNA, 19 nt, Homo sapiens
  misc_RNA (1)...(19): siRNA sense strand
ccagagaacucgccugaga

SEQ ID NO: 537002 - RNA, 19 nt, Homo sapiens
  misc_RNA (1)...(19): siRNA sense strand
ggagguaaauccuaugaca

SEQ ID NO: 537003 - RNA, 19 nt, Homo sapiens
  misc_RNA (1)...(19): siRNA sense strand
ggagagagcacucgacaga

SEQ ID NO: 537004 - RNA, 19 nt, Homo sapiens
  misc_RNA (1)...(19): siRNA sense strand
ucgaaaugguuacgucuua

SEQ ID NO: 537005 - RNA, 19 nt, Homo sapiens
  misc_RNA (1)...(19): siRNA sense strand
gcagauaucagaugucaau

SEQ ID NO: 537006 - RNA, 19 nt, Homo sapiens
  misc_RNA (1)...(19): siRNA sense strand
ggaaauacccugagcuagu

SEQ ID NO: 537007 - RNA, 19 nt, Homo sapiens
  misc_RNA (1)...(19): siRNA sense strand
ugagaaagcaaguagauuu

SEQ ID NO: 537008 - RNA, 19 nt, Homo sapiens
  misc_RNA (1)...(19): siRNA sense strand
gaagcaagagcugaauaua

SEQ ID NO: 537009 - RNA, 19 nt, Homo sapiens
  misc_RNA (1)...(19): siRNA sense strand
ccaacucgcucacugucua

SEQ ID NO: 537010 - RNA, 19 nt, Homo sapiens
  misc_RNA (1)...(19): siRNA sense strand
agcaagagcugaauauaau

SEQ ID NO: 537011 - RNA, 19 nt, Homo sapiens
  misc_RNA (1)...(19): siRNA sense strand
gcaagagcugaauauaaua

SEQ ID NO: 537012 - RNA, 19 nt, Homo sapiens
  misc_RNA (1)...(19): siRNA sense strand
gaacugcucagguccguau

SEQ ID NO: 537013 - RNA, 19 nt, Homo sapiens
  misc_RNA (1)...(19): siRNA sense strand
gaaucaugcuuuggacuug

SEQ ID NO: 537014 - RNA, 19 nt, Homo sapiens
  misc_RNA (1)...(19): siRNA sense strand
cauacuacauuuccaagug

SEQ ID NO: 537015 - RNA, 19 nt, Homo sapiens
  misc_RNA (1)...(19): siRNA sense strand
uaacagugcagauaucaga

SEQ ID NO: 537016 - RNA, 19 nt, Homo sapiens
  misc_RNA (1)...(19): siRNA sense strand
gagaagcaagagcugaaua

SEQ ID NO: 537017 - RNA, 19 nt, Homo sapiens
  misc_RNA (1)...(19): siRNA sense strand
agagagcacucgacagaga

SEQ ID NO: 537018 - RNA, 19 nt, Homo sapiens
  misc_RNA (1)...(19): siRNA sense strand
gagccucaacuaagauuaa

SEQ ID NO: 537019 - RNA, 19 nt, Homo sapiens
  misc_RNA (1)...(19): siRNA sense strand
aagcaagagcugaauauaa

SEQ ID NO: 537020 - RNA, 19 nt, Homo sapiens
  misc_RNA (1)...(19): siRNA sense strand
ucaggaaagugcacucuuc

SEQ ID NO: 537021 - RNA, 19 nt, Homo sapiens
  misc_RNA (1)...(19): siRNA sense strand
ggacguaggaagcaauaau

SEQ ID NO: 537022 - RNA, 19 nt, Homo sapiens
  misc_RNA (1)...(19): siRNA sense strand
guaggaagcaauaauguuc

SEQ ID NO: 537023 - RNA, 19 nt, Homo sapiens
  misc_RNA (1)...(19): siRNA sense strand
ucuaauccaugaauucaga

SEQ ID NO: 537024 - RNA, 19 nt, Homo sapiens
  misc_RNA (1)...(19): siRNA sense strand
ucaggucgcuggacuacga

SEQ ID NO: 537025 - RNA, 19 nt, Homo sapiens
  misc_RNA (1)...(19): siRNA sense strand
gaaaacggagcacaacaua

SEQ ID NO: 537026 - RNA, 19 nt, Homo sapiens
  misc_RNA (1)...(19): siRNA sense strand
gugcagauaucagauguca

SEQ ID NO: 537027 - RNA, 19 nt, Homo sapiens
  misc_RNA (1)...(19): siRNA sense strand
ggugauagauauaaaugac

SEQ ID NO: 537028 - RNA, 19 nt, Homo sapiens
  misc_RNA (1)...(19): siRNA sense strand
gguuacgucuuaugaagug

SEQ ID NO: 537029 - RNA, 19 nt, Homo sapiens
  misc_RNA (1)...(19): siRNA sense strand
gaaaugguuacgucuuaug

SEQ ID NO: 537030 - RNA, 19 nt, Homo sapiens
  misc_RNA (1)...(19): siRNA sense strand
gagcuaguguuggauaaag

SEQ ID NO: 537031 - RNA, 19 nt, Homo sapiens
  misc_RNA (1)...(19): siRNA sense strand
aaacaagugaguucaaguu

SEQ ID NO: 537032 - RNA, 19 nt, Homo sapiens
  misc_RNA (1)...(19): siRNA sense strand
gacaggaggcucagaaaca

SEQ ID NO: 537033 - RNA, 19 nt, Homo sapiens
  misc_RNA (1)...(19): siRNA sense strand
gauaguaguugcuguuuuc

SEQ ID NO: 537034 - RNA, 19 nt, Homo sapiens
  misc_RNA (1)...(19): siRNA sense strand
auucagagauggcaggaaa

SEQ ID NO: 537035 - RNA, 19 nt, Homo sapiens
  misc_RNA (1)...(19): siRNA sense strand
gaaacaaugggaagacgau

SEQ ID NO: 537036 - RNA, 19 nt, Homo sapiens
  misc_RNA (1)...(19): siRNA sense strand
ucagagauggcaggaaaua

SEQ ID NO: 537037 - RNA, 19 nt, Homo sapiens
  misc_RNA (1)...(19): siRNA sense strand
agagaacucgccugagaua

SEQ ID NO: 537038 - RNA, 19 nt, Homo sapiens
  misc_RNA (1)...(19): siRNA sense strand
gaaguucgacugagaaagc

SEQ ID NO: 537039 - RNA, 19 nt, Homo sapiens
  misc_RNA (1)...(19): siRNA sense strand
ugagggugauagauauaaa

SEQ ID NO: 537040 - RNA, 19 nt, Homo sapiens
  misc_RNA (1)...(19): siRNA sense strand
gauccugacuccggaaaca

SEQ ID NO: 537041 - RNA, 19 nt, Homo sapiens
  misc_RNA (1)...(19): siRNA sense strand
cgaaaugguuacgucuuau

SEQ ID NO: 537042 - RNA, 19 nt, Homo sapiens
  misc_RNA (1)...(19): siRNA sense strand
acaggaggcucagaaacaa

SEQ ID NO: 537043 - RNA, 19 nt, Homo sapiens
  misc_RNA (1)...(19): siRNA sense strand
gagccuugcauacuacauu

SEQ ID NO: 537044 - RNA, 19 nt, Homo sapiens
  misc_RNA (1)...(19): siRNA sense strand
gcaaggccaggaucauuuc

SEQ ID NO: 537045 - RNA, 19 nt, Homo sapiens
  misc_RNA (1)...(19): siRNA sense strand
gcucagguccguauugaag

SEQ ID NO: 537046 - RNA, 19 nt, Homo sapiens
  misc_RNA (1)...(19): siRNA sense strand
cacugagccuugcauacua

SEQ ID NO: 537047 - RNA, 19 nt, Homo sapiens
  misc_RNA (1)...(19): siRNA sense strand
gagauaguaguugcuguuu

SEQ ID NO: 537048 - RNA, 19 nt, Homo sapiens
  misc_RNA (1)...(19): siRNA sense strand
gagcagcccaucuacaaag

SEQ ID NO: 537049 - RNA, 19 nt, Homo sapiens
  misc_RNA (1)...(19): siRNA sense strand
ugaccauucucccauguuc

SEQ ID NO: 537050 - RNA, 19 nt, Homo sapiens
  misc_RNA (1)...(19): siRNA sense strand
gaaacaagugaguucaagu

SEQ ID NO: 537051 - RNA, 19 nt, Homo sapiens
  misc_RNA (1)...(19): siRNA sense strand
aaacggagcacaacauaac

SEQ ID NO: 537052 - RNA, 19 nt, Homo sapiens
  misc_RNA (1)...(19): siRNA sense strand
guaaaacuuuggagguaaa

SEQ ID NO: 537053 - RNA, 19 nt, Homo sapiens
  misc_RNA (1)...(19): siRNA sense strand
cuucggaggauauuaguaa

SEQ ID NO: 537054 - RNA, 19 nt, Homo sapiens
  misc_RNA (1)...(19): siRNA sense strand
guauugaagugguggacau

SEQ ID NO: 537055 - RNA, 19 nt, Homo sapiens
  misc_RNA (1)...(19): siRNA sense strand
caagugaguucaaguuccu

SEQ ID NO: 537056 - RNA, 19 nt, Homo sapiens
  misc_RNA (1)...(19): siRNA sense strand
uaucauacacacucuuuca

SEQ ID NO: 537057 - RNA, 19 nt, Homo sapiens
  misc_RNA (1)...(19): siRNA sense strand
agacaacggccaccuguuc

SEQ ID NO: 537058 - RNA, 19 nt, Homo sapiens
  misc_RNA (1)...(19): siRNA sense strand
gaagugguggacaucaaug

SEQ ID NO: 537059 - RNA, 19 nt, Homo sapiens
  misc_RNA (1)...(19): siRNA sense strand
ugucgucgcucuuccucuu

SEQ ID NO: 537060 - RNA, 19 nt, Homo sapiens
  misc_RNA (1)...(19): siRNA sense strand
cgacugagaaagcaaguag

SEQ ID NO: 537061 - RNA, 19 nt, Homo sapiens
  misc_RNA (1)...(19): siRNA sense strand
gacguaggaagcaauaaug

SEQ ID NO: 537062 - RNA, 19 nt, Homo sapiens
  misc_RNA (1)...(19): siRNA sense strand
agaaacaagugaguucaag

SEQ ID NO: 537063 - RNA, 19 nt, Homo sapiens
  misc_RNA (1)...(19): siRNA sense strand
cagagaagcaagagcugaa

SEQ ID NO: 537064 - RNA, 19 nt, Homo sapiens
  misc_RNA (1)...(19): siRNA sense strand
ucagguccguauugaagug

SEQ ID NO: 537065 - RNA, 19 nt, Homo sapiens
  misc_RNA (1)...(19): siRNA sense strand
acauaacagugcagauauc

SEQ ID NO: 537066 - RNA, 19 nt, Homo sapiens
  misc_RNA (1)...(19): siRNA sense strand
gagagcacucgacagagaa

SEQ ID NO: 537067 - RNA, 19 nt, Homo sapiens
  misc_RNA (1)...(19): siRNA sense strand
ggagccucaacuaagauua

SEQ ID NO: 537068 - RNA, 19 nt, Homo sapiens
  misc_RNA (1)...(19): siRNA sense strand
agaagcaagagcugaauau

SEQ ID NO: 537069 - RNA, 19 nt, Homo sapiens
  misc_RNA (1)...(19): siRNA sense strand
ugagauaguaguugcuguu

SEQ ID NO: 537070 - RNA, 19 nt, Homo sapiens
  misc_RNA (1)...(19): siRNA sense strand
gggaaguucgacugagaaa

SEQ ID NO: 537071 - RNA, 19 nt, Homo sapiens
  misc_RNA (1)...(19): siRNA sense strand
ccacugagccuugcauacu

SEQ ID NO: 537072 - RNA, 19 nt, Homo sapiens
  misc_RNA (1)...(19): siRNA sense strand
auacuacauuuccaagugu

SEQ ID NO: 537073 - RNA, 19 nt, Homo sapiens
  misc_RNA (1)...(19): siRNA sense strand
cgucagcgccacagacaga

SEQ ID NO: 537074 - RNA, 19 nt, Homo sapiens
  misc_RNA (1)...(19): siRNA sense strand
cgcaaggccaggaucauuu

SEQ ID NO: 537075 - RNA, 19 nt, Homo sapiens
  misc_RNA (1)...(19): siRNA sense strand
ugaaucaugcuuuggacuu

SEQ ID NO: 537076 - RNA, 19 nt, Homo sapiens
  misc_RNA (1)...(19): siRNA sense strand
aagugcagauuccagagaa

SEQ ID NO: 537077 - RNA, 19 nt, Homo sapiens
  misc_RNA (1)...(19): siRNA sense strand
agauaucagaugucaauga

SEQ ID NO: 537078 - RNA, 19 nt, Homo sapiens
  misc_RNA (1)...(19): siRNA sense strand
aaccuucagucaagaacuu

SEQ ID NO: 537079 - RNA, 19 nt, Homo sapiens
  misc_RNA (1)...(19): siRNA sense strand
gagggugauagauauaaau

SEQ ID NO: 537080 - RNA, 19 nt, Homo sapiens
  misc_RNA (1)...(19): siRNA sense strand
cagugcagauaucagaugu

SEQ ID NO: 537081 - RNA, 19 nt, Homo sapiens
  misc_RNA (1)...(19): siRNA sense strand
guucuaauccaugaauuca

SEQ ID NO: 537082 - RNA, 19 nt, Homo sapiens
  misc_RNA (1)...(19): siRNA sense strand
ggaagcaauaauguucaaa

SEQ ID NO: 537083 - RNA, 19 nt, Homo sapiens
  misc_RNA (1)...(19): siRNA sense strand
cagaaacaagugaguucaa

SEQ ID NO: 537084 - RNA, 19 nt, Homo sapiens
  misc_RNA (1)...(19): siRNA sense strand
ucuaaaaccuucagucaag

SEQ ID NO: 537085 - RNA, 19 nt, Homo sapiens
  misc_RNA (1)...(19): siRNA sense strand
acaaugggaagacgauuuc

SEQ ID NO: 537086 - RNA, 19 nt, Homo sapiens
  misc_RNA (1)...(19): siRNA sense strand
gcaggugguggacgugaau

SEQ ID NO: 537087 - RNA, 19 nt, Homo sapiens
  misc_RNA (1)...(19): siRNA sense strand
uaguaaaacuuuggaggua

SEQ ID NO: 537088 - RNA, 19 nt, Homo sapiens
  misc_RNA (1)...(19): siRNA sense strand
cugcucagguccguauuga

SEQ ID NO: 537089 - RNA, 19 nt, Homo sapiens
  misc_RNA (1)...(19): siRNA sense strand
acccugagcuaguguugga

SEQ ID NO: 537090 - RNA, 19 nt, Homo sapiens
  misc_RNA (1)...(19): siRNA sense strand
aaaugguuacgucuuauga

SEQ ID NO: 537091 - RNA, 19 nt, Homo sapiens
  misc_RNA (1)...(19): siRNA sense strand
cuacauuuccaaguguuaa

SEQ ID NO: 537092 - RNA, 19 nt, Homo sapiens
  misc_RNA (1)...(19): siRNA sense strand
caauacgaggugugucuga

SEQ ID NO: 537093 - RNA, 19 nt, Homo sapiens
  misc_RNA (1)...(19): siRNA sense strand
gaacuuuuacaccuuggua

SEQ ID NO: 537094 - RNA, 19 nt, Homo sapiens
  misc_RNA (1)...(19): siRNA sense strand
gaacaagugugauugcaaa

SEQ ID NO: 537095 - RNA, 19 nt, Homo sapiens
  misc_RNA (1)...(19): siRNA sense strand
caagacaccggaagaaaua

SEQ ID NO: 537096 - RNA, 19 nt, Homo sapiens
  misc_RNA (1)...(19): siRNA sense strand
gaugaagaccucagugaua

SEQ ID NO: 537097 - RNA, 19 nt, Homo sapiens
  misc_RNA (1)...(19): siRNA sense strand
ugaaagggcuguuuaucug

SEQ ID NO: 537098 - RNA, 19 nt, Homo sapiens
  misc_RNA (1)...(19): siRNA sense strand
gcucagugcuggucaagau

SEQ ID NO: 537099 - RNA, 19 nt, Homo sapiens
  misc_RNA (1)...(19): siRNA sense strand
cggaagaaauagaaagauu

SEQ ID NO: 537100 - RNA, 19 nt, Homo sapiens
  misc_RNA (1)...(19): siRNA sense strand
ggaagaaauagaaagauug

SEQ ID NO: 537101 - RNA, 19 nt, Homo sapiens
  misc_RNA (1)...(19): siRNA sense strand
gaagaccucagugauauug

SEQ ID NO: 537102 - RNA, 19 nt, Homo sapiens
  misc_RNA (1)...(19): siRNA sense strand
ccaaggaacaagugugauu

SEQ ID NO: 537103 - RNA, 19 nt, Homo sapiens
  misc_RNA (1)...(19): siRNA sense strand
gauugacagucgaugaaga

SEQ ID NO: 537104 - RNA, 19 nt, Homo sapiens
  misc_RNA (1)...(19): siRNA sense strand
gcgauggauuucagucaga

SEQ ID NO: 537105 - RNA, 19 nt, Homo sapiens
  misc_RNA (1)...(19): siRNA sense strand
cgacagaaucccacugaga

SEQ ID NO: 537106 - RNA, 19 nt, Homo sapiens
  misc_RNA (1)...(19): siRNA sense strand
ggaacaagugugauugcaa

SEQ ID NO: 537107 - RNA, 19 nt, Homo sapiens
  misc_RNA (1)...(19): siRNA sense strand
ucaagacaccggaagaaau

SEQ ID NO: 537108 - RNA, 19 nt, Homo sapiens
  misc_RNA (1)...(19): siRNA sense strand
agaccucagugauauugaa

SEQ ID NO: 537109 - RNA, 19 nt, Homo sapiens
  misc_RNA (1)...(19): siRNA sense strand
augaagaccucagugauau

SEQ ID NO: 537110 - RNA, 19 nt, Homo sapiens
  misc_RNA (1)...(19): siRNA sense strand
gauauugaaagggcuguuu

SEQ ID NO: 537111 - RNA, 19 nt, Homo sapiens
  misc_RNA (1)...(19): siRNA sense strand
caagauguccaaggaacaa

SEQ ID NO: 537112 - RNA, 19 nt, Homo sapiens
  misc_RNA (1)...(19): siRNA sense strand
caaggaacaagugugauug

SEQ ID NO: 537113 - RNA, 19 nt, Homo sapiens
  misc_RNA (1)...(19): siRNA sense strand
aaagauugacagucgauga

SEQ ID NO: 537114 - RNA, 19 nt, Homo sapiens
  misc_RNA (1)...(19): siRNA sense strand
ugcaggagcucaccaucau

SEQ ID NO: 537115 - RNA, 19 nt, Homo sapiens
  misc_RNA (1)...(19): siRNA sense strand
cgauggauuucagucagaa

SEQ ID NO: 537116 - RNA, 19 nt, Homo sapiens
  misc_RNA (1)...(19): siRNA sense strand
guccaaggaacaaguguga

SEQ ID NO: 537117 - RNA, 19 nt, Homo sapiens
  misc_RNA (1)...(19): siRNA sense strand
gaccucagugauauugaaa

SEQ ID NO: 537118 - RNA, 19 nt, Homo sapiens
  misc_RNA (1)...(19): siRNA sense strand
ccucagugauauugaaagg

SEQ ID NO: 537119 - RNA, 19 nt, Homo sapiens
  misc_RNA (1)...(19): siRNA sense strand
ggucaagauguccaaggaa

SEQ ID NO: 537120 - RNA, 19 nt, Homo sapiens
  misc_RNA (1)...(19): siRNA sense strand
ggagaguguugccaaaagu

SEQ ID NO: 537121 - RNA, 19 nt, Homo sapiens
  misc_RNA (1)...(19): siRNA sense strand
auauugaaagggcuguuua

SEQ ID NO: 537122 - RNA, 19 nt, Homo sapiens
  misc_RNA (1)...(19): siRNA sense strand
uggucaagauguccaagga

SEQ ID NO: 537123 - RNA, 19 nt, Homo sapiens
  misc_RNA (1)...(19): siRNA sense strand
ugaagaccucagugauauu

SEQ ID NO: 537124 - RNA, 19 nt, Homo sapiens
  misc_RNA (1)...(19): siRNA sense strand
gacaccggaagaaauagaa

SEQ ID NO: 537125 - RNA, 19 nt, Homo sapiens
  misc_RNA (1)...(19): siRNA sense strand
aagauugacagucgaugaa

SEQ ID NO: 537126 - RNA, 19 nt, Homo sapiens
  misc_RNA (1)...(19): siRNA sense strand
ucgaugaagaccucaguga

SEQ ID NO: 537127 - RNA, 19 nt, Homo sapiens
  misc_RNA (1)...(19): siRNA sense strand
cgaugaagaccucagugau

SEQ ID NO: 537128 - RNA, 19 nt, Homo sapiens
  misc_RNA (1)...(19): siRNA sense strand
gaacaagugugauugcaaa

SEQ ID NO: 537129 - RNA, 19 nt, Homo sapiens
  misc_RNA (1)...(19): siRNA sense strand
caagacaccggaagaaaua

SEQ ID NO: 537130 - RNA, 19 nt, Homo sapiens
  misc_RNA (1)...(19): siRNA sense strand
gaugaagaccucagugaua

SEQ ID NO: 537131 - RNA, 19 nt, Homo sapiens
  misc_RNA (1)...(19): siRNA sense strand
ugaaagggcuguuuaucug

SEQ ID NO: 537132 - RNA, 19 nt, Homo sapiens
  misc_RNA (1)...(19): siRNA sense strand
gcucagugcuggucaagau

SEQ ID NO: 537133 - RNA, 19 nt, Homo sapiens
  misc_RNA (1)...(19): siRNA sense strand
cggaagaaauagaaagauu

SEQ ID NO: 537134 - RNA, 19 nt, Homo sapiens
  misc_RNA (1)...(19): siRNA sense strand
ggaagaaauagaaagauug

SEQ ID NO: 537135 - RNA, 19 nt, Homo sapiens
  misc_RNA (1)...(19): siRNA sense strand
gaagaccucagugauauug

SEQ ID NO: 537136 - RNA, 19 nt, Homo sapiens
  misc_RNA (1)...(19): siRNA sense strand
ccaaggaacaagugugauu

SEQ ID NO: 537137 - RNA, 19 nt, Homo sapiens
  misc_RNA (1)...(19): siRNA sense strand
gauugacagucgaugaaga

SEQ ID NO: 537138 - RNA, 19 nt, Homo sapiens
  misc_RNA (1)...(19): siRNA sense strand
gcgauggauuucagucaga

SEQ ID NO: 537139 - RNA, 19 nt, Homo sapiens
  misc_RNA (1)...(19): siRNA sense strand
cgacagaaucccacugaga

SEQ ID NO: 537140 - RNA, 19 nt, Homo sapiens
  misc_RNA (1)...(19): siRNA sense strand
ggaacaagugugauugcaa

SEQ ID NO: 537141 - RNA, 19 nt, Homo sapiens
  misc_RNA (1)...(19): siRNA sense strand
ucaagacaccggaagaaau

SEQ ID NO: 537142 - RNA, 19 nt, Homo sapiens
  misc_RNA (1)...(19): siRNA sense strand
agaccucagugauauugaa

SEQ ID NO: 537143 - RNA, 19 nt, Homo sapiens
  misc_RNA (1)...(19): siRNA sense strand
augaagaccucagugauau

SEQ ID NO: 537144 - RNA, 19 nt, Homo sapiens
  misc_RNA (1)...(19): siRNA sense strand
gauauugaaagggcuguuu

SEQ ID NO: 537145 - RNA, 19 nt, Homo sapiens
  misc_RNA (1)...(19): siRNA sense strand
caagauguccaaggaacaa

SEQ ID NO: 537146 - RNA, 19 nt, Homo sapiens
  misc_RNA (1)...(19): siRNA sense strand
caaggaacaagugugauug

SEQ ID NO: 537147 - RNA, 19 nt, Homo sapiens
  misc_RNA (1)...(19): siRNA sense strand
aaagauugacagucgauga

SEQ ID NO: 537148 - RNA, 19 nt, Homo sapiens
  misc_RNA (1)...(19): siRNA sense strand
ugcaggagcucaccaucau

SEQ ID NO: 537149 - RNA, 19 nt, Homo sapiens
  misc_RNA (1)...(19): siRNA sense strand
cgauggauuucagucagaa

SEQ ID NO: 537150 - RNA, 19 nt, Homo sapiens
  misc_RNA (1)...(19): siRNA sense strand
guccaaggaacaaguguga

SEQ ID NO: 537151 - RNA, 19 nt, Homo sapiens
  misc_RNA (1)...(19): siRNA sense strand
gaccucagugauauugaaa

SEQ ID NO: 537152 - RNA, 19 nt, Homo sapiens
  misc_RNA (1)...(19): siRNA sense strand
ccucagugauauugaaagg

SEQ ID NO: 537153 - RNA, 19 nt, Homo sapiens
  misc_RNA (1)...(19): siRNA sense strand
ggucaagauguccaaggaa

SEQ ID NO: 537154 - RNA, 19 nt, Homo sapiens
  misc_RNA (1)...(19): siRNA sense strand
ggagaguguugccaaaagu

SEQ ID NO: 537155 - RNA, 19 nt, Homo sapiens
  misc_RNA (1)...(19): siRNA sense strand
auauugaaagggcuguuua

SEQ ID NO: 537156 - RNA, 19 nt, Homo sapiens
  misc_RNA (1)...(19): siRNA sense strand
uggucaagauguccaagga

SEQ ID NO: 537157 - RNA, 19 nt, Homo sapiens
  misc_RNA (1)...(19): siRNA sense strand
ugaagaccucagugauauu

SEQ ID NO: 537158 - RNA, 19 nt, Homo sapiens
  misc_RNA (1)...(19): siRNA sense strand
gacaccggaagaaauagaa

SEQ ID NO: 537159 - RNA, 19 nt, Homo sapiens
  misc_RNA (1)...(19): siRNA sense strand
aagauugacagucgaugaa

SEQ ID NO: 537160 - RNA, 19 nt, Homo sapiens
  misc_RNA (1)...(19): siRNA sense strand
ucgaugaagaccucaguga

SEQ ID NO: 537161 - RNA, 19 nt, Homo sapiens
  misc_RNA (1)...(19): siRNA sense strand
cgaugaagaccucagugau

SEQ ID NO: 537162 - RNA, 19 nt, Homo sapiens
  misc_RNA (1)...(19): siRNA sense strand
ggagaaaggaugacucuua

SEQ ID NO: 537163 - RNA, 19 nt, Homo sapiens
  misc_RNA (1)...(19): siRNA sense strand
gaaaggaugacucuuauuu

SEQ ID NO: 537164 - RNA, 19 nt, Homo sapiens
  misc_RNA (1)...(19): siRNA sense strand
gagaaaggaugacucuuau

SEQ ID NO: 537165 - RNA, 19 nt, Homo sapiens
  misc_RNA (1)...(19): siRNA sense strand
gaauacggcuccaucaaga

SEQ ID NO: 537166 - RNA, 19 nt, Homo sapiens
  misc_RNA (1)...(19): siRNA sense strand
gaaagucagucucgugcaa

SEQ ID NO: 537167 - RNA, 19 nt, Homo sapiens
  misc_RNA (1)...(19): siRNA sense strand
gaaggaacgugaggagauu

SEQ ID NO: 537168 - RNA, 19 nt, Homo sapiens
  misc_RNA (1)...(19): siRNA sense strand
gcaagagcaucgcaacaug

SEQ ID NO: 537169 - RNA, 19 nt, Homo sapiens
  misc_RNA (1)...(19): siRNA sense strand
gaucuuaccagaggcauua

SEQ ID NO: 537170 - RNA, 19 nt, Homo sapiens
  misc_RNA (1)...(19): siRNA sense strand
gaagagcuuuaucgucaau

SEQ ID NO: 537171 - RNA, 19 nt, Homo sapiens
  misc_RNA (1)...(19): siRNA sense strand
gacuugaucuuccuuaaca

SEQ ID NO: 537172 - RNA, 19 nt, Homo sapiens
  misc_RNA (1)...(19): siRNA sense strand
ccacagacauaguagagau

SEQ ID NO: 537173 - RNA, 19 nt, Homo sapiens
  misc_RNA (1)...(19): siRNA sense strand
gaaauuaugagcguuacaa

SEQ ID NO: 537174 - RNA, 19 nt, Homo sapiens
  misc_RNA (1)...(19): siRNA sense strand
ugaagagacugacaagauc

SEQ ID NO: 537175 - RNA, 19 nt, Homo sapiens
  misc_RNA (1)...(19): siRNA sense strand
gcacagugacggccaauag

SEQ ID NO: 537176 - RNA, 19 nt, Homo sapiens
  misc_RNA (1)...(19): siRNA sense strand
uuacagagauagcuuugau

SEQ ID NO: 537177 - RNA, 19 nt, Homo sapiens
  misc_RNA (1)...(19): siRNA sense strand
ccagaaauuaugagcguua

SEQ ID NO: 537178 - RNA, 19 nt, Homo sapiens
  misc_RNA (1)...(19): siRNA sense strand
cugacaagaucaucaacua

SEQ ID NO: 537179 - RNA, 19 nt, Homo sapiens
  misc_RNA (1)...(19): siRNA sense strand
gcaaucagccuccaagcau

SEQ ID NO: 537180 - RNA, 19 nt, Homo sapiens
  misc_RNA (1)...(19): siRNA sense strand
cagccagccucaacaaaga

SEQ ID NO: 537181 - RNA, 19 nt, Homo sapiens
  misc_RNA (1)...(19): siRNA sense strand
gcccagggauggcagaaau

SEQ ID NO: 537182 - RNA, 19 nt, Homo sapiens
  misc_RNA (1)...(19): siRNA sense strand
gugaggagauugccagaca

SEQ ID NO: 537183 - RNA, 19 nt, Homo sapiens
  misc_RNA (1)...(19): siRNA sense strand
ggaaauccagagacgcuuu

SEQ ID NO: 537184 - RNA, 19 nt, Homo sapiens
  misc_RNA (1)...(19): siRNA sense strand
gaucuuccuuaacacagaa

SEQ ID NO: 537185 - RNA, 19 nt, Homo sapiens
  misc_RNA (1)...(19): siRNA sense strand
cgaaaggcccguugauugu

SEQ ID NO: 537186 - RNA, 19 nt, Homo sapiens
  misc_RNA (1)...(19): siRNA sense strand
ccgaaaggcccguugauug

SEQ ID NO: 537187 - RNA, 19 nt, Homo sapiens
  misc_RNA (1)...(19): siRNA sense strand
ggaaggagcggcugaugag

SEQ ID NO: 537188 - RNA, 19 nt, Homo sapiens
  misc_RNA (1)...(19): siRNA sense strand
guaccucacugcugaagag

SEQ ID NO: 537189 - RNA, 19 nt, Homo sapiens
  misc_RNA (1)...(19): siRNA sense strand
gaaaggcccguugauuguu

SEQ ID NO: 537190 - RNA, 19 nt, Homo sapiens
  misc_RNA (1)...(19): siRNA sense strand
gcaaacagccagccucaac

SEQ ID NO: 537191 - RNA, 19 nt, Homo sapiens
  misc_RNA (1)...(19): siRNA sense strand
caaucagccuccaagcauu

SEQ ID NO: 537192 - RNA, 19 nt, Homo sapiens
  misc_RNA (1)...(19): siRNA sense strand
guagagauuugcgggauca

SEQ ID NO: 537193 - RNA, 19 nt, Homo sapiens
  misc_RNA (1)...(19): siRNA sense strand
gcaagagcuucaggccaaa

SEQ ID NO: 537194 - RNA, 19 nt, Homo sapiens
  misc_RNA (1)...(19): siRNA sense strand
cgacagauacagagacaug

SEQ ID NO: 537195 - RNA, 19 nt, Homo sapiens
  misc_RNA (1)...(19): siRNA sense strand
gaagagacugacaagauca

SEQ ID NO: 537196 - RNA, 19 nt, Homo sapiens
  misc_RNA (1)...(19): siRNA sense strand
ugagggaucuuagagacuu

SEQ ID NO: 537197 - RNA, 19 nt, Homo sapiens
  misc_RNA (1)...(19): siRNA sense strand
ccauauggcuuuggagaca

SEQ ID NO: 537198 - RNA, 19 nt, Homo sapiens
  misc_RNA (1)...(19): siRNA sense strand
agacuuucgugaucuaaga

SEQ ID NO: 537199 - RNA, 19 nt, Homo sapiens
  misc_RNA (1)...(19): siRNA sense strand
ggacgugagggaucuuaga

SEQ ID NO: 537200 - RNA, 19 nt, Homo sapiens
  misc_RNA (1)...(19): siRNA sense strand
gaaauccagagacgcuuug

SEQ ID NO: 537201 - RNA, 19 nt, Homo sapiens
  misc_RNA (1)...(19): siRNA sense strand
gagggaucuuagagacuuu

SEQ ID NO: 537202 - RNA, 19 nt, Homo sapiens
  misc_RNA (1)...(19): siRNA sense strand
gugccucgcugaagacaca

SEQ ID NO: 537203 - RNA, 19 nt, Homo sapiens
  misc_RNA (1)...(19): siRNA sense strand
uuccacagguaucaacuuu

SEQ ID NO: 537204 - RNA, 19 nt, Homo sapiens
  misc_RNA (1)...(19): siRNA sense strand
ccacacgaagggauccaua

SEQ ID NO: 537205 - RNA, 19 nt, Homo sapiens
  misc_RNA (1)...(19): siRNA sense strand
gccagaggccugugucuuc

SEQ ID NO: 537206 - RNA, 19 nt, Homo sapiens
  misc_RNA (1)...(19): siRNA sense strand
uaugagcguuacaagaaug

SEQ ID NO: 537207 - RNA, 19 nt, Homo sapiens
  misc_RNA (1)...(19): siRNA sense strand
ggacagcagagacauucga

SEQ ID NO: 537208 - RNA, 19 nt, Homo sapiens
  misc_RNA (1)...(19): siRNA sense strand
gagcuuuaucgucaauauu

SEQ ID NO: 537209 - RNA, 19 nt, Homo sapiens
  misc_RNA (1)...(19): siRNA sense strand
ggaacggcguagagaagag

SEQ ID NO: 537210 - RNA, 19 nt, Homo sapiens
  misc_RNA (1)...(19): siRNA sense strand
gaggaacggcguagagaag

SEQ ID NO: 537211 - RNA, 19 nt, Homo sapiens
  misc_RNA (1)...(19): siRNA sense strand
cuuagagacuuucgugauc

SEQ ID NO: 537212 - RNA, 19 nt, Homo sapiens
  misc_RNA (1)...(19): siRNA sense strand
cugaagagacugacaagau

SEQ ID NO: 537213 - RNA, 19 nt, Homo sapiens
  misc_RNA (1)...(19): siRNA sense strand
gaugacuauugcaggagaa

SEQ ID NO: 537214 - RNA, 19 nt, Homo sapiens
  misc_RNA (1)...(19): siRNA sense strand
caugagagacucccgagau

SEQ ID NO: 537215 - RNA, 19 nt, Homo sapiens
  misc_RNA (1)...(19): siRNA sense strand
auuaugagcguuacaagaa

SEQ ID NO: 537216 - RNA, 19 nt, Homo sapiens
  misc_RNA (1)...(19): siRNA sense strand
aaaggcccguugauuguuc

SEQ ID NO: 537217 - RNA, 19 nt, Homo sapiens
  misc_RNA (1)...(19): siRNA sense strand
guagagaagagcuuuaucg

SEQ ID NO: 537218 - RNA, 19 nt, Homo sapiens
  misc_RNA (1)...(19): siRNA sense strand
ccaauucgaggaaguccaa

SEQ ID NO: 537219 - RNA, 19 nt, Homo sapiens
  misc_RNA (1)...(19): siRNA sense strand
aaacagccagccucaacaa

SEQ ID NO: 537220 - RNA, 19 nt, Homo sapiens
  misc_RNA (1)...(19): siRNA sense strand
uaugaccgauaccuacgaa

SEQ ID NO: 537221 - RNA, 19 nt, Homo sapiens
  misc_RNA (1)...(19): siRNA sense strand
agagcuuuaucgucaauau

SEQ ID NO: 537222 - RNA, 19 nt, Homo sapiens
  misc_RNA (1)...(19): siRNA sense strand
ggagacagucgagauucaa

SEQ ID NO: 537223 - RNA, 19 nt, Homo sapiens
  misc_RNA (1)...(19): siRNA sense strand
uggacuugaucuuccuuaa

SEQ ID NO: 537224 - RNA, 19 nt, Homo sapiens
  misc_RNA (1)...(19): siRNA sense strand
ugaccgauaccuacgaaug

SEQ ID NO: 537225 - RNA, 19 nt, Homo sapiens
  misc_RNA (1)...(19): siRNA sense strand
gcaugguaguggacuugau

SEQ ID NO: 537226 - RNA, 19 nt, Homo sapiens
  misc_RNA (1)...(19): siRNA sense strand
aaggaugacucuuauuuug

SEQ ID NO: 537227 - RNA, 19 nt, Homo sapiens
  misc_RNA (1)...(19): siRNA sense strand
caauccaaguguacagaag

SEQ ID NO: 537228 - RNA, 19 nt, Homo sapiens
  misc_RNA (1)...(19): siRNA sense strand
gcaccugcuagcaacauga

SEQ ID NO: 537229 - RNA, 19 nt, Homo sapiens
  misc_RNA (1)...(19): siRNA sense strand
aaucagccuccaagcauuu

SEQ ID NO: 537230 - RNA, 19 nt, Homo sapiens
  misc_RNA (1)...(19): siRNA sense strand
uggagacagucgagauuca

SEQ ID NO: 537231 - RNA, 19 nt, Homo sapiens
  misc_RNA (1)...(19): siRNA sense strand
gguaguggacuugaucuuc

SEQ ID NO: 537232 - RNA, 19 nt, Homo sapiens
  misc_RNA (1)...(19): siRNA sense strand
guucugugauuguggucaa

SEQ ID NO: 537233 - RNA, 19 nt, Homo sapiens
  misc_RNA (1)...(19): siRNA sense strand
guugauuguucugugauug

SEQ ID NO: 537234 - RNA, 19 nt, Homo sapiens
  misc_RNA (1)...(19): siRNA sense strand
gaccacagacauaguagag

SEQ ID NO: 537235 - RNA, 19 nt, Homo sapiens
  misc_RNA (1)...(19): siRNA sense strand
gccgaaaggcccguugauu

SEQ ID NO: 537236 - RNA, 19 nt, Homo sapiens
  misc_RNA (1)...(19): siRNA sense strand
acgaauggaugacuauugc

SEQ ID NO: 537237 - RNA, 19 nt, Homo sapiens
  misc_RNA (1)...(19): siRNA sense strand
ggacuugaucuuccuuaac

SEQ ID NO: 537238 - RNA, 19 nt, Homo sapiens
  misc_RNA (1)...(19): siRNA sense strand
gaggaaguccaaggagaga

SEQ ID NO: 537239 - RNA, 19 nt, Homo sapiens
  misc_RNA (1)...(19): siRNA sense strand
agaaggaacgugaggagau

SEQ ID NO: 537240 - RNA, 19 nt, Homo sapiens
  misc_RNA (1)...(19): siRNA sense strand
ggaccacagacauaguaga

SEQ ID NO: 537241 - RNA, 19 nt, Homo sapiens
  misc_RNA (1)...(19): siRNA sense strand
ugaucuuccuuaacacaga

SEQ ID NO: 537242 - RNA, 19 nt, Homo sapiens
  misc_RNA (1)...(19): siRNA sense strand
agaagagcuuuaucgucaa

SEQ ID NO: 537243 - RNA, 19 nt, Homo sapiens
  misc_RNA (1)...(19): siRNA sense strand
gauacagagacaugagaga

SEQ ID NO: 537244 - RNA, 19 nt, Homo sapiens
  misc_RNA (1)...(19): siRNA sense strand
cagacauaguagagauuug

SEQ ID NO: 537245 - RNA, 19 nt, Homo sapiens
  misc_RNA (1)...(19): siRNA sense strand
caaacagccagccucaaca

SEQ ID NO: 537246 - RNA, 19 nt, Homo sapiens
  misc_RNA (1)...(19): siRNA sense strand
ucgggugccucgcugaaga

SEQ ID NO: 537247 - RNA, 19 nt, Homo sapiens
  misc_RNA (1)...(19): siRNA sense strand
cggaaggagcggcugauga

SEQ ID NO: 537248 - RNA, 19 nt, Homo sapiens
  misc_RNA (1)...(19): siRNA sense strand
gagacugacaagaucauca

SEQ ID NO: 537249 - RNA, 19 nt, Homo sapiens
  misc_RNA (1)...(19): siRNA sense strand
ccagacaggcagccaagau

SEQ ID NO: 537250 - RNA, 19 nt, Homo sapiens
  misc_RNA (1)...(19): siRNA sense strand
gaccgauaccuacgaaugg

SEQ ID NO: 537251 - RNA, 19 nt, Homo sapiens
  misc_RNA (1)...(19): siRNA sense strand
gcucucucccaccugguua

SEQ ID NO: 537252 - RNA, 19 nt, Homo sapiens
  misc_RNA (1)...(19): siRNA sense strand
auccucagccucuucaaua

SEQ ID NO: 537253 - RNA, 19 nt, Homo sapiens
  misc_RNA (1)...(19): siRNA sense strand
uuaugagcguuacaagaau

SEQ ID NO: 537254 - RNA, 19 nt, Homo sapiens
  misc_RNA (1)...(19): siRNA sense strand
gcguagagaagagcuuuau

SEQ ID NO: 537255 - RNA, 19 nt, Homo sapiens
  misc_RNA (1)...(19): siRNA sense strand
cgggaccacagacauagua

SEQ ID NO: 537256 - RNA, 19 nt, Homo sapiens
  misc_RNA (1)...(19): siRNA sense strand
acagacauaguagagauuu

SEQ ID NO: 537257 - RNA, 19 nt, Homo sapiens
  misc_RNA (1)...(19): siRNA sense strand
acacgaagggauccauaug

SEQ ID NO: 537258 - RNA, 19 nt, Homo sapiens
  misc_RNA (1)...(19): siRNA sense strand
ucacaggcuucuggcaauc

SEQ ID NO: 537259 - RNA, 19 nt, Homo sapiens
  misc_RNA (1)...(19): siRNA sense strand
agacugacaagaucaucaa

SEQ ID NO: 537260 - RNA, 19 nt, Homo sapiens
  misc_RNA (1)...(19): siRNA sense strand
uuugaccguuacagagaua

SEQ ID NO: 537261 - RNA, 19 nt, Homo sapiens
  misc_RNA (1)...(19): siRNA sense strand
ccagaccacagcacagaug

SEQ ID NO: 537262 - RNA, 19 nt, Homo sapiens
  misc_RNA (1)...(19): siRNA sense strand
gcaaagaccuggagaagau

SEQ ID NO: 537263 - RNA, 19 nt, Homo sapiens
  misc_RNA (1)...(19): siRNA sense strand
gcaaagggaucaccaggaa

SEQ ID NO: 537264 - RNA, 19 nt, Homo sapiens
  misc_RNA (1)...(19): siRNA sense strand
gcacacggcugcaugagaa

SEQ ID NO: 537265 - RNA, 19 nt, Homo sapiens
  misc_RNA (1)...(19): siRNA sense strand
gcaacggccuuccaucuga

SEQ ID NO: 537266 - RNA, 19 nt, Homo sapiens
  misc_RNA (1)...(19): siRNA sense strand
uuaaauggauggcaauuga

SEQ ID NO: 537267 - RNA, 19 nt, Homo sapiens
  misc_RNA (1)...(19): siRNA sense strand
caggagggcucgccgauuu

SEQ ID NO: 537268 - RNA, 19 nt, Homo sapiens
  misc_RNA (1)...(19): siRNA sense strand
agaugaagauuucggauuu

SEQ ID NO: 537269 - RNA, 19 nt, Homo sapiens
  misc_RNA (1)...(19): siRNA sense strand
ugaagaugcugaaagagaa

SEQ ID NO: 537270 - RNA, 19 nt, Homo sapiens
  misc_RNA (1)...(19): siRNA sense strand
uggagaagaugaugguuaa

SEQ ID NO: 537271 - RNA, 19 nt, Homo sapiens
  misc_RNA (1)...(19): siRNA sense strand
gggaaagucuguguggaaa

SEQ ID NO: 537272 - RNA, 19 nt, Homo sapiens
  misc_RNA (1)...(19): siRNA sense strand
agagacggcuggaguguga

SEQ ID NO: 537273 - RNA, 19 nt, Homo sapiens
  misc_RNA (1)...(19): siRNA sense strand
ggagaaggcgaauuuggaa

SEQ ID NO: 537274 - RNA, 19 nt, Homo sapiens
  misc_RNA (1)...(19): siRNA sense strand
cccaagacaucaacauuug

SEQ ID NO: 537275 - RNA, 19 nt, Homo sapiens
  misc_RNA (1)...(19): siRNA sense strand
gcgagcagcgggagaagua

SEQ ID NO: 537276 - RNA, 19 nt, Homo sapiens
  misc_RNA (1)...(19): siRNA sense strand
caucugacucccugauuua

SEQ ID NO: 537277 - RNA, 19 nt, Homo sapiens
  misc_RNA (1)...(19): siRNA sense strand
gcaucaacguccaguacaa

SEQ ID NO: 537278 - RNA, 19 nt, Homo sapiens
  misc_RNA (1)...(19): siRNA sense strand
ggcggaagaugaagauuuc

SEQ ID NO: 537279 - RNA, 19 nt, Homo sapiens
  misc_RNA (1)...(19): siRNA sense strand
ccacccacaugucaucaaa

SEQ ID NO: 537280 - RNA, 19 nt, Homo sapiens
  misc_RNA (1)...(19): siRNA sense strand
ccaucugacucccugauuu

SEQ ID NO: 537281 - RNA, 19 nt, Homo sapiens
  misc_RNA (1)...(19): siRNA sense strand
ccacugcuaccacaaguuu

SEQ ID NO: 537282 - RNA, 19 nt, Homo sapiens
  misc_RNA (1)...(19): siRNA sense strand
gagaagaugaugguuaaga

SEQ ID NO: 537283 - RNA, 19 nt, Homo sapiens
  misc_RNA (1)...(19): siRNA sense strand
ccacaugucaucaaauugu

SEQ ID NO: 537284 - RNA, 19 nt, Homo sapiens
  misc_RNA (1)...(19): siRNA sense strand
ccacauggauugaaaacaa

SEQ ID NO: 537285 - RNA, 19 nt, Homo sapiens
  misc_RNA (1)...(19): siRNA sense strand
gggcggaagaugaagauuu

SEQ ID NO: 537286 - RNA, 19 nt, Homo sapiens
  misc_RNA (1)...(19): siRNA sense strand
uggcggugcuggucaauga

SEQ ID NO: 537287 - RNA, 19 nt, Homo sapiens
  misc_RNA (1)...(19): siRNA sense strand
gcgaggagguggugauggu

SEQ ID NO: 537288 - RNA, 19 nt, Homo sapiens
  misc_RNA (1)...(19): siRNA sense strand
ggagauguaccgccugaug

SEQ ID NO: 537289 - RNA, 19 nt, Homo sapiens
  misc_RNA (1)...(19): siRNA sense strand
gagaccugcugucagaguu

SEQ ID NO: 537290 - RNA, 19 nt, Homo sapiens
  misc_RNA (1)...(19): siRNA sense strand
ccgugaagaugcugaaaga

SEQ ID NO: 537291 - RNA, 19 nt, Homo sapiens
  misc_RNA (1)...(19): siRNA sense strand
caacggccuuccaucugaa

SEQ ID NO: 537292 - RNA, 19 nt, Homo sapiens
  misc_RNA (1)...(19): siRNA sense strand
gugaagaugcugaaagaga

SEQ ID NO: 537293 - RNA, 19 nt, Homo sapiens
  misc_RNA (1)...(19): siRNA sense strand
cugacucccugauuuauga

SEQ ID NO: 537294 - RNA, 19 nt, Homo sapiens
  misc_RNA (1)...(19): siRNA sense strand
gaccguacaugacuauagg

SEQ ID NO: 537295 - RNA, 19 nt, Homo sapiens
  misc_RNA (1)...(19): siRNA sense strand
gucccgagauguuuaugaa

SEQ ID NO: 537296 - RNA, 19 nt, Homo sapiens
  misc_RNA (1)...(19): siRNA sense strand
ucuaggagaaggcgaauuu

SEQ ID NO: 537297 - RNA, 19 nt, Homo sapiens
  misc_RNA (1)...(19): siRNA sense strand
cacaugucaucaaauugua

SEQ ID NO: 537298 - RNA, 19 nt, Homo sapiens
  misc_RNA (1)...(19): siRNA sense strand
gaugaagauuucggauuuc

SEQ ID NO: 537299 - RNA, 19 nt, Homo sapiens
  misc_RNA (1)...(19): siRNA sense strand
gugccgaacuucacuacau

SEQ ID NO: 537300 - RNA, 19 nt, Homo sapiens
  misc_RNA (1)...(19): siRNA sense strand
cccgagauguuuaugaaga

SEQ ID NO: 537301 - RNA, 19 nt, Homo sapiens
  misc_RNA (1)...(19): siRNA sense strand
ccacaaguuugcccacaag

SEQ ID NO: 537302 - RNA, 19 nt, Homo sapiens
  misc_RNA (1)...(19): siRNA sense strand
gggcgaccguacaugacua

SEQ ID NO: 537303 - RNA, 19 nt, Homo sapiens
  misc_RNA (1)...(19): siRNA sense strand
acccacaugucaucaaauu

SEQ ID NO: 537304 - RNA, 19 nt, Homo sapiens
  misc_RNA (1)...(19): siRNA sense strand
gacccaagacaucaacauu

SEQ ID NO: 537305 - RNA, 19 nt, Homo sapiens
  misc_RNA (1)...(19): siRNA sense strand
cagggucggauuccaguua

SEQ ID NO: 537306 - RNA, 19 nt, Homo sapiens
  misc_RNA (1)...(19): siRNA sense strand
gcguauacuucuccuucuu

SEQ ID NO: 537307 - RNA, 19 nt, Homo sapiens
  misc_RNA (1)...(19): siRNA sense strand
cugguggacuguaauaaug

SEQ ID NO: 537308 - RNA, 19 nt, Homo sapiens
  misc_RNA (1)...(19): siRNA sense strand
uaagaggagagacuacuug

SEQ ID NO: 537309 - RNA, 19 nt, Homo sapiens
  misc_RNA (1)...(19): siRNA sense strand
ggauccuguuugugaauga

SEQ ID NO: 537310 - RNA, 19 nt, Homo sapiens
  misc_RNA (1)...(19): siRNA sense strand
guauacuucuccuucuuca

SEQ ID NO: 537311 - RNA, 19 nt, Homo sapiens
  misc_RNA (1)...(19): siRNA sense strand
ggaagcaggagccggacaa

SEQ ID NO: 537312 - RNA, 19 nt, Homo sapiens
  misc_RNA (1)...(19): siRNA sense strand
ugggcgaccucaucucauu

SEQ ID NO: 537313 - RNA, 19 nt, Homo sapiens
  misc_RNA (1)...(19): siRNA sense strand
ugcgagaccugcugucaga

SEQ ID NO: 537314 - RNA, 19 nt, Homo sapiens
  misc_RNA (1)...(19): siRNA sense strand
agaagaugaugguuaagag

SEQ ID NO: 537315 - RNA, 19 nt, Homo sapiens
  misc_RNA (1)...(19): siRNA sense strand
acuauaggcugguucucaa

SEQ ID NO: 537316 - RNA, 19 nt, Homo sapiens
  misc_RNA (1)...(19): siRNA sense strand
gagaaggcgaauuuggaaa

SEQ ID NO: 537317 - RNA, 19 nt, Homo sapiens
  misc_RNA (1)...(19): siRNA sense strand
gcuguccucuucuccuuca

SEQ ID NO: 537318 - RNA, 19 nt, Homo sapiens
  misc_RNA (1)...(19): siRNA sense strand
ggagauggcaaagggauca

SEQ ID NO: 537319 - RNA, 19 nt, Homo sapiens
  misc_RNA (1)...(19): siRNA sense strand
gaaccaggucuccguggau

SEQ ID NO: 537320 - RNA, 19 nt, Homo sapiens
  misc_RNA (1)...(19): siRNA sense strand
ggauggagaggccagacaa

SEQ ID NO: 537321 - RNA, 19 nt, Homo sapiens
  misc_RNA (1)...(19): siRNA sense strand
gcugguggacuguaauaau

SEQ ID NO: 537322 - RNA, 19 nt, Homo sapiens
  misc_RNA (1)...(19): siRNA sense strand
gaggcaaggagauggcaaa

SEQ ID NO: 537323 - RNA, 19 nt, Homo sapiens
  misc_RNA (1)...(19): siRNA sense strand
gcauugggccucuacuucu

SEQ ID NO: 537324 - RNA, 19 nt, Homo sapiens
  misc_RNA (1)...(19): siRNA sense strand
cugaggaggugcccagcuu

SEQ ID NO: 537325 - RNA, 19 nt, Homo sapiens
  misc_RNA (1)...(19): siRNA sense strand
cuggagaagaugaugguua

SEQ ID NO: 537326 - RNA, 19 nt, Homo sapiens
  misc_RNA (1)...(19): siRNA sense strand
gaagcaggagccggacaaa

SEQ ID NO: 537327 - RNA, 19 nt, Homo sapiens
  misc_RNA (1)...(19): siRNA sense strand
uaaauggauggcaauugaa

SEQ ID NO: 537328 - RNA, 19 nt, Homo sapiens
  misc_RNA (1)...(19): siRNA sense strand
gggauccuguuugugaaug

SEQ ID NO: 537329 - RNA, 19 nt, Homo sapiens
  misc_RNA (1)...(19): siRNA sense strand
gacggccacugcgauguug

SEQ ID NO: 537330 - RNA, 19 nt, Homo sapiens
  misc_RNA (1)...(19): siRNA sense strand
ggacaaaaggccgguguuu

SEQ ID NO: 537331 - RNA, 19 nt, Homo sapiens
  misc_RNA (1)...(19): siRNA sense strand
gcucguucaucgggacuug

SEQ ID NO: 537332 - RNA, 19 nt, Homo sapiens
  misc_RNA (1)...(19): siRNA sense strand
gugaggcgguacacaagca

SEQ ID NO: 537333 - RNA, 19 nt, Homo sapiens
  misc_RNA (1)...(19): siRNA sense strand
cagcaaagaccuggagaag

SEQ ID NO: 537334 - RNA, 19 nt, Homo sapiens
  misc_RNA (1)...(19): siRNA sense strand
caaccacccacaugucauc

SEQ ID NO: 537335 - RNA, 19 nt, Homo sapiens
  misc_RNA (1)...(19): siRNA sense strand
ggauuaaagcuggcuaugg

SEQ ID NO: 537336 - RNA, 19 nt, Homo sapiens
  misc_RNA (1)...(19): siRNA sense strand
cgacggccacugcgauguu

SEQ ID NO: 537337 - RNA, 19 nt, Homo sapiens
  misc_RNA (1)...(19): siRNA sense strand
gaaagucuguguggaaaac

SEQ ID NO: 537338 - RNA, 19 nt, Homo sapiens
  misc_RNA (1)...(19): siRNA sense strand
ggcauugggccucuacuuc

SEQ ID NO: 537339 - RNA, 19 nt, Homo sapiens
  misc_RNA (1)...(19): siRNA sense strand
cgggaaagucuguguggaa

SEQ ID NO: 537340 - RNA, 19 nt, Homo sapiens
  misc_RNA (1)...(19): siRNA sense strand
gcccagaucgggaaagucu

SEQ ID NO: 537341 - RNA, 19 nt, Homo sapiens
  misc_RNA (1)...(19): siRNA sense strand
gacuauaggcugguucuca

SEQ ID NO: 537342 - RNA, 19 nt, Homo sapiens
  misc_RNA (1)...(19): siRNA sense strand
gcacgcccuugcuguacgu

SEQ ID NO: 537343 - RNA, 19 nt, Homo sapiens
  misc_RNA (1)...(19): siRNA sense strand
ggucggauuccaguuaaau

SEQ ID NO: 537344 - RNA, 19 nt, Homo sapiens
  misc_RNA (1)...(19): siRNA sense strand
gcuugucccgagauguuua

SEQ ID NO: 537345 - RNA, 19 nt, Homo sapiens
  misc_RNA (1)...(19): siRNA sense strand
caucguggaguacgccaaa

SEQ ID NO: 537346 - RNA, 19 nt, Homo sapiens
  misc_RNA (1)...(19): siRNA sense strand
gaccugcugucagaguuca

SEQ ID NO: 537347 - RNA, 19 nt, Homo sapiens
  misc_RNA (1)...(19): siRNA sense strand
acccaagacaucaacauuu

SEQ ID NO: 537348 - RNA, 19 nt, Homo sapiens
  misc_RNA (1)...(19): siRNA sense strand
caacugcagcgaggagaug

SEQ ID NO: 537349 - RNA, 19 nt, Homo sapiens
  misc_RNA (1)...(19): siRNA sense strand
cacgcaaagugauguaugg

SEQ ID NO: 537350 - RNA, 19 nt, Homo sapiens
  misc_RNA (1)...(19): siRNA sense strand
gaggagccagggucggauu

SEQ ID NO: 537351 - RNA, 19 nt, Homo sapiens
  misc_RNA (1)...(19): siRNA sense strand
gggcgaccucaucucauuu

SEQ ID NO: 537352 - RNA, 19 nt, Homo sapiens
  misc_RNA (1)...(19): siRNA sense strand
aaccggagccuggaccaua

SEQ ID NO: 537353 - RNA, 19 nt, Homo sapiens
  misc_RNA (1)...(19): siRNA sense strand
caagagacggcuggagugu

SEQ ID NO: 537354 - RNA, 19 nt, Homo sapiens
  misc_RNA (1)...(19): siRNA sense strand
guuaaauggauggcaauug

SEQ ID NO: 537355 - RNA, 19 nt, Homo sapiens
  misc_RNA (1)...(19): siRNA sense strand
aagaugaagauuucggauu

SEQ ID NO: 537356 - RNA, 19 nt, Homo sapiens
  misc_RNA (1)...(19): siRNA sense strand
ccgcuguccucuucuccuu

SEQ ID NO: 537357 - RNA, 19 nt, Homo sapiens
  misc_RNA (1)...(19): siRNA sense strand
gcgccgugguggaguucaa

SEQ ID NO: 537358 - RNA, 19 nt, Homo sapiens
  misc_RNA (1)...(19): siRNA sense strand
ggcauucaguggcaucaac

SEQ ID NO: 537359 - RNA, 19 nt, Homo sapiens
  misc_RNA (1)...(19): siRNA sense strand
agggucggauuccaguuaa

SEQ ID NO: 537360 - RNA, 19 nt, Homo sapiens
  misc_RNA (1)...(19): siRNA sense strand
cggcuugucccgagauguu

SEQ ID NO: 537361 - RNA, 19 nt, Homo sapiens
  misc_RNA (1)...(19): siRNA sense strand
ccacgcaaagugauguaug

SEQ ID NO: 537362 - RNA, 19 nt, Homo sapiens
  misc_RNA (1)...(19): siRNA sense strand
gcaaagaccuggagaagau

SEQ ID NO: 537363 - RNA, 19 nt, Homo sapiens
  misc_RNA (1)...(19): siRNA sense strand
gcaaagggaucaccaggaa

SEQ ID NO: 537364 - RNA, 19 nt, Homo sapiens
  misc_RNA (1)...(19): siRNA sense strand
gcacacggcugcaugagaa

SEQ ID NO: 537365 - RNA, 19 nt, Homo sapiens
  misc_RNA (1)...(19): siRNA sense strand
gcaacggccuuccaucuga

SEQ ID NO: 537366 - RNA, 19 nt, Homo sapiens
  misc_RNA (1)...(19): siRNA sense strand
uuaaauggauggcaauuga

SEQ ID NO: 537367 - RNA, 19 nt, Homo sapiens
  misc_RNA (1)...(19): siRNA sense strand
caggagggcucgccgauuu

SEQ ID NO: 537368 - RNA, 19 nt, Homo sapiens
  misc_RNA (1)...(19): siRNA sense strand
agaugaagauuucggauuu

SEQ ID NO: 537369 - RNA, 19 nt, Homo sapiens
  misc_RNA (1)...(19): siRNA sense strand
caacacuccuccagucuug

SEQ ID NO: 537370 - RNA, 19 nt, Homo sapiens
  misc_RNA (1)...(19): siRNA sense strand
ugaagaugcugaaagagaa

SEQ ID NO: 537371 - RNA, 19 nt, Homo sapiens
  misc_RNA (1)...(19): siRNA sense strand
uggagaagaugaugguuaa

SEQ ID NO: 537372 - RNA, 19 nt, Homo sapiens
  misc_RNA (1)...(19): siRNA sense strand
gggaaagucuguguggaaa

SEQ ID NO: 537373 - RNA, 19 nt, Homo sapiens
  misc_RNA (1)...(19): siRNA sense strand
ugccugcucuucagacuua

SEQ ID NO: 537374 - RNA, 19 nt, Homo sapiens
  misc_RNA (1)...(19): siRNA sense strand
agagacggcuggaguguga

SEQ ID NO: 537375 - RNA, 19 nt, Homo sapiens
  misc_RNA (1)...(19): siRNA sense strand
ggagaaggcgaauuuggaa

SEQ ID NO: 537376 - RNA, 19 nt, Homo sapiens
  misc_RNA (1)...(19): siRNA sense strand
cccaagacaucaacauuug

SEQ ID NO: 537377 - RNA, 19 nt, Homo sapiens
  misc_RNA (1)...(19): siRNA sense strand
gcgagcagcgggagaagua

SEQ ID NO: 537378 - RNA, 19 nt, Homo sapiens
  misc_RNA (1)...(19): siRNA sense strand
caucugacucccugauuua

SEQ ID NO: 537379 - RNA, 19 nt, Homo sapiens
  misc_RNA (1)...(19): siRNA sense strand
gcaucaacguccaguacaa

SEQ ID NO: 537380 - RNA, 19 nt, Homo sapiens
  misc_RNA (1)...(19): siRNA sense strand
ggcggaagaugaagauuuc

SEQ ID NO: 537381 - RNA, 19 nt, Homo sapiens
  misc_RNA (1)...(19): siRNA sense strand
ccacccacaugucaucaaa

SEQ ID NO: 537382 - RNA, 19 nt, Homo sapiens
  misc_RNA (1)...(19): siRNA sense strand
ccaucugacucccugauuu

SEQ ID NO: 537383 - RNA, 19 nt, Homo sapiens
  misc_RNA (1)...(19): siRNA sense strand
ccacugcuaccacaaguuu

SEQ ID NO: 537384 - RNA, 19 nt, Homo sapiens
  misc_RNA (1)...(19): siRNA sense strand
gcagaaaagagucggauua

SEQ ID NO: 537385 - RNA, 19 nt, Homo sapiens
  misc_RNA (1)...(19): siRNA sense strand
gagaagaugaugguuaaga

SEQ ID NO: 537386 - RNA, 19 nt, Homo sapiens
  misc_RNA (1)...(19): siRNA sense strand
ccacaugucaucaaauugu

SEQ ID NO: 537387 - RNA, 19 nt, Homo sapiens
  misc_RNA (1)...(19): siRNA sense strand
ccacauggauugaaaacaa

SEQ ID NO: 537388 - RNA, 19 nt, Homo sapiens
  misc_RNA (1)...(19): siRNA sense strand
gggcggaagaugaagauuu

SEQ ID NO: 537389 - RNA, 19 nt, Homo sapiens
  misc_RNA (1)...(19): siRNA sense strand
uggcggugcuggucaauga

SEQ ID NO: 537390 - RNA, 19 nt, Homo sapiens
  misc_RNA (1)...(19): siRNA sense strand
gcgaggagguggugauggu

SEQ ID NO: 537391 - RNA, 19 nt, Homo sapiens
  misc_RNA (1)...(19): siRNA sense strand
ggagauguaccgccugaug

SEQ ID NO: 537392 - RNA, 19 nt, Homo sapiens
  misc_RNA (1)...(19): siRNA sense strand
gagaccugcugucagaguu

SEQ ID NO: 537393 - RNA, 19 nt, Homo sapiens
  misc_RNA (1)...(19): siRNA sense strand
ccgugaagaugcugaaaga

SEQ ID NO: 537394 - RNA, 19 nt, Homo sapiens
  misc_RNA (1)...(19): siRNA sense strand
caacggccuuccaucugaa

SEQ ID NO: 537395 - RNA, 19 nt, Homo sapiens
  misc_RNA (1)...(19): siRNA sense strand
gugaagaugcugaaagaga

SEQ ID NO: 537396 - RNA, 19 nt, Homo sapiens
  misc_RNA (1)...(19): siRNA sense strand
cugacucccugauuuauga

SEQ ID NO: 537397 - RNA, 19 nt, Homo sapiens
  misc_RNA (1)...(19): siRNA sense strand
gaccguacaugacuauagg

SEQ ID NO: 537398 - RNA, 19 nt, Homo sapiens
  misc_RNA (1)...(19): siRNA sense strand
gucccgagauguuuaugaa

SEQ ID NO: 537399 - RNA, 19 nt, Homo sapiens
  misc_RNA (1)...(19): siRNA sense strand
ucuaggagaaggcgaauuu

SEQ ID NO: 537400 - RNA, 19 nt, Homo sapiens
  misc_RNA (1)...(19): siRNA sense strand
cacaugucaucaaauugua

SEQ ID NO: 537401 - RNA, 19 nt, Homo sapiens
  misc_RNA (1)...(19): siRNA sense strand
gaugaagauuucggauuuc

SEQ ID NO: 537402 - RNA, 19 nt, Homo sapiens
  misc_RNA (1)...(19): siRNA sense strand
gugccgaacuucacuacau

SEQ ID NO: 537403 - RNA, 19 nt, Homo sapiens
  misc_RNA (1)...(19): siRNA sense strand
cccgagauguuuaugaaga

SEQ ID NO: 537404 - RNA, 19 nt, Homo sapiens
  misc_RNA (1)...(19): siRNA sense strand
ccacaaguuugcccacaag

SEQ ID NO: 537405 - RNA, 19 nt, Homo sapiens
  misc_RNA (1)...(19): siRNA sense strand
gggcgaccguacaugacua

SEQ ID NO: 537406 - RNA, 19 nt, Homo sapiens
  misc_RNA (1)...(19): siRNA sense strand
gcacuguaacuucgcagaa

SEQ ID NO: 537407 - RNA, 19 nt, Homo sapiens
  misc_RNA (1)...(19): siRNA sense strand
acccacaugucaucaaauu

SEQ ID NO: 537408 - RNA, 19 nt, Homo sapiens
  misc_RNA (1)...(19): siRNA sense strand
gacccaagacaucaacauu

SEQ ID NO: 537409 - RNA, 19 nt, Homo sapiens
  misc_RNA (1)...(19): siRNA sense strand
cagggucggauuccaguua

SEQ ID NO: 537410 - RNA, 19 nt, Homo sapiens
  misc_RNA (1)...(19): siRNA sense strand
gcguauacuucuccuucuu

SEQ ID NO: 537411 - RNA, 19 nt, Homo sapiens
  misc_RNA (1)...(19): siRNA sense strand
cugguggacuguaauaaug

SEQ ID NO: 537412 - RNA, 19 nt, Homo sapiens
  misc_RNA (1)...(19): siRNA sense strand
uaagaggagagacuacuug

SEQ ID NO: 537413 - RNA, 19 nt, Homo sapiens
  misc_RNA (1)...(19): siRNA sense strand
ggauccuguuugugaauga

SEQ ID NO: 537414 - RNA, 19 nt, Homo sapiens
  misc_RNA (1)...(19): siRNA sense strand
guauacuucuccuucuuca

SEQ ID NO: 537415 - RNA, 19 nt, Homo sapiens
  misc_RNA (1)...(19): siRNA sense strand
ggaagucucagcagcucuu

SEQ ID NO: 537416 - RNA, 19 nt, Homo sapiens
  misc_RNA (1)...(19): siRNA sense strand
ggaagcaggagccggacaa

SEQ ID NO: 537417 - RNA, 19 nt, Homo sapiens
  misc_RNA (1)...(19): siRNA sense strand
ugggcgaccucaucucauu

SEQ ID NO: 537418 - RNA, 19 nt, Homo sapiens
  misc_RNA (1)...(19): siRNA sense strand
ugcgagaccugcugucaga

SEQ ID NO: 537419 - RNA, 19 nt, Homo sapiens
  misc_RNA (1)...(19): siRNA sense strand
agaagaugaugguuaagag

SEQ ID NO: 537420 - RNA, 19 nt, Homo sapiens
  misc_RNA (1)...(19): siRNA sense strand
gaaaagagucggauuacca

SEQ ID NO: 537421 - RNA, 19 nt, Homo sapiens
  misc_RNA (1)...(19): siRNA sense strand
acuauaggcugguucucaa

SEQ ID NO: 537422 - RNA, 19 nt, Homo sapiens
  misc_RNA (1)...(19): siRNA sense strand
cacuguaacuucgcagaaa

SEQ ID NO: 537423 - RNA, 19 nt, Homo sapiens
  misc_RNA (1)...(19): siRNA sense strand
gagaaggcgaauuuggaaa

SEQ ID NO: 537424 - RNA, 19 nt, Homo sapiens
  misc_RNA (1)...(19): siRNA sense strand
gcuguccucuucuccuuca

SEQ ID NO: 537425 - RNA, 19 nt, Homo sapiens
  misc_RNA (1)...(19): siRNA sense strand
ggagauggcaaagggauca

SEQ ID NO: 537426 - RNA, 19 nt, Homo sapiens
  misc_RNA (1)...(19): siRNA sense strand
gaaccaggucuccguggau

SEQ ID NO: 537427 - RNA, 19 nt, Homo sapiens
  misc_RNA (1)...(19): siRNA sense strand
ggauggagaggccagacaa

SEQ ID NO: 537428 - RNA, 19 nt, Homo sapiens
  misc_RNA (1)...(19): siRNA sense strand
gcugguggacuguaauaau

SEQ ID NO: 537429 - RNA, 19 nt, Homo sapiens
  misc_RNA (1)...(19): siRNA sense strand
gcauugggccucuacuucu

SEQ ID NO: 537430 - RNA, 19 nt, Homo sapiens
  misc_RNA (1)...(19): siRNA sense strand
gaggcaaggagauggcaaa

SEQ ID NO: 537431 - RNA, 19 nt, Homo sapiens
  misc_RNA (1)...(19): siRNA sense strand
cugaggaggugcccagcuu

SEQ ID NO: 537432 - RNA, 19 nt, Homo sapiens
  misc_RNA (1)...(19): siRNA sense strand
aaacacugccugcucuuca

SEQ ID NO: 537433 - RNA, 19 nt, Homo sapiens
  misc_RNA (1)...(19): siRNA sense strand
cuggagaagaugaugguua

SEQ ID NO: 537434 - RNA, 19 nt, Homo sapiens
  misc_RNA (1)...(19): siRNA sense strand
gaagcaggagccggacaaa

SEQ ID NO: 537435 - RNA, 19 nt, Homo sapiens
  misc_RNA (1)...(19): siRNA sense strand
uaaauggauggcaauugaa

SEQ ID NO: 537436 - RNA, 19 nt, Homo sapiens
  misc_RNA (1)...(19): siRNA sense strand
gggauccuguuugugaaug

SEQ ID NO: 537437 - RNA, 19 nt, Homo sapiens
  misc_RNA (1)...(19): siRNA sense strand
gacggccacugcgauguug

SEQ ID NO: 537438 - RNA, 19 nt, Homo sapiens
  misc_RNA (1)...(19): siRNA sense strand
ggacaaaaggccgguguuu

SEQ ID NO: 537439 - RNA, 19 nt, Homo sapiens
  misc_RNA (1)...(19): siRNA sense strand
gcucguucaucgggacuug

SEQ ID NO: 537440 - RNA, 19 nt, Homo sapiens
  misc_RNA (1)...(19): siRNA sense strand
gugaggcgguacacaagca

SEQ ID NO: 537441 - RNA, 19 nt, Homo sapiens
  misc_RNA (1)...(19): siRNA sense strand
ggcauugggccucuacuuc

SEQ ID NO: 537442 - RNA, 19 nt, Homo sapiens
  misc_RNA (1)...(19): siRNA sense strand
cagcaaagaccuggagaag

SEQ ID NO: 537443 - RNA, 19 nt, Homo sapiens
  misc_RNA (1)...(19): siRNA sense strand
caaccacccacaugucauc

SEQ ID NO: 537444 - RNA, 19 nt, Homo sapiens
  misc_RNA (1)...(19): siRNA sense strand
ggauuaaagcuggcuaugg

SEQ ID NO: 537445 - RNA, 19 nt, Homo sapiens
  misc_RNA (1)...(19): siRNA sense strand
cgacggccacugcgauguu

SEQ ID NO: 537446 - RNA, 19 nt, Homo sapiens
  misc_RNA (1)...(19): siRNA sense strand
gaaagucuguguggaaaac

SEQ ID NO: 537447 - RNA, 19 nt, Homo sapiens
  misc_RNA (1)...(19): siRNA sense strand
cgggaaagucuguguggaa

SEQ ID NO: 537448 - RNA, 19 nt, Homo sapiens
  misc_RNA (1)...(19): siRNA sense strand
gcccagaucgggaaagucu

SEQ ID NO: 537449 - RNA, 19 nt, Homo sapiens
  misc_RNA (1)...(19): siRNA sense strand
gacuauaggcugguucuca

SEQ ID NO: 537450 - RNA, 19 nt, Homo sapiens
  misc_RNA (1)...(19): siRNA sense strand
ggucggauuccaguuaaau

SEQ ID NO: 537451 - RNA, 19 nt, Homo sapiens
  misc_RNA (1)...(19): siRNA sense strand
gcuugucccgagauguuua

SEQ ID NO: 537452 - RNA, 19 nt, Homo sapiens
  misc_RNA (1)...(19): siRNA sense strand
caucguggaguacgccaaa

SEQ ID NO: 537453 - RNA, 19 nt, Homo sapiens
  misc_RNA (1)...(19): siRNA sense strand
gcacgcccuugcuguacgu

SEQ ID NO: 537454 - RNA, 19 nt, Homo sapiens
  misc_RNA (1)...(19): siRNA sense strand
gaccugcugucagaguuca

SEQ ID NO: 537455 - RNA, 19 nt, Homo sapiens
  misc_RNA (1)...(19): siRNA sense strand
acccaagacaucaacauuu

SEQ ID NO: 537456 - RNA, 19 nt, Homo sapiens
  misc_RNA (1)...(19): siRNA sense strand
aaccggagccuggaccaua

SEQ ID NO: 537457 - RNA, 19 nt, Homo sapiens
  misc_RNA (1)...(19): siRNA sense strand
caacugcagcgaggagaug

SEQ ID NO: 537458 - RNA, 19 nt, Homo sapiens
  misc_RNA (1)...(19): siRNA sense strand
cacgcaaagugauguaugg

SEQ ID NO: 537459 - RNA, 19 nt, Homo sapiens
  misc_RNA (1)...(19): siRNA sense strand
gaggagccagggucggauu

SEQ ID NO: 537460 - RNA, 19 nt, Homo sapiens
  misc_RNA (1)...(19): siRNA sense strand
gggcgaccucaucucauuu

SEQ ID NO: 537461 - RNA, 19 nt, Homo sapiens
  misc_RNA (1)...(19): siRNA sense strand
gcgccgugguggaguucaa

SEQ ID NO: 537462 - RNA, 19 nt, Homo sapiens
  misc_RNA (1)...(19): siRNA sense strand
gcaaagaccuggagaagau

SEQ ID NO: 537463 - RNA, 19 nt, Homo sapiens
  misc_RNA (1)...(19): siRNA sense strand
gcaaagggaucaccaggaa

SEQ ID NO: 537464 - RNA, 19 nt, Homo sapiens
  misc_RNA (1)...(19): siRNA sense strand
gcacacggcugcaugagaa

SEQ ID NO: 537465 - RNA, 19 nt, Homo sapiens
  misc_RNA (1)...(19): siRNA sense strand
gcaacggccuuccaucuga

SEQ ID NO: 537466 - RNA, 19 nt, Homo sapiens
  misc_RNA (1)...(19): siRNA sense strand
uuaaauggauggcaauuga

SEQ ID NO: 537467 - RNA, 19 nt, Homo sapiens
  misc_RNA (1)...(19): siRNA sense strand
caggagggcucgccgauuu

SEQ ID NO: 537468 - RNA, 19 nt, Homo sapiens
  misc_RNA (1)...(19): siRNA sense strand
agaugaagauuucggauuu

SEQ ID NO: 537469 - RNA, 19 nt, Homo sapiens
  misc_RNA (1)...(19): siRNA sense strand
ugaagaugcugaaagagaa

SEQ ID NO: 537470 - RNA, 19 nt, Homo sapiens
  misc_RNA (1)...(19): siRNA sense strand
uggagaagaugaugguuaa

SEQ ID NO: 537471 - RNA, 19 nt, Homo sapiens
  misc_RNA (1)...(19): siRNA sense strand
gggaaagucuguguggaaa

SEQ ID NO: 537472 - RNA, 19 nt, Homo sapiens
  misc_RNA (1)...(19): siRNA sense strand
agagacggcuggaguguga

SEQ ID NO: 537473 - RNA, 19 nt, Homo sapiens
  misc_RNA (1)...(19): siRNA sense strand
ggagaaggcgaauuuggaa

SEQ ID NO: 537474 - RNA, 19 nt, Homo sapiens
  misc_RNA (1)...(19): siRNA sense strand
cccaagacaucaacauuug

SEQ ID NO: 537475 - RNA, 19 nt, Homo sapiens
  misc_RNA (1)...(19): siRNA sense strand
gcgagcagcgggagaagua

SEQ ID NO: 537476 - RNA, 19 nt, Homo sapiens
  misc_RNA (1)...(19): siRNA sense strand
caucugacucccugauuua

SEQ ID NO: 537477 - RNA, 19 nt, Homo sapiens
  misc_RNA (1)...(19): siRNA sense strand
gcaucaacguccaguacaa

SEQ ID NO: 537478 - RNA, 19 nt, Homo sapiens
  misc_RNA (1)...(19): siRNA sense strand
ggcggaagaugaagauuuc

SEQ ID NO: 537479 - RNA, 19 nt, Homo sapiens
  misc_RNA (1)...(19): siRNA sense strand
ccacccacaugucaucaaa

SEQ ID NO: 537480 - RNA, 19 nt, Homo sapiens
  misc_RNA (1)...(19): siRNA sense strand
ccaucugacucccugauuu

SEQ ID NO: 537481 - RNA, 19 nt, Homo sapiens
  misc_RNA (1)...(19): siRNA sense strand
ccacugcuaccacaaguuu

SEQ ID NO: 537482 - RNA, 19 nt, Homo sapiens
  misc_RNA (1)...(19): siRNA sense strand
gagaagaugaugguuaaga

SEQ ID NO: 537483 - RNA, 19 nt, Homo sapiens
  misc_RNA (1)...(19): siRNA sense strand
ccacaugucaucaaauugu

SEQ ID NO: 537484 - RNA, 19 nt, Homo sapiens
  misc_RNA (1)...(19): siRNA sense strand
ccacauggauugaaaacaa

SEQ ID NO: 537485 - RNA, 19 nt, Homo sapiens
  misc_RNA (1)...(19): siRNA sense strand
gggcggaagaugaagauuu

SEQ ID NO: 537486 - RNA, 19 nt, Homo sapiens
  misc_RNA (1)...(19): siRNA sense strand
uggcggugcuggucaauga

SEQ ID NO: 537487 - RNA, 19 nt, Homo sapiens
  misc_RNA (1)...(19): siRNA sense strand
gcgaggagguggugauggu

SEQ ID NO: 537488 - RNA, 19 nt, Homo sapiens
  misc_RNA (1)...(19): siRNA sense strand
ggagauguaccgccugaug

SEQ ID NO: 537489 - RNA, 19 nt, Homo sapiens
  misc_RNA (1)...(19): siRNA sense strand
gagaccugcugucagaguu

SEQ ID NO: 537490 - RNA, 19 nt, Homo sapiens
  misc_RNA (1)...(19): siRNA sense strand
ccgugaagaugcugaaaga

SEQ ID NO: 537491 - RNA, 19 nt, Homo sapiens
  misc_RNA (1)...(19): siRNA sense strand
caacggccuuccaucugaa

SEQ ID NO: 537492 - RNA, 19 nt, Homo sapiens
  misc_RNA (1)...(19): siRNA sense strand
gugaagaugcugaaagaga

SEQ ID NO: 537493 - RNA, 19 nt, Homo sapiens
  misc_RNA (1)...(19): siRNA sense strand
cugacucccugauuuauga

SEQ ID NO: 537494 - RNA, 19 nt, Homo sapiens
  misc_RNA (1)...(19): siRNA sense strand
gaccguacaugacuauagg

SEQ ID NO: 537495 - RNA, 19 nt, Homo sapiens
  misc_RNA (1)...(19): siRNA sense strand
gucccgagauguuuaugaa

SEQ ID NO: 537496 - RNA, 19 nt, Homo sapiens
  misc_RNA (1)...(19): siRNA sense strand
ucuaggagaaggcgaauuu

SEQ ID NO: 537497 - RNA, 19 nt, Homo sapiens
  misc_RNA (1)...(19): siRNA sense strand
cacaugucaucaaauugua

SEQ ID NO: 537498 - RNA, 19 nt, Homo sapiens
  misc_RNA (1)...(19): siRNA sense strand
gaugaagauuucggauuuc

SEQ ID NO: 537499 - RNA, 19 nt, Homo sapiens
  misc_RNA (1)...(19): siRNA sense strand
gugccgaacuucacuacau

SEQ ID NO: 537500 - RNA, 19 nt, Homo sapiens
  misc_RNA (1)...(19): siRNA sense strand
cccgagauguuuaugaaga

SEQ ID NO: 537501 - RNA, 19 nt, Homo sapiens
  misc_RNA (1)...(19): siRNA sense strand
ccacaaguuugcccacaag

SEQ ID NO: 537502 - RNA, 19 nt, Homo sapiens
  misc_RNA (1)...(19): siRNA sense strand
gggcgaccguacaugacua

SEQ ID NO: 537503 - RNA, 19 nt, Homo sapiens
  misc_RNA (1)...(19): siRNA sense strand
acccacaugucaucaaauu

SEQ ID NO: 537504 - RNA, 19 nt, Homo sapiens
  misc_RNA (1)...(19): siRNA sense strand
gacccaagacaucaacauu

SEQ ID NO: 537505 - RNA, 19 nt, Homo sapiens
  misc_RNA (1)...(19): siRNA sense strand
cagggucggauuccaguua

SEQ ID NO: 537506 - RNA, 19 nt, Homo sapiens
  misc_RNA (1)...(19): siRNA sense strand
gcguauacuucuccuucuu

SEQ ID NO: 537507 - RNA, 19 nt, Homo sapiens
  misc_RNA (1)...(19): siRNA sense strand
cugguggacuguaauaaug

SEQ ID NO: 537508 - RNA, 19 nt, Homo sapiens
  misc_RNA (1)...(19): siRNA sense strand
uaagaggagagacuacuug

SEQ ID NO: 537509 - RNA, 19 nt, Homo sapiens
  misc_RNA (1)...(19): siRNA sense strand
ggauccuguuugugaauga

SEQ ID NO: 537510 - RNA, 19 nt, Homo sapiens
  misc_RNA (1)...(19): siRNA sense strand
guauacuucuccuucuuca

SEQ ID NO: 537511 - RNA, 19 nt, Homo sapiens
  misc_RNA (1)...(19): siRNA sense strand
ggaagcaggagccggacaa

SEQ ID NO: 537512 - RNA, 19 nt, Homo sapiens
  misc_RNA (1)...(19): siRNA sense strand
ugggcgaccucaucucauu

SEQ ID NO: 537513 - RNA, 19 nt, Homo sapiens
  misc_RNA (1)...(19): siRNA sense strand
ugcgagaccugcugucaga

SEQ ID NO: 537514 - RNA, 19 nt, Homo sapiens
  misc_RNA (1)...(19): siRNA sense strand
agaagaugaugguuaagag

SEQ ID NO: 537515 - RNA, 19 nt, Homo sapiens
  misc_RNA (1)...(19): siRNA sense strand
acuauaggcugguucucaa

SEQ ID NO: 537516 - RNA, 19 nt, Homo sapiens
  misc_RNA (1)...(19): siRNA sense strand
gagaaggcgaauuuggaaa

SEQ ID NO: 537517 - RNA, 19 nt, Homo sapiens
  misc_RNA (1)...(19): siRNA sense strand
gcuguccucuucuccuuca

SEQ ID NO: 537518 - RNA, 19 nt, Homo sapiens
  misc_RNA (1)...(19): siRNA sense strand
ggagauggcaaagggauca

SEQ ID NO: 537519 - RNA, 19 nt, Homo sapiens
  misc_RNA (1)...(19): siRNA sense strand
gaaccaggucuccguggau

SEQ ID NO: 537520 - RNA, 19 nt, Homo sapiens
  misc_RNA (1)...(19): siRNA sense strand
ggauggagaggccagacaa

SEQ ID NO: 537521 - RNA, 19 nt, Homo sapiens
  misc_RNA (1)...(19): siRNA sense strand
gcugguggacuguaauaau

SEQ ID NO: 537522 - RNA, 19 nt, Homo sapiens
  misc_RNA (1)...(19): siRNA sense strand
gaggcaaggagauggcaaa

SEQ ID NO: 537523 - RNA, 19 nt, Homo sapiens
  misc_RNA (1)...(19): siRNA sense strand
gcauugggccucuacuucu

SEQ ID NO: 537524 - RNA, 19 nt, Homo sapiens
  misc_RNA (1)...(19): siRNA sense strand
cugaggaggugcccagcuu

SEQ ID NO: 537525 - RNA, 19 nt, Homo sapiens
  misc_RNA (1)...(19): siRNA sense strand
cuggagaagaugaugguua

SEQ ID NO: 537526 - RNA, 19 nt, Homo sapiens
  misc_RNA (1)...(19): siRNA sense strand
gaagcaggagccggacaaa

SEQ ID NO: 537527 - RNA, 19 nt, Homo sapiens
  misc_RNA (1)...(19): siRNA sense strand
uaaauggauggcaauugaa

SEQ ID NO: 537528 - RNA, 19 nt, Homo sapiens
  misc_RNA (1)...(19): siRNA sense strand
gggauccuguuugugaaug

SEQ ID NO: 537529 - RNA, 19 nt, Homo sapiens
  misc_RNA (1)...(19): siRNA sense strand
gacggccacugcgauguug

SEQ ID NO: 537530 - RNA, 19 nt, Homo sapiens
  misc_RNA (1)...(19): siRNA sense strand
ggacaaaaggccgguguuu

SEQ ID NO: 537531 - RNA, 19 nt, Homo sapiens
  misc_RNA (1)...(19): siRNA sense strand
gcucguucaucgggacuug

SEQ ID NO: 537532 - RNA, 19 nt, Homo sapiens
  misc_RNA (1)...(19): siRNA sense strand
gugaggcgguacacaagca

SEQ ID NO: 537533 - RNA, 19 nt, Homo sapiens
  misc_RNA (1)...(19): siRNA sense strand
cagcaaagaccuggagaag

SEQ ID NO: 537534 - RNA, 19 nt, Homo sapiens
  misc_RNA (1)...(19): siRNA sense strand
caaccacccacaugucauc

SEQ ID NO: 537535 - RNA, 19 nt, Homo sapiens
  misc_RNA (1)...(19): siRNA sense strand
ggauuaaagcuggcuaugg

SEQ ID NO: 537536 - RNA, 19 nt, Homo sapiens
  misc_RNA (1)...(19): siRNA sense strand
cgacggccacugcgauguu

SEQ ID NO: 537537 - RNA, 19 nt, Homo sapiens
  misc_RNA (1)...(19): siRNA sense strand
gaaagucuguguggaaaac

SEQ ID NO: 537538 - RNA, 19 nt, Homo sapiens
  misc_RNA (1)...(19): siRNA sense strand
ggcauugggccucuacuuc

SEQ ID NO: 537539 - RNA, 19 nt, Homo sapiens
  misc_RNA (1)...(19): siRNA sense strand
cgggaaagucuguguggaa

SEQ ID NO: 537540 - RNA, 19 nt, Homo sapiens
  misc_RNA (1)...(19): siRNA sense strand
gcccagaucgggaaagucu

SEQ ID NO: 537541 - RNA, 19 nt, Homo sapiens
  misc_RNA (1)...(19): siRNA sense strand
gacuauaggcugguucuca

SEQ ID NO: 537542 - RNA, 19 nt, Homo sapiens
  misc_RNA (1)...(19): siRNA sense strand
gcacgcccuugcuguacgu

SEQ ID NO: 537543 - RNA, 19 nt, Homo sapiens
  misc_RNA (1)...(19): siRNA sense strand
ggucggauuccaguuaaau

SEQ ID NO: 537544 - RNA, 19 nt, Homo sapiens
  misc_RNA (1)...(19): siRNA sense strand
gcuugucccgagauguuua

SEQ ID NO: 537545 - RNA, 19 nt, Homo sapiens
  misc_RNA (1)...(19): siRNA sense strand
caucguggaguacgccaaa

SEQ ID NO: 537546 - RNA, 19 nt, Homo sapiens
  misc_RNA (1)...(19): siRNA sense strand
gaccugcugucagaguuca

SEQ ID NO: 537547 - RNA, 19 nt, Homo sapiens
  misc_RNA (1)...(19): siRNA sense strand
acccaagacaucaacauuu

SEQ ID NO: 537548 - RNA, 19 nt, Homo sapiens
  misc_RNA (1)...(19): siRNA sense strand
caacugcagcgaggagaug

SEQ ID NO: 537549 - RNA, 19 nt, Homo sapiens
  misc_RNA (1)...(19): siRNA sense strand
cacgcaaagugauguaugg

SEQ ID NO: 537550 - RNA, 19 nt, Homo sapiens
  misc_RNA (1)...(19): siRNA sense strand
gaggagccagggucggauu

SEQ ID NO: 537551 - RNA, 19 nt, Homo sapiens
  misc_RNA (1)...(19): siRNA sense strand
gggcgaccucaucucauuu

SEQ ID NO: 537552 - RNA, 19 nt, Homo sapiens
  misc_RNA (1)...(19): siRNA sense strand
aaccggagccuggaccaua

SEQ ID NO: 537553 - RNA, 19 nt, Homo sapiens
  misc_RNA (1)...(19): siRNA sense strand
caagagacggcuggagugu

SEQ ID NO: 537554 - RNA, 19 nt, Homo sapiens
  misc_RNA (1)...(19): siRNA sense strand
guuaaauggauggcaauug

SEQ ID NO: 537555 - RNA, 19 nt, Homo sapiens
  misc_RNA (1)...(19): siRNA sense strand
aagaugaagauuucggauu

SEQ ID NO: 537556 - RNA, 19 nt, Homo sapiens
  misc_RNA (1)...(19): siRNA sense strand
ccgcuguccucuucuccuu

SEQ ID NO: 537557 - RNA, 19 nt, Homo sapiens
  misc_RNA (1)...(19): siRNA sense strand
gcgccgugguggaguucaa

SEQ ID NO: 537558 - RNA, 19 nt, Homo sapiens
  misc_RNA (1)...(19): siRNA sense strand
ggcauucaguggcaucaac

SEQ ID NO: 537559 - RNA, 19 nt, Homo sapiens
  misc_RNA (1)...(19): siRNA sense strand
agggucggauuccaguuaa

SEQ ID NO: 537560 - RNA, 19 nt, Homo sapiens
  misc_RNA (1)...(19): siRNA sense strand
cggcuugucccgagauguu

SEQ ID NO: 537561 - RNA, 19 nt, Homo sapiens
  misc_RNA (1)...(19): siRNA sense strand
ccacgcaaagugauguaug

SEQ ID NO: 537562 - RNA, 19 nt, Homo sapiens
  misc_RNA (1)...(19): siRNA sense strand
gcaaagaccuggagaagau

SEQ ID NO: 537563 - RNA, 19 nt, Homo sapiens
  misc_RNA (1)...(19): siRNA sense strand
gcaaagggaucaccaggaa

SEQ ID NO: 537564 - RNA, 19 nt, Homo sapiens
  misc_RNA (1)...(19): siRNA sense strand
gcacacggcugcaugagaa

SEQ ID NO: 537565 - RNA, 19 nt, Homo sapiens
  misc_RNA (1)...(19): siRNA sense strand
gcaacggccuuccaucuga

SEQ ID NO: 537566 - RNA, 19 nt, Homo sapiens
  misc_RNA (1)...(19): siRNA sense strand
uuaaauggauggcaauuga

SEQ ID NO: 537567 - RNA, 19 nt, Homo sapiens
  misc_RNA (1)...(19): siRNA sense strand
caggagggcucgccgauuu

SEQ ID NO: 537568 - RNA, 19 nt, Homo sapiens
  misc_RNA (1)...(19): siRNA sense strand
agaugaagauuucggauuu

SEQ ID NO: 537569 - RNA, 19 nt, Homo sapiens
  misc_RNA (1)...(19): siRNA sense strand
ugaagaugcugaaagagaa

SEQ ID NO: 537570 - RNA, 19 nt, Homo sapiens
  misc_RNA (1)...(19): siRNA sense strand
uggagaagaugaugguuaa

SEQ ID NO: 537571 - RNA, 19 nt, Homo sapiens
  misc_RNA (1)...(19): siRNA sense strand
gggaaagucuguguggaaa

SEQ ID NO: 537572 - RNA, 19 nt, Homo sapiens
  misc_RNA (1)...(19): siRNA sense strand
agagacggcuggaguguga

SEQ ID NO: 537573 - RNA, 19 nt, Homo sapiens
  misc_RNA (1)...(19): siRNA sense strand
ggagaaggcgaauuuggaa

SEQ ID NO: 537574 - RNA, 19 nt, Homo sapiens
  misc_RNA (1)...(19): siRNA sense strand
cccaagacaucaacauuug

SEQ ID NO: 537575 - RNA, 19 nt, Homo sapiens
  misc_RNA (1)...(19): siRNA sense strand
gcgagcagcgggagaagua

SEQ ID NO: 537576 - RNA, 19 nt, Homo sapiens
  misc_RNA (1)...(19): siRNA sense strand
caucugacucccugauuua

SEQ ID NO: 537577 - RNA, 19 nt, Homo sapiens
  misc_RNA (1)...(19): siRNA sense strand
gcaucaacguccaguacaa

SEQ ID NO: 537578 - RNA, 19 nt, Homo sapiens
  misc_RNA (1)...(19): siRNA sense strand
ggcggaagaugaagauuuc

SEQ ID NO: 537579 - RNA, 19 nt, Homo sapiens
  misc_RNA (1)...(19): siRNA sense strand
ccacccacaugucaucaaa

SEQ ID NO: 537580 - RNA, 19 nt, Homo sapiens
  misc_RNA (1)...(19): siRNA sense strand
ccaucugacucccugauuu

SEQ ID NO: 537581 - RNA, 19 nt, Homo sapiens
  misc_RNA (1)...(19): siRNA sense strand
ccacugcuaccacaaguuu

SEQ ID NO: 537582 - RNA, 19 nt, Homo sapiens
  misc_RNA (1)...(19): siRNA sense strand
gagaagaugaugguuaaga

SEQ ID NO: 537583 - RNA, 19 nt, Homo sapiens
  misc_RNA (1)...(19): siRNA sense strand
ccacaugucaucaaauugu

SEQ ID NO: 537584 - RNA, 19 nt, Homo sapiens
  misc_RNA (1)...(19): siRNA sense strand
ccacauggauugaaaacaa

SEQ ID NO: 537585 - RNA, 19 nt, Homo sapiens
  misc_RNA (1)...(19): siRNA sense strand
gggcggaagaugaagauuu

SEQ ID NO: 537586 - RNA, 19 nt, Homo sapiens
  misc_RNA (1)...(19): siRNA sense strand
uggcggugcuggucaauga

SEQ ID NO: 537587 - RNA, 19 nt, Homo sapiens
  misc_RNA (1)...(19): siRNA sense strand
gcgaggagguggugauggu

SEQ ID NO: 537588 - RNA, 19 nt, Homo sapiens
  misc_RNA (1)...(19): siRNA sense strand
ggagauguaccgccugaug

SEQ ID NO: 537589 - RNA, 19 nt, Homo sapiens
  misc_RNA (1)...(19): siRNA sense strand
gagaccugcugucagaguu

SEQ ID NO: 537590 - RNA, 19 nt, Homo sapiens
  misc_RNA (1)...(19): siRNA sense strand
ccgugaagaugcugaaaga

SEQ ID NO: 537591 - RNA, 19 nt, Homo sapiens
  misc_RNA (1)...(19): siRNA sense strand
caacggccuuccaucugaa

SEQ ID NO: 537592 - RNA, 19 nt, Homo sapiens
  misc_RNA (1)...(19): siRNA sense strand
gugaagaugcugaaagaga

SEQ ID NO: 537593 - RNA, 19 nt, Homo sapiens
  misc_RNA (1)...(19): siRNA sense strand
cugacucccugauuuauga

SEQ ID NO: 537594 - RNA, 19 nt, Homo sapiens
  misc_RNA (1)...(19): siRNA sense strand
gaccguacaugacuauagg

SEQ ID NO: 537595 - RNA, 19 nt, Homo sapiens
  misc_RNA (1)...(19): siRNA sense strand
gucccgagauguuuaugaa

SEQ ID NO: 537596 - RNA, 19 nt, Homo sapiens
  misc_RNA (1)...(19): siRNA sense strand
ucuaggagaaggcgaauuu

SEQ ID NO: 537597 - RNA, 19 nt, Homo sapiens
  misc_RNA (1)...(19): siRNA sense strand
cacaugucaucaaauugua

SEQ ID NO: 537598 - RNA, 19 nt, Homo sapiens
  misc_RNA (1)...(19): siRNA sense strand
gaugaagauuucggauuuc

SEQ ID NO: 537599 - RNA, 19 nt, Homo sapiens
  misc_RNA (1)...(19): siRNA sense strand
gugccgaacuucacuacau

SEQ ID NO: 537600 - RNA, 19 nt, Homo sapiens
  misc_RNA (1)...(19): siRNA sense strand
cccgagauguuuaugaaga

SEQ ID NO: 537601 - RNA, 19 nt, Homo sapiens
  misc_RNA (1)...(19): siRNA sense strand
ccacaaguuugcccacaag

SEQ ID NO: 537602 - RNA, 19 nt, Homo sapiens
  misc_RNA (1)...(19): siRNA sense strand
gggcgaccguacaugacua

SEQ ID NO: 537603 - RNA, 19 nt, Homo sapiens
  misc_RNA (1)...(19): siRNA sense strand
acccacaugucaucaaauu

SEQ ID NO: 537604 - RNA, 19 nt, Homo sapiens
  misc_RNA (1)...(19): siRNA sense strand
gacccaagacaucaacauu

SEQ ID NO: 537605 - RNA, 19 nt, Homo sapiens
  misc_RNA (1)...(19): siRNA sense strand
cagggucggauuccaguua

SEQ ID NO: 537606 - RNA, 19 nt, Homo sapiens
  misc_RNA (1)...(19): siRNA sense strand
gcguauacuucuccuucuu

SEQ ID NO: 537607 - RNA, 19 nt, Homo sapiens
  misc_RNA (1)...(19): siRNA sense strand
cugguggacuguaauaaug

SEQ ID NO: 537608 - RNA, 19 nt, Homo sapiens
  misc_RNA (1)...(19): siRNA sense strand
uaagaggagagacuacuug

SEQ ID NO: 537609 - RNA, 19 nt, Homo sapiens
  misc_RNA (1)...(19): siRNA sense strand
ggauccuguuugugaauga

SEQ ID NO: 537610 - RNA, 19 nt, Homo sapiens
  misc_RNA (1)...(19): siRNA sense strand
guauacuucuccuucuuca

SEQ ID NO: 537611 - RNA, 19 nt, Homo sapiens
  misc_RNA (1)...(19): siRNA sense strand
ggaagcaggagccggacaa

SEQ ID NO: 537612 - RNA, 19 nt, Homo sapiens
  misc_RNA (1)...(19): siRNA sense strand
ugggcgaccucaucucauu

SEQ ID NO: 537613 - RNA, 19 nt, Homo sapiens
  misc_RNA (1)...(19): siRNA sense strand
ugcgagaccugcugucaga

SEQ ID NO: 537614 - RNA, 19 nt, Homo sapiens
  misc_RNA (1)...(19): siRNA sense strand
agaagaugaugguuaagag

SEQ ID NO: 537615 - RNA, 19 nt, Homo sapiens
  misc_RNA (1)...(19): siRNA sense strand
acuauaggcugguucucaa

SEQ ID NO: 537616 - RNA, 19 nt, Homo sapiens
  misc_RNA (1)...(19): siRNA sense strand
gagaaggcgaauuuggaaa

SEQ ID NO: 537617 - RNA, 19 nt, Homo sapiens
  misc_RNA (1)...(19): siRNA sense strand
gcuguccucuucuccuuca

SEQ ID NO: 537618 - RNA, 19 nt, Homo sapiens
  misc_RNA (1)...(19): siRNA sense strand
ggagauggcaaagggauca

SEQ ID NO: 537619 - RNA, 19 nt, Homo sapiens
  misc_RNA (1)...(19): siRNA sense strand
gaaccaggucuccguggau

SEQ ID NO: 537620 - RNA, 19 nt, Homo sapiens
  misc_RNA (1)...(19): siRNA sense strand
ggauggagaggccagacaa

SEQ ID NO: 537621 - RNA, 19 nt, Homo sapiens
  misc_RNA (1)...(19): siRNA sense strand
gcugguggacuguaauaau

SEQ ID NO: 537622 - RNA, 19 nt, Homo sapiens
  misc_RNA (1)...(19): siRNA sense strand
gaggcaaggagauggcaaa

SEQ ID NO: 537623 - RNA, 19 nt, Homo sapiens
  misc_RNA (1)...(19): siRNA sense strand
gcauugggccucuacuucu

SEQ ID NO: 537624 - RNA, 19 nt, Homo sapiens
  misc_RNA (1)...(19): siRNA sense strand
cugaggaggugcccagcuu

SEQ ID NO: 537625 - RNA, 19 nt, Homo sapiens
  misc_RNA (1)...(19): siRNA sense strand
cuggagaagaugaugguua

SEQ ID NO: 537626 - RNA, 19 nt, Homo sapiens
  misc_RNA (1)...(19): siRNA sense strand
gaagcaggagccggacaaa

SEQ ID NO: 537627 - RNA, 19 nt, Homo sapiens
  misc_RNA (1)...(19): siRNA sense strand
uaaauggauggcaauugaa

SEQ ID NO: 537628 - RNA, 19 nt, Homo sapiens
  misc_RNA (1)...(19): siRNA sense strand
gggauccuguuugugaaug

SEQ ID NO: 537629 - RNA, 19 nt, Homo sapiens
  misc_RNA (1)...(19): siRNA sense strand
gacggccacugcgauguug

SEQ ID NO: 537630 - RNA, 19 nt, Homo sapiens
  misc_RNA (1)...(19): siRNA sense strand
ggacaaaaggccgguguuu

SEQ ID NO: 537631 - RNA, 19 nt, Homo sapiens
  misc_RNA (1)...(19): siRNA sense strand
gcucguucaucgggacuug

SEQ ID NO: 537632 - RNA, 19 nt, Homo sapiens
  misc_RNA (1)...(19): siRNA sense strand
gugaggcgguacacaagca

SEQ ID NO: 537633 - RNA, 19 nt, Homo sapiens
  misc_RNA (1)...(19): siRNA sense strand
cagcaaagaccuggagaag

SEQ ID NO: 537634 - RNA, 19 nt, Homo sapiens
  misc_RNA (1)...(19): siRNA sense strand
caaccacccacaugucauc

SEQ ID NO: 537635 - RNA, 19 nt, Homo sapiens
  misc_RNA (1)...(19): siRNA sense strand
ggauuaaagcuggcuaugg

SEQ ID NO: 537636 - RNA, 19 nt, Homo sapiens
  misc_RNA (1)...(19): siRNA sense strand
cgacggccacugcgauguu

SEQ ID NO: 537637 - RNA, 19 nt, Homo sapiens
  misc_RNA (1)...(19): siRNA sense strand
gaaagucuguguggaaaac

SEQ ID NO: 537638 - RNA, 19 nt, Homo sapiens
  misc_RNA (1)...(19): siRNA sense strand
ggcauugggccucuacuuc

SEQ ID NO: 537639 - RNA, 19 nt, Homo sapiens
  misc_RNA (1)...(19): siRNA sense strand
cgggaaagucuguguggaa

SEQ ID NO: 537640 - RNA, 19 nt, Homo sapiens
  misc_RNA (1)...(19): siRNA sense strand
gcccagaucgggaaagucu

SEQ ID NO: 537641 - RNA, 19 nt, Homo sapiens
  misc_RNA (1)...(19): siRNA sense strand
gacuauaggcugguucuca

SEQ ID NO: 537642 - RNA, 19 nt, Homo sapiens
  misc_RNA (1)...(19): siRNA sense strand
gcacgcccuugcuguacgu

SEQ ID NO: 537643 - RNA, 19 nt, Homo sapiens
  misc_RNA (1)...(19): siRNA sense strand
ggucggauuccaguuaaau

SEQ ID NO: 537644 - RNA, 19 nt, Homo sapiens
  misc_RNA (1)...(19): siRNA sense strand
gcuugucccgagauguuua

SEQ ID NO: 537645 - RNA, 19 nt, Homo sapiens
  misc_RNA (1)...(19): siRNA sense strand
caucguggaguacgccaaa

SEQ ID NO: 537646 - RNA, 19 nt, Homo sapiens
  misc_RNA (1)...(19): siRNA sense strand
gaccugcugucagaguuca

SEQ ID NO: 537647 - RNA, 19 nt, Homo sapiens
  misc_RNA (1)...(19): siRNA sense strand
acccaagacaucaacauuu

SEQ ID NO: 537648 - RNA, 19 nt, Homo sapiens
  misc_RNA (1)...(19): siRNA sense strand
caacugcagcgaggagaug

SEQ ID NO: 537649 - RNA, 19 nt, Homo sapiens
  misc_RNA (1)...(19): siRNA sense strand
cacgcaaagugauguaugg

SEQ ID NO: 537650 - RNA, 19 nt, Homo sapiens
  misc_RNA (1)...(19): siRNA sense strand
gaggagccagggucggauu

SEQ ID NO: 537651 - RNA, 19 nt, Homo sapiens
  misc_RNA (1)...(19): siRNA sense strand
gggcgaccucaucucauuu

SEQ ID NO: 537652 - RNA, 19 nt, Homo sapiens
  misc_RNA (1)...(19): siRNA sense strand
aaccggagccuggaccaua

SEQ ID NO: 537653 - RNA, 19 nt, Homo sapiens
  misc_RNA (1)...(19): siRNA sense strand
caagagacggcuggagugu

SEQ ID NO: 537654 - RNA, 19 nt, Homo sapiens
  misc_RNA (1)...(19): siRNA sense strand
guuaaauggauggcaauug

SEQ ID NO: 537655 - RNA, 19 nt, Homo sapiens
  misc_RNA (1)...(19): siRNA sense strand
aagaugaagauuucggauu

SEQ ID NO: 537656 - RNA, 19 nt, Homo sapiens
  misc_RNA (1)...(19): siRNA sense strand
ccgcuguccucuucuccuu

SEQ ID NO: 537657 - RNA, 19 nt, Homo sapiens
  misc_RNA (1)...(19): siRNA sense strand
gcgccgugguggaguucaa

SEQ ID NO: 537658 - RNA, 19 nt, Homo sapiens
  misc_RNA (1)...(19): siRNA sense strand
ggcauucaguggcaucaac

SEQ ID NO: 537659 - RNA, 19 nt, Homo sapiens
  misc_RNA (1)...(19): siRNA sense strand
agggucggauuccaguuaa

SEQ ID NO: 537660 - RNA, 19 nt, Homo sapiens
  misc_RNA (1)...(19): siRNA sense strand
cggcuugucccgagauguu

SEQ ID NO: 537661 - RNA, 19 nt, Homo sapiens
  misc_RNA (1)...(19): siRNA sense strand
ccacgcaaagugauguaug

SEQ ID NO: 537662 - RNA, 19 nt, Homo sapiens
  misc_RNA (1)...(19): siRNA sense strand
gaaagaacauccaagacaa

SEQ ID NO: 537663 - RNA, 19 nt, Homo sapiens
  misc_RNA (1)...(19): siRNA sense strand
gggaggagauugagcauuu

SEQ ID NO: 537664 - RNA, 19 nt, Homo sapiens
  misc_RNA (1)...(19): siRNA sense strand
ggacagauccagaaacuga

SEQ ID NO: 537665 - RNA, 19 nt, Homo sapiens
  misc_RNA (1)...(19): siRNA sense strand
gcaaguucgugaaggauuu

SEQ ID NO: 537666 - RNA, 19 nt, Homo sapiens
  misc_RNA (1)...(19): siRNA sense strand
ggaagccuguggcagaaua

SEQ ID NO: 537667 - RNA, 19 nt, Homo sapiens
  misc_RNA (1)...(19): siRNA sense strand
gaagagaggaucaugcaaa

SEQ ID NO: 537668 - RNA, 19 nt, Homo sapiens
  misc_RNA (1)...(19): siRNA sense strand
ggaccaagcccuaaaggaa

SEQ ID NO: 537669 - RNA, 19 nt, Homo sapiens
  misc_RNA (1)...(19): siRNA sense strand
gaaaguccgugaagaaagg

SEQ ID NO: 537670 - RNA, 19 nt, Homo sapiens
  misc_RNA (1)...(19): siRNA sense strand
gccauuggauguugaauuc

SEQ ID NO: 537671 - RNA, 19 nt, Homo sapiens
  misc_RNA (1)...(19): siRNA sense strand
ggaugaggacuucaaauug

SEQ ID NO: 537672 - RNA, 19 nt, Homo sapiens
  misc_RNA (1)...(19): siRNA sense strand
gaugaggacuucaaauugc

SEQ ID NO: 537673 - RNA, 19 nt, Homo sapiens
  misc_RNA (1)...(19): siRNA sense strand
ggagacacauuaugagaac

SEQ ID NO: 537674 - RNA, 19 nt, Homo sapiens
  misc_RNA (1)...(19): siRNA sense strand
cagcaacacuguaguagag

SEQ ID NO: 537675 - RNA, 19 nt, Homo sapiens
  misc_RNA (1)...(19): siRNA sense strand
gaugaaggagaacuauuaa

SEQ ID NO: 537676 - RNA, 19 nt, Homo sapiens
  misc_RNA (1)...(19): siRNA sense strand
agaugaaggagaacuauua

SEQ ID NO: 537677 - RNA, 19 nt, Homo sapiens
  misc_RNA (1)...(19): siRNA sense strand
cgaaagaacauccaagaca

SEQ ID NO: 537678 - RNA, 19 nt, Homo sapiens
  misc_RNA (1)...(19): siRNA sense strand
gaccaagcccuaaaggaaa

SEQ ID NO: 537679 - RNA, 19 nt, Homo sapiens
  misc_RNA (1)...(19): siRNA sense strand
caaggaguaugugggcuuu

SEQ ID NO: 537680 - RNA, 19 nt, Homo sapiens
  misc_RNA (1)...(19): siRNA sense strand
ggaaucaagaucuaucaau

SEQ ID NO: 537681 - RNA, 19 nt, Homo sapiens
  misc_RNA (1)...(19): siRNA sense strand
gcacugcgacuuugugaag

SEQ ID NO: 537682 - RNA, 19 nt, Homo sapiens
  misc_RNA (1)...(19): siRNA sense strand
gagaggaucaugcaaacug

SEQ ID NO: 537683 - RNA, 19 nt, Homo sapiens
  misc_RNA (1)...(19): siRNA sense strand
caaacugacucgggaaagu

SEQ ID NO: 537684 - RNA, 19 nt, Homo sapiens
  misc_RNA (1)...(19): siRNA sense strand
gggcaagcuugaucccuau

SEQ ID NO: 537685 - RNA, 19 nt, Homo sapiens
  misc_RNA (1)...(19): siRNA sense strand
uaaaggaaagcaucccauu

SEQ ID NO: 537686 - RNA, 19 nt, Homo sapiens
  misc_RNA (1)...(19): siRNA sense strand
gaaacuucuuggugcugaa

SEQ ID NO: 537687 - RNA, 19 nt, Homo sapiens
  misc_RNA (1)...(19): siRNA sense strand
gugaaggauuucucaggaa

SEQ ID NO: 537688 - RNA, 19 nt, Homo sapiens
  misc_RNA (1)...(19): siRNA sense strand
caucccauuugcaguaauu

SEQ ID NO: 537689 - RNA, 19 nt, Homo sapiens
  misc_RNA (1)...(19): siRNA sense strand
auacauugaucagcaguuu

SEQ ID NO: 537690 - RNA, 19 nt, Homo sapiens
  misc_RNA (1)...(19): siRNA sense strand
ccaaccaaguccaccgaaa

SEQ ID NO: 537691 - RNA, 19 nt, Homo sapiens
  misc_RNA (1)...(19): siRNA sense strand
aaggaaagcaucccauuug

SEQ ID NO: 537692 - RNA, 19 nt, Homo sapiens
  misc_RNA (1)...(19): siRNA sense strand
agaguggccugaaccgaaa

SEQ ID NO: 537693 - RNA, 19 nt, Homo sapiens
  misc_RNA (1)...(19): siRNA sense strand
aauccacacuugucaauag

SEQ ID NO: 537694 - RNA, 19 nt, Homo sapiens
  misc_RNA (1)...(19): siRNA sense strand
aaaggaaagcaucccauuu

SEQ ID NO: 537695 - RNA, 19 nt, Homo sapiens
  misc_RNA (1)...(19): siRNA sense strand
ggagaucacuaagcaugca

SEQ ID NO: 537696 - RNA, 19 nt, Homo sapiens
  misc_RNA (1)...(19): siRNA sense strand
ugagcaaguucgugaagga

SEQ ID NO: 537697 - RNA, 19 nt, Homo sapiens
  misc_RNA (1)...(19): siRNA sense strand
ggacaccacggaugaugga

SEQ ID NO: 537698 - RNA, 19 nt, Homo sapiens
  misc_RNA (1)...(19): siRNA sense strand
ccagaaacugagaagcuua

SEQ ID NO: 537699 - RNA, 19 nt, Homo sapiens
  misc_RNA (1)...(19): siRNA sense strand
caccacggaugauggagaa

SEQ ID NO: 537700 - RNA, 19 nt, Homo sapiens
  misc_RNA (1)...(19): siRNA sense strand
gcaaauccacacuugucaa

SEQ ID NO: 537701 - RNA, 19 nt, Homo sapiens
  misc_RNA (1)...(19): siRNA sense strand
gggagacacauuaugagaa

SEQ ID NO: 537702 - RNA, 19 nt, Homo sapiens
  misc_RNA (1)...(19): siRNA sense strand
gcuaagaccugggcaucca

SEQ ID NO: 537703 - RNA, 19 nt, Homo sapiens
  misc_RNA (1)...(19): siRNA sense strand
aaacuguggagaucacuaa

SEQ ID NO: 537704 - RNA, 19 nt, Homo sapiens
  misc_RNA (1)...(19): siRNA sense strand
caaauccacacuugucaau

SEQ ID NO: 537705 - RNA, 19 nt, Homo sapiens
  misc_RNA (1)...(19): siRNA sense strand
gaaccgaaagaacauccaa

SEQ ID NO: 537706 - RNA, 19 nt, Homo sapiens
  misc_RNA (1)...(19): siRNA sense strand
aagcaucccauuugcagua

SEQ ID NO: 537707 - RNA, 19 nt, Homo sapiens
  misc_RNA (1)...(19): siRNA sense strand
gcagcaacacuguaguaga

SEQ ID NO: 537708 - RNA, 19 nt, Homo sapiens
  misc_RNA (1)...(19): siRNA sense strand
ggaccucuaugaugaugac

SEQ ID NO: 537709 - RNA, 19 nt, Homo sapiens
  misc_RNA (1)...(19): siRNA sense strand
gggcaaauccacacuuguc

SEQ ID NO: 537710 - RNA, 19 nt, Homo sapiens
  misc_RNA (1)...(19): siRNA sense strand
ccagggcacugcgacuuug

SEQ ID NO: 537711 - RNA, 19 nt, Homo sapiens
  misc_RNA (1)...(19): siRNA sense strand
ggaaagcaucccauuugca

SEQ ID NO: 537712 - RNA, 19 nt, Homo sapiens
  misc_RNA (1)...(19): siRNA sense strand
gcaagcuugaucccuauga

SEQ ID NO: 537713 - RNA, 19 nt, Homo sapiens
  misc_RNA (1)...(19): siRNA sense strand
caagcuugaucccuaugau

SEQ ID NO: 537714 - RNA, 19 nt, Homo sapiens
  misc_RNA (1)...(19): siRNA sense strand
ggccugaaccgaaagaaca

SEQ ID NO: 537715 - RNA, 19 nt, Homo sapiens
  misc_RNA (1)...(19): siRNA sense strand
gcaggagaugcuacacaaa

SEQ ID NO: 537716 - RNA, 19 nt, Homo sapiens
  misc_RNA (1)...(19): siRNA sense strand
ugcaggagaugcuacacaa

SEQ ID NO: 537717 - RNA, 19 nt, Homo sapiens
  misc_RNA (1)...(19): siRNA sense strand
aggaugaggacuucaaauu

SEQ ID NO: 537718 - RNA, 19 nt, Homo sapiens
  misc_RNA (1)...(19): siRNA sense strand
gcaugcaguggacauagaa

SEQ ID NO: 537719 - RNA, 19 nt, Homo sapiens
  misc_RNA (1)...(19): siRNA sense strand
ggagaugcuacacaaaaua

SEQ ID NO: 537720 - RNA, 19 nt, Homo sapiens
  misc_RNA (1)...(19): siRNA sense strand
gagaagcuuauccgagaga

SEQ ID NO: 537721 - RNA, 19 nt, Homo sapiens
  misc_RNA (1)...(19): siRNA sense strand
agacacauuaugagaacua

SEQ ID NO: 537722 - RNA, 19 nt, Homo sapiens
  misc_RNA (1)...(19): siRNA sense strand
gcaguggacauagaagaga

SEQ ID NO: 537723 - RNA, 19 nt, Homo sapiens
  misc_RNA (1)...(19): siRNA sense strand
caaccaaguccaccgaaag

SEQ ID NO: 537724 - RNA, 19 nt, Homo sapiens
  misc_RNA (1)...(19): siRNA sense strand
gcacugcugccuguacuuc

SEQ ID NO: 537725 - RNA, 19 nt, Homo sapiens
  misc_RNA (1)...(19): siRNA sense strand
caguggacauagaagagaa

SEQ ID NO: 537726 - RNA, 19 nt, Homo sapiens
  misc_RNA (1)...(19): siRNA sense strand
ccgaaaguccgugaagaaa

SEQ ID NO: 537727 - RNA, 19 nt, Homo sapiens
  misc_RNA (1)...(19): siRNA sense strand
gaagcuuauccgagagaaa

SEQ ID NO: 537728 - RNA, 19 nt, Homo sapiens
  misc_RNA (1)...(19): siRNA sense strand
acauugaucagcaguuuga

SEQ ID NO: 537729 - RNA, 19 nt, Homo sapiens
  misc_RNA (1)...(19): siRNA sense strand
gaugaugaccuggaguuca

SEQ ID NO: 537730 - RNA, 19 nt, Homo sapiens
  misc_RNA (1)...(19): siRNA sense strand
caccgaaaguccgugaaga

SEQ ID NO: 537731 - RNA, 19 nt, Homo sapiens
  misc_RNA (1)...(19): siRNA sense strand
acugacaccucccgaagug

SEQ ID NO: 537732 - RNA, 19 nt, Homo sapiens
  misc_RNA (1)...(19): siRNA sense strand
ggccauuggauguugaauu

SEQ ID NO: 537733 - RNA, 19 nt, Homo sapiens
  misc_RNA (1)...(19): siRNA sense strand
gggcaucguggaaguggaa

SEQ ID NO: 537734 - RNA, 19 nt, Homo sapiens
  misc_RNA (1)...(19): siRNA sense strand
gcaguaauuggcagcaaca

SEQ ID NO: 537735 - RNA, 19 nt, Homo sapiens
  misc_RNA (1)...(19): siRNA sense strand
gcuaaggcagacacacuga

SEQ ID NO: 537736 - RNA, 19 nt, Homo sapiens
  misc_RNA (1)...(19): siRNA sense strand
gggucaacaucgugccuau

SEQ ID NO: 537737 - RNA, 19 nt, Homo sapiens
  misc_RNA (1)...(19): siRNA sense strand
cauuggauguugaauucau

SEQ ID NO: 537738 - RNA, 19 nt, Homo sapiens
  misc_RNA (1)...(19): siRNA sense strand
aagagaggaucaugcaaac

SEQ ID NO: 537739 - RNA, 19 nt, Homo sapiens
  misc_RNA (1)...(19): siRNA sense strand
cagaaacugagaagcuuau

SEQ ID NO: 537740 - RNA, 19 nt, Homo sapiens
  misc_RNA (1)...(19): siRNA sense strand
ccucugacaaccagcagua

SEQ ID NO: 537741 - RNA, 19 nt, Homo sapiens
  misc_RNA (1)...(19): siRNA sense strand
caugcaaacuguggagauc

SEQ ID NO: 537742 - RNA, 19 nt, Homo sapiens
  misc_RNA (1)...(19): siRNA sense strand
ucaugaaggcccugcauca

SEQ ID NO: 537743 - RNA, 19 nt, Homo sapiens
  misc_RNA (1)...(19): siRNA sense strand
uggcagcaacacuguagua

SEQ ID NO: 537744 - RNA, 19 nt, Homo sapiens
  misc_RNA (1)...(19): siRNA sense strand
cgaaaguccgugaagaaag

SEQ ID NO: 537745 - RNA, 19 nt, Homo sapiens
  misc_RNA (1)...(19): siRNA sense strand
ugaugaggaugaggacuuc

SEQ ID NO: 537746 - RNA, 19 nt, Homo sapiens
  misc_RNA (1)...(19): siRNA sense strand
gcagucaacaacacagagu

SEQ ID NO: 537747 - RNA, 19 nt, Homo sapiens
  misc_RNA (1)...(19): siRNA sense strand
gggaugcagucaacaacac

SEQ ID NO: 537748 - RNA, 19 nt, Homo sapiens
  misc_RNA (1)...(19): siRNA sense strand
uaagcaugcaguggacaua

SEQ ID NO: 537749 - RNA, 19 nt, Homo sapiens
  misc_RNA (1)...(19): siRNA sense strand
ccagggacagauccagaaa

SEQ ID NO: 537750 - RNA, 19 nt, Homo sapiens
  misc_RNA (1)...(19): siRNA sense strand
ugacccgccugguggugaa

SEQ ID NO: 537751 - RNA, 19 nt, Homo sapiens
  misc_RNA (1)...(19): siRNA sense strand
gcaggaccaagcccuaaag

SEQ ID NO: 537752 - RNA, 19 nt, Homo sapiens
  misc_RNA (1)...(19): siRNA sense strand
ggaggagauugagcauuuu

SEQ ID NO: 537753 - RNA, 19 nt, Homo sapiens
  misc_RNA (1)...(19): siRNA sense strand
ggaccacaagaaacgcaaa

SEQ ID NO: 537754 - RNA, 19 nt, Homo sapiens
  misc_RNA (1)...(19): siRNA sense strand
caaacuguggagaucacua

SEQ ID NO: 537755 - RNA, 19 nt, Homo sapiens
  misc_RNA (1)...(19): siRNA sense strand
cagaugaaggagaacuauu

SEQ ID NO: 537756 - RNA, 19 nt, Homo sapiens
  misc_RNA (1)...(19): siRNA sense strand
uccagaaacugagaagcuu

SEQ ID NO: 537757 - RNA, 19 nt, Homo sapiens
  misc_RNA (1)...(19): siRNA sense strand
gaggacaccacggaugaug

SEQ ID NO: 537758 - RNA, 19 nt, Homo sapiens
  misc_RNA (1)...(19): siRNA sense strand
gggcacugcgacuuuguga

SEQ ID NO: 537759 - RNA, 19 nt, Homo sapiens
  misc_RNA (1)...(19): siRNA sense strand
caaccagcaguacuucugu

SEQ ID NO: 537760 - RNA, 19 nt, Homo sapiens
  misc_RNA (1)...(19): siRNA sense strand
gauggagaacugagcaagu

SEQ ID NO: 537761 - RNA, 19 nt, Homo sapiens
  misc_RNA (1)...(19): siRNA sense strand
uggaggacaccacggauga

SEQ ID NO: 537762 - RNA, 19 nt, Homo sapiens
  misc_RNA (1)...(19): siRNA sense strand
gaaagaacauccaagacaa

SEQ ID NO: 537763 - RNA, 19 nt, Homo sapiens
  misc_RNA (1)...(19): siRNA sense strand
gcaaguucgugaaggauuu

SEQ ID NO: 537764 - RNA, 19 nt, Homo sapiens
  misc_RNA (1)...(19): siRNA sense strand
ggaagccuguggcagaaua

SEQ ID NO: 537765 - RNA, 19 nt, Homo sapiens
  misc_RNA (1)...(19): siRNA sense strand
gaagagaggaucaugcaaa

SEQ ID NO: 537766 - RNA, 19 nt, Homo sapiens
  misc_RNA (1)...(19): siRNA sense strand
gaaaguccgugaagaaagg

SEQ ID NO: 537767 - RNA, 19 nt, Homo sapiens
  misc_RNA (1)...(19): siRNA sense strand
cgaaagaacauccaagaca

SEQ ID NO: 537768 - RNA, 19 nt, Homo sapiens
  misc_RNA (1)...(19): siRNA sense strand
caaggaguaugugggcuuu

SEQ ID NO: 537769 - RNA, 19 nt, Homo sapiens
  misc_RNA (1)...(19): siRNA sense strand
gagaggaucaugcaaacug

SEQ ID NO: 537770 - RNA, 19 nt, Homo sapiens
  misc_RNA (1)...(19): siRNA sense strand
gggcaagcuugaucccuau

SEQ ID NO: 537771 - RNA, 19 nt, Homo sapiens
  misc_RNA (1)...(19): siRNA sense strand
gugaaggauuucucaggaa

SEQ ID NO: 537772 - RNA, 19 nt, Homo sapiens
  misc_RNA (1)...(19): siRNA sense strand
auacauugaucagcaguuu

SEQ ID NO: 537773 - RNA, 19 nt, Homo sapiens
  misc_RNA (1)...(19): siRNA sense strand
gaaacuucuuggugcugaa

SEQ ID NO: 537774 - RNA, 19 nt, Homo sapiens
  misc_RNA (1)...(19): siRNA sense strand
ccaaccaaguccaccgaaa

SEQ ID NO: 537775 - RNA, 19 nt, Homo sapiens
  misc_RNA (1)...(19): siRNA sense strand
agaguggccugaaccgaaa

SEQ ID NO: 537776 - RNA, 19 nt, Homo sapiens
  misc_RNA (1)...(19): siRNA sense strand
aauccacacuugucaauag

SEQ ID NO: 537777 - RNA, 19 nt, Homo sapiens
  misc_RNA (1)...(19): siRNA sense strand
ggagaucacuaagcaugca

SEQ ID NO: 537778 - RNA, 19 nt, Homo sapiens
  misc_RNA (1)...(19): siRNA sense strand
ugagcaaguucgugaagga

SEQ ID NO: 537779 - RNA, 19 nt, Homo sapiens
  misc_RNA (1)...(19): siRNA sense strand
caccacggaugauggagaa

SEQ ID NO: 537780 - RNA, 19 nt, Homo sapiens
  misc_RNA (1)...(19): siRNA sense strand
ggacaccacggaugaugga

SEQ ID NO: 537781 - RNA, 19 nt, Homo sapiens
  misc_RNA (1)...(19): siRNA sense strand
gcuaagaccugggcaucca

SEQ ID NO: 537782 - RNA, 19 nt, Homo sapiens
  misc_RNA (1)...(19): siRNA sense strand
aaacuguggagaucacuaa

SEQ ID NO: 537783 - RNA, 19 nt, Homo sapiens
  misc_RNA (1)...(19): siRNA sense strand
gcaaauccacacuugucaa

SEQ ID NO: 537784 - RNA, 19 nt, Homo sapiens
  misc_RNA (1)...(19): siRNA sense strand
caaauccacacuugucaau

SEQ ID NO: 537785 - RNA, 19 nt, Homo sapiens
  misc_RNA (1)...(19): siRNA sense strand
gaaccgaaagaacauccaa

SEQ ID NO: 537786 - RNA, 19 nt, Homo sapiens
  misc_RNA (1)...(19): siRNA sense strand
ggaccucuaugaugaugac

SEQ ID NO: 537787 - RNA, 19 nt, Homo sapiens
  misc_RNA (1)...(19): siRNA sense strand
gggcaaauccacacuuguc

SEQ ID NO: 537788 - RNA, 19 nt, Homo sapiens
  misc_RNA (1)...(19): siRNA sense strand
gcaagcuugaucccuauga

SEQ ID NO: 537789 - RNA, 19 nt, Homo sapiens
  misc_RNA (1)...(19): siRNA sense strand
caagcuugaucccuaugau

SEQ ID NO: 537790 - RNA, 19 nt, Homo sapiens
  misc_RNA (1)...(19): siRNA sense strand
ggccugaaccgaaagaaca

SEQ ID NO: 537791 - RNA, 19 nt, Homo sapiens
  misc_RNA (1)...(19): siRNA sense strand
gcaugcaguggacauagaa

SEQ ID NO: 537792 - RNA, 19 nt, Homo sapiens
  misc_RNA (1)...(19): siRNA sense strand
gcaguggacauagaagaga

SEQ ID NO: 537793 - RNA, 19 nt, Homo sapiens
  misc_RNA (1)...(19): siRNA sense strand
caaccaaguccaccgaaag

SEQ ID NO: 537794 - RNA, 19 nt, Homo sapiens
  misc_RNA (1)...(19): siRNA sense strand
gcacugcugccuguacuuc

SEQ ID NO: 537795 - RNA, 19 nt, Homo sapiens
  misc_RNA (1)...(19): siRNA sense strand
caguggacauagaagagaa

SEQ ID NO: 537796 - RNA, 19 nt, Homo sapiens
  misc_RNA (1)...(19): siRNA sense strand
gaugaugaccuggaguuca

SEQ ID NO: 537797 - RNA, 19 nt, Homo sapiens
  misc_RNA (1)...(19): siRNA sense strand
acauugaucagcaguuuga

SEQ ID NO: 537798 - RNA, 19 nt, Homo sapiens
  misc_RNA (1)...(19): siRNA sense strand
ccgaaaguccgugaagaaa

SEQ ID NO: 537799 - RNA, 19 nt, Homo sapiens
  misc_RNA (1)...(19): siRNA sense strand
caccgaaaguccgugaaga

SEQ ID NO: 537800 - RNA, 19 nt, Homo sapiens
  misc_RNA (1)...(19): siRNA sense strand
ccucugacaaccagcagua

SEQ ID NO: 537801 - RNA, 19 nt, Homo sapiens
  misc_RNA (1)...(19): siRNA sense strand
caugcaaacuguggagauc

SEQ ID NO: 537802 - RNA, 19 nt, Homo sapiens
  misc_RNA (1)...(19): siRNA sense strand
aagagaggaucaugcaaac

SEQ ID NO: 537803 - RNA, 19 nt, Homo sapiens
  misc_RNA (1)...(19): siRNA sense strand
cgaaaguccgugaagaaag

SEQ ID NO: 537804 - RNA, 19 nt, Homo sapiens
  misc_RNA (1)...(19): siRNA sense strand
gcagucaacaacacagagu

SEQ ID NO: 537805 - RNA, 19 nt, Homo sapiens
  misc_RNA (1)...(19): siRNA sense strand
gggaugcagucaacaacac

SEQ ID NO: 537806 - RNA, 19 nt, Homo sapiens
  misc_RNA (1)...(19): siRNA sense strand
uaagcaugcaguggacaua

SEQ ID NO: 537807 - RNA, 19 nt, Homo sapiens
  misc_RNA (1)...(19): siRNA sense strand
gaggacaccacggaugaug

SEQ ID NO: 537808 - RNA, 19 nt, Homo sapiens
  misc_RNA (1)...(19): siRNA sense strand
uggaggacaccacggauga

SEQ ID NO: 537809 - RNA, 19 nt, Homo sapiens
  misc_RNA (1)...(19): siRNA sense strand
caaacuguggagaucacua

SEQ ID NO: 537810 - RNA, 19 nt, Homo sapiens
  misc_RNA (1)...(19): siRNA sense strand
caaccagcaguacuucugu

SEQ ID NO: 537811 - RNA, 19 nt, Homo sapiens
  misc_RNA (1)...(19): siRNA sense strand
gauggagaacugagcaagu

SEQ ID NO: 537812 - RNA, 19 nt, Homo sapiens
  misc_RNA (1)...(19): siRNA sense strand
cugggcaaauccacacuug

SEQ ID NO: 537813 - RNA, 19 nt, Homo sapiens
  misc_RNA (1)...(19): siRNA sense strand
gccuguggcagaauacauu

SEQ ID NO: 537814 - RNA, 19 nt, Homo sapiens
  misc_RNA (1)...(19): siRNA sense strand
agaggaucaugcaaacugu

SEQ ID NO: 537815 - RNA, 19 nt, Homo sapiens
  misc_RNA (1)...(19): siRNA sense strand
ggcugcggcucaccauugu

SEQ ID NO: 537816 - RNA, 19 nt, Homo sapiens
  misc_RNA (1)...(19): siRNA sense strand
ggcaaauccacacuuguca

SEQ ID NO: 537817 - RNA, 19 nt, Homo sapiens
  misc_RNA (1)...(19): siRNA sense strand
gcaguuugagcaguauuuc

SEQ ID NO: 537818 - RNA, 19 nt, Homo sapiens
  misc_RNA (1)...(19): siRNA sense strand
ccccggaccucuaugauga

SEQ ID NO: 537819 - RNA, 19 nt, Homo sapiens
  misc_RNA (1)...(19): siRNA sense strand
cuguggagaucacuaagca

SEQ ID NO: 537820 - RNA, 19 nt, Homo sapiens
  misc_RNA (1)...(19): siRNA sense strand
agacgagaguggccugaac

SEQ ID NO: 537821 - RNA, 19 nt, Homo sapiens
  misc_RNA (1)...(19): siRNA sense strand
gaaagaacauccaagacaa

SEQ ID NO: 537822 - RNA, 19 nt, Homo sapiens
  misc_RNA (1)...(19): siRNA sense strand
gggaggagauugagcauuu

SEQ ID NO: 537823 - RNA, 19 nt, Homo sapiens
  misc_RNA (1)...(19): siRNA sense strand
ggacagauccagaaacuga

SEQ ID NO: 537824 - RNA, 19 nt, Homo sapiens
  misc_RNA (1)...(19): siRNA sense strand
gcaaguucgugaaggauuu

SEQ ID NO: 537825 - RNA, 19 nt, Homo sapiens
  misc_RNA (1)...(19): siRNA sense strand
ggaagccuguggcagaaua

SEQ ID NO: 537826 - RNA, 19 nt, Homo sapiens
  misc_RNA (1)...(19): siRNA sense strand
gaagagaggaucaugcaaa

SEQ ID NO: 537827 - RNA, 19 nt, Homo sapiens
  misc_RNA (1)...(19): siRNA sense strand
ggaccaagcccuaaaggaa

SEQ ID NO: 537828 - RNA, 19 nt, Homo sapiens
  misc_RNA (1)...(19): siRNA sense strand
gaaaguccgugaagaaagg

SEQ ID NO: 537829 - RNA, 19 nt, Homo sapiens
  misc_RNA (1)...(19): siRNA sense strand
gccauuggauguugaauuc

SEQ ID NO: 537830 - RNA, 19 nt, Homo sapiens
  misc_RNA (1)...(19): siRNA sense strand
ggaugaggacuucaaauug

SEQ ID NO: 537831 - RNA, 19 nt, Homo sapiens
  misc_RNA (1)...(19): siRNA sense strand
gaugaggacuucaaauugc

SEQ ID NO: 537832 - RNA, 19 nt, Homo sapiens
  misc_RNA (1)...(19): siRNA sense strand
ggagacacauuaugagaac

SEQ ID NO: 537833 - RNA, 19 nt, Homo sapiens
  misc_RNA (1)...(19): siRNA sense strand
cagcaacacuguaguagag

SEQ ID NO: 537834 - RNA, 19 nt, Homo sapiens
  misc_RNA (1)...(19): siRNA sense strand
gaugaaggagaacuauuaa

SEQ ID NO: 537835 - RNA, 19 nt, Homo sapiens
  misc_RNA (1)...(19): siRNA sense strand
agaugaaggagaacuauua

SEQ ID NO: 537836 - RNA, 19 nt, Homo sapiens
  misc_RNA (1)...(19): siRNA sense strand
cgaaagaacauccaagaca

SEQ ID NO: 537837 - RNA, 19 nt, Homo sapiens
  misc_RNA (1)...(19): siRNA sense strand
gaccaagcccuaaaggaaa

SEQ ID NO: 537838 - RNA, 19 nt, Homo sapiens
  misc_RNA (1)...(19): siRNA sense strand
caaggaguaugugggcuuu

SEQ ID NO: 537839 - RNA, 19 nt, Homo sapiens
  misc_RNA (1)...(19): siRNA sense strand
ggaaucaagaucuaucaau

SEQ ID NO: 537840 - RNA, 19 nt, Homo sapiens
  misc_RNA (1)...(19): siRNA sense strand
gcacugcgacuuugugaag

SEQ ID NO: 537841 - RNA, 19 nt, Homo sapiens
  misc_RNA (1)...(19): siRNA sense strand
gagaggaucaugcaaacug

SEQ ID NO: 537842 - RNA, 19 nt, Homo sapiens
  misc_RNA (1)...(19): siRNA sense strand
caaacugacucgggaaagu

SEQ ID NO: 537843 - RNA, 19 nt, Homo sapiens
  misc_RNA (1)...(19): siRNA sense strand
gggcaagcuugaucccuau

SEQ ID NO: 537844 - RNA, 19 nt, Homo sapiens
  misc_RNA (1)...(19): siRNA sense strand
uaaaggaaagcaucccauu

SEQ ID NO: 537845 - RNA, 19 nt, Homo sapiens
  misc_RNA (1)...(19): siRNA sense strand
gaaacuucuuggugcugaa

SEQ ID NO: 537846 - RNA, 19 nt, Homo sapiens
  misc_RNA (1)...(19): siRNA sense strand
gugaaggauuucucaggaa

SEQ ID NO: 537847 - RNA, 19 nt, Homo sapiens
  misc_RNA (1)...(19): siRNA sense strand
caucccauuugcaguaauu

SEQ ID NO: 537848 - RNA, 19 nt, Homo sapiens
  misc_RNA (1)...(19): siRNA sense strand
auacauugaucagcaguuu

SEQ ID NO: 537849 - RNA, 19 nt, Homo sapiens
  misc_RNA (1)...(19): siRNA sense strand
ccaaccaaguccaccgaaa

SEQ ID NO: 537850 - RNA, 19 nt, Homo sapiens
  misc_RNA (1)...(19): siRNA sense strand
aaggaaagcaucccauuug

SEQ ID NO: 537851 - RNA, 19 nt, Homo sapiens
  misc_RNA (1)...(19): siRNA sense strand
agaguggccugaaccgaaa

SEQ ID NO: 537852 - RNA, 19 nt, Homo sapiens
  misc_RNA (1)...(19): siRNA sense strand
aauccacacuugucaauag

SEQ ID NO: 537853 - RNA, 19 nt, Homo sapiens
  misc_RNA (1)...(19): siRNA sense strand
aaaggaaagcaucccauuu

SEQ ID NO: 537854 - RNA, 19 nt, Homo sapiens
  misc_RNA (1)...(19): siRNA sense strand
ggagaucacuaagcaugca

SEQ ID NO: 537855 - RNA, 19 nt, Homo sapiens
  misc_RNA (1)...(19): siRNA sense strand
ugagcaaguucgugaagga

SEQ ID NO: 537856 - RNA, 19 nt, Homo sapiens
  misc_RNA (1)...(19): siRNA sense strand
ggacaccacggaugaugga

SEQ ID NO: 537857 - RNA, 19 nt, Homo sapiens
  misc_RNA (1)...(19): siRNA sense strand
ccagaaacugagaagcuua

SEQ ID NO: 537858 - RNA, 19 nt, Homo sapiens
  misc_RNA (1)...(19): siRNA sense strand
caccacggaugauggagaa

SEQ ID NO: 537859 - RNA, 19 nt, Homo sapiens
  misc_RNA (1)...(19): siRNA sense strand
gcaaauccacacuugucaa

SEQ ID NO: 537860 - RNA, 19 nt, Homo sapiens
  misc_RNA (1)...(19): siRNA sense strand
gggagacacauuaugagaa

SEQ ID NO: 537861 - RNA, 19 nt, Homo sapiens
  misc_RNA (1)...(19): siRNA sense strand
gcuaagaccugggcaucca

SEQ ID NO: 537862 - RNA, 19 nt, Homo sapiens
  misc_RNA (1)...(19): siRNA sense strand
aaacuguggagaucacuaa

SEQ ID NO: 537863 - RNA, 19 nt, Homo sapiens
  misc_RNA (1)...(19): siRNA sense strand
caaauccacacuugucaau

SEQ ID NO: 537864 - RNA, 19 nt, Homo sapiens
  misc_RNA (1)...(19): siRNA sense strand
gaaccgaaagaacauccaa

SEQ ID NO: 537865 - RNA, 19 nt, Homo sapiens
  misc_RNA (1)...(19): siRNA sense strand
aagcaucccauuugcagua

SEQ ID NO: 537866 - RNA, 19 nt, Homo sapiens
  misc_RNA (1)...(19): siRNA sense strand
gcagcaacacuguaguaga

SEQ ID NO: 537867 - RNA, 19 nt, Homo sapiens
  misc_RNA (1)...(19): siRNA sense strand
ggaccucuaugaugaugac

SEQ ID NO: 537868 - RNA, 19 nt, Homo sapiens
  misc_RNA (1)...(19): siRNA sense strand
gggcaaauccacacuuguc

SEQ ID NO: 537869 - RNA, 19 nt, Homo sapiens
  misc_RNA (1)...(19): siRNA sense strand
ccagggcacugcgacuuug

SEQ ID NO: 537870 - RNA, 19 nt, Homo sapiens
  misc_RNA (1)...(19): siRNA sense strand
ggaaagcaucccauuugca

SEQ ID NO: 537871 - RNA, 19 nt, Homo sapiens
  misc_RNA (1)...(19): siRNA sense strand
gcaagcuugaucccuauga

SEQ ID NO: 537872 - RNA, 19 nt, Homo sapiens
  misc_RNA (1)...(19): siRNA sense strand
caagcuugaucccuaugau

SEQ ID NO: 537873 - RNA, 19 nt, Homo sapiens
  misc_RNA (1)...(19): siRNA sense strand
ggccugaaccgaaagaaca

SEQ ID NO: 537874 - RNA, 19 nt, Homo sapiens
  misc_RNA (1)...(19): siRNA sense strand
gcaggagaugcuacacaaa

SEQ ID NO: 537875 - RNA, 19 nt, Homo sapiens
  misc_RNA (1)...(19): siRNA sense strand
ugcaggagaugcuacacaa

SEQ ID NO: 537876 - RNA, 19 nt, Homo sapiens
  misc_RNA (1)...(19): siRNA sense strand
aggaugaggacuucaaauu

SEQ ID NO: 537877 - RNA, 19 nt, Homo sapiens
  misc_RNA (1)...(19): siRNA sense strand
gcaugcaguggacauagaa

SEQ ID NO: 537878 - RNA, 19 nt, Homo sapiens
  misc_RNA (1)...(19): siRNA sense strand
ggagaugcuacacaaaaua

SEQ ID NO: 537879 - RNA, 19 nt, Homo sapiens
  misc_RNA (1)...(19): siRNA sense strand
gagaagcuuauccgagaga

SEQ ID NO: 537880 - RNA, 19 nt, Homo sapiens
  misc_RNA (1)...(19): siRNA sense strand
agacacauuaugagaacua

SEQ ID NO: 537881 - RNA, 19 nt, Homo sapiens
  misc_RNA (1)...(19): siRNA sense strand
gcaguggacauagaagaga

SEQ ID NO: 537882 - RNA, 19 nt, Homo sapiens
  misc_RNA (1)...(19): siRNA sense strand
caaccaaguccaccgaaag

SEQ ID NO: 537883 - RNA, 19 nt, Homo sapiens
  misc_RNA (1)...(19): siRNA sense strand
gcacugcugccuguacuuc

SEQ ID NO: 537884 - RNA, 19 nt, Homo sapiens
  misc_RNA (1)...(19): siRNA sense strand
caguggacauagaagagaa

SEQ ID NO: 537885 - RNA, 19 nt, Homo sapiens
  misc_RNA (1)...(19): siRNA sense strand
ccgaaaguccgugaagaaa

SEQ ID NO: 537886 - RNA, 19 nt, Homo sapiens
  misc_RNA (1)...(19): siRNA sense strand
gaagcuuauccgagagaaa

SEQ ID NO: 537887 - RNA, 19 nt, Homo sapiens
  misc_RNA (1)...(19): siRNA sense strand
acauugaucagcaguuuga

SEQ ID NO: 537888 - RNA, 19 nt, Homo sapiens
  misc_RNA (1)...(19): siRNA sense strand
gaugaugaccuggaguuca

SEQ ID NO: 537889 - RNA, 19 nt, Homo sapiens
  misc_RNA (1)...(19): siRNA sense strand
caccgaaaguccgugaaga

SEQ ID NO: 537890 - RNA, 19 nt, Homo sapiens
  misc_RNA (1)...(19): siRNA sense strand
acugacaccucccgaagug

SEQ ID NO: 537891 - RNA, 19 nt, Homo sapiens
  misc_RNA (1)...(19): siRNA sense strand
ggccauuggauguugaauu

SEQ ID NO: 537892 - RNA, 19 nt, Homo sapiens
  misc_RNA (1)...(19): siRNA sense strand
gggcaucguggaaguggaa

SEQ ID NO: 537893 - RNA, 19 nt, Homo sapiens
  misc_RNA (1)...(19): siRNA sense strand
gcaguaauuggcagcaaca

SEQ ID NO: 537894 - RNA, 19 nt, Homo sapiens
  misc_RNA (1)...(19): siRNA sense strand
gcuaaggcagacacacuga

SEQ ID NO: 537895 - RNA, 19 nt, Homo sapiens
  misc_RNA (1)...(19): siRNA sense strand
gggucaacaucgugccuau

SEQ ID NO: 537896 - RNA, 19 nt, Homo sapiens
  misc_RNA (1)...(19): siRNA sense strand
cauuggauguugaauucau

SEQ ID NO: 537897 - RNA, 19 nt, Homo sapiens
  misc_RNA (1)...(19): siRNA sense strand
aagagaggaucaugcaaac

SEQ ID NO: 537898 - RNA, 19 nt, Homo sapiens
  misc_RNA (1)...(19): siRNA sense strand
cagaaacugagaagcuuau

SEQ ID NO: 537899 - RNA, 19 nt, Homo sapiens
  misc_RNA (1)...(19): siRNA sense strand
ccucugacaaccagcagua

SEQ ID NO: 537900 - RNA, 19 nt, Homo sapiens
  misc_RNA (1)...(19): siRNA sense strand
caugcaaacuguggagauc

SEQ ID NO: 537901 - RNA, 19 nt, Homo sapiens
  misc_RNA (1)...(19): siRNA sense strand
ucaugaaggcccugcauca

SEQ ID NO: 537902 - RNA, 19 nt, Homo sapiens
  misc_RNA (1)...(19): siRNA sense strand
uggcagcaacacuguagua

SEQ ID NO: 537903 - RNA, 19 nt, Homo sapiens
  misc_RNA (1)...(19): siRNA sense strand
cgaaaguccgugaagaaag

SEQ ID NO: 537904 - RNA, 19 nt, Homo sapiens
  misc_RNA (1)...(19): siRNA sense strand
ugaugaggaugaggacuuc

SEQ ID NO: 537905 - RNA, 19 nt, Homo sapiens
  misc_RNA (1)...(19): siRNA sense strand
gcagucaacaacacagagu

SEQ ID NO: 537906 - RNA, 19 nt, Homo sapiens
  misc_RNA (1)...(19): siRNA sense strand
gggaugcagucaacaacac

SEQ ID NO: 537907 - RNA, 19 nt, Homo sapiens
  misc_RNA (1)...(19): siRNA sense strand
uaagcaugcaguggacaua

SEQ ID NO: 537908 - RNA, 19 nt, Homo sapiens
  misc_RNA (1)...(19): siRNA sense strand
ccagggacagauccagaaa

SEQ ID NO: 537909 - RNA, 19 nt, Homo sapiens
  misc_RNA (1)...(19): siRNA sense strand
ugacccgccugguggugaa

SEQ ID NO: 537910 - RNA, 19 nt, Homo sapiens
  misc_RNA (1)...(19): siRNA sense strand
gcaggaccaagcccuaaag

SEQ ID NO: 537911 - RNA, 19 nt, Homo sapiens
  misc_RNA (1)...(19): siRNA sense strand
ggaggagauugagcauuuu

SEQ ID NO: 537912 - RNA, 19 nt, Homo sapiens
  misc_RNA (1)...(19): siRNA sense strand
ggaccacaagaaacgcaaa

SEQ ID NO: 537913 - RNA, 19 nt, Homo sapiens
  misc_RNA (1)...(19): siRNA sense strand
caaacuguggagaucacua

SEQ ID NO: 537914 - RNA, 19 nt, Homo sapiens
  misc_RNA (1)...(19): siRNA sense strand
cagaugaaggagaacuauu

SEQ ID NO: 537915 - RNA, 19 nt, Homo sapiens
  misc_RNA (1)...(19): siRNA sense strand
uccagaaacugagaagcuu

SEQ ID NO: 537916 - RNA, 19 nt, Homo sapiens
  misc_RNA (1)...(19): siRNA sense strand
gaggacaccacggaugaug

SEQ ID NO: 537917 - RNA, 19 nt, Homo sapiens
  misc_RNA (1)...(19): siRNA sense strand
gggcacugcgacuuuguga

SEQ ID NO: 537918 - RNA, 19 nt, Homo sapiens
  misc_RNA (1)...(19): siRNA sense strand
caaccagcaguacuucugu

SEQ ID NO: 537919 - RNA, 19 nt, Homo sapiens
  misc_RNA (1)...(19): siRNA sense strand
gauggagaacugagcaagu

SEQ ID NO: 537920 - RNA, 19 nt, Homo sapiens
  misc_RNA (1)...(19): siRNA sense strand
uggaggacaccacggauga

SEQ ID NO: 537921 - RNA, 19 nt, Homo sapiens
  misc_RNA (1)...(19): siRNA sense strand
gcaaguucgugaaggauuu

SEQ ID NO: 537922 - RNA, 19 nt, Homo sapiens
  misc_RNA (1)...(19): siRNA sense strand
gggcaagcuugaucccuau

SEQ ID NO: 537923 - RNA, 19 nt, Homo sapiens
  misc_RNA (1)...(19): siRNA sense strand
gugaaggauuucucaggaa

SEQ ID NO: 537924 - RNA, 19 nt, Homo sapiens
  misc_RNA (1)...(19): siRNA sense strand
ugagcaaguucgugaagga

SEQ ID NO: 537925 - RNA, 19 nt, Homo sapiens
  misc_RNA (1)...(19): siRNA sense strand
caccacggaugauggagaa

SEQ ID NO: 537926 - RNA, 19 nt, Homo sapiens
  misc_RNA (1)...(19): siRNA sense strand
ggacaccacggaugaugga

SEQ ID NO: 537927 - RNA, 19 nt, Homo sapiens
  misc_RNA (1)...(19): siRNA sense strand
gcuaagaccugggcaucca

SEQ ID NO: 537928 - RNA, 19 nt, Homo sapiens
  misc_RNA (1)...(19): siRNA sense strand
ggaccucuaugaugaugac

SEQ ID NO: 537929 - RNA, 19 nt, Homo sapiens
  misc_RNA (1)...(19): siRNA sense strand
gcaagcuugaucccuauga

SEQ ID NO: 537930 - RNA, 19 nt, Homo sapiens
  misc_RNA (1)...(19): siRNA sense strand
caagcuugaucccuaugau

SEQ ID NO: 537931 - RNA, 19 nt, Homo sapiens
  misc_RNA (1)...(19): siRNA sense strand
gaugaugaccuggaguuca

SEQ ID NO: 537932 - RNA, 19 nt, Homo sapiens
  misc_RNA (1)...(19): siRNA sense strand
ccucugacaaccagcagua

SEQ ID NO: 537933 - RNA, 19 nt, Homo sapiens
  misc_RNA (1)...(19): siRNA sense strand
uggaggacaccacggauga

SEQ ID NO: 537934 - RNA, 19 nt, Homo sapiens
  misc_RNA (1)...(19): siRNA sense strand
caaccagcaguacuucugu

SEQ ID NO: 537935 - RNA, 19 nt, Homo sapiens
  misc_RNA (1)...(19): siRNA sense strand
gauggagaacugagcaagu

SEQ ID NO: 537936 - RNA, 19 nt, Homo sapiens
  misc_RNA (1)...(19): siRNA sense strand
gaggacaccacggaugaug

SEQ ID NO: 537937 - RNA, 19 nt, Homo sapiens
  misc_RNA (1)...(19): siRNA sense strand
ccccggaccucuaugauga

SEQ ID NO: 537938 - RNA, 19 nt, Homo sapiens
  misc_RNA (1)...(19): siRNA sense strand
gaaagaacauccaagacaa

SEQ ID NO: 537939 - RNA, 19 nt, Homo sapiens
  misc_RNA (1)...(19): siRNA sense strand
gggaggagauugagcauuu

SEQ ID NO: 537940 - RNA, 19 nt, Homo sapiens
  misc_RNA (1)...(19): siRNA sense strand
ggacagauccagaaacuga

SEQ ID NO: 537941 - RNA, 19 nt, Homo sapiens
  misc_RNA (1)...(19): siRNA sense strand
gcaaguucgugaaggauuu

SEQ ID NO: 537942 - RNA, 19 nt, Homo sapiens
  misc_RNA (1)...(19): siRNA sense strand
ggaagccuguggcagaaua

SEQ ID NO: 537943 - RNA, 19 nt, Homo sapiens
  misc_RNA (1)...(19): siRNA sense strand
gaagagaggaucaugcaaa

SEQ ID NO: 537944 - RNA, 19 nt, Homo sapiens
  misc_RNA (1)...(19): siRNA sense strand
ggaccaagcccuaaaggaa

SEQ ID NO: 537945 - RNA, 19 nt, Homo sapiens
  misc_RNA (1)...(19): siRNA sense strand
gaaaguccgugaagaaagg

SEQ ID NO: 537946 - RNA, 19 nt, Homo sapiens
  misc_RNA (1)...(19): siRNA sense strand
gccauuggauguugaauuc

SEQ ID NO: 537947 - RNA, 19 nt, Homo sapiens
  misc_RNA (1)...(19): siRNA sense strand
ggaugaggacuucaaauug

SEQ ID NO: 537948 - RNA, 19 nt, Homo sapiens
  misc_RNA (1)...(19): siRNA sense strand
gaugaggacuucaaauugc

SEQ ID NO: 537949 - RNA, 19 nt, Homo sapiens
  misc_RNA (1)...(19): siRNA sense strand
ggagacacauuaugagaac

SEQ ID NO: 537950 - RNA, 19 nt, Homo sapiens
  misc_RNA (1)...(19): siRNA sense strand
cagcaacacuguaguagag

SEQ ID NO: 537951 - RNA, 19 nt, Homo sapiens
  misc_RNA (1)...(19): siRNA sense strand
gaugaaggagaacuauuaa

SEQ ID NO: 537952 - RNA, 19 nt, Homo sapiens
  misc_RNA (1)...(19): siRNA sense strand
agaugaaggagaacuauua

SEQ ID NO: 537953 - RNA, 19 nt, Homo sapiens
  misc_RNA (1)...(19): siRNA sense strand
cgaaagaacauccaagaca

SEQ ID NO: 537954 - RNA, 19 nt, Homo sapiens
  misc_RNA (1)...(19): siRNA sense strand
gaccaagcccuaaaggaaa

SEQ ID NO: 537955 - RNA, 19 nt, Homo sapiens
  misc_RNA (1)...(19): siRNA sense strand
caaggaguaugugggcuuu

SEQ ID NO: 537956 - RNA, 19 nt, Homo sapiens
  misc_RNA (1)...(19): siRNA sense strand
ggaaucaagaucuaucaau

SEQ ID NO: 537957 - RNA, 19 nt, Homo sapiens
  misc_RNA (1)...(19): siRNA sense strand
gcacugcgacuuugugaag

SEQ ID NO: 537958 - RNA, 19 nt, Homo sapiens
  misc_RNA (1)...(19): siRNA sense strand
gagaggaucaugcaaacug

SEQ ID NO: 537959 - RNA, 19 nt, Homo sapiens
  misc_RNA (1)...(19): siRNA sense strand
caaacugacucgggaaagu

SEQ ID NO: 537960 - RNA, 19 nt, Homo sapiens
  misc_RNA (1)...(19): siRNA sense strand
gggcaagcuugaucccuau

SEQ ID NO: 537961 - RNA, 19 nt, Homo sapiens
  misc_RNA (1)...(19): siRNA sense strand
uaaaggaaagcaucccauu

SEQ ID NO: 537962 - RNA, 19 nt, Homo sapiens
  misc_RNA (1)...(19): siRNA sense strand
gaaacuucuuggugcugaa

SEQ ID NO: 537963 - RNA, 19 nt, Homo sapiens
  misc_RNA (1)...(19): siRNA sense strand
gugaaggauuucucaggaa

SEQ ID NO: 537964 - RNA, 19 nt, Homo sapiens
  misc_RNA (1)...(19): siRNA sense strand
caucccauuugcaguaauu

SEQ ID NO: 537965 - RNA, 19 nt, Homo sapiens
  misc_RNA (1)...(19): siRNA sense strand
auacauugaucagcaguuu

SEQ ID NO: 537966 - RNA, 19 nt, Homo sapiens
  misc_RNA (1)...(19): siRNA sense strand
ccaaccaaguccaccgaaa

SEQ ID NO: 537967 - RNA, 19 nt, Homo sapiens
  misc_RNA (1)...(19): siRNA sense strand
aaggaaagcaucccauuug

SEQ ID NO: 537968 - RNA, 19 nt, Homo sapiens
  misc_RNA (1)...(19): siRNA sense strand
agaguggccugaaccgaaa

SEQ ID NO: 537969 - RNA, 19 nt, Homo sapiens
  misc_RNA (1)...(19): siRNA sense strand
aauccacacuugucaauag

SEQ ID NO: 537970 - RNA, 19 nt, Homo sapiens
  misc_RNA (1)...(19): siRNA sense strand
aaaggaaagcaucccauuu

SEQ ID NO: 537971 - RNA, 19 nt, Homo sapiens
  misc_RNA (1)...(19): siRNA sense strand
ggagaucacuaagcaugca

SEQ ID NO: 537972 - RNA, 19 nt, Homo sapiens
  misc_RNA (1)...(19): siRNA sense strand
ugagcaaguucgugaagga

SEQ ID NO: 537973 - RNA, 19 nt, Homo sapiens
  misc_RNA (1)...(19): siRNA sense strand
ggacaccacggaugaugga

SEQ ID NO: 537974 - RNA, 19 nt, Homo sapiens
  misc_RNA (1)...(19): siRNA sense strand
ccagaaacugagaagcuua

SEQ ID NO: 537975 - RNA, 19 nt, Homo sapiens
  misc_RNA (1)...(19): siRNA sense strand
caccacggaugauggagaa

SEQ ID NO: 537976 - RNA, 19 nt, Homo sapiens
  misc_RNA (1)...(19): siRNA sense strand
gcaaauccacacuugucaa

SEQ ID NO: 537977 - RNA, 19 nt, Homo sapiens
  misc_RNA (1)...(19): siRNA sense strand
gggagacacauuaugagaa

SEQ ID NO: 537978 - RNA, 19 nt, Homo sapiens
  misc_RNA (1)...(19): siRNA sense strand
gcuaagaccugggcaucca

SEQ ID NO: 537979 - RNA, 19 nt, Homo sapiens
  misc_RNA (1)...(19): siRNA sense strand
aaacuguggagaucacuaa

SEQ ID NO: 537980 - RNA, 19 nt, Homo sapiens
  misc_RNA (1)...(19): siRNA sense strand
caaauccacacuugucaau

SEQ ID NO: 537981 - RNA, 19 nt, Homo sapiens
  misc_RNA (1)...(19): siRNA sense strand
gaaccgaaagaacauccaa

SEQ ID NO: 537982 - RNA, 19 nt, Homo sapiens
  misc_RNA (1)...(19): siRNA sense strand
aagcaucccauuugcagua

SEQ ID NO: 537983 - RNA, 19 nt, Homo sapiens
  misc_RNA (1)...(19): siRNA sense strand
gcagcaacacuguaguaga

SEQ ID NO: 537984 - RNA, 19 nt, Homo sapiens
  misc_RNA (1)...(19): siRNA sense strand
ggaccucuaugaugaugac

SEQ ID NO: 537985 - RNA, 19 nt, Homo sapiens
  misc_RNA (1)...(19): siRNA sense strand
gggcaaauccacacuuguc

SEQ ID NO: 537986 - RNA, 19 nt, Homo sapiens
  misc_RNA (1)...(19): siRNA sense strand
ccagggcacugcgacuuug

SEQ ID NO: 537987 - RNA, 19 nt, Homo sapiens
  misc_RNA (1)...(19): siRNA sense strand
ggaaagcaucccauuugca

SEQ ID NO: 537988 - RNA, 19 nt, Homo sapiens
  misc_RNA (1)...(19): siRNA sense strand
gcaagcuugaucccuauga

SEQ ID NO: 537989 - RNA, 19 nt, Homo sapiens
  misc_RNA (1)...(19): siRNA sense strand
caagcuugaucccuaugau

SEQ ID NO: 537990 - RNA, 19 nt, Homo sapiens
  misc_RNA (1)...(19): siRNA sense strand
ggccugaaccgaaagaaca

SEQ ID NO: 537991 - RNA, 19 nt, Homo sapiens
  misc_RNA (1)...(19): siRNA sense strand
gcaggagaugcuacacaaa

SEQ ID NO: 537992 - RNA, 19 nt, Homo sapiens
  misc_RNA (1)...(19): siRNA sense strand
ugcaggagaugcuacacaa

SEQ ID NO: 537993 - RNA, 19 nt, Homo sapiens
  misc_RNA (1)...(19): siRNA sense strand
aggaugaggacuucaaauu

SEQ ID NO: 537994 - RNA, 19 nt, Homo sapiens
  misc_RNA (1)...(19): siRNA sense strand
gcaugcaguggacauagaa

SEQ ID NO: 537995 - RNA, 19 nt, Homo sapiens
  misc_RNA (1)...(19): siRNA sense strand
ggagaugcuacacaaaaua

SEQ ID NO: 537996 - RNA, 19 nt, Homo sapiens
  misc_RNA (1)...(19): siRNA sense strand
gagaagcuuauccgagaga

SEQ ID NO: 537997 - RNA, 19 nt, Homo sapiens
  misc_RNA (1)...(19): siRNA sense strand
agacacauuaugagaacua

SEQ ID NO: 537998 - RNA, 19 nt, Homo sapiens
  misc_RNA (1)...(19): siRNA sense strand
gcaguggacauagaagaga

SEQ ID NO: 537999 - RNA, 19 nt, Homo sapiens
  misc_RNA (1)...(19): siRNA sense strand
caaccaaguccaccgaaag

SEQ ID NO: 538000 - RNA, 19 nt, Homo sapiens
  misc_RNA (1)...(19): siRNA sense strand
gcacugcugccuguacuuc

SEQ ID NO: 538001 - RNA, 19 nt, Homo sapiens
  misc_RNA (1)...(19): siRNA sense strand
caguggacauagaagagaa

SEQ ID NO: 538002 - RNA, 19 nt, Homo sapiens
  misc_RNA (1)...(19): siRNA sense strand
ccgaaaguccgugaagaaa

SEQ ID NO: 538003 - RNA, 19 nt, Homo sapiens
  misc_RNA (1)...(19): siRNA sense strand
gaagcuuauccgagagaaa

SEQ ID NO: 538004 - RNA, 19 nt, Homo sapiens
  misc_RNA (1)...(19): siRNA sense strand
acauugaucagcaguuuga

SEQ ID NO: 538005 - RNA, 19 nt, Homo sapiens
  misc_RNA (1)...(19): siRNA sense strand
gaugaugaccuggaguuca

SEQ ID NO: 538006 - RNA, 19 nt, Homo sapiens
  misc_RNA (1)...(19): siRNA sense strand
caccgaaaguccgugaaga

SEQ ID NO: 538007 - RNA, 19 nt, Homo sapiens
  misc_RNA (1)...(19): siRNA sense strand
acugacaccucccgaagug

SEQ ID NO: 538008 - RNA, 19 nt, Homo sapiens
  misc_RNA (1)...(19): siRNA sense strand
ggccauuggauguugaauu

SEQ ID NO: 538009 - RNA, 19 nt, Homo sapiens
  misc_RNA (1)...(19): siRNA sense strand
gggcaucguggaaguggaa

SEQ ID NO: 538010 - RNA, 19 nt, Homo sapiens
  misc_RNA (1)...(19): siRNA sense strand
gcaguaauuggcagcaaca

SEQ ID NO: 538011 - RNA, 19 nt, Homo sapiens
  misc_RNA (1)...(19): siRNA sense strand
gcuaaggcagacacacuga

SEQ ID NO: 538012 - RNA, 19 nt, Homo sapiens
  misc_RNA (1)...(19): siRNA sense strand
gggucaacaucgugccuau

SEQ ID NO: 538013 - RNA, 19 nt, Homo sapiens
  misc_RNA (1)...(19): siRNA sense strand
cauuggauguugaauucau

SEQ ID NO: 538014 - RNA, 19 nt, Homo sapiens
  misc_RNA (1)...(19): siRNA sense strand
aagagaggaucaugcaaac

SEQ ID NO: 538015 - RNA, 19 nt, Homo sapiens
  misc_RNA (1)...(19): siRNA sense strand
cagaaacugagaagcuuau

SEQ ID NO: 538016 - RNA, 19 nt, Homo sapiens
  misc_RNA (1)...(19): siRNA sense strand
ccucugacaaccagcagua

SEQ ID NO: 538017 - RNA, 19 nt, Homo sapiens
  misc_RNA (1)...(19): siRNA sense strand
caugcaaacuguggagauc

SEQ ID NO: 538018 - RNA, 19 nt, Homo sapiens
  misc_RNA (1)...(19): siRNA sense strand
ucaugaaggcccugcauca

SEQ ID NO: 538019 - RNA, 19 nt, Homo sapiens
  misc_RNA (1)...(19): siRNA sense strand
uggcagcaacacuguagua

SEQ ID NO: 538020 - RNA, 19 nt, Homo sapiens
  misc_RNA (1)...(19): siRNA sense strand
cgaaaguccgugaagaaag

SEQ ID NO: 538021 - RNA, 19 nt, Homo sapiens
  misc_RNA (1)...(19): siRNA sense strand
ugaugaggaugaggacuuc

SEQ ID NO: 538022 - RNA, 19 nt, Homo sapiens
  misc_RNA (1)...(19): siRNA sense strand
gcagucaacaacacagagu

SEQ ID NO: 538023 - RNA, 19 nt, Homo sapiens
  misc_RNA (1)...(19): siRNA sense strand
gggaugcagucaacaacac

SEQ ID NO: 538024 - RNA, 19 nt, Homo sapiens
  misc_RNA (1)...(19): siRNA sense strand
uaagcaugcaguggacaua

SEQ ID NO: 538025 - RNA, 19 nt, Homo sapiens
  misc_RNA (1)...(19): siRNA sense strand
ccagggacagauccagaaa

SEQ ID NO: 538026 - RNA, 19 nt, Homo sapiens
  misc_RNA (1)...(19): siRNA sense strand
ugacccgccugguggugaa

SEQ ID NO: 538027 - RNA, 19 nt, Homo sapiens
  misc_RNA (1)...(19): siRNA sense strand
gcaggaccaagcccuaaag

SEQ ID NO: 538028 - RNA, 19 nt, Homo sapiens
  misc_RNA (1)...(19): siRNA sense strand
ggaggagauugagcauuuu

SEQ ID NO: 538029 - RNA, 19 nt, Homo sapiens
  misc_RNA (1)...(19): siRNA sense strand
ggaccacaagaaacgcaaa

SEQ ID NO: 538030 - RNA, 19 nt, Homo sapiens
  misc_RNA (1)...(19): siRNA sense strand
caaacuguggagaucacua

SEQ ID NO: 538031 - RNA, 19 nt, Homo sapiens
  misc_RNA (1)...(19): siRNA sense strand
cagaugaaggagaacuauu

SEQ ID NO: 538032 - RNA, 19 nt, Homo sapiens
  misc_RNA (1)...(19): siRNA sense strand
uccagaaacugagaagcuu

SEQ ID NO: 538033 - RNA, 19 nt, Homo sapiens
  misc_RNA (1)...(19): siRNA sense strand
gaggacaccacggaugaug

SEQ ID NO: 538034 - RNA, 19 nt, Homo sapiens
  misc_RNA (1)...(19): siRNA sense strand
gggcacugcgacuuuguga

SEQ ID NO: 538035 - RNA, 19 nt, Homo sapiens
  misc_RNA (1)...(19): siRNA sense strand
caaccagcaguacuucugu

SEQ ID NO: 538036 - RNA, 19 nt, Homo sapiens
  misc_RNA (1)...(19): siRNA sense strand
gauggagaacugagcaagu

SEQ ID NO: 538037 - RNA, 19 nt, Homo sapiens
  misc_RNA (1)...(19): siRNA sense strand
uggaggacaccacggauga

SEQ ID NO: 538038 - RNA, 19 nt, Homo sapiens
  misc_RNA (1)...(19): siRNA sense strand
gaaagaacauccaagacaa

SEQ ID NO: 538039 - RNA, 19 nt, Homo sapiens
  misc_RNA (1)...(19): siRNA sense strand
gcaaguucgugaaggauuu

SEQ ID NO: 538040 - RNA, 19 nt, Homo sapiens
  misc_RNA (1)...(19): siRNA sense strand
ggaagccuguggcagaaua

SEQ ID NO: 538041 - RNA, 19 nt, Homo sapiens
  misc_RNA (1)...(19): siRNA sense strand
gaagagaggaucaugcaaa

SEQ ID NO: 538042 - RNA, 19 nt, Homo sapiens
  misc_RNA (1)...(19): siRNA sense strand
gaaaguccgugaagaaagg

SEQ ID NO: 538043 - RNA, 19 nt, Homo sapiens
  misc_RNA (1)...(19): siRNA sense strand
cgaaagaacauccaagaca

SEQ ID NO: 538044 - RNA, 19 nt, Homo sapiens
  misc_RNA (1)...(19): siRNA sense strand
caaggaguaugugggcuuu

SEQ ID NO: 538045 - RNA, 19 nt, Homo sapiens
  misc_RNA (1)...(19): siRNA sense strand
gagaggaucaugcaaacug

SEQ ID NO: 538046 - RNA, 19 nt, Homo sapiens
  misc_RNA (1)...(19): siRNA sense strand
gggcaagcuugaucccuau

SEQ ID NO: 538047 - RNA, 19 nt, Homo sapiens
  misc_RNA (1)...(19): siRNA sense strand
gugaaggauuucucaggaa

SEQ ID NO: 538048 - RNA, 19 nt, Homo sapiens
  misc_RNA (1)...(19): siRNA sense strand
auacauugaucagcaguuu

SEQ ID NO: 538049 - RNA, 19 nt, Homo sapiens
  misc_RNA (1)...(19): siRNA sense strand
gaaacuucuuggugcugaa

SEQ ID NO: 538050 - RNA, 19 nt, Homo sapiens
  misc_RNA (1)...(19): siRNA sense strand
ccaaccaaguccaccgaaa

SEQ ID NO: 538051 - RNA, 19 nt, Homo sapiens
  misc_RNA (1)...(19): siRNA sense strand
agaguggccugaaccgaaa

SEQ ID NO: 538052 - RNA, 19 nt, Homo sapiens
  misc_RNA (1)...(19): siRNA sense strand
aauccacacuugucaauag

SEQ ID NO: 538053 - RNA, 19 nt, Homo sapiens
  misc_RNA (1)...(19): siRNA sense strand
ggagaucacuaagcaugca

SEQ ID NO: 538054 - RNA, 19 nt, Homo sapiens
  misc_RNA (1)...(19): siRNA sense strand
ugagcaaguucgugaagga

SEQ ID NO: 538055 - RNA, 19 nt, Homo sapiens
  misc_RNA (1)...(19): siRNA sense strand
caccacggaugauggagaa

SEQ ID NO: 538056 - RNA, 19 nt, Homo sapiens
  misc_RNA (1)...(19): siRNA sense strand
ggacaccacggaugaugga

SEQ ID NO: 538057 - RNA, 19 nt, Homo sapiens
  misc_RNA (1)...(19): siRNA sense strand
gcuaagaccugggcaucca

SEQ ID NO: 538058 - RNA, 19 nt, Homo sapiens
  misc_RNA (1)...(19): siRNA sense strand
aaacuguggagaucacuaa

SEQ ID NO: 538059 - RNA, 19 nt, Homo sapiens
  misc_RNA (1)...(19): siRNA sense strand
gcaaauccacacuugucaa

SEQ ID NO: 538060 - RNA, 19 nt, Homo sapiens
  misc_RNA (1)...(19): siRNA sense strand
caaauccacacuugucaau

SEQ ID NO: 538061 - RNA, 19 nt, Homo sapiens
  misc_RNA (1)...(19): siRNA sense strand
gaaccgaaagaacauccaa

SEQ ID NO: 538062 - RNA, 19 nt, Homo sapiens
  misc_RNA (1)...(19): siRNA sense strand
ggaccucuaugaugaugac

SEQ ID NO: 538063 - RNA, 19 nt, Homo sapiens
  misc_RNA (1)...(19): siRNA sense strand
gggcaaauccacacuuguc

SEQ ID NO: 538064 - RNA, 19 nt, Homo sapiens
  misc_RNA (1)...(19): siRNA sense strand
gcaagcuugaucccuauga

SEQ ID NO: 538065 - RNA, 19 nt, Homo sapiens
  misc_RNA (1)...(19): siRNA sense strand
caagcuugaucccuaugau

SEQ ID NO: 538066 - RNA, 19 nt, Homo sapiens
  misc_RNA (1)...(19): siRNA sense strand
ggccugaaccgaaagaaca

SEQ ID NO: 538067 - RNA, 19 nt, Homo sapiens
  misc_RNA (1)...(19): siRNA sense strand
gcaugcaguggacauagaa

SEQ ID NO: 538068 - RNA, 19 nt, Homo sapiens
  misc_RNA (1)...(19): siRNA sense strand
gcaguggacauagaagaga

SEQ ID NO: 538069 - RNA, 19 nt, Homo sapiens
  misc_RNA (1)...(19): siRNA sense strand
caaccaaguccaccgaaag

SEQ ID NO: 538070 - RNA, 19 nt, Homo sapiens
  misc_RNA (1)...(19): siRNA sense strand
gcacugcugccuguacuuc

SEQ ID NO: 538071 - RNA, 19 nt, Homo sapiens
  misc_RNA (1)...(19): siRNA sense strand
caguggacauagaagagaa

SEQ ID NO: 538072 - RNA, 19 nt, Homo sapiens
  misc_RNA (1)...(19): siRNA sense strand
gaugaugaccuggaguuca

SEQ ID NO: 538073 - RNA, 19 nt, Homo sapiens
  misc_RNA (1)...(19): siRNA sense strand
acauugaucagcaguuuga

SEQ ID NO: 538074 - RNA, 19 nt, Homo sapiens
  misc_RNA (1)...(19): siRNA sense strand
ccgaaaguccgugaagaaa

SEQ ID NO: 538075 - RNA, 19 nt, Homo sapiens
  misc_RNA (1)...(19): siRNA sense strand
caccgaaaguccgugaaga

SEQ ID NO: 538076 - RNA, 19 nt, Homo sapiens
  misc_RNA (1)...(19): siRNA sense strand
ccucugacaaccagcagua

SEQ ID NO: 538077 - RNA, 19 nt, Homo sapiens
  misc_RNA (1)...(19): siRNA sense strand
caugcaaacuguggagauc

SEQ ID NO: 538078 - RNA, 19 nt, Homo sapiens
  misc_RNA (1)...(19): siRNA sense strand
aagagaggaucaugcaaac

SEQ ID NO: 538079 - RNA, 19 nt, Homo sapiens
  misc_RNA (1)...(19): siRNA sense strand
cgaaaguccgugaagaaag

SEQ ID NO: 538080 - RNA, 19 nt, Homo sapiens
  misc_RNA (1)...(19): siRNA sense strand
gcagucaacaacacagagu

SEQ ID NO: 538081 - RNA, 19 nt, Homo sapiens
  misc_RNA (1)...(19): siRNA sense strand
gggaugcagucaacaacac

SEQ ID NO: 538082 - RNA, 19 nt, Homo sapiens
  misc_RNA (1)...(19): siRNA sense strand
uaagcaugcaguggacaua

SEQ ID NO: 538083 - RNA, 19 nt, Homo sapiens
  misc_RNA (1)...(19): siRNA sense strand
gaggacaccacggaugaug

SEQ ID NO: 538084 - RNA, 19 nt, Homo sapiens
  misc_RNA (1)...(19): siRNA sense strand
uggaggacaccacggauga

SEQ ID NO: 538085 - RNA, 19 nt, Homo sapiens
  misc_RNA (1)...(19): siRNA sense strand
caaacuguggagaucacua

SEQ ID NO: 538086 - RNA, 19 nt, Homo sapiens
  misc_RNA (1)...(19): siRNA sense strand
caaccagcaguacuucugu

SEQ ID NO: 538087 - RNA, 19 nt, Homo sapiens
  misc_RNA (1)...(19): siRNA sense strand
gauggagaacugagcaagu

SEQ ID NO: 538088 - RNA, 19 nt, Homo sapiens
  misc_RNA (1)...(19): siRNA sense strand
cugggcaaauccacacuug

SEQ ID NO: 538089 - RNA, 19 nt, Homo sapiens
  misc_RNA (1)...(19): siRNA sense strand
gccuguggcagaauacauu

SEQ ID NO: 538090 - RNA, 19 nt, Homo sapiens
  misc_RNA (1)...(19): siRNA sense strand
agaggaucaugcaaacugu

SEQ ID NO: 538091 - RNA, 19 nt, Homo sapiens
  misc_RNA (1)...(19): siRNA sense strand
ggcugcggcucaccauugu

SEQ ID NO: 538092 - RNA, 19 nt, Homo sapiens
  misc_RNA (1)...(19): siRNA sense strand
ggcaaauccacacuuguca

SEQ ID NO: 538093 - RNA, 19 nt, Homo sapiens
  misc_RNA (1)...(19): siRNA sense strand
gcaguuugagcaguauuuc

SEQ ID NO: 538094 - RNA, 19 nt, Homo sapiens
  misc_RNA (1)...(19): siRNA sense strand
ccccggaccucuaugauga

SEQ ID NO: 538095 - RNA, 19 nt, Homo sapiens
  misc_RNA (1)...(19): siRNA sense strand
cuguggagaucacuaagca

SEQ ID NO: 538096 - RNA, 19 nt, Homo sapiens
  misc_RNA (1)...(19): siRNA sense strand
agacgagaguggccugaac

SEQ ID NO: 538097 - RNA, 19 nt, Homo sapiens
  misc_RNA (1)...(19): siRNA sense strand
gaaagaacauccaagacaa

SEQ ID NO: 538098 - RNA, 19 nt, Homo sapiens
  misc_RNA (1)...(19): siRNA sense strand
gggaggagauugagcauuu

SEQ ID NO: 538099 - RNA, 19 nt, Homo sapiens
  misc_RNA (1)...(19): siRNA sense strand
ggacagauccagaaacuga

SEQ ID NO: 538100 - RNA, 19 nt, Homo sapiens
  misc_RNA (1)...(19): siRNA sense strand
gcaaguucgugaaggauuu

SEQ ID NO: 538101 - RNA, 19 nt, Homo sapiens
  misc_RNA (1)...(19): siRNA sense strand
ggaagccuguggcagaaua

SEQ ID NO: 538102 - RNA, 19 nt, Homo sapiens
  misc_RNA (1)...(19): siRNA sense strand
gaagagaggaucaugcaaa

SEQ ID NO: 538103 - RNA, 19 nt, Homo sapiens
  misc_RNA (1)...(19): siRNA sense strand
ggaccaagcccuaaaggaa

SEQ ID NO: 538104 - RNA, 19 nt, Homo sapiens
  misc_RNA (1)...(19): siRNA sense strand
gaaaguccgugaagaaagg

SEQ ID NO: 538105 - RNA, 19 nt, Homo sapiens
  misc_RNA (1)...(19): siRNA sense strand
gccauuggauguugaauuc

SEQ ID NO: 538106 - RNA, 19 nt, Homo sapiens
  misc_RNA (1)...(19): siRNA sense strand
ggaugaggacuucaaauug

SEQ ID NO: 538107 - RNA, 19 nt, Homo sapiens
  misc_RNA (1)...(19): siRNA sense strand
gaugaggacuucaaauugc

SEQ ID NO: 538108 - RNA, 19 nt, Homo sapiens
  misc_RNA (1)...(19): siRNA sense strand
ggagacacauuaugagaac

SEQ ID NO: 538109 - RNA, 19 nt, Homo sapiens
  misc_RNA (1)...(19): siRNA sense strand
cagcaacacuguaguagag

SEQ ID NO: 538110 - RNA, 19 nt, Homo sapiens
  misc_RNA (1)...(19): siRNA sense strand
gaugaaggagaacuauuaa

SEQ ID NO: 538111 - RNA, 19 nt, Homo sapiens
  misc_RNA (1)...(19): siRNA sense strand
agaugaaggagaacuauua

SEQ ID NO: 538112 - RNA, 19 nt, Homo sapiens
  misc_RNA (1)...(19): siRNA sense strand
cgaaagaacauccaagaca

SEQ ID NO: 538113 - RNA, 19 nt, Homo sapiens
  misc_RNA (1)...(19): siRNA sense strand
gaccaagcccuaaaggaaa

SEQ ID NO: 538114 - RNA, 19 nt, Homo sapiens
  misc_RNA (1)...(19): siRNA sense strand
caaggaguaugugggcuuu

SEQ ID NO: 538115 - RNA, 19 nt, Homo sapiens
  misc_RNA (1)...(19): siRNA sense strand
ggaaucaagaucuaucaau

SEQ ID NO: 538116 - RNA, 19 nt, Homo sapiens
  misc_RNA (1)...(19): siRNA sense strand
gcacugcgacuuugugaag

SEQ ID NO: 538117 - RNA, 19 nt, Homo sapiens
  misc_RNA (1)...(19): siRNA sense strand
gagaggaucaugcaaacug

SEQ ID NO: 538118 - RNA, 19 nt, Homo sapiens
  misc_RNA (1)...(19): siRNA sense strand
caaacugacucgggaaagu

SEQ ID NO: 538119 - RNA, 19 nt, Homo sapiens
  misc_RNA (1)...(19): siRNA sense strand
gggcaagcuugaucccuau

SEQ ID NO: 538120 - RNA, 19 nt, Homo sapiens
  misc_RNA (1)...(19): siRNA sense strand
uaaaggaaagcaucccauu

SEQ ID NO: 538121 - RNA, 19 nt, Homo sapiens
  misc_RNA (1)...(19): siRNA sense strand
gaaacuucuuggugcugaa

SEQ ID NO: 538122 - RNA, 19 nt, Homo sapiens
  misc_RNA (1)...(19): siRNA sense strand
gugaaggauuucucaggaa

SEQ ID NO: 538123 - RNA, 19 nt, Homo sapiens
  misc_RNA (1)...(19): siRNA sense strand
caucccauuugcaguaauu

SEQ ID NO: 538124 - RNA, 19 nt, Homo sapiens
  misc_RNA (1)...(19): siRNA sense strand
auacauugaucagcaguuu

SEQ ID NO: 538125 - RNA, 19 nt, Homo sapiens
  misc_RNA (1)...(19): siRNA sense strand
ccaaccaaguccaccgaaa

SEQ ID NO: 538126 - RNA, 19 nt, Homo sapiens
  misc_RNA (1)...(19): siRNA sense strand
aaggaaagcaucccauuug

SEQ ID NO: 538127 - RNA, 19 nt, Homo sapiens
  misc_RNA (1)...(19): siRNA sense strand
agaguggccugaaccgaaa

SEQ ID NO: 538128 - RNA, 19 nt, Homo sapiens
  misc_RNA (1)...(19): siRNA sense strand
aauccacacuugucaauag

SEQ ID NO: 538129 - RNA, 19 nt, Homo sapiens
  misc_RNA (1)...(19): siRNA sense strand
aaaggaaagcaucccauuu

SEQ ID NO: 538130 - RNA, 19 nt, Homo sapiens
  misc_RNA (1)...(19): siRNA sense strand
ggagaucacuaagcaugca

SEQ ID NO: 538131 - RNA, 19 nt, Homo sapiens
  misc_RNA (1)...(19): siRNA sense strand
ugagcaaguucgugaagga

SEQ ID NO: 538132 - RNA, 19 nt, Homo sapiens
  misc_RNA (1)...(19): siRNA sense strand
ggacaccacggaugaugga

SEQ ID NO: 538133 - RNA, 19 nt, Homo sapiens
  misc_RNA (1)...(19): siRNA sense strand
ccagaaacugagaagcuua

SEQ ID NO: 538134 - RNA, 19 nt, Homo sapiens
  misc_RNA (1)...(19): siRNA sense strand
caccacggaugauggagaa

SEQ ID NO: 538135 - RNA, 19 nt, Homo sapiens
  misc_RNA (1)...(19): siRNA sense strand
gcaaauccacacuugucaa

SEQ ID NO: 538136 - RNA, 19 nt, Homo sapiens
  misc_RNA (1)...(19): siRNA sense strand
gggagacacauuaugagaa

SEQ ID NO: 538137 - RNA, 19 nt, Homo sapiens
  misc_RNA (1)...(19): siRNA sense strand
gcuaagaccugggcaucca

SEQ ID NO: 538138 - RNA, 19 nt, Homo sapiens
  misc_RNA (1)...(19): siRNA sense strand
aaacuguggagaucacuaa

SEQ ID NO: 538139 - RNA, 19 nt, Homo sapiens
  misc_RNA (1)...(19): siRNA sense strand
caaauccacacuugucaau

SEQ ID NO: 538140 - RNA, 19 nt, Homo sapiens
  misc_RNA (1)...(19): siRNA sense strand
gaaccgaaagaacauccaa

SEQ ID NO: 538141 - RNA, 19 nt, Homo sapiens
  misc_RNA (1)...(19): siRNA sense strand
aagcaucccauuugcagua

SEQ ID NO: 538142 - RNA, 19 nt, Homo sapiens
  misc_RNA (1)...(19): siRNA sense strand
gcagcaacacuguaguaga

SEQ ID NO: 538143 - RNA, 19 nt, Homo sapiens
  misc_RNA (1)...(19): siRNA sense strand
ggaccucuaugaugaugac

SEQ ID NO: 538144 - RNA, 19 nt, Homo sapiens
  misc_RNA (1)...(19): siRNA sense strand
gggcaaauccacacuuguc

SEQ ID NO: 538145 - RNA, 19 nt, Homo sapiens
  misc_RNA (1)...(19): siRNA sense strand
ccagggcacugcgacuuug

SEQ ID NO: 538146 - RNA, 19 nt, Homo sapiens
  misc_RNA (1)...(19): siRNA sense strand
ggaaagcaucccauuugca

SEQ ID NO: 538147 - RNA, 19 nt, Homo sapiens
  misc_RNA (1)...(19): siRNA sense strand
gcaagcuugaucccuauga

SEQ ID NO: 538148 - RNA, 19 nt, Homo sapiens
  misc_RNA (1)...(19): siRNA sense strand
caagcuugaucccuaugau

SEQ ID NO: 538149 - RNA, 19 nt, Homo sapiens
  misc_RNA (1)...(19): siRNA sense strand
ggccugaaccgaaagaaca

SEQ ID NO: 538150 - RNA, 19 nt, Homo sapiens
  misc_RNA (1)...(19): siRNA sense strand
gcaggagaugcuacacaaa

SEQ ID NO: 538151 - RNA, 19 nt, Homo sapiens
  misc_RNA (1)...(19): siRNA sense strand
ugcaggagaugcuacacaa

SEQ ID NO: 538152 - RNA, 19 nt, Homo sapiens
  misc_RNA (1)...(19): siRNA sense strand
aggaugaggacuucaaauu

SEQ ID NO: 538153 - RNA, 19 nt, Homo sapiens
  misc_RNA (1)...(19): siRNA sense strand
gcaugcaguggacauagaa

SEQ ID NO: 538154 - RNA, 19 nt, Homo sapiens
  misc_RNA (1)...(19): siRNA sense strand
ggagaugcuacacaaaaua

SEQ ID NO: 538155 - RNA, 19 nt, Homo sapiens
  misc_RNA (1)...(19): siRNA sense strand
gagaagcuuauccgagaga

SEQ ID NO: 538156 - RNA, 19 nt, Homo sapiens
  misc_RNA (1)...(19): siRNA sense strand
agacacauuaugagaacua

SEQ ID NO: 538157 - RNA, 19 nt, Homo sapiens
  misc_RNA (1)...(19): siRNA sense strand
gcaguggacauagaagaga

SEQ ID NO: 538158 - RNA, 19 nt, Homo sapiens
  misc_RNA (1)...(19): siRNA sense strand
caaccaaguccaccgaaag

SEQ ID NO: 538159 - RNA, 19 nt, Homo sapiens
  misc_RNA (1)...(19): siRNA sense strand
gcacugcugccuguacuuc

SEQ ID NO: 538160 - RNA, 19 nt, Homo sapiens
  misc_RNA (1)...(19): siRNA sense strand
caguggacauagaagagaa

SEQ ID NO: 538161 - RNA, 19 nt, Homo sapiens
  misc_RNA (1)...(19): siRNA sense strand
ccgaaaguccgugaagaaa

SEQ ID NO: 538162 - RNA, 19 nt, Homo sapiens
  misc_RNA (1)...(19): siRNA sense strand
gaagcuuauccgagagaaa

SEQ ID NO: 538163 - RNA, 19 nt, Homo sapiens
  misc_RNA (1)...(19): siRNA sense strand
acauugaucagcaguuuga

SEQ ID NO: 538164 - RNA, 19 nt, Homo sapiens
  misc_RNA (1)...(19): siRNA sense strand
gaugaugaccuggaguuca

SEQ ID NO: 538165 - RNA, 19 nt, Homo sapiens
  misc_RNA (1)...(19): siRNA sense strand
caccgaaaguccgugaaga

SEQ ID NO: 538166 - RNA, 19 nt, Homo sapiens
  misc_RNA (1)...(19): siRNA sense strand
acugacaccucccgaagug

SEQ ID NO: 538167 - RNA, 19 nt, Homo sapiens
  misc_RNA (1)...(19): siRNA sense strand
ggccauuggauguugaauu

SEQ ID NO: 538168 - RNA, 19 nt, Homo sapiens
  misc_RNA (1)...(19): siRNA sense strand
gggcaucguggaaguggaa

SEQ ID NO: 538169 - RNA, 19 nt, Homo sapiens
  misc_RNA (1)...(19): siRNA sense strand
gcaguaauuggcagcaaca

SEQ ID NO: 538170 - RNA, 19 nt, Homo sapiens
  misc_RNA (1)...(19): siRNA sense strand
gcuaaggcagacacacuga

SEQ ID NO: 538171 - RNA, 19 nt, Homo sapiens
  misc_RNA (1)...(19): siRNA sense strand
gggucaacaucgugccuau

SEQ ID NO: 538172 - RNA, 19 nt, Homo sapiens
  misc_RNA (1)...(19): siRNA sense strand
cauuggauguugaauucau

SEQ ID NO: 538173 - RNA, 19 nt, Homo sapiens
  misc_RNA (1)...(19): siRNA sense strand
aagagaggaucaugcaaac

SEQ ID NO: 538174 - RNA, 19 nt, Homo sapiens
  misc_RNA (1)...(19): siRNA sense strand
cagaaacugagaagcuuau

SEQ ID NO: 538175 - RNA, 19 nt, Homo sapiens
  misc_RNA (1)...(19): siRNA sense strand
ccucugacaaccagcagua

SEQ ID NO: 538176 - RNA, 19 nt, Homo sapiens
  misc_RNA (1)...(19): siRNA sense strand
caugcaaacuguggagauc

SEQ ID NO: 538177 - RNA, 19 nt, Homo sapiens
  misc_RNA (1)...(19): siRNA sense strand
ucaugaaggcccugcauca

SEQ ID NO: 538178 - RNA, 19 nt, Homo sapiens
  misc_RNA (1)...(19): siRNA sense strand
uggcagcaacacuguagua

SEQ ID NO: 538179 - RNA, 19 nt, Homo sapiens
  misc_RNA (1)...(19): siRNA sense strand
cgaaaguccgugaagaaag

SEQ ID NO: 538180 - RNA, 19 nt, Homo sapiens
  misc_RNA (1)...(19): siRNA sense strand
ugaugaggaugaggacuuc

SEQ ID NO: 538181 - RNA, 19 nt, Homo sapiens
  misc_RNA (1)...(19): siRNA sense strand
gcagucaacaacacagagu

SEQ ID NO: 538182 - RNA, 19 nt, Homo sapiens
  misc_RNA (1)...(19): siRNA sense strand
gggaugcagucaacaacac

SEQ ID NO: 538183 - RNA, 19 nt, Homo sapiens
  misc_RNA (1)...(19): siRNA sense strand
uaagcaugcaguggacaua

SEQ ID NO: 538184 - RNA, 19 nt, Homo sapiens
  misc_RNA (1)...(19): siRNA sense strand
ccagggacagauccagaaa

SEQ ID NO: 538185 - RNA, 19 nt, Homo sapiens
  misc_RNA (1)...(19): siRNA sense strand
ugacccgccugguggugaa

SEQ ID NO: 538186 - RNA, 19 nt, Homo sapiens
  misc_RNA (1)...(19): siRNA sense strand
gcaggaccaagcccuaaag

SEQ ID NO: 538187 - RNA, 19 nt, Homo sapiens
  misc_RNA (1)...(19): siRNA sense strand
ggaggagauugagcauuuu

SEQ ID NO: 538188 - RNA, 19 nt, Homo sapiens
  misc_RNA (1)...(19): siRNA sense strand
ggaccacaagaaacgcaaa

SEQ ID NO: 538189 - RNA, 19 nt, Homo sapiens
  misc_RNA (1)...(19): siRNA sense strand
caaacuguggagaucacua

SEQ ID NO: 538190 - RNA, 19 nt, Homo sapiens
  misc_RNA (1)...(19): siRNA sense strand
cagaugaaggagaacuauu

SEQ ID NO: 538191 - RNA, 19 nt, Homo sapiens
  misc_RNA (1)...(19): siRNA sense strand
uccagaaacugagaagcuu

SEQ ID NO: 538192 - RNA, 19 nt, Homo sapiens
  misc_RNA (1)...(19): siRNA sense strand
gaggacaccacggaugaug

SEQ ID NO: 538193 - RNA, 19 nt, Homo sapiens
  misc_RNA (1)...(19): siRNA sense strand
gggcacugcgacuuuguga

SEQ ID NO: 538194 - RNA, 19 nt, Homo sapiens
  misc_RNA (1)...(19): siRNA sense strand
caaccagcaguacuucugu

SEQ ID NO: 538195 - RNA, 19 nt, Homo sapiens
  misc_RNA (1)...(19): siRNA sense strand
gauggagaacugagcaagu

SEQ ID NO: 538196 - RNA, 19 nt, Homo sapiens
  misc_RNA (1)...(19): siRNA sense strand
uggaggacaccacggauga

SEQ ID NO: 538197 - RNA, 19 nt, Homo sapiens
  misc_RNA (1)...(19): siRNA sense strand
gcaaguucgugaaggauuu

SEQ ID NO: 538198 - RNA, 19 nt, Homo sapiens
  misc_RNA (1)...(19): siRNA sense strand
gggcaagcuugaucccuau

SEQ ID NO: 538199 - RNA, 19 nt, Homo sapiens
  misc_RNA (1)...(19): siRNA sense strand
gugaaggauuucucaggaa

SEQ ID NO: 538200 - RNA, 19 nt, Homo sapiens
  misc_RNA (1)...(19): siRNA sense strand
ugagcaaguucgugaagga

SEQ ID NO: 538201 - RNA, 19 nt, Homo sapiens
  misc_RNA (1)...(19): siRNA sense strand
caccacggaugauggagaa

SEQ ID NO: 538202 - RNA, 19 nt, Homo sapiens
  misc_RNA (1)...(19): siRNA sense strand
ggacaccacggaugaugga

SEQ ID NO: 538203 - RNA, 19 nt, Homo sapiens
  misc_RNA (1)...(19): siRNA sense strand
gcuaagaccugggcaucca

SEQ ID NO: 538204 - RNA, 19 nt, Homo sapiens
  misc_RNA (1)...(19): siRNA sense strand
ggaccucuaugaugaugac

SEQ ID NO: 538205 - RNA, 19 nt, Homo sapiens
  misc_RNA (1)...(19): siRNA sense strand
gcaagcuugaucccuauga

SEQ ID NO: 538206 - RNA, 19 nt, Homo sapiens
  misc_RNA (1)...(19): siRNA sense strand
caagcuugaucccuaugau

SEQ ID NO: 538207 - RNA, 19 nt, Homo sapiens
  misc_RNA (1)...(19): siRNA sense strand
gaugaugaccuggaguuca

SEQ ID NO: 538208 - RNA, 19 nt, Homo sapiens
  misc_RNA (1)...(19): siRNA sense strand
ccucugacaaccagcagua

SEQ ID NO: 538209 - RNA, 19 nt, Homo sapiens
  misc_RNA (1)...(19): siRNA sense strand
uggaggacaccacggauga

SEQ ID NO: 538210 - RNA, 19 nt, Homo sapiens
  misc_RNA (1)...(19): siRNA sense strand
caaccagcaguacuucugu

SEQ ID NO: 538211 - RNA, 19 nt, Homo sapiens
  misc_RNA (1)...(19): siRNA sense strand
gauggagaacugagcaagu

SEQ ID NO: 538212 - RNA, 19 nt, Homo sapiens
  misc_RNA (1)...(19): siRNA sense strand
gaggacaccacggaugaug

SEQ ID NO: 538213 - RNA, 19 nt, Homo sapiens
  misc_RNA (1)...(19): siRNA sense strand
ccccggaccucuaugauga

SEQ ID NO: 538214 - RNA, 19 nt, Homo sapiens
  misc_RNA (1)...(19): siRNA sense strand
gaaagaacauccaagacaa

SEQ ID NO: 538215 - RNA, 19 nt, Homo sapiens
  misc_RNA (1)...(19): siRNA sense strand
gggaggagauugagcauuu

SEQ ID NO: 538216 - RNA, 19 nt, Homo sapiens
  misc_RNA (1)...(19): siRNA sense strand
ggacagauccagaaacuga

SEQ ID NO: 538217 - RNA, 19 nt, Homo sapiens
  misc_RNA (1)...(19): siRNA sense strand
gcaaguucgugaaggauuu

SEQ ID NO: 538218 - RNA, 19 nt, Homo sapiens
  misc_RNA (1)...(19): siRNA sense strand
ggaagccuguggcagaaua

SEQ ID NO: 538219 - RNA, 19 nt, Homo sapiens
  misc_RNA (1)...(19): siRNA sense strand
gaagagaggaucaugcaaa

SEQ ID NO: 538220 - RNA, 19 nt, Homo sapiens
  misc_RNA (1)...(19): siRNA sense strand
ggaccaagcccuaaaggaa

SEQ ID NO: 538221 - RNA, 19 nt, Homo sapiens
  misc_RNA (1)...(19): siRNA sense strand
gaaaguccgugaagaaagg

SEQ ID NO: 538222 - RNA, 19 nt, Homo sapiens
  misc_RNA (1)...(19): siRNA sense strand
gccauuggauguugaauuc

SEQ ID NO: 538223 - RNA, 19 nt, Homo sapiens
  misc_RNA (1)...(19): siRNA sense strand
ggaugaggacuucaaauug

SEQ ID NO: 538224 - RNA, 19 nt, Homo sapiens
  misc_RNA (1)...(19): siRNA sense strand
gaugaggacuucaaauugc

SEQ ID NO: 538225 - RNA, 19 nt, Homo sapiens
  misc_RNA (1)...(19): siRNA sense strand
ggagacacauuaugagaac

SEQ ID NO: 538226 - RNA, 19 nt, Homo sapiens
  misc_RNA (1)...(19): siRNA sense strand
cagcaacacuguaguagag

SEQ ID NO: 538227 - RNA, 19 nt, Homo sapiens
  misc_RNA (1)...(19): siRNA sense strand
gaugaaggagaacuauuaa

SEQ ID NO: 538228 - RNA, 19 nt, Homo sapiens
  misc_RNA (1)...(19): siRNA sense strand
agaugaaggagaacuauua

SEQ ID NO: 538229 - RNA, 19 nt, Homo sapiens
  misc_RNA (1)...(19): siRNA sense strand
cgaaagaacauccaagaca

SEQ ID NO: 538230 - RNA, 19 nt, Homo sapiens
  misc_RNA (1)...(19): siRNA sense strand
gaccaagcccuaaaggaaa

SEQ ID NO: 538231 - RNA, 19 nt, Homo sapiens
  misc_RNA (1)...(19): siRNA sense strand
caaggaguaugugggcuuu

SEQ ID NO: 538232 - RNA, 19 nt, Homo sapiens
  misc_RNA (1)...(19): siRNA sense strand
ggaaucaagaucuaucaau

SEQ ID NO: 538233 - RNA, 19 nt, Homo sapiens
  misc_RNA (1)...(19): siRNA sense strand
gcacugcgacuuugugaag

SEQ ID NO: 538234 - RNA, 19 nt, Homo sapiens
  misc_RNA (1)...(19): siRNA sense strand
gagaggaucaugcaaacug

SEQ ID NO: 538235 - RNA, 19 nt, Homo sapiens
  misc_RNA (1)...(19): siRNA sense strand
caaacugacucgggaaagu

SEQ ID NO: 538236 - RNA, 19 nt, Homo sapiens
  misc_RNA (1)...(19): siRNA sense strand
gggcaagcuugaucccuau

SEQ ID NO: 538237 - RNA, 19 nt, Homo sapiens
  misc_RNA (1)...(19): siRNA sense strand
uaaaggaaagcaucccauu

SEQ ID NO: 538238 - RNA, 19 nt, Homo sapiens
  misc_RNA (1)...(19): siRNA sense strand
gaaacuucuuggugcugaa

SEQ ID NO: 538239 - RNA, 19 nt, Homo sapiens
  misc_RNA (1)...(19): siRNA sense strand
gugaaggauuucucaggaa

SEQ ID NO: 538240 - RNA, 19 nt, Homo sapiens
  misc_RNA (1)...(19): siRNA sense strand
caucccauuugcaguaauu

SEQ ID NO: 538241 - RNA, 19 nt, Homo sapiens
  misc_RNA (1)...(19): siRNA sense strand
auacauugaucagcaguuu

SEQ ID NO: 538242 - RNA, 19 nt, Homo sapiens
  misc_RNA (1)...(19): siRNA sense strand
ccaaccaaguccaccgaaa

SEQ ID NO: 538243 - RNA, 19 nt, Homo sapiens
  misc_RNA (1)...(19): siRNA sense strand
aaggaaagcaucccauuug

SEQ ID NO: 538244 - RNA, 19 nt, Homo sapiens
  misc_RNA (1)...(19): siRNA sense strand
agaguggccugaaccgaaa

SEQ ID NO: 538245 - RNA, 19 nt, Homo sapiens
  misc_RNA (1)...(19): siRNA sense strand
aauccacacuugucaauag

SEQ ID NO: 538246 - RNA, 19 nt, Homo sapiens
  misc_RNA (1)...(19): siRNA sense strand
aaaggaaagcaucccauuu

SEQ ID NO: 538247 - RNA, 19 nt, Homo sapiens
  misc_RNA (1)...(19): siRNA sense strand
ggagaucacuaagcaugca

SEQ ID NO: 538248 - RNA, 19 nt, Homo sapiens
  misc_RNA (1)...(19): siRNA sense strand
ugagcaaguucgugaagga

SEQ ID NO: 538249 - RNA, 19 nt, Homo sapiens
  misc_RNA (1)...(19): siRNA sense strand
ggacaccacggaugaugga

SEQ ID NO: 538250 - RNA, 19 nt, Homo sapiens
  misc_RNA (1)...(19): siRNA sense strand
ccagaaacugagaagcuua

SEQ ID NO: 538251 - RNA, 19 nt, Homo sapiens
  misc_RNA (1)...(19): siRNA sense strand
caccacggaugauggagaa

SEQ ID NO: 538252 - RNA, 19 nt, Homo sapiens
  misc_RNA (1)...(19): siRNA sense strand
gcaaauccacacuugucaa

SEQ ID NO: 538253 - RNA, 19 nt, Homo sapiens
  misc_RNA (1)...(19): siRNA sense strand
gggagacacauuaugagaa

SEQ ID NO: 538254 - RNA, 19 nt, Homo sapiens
  misc_RNA (1)...(19): siRNA sense strand
gcuaagaccugggcaucca

SEQ ID NO: 538255 - RNA, 19 nt, Homo sapiens
  misc_RNA (1)...(19): siRNA sense strand
aaacuguggagaucacuaa

SEQ ID NO: 538256 - RNA, 19 nt, Homo sapiens
  misc_RNA (1)...(19): siRNA sense strand
caaauccacacuugucaau

SEQ ID NO: 538257 - RNA, 19 nt, Homo sapiens
  misc_RNA (1)...(19): siRNA sense strand
gaaccgaaagaacauccaa

SEQ ID NO: 538258 - RNA, 19 nt, Homo sapiens
  misc_RNA (1)...(19): siRNA sense strand
aagcaucccauuugcagua

SEQ ID NO: 538259 - RNA, 19 nt, Homo sapiens
  misc_RNA (1)...(19): siRNA sense strand
gcagcaacacuguaguaga

SEQ ID NO: 538260 - RNA, 19 nt, Homo sapiens
  misc_RNA (1)...(19): siRNA sense strand
ggaccucuaugaugaugac

SEQ ID NO: 538261 - RNA, 19 nt, Homo sapiens
  misc_RNA (1)...(19): siRNA sense strand
gggcaaauccacacuuguc

SEQ ID NO: 538262 - RNA, 19 nt, Homo sapiens
  misc_RNA (1)...(19): siRNA sense strand
ccagggcacugcgacuuug

SEQ ID NO: 538263 - RNA, 19 nt, Homo sapiens
  misc_RNA (1)...(19): siRNA sense strand
ggaaagcaucccauuugca

SEQ ID NO: 538264 - RNA, 19 nt, Homo sapiens
  misc_RNA (1)...(19): siRNA sense strand
gcaagcuugaucccuauga

SEQ ID NO: 538265 - RNA, 19 nt, Homo sapiens
  misc_RNA (1)...(19): siRNA sense strand
caagcuugaucccuaugau

SEQ ID NO: 538266 - RNA, 19 nt, Homo sapiens
  misc_RNA (1)...(19): siRNA sense strand
ggccugaaccgaaagaaca

SEQ ID NO: 538267 - RNA, 19 nt, Homo sapiens
  misc_RNA (1)...(19): siRNA sense strand
gcaggagaugcuacacaaa

SEQ ID NO: 538268 - RNA, 19 nt, Homo sapiens
  misc_RNA (1)...(19): siRNA sense strand
ugcaggagaugcuacacaa

SEQ ID NO: 538269 - RNA, 19 nt, Homo sapiens
  misc_RNA (1)...(19): siRNA sense strand
aggaugaggacuucaaauu

SEQ ID NO: 538270 - RNA, 19 nt, Homo sapiens
  misc_RNA (1)...(19): siRNA sense strand
gcaugcaguggacauagaa

SEQ ID NO: 538271 - RNA, 19 nt, Homo sapiens
  misc_RNA (1)...(19): siRNA sense strand
ggagaugcuacacaaaaua

SEQ ID NO: 538272 - RNA, 19 nt, Homo sapiens
  misc_RNA (1)...(19): siRNA sense strand
gagaagcuuauccgagaga

SEQ ID NO: 538273 - RNA, 19 nt, Homo sapiens
  misc_RNA (1)...(19): siRNA sense strand
agacacauuaugagaacua

SEQ ID NO: 538274 - RNA, 19 nt, Homo sapiens
  misc_RNA (1)...(19): siRNA sense strand
gcaguggacauagaagaga

SEQ ID NO: 538275 - RNA, 19 nt, Homo sapiens
  misc_RNA (1)...(19): siRNA sense strand
caaccaaguccaccgaaag

SEQ ID NO: 538276 - RNA, 19 nt, Homo sapiens
  misc_RNA (1)...(19): siRNA sense strand
gcacugcugccuguacuuc

SEQ ID NO: 538277 - RNA, 19 nt, Homo sapiens
  misc_RNA (1)...(19): siRNA sense strand
caguggacauagaagagaa

SEQ ID NO: 538278 - RNA, 19 nt, Homo sapiens
  misc_RNA (1)...(19): siRNA sense strand
ccgaaaguccgugaagaaa

SEQ ID NO: 538279 - RNA, 19 nt, Homo sapiens
  misc_RNA (1)...(19): siRNA sense strand
gaagcuuauccgagagaaa

SEQ ID NO: 538280 - RNA, 19 nt, Homo sapiens
  misc_RNA (1)...(19): siRNA sense strand
acauugaucagcaguuuga

SEQ ID NO: 538281 - RNA, 19 nt, Homo sapiens
  misc_RNA (1)...(19): siRNA sense strand
gaugaugaccuggaguuca

SEQ ID NO: 538282 - RNA, 19 nt, Homo sapiens
  misc_RNA (1)...(19): siRNA sense strand
caccgaaaguccgugaaga

SEQ ID NO: 538283 - RNA, 19 nt, Homo sapiens
  misc_RNA (1)...(19): siRNA sense strand
acugacaccucccgaagug

SEQ ID NO: 538284 - RNA, 19 nt, Homo sapiens
  misc_RNA (1)...(19): siRNA sense strand
ggccauuggauguugaauu

SEQ ID NO: 538285 - RNA, 19 nt, Homo sapiens
  misc_RNA (1)...(19): siRNA sense strand
gggcaucguggaaguggaa

SEQ ID NO: 538286 - RNA, 19 nt, Homo sapiens
  misc_RNA (1)...(19): siRNA sense strand
gcaguaauuggcagcaaca

SEQ ID NO: 538287 - RNA, 19 nt, Homo sapiens
  misc_RNA (1)...(19): siRNA sense strand
gcuaaggcagacacacuga

SEQ ID NO: 538288 - RNA, 19 nt, Homo sapiens
  misc_RNA (1)...(19): siRNA sense strand
gggucaacaucgugccuau

SEQ ID NO: 538289 - RNA, 19 nt, Homo sapiens
  misc_RNA (1)...(19): siRNA sense strand
cauuggauguugaauucau

SEQ ID NO: 538290 - RNA, 19 nt, Homo sapiens
  misc_RNA (1)...(19): siRNA sense strand
aagagaggaucaugcaaac

SEQ ID NO: 538291 - RNA, 19 nt, Homo sapiens
  misc_RNA (1)...(19): siRNA sense strand
cagaaacugagaagcuuau

SEQ ID NO: 538292 - RNA, 19 nt, Homo sapiens
  misc_RNA (1)...(19): siRNA sense strand
ccucugacaaccagcagua

SEQ ID NO: 538293 - RNA, 19 nt, Homo sapiens
  misc_RNA (1)...(19): siRNA sense strand
caugcaaacuguggagauc

SEQ ID NO: 538294 - RNA, 19 nt, Homo sapiens
  misc_RNA (1)...(19): siRNA sense strand
ucaugaaggcccugcauca

SEQ ID NO: 538295 - RNA, 19 nt, Homo sapiens
  misc_RNA (1)...(19): siRNA sense strand
uggcagcaacacuguagua

SEQ ID NO: 538296 - RNA, 19 nt, Homo sapiens
  misc_RNA (1)...(19): siRNA sense strand
cgaaaguccgugaagaaag

SEQ ID NO: 538297 - RNA, 19 nt, Homo sapiens
  misc_RNA (1)...(19): siRNA sense strand
ugaugaggaugaggacuuc

SEQ ID NO: 538298 - RNA, 19 nt, Homo sapiens
  misc_RNA (1)...(19): siRNA sense strand
gcagucaacaacacagagu

SEQ ID NO: 538299 - RNA, 19 nt, Homo sapiens
  misc_RNA (1)...(19): siRNA sense strand
gggaugcagucaacaacac

SEQ ID NO: 538300 - RNA, 19 nt, Homo sapiens
  misc_RNA (1)...(19): siRNA sense strand
uaagcaugcaguggacaua

SEQ ID NO: 538301 - RNA, 19 nt, Homo sapiens
  misc_RNA (1)...(19): siRNA sense strand
ccagggacagauccagaaa

SEQ ID NO: 538302 - RNA, 19 nt, Homo sapiens
  misc_RNA (1)...(19): siRNA sense strand
ugacccgccugguggugaa

SEQ ID NO: 538303 - RNA, 19 nt, Homo sapiens
  misc_RNA (1)...(19): siRNA sense strand
gcaggaccaagcccuaaag

SEQ ID NO: 538304 - RNA, 19 nt, Homo sapiens
  misc_RNA (1)...(19): siRNA sense strand
ggaggagauugagcauuuu

SEQ ID NO: 538305 - RNA, 19 nt, Homo sapiens
  misc_RNA (1)...(19): siRNA sense strand
ggaccacaagaaacgcaaa

SEQ ID NO: 538306 - RNA, 19 nt, Homo sapiens
  misc_RNA (1)...(19): siRNA sense strand
caaacuguggagaucacua

SEQ ID NO: 538307 - RNA, 19 nt, Homo sapiens
  misc_RNA (1)...(19): siRNA sense strand
cagaugaaggagaacuauu

SEQ ID NO: 538308 - RNA, 19 nt, Homo sapiens
  misc_RNA (1)...(19): siRNA sense strand
uccagaaacugagaagcuu

SEQ ID NO: 538309 - RNA, 19 nt, Homo sapiens
  misc_RNA (1)...(19): siRNA sense strand
gaggacaccacggaugaug

SEQ ID NO: 538310 - RNA, 19 nt, Homo sapiens
  misc_RNA (1)...(19): siRNA sense strand
gggcacugcgacuuuguga

SEQ ID NO: 538311 - RNA, 19 nt, Homo sapiens
  misc_RNA (1)...(19): siRNA sense strand
caaccagcaguacuucugu

SEQ ID NO: 538312 - RNA, 19 nt, Homo sapiens
  misc_RNA (1)...(19): siRNA sense strand
gauggagaacugagcaagu

SEQ ID NO: 538313 - RNA, 19 nt, Homo sapiens
  misc_RNA (1)...(19): siRNA sense strand
uggaggacaccacggauga

SEQ ID NO: 538314 - RNA, 19 nt, Homo sapiens
  misc_RNA (1)...(19): siRNA sense strand
gaaagaacauccaagacaa

SEQ ID NO: 538315 - RNA, 19 nt, Homo sapiens
  misc_RNA (1)...(19): siRNA sense strand
gcaaguucgugaaggauuu

SEQ ID NO: 538316 - RNA, 19 nt, Homo sapiens
  misc_RNA (1)...(19): siRNA sense strand
ggaagccuguggcagaaua

SEQ ID NO: 538317 - RNA, 19 nt, Homo sapiens
  misc_RNA (1)...(19): siRNA sense strand
gaagagaggaucaugcaaa

SEQ ID NO: 538318 - RNA, 19 nt, Homo sapiens
  misc_RNA (1)...(19): siRNA sense strand
gaaaguccgugaagaaagg

SEQ ID NO: 538319 - RNA, 19 nt, Homo sapiens
  misc_RNA (1)...(19): siRNA sense strand
cgaaagaacauccaagaca

SEQ ID NO: 538320 - RNA, 19 nt, Homo sapiens
  misc_RNA (1)...(19): siRNA sense strand
caaggaguaugugggcuuu

SEQ ID NO: 538321 - RNA, 19 nt, Homo sapiens
  misc_RNA (1)...(19): siRNA sense strand
gagaggaucaugcaaacug

SEQ ID NO: 538322 - RNA, 19 nt, Homo sapiens
  misc_RNA (1)...(19): siRNA sense strand
gggcaagcuugaucccuau

SEQ ID NO: 538323 - RNA, 19 nt, Homo sapiens
  misc_RNA (1)...(19): siRNA sense strand
gugaaggauuucucaggaa

SEQ ID NO: 538324 - RNA, 19 nt, Homo sapiens
  misc_RNA (1)...(19): siRNA sense strand
auacauugaucagcaguuu

SEQ ID NO: 538325 - RNA, 19 nt, Homo sapiens
  misc_RNA (1)...(19): siRNA sense strand
gaaacuucuuggugcugaa

SEQ ID NO: 538326 - RNA, 19 nt, Homo sapiens
  misc_RNA (1)...(19): siRNA sense strand
ccaaccaaguccaccgaaa

SEQ ID NO: 538327 - RNA, 19 nt, Homo sapiens
  misc_RNA (1)...(19): siRNA sense strand
agaguggccugaaccgaaa

SEQ ID NO: 538328 - RNA, 19 nt, Homo sapiens
  misc_RNA (1)...(19): siRNA sense strand
aauccacacuugucaauag

SEQ ID NO: 538329 - RNA, 19 nt, Homo sapiens
  misc_RNA (1)...(19): siRNA sense strand
ggagaucacuaagcaugca

SEQ ID NO: 538330 - RNA, 19 nt, Homo sapiens
  misc_RNA (1)...(19): siRNA sense strand
ugagcaaguucgugaagga

SEQ ID NO: 538331 - RNA, 19 nt, Homo sapiens
  misc_RNA (1)...(19): siRNA sense strand
caccacggaugauggagaa

SEQ ID NO: 538332 - RNA, 19 nt, Homo sapiens
  misc_RNA (1)...(19): siRNA sense strand
ggacaccacggaugaugga

SEQ ID NO: 538333 - RNA, 19 nt, Homo sapiens
  misc_RNA (1)...(19): siRNA sense strand
gcuaagaccugggcaucca

SEQ ID NO: 538334 - RNA, 19 nt, Homo sapiens
  misc_RNA (1)...(19): siRNA sense strand
aaacuguggagaucacuaa

SEQ ID NO: 538335 - RNA, 19 nt, Homo sapiens
  misc_RNA (1)...(19): siRNA sense strand
gcaaauccacacuugucaa

SEQ ID NO: 538336 - RNA, 19 nt, Homo sapiens
  misc_RNA (1)...(19): siRNA sense strand
caaauccacacuugucaau

SEQ ID NO: 538337 - RNA, 19 nt, Homo sapiens
  misc_RNA (1)...(19): siRNA sense strand
gaaccgaaagaacauccaa

SEQ ID NO: 538338 - RNA, 19 nt, Homo sapiens
  misc_RNA (1)...(19): siRNA sense strand
ggaccucuaugaugaugac

SEQ ID NO: 538339 - RNA, 19 nt, Homo sapiens
  misc_RNA (1)...(19): siRNA sense strand
gggcaaauccacacuuguc

SEQ ID NO: 538340 - RNA, 19 nt, Homo sapiens
  misc_RNA (1)...(19): siRNA sense strand
gcaagcuugaucccuauga

SEQ ID NO: 538341 - RNA, 19 nt, Homo sapiens
  misc_RNA (1)...(19): siRNA sense strand
caagcuugaucccuaugau

SEQ ID NO: 538342 - RNA, 19 nt, Homo sapiens
  misc_RNA (1)...(19): siRNA sense strand
ggccugaaccgaaagaaca

SEQ ID NO: 538343 - RNA, 19 nt, Homo sapiens
  misc_RNA (1)...(19): siRNA sense strand
gcaugcaguggacauagaa

SEQ ID NO: 538344 - RNA, 19 nt, Homo sapiens
  misc_RNA (1)...(19): siRNA sense strand
gcaguggacauagaagaga

SEQ ID NO: 538345 - RNA, 19 nt, Homo sapiens
  misc_RNA (1)...(19): siRNA sense strand
caaccaaguccaccgaaag

SEQ ID NO: 538346 - RNA, 19 nt, Homo sapiens
  misc_RNA (1)...(19): siRNA sense strand
gcacugcugccuguacuuc

SEQ ID NO: 538347 - RNA, 19 nt, Homo sapiens
  misc_RNA (1)...(19): siRNA sense strand
caguggacauagaagagaa

SEQ ID NO: 538348 - RNA, 19 nt, Homo sapiens
  misc_RNA (1)...(19): siRNA sense strand
gaugaugaccuggaguuca

SEQ ID NO: 538349 - RNA, 19 nt, Homo sapiens
  misc_RNA (1)...(19): siRNA sense strand
acauugaucagcaguuuga

SEQ ID NO: 538350 - RNA, 19 nt, Homo sapiens
  misc_RNA (1)...(19): siRNA sense strand
ccgaaaguccgugaagaaa

SEQ ID NO: 538351 - RNA, 19 nt, Homo sapiens
  misc_RNA (1)...(19): siRNA sense strand
caccgaaaguccgugaaga

SEQ ID NO: 538352 - RNA, 19 nt, Homo sapiens
  misc_RNA (1)...(19): siRNA sense strand
ccucugacaaccagcagua

SEQ ID NO: 538353 - RNA, 19 nt, Homo sapiens
  misc_RNA (1)...(19): siRNA sense strand
caugcaaacuguggagauc

SEQ ID NO: 538354 - RNA, 19 nt, Homo sapiens
  misc_RNA (1)...(19): siRNA sense strand
aagagaggaucaugcaaac

SEQ ID NO: 538355 - RNA, 19 nt, Homo sapiens
  misc_RNA (1)...(19): siRNA sense strand
cgaaaguccgugaagaaag

SEQ ID NO: 538356 - RNA, 19 nt, Homo sapiens
  misc_RNA (1)...(19): siRNA sense strand
gcagucaacaacacagagu

SEQ ID NO: 538357 - RNA, 19 nt, Homo sapiens
  misc_RNA (1)...(19): siRNA sense strand
gggaugcagucaacaacac

SEQ ID NO: 538358 - RNA, 19 nt, Homo sapiens
  misc_RNA (1)...(19): siRNA sense strand
uaagcaugcaguggacaua

SEQ ID NO: 538359 - RNA, 19 nt, Homo sapiens
  misc_RNA (1)...(19): siRNA sense strand
gaggacaccacggaugaug

SEQ ID NO: 538360 - RNA, 19 nt, Homo sapiens
  misc_RNA (1)...(19): siRNA sense strand
uggaggacaccacggauga

SEQ ID NO: 538361 - RNA, 19 nt, Homo sapiens
  misc_RNA (1)...(19): siRNA sense strand
caaacuguggagaucacua

SEQ ID NO: 538362 - RNA, 19 nt, Homo sapiens
  misc_RNA (1)...(19): siRNA sense strand
caaccagcaguacuucugu

SEQ ID NO: 538363 - RNA, 19 nt, Homo sapiens
  misc_RNA (1)...(19): siRNA sense strand
gauggagaacugagcaagu

SEQ ID NO: 538364 - RNA, 19 nt, Homo sapiens
  misc_RNA (1)...(19): siRNA sense strand
cugggcaaauccacacuug

SEQ ID NO: 538365 - RNA, 19 nt, Homo sapiens
  misc_RNA (1)...(19): siRNA sense strand
gccuguggcagaauacauu

SEQ ID NO: 538366 - RNA, 19 nt, Homo sapiens
  misc_RNA (1)...(19): siRNA sense strand
agaggaucaugcaaacugu

SEQ ID NO: 538367 - RNA, 19 nt, Homo sapiens
  misc_RNA (1)...(19): siRNA sense strand
ggcugcggcucaccauugu

SEQ ID NO: 538368 - RNA, 19 nt, Homo sapiens
  misc_RNA (1)...(19): siRNA sense strand
ggcaaauccacacuuguca

SEQ ID NO: 538369 - RNA, 19 nt, Homo sapiens
  misc_RNA (1)...(19): siRNA sense strand
gcaguuugagcaguauuuc

SEQ ID NO: 538370 - RNA, 19 nt, Homo sapiens
  misc_RNA (1)...(19): siRNA sense strand
ccccggaccucuaugauga

SEQ ID NO: 538371 - RNA, 19 nt, Homo sapiens
  misc_RNA (1)...(19): siRNA sense strand
cuguggagaucacuaagca

SEQ ID NO: 538372 - RNA, 19 nt, Homo sapiens
  misc_RNA (1)...(19): siRNA sense strand
agacgagaguggccugaac

SEQ ID NO: 538373 - RNA, 19 nt, Homo sapiens
  misc_RNA (1)...(19): siRNA sense strand
gaaagaacauccaagacaa

SEQ ID NO: 538374 - RNA, 19 nt, Homo sapiens
  misc_RNA (1)...(19): siRNA sense strand
gggaggagauugagcauuu

SEQ ID NO: 538375 - RNA, 19 nt, Homo sapiens
  misc_RNA (1)...(19): siRNA sense strand
ggacagauccagaaacuga

SEQ ID NO: 538376 - RNA, 19 nt, Homo sapiens
  misc_RNA (1)...(19): siRNA sense strand
gcaaguucgugaaggauuu

SEQ ID NO: 538377 - RNA, 19 nt, Homo sapiens
  misc_RNA (1)...(19): siRNA sense strand
ggaagccuguggcagaaua

SEQ ID NO: 538378 - RNA, 19 nt, Homo sapiens
  misc_RNA (1)...(19): siRNA sense strand
gaagagaggaucaugcaaa

SEQ ID NO: 538379 - RNA, 19 nt, Homo sapiens
  misc_RNA (1)...(19): siRNA sense strand
ggaccaagcccuaaaggaa

SEQ ID NO: 538380 - RNA, 19 nt, Homo sapiens
  misc_RNA (1)...(19): siRNA sense strand
gaaaguccgugaagaaagg

SEQ ID NO: 538381 - RNA, 19 nt, Homo sapiens
  misc_RNA (1)...(19): siRNA sense strand
gccauuggauguugaauuc

SEQ ID NO: 538382 - RNA, 19 nt, Homo sapiens
  misc_RNA (1)...(19): siRNA sense strand
ggaugaggacuucaaauug

SEQ ID NO: 538383 - RNA, 19 nt, Homo sapiens
  misc_RNA (1)...(19): siRNA sense strand
gaugaggacuucaaauugc

SEQ ID NO: 538384 - RNA, 19 nt, Homo sapiens
  misc_RNA (1)...(19): siRNA sense strand
ggagacacauuaugagaac

SEQ ID NO: 538385 - RNA, 19 nt, Homo sapiens
  misc_RNA (1)...(19): siRNA sense strand
cagcaacacuguaguagag

SEQ ID NO: 538386 - RNA, 19 nt, Homo sapiens
  misc_RNA (1)...(19): siRNA sense strand
gaugaaggagaacuauuaa

SEQ ID NO: 538387 - RNA, 19 nt, Homo sapiens
  misc_RNA (1)...(19): siRNA sense strand
agaugaaggagaacuauua

SEQ ID NO: 538388 - RNA, 19 nt, Homo sapiens
  misc_RNA (1)...(19): siRNA sense strand
cgaaagaacauccaagaca

SEQ ID NO: 538389 - RNA, 19 nt, Homo sapiens
  misc_RNA (1)...(19): siRNA sense strand
gaccaagcccuaaaggaaa

SEQ ID NO: 538390 - RNA, 19 nt, Homo sapiens
  misc_RNA (1)...(19): siRNA sense strand
caaggaguaugugggcuuu

SEQ ID NO: 538391 - RNA, 19 nt, Homo sapiens
  misc_RNA (1)...(19): siRNA sense strand
ggaaucaagaucuaucaau

SEQ ID NO: 538392 - RNA, 19 nt, Homo sapiens
  misc_RNA (1)...(19): siRNA sense strand
gcacugcgacuuugugaag

SEQ ID NO: 538393 - RNA, 19 nt, Homo sapiens
  misc_RNA (1)...(19): siRNA sense strand
gagaggaucaugcaaacug

SEQ ID NO: 538394 - RNA, 19 nt, Homo sapiens
  misc_RNA (1)...(19): siRNA sense strand
caaacugacucgggaaagu

SEQ ID NO: 538395 - RNA, 19 nt, Homo sapiens
  misc_RNA (1)...(19): siRNA sense strand
gggcaagcuugaucccuau

SEQ ID NO: 538396 - RNA, 19 nt, Homo sapiens
  misc_RNA (1)...(19): siRNA sense strand
uaaaggaaagcaucccauu

SEQ ID NO: 538397 - RNA, 19 nt, Homo sapiens
  misc_RNA (1)...(19): siRNA sense strand
gaaacuucuuggugcugaa

SEQ ID NO: 538398 - RNA, 19 nt, Homo sapiens
  misc_RNA (1)...(19): siRNA sense strand
gugaaggauuucucaggaa

SEQ ID NO: 538399 - RNA, 19 nt, Homo sapiens
  misc_RNA (1)...(19): siRNA sense strand
caucccauuugcaguaauu

SEQ ID NO: 538400 - RNA, 19 nt, Homo sapiens
  misc_RNA (1)...(19): siRNA sense strand
auacauugaucagcaguuu

SEQ ID NO: 538401 - RNA, 19 nt, Homo sapiens
  misc_RNA (1)...(19): siRNA sense strand
ccaaccaaguccaccgaaa

SEQ ID NO: 538402 - RNA, 19 nt, Homo sapiens
  misc_RNA (1)...(19): siRNA sense strand
aaggaaagcaucccauuug

SEQ ID NO: 538403 - RNA, 19 nt, Homo sapiens
  misc_RNA (1)...(19): siRNA sense strand
agaguggccugaaccgaaa

SEQ ID NO: 538404 - RNA, 19 nt, Homo sapiens
  misc_RNA (1)...(19): siRNA sense strand
aauccacacuugucaauag

SEQ ID NO: 538405 - RNA, 19 nt, Homo sapiens
  misc_RNA (1)...(19): siRNA sense strand
aaaggaaagcaucccauuu

SEQ ID NO: 538406 - RNA, 19 nt, Homo sapiens
  misc_RNA (1)...(19): siRNA sense strand
ggagaucacuaagcaugca

SEQ ID NO: 538407 - RNA, 19 nt, Homo sapiens
  misc_RNA (1)...(19): siRNA sense strand
ugagcaaguucgugaagga

SEQ ID NO: 538408 - RNA, 19 nt, Homo sapiens
  misc_RNA (1)...(19): siRNA sense strand
ggacaccacggaugaugga

SEQ ID NO: 538409 - RNA, 19 nt, Homo sapiens
  misc_RNA (1)...(19): siRNA sense strand
ccagaaacugagaagcuua

SEQ ID NO: 538410 - RNA, 19 nt, Homo sapiens
  misc_RNA (1)...(19): siRNA sense strand
caccacggaugauggagaa

SEQ ID NO: 538411 - RNA, 19 nt, Homo sapiens
  misc_RNA (1)...(19): siRNA sense strand
gcaaauccacacuugucaa

SEQ ID NO: 538412 - RNA, 19 nt, Homo sapiens
  misc_RNA (1)...(19): siRNA sense strand
gggagacacauuaugagaa

SEQ ID NO: 538413 - RNA, 19 nt, Homo sapiens
  misc_RNA (1)...(19): siRNA sense strand
gcuaagaccugggcaucca

SEQ ID NO: 538414 - RNA, 19 nt, Homo sapiens
  misc_RNA (1)...(19): siRNA sense strand
aaacuguggagaucacuaa

SEQ ID NO: 538415 - RNA, 19 nt, Homo sapiens
  misc_RNA (1)...(19): siRNA sense strand
caaauccacacuugucaau

SEQ ID NO: 538416 - RNA, 19 nt, Homo sapiens
  misc_RNA (1)...(19): siRNA sense strand
gaaccgaaagaacauccaa

SEQ ID NO: 538417 - RNA, 19 nt, Homo sapiens
  misc_RNA (1)...(19): siRNA sense strand
aagcaucccauuugcagua

SEQ ID NO: 538418 - RNA, 19 nt, Homo sapiens
  misc_RNA (1)...(19): siRNA sense strand
gcagcaacacuguaguaga

SEQ ID NO: 538419 - RNA, 19 nt, Homo sapiens
  misc_RNA (1)...(19): siRNA sense strand
ggaccucuaugaugaugac

SEQ ID NO: 538420 - RNA, 19 nt, Homo sapiens
  misc_RNA (1)...(19): siRNA sense strand
gggcaaauccacacuuguc

SEQ ID NO: 538421 - RNA, 19 nt, Homo sapiens
  misc_RNA (1)...(19): siRNA sense strand
ccagggcacugcgacuuug

SEQ ID NO: 538422 - RNA, 19 nt, Homo sapiens
  misc_RNA (1)...(19): siRNA sense strand
ggaaagcaucccauuugca

SEQ ID NO: 538423 - RNA, 19 nt, Homo sapiens
  misc_RNA (1)...(19): siRNA sense strand
gcaagcuugaucccuauga

SEQ ID NO: 538424 - RNA, 19 nt, Homo sapiens
  misc_RNA (1)...(19): siRNA sense strand
caagcuugaucccuaugau

SEQ ID NO: 538425 - RNA, 19 nt, Homo sapiens
  misc_RNA (1)...(19): siRNA sense strand
ggccugaaccgaaagaaca

SEQ ID NO: 538426 - RNA, 19 nt, Homo sapiens
  misc_RNA (1)...(19): siRNA sense strand
gcaggagaugcuacacaaa

SEQ ID NO: 538427 - RNA, 19 nt, Homo sapiens
  misc_RNA (1)...(19): siRNA sense strand
ugcaggagaugcuacacaa

SEQ ID NO: 538428 - RNA, 19 nt, Homo sapiens
  misc_RNA (1)...(19): siRNA sense strand
aggaugaggacuucaaauu

SEQ ID NO: 538429 - RNA, 19 nt, Homo sapiens
  misc_RNA (1)...(19): siRNA sense strand
gcaugcaguggacauagaa

SEQ ID NO: 538430 - RNA, 19 nt, Homo sapiens
  misc_RNA (1)...(19): siRNA sense strand
ggagaugcuacacaaaaua

SEQ ID NO: 538431 - RNA, 19 nt, Homo sapiens
  misc_RNA (1)...(19): siRNA sense strand
gagaagcuuauccgagaga

SEQ ID NO: 538432 - RNA, 19 nt, Homo sapiens
  misc_RNA (1)...(19): siRNA sense strand
agacacauuaugagaacua

SEQ ID NO: 538433 - RNA, 19 nt, Homo sapiens
  misc_RNA (1)...(19): siRNA sense strand
gcaguggacauagaagaga

SEQ ID NO: 538434 - RNA, 19 nt, Homo sapiens
  misc_RNA (1)...(19): siRNA sense strand
caaccaaguccaccgaaag

SEQ ID NO: 538435 - RNA, 19 nt, Homo sapiens
  misc_RNA (1)...(19): siRNA sense strand
gcacugcugccuguacuuc

SEQ ID NO: 538436 - RNA, 19 nt, Homo sapiens
  misc_RNA (1)...(19): siRNA sense strand
caguggacauagaagagaa

SEQ ID NO: 538437 - RNA, 19 nt, Homo sapiens
  misc_RNA (1)...(19): siRNA sense strand
ccgaaaguccgugaagaaa

SEQ ID NO: 538438 - RNA, 19 nt, Homo sapiens
  misc_RNA (1)...(19): siRNA sense strand
gaagcuuauccgagagaaa

SEQ ID NO: 538439 - RNA, 19 nt, Homo sapiens
  misc_RNA (1)...(19): siRNA sense strand
acauugaucagcaguuuga

SEQ ID NO: 538440 - RNA, 19 nt, Homo sapiens
  misc_RNA (1)...(19): siRNA sense strand
gaugaugaccuggaguuca

SEQ ID NO: 538441 - RNA, 19 nt, Homo sapiens
  misc_RNA (1)...(19): siRNA sense strand
caccgaaaguccgugaaga

SEQ ID NO: 538442 - RNA, 19 nt, Homo sapiens
  misc_RNA (1)...(19): siRNA sense strand
acugacaccucccgaagug

SEQ ID NO: 538443 - RNA, 19 nt, Homo sapiens
  misc_RNA (1)...(19): siRNA sense strand
ggccauuggauguugaauu

SEQ ID NO: 538444 - RNA, 19 nt, Homo sapiens
  misc_RNA (1)...(19): siRNA sense strand
gggcaucguggaaguggaa

SEQ ID NO: 538445 - RNA, 19 nt, Homo sapiens
  misc_RNA (1)...(19): siRNA sense strand
gcaguaauuggcagcaaca

SEQ ID NO: 538446 - RNA, 19 nt, Homo sapiens
  misc_RNA (1)...(19): siRNA sense strand
gcuaaggcagacacacuga

SEQ ID NO: 538447 - RNA, 19 nt, Homo sapiens
  misc_RNA (1)...(19): siRNA sense strand
gggucaacaucgugccuau

SEQ ID NO: 538448 - RNA, 19 nt, Homo sapiens
  misc_RNA (1)...(19): siRNA sense strand
cauuggauguugaauucau

SEQ ID NO: 538449 - RNA, 19 nt, Homo sapiens
  misc_RNA (1)...(19): siRNA sense strand
aagagaggaucaugcaaac

SEQ ID NO: 538450 - RNA, 19 nt, Homo sapiens
  misc_RNA (1)...(19): siRNA sense strand
cagaaacugagaagcuuau

SEQ ID NO: 538451 - RNA, 19 nt, Homo sapiens
  misc_RNA (1)...(19): siRNA sense strand
ccucugacaaccagcagua

SEQ ID NO: 538452 - RNA, 19 nt, Homo sapiens
  misc_RNA (1)...(19): siRNA sense strand
caugcaaacuguggagauc

SEQ ID NO: 538453 - RNA, 19 nt, Homo sapiens
  misc_RNA (1)...(19): siRNA sense strand
ucaugaaggcccugcauca

SEQ ID NO: 538454 - RNA, 19 nt, Homo sapiens
  misc_RNA (1)...(19): siRNA sense strand
uggcagcaacacuguagua

SEQ ID NO: 538455 - RNA, 19 nt, Homo sapiens
  misc_RNA (1)...(19): siRNA sense strand
cgaaaguccgugaagaaag

SEQ ID NO: 538456 - RNA, 19 nt, Homo sapiens
  misc_RNA (1)...(19): siRNA sense strand
ugaugaggaugaggacuuc

SEQ ID NO: 538457 - RNA, 19 nt, Homo sapiens
  misc_RNA (1)...(19): siRNA sense strand
gcagucaacaacacagagu

SEQ ID NO: 538458 - RNA, 19 nt, Homo sapiens
  misc_RNA (1)...(19): siRNA sense strand
gggaugcagucaacaacac

SEQ ID NO: 538459 - RNA, 19 nt, Homo sapiens
  misc_RNA (1)...(19): siRNA sense strand
uaagcaugcaguggacaua

SEQ ID NO: 538460 - RNA, 19 nt, Homo sapiens
  misc_RNA (1)...(19): siRNA sense strand
ccagggacagauccagaaa

SEQ ID NO: 538461 - RNA, 19 nt, Homo sapiens
  misc_RNA (1)...(19): siRNA sense strand
ugacccgccugguggugaa

SEQ ID NO: 538462 - RNA, 19 nt, Homo sapiens
  misc_RNA (1)...(19): siRNA sense strand
gcaggaccaagcccuaaag

SEQ ID NO: 538463 - RNA, 19 nt, Homo sapiens
  misc_RNA (1)...(19): siRNA sense strand
ggaggagauugagcauuuu

SEQ ID NO: 538464 - RNA, 19 nt, Homo sapiens
  misc_RNA (1)...(19): siRNA sense strand
ggaccacaagaaacgcaaa

SEQ ID NO: 538465 - RNA, 19 nt, Homo sapiens
  misc_RNA (1)...(19): siRNA sense strand
caaacuguggagaucacua

SEQ ID NO: 538466 - RNA, 19 nt, Homo sapiens
  misc_RNA (1)...(19): siRNA sense strand
cagaugaaggagaacuauu

SEQ ID NO: 538467 - RNA, 19 nt, Homo sapiens
  misc_RNA (1)...(19): siRNA sense strand
uccagaaacugagaagcuu

SEQ ID NO: 538468 - RNA, 19 nt, Homo sapiens
  misc_RNA (1)...(19): siRNA sense strand
gaggacaccacggaugaug

SEQ ID NO: 538469 - RNA, 19 nt, Homo sapiens
  misc_RNA (1)...(19): siRNA sense strand
gggcacugcgacuuuguga

SEQ ID NO: 538470 - RNA, 19 nt, Homo sapiens
  misc_RNA (1)...(19): siRNA sense strand
caaccagcaguacuucugu

SEQ ID NO: 538471 - RNA, 19 nt, Homo sapiens
  misc_RNA (1)...(19): siRNA sense strand
gauggagaacugagcaagu

SEQ ID NO: 538472 - RNA, 19 nt, Homo sapiens
  misc_RNA (1)...(19): siRNA sense strand
uggaggacaccacggauga

SEQ ID NO: 538473 - RNA, 19 nt, Homo sapiens
  misc_RNA (1)...(19): siRNA sense strand
gcaaguucgugaaggauuu

SEQ ID NO: 538474 - RNA, 19 nt, Homo sapiens
  misc_RNA (1)...(19): siRNA sense strand
gggcaagcuugaucccuau

SEQ ID NO: 538475 - RNA, 19 nt, Homo sapiens
  misc_RNA (1)...(19): siRNA sense strand
gugaaggauuucucaggaa

SEQ ID NO: 538476 - RNA, 19 nt, Homo sapiens
  misc_RNA (1)...(19): siRNA sense strand
ugagcaaguucgugaagga

SEQ ID NO: 538477 - RNA, 19 nt, Homo sapiens
  misc_RNA (1)...(19): siRNA sense strand
caccacggaugauggagaa

SEQ ID NO: 538478 - RNA, 19 nt, Homo sapiens
  misc_RNA (1)...(19): siRNA sense strand
ggacaccacggaugaugga

SEQ ID NO: 538479 - RNA, 19 nt, Homo sapiens
  misc_RNA (1)...(19): siRNA sense strand
gcuaagaccugggcaucca

SEQ ID NO: 538480 - RNA, 19 nt, Homo sapiens
  misc_RNA (1)...(19): siRNA sense strand
ggaccucuaugaugaugac

SEQ ID NO: 538481 - RNA, 19 nt, Homo sapiens
  misc_RNA (1)...(19): siRNA sense strand
gcaagcuugaucccuauga

SEQ ID NO: 538482 - RNA, 19 nt, Homo sapiens
  misc_RNA (1)...(19): siRNA sense strand
caagcuugaucccuaugau

SEQ ID NO: 538483 - RNA, 19 nt, Homo sapiens
  misc_RNA (1)...(19): siRNA sense strand
gaugaugaccuggaguuca

SEQ ID NO: 538484 - RNA, 19 nt, Homo sapiens
  misc_RNA (1)...(19): siRNA sense strand
ccucugacaaccagcagua

SEQ ID NO: 538485 - RNA, 19 nt, Homo sapiens
  misc_RNA (1)...(19): siRNA sense strand
uggaggacaccacggauga

SEQ ID NO: 538486 - RNA, 19 nt, Homo sapiens
  misc_RNA (1)...(19): siRNA sense strand
caaccagcaguacuucugu

SEQ ID NO: 538487 - RNA, 19 nt, Homo sapiens
  misc_RNA (1)...(19): siRNA sense strand
gauggagaacugagcaagu

SEQ ID NO: 538488 - RNA, 19 nt, Homo sapiens
  misc_RNA (1)...(19): siRNA sense strand
gaggacaccacggaugaug

SEQ ID NO: 538489 - RNA, 19 nt, Homo sapiens
  misc_RNA (1)...(19): siRNA sense strand
ccccggaccucuaugauga

SEQ ID NO: 538490 - RNA, 19 nt, Homo sapiens
  misc_RNA (1)...(19): siRNA sense strand
ggaaagggcauucgacuua

SEQ ID NO: 538491 - RNA, 19 nt, Homo sapiens
  misc_RNA (1)...(19): siRNA sense strand
gaagacaggugaacauuuc

SEQ ID NO: 538492 - RNA, 19 nt, Homo sapiens
  misc_RNA (1)...(19): siRNA sense strand
ggaauagacucaaguaugc

SEQ ID NO: 538493 - RNA, 19 nt, Homo sapiens
  misc_RNA (1)...(19): siRNA sense strand
caaacuaacggguguauuu

SEQ ID NO: 538494 - RNA, 19 nt, Homo sapiens
  misc_RNA (1)...(19): siRNA sense strand
gaacgauacugugcagauu

SEQ ID NO: 538495 - RNA, 19 nt, Homo sapiens
  misc_RNA (1)...(19): siRNA sense strand
gagaugagguaaagaagau

SEQ ID NO: 538496 - RNA, 19 nt, Homo sapiens
  misc_RNA (1)...(19): siRNA sense strand
ggaaagacauccugguucu

SEQ ID NO: 538497 - RNA, 19 nt, Homo sapiens
  misc_RNA (1)...(19): siRNA sense strand
gcaauaaaccuuggauuuc

SEQ ID NO: 538498 - RNA, 19 nt, Homo sapiens
  misc_RNA (1)...(19): siRNA sense strand
ccacgaggcuuuccaacau

SEQ ID NO: 538499 - RNA, 19 nt, Homo sapiens
  misc_RNA (1)...(19): siRNA sense strand
ggcaauaaaccuuggauuu

SEQ ID NO: 538500 - RNA, 19 nt, Homo sapiens
  misc_RNA (1)...(19): siRNA sense strand
ucacauacccugcuggauu

SEQ ID NO: 538501 - RNA, 19 nt, Homo sapiens
  misc_RNA (1)...(19): siRNA sense strand
ggcaagauaaucaacuuua

SEQ ID NO: 538502 - RNA, 19 nt, Homo sapiens
  misc_RNA (1)...(19): siRNA sense strand
gaagauauguaugcaacgu

SEQ ID NO: 538503 - RNA, 19 nt, Homo sapiens
  misc_RNA (1)...(19): siRNA sense strand
uuuagggacuggcaagaua

SEQ ID NO: 538504 - RNA, 19 nt, Homo sapiens
  misc_RNA (1)...(19): siRNA sense strand
caaauuugauacaggcaau

SEQ ID NO: 538505 - RNA, 19 nt, Homo sapiens
  misc_RNA (1)...(19): siRNA sense strand
guaaagaagauauguaugc

SEQ ID NO: 538506 - RNA, 19 nt, Homo sapiens
  misc_RNA (1)...(19): siRNA sense strand
agauauguaugcaacguuu

SEQ ID NO: 538507 - RNA, 19 nt, Homo sapiens
  misc_RNA (1)...(19): siRNA sense strand
ggagaugagguaaagaaga

SEQ ID NO: 538508 - RNA, 19 nt, Homo sapiens
  misc_RNA (1)...(19): siRNA sense strand
gaaagggcauucgacuuac

SEQ ID NO: 538509 - RNA, 19 nt, Homo sapiens
  misc_RNA (1)...(19): siRNA sense strand
uaugcaacguuucaucaaa

SEQ ID NO: 538510 - RNA, 19 nt, Homo sapiens
  misc_RNA (1)...(19): siRNA sense strand
gagaagacaggugaacauu

SEQ ID NO: 538511 - RNA, 19 nt, Homo sapiens
  misc_RNA (1)...(19): siRNA sense strand
caaaauugauggcaagguu

SEQ ID NO: 538512 - RNA, 19 nt, Homo sapiens
  misc_RNA (1)...(19): siRNA sense strand
gagguaaagaagauaugua

SEQ ID NO: 538513 - RNA, 19 nt, Homo sapiens
  misc_RNA (1)...(19): siRNA sense strand
cacauacccugcuggauuc

SEQ ID NO: 538514 - RNA, 19 nt, Homo sapiens
  misc_RNA (1)...(19): siRNA sense strand
auaagaggcuggccaccaa

SEQ ID NO: 538515 - RNA, 19 nt, Homo sapiens
  misc_RNA (1)...(19): siRNA sense strand
gcaaagugaggaagauuac

SEQ ID NO: 538516 - RNA, 19 nt, Homo sapiens
  misc_RNA (1)...(19): siRNA sense strand
caauaaaccuuggauuucc

SEQ ID NO: 538517 - RNA, 19 nt, Homo sapiens
  misc_RNA (1)...(19): siRNA sense strand
ggcauucgacuuacuguug

SEQ ID NO: 538518 - RNA, 19 nt, Homo sapiens
  misc_RNA (1)...(19): siRNA sense strand
ggacuggcaagauaaucaa

SEQ ID NO: 538519 - RNA, 19 nt, Homo sapiens
  misc_RNA (1)...(19): siRNA sense strand
gcacuuaaagcguguugca

SEQ ID NO: 538520 - RNA, 19 nt, Homo sapiens
  misc_RNA (1)...(19): siRNA sense strand
ucaggaauagacucaagua

SEQ ID NO: 538521 - RNA, 19 nt, Homo sapiens
  misc_RNA (1)...(19): siRNA sense strand
gacuuacuguugcugaaga

SEQ ID NO: 538522 - RNA, 19 nt, Homo sapiens
  misc_RNA (1)...(19): siRNA sense strand
caauuuguguauggugauu

SEQ ID NO: 538523 - RNA, 19 nt, Homo sapiens
  misc_RNA (1)...(19): siRNA sense strand
gaugagguaaagaagauau

SEQ ID NO: 538524 - RNA, 19 nt, Homo sapiens
  misc_RNA (1)...(19): siRNA sense strand
acgauacugugcagauuga

SEQ ID NO: 538525 - RNA, 19 nt, Homo sapiens
  misc_RNA (1)...(19): siRNA sense strand
agaagacaggugaacauuu

SEQ ID NO: 538526 - RNA, 19 nt, Homo sapiens
  misc_RNA (1)...(19): siRNA sense strand
gacuggagaugagguaaag

SEQ ID NO: 538527 - RNA, 19 nt, Homo sapiens
  misc_RNA (1)...(19): siRNA sense strand
auacugugcagauugauuu

SEQ ID NO: 538528 - RNA, 19 nt, Homo sapiens
  misc_RNA (1)...(19): siRNA sense strand
gauacugugcagauugauu

SEQ ID NO: 538529 - RNA, 19 nt, Homo sapiens
  misc_RNA (1)...(19): siRNA sense strand
cuacccagauccugucauc

SEQ ID NO: 538530 - RNA, 19 nt, Homo sapiens
  misc_RNA (1)...(19): siRNA sense strand
gaagaggcaaaguacaagu

SEQ ID NO: 538531 - RNA, 19 nt, Homo sapiens
  misc_RNA (1)...(19): siRNA sense strand
ucaucaaggugaacgauac

SEQ ID NO: 538532 - RNA, 19 nt, Homo sapiens
  misc_RNA (1)...(19): siRNA sense strand
caaacagagcaguggcuaa

SEQ ID NO: 538533 - RNA, 19 nt, Homo sapiens
  misc_RNA (1)...(19): siRNA sense strand
cacgaggcuuuccaacauu

SEQ ID NO: 538534 - RNA, 19 nt, Homo sapiens
  misc_RNA (1)...(19): siRNA sense strand
aggaauagacucaaguaug

SEQ ID NO: 538535 - RNA, 19 nt, Homo sapiens
  misc_RNA (1)...(19): siRNA sense strand
aaacuaacggguguauuug

SEQ ID NO: 538536 - RNA, 19 nt, Homo sapiens
  misc_RNA (1)...(19): siRNA sense strand
acgaggcuuuccaacauuu

SEQ ID NO: 538537 - RNA, 19 nt, Homo sapiens
  misc_RNA (1)...(19): siRNA sense strand
uggaagaggcaaaguacaa

SEQ ID NO: 538538 - RNA, 19 nt, Homo sapiens
  misc_RNA (1)...(19): siRNA sense strand
ugcaaagugaggaagauua

SEQ ID NO: 538539 - RNA, 19 nt, Homo sapiens
  misc_RNA (1)...(19): siRNA sense strand
gggaaagggcauucgacuu

SEQ ID NO: 538540 - RNA, 19 nt, Homo sapiens
  misc_RNA (1)...(19): siRNA sense strand
gggacuggcaagauaauca

SEQ ID NO: 538541 - RNA, 19 nt, Homo sapiens
  misc_RNA (1)...(19): siRNA sense strand
uugcagcgccgaagcauug

SEQ ID NO: 538542 - RNA, 19 nt, Homo sapiens
  misc_RNA (1)...(19): siRNA sense strand
ggaagaggcaaaguacaag

SEQ ID NO: 538543 - RNA, 19 nt, Homo sapiens
  misc_RNA (1)...(19): siRNA sense strand
ggcaauggcaauaaaccuu

SEQ ID NO: 538544 - RNA, 19 nt, Homo sapiens
  misc_RNA (1)...(19): siRNA sense strand
cgagaagacaggugaacau

SEQ ID NO: 538545 - RNA, 19 nt, Homo sapiens
  misc_RNA (1)...(19): siRNA sense strand
cccacaagcugagggaaug

SEQ ID NO: 538546 - RNA, 19 nt, Homo sapiens
  misc_RNA (1)...(19): siRNA sense strand
uuggaugcuugacaaacua

SEQ ID NO: 538547 - RNA, 19 nt, Homo sapiens
  misc_RNA (1)...(19): siRNA sense strand
caguggaagaggcaaagua

SEQ ID NO: 538548 - RNA, 19 nt, Homo sapiens
  misc_RNA (1)...(19): siRNA sense strand
gcaagguucgaguggaugu

SEQ ID NO: 538549 - RNA, 19 nt, Homo sapiens
  misc_RNA (1)...(19): siRNA sense strand
caacguuucaucaaaauug

SEQ ID NO: 538550 - RNA, 19 nt, Homo sapiens
  misc_RNA (1)...(19): siRNA sense strand
gguaaagaagauauguaug

SEQ ID NO: 538551 - RNA, 19 nt, Homo sapiens
  misc_RNA (1)...(19): siRNA sense strand
acaggcaauuuguguaugg

SEQ ID NO: 538552 - RNA, 19 nt, Homo sapiens
  misc_RNA (1)...(19): siRNA sense strand
ccucaggaauagacucaag

SEQ ID NO: 538553 - RNA, 19 nt, Homo sapiens
  misc_RNA (1)...(19): siRNA sense strand
cagauccugucaucaaggu

SEQ ID NO: 538554 - RNA, 19 nt, Homo sapiens
  misc_RNA (1)...(19): siRNA sense strand
uggcaagguucgaguggau

SEQ ID NO: 538555 - RNA, 19 nt, Homo sapiens
  misc_RNA (1)...(19): siRNA sense strand
guaugcaacguuucaucaa

SEQ ID NO: 538556 - RNA, 19 nt, Homo sapiens
  misc_RNA (1)...(19): siRNA sense strand
ugacuggagaugagguaaa

SEQ ID NO: 538557 - RNA, 19 nt, Homo sapiens
  misc_RNA (1)...(19): siRNA sense strand
gacaaacuaacggguguau

SEQ ID NO: 538558 - RNA, 19 nt, Homo sapiens
  misc_RNA (1)...(19): siRNA sense strand
uacuguugcugaagagaga

SEQ ID NO: 538559 - RNA, 19 nt, Homo sapiens
  misc_RNA (1)...(19): siRNA sense strand
gaucaccaacagggaaaga

SEQ ID NO: 538560 - RNA, 19 nt, Homo sapiens
  misc_RNA (1)...(19): siRNA sense strand
cuggcaagauaaucaacuu

SEQ ID NO: 538561 - RNA, 19 nt, Homo sapiens
  misc_RNA (1)...(19): siRNA sense strand
ugaacgauacugugcagau

SEQ ID NO: 538562 - RNA, 19 nt, Homo sapiens
  misc_RNA (1)...(19): siRNA sense strand
aaagugaggaagauuacug

SEQ ID NO: 538563 - RNA, 19 nt, Homo sapiens
  misc_RNA (1)...(19): siRNA sense strand
ugauacaggcaauuugugu

SEQ ID NO: 538564 - RNA, 19 nt, Homo sapiens
  misc_RNA (1)...(19): siRNA sense strand
uuagggacuggcaagauaa

SEQ ID NO: 538565 - RNA, 19 nt, Homo sapiens
  misc_RNA (1)...(19): siRNA sense strand
gcugaagagagagauaaga

SEQ ID NO: 538566 - RNA, 19 nt, Homo sapiens
  misc_RNA (1)...(19): siRNA sense strand
gcaauuuguguauggugau

SEQ ID NO: 538567 - RNA, 19 nt, Homo sapiens
  misc_RNA (1)...(19): siRNA sense strand
auacccugcuggauucaug

SEQ ID NO: 538568 - RNA, 19 nt, Homo sapiens
  misc_RNA (1)...(19): siRNA sense strand
acuaacggguguauuugca

SEQ ID NO: 538569 - RNA, 19 nt, Homo sapiens
  misc_RNA (1)...(19): siRNA sense strand
gaaacaggauucaguguga

SEQ ID NO: 538570 - RNA, 19 nt, Homo sapiens
  misc_RNA (1)...(19): siRNA sense strand
gaugugaagucguauuaua

SEQ ID NO: 538571 - RNA, 19 nt, Homo sapiens
  misc_RNA (1)...(19): siRNA sense strand
cagaauaggucuagaagaa

SEQ ID NO: 538572 - RNA, 19 nt, Homo sapiens
  misc_RNA (1)...(19): siRNA sense strand
gaaagaaucgguuaaaugu

SEQ ID NO: 538573 - RNA, 19 nt, Homo sapiens
  misc_RNA (1)...(19): siRNA sense strand
acaaaggaguuacaucuua

SEQ ID NO: 538574 - RNA, 19 nt, Homo sapiens
  misc_RNA (1)...(19): siRNA sense strand
aaagggagauucuaguaua

SEQ ID NO: 538575 - RNA, 19 nt, Homo sapiens
  misc_RNA (1)...(19): siRNA sense strand
caaaggaguuacaucuuaa

SEQ ID NO: 538576 - RNA, 19 nt, Homo sapiens
  misc_RNA (1)...(19): siRNA sense strand
aaacagaaaucgaaacaga

SEQ ID NO: 538577 - RNA, 19 nt, Homo sapiens
  misc_RNA (1)...(19): siRNA sense strand
cagaagaugugaagucgua

SEQ ID NO: 538578 - RNA, 19 nt, Homo sapiens
  misc_RNA (1)...(19): siRNA sense strand
gagaugcuguuuaaagaaa

SEQ ID NO: 538579 - RNA, 19 nt, Homo sapiens
  misc_RNA (1)...(19): siRNA sense strand
gaauaggucuagaagaaga

SEQ ID NO: 538580 - RNA, 19 nt, Homo sapiens
  misc_RNA (1)...(19): siRNA sense strand
agacuuaucuccugccuuu

SEQ ID NO: 538581 - RNA, 19 nt, Homo sapiens
  misc_RNA (1)...(19): siRNA sense strand
gaacagaauaggucuagaa

SEQ ID NO: 538582 - RNA, 19 nt, Homo sapiens
  misc_RNA (1)...(19): siRNA sense strand
cgaaacagauacagagaug

SEQ ID NO: 538583 - RNA, 19 nt, Homo sapiens
  misc_RNA (1)...(19): siRNA sense strand
gagaaagaaucgguuaaau

SEQ ID NO: 538584 - RNA, 19 nt, Homo sapiens
  misc_RNA (1)...(19): siRNA sense strand
cagcuucauuucucaauuu

SEQ ID NO: 538585 - RNA, 19 nt, Homo sapiens
  misc_RNA (1)...(19): siRNA sense strand
gcacaaaggaguuacaucu

SEQ ID NO: 538586 - RNA, 19 nt, Homo sapiens
  misc_RNA (1)...(19): siRNA sense strand
ggugaaaccagaacaauau

SEQ ID NO: 538587 - RNA, 19 nt, Homo sapiens
  misc_RNA (1)...(19): siRNA sense strand
accaagagaugcuguuuaa

SEQ ID NO: 538588 - RNA, 19 nt, Homo sapiens
  misc_RNA (1)...(19): siRNA sense strand
gaccaaagcaguugucaug

SEQ ID NO: 538589 - RNA, 19 nt, Homo sapiens
  misc_RNA (1)...(19): siRNA sense strand
gauguaagcccauaugauc

SEQ ID NO: 538590 - RNA, 19 nt, Homo sapiens
  misc_RNA (1)...(19): siRNA sense strand
ggagaaagaaucgguuaaa

SEQ ID NO: 538591 - RNA, 19 nt, Homo sapiens
  misc_RNA (1)...(19): siRNA sense strand
uauacuaccuggccagauu

SEQ ID NO: 538592 - RNA, 19 nt, Homo sapiens
  misc_RNA (1)...(19): siRNA sense strand
caagagaugcuguuuaaag

SEQ ID NO: 538593 - RNA, 19 nt, Homo sapiens
  misc_RNA (1)...(19): siRNA sense strand
aagagaugcuguuuaaaga

SEQ ID NO: 538594 - RNA, 19 nt, Homo sapiens
  misc_RNA (1)...(19): siRNA sense strand
gcacaguacuggccaacag

SEQ ID NO: 538595 - RNA, 19 nt, Homo sapiens
  misc_RNA (1)...(19): siRNA sense strand
gugugaagcucuugucaga

SEQ ID NO: 538596 - RNA, 19 nt, Homo sapiens
  misc_RNA (1)...(19): siRNA sense strand
caguuuaguugacauagaa

SEQ ID NO: 538597 - RNA, 19 nt, Homo sapiens
  misc_RNA (1)...(19): siRNA sense strand
gaacaauaucucacuuuca

SEQ ID NO: 538598 - RNA, 19 nt, Homo sapiens
  misc_RNA (1)...(19): siRNA sense strand
guacaucuacuacaauuag

SEQ ID NO: 538599 - RNA, 19 nt, Homo sapiens
  misc_RNA (1)...(19): siRNA sense strand
acagaaaucgaaacagaua

SEQ ID NO: 538600 - RNA, 19 nt, Homo sapiens
  misc_RNA (1)...(19): siRNA sense strand
ucucauacauggcuauaau

SEQ ID NO: 538601 - RNA, 19 nt, Homo sapiens
  misc_RNA (1)...(19): siRNA sense strand
gaaccgcauuguggagaaa

SEQ ID NO: 538602 - RNA, 19 nt, Homo sapiens
  misc_RNA (1)...(19): siRNA sense strand
gcagaagaccaaagcaguu

SEQ ID NO: 538603 - RNA, 19 nt, Homo sapiens
  misc_RNA (1)...(19): siRNA sense strand
uaugaucacagucguguua

SEQ ID NO: 538604 - RNA, 19 nt, Homo sapiens
  misc_RNA (1)...(19): siRNA sense strand
gaccaagagaugcuguuua

SEQ ID NO: 538605 - RNA, 19 nt, Homo sapiens
  misc_RNA (1)...(19): siRNA sense strand
gugaagcucuugucagaag

SEQ ID NO: 538606 - RNA, 19 nt, Homo sapiens
  misc_RNA (1)...(19): siRNA sense strand
gaagaggcacaaaggaguu

SEQ ID NO: 538607 - RNA, 19 nt, Homo sapiens
  misc_RNA (1)...(19): siRNA sense strand
uaaagaaacaggauucagu

SEQ ID NO: 538608 - RNA, 19 nt, Homo sapiens
  misc_RNA (1)...(19): siRNA sense strand
cagaaacgauggaaagaac

SEQ ID NO: 538609 - RNA, 19 nt, Homo sapiens
  misc_RNA (1)...(19): siRNA sense strand
uaacacaugcugccauuuc

SEQ ID NO: 538610 - RNA, 19 nt, Homo sapiens
  misc_RNA (1)...(19): siRNA sense strand
agaaagaaucgguuaaaug

SEQ ID NO: 538611 - RNA, 19 nt, Homo sapiens
  misc_RNA (1)...(19): siRNA sense strand
gccaacagaugaccaagag

SEQ ID NO: 538612 - RNA, 19 nt, Homo sapiens
  misc_RNA (1)...(19): siRNA sense strand
gaaacgauggaaagaacuu

SEQ ID NO: 538613 - RNA, 19 nt, Homo sapiens
  misc_RNA (1)...(19): siRNA sense strand
caacagaugaccaagagau

SEQ ID NO: 538614 - RNA, 19 nt, Homo sapiens
  misc_RNA (1)...(19): siRNA sense strand
ccuaacacaugcugccauu

SEQ ID NO: 538615 - RNA, 19 nt, Homo sapiens
  misc_RNA (1)...(19): siRNA sense strand
gaagaugugaagucguauu

SEQ ID NO: 538616 - RNA, 19 nt, Homo sapiens
  misc_RNA (1)...(19): siRNA sense strand
gguuaaaugugcacaguac

SEQ ID NO: 538617 - RNA, 19 nt, Homo sapiens
  misc_RNA (1)...(19): siRNA sense strand
ccagaacaauaucucacuu

SEQ ID NO: 538618 - RNA, 19 nt, Homo sapiens
  misc_RNA (1)...(19): siRNA sense strand
caauggaggagaacaguga

SEQ ID NO: 538619 - RNA, 19 nt, Homo sapiens
  misc_RNA (1)...(19): siRNA sense strand
agaacaauaucucacuuuc

SEQ ID NO: 538620 - RNA, 19 nt, Homo sapiens
  misc_RNA (1)...(19): siRNA sense strand
acagagauguaagcccaua

SEQ ID NO: 538621 - RNA, 19 nt, Homo sapiens
  misc_RNA (1)...(19): siRNA sense strand
ccaguuuaguugacauaga

SEQ ID NO: 538622 - RNA, 19 nt, Homo sapiens
  misc_RNA (1)...(19): siRNA sense strand
gagaaucuggcuccuugaa

SEQ ID NO: 538623 - RNA, 19 nt, Homo sapiens
  misc_RNA (1)...(19): siRNA sense strand
aagaugugaagucguauua

SEQ ID NO: 538624 - RNA, 19 nt, Homo sapiens
  misc_RNA (1)...(19): siRNA sense strand
uaaagggagauucuaguau

SEQ ID NO: 538625 - RNA, 19 nt, Homo sapiens
  misc_RNA (1)...(19): siRNA sense strand
aagauacaauggaggagaa

SEQ ID NO: 538626 - RNA, 19 nt, Homo sapiens
  misc_RNA (1)...(19): siRNA sense strand
gagauguaagcccauauga

SEQ ID NO: 538627 - RNA, 19 nt, Homo sapiens
  misc_RNA (1)...(19): siRNA sense strand
cagaacaauaucucacuuu

SEQ ID NO: 538628 - RNA, 19 nt, Homo sapiens
  misc_RNA (1)...(19): siRNA sense strand
gcaaaaugcugagaaugau

SEQ ID NO: 538629 - RNA, 19 nt, Homo sapiens
  misc_RNA (1)...(19): siRNA sense strand
auaaagggagauucuagua

SEQ ID NO: 538630 - RNA, 19 nt, Homo sapiens
  misc_RNA (1)...(19): siRNA sense strand
ccagcuucauuucucaauu

SEQ ID NO: 538631 - RNA, 19 nt, Homo sapiens
  misc_RNA (1)...(19): siRNA sense strand
ucauagaguggccaaguuu

SEQ ID NO: 538632 - RNA, 19 nt, Homo sapiens
  misc_RNA (1)...(19): siRNA sense strand
guacuuggaaauucgaaau

SEQ ID NO: 538633 - RNA, 19 nt, Homo sapiens
  misc_RNA (1)...(19): siRNA sense strand
guggagaaagaaucgguua

SEQ ID NO: 538634 - RNA, 19 nt, Homo sapiens
  misc_RNA (1)...(19): siRNA sense strand
gaaaacagaaaucgaaaca

SEQ ID NO: 538635 - RNA, 19 nt, Homo sapiens
  misc_RNA (1)...(19): siRNA sense strand
guauaaagggagauucuag

SEQ ID NO: 538636 - RNA, 19 nt, Homo sapiens
  misc_RNA (1)...(19): siRNA sense strand
gaaaccagaacaauaucuc

SEQ ID NO: 538637 - RNA, 19 nt, Homo sapiens
  misc_RNA (1)...(19): siRNA sense strand
ggaacagaauaggucuaga

SEQ ID NO: 538638 - RNA, 19 nt, Homo sapiens
  misc_RNA (1)...(19): siRNA sense strand
acacaggguccacuuccua

SEQ ID NO: 538639 - RNA, 19 nt, Homo sapiens
  misc_RNA (1)...(19): siRNA sense strand
ggacuuuccucuaaaaugc

SEQ ID NO: 538640 - RNA, 19 nt, Homo sapiens
  misc_RNA (1)...(19): siRNA sense strand
ugaucacagucguguuaaa

SEQ ID NO: 538641 - RNA, 19 nt, Homo sapiens
  misc_RNA (1)...(19): siRNA sense strand
ucaccagcuucauuucuca

SEQ ID NO: 538642 - RNA, 19 nt, Homo sapiens
  misc_RNA (1)...(19): siRNA sense strand
ugaccgauguacaggacuu

SEQ ID NO: 538643 - RNA, 19 nt, Homo sapiens
  misc_RNA (1)...(19): siRNA sense strand
gaaggagcaaaauguauaa

SEQ ID NO: 538644 - RNA, 19 nt, Homo sapiens
  misc_RNA (1)...(19): siRNA sense strand
ugacauagaagaggcacaa

SEQ ID NO: 538645 - RNA, 19 nt, Homo sapiens
  misc_RNA (1)...(19): siRNA sense strand
gagcgggaguucgaagagu

SEQ ID NO: 538646 - RNA, 19 nt, Homo sapiens
  misc_RNA (1)...(19): siRNA sense strand
cagaagaccaaagcaguug

SEQ ID NO: 538647 - RNA, 19 nt, Homo sapiens
  misc_RNA (1)...(19): siRNA sense strand
ugaaccgcauuguggagaa

SEQ ID NO: 538648 - RNA, 19 nt, Homo sapiens
  misc_RNA (1)...(19): siRNA sense strand
ccgcuguacuuggaaauuc

SEQ ID NO: 538649 - RNA, 19 nt, Homo sapiens
  misc_RNA (1)...(19): siRNA sense strand
ggagauucuaguauacaga

SEQ ID NO: 538650 - RNA, 19 nt, Homo sapiens
  misc_RNA (1)...(19): siRNA sense strand
ggagcaaaauguauaaagg

SEQ ID NO: 538651 - RNA, 19 nt, Homo sapiens
  misc_RNA (1)...(19): siRNA sense strand
cauagaagaggcacaaagg

SEQ ID NO: 538652 - RNA, 19 nt, Homo sapiens
  misc_RNA (1)...(19): siRNA sense strand
acugacaggugaccgaugu

SEQ ID NO: 538653 - RNA, 19 nt, Homo sapiens
  misc_RNA (1)...(19): siRNA sense strand
gggagauucuaguauacag

SEQ ID NO: 538654 - RNA, 19 nt, Homo sapiens
  misc_RNA (1)...(19): siRNA sense strand
aaauaccgaaugggucuua

SEQ ID NO: 538655 - RNA, 19 nt, Homo sapiens
  misc_RNA (1)...(19): siRNA sense strand
gaucacagucguguuaaac

SEQ ID NO: 538656 - RNA, 19 nt, Homo sapiens
  misc_RNA (1)...(19): siRNA sense strand
gaagaccaaagcaguuguc

SEQ ID NO: 538657 - RNA, 19 nt, Homo sapiens
  misc_RNA (1)...(19): siRNA sense strand
ucuccugccuuugaucauu

SEQ ID NO: 538658 - RNA, 19 nt, Homo sapiens
  misc_RNA (1)...(19): siRNA sense strand
auacagaaacgauggaaag

SEQ ID NO: 538659 - RNA, 19 nt, Homo sapiens
  misc_RNA (1)...(19): siRNA sense strand
ccagaucaacugagauucu

SEQ ID NO: 538660 - RNA, 19 nt, Homo sapiens
  misc_RNA (1)...(19): siRNA sense strand
acuuggaaauucgaaauga

SEQ ID NO: 538661 - RNA, 19 nt, Homo sapiens
  misc_RNA (1)...(19): siRNA sense strand
auacaaugggaacagaaua

SEQ ID NO: 538662 - RNA, 19 nt, Homo sapiens
  misc_RNA (1)...(19): siRNA sense strand
gaaucaccagcuucauuuc

SEQ ID NO: 538663 - RNA, 19 nt, Homo sapiens
  misc_RNA (1)...(19): siRNA sense strand
ccagaaaacagaaaucgaa

SEQ ID NO: 538664 - RNA, 19 nt, Homo sapiens
  misc_RNA (1)...(19): siRNA sense strand
gggaacagaauaggucuag

SEQ ID NO: 538665 - RNA, 19 nt, Homo sapiens
  misc_RNA (1)...(19): siRNA sense strand
cacaaaggaguuacaucuu

SEQ ID NO: 538666 - RNA, 19 nt, Homo sapiens
  misc_RNA (1)...(19): siRNA sense strand
gaucauucaccaaacaaaa

SEQ ID NO: 538667 - RNA, 19 nt, Homo sapiens
  misc_RNA (1)...(19): siRNA sense strand
acagaaacgauggaaagaa

SEQ ID NO: 538668 - RNA, 19 nt, Homo sapiens
  misc_RNA (1)...(19): siRNA sense strand
agaaggagcaaaauguaua

SEQ ID NO: 538669 - RNA, 19 nt, Homo sapiens
  misc_RNA (1)...(19): siRNA sense strand
gaaacaggauucaguguga

SEQ ID NO: 538670 - RNA, 19 nt, Homo sapiens
  misc_RNA (1)...(19): siRNA sense strand
gaugugaagucguauuaua

SEQ ID NO: 538671 - RNA, 19 nt, Homo sapiens
  misc_RNA (1)...(19): siRNA sense strand
cagaauaggucuagaagaa

SEQ ID NO: 538672 - RNA, 19 nt, Homo sapiens
  misc_RNA (1)...(19): siRNA sense strand
gaaagaaucgguuaaaugu

SEQ ID NO: 538673 - RNA, 19 nt, Homo sapiens
  misc_RNA (1)...(19): siRNA sense strand
acaaaggaguuacaucuua

SEQ ID NO: 538674 - RNA, 19 nt, Homo sapiens
  misc_RNA (1)...(19): siRNA sense strand
aaagggagauucuaguaua

SEQ ID NO: 538675 - RNA, 19 nt, Homo sapiens
  misc_RNA (1)...(19): siRNA sense strand
caaaggaguuacaucuuaa

SEQ ID NO: 538676 - RNA, 19 nt, Homo sapiens
  misc_RNA (1)...(19): siRNA sense strand
aaacagaaaucgaaacaga

SEQ ID NO: 538677 - RNA, 19 nt, Homo sapiens
  misc_RNA (1)...(19): siRNA sense strand
cagaagaugugaagucgua

SEQ ID NO: 538678 - RNA, 19 nt, Homo sapiens
  misc_RNA (1)...(19): siRNA sense strand
gagaugcuguuuaaagaaa

SEQ ID NO: 538679 - RNA, 19 nt, Homo sapiens
  misc_RNA (1)...(19): siRNA sense strand
gaauaggucuagaagaaga

SEQ ID NO: 538680 - RNA, 19 nt, Homo sapiens
  misc_RNA (1)...(19): siRNA sense strand
agacuuaucuccugccuuu

SEQ ID NO: 538681 - RNA, 19 nt, Homo sapiens
  misc_RNA (1)...(19): siRNA sense strand
gaacagaauaggucuagaa

SEQ ID NO: 538682 - RNA, 19 nt, Homo sapiens
  misc_RNA (1)...(19): siRNA sense strand
cgaaacagauacagagaug

SEQ ID NO: 538683 - RNA, 19 nt, Homo sapiens
  misc_RNA (1)...(19): siRNA sense strand
gagaaagaaucgguuaaau

SEQ ID NO: 538684 - RNA, 19 nt, Homo sapiens
  misc_RNA (1)...(19): siRNA sense strand
cagcuucauuucucaauuu

SEQ ID NO: 538685 - RNA, 19 nt, Homo sapiens
  misc_RNA (1)...(19): siRNA sense strand
gcacaaaggaguuacaucu

SEQ ID NO: 538686 - RNA, 19 nt, Homo sapiens
  misc_RNA (1)...(19): siRNA sense strand
ggugaaaccagaacaauau

SEQ ID NO: 538687 - RNA, 19 nt, Homo sapiens
  misc_RNA (1)...(19): siRNA sense strand
accaagagaugcuguuuaa

SEQ ID NO: 538688 - RNA, 19 nt, Homo sapiens
  misc_RNA (1)...(19): siRNA sense strand
gaccaaagcaguugucaug

SEQ ID NO: 538689 - RNA, 19 nt, Homo sapiens
  misc_RNA (1)...(19): siRNA sense strand
gauguaagcccauaugauc

SEQ ID NO: 538690 - RNA, 19 nt, Homo sapiens
  misc_RNA (1)...(19): siRNA sense strand
ggagaaagaaucgguuaaa

SEQ ID NO: 538691 - RNA, 19 nt, Homo sapiens
  misc_RNA (1)...(19): siRNA sense strand
uauacuaccuggccagauu

SEQ ID NO: 538692 - RNA, 19 nt, Homo sapiens
  misc_RNA (1)...(19): siRNA sense strand
caagagaugcuguuuaaag

SEQ ID NO: 538693 - RNA, 19 nt, Homo sapiens
  misc_RNA (1)...(19): siRNA sense strand
aagagaugcuguuuaaaga

SEQ ID NO: 538694 - RNA, 19 nt, Homo sapiens
  misc_RNA (1)...(19): siRNA sense strand
gcacaguacuggccaacag

SEQ ID NO: 538695 - RNA, 19 nt, Homo sapiens
  misc_RNA (1)...(19): siRNA sense strand
gugugaagcucuugucaga

SEQ ID NO: 538696 - RNA, 19 nt, Homo sapiens
  misc_RNA (1)...(19): siRNA sense strand
caguuuaguugacauagaa

SEQ ID NO: 538697 - RNA, 19 nt, Homo sapiens
  misc_RNA (1)...(19): siRNA sense strand
gaacaauaucucacuuuca

SEQ ID NO: 538698 - RNA, 19 nt, Homo sapiens
  misc_RNA (1)...(19): siRNA sense strand
guacaucuacuacaauuag

SEQ ID NO: 538699 - RNA, 19 nt, Homo sapiens
  misc_RNA (1)...(19): siRNA sense strand
acagaaaucgaaacagaua

SEQ ID NO: 538700 - RNA, 19 nt, Homo sapiens
  misc_RNA (1)...(19): siRNA sense strand
ucucauacauggcuauaau

SEQ ID NO: 538701 - RNA, 19 nt, Homo sapiens
  misc_RNA (1)...(19): siRNA sense strand
gaaccgcauuguggagaaa

SEQ ID NO: 538702 - RNA, 19 nt, Homo sapiens
  misc_RNA (1)...(19): siRNA sense strand
gcagaagaccaaagcaguu

SEQ ID NO: 538703 - RNA, 19 nt, Homo sapiens
  misc_RNA (1)...(19): siRNA sense strand
uaugaucacagucguguua

SEQ ID NO: 538704 - RNA, 19 nt, Homo sapiens
  misc_RNA (1)...(19): siRNA sense strand
gaccaagagaugcuguuua

SEQ ID NO: 538705 - RNA, 19 nt, Homo sapiens
  misc_RNA (1)...(19): siRNA sense strand
gugaagcucuugucagaag

SEQ ID NO: 538706 - RNA, 19 nt, Homo sapiens
  misc_RNA (1)...(19): siRNA sense strand
gaagaggcacaaaggaguu

SEQ ID NO: 538707 - RNA, 19 nt, Homo sapiens
  misc_RNA (1)...(19): siRNA sense strand
uaaagaaacaggauucagu

SEQ ID NO: 538708 - RNA, 19 nt, Homo sapiens
  misc_RNA (1)...(19): siRNA sense strand
cagaaacgauggaaagaac

SEQ ID NO: 538709 - RNA, 19 nt, Homo sapiens
  misc_RNA (1)...(19): siRNA sense strand
uaacacaugcugccauuuc

SEQ ID NO: 538710 - RNA, 19 nt, Homo sapiens
  misc_RNA (1)...(19): siRNA sense strand
agaaagaaucgguuaaaug

SEQ ID NO: 538711 - RNA, 19 nt, Homo sapiens
  misc_RNA (1)...(19): siRNA sense strand
gccaacagaugaccaagag

SEQ ID NO: 538712 - RNA, 19 nt, Homo sapiens
  misc_RNA (1)...(19): siRNA sense strand
gaaacgauggaaagaacuu

SEQ ID NO: 538713 - RNA, 19 nt, Homo sapiens
  misc_RNA (1)...(19): siRNA sense strand
caacagaugaccaagagau

SEQ ID NO: 538714 - RNA, 19 nt, Homo sapiens
  misc_RNA (1)...(19): siRNA sense strand
ccuaacacaugcugccauu

SEQ ID NO: 538715 - RNA, 19 nt, Homo sapiens
  misc_RNA (1)...(19): siRNA sense strand
gaagaugugaagucguauu

SEQ ID NO: 538716 - RNA, 19 nt, Homo sapiens
  misc_RNA (1)...(19): siRNA sense strand
gguuaaaugugcacaguac

SEQ ID NO: 538717 - RNA, 19 nt, Homo sapiens
  misc_RNA (1)...(19): siRNA sense strand
ccagaacaauaucucacuu

SEQ ID NO: 538718 - RNA, 19 nt, Homo sapiens
  misc_RNA (1)...(19): siRNA sense strand
caauggaggagaacaguga

SEQ ID NO: 538719 - RNA, 19 nt, Homo sapiens
  misc_RNA (1)...(19): siRNA sense strand
agaacaauaucucacuuuc

SEQ ID NO: 538720 - RNA, 19 nt, Homo sapiens
  misc_RNA (1)...(19): siRNA sense strand
acagagauguaagcccaua

SEQ ID NO: 538721 - RNA, 19 nt, Homo sapiens
  misc_RNA (1)...(19): siRNA sense strand
ccaguuuaguugacauaga

SEQ ID NO: 538722 - RNA, 19 nt, Homo sapiens
  misc_RNA (1)...(19): siRNA sense strand
gagaaucuggcuccuugaa

SEQ ID NO: 538723 - RNA, 19 nt, Homo sapiens
  misc_RNA (1)...(19): siRNA sense strand
aagaugugaagucguauua

SEQ ID NO: 538724 - RNA, 19 nt, Homo sapiens
  misc_RNA (1)...(19): siRNA sense strand
uaaagggagauucuaguau

SEQ ID NO: 538725 - RNA, 19 nt, Homo sapiens
  misc_RNA (1)...(19): siRNA sense strand
aagauacaauggaggagaa

SEQ ID NO: 538726 - RNA, 19 nt, Homo sapiens
  misc_RNA (1)...(19): siRNA sense strand
gagauguaagcccauauga

SEQ ID NO: 538727 - RNA, 19 nt, Homo sapiens
  misc_RNA (1)...(19): siRNA sense strand
cagaacaauaucucacuuu

SEQ ID NO: 538728 - RNA, 19 nt, Homo sapiens
  misc_RNA (1)...(19): siRNA sense strand
gcaaaaugcugagaaugau

SEQ ID NO: 538729 - RNA, 19 nt, Homo sapiens
  misc_RNA (1)...(19): siRNA sense strand
auaaagggagauucuagua

SEQ ID NO: 538730 - RNA, 19 nt, Homo sapiens
  misc_RNA (1)...(19): siRNA sense strand
ccagcuucauuucucaauu

SEQ ID NO: 538731 - RNA, 19 nt, Homo sapiens
  misc_RNA (1)...(19): siRNA sense strand
ucauagaguggccaaguuu

SEQ ID NO: 538732 - RNA, 19 nt, Homo sapiens
  misc_RNA (1)...(19): siRNA sense strand
guacuuggaaauucgaaau

SEQ ID NO: 538733 - RNA, 19 nt, Homo sapiens
  misc_RNA (1)...(19): siRNA sense strand
guggagaaagaaucgguua

SEQ ID NO: 538734 - RNA, 19 nt, Homo sapiens
  misc_RNA (1)...(19): siRNA sense strand
gaaaacagaaaucgaaaca

SEQ ID NO: 538735 - RNA, 19 nt, Homo sapiens
  misc_RNA (1)...(19): siRNA sense strand
guauaaagggagauucuag

SEQ ID NO: 538736 - RNA, 19 nt, Homo sapiens
  misc_RNA (1)...(19): siRNA sense strand
gaaaccagaacaauaucuc

SEQ ID NO: 538737 - RNA, 19 nt, Homo sapiens
  misc_RNA (1)...(19): siRNA sense strand
ggaacagaauaggucuaga

SEQ ID NO: 538738 - RNA, 19 nt, Homo sapiens
  misc_RNA (1)...(19): siRNA sense strand
acacaggguccacuuccua

SEQ ID NO: 538739 - RNA, 19 nt, Homo sapiens
  misc_RNA (1)...(19): siRNA sense strand
ggacuuuccucuaaaaugc

SEQ ID NO: 538740 - RNA, 19 nt, Homo sapiens
  misc_RNA (1)...(19): siRNA sense strand
ugaucacagucguguuaaa

SEQ ID NO: 538741 - RNA, 19 nt, Homo sapiens
  misc_RNA (1)...(19): siRNA sense strand
ucaccagcuucauuucuca

SEQ ID NO: 538742 - RNA, 19 nt, Homo sapiens
  misc_RNA (1)...(19): siRNA sense strand
ugaccgauguacaggacuu

SEQ ID NO: 538743 - RNA, 19 nt, Homo sapiens
  misc_RNA (1)...(19): siRNA sense strand
gaaggagcaaaauguauaa

SEQ ID NO: 538744 - RNA, 19 nt, Homo sapiens
  misc_RNA (1)...(19): siRNA sense strand
ugacauagaagaggcacaa

SEQ ID NO: 538745 - RNA, 19 nt, Homo sapiens
  misc_RNA (1)...(19): siRNA sense strand
gagcgggaguucgaagagu

SEQ ID NO: 538746 - RNA, 19 nt, Homo sapiens
  misc_RNA (1)...(19): siRNA sense strand
cagaagaccaaagcaguug

SEQ ID NO: 538747 - RNA, 19 nt, Homo sapiens
  misc_RNA (1)...(19): siRNA sense strand
ugaaccgcauuguggagaa

SEQ ID NO: 538748 - RNA, 19 nt, Homo sapiens
  misc_RNA (1)...(19): siRNA sense strand
ccgcuguacuuggaaauuc

SEQ ID NO: 538749 - RNA, 19 nt, Homo sapiens
  misc_RNA (1)...(19): siRNA sense strand
ggagauucuaguauacaga

SEQ ID NO: 538750 - RNA, 19 nt, Homo sapiens
  misc_RNA (1)...(19): siRNA sense strand
ggagcaaaauguauaaagg

SEQ ID NO: 538751 - RNA, 19 nt, Homo sapiens
  misc_RNA (1)...(19): siRNA sense strand
cauagaagaggcacaaagg

SEQ ID NO: 538752 - RNA, 19 nt, Homo sapiens
  misc_RNA (1)...(19): siRNA sense strand
acugacaggugaccgaugu

SEQ ID NO: 538753 - RNA, 19 nt, Homo sapiens
  misc_RNA (1)...(19): siRNA sense strand
gggagauucuaguauacag

SEQ ID NO: 538754 - RNA, 19 nt, Homo sapiens
  misc_RNA (1)...(19): siRNA sense strand
aaauaccgaaugggucuua

SEQ ID NO: 538755 - RNA, 19 nt, Homo sapiens
  misc_RNA (1)...(19): siRNA sense strand
gaucacagucguguuaaac

SEQ ID NO: 538756 - RNA, 19 nt, Homo sapiens
  misc_RNA (1)...(19): siRNA sense strand
gaagaccaaagcaguuguc

SEQ ID NO: 538757 - RNA, 19 nt, Homo sapiens
  misc_RNA (1)...(19): siRNA sense strand
ucuccugccuuugaucauu

SEQ ID NO: 538758 - RNA, 19 nt, Homo sapiens
  misc_RNA (1)...(19): siRNA sense strand
auacagaaacgauggaaag

SEQ ID NO: 538759 - RNA, 19 nt, Homo sapiens
  misc_RNA (1)...(19): siRNA sense strand
ccagaucaacugagauucu

SEQ ID NO: 538760 - RNA, 19 nt, Homo sapiens
  misc_RNA (1)...(19): siRNA sense strand
acuuggaaauucgaaauga

SEQ ID NO: 538761 - RNA, 19 nt, Homo sapiens
  misc_RNA (1)...(19): siRNA sense strand
auacaaugggaacagaaua

SEQ ID NO: 538762 - RNA, 19 nt, Homo sapiens
  misc_RNA (1)...(19): siRNA sense strand
gaaucaccagcuucauuuc

SEQ ID NO: 538763 - RNA, 19 nt, Homo sapiens
  misc_RNA (1)...(19): siRNA sense strand
ccagaaaacagaaaucgaa

SEQ ID NO: 538764 - RNA, 19 nt, Homo sapiens
  misc_RNA (1)...(19): siRNA sense strand
gggaacagaauaggucuag

SEQ ID NO: 538765 - RNA, 19 nt, Homo sapiens
  misc_RNA (1)...(19): siRNA sense strand
cacaaaggaguuacaucuu

SEQ ID NO: 538766 - RNA, 19 nt, Homo sapiens
  misc_RNA (1)...(19): siRNA sense strand
gaucauucaccaaacaaaa

SEQ ID NO: 538767 - RNA, 19 nt, Homo sapiens
  misc_RNA (1)...(19): siRNA sense strand
acagaaacgauggaaagaa

SEQ ID NO: 538768 - RNA, 19 nt, Homo sapiens
  misc_RNA (1)...(19): siRNA sense strand
agaaggagcaaaauguaua

SEQ ID NO: 538769 - RNA, 19 nt, Homo sapiens
  misc_RNA (1)...(19): siRNA sense strand
gaaacaggauucaguguga

SEQ ID NO: 538770 - RNA, 19 nt, Homo sapiens
  misc_RNA (1)...(19): siRNA sense strand
gaugugaagucguauuaua

SEQ ID NO: 538771 - RNA, 19 nt, Homo sapiens
  misc_RNA (1)...(19): siRNA sense strand
cagaauaggucuagaagaa

SEQ ID NO: 538772 - RNA, 19 nt, Homo sapiens
  misc_RNA (1)...(19): siRNA sense strand
gaaagaaucgguuaaaugu

SEQ ID NO: 538773 - RNA, 19 nt, Homo sapiens
  misc_RNA (1)...(19): siRNA sense strand
acaaaggaguuacaucuua

SEQ ID NO: 538774 - RNA, 19 nt, Homo sapiens
  misc_RNA (1)...(19): siRNA sense strand
aaagggagauucuaguaua

SEQ ID NO: 538775 - RNA, 19 nt, Homo sapiens
  misc_RNA (1)...(19): siRNA sense strand
caaaggaguuacaucuuaa

SEQ ID NO: 538776 - RNA, 19 nt, Homo sapiens
  misc_RNA (1)...(19): siRNA sense strand
aaacagaaaucgaaacaga

SEQ ID NO: 538777 - RNA, 19 nt, Homo sapiens
  misc_RNA (1)...(19): siRNA sense strand
cagaagaugugaagucgua

SEQ ID NO: 538778 - RNA, 19 nt, Homo sapiens
  misc_RNA (1)...(19): siRNA sense strand
gagaugcuguuuaaagaaa

SEQ ID NO: 538779 - RNA, 19 nt, Homo sapiens
  misc_RNA (1)...(19): siRNA sense strand
gaauaggucuagaagaaga

SEQ ID NO: 538780 - RNA, 19 nt, Homo sapiens
  misc_RNA (1)...(19): siRNA sense strand
agacuuaucuccugccuuu

SEQ ID NO: 538781 - RNA, 19 nt, Homo sapiens
  misc_RNA (1)...(19): siRNA sense strand
gaacagaauaggucuagaa

SEQ ID NO: 538782 - RNA, 19 nt, Homo sapiens
  misc_RNA (1)...(19): siRNA sense strand
cgaaacagauacagagaug

SEQ ID NO: 538783 - RNA, 19 nt, Homo sapiens
  misc_RNA (1)...(19): siRNA sense strand
gagaaagaaucgguuaaau

SEQ ID NO: 538784 - RNA, 19 nt, Homo sapiens
  misc_RNA (1)...(19): siRNA sense strand
cagcuucauuucucaauuu

SEQ ID NO: 538785 - RNA, 19 nt, Homo sapiens
  misc_RNA (1)...(19): siRNA sense strand
gcacaaaggaguuacaucu

SEQ ID NO: 538786 - RNA, 19 nt, Homo sapiens
  misc_RNA (1)...(19): siRNA sense strand
ggugaaaccagaacaauau

SEQ ID NO: 538787 - RNA, 19 nt, Homo sapiens
  misc_RNA (1)...(19): siRNA sense strand
accaagagaugcuguuuaa

SEQ ID NO: 538788 - RNA, 19 nt, Homo sapiens
  misc_RNA (1)...(19): siRNA sense strand
gaccaaagcaguugucaug

SEQ ID NO: 538789 - RNA, 19 nt, Homo sapiens
  misc_RNA (1)...(19): siRNA sense strand
gauguaagcccauaugauc

SEQ ID NO: 538790 - RNA, 19 nt, Homo sapiens
  misc_RNA (1)...(19): siRNA sense strand
ggagaaagaaucgguuaaa

SEQ ID NO: 538791 - RNA, 19 nt, Homo sapiens
  misc_RNA (1)...(19): siRNA sense strand
uauacuaccuggccagauu

SEQ ID NO: 538792 - RNA, 19 nt, Homo sapiens
  misc_RNA (1)...(19): siRNA sense strand
caagagaugcuguuuaaag

SEQ ID NO: 538793 - RNA, 19 nt, Homo sapiens
  misc_RNA (1)...(19): siRNA sense strand
aagagaugcuguuuaaaga

SEQ ID NO: 538794 - RNA, 19 nt, Homo sapiens
  misc_RNA (1)...(19): siRNA sense strand
gcacaguacuggccaacag

SEQ ID NO: 538795 - RNA, 19 nt, Homo sapiens
  misc_RNA (1)...(19): siRNA sense strand
gugugaagcucuugucaga

SEQ ID NO: 538796 - RNA, 19 nt, Homo sapiens
  misc_RNA (1)...(19): siRNA sense strand
caguuuaguugacauagaa

SEQ ID NO: 538797 - RNA, 19 nt, Homo sapiens
  misc_RNA (1)...(19): siRNA sense strand
gaacaauaucucacuuuca

SEQ ID NO: 538798 - RNA, 19 nt, Homo sapiens
  misc_RNA (1)...(19): siRNA sense strand
guacaucuacuacaauuag

SEQ ID NO: 538799 - RNA, 19 nt, Homo sapiens
  misc_RNA (1)...(19): siRNA sense strand
acagaaaucgaaacagaua

SEQ ID NO: 538800 - RNA, 19 nt, Homo sapiens
  misc_RNA (1)...(19): siRNA sense strand
ucucauacauggcuauaau

SEQ ID NO: 538801 - RNA, 19 nt, Homo sapiens
  misc_RNA (1)...(19): siRNA sense strand
gaaccgcauuguggagaaa

SEQ ID NO: 538802 - RNA, 19 nt, Homo sapiens
  misc_RNA (1)...(19): siRNA sense strand
gcagaagaccaaagcaguu

SEQ ID NO: 538803 - RNA, 19 nt, Homo sapiens
  misc_RNA (1)...(19): siRNA sense strand
uaugaucacagucguguua

SEQ ID NO: 538804 - RNA, 19 nt, Homo sapiens
  misc_RNA (1)...(19): siRNA sense strand
gaccaagagaugcuguuua

SEQ ID NO: 538805 - RNA, 19 nt, Homo sapiens
  misc_RNA (1)...(19): siRNA sense strand
gugaagcucuugucagaag

SEQ ID NO: 538806 - RNA, 19 nt, Homo sapiens
  misc_RNA (1)...(19): siRNA sense strand
gaagaggcacaaaggaguu

SEQ ID NO: 538807 - RNA, 19 nt, Homo sapiens
  misc_RNA (1)...(19): siRNA sense strand
uaaagaaacaggauucagu

SEQ ID NO: 538808 - RNA, 19 nt, Homo sapiens
  misc_RNA (1)...(19): siRNA sense strand
cagaaacgauggaaagaac

SEQ ID NO: 538809 - RNA, 19 nt, Homo sapiens
  misc_RNA (1)...(19): siRNA sense strand
uaacacaugcugccauuuc

SEQ ID NO: 538810 - RNA, 19 nt, Homo sapiens
  misc_RNA (1)...(19): siRNA sense strand
agaaagaaucgguuaaaug

SEQ ID NO: 538811 - RNA, 19 nt, Homo sapiens
  misc_RNA (1)...(19): siRNA sense strand
gccaacagaugaccaagag

SEQ ID NO: 538812 - RNA, 19 nt, Homo sapiens
  misc_RNA (1)...(19): siRNA sense strand
gaaacgauggaaagaacuu

SEQ ID NO: 538813 - RNA, 19 nt, Homo sapiens
  misc_RNA (1)...(19): siRNA sense strand
caacagaugaccaagagau

SEQ ID NO: 538814 - RNA, 19 nt, Homo sapiens
  misc_RNA (1)...(19): siRNA sense strand
ccuaacacaugcugccauu

SEQ ID NO: 538815 - RNA, 19 nt, Homo sapiens
  misc_RNA (1)...(19): siRNA sense strand
gaagaugugaagucguauu

SEQ ID NO: 538816 - RNA, 19 nt, Homo sapiens
  misc_RNA (1)...(19): siRNA sense strand
gguuaaaugugcacaguac

SEQ ID NO: 538817 - RNA, 19 nt, Homo sapiens
  misc_RNA (1)...(19): siRNA sense strand
ccagaacaauaucucacuu

SEQ ID NO: 538818 - RNA, 19 nt, Homo sapiens
  misc_RNA (1)...(19): siRNA sense strand
caauggaggagaacaguga

SEQ ID NO: 538819 - RNA, 19 nt, Homo sapiens
  misc_RNA (1)...(19): siRNA sense strand
agaacaauaucucacuuuc

SEQ ID NO: 538820 - RNA, 19 nt, Homo sapiens
  misc_RNA (1)...(19): siRNA sense strand
acagagauguaagcccaua

SEQ ID NO: 538821 - RNA, 19 nt, Homo sapiens
  misc_RNA (1)...(19): siRNA sense strand
ccaguuuaguugacauaga

SEQ ID NO: 538822 - RNA, 19 nt, Homo sapiens
  misc_RNA (1)...(19): siRNA sense strand
gagaaucuggcuccuugaa

SEQ ID NO: 538823 - RNA, 19 nt, Homo sapiens
  misc_RNA (1)...(19): siRNA sense strand
aagaugugaagucguauua

SEQ ID NO: 538824 - RNA, 19 nt, Homo sapiens
  misc_RNA (1)...(19): siRNA sense strand
uaaagggagauucuaguau

SEQ ID NO: 538825 - RNA, 19 nt, Homo sapiens
  misc_RNA (1)...(19): siRNA sense strand
aagauacaauggaggagaa

SEQ ID NO: 538826 - RNA, 19 nt, Homo sapiens
  misc_RNA (1)...(19): siRNA sense strand
gagauguaagcccauauga

SEQ ID NO: 538827 - RNA, 19 nt, Homo sapiens
  misc_RNA (1)...(19): siRNA sense strand
cagaacaauaucucacuuu

SEQ ID NO: 538828 - RNA, 19 nt, Homo sapiens
  misc_RNA (1)...(19): siRNA sense strand
gcaaaaugcugagaaugau

SEQ ID NO: 538829 - RNA, 19 nt, Homo sapiens
  misc_RNA (1)...(19): siRNA sense strand
auaaagggagauucuagua

SEQ ID NO: 538830 - RNA, 19 nt, Homo sapiens
  misc_RNA (1)...(19): siRNA sense strand
ccagcuucauuucucaauu

SEQ ID NO: 538831 - RNA, 19 nt, Homo sapiens
  misc_RNA (1)...(19): siRNA sense strand
ucauagaguggccaaguuu

SEQ ID NO: 538832 - RNA, 19 nt, Homo sapiens
  misc_RNA (1)...(19): siRNA sense strand
guacuuggaaauucgaaau

SEQ ID NO: 538833 - RNA, 19 nt, Homo sapiens
  misc_RNA (1)...(19): siRNA sense strand
guggagaaagaaucgguua

SEQ ID NO: 538834 - RNA, 19 nt, Homo sapiens
  misc_RNA (1)...(19): siRNA sense strand
gaaaacagaaaucgaaaca

SEQ ID NO: 538835 - RNA, 19 nt, Homo sapiens
  misc_RNA (1)...(19): siRNA sense strand
guauaaagggagauucuag

SEQ ID NO: 538836 - RNA, 19 nt, Homo sapiens
  misc_RNA (1)...(19): siRNA sense strand
gaaaccagaacaauaucuc

SEQ ID NO: 538837 - RNA, 19 nt, Homo sapiens
  misc_RNA (1)...(19): siRNA sense strand
ggaacagaauaggucuaga

SEQ ID NO: 538838 - RNA, 19 nt, Homo sapiens
  misc_RNA (1)...(19): siRNA sense strand
acacaggguccacuuccua

SEQ ID NO: 538839 - RNA, 19 nt, Homo sapiens
  misc_RNA (1)...(19): siRNA sense strand
ggacuuuccucuaaaaugc

SEQ ID NO: 538840 - RNA, 19 nt, Homo sapiens
  misc_RNA (1)...(19): siRNA sense strand
ugaucacagucguguuaaa

SEQ ID NO: 538841 - RNA, 19 nt, Homo sapiens
  misc_RNA (1)...(19): siRNA sense strand
ucaccagcuucauuucuca

SEQ ID NO: 538842 - RNA, 19 nt, Homo sapiens
  misc_RNA (1)...(19): siRNA sense strand
ugaccgauguacaggacuu

SEQ ID NO: 538843 - RNA, 19 nt, Homo sapiens
  misc_RNA (1)...(19): siRNA sense strand
gaaggagcaaaauguauaa

SEQ ID NO: 538844 - RNA, 19 nt, Homo sapiens
  misc_RNA (1)...(19): siRNA sense strand
ugacauagaagaggcacaa

SEQ ID NO: 538845 - RNA, 19 nt, Homo sapiens
  misc_RNA (1)...(19): siRNA sense strand
gagcgggaguucgaagagu

SEQ ID NO: 538846 - RNA, 19 nt, Homo sapiens
  misc_RNA (1)...(19): siRNA sense strand
cagaagaccaaagcaguug

SEQ ID NO: 538847 - RNA, 19 nt, Homo sapiens
  misc_RNA (1)...(19): siRNA sense strand
ugaaccgcauuguggagaa

SEQ ID NO: 538848 - RNA, 19 nt, Homo sapiens
  misc_RNA (1)...(19): siRNA sense strand
ccgcuguacuuggaaauuc

SEQ ID NO: 538849 - RNA, 19 nt, Homo sapiens
  misc_RNA (1)...(19): siRNA sense strand
ggagauucuaguauacaga

SEQ ID NO: 538850 - RNA, 19 nt, Homo sapiens
  misc_RNA (1)...(19): siRNA sense strand
ggagcaaaauguauaaagg

SEQ ID NO: 538851 - RNA, 19 nt, Homo sapiens
  misc_RNA (1)...(19): siRNA sense strand
cauagaagaggcacaaagg

SEQ ID NO: 538852 - RNA, 19 nt, Homo sapiens
  misc_RNA (1)...(19): siRNA sense strand
acugacaggugaccgaugu

SEQ ID NO: 538853 - RNA, 19 nt, Homo sapiens
  misc_RNA (1)...(19): siRNA sense strand
gggagauucuaguauacag

SEQ ID NO: 538854 - RNA, 19 nt, Homo sapiens
  misc_RNA (1)...(19): siRNA sense strand
aaauaccgaaugggucuua

SEQ ID NO: 538855 - RNA, 19 nt, Homo sapiens
  misc_RNA (1)...(19): siRNA sense strand
gaucacagucguguuaaac

SEQ ID NO: 538856 - RNA, 19 nt, Homo sapiens
  misc_RNA (1)...(19): siRNA sense strand
gaagaccaaagcaguuguc

SEQ ID NO: 538857 - RNA, 19 nt, Homo sapiens
  misc_RNA (1)...(19): siRNA sense strand
ucuccugccuuugaucauu

SEQ ID NO: 538858 - RNA, 19 nt, Homo sapiens
  misc_RNA (1)...(19): siRNA sense strand
auacagaaacgauggaaag

SEQ ID NO: 538859 - RNA, 19 nt, Homo sapiens
  misc_RNA (1)...(19): siRNA sense strand
ccagaucaacugagauucu

SEQ ID NO: 538860 - RNA, 19 nt, Homo sapiens
  misc_RNA (1)...(19): siRNA sense strand
acuuggaaauucgaaauga

SEQ ID NO: 538861 - RNA, 19 nt, Homo sapiens
  misc_RNA (1)...(19): siRNA sense strand
auacaaugggaacagaaua

SEQ ID NO: 538862 - RNA, 19 nt, Homo sapiens
  misc_RNA (1)...(19): siRNA sense strand
gaaucaccagcuucauuuc

SEQ ID NO: 538863 - RNA, 19 nt, Homo sapiens
  misc_RNA (1)...(19): siRNA sense strand
ccagaaaacagaaaucgaa

SEQ ID NO: 538864 - RNA, 19 nt, Homo sapiens
  misc_RNA (1)...(19): siRNA sense strand
gggaacagaauaggucuag

SEQ ID NO: 538865 - RNA, 19 nt, Homo sapiens
  misc_RNA (1)...(19): siRNA sense strand
cacaaaggaguuacaucuu

SEQ ID NO: 538866 - RNA, 19 nt, Homo sapiens
  misc_RNA (1)...(19): siRNA sense strand
gaucauucaccaaacaaaa

SEQ ID NO: 538867 - RNA, 19 nt, Homo sapiens
  misc_RNA (1)...(19): siRNA sense strand
acagaaacgauggaaagaa

SEQ ID NO: 538868 - RNA, 19 nt, Homo sapiens
  misc_RNA (1)...(19): siRNA sense strand
agaaggagcaaaauguaua

SEQ ID NO: 538869 - RNA, 19 nt, Homo sapiens
  misc_RNA (1)...(19): siRNA sense strand
gaaacaggauucaguguga

SEQ ID NO: 538870 - RNA, 19 nt, Homo sapiens
  misc_RNA (1)...(19): siRNA sense strand
gaugugaagucguauuaua

SEQ ID NO: 538871 - RNA, 19 nt, Homo sapiens
  misc_RNA (1)...(19): siRNA sense strand
cagaauaggucuagaagaa

SEQ ID NO: 538872 - RNA, 19 nt, Homo sapiens
  misc_RNA (1)...(19): siRNA sense strand
gaaagaaucgguuaaaugu

SEQ ID NO: 538873 - RNA, 19 nt, Homo sapiens
  misc_RNA (1)...(19): siRNA sense strand
acaaaggaguuacaucuua

SEQ ID NO: 538874 - RNA, 19 nt, Homo sapiens
  misc_RNA (1)...(19): siRNA sense strand
aaagggagauucuaguaua

SEQ ID NO: 538875 - RNA, 19 nt, Homo sapiens
  misc_RNA (1)...(19): siRNA sense strand
caaaggaguuacaucuuaa

SEQ ID NO: 538876 - RNA, 19 nt, Homo sapiens
  misc_RNA (1)...(19): siRNA sense strand
aaacagaaaucgaaacaga

SEQ ID NO: 538877 - RNA, 19 nt, Homo sapiens
  misc_RNA (1)...(19): siRNA sense strand
cagaagaugugaagucgua

SEQ ID NO: 538878 - RNA, 19 nt, Homo sapiens
  misc_RNA (1)...(19): siRNA sense strand
gagaugcuguuuaaagaaa

SEQ ID NO: 538879 - RNA, 19 nt, Homo sapiens
  misc_RNA (1)...(19): siRNA sense strand
gaauaggucuagaagaaga

SEQ ID NO: 538880 - RNA, 19 nt, Homo sapiens
  misc_RNA (1)...(19): siRNA sense strand
agacuuaucuccugccuuu

SEQ ID NO: 538881 - RNA, 19 nt, Homo sapiens
  misc_RNA (1)...(19): siRNA sense strand
gaacagaauaggucuagaa

SEQ ID NO: 538882 - RNA, 19 nt, Homo sapiens
  misc_RNA (1)...(19): siRNA sense strand
cgaaacagauacagagaug

SEQ ID NO: 538883 - RNA, 19 nt, Homo sapiens
  misc_RNA (1)...(19): siRNA sense strand
gagaaagaaucgguuaaau

SEQ ID NO: 538884 - RNA, 19 nt, Homo sapiens
  misc_RNA (1)...(19): siRNA sense strand
cagcuucauuucucaauuu

SEQ ID NO: 538885 - RNA, 19 nt, Homo sapiens
  misc_RNA (1)...(19): siRNA sense strand
gcacaaaggaguuacaucu

SEQ ID NO: 538886 - RNA, 19 nt, Homo sapiens
  misc_RNA (1)...(19): siRNA sense strand
ggugaaaccagaacaauau

SEQ ID NO: 538887 - RNA, 19 nt, Homo sapiens
  misc_RNA (1)...(19): siRNA sense strand
accaagagaugcuguuuaa

SEQ ID NO: 538888 - RNA, 19 nt, Homo sapiens
  misc_RNA (1)...(19): siRNA sense strand
gaccaaagcaguugucaug

SEQ ID NO: 538889 - RNA, 19 nt, Homo sapiens
  misc_RNA (1)...(19): siRNA sense strand
gauguaagcccauaugauc

SEQ ID NO: 538890 - RNA, 19 nt, Homo sapiens
  misc_RNA (1)...(19): siRNA sense strand
ggagaaagaaucgguuaaa

SEQ ID NO: 538891 - RNA, 19 nt, Homo sapiens
  misc_RNA (1)...(19): siRNA sense strand
uauacuaccuggccagauu

SEQ ID NO: 538892 - RNA, 19 nt, Homo sapiens
  misc_RNA (1)...(19): siRNA sense strand
caagagaugcuguuuaaag

SEQ ID NO: 538893 - RNA, 19 nt, Homo sapiens
  misc_RNA (1)...(19): siRNA sense strand
aagagaugcuguuuaaaga

SEQ ID NO: 538894 - RNA, 19 nt, Homo sapiens
  misc_RNA (1)...(19): siRNA sense strand
gcacaguacuggccaacag

SEQ ID NO: 538895 - RNA, 19 nt, Homo sapiens
  misc_RNA (1)...(19): siRNA sense strand
gugugaagcucuugucaga

SEQ ID NO: 538896 - RNA, 19 nt, Homo sapiens
  misc_RNA (1)...(19): siRNA sense strand
caguuuaguugacauagaa

SEQ ID NO: 538897 - RNA, 19 nt, Homo sapiens
  misc_RNA (1)...(19): siRNA sense strand
gaacaauaucucacuuuca

SEQ ID NO: 538898 - RNA, 19 nt, Homo sapiens
  misc_RNA (1)...(19): siRNA sense strand
guacaucuacuacaauuag

SEQ ID NO: 538899 - RNA, 19 nt, Homo sapiens
  misc_RNA (1)...(19): siRNA sense strand
acagaaaucgaaacagaua

SEQ ID NO: 538900 - RNA, 19 nt, Homo sapiens
  misc_RNA (1)...(19): siRNA sense strand
ucucauacauggcuauaau

SEQ ID NO: 538901 - RNA, 19 nt, Homo sapiens
  misc_RNA (1)...(19): siRNA sense strand
gaaccgcauuguggagaaa

SEQ ID NO: 538902 - RNA, 19 nt, Homo sapiens
  misc_RNA (1)...(19): siRNA sense strand
gcagaagaccaaagcaguu

SEQ ID NO: 538903 - RNA, 19 nt, Homo sapiens
  misc_RNA (1)...(19): siRNA sense strand
uaugaucacagucguguua

SEQ ID NO: 538904 - RNA, 19 nt, Homo sapiens
  misc_RNA (1)...(19): siRNA sense strand
gaccaagagaugcuguuua

SEQ ID NO: 538905 - RNA, 19 nt, Homo sapiens
  misc_RNA (1)...(19): siRNA sense strand
gugaagcucuugucagaag

SEQ ID NO: 538906 - RNA, 19 nt, Homo sapiens
  misc_RNA (1)...(19): siRNA sense strand
gaagaggcacaaaggaguu

SEQ ID NO: 538907 - RNA, 19 nt, Homo sapiens
  misc_RNA (1)...(19): siRNA sense strand
uaaagaaacaggauucagu

SEQ ID NO: 538908 - RNA, 19 nt, Homo sapiens
  misc_RNA (1)...(19): siRNA sense strand
cagaaacgauggaaagaac

SEQ ID NO: 538909 - RNA, 19 nt, Homo sapiens
  misc_RNA (1)...(19): siRNA sense strand
uaacacaugcugccauuuc

SEQ ID NO: 538910 - RNA, 19 nt, Homo sapiens
  misc_RNA (1)...(19): siRNA sense strand
agaaagaaucgguuaaaug

SEQ ID NO: 538911 - RNA, 19 nt, Homo sapiens
  misc_RNA (1)...(19): siRNA sense strand
gccaacagaugaccaagag

SEQ ID NO: 538912 - RNA, 19 nt, Homo sapiens
  misc_RNA (1)...(19): siRNA sense strand
gaaacgauggaaagaacuu

SEQ ID NO: 538913 - RNA, 19 nt, Homo sapiens
  misc_RNA (1)...(19): siRNA sense strand
caacagaugaccaagagau

SEQ ID NO: 538914 - RNA, 19 nt, Homo sapiens
  misc_RNA (1)...(19): siRNA sense strand
ccuaacacaugcugccauu

SEQ ID NO: 538915 - RNA, 19 nt, Homo sapiens
  misc_RNA (1)...(19): siRNA sense strand
gaagaugugaagucguauu

SEQ ID NO: 538916 - RNA, 19 nt, Homo sapiens
  misc_RNA (1)...(19): siRNA sense strand
gguuaaaugugcacaguac

SEQ ID NO: 538917 - RNA, 19 nt, Homo sapiens
  misc_RNA (1)...(19): siRNA sense strand
ccagaacaauaucucacuu

SEQ ID NO: 538918 - RNA, 19 nt, Homo sapiens
  misc_RNA (1)...(19): siRNA sense strand
caauggaggagaacaguga

SEQ ID NO: 538919 - RNA, 19 nt, Homo sapiens
  misc_RNA (1)...(19): siRNA sense strand
agaacaauaucucacuuuc

SEQ ID NO: 538920 - RNA, 19 nt, Homo sapiens
  misc_RNA (1)...(19): siRNA sense strand
acagagauguaagcccaua

SEQ ID NO: 538921 - RNA, 19 nt, Homo sapiens
  misc_RNA (1)...(19): siRNA sense strand
ccaguuuaguugacauaga

SEQ ID NO: 538922 - RNA, 19 nt, Homo sapiens
  misc_RNA (1)...(19): siRNA sense strand
gagaaucuggcuccuugaa

SEQ ID NO: 538923 - RNA, 19 nt, Homo sapiens
  misc_RNA (1)...(19): siRNA sense strand
aagaugugaagucguauua

SEQ ID NO: 538924 - RNA, 19 nt, Homo sapiens
  misc_RNA (1)...(19): siRNA sense strand
uaaagggagauucuaguau

SEQ ID NO: 538925 - RNA, 19 nt, Homo sapiens
  misc_RNA (1)...(19): siRNA sense strand
aagauacaauggaggagaa

SEQ ID NO: 538926 - RNA, 19 nt, Homo sapiens
  misc_RNA (1)...(19): siRNA sense strand
gagauguaagcccauauga

SEQ ID NO: 538927 - RNA, 19 nt, Homo sapiens
  misc_RNA (1)...(19): siRNA sense strand
cagaacaauaucucacuuu

SEQ ID NO: 538928 - RNA, 19 nt, Homo sapiens
  misc_RNA (1)...(19): siRNA sense strand
gcaaaaugcugagaaugau

SEQ ID NO: 538929 - RNA, 19 nt, Homo sapiens
  misc_RNA (1)...(19): siRNA sense strand
auaaagggagauucuagua

SEQ ID NO: 538930 - RNA, 19 nt, Homo sapiens
  misc_RNA (1)...(19): siRNA sense strand
ccagcuucauuucucaauu

SEQ ID NO: 538931 - RNA, 19 nt, Homo sapiens
  misc_RNA (1)...(19): siRNA sense strand
ucauagaguggccaaguuu

SEQ ID NO: 538932 - RNA, 19 nt, Homo sapiens
  misc_RNA (1)...(19): siRNA sense strand
guacuuggaaauucgaaau

SEQ ID NO: 538933 - RNA, 19 nt, Homo sapiens
  misc_RNA (1)...(19): siRNA sense strand
guggagaaagaaucgguua

SEQ ID NO: 538934 - RNA, 19 nt, Homo sapiens
  misc_RNA (1)...(19): siRNA sense strand
gaaaacagaaaucgaaaca

SEQ ID NO: 538935 - RNA, 19 nt, Homo sapiens
  misc_RNA (1)...(19): siRNA sense strand
guauaaagggagauucuag

SEQ ID NO: 538936 - RNA, 19 nt, Homo sapiens
  misc_RNA (1)...(19): siRNA sense strand
gaaaccagaacaauaucuc

SEQ ID NO: 538937 - RNA, 19 nt, Homo sapiens
  misc_RNA (1)...(19): siRNA sense strand
ggaacagaauaggucuaga

SEQ ID NO: 538938 - RNA, 19 nt, Homo sapiens
  misc_RNA (1)...(19): siRNA sense strand
acacaggguccacuuccua

SEQ ID NO: 538939 - RNA, 19 nt, Homo sapiens
  misc_RNA (1)...(19): siRNA sense strand
ggacuuuccucuaaaaugc

SEQ ID NO: 538940 - RNA, 19 nt, Homo sapiens
  misc_RNA (1)...(19): siRNA sense strand
ugaucacagucguguuaaa

SEQ ID NO: 538941 - RNA, 19 nt, Homo sapiens
  misc_RNA (1)...(19): siRNA sense strand
ucaccagcuucauuucuca

SEQ ID NO: 538942 - RNA, 19 nt, Homo sapiens
  misc_RNA (1)...(19): siRNA sense strand
ugaccgauguacaggacuu

SEQ ID NO: 538943 - RNA, 19 nt, Homo sapiens
  misc_RNA (1)...(19): siRNA sense strand
gaaggagcaaaauguauaa

SEQ ID NO: 538944 - RNA, 19 nt, Homo sapiens
  misc_RNA (1)...(19): siRNA sense strand
ugacauagaagaggcacaa

SEQ ID NO: 538945 - RNA, 19 nt, Homo sapiens
  misc_RNA (1)...(19): siRNA sense strand
gagcgggaguucgaagagu

SEQ ID NO: 538946 - RNA, 19 nt, Homo sapiens
  misc_RNA (1)...(19): siRNA sense strand
cagaagaccaaagcaguug

SEQ ID NO: 538947 - RNA, 19 nt, Homo sapiens
  misc_RNA (1)...(19): siRNA sense strand
ugaaccgcauuguggagaa

SEQ ID NO: 538948 - RNA, 19 nt, Homo sapiens
  misc_RNA (1)...(19): siRNA sense strand
ccgcuguacuuggaaauuc

SEQ ID NO: 538949 - RNA, 19 nt, Homo sapiens
  misc_RNA (1)...(19): siRNA sense strand
ggagauucuaguauacaga

SEQ ID NO: 538950 - RNA, 19 nt, Homo sapiens
  misc_RNA (1)...(19): siRNA sense strand
ggagcaaaauguauaaagg

SEQ ID NO: 538951 - RNA, 19 nt, Homo sapiens
  misc_RNA (1)...(19): siRNA sense strand
cauagaagaggcacaaagg

SEQ ID NO: 538952 - RNA, 19 nt, Homo sapiens
  misc_RNA (1)...(19): siRNA sense strand
acugacaggugaccgaugu

SEQ ID NO: 538953 - RNA, 19 nt, Homo sapiens
  misc_RNA (1)...(19): siRNA sense strand
gggagauucuaguauacag

SEQ ID NO: 538954 - RNA, 19 nt, Homo sapiens
  misc_RNA (1)...(19): siRNA sense strand
aaauaccgaaugggucuua

SEQ ID NO: 538955 - RNA, 19 nt, Homo sapiens
  misc_RNA (1)...(19): siRNA sense strand
gaucacagucguguuaaac

SEQ ID NO: 538956 - RNA, 19 nt, Homo sapiens
  misc_RNA (1)...(19): siRNA sense strand
gaagaccaaagcaguuguc

SEQ ID NO: 538957 - RNA, 19 nt, Homo sapiens
  misc_RNA (1)...(19): siRNA sense strand
ucuccugccuuugaucauu

SEQ ID NO: 538958 - RNA, 19 nt, Homo sapiens
  misc_RNA (1)...(19): siRNA sense strand
auacagaaacgauggaaag

SEQ ID NO: 538959 - RNA, 19 nt, Homo sapiens
  misc_RNA (1)...(19): siRNA sense strand
ccagaucaacugagauucu

SEQ ID NO: 538960 - RNA, 19 nt, Homo sapiens
  misc_RNA (1)...(19): siRNA sense strand
acuuggaaauucgaaauga

SEQ ID NO: 538961 - RNA, 19 nt, Homo sapiens
  misc_RNA (1)...(19): siRNA sense strand
auacaaugggaacagaaua

SEQ ID NO: 538962 - RNA, 19 nt, Homo sapiens
  misc_RNA (1)...(19): siRNA sense strand
gaaucaccagcuucauuuc

SEQ ID NO: 538963 - RNA, 19 nt, Homo sapiens
  misc_RNA (1)...(19): siRNA sense strand
ccagaaaacagaaaucgaa

SEQ ID NO: 538964 - RNA, 19 nt, Homo sapiens
  misc_RNA (1)...(19): siRNA sense strand
gggaacagaauaggucuag

SEQ ID NO: 538965 - RNA, 19 nt, Homo sapiens
  misc_RNA (1)...(19): siRNA sense strand
cacaaaggaguuacaucuu

SEQ ID NO: 538966 - RNA, 19 nt, Homo sapiens
  misc_RNA (1)...(19): siRNA sense strand
gaucauucaccaaacaaaa

SEQ ID NO: 538967 - RNA, 19 nt, Homo sapiens
  misc_RNA (1)...(19): siRNA sense strand
acagaaacgauggaaagaa

SEQ ID NO: 538968 - RNA, 19 nt, Homo sapiens
  misc_RNA (1)...(19): siRNA sense strand
agaaggagcaaaauguaua

SEQ ID NO: 538969 - RNA, 19 nt, Homo sapiens
  misc_RNA (1)...(19): siRNA sense strand
gaaacaggauucaguguga

SEQ ID NO: 538970 - RNA, 19 nt, Homo sapiens
  misc_RNA (1)...(19): siRNA sense strand
gaugugaagucguauuaua

SEQ ID NO: 538971 - RNA, 19 nt, Homo sapiens
  misc_RNA (1)...(19): siRNA sense strand
cagaauaggucuagaagaa

SEQ ID NO: 538972 - RNA, 19 nt, Homo sapiens
  misc_RNA (1)...(19): siRNA sense strand
gaaagaaucgguuaaaugu

SEQ ID NO: 538973 - RNA, 19 nt, Homo sapiens
  misc_RNA (1)...(19): siRNA sense strand
acaaaggaguuacaucuua

SEQ ID NO: 538974 - RNA, 19 nt, Homo sapiens
  misc_RNA (1)...(19): siRNA sense strand
aaagggagauucuaguaua

SEQ ID NO: 538975 - RNA, 19 nt, Homo sapiens
  misc_RNA (1)...(19): siRNA sense strand
caaaggaguuacaucuuaa

SEQ ID NO: 538976 - RNA, 19 nt, Homo sapiens
  misc_RNA (1)...(19): siRNA sense strand
aaacagaaaucgaaacaga

SEQ ID NO: 538977 - RNA, 19 nt, Homo sapiens
  misc_RNA (1)...(19): siRNA sense strand
cagaagaugugaagucgua

SEQ ID NO: 538978 - RNA, 19 nt, Homo sapiens
  misc_RNA (1)...(19): siRNA sense strand
gagaugcuguuuaaagaaa

SEQ ID NO: 538979 - RNA, 19 nt, Homo sapiens
  misc_RNA (1)...(19): siRNA sense strand
gaauaggucuagaagaaga

SEQ ID NO: 538980 - RNA, 19 nt, Homo sapiens
  misc_RNA (1)...(19): siRNA sense strand
agacuuaucuccugccuuu

SEQ ID NO: 538981 - RNA, 19 nt, Homo sapiens
  misc_RNA (1)...(19): siRNA sense strand
gaacagaauaggucuagaa

SEQ ID NO: 538982 - RNA, 19 nt, Homo sapiens
  misc_RNA (1)...(19): siRNA sense strand
cgaaacagauacagagaug

SEQ ID NO: 538983 - RNA, 19 nt, Homo sapiens
  misc_RNA (1)...(19): siRNA sense strand
gagaaagaaucgguuaaau

SEQ ID NO: 538984 - RNA, 19 nt, Homo sapiens
  misc_RNA (1)...(19): siRNA sense strand
cagcuucauuucucaauuu

SEQ ID NO: 538985 - RNA, 19 nt, Homo sapiens
  misc_RNA (1)...(19): siRNA sense strand
gcacaaaggaguuacaucu

SEQ ID NO: 538986 - RNA, 19 nt, Homo sapiens
  misc_RNA (1)...(19): siRNA sense strand
ggugaaaccagaacaauau

SEQ ID NO: 538987 - RNA, 19 nt, Homo sapiens
  misc_RNA (1)...(19): siRNA sense strand
accaagagaugcuguuuaa

SEQ ID NO: 538988 - RNA, 19 nt, Homo sapiens
  misc_RNA (1)...(19): siRNA sense strand
gaccaaagcaguugucaug

SEQ ID NO: 538989 - RNA, 19 nt, Homo sapiens
  misc_RNA (1)...(19): siRNA sense strand
gauguaagcccauaugauc

SEQ ID NO: 538990 - RNA, 19 nt, Homo sapiens
  misc_RNA (1)...(19): siRNA sense strand
ggagaaagaaucgguuaaa

SEQ ID NO: 538991 - RNA, 19 nt, Homo sapiens
  misc_RNA (1)...(19): siRNA sense strand
uauacuaccuggccagauu

SEQ ID NO: 538992 - RNA, 19 nt, Homo sapiens
  misc_RNA (1)...(19): siRNA sense strand
caagagaugcuguuuaaag

SEQ ID NO: 538993 - RNA, 19 nt, Homo sapiens
  misc_RNA (1)...(19): siRNA sense strand
aagagaugcuguuuaaaga

SEQ ID NO: 538994 - RNA, 19 nt, Homo sapiens
  misc_RNA (1)...(19): siRNA sense strand
gcacaguacuggccaacag

SEQ ID NO: 538995 - RNA, 19 nt, Homo sapiens
  misc_RNA (1)...(19): siRNA sense strand
gugugaagcucuugucaga

SEQ ID NO: 538996 - RNA, 19 nt, Homo sapiens
  misc_RNA (1)...(19): siRNA sense strand
caguuuaguugacauagaa

SEQ ID NO: 538997 - RNA, 19 nt, Homo sapiens
  misc_RNA (1)...(19): siRNA sense strand
gaacaauaucucacuuuca

SEQ ID NO: 538998 - RNA, 19 nt, Homo sapiens
  misc_RNA (1)...(19): siRNA sense strand
guacaucuacuacaauuag

SEQ ID NO: 538999 - RNA, 19 nt, Homo sapiens
  misc_RNA (1)...(19): siRNA sense strand
acagaaaucgaaacagaua

SEQ ID NO: 539000 - RNA, 19 nt, Homo sapiens
  misc_RNA (1)...(19): siRNA sense strand
ucucauacauggcuauaau

SEQ ID NO: 539001 - RNA, 19 nt, Homo sapiens
  misc_RNA (1)...(19): siRNA sense strand
gaaccgcauuguggagaaa

SEQ ID NO: 539002 - RNA, 19 nt, Homo sapiens
  misc_RNA (1)...(19): siRNA sense strand
gcagaagaccaaagcaguu

SEQ ID NO: 539003 - RNA, 19 nt, Homo sapiens
  misc_RNA (1)...(19): siRNA sense strand
uaugaucacagucguguua

SEQ ID NO: 539004 - RNA, 19 nt, Homo sapiens
  misc_RNA (1)...(19): siRNA sense strand
gaccaagagaugcuguuua

SEQ ID NO: 539005 - RNA, 19 nt, Homo sapiens
  misc_RNA (1)...(19): siRNA sense strand
gugaagcucuugucagaag

SEQ ID NO: 539006 - RNA, 19 nt, Homo sapiens
  misc_RNA (1)...(19): siRNA sense strand
gaagaggcacaaaggaguu

SEQ ID NO: 539007 - RNA, 19 nt, Homo sapiens
  misc_RNA (1)...(19): siRNA sense strand
uaaagaaacaggauucagu

SEQ ID NO: 539008 - RNA, 19 nt, Homo sapiens
  misc_RNA (1)...(19): siRNA sense strand
cagaaacgauggaaagaac

SEQ ID NO: 539009 - RNA, 19 nt, Homo sapiens
  misc_RNA (1)...(19): siRNA sense strand
uaacacaugcugccauuuc

SEQ ID NO: 539010 - RNA, 19 nt, Homo sapiens
  misc_RNA (1)...(19): siRNA sense strand
agaaagaaucgguuaaaug

SEQ ID NO: 539011 - RNA, 19 nt, Homo sapiens
  misc_RNA (1)...(19): siRNA sense strand
gccaacagaugaccaagag

SEQ ID NO: 539012 - RNA, 19 nt, Homo sapiens
  misc_RNA (1)...(19): siRNA sense strand
gaaacgauggaaagaacuu

SEQ ID NO: 539013 - RNA, 19 nt, Homo sapiens
  misc_RNA (1)...(19): siRNA sense strand
caacagaugaccaagagau

SEQ ID NO: 539014 - RNA, 19 nt, Homo sapiens
  misc_RNA (1)...(19): siRNA sense strand
ccuaacacaugcugccauu

SEQ ID NO: 539015 - RNA, 19 nt, Homo sapiens
  misc_RNA (1)...(19): siRNA sense strand
gaagaugugaagucguauu

SEQ ID NO: 539016 - RNA, 19 nt, Homo sapiens
  misc_RNA (1)...(19): siRNA sense strand
gguuaaaugugcacaguac

SEQ ID NO: 539017 - RNA, 19 nt, Homo sapiens
  misc_RNA (1)...(19): siRNA sense strand
ccagaacaauaucucacuu

SEQ ID NO: 539018 - RNA, 19 nt, Homo sapiens
  misc_RNA (1)...(19): siRNA sense strand
caauggaggagaacaguga

SEQ ID NO: 539019 - RNA, 19 nt, Homo sapiens
  misc_RNA (1)...(19): siRNA sense strand
agaacaauaucucacuuuc

SEQ ID NO: 539020 - RNA, 19 nt, Homo sapiens
  misc_RNA (1)...(19): siRNA sense strand
acagagauguaagcccaua

SEQ ID NO: 539021 - RNA, 19 nt, Homo sapiens
  misc_RNA (1)...(19): siRNA sense strand
ccaguuuaguugacauaga

SEQ ID NO: 539022 - RNA, 19 nt, Homo sapiens
  misc_RNA (1)...(19): siRNA sense strand
gagaaucuggcuccuugaa

SEQ ID NO: 539023 - RNA, 19 nt, Homo sapiens
  misc_RNA (1)...(19): siRNA sense strand
aagaugugaagucguauua

SEQ ID NO: 539024 - RNA, 19 nt, Homo sapiens
  misc_RNA (1)...(19): siRNA sense strand
uaaagggagauucuaguau

SEQ ID NO: 539025 - RNA, 19 nt, Homo sapiens
  misc_RNA (1)...(19): siRNA sense strand
aagauacaauggaggagaa

SEQ ID NO: 539026 - RNA, 19 nt, Homo sapiens
  misc_RNA (1)...(19): siRNA sense strand
gagauguaagcccauauga

SEQ ID NO: 539027 - RNA, 19 nt, Homo sapiens
  misc_RNA (1)...(19): siRNA sense strand
cagaacaauaucucacuuu

SEQ ID NO: 539028 - RNA, 19 nt, Homo sapiens
  misc_RNA (1)...(19): siRNA sense strand
gcaaaaugcugagaaugau

SEQ ID NO: 539029 - RNA, 19 nt, Homo sapiens
  misc_RNA (1)...(19): siRNA sense strand
auaaagggagauucuagua

SEQ ID NO: 539030 - RNA, 19 nt, Homo sapiens
  misc_RNA (1)...(19): siRNA sense strand
ccagcuucauuucucaauu

SEQ ID NO: 539031 - RNA, 19 nt, Homo sapiens
  misc_RNA (1)...(19): siRNA sense strand
ucauagaguggccaaguuu

SEQ ID NO: 539032 - RNA, 19 nt, Homo sapiens
  misc_RNA (1)...(19): siRNA sense strand
guacuuggaaauucgaaau

SEQ ID NO: 539033 - RNA, 19 nt, Homo sapiens
  misc_RNA (1)...(19): siRNA sense strand
guggagaaagaaucgguua

SEQ ID NO: 539034 - RNA, 19 nt, Homo sapiens
  misc_RNA (1)...(19): siRNA sense strand
gaaaacagaaaucgaaaca

SEQ ID NO: 539035 - RNA, 19 nt, Homo sapiens
  misc_RNA (1)...(19): siRNA sense strand
guauaaagggagauucuag

SEQ ID NO: 539036 - RNA, 19 nt, Homo sapiens
  misc_RNA (1)...(19): siRNA sense strand
gaaaccagaacaauaucuc

SEQ ID NO: 539037 - RNA, 19 nt, Homo sapiens
  misc_RNA (1)...(19): siRNA sense strand
ggaacagaauaggucuaga

SEQ ID NO: 539038 - RNA, 19 nt, Homo sapiens
  misc_RNA (1)...(19): siRNA sense strand
acacaggguccacuuccua

SEQ ID NO: 539039 - RNA, 19 nt, Homo sapiens
  misc_RNA (1)...(19): siRNA sense strand
ggacuuuccucuaaaaugc

SEQ ID NO: 539040 - RNA, 19 nt, Homo sapiens
  misc_RNA (1)...(19): siRNA sense strand
ugaucacagucguguuaaa

SEQ ID NO: 539041 - RNA, 19 nt, Homo sapiens
  misc_RNA (1)...(19): siRNA sense strand
ucaccagcuucauuucuca

SEQ ID NO: 539042 - RNA, 19 nt, Homo sapiens
  misc_RNA (1)...(19): siRNA sense strand
ugaccgauguacaggacuu

SEQ ID NO: 539043 - RNA, 19 nt, Homo sapiens
  misc_RNA (1)...(19): siRNA sense strand
gaaggagcaaaauguauaa

SEQ ID NO: 539044 - RNA, 19 nt, Homo sapiens
  misc_RNA (1)...(19): siRNA sense strand
ugacauagaagaggcacaa

SEQ ID NO: 539045 - RNA, 19 nt, Homo sapiens
  misc_RNA (1)...(19): siRNA sense strand
gagcgggaguucgaagagu

SEQ ID NO: 539046 - RNA, 19 nt, Homo sapiens
  misc_RNA (1)...(19): siRNA sense strand
cagaagaccaaagcaguug

SEQ ID NO: 539047 - RNA, 19 nt, Homo sapiens
  misc_RNA (1)...(19): siRNA sense strand
ugaaccgcauuguggagaa

SEQ ID NO: 539048 - RNA, 19 nt, Homo sapiens
  misc_RNA (1)...(19): siRNA sense strand
ccgcuguacuuggaaauuc

SEQ ID NO: 539049 - RNA, 19 nt, Homo sapiens
  misc_RNA (1)...(19): siRNA sense strand
ggagauucuaguauacaga

SEQ ID NO: 539050 - RNA, 19 nt, Homo sapiens
  misc_RNA (1)...(19): siRNA sense strand
ggagcaaaauguauaaagg

SEQ ID NO: 539051 - RNA, 19 nt, Homo sapiens
  misc_RNA (1)...(19): siRNA sense strand
cauagaagaggcacaaagg

SEQ ID NO: 539052 - RNA, 19 nt, Homo sapiens
  misc_RNA (1)...(19): siRNA sense strand
acugacaggugaccgaugu

SEQ ID NO: 539053 - RNA, 19 nt, Homo sapiens
  misc_RNA (1)...(19): siRNA sense strand
gggagauucuaguauacag

SEQ ID NO: 539054 - RNA, 19 nt, Homo sapiens
  misc_RNA (1)...(19): siRNA sense strand
aaauaccgaaugggucuua

SEQ ID NO: 539055 - RNA, 19 nt, Homo sapiens
  misc_RNA (1)...(19): siRNA sense strand
gaucacagucguguuaaac

SEQ ID NO: 539056 - RNA, 19 nt, Homo sapiens
  misc_RNA (1)...(19): siRNA sense strand
gaagaccaaagcaguuguc

SEQ ID NO: 539057 - RNA, 19 nt, Homo sapiens
  misc_RNA (1)...(19): siRNA sense strand
ucuccugccuuugaucauu

SEQ ID NO: 539058 - RNA, 19 nt, Homo sapiens
  misc_RNA (1)...(19): siRNA sense strand
auacagaaacgauggaaag

SEQ ID NO: 539059 - RNA, 19 nt, Homo sapiens
  misc_RNA (1)...(19): siRNA sense strand
ccagaucaacugagauucu

SEQ ID NO: 539060 - RNA, 19 nt, Homo sapiens
  misc_RNA (1)...(19): siRNA sense strand
acuuggaaauucgaaauga

SEQ ID NO: 539061 - RNA, 19 nt, Homo sapiens
  misc_RNA (1)...(19): siRNA sense strand
auacaaugggaacagaaua

SEQ ID NO: 539062 - RNA, 19 nt, Homo sapiens
  misc_RNA (1)...(19): siRNA sense strand
gaaucaccagcuucauuuc

SEQ ID NO: 539063 - RNA, 19 nt, Homo sapiens
  misc_RNA (1)...(19): siRNA sense strand
ccagaaaacagaaaucgaa

SEQ ID NO: 539064 - RNA, 19 nt, Homo sapiens
  misc_RNA (1)...(19): siRNA sense strand
gggaacagaauaggucuag

SEQ ID NO: 539065 - RNA, 19 nt, Homo sapiens
  misc_RNA (1)...(19): siRNA sense strand
cacaaaggaguuacaucuu

SEQ ID NO: 539066 - RNA, 19 nt, Homo sapiens
  misc_RNA (1)...(19): siRNA sense strand
gaucauucaccaaacaaaa

SEQ ID NO: 539067 - RNA, 19 nt, Homo sapiens
  misc_RNA (1)...(19): siRNA sense strand
acagaaacgauggaaagaa

SEQ ID NO: 539068 - RNA, 19 nt, Homo sapiens
  misc_RNA (1)...(19): siRNA sense strand
agaaggagcaaaauguaua

SEQ ID NO: 539069 - RNA, 19 nt, Homo sapiens
  misc_RNA (1)...(19): siRNA sense strand
gaaacaggauucaguguga

SEQ ID NO: 539070 - RNA, 19 nt, Homo sapiens
  misc_RNA (1)...(19): siRNA sense strand
gaugugaagucguauuaua

SEQ ID NO: 539071 - RNA, 19 nt, Homo sapiens
  misc_RNA (1)...(19): siRNA sense strand
cagaauaggucuagaagaa

SEQ ID NO: 539072 - RNA, 19 nt, Homo sapiens
  misc_RNA (1)...(19): siRNA sense strand
gaaagaaucgguuaaaugu

SEQ ID NO: 539073 - RNA, 19 nt, Homo sapiens
  misc_RNA (1)...(19): siRNA sense strand
acaaaggaguuacaucuua

SEQ ID NO: 539074 - RNA, 19 nt, Homo sapiens
  misc_RNA (1)...(19): siRNA sense strand
aaagggagauucuaguaua

SEQ ID NO: 539075 - RNA, 19 nt, Homo sapiens
  misc_RNA (1)...(19): siRNA sense strand
caaaggaguuacaucuuaa

SEQ ID NO: 539076 - RNA, 19 nt, Homo sapiens
  misc_RNA (1)...(19): siRNA sense strand
aaacagaaaucgaaacaga

SEQ ID NO: 539077 - RNA, 19 nt, Homo sapiens
  misc_RNA (1)...(19): siRNA sense strand
cagaagaugugaagucgua

SEQ ID NO: 539078 - RNA, 19 nt, Homo sapiens
  misc_RNA (1)...(19): siRNA sense strand
gagaugcuguuuaaagaaa

SEQ ID NO: 539079 - RNA, 19 nt, Homo sapiens
  misc_RNA (1)...(19): siRNA sense strand
gaauaggucuagaagaaga

SEQ ID NO: 539080 - RNA, 19 nt, Homo sapiens
  misc_RNA (1)...(19): siRNA sense strand
agacuuaucuccugccuuu

SEQ ID NO: 539081 - RNA, 19 nt, Homo sapiens
  misc_RNA (1)...(19): siRNA sense strand
gaacagaauaggucuagaa

SEQ ID NO: 539082 - RNA, 19 nt, Homo sapiens
  misc_RNA (1)...(19): siRNA sense strand
cgaaacagauacagagaug

SEQ ID NO: 539083 - RNA, 19 nt, Homo sapiens
  misc_RNA (1)...(19): siRNA sense strand
gagaaagaaucgguuaaau

SEQ ID NO: 539084 - RNA, 19 nt, Homo sapiens
  misc_RNA (1)...(19): siRNA sense strand
cagcuucauuucucaauuu

SEQ ID NO: 539085 - RNA, 19 nt, Homo sapiens
  misc_RNA (1)...(19): siRNA sense strand
gcacaaaggaguuacaucu

SEQ ID NO: 539086 - RNA, 19 nt, Homo sapiens
  misc_RNA (1)...(19): siRNA sense strand
ggugaaaccagaacaauau

SEQ ID NO: 539087 - RNA, 19 nt, Homo sapiens
  misc_RNA (1)...(19): siRNA sense strand
accaagagaugcuguuuaa

SEQ ID NO: 539088 - RNA, 19 nt, Homo sapiens
  misc_RNA (1)...(19): siRNA sense strand
gaccaaagcaguugucaug

SEQ ID NO: 539089 - RNA, 19 nt, Homo sapiens
  misc_RNA (1)...(19): siRNA sense strand
gauguaagcccauaugauc

SEQ ID NO: 539090 - RNA, 19 nt, Homo sapiens
  misc_RNA (1)...(19): siRNA sense strand
ggagaaagaaucgguuaaa

SEQ ID NO: 539091 - RNA, 19 nt, Homo sapiens
  misc_RNA (1)...(19): siRNA sense strand
uauacuaccuggccagauu

SEQ ID NO: 539092 - RNA, 19 nt, Homo sapiens
  misc_RNA (1)...(19): siRNA sense strand
caagagaugcuguuuaaag

SEQ ID NO: 539093 - RNA, 19 nt, Homo sapiens
  misc_RNA (1)...(19): siRNA sense strand
aagagaugcuguuuaaaga

SEQ ID NO: 539094 - RNA, 19 nt, Homo sapiens
  misc_RNA (1)...(19): siRNA sense strand
gcacaguacuggccaacag

SEQ ID NO: 539095 - RNA, 19 nt, Homo sapiens
  misc_RNA (1)...(19): siRNA sense strand
gugugaagcucuugucaga

SEQ ID NO: 539096 - RNA, 19 nt, Homo sapiens
  misc_RNA (1)...(19): siRNA sense strand
caguuuaguugacauagaa

SEQ ID NO: 539097 - RNA, 19 nt, Homo sapiens
  misc_RNA (1)...(19): siRNA sense strand
gaacaauaucucacuuuca

SEQ ID NO: 539098 - RNA, 19 nt, Homo sapiens
  misc_RNA (1)...(19): siRNA sense strand
guacaucuacuacaauuag

SEQ ID NO: 539099 - RNA, 19 nt, Homo sapiens
  misc_RNA (1)...(19): siRNA sense strand
acagaaaucgaaacagaua

SEQ ID NO: 539100 - RNA, 19 nt, Homo sapiens
  misc_RNA (1)...(19): siRNA sense strand
ucucauacauggcuauaau

SEQ ID NO: 539101 - RNA, 19 nt, Homo sapiens
  misc_RNA (1)...(19): siRNA sense strand
gaaccgcauuguggagaaa

SEQ ID NO: 539102 - RNA, 19 nt, Homo sapiens
  misc_RNA (1)...(19): siRNA sense strand
gcagaagaccaaagcaguu

SEQ ID NO: 539103 - RNA, 19 nt, Homo sapiens
  misc_RNA (1)...(19): siRNA sense strand
uaugaucacagucguguua

SEQ ID NO: 539104 - RNA, 19 nt, Homo sapiens
  misc_RNA (1)...(19): siRNA sense strand
gaccaagagaugcuguuua

SEQ ID NO: 539105 - RNA, 19 nt, Homo sapiens
  misc_RNA (1)...(19): siRNA sense strand
gugaagcucuugucagaag

SEQ ID NO: 539106 - RNA, 19 nt, Homo sapiens
  misc_RNA (1)...(19): siRNA sense strand
gaagaggcacaaaggaguu

SEQ ID NO: 539107 - RNA, 19 nt, Homo sapiens
  misc_RNA (1)...(19): siRNA sense strand
uaaagaaacaggauucagu

SEQ ID NO: 539108 - RNA, 19 nt, Homo sapiens
  misc_RNA (1)...(19): siRNA sense strand
cagaaacgauggaaagaac

SEQ ID NO: 539109 - RNA, 19 nt, Homo sapiens
  misc_RNA (1)...(19): siRNA sense strand
uaacacaugcugccauuuc

SEQ ID NO: 539110 - RNA, 19 nt, Homo sapiens
  misc_RNA (1)...(19): siRNA sense strand
agaaagaaucgguuaaaug

SEQ ID NO: 539111 - RNA, 19 nt, Homo sapiens
  misc_RNA (1)...(19): siRNA sense strand
gccaacagaugaccaagag

SEQ ID NO: 539112 - RNA, 19 nt, Homo sapiens
  misc_RNA (1)...(19): siRNA sense strand
gaaacgauggaaagaacuu

SEQ ID NO: 539113 - RNA, 19 nt, Homo sapiens
  misc_RNA (1)...(19): siRNA sense strand
caacagaugaccaagagau

SEQ ID NO: 539114 - RNA, 19 nt, Homo sapiens
  misc_RNA (1)...(19): siRNA sense strand
ccuaacacaugcugccauu

SEQ ID NO: 539115 - RNA, 19 nt, Homo sapiens
  misc_RNA (1)...(19): siRNA sense strand
gaagaugugaagucguauu

SEQ ID NO: 539116 - RNA, 19 nt, Homo sapiens
  misc_RNA (1)...(19): siRNA sense strand
gguuaaaugugcacaguac

SEQ ID NO: 539117 - RNA, 19 nt, Homo sapiens
  misc_RNA (1)...(19): siRNA sense strand
ccagaacaauaucucacuu

SEQ ID NO: 539118 - RNA, 19 nt, Homo sapiens
  misc_RNA (1)...(19): siRNA sense strand
caauggaggagaacaguga

SEQ ID NO: 539119 - RNA, 19 nt, Homo sapiens
  misc_RNA (1)...(19): siRNA sense strand
agaacaauaucucacuuuc

SEQ ID NO: 539120 - RNA, 19 nt, Homo sapiens
  misc_RNA (1)...(19): siRNA sense strand
acagagauguaagcccaua

SEQ ID NO: 539121 - RNA, 19 nt, Homo sapiens
  misc_RNA (1)...(19): siRNA sense strand
ccaguuuaguugacauaga

SEQ ID NO: 539122 - RNA, 19 nt, Homo sapiens
  misc_RNA (1)...(19): siRNA sense strand
gagaaucuggcuccuugaa

SEQ ID NO: 539123 - RNA, 19 nt, Homo sapiens
  misc_RNA (1)...(19): siRNA sense strand
aagaugugaagucguauua

SEQ ID NO: 539124 - RNA, 19 nt, Homo sapiens
  misc_RNA (1)...(19): siRNA sense strand
uaaagggagauucuaguau

SEQ ID NO: 539125 - RNA, 19 nt, Homo sapiens
  misc_RNA (1)...(19): siRNA sense strand
aagauacaauggaggagaa

SEQ ID NO: 539126 - RNA, 19 nt, Homo sapiens
  misc_RNA (1)...(19): siRNA sense strand
gagauguaagcccauauga

SEQ ID NO: 539127 - RNA, 19 nt, Homo sapiens
  misc_RNA (1)...(19): siRNA sense strand
cagaacaauaucucacuuu

SEQ ID NO: 539128 - RNA, 19 nt, Homo sapiens
  misc_RNA (1)...(19): siRNA sense strand
gcaaaaugcugagaaugau

SEQ ID NO: 539129 - RNA, 19 nt, Homo sapiens
  misc_RNA (1)...(19): siRNA sense strand
auaaagggagauucuagua

SEQ ID NO: 539130 - RNA, 19 nt, Homo sapiens
  misc_RNA (1)...(19): siRNA sense strand
ccagcuucauuucucaauu

SEQ ID NO: 539131 - RNA, 19 nt, Homo sapiens
  misc_RNA (1)...(19): siRNA sense strand
ucauagaguggccaaguuu

SEQ ID NO: 539132 - RNA, 19 nt, Homo sapiens
  misc_RNA (1)...(19): siRNA sense strand
guacuuggaaauucgaaau

SEQ ID NO: 539133 - RNA, 19 nt, Homo sapiens
  misc_RNA (1)...(19): siRNA sense strand
guggagaaagaaucgguua

SEQ ID NO: 539134 - RNA, 19 nt, Homo sapiens
  misc_RNA (1)...(19): siRNA sense strand
gaaaacagaaaucgaaaca

SEQ ID NO: 539135 - RNA, 19 nt, Homo sapiens
  misc_RNA (1)...(19): siRNA sense strand
guauaaagggagauucuag

SEQ ID NO: 539136 - RNA, 19 nt, Homo sapiens
  misc_RNA (1)...(19): siRNA sense strand
gaaaccagaacaauaucuc

SEQ ID NO: 539137 - RNA, 19 nt, Homo sapiens
  misc_RNA (1)...(19): siRNA sense strand
ggaacagaauaggucuaga

SEQ ID NO: 539138 - RNA, 19 nt, Homo sapiens
  misc_RNA (1)...(19): siRNA sense strand
acacaggguccacuuccua

SEQ ID NO: 539139 - RNA, 19 nt, Homo sapiens
  misc_RNA (1)...(19): siRNA sense strand
ggacuuuccucuaaaaugc

SEQ ID NO: 539140 - RNA, 19 nt, Homo sapiens
  misc_RNA (1)...(19): siRNA sense strand
ugaucacagucguguuaaa

SEQ ID NO: 539141 - RNA, 19 nt, Homo sapiens
  misc_RNA (1)...(19): siRNA sense strand
ucaccagcuucauuucuca

SEQ ID NO: 539142 - RNA, 19 nt, Homo sapiens
  misc_RNA (1)...(19): siRNA sense strand
ugaccgauguacaggacuu

SEQ ID NO: 539143 - RNA, 19 nt, Homo sapiens
  misc_RNA (1)...(19): siRNA sense strand
gaaggagcaaaauguauaa

SEQ ID NO: 539144 - RNA, 19 nt, Homo sapiens
  misc_RNA (1)...(19): siRNA sense strand
ugacauagaagaggcacaa

SEQ ID NO: 539145 - RNA, 19 nt, Homo sapiens
  misc_RNA (1)...(19): siRNA sense strand
gagcgggaguucgaagagu

SEQ ID NO: 539146 - RNA, 19 nt, Homo sapiens
  misc_RNA (1)...(19): siRNA sense strand
cagaagaccaaagcaguug

SEQ ID NO: 539147 - RNA, 19 nt, Homo sapiens
  misc_RNA (1)...(19): siRNA sense strand
ugaaccgcauuguggagaa

SEQ ID NO: 539148 - RNA, 19 nt, Homo sapiens
  misc_RNA (1)...(19): siRNA sense strand
ccgcuguacuuggaaauuc

SEQ ID NO: 539149 - RNA, 19 nt, Homo sapiens
  misc_RNA (1)...(19): siRNA sense strand
ggagauucuaguauacaga

SEQ ID NO: 539150 - RNA, 19 nt, Homo sapiens
  misc_RNA (1)...(19): siRNA sense strand
ggagcaaaauguauaaagg

SEQ ID NO: 539151 - RNA, 19 nt, Homo sapiens
  misc_RNA (1)...(19): siRNA sense strand
cauagaagaggcacaaagg

SEQ ID NO: 539152 - RNA, 19 nt, Homo sapiens
  misc_RNA (1)...(19): siRNA sense strand
acugacaggugaccgaugu

SEQ ID NO: 539153 - RNA, 19 nt, Homo sapiens
  misc_RNA (1)...(19): siRNA sense strand
gggagauucuaguauacag

SEQ ID NO: 539154 - RNA, 19 nt, Homo sapiens
  misc_RNA (1)...(19): siRNA sense strand
aaauaccgaaugggucuua

SEQ ID NO: 539155 - RNA, 19 nt, Homo sapiens
  misc_RNA (1)...(19): siRNA sense strand
gaucacagucguguuaaac

SEQ ID NO: 539156 - RNA, 19 nt, Homo sapiens
  misc_RNA (1)...(19): siRNA sense strand
gaagaccaaagcaguuguc

SEQ ID NO: 539157 - RNA, 19 nt, Homo sapiens
  misc_RNA (1)...(19): siRNA sense strand
ucuccugccuuugaucauu

SEQ ID NO: 539158 - RNA, 19 nt, Homo sapiens
  misc_RNA (1)...(19): siRNA sense strand
auacagaaacgauggaaag

SEQ ID NO: 539159 - RNA, 19 nt, Homo sapiens
  misc_RNA (1)...(19): siRNA sense strand
ccagaucaacugagauucu

SEQ ID NO: 539160 - RNA, 19 nt, Homo sapiens
  misc_RNA (1)...(19): siRNA sense strand
acuuggaaauucgaaauga

SEQ ID NO: 539161 - RNA, 19 nt, Homo sapiens
  misc_RNA (1)...(19): siRNA sense strand
auacaaugggaacagaaua

SEQ ID NO: 539162 - RNA, 19 nt, Homo sapiens
  misc_RNA (1)...(19): siRNA sense strand
gaaucaccagcuucauuuc

SEQ ID NO: 539163 - RNA, 19 nt, Homo sapiens
  misc_RNA (1)...(19): siRNA sense strand
ccagaaaacagaaaucgaa

SEQ ID NO: 539164 - RNA, 19 nt, Homo sapiens
  misc_RNA (1)...(19): siRNA sense strand
gggaacagaauaggucuag

SEQ ID NO: 539165 - RNA, 19 nt, Homo sapiens
  misc_RNA (1)...(19): siRNA sense strand
cacaaaggaguuacaucuu

SEQ ID NO: 539166 - RNA, 19 nt, Homo sapiens
  misc_RNA (1)...(19): siRNA sense strand
gaucauucaccaaacaaaa

SEQ ID NO: 539167 - RNA, 19 nt, Homo sapiens
  misc_RNA (1)...(19): siRNA sense strand
acagaaacgauggaaagaa

SEQ ID NO: 539168 - RNA, 19 nt, Homo sapiens
  misc_RNA (1)...(19): siRNA sense strand
agaaggagcaaaauguaua

SEQ ID NO: 539169 - RNA, 19 nt, Homo sapiens
  misc_RNA (1)...(19): siRNA sense strand
gaaggaagcucccuccaua

SEQ ID NO: 539170 - RNA, 19 nt, Homo sapiens
  misc_RNA (1)...(19): siRNA sense strand
ggaaagaggucccagaaga

SEQ ID NO: 539171 - RNA, 19 nt, Homo sapiens
  misc_RNA (1)...(19): siRNA sense strand
gaauauacguugugaagga

SEQ ID NO: 539172 - RNA, 19 nt, Homo sapiens
  misc_RNA (1)...(19): siRNA sense strand
aaagaugacucaacuugua

SEQ ID NO: 539173 - RNA, 19 nt, Homo sapiens
  misc_RNA (1)...(19): siRNA sense strand
ggagaaagauaucuguuca

SEQ ID NO: 539174 - RNA, 19 nt, Homo sapiens
  misc_RNA (1)...(19): siRNA sense strand
gcgaugagauccugaguga

SEQ ID NO: 539175 - RNA, 19 nt, Homo sapiens
  misc_RNA (1)...(19): siRNA sense strand
gaaauuugaucccuguauc

SEQ ID NO: 539176 - RNA, 19 nt, Homo sapiens
  misc_RNA (1)...(19): siRNA sense strand
caaauuaaccugcgugaau

SEQ ID NO: 539177 - RNA, 19 nt, Homo sapiens
  misc_RNA (1)...(19): siRNA sense strand
uaaggugacucaaaggaaa

SEQ ID NO: 539178 - RNA, 19 nt, Homo sapiens
  misc_RNA (1)...(19): siRNA sense strand
aaauuaaccugcgugaaua

SEQ ID NO: 539179 - RNA, 19 nt, Homo sapiens
  misc_RNA (1)...(19): siRNA sense strand
aaacacggauccucaguga

SEQ ID NO: 539180 - RNA, 19 nt, Homo sapiens
  misc_RNA (1)...(19): siRNA sense strand
gaauguacauggaaucucu

SEQ ID NO: 539181 - RNA, 19 nt, Homo sapiens
  misc_RNA (1)...(19): siRNA sense strand
aaagauaucuguucaagcu

SEQ ID NO: 539182 - RNA, 19 nt, Homo sapiens
  misc_RNA (1)...(19): siRNA sense strand
gaacucagaggucaugaug

SEQ ID NO: 539183 - RNA, 19 nt, Homo sapiens
  misc_RNA (1)...(19): siRNA sense strand
ggauggaacuugguuaaca

SEQ ID NO: 539184 - RNA, 19 nt, Homo sapiens
  misc_RNA (1)...(19): siRNA sense strand
ggaagccuguagaaauuug

SEQ ID NO: 539185 - RNA, 19 nt, Homo sapiens
  misc_RNA (1)...(19): siRNA sense strand
aaagaaagaugacucaacu

SEQ ID NO: 539186 - RNA, 19 nt, Homo sapiens
  misc_RNA (1)...(19): siRNA sense strand
gaacuggaaacggaauaua

SEQ ID NO: 539187 - RNA, 19 nt, Homo sapiens
  misc_RNA (1)...(19): siRNA sense strand
cuagacaacuccaucauca

SEQ ID NO: 539188 - RNA, 19 nt, Homo sapiens
  misc_RNA (1)...(19): siRNA sense strand
ggaacauccucccagcaaa

SEQ ID NO: 539189 - RNA, 19 nt, Homo sapiens
  misc_RNA (1)...(19): siRNA sense strand
gaacuaaaugugcccgaaa

SEQ ID NO: 539190 - RNA, 19 nt, Homo sapiens
  misc_RNA (1)...(19): siRNA sense strand
ggaaugaggauggaacuug

SEQ ID NO: 539191 - RNA, 19 nt, Homo sapiens
  misc_RNA (1)...(19): siRNA sense strand
agaagacccucaagagaug

SEQ ID NO: 539192 - RNA, 19 nt, Homo sapiens
  misc_RNA (1)...(19): siRNA sense strand
gaacugaaugugcccgaaa

SEQ ID NO: 539193 - RNA, 19 nt, Homo sapiens
  misc_RNA (1)...(19): siRNA sense strand
acaacuccaucaucacuaa

SEQ ID NO: 539194 - RNA, 19 nt, Homo sapiens
  misc_RNA (1)...(19): siRNA sense strand
caagccauuucccuucuuu

SEQ ID NO: 539195 - RNA, 19 nt, Homo sapiens
  misc_RNA (1)...(19): siRNA sense strand
gaaagaugacucaacuugu

SEQ ID NO: 539196 - RNA, 19 nt, Homo sapiens
  misc_RNA (1)...(19): siRNA sense strand
gaugagauccugagugagu

SEQ ID NO: 539197 - RNA, 19 nt, Homo sapiens
  misc_RNA (1)...(19): siRNA sense strand
cuggaagccuguagaaauu

SEQ ID NO: 539198 - RNA, 19 nt, Homo sapiens
  misc_RNA (1)...(19): siRNA sense strand
guacauggaaucucuggaa

SEQ ID NO: 539199 - RNA, 19 nt, Homo sapiens
  misc_RNA (1)...(19): siRNA sense strand
cagcacaccuucagacaag

SEQ ID NO: 539200 - RNA, 19 nt, Homo sapiens
  misc_RNA (1)...(19): siRNA sense strand
gaggauggaacuugguuaa

SEQ ID NO: 539201 - RNA, 19 nt, Homo sapiens
  misc_RNA (1)...(19): siRNA sense strand
ugauggcacuucagaaaug

SEQ ID NO: 539202 - RNA, 19 nt, Homo sapiens
  misc_RNA (1)...(19): siRNA sense strand
uaaagaagacccucaagag

SEQ ID NO: 539203 - RNA, 19 nt, Homo sapiens
  misc_RNA (1)...(19): siRNA sense strand
agaaaugaaugaaggaaag

SEQ ID NO: 539204 - RNA, 19 nt, Homo sapiens
  misc_RNA (1)...(19): siRNA sense strand
gagcagagacacaccaauc

SEQ ID NO: 539205 - RNA, 19 nt, Homo sapiens
  misc_RNA (1)...(19): siRNA sense strand
gggcauggcauccaagaga

SEQ ID NO: 539206 - RNA, 19 nt, Homo sapiens
  misc_RNA (1)...(19): siRNA sense strand
caucaucacuaagagaaug

SEQ ID NO: 539207 - RNA, 19 nt, Homo sapiens
  misc_RNA (1)...(19): siRNA sense strand
gauggcacuucagaaauga

SEQ ID NO: 539208 - RNA, 19 nt, Homo sapiens
  misc_RNA (1)...(19): siRNA sense strand
aaagaagacccucaagaga

SEQ ID NO: 539209 - RNA, 19 nt, Homo sapiens
  misc_RNA (1)...(19): siRNA sense strand
gaacauccucccagcaaag

SEQ ID NO: 539210 - RNA, 19 nt, Homo sapiens
  misc_RNA (1)...(19): siRNA sense strand
gaacgcaaagaacuggaaa

SEQ ID NO: 539211 - RNA, 19 nt, Homo sapiens
  misc_RNA (1)...(19): siRNA sense strand
ggaaggaacgcaaagaacu

SEQ ID NO: 539212 - RNA, 19 nt, Homo sapiens
  misc_RNA (1)...(19): siRNA sense strand
agaaagauaucuguucaag

SEQ ID NO: 539213 - RNA, 19 nt, Homo sapiens
  misc_RNA (1)...(19): siRNA sense strand
agaaagaugacucaacuug

SEQ ID NO: 539214 - RNA, 19 nt, Homo sapiens
  misc_RNA (1)...(19): siRNA sense strand
acacaccaauccuacuuga

SEQ ID NO: 539215 - RNA, 19 nt, Homo sapiens
  misc_RNA (1)...(19): siRNA sense strand
gaaggaacgcaaagaacug

SEQ ID NO: 539216 - RNA, 19 nt, Homo sapiens
  misc_RNA (1)...(19): siRNA sense strand
cuaagagaauguacaugga

SEQ ID NO: 539217 - RNA, 19 nt, Homo sapiens
  misc_RNA (1)...(19): siRNA sense strand
gauaaggugacucaaagga

SEQ ID NO: 539218 - RNA, 19 nt, Homo sapiens
  misc_RNA (1)...(19): siRNA sense strand
gaaaugaaugaaggaaaga

SEQ ID NO: 539219 - RNA, 19 nt, Homo sapiens
  misc_RNA (1)...(19): siRNA sense strand
ccagagauaagagauaauu

SEQ ID NO: 539220 - RNA, 19 nt, Homo sapiens
  misc_RNA (1)...(19): siRNA sense strand
agugaccaaugacaaguua

SEQ ID NO: 539221 - RNA, 19 nt, Homo sapiens
  misc_RNA (1)...(19): siRNA sense strand
ugccagagauaagagauaa

SEQ ID NO: 539222 - RNA, 19 nt, Homo sapiens
  misc_RNA (1)...(19): siRNA sense strand
gaggaaaacccaaaaguga

SEQ ID NO: 539223 - RNA, 19 nt, Homo sapiens
  misc_RNA (1)...(19): siRNA sense strand
uggauaaggugacucaaag

SEQ ID NO: 539224 - RNA, 19 nt, Homo sapiens
  misc_RNA (1)...(19): siRNA sense strand
ggcauggcauccaagagaa

SEQ ID NO: 539225 - RNA, 19 nt, Homo sapiens
  misc_RNA (1)...(19): siRNA sense strand
uaagagaauguacauggaa

SEQ ID NO: 539226 - RNA, 19 nt, Homo sapiens
  misc_RNA (1)...(19): siRNA sense strand
gaaagaggucccagaagac

SEQ ID NO: 539227 - RNA, 19 nt, Homo sapiens
  misc_RNA (1)...(19): siRNA sense strand
gguuaacaccaaaugaauu

SEQ ID NO: 539228 - RNA, 19 nt, Homo sapiens
  misc_RNA (1)...(19): siRNA sense strand
ccagaguggugcacaacau

SEQ ID NO: 539229 - RNA, 19 nt, Homo sapiens
  misc_RNA (1)...(19): siRNA sense strand
gcaaguggccagugacaac

SEQ ID NO: 539230 - RNA, 19 nt, Homo sapiens
  misc_RNA (1)...(19): siRNA sense strand
ugacaagagccauggaaga

SEQ ID NO: 539231 - RNA, 19 nt, Homo sapiens
  misc_RNA (1)...(19): siRNA sense strand
gcacaccuucagacaagaa

SEQ ID NO: 539232 - RNA, 19 nt, Homo sapiens
  misc_RNA (1)...(19): siRNA sense strand
gcacucauccaggaaggaa

SEQ ID NO: 539233 - RNA, 19 nt, Homo sapiens
  misc_RNA (1)...(19): siRNA sense strand
gcgaaagggauuuuauaua

SEQ ID NO: 539234 - RNA, 19 nt, Homo sapiens
  misc_RNA (1)...(19): siRNA sense strand
agaaccaaaugacccagaa

SEQ ID NO: 539235 - RNA, 19 nt, Homo sapiens
  misc_RNA (1)...(19): siRNA sense strand
ccaaugacaaguuaacauc

SEQ ID NO: 539236 - RNA, 19 nt, Homo sapiens
  misc_RNA (1)...(19): siRNA sense strand
aagaagacccucaagagau

SEQ ID NO: 539237 - RNA, 19 nt, Homo sapiens
  misc_RNA (1)...(19): siRNA sense strand
guggauaaggugacucaaa

SEQ ID NO: 539238 - RNA, 19 nt, Homo sapiens
  misc_RNA (1)...(19): siRNA sense strand
aauuugaagucgaaggaaa

SEQ ID NO: 539239 - RNA, 19 nt, Homo sapiens
  misc_RNA (1)...(19): siRNA sense strand
gacauuguucagucaaauu

SEQ ID NO: 539240 - RNA, 19 nt, Homo sapiens
  misc_RNA (1)...(19): siRNA sense strand
ggaacgcaaagaacuggaa

SEQ ID NO: 539241 - RNA, 19 nt, Homo sapiens
  misc_RNA (1)...(19): siRNA sense strand
gaaaaggaaggaacgcaaa

SEQ ID NO: 539242 - RNA, 19 nt, Homo sapiens
  misc_RNA (1)...(19): siRNA sense strand
gauccucagugaagugcau

SEQ ID NO: 539243 - RNA, 19 nt, Homo sapiens
  misc_RNA (1)...(19): siRNA sense strand
gagaaagauaucuguucaa

SEQ ID NO: 539244 - RNA, 19 nt, Homo sapiens
  misc_RNA (1)...(19): siRNA sense strand
gcccgaaaguccagaucga

SEQ ID NO: 539245 - RNA, 19 nt, Homo sapiens
  misc_RNA (1)...(19): siRNA sense strand
caaguuaacauccaaaaug

SEQ ID NO: 539246 - RNA, 19 nt, Homo sapiens
  misc_RNA (1)...(19): siRNA sense strand
cagagacacaccaauccua

SEQ ID NO: 539247 - RNA, 19 nt, Homo sapiens
  misc_RNA (1)...(19): siRNA sense strand
gauggaacuugguuaacac

SEQ ID NO: 539248 - RNA, 19 nt, Homo sapiens
  misc_RNA (1)...(19): siRNA sense strand
ucuggaagccuguagaaau

SEQ ID NO: 539249 - RNA, 19 nt, Homo sapiens
  misc_RNA (1)...(19): siRNA sense strand
gacaagagccauggaagag

SEQ ID NO: 539250 - RNA, 19 nt, Homo sapiens
  misc_RNA (1)...(19): siRNA sense strand
cagaaaugaaugaaggaaa

SEQ ID NO: 539251 - RNA, 19 nt, Homo sapiens
  misc_RNA (1)...(19): siRNA sense strand
uugaaggccuccuagacaa

SEQ ID NO: 539252 - RNA, 19 nt, Homo sapiens
  misc_RNA (1)...(19): siRNA sense strand
ccacgaagggucacacaag

SEQ ID NO: 539253 - RNA, 19 nt, Homo sapiens
  misc_RNA (1)...(19): siRNA sense strand
acacggauccucagugaag

SEQ ID NO: 539254 - RNA, 19 nt, Homo sapiens
  misc_RNA (1)...(19): siRNA sense strand
aauauucaccgaagaggaa

SEQ ID NO: 539255 - RNA, 19 nt, Homo sapiens
  misc_RNA (1)...(19): siRNA sense strand
gauaucuguucaagcucaa

SEQ ID NO: 539256 - RNA, 19 nt, Homo sapiens
  misc_RNA (1)...(19): siRNA sense strand
caacuggagaggacuuuua

SEQ ID NO: 539257 - RNA, 19 nt, Homo sapiens
  misc_RNA (1)...(19): siRNA sense strand
aagagaauguacauggaau

SEQ ID NO: 539258 - RNA, 19 nt, Homo sapiens
  misc_RNA (1)...(19): siRNA sense strand
gcgugaauaucccaaucug

SEQ ID NO: 539259 - RNA, 19 nt, Homo sapiens
  misc_RNA (1)...(19): siRNA sense strand
ucaaaggaaagacgacuca

SEQ ID NO: 539260 - RNA, 19 nt, Homo sapiens
  misc_RNA (1)...(19): siRNA sense strand
gggacagccucaucuagac

SEQ ID NO: 539261 - RNA, 19 nt, Homo sapiens
  misc_RNA (1)...(19): siRNA sense strand
ggacagccucaucuagaca

SEQ ID NO: 539262 - RNA, 19 nt, Homo sapiens
  misc_RNA (1)...(19): siRNA sense strand
cggaauauacguugugaag

SEQ ID NO: 539263 - RNA, 19 nt, Homo sapiens
  misc_RNA (1)...(19): siRNA sense strand
cgacucaaccuggaacuca

SEQ ID NO: 539264 - RNA, 19 nt, Homo sapiens
  misc_RNA (1)...(19): siRNA sense strand
auaaagaagacccucaaga

SEQ ID NO: 539265 - RNA, 19 nt, Homo sapiens
  misc_RNA (1)...(19): siRNA sense strand
aauauacguugugaaggaa

SEQ ID NO: 539266 - RNA, 19 nt, Homo sapiens
  misc_RNA (1)...(19): siRNA sense strand
gaccuguggugaggcgaaa

SEQ ID NO: 539267 - RNA, 19 nt, Homo sapiens
  misc_RNA (1)...(19): siRNA sense strand
ccgaaaguccagaucgaaa

SEQ ID NO: 539268 - RNA, 19 nt, Homo sapiens
  misc_RNA (1)...(19): siRNA sense strand
ucacuaagagaauguacau

SEQ ID NO: 539269 - RNA, 19 nt, Homo sapiens
  misc_RNA (1)...(19): siRNA sense strand
gaaggaagcucccuccaua

SEQ ID NO: 539270 - RNA, 19 nt, Homo sapiens
  misc_RNA (1)...(19): siRNA sense strand
ggaaagaggucccagaaga

SEQ ID NO: 539271 - RNA, 19 nt, Homo sapiens
  misc_RNA (1)...(19): siRNA sense strand
gaauauacguugugaagga

SEQ ID NO: 539272 - RNA, 19 nt, Homo sapiens
  misc_RNA (1)...(19): siRNA sense strand
aaagaugacucaacuugua

SEQ ID NO: 539273 - RNA, 19 nt, Homo sapiens
  misc_RNA (1)...(19): siRNA sense strand
ggagaaagauaucuguuca

SEQ ID NO: 539274 - RNA, 19 nt, Homo sapiens
  misc_RNA (1)...(19): siRNA sense strand
gcgaugagauccugaguga

SEQ ID NO: 539275 - RNA, 19 nt, Homo sapiens
  misc_RNA (1)...(19): siRNA sense strand
gaaauuugaucccuguauc

SEQ ID NO: 539276 - RNA, 19 nt, Homo sapiens
  misc_RNA (1)...(19): siRNA sense strand
caaauuaaccugcgugaau

SEQ ID NO: 539277 - RNA, 19 nt, Homo sapiens
  misc_RNA (1)...(19): siRNA sense strand
uaaggugacucaaaggaaa

SEQ ID NO: 539278 - RNA, 19 nt, Homo sapiens
  misc_RNA (1)...(19): siRNA sense strand
aaauuaaccugcgugaaua

SEQ ID NO: 539279 - RNA, 19 nt, Homo sapiens
  misc_RNA (1)...(19): siRNA sense strand
aaacacggauccucaguga

SEQ ID NO: 539280 - RNA, 19 nt, Homo sapiens
  misc_RNA (1)...(19): siRNA sense strand
gaauguacauggaaucucu

SEQ ID NO: 539281 - RNA, 19 nt, Homo sapiens
  misc_RNA (1)...(19): siRNA sense strand
aaagauaucuguucaagcu

SEQ ID NO: 539282 - RNA, 19 nt, Homo sapiens
  misc_RNA (1)...(19): siRNA sense strand
gaacucagaggucaugaug

SEQ ID NO: 539283 - RNA, 19 nt, Homo sapiens
  misc_RNA (1)...(19): siRNA sense strand
ggauggaacuugguuaaca

SEQ ID NO: 539284 - RNA, 19 nt, Homo sapiens
  misc_RNA (1)...(19): siRNA sense strand
ggaagccuguagaaauuug

SEQ ID NO: 539285 - RNA, 19 nt, Homo sapiens
  misc_RNA (1)...(19): siRNA sense strand
aaagaaagaugacucaacu

SEQ ID NO: 539286 - RNA, 19 nt, Homo sapiens
  misc_RNA (1)...(19): siRNA sense strand
gaacuggaaacggaauaua

SEQ ID NO: 539287 - RNA, 19 nt, Homo sapiens
  misc_RNA (1)...(19): siRNA sense strand
cuagacaacuccaucauca

SEQ ID NO: 539288 - RNA, 19 nt, Homo sapiens
  misc_RNA (1)...(19): siRNA sense strand
ggaacauccucccagcaaa

SEQ ID NO: 539289 - RNA, 19 nt, Homo sapiens
  misc_RNA (1)...(19): siRNA sense strand
gaacuaaaugugcccgaaa

SEQ ID NO: 539290 - RNA, 19 nt, Homo sapiens
  misc_RNA (1)...(19): siRNA sense strand
ggaaugaggauggaacuug

SEQ ID NO: 539291 - RNA, 19 nt, Homo sapiens
  misc_RNA (1)...(19): siRNA sense strand
agaagacccucaagagaug

SEQ ID NO: 539292 - RNA, 19 nt, Homo sapiens
  misc_RNA (1)...(19): siRNA sense strand
gaacugaaugugcccgaaa

SEQ ID NO: 539293 - RNA, 19 nt, Homo sapiens
  misc_RNA (1)...(19): siRNA sense strand
acaacuccaucaucacuaa

SEQ ID NO: 539294 - RNA, 19 nt, Homo sapiens
  misc_RNA (1)...(19): siRNA sense strand
caagccauuucccuucuuu

SEQ ID NO: 539295 - RNA, 19 nt, Homo sapiens
  misc_RNA (1)...(19): siRNA sense strand
gaaagaugacucaacuugu

SEQ ID NO: 539296 - RNA, 19 nt, Homo sapiens
  misc_RNA (1)...(19): siRNA sense strand
gaugagauccugagugagu

SEQ ID NO: 539297 - RNA, 19 nt, Homo sapiens
  misc_RNA (1)...(19): siRNA sense strand
cuggaagccuguagaaauu

SEQ ID NO: 539298 - RNA, 19 nt, Homo sapiens
  misc_RNA (1)...(19): siRNA sense strand
guacauggaaucucuggaa

SEQ ID NO: 539299 - RNA, 19 nt, Homo sapiens
  misc_RNA (1)...(19): siRNA sense strand
cagcacaccuucagacaag

SEQ ID NO: 539300 - RNA, 19 nt, Homo sapiens
  misc_RNA (1)...(19): siRNA sense strand
gaggauggaacuugguuaa

SEQ ID NO: 539301 - RNA, 19 nt, Homo sapiens
  misc_RNA (1)...(19): siRNA sense strand
ugauggcacuucagaaaug

SEQ ID NO: 539302 - RNA, 19 nt, Homo sapiens
  misc_RNA (1)...(19): siRNA sense strand
uaaagaagacccucaagag

SEQ ID NO: 539303 - RNA, 19 nt, Homo sapiens
  misc_RNA (1)...(19): siRNA sense strand
agaaaugaaugaaggaaag

SEQ ID NO: 539304 - RNA, 19 nt, Homo sapiens
  misc_RNA (1)...(19): siRNA sense strand
gagcagagacacaccaauc

SEQ ID NO: 539305 - RNA, 19 nt, Homo sapiens
  misc_RNA (1)...(19): siRNA sense strand
gggcauggcauccaagaga

SEQ ID NO: 539306 - RNA, 19 nt, Homo sapiens
  misc_RNA (1)...(19): siRNA sense strand
caucaucacuaagagaaug

SEQ ID NO: 539307 - RNA, 19 nt, Homo sapiens
  misc_RNA (1)...(19): siRNA sense strand
gauggcacuucagaaauga

SEQ ID NO: 539308 - RNA, 19 nt, Homo sapiens
  misc_RNA (1)...(19): siRNA sense strand
aaagaagacccucaagaga

SEQ ID NO: 539309 - RNA, 19 nt, Homo sapiens
  misc_RNA (1)...(19): siRNA sense strand
gaacauccucccagcaaag

SEQ ID NO: 539310 - RNA, 19 nt, Homo sapiens
  misc_RNA (1)...(19): siRNA sense strand
gaacgcaaagaacuggaaa

SEQ ID NO: 539311 - RNA, 19 nt, Homo sapiens
  misc_RNA (1)...(19): siRNA sense strand
ggaaggaacgcaaagaacu

SEQ ID NO: 539312 - RNA, 19 nt, Homo sapiens
  misc_RNA (1)...(19): siRNA sense strand
agaaagauaucuguucaag

SEQ ID NO: 539313 - RNA, 19 nt, Homo sapiens
  misc_RNA (1)...(19): siRNA sense strand
agaaagaugacucaacuug

SEQ ID NO: 539314 - RNA, 19 nt, Homo sapiens
  misc_RNA (1)...(19): siRNA sense strand
acacaccaauccuacuuga

SEQ ID NO: 539315 - RNA, 19 nt, Homo sapiens
  misc_RNA (1)...(19): siRNA sense strand
gaaggaacgcaaagaacug

SEQ ID NO: 539316 - RNA, 19 nt, Homo sapiens
  misc_RNA (1)...(19): siRNA sense strand
cuaagagaauguacaugga

SEQ ID NO: 539317 - RNA, 19 nt, Homo sapiens
  misc_RNA (1)...(19): siRNA sense strand
gauaaggugacucaaagga

SEQ ID NO: 539318 - RNA, 19 nt, Homo sapiens
  misc_RNA (1)...(19): siRNA sense strand
gaaaugaaugaaggaaaga

SEQ ID NO: 539319 - RNA, 19 nt, Homo sapiens
  misc_RNA (1)...(19): siRNA sense strand
ccagagauaagagauaauu

SEQ ID NO: 539320 - RNA, 19 nt, Homo sapiens
  misc_RNA (1)...(19): siRNA sense strand
agugaccaaugacaaguua

SEQ ID NO: 539321 - RNA, 19 nt, Homo sapiens
  misc_RNA (1)...(19): siRNA sense strand
ugccagagauaagagauaa

SEQ ID NO: 539322 - RNA, 19 nt, Homo sapiens
  misc_RNA (1)...(19): siRNA sense strand
gaggaaaacccaaaaguga

SEQ ID NO: 539323 - RNA, 19 nt, Homo sapiens
  misc_RNA (1)...(19): siRNA sense strand
uggauaaggugacucaaag

SEQ ID NO: 539324 - RNA, 19 nt, Homo sapiens
  misc_RNA (1)...(19): siRNA sense strand
ggcauggcauccaagagaa

SEQ ID NO: 539325 - RNA, 19 nt, Homo sapiens
  misc_RNA (1)...(19): siRNA sense strand
uaagagaauguacauggaa

SEQ ID NO: 539326 - RNA, 19 nt, Homo sapiens
  misc_RNA (1)...(19): siRNA sense strand
gaaagaggucccagaagac

SEQ ID NO: 539327 - RNA, 19 nt, Homo sapiens
  misc_RNA (1)...(19): siRNA sense strand
gguuaacaccaaaugaauu

SEQ ID NO: 539328 - RNA, 19 nt, Homo sapiens
  misc_RNA (1)...(19): siRNA sense strand
ccagaguggugcacaacau

SEQ ID NO: 539329 - RNA, 19 nt, Homo sapiens
  misc_RNA (1)...(19): siRNA sense strand
gcaaguggccagugacaac

SEQ ID NO: 539330 - RNA, 19 nt, Homo sapiens
  misc_RNA (1)...(19): siRNA sense strand
ugacaagagccauggaaga

SEQ ID NO: 539331 - RNA, 19 nt, Homo sapiens
  misc_RNA (1)...(19): siRNA sense strand
gcacaccuucagacaagaa

SEQ ID NO: 539332 - RNA, 19 nt, Homo sapiens
  misc_RNA (1)...(19): siRNA sense strand
gcacucauccaggaaggaa

SEQ ID NO: 539333 - RNA, 19 nt, Homo sapiens
  misc_RNA (1)...(19): siRNA sense strand
gcgaaagggauuuuauaua

SEQ ID NO: 539334 - RNA, 19 nt, Homo sapiens
  misc_RNA (1)...(19): siRNA sense strand
agaaccaaaugacccagaa

SEQ ID NO: 539335 - RNA, 19 nt, Homo sapiens
  misc_RNA (1)...(19): siRNA sense strand
ccaaugacaaguuaacauc

SEQ ID NO: 539336 - RNA, 19 nt, Homo sapiens
  misc_RNA (1)...(19): siRNA sense strand
aagaagacccucaagagau

SEQ ID NO: 539337 - RNA, 19 nt, Homo sapiens
  misc_RNA (1)...(19): siRNA sense strand
guggauaaggugacucaaa

SEQ ID NO: 539338 - RNA, 19 nt, Homo sapiens
  misc_RNA (1)...(19): siRNA sense strand
aauuugaagucgaaggaaa

SEQ ID NO: 539339 - RNA, 19 nt, Homo sapiens
  misc_RNA (1)...(19): siRNA sense strand
gacauuguucagucaaauu

SEQ ID NO: 539340 - RNA, 19 nt, Homo sapiens
  misc_RNA (1)...(19): siRNA sense strand
ggaacgcaaagaacuggaa

SEQ ID NO: 539341 - RNA, 19 nt, Homo sapiens
  misc_RNA (1)...(19): siRNA sense strand
gaaaaggaaggaacgcaaa

SEQ ID NO: 539342 - RNA, 19 nt, Homo sapiens
  misc_RNA (1)...(19): siRNA sense strand
gauccucagugaagugcau

SEQ ID NO: 539343 - RNA, 19 nt, Homo sapiens
  misc_RNA (1)...(19): siRNA sense strand
gagaaagauaucuguucaa

SEQ ID NO: 539344 - RNA, 19 nt, Homo sapiens
  misc_RNA (1)...(19): siRNA sense strand
gcccgaaaguccagaucga

SEQ ID NO: 539345 - RNA, 19 nt, Homo sapiens
  misc_RNA (1)...(19): siRNA sense strand
caaguuaacauccaaaaug

SEQ ID NO: 539346 - RNA, 19 nt, Homo sapiens
  misc_RNA (1)...(19): siRNA sense strand
cagagacacaccaauccua

SEQ ID NO: 539347 - RNA, 19 nt, Homo sapiens
  misc_RNA (1)...(19): siRNA sense strand
gauggaacuugguuaacac

SEQ ID NO: 539348 - RNA, 19 nt, Homo sapiens
  misc_RNA (1)...(19): siRNA sense strand
ucuggaagccuguagaaau

SEQ ID NO: 539349 - RNA, 19 nt, Homo sapiens
  misc_RNA (1)...(19): siRNA sense strand
gacaagagccauggaagag

SEQ ID NO: 539350 - RNA, 19 nt, Homo sapiens
  misc_RNA (1)...(19): siRNA sense strand
cagaaaugaaugaaggaaa

SEQ ID NO: 539351 - RNA, 19 nt, Homo sapiens
  misc_RNA (1)...(19): siRNA sense strand
uugaaggccuccuagacaa

SEQ ID NO: 539352 - RNA, 19 nt, Homo sapiens
  misc_RNA (1)...(19): siRNA sense strand
ccacgaagggucacacaag

SEQ ID NO: 539353 - RNA, 19 nt, Homo sapiens
  misc_RNA (1)...(19): siRNA sense strand
acacggauccucagugaag

SEQ ID NO: 539354 - RNA, 19 nt, Homo sapiens
  misc_RNA (1)...(19): siRNA sense strand
aauauucaccgaagaggaa

SEQ ID NO: 539355 - RNA, 19 nt, Homo sapiens
  misc_RNA (1)...(19): siRNA sense strand
gauaucuguucaagcucaa

SEQ ID NO: 539356 - RNA, 19 nt, Homo sapiens
  misc_RNA (1)...(19): siRNA sense strand
caacuggagaggacuuuua

SEQ ID NO: 539357 - RNA, 19 nt, Homo sapiens
  misc_RNA (1)...(19): siRNA sense strand
aagagaauguacauggaau

SEQ ID NO: 539358 - RNA, 19 nt, Homo sapiens
  misc_RNA (1)...(19): siRNA sense strand
gcgugaauaucccaaucug

SEQ ID NO: 539359 - RNA, 19 nt, Homo sapiens
  misc_RNA (1)...(19): siRNA sense strand
ucaaaggaaagacgacuca

SEQ ID NO: 539360 - RNA, 19 nt, Homo sapiens
  misc_RNA (1)...(19): siRNA sense strand
gggacagccucaucuagac

SEQ ID NO: 539361 - RNA, 19 nt, Homo sapiens
  misc_RNA (1)...(19): siRNA sense strand
ggacagccucaucuagaca

SEQ ID NO: 539362 - RNA, 19 nt, Homo sapiens
  misc_RNA (1)...(19): siRNA sense strand
cggaauauacguugugaag

SEQ ID NO: 539363 - RNA, 19 nt, Homo sapiens
  misc_RNA (1)...(19): siRNA sense strand
cgacucaaccuggaacuca

SEQ ID NO: 539364 - RNA, 19 nt, Homo sapiens
  misc_RNA (1)...(19): siRNA sense strand
auaaagaagacccucaaga

SEQ ID NO: 539365 - RNA, 19 nt, Homo sapiens
  misc_RNA (1)...(19): siRNA sense strand
aauauacguugugaaggaa

SEQ ID NO: 539366 - RNA, 19 nt, Homo sapiens
  misc_RNA (1)...(19): siRNA sense strand
gaccuguggugaggcgaaa

SEQ ID NO: 539367 - RNA, 19 nt, Homo sapiens
  misc_RNA (1)...(19): siRNA sense strand
ccgaaaguccagaucgaaa

SEQ ID NO: 539368 - RNA, 19 nt, Homo sapiens
  misc_RNA (1)...(19): siRNA sense strand
ucacuaagagaauguacau

SEQ ID NO: 539369 - RNA, 19 nt, Homo sapiens
  misc_RNA (1)...(19): siRNA sense strand
gaaggaagcucccuccaua

SEQ ID NO: 539370 - RNA, 19 nt, Homo sapiens
  misc_RNA (1)...(19): siRNA sense strand
ggaaagaggucccagaaga

SEQ ID NO: 539371 - RNA, 19 nt, Homo sapiens
  misc_RNA (1)...(19): siRNA sense strand
gaauauacguugugaagga

SEQ ID NO: 539372 - RNA, 19 nt, Homo sapiens
  misc_RNA (1)...(19): siRNA sense strand
aaagaugacucaacuugua

SEQ ID NO: 539373 - RNA, 19 nt, Homo sapiens
  misc_RNA (1)...(19): siRNA sense strand
ggagaaagauaucuguuca

SEQ ID NO: 539374 - RNA, 19 nt, Homo sapiens
  misc_RNA (1)...(19): siRNA sense strand
gcgaugagauccugaguga

SEQ ID NO: 539375 - RNA, 19 nt, Homo sapiens
  misc_RNA (1)...(19): siRNA sense strand
gaaauuugaucccuguauc

SEQ ID NO: 539376 - RNA, 19 nt, Homo sapiens
  misc_RNA (1)...(19): siRNA sense strand
caaauuaaccugcgugaau

SEQ ID NO: 539377 - RNA, 19 nt, Homo sapiens
  misc_RNA (1)...(19): siRNA sense strand
uaaggugacucaaaggaaa

SEQ ID NO: 539378 - RNA, 19 nt, Homo sapiens
  misc_RNA (1)...(19): siRNA sense strand
aaauuaaccugcgugaaua

SEQ ID NO: 539379 - RNA, 19 nt, Homo sapiens
  misc_RNA (1)...(19): siRNA sense strand
aaacacggauccucaguga

SEQ ID NO: 539380 - RNA, 19 nt, Homo sapiens
  misc_RNA (1)...(19): siRNA sense strand
gaauguacauggaaucucu

SEQ ID NO: 539381 - RNA, 19 nt, Homo sapiens
  misc_RNA (1)...(19): siRNA sense strand
aaagauaucuguucaagcu

SEQ ID NO: 539382 - RNA, 19 nt, Homo sapiens
  misc_RNA (1)...(19): siRNA sense strand
gaacucagaggucaugaug

SEQ ID NO: 539383 - RNA, 19 nt, Homo sapiens
  misc_RNA (1)...(19): siRNA sense strand
ggauggaacuugguuaaca

SEQ ID NO: 539384 - RNA, 19 nt, Homo sapiens
  misc_RNA (1)...(19): siRNA sense strand
ggaagccuguagaaauuug

SEQ ID NO: 539385 - RNA, 19 nt, Homo sapiens
  misc_RNA (1)...(19): siRNA sense strand
aaagaaagaugacucaacu

SEQ ID NO: 539386 - RNA, 19 nt, Homo sapiens
  misc_RNA (1)...(19): siRNA sense strand
gaacuggaaacggaauaua

SEQ ID NO: 539387 - RNA, 19 nt, Homo sapiens
  misc_RNA (1)...(19): siRNA sense strand
cuagacaacuccaucauca

SEQ ID NO: 539388 - RNA, 19 nt, Homo sapiens
  misc_RNA (1)...(19): siRNA sense strand
ggaacauccucccagcaaa

SEQ ID NO: 539389 - RNA, 19 nt, Homo sapiens
  misc_RNA (1)...(19): siRNA sense strand
gaacuaaaugugcccgaaa

SEQ ID NO: 539390 - RNA, 19 nt, Homo sapiens
  misc_RNA (1)...(19): siRNA sense strand
ggaaugaggauggaacuug

SEQ ID NO: 539391 - RNA, 19 nt, Homo sapiens
  misc_RNA (1)...(19): siRNA sense strand
agaagacccucaagagaug

SEQ ID NO: 539392 - RNA, 19 nt, Homo sapiens
  misc_RNA (1)...(19): siRNA sense strand
gaacugaaugugcccgaaa

SEQ ID NO: 539393 - RNA, 19 nt, Homo sapiens
  misc_RNA (1)...(19): siRNA sense strand
acaacuccaucaucacuaa

SEQ ID NO: 539394 - RNA, 19 nt, Homo sapiens
  misc_RNA (1)...(19): siRNA sense strand
caagccauuucccuucuuu

SEQ ID NO: 539395 - RNA, 19 nt, Homo sapiens
  misc_RNA (1)...(19): siRNA sense strand
gaaagaugacucaacuugu

SEQ ID NO: 539396 - RNA, 19 nt, Homo sapiens
  misc_RNA (1)...(19): siRNA sense strand
gaugagauccugagugagu

SEQ ID NO: 539397 - RNA, 19 nt, Homo sapiens
  misc_RNA (1)...(19): siRNA sense strand
cuggaagccuguagaaauu

SEQ ID NO: 539398 - RNA, 19 nt, Homo sapiens
  misc_RNA (1)...(19): siRNA sense strand
guacauggaaucucuggaa

SEQ ID NO: 539399 - RNA, 19 nt, Homo sapiens
  misc_RNA (1)...(19): siRNA sense strand
cagcacaccuucagacaag

SEQ ID NO: 539400 - RNA, 19 nt, Homo sapiens
  misc_RNA (1)...(19): siRNA sense strand
gaggauggaacuugguuaa

SEQ ID NO: 539401 - RNA, 19 nt, Homo sapiens
  misc_RNA (1)...(19): siRNA sense strand
ugauggcacuucagaaaug

SEQ ID NO: 539402 - RNA, 19 nt, Homo sapiens
  misc_RNA (1)...(19): siRNA sense strand
uaaagaagacccucaagag

SEQ ID NO: 539403 - RNA, 19 nt, Homo sapiens
  misc_RNA (1)...(19): siRNA sense strand
agaaaugaaugaaggaaag

SEQ ID NO: 539404 - RNA, 19 nt, Homo sapiens
  misc_RNA (1)...(19): siRNA sense strand
gagcagagacacaccaauc

SEQ ID NO: 539405 - RNA, 19 nt, Homo sapiens
  misc_RNA (1)...(19): siRNA sense strand
gggcauggcauccaagaga

SEQ ID NO: 539406 - RNA, 19 nt, Homo sapiens
  misc_RNA (1)...(19): siRNA sense strand
caucaucacuaagagaaug

SEQ ID NO: 539407 - RNA, 19 nt, Homo sapiens
  misc_RNA (1)...(19): siRNA sense strand
gauggcacuucagaaauga

SEQ ID NO: 539408 - RNA, 19 nt, Homo sapiens
  misc_RNA (1)...(19): siRNA sense strand
aaagaagacccucaagaga

SEQ ID NO: 539409 - RNA, 19 nt, Homo sapiens
  misc_RNA (1)...(19): siRNA sense strand
gaacauccucccagcaaag

SEQ ID NO: 539410 - RNA, 19 nt, Homo sapiens
  misc_RNA (1)...(19): siRNA sense strand
gaacgcaaagaacuggaaa

SEQ ID NO: 539411 - RNA, 19 nt, Homo sapiens
  misc_RNA (1)...(19): siRNA sense strand
ggaaggaacgcaaagaacu

SEQ ID NO: 539412 - RNA, 19 nt, Homo sapiens
  misc_RNA (1)...(19): siRNA sense strand
agaaagauaucuguucaag

SEQ ID NO: 539413 - RNA, 19 nt, Homo sapiens
  misc_RNA (1)...(19): siRNA sense strand
agaaagaugacucaacuug

SEQ ID NO: 539414 - RNA, 19 nt, Homo sapiens
  misc_RNA (1)...(19): siRNA sense strand
acacaccaauccuacuuga

SEQ ID NO: 539415 - RNA, 19 nt, Homo sapiens
  misc_RNA (1)...(19): siRNA sense strand
gaaggaacgcaaagaacug

SEQ ID NO: 539416 - RNA, 19 nt, Homo sapiens
  misc_RNA (1)...(19): siRNA sense strand
cuaagagaauguacaugga

SEQ ID NO: 539417 - RNA, 19 nt, Homo sapiens
  misc_RNA (1)...(19): siRNA sense strand
gauaaggugacucaaagga

SEQ ID NO: 539418 - RNA, 19 nt, Homo sapiens
  misc_RNA (1)...(19): siRNA sense strand
gaaaugaaugaaggaaaga

SEQ ID NO: 539419 - RNA, 19 nt, Homo sapiens
  misc_RNA (1)...(19): siRNA sense strand
ccagagauaagagauaauu

SEQ ID NO: 539420 - RNA, 19 nt, Homo sapiens
  misc_RNA (1)...(19): siRNA sense strand
agugaccaaugacaaguua

SEQ ID NO: 539421 - RNA, 19 nt, Homo sapiens
  misc_RNA (1)...(19): siRNA sense strand
ugccagagauaagagauaa

SEQ ID NO: 539422 - RNA, 19 nt, Homo sapiens
  misc_RNA (1)...(19): siRNA sense strand
gaggaaaacccaaaaguga

SEQ ID NO: 539423 - RNA, 19 nt, Homo sapiens
  misc_RNA (1)...(19): siRNA sense strand
uggauaaggugacucaaag

SEQ ID NO: 539424 - RNA, 19 nt, Homo sapiens
  misc_RNA (1)...(19): siRNA sense strand
ggcauggcauccaagagaa

SEQ ID NO: 539425 - RNA, 19 nt, Homo sapiens
  misc_RNA (1)...(19): siRNA sense strand
uaagagaauguacauggaa

SEQ ID NO: 539426 - RNA, 19 nt, Homo sapiens
  misc_RNA (1)...(19): siRNA sense strand
gaaagaggucccagaagac

SEQ ID NO: 539427 - RNA, 19 nt, Homo sapiens
  misc_RNA (1)...(19): siRNA sense strand
gguuaacaccaaaugaauu

SEQ ID NO: 539428 - RNA, 19 nt, Homo sapiens
  misc_RNA (1)...(19): siRNA sense strand
ccagaguggugcacaacau

SEQ ID NO: 539429 - RNA, 19 nt, Homo sapiens
  misc_RNA (1)...(19): siRNA sense strand
gcaaguggccagugacaac

SEQ ID NO: 539430 - RNA, 19 nt, Homo sapiens
  misc_RNA (1)...(19): siRNA sense strand
ugacaagagccauggaaga

SEQ ID NO: 539431 - RNA, 19 nt, Homo sapiens
  misc_RNA (1)...(19): siRNA sense strand
gcacaccuucagacaagaa

SEQ ID NO: 539432 - RNA, 19 nt, Homo sapiens
  misc_RNA (1)...(19): siRNA sense strand
gcacucauccaggaaggaa

SEQ ID NO: 539433 - RNA, 19 nt, Homo sapiens
  misc_RNA (1)...(19): siRNA sense strand
gcgaaagggauuuuauaua

SEQ ID NO: 539434 - RNA, 19 nt, Homo sapiens
  misc_RNA (1)...(19): siRNA sense strand
agaaccaaaugacccagaa

SEQ ID NO: 539435 - RNA, 19 nt, Homo sapiens
  misc_RNA (1)...(19): siRNA sense strand
ccaaugacaaguuaacauc

SEQ ID NO: 539436 - RNA, 19 nt, Homo sapiens
  misc_RNA (1)...(19): siRNA sense strand
aagaagacccucaagagau

SEQ ID NO: 539437 - RNA, 19 nt, Homo sapiens
  misc_RNA (1)...(19): siRNA sense strand
guggauaaggugacucaaa

SEQ ID NO: 539438 - RNA, 19 nt, Homo sapiens
  misc_RNA (1)...(19): siRNA sense strand
aauuugaagucgaaggaaa

SEQ ID NO: 539439 - RNA, 19 nt, Homo sapiens
  misc_RNA (1)...(19): siRNA sense strand
gacauuguucagucaaauu

SEQ ID NO: 539440 - RNA, 19 nt, Homo sapiens
  misc_RNA (1)...(19): siRNA sense strand
ggaacgcaaagaacuggaa

SEQ ID NO: 539441 - RNA, 19 nt, Homo sapiens
  misc_RNA (1)...(19): siRNA sense strand
gaaaaggaaggaacgcaaa

SEQ ID NO: 539442 - RNA, 19 nt, Homo sapiens
  misc_RNA (1)...(19): siRNA sense strand
gauccucagugaagugcau

SEQ ID NO: 539443 - RNA, 19 nt, Homo sapiens
  misc_RNA (1)...(19): siRNA sense strand
gagaaagauaucuguucaa

SEQ ID NO: 539444 - RNA, 19 nt, Homo sapiens
  misc_RNA (1)...(19): siRNA sense strand
gcccgaaaguccagaucga

SEQ ID NO: 539445 - RNA, 19 nt, Homo sapiens
  misc_RNA (1)...(19): siRNA sense strand
caaguuaacauccaaaaug

SEQ ID NO: 539446 - RNA, 19 nt, Homo sapiens
  misc_RNA (1)...(19): siRNA sense strand
cagagacacaccaauccua

SEQ ID NO: 539447 - RNA, 19 nt, Homo sapiens
  misc_RNA (1)...(19): siRNA sense strand
gauggaacuugguuaacac

SEQ ID NO: 539448 - RNA, 19 nt, Homo sapiens
  misc_RNA (1)...(19): siRNA sense strand
ucuggaagccuguagaaau

SEQ ID NO: 539449 - RNA, 19 nt, Homo sapiens
  misc_RNA (1)...(19): siRNA sense strand
gacaagagccauggaagag

SEQ ID NO: 539450 - RNA, 19 nt, Homo sapiens
  misc_RNA (1)...(19): siRNA sense strand
cagaaaugaaugaaggaaa

SEQ ID NO: 539451 - RNA, 19 nt, Homo sapiens
  misc_RNA (1)...(19): siRNA sense strand
uugaaggccuccuagacaa

SEQ ID NO: 539452 - RNA, 19 nt, Homo sapiens
  misc_RNA (1)...(19): siRNA sense strand
ccacgaagggucacacaag

SEQ ID NO: 539453 - RNA, 19 nt, Homo sapiens
  misc_RNA (1)...(19): siRNA sense strand
acacggauccucagugaag

SEQ ID NO: 539454 - RNA, 19 nt, Homo sapiens
  misc_RNA (1)...(19): siRNA sense strand
aauauucaccgaagaggaa

SEQ ID NO: 539455 - RNA, 19 nt, Homo sapiens
  misc_RNA (1)...(19): siRNA sense strand
gauaucuguucaagcucaa

SEQ ID NO: 539456 - RNA, 19 nt, Homo sapiens
  misc_RNA (1)...(19): siRNA sense strand
caacuggagaggacuuuua

SEQ ID NO: 539457 - RNA, 19 nt, Homo sapiens
  misc_RNA (1)...(19): siRNA sense strand
aagagaauguacauggaau

SEQ ID NO: 539458 - RNA, 19 nt, Homo sapiens
  misc_RNA (1)...(19): siRNA sense strand
gcgugaauaucccaaucug

SEQ ID NO: 539459 - RNA, 19 nt, Homo sapiens
  misc_RNA (1)...(19): siRNA sense strand
ucaaaggaaagacgacuca

SEQ ID NO: 539460 - RNA, 19 nt, Homo sapiens
  misc_RNA (1)...(19): siRNA sense strand
gggacagccucaucuagac

SEQ ID NO: 539461 - RNA, 19 nt, Homo sapiens
  misc_RNA (1)...(19): siRNA sense strand
ggacagccucaucuagaca

SEQ ID NO: 539462 - RNA, 19 nt, Homo sapiens
  misc_RNA (1)...(19): siRNA sense strand
cggaauauacguugugaag

SEQ ID NO: 539463 - RNA, 19 nt, Homo sapiens
  misc_RNA (1)...(19): siRNA sense strand
cgacucaaccuggaacuca

SEQ ID NO: 539464 - RNA, 19 nt, Homo sapiens
  misc_RNA (1)...(19): siRNA sense strand
auaaagaagacccucaaga

SEQ ID NO: 539465 - RNA, 19 nt, Homo sapiens
  misc_RNA (1)...(19): siRNA sense strand
aauauacguugugaaggaa

SEQ ID NO: 539466 - RNA, 19 nt, Homo sapiens
  misc_RNA (1)...(19): siRNA sense strand
gaccuguggugaggcgaaa

SEQ ID NO: 539467 - RNA, 19 nt, Homo sapiens
  misc_RNA (1)...(19): siRNA sense strand
ccgaaaguccagaucgaaa

SEQ ID NO: 539468 - RNA, 19 nt, Homo sapiens
  misc_RNA (1)...(19): siRNA sense strand
ucacuaagagaauguacau

SEQ ID NO: 539469 - RNA, 19 nt, Homo sapiens
  misc_RNA (1)...(19): siRNA sense strand
ccacugggcugcaacauua

SEQ ID NO: 539470 - RNA, 19 nt, Homo sapiens
  misc_RNA (1)...(19): siRNA sense strand
gaccaugacugacauauug

SEQ ID NO: 539471 - RNA, 19 nt, Homo sapiens
  misc_RNA (1)...(19): siRNA sense strand
ggaaagaccauccaauuug

SEQ ID NO: 539472 - RNA, 19 nt, Homo sapiens
  misc_RNA (1)...(19): siRNA sense strand
gagaagagaugaugaagag

SEQ ID NO: 539473 - RNA, 19 nt, Homo sapiens
  misc_RNA (1)...(19): siRNA sense strand
gguauuagcacaacuuaua

SEQ ID NO: 539474 - RNA, 19 nt, Homo sapiens
  misc_RNA (1)...(19): siRNA sense strand
ucuaugagcuugcaagaaa

SEQ ID NO: 539475 - RNA, 19 nt, Homo sapiens
  misc_RNA (1)...(19): siRNA sense strand
caacauuucuuuccaugga

SEQ ID NO: 539476 - RNA, 19 nt, Homo sapiens
  misc_RNA (1)...(19): siRNA sense strand
gagauaauguccuccuaga

SEQ ID NO: 539477 - RNA, 19 nt, Homo sapiens
  misc_RNA (1)...(19): siRNA sense strand
gauaauguccuccuagaug

SEQ ID NO: 539478 - RNA, 19 nt, Homo sapiens
  misc_RNA (1)...(19): siRNA sense strand
gcagacaagugguuaacug

SEQ ID NO: 539479 - RNA, 19 nt, Homo sapiens
  misc_RNA (1)...(19): siRNA sense strand
gaaacucauuaaccaguga

SEQ ID NO: 539480 - RNA, 19 nt, Homo sapiens
  misc_RNA (1)...(19): siRNA sense strand
gcaacaacccuacuggaaa

SEQ ID NO: 539481 - RNA, 19 nt, Homo sapiens
  misc_RNA (1)...(19): siRNA sense strand
agagagcacuucaguauuc

SEQ ID NO: 539482 - RNA, 19 nt, Homo sapiens
  misc_RNA (1)...(19): siRNA sense strand
cauacaaguuucaacauug

SEQ ID NO: 539483 - RNA, 19 nt, Homo sapiens
  misc_RNA (1)...(19): siRNA sense strand
uagacaggguuauugauuu

SEQ ID NO: 539484 - RNA, 19 nt, Homo sapiens
  misc_RNA (1)...(19): siRNA sense strand
gaagaugauccuuacuauu

SEQ ID NO: 539485 - RNA, 19 nt, Homo sapiens
  misc_RNA (1)...(19): siRNA sense strand
ggauguggccuuccaggua

SEQ ID NO: 539486 - RNA, 19 nt, Homo sapiens
  misc_RNA (1)...(19): siRNA sense strand
gacaagugguuaacugguu

SEQ ID NO: 539487 - RNA, 19 nt, Homo sapiens
  misc_RNA (1)...(19): siRNA sense strand
ccagaaggaugcaauacug

SEQ ID NO: 539488 - RNA, 19 nt, Homo sapiens
  misc_RNA (1)...(19): siRNA sense strand
gauguggccuuccagguau

SEQ ID NO: 539489 - RNA, 19 nt, Homo sapiens
  misc_RNA (1)...(19): siRNA sense strand
caacaacccuacuggaaac

SEQ ID NO: 539490 - RNA, 19 nt, Homo sapiens
  misc_RNA (1)...(19): siRNA sense strand
guagacaggguuauugauu

SEQ ID NO: 539491 - RNA, 19 nt, Homo sapiens
  misc_RNA (1)...(19): siRNA sense strand
gaucauuaauccuggagau

SEQ ID NO: 539492 - RNA, 19 nt, Homo sapiens
  misc_RNA (1)...(19): siRNA sense strand
ggaaaucuaugagcuugca

SEQ ID NO: 539493 - RNA, 19 nt, Homo sapiens
  misc_RNA (1)...(19): siRNA sense strand
gagacauacuuuccagaug

SEQ ID NO: 539494 - RNA, 19 nt, Homo sapiens
  misc_RNA (1)...(19): siRNA sense strand
uagaugaaccugcuuauuc

SEQ ID NO: 539495 - RNA, 19 nt, Homo sapiens
  misc_RNA (1)...(19): siRNA sense strand
agaagaugauccuuacuau

SEQ ID NO: 539496 - RNA, 19 nt, Homo sapiens
  misc_RNA (1)...(19): siRNA sense strand
gcuccuagcccuuacuuga

SEQ ID NO: 539497 - RNA, 19 nt, Homo sapiens
  misc_RNA (1)...(19): siRNA sense strand
ccaaaacccuuaauagaga

SEQ ID NO: 539498 - RNA, 19 nt, Homo sapiens
  misc_RNA (1)...(19): siRNA sense strand
uaacugguuuggcagaaug

SEQ ID NO: 539499 - RNA, 19 nt, Homo sapiens
  misc_RNA (1)...(19): siRNA sense strand
gcucagcuccuagcccuua

SEQ ID NO: 539500 - RNA, 19 nt, Homo sapiens
  misc_RNA (1)...(19): siRNA sense strand
caaaaucgaugaucuccuu

SEQ ID NO: 539501 - RNA, 19 nt, Homo sapiens
  misc_RNA (1)...(19): siRNA sense strand
cuccuuggcugguggcuua

SEQ ID NO: 539502 - RNA, 19 nt, Homo sapiens
  misc_RNA (1)...(19): siRNA sense strand
ggacaaauggaucuaugug

SEQ ID NO: 539503 - RNA, 19 nt, Homo sapiens
  misc_RNA (1)...(19): siRNA sense strand
uagaagaugauccuuacua

SEQ ID NO: 539504 - RNA, 19 nt, Homo sapiens
  misc_RNA (1)...(19): siRNA sense strand
caggaacucuucaaagucu

SEQ ID NO: 539505 - RNA, 19 nt, Homo sapiens
  misc_RNA (1)...(19): siRNA sense strand
uguaagguguuugaaauga

SEQ ID NO: 539506 - RNA, 19 nt, Homo sapiens
  misc_RNA (1)...(19): siRNA sense strand
ggagaagagaugaugaaga

SEQ ID NO: 539507 - RNA, 19 nt, Homo sapiens
  misc_RNA (1)...(19): siRNA sense strand
ggaccaugacugacauauu

SEQ ID NO: 539508 - RNA, 19 nt, Homo sapiens
  misc_RNA (1)...(19): siRNA sense strand
gaugaaagugggauuguuc

SEQ ID NO: 539509 - RNA, 19 nt, Homo sapiens
  misc_RNA (1)...(19): siRNA sense strand
uuauuaauguugccaguga

SEQ ID NO: 539510 - RNA, 19 nt, Homo sapiens
  misc_RNA (1)...(19): siRNA sense strand
guaagguguuugaaaugau

SEQ ID NO: 539511 - RNA, 19 nt, Homo sapiens
  misc_RNA (1)...(19): siRNA sense strand
acaagugguuaacugguuu

SEQ ID NO: 539512 - RNA, 19 nt, Homo sapiens
  misc_RNA (1)...(19): siRNA sense strand
agacaggguuauugauuuc

SEQ ID NO: 539513 - RNA, 19 nt, Homo sapiens
  misc_RNA (1)...(19): siRNA sense strand
uuaaccagcucaugauauc

SEQ ID NO: 539514 - RNA, 19 nt, Homo sapiens
  misc_RNA (1)...(19): siRNA sense strand
auaauguccuccuagauga

SEQ ID NO: 539515 - RNA, 19 nt, Homo sapiens
  misc_RNA (1)...(19): siRNA sense strand
aauagaagaugauccuuac

SEQ ID NO: 539516 - RNA, 19 nt, Homo sapiens
  misc_RNA (1)...(19): siRNA sense strand
uauuaaugcucccuggaaa

SEQ ID NO: 539517 - RNA, 19 nt, Homo sapiens
  misc_RNA (1)...(19): siRNA sense strand
gggagaagaagguuucaug

SEQ ID NO: 539518 - RNA, 19 nt, Homo sapiens
  misc_RNA (1)...(19): siRNA sense strand
guaccaacauuucuuucca

SEQ ID NO: 539519 - RNA, 19 nt, Homo sapiens
  misc_RNA (1)...(19): siRNA sense strand
gaaaccagaagaugcaaag

SEQ ID NO: 539520 - RNA, 19 nt, Homo sapiens
  misc_RNA (1)...(19): siRNA sense strand
uaaccagaaggaugcaaua

SEQ ID NO: 539521 - RNA, 19 nt, Homo sapiens
  misc_RNA (1)...(19): siRNA sense strand
uaagguguuugaaaugauc

SEQ ID NO: 539522 - RNA, 19 nt, Homo sapiens
  misc_RNA (1)...(19): siRNA sense strand
gcucauguagacaggguua

SEQ ID NO: 539523 - RNA, 19 nt, Homo sapiens
  misc_RNA (1)...(19): siRNA sense strand
caacccuacuggaaacuca

SEQ ID NO: 539524 - RNA, 19 nt, Homo sapiens
  misc_RNA (1)...(19): siRNA sense strand
ucauuaauccuggagauaa

SEQ ID NO: 539525 - RNA, 19 nt, Homo sapiens
  misc_RNA (1)...(19): siRNA sense strand
caaauggaucuauguguca

SEQ ID NO: 539526 - RNA, 19 nt, Homo sapiens
  misc_RNA (1)...(19): siRNA sense strand
ggcaacaacccuacuggaa

SEQ ID NO: 539527 - RNA, 19 nt, Homo sapiens
  misc_RNA (1)...(19): siRNA sense strand
gcaaagaauccccagaaaa

SEQ ID NO: 539528 - RNA, 19 nt, Homo sapiens
  misc_RNA (1)...(19): siRNA sense strand
cguaaucacuguagaaaau

SEQ ID NO: 539529 - RNA, 19 nt, Homo sapiens
  misc_RNA (1)...(19): siRNA sense strand
guucaggguaccaacauuu

SEQ ID NO: 539530 - RNA, 19 nt, Homo sapiens
  misc_RNA (1)...(19): siRNA sense strand
uaccaaauccaaacauguu

SEQ ID NO: 539531 - RNA, 19 nt, Homo sapiens
  misc_RNA (1)...(19): siRNA sense strand
guauuaaugcucccuggaa

SEQ ID NO: 539532 - RNA, 19 nt, Homo sapiens
  misc_RNA (1)...(19): siRNA sense strand
accagaagaugcaaagaau

SEQ ID NO: 539533 - RNA, 19 nt, Homo sapiens
  misc_RNA (1)...(19): siRNA sense strand
ggaaaccagaagaugcaaa

SEQ ID NO: 539534 - RNA, 19 nt, Homo sapiens
  misc_RNA (1)...(19): siRNA sense strand
acaggguuauugauuucua

SEQ ID NO: 539535 - RNA, 19 nt, Homo sapiens
  misc_RNA (1)...(19): siRNA sense strand
acacauacaaguuucaaca

SEQ ID NO: 539536 - RNA, 19 nt, Homo sapiens
  misc_RNA (1)...(19): siRNA sense strand
caugauaucacagcuucua

SEQ ID NO: 539537 - RNA, 19 nt, Homo sapiens
  misc_RNA (1)...(19): siRNA sense strand
uucaggaacucuucaaagu

SEQ ID NO: 539538 - RNA, 19 nt, Homo sapiens
  misc_RNA (1)...(19): siRNA sense strand
aaggacaaauggaucuaug

SEQ ID NO: 539539 - RNA, 19 nt, Homo sapiens
  misc_RNA (1)...(19): siRNA sense strand
ggaccaaaaucgaugaucu

SEQ ID NO: 539540 - RNA, 19 nt, Homo sapiens
  misc_RNA (1)...(19): siRNA sense strand
ugaugaaagugggauuguu

SEQ ID NO: 539541 - RNA, 19 nt, Homo sapiens
  misc_RNA (1)...(19): siRNA sense strand
gaauuacgcacgguucauc

SEQ ID NO: 539542 - RNA, 19 nt, Homo sapiens
  misc_RNA (1)...(19): siRNA sense strand
gacaaauggaucuaugugu

SEQ ID NO: 539543 - RNA, 19 nt, Homo sapiens
  misc_RNA (1)...(19): siRNA sense strand
agacugccguaaucacugu

SEQ ID NO: 539544 - RNA, 19 nt, Homo sapiens
  misc_RNA (1)...(19): siRNA sense strand
acuggaaacucauuaacca

SEQ ID NO: 539545 - RNA, 19 nt, Homo sapiens
  misc_RNA (1)...(19): siRNA sense strand
cagguauuagcacaacuua

SEQ ID NO: 539546 - RNA, 19 nt, Homo sapiens
  misc_RNA (1)...(19): siRNA sense strand
caggguuauugauuucuau

SEQ ID NO: 539547 - RNA, 19 nt, Homo sapiens
  misc_RNA (1)...(19): siRNA sense strand
gagagcacuucaguauucu

SEQ ID NO: 539548 - RNA, 19 nt, Homo sapiens
  misc_RNA (1)...(19): siRNA sense strand
gaagaaaaggccguuaaga

SEQ ID NO: 539549 - RNA, 19 nt, Homo sapiens
  misc_RNA (1)...(19): siRNA sense strand
ccagauggaaaccagaaga

SEQ ID NO: 539550 - RNA, 19 nt, Homo sapiens
  misc_RNA (1)...(19): siRNA sense strand
ccagauucccuaagagaca

SEQ ID NO: 539551 - RNA, 19 nt, Homo sapiens
  misc_RNA (1)...(19): siRNA sense strand
gagcuuuuguccuggcuaa

SEQ ID NO: 539552 - RNA, 19 nt, Homo sapiens
  misc_RNA (1)...(19): siRNA sense strand
guuaacugguuuggcagaa

SEQ ID NO: 539553 - RNA, 19 nt, Homo sapiens
  misc_RNA (1)...(19): siRNA sense strand
aaaggaaaucuaugagcuu

SEQ ID NO: 539554 - RNA, 19 nt, Homo sapiens
  misc_RNA (1)...(19): siRNA sense strand
aaccagaagaugcaaagaa

SEQ ID NO: 539555 - RNA, 19 nt, Homo sapiens
  misc_RNA (1)...(19): siRNA sense strand
uuuauacuguuccaaaugg

SEQ ID NO: 539556 - RNA, 19 nt, Homo sapiens
  misc_RNA (1)...(19): siRNA sense strand
agaaaaggccguuaagaug

SEQ ID NO: 539557 - RNA, 19 nt, Homo sapiens
  misc_RNA (1)...(19): siRNA sense strand
gcauccuucucuucagcuu

SEQ ID NO: 539558 - RNA, 19 nt, Homo sapiens
  misc_RNA (1)...(19): siRNA sense strand
uuaaugcucccuggaaaug

SEQ ID NO: 539559 - RNA, 19 nt, Homo sapiens
  misc_RNA (1)...(19): siRNA sense strand
uaauguugccagugaugaa

SEQ ID NO: 539560 - RNA, 19 nt, Homo sapiens
  misc_RNA (1)...(19): siRNA sense strand
guaaccagaaggaugcaau

SEQ ID NO: 539561 - RNA, 19 nt, Homo sapiens
  misc_RNA (1)...(19): siRNA sense strand
gccguaaucacuguagaaa

SEQ ID NO: 539562 - RNA, 19 nt, Homo sapiens
  misc_RNA (1)...(19): siRNA sense strand
caaggacaaauggaucuau

SEQ ID NO: 539563 - RNA, 19 nt, Homo sapiens
  misc_RNA (1)...(19): siRNA sense strand
ccagguauuagcacaacuu

SEQ ID NO: 539564 - RNA, 19 nt, Homo sapiens
  misc_RNA (1)...(19): siRNA sense strand
uccuagcccuuacuugaga

SEQ ID NO: 539565 - RNA, 19 nt, Homo sapiens
  misc_RNA (1)...(19): siRNA sense strand
cauguagacaggguuauug

SEQ ID NO: 539566 - RNA, 19 nt, Homo sapiens
  misc_RNA (1)...(19): siRNA sense strand
auacaaguuucaacauugc

SEQ ID NO: 539567 - RNA, 19 nt, Homo sapiens
  misc_RNA (1)...(19): siRNA sense strand
cuuaccaaauccaaacaug

SEQ ID NO: 539568 - RNA, 19 nt, Homo sapiens
  misc_RNA (1)...(19): siRNA sense strand
cuagaugaaccugcuuauu

SEQ ID NO: 539569 - RNA, 19 nt, Homo sapiens
  misc_RNA (1)...(19): siRNA sense strand
ccacugggcugcaacauua

SEQ ID NO: 539570 - RNA, 19 nt, Homo sapiens
  misc_RNA (1)...(19): siRNA sense strand
gaccaugacugacauauug

SEQ ID NO: 539571 - RNA, 19 nt, Homo sapiens
  misc_RNA (1)...(19): siRNA sense strand
ggaaagaccauccaauuug

SEQ ID NO: 539572 - RNA, 19 nt, Homo sapiens
  misc_RNA (1)...(19): siRNA sense strand
gagaagagaugaugaagag

SEQ ID NO: 539573 - RNA, 19 nt, Homo sapiens
  misc_RNA (1)...(19): siRNA sense strand
gguauuagcacaacuuaua

SEQ ID NO: 539574 - RNA, 19 nt, Homo sapiens
  misc_RNA (1)...(19): siRNA sense strand
ucuaugagcuugcaagaaa

SEQ ID NO: 539575 - RNA, 19 nt, Homo sapiens
  misc_RNA (1)...(19): siRNA sense strand
caacauuucuuuccaugga

SEQ ID NO: 539576 - RNA, 19 nt, Homo sapiens
  misc_RNA (1)...(19): siRNA sense strand
gagauaauguccuccuaga

SEQ ID NO: 539577 - RNA, 19 nt, Homo sapiens
  misc_RNA (1)...(19): siRNA sense strand
gauaauguccuccuagaug

SEQ ID NO: 539578 - RNA, 19 nt, Homo sapiens
  misc_RNA (1)...(19): siRNA sense strand
gcagacaagugguuaacug

SEQ ID NO: 539579 - RNA, 19 nt, Homo sapiens
  misc_RNA (1)...(19): siRNA sense strand
gaaacucauuaaccaguga

SEQ ID NO: 539580 - RNA, 19 nt, Homo sapiens
  misc_RNA (1)...(19): siRNA sense strand
gcaacaacccuacuggaaa

SEQ ID NO: 539581 - RNA, 19 nt, Homo sapiens
  misc_RNA (1)...(19): siRNA sense strand
agagagcacuucaguauuc

SEQ ID NO: 539582 - RNA, 19 nt, Homo sapiens
  misc_RNA (1)...(19): siRNA sense strand
cauacaaguuucaacauug

SEQ ID NO: 539583 - RNA, 19 nt, Homo sapiens
  misc_RNA (1)...(19): siRNA sense strand
uagacaggguuauugauuu

SEQ ID NO: 539584 - RNA, 19 nt, Homo sapiens
  misc_RNA (1)...(19): siRNA sense strand
gaagaugauccuuacuauu

SEQ ID NO: 539585 - RNA, 19 nt, Homo sapiens
  misc_RNA (1)...(19): siRNA sense strand
ggauguggccuuccaggua

SEQ ID NO: 539586 - RNA, 19 nt, Homo sapiens
  misc_RNA (1)...(19): siRNA sense strand
gacaagugguuaacugguu

SEQ ID NO: 539587 - RNA, 19 nt, Homo sapiens
  misc_RNA (1)...(19): siRNA sense strand
ccagaaggaugcaauacug

SEQ ID NO: 539588 - RNA, 19 nt, Homo sapiens
  misc_RNA (1)...(19): siRNA sense strand
gauguggccuuccagguau

SEQ ID NO: 539589 - RNA, 19 nt, Homo sapiens
  misc_RNA (1)...(19): siRNA sense strand
caacaacccuacuggaaac

SEQ ID NO: 539590 - RNA, 19 nt, Homo sapiens
  misc_RNA (1)...(19): siRNA sense strand
guagacaggguuauugauu

SEQ ID NO: 539591 - RNA, 19 nt, Homo sapiens
  misc_RNA (1)...(19): siRNA sense strand
gaucauuaauccuggagau

SEQ ID NO: 539592 - RNA, 19 nt, Homo sapiens
  misc_RNA (1)...(19): siRNA sense strand
ggaaaucuaugagcuugca

SEQ ID NO: 539593 - RNA, 19 nt, Homo sapiens
  misc_RNA (1)...(19): siRNA sense strand
gagacauacuuuccagaug

SEQ ID NO: 539594 - RNA, 19 nt, Homo sapiens
  misc_RNA (1)...(19): siRNA sense strand
uagaugaaccugcuuauuc

SEQ ID NO: 539595 - RNA, 19 nt, Homo sapiens
  misc_RNA (1)...(19): siRNA sense strand
agaagaugauccuuacuau

SEQ ID NO: 539596 - RNA, 19 nt, Homo sapiens
  misc_RNA (1)...(19): siRNA sense strand
gcuccuagcccuuacuuga

SEQ ID NO: 539597 - RNA, 19 nt, Homo sapiens
  misc_RNA (1)...(19): siRNA sense strand
ccaaaacccuuaauagaga

SEQ ID NO: 539598 - RNA, 19 nt, Homo sapiens
  misc_RNA (1)...(19): siRNA sense strand
uaacugguuuggcagaaug

SEQ ID NO: 539599 - RNA, 19 nt, Homo sapiens
  misc_RNA (1)...(19): siRNA sense strand
gcucagcuccuagcccuua

SEQ ID NO: 539600 - RNA, 19 nt, Homo sapiens
  misc_RNA (1)...(19): siRNA sense strand
caaaaucgaugaucuccuu

SEQ ID NO: 539601 - RNA, 19 nt, Homo sapiens
  misc_RNA (1)...(19): siRNA sense strand
cuccuuggcugguggcuua

SEQ ID NO: 539602 - RNA, 19 nt, Homo sapiens
  misc_RNA (1)...(19): siRNA sense strand
ggacaaauggaucuaugug

SEQ ID NO: 539603 - RNA, 19 nt, Homo sapiens
  misc_RNA (1)...(19): siRNA sense strand
uagaagaugauccuuacua

SEQ ID NO: 539604 - RNA, 19 nt, Homo sapiens
  misc_RNA (1)...(19): siRNA sense strand
caggaacucuucaaagucu

SEQ ID NO: 539605 - RNA, 19 nt, Homo sapiens
  misc_RNA (1)...(19): siRNA sense strand
uguaagguguuugaaauga

SEQ ID NO: 539606 - RNA, 19 nt, Homo sapiens
  misc_RNA (1)...(19): siRNA sense strand
ggagaagagaugaugaaga

SEQ ID NO: 539607 - RNA, 19 nt, Homo sapiens
  misc_RNA (1)...(19): siRNA sense strand
ggaccaugacugacauauu

SEQ ID NO: 539608 - RNA, 19 nt, Homo sapiens
  misc_RNA (1)...(19): siRNA sense strand
gaugaaagugggauuguuc

SEQ ID NO: 539609 - RNA, 19 nt, Homo sapiens
  misc_RNA (1)...(19): siRNA sense strand
uuauuaauguugccaguga

SEQ ID NO: 539610 - RNA, 19 nt, Homo sapiens
  misc_RNA (1)...(19): siRNA sense strand
guaagguguuugaaaugau

SEQ ID NO: 539611 - RNA, 19 nt, Homo sapiens
  misc_RNA (1)...(19): siRNA sense strand
acaagugguuaacugguuu

SEQ ID NO: 539612 - RNA, 19 nt, Homo sapiens
  misc_RNA (1)...(19): siRNA sense strand
agacaggguuauugauuuc

SEQ ID NO: 539613 - RNA, 19 nt, Homo sapiens
  misc_RNA (1)...(19): siRNA sense strand
uuaaccagcucaugauauc

SEQ ID NO: 539614 - RNA, 19 nt, Homo sapiens
  misc_RNA (1)...(19): siRNA sense strand
auaauguccuccuagauga

SEQ ID NO: 539615 - RNA, 19 nt, Homo sapiens
  misc_RNA (1)...(19): siRNA sense strand
aauagaagaugauccuuac

SEQ ID NO: 539616 - RNA, 19 nt, Homo sapiens
  misc_RNA (1)...(19): siRNA sense strand
uauuaaugcucccuggaaa

SEQ ID NO: 539617 - RNA, 19 nt, Homo sapiens
  misc_RNA (1)...(19): siRNA sense strand
gggagaagaagguuucaug

SEQ ID NO: 539618 - RNA, 19 nt, Homo sapiens
  misc_RNA (1)...(19): siRNA sense strand
guaccaacauuucuuucca

SEQ ID NO: 539619 - RNA, 19 nt, Homo sapiens
  misc_RNA (1)...(19): siRNA sense strand
gaaaccagaagaugcaaag

SEQ ID NO: 539620 - RNA, 19 nt, Homo sapiens
  misc_RNA (1)...(19): siRNA sense strand
uaaccagaaggaugcaaua

SEQ ID NO: 539621 - RNA, 19 nt, Homo sapiens
  misc_RNA (1)...(19): siRNA sense strand
uaagguguuugaaaugauc

SEQ ID NO: 539622 - RNA, 19 nt, Homo sapiens
  misc_RNA (1)...(19): siRNA sense strand
gcucauguagacaggguua

SEQ ID NO: 539623 - RNA, 19 nt, Homo sapiens
  misc_RNA (1)...(19): siRNA sense strand
caacccuacuggaaacuca

SEQ ID NO: 539624 - RNA, 19 nt, Homo sapiens
  misc_RNA (1)...(19): siRNA sense strand
ucauuaauccuggagauaa

SEQ ID NO: 539625 - RNA, 19 nt, Homo sapiens
  misc_RNA (1)...(19): siRNA sense strand
caaauggaucuauguguca

SEQ ID NO: 539626 - RNA, 19 nt, Homo sapiens
  misc_RNA (1)...(19): siRNA sense strand
ggcaacaacccuacuggaa

SEQ ID NO: 539627 - RNA, 19 nt, Homo sapiens
  misc_RNA (1)...(19): siRNA sense strand
gcaaagaauccccagaaaa

SEQ ID NO: 539628 - RNA, 19 nt, Homo sapiens
  misc_RNA (1)...(19): siRNA sense strand
cguaaucacuguagaaaau

SEQ ID NO: 539629 - RNA, 19 nt, Homo sapiens
  misc_RNA (1)...(19): siRNA sense strand
guucaggguaccaacauuu

SEQ ID NO: 539630 - RNA, 19 nt, Homo sapiens
  misc_RNA (1)...(19): siRNA sense strand
uaccaaauccaaacauguu

SEQ ID NO: 539631 - RNA, 19 nt, Homo sapiens
  misc_RNA (1)...(19): siRNA sense strand
guauuaaugcucccuggaa

SEQ ID NO: 539632 - RNA, 19 nt, Homo sapiens
  misc_RNA (1)...(19): siRNA sense strand
accagaagaugcaaagaau

SEQ ID NO: 539633 - RNA, 19 nt, Homo sapiens
  misc_RNA (1)...(19): siRNA sense strand
ggaaaccagaagaugcaaa

SEQ ID NO: 539634 - RNA, 19 nt, Homo sapiens
  misc_RNA (1)...(19): siRNA sense strand
acaggguuauugauuucua

SEQ ID NO: 539635 - RNA, 19 nt, Homo sapiens
  misc_RNA (1)...(19): siRNA sense strand
acacauacaaguuucaaca

SEQ ID NO: 539636 - RNA, 19 nt, Homo sapiens
  misc_RNA (1)...(19): siRNA sense strand
caugauaucacagcuucua

SEQ ID NO: 539637 - RNA, 19 nt, Homo sapiens
  misc_RNA (1)...(19): siRNA sense strand
uucaggaacucuucaaagu

SEQ ID NO: 539638 - RNA, 19 nt, Homo sapiens
  misc_RNA (1)...(19): siRNA sense strand
aaggacaaauggaucuaug

SEQ ID NO: 539639 - RNA, 19 nt, Homo sapiens
  misc_RNA (1)...(19): siRNA sense strand
ggaccaaaaucgaugaucu

SEQ ID NO: 539640 - RNA, 19 nt, Homo sapiens
  misc_RNA (1)...(19): siRNA sense strand
ugaugaaagugggauuguu

SEQ ID NO: 539641 - RNA, 19 nt, Homo sapiens
  misc_RNA (1)...(19): siRNA sense strand
gaauuacgcacgguucauc

SEQ ID NO: 539642 - RNA, 19 nt, Homo sapiens
  misc_RNA (1)...(19): siRNA sense strand
gacaaauggaucuaugugu

SEQ ID NO: 539643 - RNA, 19 nt, Homo sapiens
  misc_RNA (1)...(19): siRNA sense strand
agacugccguaaucacugu

SEQ ID NO: 539644 - RNA, 19 nt, Homo sapiens
  misc_RNA (1)...(19): siRNA sense strand
acuggaaacucauuaacca

SEQ ID NO: 539645 - RNA, 19 nt, Homo sapiens
  misc_RNA (1)...(19): siRNA sense strand
cagguauuagcacaacuua

SEQ ID NO: 539646 - RNA, 19 nt, Homo sapiens
  misc_RNA (1)...(19): siRNA sense strand
caggguuauugauuucuau

SEQ ID NO: 539647 - RNA, 19 nt, Homo sapiens
  misc_RNA (1)...(19): siRNA sense strand
gagagcacuucaguauucu

SEQ ID NO: 539648 - RNA, 19 nt, Homo sapiens
  misc_RNA (1)...(19): siRNA sense strand
gaagaaaaggccguuaaga

SEQ ID NO: 539649 - RNA, 19 nt, Homo sapiens
  misc_RNA (1)...(19): siRNA sense strand
ccagauggaaaccagaaga

SEQ ID NO: 539650 - RNA, 19 nt, Homo sapiens
  misc_RNA (1)...(19): siRNA sense strand
ccagauucccuaagagaca

SEQ ID NO: 539651 - RNA, 19 nt, Homo sapiens
  misc_RNA (1)...(19): siRNA sense strand
gagcuuuuguccuggcuaa

SEQ ID NO: 539652 - RNA, 19 nt, Homo sapiens
  misc_RNA (1)...(19): siRNA sense strand
guuaacugguuuggcagaa

SEQ ID NO: 539653 - RNA, 19 nt, Homo sapiens
  misc_RNA (1)...(19): siRNA sense strand
aaaggaaaucuaugagcuu

SEQ ID NO: 539654 - RNA, 19 nt, Homo sapiens
  misc_RNA (1)...(19): siRNA sense strand
aaccagaagaugcaaagaa

SEQ ID NO: 539655 - RNA, 19 nt, Homo sapiens
  misc_RNA (1)...(19): siRNA sense strand
uuuauacuguuccaaaugg

SEQ ID NO: 539656 - RNA, 19 nt, Homo sapiens
  misc_RNA (1)...(19): siRNA sense strand
agaaaaggccguuaagaug

SEQ ID NO: 539657 - RNA, 19 nt, Homo sapiens
  misc_RNA (1)...(19): siRNA sense strand
gcauccuucucuucagcuu

SEQ ID NO: 539658 - RNA, 19 nt, Homo sapiens
  misc_RNA (1)...(19): siRNA sense strand
uuaaugcucccuggaaaug

SEQ ID NO: 539659 - RNA, 19 nt, Homo sapiens
  misc_RNA (1)...(19): siRNA sense strand
uaauguugccagugaugaa

SEQ ID NO: 539660 - RNA, 19 nt, Homo sapiens
  misc_RNA (1)...(19): siRNA sense strand
guaaccagaaggaugcaau

SEQ ID NO: 539661 - RNA, 19 nt, Homo sapiens
  misc_RNA (1)...(19): siRNA sense strand
gccguaaucacuguagaaa

SEQ ID NO: 539662 - RNA, 19 nt, Homo sapiens
  misc_RNA (1)...(19): siRNA sense strand
caaggacaaauggaucuau

SEQ ID NO: 539663 - RNA, 19 nt, Homo sapiens
  misc_RNA (1)...(19): siRNA sense strand
ccagguauuagcacaacuu

SEQ ID NO: 539664 - RNA, 19 nt, Homo sapiens
  misc_RNA (1)...(19): siRNA sense strand
uccuagcccuuacuugaga

SEQ ID NO: 539665 - RNA, 19 nt, Homo sapiens
  misc_RNA (1)...(19): siRNA sense strand
cauguagacaggguuauug

SEQ ID NO: 539666 - RNA, 19 nt, Homo sapiens
  misc_RNA (1)...(19): siRNA sense strand
auacaaguuucaacauugc

SEQ ID NO: 539667 - RNA, 19 nt, Homo sapiens
  misc_RNA (1)...(19): siRNA sense strand
cuuaccaaauccaaacaug

SEQ ID NO: 539668 - RNA, 19 nt, Homo sapiens
  misc_RNA (1)...(19): siRNA sense strand
cuagaugaaccugcuuauu

SEQ ID NO: 539669 - RNA, 19 nt, Homo sapiens
  misc_RNA (1)...(19): siRNA sense strand
ccacaagggugacaucaua

SEQ ID NO: 539670 - RNA, 19 nt, Homo sapiens
  misc_RNA (1)...(19): siRNA sense strand
gcacagagacucaugaauu

SEQ ID NO: 539671 - RNA, 19 nt, Homo sapiens
  misc_RNA (1)...(19): siRNA sense strand
gcauacagcuuugcagaua

SEQ ID NO: 539672 - RNA, 19 nt, Homo sapiens
  misc_RNA (1)...(19): siRNA sense strand
gcagauauccuguuuguga

SEQ ID NO: 539673 - RNA, 19 nt, Homo sapiens
  misc_RNA (1)...(19): siRNA sense strand
gaagagauaugugcugaga

SEQ ID NO: 539674 - RNA, 19 nt, Homo sapiens
  misc_RNA (1)...(19): siRNA sense strand
ggaggagucuggugaaguu

SEQ ID NO: 539675 - RNA, 19 nt, Homo sapiens
  misc_RNA (1)...(19): siRNA sense strand
acaaguaccuucucaaguu

SEQ ID NO: 539676 - RNA, 19 nt, Homo sapiens
  misc_RNA (1)...(19): siRNA sense strand
ccaaaguacuugacucuga

SEQ ID NO: 539677 - RNA, 19 nt, Homo sapiens
  misc_RNA (1)...(19): siRNA sense strand
ggaauuaccacaucuucua

SEQ ID NO: 539678 - RNA, 19 nt, Homo sapiens
  misc_RNA (1)...(19): siRNA sense strand
ggaacuacaucgugcagaa

SEQ ID NO: 539679 - RNA, 19 nt, Homo sapiens
  misc_RNA (1)...(19): siRNA sense strand
aaacagaaccagugcauaa

SEQ ID NO: 539680 - RNA, 19 nt, Homo sapiens
  misc_RNA (1)...(19): siRNA sense strand
gcuggaggcugcuguauau

SEQ ID NO: 539681 - RNA, 19 nt, Homo sapiens
  misc_RNA (1)...(19): siRNA sense strand
guacauccgugagcagaua

SEQ ID NO: 539682 - RNA, 19 nt, Homo sapiens
  misc_RNA (1)...(19): siRNA sense strand
ucaaguuugugucugauua

SEQ ID NO: 539683 - RNA, 19 nt, Homo sapiens
  misc_RNA (1)...(19): siRNA sense strand
gaauguuacugccaaguug

SEQ ID NO: 539684 - RNA, 19 nt, Homo sapiens
  misc_RNA (1)...(19): siRNA sense strand
gaacccauaccaaauguuu

SEQ ID NO: 539685 - RNA, 19 nt, Homo sapiens
  misc_RNA (1)...(19): siRNA sense strand
gaccacaccuuccuacaga

SEQ ID NO: 539686 - RNA, 19 nt, Homo sapiens
  misc_RNA (1)...(19): siRNA sense strand
ucaagacccugguagauga

SEQ ID NO: 539687 - RNA, 19 nt, Homo sapiens
  misc_RNA (1)...(19): siRNA sense strand
ggacagcgaccuaugagaa

SEQ ID NO: 539688 - RNA, 19 nt, Homo sapiens
  misc_RNA (1)...(19): siRNA sense strand
gaacggaaccucaucuaca

SEQ ID NO: 539689 - RNA, 19 nt, Homo sapiens
  misc_RNA (1)...(19): siRNA sense strand
caaguaccuucucaaguuu

SEQ ID NO: 539690 - RNA, 19 nt, Homo sapiens
  misc_RNA (1)...(19): siRNA sense strand
gaaggagccaggucucuuu

SEQ ID NO: 539691 - RNA, 19 nt, Homo sapiens
  misc_RNA (1)...(19): siRNA sense strand
gagaaugagcuauauguga

SEQ ID NO: 539692 - RNA, 19 nt, Homo sapiens
  misc_RNA (1)...(19): siRNA sense strand
ggaacaagaugcacuccau

SEQ ID NO: 539693 - RNA, 19 nt, Homo sapiens
  misc_RNA (1)...(19): siRNA sense strand
cacagagacucaugaauug

SEQ ID NO: 539694 - RNA, 19 nt, Homo sapiens
  misc_RNA (1)...(19): siRNA sense strand
ccacacagcagaucaagaa

SEQ ID NO: 539695 - RNA, 19 nt, Homo sapiens
  misc_RNA (1)...(19): siRNA sense strand
agaagacgcugucggagaa

SEQ ID NO: 539696 - RNA, 19 nt, Homo sapiens
  misc_RNA (1)...(19): siRNA sense strand
cuccguggcuucuucauua

SEQ ID NO: 539697 - RNA, 19 nt, Homo sapiens
  misc_RNA (1)...(19): siRNA sense strand
gcacaugcccaaaguacuu

SEQ ID NO: 539698 - RNA, 19 nt, Homo sapiens
  misc_RNA (1)...(19): siRNA sense strand
cacagcagaucaagaauau

SEQ ID NO: 539699 - RNA, 19 nt, Homo sapiens
  misc_RNA (1)...(19): siRNA sense strand
ggaggcagcaguaguggua

SEQ ID NO: 539700 - RNA, 19 nt, Homo sapiens
  misc_RNA (1)...(19): siRNA sense strand
gggcgaguauuaugacuau

SEQ ID NO: 539701 - RNA, 19 nt, Homo sapiens
  misc_RNA (1)...(19): siRNA sense strand
gaagaaggacucugacuac

SEQ ID NO: 539702 - RNA, 19 nt, Homo sapiens
  misc_RNA (1)...(19): siRNA sense strand
gcaaagucaugccaaacau

SEQ ID NO: 539703 - RNA, 19 nt, Homo sapiens
  misc_RNA (1)...(19): siRNA sense strand
caaacgagaaccuucagua

SEQ ID NO: 539704 - RNA, 19 nt, Homo sapiens
  misc_RNA (1)...(19): siRNA sense strand
gagcagcuguguauuaacu

SEQ ID NO: 539705 - RNA, 19 nt, Homo sapiens
  misc_RNA (1)...(19): siRNA sense strand
gaaagagcgaugcagauga

SEQ ID NO: 539706 - RNA, 19 nt, Homo sapiens
  misc_RNA (1)...(19): siRNA sense strand
ggaaccucaucuacacaua

SEQ ID NO: 539707 - RNA, 19 nt, Homo sapiens
  misc_RNA (1)...(19): siRNA sense strand
agagguggcuggagacauu

SEQ ID NO: 539708 - RNA, 19 nt, Homo sapiens
  misc_RNA (1)...(19): siRNA sense strand
ggacgugguggaagagaua

SEQ ID NO: 539709 - RNA, 19 nt, Homo sapiens
  misc_RNA (1)...(19): siRNA sense strand
ggagucggcuucggccuuu

SEQ ID NO: 539710 - RNA, 19 nt, Homo sapiens
  misc_RNA (1)...(19): siRNA sense strand
gacgugggcugcuucaaug

SEQ ID NO: 539711 - RNA, 19 nt, Homo sapiens
  misc_RNA (1)...(19): siRNA sense strand
cgugaucucuggugccaua

SEQ ID NO: 539712 - RNA, 19 nt, Homo sapiens
  misc_RNA (1)...(19): siRNA sense strand
ggaaguuuguggaaaucuu

SEQ ID NO: 539713 - RNA, 19 nt, Homo sapiens
  misc_RNA (1)...(19): siRNA sense strand
cagcagaucaagaauauug

SEQ ID NO: 539714 - RNA, 19 nt, Homo sapiens
  misc_RNA (1)...(19): siRNA sense strand
agagauaugugcugagaug

SEQ ID NO: 539715 - RNA, 19 nt, Homo sapiens
  misc_RNA (1)...(19): siRNA sense strand
gaaccagggugggaacugu

SEQ ID NO: 539716 - RNA, 19 nt, Homo sapiens
  misc_RNA (1)...(19): siRNA sense strand
ccacaauggccucaacuuu

SEQ ID NO: 539717 - RNA, 19 nt, Homo sapiens
  misc_RNA (1)...(19): siRNA sense strand
ugaagcagaucacagacaa

SEQ ID NO: 539718 - RNA, 19 nt, Homo sapiens
  misc_RNA (1)...(19): siRNA sense strand
ggaggaagaugaggagaag

SEQ ID NO: 539719 - RNA, 19 nt, Homo sapiens
  misc_RNA (1)...(19): siRNA sense strand
gcgggaaaguguucaugaa

SEQ ID NO: 539720 - RNA, 19 nt, Homo sapiens
  misc_RNA (1)...(19): siRNA sense strand
ggacagcaacccaccaaga

SEQ ID NO: 539721 - RNA, 19 nt, Homo sapiens
  misc_RNA (1)...(19): siRNA sense strand
gagagcauguccugaaucu

SEQ ID NO: 539722 - RNA, 19 nt, Homo sapiens
  misc_RNA (1)...(19): siRNA sense strand
ggaaagagcgaugcagaug

SEQ ID NO: 539723 - RNA, 19 nt, Homo sapiens
  misc_RNA (1)...(19): siRNA sense strand
gaaguuuguggaaaucuuu

SEQ ID NO: 539724 - RNA, 19 nt, Homo sapiens
  misc_RNA (1)...(19): siRNA sense strand
caaaguacuugacucugau

SEQ ID NO: 539725 - RNA, 19 nt, Homo sapiens
  misc_RNA (1)...(19): siRNA sense strand
gagcgaugcagaugacuuu

SEQ ID NO: 539726 - RNA, 19 nt, Homo sapiens
  misc_RNA (1)...(19): siRNA sense strand
ucaucucacugaagccuua

SEQ ID NO: 539727 - RNA, 19 nt, Homo sapiens
  misc_RNA (1)...(19): siRNA sense strand
ggagaagaaagccaagaaa

SEQ ID NO: 539728 - RNA, 19 nt, Homo sapiens
  misc_RNA (1)...(19): siRNA sense strand
acucuacgcucaacucuga

SEQ ID NO: 539729 - RNA, 19 nt, Homo sapiens
  misc_RNA (1)...(19): siRNA sense strand
cagaaccagugcauaauca

SEQ ID NO: 539730 - RNA, 19 nt, Homo sapiens
  misc_RNA (1)...(19): siRNA sense strand
acaaguuccuggacaagaa

SEQ ID NO: 539731 - RNA, 19 nt, Homo sapiens
  misc_RNA (1)...(19): siRNA sense strand
cacccaagaucuccaagaa

SEQ ID NO: 539732 - RNA, 19 nt, Homo sapiens
  misc_RNA (1)...(19): siRNA sense strand
gaaccagugcauaaucauu

SEQ ID NO: 539733 - RNA, 19 nt, Homo sapiens
  misc_RNA (1)...(19): siRNA sense strand
ggacaagaaccacgaccaa

SEQ ID NO: 539734 - RNA, 19 nt, Homo sapiens
  misc_RNA (1)...(19): siRNA sense strand
gcccugaggccuucaauga

SEQ ID NO: 539735 - RNA, 19 nt, Homo sapiens
  misc_RNA (1)...(19): siRNA sense strand
ggacgugggcugcuucaau

SEQ ID NO: 539736 - RNA, 19 nt, Homo sapiens
  misc_RNA (1)...(19): siRNA sense strand
gauguacccuacuuugauc

SEQ ID NO: 539737 - RNA, 19 nt, Homo sapiens
  misc_RNA (1)...(19): siRNA sense strand
caggaaggauggcgggaaa

SEQ ID NO: 539738 - RNA, 19 nt, Homo sapiens
  misc_RNA (1)...(19): siRNA sense strand
ggacucggaugaggacaug

SEQ ID NO: 539739 - RNA, 19 nt, Homo sapiens
  misc_RNA (1)...(19): siRNA sense strand
gagaucaccuuugcugaca

SEQ ID NO: 539740 - RNA, 19 nt, Homo sapiens
  misc_RNA (1)...(19): siRNA sense strand
gcugagaccuacuacuauc

SEQ ID NO: 539741 - RNA, 19 nt, Homo sapiens
  misc_RNA (1)...(19): siRNA sense strand
ugagaagccugaagaagag

SEQ ID NO: 539742 - RNA, 19 nt, Homo sapiens
  misc_RNA (1)...(19): siRNA sense strand
gagcagcaaggcauggaua

SEQ ID NO: 539743 - RNA, 19 nt, Homo sapiens
  misc_RNA (1)...(19): siRNA sense strand
cggagcaggugcagcagua

SEQ ID NO: 539744 - RNA, 19 nt, Homo sapiens
  misc_RNA (1)...(19): siRNA sense strand
caagauggccaccgacaug

SEQ ID NO: 539745 - RNA, 19 nt, Homo sapiens
  misc_RNA (1)...(19): siRNA sense strand
gaaguuccggucccuggua

SEQ ID NO: 539746 - RNA, 19 nt, Homo sapiens
  misc_RNA (1)...(19): siRNA sense strand
cgagaggaauuaccacauc

SEQ ID NO: 539747 - RNA, 19 nt, Homo sapiens
  misc_RNA (1)...(19): siRNA sense strand
ccaggaaucccucaucgaa

SEQ ID NO: 539748 - RNA, 19 nt, Homo sapiens
  misc_RNA (1)...(19): siRNA sense strand
ggauguggccucagagaug

SEQ ID NO: 539749 - RNA, 19 nt, Homo sapiens
  misc_RNA (1)...(19): siRNA sense strand
cgacaacuccagccgcuuu

SEQ ID NO: 539750 - RNA, 19 nt, Homo sapiens
  misc_RNA (1)...(19): siRNA sense strand
gggaucagccacucaaguu

SEQ ID NO: 539751 - RNA, 19 nt, Homo sapiens
  misc_RNA (1)...(19): siRNA sense strand
cagcaugugugcccacuca

SEQ ID NO: 539752 - RNA, 19 nt, Homo sapiens
  misc_RNA (1)...(19): siRNA sense strand
aggcaacucuuucuucuuc

SEQ ID NO: 539753 - RNA, 19 nt, Homo sapiens
  misc_RNA (1)...(19): siRNA sense strand
gacagcagccucagcaaga

SEQ ID NO: 539754 - RNA, 19 nt, Homo sapiens
  misc_RNA (1)...(19): siRNA sense strand
ugaagaaggacucugacua

SEQ ID NO: 539755 - RNA, 19 nt, Homo sapiens
  misc_RNA (1)...(19): siRNA sense strand
gugagaaggucauccucuu

SEQ ID NO: 539756 - RNA, 19 nt, Homo sapiens
  misc_RNA (1)...(19): siRNA sense strand
cuaccuggauagccucuuu

SEQ ID NO: 539757 - RNA, 19 nt, Homo sapiens
  misc_RNA (1)...(19): siRNA sense strand
gagaacaucuucgggaacu

SEQ ID NO: 539758 - RNA, 19 nt, Homo sapiens
  misc_RNA (1)...(19): siRNA sense strand
ccaacccgcucuauuccaa

SEQ ID NO: 539759 - RNA, 19 nt, Homo sapiens
  misc_RNA (1)...(19): siRNA sense strand
cccaguaccugcuugagaa

SEQ ID NO: 539760 - RNA, 19 nt, Homo sapiens
  misc_RNA (1)...(19): siRNA sense strand
ggacaugacacagcuggaa

SEQ ID NO: 539761 - RNA, 19 nt, Homo sapiens
  misc_RNA (1)...(19): siRNA sense strand
gcccagcucuaccguacaa

SEQ ID NO: 539762 - RNA, 19 nt, Homo sapiens
  misc_RNA (1)...(19): siRNA sense strand
uauguuaucuucguuguca

SEQ ID NO: 539763 - RNA, 19 nt, Homo sapiens
  misc_RNA (1)...(19): siRNA sense strand
ccucaucaaucccaacuuc

SEQ ID NO: 539764 - RNA, 19 nt, Homo sapiens
  misc_RNA (1)...(19): siRNA sense strand
acacagcagaucaagaaua

SEQ ID NO: 539765 - RNA, 19 nt, Homo sapiens
  misc_RNA (1)...(19): siRNA sense strand
gccauugccuaccgcauga

SEQ ID NO: 539766 - RNA, 19 nt, Homo sapiens
  misc_RNA (1)...(19): siRNA sense strand
caacaaguaccuucucaag

SEQ ID NO: 539767 - RNA, 19 nt, Homo sapiens
  misc_RNA (1)...(19): siRNA sense strand
gcgagagcauguccugaau

SEQ ID NO: 539768 - RNA, 19 nt, Homo sapiens
  misc_RNA (1)...(19): siRNA sense strand
ggugggaacugugagauag

SEQ ID NO: 539769 - RNA, 19 nt, Homo sapiens
  misc_RNA (1)...(19): siRNA sense strand
gaacuacugugcagaaauu

SEQ ID NO: 539770 - RNA, 19 nt, Homo sapiens
  misc_RNA (1)...(19): siRNA sense strand
uaacggagaucuggcauua

SEQ ID NO: 539771 - RNA, 19 nt, Homo sapiens
  misc_RNA (1)...(19): siRNA sense strand
gcaaacaacuagauuuaga

SEQ ID NO: 539772 - RNA, 19 nt, Homo sapiens
  misc_RNA (1)...(19): siRNA sense strand
caucagugcucacaaguuu

SEQ ID NO: 539773 - RNA, 19 nt, Homo sapiens
  misc_RNA (1)...(19): siRNA sense strand
uaacuugucuuccacuaaa

SEQ ID NO: 539774 - RNA, 19 nt, Homo sapiens
  misc_RNA (1)...(19): siRNA sense strand
ccacuuuccucauuaagaa

SEQ ID NO: 539775 - RNA, 19 nt, Homo sapiens
  misc_RNA (1)...(19): siRNA sense strand
gguguuaugucucuaguga

SEQ ID NO: 539776 - RNA, 19 nt, Homo sapiens
  misc_RNA (1)...(19): siRNA sense strand
gugcaaacaacuagauuua

SEQ ID NO: 539777 - RNA, 19 nt, Homo sapiens
  misc_RNA (1)...(19): siRNA sense strand
ugacugaacugaugaaacu

SEQ ID NO: 539778 - RNA, 19 nt, Homo sapiens
  misc_RNA (1)...(19): siRNA sense strand
cagaguacccgcuacauaa

SEQ ID NO: 539779 - RNA, 19 nt, Homo sapiens
  misc_RNA (1)...(19): siRNA sense strand
ccagcacacugaugaacua

SEQ ID NO: 539780 - RNA, 19 nt, Homo sapiens
  misc_RNA (1)...(19): siRNA sense strand
gcacacugaugaacuacug

SEQ ID NO: 539781 - RNA, 19 nt, Homo sapiens
  misc_RNA (1)...(19): siRNA sense strand
cagagaggaugauguguuc

SEQ ID NO: 539782 - RNA, 19 nt, Homo sapiens
  misc_RNA (1)...(19): siRNA sense strand
aagaggagguggccaaguu

SEQ ID NO: 539783 - RNA, 19 nt, Homo sapiens
  misc_RNA (1)...(19): siRNA sense strand
ggaacuguauucgcuucua

SEQ ID NO: 539784 - RNA, 19 nt, Homo sapiens
  misc_RNA (1)...(19): siRNA sense strand
gcuggagucuggcuaacuu

SEQ ID NO: 539785 - RNA, 19 nt, Homo sapiens
  misc_RNA (1)...(19): siRNA sense strand
gaacugaugaaacuagcaa

SEQ ID NO: 539786 - RNA, 19 nt, Homo sapiens
  misc_RNA (1)...(19): siRNA sense strand
gaacuguauucgcuucuac

SEQ ID NO: 539787 - RNA, 19 nt, Homo sapiens
  misc_RNA (1)...(19): siRNA sense strand
cagaaauuauugcaaguca

SEQ ID NO: 539788 - RNA, 19 nt, Homo sapiens
  misc_RNA (1)...(19): siRNA sense strand
gcugccacuuuccucauua

SEQ ID NO: 539789 - RNA, 19 nt, Homo sapiens
  misc_RNA (1)...(19): siRNA sense strand
cagaugagcuggaguucag

SEQ ID NO: 539790 - RNA, 19 nt, Homo sapiens
  misc_RNA (1)...(19): siRNA sense strand
caacuagauuuagaacuca

SEQ ID NO: 539791 - RNA, 19 nt, Homo sapiens
  misc_RNA (1)...(19): siRNA sense strand
ugagaaggguguuaugucu

SEQ ID NO: 539792 - RNA, 19 nt, Homo sapiens
  misc_RNA (1)...(19): siRNA sense strand
augcuucgcuggaucuaua

SEQ ID NO: 539793 - RNA, 19 nt, Homo sapiens
  misc_RNA (1)...(19): siRNA sense strand
acaacuagauuuagaacuc

SEQ ID NO: 539794 - RNA, 19 nt, Homo sapiens
  misc_RNA (1)...(19): siRNA sense strand
gcuaacuugucuuccacua

SEQ ID NO: 539795 - RNA, 19 nt, Homo sapiens
  misc_RNA (1)...(19): siRNA sense strand
acggagaucuggcauuaga

SEQ ID NO: 539796 - RNA, 19 nt, Homo sapiens
  misc_RNA (1)...(19): siRNA sense strand
ucaaauccaagacagagua

SEQ ID NO: 539797 - RNA, 19 nt, Homo sapiens
  misc_RNA (1)...(19): siRNA sense strand
gaugaacuacugugcagaa

SEQ ID NO: 539798 - RNA, 19 nt, Homo sapiens
  misc_RNA (1)...(19): siRNA sense strand
acacaaaggaauccaaaga

SEQ ID NO: 539799 - RNA, 19 nt, Homo sapiens
  misc_RNA (1)...(19): siRNA sense strand
gaaacacucagcagaugug

SEQ ID NO: 539800 - RNA, 19 nt, Homo sapiens
  misc_RNA (1)...(19): siRNA sense strand
ggcuggagcuuguuacaca

SEQ ID NO: 539801 - RNA, 19 nt, Homo sapiens
  misc_RNA (1)...(19): siRNA sense strand
caaaucgguuucagcuaca

SEQ ID NO: 539802 - RNA, 19 nt, Homo sapiens
  misc_RNA (1)...(19): siRNA sense strand
gggacgaccugaggaagga

SEQ ID NO: 539803 - RNA, 19 nt, Homo sapiens
  misc_RNA (1)...(19): siRNA sense strand
ugacaaugcuucgcuggau

SEQ ID NO: 539804 - RNA, 19 nt, Homo sapiens
  misc_RNA (1)...(19): siRNA sense strand
aagaaacacucagcagaug

SEQ ID NO: 539805 - RNA, 19 nt, Homo sapiens
  misc_RNA (1)...(19): siRNA sense strand
gugaaugucaggaacugua

SEQ ID NO: 539806 - RNA, 19 nt, Homo sapiens
  misc_RNA (1)...(19): siRNA sense strand
aagaguggcuggagcuugu

SEQ ID NO: 539807 - RNA, 19 nt, Homo sapiens
  misc_RNA (1)...(19): siRNA sense strand
acauaaagccaucaaagug

SEQ ID NO: 539808 - RNA, 19 nt, Homo sapiens
  misc_RNA (1)...(19): siRNA sense strand
acagaguacccgcuacaua

SEQ ID NO: 539809 - RNA, 19 nt, Homo sapiens
  misc_RNA (1)...(19): siRNA sense strand
gaggauuucagcagcauga

SEQ ID NO: 539810 - RNA, 19 nt, Homo sapiens
  misc_RNA (1)...(19): siRNA sense strand
cuacugugcagaaauuauu

SEQ ID NO: 539811 - RNA, 19 nt, Homo sapiens
  misc_RNA (1)...(19): siRNA sense strand
agacaccacugcaccuugu

SEQ ID NO: 539812 - RNA, 19 nt, Homo sapiens
  misc_RNA (1)...(19): siRNA sense strand
ggacaugguggacaagagu

SEQ ID NO: 539813 - RNA, 19 nt, Homo sapiens
  misc_RNA (1)...(19): siRNA sense strand
ccaucaaaguggagagaga

SEQ ID NO: 539814 - RNA, 19 nt, Homo sapiens
  misc_RNA (1)...(19): siRNA sense strand
aaagaaacacucagcagau

SEQ ID NO: 539815 - RNA, 19 nt, Homo sapiens
  misc_RNA (1)...(19): siRNA sense strand
uguuaugucucuagugaau

SEQ ID NO: 539816 - RNA, 19 nt, Homo sapiens
  misc_RNA (1)...(19): siRNA sense strand
cacgacgacuggagaguau

SEQ ID NO: 539817 - RNA, 19 nt, Homo sapiens
  misc_RNA (1)...(19): siRNA sense strand
gacguggucuuccuguauc

SEQ ID NO: 539818 - RNA, 19 nt, Homo sapiens
  misc_RNA (1)...(19): siRNA sense strand
ucagagaggaugauguguu

SEQ ID NO: 539819 - RNA, 19 nt, Homo sapiens
  misc_RNA (1)...(19): siRNA sense strand
ugaugaaacuagcaaaucg

SEQ ID NO: 539820 - RNA, 19 nt, Homo sapiens
  misc_RNA (1)...(19): siRNA sense strand
guucagagaggaugaugug

SEQ ID NO: 539821 - RNA, 19 nt, Homo sapiens
  misc_RNA (1)...(19): siRNA sense strand
acacucagcagaugugaug

SEQ ID NO: 539822 - RNA, 19 nt, Homo sapiens
  misc_RNA (1)...(19): siRNA sense strand
cuuguacaguucaaagaaa

SEQ ID NO: 539823 - RNA, 19 nt, Homo sapiens
  misc_RNA (1)...(19): siRNA sense strand
gaaggguguuaugucucua

SEQ ID NO: 539824 - RNA, 19 nt, Homo sapiens
  misc_RNA (1)...(19): siRNA sense strand
agaaggguguuaugucucu

SEQ ID NO: 539825 - RNA, 19 nt, Homo sapiens
  misc_RNA (1)...(19): siRNA sense strand
gcagugcaaacaacuagau

SEQ ID NO: 539826 - RNA, 19 nt, Homo sapiens
  misc_RNA (1)...(19): siRNA sense strand
ggaccugucagaugcuaau

SEQ ID NO: 539827 - RNA, 19 nt, Homo sapiens
  misc_RNA (1)...(19): siRNA sense strand
ucacgacgacuggagagua

SEQ ID NO: 539828 - RNA, 19 nt, Homo sapiens
  misc_RNA (1)...(19): siRNA sense strand
uuaugucucuagugaaugu

SEQ ID NO: 539829 - RNA, 19 nt, Homo sapiens
  misc_RNA (1)...(19): siRNA sense strand
gaguuggaccugucagaug

SEQ ID NO: 539830 - RNA, 19 nt, Homo sapiens
  misc_RNA (1)...(19): siRNA sense strand
gaagauguccccgugguaa

SEQ ID NO: 539831 - RNA, 19 nt, Homo sapiens
  misc_RNA (1)...(19): siRNA sense strand
ucucuuugcugccacuuuc

SEQ ID NO: 539832 - RNA, 19 nt, Homo sapiens
  misc_RNA (1)...(19): siRNA sense strand
cuacauaaagccaucaaag

SEQ ID NO: 539833 - RNA, 19 nt, Homo sapiens
  misc_RNA (1)...(19): siRNA sense strand
gagucuggcuaacuugucu

SEQ ID NO: 539834 - RNA, 19 nt, Homo sapiens
  misc_RNA (1)...(19): siRNA sense strand
gagcaguacagcgaucuga

SEQ ID NO: 539835 - RNA, 19 nt, Homo sapiens
  misc_RNA (1)...(19): siRNA sense strand
ucuacgagcaggagcagua

SEQ ID NO: 539836 - RNA, 19 nt, Homo sapiens
  misc_RNA (1)...(19): siRNA sense strand
gcaguacagcgaucugaag

SEQ ID NO: 539837 - RNA, 19 nt, Homo sapiens
  misc_RNA (1)...(19): siRNA sense strand
cuuguggccuuguacaguu

SEQ ID NO: 539838 - RNA, 19 nt, Homo sapiens
  misc_RNA (1)...(19): siRNA sense strand
gaugugagaaggguguuau

SEQ ID NO: 539839 - RNA, 19 nt, Homo sapiens
  misc_RNA (1)...(19): siRNA sense strand
uuacacaaaggaauccaaa

SEQ ID NO: 539840 - RNA, 19 nt, Homo sapiens
  misc_RNA (1)...(19): siRNA sense strand
cgacgacuggagaguauug

SEQ ID NO: 539841 - RNA, 19 nt, Homo sapiens
  misc_RNA (1)...(19): siRNA sense strand
uccuguaucugauugaaau

SEQ ID NO: 539842 - RNA, 19 nt, Homo sapiens
  misc_RNA (1)...(19): siRNA sense strand
gcagaaauuauugcaaguc

SEQ ID NO: 539843 - RNA, 19 nt, Homo sapiens
  misc_RNA (1)...(19): siRNA sense strand
gaaugucaggaacuguauu

SEQ ID NO: 539844 - RNA, 19 nt, Homo sapiens
  misc_RNA (1)...(19): siRNA sense strand
agaguacccgcuacauaaa

SEQ ID NO: 539845 - RNA, 19 nt, Homo sapiens
  misc_RNA (1)...(19): siRNA sense strand
caucaaaguggagagagaa

SEQ ID NO: 539846 - RNA, 19 nt, Homo sapiens
  misc_RNA (1)...(19): siRNA sense strand
ggagacaccacugcaccuu

SEQ ID NO: 539847 - RNA, 19 nt, Homo sapiens
  misc_RNA (1)...(19): siRNA sense strand
gaguggcuggagcuuguua

SEQ ID NO: 539848 - RNA, 19 nt, Homo sapiens
  misc_RNA (1)...(19): siRNA sense strand
augucaagcugcagaagaa

SEQ ID NO: 539849 - RNA, 19 nt, Homo sapiens
  misc_RNA (1)...(19): siRNA sense strand
ggucuuccuguaucugauu

SEQ ID NO: 539850 - RNA, 19 nt, Homo sapiens
  misc_RNA (1)...(19): siRNA sense strand
auacagaugagcuggaguu

SEQ ID NO: 539851 - RNA, 19 nt, Homo sapiens
  misc_RNA (1)...(19): siRNA sense strand
uacauaaagccaucaaagu

SEQ ID NO: 539852 - RNA, 19 nt, Homo sapiens
  misc_RNA (1)...(19): siRNA sense strand
cuaacuugucuuccacuaa

SEQ ID NO: 539853 - RNA, 19 nt, Homo sapiens
  misc_RNA (1)...(19): siRNA sense strand
cugccacuuuccucauuaa

SEQ ID NO: 539854 - RNA, 19 nt, Homo sapiens
  misc_RNA (1)...(19): siRNA sense strand
uaaagaguuggaccuguca

SEQ ID NO: 539855 - RNA, 19 nt, Homo sapiens
  misc_RNA (1)...(19): siRNA sense strand
gccacuuuccucauuaaga

SEQ ID NO: 539856 - RNA, 19 nt, Homo sapiens
  misc_RNA (1)...(19): siRNA sense strand
cagcagcgaguccuucauc

SEQ ID NO: 539857 - RNA, 19 nt, Homo sapiens
  misc_RNA (1)...(19): siRNA sense strand
cugaaugccagcacacuga

SEQ ID NO: 539858 - RNA, 19 nt, Homo sapiens
  misc_RNA (1)...(19): siRNA sense strand
gaagaggagguggccaagu

SEQ ID NO: 539859 - RNA, 19 nt, Homo sapiens
  misc_RNA (1)...(19): siRNA sense strand
cagcauaucacagugucuu

SEQ ID NO: 539860 - RNA, 19 nt, Homo sapiens
  misc_RNA (1)...(19): siRNA sense strand
gaggugacgaugacaaugc

SEQ ID NO: 539861 - RNA, 19 nt, Homo sapiens
  misc_RNA (1)...(19): siRNA sense strand
caucguggcagaccucuac

SEQ ID NO: 539862 - RNA, 19 nt, Homo sapiens
  misc_RNA (1)...(19): siRNA sense strand
guaucugauugaaauggau

SEQ ID NO: 539863 - RNA, 19 nt, Homo sapiens
  misc_RNA (1)...(19): siRNA sense strand
uguaucugauugaaaugga

SEQ ID NO: 539864 - RNA, 19 nt, Homo sapiens
  misc_RNA (1)...(19): siRNA sense strand
gugagaaggguguuauguc

SEQ ID NO: 539865 - RNA, 19 nt, Homo sapiens
  misc_RNA (1)...(19): siRNA sense strand
caguacagcgaucugaaga

SEQ ID NO: 539866 - RNA, 19 nt, Homo sapiens
  misc_RNA (1)...(19): siRNA sense strand
ccacgcugguuagucacaa

SEQ ID NO: 539867 - RNA, 19 nt, Homo sapiens
  misc_RNA (1)...(19): siRNA sense strand
gaacuacugugcagaaauu

SEQ ID NO: 539868 - RNA, 19 nt, Homo sapiens
  misc_RNA (1)...(19): siRNA sense strand
uaacggagaucuggcauua

SEQ ID NO: 539869 - RNA, 19 nt, Homo sapiens
  misc_RNA (1)...(19): siRNA sense strand
gcaaacaacuagauuuaga

SEQ ID NO: 539870 - RNA, 19 nt, Homo sapiens
  misc_RNA (1)...(19): siRNA sense strand
caucagugcucacaaguuu

SEQ ID NO: 539871 - RNA, 19 nt, Homo sapiens
  misc_RNA (1)...(19): siRNA sense strand
uaacuugucuuccacuaaa

SEQ ID NO: 539872 - RNA, 19 nt, Homo sapiens
  misc_RNA (1)...(19): siRNA sense strand
ccacuuuccucauuaagaa

SEQ ID NO: 539873 - RNA, 19 nt, Homo sapiens
  misc_RNA (1)...(19): siRNA sense strand
gguguuaugucucuaguga

SEQ ID NO: 539874 - RNA, 19 nt, Homo sapiens
  misc_RNA (1)...(19): siRNA sense strand
gugcaaacaacuagauuua

SEQ ID NO: 539875 - RNA, 19 nt, Homo sapiens
  misc_RNA (1)...(19): siRNA sense strand
ugacugaacugaugaaacu

SEQ ID NO: 539876 - RNA, 19 nt, Homo sapiens
  misc_RNA (1)...(19): siRNA sense strand
cagaguacccgcuacauaa

SEQ ID NO: 539877 - RNA, 19 nt, Homo sapiens
  misc_RNA (1)...(19): siRNA sense strand
ccagcacacugaugaacua

SEQ ID NO: 539878 - RNA, 19 nt, Homo sapiens
  misc_RNA (1)...(19): siRNA sense strand
gcacacugaugaacuacug

SEQ ID NO: 539879 - RNA, 19 nt, Homo sapiens
  misc_RNA (1)...(19): siRNA sense strand
cagagaggaugauguguuc

SEQ ID NO: 539880 - RNA, 19 nt, Homo sapiens
  misc_RNA (1)...(19): siRNA sense strand
aagaggagguggccaaguu

SEQ ID NO: 539881 - RNA, 19 nt, Homo sapiens
  misc_RNA (1)...(19): siRNA sense strand
ggaacuguauucgcuucua

SEQ ID NO: 539882 - RNA, 19 nt, Homo sapiens
  misc_RNA (1)...(19): siRNA sense strand
gcuggagucuggcuaacuu

SEQ ID NO: 539883 - RNA, 19 nt, Homo sapiens
  misc_RNA (1)...(19): siRNA sense strand
gaacugaugaaacuagcaa

SEQ ID NO: 539884 - RNA, 19 nt, Homo sapiens
  misc_RNA (1)...(19): siRNA sense strand
gaacuguauucgcuucuac

SEQ ID NO: 539885 - RNA, 19 nt, Homo sapiens
  misc_RNA (1)...(19): siRNA sense strand
cagaaauuauugcaaguca

SEQ ID NO: 539886 - RNA, 19 nt, Homo sapiens
  misc_RNA (1)...(19): siRNA sense strand
gcugccacuuuccucauua

SEQ ID NO: 539887 - RNA, 19 nt, Homo sapiens
  misc_RNA (1)...(19): siRNA sense strand
cagaugagcuggaguucag

SEQ ID NO: 539888 - RNA, 19 nt, Homo sapiens
  misc_RNA (1)...(19): siRNA sense strand
caacuagauuuagaacuca

SEQ ID NO: 539889 - RNA, 19 nt, Homo sapiens
  misc_RNA (1)...(19): siRNA sense strand
ugagaaggguguuaugucu

SEQ ID NO: 539890 - RNA, 19 nt, Homo sapiens
  misc_RNA (1)...(19): siRNA sense strand
augcuucgcuggaucuaua

SEQ ID NO: 539891 - RNA, 19 nt, Homo sapiens
  misc_RNA (1)...(19): siRNA sense strand
acaacuagauuuagaacuc

SEQ ID NO: 539892 - RNA, 19 nt, Homo sapiens
  misc_RNA (1)...(19): siRNA sense strand
gcuaacuugucuuccacua

SEQ ID NO: 539893 - RNA, 19 nt, Homo sapiens
  misc_RNA (1)...(19): siRNA sense strand
acggagaucuggcauuaga

SEQ ID NO: 539894 - RNA, 19 nt, Homo sapiens
  misc_RNA (1)...(19): siRNA sense strand
ucaaauccaagacagagua

SEQ ID NO: 539895 - RNA, 19 nt, Homo sapiens
  misc_RNA (1)...(19): siRNA sense strand
gaugaacuacugugcagaa

SEQ ID NO: 539896 - RNA, 19 nt, Homo sapiens
  misc_RNA (1)...(19): siRNA sense strand
acacaaaggaauccaaaga

SEQ ID NO: 539897 - RNA, 19 nt, Homo sapiens
  misc_RNA (1)...(19): siRNA sense strand
gaaacacucagcagaugug

SEQ ID NO: 539898 - RNA, 19 nt, Homo sapiens
  misc_RNA (1)...(19): siRNA sense strand
ggcuggagcuuguuacaca

SEQ ID NO: 539899 - RNA, 19 nt, Homo sapiens
  misc_RNA (1)...(19): siRNA sense strand
caaaucgguuucagcuaca

SEQ ID NO: 539900 - RNA, 19 nt, Homo sapiens
  misc_RNA (1)...(19): siRNA sense strand
gggacgaccugaggaagga

SEQ ID NO: 539901 - RNA, 19 nt, Homo sapiens
  misc_RNA (1)...(19): siRNA sense strand
ugacaaugcuucgcuggau

SEQ ID NO: 539902 - RNA, 19 nt, Homo sapiens
  misc_RNA (1)...(19): siRNA sense strand
aagaaacacucagcagaug

SEQ ID NO: 539903 - RNA, 19 nt, Homo sapiens
  misc_RNA (1)...(19): siRNA sense strand
gugaaugucaggaacugua

SEQ ID NO: 539904 - RNA, 19 nt, Homo sapiens
  misc_RNA (1)...(19): siRNA sense strand
aagaguggcuggagcuugu

SEQ ID NO: 539905 - RNA, 19 nt, Homo sapiens
  misc_RNA (1)...(19): siRNA sense strand
acauaaagccaucaaagug

SEQ ID NO: 539906 - RNA, 19 nt, Homo sapiens
  misc_RNA (1)...(19): siRNA sense strand
acagaguacccgcuacaua

SEQ ID NO: 539907 - RNA, 19 nt, Homo sapiens
  misc_RNA (1)...(19): siRNA sense strand
gaggauuucagcagcauga

SEQ ID NO: 539908 - RNA, 19 nt, Homo sapiens
  misc_RNA (1)...(19): siRNA sense strand
cuacugugcagaaauuauu

SEQ ID NO: 539909 - RNA, 19 nt, Homo sapiens
  misc_RNA (1)...(19): siRNA sense strand
agacaccacugcaccuugu

SEQ ID NO: 539910 - RNA, 19 nt, Homo sapiens
  misc_RNA (1)...(19): siRNA sense strand
ggacaugguggacaagagu

SEQ ID NO: 539911 - RNA, 19 nt, Homo sapiens
  misc_RNA (1)...(19): siRNA sense strand
ccaucaaaguggagagaga

SEQ ID NO: 539912 - RNA, 19 nt, Homo sapiens
  misc_RNA (1)...(19): siRNA sense strand
aaagaaacacucagcagau

SEQ ID NO: 539913 - RNA, 19 nt, Homo sapiens
  misc_RNA (1)...(19): siRNA sense strand
uguuaugucucuagugaau

SEQ ID NO: 539914 - RNA, 19 nt, Homo sapiens
  misc_RNA (1)...(19): siRNA sense strand
cacgacgacuggagaguau

SEQ ID NO: 539915 - RNA, 19 nt, Homo sapiens
  misc_RNA (1)...(19): siRNA sense strand
gacguggucuuccuguauc

SEQ ID NO: 539916 - RNA, 19 nt, Homo sapiens
  misc_RNA (1)...(19): siRNA sense strand
ucagagaggaugauguguu

SEQ ID NO: 539917 - RNA, 19 nt, Homo sapiens
  misc_RNA (1)...(19): siRNA sense strand
ugaugaaacuagcaaaucg

SEQ ID NO: 539918 - RNA, 19 nt, Homo sapiens
  misc_RNA (1)...(19): siRNA sense strand
guucagagaggaugaugug

SEQ ID NO: 539919 - RNA, 19 nt, Homo sapiens
  misc_RNA (1)...(19): siRNA sense strand
acacucagcagaugugaug

SEQ ID NO: 539920 - RNA, 19 nt, Homo sapiens
  misc_RNA (1)...(19): siRNA sense strand
cuuguacaguucaaagaaa

SEQ ID NO: 539921 - RNA, 19 nt, Homo sapiens
  misc_RNA (1)...(19): siRNA sense strand
gaaggguguuaugucucua

SEQ ID NO: 539922 - RNA, 19 nt, Homo sapiens
  misc_RNA (1)...(19): siRNA sense strand
agaaggguguuaugucucu

SEQ ID NO: 539923 - RNA, 19 nt, Homo sapiens
  misc_RNA (1)...(19): siRNA sense strand
gcagugcaaacaacuagau

SEQ ID NO: 539924 - RNA, 19 nt, Homo sapiens
  misc_RNA (1)...(19): siRNA sense strand
ggaccugucagaugcuaau

SEQ ID NO: 539925 - RNA, 19 nt, Homo sapiens
  misc_RNA (1)...(19): siRNA sense strand
ucacgacgacuggagagua

SEQ ID NO: 539926 - RNA, 19 nt, Homo sapiens
  misc_RNA (1)...(19): siRNA sense strand
uuaugucucuagugaaugu

SEQ ID NO: 539927 - RNA, 19 nt, Homo sapiens
  misc_RNA (1)...(19): siRNA sense strand
gaguuggaccugucagaug

SEQ ID NO: 539928 - RNA, 19 nt, Homo sapiens
  misc_RNA (1)...(19): siRNA sense strand
gaagauguccccgugguaa

SEQ ID NO: 539929 - RNA, 19 nt, Homo sapiens
  misc_RNA (1)...(19): siRNA sense strand
ucucuuugcugccacuuuc

SEQ ID NO: 539930 - RNA, 19 nt, Homo sapiens
  misc_RNA (1)...(19): siRNA sense strand
cuacauaaagccaucaaag

SEQ ID NO: 539931 - RNA, 19 nt, Homo sapiens
  misc_RNA (1)...(19): siRNA sense strand
gagucuggcuaacuugucu

SEQ ID NO: 539932 - RNA, 19 nt, Homo sapiens
  misc_RNA (1)...(19): siRNA sense strand
gagcaguacagcgaucuga

SEQ ID NO: 539933 - RNA, 19 nt, Homo sapiens
  misc_RNA (1)...(19): siRNA sense strand
ucuacgagcaggagcagua

SEQ ID NO: 539934 - RNA, 19 nt, Homo sapiens
  misc_RNA (1)...(19): siRNA sense strand
gcaguacagcgaucugaag

SEQ ID NO: 539935 - RNA, 19 nt, Homo sapiens
  misc_RNA (1)...(19): siRNA sense strand
cuuguggccuuguacaguu

SEQ ID NO: 539936 - RNA, 19 nt, Homo sapiens
  misc_RNA (1)...(19): siRNA sense strand
gaugugagaaggguguuau

SEQ ID NO: 539937 - RNA, 19 nt, Homo sapiens
  misc_RNA (1)...(19): siRNA sense strand
uuacacaaaggaauccaaa

SEQ ID NO: 539938 - RNA, 19 nt, Homo sapiens
  misc_RNA (1)...(19): siRNA sense strand
cgacgacuggagaguauug

SEQ ID NO: 539939 - RNA, 19 nt, Homo sapiens
  misc_RNA (1)...(19): siRNA sense strand
uccuguaucugauugaaau

SEQ ID NO: 539940 - RNA, 19 nt, Homo sapiens
  misc_RNA (1)...(19): siRNA sense strand
gcagaaauuauugcaaguc

SEQ ID NO: 539941 - RNA, 19 nt, Homo sapiens
  misc_RNA (1)...(19): siRNA sense strand
gaaugucaggaacuguauu

SEQ ID NO: 539942 - RNA, 19 nt, Homo sapiens
  misc_RNA (1)...(19): siRNA sense strand
agaguacccgcuacauaaa

SEQ ID NO: 539943 - RNA, 19 nt, Homo sapiens
  misc_RNA (1)...(19): siRNA sense strand
caucaaaguggagagagaa

SEQ ID NO: 539944 - RNA, 19 nt, Homo sapiens
  misc_RNA (1)...(19): siRNA sense strand
ggagacaccacugcaccuu

SEQ ID NO: 539945 - RNA, 19 nt, Homo sapiens
  misc_RNA (1)...(19): siRNA sense strand
gaguggcuggagcuuguua

SEQ ID NO: 539946 - RNA, 19 nt, Homo sapiens
  misc_RNA (1)...(19): siRNA sense strand
augucaagcugcagaagaa

SEQ ID NO: 539947 - RNA, 19 nt, Homo sapiens
  misc_RNA (1)...(19): siRNA sense strand
ggucuuccuguaucugauu

SEQ ID NO: 539948 - RNA, 19 nt, Homo sapiens
  misc_RNA (1)...(19): siRNA sense strand
auacagaugagcuggaguu

SEQ ID NO: 539949 - RNA, 19 nt, Homo sapiens
  misc_RNA (1)...(19): siRNA sense strand
uacauaaagccaucaaagu

SEQ ID NO: 539950 - RNA, 19 nt, Homo sapiens
  misc_RNA (1)...(19): siRNA sense strand
cuaacuugucuuccacuaa

SEQ ID NO: 539951 - RNA, 19 nt, Homo sapiens
  misc_RNA (1)...(19): siRNA sense strand
cugccacuuuccucauuaa

SEQ ID NO: 539952 - RNA, 19 nt, Homo sapiens
  misc_RNA (1)...(19): siRNA sense strand
uaaagaguuggaccuguca

SEQ ID NO: 539953 - RNA, 19 nt, Homo sapiens
  misc_RNA (1)...(19): siRNA sense strand
gccacuuuccucauuaaga

SEQ ID NO: 539954 - RNA, 19 nt, Homo sapiens
  misc_RNA (1)...(19): siRNA sense strand
cagcagcgaguccuucauc

SEQ ID NO: 539955 - RNA, 19 nt, Homo sapiens
  misc_RNA (1)...(19): siRNA sense strand
cugaaugccagcacacuga

SEQ ID NO: 539956 - RNA, 19 nt, Homo sapiens
  misc_RNA (1)...(19): siRNA sense strand
gaagaggagguggccaagu

SEQ ID NO: 539957 - RNA, 19 nt, Homo sapiens
  misc_RNA (1)...(19): siRNA sense strand
cagcauaucacagugucuu

SEQ ID NO: 539958 - RNA, 19 nt, Homo sapiens
  misc_RNA (1)...(19): siRNA sense strand
gaggugacgaugacaaugc

SEQ ID NO: 539959 - RNA, 19 nt, Homo sapiens
  misc_RNA (1)...(19): siRNA sense strand
caucguggcagaccucuac

SEQ ID NO: 539960 - RNA, 19 nt, Homo sapiens
  misc_RNA (1)...(19): siRNA sense strand
guaucugauugaaauggau

SEQ ID NO: 539961 - RNA, 19 nt, Homo sapiens
  misc_RNA (1)...(19): siRNA sense strand
uguaucugauugaaaugga

SEQ ID NO: 539962 - RNA, 19 nt, Homo sapiens
  misc_RNA (1)...(19): siRNA sense strand
gugagaaggguguuauguc

SEQ ID NO: 539963 - RNA, 19 nt, Homo sapiens
  misc_RNA (1)...(19): siRNA sense strand
caguacagcgaucugaaga

SEQ ID NO: 539964 - RNA, 19 nt, Homo sapiens
  misc_RNA (1)...(19): siRNA sense strand
ccacgcugguuagucacaa

SEQ ID NO: 539965 - RNA, 19 nt, Homo sapiens
  misc_RNA (1)...(19): siRNA sense strand
caacacaaauuauggcaaa

SEQ ID NO: 539966 - RNA, 19 nt, Homo sapiens
  misc_RNA (1)...(19): siRNA sense strand
gaacaccguuacccaauga

SEQ ID NO: 539967 - RNA, 19 nt, Homo sapiens
  misc_RNA (1)...(19): siRNA sense strand
ccaccgagcucuucaguug

SEQ ID NO: 539968 - RNA, 19 nt, Homo sapiens
  misc_RNA (1)...(19): siRNA sense strand
cgaauuaagugucaccauu

SEQ ID NO: 539969 - RNA, 19 nt, Homo sapiens
  misc_RNA (1)...(19): siRNA sense strand
gaagacugccuuuacuuaa

SEQ ID NO: 539970 - RNA, 19 nt, Homo sapiens
  misc_RNA (1)...(19): siRNA sense strand
gaccagcucuaucugcaua

SEQ ID NO: 539971 - RNA, 19 nt, Homo sapiens
  misc_RNA (1)...(19): siRNA sense strand
caaguacacucggauauug

SEQ ID NO: 539972 - RNA, 19 nt, Homo sapiens
  misc_RNA (1)...(19): siRNA sense strand
gaaguggccugguccaagu

SEQ ID NO: 539973 - RNA, 19 nt, Homo sapiens
  misc_RNA (1)...(19): siRNA sense strand
gaucaugucucugcagaug

SEQ ID NO: 539974 - RNA, 19 nt, Homo sapiens
  misc_RNA (1)...(19): siRNA sense strand
ugaacgagauauuccagua

SEQ ID NO: 539975 - RNA, 19 nt, Homo sapiens
  misc_RNA (1)...(19): siRNA sense strand
uaacugcucuugccaucaa

SEQ ID NO: 539976 - RNA, 19 nt, Homo sapiens
  misc_RNA (1)...(19): siRNA sense strand
uaacuaccgucugggaaua

SEQ ID NO: 539977 - RNA, 19 nt, Homo sapiens
  misc_RNA (1)...(19): siRNA sense strand
ggacaaaacaguacaaauu

SEQ ID NO: 539978 - RNA, 19 nt, Homo sapiens
  misc_RNA (1)...(19): siRNA sense strand
caaaugauaucgcucacau

SEQ ID NO: 539979 - RNA, 19 nt, Homo sapiens
  misc_RNA (1)...(19): siRNA sense strand
ccacggacaugguagaaug

SEQ ID NO: 539980 - RNA, 19 nt, Homo sapiens
  misc_RNA (1)...(19): siRNA sense strand
ggacugcuauggcuuccuu

SEQ ID NO: 539981 - RNA, 19 nt, Homo sapiens
  misc_RNA (1)...(19): siRNA sense strand
acacaacuguccucauuga

SEQ ID NO: 539982 - RNA, 19 nt, Homo sapiens
  misc_RNA (1)...(19): siRNA sense strand
ugaagacugccuuuacuua

SEQ ID NO: 539983 - RNA, 19 nt, Homo sapiens
  misc_RNA (1)...(19): siRNA sense strand
agaaacaccacaaaugaua

SEQ ID NO: 539984 - RNA, 19 nt, Homo sapiens
  misc_RNA (1)...(19): siRNA sense strand
ccaaguucauucacacaaa

SEQ ID NO: 539985 - RNA, 19 nt, Homo sapiens
  misc_RNA (1)...(19): siRNA sense strand
gaauuaagugucaccauug

SEQ ID NO: 539986 - RNA, 19 nt, Homo sapiens
  misc_RNA (1)...(19): siRNA sense strand
ggaacaagaacuacaagga

SEQ ID NO: 539987 - RNA, 19 nt, Homo sapiens
  misc_RNA (1)...(19): siRNA sense strand
ccaaacaccaucaccauga

SEQ ID NO: 539988 - RNA, 19 nt, Homo sapiens
  misc_RNA (1)...(19): siRNA sense strand
ccgaaauacuacucaguuu

SEQ ID NO: 539989 - RNA, 19 nt, Homo sapiens
  misc_RNA (1)...(19): siRNA sense strand
agagaaacaccacaaauga

SEQ ID NO: 539990 - RNA, 19 nt, Homo sapiens
  misc_RNA (1)...(19): siRNA sense strand
gacaagaggcgccaugaga

SEQ ID NO: 539991 - RNA, 19 nt, Homo sapiens
  misc_RNA (1)...(19): siRNA sense strand
cuacuucuaugccuucuau

SEQ ID NO: 539992 - RNA, 19 nt, Homo sapiens
  misc_RNA (1)...(19): siRNA sense strand
ugaccuauguucaagauca

SEQ ID NO: 539993 - RNA, 19 nt, Homo sapiens
  misc_RNA (1)...(19): siRNA sense strand
caauuuggauacuuugaug

SEQ ID NO: 539994 - RNA, 19 nt, Homo sapiens
  misc_RNA (1)...(19): siRNA sense strand
gaugaccuauguucaagau

SEQ ID NO: 539995 - RNA, 19 nt, Homo sapiens
  misc_RNA (1)...(19): siRNA sense strand
gagauauuccaguauguuu

SEQ ID NO: 539996 - RNA, 19 nt, Homo sapiens
  misc_RNA (1)...(19): siRNA sense strand
gcacaacuugaacgagaua

SEQ ID NO: 539997 - RNA, 19 nt, Homo sapiens
  misc_RNA (1)...(19): siRNA sense strand
ccaauguccuccugugguu

SEQ ID NO: 539998 - RNA, 19 nt, Homo sapiens
  misc_RNA (1)...(19): siRNA sense strand
gaacgaagagaucaugucu

SEQ ID NO: 539999 - RNA, 19 nt, Homo sapiens
  misc_RNA (1)...(19): siRNA sense strand
gaaacaccacaaaugauau

SEQ ID NO: 540000 - RNA, 19 nt, Homo sapiens
  misc_RNA (1)...(19): siRNA sense strand
guaagaagcccgucauggu

SEQ ID NO: 540001 - RNA, 19 nt, Homo sapiens
  misc_RNA (1)...(19): siRNA sense strand
gaacgagauauuccaguau

SEQ ID NO: 540002 - RNA, 19 nt, Homo sapiens
  misc_RNA (1)...(19): siRNA sense strand
ccaaagaccagcucuaucu

SEQ ID NO: 540003 - RNA, 19 nt, Homo sapiens
  misc_RNA (1)...(19): siRNA sense strand
ccaaguauaaucccaaaga

SEQ ID NO: 540004 - RNA, 19 nt, Homo sapiens
  misc_RNA (1)...(19): siRNA sense strand
gcuauggcuuccuuuguug

SEQ ID NO: 540005 - RNA, 19 nt, Homo sapiens
  misc_RNA (1)...(19): siRNA sense strand
ggacuggcauccgaaauac

SEQ ID NO: 540006 - RNA, 19 nt, Homo sapiens
  misc_RNA (1)...(19): siRNA sense strand
gaaaccaaacgagauuauu

SEQ ID NO: 540007 - RNA, 19 nt, Homo sapiens
  misc_RNA (1)...(19): siRNA sense strand
gaaauacuacucaguuugc

SEQ ID NO: 540008 - RNA, 19 nt, Homo sapiens
  misc_RNA (1)...(19): siRNA sense strand
caacuguccucauugaaac

SEQ ID NO: 540009 - RNA, 19 nt, Homo sapiens
  misc_RNA (1)...(19): siRNA sense strand
gauaccaaguucauucaca

SEQ ID NO: 540010 - RNA, 19 nt, Homo sapiens
  misc_RNA (1)...(19): siRNA sense strand
ugacaucauuucccuaugg

SEQ ID NO: 540011 - RNA, 19 nt, Homo sapiens
  misc_RNA (1)...(19): siRNA sense strand
cagagaaacaccacaaaug

SEQ ID NO: 540012 - RNA, 19 nt, Homo sapiens
  misc_RNA (1)...(19): siRNA sense strand
gagaaacaccacaaaugau

SEQ ID NO: 540013 - RNA, 19 nt, Homo sapiens
  misc_RNA (1)...(19): siRNA sense strand
caaccgcuuugaagaagug

SEQ ID NO: 540014 - RNA, 19 nt, Homo sapiens
  misc_RNA (1)...(19): siRNA sense strand
uagaaugccugcggaacaa

SEQ ID NO: 540015 - RNA, 19 nt, Homo sapiens
  misc_RNA (1)...(19): siRNA sense strand
ucaaguucauguacacaga

SEQ ID NO: 540016 - RNA, 19 nt, Homo sapiens
  misc_RNA (1)...(19): siRNA sense strand
cgaaauacuacucaguuug

SEQ ID NO: 540017 - RNA, 19 nt, Homo sapiens
  misc_RNA (1)...(19): siRNA sense strand
caacuugaacgagauauuc

SEQ ID NO: 540018 - RNA, 19 nt, Homo sapiens
  misc_RNA (1)...(19): siRNA sense strand
caagcacaguauccaguug

SEQ ID NO: 540019 - RNA, 19 nt, Homo sapiens
  misc_RNA (1)...(19): siRNA sense strand
gcgggagacuaucaaguuc

SEQ ID NO: 540020 - RNA, 19 nt, Homo sapiens
  misc_RNA (1)...(19): siRNA sense strand
gggaaggccugaaguucgu

SEQ ID NO: 540021 - RNA, 19 nt, Homo sapiens
  misc_RNA (1)...(19): siRNA sense strand
agacugggccgauaaggaa

SEQ ID NO: 540022 - RNA, 19 nt, Homo sapiens
  misc_RNA (1)...(19): siRNA sense strand
auacuuugaugaccuaugu

SEQ ID NO: 540023 - RNA, 19 nt, Homo sapiens
  misc_RNA (1)...(19): siRNA sense strand
gauauuccaguauguuuca

SEQ ID NO: 540024 - RNA, 19 nt, Homo sapiens
  misc_RNA (1)...(19): siRNA sense strand
ccaaguacacucggauauu

SEQ ID NO: 540025 - RNA, 19 nt, Homo sapiens
  misc_RNA (1)...(19): siRNA sense strand
acuaugggcuccuggauca

SEQ ID NO: 540026 - RNA, 19 nt, Homo sapiens
  misc_RNA (1)...(19): siRNA sense strand
caaggucggcugcaacaug

SEQ ID NO: 540027 - RNA, 19 nt, Homo sapiens
  misc_RNA (1)...(19): siRNA sense strand
aaaccaaacgagauuauuc

SEQ ID NO: 540028 - RNA, 19 nt, Homo sapiens
  misc_RNA (1)...(19): siRNA sense strand
ccacggaagaugauauuca

SEQ ID NO: 540029 - RNA, 19 nt, Homo sapiens
  misc_RNA (1)...(19): siRNA sense strand
gaccuauguucaagaucaa

SEQ ID NO: 540030 - RNA, 19 nt, Homo sapiens
  misc_RNA (1)...(19): siRNA sense strand
acaacuguccucauugaaa

SEQ ID NO: 540031 - RNA, 19 nt, Homo sapiens
  misc_RNA (1)...(19): siRNA sense strand
gggagacuaucaaguucau

SEQ ID NO: 540032 - RNA, 19 nt, Homo sapiens
  misc_RNA (1)...(19): siRNA sense strand
gcccaacgacuuugacuuc

SEQ ID NO: 540033 - RNA, 19 nt, Homo sapiens
  misc_RNA (1)...(19): siRNA sense strand
guagaaugccugcggaaca

SEQ ID NO: 540034 - RNA, 19 nt, Homo sapiens
  misc_RNA (1)...(19): siRNA sense strand
cagaaggccaucauucaga

SEQ ID NO: 540035 - RNA, 19 nt, Homo sapiens
  misc_RNA (1)...(19): siRNA sense strand
ugagagauccuuacugcau

SEQ ID NO: 540036 - RNA, 19 nt, Homo sapiens
  misc_RNA (1)...(19): siRNA sense strand
ggacauuccaccacuagag

SEQ ID NO: 540037 - RNA, 19 nt, Homo sapiens
  misc_RNA (1)...(19): siRNA sense strand
guccaaguauaaucccaaa

SEQ ID NO: 540038 - RNA, 19 nt, Homo sapiens
  misc_RNA (1)...(19): siRNA sense strand
gagacuaucaaguucaugu

SEQ ID NO: 540039 - RNA, 19 nt, Homo sapiens
  misc_RNA (1)...(19): siRNA sense strand
ucaucgugaucaccauuaa

SEQ ID NO: 540040 - RNA, 19 nt, Homo sapiens
  misc_RNA (1)...(19): siRNA sense strand
ggaaacgucaucgugauca

SEQ ID NO: 540041 - RNA, 19 nt, Homo sapiens
  misc_RNA (1)...(19): siRNA sense strand
gcaccggcaacaugauuga

SEQ ID NO: 540042 - RNA, 19 nt, Homo sapiens
  misc_RNA (1)...(19): siRNA sense strand
gauccuuacugcaugacau

SEQ ID NO: 540043 - RNA, 19 nt, Homo sapiens
  misc_RNA (1)...(19): siRNA sense strand
ccagagaaacaccacaaau

SEQ ID NO: 540044 - RNA, 19 nt, Homo sapiens
  misc_RNA (1)...(19): siRNA sense strand
accgagcucuucaguugua

SEQ ID NO: 540045 - RNA, 19 nt, Homo sapiens
  misc_RNA (1)...(19): siRNA sense strand
uggacuggcauccgaaaua

SEQ ID NO: 540046 - RNA, 19 nt, Homo sapiens
  misc_RNA (1)...(19): siRNA sense strand
acacagacugggccgauaa

SEQ ID NO: 540047 - RNA, 19 nt, Homo sapiens
  misc_RNA (1)...(19): siRNA sense strand
ggagaaugugggagccuuu

SEQ ID NO: 540048 - RNA, 19 nt, Homo sapiens
  misc_RNA (1)...(19): siRNA sense strand
gagggcaccggcaacauga

SEQ ID NO: 540049 - RNA, 19 nt, Homo sapiens
  misc_RNA (1)...(19): siRNA sense strand
agagauccuuacugcauga

SEQ ID NO: 540050 - RNA, 19 nt, Homo sapiens
  misc_RNA (1)...(19): siRNA sense strand
gauauggccaaccaccaaa

SEQ ID NO: 540051 - RNA, 19 nt, Homo sapiens
  misc_RNA (1)...(19): siRNA sense strand
ugcuauggcuuccuuuguu

SEQ ID NO: 540052 - RNA, 19 nt, Homo sapiens
  misc_RNA (1)...(19): siRNA sense strand
agaacaccguuacccaaug

SEQ ID NO: 540053 - RNA, 19 nt, Homo sapiens
  misc_RNA (1)...(19): siRNA sense strand
caacaaucccaaacacucu

SEQ ID NO: 540054 - RNA, 19 nt, Homo sapiens
  misc_RNA (1)...(19): siRNA sense strand
caaguauaaucccaaagac

SEQ ID NO: 540055 - RNA, 19 nt, Homo sapiens
  misc_RNA (1)...(19): siRNA sense strand
caaguucauucacacaaaa

SEQ ID NO: 540056 - RNA, 19 nt, Homo sapiens
  misc_RNA (1)...(19): siRNA sense strand
uggauacuuugaugaccua

SEQ ID NO: 540057 - RNA, 19 nt, Homo sapiens
  misc_RNA (1)...(19): siRNA sense strand
aacgagauauuccaguaug

SEQ ID NO: 540058 - RNA, 19 nt, Homo sapiens
  misc_RNA (1)...(19): siRNA sense strand
ccagcucuaucugcauauu

SEQ ID NO: 540059 - RNA, 19 nt, Homo sapiens
  misc_RNA (1)...(19): siRNA sense strand
caggauaccaaguucauuc

SEQ ID NO: 540060 - RNA, 19 nt, Homo sapiens
  misc_RNA (1)...(19): siRNA sense strand
ugguggcucucuuuacuga

SEQ ID NO: 540061 - RNA, 19 nt, Homo sapiens
  misc_RNA (1)...(19): siRNA sense strand
uggacggcaucguggauaa

SEQ ID NO: 540062 - RNA, 19 nt, Homo sapiens
  misc_RNA (1)...(19): siRNA sense strand
ugacagccaagcacaguau

SEQ ID NO: 540063 - RNA, 19 nt, Homo sapiens
  misc_RNA (1)...(19): siRNA sense strand
caaaacuggugauccaaau

SEQ ID NO: 540064 - RNA, 19 nt, Homo sapiens
  misc_RNA (1)...(19): siRNA sense strand
uaaggacccucacaaaaca

SEQ ID NO: 540065 - RNA, 19 nt, Homo sapiens
  misc_RNA (1)...(19): siRNA sense strand
caacacaaauuauggcaaa

SEQ ID NO: 540066 - RNA, 19 nt, Homo sapiens
  misc_RNA (1)...(19): siRNA sense strand
gaacaccguuacccaauga

SEQ ID NO: 540067 - RNA, 19 nt, Homo sapiens
  misc_RNA (1)...(19): siRNA sense strand
ccaccgagcucuucaguug

SEQ ID NO: 540068 - RNA, 19 nt, Homo sapiens
  misc_RNA (1)...(19): siRNA sense strand
cgaauuaagugucaccauu

SEQ ID NO: 540069 - RNA, 19 nt, Homo sapiens
  misc_RNA (1)...(19): siRNA sense strand
gaagacugccuuuacuuaa

SEQ ID NO: 540070 - RNA, 19 nt, Homo sapiens
  misc_RNA (1)...(19): siRNA sense strand
gaccagcucuaucugcaua

SEQ ID NO: 540071 - RNA, 19 nt, Homo sapiens
  misc_RNA (1)...(19): siRNA sense strand
caaguacacucggauauug

SEQ ID NO: 540072 - RNA, 19 nt, Homo sapiens
  misc_RNA (1)...(19): siRNA sense strand
gaaguggccugguccaagu

SEQ ID NO: 540073 - RNA, 19 nt, Homo sapiens
  misc_RNA (1)...(19): siRNA sense strand
gaucaugucucugcagaug

SEQ ID NO: 540074 - RNA, 19 nt, Homo sapiens
  misc_RNA (1)...(19): siRNA sense strand
ugaacgagauauuccagua

SEQ ID NO: 540075 - RNA, 19 nt, Homo sapiens
  misc_RNA (1)...(19): siRNA sense strand
uaacugcucuugccaucaa

SEQ ID NO: 540076 - RNA, 19 nt, Homo sapiens
  misc_RNA (1)...(19): siRNA sense strand
uaacuaccgucugggaaua

SEQ ID NO: 540077 - RNA, 19 nt, Homo sapiens
  misc_RNA (1)...(19): siRNA sense strand
ggacaaaacaguacaaauu

SEQ ID NO: 540078 - RNA, 19 nt, Homo sapiens
  misc_RNA (1)...(19): siRNA sense strand
caaaugauaucgcucacau

SEQ ID NO: 540079 - RNA, 19 nt, Homo sapiens
  misc_RNA (1)...(19): siRNA sense strand
ccacggacaugguagaaug

SEQ ID NO: 540080 - RNA, 19 nt, Homo sapiens
  misc_RNA (1)...(19): siRNA sense strand
ggacugcuauggcuuccuu

SEQ ID NO: 540081 - RNA, 19 nt, Homo sapiens
  misc_RNA (1)...(19): siRNA sense strand
acacaacuguccucauuga

SEQ ID NO: 540082 - RNA, 19 nt, Homo sapiens
  misc_RNA (1)...(19): siRNA sense strand
ugaagacugccuuuacuua

SEQ ID NO: 540083 - RNA, 19 nt, Homo sapiens
  misc_RNA (1)...(19): siRNA sense strand
agaaacaccacaaaugaua

SEQ ID NO: 540084 - RNA, 19 nt, Homo sapiens
  misc_RNA (1)...(19): siRNA sense strand
ccaaguucauucacacaaa

SEQ ID NO: 540085 - RNA, 19 nt, Homo sapiens
  misc_RNA (1)...(19): siRNA sense strand
gaauuaagugucaccauug

SEQ ID NO: 540086 - RNA, 19 nt, Homo sapiens
  misc_RNA (1)...(19): siRNA sense strand
ggaacaagaacuacaagga

SEQ ID NO: 540087 - RNA, 19 nt, Homo sapiens
  misc_RNA (1)...(19): siRNA sense strand
ccaaacaccaucaccauga

SEQ ID NO: 540088 - RNA, 19 nt, Homo sapiens
  misc_RNA (1)...(19): siRNA sense strand
ccgaaauacuacucaguuu

SEQ ID NO: 540089 - RNA, 19 nt, Homo sapiens
  misc_RNA (1)...(19): siRNA sense strand
agagaaacaccacaaauga

SEQ ID NO: 540090 - RNA, 19 nt, Homo sapiens
  misc_RNA (1)...(19): siRNA sense strand
gacaagaggcgccaugaga

SEQ ID NO: 540091 - RNA, 19 nt, Homo sapiens
  misc_RNA (1)...(19): siRNA sense strand
cuacuucuaugccuucuau

SEQ ID NO: 540092 - RNA, 19 nt, Homo sapiens
  misc_RNA (1)...(19): siRNA sense strand
ugaccuauguucaagauca

SEQ ID NO: 540093 - RNA, 19 nt, Homo sapiens
  misc_RNA (1)...(19): siRNA sense strand
caauuuggauacuuugaug

SEQ ID NO: 540094 - RNA, 19 nt, Homo sapiens
  misc_RNA (1)...(19): siRNA sense strand
gaugaccuauguucaagau

SEQ ID NO: 540095 - RNA, 19 nt, Homo sapiens
  misc_RNA (1)...(19): siRNA sense strand
gagauauuccaguauguuu

SEQ ID NO: 540096 - RNA, 19 nt, Homo sapiens
  misc_RNA (1)...(19): siRNA sense strand
gcacaacuugaacgagaua

SEQ ID NO: 540097 - RNA, 19 nt, Homo sapiens
  misc_RNA (1)...(19): siRNA sense strand
ccaauguccuccugugguu

SEQ ID NO: 540098 - RNA, 19 nt, Homo sapiens
  misc_RNA (1)...(19): siRNA sense strand
gaacgaagagaucaugucu

SEQ ID NO: 540099 - RNA, 19 nt, Homo sapiens
  misc_RNA (1)...(19): siRNA sense strand
gaaacaccacaaaugauau

SEQ ID NO: 540100 - RNA, 19 nt, Homo sapiens
  misc_RNA (1)...(19): siRNA sense strand
guaagaagcccgucauggu

SEQ ID NO: 540101 - RNA, 19 nt, Homo sapiens
  misc_RNA (1)...(19): siRNA sense strand
gaacgagauauuccaguau

SEQ ID NO: 540102 - RNA, 19 nt, Homo sapiens
  misc_RNA (1)...(19): siRNA sense strand
ccaaagaccagcucuaucu

SEQ ID NO: 540103 - RNA, 19 nt, Homo sapiens
  misc_RNA (1)...(19): siRNA sense strand
ccaaguauaaucccaaaga

SEQ ID NO: 540104 - RNA, 19 nt, Homo sapiens
  misc_RNA (1)...(19): siRNA sense strand
gcuauggcuuccuuuguug

SEQ ID NO: 540105 - RNA, 19 nt, Homo sapiens
  misc_RNA (1)...(19): siRNA sense strand
ggacuggcauccgaaauac

SEQ ID NO: 540106 - RNA, 19 nt, Homo sapiens
  misc_RNA (1)...(19): siRNA sense strand
gaaaccaaacgagauuauu

SEQ ID NO: 540107 - RNA, 19 nt, Homo sapiens
  misc_RNA (1)...(19): siRNA sense strand
gaaauacuacucaguuugc

SEQ ID NO: 540108 - RNA, 19 nt, Homo sapiens
  misc_RNA (1)...(19): siRNA sense strand
caacuguccucauugaaac

SEQ ID NO: 540109 - RNA, 19 nt, Homo sapiens
  misc_RNA (1)...(19): siRNA sense strand
gauaccaaguucauucaca

SEQ ID NO: 540110 - RNA, 19 nt, Homo sapiens
  misc_RNA (1)...(19): siRNA sense strand
ugacaucauuucccuaugg

SEQ ID NO: 540111 - RNA, 19 nt, Homo sapiens
  misc_RNA (1)...(19): siRNA sense strand
cagagaaacaccacaaaug

SEQ ID NO: 540112 - RNA, 19 nt, Homo sapiens
  misc_RNA (1)...(19): siRNA sense strand
gagaaacaccacaaaugau

SEQ ID NO: 540113 - RNA, 19 nt, Homo sapiens
  misc_RNA (1)...(19): siRNA sense strand
caaccgcuuugaagaagug

SEQ ID NO: 540114 - RNA, 19 nt, Homo sapiens
  misc_RNA (1)...(19): siRNA sense strand
uagaaugccugcggaacaa

SEQ ID NO: 540115 - RNA, 19 nt, Homo sapiens
  misc_RNA (1)...(19): siRNA sense strand
ucaaguucauguacacaga

SEQ ID NO: 540116 - RNA, 19 nt, Homo sapiens
  misc_RNA (1)...(19): siRNA sense strand
cgaaauacuacucaguuug

SEQ ID NO: 540117 - RNA, 19 nt, Homo sapiens
  misc_RNA (1)...(19): siRNA sense strand
caacuugaacgagauauuc

SEQ ID NO: 540118 - RNA, 19 nt, Homo sapiens
  misc_RNA (1)...(19): siRNA sense strand
caagcacaguauccaguug

SEQ ID NO: 540119 - RNA, 19 nt, Homo sapiens
  misc_RNA (1)...(19): siRNA sense strand
gcgggagacuaucaaguuc

SEQ ID NO: 540120 - RNA, 19 nt, Homo sapiens
  misc_RNA (1)...(19): siRNA sense strand
gggaaggccugaaguucgu

SEQ ID NO: 540121 - RNA, 19 nt, Homo sapiens
  misc_RNA (1)...(19): siRNA sense strand
agacugggccgauaaggaa

SEQ ID NO: 540122 - RNA, 19 nt, Homo sapiens
  misc_RNA (1)...(19): siRNA sense strand
auacuuugaugaccuaugu

SEQ ID NO: 540123 - RNA, 19 nt, Homo sapiens
  misc_RNA (1)...(19): siRNA sense strand
gauauuccaguauguuuca

SEQ ID NO: 540124 - RNA, 19 nt, Homo sapiens
  misc_RNA (1)...(19): siRNA sense strand
ccaaguacacucggauauu

SEQ ID NO: 540125 - RNA, 19 nt, Homo sapiens
  misc_RNA (1)...(19): siRNA sense strand
acuaugggcuccuggauca

SEQ ID NO: 540126 - RNA, 19 nt, Homo sapiens
  misc_RNA (1)...(19): siRNA sense strand
caaggucggcugcaacaug

SEQ ID NO: 540127 - RNA, 19 nt, Homo sapiens
  misc_RNA (1)...(19): siRNA sense strand
aaaccaaacgagauuauuc

SEQ ID NO: 540128 - RNA, 19 nt, Homo sapiens
  misc_RNA (1)...(19): siRNA sense strand
ccacggaagaugauauuca

SEQ ID NO: 540129 - RNA, 19 nt, Homo sapiens
  misc_RNA (1)...(19): siRNA sense strand
gaccuauguucaagaucaa

SEQ ID NO: 540130 - RNA, 19 nt, Homo sapiens
  misc_RNA (1)...(19): siRNA sense strand
acaacuguccucauugaaa

SEQ ID NO: 540131 - RNA, 19 nt, Homo sapiens
  misc_RNA (1)...(19): siRNA sense strand
gggagacuaucaaguucau

SEQ ID NO: 540132 - RNA, 19 nt, Homo sapiens
  misc_RNA (1)...(19): siRNA sense strand
gcccaacgacuuugacuuc

SEQ ID NO: 540133 - RNA, 19 nt, Homo sapiens
  misc_RNA (1)...(19): siRNA sense strand
guagaaugccugcggaaca

SEQ ID NO: 540134 - RNA, 19 nt, Homo sapiens
  misc_RNA (1)...(19): siRNA sense strand
cagaaggccaucauucaga

SEQ ID NO: 540135 - RNA, 19 nt, Homo sapiens
  misc_RNA (1)...(19): siRNA sense strand
ugagagauccuuacugcau

SEQ ID NO: 540136 - RNA, 19 nt, Homo sapiens
  misc_RNA (1)...(19): siRNA sense strand
ggacauuccaccacuagag

SEQ ID NO: 540137 - RNA, 19 nt, Homo sapiens
  misc_RNA (1)...(19): siRNA sense strand
guccaaguauaaucccaaa

SEQ ID NO: 540138 - RNA, 19 nt, Homo sapiens
  misc_RNA (1)...(19): siRNA sense strand
gagacuaucaaguucaugu

SEQ ID NO: 540139 - RNA, 19 nt, Homo sapiens
  misc_RNA (1)...(19): siRNA sense strand
ucaucgugaucaccauuaa

SEQ ID NO: 540140 - RNA, 19 nt, Homo sapiens
  misc_RNA (1)...(19): siRNA sense strand
ggaaacgucaucgugauca

SEQ ID NO: 540141 - RNA, 19 nt, Homo sapiens
  misc_RNA (1)...(19): siRNA sense strand
gcaccggcaacaugauuga

SEQ ID NO: 540142 - RNA, 19 nt, Homo sapiens
  misc_RNA (1)...(19): siRNA sense strand
gauccuuacugcaugacau

SEQ ID NO: 540143 - RNA, 19 nt, Homo sapiens
  misc_RNA (1)...(19): siRNA sense strand
ccagagaaacaccacaaau

SEQ ID NO: 540144 - RNA, 19 nt, Homo sapiens
  misc_RNA (1)...(19): siRNA sense strand
accgagcucuucaguugua

SEQ ID NO: 540145 - RNA, 19 nt, Homo sapiens
  misc_RNA (1)...(19): siRNA sense strand
uggacuggcauccgaaaua

SEQ ID NO: 540146 - RNA, 19 nt, Homo sapiens
  misc_RNA (1)...(19): siRNA sense strand
acacagacugggccgauaa

SEQ ID NO: 540147 - RNA, 19 nt, Homo sapiens
  misc_RNA (1)...(19): siRNA sense strand
ggagaaugugggagccuuu

SEQ ID NO: 540148 - RNA, 19 nt, Homo sapiens
  misc_RNA (1)...(19): siRNA sense strand
gagggcaccggcaacauga

SEQ ID NO: 540149 - RNA, 19 nt, Homo sapiens
  misc_RNA (1)...(19): siRNA sense strand
agagauccuuacugcauga

SEQ ID NO: 540150 - RNA, 19 nt, Homo sapiens
  misc_RNA (1)...(19): siRNA sense strand
gauauggccaaccaccaaa

SEQ ID NO: 540151 - RNA, 19 nt, Homo sapiens
  misc_RNA (1)...(19): siRNA sense strand
ugcuauggcuuccuuuguu

SEQ ID NO: 540152 - RNA, 19 nt, Homo sapiens
  misc_RNA (1)...(19): siRNA sense strand
agaacaccguuacccaaug

SEQ ID NO: 540153 - RNA, 19 nt, Homo sapiens
  misc_RNA (1)...(19): siRNA sense strand
caacaaucccaaacacucu

SEQ ID NO: 540154 - RNA, 19 nt, Homo sapiens
  misc_RNA (1)...(19): siRNA sense strand
caaguauaaucccaaagac

SEQ ID NO: 540155 - RNA, 19 nt, Homo sapiens
  misc_RNA (1)...(19): siRNA sense strand
caaguucauucacacaaaa

SEQ ID NO: 540156 - RNA, 19 nt, Homo sapiens
  misc_RNA (1)...(19): siRNA sense strand
uggauacuuugaugaccua

SEQ ID NO: 540157 - RNA, 19 nt, Homo sapiens
  misc_RNA (1)...(19): siRNA sense strand
aacgagauauuccaguaug

SEQ ID NO: 540158 - RNA, 19 nt, Homo sapiens
  misc_RNA (1)...(19): siRNA sense strand
ccagcucuaucugcauauu

SEQ ID NO: 540159 - RNA, 19 nt, Homo sapiens
  misc_RNA (1)...(19): siRNA sense strand
caggauaccaaguucauuc

SEQ ID NO: 540160 - RNA, 19 nt, Homo sapiens
  misc_RNA (1)...(19): siRNA sense strand
ugguggcucucuuuacuga

SEQ ID NO: 540161 - RNA, 19 nt, Homo sapiens
  misc_RNA (1)...(19): siRNA sense strand
uggacggcaucguggauaa

SEQ ID NO: 540162 - RNA, 19 nt, Homo sapiens
  misc_RNA (1)...(19): siRNA sense strand
ugacagccaagcacaguau

SEQ ID NO: 540163 - RNA, 19 nt, Homo sapiens
  misc_RNA (1)...(19): siRNA sense strand
caaaacuggugauccaaau

SEQ ID NO: 540164 - RNA, 19 nt, Homo sapiens
  misc_RNA (1)...(19): siRNA sense strand
uaaggacccucacaaaaca

SEQ ID NO: 540165 - RNA, 19 nt, Homo sapiens
  misc_RNA (1)...(19): siRNA sense strand
gcucacagcugguggaaua

SEQ ID NO: 540166 - RNA, 19 nt, Homo sapiens
  misc_RNA (1)...(19): siRNA sense strand
ugaugaagcugccgaagua

SEQ ID NO: 540167 - RNA, 19 nt, Homo sapiens
  misc_RNA (1)...(19): siRNA sense strand
ggaaagugaugacgcuuau

SEQ ID NO: 540168 - RNA, 19 nt, Homo sapiens
  misc_RNA (1)...(19): siRNA sense strand
gcaggacgauuacaucuuc

SEQ ID NO: 540169 - RNA, 19 nt, Homo sapiens
  misc_RNA (1)...(19): siRNA sense strand
ggaagguucuggaaaguuc

SEQ ID NO: 540170 - RNA, 19 nt, Homo sapiens
  misc_RNA (1)...(19): siRNA sense strand
ggaggugguuccugucauu

SEQ ID NO: 540171 - RNA, 19 nt, Homo sapiens
  misc_RNA (1)...(19): siRNA sense strand
gauuacaucuucuuuaagg

SEQ ID NO: 540172 - RNA, 19 nt, Homo sapiens
  misc_RNA (1)...(19): siRNA sense strand
gguggaauauaaagaagaa

SEQ ID NO: 540173 - RNA, 19 nt, Homo sapiens
  misc_RNA (1)...(19): siRNA sense strand
ugaugacgcuuauaaccua

SEQ ID NO: 540174 - RNA, 19 nt, Homo sapiens
  misc_RNA (1)...(19): siRNA sense strand
gaacagcagcgugaucuug

SEQ ID NO: 540175 - RNA, 19 nt, Homo sapiens
  misc_RNA (1)...(19): siRNA sense strand
gaccaaagaccacguguuc

SEQ ID NO: 540176 - RNA, 19 nt, Homo sapiens
  misc_RNA (1)...(19): siRNA sense strand
gagaugaccagcccuguga

SEQ ID NO: 540177 - RNA, 19 nt, Homo sapiens
  misc_RNA (1)...(19): siRNA sense strand
ggaaagugguguccaacgu

SEQ ID NO: 540178 - RNA, 19 nt, Homo sapiens
  misc_RNA (1)...(19): siRNA sense strand
aaagugaugacgcuuauaa

SEQ ID NO: 540179 - RNA, 19 nt, Homo sapiens
  misc_RNA (1)...(19): siRNA sense strand
ccaccgucaucgacaauuu

SEQ ID NO: 540180 - RNA, 19 nt, Homo sapiens
  misc_RNA (1)...(19): siRNA sense strand
gguaccagauggacaccua

SEQ ID NO: 540181 - RNA, 19 nt, Homo sapiens
  misc_RNA (1)...(19): siRNA sense strand
ggacgagagucagguguuc

SEQ ID NO: 540182 - RNA, 19 nt, Homo sapiens
  misc_RNA (1)...(19): siRNA sense strand
gggaaagugaugacgcuua

SEQ ID NO: 540183 - RNA, 19 nt, Homo sapiens
  misc_RNA (1)...(19): siRNA sense strand
aaauguacaucacgucaga

SEQ ID NO: 540184 - RNA, 19 nt, Homo sapiens
  misc_RNA (1)...(19): siRNA sense strand
ggaucaauuucaagucaug

SEQ ID NO: 540185 - RNA, 19 nt, Homo sapiens
  misc_RNA (1)...(19): siRNA sense strand
gaacacggcaggccacgau

SEQ ID NO: 540186 - RNA, 19 nt, Homo sapiens
  misc_RNA (1)...(19): siRNA sense strand
ggacgauuacaucuucuuu

SEQ ID NO: 540187 - RNA, 19 nt, Homo sapiens
  misc_RNA (1)...(19): siRNA sense strand
guacaucacgucagacugu

SEQ ID NO: 540188 - RNA, 19 nt, Homo sapiens
  misc_RNA (1)...(19): siRNA sense strand
gacgauuacaucuucuuua

SEQ ID NO: 540189 - RNA, 19 nt, Homo sapiens
  misc_RNA (1)...(19): siRNA sense strand
caaaauacuacgucucuua

SEQ ID NO: 540190 - RNA, 19 nt, Homo sapiens
  misc_RNA (1)...(19): siRNA sense strand
cagcaaaccagacaaaaua

SEQ ID NO: 540191 - RNA, 19 nt, Homo sapiens
  misc_RNA (1)...(19): siRNA sense strand
cacagcugguggaauauaa

SEQ ID NO: 540192 - RNA, 19 nt, Homo sapiens
  misc_RNA (1)...(19): siRNA sense strand
caucgacaauuucuacauc

SEQ ID NO: 540193 - RNA, 19 nt, Homo sapiens
  misc_RNA (1)...(19): siRNA sense strand
cccgagagaugcacagcua

SEQ ID NO: 540194 - RNA, 19 nt, Homo sapiens
  misc_RNA (1)...(19): siRNA sense strand
ucugccaacuucugguuua

SEQ ID NO: 540195 - RNA, 19 nt, Homo sapiens
  misc_RNA (1)...(19): siRNA sense strand
ucaaggccauguacgugaa

SEQ ID NO: 540196 - RNA, 19 nt, Homo sapiens
  misc_RNA (1)...(19): siRNA sense strand
agucaugccucugcaguuu

SEQ ID NO: 540197 - RNA, 19 nt, Homo sapiens
  misc_RNA (1)...(19): siRNA sense strand
cgaaguaugcauugccaaa

SEQ ID NO: 540198 - RNA, 19 nt, Homo sapiens
  misc_RNA (1)...(19): siRNA sense strand
gcuuauaaccuacaacaag

SEQ ID NO: 540199 - RNA, 19 nt, Homo sapiens
  misc_RNA (1)...(19): siRNA sense strand
gaaagugaugacgcuuaua

SEQ ID NO: 540200 - RNA, 19 nt, Homo sapiens
  misc_RNA (1)...(19): siRNA sense strand
ccaaagaccacguguucug

SEQ ID NO: 540201 - RNA, 19 nt, Homo sapiens
  misc_RNA (1)...(19): siRNA sense strand
aggagccucucgagugaua

SEQ ID NO: 540202 - RNA, 19 nt, Homo sapiens
  misc_RNA (1)...(19): siRNA sense strand
uggacgggcugcugaguga

SEQ ID NO: 540203 - RNA, 19 nt, Homo sapiens
  misc_RNA (1)...(19): siRNA sense strand
ugaccgugcaggacgauua

SEQ ID NO: 540204 - RNA, 19 nt, Homo sapiens
  misc_RNA (1)...(19): siRNA sense strand
guacgucaccugcgcaauc

SEQ ID NO: 540205 - RNA, 19 nt, Homo sapiens
  misc_RNA (1)...(19): siRNA sense strand
gagccuucauccucuacaa

SEQ ID NO: 540206 - RNA, 19 nt, Homo sapiens
  misc_RNA (1)...(19): siRNA sense strand
ggagcuggaugccuacaac

SEQ ID NO: 540207 - RNA, 19 nt, Homo sapiens
  misc_RNA (1)...(19): siRNA sense strand
gcugguggaauauaaagaa

SEQ ID NO: 540208 - RNA, 19 nt, Homo sapiens
  misc_RNA (1)...(19): siRNA sense strand
cacaauugcuccgagaaga

SEQ ID NO: 540209 - RNA, 19 nt, Homo sapiens
  misc_RNA (1)...(19): siRNA sense strand
guacuaccacgcagacaug

SEQ ID NO: 540210 - RNA, 19 nt, Homo sapiens
  misc_RNA (1)...(19): siRNA sense strand
ggacgcugacccugacuug

SEQ ID NO: 540211 - RNA, 19 nt, Homo sapiens
  misc_RNA (1)...(19): siRNA sense strand
ggacaugaauggaaaacca

SEQ ID NO: 540212 - RNA, 19 nt, Homo sapiens
  misc_RNA (1)...(19): siRNA sense strand
caucagcaaaccagacaaa

SEQ ID NO: 540213 - RNA, 19 nt, Homo sapiens
  misc_RNA (1)...(19): siRNA sense strand
caucaugggugcagguaac

SEQ ID NO: 540214 - RNA, 19 nt, Homo sapiens
  misc_RNA (1)...(19): siRNA sense strand
cuugucagcuccucacuca

SEQ ID NO: 540215 - RNA, 19 nt, Homo sapiens
  misc_RNA (1)...(19): siRNA sense strand
ccacuuuggccgaucugua

SEQ ID NO: 540216 - RNA, 19 nt, Homo sapiens
  misc_RNA (1)...(19): siRNA sense strand
gugauguccugacuaccaa

SEQ ID NO: 540217 - RNA, 19 nt, Homo sapiens
  misc_RNA (1)...(19): siRNA sense strand
ucacagcugguggaauaua

SEQ ID NO: 540218 - RNA, 19 nt, Homo sapiens
  misc_RNA (1)...(19): siRNA sense strand
uacgugaaccuuacacuga

SEQ ID NO: 540219 - RNA, 19 nt, Homo sapiens
  misc_RNA (1)...(19): siRNA sense strand
ucacccggcugcucuccaa

SEQ ID NO: 540220 - RNA, 19 nt, Homo sapiens
  misc_RNA (1)...(19): siRNA sense strand
caagagcgagugaccaaag

SEQ ID NO: 540221 - RNA, 19 nt, Homo sapiens
  misc_RNA (1)...(19): siRNA sense strand
gccauguacgugaaccuua

SEQ ID NO: 540222 - RNA, 19 nt, Homo sapiens
  misc_RNA (1)...(19): siRNA sense strand
acaccuccaucccuuugaa

SEQ ID NO: 540223 - RNA, 19 nt, Homo sapiens
  misc_RNA (1)...(19): siRNA sense strand
gaucguggccaucaaagac

SEQ ID NO: 540224 - RNA, 19 nt, Homo sapiens
  misc_RNA (1)...(19): siRNA sense strand
gaccguguacgcccaaaug

SEQ ID NO: 540225 - RNA, 19 nt, Homo sapiens
  misc_RNA (1)...(19): siRNA sense strand
guaguggugcuguuuguca

SEQ ID NO: 540226 - RNA, 19 nt, Homo sapiens
  misc_RNA (1)...(19): siRNA sense strand
cuggaucaauuucaaguca

SEQ ID NO: 540227 - RNA, 19 nt, Homo sapiens
  misc_RNA (1)...(19): siRNA sense strand
gagaacagcagcgugaucu

SEQ ID NO: 540228 - RNA, 19 nt, Homo sapiens
  misc_RNA (1)...(19): siRNA sense strand
ucuugauccugacgaagua

SEQ ID NO: 540229 - RNA, 19 nt, Homo sapiens
  misc_RNA (1)...(19): siRNA sense strand
ggacgagacgcuggucaug

SEQ ID NO: 540230 - RNA, 19 nt, Homo sapiens
  misc_RNA (1)...(19): siRNA sense strand
ucucuuaucgucgaaauga

SEQ ID NO: 540231 - RNA, 19 nt, Homo sapiens
  misc_RNA (1)...(19): siRNA sense strand
gagaaggagcaggagauga

SEQ ID NO: 540232 - RNA, 19 nt, Homo sapiens
  misc_RNA (1)...(19): siRNA sense strand
ccauguacgugaaccuuac

SEQ ID NO: 540233 - RNA, 19 nt, Homo sapiens
  misc_RNA (1)...(19): siRNA sense strand
aagagcgagugaccaaaga

SEQ ID NO: 540234 - RNA, 19 nt, Homo sapiens
  misc_RNA (1)...(19): siRNA sense strand
ccugugcgacuacggauuu

SEQ ID NO: 540235 - RNA, 19 nt, Homo sapiens
  misc_RNA (1)...(19): siRNA sense strand
gacgagacgcuggucauga

SEQ ID NO: 540236 - RNA, 19 nt, Homo sapiens
  misc_RNA (1)...(19): siRNA sense strand
gcaggagugguaccagaug

SEQ ID NO: 540237 - RNA, 19 nt, Homo sapiens
  misc_RNA (1)...(19): siRNA sense strand
gaaguaugcauugccaaag

SEQ ID NO: 540238 - RNA, 19 nt, Homo sapiens
  misc_RNA (1)...(19): siRNA sense strand
ucaccaccgucaucgacaa

SEQ ID NO: 540239 - RNA, 19 nt, Homo sapiens
  misc_RNA (1)...(19): siRNA sense strand
aagaagaaauguacaucac

SEQ ID NO: 540240 - RNA, 19 nt, Homo sapiens
  misc_RNA (1)...(19): siRNA sense strand
uaaccucaccgucuucuac

SEQ ID NO: 540241 - RNA, 19 nt, Homo sapiens
  misc_RNA (1)...(19): siRNA sense strand
ggcagguguuugaggaaga

SEQ ID NO: 540242 - RNA, 19 nt, Homo sapiens
  misc_RNA (1)...(19): siRNA sense strand
gcagcccauucccuucuuc

SEQ ID NO: 540243 - RNA, 19 nt, Homo sapiens
  misc_RNA (1)...(19): siRNA sense strand
gaugaggcggugcucuuug

SEQ ID NO: 540244 - RNA, 19 nt, Homo sapiens
  misc_RNA (1)...(19): siRNA sense strand
gguccucgccuacacaaag

SEQ ID NO: 540245 - RNA, 19 nt, Homo sapiens
  misc_RNA (1)...(19): siRNA sense strand
gcaagagcgagugaccaaa

SEQ ID NO: 540246 - RNA, 19 nt, Homo sapiens
  misc_RNA (1)...(19): siRNA sense strand
cagcgucccucaggagcuu

SEQ ID NO: 540247 - RNA, 19 nt, Homo sapiens
  misc_RNA (1)...(19): siRNA sense strand
uccgugugcuggaucaauu

SEQ ID NO: 540248 - RNA, 19 nt, Homo sapiens
  misc_RNA (1)...(19): siRNA sense strand
ggugauguccugacuacca

SEQ ID NO: 540249 - RNA, 19 nt, Homo sapiens
  misc_RNA (1)...(19): siRNA sense strand
gcagguguuugaggaagag

SEQ ID NO: 540250 - RNA, 19 nt, Homo sapiens
  misc_RNA (1)...(19): siRNA sense strand
gcagacaaccccuacguau

SEQ ID NO: 540251 - RNA, 19 nt, Homo sapiens
  misc_RNA (1)...(19): siRNA sense strand
aauacuacgucucuuaucg

SEQ ID NO: 540252 - RNA, 19 nt, Homo sapiens
  misc_RNA (1)...(19): siRNA sense strand
caagaccucgguggagauu

SEQ ID NO: 540253 - RNA, 19 nt, Homo sapiens
  misc_RNA (1)...(19): siRNA sense strand
ugaggaagagcaucacauc

SEQ ID NO: 540254 - RNA, 19 nt, Homo sapiens
  misc_RNA (1)...(19): siRNA sense strand
gaaaaccaaccaacugcaa

SEQ ID NO: 540255 - RNA, 19 nt, Homo sapiens
  misc_RNA (1)...(19): siRNA sense strand
ccaaaugcacaacgagaag

SEQ ID NO: 540256 - RNA, 19 nt, Homo sapiens
  misc_RNA (1)...(19): siRNA sense strand
gggaagguucuggaaaguu

SEQ ID NO: 540257 - RNA, 19 nt, Homo sapiens
  misc_RNA (1)...(19): siRNA sense strand
gggcgguaguggugcuguu

SEQ ID NO: 540258 - RNA, 19 nt, Homo sapiens
  misc_RNA (1)...(19): siRNA sense strand
gggcgaccgcuguaucaug

SEQ ID NO: 540259 - RNA, 19 nt, Homo sapiens
  misc_RNA (1)...(19): siRNA sense strand
agaccucgguggagauuuu

SEQ ID NO: 540260 - RNA, 19 nt, Homo sapiens
  misc_RNA (1)...(19): siRNA sense strand
agcaucaacucccgagaga

SEQ ID NO: 540261 - RNA, 19 nt, Homo sapiens
  misc_RNA (1)...(19): siRNA sense strand
cgaugaggcggugcucuuu

SEQ ID NO: 540262 - RNA, 19 nt, Homo sapiens
  misc_RNA (1)...(19): siRNA sense strand
caauugcuccgagaagaug

SEQ ID NO: 540263 - RNA, 19 nt, Homo sapiens
  misc_RNA (1)...(19): siRNA sense strand
auugggagcuggucaaggu

SEQ ID NO: 540264 - RNA, 19 nt, Homo sapiens
  misc_RNA (1)...(19): siRNA sense strand
uccuuucccuggauaauuc

SEQ ID NO: 540265 - RNA, 19 nt, Homo sapiens
  misc_RNA (1)...(19): siRNA sense strand
gauauucugucuuggauua

SEQ ID NO: 540266 - RNA, 19 nt, Homo sapiens
  misc_RNA (1)...(19): siRNA sense strand
uaacugggcuugaaacuuc

SEQ ID NO: 540267 - RNA, 19 nt, Homo sapiens
  misc_RNA (1)...(19): siRNA sense strand
gcaagaaucucagccaaga

SEQ ID NO: 540268 - RNA, 19 nt, Homo sapiens
  misc_RNA (1)...(19): siRNA sense strand
aaagugagauucccacaga

SEQ ID NO: 540269 - RNA, 19 nt, Homo sapiens
  misc_RNA (1)...(19): siRNA sense strand
gcacuuaugcugaugaaga

SEQ ID NO: 540270 - RNA, 19 nt, Homo sapiens
  misc_RNA (1)...(19): siRNA sense strand
cuacauccaugacaccuuu

SEQ ID NO: 540271 - RNA, 19 nt, Homo sapiens
  misc_RNA (1)...(19): siRNA sense strand
agacuuaccuaccaucuuc

SEQ ID NO: 540272 - RNA, 19 nt, Homo sapiens
  misc_RNA (1)...(19): siRNA sense strand
gcgagcagguguucucaug

SEQ ID NO: 540273 - RNA, 19 nt, Homo sapiens
  misc_RNA (1)...(19): siRNA sense strand
gcaagcaccaccuaaugaa

SEQ ID NO: 540274 - RNA, 19 nt, Homo sapiens
  misc_RNA (1)...(19): siRNA sense strand
ugaagagcuugucaucaaa

SEQ ID NO: 540275 - RNA, 19 nt, Homo sapiens
  misc_RNA (1)...(19): siRNA sense strand
ccucauaacugggcuugaa

SEQ ID NO: 540276 - RNA, 19 nt, Homo sapiens
  misc_RNA (1)...(19): siRNA sense strand
caucaagacuuaccuacca

SEQ ID NO: 540277 - RNA, 19 nt, Homo sapiens
  misc_RNA (1)...(19): siRNA sense strand
cuccauggauuaugcuaua

SEQ ID NO: 540278 - RNA, 19 nt, Homo sapiens
  misc_RNA (1)...(19): siRNA sense strand
ugucaacacugaaggucua

SEQ ID NO: 540279 - RNA, 19 nt, Homo sapiens
  misc_RNA (1)...(19): siRNA sense strand
acucacccaucaagacuua

SEQ ID NO: 540280 - RNA, 19 nt, Homo sapiens
  misc_RNA (1)...(19): siRNA sense strand
ccaaggagagugacgugua

SEQ ID NO: 540281 - RNA, 19 nt, Homo sapiens
  misc_RNA (1)...(19): siRNA sense strand
ggcaggagcuuccgcuaca

SEQ ID NO: 540282 - RNA, 19 nt, Homo sapiens
  misc_RNA (1)...(19): siRNA sense strand
gugaagagccugguauuuc

SEQ ID NO: 540283 - RNA, 19 nt, Homo sapiens
  misc_RNA (1)...(19): siRNA sense strand
ggauuaaacaagaagaaga

SEQ ID NO: 540284 - RNA, 19 nt, Homo sapiens
  misc_RNA (1)...(19): siRNA sense strand
ucucucaucuccauggauu

SEQ ID NO: 540285 - RNA, 19 nt, Homo sapiens
  misc_RNA (1)...(19): siRNA sense strand
caaggagagugacguguac

SEQ ID NO: 540286 - RNA, 19 nt, Homo sapiens
  misc_RNA (1)...(19): siRNA sense strand
ggagagugacguguacaaa

SEQ ID NO: 540287 - RNA, 19 nt, Homo sapiens
  misc_RNA (1)...(19): siRNA sense strand
gcacaagagcgcccuuucu

SEQ ID NO: 540288 - RNA, 19 nt, Homo sapiens
  misc_RNA (1)...(19): siRNA sense strand
caacuacgagucucucauc

SEQ ID NO: 540289 - RNA, 19 nt, Homo sapiens
  misc_RNA (1)...(19): siRNA sense strand
gguauuucaacaucagaua

SEQ ID NO: 540290 - RNA, 19 nt, Homo sapiens
  misc_RNA (1)...(19): siRNA sense strand
gaagagccugguauuucaa

SEQ ID NO: 540291 - RNA, 19 nt, Homo sapiens
  misc_RNA (1)...(19): siRNA sense strand
aaccugaugucuuaucuca

SEQ ID NO: 540292 - RNA, 19 nt, Homo sapiens
  misc_RNA (1)...(19): siRNA sense strand
gaagggcaacuacgagucu

SEQ ID NO: 540293 - RNA, 19 nt, Homo sapiens
  misc_RNA (1)...(19): siRNA sense strand
caagcaccaccuaaugaaa

SEQ ID NO: 540294 - RNA, 19 nt, Homo sapiens
  misc_RNA (1)...(19): siRNA sense strand
gaagagcuugucaucaaag

SEQ ID NO: 540295 - RNA, 19 nt, Homo sapiens
  misc_RNA (1)...(19): siRNA sense strand
cugaaggccuugcuagauc

SEQ ID NO: 540296 - RNA, 19 nt, Homo sapiens
  misc_RNA (1)...(19): siRNA sense strand
agaagaagagccucagguu

SEQ ID NO: 540297 - RNA, 19 nt, Homo sapiens
  misc_RNA (1)...(19): siRNA sense strand
acaaacagacacucaagga

SEQ ID NO: 540298 - RNA, 19 nt, Homo sapiens
  misc_RNA (1)...(19): siRNA sense strand
gcaggagcuuccgcuacaa

SEQ ID NO: 540299 - RNA, 19 nt, Homo sapiens
  misc_RNA (1)...(19): siRNA sense strand
gcugaaggccuugcuagau

SEQ ID NO: 540300 - RNA, 19 nt, Homo sapiens
  misc_RNA (1)...(19): siRNA sense strand
gauuaaacaagaagaagag

SEQ ID NO: 540301 - RNA, 19 nt, Homo sapiens
  misc_RNA (1)...(19): siRNA sense strand
gaaucucagccaagacaug

SEQ ID NO: 540302 - RNA, 19 nt, Homo sapiens
  misc_RNA (1)...(19): siRNA sense strand
uuacucaguuggguagcua

SEQ ID NO: 540303 - RNA, 19 nt, Homo sapiens
  misc_RNA (1)...(19): siRNA sense strand
cgcaagcaccaccuaauga

SEQ ID NO: 540304 - RNA, 19 nt, Homo sapiens
  misc_RNA (1)...(19): siRNA sense strand
ccgcaagcaccaccuaaug

SEQ ID NO: 540305 - RNA, 19 nt, Homo sapiens
  misc_RNA (1)...(19): siRNA sense strand
ucaaccugaugucuuaucu

SEQ ID NO: 540306 - RNA, 19 nt, Homo sapiens
  misc_RNA (1)...(19): siRNA sense strand
gcuacaaacagacacucaa

SEQ ID NO: 540307 - RNA, 19 nt, Homo sapiens
  misc_RNA (1)...(19): siRNA sense strand
caucuucggguccauaaca

SEQ ID NO: 540308 - RNA, 19 nt, Homo sapiens
  misc_RNA (1)...(19): siRNA sense strand
gagagugacguguacaaaa

SEQ ID NO: 540309 - RNA, 19 nt, Homo sapiens
  misc_RNA (1)...(19): siRNA sense strand
ccagaaggggaacauaaua

SEQ ID NO: 540310 - RNA, 19 nt, Homo sapiens
  misc_RNA (1)...(19): siRNA sense strand
ggaccaugccagcgagaca

SEQ ID NO: 540311 - RNA, 19 nt, Homo sapiens
  misc_RNA (1)...(19): siRNA sense strand
caaggaccaccuccguuca

SEQ ID NO: 540312 - RNA, 19 nt, Homo sapiens
  misc_RNA (1)...(19): siRNA sense strand
uugcugacccaccaaugua

SEQ ID NO: 540313 - RNA, 19 nt, Homo sapiens
  misc_RNA (1)...(19): siRNA sense strand
gagcuuccgcuacaaacag

SEQ ID NO: 540314 - RNA, 19 nt, Homo sapiens
  misc_RNA (1)...(19): siRNA sense strand
caggagcuuccgcuacaaa

SEQ ID NO: 540315 - RNA, 19 nt, Homo sapiens
  misc_RNA (1)...(19): siRNA sense strand
acacaggcgagcguccuua

SEQ ID NO: 540316 - RNA, 19 nt, Homo sapiens
  misc_RNA (1)...(19): siRNA sense strand
caacacugaaggucuagag

SEQ ID NO: 540317 - RNA, 19 nt, Homo sapiens
  misc_RNA (1)...(19): siRNA sense strand
cacaagagcgcccuuucuc

SEQ ID NO: 540318 - RNA, 19 nt, Homo sapiens
  misc_RNA (1)...(19): siRNA sense strand
gccagaggaaagugagauu

SEQ ID NO: 540319 - RNA, 19 nt, Homo sapiens
  misc_RNA (1)...(19): siRNA sense strand
ggagcuuccgcuacaaaca

SEQ ID NO: 540320 - RNA, 19 nt, Homo sapiens
  misc_RNA (1)...(19): siRNA sense strand
gauauucugucuuggauua

SEQ ID NO: 540321 - RNA, 19 nt, Homo sapiens
  misc_RNA (1)...(19): siRNA sense strand
uaacugggcuugaaacuuc

SEQ ID NO: 540322 - RNA, 19 nt, Homo sapiens
  misc_RNA (1)...(19): siRNA sense strand
gcaagaaucucagccaaga

SEQ ID NO: 540323 - RNA, 19 nt, Homo sapiens
  misc_RNA (1)...(19): siRNA sense strand
aaagugagauucccacaga

SEQ ID NO: 540324 - RNA, 19 nt, Homo sapiens
  misc_RNA (1)...(19): siRNA sense strand
gcacuuaugcugaugaaga

SEQ ID NO: 540325 - RNA, 19 nt, Homo sapiens
  misc_RNA (1)...(19): siRNA sense strand
gaaacuagccagcugugaa

SEQ ID NO: 540326 - RNA, 19 nt, Homo sapiens
  misc_RNA (1)...(19): siRNA sense strand
cuacauccaugacaccuuu

SEQ ID NO: 540327 - RNA, 19 nt, Homo sapiens
  misc_RNA (1)...(19): siRNA sense strand
agacuuaccuaccaucuuc

SEQ ID NO: 540328 - RNA, 19 nt, Homo sapiens
  misc_RNA (1)...(19): siRNA sense strand
gcgagcagguguucucaug

SEQ ID NO: 540329 - RNA, 19 nt, Homo sapiens
  misc_RNA (1)...(19): siRNA sense strand
ggacagggacagcagagaa

SEQ ID NO: 540330 - RNA, 19 nt, Homo sapiens
  misc_RNA (1)...(19): siRNA sense strand
gcaagcaccaccuaaugaa

SEQ ID NO: 540331 - RNA, 19 nt, Homo sapiens
  misc_RNA (1)...(19): siRNA sense strand
ugaagagcuugucaucaaa

SEQ ID NO: 540332 - RNA, 19 nt, Homo sapiens
  misc_RNA (1)...(19): siRNA sense strand
ccucauaacugggcuugaa

SEQ ID NO: 540333 - RNA, 19 nt, Homo sapiens
  misc_RNA (1)...(19): siRNA sense strand
caucaagacuuaccuacca

SEQ ID NO: 540334 - RNA, 19 nt, Homo sapiens
  misc_RNA (1)...(19): siRNA sense strand
cuccauggauuaugcuaua

SEQ ID NO: 540335 - RNA, 19 nt, Homo sapiens
  misc_RNA (1)...(19): siRNA sense strand
ugucaacacugaaggucua

SEQ ID NO: 540336 - RNA, 19 nt, Homo sapiens
  misc_RNA (1)...(19): siRNA sense strand
acucacccaucaagacuua

SEQ ID NO: 540337 - RNA, 19 nt, Homo sapiens
  misc_RNA (1)...(19): siRNA sense strand
ccaaggagagugacgugua

SEQ ID NO: 540338 - RNA, 19 nt, Homo sapiens
  misc_RNA (1)...(19): siRNA sense strand
ggcaggagcuuccgcuaca

SEQ ID NO: 540339 - RNA, 19 nt, Homo sapiens
  misc_RNA (1)...(19): siRNA sense strand
gcagacagcagcuaucucu

SEQ ID NO: 540340 - RNA, 19 nt, Homo sapiens
  misc_RNA (1)...(19): siRNA sense strand
gugaagagccugguauuuc

SEQ ID NO: 540341 - RNA, 19 nt, Homo sapiens
  misc_RNA (1)...(19): siRNA sense strand
ggauuaaacaagaagaaga

SEQ ID NO: 540342 - RNA, 19 nt, Homo sapiens
  misc_RNA (1)...(19): siRNA sense strand
ucucucaucuccauggauu

SEQ ID NO: 540343 - RNA, 19 nt, Homo sapiens
  misc_RNA (1)...(19): siRNA sense strand
aaacuagccagcugugaaa

SEQ ID NO: 540344 - RNA, 19 nt, Homo sapiens
  misc_RNA (1)...(19): siRNA sense strand
caaggagagugacguguac

SEQ ID NO: 540345 - RNA, 19 nt, Homo sapiens
  misc_RNA (1)...(19): siRNA sense strand
ggagagugacguguacaaa

SEQ ID NO: 540346 - RNA, 19 nt, Homo sapiens
  misc_RNA (1)...(19): siRNA sense strand
gcacaagagcgcccuuucu

SEQ ID NO: 540347 - RNA, 19 nt, Homo sapiens
  misc_RNA (1)...(19): siRNA sense strand
caacuacgagucucucauc

SEQ ID NO: 540348 - RNA, 19 nt, Homo sapiens
  misc_RNA (1)...(19): siRNA sense strand
gguauuucaacaucagaua

SEQ ID NO: 540349 - RNA, 19 nt, Homo sapiens
  misc_RNA (1)...(19): siRNA sense strand
gaagagccugguauuucaa

SEQ ID NO: 540350 - RNA, 19 nt, Homo sapiens
  misc_RNA (1)...(19): siRNA sense strand
agaggcggcuggagaacuu

SEQ ID NO: 540351 - RNA, 19 nt, Homo sapiens
  misc_RNA (1)...(19): siRNA sense strand
ggacagcagagaagaaacu

SEQ ID NO: 540352 - RNA, 19 nt, Homo sapiens
  misc_RNA (1)...(19): siRNA sense strand
aaccugaugucuuaucuca

SEQ ID NO: 540353 - RNA, 19 nt, Homo sapiens
  misc_RNA (1)...(19): siRNA sense strand
gaagggcaacuacgagucu

SEQ ID NO: 540354 - RNA, 19 nt, Homo sapiens
  misc_RNA (1)...(19): siRNA sense strand
caagcaccaccuaaugaaa

SEQ ID NO: 540355 - RNA, 19 nt, Homo sapiens
  misc_RNA (1)...(19): siRNA sense strand
gcggcucccuccagguauu

SEQ ID NO: 540356 - RNA, 19 nt, Homo sapiens
  misc_RNA (1)...(19): siRNA sense strand
cugaaggccuugcuagauc

SEQ ID NO: 540357 - RNA, 19 nt, Homo sapiens
  misc_RNA (1)...(19): siRNA sense strand
gaagagcuugucaucaaag

SEQ ID NO: 540358 - RNA, 19 nt, Homo sapiens
  misc_RNA (1)...(19): siRNA sense strand
agaagaagagccucagguu

SEQ ID NO: 540359 - RNA, 19 nt, Homo sapiens
  misc_RNA (1)...(19): siRNA sense strand
acaaacagacacucaagga

SEQ ID NO: 540360 - RNA, 19 nt, Homo sapiens
  misc_RNA (1)...(19): siRNA sense strand
gcaggagcuuccgcuacaa

SEQ ID NO: 540361 - RNA, 19 nt, Homo sapiens
  misc_RNA (1)...(19): siRNA sense strand
gcugaaggccuugcuagau

SEQ ID NO: 540362 - RNA, 19 nt, Homo sapiens
  misc_RNA (1)...(19): siRNA sense strand
gcaacaggaacuucuggau

SEQ ID NO: 540363 - RNA, 19 nt, Homo sapiens
  misc_RNA (1)...(19): siRNA sense strand
gaaucucagccaagacaug

SEQ ID NO: 540364 - RNA, 19 nt, Homo sapiens
  misc_RNA (1)...(19): siRNA sense strand
gauuaaacaagaagaagag

SEQ ID NO: 540365 - RNA, 19 nt, Homo sapiens
  misc_RNA (1)...(19): siRNA sense strand
uuacucaguuggguagcua

SEQ ID NO: 540366 - RNA, 19 nt, Homo sapiens
  misc_RNA (1)...(19): siRNA sense strand
cgcaagcaccaccuaauga

SEQ ID NO: 540367 - RNA, 19 nt, Homo sapiens
  misc_RNA (1)...(19): siRNA sense strand
ccgcaagcaccaccuaaug

SEQ ID NO: 540368 - RNA, 19 nt, Homo sapiens
  misc_RNA (1)...(19): siRNA sense strand
ucaaccugaugucuuaucu

SEQ ID NO: 540369 - RNA, 19 nt, Homo sapiens
  misc_RNA (1)...(19): siRNA sense strand
gcuacaaacagacacucaa

SEQ ID NO: 540370 - RNA, 19 nt, Homo sapiens
  misc_RNA (1)...(19): siRNA sense strand
gagaaccugcugcgcaaca

SEQ ID NO: 540371 - RNA, 19 nt, Homo sapiens
  misc_RNA (1)...(19): siRNA sense strand
caucuucggguccauaaca

SEQ ID NO: 540372 - RNA, 19 nt, Homo sapiens
  misc_RNA (1)...(19): siRNA sense strand
gagagugacguguacaaaa

SEQ ID NO: 540373 - RNA, 19 nt, Homo sapiens
  misc_RNA (1)...(19): siRNA sense strand
ccagaaggggaacauaaua

SEQ ID NO: 540374 - RNA, 19 nt, Homo sapiens
  misc_RNA (1)...(19): siRNA sense strand
ggaccaugccagcgagaca

SEQ ID NO: 540375 - RNA, 19 nt, Homo sapiens
  misc_RNA (1)...(19): siRNA sense strand
caaggaccaccuccguuca

SEQ ID NO: 540376 - RNA, 19 nt, Homo sapiens
  misc_RNA (1)...(19): siRNA sense strand
gacagcagagaagaaacua

SEQ ID NO: 540377 - RNA, 19 nt, Homo sapiens
  misc_RNA (1)...(19): siRNA sense strand
gagcuuccgcuacaaacag

SEQ ID NO: 540378 - RNA, 19 nt, Homo sapiens
  misc_RNA (1)...(19): siRNA sense strand
caggagcuuccgcuacaaa

SEQ ID NO: 540379 - RNA, 19 nt, Homo sapiens
  misc_RNA (1)...(19): siRNA sense strand
uugcugacccaccaaugua

SEQ ID NO: 540380 - RNA, 19 nt, Homo sapiens
  misc_RNA (1)...(19): siRNA sense strand
acacaggcgagcguccuua

SEQ ID NO: 540381 - RNA, 19 nt, Homo sapiens
  misc_RNA (1)...(19): siRNA sense strand
caacacugaaggucuagag

SEQ ID NO: 540382 - RNA, 19 nt, Homo sapiens
  misc_RNA (1)...(19): siRNA sense strand
gccagaggaaagugagauu

SEQ ID NO: 540383 - RNA, 19 nt, Homo sapiens
  misc_RNA (1)...(19): siRNA sense strand
ggagcuuccgcuacaaaca

SEQ ID NO: 540384 - RNA, 19 nt, Homo sapiens
  misc_RNA (1)...(19): siRNA sense strand
cacaagagcgcccuuucuc

SEQ ID NO: 540385 - RNA, 19 nt, Homo sapiens
  misc_RNA (1)...(19): siRNA sense strand
agacagcagcuaucucucu

SEQ ID NO: 540386 - RNA, 19 nt, Homo sapiens
  misc_RNA (1)...(19): siRNA sense strand
gggaugaacugcccuaugu

SEQ ID NO: 540387 - RNA, 19 nt, Homo sapiens
  misc_RNA (1)...(19): siRNA sense strand
cagaagggcuguuccagaa

SEQ ID NO: 540388 - RNA, 19 nt, Homo sapiens
  misc_RNA (1)...(19): siRNA sense strand
gaacugcccuaugucuuug

SEQ ID NO: 540389 - RNA, 19 nt, Homo sapiens
  misc_RNA (1)...(19): siRNA sense strand
gagaauuccucaacuacga

SEQ ID NO: 540390 - RNA, 19 nt, Homo sapiens
  misc_RNA (1)...(19): siRNA sense strand
gggagaccaucaaguuuau

SEQ ID NO: 540391 - RNA, 19 nt, Homo sapiens
  misc_RNA (1)...(19): siRNA sense strand
gcaaggagaagcaguaucu

SEQ ID NO: 540392 - RNA, 19 nt, Homo sapiens
  misc_RNA (1)...(19): siRNA sense strand
gagcguaucaccaucuuug

SEQ ID NO: 540393 - RNA, 19 nt, Homo sapiens
  misc_RNA (1)...(19): siRNA sense strand
ggaagaagccugugaugcu

SEQ ID NO: 540394 - RNA, 19 nt, Homo sapiens
  misc_RNA (1)...(19): siRNA sense strand
ggagcaaauucaacagcaa

SEQ ID NO: 540395 - RNA, 19 nt, Homo sapiens
  misc_RNA (1)...(19): siRNA sense strand
cgggagaccaucaaguuua

SEQ ID NO: 540396 - RNA, 19 nt, Homo sapiens
  misc_RNA (1)...(19): siRNA sense strand
ucaaguuuauguacacaga

SEQ ID NO: 540397 - RNA, 19 nt, Homo sapiens
  misc_RNA (1)...(19): siRNA sense strand
ugaacugcccuaugucuuu

SEQ ID NO: 540398 - RNA, 19 nt, Homo sapiens
  misc_RNA (1)...(19): siRNA sense strand
gcucuuuacugaccaccaa

SEQ ID NO: 540399 - RNA, 19 nt, Homo sapiens
  misc_RNA (1)...(19): siRNA sense strand
gaggugguguggagcaaau

SEQ ID NO: 540400 - RNA, 19 nt, Homo sapiens
  misc_RNA (1)...(19): siRNA sense strand
cagcuggucugucaacuac

SEQ ID NO: 540401 - RNA, 19 nt, Homo sapiens
  misc_RNA (1)...(19): siRNA sense strand
gaaaacaucgcccacuuug

SEQ ID NO: 540402 - RNA, 19 nt, Homo sapiens
  misc_RNA (1)...(19): siRNA sense strand
gccuguaccucaaccucua

SEQ ID NO: 540403 - RNA, 19 nt, Homo sapiens
  misc_RNA (1)...(19): siRNA sense strand
ggcgcgagcucaacaacga

SEQ ID NO: 540404 - RNA, 19 nt, Homo sapiens
  misc_RNA (1)...(19): siRNA sense strand
agggagaauuccucaacua

SEQ ID NO: 540405 - RNA, 19 nt, Homo sapiens
  misc_RNA (1)...(19): siRNA sense strand
ggaccaacuucgccaagac

SEQ ID NO: 540406 - RNA, 19 nt, Homo sapiens
  misc_RNA (1)...(19): siRNA sense strand
gauccucucccaccauuca

SEQ ID NO: 540407 - RNA, 19 nt, Homo sapiens
  misc_RNA (1)...(19): siRNA sense strand
ccaaguucauccacaccaa

SEQ ID NO: 540408 - RNA, 19 nt, Homo sapiens
  misc_RNA (1)...(19): siRNA sense strand
ccaccuacgugcagaacca

SEQ ID NO: 540409 - RNA, 19 nt, Homo sapiens
  misc_RNA (1)...(19): siRNA sense strand
gcagggagaauuccucaac

SEQ ID NO: 540410 - RNA, 19 nt, Homo sapiens
  misc_RNA (1)...(19): siRNA sense strand
ggaaggcaaggaugugcuu

SEQ ID NO: 540411 - RNA, 19 nt, Homo sapiens
  misc_RNA (1)...(19): siRNA sense strand
gagaccaucaaguuuaugu

SEQ ID NO: 540412 - RNA, 19 nt, Homo sapiens
  misc_RNA (1)...(19): siRNA sense strand
ggacgaugugccucucuug

SEQ ID NO: 540413 - RNA, 19 nt, Homo sapiens
  misc_RNA (1)...(19): siRNA sense strand
gagcgaggacugccuguac

SEQ ID NO: 540414 - RNA, 19 nt, Homo sapiens
  misc_RNA (1)...(19): siRNA sense strand
ggccuuugcugcccucuac

SEQ ID NO: 540415 - RNA, 19 nt, Homo sapiens
  misc_RNA (1)...(19): siRNA sense strand
cccuguaacuucuccaaga

SEQ ID NO: 540416 - RNA, 19 nt, Homo sapiens
  misc_RNA (1)...(19): siRNA sense strand
uugcugcccucuacuacaa

SEQ ID NO: 540417 - RNA, 19 nt, Homo sapiens
  misc_RNA (1)...(19): siRNA sense strand
acgcucaacuaccgucuug

SEQ ID NO: 540418 - RNA, 19 nt, Homo sapiens
  misc_RNA (1)...(19): siRNA sense strand
aggaggagcuggugucacu

SEQ ID NO: 540419 - RNA, 19 nt, Homo sapiens
  misc_RNA (1)...(19): siRNA sense strand
gugguucaccgacaacuug

SEQ ID NO: 540420 - RNA, 19 nt, Homo sapiens
  misc_RNA (1)...(19): siRNA sense strand
gaugaacugcccuaugucu

SEQ ID NO: 540421 - RNA, 19 nt, Homo sapiens
  misc_RNA (1)...(19): siRNA sense strand
cuaccagucucccgucuac

SEQ ID NO: 540422 - RNA, 19 nt, Homo sapiens
  misc_RNA (1)...(19): siRNA sense strand
ccgggacaauggcgaaaug

SEQ ID NO: 540423 - RNA, 19 nt, Homo sapiens
  misc_RNA (1)...(19): siRNA sense strand
gagcgaggacggugugucu

SEQ ID NO: 540424 - RNA, 19 nt, Homo sapiens
  misc_RNA (1)...(19): siRNA sense strand
acuaccagccgcucaagua

SEQ ID NO: 540425 - RNA, 19 nt, Homo sapiens
  misc_RNA (1)...(19): siRNA sense strand
gcaaauucaacagcaagga

SEQ ID NO: 540426 - RNA, 19 nt, Homo sapiens
  misc_RNA (1)...(19): siRNA sense strand
ucaauccgccagacacaga

SEQ ID NO: 540427 - RNA, 19 nt, Homo sapiens
  misc_RNA (1)...(19): siRNA sense strand
ccagucucccgucuacuuu

SEQ ID NO: 540428 - RNA, 19 nt, Homo sapiens
  misc_RNA (1)...(19): siRNA sense strand
ugcuggcgcucuuuacuga

SEQ ID NO: 540429 - RNA, 19 nt, Homo sapiens
  misc_RNA (1)...(19): siRNA sense strand
gaccaucaaguuuauguac

SEQ ID NO: 540430 - RNA, 19 nt, Homo sapiens
  misc_RNA (1)...(19): siRNA sense strand
gcuaccacaucgccuuugg

SEQ ID NO: 540431 - RNA, 19 nt, Homo sapiens
  misc_RNA (1)...(19): siRNA sense strand
acagcaaggagaagcagua

SEQ ID NO: 540432 - RNA, 19 nt, Homo sapiens
  misc_RNA (1)...(19): siRNA sense strand
gcucagugccguggucaug

SEQ ID NO: 540433 - RNA, 19 nt, Homo sapiens
  misc_RNA (1)...(19): siRNA sense strand
agaagccugugaugcuguu

SEQ ID NO: 540434 - RNA, 19 nt, Homo sapiens
  misc_RNA (1)...(19): siRNA sense strand
ccagcuggucugucaacua

SEQ ID NO: 540435 - RNA, 19 nt, Homo sapiens
  misc_RNA (1)...(19): siRNA sense strand
cugauccucucccaccauu

SEQ ID NO: 540436 - RNA, 19 nt, Homo sapiens
  misc_RNA (1)...(19): siRNA sense strand
gggagaauuccucaacuac

SEQ ID NO: 540437 - RNA, 19 nt, Homo sapiens
  misc_RNA (1)...(19): siRNA sense strand
ugccagcgccuuugacuuc

SEQ ID NO: 540438 - RNA, 19 nt, Homo sapiens
  misc_RNA (1)...(19): siRNA sense strand
gccuuugacuucacugucu

SEQ ID NO: 540439 - RNA, 19 nt, Homo sapiens
  misc_RNA (1)...(19): siRNA sense strand
gugaaaacaucgcccacuu

SEQ ID NO: 540440 - RNA, 19 nt, Homo sapiens
  misc_RNA (1)...(19): siRNA sense strand
caacuacgacaugcucauc

SEQ ID NO: 540441 - RNA, 19 nt, Homo sapiens
  misc_RNA (1)...(19): siRNA sense strand
caucaaguuuauguacaca

SEQ ID NO: 540442 - RNA, 19 nt, Homo sapiens
  misc_RNA (1)...(19): siRNA sense strand
cuauggcaacgucauugua

SEQ ID NO: 540443 - RNA, 19 nt, Homo sapiens
  misc_RNA (1)...(19): siRNA sense strand
ccaagcugcacgccgacua

SEQ ID NO: 540444 - RNA, 19 nt, Homo sapiens
  misc_RNA (1)...(19): siRNA sense strand
cugaagcuguggagugucu

SEQ ID NO: 540445 - RNA, 19 nt, Homo sapiens
  misc_RNA (1)...(19): siRNA sense strand
ccaucaaguuuauguacac

SEQ ID NO: 540446 - RNA, 19 nt, Homo sapiens
  misc_RNA (1)...(19): siRNA sense strand
agaagaagcucaacaucua

SEQ ID NO: 540447 - RNA, 19 nt, Homo sapiens
  misc_RNA (1)...(19): siRNA sense strand
gaauaucgcugaagaucug

SEQ ID NO: 540448 - RNA, 19 nt, Homo sapiens
  misc_RNA (1)...(19): siRNA sense strand
gugcagagcuccaauguac

SEQ ID NO: 540449 - RNA, 19 nt, Homo sapiens
  misc_RNA (1)...(19): siRNA sense strand
gcaggaacauggcacuuuc

SEQ ID NO: 540450 - RNA, 19 nt, Homo sapiens
  misc_RNA (1)...(19): siRNA sense strand
guacaagugucggauguga

SEQ ID NO: 540451 - RNA, 19 nt, Homo sapiens
  misc_RNA (1)...(19): siRNA sense strand
gaaaauagaccgcgaacaa

SEQ ID NO: 540452 - RNA, 19 nt, Homo sapiens
  misc_RNA (1)...(19): siRNA sense strand
gcaacgaaaugaaccucuu

SEQ ID NO: 540453 - RNA, 19 nt, Homo sapiens
  misc_RNA (1)...(19): siRNA sense strand
gaauuacugcuaucaggua

SEQ ID NO: 540454 - RNA, 19 nt, Homo sapiens
  misc_RNA (1)...(19): siRNA sense strand
gcuccaauguacccaguaa

SEQ ID NO: 540455 - RNA, 19 nt, Homo sapiens
  misc_RNA (1)...(19): siRNA sense strand
caaccagaauuacugcuau

SEQ ID NO: 540456 - RNA, 19 nt, Homo sapiens
  misc_RNA (1)...(19): siRNA sense strand
ggacuccaaugacaaugug

SEQ ID NO: 540457 - RNA, 19 nt, Homo sapiens
  misc_RNA (1)...(19): siRNA sense strand
gcaugagcgucuucaccua

SEQ ID NO: 540458 - RNA, 19 nt, Homo sapiens
  misc_RNA (1)...(19): siRNA sense strand
guaagucgauccagguaca

SEQ ID NO: 540459 - RNA, 19 nt, Homo sapiens
  misc_RNA (1)...(19): siRNA sense strand
gcggcgaguuggacuauga

SEQ ID NO: 540460 - RNA, 19 nt, Homo sapiens
  misc_RNA (1)...(19): siRNA sense strand
gaagaaacucagcaaguca

SEQ ID NO: 540461 - RNA, 19 nt, Homo sapiens
  misc_RNA (1)...(19): siRNA sense strand
gaucugggucuggacauua

SEQ ID NO: 540462 - RNA, 19 nt, Homo sapiens
  misc_RNA (1)...(19): siRNA sense strand
ggagguaagcggcgaguug

SEQ ID NO: 540463 - RNA, 19 nt, Homo sapiens
  misc_RNA (1)...(19): siRNA sense strand
ucgaggugcuggacauuaa

SEQ ID NO: 540464 - RNA, 19 nt, Homo sapiens
  misc_RNA (1)...(19): siRNA sense strand
uaacgccacugucaacauc

SEQ ID NO: 540465 - RNA, 19 nt, Homo sapiens
  misc_RNA (1)...(19): siRNA sense strand
gagaagaagcucaacaucu

SEQ ID NO: 540466 - RNA, 19 nt, Homo sapiens
  misc_RNA (1)...(19): siRNA sense strand
gaagaagcucaacaucuau

SEQ ID NO: 540467 - RNA, 19 nt, Homo sapiens
  misc_RNA (1)...(19): siRNA sense strand
ccucaagucuuccuuuaag

SEQ ID NO: 540468 - RNA, 19 nt, Homo sapiens
  misc_RNA (1)...(19): siRNA sense strand
gcaagaagaaacucagcaa

SEQ ID NO: 540469 - RNA, 19 nt, Homo sapiens
  misc_RNA (1)...(19): siRNA sense strand
gcgaacaaaucugcaaaca

SEQ ID NO: 540470 - RNA, 19 nt, Homo sapiens
  misc_RNA (1)...(19): siRNA sense strand
ucaccuacguuucuaucaa

SEQ ID NO: 540471 - RNA, 19 nt, Homo sapiens
  misc_RNA (1)...(19): siRNA sense strand
caacgaaaugaaccucuuu

SEQ ID NO: 540472 - RNA, 19 nt, Homo sapiens
  misc_RNA (1)...(19): siRNA sense strand
gaccugauguuucuuaagc

SEQ ID NO: 540473 - RNA, 19 nt, Homo sapiens
  misc_RNA (1)...(19): siRNA sense strand
gaugguggaaggagucuuu

SEQ ID NO: 540474 - RNA, 19 nt, Homo sapiens
  misc_RNA (1)...(19): siRNA sense strand
gcacggcccuacucaccau

SEQ ID NO: 540475 - RNA, 19 nt, Homo sapiens
  misc_RNA (1)...(19): siRNA sense strand
agaagaaacucagcaaguc

SEQ ID NO: 540476 - RNA, 19 nt, Homo sapiens
  misc_RNA (1)...(19): siRNA sense strand
ugaaggaagcggugaguga

SEQ ID NO: 540477 - RNA, 19 nt, Homo sapiens
  misc_RNA (1)...(19): siRNA sense strand
cgccucaagucuuccuuua

SEQ ID NO: 540478 - RNA, 19 nt, Homo sapiens
  misc_RNA (1)...(19): siRNA sense strand
cuuaugagcuggugaucga

SEQ ID NO: 540479 - RNA, 19 nt, Homo sapiens
  misc_RNA (1)...(19): siRNA sense strand
caagaccgaccugauguuu

SEQ ID NO: 540480 - RNA, 19 nt, Homo sapiens
  misc_RNA (1)...(19): siRNA sense strand
guacggacacugagcacaa

SEQ ID NO: 540481 - RNA, 19 nt, Homo sapiens
  misc_RNA (1)...(19): siRNA sense strand
agaccgaccugauguuucu

SEQ ID NO: 540482 - RNA, 19 nt, Homo sapiens
  misc_RNA (1)...(19): siRNA sense strand
gggccaucgucaccgguua

SEQ ID NO: 540483 - RNA, 19 nt, Homo sapiens
  misc_RNA (1)...(19): siRNA sense strand
ccagcagccugauaucauc

SEQ ID NO: 540484 - RNA, 19 nt, Homo sapiens
  misc_RNA (1)...(19): siRNA sense strand
gcacugugguggcccuuuu

SEQ ID NO: 540485 - RNA, 19 nt, Homo sapiens
  misc_RNA (1)...(19): siRNA sense strand
gaauuacuacaccaucguu

SEQ ID NO: 540486 - RNA, 19 nt, Homo sapiens
  misc_RNA (1)...(19): siRNA sense strand
aaauagaccgcgaacaaau

SEQ ID NO: 540487 - RNA, 19 nt, Homo sapiens
  misc_RNA (1)...(19): siRNA sense strand
cagcaagucagacaucaug

SEQ ID NO: 540488 - RNA, 19 nt, Homo sapiens
  misc_RNA (1)...(19): siRNA sense strand
ugacaacgcgccagagauc

SEQ ID NO: 540489 - RNA, 19 nt, Homo sapiens
  misc_RNA (1)...(19): siRNA sense strand
cgacguguaugugacugaa

SEQ ID NO: 540490 - RNA, 19 nt, Homo sapiens
  misc_RNA (1)...(19): siRNA sense strand
gaguuggacuaugaagaga

SEQ ID NO: 540491 - RNA, 19 nt, Homo sapiens
  misc_RNA (1)...(19): siRNA sense strand
gggaauaucgcugaagauc

SEQ ID NO: 540492 - RNA, 19 nt, Homo sapiens
  misc_RNA (1)...(19): siRNA sense strand
gaacggugaggucguguac

SEQ ID NO: 540493 - RNA, 19 nt, Homo sapiens
  misc_RNA (1)...(19): siRNA sense strand
aagaagcucaacaucuaua

SEQ ID NO: 540494 - RNA, 19 nt, Homo sapiens
  misc_RNA (1)...(19): siRNA sense strand
ccugcgcucuccaccagua

SEQ ID NO: 540495 - RNA, 19 nt, Homo sapiens
  misc_RNA (1)...(19): siRNA sense strand
gcugguaacgccacuguca

SEQ ID NO: 540496 - RNA, 19 nt, Homo sapiens
  misc_RNA (1)...(19): siRNA sense strand
gcaggugcagugcgagcua

SEQ ID NO: 540497 - RNA, 19 nt, Homo sapiens
  misc_RNA (1)...(19): siRNA sense strand
ggaauaucgcugaagaucu

SEQ ID NO: 540498 - RNA, 19 nt, Homo sapiens
  misc_RNA (1)...(19): siRNA sense strand
gggaggaguaggagaagga

SEQ ID NO: 540499 - RNA, 19 nt, Homo sapiens
  misc_RNA (1)...(19): siRNA sense strand
ugagaacggcuacuuguac

SEQ ID NO: 540500 - RNA, 19 nt, Homo sapiens
  misc_RNA (1)...(19): siRNA sense strand
gcucaacaucuauacuugu

SEQ ID NO: 540501 - RNA, 19 nt, Homo sapiens
  misc_RNA (1)...(19): siRNA sense strand
cgaguuggacuaugaagag

SEQ ID NO: 540502 - RNA, 19 nt, Homo sapiens
  misc_RNA (1)...(19): siRNA sense strand
gaccagcagccugauauca

SEQ ID NO: 540503 - RNA, 19 nt, Homo sapiens
  misc_RNA (1)...(19): siRNA sense strand
aaacucagcaagucagaca

SEQ ID NO: 540504 - RNA, 19 nt, Homo sapiens
  misc_RNA (1)...(19): siRNA sense strand
aagaagaaacucagcaagu

SEQ ID NO: 540505 - RNA, 19 nt, Homo sapiens
  misc_RNA (1)...(19): siRNA sense strand
acuaugagcagcugaagga

SEQ ID NO: 540506 - RNA, 19 nt, Homo sapiens
  misc_RNA (1)...(19): siRNA sense strand
cuacguuucuaucaacucu

SEQ ID NO: 540507 - RNA, 19 nt, Homo sapiens
  misc_RNA (1)...(19): siRNA sense strand
ugcgaguacuggaugcuaa

SEQ ID NO: 540508 - RNA, 19 nt, Homo sapiens
  misc_RNA (1)...(19): siRNA sense strand
gaguacuggaugcuaauga

SEQ ID NO: 540509 - RNA, 19 nt, Homo sapiens
  misc_RNA (1)...(19): siRNA sense strand
augagcagcugaaggacuu

SEQ ID NO: 540510 - RNA, 19 nt, Homo sapiens
  misc_RNA (1)...(19): siRNA sense strand
guacgugaacgagaaaaua

SEQ ID NO: 540511 - RNA, 19 nt, Homo sapiens
  misc_RNA (1)...(19): siRNA sense strand
gccaagaccgaccugaugu

SEQ ID NO: 540512 - RNA, 19 nt, Homo sapiens
  misc_RNA (1)...(19): siRNA sense strand
cagcuugccuacucuaucc

SEQ ID NO: 540513 - RNA, 19 nt, Homo sapiens
  misc_RNA (1)...(19): siRNA sense strand
ccgaccugauguuucuuaa

SEQ ID NO: 540514 - RNA, 19 nt, Homo sapiens
  misc_RNA (1)...(19): siRNA sense strand
gcacuuucguggggaauau

SEQ ID NO: 540515 - RNA, 19 nt, Homo sapiens
  misc_RNA (1)...(19): siRNA sense strand
ccaagaccgaccugauguu

SEQ ID NO: 540516 - RNA, 19 nt, Homo sapiens
  misc_RNA (1)...(19): siRNA sense strand
acaaccagaauuacugcua

SEQ ID NO: 540517 - RNA, 19 nt, Homo sapiens
  misc_RNA (1)...(19): siRNA sense strand
aagcucaacaucuauacuu

SEQ ID NO: 540518 - RNA, 19 nt, Homo sapiens
  misc_RNA (1)...(19): siRNA sense strand
gaucgaggugcuggacauu

SEQ ID NO: 540519 - RNA, 19 nt, Homo sapiens
  misc_RNA (1)...(19): siRNA sense strand
ggugcagagcuccaaugua

SEQ ID NO: 540520 - RNA, 19 nt, Homo sapiens
  misc_RNA (1)...(19): siRNA sense strand
gcgaguuggacuaugaaga

SEQ ID NO: 540521 - RNA, 19 nt, Homo sapiens
  misc_RNA (1)...(19): siRNA sense strand
cccaggcacucucgugauc

SEQ ID NO: 540522 - RNA, 19 nt, Homo sapiens
  misc_RNA (1)...(19): siRNA sense strand
cgaccaacccgucuacacu

SEQ ID NO: 540523 - RNA, 19 nt, Homo sapiens
  misc_RNA (1)...(19): siRNA sense strand
gaggugcuggacauuaaug

SEQ ID NO: 540524 - RNA, 19 nt, Homo sapiens
  misc_RNA (1)...(19): siRNA sense strand
agccugauaucaucuccaa

SEQ ID NO: 540525 - RNA, 19 nt, Homo sapiens
  misc_RNA (1)...(19): siRNA sense strand
caccuacguuucuaucaac

SEQ ID NO: 540526 - RNA, 19 nt, Homo sapiens
  misc_RNA (1)...(19): siRNA sense strand
gccucaagucuuccuuuaa

SEQ ID NO: 540527 - RNA, 19 nt, Homo sapiens
  misc_RNA (1)...(19): siRNA sense strand
gaggucguguacuccuuca

SEQ ID NO: 540528 - RNA, 19 nt, Homo sapiens
  misc_RNA (1)...(19): siRNA sense strand
ccaacuccuugcgcgacua

SEQ ID NO: 540529 - RNA, 19 nt, Homo sapiens
  misc_RNA (1)...(19): siRNA sense strand
aaagagaagaagcucaaca

SEQ ID NO: 540530 - RNA, 19 nt, Homo sapiens
  misc_RNA (1)...(19): siRNA sense strand
gugcguggcaacgaaauga

SEQ ID NO: 540531 - RNA, 19 nt, Homo sapiens
  misc_RNA (1)...(19): siRNA sense strand
acguuucuaucaacucuga

SEQ ID NO: 540532 - RNA, 19 nt, Homo sapiens
  misc_RNA (1)...(19): siRNA sense strand
caguaagucgauccaggua

SEQ ID NO: 540533 - RNA, 19 nt, Homo sapiens
  misc_RNA (1)...(19): siRNA sense strand
augacaaugugcccgcuuu

SEQ ID NO: 540534 - RNA, 19 nt, Homo sapiens
  misc_RNA (1)...(19): siRNA sense strand
gugcuggacauuaaugaca

SEQ ID NO: 540535 - RNA, 19 nt, Homo sapiens
  misc_RNA (1)...(19): siRNA sense strand
guaacgccacugucaacau

SEQ ID NO: 540536 - RNA, 19 nt, Homo sapiens
  misc_RNA (1)...(19): siRNA sense strand
cugagaacggcuacuugua

SEQ ID NO: 540537 - RNA, 19 nt, Homo sapiens
  misc_RNA (1)...(19): siRNA sense strand
gagcgucuucaccuacguu

SEQ ID NO: 540538 - RNA, 19 nt, Homo sapiens
  misc_RNA (1)...(19): siRNA sense strand
gugaggucguguacuccuu

SEQ ID NO: 540539 - RNA, 19 nt, Homo sapiens
  misc_RNA (1)...(19): siRNA sense strand
agaagaagcucaacaucua

SEQ ID NO: 540540 - RNA, 19 nt, Homo sapiens
  misc_RNA (1)...(19): siRNA sense strand
gaauaucgcugaagaucug

SEQ ID NO: 540541 - RNA, 19 nt, Homo sapiens
  misc_RNA (1)...(19): siRNA sense strand
gugcagagcuccaauguac

SEQ ID NO: 540542 - RNA, 19 nt, Homo sapiens
  misc_RNA (1)...(19): siRNA sense strand
gcaggaacauggcacuuuc

SEQ ID NO: 540543 - RNA, 19 nt, Homo sapiens
  misc_RNA (1)...(19): siRNA sense strand
guacaagugucggauguga

SEQ ID NO: 540544 - RNA, 19 nt, Homo sapiens
  misc_RNA (1)...(19): siRNA sense strand
gaaaauagaccgcgaacaa

SEQ ID NO: 540545 - RNA, 19 nt, Homo sapiens
  misc_RNA (1)...(19): siRNA sense strand
gcaacgaaaugaaccucuu

SEQ ID NO: 540546 - RNA, 19 nt, Homo sapiens
  misc_RNA (1)...(19): siRNA sense strand
gaauuacugcuaucaggua

SEQ ID NO: 540547 - RNA, 19 nt, Homo sapiens
  misc_RNA (1)...(19): siRNA sense strand
gcuccaauguacccaguaa

SEQ ID NO: 540548 - RNA, 19 nt, Homo sapiens
  misc_RNA (1)...(19): siRNA sense strand
caaccagaauuacugcuau

SEQ ID NO: 540549 - RNA, 19 nt, Homo sapiens
  misc_RNA (1)...(19): siRNA sense strand
ggacuccaaugacaaugug

SEQ ID NO: 540550 - RNA, 19 nt, Homo sapiens
  misc_RNA (1)...(19): siRNA sense strand
gcaugagcgucuucaccua

SEQ ID NO: 540551 - RNA, 19 nt, Homo sapiens
  misc_RNA (1)...(19): siRNA sense strand
guaagucgauccagguaca

SEQ ID NO: 540552 - RNA, 19 nt, Homo sapiens
  misc_RNA (1)...(19): siRNA sense strand
gcggcgaguuggacuauga

SEQ ID NO: 540553 - RNA, 19 nt, Homo sapiens
  misc_RNA (1)...(19): siRNA sense strand
gaagaaacucagcaaguca

SEQ ID NO: 540554 - RNA, 19 nt, Homo sapiens
  misc_RNA (1)...(19): siRNA sense strand
gaucugggucuggacauua

SEQ ID NO: 540555 - RNA, 19 nt, Homo sapiens
  misc_RNA (1)...(19): siRNA sense strand
ggagguaagcggcgaguug

SEQ ID NO: 540556 - RNA, 19 nt, Homo sapiens
  misc_RNA (1)...(19): siRNA sense strand
ucgaggugcuggacauuaa

SEQ ID NO: 540557 - RNA, 19 nt, Homo sapiens
  misc_RNA (1)...(19): siRNA sense strand
uaacgccacugucaacauc

SEQ ID NO: 540558 - RNA, 19 nt, Homo sapiens
  misc_RNA (1)...(19): siRNA sense strand
gagaagaagcucaacaucu

SEQ ID NO: 540559 - RNA, 19 nt, Homo sapiens
  misc_RNA (1)...(19): siRNA sense strand
gaagaagcucaacaucuau

SEQ ID NO: 540560 - RNA, 19 nt, Homo sapiens
  misc_RNA (1)...(19): siRNA sense strand
ccucaagucuuccuuuaag

SEQ ID NO: 540561 - RNA, 19 nt, Homo sapiens
  misc_RNA (1)...(19): siRNA sense strand
gcaagaagaaacucagcaa

SEQ ID NO: 540562 - RNA, 19 nt, Homo sapiens
  misc_RNA (1)...(19): siRNA sense strand
gcgaacaaaucugcaaaca

SEQ ID NO: 540563 - RNA, 19 nt, Homo sapiens
  misc_RNA (1)...(19): siRNA sense strand
ucaccuacguuucuaucaa

SEQ ID NO: 540564 - RNA, 19 nt, Homo sapiens
  misc_RNA (1)...(19): siRNA sense strand
caacgaaaugaaccucuuu

SEQ ID NO: 540565 - RNA, 19 nt, Homo sapiens
  misc_RNA (1)...(19): siRNA sense strand
gaccugauguuucuuaagc

SEQ ID NO: 540566 - RNA, 19 nt, Homo sapiens
  misc_RNA (1)...(19): siRNA sense strand
gaugguggaaggagucuuu

SEQ ID NO: 540567 - RNA, 19 nt, Homo sapiens
  misc_RNA (1)...(19): siRNA sense strand
gcacggcccuacucaccau

SEQ ID NO: 540568 - RNA, 19 nt, Homo sapiens
  misc_RNA (1)...(19): siRNA sense strand
agaagaaacucagcaaguc

SEQ ID NO: 540569 - RNA, 19 nt, Homo sapiens
  misc_RNA (1)...(19): siRNA sense strand
ugaaggaagcggugaguga

SEQ ID NO: 540570 - RNA, 19 nt, Homo sapiens
  misc_RNA (1)...(19): siRNA sense strand
cgccucaagucuuccuuua

SEQ ID NO: 540571 - RNA, 19 nt, Homo sapiens
  misc_RNA (1)...(19): siRNA sense strand
cuuaugagcuggugaucga

SEQ ID NO: 540572 - RNA, 19 nt, Homo sapiens
  misc_RNA (1)...(19): siRNA sense strand
caagaccgaccugauguuu

SEQ ID NO: 540573 - RNA, 19 nt, Homo sapiens
  misc_RNA (1)...(19): siRNA sense strand
guacggacacugagcacaa

SEQ ID NO: 540574 - RNA, 19 nt, Homo sapiens
  misc_RNA (1)...(19): siRNA sense strand
agaccgaccugauguuucu

SEQ ID NO: 540575 - RNA, 19 nt, Homo sapiens
  misc_RNA (1)...(19): siRNA sense strand
gggccaucgucaccgguua

SEQ ID NO: 540576 - RNA, 19 nt, Homo sapiens
  misc_RNA (1)...(19): siRNA sense strand
ccagcagccugauaucauc

SEQ ID NO: 540577 - RNA, 19 nt, Homo sapiens
  misc_RNA (1)...(19): siRNA sense strand
gcacugugguggcccuuuu

SEQ ID NO: 540578 - RNA, 19 nt, Homo sapiens
  misc_RNA (1)...(19): siRNA sense strand
gaauuacuacaccaucguu

SEQ ID NO: 540579 - RNA, 19 nt, Homo sapiens
  misc_RNA (1)...(19): siRNA sense strand
aaauagaccgcgaacaaau

SEQ ID NO: 540580 - RNA, 19 nt, Homo sapiens
  misc_RNA (1)...(19): siRNA sense strand
cagcaagucagacaucaug

SEQ ID NO: 540581 - RNA, 19 nt, Homo sapiens
  misc_RNA (1)...(19): siRNA sense strand
ugacaacgcgccagagauc

SEQ ID NO: 540582 - RNA, 19 nt, Homo sapiens
  misc_RNA (1)...(19): siRNA sense strand
cgacguguaugugacugaa

SEQ ID NO: 540583 - RNA, 19 nt, Homo sapiens
  misc_RNA (1)...(19): siRNA sense strand
gaguuggacuaugaagaga

SEQ ID NO: 540584 - RNA, 19 nt, Homo sapiens
  misc_RNA (1)...(19): siRNA sense strand
gggaauaucgcugaagauc

SEQ ID NO: 540585 - RNA, 19 nt, Homo sapiens
  misc_RNA (1)...(19): siRNA sense strand
gaacggugaggucguguac

SEQ ID NO: 540586 - RNA, 19 nt, Homo sapiens
  misc_RNA (1)...(19): siRNA sense strand
aagaagcucaacaucuaua

SEQ ID NO: 540587 - RNA, 19 nt, Homo sapiens
  misc_RNA (1)...(19): siRNA sense strand
ccugcgcucuccaccagua

SEQ ID NO: 540588 - RNA, 19 nt, Homo sapiens
  misc_RNA (1)...(19): siRNA sense strand
gcugguaacgccacuguca

SEQ ID NO: 540589 - RNA, 19 nt, Homo sapiens
  misc_RNA (1)...(19): siRNA sense strand
gcaggugcagugcgagcua

SEQ ID NO: 540590 - RNA, 19 nt, Homo sapiens
  misc_RNA (1)...(19): siRNA sense strand
ggaauaucgcugaagaucu

SEQ ID NO: 540591 - RNA, 19 nt, Homo sapiens
  misc_RNA (1)...(19): siRNA sense strand
gggaggaguaggagaagga

SEQ ID NO: 540592 - RNA, 19 nt, Homo sapiens
  misc_RNA (1)...(19): siRNA sense strand
ugagaacggcuacuuguac

SEQ ID NO: 540593 - RNA, 19 nt, Homo sapiens
  misc_RNA (1)...(19): siRNA sense strand
gcucaacaucuauacuugu

SEQ ID NO: 540594 - RNA, 19 nt, Homo sapiens
  misc_RNA (1)...(19): siRNA sense strand
cgaguuggacuaugaagag

SEQ ID NO: 540595 - RNA, 19 nt, Homo sapiens
  misc_RNA (1)...(19): siRNA sense strand
gaccagcagccugauauca

SEQ ID NO: 540596 - RNA, 19 nt, Homo sapiens
  misc_RNA (1)...(19): siRNA sense strand
aaacucagcaagucagaca

SEQ ID NO: 540597 - RNA, 19 nt, Homo sapiens
  misc_RNA (1)...(19): siRNA sense strand
aagaagaaacucagcaagu

SEQ ID NO: 540598 - RNA, 19 nt, Homo sapiens
  misc_RNA (1)...(19): siRNA sense strand
acuaugagcagcugaagga

SEQ ID NO: 540599 - RNA, 19 nt, Homo sapiens
  misc_RNA (1)...(19): siRNA sense strand
cuacguuucuaucaacucu

SEQ ID NO: 540600 - RNA, 19 nt, Homo sapiens
  misc_RNA (1)...(19): siRNA sense strand
ugcgaguacuggaugcuaa

SEQ ID NO: 540601 - RNA, 19 nt, Homo sapiens
  misc_RNA (1)...(19): siRNA sense strand
gaguacuggaugcuaauga

SEQ ID NO: 540602 - RNA, 19 nt, Homo sapiens
  misc_RNA (1)...(19): siRNA sense strand
augagcagcugaaggacuu

SEQ ID NO: 540603 - RNA, 19 nt, Homo sapiens
  misc_RNA (1)...(19): siRNA sense strand
guacgugaacgagaaaaua

SEQ ID NO: 540604 - RNA, 19 nt, Homo sapiens
  misc_RNA (1)...(19): siRNA sense strand
gccaagaccgaccugaugu

SEQ ID NO: 540605 - RNA, 19 nt, Homo sapiens
  misc_RNA (1)...(19): siRNA sense strand
cagcuugccuacucuaucc

SEQ ID NO: 540606 - RNA, 19 nt, Homo sapiens
  misc_RNA (1)...(19): siRNA sense strand
ccgaccugauguuucuuaa

SEQ ID NO: 540607 - RNA, 19 nt, Homo sapiens
  misc_RNA (1)...(19): siRNA sense strand
gcacuuucguggggaauau

SEQ ID NO: 540608 - RNA, 19 nt, Homo sapiens
  misc_RNA (1)...(19): siRNA sense strand
ccaagaccgaccugauguu

SEQ ID NO: 540609 - RNA, 19 nt, Homo sapiens
  misc_RNA (1)...(19): siRNA sense strand
acaaccagaauuacugcua

SEQ ID NO: 540610 - RNA, 19 nt, Homo sapiens
  misc_RNA (1)...(19): siRNA sense strand
aagcucaacaucuauacuu

SEQ ID NO: 540611 - RNA, 19 nt, Homo sapiens
  misc_RNA (1)...(19): siRNA sense strand
gaucgaggugcuggacauu

SEQ ID NO: 540612 - RNA, 19 nt, Homo sapiens
  misc_RNA (1)...(19): siRNA sense strand
ggugcagagcuccaaugua

SEQ ID NO: 540613 - RNA, 19 nt, Homo sapiens
  misc_RNA (1)...(19): siRNA sense strand
gcgaguuggacuaugaaga

SEQ ID NO: 540614 - RNA, 19 nt, Homo sapiens
  misc_RNA (1)...(19): siRNA sense strand
cccaggcacucucgugauc

SEQ ID NO: 540615 - RNA, 19 nt, Homo sapiens
  misc_RNA (1)...(19): siRNA sense strand
cgaccaacccgucuacacu

SEQ ID NO: 540616 - RNA, 19 nt, Homo sapiens
  misc_RNA (1)...(19): siRNA sense strand
gaggugcuggacauuaaug

SEQ ID NO: 540617 - RNA, 19 nt, Homo sapiens
  misc_RNA (1)...(19): siRNA sense strand
agccugauaucaucuccaa

SEQ ID NO: 540618 - RNA, 19 nt, Homo sapiens
  misc_RNA (1)...(19): siRNA sense strand
caccuacguuucuaucaac

SEQ ID NO: 540619 - RNA, 19 nt, Homo sapiens
  misc_RNA (1)...(19): siRNA sense strand
gccucaagucuuccuuuaa

SEQ ID NO: 540620 - RNA, 19 nt, Homo sapiens
  misc_RNA (1)...(19): siRNA sense strand
gaggucguguacuccuuca

SEQ ID NO: 540621 - RNA, 19 nt, Homo sapiens
  misc_RNA (1)...(19): siRNA sense strand
ccaacuccuugcgcgacua

SEQ ID NO: 540622 - RNA, 19 nt, Homo sapiens
  misc_RNA (1)...(19): siRNA sense strand
aaagagaagaagcucaaca

SEQ ID NO: 540623 - RNA, 19 nt, Homo sapiens
  misc_RNA (1)...(19): siRNA sense strand
gugcguggcaacgaaauga

SEQ ID NO: 540624 - RNA, 19 nt, Homo sapiens
  misc_RNA (1)...(19): siRNA sense strand
acguuucuaucaacucuga

SEQ ID NO: 540625 - RNA, 19 nt, Homo sapiens
  misc_RNA (1)...(19): siRNA sense strand
caguaagucgauccaggua

SEQ ID NO: 540626 - RNA, 19 nt, Homo sapiens
  misc_RNA (1)...(19): siRNA sense strand
augacaaugugcccgcuuu

SEQ ID NO: 540627 - RNA, 19 nt, Homo sapiens
  misc_RNA (1)...(19): siRNA sense strand
gugcuggacauuaaugaca

SEQ ID NO: 540628 - RNA, 19 nt, Homo sapiens
  misc_RNA (1)...(19): siRNA sense strand
guaacgccacugucaacau

SEQ ID NO: 540629 - RNA, 19 nt, Homo sapiens
  misc_RNA (1)...(19): siRNA sense strand
cugagaacggcuacuugua

SEQ ID NO: 540630 - RNA, 19 nt, Homo sapiens
  misc_RNA (1)...(19): siRNA sense strand
gagcgucuucaccuacguu

SEQ ID NO: 540631 - RNA, 19 nt, Homo sapiens
  misc_RNA (1)...(19): siRNA sense strand
gugaggucguguacuccuu

SEQ ID NO: 540632 - RNA, 19 nt, Homo sapiens
  misc_RNA (1)...(19): siRNA sense strand
gagaugagcugcccuguga

SEQ ID NO: 540633 - RNA, 19 nt, Homo sapiens
  misc_RNA (1)...(19): siRNA sense strand
ugaaggagaugaagcaaua

SEQ ID NO: 540634 - RNA, 19 nt, Homo sapiens
  misc_RNA (1)...(19): siRNA sense strand
ggagaaagcugagcacugu

SEQ ID NO: 540635 - RNA, 19 nt, Homo sapiens
  misc_RNA (1)...(19): siRNA sense strand
gaagugagcuggaggacau

SEQ ID NO: 540636 - RNA, 19 nt, Homo sapiens
  misc_RNA (1)...(19): siRNA sense strand
ggagaaaguucagcaguau

SEQ ID NO: 540637 - RNA, 19 nt, Homo sapiens
  misc_RNA (1)...(19): siRNA sense strand
gaaagaagaguguacaauc

SEQ ID NO: 540638 - RNA, 19 nt, Homo sapiens
  misc_RNA (1)...(19): siRNA sense strand
ggaagaaggagucaacuug

SEQ ID NO: 540639 - RNA, 19 nt, Homo sapiens
  misc_RNA (1)...(19): siRNA sense strand
gagaagcuguaccacauga

SEQ ID NO: 540640 - RNA, 19 nt, Homo sapiens
  misc_RNA (1)...(19): siRNA sense strand
ggacaacauucagagauau

SEQ ID NO: 540641 - RNA, 19 nt, Homo sapiens
  misc_RNA (1)...(19): siRNA sense strand
ccaaagagaucaucaaaau

SEQ ID NO: 540642 - RNA, 19 nt, Homo sapiens
  misc_RNA (1)...(19): siRNA sense strand
gggagaagcuguaccacau

SEQ ID NO: 540643 - RNA, 19 nt, Homo sapiens
  misc_RNA (1)...(19): siRNA sense strand
gaagaucuacuccaucaau

SEQ ID NO: 540644 - RNA, 19 nt, Homo sapiens
  misc_RNA (1)...(19): siRNA sense strand
caacaacaauggcgaguac

SEQ ID NO: 540645 - RNA, 19 nt, Homo sapiens
  misc_RNA (1)...(19): siRNA sense strand
agaaaguucagcaguauua

SEQ ID NO: 540646 - RNA, 19 nt, Homo sapiens
  misc_RNA (1)...(19): siRNA sense strand
ucacgaaagugcuggagaa

SEQ ID NO: 540647 - RNA, 19 nt, Homo sapiens
  misc_RNA (1)...(19): siRNA sense strand
aaugucaccuucuccuuua

SEQ ID NO: 540648 - RNA, 19 nt, Homo sapiens
  misc_RNA (1)...(19): siRNA sense strand
uuaagcagcuggacgagaa

SEQ ID NO: 540649 - RNA, 19 nt, Homo sapiens
  misc_RNA (1)...(19): siRNA sense strand
aaucaacacugaagucaug

SEQ ID NO: 540650 - RNA, 19 nt, Homo sapiens
  misc_RNA (1)...(19): siRNA sense strand
gagacucgguccuguccua

SEQ ID NO: 540651 - RNA, 19 nt, Homo sapiens
  misc_RNA (1)...(19): siRNA sense strand
agaaugagcaggugaugua

SEQ ID NO: 540652 - RNA, 19 nt, Homo sapiens
  misc_RNA (1)...(19): siRNA sense strand
gaagacauccuggaaguuc

SEQ ID NO: 540653 - RNA, 19 nt, Homo sapiens
  misc_RNA (1)...(19): siRNA sense strand
ggaggaggacuauggcuuu

SEQ ID NO: 540654 - RNA, 19 nt, Homo sapiens
  misc_RNA (1)...(19): siRNA sense strand
ccaagggugugaggcuuua

SEQ ID NO: 540655 - RNA, 19 nt, Homo sapiens
  misc_RNA (1)...(19): siRNA sense strand
ggccucagcuuccuacuca

SEQ ID NO: 540656 - RNA, 19 nt, Homo sapiens
  misc_RNA (1)...(19): siRNA sense strand
uuaaggagcuggccaagag

SEQ ID NO: 540657 - RNA, 19 nt, Homo sapiens
  misc_RNA (1)...(19): siRNA sense strand
uggagaaaguucagcagua

SEQ ID NO: 540658 - RNA, 19 nt, Homo sapiens
  misc_RNA (1)...(19): siRNA sense strand
ucgaagagaccaagcauuu

SEQ ID NO: 540659 - RNA, 19 nt, Homo sapiens
  misc_RNA (1)...(19): siRNA sense strand
ccacggacaucccuuugga

SEQ ID NO: 540660 - RNA, 19 nt, Homo sapiens
  misc_RNA (1)...(19): siRNA sense strand
uggacaacauucagagaua

SEQ ID NO: 540661 - RNA, 19 nt, Homo sapiens
  misc_RNA (1)...(19): siRNA sense strand
gcagcaacgugaugaacga

SEQ ID NO: 540662 - RNA, 19 nt, Homo sapiens
  misc_RNA (1)...(19): siRNA sense strand
ggacagcggauuaccauag

SEQ ID NO: 540663 - RNA, 19 nt, Homo sapiens
  misc_RNA (1)...(19): siRNA sense strand
ucauggagguggagaaugu

SEQ ID NO: 540664 - RNA, 19 nt, Homo sapiens
  misc_RNA (1)...(19): siRNA sense strand
caucaaugcucuccucaag

SEQ ID NO: 540665 - RNA, 19 nt, Homo sapiens
  misc_RNA (1)...(19): siRNA sense strand
ccacggcgguaaagauaga

SEQ ID NO: 540666 - RNA, 19 nt, Homo sapiens
  misc_RNA (1)...(19): siRNA sense strand
cgaaagugcuggagaacgu

SEQ ID NO: 540667 - RNA, 19 nt, Homo sapiens
  misc_RNA (1)...(19): siRNA sense strand
gaccaagcauuucccuaug

SEQ ID NO: 540668 - RNA, 19 nt, Homo sapiens
  misc_RNA (1)...(19): siRNA sense strand
acaaacagcuucgcaacga

SEQ ID NO: 540669 - RNA, 19 nt, Homo sapiens
  misc_RNA (1)...(19): siRNA sense strand
ucaagacccugguggacaa

SEQ ID NO: 540670 - RNA, 19 nt, Homo sapiens
  misc_RNA (1)...(19): siRNA sense strand
acacugugcuuccagauuc

SEQ ID NO: 540671 - RNA, 19 nt, Homo sapiens
  misc_RNA (1)...(19): siRNA sense strand
gugcaacaauggcuucaug

SEQ ID NO: 540672 - RNA, 19 nt, Homo sapiens
  misc_RNA (1)...(19): siRNA sense strand
ccaagcauuucccuaugaa

SEQ ID NO: 540673 - RNA, 19 nt, Homo sapiens
  misc_RNA (1)...(19): siRNA sense strand
gccagaggauugccugcua

SEQ ID NO: 540674 - RNA, 19 nt, Homo sapiens
  misc_RNA (1)...(19): siRNA sense strand
gcaagaaguccaccaagag

SEQ ID NO: 540675 - RNA, 19 nt, Homo sapiens
  misc_RNA (1)...(19): siRNA sense strand
ucaagguccuguucucgaa

SEQ ID NO: 540676 - RNA, 19 nt, Homo sapiens
  misc_RNA (1)...(19): siRNA sense strand
aagaauaagugguuugucu

SEQ ID NO: 540677 - RNA, 19 nt, Homo sapiens
  misc_RNA (1)...(19): siRNA sense strand
caaugucaccuucuccuuu

SEQ ID NO: 540678 - RNA, 19 nt, Homo sapiens
  misc_RNA (1)...(19): siRNA sense strand
ggacaacgugcaccuggaa

SEQ ID NO: 540679 - RNA, 19 nt, Homo sapiens
  misc_RNA (1)...(19): siRNA sense strand
ucagagauauguggaagau

SEQ ID NO: 540680 - RNA, 19 nt, Homo sapiens
  misc_RNA (1)...(19): siRNA sense strand
gagaugaagcaauauguca

SEQ ID NO: 540681 - RNA, 19 nt, Homo sapiens
  misc_RNA (1)...(19): siRNA sense strand
acaacacggccaagaauaa

SEQ ID NO: 540682 - RNA, 19 nt, Homo sapiens
  misc_RNA (1)...(19): siRNA sense strand
ggaccaugcuggaggacau

SEQ ID NO: 540683 - RNA, 19 nt, Homo sapiens
  misc_RNA (1)...(19): siRNA sense strand
ccacaucaaccucauggaa

SEQ ID NO: 540684 - RNA, 19 nt, Homo sapiens
  misc_RNA (1)...(19): siRNA sense strand
aggaagaucuacuccauca

SEQ ID NO: 540685 - RNA, 19 nt, Homo sapiens
  misc_RNA (1)...(19): siRNA sense strand
gcuuugacaucgaggagaa

SEQ ID NO: 540686 - RNA, 19 nt, Homo sapiens
  misc_RNA (1)...(19): siRNA sense strand
gaggaggacuauggcuuug

SEQ ID NO: 540687 - RNA, 19 nt, Homo sapiens
  misc_RNA (1)...(19): siRNA sense strand
caacgucuucuaccacauu

SEQ ID NO: 540688 - RNA, 19 nt, Homo sapiens
  misc_RNA (1)...(19): siRNA sense strand
gccacgacaccaugaguua

SEQ ID NO: 540689 - RNA, 19 nt, Homo sapiens
  misc_RNA (1)...(19): siRNA sense strand
ggucagcccacccuucaaa

SEQ ID NO: 540690 - RNA, 19 nt, Homo sapiens
  misc_RNA (1)...(19): siRNA sense strand
ccuagaaauuggugaaauc

SEQ ID NO: 540691 - RNA, 19 nt, Homo sapiens
  misc_RNA (1)...(19): siRNA sense strand
aaccacagcuuacaagagu

SEQ ID NO: 540692 - RNA, 19 nt, Homo sapiens
  misc_RNA (1)...(19): siRNA sense strand
gccaugugcuggagaagau

SEQ ID NO: 540693 - RNA, 19 nt, Homo sapiens
  misc_RNA (1)...(19): siRNA sense strand
caacggcucccucuacauc

SEQ ID NO: 540694 - RNA, 19 nt, Homo sapiens
  misc_RNA (1)...(19): siRNA sense strand
ccacagcuuacaagaguuu

SEQ ID NO: 540695 - RNA, 19 nt, Homo sapiens
  misc_RNA (1)...(19): siRNA sense strand
acaccaagcuggagagcau

SEQ ID NO: 540696 - RNA, 19 nt, Homo sapiens
  misc_RNA (1)...(19): siRNA sense strand
ggccaaagagaucaucaaa

SEQ ID NO: 540697 - RNA, 19 nt, Homo sapiens
  misc_RNA (1)...(19): siRNA sense strand
ccacgaaggccaaagagau

SEQ ID NO: 540698 - RNA, 19 nt, Homo sapiens
  misc_RNA (1)...(19): siRNA sense strand
gaagaugggacagcggauu

SEQ ID NO: 540699 - RNA, 19 nt, Homo sapiens
  misc_RNA (1)...(19): siRNA sense strand
cgacaaccuucucgucuac

SEQ ID NO: 540700 - RNA, 19 nt, Homo sapiens
  misc_RNA (1)...(19): siRNA sense strand
ccaugaggaugcccaggaa

SEQ ID NO: 540701 - RNA, 19 nt, Homo sapiens
  misc_RNA (1)...(19): siRNA sense strand
gcaugaacuugggaauguu

SEQ ID NO: 540702 - RNA, 19 nt, Homo sapiens
  misc_RNA (1)...(19): siRNA sense strand
ggacuauggcuuugacauc

SEQ ID NO: 540703 - RNA, 19 nt, Homo sapiens
  misc_RNA (1)...(19): siRNA sense strand
gacaagcaccaguucaaga

SEQ ID NO: 540704 - RNA, 19 nt, Homo sapiens
  misc_RNA (1)...(19): siRNA sense strand
gaagcuguaccacaugaug

SEQ ID NO: 540705 - RNA, 19 nt, Homo sapiens
  misc_RNA (1)...(19): siRNA sense strand
ccacaacacggccaagaau

SEQ ID NO: 540706 - RNA, 19 nt, Homo sapiens
  misc_RNA (1)...(19): siRNA sense strand
gcccaaggguggagauucu

SEQ ID NO: 540707 - RNA, 19 nt, Homo sapiens
  misc_RNA (1)...(19): siRNA sense strand
caccacggcgguaaagaua

SEQ ID NO: 540708 - RNA, 19 nt, Homo sapiens
  misc_RNA (1)...(19): siRNA sense strand
gcaccacggcgguaaagau

SEQ ID NO: 540709 - RNA, 19 nt, Homo sapiens
  misc_RNA (1)...(19): siRNA sense strand
ggaucuaccacacccauga

SEQ ID NO: 540710 - RNA, 19 nt, Homo sapiens
  misc_RNA (1)...(19): siRNA sense strand
ggaaguucauaaggauuuc

SEQ ID NO: 540711 - RNA, 19 nt, Homo sapiens
  misc_RNA (1)...(19): siRNA sense strand
gaaccacagcuuacaagag

SEQ ID NO: 540712 - RNA, 19 nt, Homo sapiens
  misc_RNA (1)...(19): siRNA sense strand
ugguggagcugaacaagau

SEQ ID NO: 540713 - RNA, 19 nt, Homo sapiens
  misc_RNA (1)...(19): siRNA sense strand
gagcucugccgccucauga

SEQ ID NO: 540714 - RNA, 19 nt, Homo sapiens
  misc_RNA (1)...(19): siRNA sense strand
ucgaagacauccuggaagu

SEQ ID NO: 540715 - RNA, 19 nt, Homo sapiens
  misc_RNA (1)...(19): siRNA sense strand
caauaugucacccagauca

SEQ ID NO: 540716 - RNA, 19 nt, Homo sapiens
  misc_RNA (1)...(19): siRNA sense strand
ggaagaccaggcugauuca

SEQ ID NO: 540717 - RNA, 19 nt, Homo sapiens
  misc_RNA (1)...(19): siRNA sense strand
ucaaagaccgugauuacca

SEQ ID NO: 540718 - RNA, 19 nt, Homo sapiens
  misc_RNA (1)...(19): siRNA sense strand
ucgacaaccuucucgucua

SEQ ID NO: 540719 - RNA, 19 nt, Homo sapiens
  misc_RNA (1)...(19): siRNA sense strand
acaugaugaugaacaagaa

SEQ ID NO: 540720 - RNA, 19 nt, Homo sapiens
  misc_RNA (1)...(19): siRNA sense strand
ggacaaguucugcguguac

SEQ ID NO: 540721 - RNA, 19 nt, Homo sapiens
  misc_RNA (1)...(19): siRNA sense strand
gcgcagagacgcgaucuuc

SEQ ID NO: 540722 - RNA, 19 nt, Homo sapiens
  misc_RNA (1)...(19): siRNA sense strand
aaagaagaguguacaaucc

SEQ ID NO: 540723 - RNA, 19 nt, Homo sapiens
  misc_RNA (1)...(19): siRNA sense strand
ggcaucauccaccauguuu

SEQ ID NO: 540724 - RNA, 19 nt, Homo sapiens
  misc_RNA (1)...(19): siRNA sense strand
aagaugggacagcggauua

SEQ ID NO: 540725 - RNA, 19 nt, Homo sapiens
  misc_RNA (1)...(19): siRNA sense strand
caucgaagacauccuggaa

SEQ ID NO: 540726 - RNA, 19 nt, Homo sapiens
  misc_RNA (1)...(19): siRNA sense strand
gccuggagcaccucuuuaa

SEQ ID NO: 540727 - RNA, 19 nt, Homo sapiens
  misc_RNA (1)...(19): siRNA sense strand
ggccaagaauaagugguuu

SEQ ID NO: 540728 - RNA, 19 nt, Homo sapiens
  misc_RNA (1)...(19): siRNA sense strand
acaagcaccaguucaagaa

SEQ ID NO: 540729 - RNA, 19 nt, Homo sapiens
  misc_RNA (1)...(19): siRNA sense strand
gagaaaguucagcaguauu

SEQ ID NO: 540730 - RNA, 19 nt, Homo sapiens
  misc_RNA (1)...(19): siRNA sense strand
gaagagaccaagcauuucc

SEQ ID NO: 540731 - RNA, 19 nt, Homo sapiens
  misc_RNA (1)...(19): siRNA sense strand
ggaggacuauggcuuugac

SEQ ID NO: 540732 - RNA, 19 nt, Homo sapiens
  misc_RNA (1)...(19): siRNA sense strand
guaaagaucugggacauga

SEQ ID NO: 540733 - RNA, 19 nt, Homo sapiens
  misc_RNA (1)...(19): siRNA sense strand
caacaucacugcaggaaau

SEQ ID NO: 540734 - RNA, 19 nt, Homo sapiens
  misc_RNA (1)...(19): siRNA sense strand
gaaagugauucuugucaga

SEQ ID NO: 540735 - RNA, 19 nt, Homo sapiens
  misc_RNA (1)...(19): siRNA sense strand
gcagcaagcgcucaaguua

SEQ ID NO: 540736 - RNA, 19 nt, Homo sapiens
  misc_RNA (1)...(19): siRNA sense strand
uaauggagcuguaauggaa

SEQ ID NO: 540737 - RNA, 19 nt, Homo sapiens
  misc_RNA (1)...(19): siRNA sense strand
guaauggaauuucacguuu

SEQ ID NO: 540738 - RNA, 19 nt, Homo sapiens
  misc_RNA (1)...(19): siRNA sense strand
ggacuucucuagcgaccuu

SEQ ID NO: 540739 - RNA, 19 nt, Homo sapiens
  misc_RNA (1)...(19): siRNA sense strand
caaaggacaugaagguagu

SEQ ID NO: 540740 - RNA, 19 nt, Homo sapiens
  misc_RNA (1)...(19): siRNA sense strand
ggacaucggaggaaggaaa

SEQ ID NO: 540741 - RNA, 19 nt, Homo sapiens
  misc_RNA (1)...(19): siRNA sense strand
cuucgugucugcaauauga

SEQ ID NO: 540742 - RNA, 19 nt, Homo sapiens
  misc_RNA (1)...(19): siRNA sense strand
gagcuguaauggaauuuca

SEQ ID NO: 540743 - RNA, 19 nt, Homo sapiens
  misc_RNA (1)...(19): siRNA sense strand
ggaccgaccgcauuguaaa

SEQ ID NO: 540744 - RNA, 19 nt, Homo sapiens
  misc_RNA (1)...(19): siRNA sense strand
gacaacagcaucaucaugu

SEQ ID NO: 540745 - RNA, 19 nt, Homo sapiens
  misc_RNA (1)...(19): siRNA sense strand
caucacaacccucaaagga

SEQ ID NO: 540746 - RNA, 19 nt, Homo sapiens
  misc_RNA (1)...(19): siRNA sense strand
ggaaaggccggacgcuguu

SEQ ID NO: 540747 - RNA, 19 nt, Homo sapiens
  misc_RNA (1)...(19): siRNA sense strand
gaaaggccggacgcuguua

SEQ ID NO: 540748 - RNA, 19 nt, Homo sapiens
  misc_RNA (1)...(19): siRNA sense strand
uaauggaauuucacguuuc

SEQ ID NO: 540749 - RNA, 19 nt, Homo sapiens
  misc_RNA (1)...(19): siRNA sense strand
aauaugacuuugacacuca

SEQ ID NO: 540750 - RNA, 19 nt, Homo sapiens
  misc_RNA (1)...(19): siRNA sense strand
cagagugggugaucaguac

SEQ ID NO: 540751 - RNA, 19 nt, Homo sapiens
  misc_RNA (1)...(19): siRNA sense strand
gccggacgcuguuacuuca

SEQ ID NO: 540752 - RNA, 19 nt, Homo sapiens
  misc_RNA (1)...(19): siRNA sense strand
gcuccucagugguuggaaa

SEQ ID NO: 540753 - RNA, 19 nt, Homo sapiens
  misc_RNA (1)...(19): siRNA sense strand
ugaacuuuaucaagaccua

SEQ ID NO: 540754 - RNA, 19 nt, Homo sapiens
  misc_RNA (1)...(19): siRNA sense strand
ccaggauaauggagcugua

SEQ ID NO: 540755 - RNA, 19 nt, Homo sapiens
  misc_RNA (1)...(19): siRNA sense strand
guuggaaagugauucuugu

SEQ ID NO: 540756 - RNA, 19 nt, Homo sapiens
  misc_RNA (1)...(19): siRNA sense strand
gggcuucgugucugcaaua

SEQ ID NO: 540757 - RNA, 19 nt, Homo sapiens
  misc_RNA (1)...(19): siRNA sense strand
ucacguuucugaagauuuu

SEQ ID NO: 540758 - RNA, 19 nt, Homo sapiens
  misc_RNA (1)...(19): siRNA sense strand
gaauugcaguguggaacau

SEQ ID NO: 540759 - RNA, 19 nt, Homo sapiens
  misc_RNA (1)...(19): siRNA sense strand
ggauaauggagcuguaaug

SEQ ID NO: 540760 - RNA, 19 nt, Homo sapiens
  misc_RNA (1)...(19): siRNA sense strand
cuagcgaccuuucaugaag

SEQ ID NO: 540761 - RNA, 19 nt, Homo sapiens
  misc_RNA (1)...(19): siRNA sense strand
gauaauggagcuguaaugg

SEQ ID NO: 540762 - RNA, 19 nt, Homo sapiens
  misc_RNA (1)...(19): siRNA sense strand
ggguuugugauucuuguua

SEQ ID NO: 540763 - RNA, 19 nt, Homo sapiens
  misc_RNA (1)...(19): siRNA sense strand
ugcugaagcuugaacagaa

SEQ ID NO: 540764 - RNA, 19 nt, Homo sapiens
  misc_RNA (1)...(19): siRNA sense strand
gaaccgggugucugcgauu

SEQ ID NO: 540765 - RNA, 19 nt, Homo sapiens
  misc_RNA (1)...(19): siRNA sense strand
ggaauugcaguguggaaca

SEQ ID NO: 540766 - RNA, 19 nt, Homo sapiens
  misc_RNA (1)...(19): siRNA sense strand
gcaauaugacuuugacacu

SEQ ID NO: 540767 - RNA, 19 nt, Homo sapiens
  misc_RNA (1)...(19): siRNA sense strand
cuacccagcucaucagaac

SEQ ID NO: 540768 - RNA, 19 nt, Homo sapiens
  misc_RNA (1)...(19): siRNA sense strand
ucacccugcugaagcuuga

SEQ ID NO: 540769 - RNA, 19 nt, Homo sapiens
  misc_RNA (1)...(19): siRNA sense strand
ucaguaugcuuucguuggu

SEQ ID NO: 540770 - RNA, 19 nt, Homo sapiens
  misc_RNA (1)...(19): siRNA sense strand
caaguccggguuugugauu

SEQ ID NO: 540771 - RNA, 19 nt, Homo sapiens
  misc_RNA (1)...(19): siRNA sense strand
gggaccgaccgcauuguaa

SEQ ID NO: 540772 - RNA, 19 nt, Homo sapiens
  misc_RNA (1)...(19): siRNA sense strand
ggacccuauucagcgguua

SEQ ID NO: 540773 - RNA, 19 nt, Homo sapiens
  misc_RNA (1)...(19): siRNA sense strand
ugacaacagcaucaucaug

SEQ ID NO: 540774 - RNA, 19 nt, Homo sapiens
  misc_RNA (1)...(19): siRNA sense strand
aaccgggugucugcgauua

SEQ ID NO: 540775 - RNA, 19 nt, Homo sapiens
  misc_RNA (1)...(19): siRNA sense strand
cgaccgcauuguaaagauc

SEQ ID NO: 540776 - RNA, 19 nt, Homo sapiens
  misc_RNA (1)...(19): siRNA sense strand
acauaacauuucccacaug

SEQ ID NO: 540777 - RNA, 19 nt, Homo sapiens
  misc_RNA (1)...(19): siRNA sense strand
caaggaggacggcgugauc

SEQ ID NO: 540778 - RNA, 19 nt, Homo sapiens
  misc_RNA (1)...(19): siRNA sense strand
acaacagcaucaucaugug

SEQ ID NO: 540779 - RNA, 19 nt, Homo sapiens
  misc_RNA (1)...(19): siRNA sense strand
gacaacaucacugcaggaa

SEQ ID NO: 540780 - RNA, 19 nt, Homo sapiens
  misc_RNA (1)...(19): siRNA sense strand
uguaauggaauuucacguu

SEQ ID NO: 540781 - RNA, 19 nt, Homo sapiens
  misc_RNA (1)...(19): siRNA sense strand
ucagggccaucaugacaag

SEQ ID NO: 540782 - RNA, 19 nt, Homo sapiens
  misc_RNA (1)...(19): siRNA sense strand
gguuggaaagugauucuug

SEQ ID NO: 540783 - RNA, 19 nt, Homo sapiens
  misc_RNA (1)...(19): siRNA sense strand
gcugaagcuugaacagaac

SEQ ID NO: 540784 - RNA, 19 nt, Homo sapiens
  misc_RNA (1)...(19): siRNA sense strand
ccucaaaggacaugaaggu

SEQ ID NO: 540785 - RNA, 19 nt, Homo sapiens
  misc_RNA (1)...(19): siRNA sense strand
ugacuuugacacucaguau

SEQ ID NO: 540786 - RNA, 19 nt, Homo sapiens
  misc_RNA (1)...(19): siRNA sense strand
ccucagugguuggaaagug

SEQ ID NO: 540787 - RNA, 19 nt, Homo sapiens
  misc_RNA (1)...(19): siRNA sense strand
ggccggacgcuguuacuuc

SEQ ID NO: 540788 - RNA, 19 nt, Homo sapiens
  misc_RNA (1)...(19): siRNA sense strand
aacauaacauuucccacau

SEQ ID NO: 540789 - RNA, 19 nt, Homo sapiens
  misc_RNA (1)...(19): siRNA sense strand
cucagugguuggaaaguga

SEQ ID NO: 540790 - RNA, 19 nt, Homo sapiens
  misc_RNA (1)...(19): siRNA sense strand
uggaauuucacguuucuga

SEQ ID NO: 540791 - RNA, 19 nt, Homo sapiens
  misc_RNA (1)...(19): siRNA sense strand
guuacgacuccaucaaaga

SEQ ID NO: 540792 - RNA, 19 nt, Homo sapiens
  misc_RNA (1)...(19): siRNA sense strand
gggcuaagacaacaucacu

SEQ ID NO: 540793 - RNA, 19 nt, Homo sapiens
  misc_RNA (1)...(19): siRNA sense strand
guaccggccacgacaagug

SEQ ID NO: 540794 - RNA, 19 nt, Homo sapiens
  misc_RNA (1)...(19): siRNA sense strand
acagagugggugaucagua

SEQ ID NO: 540795 - RNA, 19 nt, Homo sapiens
  misc_RNA (1)...(19): siRNA sense strand
gagcaucugacaacagcau

SEQ ID NO: 540796 - RNA, 19 nt, Homo sapiens
  misc_RNA (1)...(19): siRNA sense strand
caggauaauggagcuguaa

SEQ ID NO: 540797 - RNA, 19 nt, Homo sapiens
  misc_RNA (1)...(19): siRNA sense strand
gggcuucgaguuccaaguc

SEQ ID NO: 540798 - RNA, 19 nt, Homo sapiens
  misc_RNA (1)...(19): siRNA sense strand
aauggaauuucacguuucu

SEQ ID NO: 540799 - RNA, 19 nt, Homo sapiens
  misc_RNA (1)...(19): siRNA sense strand
uuacgacuccaucaaagau

SEQ ID NO: 540800 - RNA, 19 nt, Homo sapiens
  misc_RNA (1)...(19): siRNA sense strand
agaccuacccagcucauca

SEQ ID NO: 540801 - RNA, 19 nt, Homo sapiens
  misc_RNA (1)...(19): siRNA sense strand
gguuugugauucuuguuac

SEQ ID NO: 540802 - RNA, 19 nt, Homo sapiens
  misc_RNA (1)...(19): siRNA sense strand
cauggauguuagcagagaa

SEQ ID NO: 540803 - RNA, 19 nt, Homo sapiens
  misc_RNA (1)...(19): siRNA sense strand
agucaugggcuucgaguuc

SEQ ID NO: 540804 - RNA, 19 nt, Homo sapiens
  misc_RNA (1)...(19): siRNA sense strand
guaaagaucugggacauga

SEQ ID NO: 540805 - RNA, 19 nt, Homo sapiens
  misc_RNA (1)...(19): siRNA sense strand
caacaucacugcaggaaau

SEQ ID NO: 540806 - RNA, 19 nt, Homo sapiens
  misc_RNA (1)...(19): siRNA sense strand
gaaagugauucuugucaga

SEQ ID NO: 540807 - RNA, 19 nt, Homo sapiens
  misc_RNA (1)...(19): siRNA sense strand
gcagcaagcgcucaaguua

SEQ ID NO: 540808 - RNA, 19 nt, Homo sapiens
  misc_RNA (1)...(19): siRNA sense strand
uaauggagcuguaauggaa

SEQ ID NO: 540809 - RNA, 19 nt, Homo sapiens
  misc_RNA (1)...(19): siRNA sense strand
guaauggaauuucacguuu

SEQ ID NO: 540810 - RNA, 19 nt, Homo sapiens
  misc_RNA (1)...(19): siRNA sense strand
ggacuucucuagcgaccuu

SEQ ID NO: 540811 - RNA, 19 nt, Homo sapiens
  misc_RNA (1)...(19): siRNA sense strand
caaaggacaugaagguagu

SEQ ID NO: 540812 - RNA, 19 nt, Homo sapiens
  misc_RNA (1)...(19): siRNA sense strand
ggacaucggaggaaggaaa

SEQ ID NO: 540813 - RNA, 19 nt, Homo sapiens
  misc_RNA (1)...(19): siRNA sense strand
cuucgugucugcaauauga

SEQ ID NO: 540814 - RNA, 19 nt, Homo sapiens
  misc_RNA (1)...(19): siRNA sense strand
gagcuguaauggaauuuca

SEQ ID NO: 540815 - RNA, 19 nt, Homo sapiens
  misc_RNA (1)...(19): siRNA sense strand
ggaccgaccgcauuguaaa

SEQ ID NO: 540816 - RNA, 19 nt, Homo sapiens
  misc_RNA (1)...(19): siRNA sense strand
gacaacagcaucaucaugu

SEQ ID NO: 540817 - RNA, 19 nt, Homo sapiens
  misc_RNA (1)...(19): siRNA sense strand
caucacaacccucaaagga

SEQ ID NO: 540818 - RNA, 19 nt, Homo sapiens
  misc_RNA (1)...(19): siRNA sense strand
ggaaaggccggacgcuguu

SEQ ID NO: 540819 - RNA, 19 nt, Homo sapiens
  misc_RNA (1)...(19): siRNA sense strand
gaaaggccggacgcuguua

SEQ ID NO: 540820 - RNA, 19 nt, Homo sapiens
  misc_RNA (1)...(19): siRNA sense strand
uaauggaauuucacguuuc

SEQ ID NO: 540821 - RNA, 19 nt, Homo sapiens
  misc_RNA (1)...(19): siRNA sense strand
aauaugacuuugacacuca

SEQ ID NO: 540822 - RNA, 19 nt, Homo sapiens
  misc_RNA (1)...(19): siRNA sense strand
cagagugggugaucaguac

SEQ ID NO: 540823 - RNA, 19 nt, Homo sapiens
  misc_RNA (1)...(19): siRNA sense strand
gccggacgcuguuacuuca

SEQ ID NO: 540824 - RNA, 19 nt, Homo sapiens
  misc_RNA (1)...(19): siRNA sense strand
gcuccucagugguuggaaa

SEQ ID NO: 540825 - RNA, 19 nt, Homo sapiens
  misc_RNA (1)...(19): siRNA sense strand
ugaacuuuaucaagaccua

SEQ ID NO: 540826 - RNA, 19 nt, Homo sapiens
  misc_RNA (1)...(19): siRNA sense strand
ccaggauaauggagcugua

SEQ ID NO: 540827 - RNA, 19 nt, Homo sapiens
  misc_RNA (1)...(19): siRNA sense strand
guuggaaagugauucuugu

SEQ ID NO: 540828 - RNA, 19 nt, Homo sapiens
  misc_RNA (1)...(19): siRNA sense strand
gggcuucgugucugcaaua

SEQ ID NO: 540829 - RNA, 19 nt, Homo sapiens
  misc_RNA (1)...(19): siRNA sense strand
ucacguuucugaagauuuu

SEQ ID NO: 540830 - RNA, 19 nt, Homo sapiens
  misc_RNA (1)...(19): siRNA sense strand
gaauugcaguguggaacau

SEQ ID NO: 540831 - RNA, 19 nt, Homo sapiens
  misc_RNA (1)...(19): siRNA sense strand
ggauaauggagcuguaaug

SEQ ID NO: 540832 - RNA, 19 nt, Homo sapiens
  misc_RNA (1)...(19): siRNA sense strand
cuagcgaccuuucaugaag

SEQ ID NO: 540833 - RNA, 19 nt, Homo sapiens
  misc_RNA (1)...(19): siRNA sense strand
gauaauggagcuguaaugg

SEQ ID NO: 540834 - RNA, 19 nt, Homo sapiens
  misc_RNA (1)...(19): siRNA sense strand
ggguuugugauucuuguua

SEQ ID NO: 540835 - RNA, 19 nt, Homo sapiens
  misc_RNA (1)...(19): siRNA sense strand
ugcugaagcuugaacagaa

SEQ ID NO: 540836 - RNA, 19 nt, Homo sapiens
  misc_RNA (1)...(19): siRNA sense strand
gaaccgggugucugcgauu

SEQ ID NO: 540837 - RNA, 19 nt, Homo sapiens
  misc_RNA (1)...(19): siRNA sense strand
ggaauugcaguguggaaca

SEQ ID NO: 540838 - RNA, 19 nt, Homo sapiens
  misc_RNA (1)...(19): siRNA sense strand
gcaauaugacuuugacacu

SEQ ID NO: 540839 - RNA, 19 nt, Homo sapiens
  misc_RNA (1)...(19): siRNA sense strand
cuacccagcucaucagaac

SEQ ID NO: 540840 - RNA, 19 nt, Homo sapiens
  misc_RNA (1)...(19): siRNA sense strand
ucacccugcugaagcuuga

SEQ ID NO: 540841 - RNA, 19 nt, Homo sapiens
  misc_RNA (1)...(19): siRNA sense strand
ucaguaugcuuucguuggu

SEQ ID NO: 540842 - RNA, 19 nt, Homo sapiens
  misc_RNA (1)...(19): siRNA sense strand
caaguccggguuugugauu

SEQ ID NO: 540843 - RNA, 19 nt, Homo sapiens
  misc_RNA (1)...(19): siRNA sense strand
gggaccgaccgcauuguaa

SEQ ID NO: 540844 - RNA, 19 nt, Homo sapiens
  misc_RNA (1)...(19): siRNA sense strand
ggacccuauucagcgguua

SEQ ID NO: 540845 - RNA, 19 nt, Homo sapiens
  misc_RNA (1)...(19): siRNA sense strand
ugacaacagcaucaucaug

SEQ ID NO: 540846 - RNA, 19 nt, Homo sapiens
  misc_RNA (1)...(19): siRNA sense strand
aaccgggugucugcgauua

SEQ ID NO: 540847 - RNA, 19 nt, Homo sapiens
  misc_RNA (1)...(19): siRNA sense strand
cgaccgcauuguaaagauc

SEQ ID NO: 540848 - RNA, 19 nt, Homo sapiens
  misc_RNA (1)...(19): siRNA sense strand
acauaacauuucccacaug

SEQ ID NO: 540849 - RNA, 19 nt, Homo sapiens
  misc_RNA (1)...(19): siRNA sense strand
caaggaggacggcgugauc

SEQ ID NO: 540850 - RNA, 19 nt, Homo sapiens
  misc_RNA (1)...(19): siRNA sense strand
acaacagcaucaucaugug

SEQ ID NO: 540851 - RNA, 19 nt, Homo sapiens
  misc_RNA (1)...(19): siRNA sense strand
gacaacaucacugcaggaa

SEQ ID NO: 540852 - RNA, 19 nt, Homo sapiens
  misc_RNA (1)...(19): siRNA sense strand
uguaauggaauuucacguu

SEQ ID NO: 540853 - RNA, 19 nt, Homo sapiens
  misc_RNA (1)...(19): siRNA sense strand
ucagggccaucaugacaag

SEQ ID NO: 540854 - RNA, 19 nt, Homo sapiens
  misc_RNA (1)...(19): siRNA sense strand
gguuggaaagugauucuug

SEQ ID NO: 540855 - RNA, 19 nt, Homo sapiens
  misc_RNA (1)...(19): siRNA sense strand
gcugaagcuugaacagaac

SEQ ID NO: 540856 - RNA, 19 nt, Homo sapiens
  misc_RNA (1)...(19): siRNA sense strand
ccucaaaggacaugaaggu

SEQ ID NO: 540857 - RNA, 19 nt, Homo sapiens
  misc_RNA (1)...(19): siRNA sense strand
ugacuuugacacucaguau

SEQ ID NO: 540858 - RNA, 19 nt, Homo sapiens
  misc_RNA (1)...(19): siRNA sense strand
ccucagugguuggaaagug

SEQ ID NO: 540859 - RNA, 19 nt, Homo sapiens
  misc_RNA (1)...(19): siRNA sense strand
ggccggacgcuguuacuuc

SEQ ID NO: 540860 - RNA, 19 nt, Homo sapiens
  misc_RNA (1)...(19): siRNA sense strand
aacauaacauuucccacau

SEQ ID NO: 540861 - RNA, 19 nt, Homo sapiens
  misc_RNA (1)...(19): siRNA sense strand
cucagugguuggaaaguga

SEQ ID NO: 540862 - RNA, 19 nt, Homo sapiens
  misc_RNA (1)...(19): siRNA sense strand
uggaauuucacguuucuga

SEQ ID NO: 540863 - RNA, 19 nt, Homo sapiens
  misc_RNA (1)...(19): siRNA sense strand
guuacgacuccaucaaaga

SEQ ID NO: 540864 - RNA, 19 nt, Homo sapiens
  misc_RNA (1)...(19): siRNA sense strand
gggcuaagacaacaucacu

SEQ ID NO: 540865 - RNA, 19 nt, Homo sapiens
  misc_RNA (1)...(19): siRNA sense strand
guaccggccacgacaagug

SEQ ID NO: 540866 - RNA, 19 nt, Homo sapiens
  misc_RNA (1)...(19): siRNA sense strand
acagagugggugaucagua

SEQ ID NO: 540867 - RNA, 19 nt, Homo sapiens
  misc_RNA (1)...(19): siRNA sense strand
gagcaucugacaacagcau

SEQ ID NO: 540868 - RNA, 19 nt, Homo sapiens
  misc_RNA (1)...(19): siRNA sense strand
caggauaauggagcuguaa

SEQ ID NO: 540869 - RNA, 19 nt, Homo sapiens
  misc_RNA (1)...(19): siRNA sense strand
gggcuucgaguuccaaguc

SEQ ID NO: 540870 - RNA, 19 nt, Homo sapiens
  misc_RNA (1)...(19): siRNA sense strand
aauggaauuucacguuucu

SEQ ID NO: 540871 - RNA, 19 nt, Homo sapiens
  misc_RNA (1)...(19): siRNA sense strand
uuacgacuccaucaaagau

SEQ ID NO: 540872 - RNA, 19 nt, Homo sapiens
  misc_RNA (1)...(19): siRNA sense strand
agaccuacccagcucauca

SEQ ID NO: 540873 - RNA, 19 nt, Homo sapiens
  misc_RNA (1)...(19): siRNA sense strand
gguuugugauucuuguuac

SEQ ID NO: 540874 - RNA, 19 nt, Homo sapiens
  misc_RNA (1)...(19): siRNA sense strand
cauggauguuagcagagaa

SEQ ID NO: 540875 - RNA, 19 nt, Homo sapiens
  misc_RNA (1)...(19): siRNA sense strand
agucaugggcuucgaguuc

SEQ ID NO: 540876 - RNA, 19 nt, Homo sapiens
  misc_RNA (1)...(19): siRNA sense strand
gaauagaggugaagauuau

SEQ ID NO: 540877 - RNA, 19 nt, Homo sapiens
  misc_RNA (1)...(19): siRNA sense strand
ggaagaagcucaaagacaa

SEQ ID NO: 540878 - RNA, 19 nt, Homo sapiens
  misc_RNA (1)...(19): siRNA sense strand
gagcaagucugaaucuaaa

SEQ ID NO: 540879 - RNA, 19 nt, Homo sapiens
  misc_RNA (1)...(19): siRNA sense strand
gaacaugaccugagcguuu

SEQ ID NO: 540880 - RNA, 19 nt, Homo sapiens
  misc_RNA (1)...(19): siRNA sense strand
agaguggucuugcaaauua

SEQ ID NO: 540881 - RNA, 19 nt, Homo sapiens
  misc_RNA (1)...(19): siRNA sense strand
gaacaggugucccaucauc

SEQ ID NO: 540882 - RNA, 19 nt, Homo sapiens
  misc_RNA (1)...(19): siRNA sense strand
gaaggaagauauuucucaa

SEQ ID NO: 540883 - RNA, 19 nt, Homo sapiens
  misc_RNA (1)...(19): siRNA sense strand
gaagaaaccuuauaauccu

SEQ ID NO: 540884 - RNA, 19 nt, Homo sapiens
  misc_RNA (1)...(19): siRNA sense strand
ggaguuggcuuugaaaugu

SEQ ID NO: 540885 - RNA, 19 nt, Homo sapiens
  misc_RNA (1)...(19): siRNA sense strand
gaagaaagugacacagaua

SEQ ID NO: 540886 - RNA, 19 nt, Homo sapiens
  misc_RNA (1)...(19): siRNA sense strand
gaaauugaacgacaacauu

SEQ ID NO: 540887 - RNA, 19 nt, Homo sapiens
  misc_RNA (1)...(19): siRNA sense strand
gcacaccggccacggauua

SEQ ID NO: 540888 - RNA, 19 nt, Homo sapiens
  misc_RNA (1)...(19): siRNA sense strand
cuaaagagcuggaccaagu

SEQ ID NO: 540889 - RNA, 19 nt, Homo sapiens
  misc_RNA (1)...(19): siRNA sense strand
gaaacuguaucugaagaaa

SEQ ID NO: 540890 - RNA, 19 nt, Homo sapiens
  misc_RNA (1)...(19): siRNA sense strand
gaaauguucuagucuucuu

SEQ ID NO: 540891 - RNA, 19 nt, Homo sapiens
  misc_RNA (1)...(19): siRNA sense strand
gagaagcacgguuaacuuu

SEQ ID NO: 540892 - RNA, 19 nt, Homo sapiens
  misc_RNA (1)...(19): siRNA sense strand
gccauacgcucauuguaaa

SEQ ID NO: 540893 - RNA, 19 nt, Homo sapiens
  misc_RNA (1)...(19): siRNA sense strand
uguuauggcugauugguua

SEQ ID NO: 540894 - RNA, 19 nt, Homo sapiens
  misc_RNA (1)...(19): siRNA sense strand
ggacugaagaaaccuuaua

SEQ ID NO: 540895 - RNA, 19 nt, Homo sapiens
  misc_RNA (1)...(19): siRNA sense strand
gaucagagaaggaaaggaa

SEQ ID NO: 540896 - RNA, 19 nt, Homo sapiens
  misc_RNA (1)...(19): siRNA sense strand
gguggaacagucaauauua

SEQ ID NO: 540897 - RNA, 19 nt, Homo sapiens
  misc_RNA (1)...(19): siRNA sense strand
ugaagaaaguagugaaaug

SEQ ID NO: 540898 - RNA, 19 nt, Homo sapiens
  misc_RNA (1)...(19): siRNA sense strand
gaacaugaugagucugaua

SEQ ID NO: 540899 - RNA, 19 nt, Homo sapiens
  misc_RNA (1)...(19): siRNA sense strand
ugacacagauacaucagaa

SEQ ID NO: 540900 - RNA, 19 nt, Homo sapiens
  misc_RNA (1)...(19): siRNA sense strand
gaacaaacagcaaaacuuu

SEQ ID NO: 540901 - RNA, 19 nt, Homo sapiens
  misc_RNA (1)...(19): siRNA sense strand
gaauagaacugggagacau

SEQ ID NO: 540902 - RNA, 19 nt, Homo sapiens
  misc_RNA (1)...(19): siRNA sense strand
aagugaagcucaaucagua

SEQ ID NO: 540903 - RNA, 19 nt, Homo sapiens
  misc_RNA (1)...(19): siRNA sense strand
ccaguuaaaugauagugaa

SEQ ID NO: 540904 - RNA, 19 nt, Homo sapiens
  misc_RNA (1)...(19): siRNA sense strand
ggauaaacuuucagauuac

SEQ ID NO: 540905 - RNA, 19 nt, Homo sapiens
  misc_RNA (1)...(19): siRNA sense strand
gaagcacgguuaacuuucu

SEQ ID NO: 540906 - RNA, 19 nt, Homo sapiens
  misc_RNA (1)...(19): siRNA sense strand
gaagaaaacaaaagccuua

SEQ ID NO: 540907 - RNA, 19 nt, Homo sapiens
  misc_RNA (1)...(19): siRNA sense strand
agaaaguagugaaauggua

SEQ ID NO: 540908 - RNA, 19 nt, Homo sapiens
  misc_RNA (1)...(19): siRNA sense strand
ggaaggaagauauuucuca

SEQ ID NO: 540909 - RNA, 19 nt, Homo sapiens
  misc_RNA (1)...(19): siRNA sense strand
caaauaucagggaaacuua

SEQ ID NO: 540910 - RNA, 19 nt, Homo sapiens
  misc_RNA (1)...(19): siRNA sense strand
gaaaguagugaaaugguau

SEQ ID NO: 540911 - RNA, 19 nt, Homo sapiens
  misc_RNA (1)...(19): siRNA sense strand
gaacagagccaugaagaac

SEQ ID NO: 540912 - RNA, 19 nt, Homo sapiens
  misc_RNA (1)...(19): siRNA sense strand
ggaaacucauuaucugcaa

SEQ ID NO: 540913 - RNA, 19 nt, Homo sapiens
  misc_RNA (1)...(19): siRNA sense strand
aaagauggauuuugccuua

SEQ ID NO: 540914 - RNA, 19 nt, Homo sapiens
  misc_RNA (1)...(19): siRNA sense strand
gaaagagggaaggaagaua

SEQ ID NO: 540915 - RNA, 19 nt, Homo sapiens
  misc_RNA (1)...(19): siRNA sense strand
gaacagucaauauuacaug

SEQ ID NO: 540916 - RNA, 19 nt, Homo sapiens
  misc_RNA (1)...(19): siRNA sense strand
gcugauugguuaaagauuc

SEQ ID NO: 540917 - RNA, 19 nt, Homo sapiens
  misc_RNA (1)...(19): siRNA sense strand
ugaagaaagugacacagau

SEQ ID NO: 540918 - RNA, 19 nt, Homo sapiens
  misc_RNA (1)...(19): siRNA sense strand
gaagaaagaaaggaauaga

SEQ ID NO: 540919 - RNA, 19 nt, Homo sapiens
  misc_RNA (1)...(19): siRNA sense strand
gaagugaagcucaaucagu

SEQ ID NO: 540920 - RNA, 19 nt, Homo sapiens
  misc_RNA (1)...(19): siRNA sense strand
ugaauagaggugaagauua

SEQ ID NO: 540921 - RNA, 19 nt, Homo sapiens
  misc_RNA (1)...(19): siRNA sense strand
gauggaugcuuuggaguug

SEQ ID NO: 540922 - RNA, 19 nt, Homo sapiens
  misc_RNA (1)...(19): siRNA sense strand
uauuauggcucuucgaaau

SEQ ID NO: 540923 - RNA, 19 nt, Homo sapiens
  misc_RNA (1)...(19): siRNA sense strand
ucaagaacaugaugagucu

SEQ ID NO: 540924 - RNA, 19 nt, Homo sapiens
  misc_RNA (1)...(19): siRNA sense strand
gagaaggaaaggaacauga

SEQ ID NO: 540925 - RNA, 19 nt, Homo sapiens
  misc_RNA (1)...(19): siRNA sense strand
gaacugggagacauucaga

SEQ ID NO: 540926 - RNA, 19 nt, Homo sapiens
  misc_RNA (1)...(19): siRNA sense strand
ggagggagguuuggcagau

SEQ ID NO: 540927 - RNA, 19 nt, Homo sapiens
  misc_RNA (1)...(19): siRNA sense strand
caacgccaaccaaagauuu

SEQ ID NO: 540928 - RNA, 19 nt, Homo sapiens
  misc_RNA (1)...(19): siRNA sense strand
ccaaguacaagaagaaaga

SEQ ID NO: 540929 - RNA, 19 nt, Homo sapiens
  misc_RNA (1)...(19): siRNA sense strand
uuaauaaggcacacuguaa

SEQ ID NO: 540930 - RNA, 19 nt, Homo sapiens
  misc_RNA (1)...(19): siRNA sense strand
ggagaagcacgguuaacuu

SEQ ID NO: 540931 - RNA, 19 nt, Homo sapiens
  misc_RNA (1)...(19): siRNA sense strand
ucaaagagcaagucugaau

SEQ ID NO: 540932 - RNA, 19 nt, Homo sapiens
  misc_RNA (1)...(19): siRNA sense strand
accaagauauguauucuga

SEQ ID NO: 540933 - RNA, 19 nt, Homo sapiens
  misc_RNA (1)...(19): siRNA sense strand
gaaacaucguacuccaaug

SEQ ID NO: 540934 - RNA, 19 nt, Homo sapiens
  misc_RNA (1)...(19): siRNA sense strand
gggacccacuuaaugauau

SEQ ID NO: 540935 - RNA, 19 nt, Homo sapiens
  misc_RNA (1)...(19): siRNA sense strand
gggaguagugacuguguua

SEQ ID NO: 540936 - RNA, 19 nt, Homo sapiens
  misc_RNA (1)...(19): siRNA sense strand
gcgguaguauccuggcuaa

SEQ ID NO: 540937 - RNA, 19 nt, Homo sapiens
  misc_RNA (1)...(19): siRNA sense strand
gaagaaaguagugaaaugg

SEQ ID NO: 540938 - RNA, 19 nt, Homo sapiens
  misc_RNA (1)...(19): siRNA sense strand
gcucagagaaggacaguuc

SEQ ID NO: 540939 - RNA, 19 nt, Homo sapiens
  misc_RNA (1)...(19): siRNA sense strand
caucguacuccaaugguua

SEQ ID NO: 540940 - RNA, 19 nt, Homo sapiens
  misc_RNA (1)...(19): siRNA sense strand
gaaacucauuaucugcaau

SEQ ID NO: 540941 - RNA, 19 nt, Homo sapiens
  misc_RNA (1)...(19): siRNA sense strand
caaagggacugaagaaacc

SEQ ID NO: 540942 - RNA, 19 nt, Homo sapiens
  misc_RNA (1)...(19): siRNA sense strand
ggaccaagauauguauucu

SEQ ID NO: 540943 - RNA, 19 nt, Homo sapiens
  misc_RNA (1)...(19): siRNA sense strand
gacuuucuauggcuuacua

SEQ ID NO: 540944 - RNA, 19 nt, Homo sapiens
  misc_RNA (1)...(19): siRNA sense strand
gaagcgguuggauccauua

SEQ ID NO: 540945 - RNA, 19 nt, Homo sapiens
  misc_RNA (1)...(19): siRNA sense strand
caaguuaugguguguguug

SEQ ID NO: 540946 - RNA, 19 nt, Homo sapiens
  misc_RNA (1)...(19): siRNA sense strand
ggugcuggauggaugcuuu

SEQ ID NO: 540947 - RNA, 19 nt, Homo sapiens
  misc_RNA (1)...(19): siRNA sense strand
cauuacaaguuugcagaua

SEQ ID NO: 540948 - RNA, 19 nt, Homo sapiens
  misc_RNA (1)...(19): siRNA sense strand
uaauaaggcacacuguaaa

SEQ ID NO: 540949 - RNA, 19 nt, Homo sapiens
  misc_RNA (1)...(19): siRNA sense strand
gaaggucauugggauagug

SEQ ID NO: 540950 - RNA, 19 nt, Homo sapiens
  misc_RNA (1)...(19): siRNA sense strand
caucagccaucucuuaguc

SEQ ID NO: 540951 - RNA, 19 nt, Homo sapiens
  misc_RNA (1)...(19): siRNA sense strand
ggaauucuuuaugguacaa

SEQ ID NO: 540952 - RNA, 19 nt, Homo sapiens
  misc_RNA (1)...(19): siRNA sense strand
cgguuaacuuucuugaaua

SEQ ID NO: 540953 - RNA, 19 nt, Homo sapiens
  misc_RNA (1)...(19): siRNA sense strand
uauggaaacucauuaucug

SEQ ID NO: 540954 - RNA, 19 nt, Homo sapiens
  misc_RNA (1)...(19): siRNA sense strand
ucagauuacuacuaucaug

SEQ ID NO: 540955 - RNA, 19 nt, Homo sapiens
  misc_RNA (1)...(19): siRNA sense strand
gggugcuacugaucuauaa

SEQ ID NO: 540956 - RNA, 19 nt, Homo sapiens
  misc_RNA (1)...(19): siRNA sense strand
uuaccuagcaguuauuuga

SEQ ID NO: 540957 - RNA, 19 nt, Homo sapiens
  misc_RNA (1)...(19): siRNA sense strand
aaacugaagcuacccaaga

SEQ ID NO: 540958 - RNA, 19 nt, Homo sapiens
  misc_RNA (1)...(19): siRNA sense strand
acggguaacucgagccaua

SEQ ID NO: 540959 - RNA, 19 nt, Homo sapiens
  misc_RNA (1)...(19): siRNA sense strand
gguuaacuuucuugaauag

SEQ ID NO: 540960 - RNA, 19 nt, Homo sapiens
  misc_RNA (1)...(19): siRNA sense strand
gagacuaccuacacugaac

SEQ ID NO: 540961 - RNA, 19 nt, Homo sapiens
  misc_RNA (1)...(19): siRNA sense strand
acaaacacaggaagaaauu

SEQ ID NO: 540962 - RNA, 19 nt, Homo sapiens
  misc_RNA (1)...(19): siRNA sense strand
acagagccaugaagaacuu

SEQ ID NO: 540963 - RNA, 19 nt, Homo sapiens
  misc_RNA (1)...(19): siRNA sense strand
ggauggaugcuuuggaguu

SEQ ID NO: 540964 - RNA, 19 nt, Homo sapiens
  misc_RNA (1)...(19): siRNA sense strand
agaguuccaucgaaucuau

SEQ ID NO: 540965 - RNA, 19 nt, Homo sapiens
  misc_RNA (1)...(19): siRNA sense strand
ggacccacuuaaugauaug

SEQ ID NO: 540966 - RNA, 19 nt, Homo sapiens
  misc_RNA (1)...(19): siRNA sense strand
ucaaauaucagggaaacuu

SEQ ID NO: 540967 - RNA, 19 nt, Homo sapiens
  misc_RNA (1)...(19): siRNA sense strand
ggauacagugcaauacuug

SEQ ID NO: 540968 - RNA, 19 nt, Homo sapiens
  misc_RNA (1)...(19): siRNA sense strand
guaguauccuggcuaaguc

SEQ ID NO: 540969 - RNA, 19 nt, Homo sapiens
  misc_RNA (1)...(19): siRNA sense strand
ggacacuauugaaacaagu

SEQ ID NO: 540970 - RNA, 19 nt, Homo sapiens
  misc_RNA (1)...(19): siRNA sense strand
caugaugagucugauaaug

SEQ ID NO: 540971 - RNA, 19 nt, Homo sapiens
  misc_RNA (1)...(19): siRNA sense strand
gcuuugaaauguucuaguc

SEQ ID NO: 540972 - RNA, 19 nt, Homo sapiens
  misc_RNA (1)...(19): siRNA sense strand
acgguuaacuuucuugaau

SEQ ID NO: 540973 - RNA, 19 nt, Homo sapiens
  misc_RNA (1)...(19): siRNA sense strand
caaccaggcaacagaagaa

SEQ ID NO: 540974 - RNA, 19 nt, Homo sapiens
  misc_RNA (1)...(19): siRNA sense strand
gaauccaacaccugacauu

SEQ ID NO: 540975 - RNA, 19 nt, Homo sapiens
  misc_RNA (1)...(19): siRNA sense strand
uaaacuaaagccauuccua

SEQ ID NO: 540976 - RNA, 19 nt, Homo sapiens
  misc_RNA (1)...(19): siRNA sense strand
gaacuacacagucaucuuu

SEQ ID NO: 540977 - RNA, 19 nt, Homo sapiens
  misc_RNA (1)...(19): siRNA sense strand
ggacagcaguucccgaaga

SEQ ID NO: 540978 - RNA, 19 nt, Homo sapiens
  misc_RNA (1)...(19): siRNA sense strand
gaaacucugucauucauca

SEQ ID NO: 540979 - RNA, 19 nt, Homo sapiens
  misc_RNA (1)...(19): siRNA sense strand
ggaucaaguuuauacagua

SEQ ID NO: 540980 - RNA, 19 nt, Homo sapiens
  misc_RNA (1)...(19): siRNA sense strand
gagaaacacuggacuucau

SEQ ID NO: 540981 - RNA, 19 nt, Homo sapiens
  misc_RNA (1)...(19): siRNA sense strand
gaugaaugccacaacuuua

SEQ ID NO: 540982 - RNA, 19 nt, Homo sapiens
  misc_RNA (1)...(19): siRNA sense strand
gaagcuggcaugguacuua

SEQ ID NO: 540983 - RNA, 19 nt, Homo sapiens
  misc_RNA (1)...(19): siRNA sense strand
gaugagcccugguucacaa

SEQ ID NO: 540984 - RNA, 19 nt, Homo sapiens
  misc_RNA (1)...(19): siRNA sense strand
acacuggacuucauuucua

SEQ ID NO: 540985 - RNA, 19 nt, Homo sapiens
  misc_RNA (1)...(19): siRNA sense strand
agaaaucgcugucgaacau

SEQ ID NO: 540986 - RNA, 19 nt, Homo sapiens
  misc_RNA (1)...(19): siRNA sense strand
gagccacacuuucuucaug

SEQ ID NO: 540987 - RNA, 19 nt, Homo sapiens
  misc_RNA (1)...(19): siRNA sense strand
uagcauggaugacauugaa

SEQ ID NO: 540988 - RNA, 19 nt, Homo sapiens
  misc_RNA (1)...(19): siRNA sense strand
gcaagaugcccauuugaug

SEQ ID NO: 540989 - RNA, 19 nt, Homo sapiens
  misc_RNA (1)...(19): siRNA sense strand
gauguucugcagucuauua

SEQ ID NO: 540990 - RNA, 19 nt, Homo sapiens
  misc_RNA (1)...(19): siRNA sense strand
cacaguggcugacuucuug

SEQ ID NO: 540991 - RNA, 19 nt, Homo sapiens
  misc_RNA (1)...(19): siRNA sense strand
ggccagcgaugccguuauu

SEQ ID NO: 540992 - RNA, 19 nt, Homo sapiens
  misc_RNA (1)...(19): siRNA sense strand
gaccaguccuuucucuuug

SEQ ID NO: 540993 - RNA, 19 nt, Homo sapiens
  misc_RNA (1)...(19): siRNA sense strand
aaacugacauggcgaucaa

SEQ ID NO: 540994 - RNA, 19 nt, Homo sapiens
  misc_RNA (1)...(19): siRNA sense strand
gcugaugguuucccaguug

SEQ ID NO: 540995 - RNA, 19 nt, Homo sapiens
  misc_RNA (1)...(19): siRNA sense strand
cgagacacacuuuauauug

SEQ ID NO: 540996 - RNA, 19 nt, Homo sapiens
  misc_RNA (1)...(19): siRNA sense strand
caaagacucgggucaggua

SEQ ID NO: 540997 - RNA, 19 nt, Homo sapiens
  misc_RNA (1)...(19): siRNA sense strand
ccacgcagcucaauagcau

SEQ ID NO: 540998 - RNA, 19 nt, Homo sapiens
  misc_RNA (1)...(19): siRNA sense strand
gaaaggcaagcauaaagau

SEQ ID NO: 540999 - RNA, 19 nt, Homo sapiens
  misc_RNA (1)...(19): siRNA sense strand
uggcagggaucaaguuuau

SEQ ID NO: 541000 - RNA, 19 nt, Homo sapiens
  misc_RNA (1)...(19): siRNA sense strand
gaacgacagcguauuacug

SEQ ID NO: 541001 - RNA, 19 nt, Homo sapiens
  misc_RNA (1)...(19): siRNA sense strand
uuaauacugucgacuauca

SEQ ID NO: 541002 - RNA, 19 nt, Homo sapiens
  misc_RNA (1)...(19): siRNA sense strand
ccagcgaugccguuauuua

SEQ ID NO: 541003 - RNA, 19 nt, Homo sapiens
  misc_RNA (1)...(19): siRNA sense strand
gagacacacuuuauauugc

SEQ ID NO: 541004 - RNA, 19 nt, Homo sapiens
  misc_RNA (1)...(19): siRNA sense strand
gaacagaaaacuccagauu

SEQ ID NO: 541005 - RNA, 19 nt, Homo sapiens
  misc_RNA (1)...(19): siRNA sense strand
caaaggacgguuuaaggaa

SEQ ID NO: 541006 - RNA, 19 nt, Homo sapiens
  misc_RNA (1)...(19): siRNA sense strand
gaaacacuggacuucauuu

SEQ ID NO: 541007 - RNA, 19 nt, Homo sapiens
  misc_RNA (1)...(19): siRNA sense strand
gaucugcccuucgcacaau

SEQ ID NO: 541008 - RNA, 19 nt, Homo sapiens
  misc_RNA (1)...(19): siRNA sense strand
cgagaaaacugugcuauga

SEQ ID NO: 541009 - RNA, 19 nt, Homo sapiens
  misc_RNA (1)...(19): siRNA sense strand
uaccagaacuacacaguca

SEQ ID NO: 541010 - RNA, 19 nt, Homo sapiens
  misc_RNA (1)...(19): siRNA sense strand
ucaaggcaauauccgguuu

SEQ ID NO: 541011 - RNA, 19 nt, Homo sapiens
  misc_RNA (1)...(19): siRNA sense strand
gggaucaaguuuauacagu

SEQ ID NO: 541012 - RNA, 19 nt, Homo sapiens
  misc_RNA (1)...(19): siRNA sense strand
ucaaucccauguguagaua

SEQ ID NO: 541013 - RNA, 19 nt, Homo sapiens
  misc_RNA (1)...(19): siRNA sense strand
uauaaaaccuccaucgauu

SEQ ID NO: 541014 - RNA, 19 nt, Homo sapiens
  misc_RNA (1)...(19): siRNA sense strand
gcagggaucaaguuuauac

SEQ ID NO: 541015 - RNA, 19 nt, Homo sapiens
  misc_RNA (1)...(19): siRNA sense strand
ucaaaggacgguuuaagga

SEQ ID NO: 541016 - RNA, 19 nt, Homo sapiens
  misc_RNA (1)...(19): siRNA sense strand
ugaguaccuuagaauauga

SEQ ID NO: 541017 - RNA, 19 nt, Homo sapiens
  misc_RNA (1)...(19): siRNA sense strand
gcccaaaacagaaguaaua

SEQ ID NO: 541018 - RNA, 19 nt, Homo sapiens
  misc_RNA (1)...(19): siRNA sense strand
aagcuggcaugguacuuaa

SEQ ID NO: 541019 - RNA, 19 nt, Homo sapiens
  misc_RNA (1)...(19): siRNA sense strand
aaaucgcugucgaacauaa

SEQ ID NO: 541020 - RNA, 19 nt, Homo sapiens
  misc_RNA (1)...(19): siRNA sense strand
ugaaaggcaagcauaaaga

SEQ ID NO: 541021 - RNA, 19 nt, Homo sapiens
  misc_RNA (1)...(19): siRNA sense strand
gagcccugguucacaaaga

SEQ ID NO: 541022 - RNA, 19 nt, Homo sapiens
  misc_RNA (1)...(19): siRNA sense strand
aagaaacgaugagaugguu

SEQ ID NO: 541023 - RNA, 19 nt, Homo sapiens
  misc_RNA (1)...(19): siRNA sense strand
gaugaugaaccccuuaaua

SEQ ID NO: 541024 - RNA, 19 nt, Homo sapiens
  misc_RNA (1)...(19): siRNA sense strand
agaccaguccuuucucuuu

SEQ ID NO: 541025 - RNA, 19 nt, Homo sapiens
  misc_RNA (1)...(19): siRNA sense strand
guugaguaccuuagaauau

SEQ ID NO: 541026 - RNA, 19 nt, Homo sapiens
  misc_RNA (1)...(19): siRNA sense strand
gauugaagccuacaaccau

SEQ ID NO: 541027 - RNA, 19 nt, Homo sapiens
  misc_RNA (1)...(19): siRNA sense strand
ggagaaacacuggacuuca

SEQ ID NO: 541028 - RNA, 19 nt, Homo sapiens
  misc_RNA (1)...(19): siRNA sense strand
cagcgaugccguuauuuau

SEQ ID NO: 541029 - RNA, 19 nt, Homo sapiens
  misc_RNA (1)...(19): siRNA sense strand
aaaccaauguugcccucuu

SEQ ID NO: 541030 - RNA, 19 nt, Homo sapiens
  misc_RNA (1)...(19): siRNA sense strand
gcaagcauaaagaugaaug

SEQ ID NO: 541031 - RNA, 19 nt, Homo sapiens
  misc_RNA (1)...(19): siRNA sense strand
cacuggacuucauuucuaa

SEQ ID NO: 541032 - RNA, 19 nt, Homo sapiens
  misc_RNA (1)...(19): siRNA sense strand
gaaaucgcugucgaacaua

SEQ ID NO: 541033 - RNA, 19 nt, Homo sapiens
  misc_RNA (1)...(19): siRNA sense strand
acacuuucuucaugccaua

SEQ ID NO: 541034 - RNA, 19 nt, Homo sapiens
  misc_RNA (1)...(19): siRNA sense strand
gguugaguaccuuagaaua

SEQ ID NO: 541035 - RNA, 19 nt, Homo sapiens
  misc_RNA (1)...(19): siRNA sense strand
cagcugauguugaaaauuc

SEQ ID NO: 541036 - RNA, 19 nt, Homo sapiens
  misc_RNA (1)...(19): siRNA sense strand
guauucaaaggacgguuua

SEQ ID NO: 541037 - RNA, 19 nt, Homo sapiens
  misc_RNA (1)...(19): siRNA sense strand
aagcaugggugauggaucu

SEQ ID NO: 541038 - RNA, 19 nt, Homo sapiens
  misc_RNA (1)...(19): siRNA sense strand
uuaguggccuggcaagaug

SEQ ID NO: 541039 - RNA, 19 nt, Homo sapiens
  misc_RNA (1)...(19): siRNA sense strand
aaagaugaaugccacaacu

SEQ ID NO: 541040 - RNA, 19 nt, Homo sapiens
  misc_RNA (1)...(19): siRNA sense strand
guugagggcagucagcuuu

SEQ ID NO: 541041 - RNA, 19 nt, Homo sapiens
  misc_RNA (1)...(19): siRNA sense strand
gaaacugacauggcgauca

SEQ ID NO: 541042 - RNA, 19 nt, Homo sapiens
  misc_RNA (1)...(19): siRNA sense strand
cgacagcguauuacuggaa

SEQ ID NO: 541043 - RNA, 19 nt, Homo sapiens
  misc_RNA (1)...(19): siRNA sense strand
cucugaagcuggcauggua

SEQ ID NO: 541044 - RNA, 19 nt, Homo sapiens
  misc_RNA (1)...(19): siRNA sense strand
gaauauggaaacuaugucu

SEQ ID NO: 541045 - RNA, 19 nt, Homo sapiens
  misc_RNA (1)...(19): siRNA sense strand
cagcuuuccugaagaugau

SEQ ID NO: 541046 - RNA, 19 nt, Homo sapiens
  misc_RNA (1)...(19): siRNA sense strand
agaaaacugugcuaugaaa

SEQ ID NO: 541047 - RNA, 19 nt, Homo sapiens
  misc_RNA (1)...(19): siRNA sense strand
ccuuaauacugucgacuau

SEQ ID NO: 541048 - RNA, 19 nt, Homo sapiens
  misc_RNA (1)...(19): siRNA sense strand
uuugaacgacagcguauua

SEQ ID NO: 541049 - RNA, 19 nt, Homo sapiens
  misc_RNA (1)...(19): siRNA sense strand
gcauuuagcauggaugaca

SEQ ID NO: 541050 - RNA, 19 nt, Homo sapiens
  misc_RNA (1)...(19): siRNA sense strand
ucugcugucugugcauuua

SEQ ID NO: 541051 - RNA, 19 nt, Homo sapiens
  misc_RNA (1)...(19): siRNA sense strand
uaaaugaaaugcccaaaac

SEQ ID NO: 541052 - RNA, 19 nt, Homo sapiens
  misc_RNA (1)...(19): siRNA sense strand
gcguauuacuggaagagau

SEQ ID NO: 541053 - RNA, 19 nt, Homo sapiens
  misc_RNA (1)...(19): siRNA sense strand
ugucauucaucaaaucuca

SEQ ID NO: 541054 - RNA, 19 nt, Homo sapiens
  misc_RNA (1)...(19): siRNA sense strand
gaagacaaagugccaaagc

SEQ ID NO: 541055 - RNA, 19 nt, Homo sapiens
  misc_RNA (1)...(19): siRNA sense strand
aaccaauguugcccucuuu

SEQ ID NO: 541056 - RNA, 19 nt, Homo sapiens
  misc_RNA (1)...(19): siRNA sense strand
uugaguaccuuagaauaug

SEQ ID NO: 541057 - RNA, 19 nt, Homo sapiens
  misc_RNA (1)...(19): siRNA sense strand
gaaugccacaacuuuauca

SEQ ID NO: 541058 - RNA, 19 nt, Homo sapiens
  misc_RNA (1)...(19): siRNA sense strand
agaugaaugccacaacuuu

SEQ ID NO: 541059 - RNA, 19 nt, Homo sapiens
  misc_RNA (1)...(19): siRNA sense strand
ugucgacuaucacuauuca

SEQ ID NO: 541060 - RNA, 19 nt, Homo sapiens
  misc_RNA (1)...(19): siRNA sense strand
uuaaaguucuggcaaagac

SEQ ID NO: 541061 - RNA, 19 nt, Homo sapiens
  misc_RNA (1)...(19): siRNA sense strand
ugacauggcgaucaagaca

SEQ ID NO: 541062 - RNA, 19 nt, Homo sapiens
  misc_RNA (1)...(19): siRNA sense strand
ccaguccuuucucuuugaa

SEQ ID NO: 541063 - RNA, 19 nt, Homo sapiens
  misc_RNA (1)...(19): siRNA sense strand
gcauucaaucccaugugua

SEQ ID NO: 541064 - RNA, 19 nt, Homo sapiens
  misc_RNA (1)...(19): siRNA sense strand
caagaaacgaugagauggu

SEQ ID NO: 541065 - RNA, 19 nt, Homo sapiens
  misc_RNA (1)...(19): siRNA sense strand
aaggcaagcauaaagauga

SEQ ID NO: 541066 - RNA, 19 nt, Homo sapiens
  misc_RNA (1)...(19): siRNA sense strand
caucuuuguuggcucugaa

SEQ ID NO: 541067 - RNA, 19 nt, Homo sapiens
  misc_RNA (1)...(19): siRNA sense strand
uaaaggcucggcugaacug

SEQ ID NO: 541068 - RNA, 19 nt, Homo sapiens
  misc_RNA (1)...(19): siRNA sense strand
gaugggaagcuguauucug

SEQ ID NO: 541069 - RNA, 19 nt, Homo sapiens
  misc_RNA (1)...(19): siRNA sense strand
gagaaaucgcugucgaaca

SEQ ID NO: 541070 - RNA, 19 nt, Homo sapiens
  misc_RNA (1)...(19): siRNA sense strand
aggcaagcauaaagaugaa

SEQ ID NO: 541071 - RNA, 19 nt, Homo sapiens
  misc_RNA (1)...(19): siRNA sense strand
cuacacagucaucuuuguu

SEQ ID NO: 541072 - RNA, 19 nt, Homo sapiens
  misc_RNA (1)...(19): siRNA sense strand
ggacgcccuucaggcaaug

SEQ ID NO: 541073 - RNA, 19 nt, Homo sapiens
  misc_RNA (1)...(19): siRNA sense strand
guucugcagucuauuacag

SEQ ID NO: 541074 - RNA, 19 nt, Homo sapiens
  misc_RNA (1)...(19): siRNA sense strand
gacagcaguucccgaagac

SEQ ID NO: 541075 - RNA, 19 nt, Homo sapiens
  misc_RNA (1)...(19): siRNA sense strand
guucugcugucugugcauu

SEQ ID NO: 541076 - RNA, 19 nt, Homo sapiens
  misc_RNA (1)...(19): siRNA sense strand
gaacuacacagucaucuuu

SEQ ID NO: 541077 - RNA, 19 nt, Homo sapiens
  misc_RNA (1)...(19): siRNA sense strand
ggacagcaguucccgaaga

SEQ ID NO: 541078 - RNA, 19 nt, Homo sapiens
  misc_RNA (1)...(19): siRNA sense strand
gaaacucugucauucauca

SEQ ID NO: 541079 - RNA, 19 nt, Homo sapiens
  misc_RNA (1)...(19): siRNA sense strand
ggaucaaguuuauacagua

SEQ ID NO: 541080 - RNA, 19 nt, Homo sapiens
  misc_RNA (1)...(19): siRNA sense strand
gagaaacacuggacuucau

SEQ ID NO: 541081 - RNA, 19 nt, Homo sapiens
  misc_RNA (1)...(19): siRNA sense strand
gaugaaugccacaacuuua

SEQ ID NO: 541082 - RNA, 19 nt, Homo sapiens
  misc_RNA (1)...(19): siRNA sense strand
gaagcuggcaugguacuua

SEQ ID NO: 541083 - RNA, 19 nt, Homo sapiens
  misc_RNA (1)...(19): siRNA sense strand
gaugagcccugguucacaa

SEQ ID NO: 541084 - RNA, 19 nt, Homo sapiens
  misc_RNA (1)...(19): siRNA sense strand
acacuggacuucauuucua

SEQ ID NO: 541085 - RNA, 19 nt, Homo sapiens
  misc_RNA (1)...(19): siRNA sense strand
agaaaucgcugucgaacau

SEQ ID NO: 541086 - RNA, 19 nt, Homo sapiens
  misc_RNA (1)...(19): siRNA sense strand
gagccacacuuucuucaug

SEQ ID NO: 541087 - RNA, 19 nt, Homo sapiens
  misc_RNA (1)...(19): siRNA sense strand
uagcauggaugacauugaa

SEQ ID NO: 541088 - RNA, 19 nt, Homo sapiens
  misc_RNA (1)...(19): siRNA sense strand
gcaagaugcccauuugaug

SEQ ID NO: 541089 - RNA, 19 nt, Homo sapiens
  misc_RNA (1)...(19): siRNA sense strand
gauguucugcagucuauua

SEQ ID NO: 541090 - RNA, 19 nt, Homo sapiens
  misc_RNA (1)...(19): siRNA sense strand
cacaguggcugacuucuug

SEQ ID NO: 541091 - RNA, 19 nt, Homo sapiens
  misc_RNA (1)...(19): siRNA sense strand
ggccagcgaugccguuauu

SEQ ID NO: 541092 - RNA, 19 nt, Homo sapiens
  misc_RNA (1)...(19): siRNA sense strand
gaccaguccuuucucuuug

SEQ ID NO: 541093 - RNA, 19 nt, Homo sapiens
  misc_RNA (1)...(19): siRNA sense strand
aaacugacauggcgaucaa

SEQ ID NO: 541094 - RNA, 19 nt, Homo sapiens
  misc_RNA (1)...(19): siRNA sense strand
gcugaugguuucccaguug

SEQ ID NO: 541095 - RNA, 19 nt, Homo sapiens
  misc_RNA (1)...(19): siRNA sense strand
cgagacacacuuuauauug

SEQ ID NO: 541096 - RNA, 19 nt, Homo sapiens
  misc_RNA (1)...(19): siRNA sense strand
caaagacucgggucaggua

SEQ ID NO: 541097 - RNA, 19 nt, Homo sapiens
  misc_RNA (1)...(19): siRNA sense strand
ccacgcagcucaauagcau

SEQ ID NO: 541098 - RNA, 19 nt, Homo sapiens
  misc_RNA (1)...(19): siRNA sense strand
gaaaggcaagcauaaagau

SEQ ID NO: 541099 - RNA, 19 nt, Homo sapiens
  misc_RNA (1)...(19): siRNA sense strand
uggcagggaucaaguuuau

SEQ ID NO: 541100 - RNA, 19 nt, Homo sapiens
  misc_RNA (1)...(19): siRNA sense strand
gaacgacagcguauuacug

SEQ ID NO: 541101 - RNA, 19 nt, Homo sapiens
  misc_RNA (1)...(19): siRNA sense strand
uuaauacugucgacuauca

SEQ ID NO: 541102 - RNA, 19 nt, Homo sapiens
  misc_RNA (1)...(19): siRNA sense strand
ccagcgaugccguuauuua

SEQ ID NO: 541103 - RNA, 19 nt, Homo sapiens
  misc_RNA (1)...(19): siRNA sense strand
gagacacacuuuauauugc

SEQ ID NO: 541104 - RNA, 19 nt, Homo sapiens
  misc_RNA (1)...(19): siRNA sense strand
gaacagaaaacuccagauu

SEQ ID NO: 541105 - RNA, 19 nt, Homo sapiens
  misc_RNA (1)...(19): siRNA sense strand
caaaggacgguuuaaggaa

SEQ ID NO: 541106 - RNA, 19 nt, Homo sapiens
  misc_RNA (1)...(19): siRNA sense strand
gaaacacuggacuucauuu

SEQ ID NO: 541107 - RNA, 19 nt, Homo sapiens
  misc_RNA (1)...(19): siRNA sense strand
gaucugcccuucgcacaau

SEQ ID NO: 541108 - RNA, 19 nt, Homo sapiens
  misc_RNA (1)...(19): siRNA sense strand
cgagaaaacugugcuauga

SEQ ID NO: 541109 - RNA, 19 nt, Homo sapiens
  misc_RNA (1)...(19): siRNA sense strand
uaccagaacuacacaguca

SEQ ID NO: 541110 - RNA, 19 nt, Homo sapiens
  misc_RNA (1)...(19): siRNA sense strand
ucaaggcaauauccgguuu

SEQ ID NO: 541111 - RNA, 19 nt, Homo sapiens
  misc_RNA (1)...(19): siRNA sense strand
gggaucaaguuuauacagu

SEQ ID NO: 541112 - RNA, 19 nt, Homo sapiens
  misc_RNA (1)...(19): siRNA sense strand
ucaaucccauguguagaua

SEQ ID NO: 541113 - RNA, 19 nt, Homo sapiens
  misc_RNA (1)...(19): siRNA sense strand
uauaaaaccuccaucgauu

SEQ ID NO: 541114 - RNA, 19 nt, Homo sapiens
  misc_RNA (1)...(19): siRNA sense strand
gcagggaucaaguuuauac

SEQ ID NO: 541115 - RNA, 19 nt, Homo sapiens
  misc_RNA (1)...(19): siRNA sense strand
ucaaaggacgguuuaagga

SEQ ID NO: 541116 - RNA, 19 nt, Homo sapiens
  misc_RNA (1)...(19): siRNA sense strand
ugaguaccuuagaauauga

SEQ ID NO: 541117 - RNA, 19 nt, Homo sapiens
  misc_RNA (1)...(19): siRNA sense strand
gcccaaaacagaaguaaua

SEQ ID NO: 541118 - RNA, 19 nt, Homo sapiens
  misc_RNA (1)...(19): siRNA sense strand
aagcuggcaugguacuuaa

SEQ ID NO: 541119 - RNA, 19 nt, Homo sapiens
  misc_RNA (1)...(19): siRNA sense strand
aaaucgcugucgaacauaa

SEQ ID NO: 541120 - RNA, 19 nt, Homo sapiens
  misc_RNA (1)...(19): siRNA sense strand
ugaaaggcaagcauaaaga

SEQ ID NO: 541121 - RNA, 19 nt, Homo sapiens
  misc_RNA (1)...(19): siRNA sense strand
gagcccugguucacaaaga

SEQ ID NO: 541122 - RNA, 19 nt, Homo sapiens
  misc_RNA (1)...(19): siRNA sense strand
aagaaacgaugagaugguu

SEQ ID NO: 541123 - RNA, 19 nt, Homo sapiens
  misc_RNA (1)...(19): siRNA sense strand
gaugaugaaccccuuaaua

SEQ ID NO: 541124 - RNA, 19 nt, Homo sapiens
  misc_RNA (1)...(19): siRNA sense strand
agaccaguccuuucucuuu

SEQ ID NO: 541125 - RNA, 19 nt, Homo sapiens
  misc_RNA (1)...(19): siRNA sense strand
guugaguaccuuagaauau

SEQ ID NO: 541126 - RNA, 19 nt, Homo sapiens
  misc_RNA (1)...(19): siRNA sense strand
gauugaagccuacaaccau

SEQ ID NO: 541127 - RNA, 19 nt, Homo sapiens
  misc_RNA (1)...(19): siRNA sense strand
ggagaaacacuggacuuca

SEQ ID NO: 541128 - RNA, 19 nt, Homo sapiens
  misc_RNA (1)...(19): siRNA sense strand
cagcgaugccguuauuuau

SEQ ID NO: 541129 - RNA, 19 nt, Homo sapiens
  misc_RNA (1)...(19): siRNA sense strand
aaaccaauguugcccucuu

SEQ ID NO: 541130 - RNA, 19 nt, Homo sapiens
  misc_RNA (1)...(19): siRNA sense strand
gcaagcauaaagaugaaug

SEQ ID NO: 541131 - RNA, 19 nt, Homo sapiens
  misc_RNA (1)...(19): siRNA sense strand
cacuggacuucauuucuaa

SEQ ID NO: 541132 - RNA, 19 nt, Homo sapiens
  misc_RNA (1)...(19): siRNA sense strand
gaaaucgcugucgaacaua

SEQ ID NO: 541133 - RNA, 19 nt, Homo sapiens
  misc_RNA (1)...(19): siRNA sense strand
acacuuucuucaugccaua

SEQ ID NO: 541134 - RNA, 19 nt, Homo sapiens
  misc_RNA (1)...(19): siRNA sense strand
gguugaguaccuuagaaua

SEQ ID NO: 541135 - RNA, 19 nt, Homo sapiens
  misc_RNA (1)...(19): siRNA sense strand
cagcugauguugaaaauuc

SEQ ID NO: 541136 - RNA, 19 nt, Homo sapiens
  misc_RNA (1)...(19): siRNA sense strand
guauucaaaggacgguuua

SEQ ID NO: 541137 - RNA, 19 nt, Homo sapiens
  misc_RNA (1)...(19): siRNA sense strand
aagcaugggugauggaucu

SEQ ID NO: 541138 - RNA, 19 nt, Homo sapiens
  misc_RNA (1)...(19): siRNA sense strand
uuaguggccuggcaagaug

SEQ ID NO: 541139 - RNA, 19 nt, Homo sapiens
  misc_RNA (1)...(19): siRNA sense strand
aaagaugaaugccacaacu

SEQ ID NO: 541140 - RNA, 19 nt, Homo sapiens
  misc_RNA (1)...(19): siRNA sense strand
guugagggcagucagcuuu

SEQ ID NO: 541141 - RNA, 19 nt, Homo sapiens
  misc_RNA (1)...(19): siRNA sense strand
gaaacugacauggcgauca

SEQ ID NO: 541142 - RNA, 19 nt, Homo sapiens
  misc_RNA (1)...(19): siRNA sense strand
cgacagcguauuacuggaa

SEQ ID NO: 541143 - RNA, 19 nt, Homo sapiens
  misc_RNA (1)...(19): siRNA sense strand
cucugaagcuggcauggua

SEQ ID NO: 541144 - RNA, 19 nt, Homo sapiens
  misc_RNA (1)...(19): siRNA sense strand
gaauauggaaacuaugucu

SEQ ID NO: 541145 - RNA, 19 nt, Homo sapiens
  misc_RNA (1)...(19): siRNA sense strand
cagcuuuccugaagaugau

SEQ ID NO: 541146 - RNA, 19 nt, Homo sapiens
  misc_RNA (1)...(19): siRNA sense strand
agaaaacugugcuaugaaa

SEQ ID NO: 541147 - RNA, 19 nt, Homo sapiens
  misc_RNA (1)...(19): siRNA sense strand
ccuuaauacugucgacuau

SEQ ID NO: 541148 - RNA, 19 nt, Homo sapiens
  misc_RNA (1)...(19): siRNA sense strand
uuugaacgacagcguauua

SEQ ID NO: 541149 - RNA, 19 nt, Homo sapiens
  misc_RNA (1)...(19): siRNA sense strand
gcauuuagcauggaugaca

SEQ ID NO: 541150 - RNA, 19 nt, Homo sapiens
  misc_RNA (1)...(19): siRNA sense strand
ucugcugucugugcauuua

SEQ ID NO: 541151 - RNA, 19 nt, Homo sapiens
  misc_RNA (1)...(19): siRNA sense strand
uaaaugaaaugcccaaaac

SEQ ID NO: 541152 - RNA, 19 nt, Homo sapiens
  misc_RNA (1)...(19): siRNA sense strand
gcguauuacuggaagagau

SEQ ID NO: 541153 - RNA, 19 nt, Homo sapiens
  misc_RNA (1)...(19): siRNA sense strand
ugucauucaucaaaucuca

SEQ ID NO: 541154 - RNA, 19 nt, Homo sapiens
  misc_RNA (1)...(19): siRNA sense strand
gaagacaaagugccaaagc

SEQ ID NO: 541155 - RNA, 19 nt, Homo sapiens
  misc_RNA (1)...(19): siRNA sense strand
aaccaauguugcccucuuu

SEQ ID NO: 541156 - RNA, 19 nt, Homo sapiens
  misc_RNA (1)...(19): siRNA sense strand
uugaguaccuuagaauaug

SEQ ID NO: 541157 - RNA, 19 nt, Homo sapiens
  misc_RNA (1)...(19): siRNA sense strand
gaaugccacaacuuuauca

SEQ ID NO: 541158 - RNA, 19 nt, Homo sapiens
  misc_RNA (1)...(19): siRNA sense strand
agaugaaugccacaacuuu

SEQ ID NO: 541159 - RNA, 19 nt, Homo sapiens
  misc_RNA (1)...(19): siRNA sense strand
ugucgacuaucacuauuca

SEQ ID NO: 541160 - RNA, 19 nt, Homo sapiens
  misc_RNA (1)...(19): siRNA sense strand
uuaaaguucuggcaaagac

SEQ ID NO: 541161 - RNA, 19 nt, Homo sapiens
  misc_RNA (1)...(19): siRNA sense strand
ugacauggcgaucaagaca

SEQ ID NO: 541162 - RNA, 19 nt, Homo sapiens
  misc_RNA (1)...(19): siRNA sense strand
ccaguccuuucucuuugaa

SEQ ID NO: 541163 - RNA, 19 nt, Homo sapiens
  misc_RNA (1)...(19): siRNA sense strand
gcauucaaucccaugugua

SEQ ID NO: 541164 - RNA, 19 nt, Homo sapiens
  misc_RNA (1)...(19): siRNA sense strand
caagaaacgaugagauggu

SEQ ID NO: 541165 - RNA, 19 nt, Homo sapiens
  misc_RNA (1)...(19): siRNA sense strand
aaggcaagcauaaagauga

SEQ ID NO: 541166 - RNA, 19 nt, Homo sapiens
  misc_RNA (1)...(19): siRNA sense strand
caucuuuguuggcucugaa

SEQ ID NO: 541167 - RNA, 19 nt, Homo sapiens
  misc_RNA (1)...(19): siRNA sense strand
uaaaggcucggcugaacug

SEQ ID NO: 541168 - RNA, 19 nt, Homo sapiens
  misc_RNA (1)...(19): siRNA sense strand
gaugggaagcuguauucug

SEQ ID NO: 541169 - RNA, 19 nt, Homo sapiens
  misc_RNA (1)...(19): siRNA sense strand
gagaaaucgcugucgaaca

SEQ ID NO: 541170 - RNA, 19 nt, Homo sapiens
  misc_RNA (1)...(19): siRNA sense strand
aggcaagcauaaagaugaa

SEQ ID NO: 541171 - RNA, 19 nt, Homo sapiens
  misc_RNA (1)...(19): siRNA sense strand
cuacacagucaucuuuguu

SEQ ID NO: 541172 - RNA, 19 nt, Homo sapiens
  misc_RNA (1)...(19): siRNA sense strand
ggacgcccuucaggcaaug

SEQ ID NO: 541173 - RNA, 19 nt, Homo sapiens
  misc_RNA (1)...(19): siRNA sense strand
guucugcagucuauuacag

SEQ ID NO: 541174 - RNA, 19 nt, Homo sapiens
  misc_RNA (1)...(19): siRNA sense strand
gacagcaguucccgaagac

SEQ ID NO: 541175 - RNA, 19 nt, Homo sapiens
  misc_RNA (1)...(19): siRNA sense strand
guucugcugucugugcauu

SEQ ID NO: 541176 - RNA, 19 nt, Homo sapiens
  misc_RNA (1)...(19): siRNA sense strand
gaacuacacagucaucuuu

SEQ ID NO: 541177 - RNA, 19 nt, Homo sapiens
  misc_RNA (1)...(19): siRNA sense strand
ggacagcaguucccgaaga

SEQ ID NO: 541178 - RNA, 19 nt, Homo sapiens
  misc_RNA (1)...(19): siRNA sense strand
gaaacucugucauucauca

SEQ ID NO: 541179 - RNA, 19 nt, Homo sapiens
  misc_RNA (1)...(19): siRNA sense strand
ggaucaaguuuauacagua

SEQ ID NO: 541180 - RNA, 19 nt, Homo sapiens
  misc_RNA (1)...(19): siRNA sense strand
gagaaacacuggacuucau

SEQ ID NO: 541181 - RNA, 19 nt, Homo sapiens
  misc_RNA (1)...(19): siRNA sense strand
gaugaaugccacaacuuua

SEQ ID NO: 541182 - RNA, 19 nt, Homo sapiens
  misc_RNA (1)...(19): siRNA sense strand
gaagcuggcaugguacuua

SEQ ID NO: 541183 - RNA, 19 nt, Homo sapiens
  misc_RNA (1)...(19): siRNA sense strand
gaugagcccugguucacaa

SEQ ID NO: 541184 - RNA, 19 nt, Homo sapiens
  misc_RNA (1)...(19): siRNA sense strand
acacuggacuucauuucua

SEQ ID NO: 541185 - RNA, 19 nt, Homo sapiens
  misc_RNA (1)...(19): siRNA sense strand
agaaaucgcugucgaacau

SEQ ID NO: 541186 - RNA, 19 nt, Homo sapiens
  misc_RNA (1)...(19): siRNA sense strand
gagccacacuuucuucaug

SEQ ID NO: 541187 - RNA, 19 nt, Homo sapiens
  misc_RNA (1)...(19): siRNA sense strand
uagcauggaugacauugaa

SEQ ID NO: 541188 - RNA, 19 nt, Homo sapiens
  misc_RNA (1)...(19): siRNA sense strand
gcaagaugcccauuugaug

SEQ ID NO: 541189 - RNA, 19 nt, Homo sapiens
  misc_RNA (1)...(19): siRNA sense strand
gauguucugcagucuauua

SEQ ID NO: 541190 - RNA, 19 nt, Homo sapiens
  misc_RNA (1)...(19): siRNA sense strand
cacaguggcugacuucuug

SEQ ID NO: 541191 - RNA, 19 nt, Homo sapiens
  misc_RNA (1)...(19): siRNA sense strand
ggccagcgaugccguuauu

SEQ ID NO: 541192 - RNA, 19 nt, Homo sapiens
  misc_RNA (1)...(19): siRNA sense strand
gaccaguccuuucucuuug

SEQ ID NO: 541193 - RNA, 19 nt, Homo sapiens
  misc_RNA (1)...(19): siRNA sense strand
aaacugacauggcgaucaa

SEQ ID NO: 541194 - RNA, 19 nt, Homo sapiens
  misc_RNA (1)...(19): siRNA sense strand
gcugaugguuucccaguug

SEQ ID NO: 541195 - RNA, 19 nt, Homo sapiens
  misc_RNA (1)...(19): siRNA sense strand
cgagacacacuuuauauug

SEQ ID NO: 541196 - RNA, 19 nt, Homo sapiens
  misc_RNA (1)...(19): siRNA sense strand
caaagacucgggucaggua

SEQ ID NO: 541197 - RNA, 19 nt, Homo sapiens
  misc_RNA (1)...(19): siRNA sense strand
ccacgcagcucaauagcau

SEQ ID NO: 541198 - RNA, 19 nt, Homo sapiens
  misc_RNA (1)...(19): siRNA sense strand
gaaaggcaagcauaaagau

SEQ ID NO: 541199 - RNA, 19 nt, Homo sapiens
  misc_RNA (1)...(19): siRNA sense strand
uggcagggaucaaguuuau

SEQ ID NO: 541200 - RNA, 19 nt, Homo sapiens
  misc_RNA (1)...(19): siRNA sense strand
gaacgacagcguauuacug

SEQ ID NO: 541201 - RNA, 19 nt, Homo sapiens
  misc_RNA (1)...(19): siRNA sense strand
uuaauacugucgacuauca

SEQ ID NO: 541202 - RNA, 19 nt, Homo sapiens
  misc_RNA (1)...(19): siRNA sense strand
ccagcgaugccguuauuua

SEQ ID NO: 541203 - RNA, 19 nt, Homo sapiens
  misc_RNA (1)...(19): siRNA sense strand
gagacacacuuuauauugc

SEQ ID NO: 541204 - RNA, 19 nt, Homo sapiens
  misc_RNA (1)...(19): siRNA sense strand
gaacagaaaacuccagauu

SEQ ID NO: 541205 - RNA, 19 nt, Homo sapiens
  misc_RNA (1)...(19): siRNA sense strand
caaaggacgguuuaaggaa

SEQ ID NO: 541206 - RNA, 19 nt, Homo sapiens
  misc_RNA (1)...(19): siRNA sense strand
gaaacacuggacuucauuu

SEQ ID NO: 541207 - RNA, 19 nt, Homo sapiens
  misc_RNA (1)...(19): siRNA sense strand
gaucugcccuucgcacaau

SEQ ID NO: 541208 - RNA, 19 nt, Homo sapiens
  misc_RNA (1)...(19): siRNA sense strand
cgagaaaacugugcuauga

SEQ ID NO: 541209 - RNA, 19 nt, Homo sapiens
  misc_RNA (1)...(19): siRNA sense strand
uaccagaacuacacaguca

SEQ ID NO: 541210 - RNA, 19 nt, Homo sapiens
  misc_RNA (1)...(19): siRNA sense strand
ucaaggcaauauccgguuu

SEQ ID NO: 541211 - RNA, 19 nt, Homo sapiens
  misc_RNA (1)...(19): siRNA sense strand
gggaucaaguuuauacagu

SEQ ID NO: 541212 - RNA, 19 nt, Homo sapiens
  misc_RNA (1)...(19): siRNA sense strand
ucaaucccauguguagaua

SEQ ID NO: 541213 - RNA, 19 nt, Homo sapiens
  misc_RNA (1)...(19): siRNA sense strand
uauaaaaccuccaucgauu

SEQ ID NO: 541214 - RNA, 19 nt, Homo sapiens
  misc_RNA (1)...(19): siRNA sense strand
gcagggaucaaguuuauac

SEQ ID NO: 541215 - RNA, 19 nt, Homo sapiens
  misc_RNA (1)...(19): siRNA sense strand
ucaaaggacgguuuaagga

SEQ ID NO: 541216 - RNA, 19 nt, Homo sapiens
  misc_RNA (1)...(19): siRNA sense strand
ugaguaccuuagaauauga

SEQ ID NO: 541217 - RNA, 19 nt, Homo sapiens
  misc_RNA (1)...(19): siRNA sense strand
gcccaaaacagaaguaaua

SEQ ID NO: 541218 - RNA, 19 nt, Homo sapiens
  misc_RNA (1)...(19): siRNA sense strand
aagcuggcaugguacuuaa

SEQ ID NO: 541219 - RNA, 19 nt, Homo sapiens
  misc_RNA (1)...(19): siRNA sense strand
aaaucgcugucgaacauaa

SEQ ID NO: 541220 - RNA, 19 nt, Homo sapiens
  misc_RNA (1)...(19): siRNA sense strand
ugaaaggcaagcauaaaga

SEQ ID NO: 541221 - RNA, 19 nt, Homo sapiens
  misc_RNA (1)...(19): siRNA sense strand
gagcccugguucacaaaga

SEQ ID NO: 541222 - RNA, 19 nt, Homo sapiens
  misc_RNA (1)...(19): siRNA sense strand
aagaaacgaugagaugguu

SEQ ID NO: 541223 - RNA, 19 nt, Homo sapiens
  misc_RNA (1)...(19): siRNA sense strand
gaugaugaaccccuuaaua

SEQ ID NO: 541224 - RNA, 19 nt, Homo sapiens
  misc_RNA (1)...(19): siRNA sense strand
agaccaguccuuucucuuu

SEQ ID NO: 541225 - RNA, 19 nt, Homo sapiens
  misc_RNA (1)...(19): siRNA sense strand
guugaguaccuuagaauau

SEQ ID NO: 541226 - RNA, 19 nt, Homo sapiens
  misc_RNA (1)...(19): siRNA sense strand
gauugaagccuacaaccau

SEQ ID NO: 541227 - RNA, 19 nt, Homo sapiens
  misc_RNA (1)...(19): siRNA sense strand
ggagaaacacuggacuuca

SEQ ID NO: 541228 - RNA, 19 nt, Homo sapiens
  misc_RNA (1)...(19): siRNA sense strand
cagcgaugccguuauuuau

SEQ ID NO: 541229 - RNA, 19 nt, Homo sapiens
  misc_RNA (1)...(19): siRNA sense strand
aaaccaauguugcccucuu

SEQ ID NO: 541230 - RNA, 19 nt, Homo sapiens
  misc_RNA (1)...(19): siRNA sense strand
gcaagcauaaagaugaaug

SEQ ID NO: 541231 - RNA, 19 nt, Homo sapiens
  misc_RNA (1)...(19): siRNA sense strand
cacuggacuucauuucuaa

SEQ ID NO: 541232 - RNA, 19 nt, Homo sapiens
  misc_RNA (1)...(19): siRNA sense strand
gaaaucgcugucgaacaua

SEQ ID NO: 541233 - RNA, 19 nt, Homo sapiens
  misc_RNA (1)...(19): siRNA sense strand
acacuuucuucaugccaua

SEQ ID NO: 541234 - RNA, 19 nt, Homo sapiens
  misc_RNA (1)...(19): siRNA sense strand
gguugaguaccuuagaaua

SEQ ID NO: 541235 - RNA, 19 nt, Homo sapiens
  misc_RNA (1)...(19): siRNA sense strand
cagcugauguugaaaauuc

SEQ ID NO: 541236 - RNA, 19 nt, Homo sapiens
  misc_RNA (1)...(19): siRNA sense strand
guauucaaaggacgguuua

SEQ ID NO: 541237 - RNA, 19 nt, Homo sapiens
  misc_RNA (1)...(19): siRNA sense strand
aagcaugggugauggaucu

SEQ ID NO: 541238 - RNA, 19 nt, Homo sapiens
  misc_RNA (1)...(19): siRNA sense strand
uuaguggccuggcaagaug

SEQ ID NO: 541239 - RNA, 19 nt, Homo sapiens
  misc_RNA (1)...(19): siRNA sense strand
aaagaugaaugccacaacu

SEQ ID NO: 541240 - RNA, 19 nt, Homo sapiens
  misc_RNA (1)...(19): siRNA sense strand
guugagggcagucagcuuu

SEQ ID NO: 541241 - RNA, 19 nt, Homo sapiens
  misc_RNA (1)...(19): siRNA sense strand
gaaacugacauggcgauca

SEQ ID NO: 541242 - RNA, 19 nt, Homo sapiens
  misc_RNA (1)...(19): siRNA sense strand
cgacagcguauuacuggaa

SEQ ID NO: 541243 - RNA, 19 nt, Homo sapiens
  misc_RNA (1)...(19): siRNA sense strand
cucugaagcuggcauggua

SEQ ID NO: 541244 - RNA, 19 nt, Homo sapiens
  misc_RNA (1)...(19): siRNA sense strand
gaauauggaaacuaugucu

SEQ ID NO: 541245 - RNA, 19 nt, Homo sapiens
  misc_RNA (1)...(19): siRNA sense strand
cagcuuuccugaagaugau

SEQ ID NO: 541246 - RNA, 19 nt, Homo sapiens
  misc_RNA (1)...(19): siRNA sense strand
agaaaacugugcuaugaaa

SEQ ID NO: 541247 - RNA, 19 nt, Homo sapiens
  misc_RNA (1)...(19): siRNA sense strand
ccuuaauacugucgacuau

SEQ ID NO: 541248 - RNA, 19 nt, Homo sapiens
  misc_RNA (1)...(19): siRNA sense strand
uuugaacgacagcguauua

SEQ ID NO: 541249 - RNA, 19 nt, Homo sapiens
  misc_RNA (1)...(19): siRNA sense strand
gcauuuagcauggaugaca

SEQ ID NO: 541250 - RNA, 19 nt, Homo sapiens
  misc_RNA (1)...(19): siRNA sense strand
ucugcugucugugcauuua

SEQ ID NO: 541251 - RNA, 19 nt, Homo sapiens
  misc_RNA (1)...(19): siRNA sense strand
uaaaugaaaugcccaaaac

SEQ ID NO: 541252 - RNA, 19 nt, Homo sapiens
  misc_RNA (1)...(19): siRNA sense strand
gcguauuacuggaagagau

SEQ ID NO: 541253 - RNA, 19 nt, Homo sapiens
  misc_RNA (1)...(19): siRNA sense strand
ugucauucaucaaaucuca

SEQ ID NO: 541254 - RNA, 19 nt, Homo sapiens
  misc_RNA (1)...(19): siRNA sense strand
gaagacaaagugccaaagc

SEQ ID NO: 541255 - RNA, 19 nt, Homo sapiens
  misc_RNA (1)...(19): siRNA sense strand
aaccaauguugcccucuuu

SEQ ID NO: 541256 - RNA, 19 nt, Homo sapiens
  misc_RNA (1)...(19): siRNA sense strand
uugaguaccuuagaauaug

SEQ ID NO: 541257 - RNA, 19 nt, Homo sapiens
  misc_RNA (1)...(19): siRNA sense strand
gaaugccacaacuuuauca

SEQ ID NO: 541258 - RNA, 19 nt, Homo sapiens
  misc_RNA (1)...(19): siRNA sense strand
agaugaaugccacaacuuu

SEQ ID NO: 541259 - RNA, 19 nt, Homo sapiens
  misc_RNA (1)...(19): siRNA sense strand
ugucgacuaucacuauuca

SEQ ID NO: 541260 - RNA, 19 nt, Homo sapiens
  misc_RNA (1)...(19): siRNA sense strand
uuaaaguucuggcaaagac

SEQ ID NO: 541261 - RNA, 19 nt, Homo sapiens
  misc_RNA (1)...(19): siRNA sense strand
ugacauggcgaucaagaca

SEQ ID NO: 541262 - RNA, 19 nt, Homo sapiens
  misc_RNA (1)...(19): siRNA sense strand
ccaguccuuucucuuugaa

SEQ ID NO: 541263 - RNA, 19 nt, Homo sapiens
  misc_RNA (1)...(19): siRNA sense strand
gcauucaaucccaugugua

SEQ ID NO: 541264 - RNA, 19 nt, Homo sapiens
  misc_RNA (1)...(19): siRNA sense strand
caagaaacgaugagauggu

SEQ ID NO: 541265 - RNA, 19 nt, Homo sapiens
  misc_RNA (1)...(19): siRNA sense strand
aaggcaagcauaaagauga

SEQ ID NO: 541266 - RNA, 19 nt, Homo sapiens
  misc_RNA (1)...(19): siRNA sense strand
caucuuuguuggcucugaa

SEQ ID NO: 541267 - RNA, 19 nt, Homo sapiens
  misc_RNA (1)...(19): siRNA sense strand
uaaaggcucggcugaacug

SEQ ID NO: 541268 - RNA, 19 nt, Homo sapiens
  misc_RNA (1)...(19): siRNA sense strand
gaugggaagcuguauucug

SEQ ID NO: 541269 - RNA, 19 nt, Homo sapiens
  misc_RNA (1)...(19): siRNA sense strand
gagaaaucgcugucgaaca

SEQ ID NO: 541270 - RNA, 19 nt, Homo sapiens
  misc_RNA (1)...(19): siRNA sense strand
aggcaagcauaaagaugaa

SEQ ID NO: 541271 - RNA, 19 nt, Homo sapiens
  misc_RNA (1)...(19): siRNA sense strand
cuacacagucaucuuuguu

SEQ ID NO: 541272 - RNA, 19 nt, Homo sapiens
  misc_RNA (1)...(19): siRNA sense strand
ggacgcccuucaggcaaug

SEQ ID NO: 541273 - RNA, 19 nt, Homo sapiens
  misc_RNA (1)...(19): siRNA sense strand
guucugcagucuauuacag

SEQ ID NO: 541274 - RNA, 19 nt, Homo sapiens
  misc_RNA (1)...(19): siRNA sense strand
gacagcaguucccgaagac

SEQ ID NO: 541275 - RNA, 19 nt, Homo sapiens
  misc_RNA (1)...(19): siRNA sense strand
guucugcugucugugcauu

SEQ ID NO: 541276 - RNA, 19 nt, Homo sapiens
  misc_RNA (1)...(19): siRNA sense strand
gaacuacacagucaucuuu

SEQ ID NO: 541277 - RNA, 19 nt, Homo sapiens
  misc_RNA (1)...(19): siRNA sense strand
ggacagcaguucccgaaga

SEQ ID NO: 541278 - RNA, 19 nt, Homo sapiens
  misc_RNA (1)...(19): siRNA sense strand
gaaacucugucauucauca

SEQ ID NO: 541279 - RNA, 19 nt, Homo sapiens
  misc_RNA (1)...(19): siRNA sense strand
ggaucaaguuuauacagua

SEQ ID NO: 541280 - RNA, 19 nt, Homo sapiens
  misc_RNA (1)...(19): siRNA sense strand
gagaaacacuggacuucau

SEQ ID NO: 541281 - RNA, 19 nt, Homo sapiens
  misc_RNA (1)...(19): siRNA sense strand
gaugaaugccacaacuuua

SEQ ID NO: 541282 - RNA, 19 nt, Homo sapiens
  misc_RNA (1)...(19): siRNA sense strand
gaagcuggcaugguacuua

SEQ ID NO: 541283 - RNA, 19 nt, Homo sapiens
  misc_RNA (1)...(19): siRNA sense strand
gaugagcccugguucacaa

SEQ ID NO: 541284 - RNA, 19 nt, Homo sapiens
  misc_RNA (1)...(19): siRNA sense strand
acacuggacuucauuucua

SEQ ID NO: 541285 - RNA, 19 nt, Homo sapiens
  misc_RNA (1)...(19): siRNA sense strand
agaaaucgcugucgaacau

SEQ ID NO: 541286 - RNA, 19 nt, Homo sapiens
  misc_RNA (1)...(19): siRNA sense strand
gagccacacuuucuucaug

SEQ ID NO: 541287 - RNA, 19 nt, Homo sapiens
  misc_RNA (1)...(19): siRNA sense strand
uagcauggaugacauugaa

SEQ ID NO: 541288 - RNA, 19 nt, Homo sapiens
  misc_RNA (1)...(19): siRNA sense strand
gcaagaugcccauuugaug

SEQ ID NO: 541289 - RNA, 19 nt, Homo sapiens
  misc_RNA (1)...(19): siRNA sense strand
gauguucugcagucuauua

SEQ ID NO: 541290 - RNA, 19 nt, Homo sapiens
  misc_RNA (1)...(19): siRNA sense strand
cacaguggcugacuucuug

SEQ ID NO: 541291 - RNA, 19 nt, Homo sapiens
  misc_RNA (1)...(19): siRNA sense strand
ggccagcgaugccguuauu

SEQ ID NO: 541292 - RNA, 19 nt, Homo sapiens
  misc_RNA (1)...(19): siRNA sense strand
gaccaguccuuucucuuug

SEQ ID NO: 541293 - RNA, 19 nt, Homo sapiens
  misc_RNA (1)...(19): siRNA sense strand
aaacugacauggcgaucaa

SEQ ID NO: 541294 - RNA, 19 nt, Homo sapiens
  misc_RNA (1)...(19): siRNA sense strand
gcugaugguuucccaguug

SEQ ID NO: 541295 - RNA, 19 nt, Homo sapiens
  misc_RNA (1)...(19): siRNA sense strand
cgagacacacuuuauauug

SEQ ID NO: 541296 - RNA, 19 nt, Homo sapiens
  misc_RNA (1)...(19): siRNA sense strand
caaagacucgggucaggua

SEQ ID NO: 541297 - RNA, 19 nt, Homo sapiens
  misc_RNA (1)...(19): siRNA sense strand
ccacgcagcucaauagcau

SEQ ID NO: 541298 - RNA, 19 nt, Homo sapiens
  misc_RNA (1)...(19): siRNA sense strand
gaaaggcaagcauaaagau

SEQ ID NO: 541299 - RNA, 19 nt, Homo sapiens
  misc_RNA (1)...(19): siRNA sense strand
uggcagggaucaaguuuau

SEQ ID NO: 541300 - RNA, 19 nt, Homo sapiens
  misc_RNA (1)...(19): siRNA sense strand
gaacgacagcguauuacug

SEQ ID NO: 541301 - RNA, 19 nt, Homo sapiens
  misc_RNA (1)...(19): siRNA sense strand
uuaauacugucgacuauca

SEQ ID NO: 541302 - RNA, 19 nt, Homo sapiens
  misc_RNA (1)...(19): siRNA sense strand
ccagcgaugccguuauuua

SEQ ID NO: 541303 - RNA, 19 nt, Homo sapiens
  misc_RNA (1)...(19): siRNA sense strand
gagacacacuuuauauugc

SEQ ID NO: 541304 - RNA, 19 nt, Homo sapiens
  misc_RNA (1)...(19): siRNA sense strand
gaacagaaaacuccagauu

SEQ ID NO: 541305 - RNA, 19 nt, Homo sapiens
  misc_RNA (1)...(19): siRNA sense strand
caaaggacgguuuaaggaa

SEQ ID NO: 541306 - RNA, 19 nt, Homo sapiens
  misc_RNA (1)...(19): siRNA sense strand
gaaacacuggacuucauuu

SEQ ID NO: 541307 - RNA, 19 nt, Homo sapiens
  misc_RNA (1)...(19): siRNA sense strand
gaucugcccuucgcacaau

SEQ ID NO: 541308 - RNA, 19 nt, Homo sapiens
  misc_RNA (1)...(19): siRNA sense strand
cgagaaaacugugcuauga

SEQ ID NO: 541309 - RNA, 19 nt, Homo sapiens
  misc_RNA (1)...(19): siRNA sense strand
uaccagaacuacacaguca

SEQ ID NO: 541310 - RNA, 19 nt, Homo sapiens
  misc_RNA (1)...(19): siRNA sense strand
ucaaggcaauauccgguuu

SEQ ID NO: 541311 - RNA, 19 nt, Homo sapiens
  misc_RNA (1)...(19): siRNA sense strand
gggaucaaguuuauacagu

SEQ ID NO: 541312 - RNA, 19 nt, Homo sapiens
  misc_RNA (1)...(19): siRNA sense strand
ucaaucccauguguagaua

SEQ ID NO: 541313 - RNA, 19 nt, Homo sapiens
  misc_RNA (1)...(19): siRNA sense strand
uauaaaaccuccaucgauu

SEQ ID NO: 541314 - RNA, 19 nt, Homo sapiens
  misc_RNA (1)...(19): siRNA sense strand
gcagggaucaaguuuauac

SEQ ID NO: 541315 - RNA, 19 nt, Homo sapiens
  misc_RNA (1)...(19): siRNA sense strand
ucaaaggacgguuuaagga

SEQ ID NO: 541316 - RNA, 19 nt, Homo sapiens
  misc_RNA (1)...(19): siRNA sense strand
ugaguaccuuagaauauga

SEQ ID NO: 541317 - RNA, 19 nt, Homo sapiens
  misc_RNA (1)...(19): siRNA sense strand
gcccaaaacagaaguaaua

SEQ ID NO: 541318 - RNA, 19 nt, Homo sapiens
  misc_RNA (1)...(19): siRNA sense strand
aagcuggcaugguacuuaa

SEQ ID NO: 541319 - RNA, 19 nt, Homo sapiens
  misc_RNA (1)...(19): siRNA sense strand
aaaucgcugucgaacauaa

SEQ ID NO: 541320 - RNA, 19 nt, Homo sapiens
  misc_RNA (1)...(19): siRNA sense strand
ugaaaggcaagcauaaaga

SEQ ID NO: 541321 - RNA, 19 nt, Homo sapiens
  misc_RNA (1)...(19): siRNA sense strand
gagcccugguucacaaaga

SEQ ID NO: 541322 - RNA, 19 nt, Homo sapiens
  misc_RNA (1)...(19): siRNA sense strand
aagaaacgaugagaugguu

SEQ ID NO: 541323 - RNA, 19 nt, Homo sapiens
  misc_RNA (1)...(19): siRNA sense strand
gaugaugaaccccuuaaua

SEQ ID NO: 541324 - RNA, 19 nt, Homo sapiens
  misc_RNA (1)...(19): siRNA sense strand
agaccaguccuuucucuuu

SEQ ID NO: 541325 - RNA, 19 nt, Homo sapiens
  misc_RNA (1)...(19): siRNA sense strand
guugaguaccuuagaauau

SEQ ID NO: 541326 - RNA, 19 nt, Homo sapiens
  misc_RNA (1)...(19): siRNA sense strand
gauugaagccuacaaccau

SEQ ID NO: 541327 - RNA, 19 nt, Homo sapiens
  misc_RNA (1)...(19): siRNA sense strand
ggagaaacacuggacuuca

SEQ ID NO: 541328 - RNA, 19 nt, Homo sapiens
  misc_RNA (1)...(19): siRNA sense strand
cagcgaugccguuauuuau

SEQ ID NO: 541329 - RNA, 19 nt, Homo sapiens
  misc_RNA (1)...(19): siRNA sense strand
aaaccaauguugcccucuu

SEQ ID NO: 541330 - RNA, 19 nt, Homo sapiens
  misc_RNA (1)...(19): siRNA sense strand
gcaagcauaaagaugaaug

SEQ ID NO: 541331 - RNA, 19 nt, Homo sapiens
  misc_RNA (1)...(19): siRNA sense strand
cacuggacuucauuucuaa

SEQ ID NO: 541332 - RNA, 19 nt, Homo sapiens
  misc_RNA (1)...(19): siRNA sense strand
gaaaucgcugucgaacaua

SEQ ID NO: 541333 - RNA, 19 nt, Homo sapiens
  misc_RNA (1)...(19): siRNA sense strand
acacuuucuucaugccaua

SEQ ID NO: 541334 - RNA, 19 nt, Homo sapiens
  misc_RNA (1)...(19): siRNA sense strand
gguugaguaccuuagaaua

SEQ ID NO: 541335 - RNA, 19 nt, Homo sapiens
  misc_RNA (1)...(19): siRNA sense strand
cagcugauguugaaaauuc

SEQ ID NO: 541336 - RNA, 19 nt, Homo sapiens
  misc_RNA (1)...(19): siRNA sense strand
guauucaaaggacgguuua

SEQ ID NO: 541337 - RNA, 19 nt, Homo sapiens
  misc_RNA (1)...(19): siRNA sense strand
aagcaugggugauggaucu

SEQ ID NO: 541338 - RNA, 19 nt, Homo sapiens
  misc_RNA (1)...(19): siRNA sense strand
uuaguggccuggcaagaug

SEQ ID NO: 541339 - RNA, 19 nt, Homo sapiens
  misc_RNA (1)...(19): siRNA sense strand
aaagaugaaugccacaacu

SEQ ID NO: 541340 - RNA, 19 nt, Homo sapiens
  misc_RNA (1)...(19): siRNA sense strand
guugagggcagucagcuuu

SEQ ID NO: 541341 - RNA, 19 nt, Homo sapiens
  misc_RNA (1)...(19): siRNA sense strand
gaaacugacauggcgauca

SEQ ID NO: 541342 - RNA, 19 nt, Homo sapiens
  misc_RNA (1)...(19): siRNA sense strand
cgacagcguauuacuggaa

SEQ ID NO: 541343 - RNA, 19 nt, Homo sapiens
  misc_RNA (1)...(19): siRNA sense strand
cucugaagcuggcauggua

SEQ ID NO: 541344 - RNA, 19 nt, Homo sapiens
  misc_RNA (1)...(19): siRNA sense strand
gaauauggaaacuaugucu

SEQ ID NO: 541345 - RNA, 19 nt, Homo sapiens
  misc_RNA (1)...(19): siRNA sense strand
cagcuuuccugaagaugau

SEQ ID NO: 541346 - RNA, 19 nt, Homo sapiens
  misc_RNA (1)...(19): siRNA sense strand
agaaaacugugcuaugaaa

SEQ ID NO: 541347 - RNA, 19 nt, Homo sapiens
  misc_RNA (1)...(19): siRNA sense strand
ccuuaauacugucgacuau

SEQ ID NO: 541348 - RNA, 19 nt, Homo sapiens
  misc_RNA (1)...(19): siRNA sense strand
uuugaacgacagcguauua

SEQ ID NO: 541349 - RNA, 19 nt, Homo sapiens
  misc_RNA (1)...(19): siRNA sense strand
gcauuuagcauggaugaca

SEQ ID NO: 541350 - RNA, 19 nt, Homo sapiens
  misc_RNA (1)...(19): siRNA sense strand
ucugcugucugugcauuua

SEQ ID NO: 541351 - RNA, 19 nt, Homo sapiens
  misc_RNA (1)...(19): siRNA sense strand
uaaaugaaaugcccaaaac

SEQ ID NO: 541352 - RNA, 19 nt, Homo sapiens
  misc_RNA (1)...(19): siRNA sense strand
gcguauuacuggaagagau

SEQ ID NO: 541353 - RNA, 19 nt, Homo sapiens
  misc_RNA (1)...(19): siRNA sense strand
ugucauucaucaaaucuca

SEQ ID NO: 541354 - RNA, 19 nt, Homo sapiens
  misc_RNA (1)...(19): siRNA sense strand
gaagacaaagugccaaagc

SEQ ID NO: 541355 - RNA, 19 nt, Homo sapiens
  misc_RNA (1)...(19): siRNA sense strand
aaccaauguugcccucuuu

SEQ ID NO: 541356 - RNA, 19 nt, Homo sapiens
  misc_RNA (1)...(19): siRNA sense strand
uugaguaccuuagaauaug

SEQ ID NO: 541357 - RNA, 19 nt, Homo sapiens
  misc_RNA (1)...(19): siRNA sense strand
gaaugccacaacuuuauca

SEQ ID NO: 541358 - RNA, 19 nt, Homo sapiens
  misc_RNA (1)...(19): siRNA sense strand
agaugaaugccacaacuuu

SEQ ID NO: 541359 - RNA, 19 nt, Homo sapiens
  misc_RNA (1)...(19): siRNA sense strand
ugucgacuaucacuauuca

SEQ ID NO: 541360 - RNA, 19 nt, Homo sapiens
  misc_RNA (1)...(19): siRNA sense strand
uuaaaguucuggcaaagac

SEQ ID NO: 541361 - RNA, 19 nt, Homo sapiens
  misc_RNA (1)...(19): siRNA sense strand
ugacauggcgaucaagaca

SEQ ID NO: 541362 - RNA, 19 nt, Homo sapiens
  misc_RNA (1)...(19): siRNA sense strand
ccaguccuuucucuuugaa

SEQ ID NO: 541363 - RNA, 19 nt, Homo sapiens
  misc_RNA (1)...(19): siRNA sense strand
gcauucaaucccaugugua

SEQ ID NO: 541364 - RNA, 19 nt, Homo sapiens
  misc_RNA (1)...(19): siRNA sense strand
caagaaacgaugagauggu

SEQ ID NO: 541365 - RNA, 19 nt, Homo sapiens
  misc_RNA (1)...(19): siRNA sense strand
aaggcaagcauaaagauga

SEQ ID NO: 541366 - RNA, 19 nt, Homo sapiens
  misc_RNA (1)...(19): siRNA sense strand
caucuuuguuggcucugaa

SEQ ID NO: 541367 - RNA, 19 nt, Homo sapiens
  misc_RNA (1)...(19): siRNA sense strand
uaaaggcucggcugaacug

SEQ ID NO: 541368 - RNA, 19 nt, Homo sapiens
  misc_RNA (1)...(19): siRNA sense strand
gaugggaagcuguauucug

SEQ ID NO: 541369 - RNA, 19 nt, Homo sapiens
  misc_RNA (1)...(19): siRNA sense strand
gagaaaucgcugucgaaca

SEQ ID NO: 541370 - RNA, 19 nt, Homo sapiens
  misc_RNA (1)...(19): siRNA sense strand
aggcaagcauaaagaugaa

SEQ ID NO: 541371 - RNA, 19 nt, Homo sapiens
  misc_RNA (1)...(19): siRNA sense strand
cuacacagucaucuuuguu

SEQ ID NO: 541372 - RNA, 19 nt, Homo sapiens
  misc_RNA (1)...(19): siRNA sense strand
ggacgcccuucaggcaaug

SEQ ID NO: 541373 - RNA, 19 nt, Homo sapiens
  misc_RNA (1)...(19): siRNA sense strand
guucugcagucuauuacag

SEQ ID NO: 541374 - RNA, 19 nt, Homo sapiens
  misc_RNA (1)...(19): siRNA sense strand
gacagcaguucccgaagac

SEQ ID NO: 541375 - RNA, 19 nt, Homo sapiens
  misc_RNA (1)...(19): siRNA sense strand
guucugcugucugugcauu

SEQ ID NO: 541376 - RNA, 19 nt, Homo sapiens
  misc_RNA (1)...(19): siRNA sense strand
gaacuacacagucaucuuu

SEQ ID NO: 541377 - RNA, 19 nt, Homo sapiens
  misc_RNA (1)...(19): siRNA sense strand
ggacagcaguucccgaaga

SEQ ID NO: 541378 - RNA, 19 nt, Homo sapiens
  misc_RNA (1)...(19): siRNA sense strand
gaaacucugucauucauca

SEQ ID NO: 541379 - RNA, 19 nt, Homo sapiens
  misc_RNA (1)...(19): siRNA sense strand
ggaucaaguuuauacagua

SEQ ID NO: 541380 - RNA, 19 nt, Homo sapiens
  misc_RNA (1)...(19): siRNA sense strand
gagaaacacuggacuucau

SEQ ID NO: 541381 - RNA, 19 nt, Homo sapiens
  misc_RNA (1)...(19): siRNA sense strand
gaugaaugccacaacuuua

SEQ ID NO: 541382 - RNA, 19 nt, Homo sapiens
  misc_RNA (1)...(19): siRNA sense strand
gaagcuggcaugguacuua

SEQ ID NO: 541383 - RNA, 19 nt, Homo sapiens
  misc_RNA (1)...(19): siRNA sense strand
gaugagcccugguucacaa

SEQ ID NO: 541384 - RNA, 19 nt, Homo sapiens
  misc_RNA (1)...(19): siRNA sense strand
acacuggacuucauuucua

SEQ ID NO: 541385 - RNA, 19 nt, Homo sapiens
  misc_RNA (1)...(19): siRNA sense strand
agaaaucgcugucgaacau

SEQ ID NO: 541386 - RNA, 19 nt, Homo sapiens
  misc_RNA (1)...(19): siRNA sense strand
gagccacacuuucuucaug

SEQ ID NO: 541387 - RNA, 19 nt, Homo sapiens
  misc_RNA (1)...(19): siRNA sense strand
uagcauggaugacauugaa

SEQ ID NO: 541388 - RNA, 19 nt, Homo sapiens
  misc_RNA (1)...(19): siRNA sense strand
gcaagaugcccauuugaug

SEQ ID NO: 541389 - RNA, 19 nt, Homo sapiens
  misc_RNA (1)...(19): siRNA sense strand
gauguucugcagucuauua

SEQ ID NO: 541390 - RNA, 19 nt, Homo sapiens
  misc_RNA (1)...(19): siRNA sense strand
cacaguggcugacuucuug

SEQ ID NO: 541391 - RNA, 19 nt, Homo sapiens
  misc_RNA (1)...(19): siRNA sense strand
ggccagcgaugccguuauu

SEQ ID NO: 541392 - RNA, 19 nt, Homo sapiens
  misc_RNA (1)...(19): siRNA sense strand
gaccaguccuuucucuuug

SEQ ID NO: 541393 - RNA, 19 nt, Homo sapiens
  misc_RNA (1)...(19): siRNA sense strand
aaacugacauggcgaucaa

SEQ ID NO: 541394 - RNA, 19 nt, Homo sapiens
  misc_RNA (1)...(19): siRNA sense strand
gcugaugguuucccaguug

SEQ ID NO: 541395 - RNA, 19 nt, Homo sapiens
  misc_RNA (1)...(19): siRNA sense strand
cgagacacacuuuauauug

SEQ ID NO: 541396 - RNA, 19 nt, Homo sapiens
  misc_RNA (1)...(19): siRNA sense strand
caaagacucgggucaggua

SEQ ID NO: 541397 - RNA, 19 nt, Homo sapiens
  misc_RNA (1)...(19): siRNA sense strand
ccacgcagcucaauagcau

SEQ ID NO: 541398 - RNA, 19 nt, Homo sapiens
  misc_RNA (1)...(19): siRNA sense strand
gaaaggcaagcauaaagau

SEQ ID NO: 541399 - RNA, 19 nt, Homo sapiens
  misc_RNA (1)...(19): siRNA sense strand
uggcagggaucaaguuuau

SEQ ID NO: 541400 - RNA, 19 nt, Homo sapiens
  misc_RNA (1)...(19): siRNA sense strand
gaacgacagcguauuacug

SEQ ID NO: 541401 - RNA, 19 nt, Homo sapiens
  misc_RNA (1)...(19): siRNA sense strand
uuaauacugucgacuauca

SEQ ID NO: 541402 - RNA, 19 nt, Homo sapiens
  misc_RNA (1)...(19): siRNA sense strand
ccagcgaugccguuauuua

SEQ ID NO: 541403 - RNA, 19 nt, Homo sapiens
  misc_RNA (1)...(19): siRNA sense strand
gagacacacuuuauauugc

SEQ ID NO: 541404 - RNA, 19 nt, Homo sapiens
  misc_RNA (1)...(19): siRNA sense strand
gaacagaaaacuccagauu

SEQ ID NO: 541405 - RNA, 19 nt, Homo sapiens
  misc_RNA (1)...(19): siRNA sense strand
caaaggacgguuuaaggaa

SEQ ID NO: 541406 - RNA, 19 nt, Homo sapiens
  misc_RNA (1)...(19): siRNA sense strand
gaaacacuggacuucauuu

SEQ ID NO: 541407 - RNA, 19 nt, Homo sapiens
  misc_RNA (1)...(19): siRNA sense strand
gaucugcccuucgcacaau

SEQ ID NO: 541408 - RNA, 19 nt, Homo sapiens
  misc_RNA (1)...(19): siRNA sense strand
cgagaaaacugugcuauga

SEQ ID NO: 541409 - RNA, 19 nt, Homo sapiens
  misc_RNA (1)...(19): siRNA sense strand
uaccagaacuacacaguca

SEQ ID NO: 541410 - RNA, 19 nt, Homo sapiens
  misc_RNA (1)...(19): siRNA sense strand
ucaaggcaauauccgguuu

SEQ ID NO: 541411 - RNA, 19 nt, Homo sapiens
  misc_RNA (1)...(19): siRNA sense strand
gggaucaaguuuauacagu

SEQ ID NO: 541412 - RNA, 19 nt, Homo sapiens
  misc_RNA (1)...(19): siRNA sense strand
ucaaucccauguguagaua

SEQ ID NO: 541413 - RNA, 19 nt, Homo sapiens
  misc_RNA (1)...(19): siRNA sense strand
uauaaaaccuccaucgauu

SEQ ID NO: 541414 - RNA, 19 nt, Homo sapiens
  misc_RNA (1)...(19): siRNA sense strand
gcagggaucaaguuuauac

SEQ ID NO: 541415 - RNA, 19 nt, Homo sapiens
  misc_RNA (1)...(19): siRNA sense strand
ucaaaggacgguuuaagga

SEQ ID NO: 541416 - RNA, 19 nt, Homo sapiens
  misc_RNA (1)...(19): siRNA sense strand
ugaguaccuuagaauauga

SEQ ID NO: 541417 - RNA, 19 nt, Homo sapiens
  misc_RNA (1)...(19): siRNA sense strand
gcccaaaacagaaguaaua

SEQ ID NO: 541418 - RNA, 19 nt, Homo sapiens
  misc_RNA (1)...(19): siRNA sense strand
aagcuggcaugguacuuaa

SEQ ID NO: 541419 - RNA, 19 nt, Homo sapiens
  misc_RNA (1)...(19): siRNA sense strand
aaaucgcugucgaacauaa

SEQ ID NO: 541420 - RNA, 19 nt, Homo sapiens
  misc_RNA (1)...(19): siRNA sense strand
ugaaaggcaagcauaaaga

SEQ ID NO: 541421 - RNA, 19 nt, Homo sapiens
  misc_RNA (1)...(19): siRNA sense strand
gagcccugguucacaaaga

SEQ ID NO: 541422 - RNA, 19 nt, Homo sapiens
  misc_RNA (1)...(19): siRNA sense strand
aagaaacgaugagaugguu

SEQ ID NO: 541423 - RNA, 19 nt, Homo sapiens
  misc_RNA (1)...(19): siRNA sense strand
gaugaugaaccccuuaaua

SEQ ID NO: 541424 - RNA, 19 nt, Homo sapiens
  misc_RNA (1)...(19): siRNA sense strand
agaccaguccuuucucuuu

SEQ ID NO: 541425 - RNA, 19 nt, Homo sapiens
  misc_RNA (1)...(19): siRNA sense strand
guugaguaccuuagaauau

SEQ ID NO: 541426 - RNA, 19 nt, Homo sapiens
  misc_RNA (1)...(19): siRNA sense strand
gauugaagccuacaaccau

SEQ ID NO: 541427 - RNA, 19 nt, Homo sapiens
  misc_RNA (1)...(19): siRNA sense strand
ggagaaacacuggacuuca

SEQ ID NO: 541428 - RNA, 19 nt, Homo sapiens
  misc_RNA (1)...(19): siRNA sense strand
cagcgaugccguuauuuau

SEQ ID NO: 541429 - RNA, 19 nt, Homo sapiens
  misc_RNA (1)...(19): siRNA sense strand
aaaccaauguugcccucuu

SEQ ID NO: 541430 - RNA, 19 nt, Homo sapiens
  misc_RNA (1)...(19): siRNA sense strand
gcaagcauaaagaugaaug

SEQ ID NO: 541431 - RNA, 19 nt, Homo sapiens
  misc_RNA (1)...(19): siRNA sense strand
cacuggacuucauuucuaa

SEQ ID NO: 541432 - RNA, 19 nt, Homo sapiens
  misc_RNA (1)...(19): siRNA sense strand
gaaaucgcugucgaacaua

SEQ ID NO: 541433 - RNA, 19 nt, Homo sapiens
  misc_RNA (1)...(19): siRNA sense strand
acacuuucuucaugccaua

SEQ ID NO: 541434 - RNA, 19 nt, Homo sapiens
  misc_RNA (1)...(19): siRNA sense strand
gguugaguaccuuagaaua

SEQ ID NO: 541435 - RNA, 19 nt, Homo sapiens
  misc_RNA (1)...(19): siRNA sense strand
cagcugauguugaaaauuc

SEQ ID NO: 541436 - RNA, 19 nt, Homo sapiens
  misc_RNA (1)...(19): siRNA sense strand
guauucaaaggacgguuua

SEQ ID NO: 541437 - RNA, 19 nt, Homo sapiens
  misc_RNA (1)...(19): siRNA sense strand
aagcaugggugauggaucu

SEQ ID NO: 541438 - RNA, 19 nt, Homo sapiens
  misc_RNA (1)...(19): siRNA sense strand
uuaguggccuggcaagaug

SEQ ID NO: 541439 - RNA, 19 nt, Homo sapiens
  misc_RNA (1)...(19): siRNA sense strand
aaagaugaaugccacaacu

SEQ ID NO: 541440 - RNA, 19 nt, Homo sapiens
  misc_RNA (1)...(19): siRNA sense strand
guugagggcagucagcuuu

SEQ ID NO: 541441 - RNA, 19 nt, Homo sapiens
  misc_RNA (1)...(19): siRNA sense strand
gaaacugacauggcgauca

SEQ ID NO: 541442 - RNA, 19 nt, Homo sapiens
  misc_RNA (1)...(19): siRNA sense strand
cgacagcguauuacuggaa

SEQ ID NO: 541443 - RNA, 19 nt, Homo sapiens
  misc_RNA (1)...(19): siRNA sense strand
cucugaagcuggcauggua

SEQ ID NO: 541444 - RNA, 19 nt, Homo sapiens
  misc_RNA (1)...(19): siRNA sense strand
gaauauggaaacuaugucu

SEQ ID NO: 541445 - RNA, 19 nt, Homo sapiens
  misc_RNA (1)...(19): siRNA sense strand
cagcuuuccugaagaugau

SEQ ID NO: 541446 - RNA, 19 nt, Homo sapiens
  misc_RNA (1)...(19): siRNA sense strand
agaaaacugugcuaugaaa

SEQ ID NO: 541447 - RNA, 19 nt, Homo sapiens
  misc_RNA (1)...(19): siRNA sense strand
ccuuaauacugucgacuau

SEQ ID NO: 541448 - RNA, 19 nt, Homo sapiens
  misc_RNA (1)...(19): siRNA sense strand
uuugaacgacagcguauua

SEQ ID NO: 541449 - RNA, 19 nt, Homo sapiens
  misc_RNA (1)...(19): siRNA sense strand
gcauuuagcauggaugaca

SEQ ID NO: 541450 - RNA, 19 nt, Homo sapiens
  misc_RNA (1)...(19): siRNA sense strand
ucugcugucugugcauuua

SEQ ID NO: 541451 - RNA, 19 nt, Homo sapiens
  misc_RNA (1)...(19): siRNA sense strand
uaaaugaaaugcccaaaac

SEQ ID NO: 541452 - RNA, 19 nt, Homo sapiens
  misc_RNA (1)...(19): siRNA sense strand
gcguauuacuggaagagau

SEQ ID NO: 541453 - RNA, 19 nt, Homo sapiens
  misc_RNA (1)...(19): siRNA sense strand
ugucauucaucaaaucuca

SEQ ID NO: 541454 - RNA, 19 nt, Homo sapiens
  misc_RNA (1)...(19): siRNA sense strand
gaagacaaagugccaaagc

SEQ ID NO: 541455 - RNA, 19 nt, Homo sapiens
  misc_RNA (1)...(19): siRNA sense strand
aaccaauguugcccucuuu

SEQ ID NO: 541456 - RNA, 19 nt, Homo sapiens
  misc_RNA (1)...(19): siRNA sense strand
uugaguaccuuagaauaug

SEQ ID NO: 541457 - RNA, 19 nt, Homo sapiens
  misc_RNA (1)...(19): siRNA sense strand
gaaugccacaacuuuauca

SEQ ID NO: 541458 - RNA, 19 nt, Homo sapiens
  misc_RNA (1)...(19): siRNA sense strand
agaugaaugccacaacuuu

SEQ ID NO: 541459 - RNA, 19 nt, Homo sapiens
  misc_RNA (1)...(19): siRNA sense strand
ugucgacuaucacuauuca

SEQ ID NO: 541460 - RNA, 19 nt, Homo sapiens
  misc_RNA (1)...(19): siRNA sense strand
uuaaaguucuggcaaagac

SEQ ID NO: 541461 - RNA, 19 nt, Homo sapiens
  misc_RNA (1)...(19): siRNA sense strand
ugacauggcgaucaagaca

SEQ ID NO: 541462 - RNA, 19 nt, Homo sapiens
  misc_RNA (1)...(19): siRNA sense strand
ccaguccuuucucuuugaa

SEQ ID NO: 541463 - RNA, 19 nt, Homo sapiens
  misc_RNA (1)...(19): siRNA sense strand
gcauucaaucccaugugua

SEQ ID NO: 541464 - RNA, 19 nt, Homo sapiens
  misc_RNA (1)...(19): siRNA sense strand
caagaaacgaugagauggu

SEQ ID NO: 541465 - RNA, 19 nt, Homo sapiens
  misc_RNA (1)...(19): siRNA sense strand
aaggcaagcauaaagauga

SEQ ID NO: 541466 - RNA, 19 nt, Homo sapiens
  misc_RNA (1)...(19): siRNA sense strand
caucuuuguuggcucugaa

SEQ ID NO: 541467 - RNA, 19 nt, Homo sapiens
  misc_RNA (1)...(19): siRNA sense strand
uaaaggcucggcugaacug

SEQ ID NO: 541468 - RNA, 19 nt, Homo sapiens
  misc_RNA (1)...(19): siRNA sense strand
gaugggaagcuguauucug

SEQ ID NO: 541469 - RNA, 19 nt, Homo sapiens
  misc_RNA (1)...(19): siRNA sense strand
gagaaaucgcugucgaaca

SEQ ID NO: 541470 - RNA, 19 nt, Homo sapiens
  misc_RNA (1)...(19): siRNA sense strand
aggcaagcauaaagaugaa

SEQ ID NO: 541471 - RNA, 19 nt, Homo sapiens
  misc_RNA (1)...(19): siRNA sense strand
cuacacagucaucuuuguu

SEQ ID NO: 541472 - RNA, 19 nt, Homo sapiens
  misc_RNA (1)...(19): siRNA sense strand
ggacgcccuucaggcaaug

SEQ ID NO: 541473 - RNA, 19 nt, Homo sapiens
  misc_RNA (1)...(19): siRNA sense strand
guucugcagucuauuacag

SEQ ID NO: 541474 - RNA, 19 nt, Homo sapiens
  misc_RNA (1)...(19): siRNA sense strand
gacagcaguucccgaagac

SEQ ID NO: 541475 - RNA, 19 nt, Homo sapiens
  misc_RNA (1)...(19): siRNA sense strand
guucugcugucugugcauu

SEQ ID NO: 541476 - RNA, 19 nt, Homo sapiens
  misc_RNA (1)...(19): siRNA sense strand
gaacuacacagucaucuuu

SEQ ID NO: 541477 - RNA, 19 nt, Homo sapiens
  misc_RNA (1)...(19): siRNA sense strand
ggacagcaguucccgaaga

SEQ ID NO: 541478 - RNA, 19 nt, Homo sapiens
  misc_RNA (1)...(19): siRNA sense strand
gaaacucugucauucauca

SEQ ID NO: 541479 - RNA, 19 nt, Homo sapiens
  misc_RNA (1)...(19): siRNA sense strand
ggaucaaguuuauacagua

SEQ ID NO: 541480 - RNA, 19 nt, Homo sapiens
  misc_RNA (1)...(19): siRNA sense strand
gagaaacacuggacuucau

SEQ ID NO: 541481 - RNA, 19 nt, Homo sapiens
  misc_RNA (1)...(19): siRNA sense strand
gaugaaugccacaacuuua

SEQ ID NO: 541482 - RNA, 19 nt, Homo sapiens
  misc_RNA (1)...(19): siRNA sense strand
gaagcuggcaugguacuua

SEQ ID NO: 541483 - RNA, 19 nt, Homo sapiens
  misc_RNA (1)...(19): siRNA sense strand
gaugagcccugguucacaa

SEQ ID NO: 541484 - RNA, 19 nt, Homo sapiens
  misc_RNA (1)...(19): siRNA sense strand
acacuggacuucauuucua

SEQ ID NO: 541485 - RNA, 19 nt, Homo sapiens
  misc_RNA (1)...(19): siRNA sense strand
agaaaucgcugucgaacau

SEQ ID NO: 541486 - RNA, 19 nt, Homo sapiens
  misc_RNA (1)...(19): siRNA sense strand
gagccacacuuucuucaug

SEQ ID NO: 541487 - RNA, 19 nt, Homo sapiens
  misc_RNA (1)...(19): siRNA sense strand
uagcauggaugacauugaa

SEQ ID NO: 541488 - RNA, 19 nt, Homo sapiens
  misc_RNA (1)...(19): siRNA sense strand
gcaagaugcccauuugaug

SEQ ID NO: 541489 - RNA, 19 nt, Homo sapiens
  misc_RNA (1)...(19): siRNA sense strand
gauguucugcagucuauua

SEQ ID NO: 541490 - RNA, 19 nt, Homo sapiens
  misc_RNA (1)...(19): siRNA sense strand
cacaguggcugacuucuug

SEQ ID NO: 541491 - RNA, 19 nt, Homo sapiens
  misc_RNA (1)...(19): siRNA sense strand
ggccagcgaugccguuauu

SEQ ID NO: 541492 - RNA, 19 nt, Homo sapiens
  misc_RNA (1)...(19): siRNA sense strand
gaccaguccuuucucuuug

SEQ ID NO: 541493 - RNA, 19 nt, Homo sapiens
  misc_RNA (1)...(19): siRNA sense strand
aaacugacauggcgaucaa

SEQ ID NO: 541494 - RNA, 19 nt, Homo sapiens
  misc_RNA (1)...(19): siRNA sense strand
gcugaugguuucccaguug

SEQ ID NO: 541495 - RNA, 19 nt, Homo sapiens
  misc_RNA (1)...(19): siRNA sense strand
cgagacacacuuuauauug

SEQ ID NO: 541496 - RNA, 19 nt, Homo sapiens
  misc_RNA (1)...(19): siRNA sense strand
caaagacucgggucaggua

SEQ ID NO: 541497 - RNA, 19 nt, Homo sapiens
  misc_RNA (1)...(19): siRNA sense strand
ccacgcagcucaauagcau

SEQ ID NO: 541498 - RNA, 19 nt, Homo sapiens
  misc_RNA (1)...(19): siRNA sense strand
gaaaggcaagcauaaagau

SEQ ID NO: 541499 - RNA, 19 nt, Homo sapiens
  misc_RNA (1)...(19): siRNA sense strand
uggcagggaucaaguuuau

SEQ ID NO: 541500 - RNA, 19 nt, Homo sapiens
  misc_RNA (1)...(19): siRNA sense strand
gaacgacagcguauuacug

SEQ ID NO: 541501 - RNA, 19 nt, Homo sapiens
  misc_RNA (1)...(19): siRNA sense strand
uuaauacugucgacuauca

SEQ ID NO: 541502 - RNA, 19 nt, Homo sapiens
  misc_RNA (1)...(19): siRNA sense strand
ccagcgaugccguuauuua

SEQ ID NO: 541503 - RNA, 19 nt, Homo sapiens
  misc_RNA (1)...(19): siRNA sense strand
gagacacacuuuauauugc

SEQ ID NO: 541504 - RNA, 19 nt, Homo sapiens
  misc_RNA (1)...(19): siRNA sense strand
gaacagaaaacuccagauu

SEQ ID NO: 541505 - RNA, 19 nt, Homo sapiens
  misc_RNA (1)...(19): siRNA sense strand
caaaggacgguuuaaggaa

SEQ ID NO: 541506 - RNA, 19 nt, Homo sapiens
  misc_RNA (1)...(19): siRNA sense strand
gaaacacuggacuucauuu

SEQ ID NO: 541507 - RNA, 19 nt, Homo sapiens
  misc_RNA (1)...(19): siRNA sense strand
gaucugcccuucgcacaau

SEQ ID NO: 541508 - RNA, 19 nt, Homo sapiens
  misc_RNA (1)...(19): siRNA sense strand
cgagaaaacugugcuauga

SEQ ID NO: 541509 - RNA, 19 nt, Homo sapiens
  misc_RNA (1)...(19): siRNA sense strand
uaccagaacuacacaguca

SEQ ID NO: 541510 - RNA, 19 nt, Homo sapiens
  misc_RNA (1)...(19): siRNA sense strand
ucaaggcaauauccgguuu

SEQ ID NO: 541511 - RNA, 19 nt, Homo sapiens
  misc_RNA (1)...(19): siRNA sense strand
gggaucaaguuuauacagu

SEQ ID NO: 541512 - RNA, 19 nt, Homo sapiens
  misc_RNA (1)...(19): siRNA sense strand
ucaaucccauguguagaua

SEQ ID NO: 541513 - RNA, 19 nt, Homo sapiens
  misc_RNA (1)...(19): siRNA sense strand
uauaaaaccuccaucgauu

SEQ ID NO: 541514 - RNA, 19 nt, Homo sapiens
  misc_RNA (1)...(19): siRNA sense strand
gcagggaucaaguuuauac

SEQ ID NO: 541515 - RNA, 19 nt, Homo sapiens
  misc_RNA (1)...(19): siRNA sense strand
ucaaaggacgguuuaagga

SEQ ID NO: 541516 - RNA, 19 nt, Homo sapiens
  misc_RNA (1)...(19): siRNA sense strand
ugaguaccuuagaauauga

SEQ ID NO: 541517 - RNA, 19 nt, Homo sapiens
  misc_RNA (1)...(19): siRNA sense strand
gcccaaaacagaaguaaua

SEQ ID NO: 541518 - RNA, 19 nt, Homo sapiens
  misc_RNA (1)...(19): siRNA sense strand
aagcuggcaugguacuuaa

SEQ ID NO: 541519 - RNA, 19 nt, Homo sapiens
  misc_RNA (1)...(19): siRNA sense strand
aaaucgcugucgaacauaa

SEQ ID NO: 541520 - RNA, 19 nt, Homo sapiens
  misc_RNA (1)...(19): siRNA sense strand
ugaaaggcaagcauaaaga

SEQ ID NO: 541521 - RNA, 19 nt, Homo sapiens
  misc_RNA (1)...(19): siRNA sense strand
gagcccugguucacaaaga

SEQ ID NO: 541522 - RNA, 19 nt, Homo sapiens
  misc_RNA (1)...(19): siRNA sense strand
aagaaacgaugagaugguu

SEQ ID NO: 541523 - RNA, 19 nt, Homo sapiens
  misc_RNA (1)...(19): siRNA sense strand
gaugaugaaccccuuaaua

SEQ ID NO: 541524 - RNA, 19 nt, Homo sapiens
  misc_RNA (1)...(19): siRNA sense strand
agaccaguccuuucucuuu

SEQ ID NO: 541525 - RNA, 19 nt, Homo sapiens
  misc_RNA (1)...(19): siRNA sense strand
guugaguaccuuagaauau

SEQ ID NO: 541526 - RNA, 19 nt, Homo sapiens
  misc_RNA (1)...(19): siRNA sense strand
gauugaagccuacaaccau

SEQ ID NO: 541527 - RNA, 19 nt, Homo sapiens
  misc_RNA (1)...(19): siRNA sense strand
ggagaaacacuggacuuca

SEQ ID NO: 541528 - RNA, 19 nt, Homo sapiens
  misc_RNA (1)...(19): siRNA sense strand
cagcgaugccguuauuuau

SEQ ID NO: 541529 - RNA, 19 nt, Homo sapiens
  misc_RNA (1)...(19): siRNA sense strand
aaaccaauguugcccucuu

SEQ ID NO: 541530 - RNA, 19 nt, Homo sapiens
  misc_RNA (1)...(19): siRNA sense strand
gcaagcauaaagaugaaug

SEQ ID NO: 541531 - RNA, 19 nt, Homo sapiens
  misc_RNA (1)...(19): siRNA sense strand
cacuggacuucauuucuaa

SEQ ID NO: 541532 - RNA, 19 nt, Homo sapiens
  misc_RNA (1)...(19): siRNA sense strand
gaaaucgcugucgaacaua

SEQ ID NO: 541533 - RNA, 19 nt, Homo sapiens
  misc_RNA (1)...(19): siRNA sense strand
acacuuucuucaugccaua

SEQ ID NO: 541534 - RNA, 19 nt, Homo sapiens
  misc_RNA (1)...(19): siRNA sense strand
gguugaguaccuuagaaua

SEQ ID NO: 541535 - RNA, 19 nt, Homo sapiens
  misc_RNA (1)...(19): siRNA sense strand
cagcugauguugaaaauuc

SEQ ID NO: 541536 - RNA, 19 nt, Homo sapiens
  misc_RNA (1)...(19): siRNA sense strand
guauucaaaggacgguuua

SEQ ID NO: 541537 - RNA, 19 nt, Homo sapiens
  misc_RNA (1)...(19): siRNA sense strand
aagcaugggugauggaucu

SEQ ID NO: 541538 - RNA, 19 nt, Homo sapiens
  misc_RNA (1)...(19): siRNA sense strand
uuaguggccuggcaagaug

SEQ ID NO: 541539 - RNA, 19 nt, Homo sapiens
  misc_RNA (1)...(19): siRNA sense strand
aaagaugaaugccacaacu

SEQ ID NO: 541540 - RNA, 19 nt, Homo sapiens
  misc_RNA (1)...(19): siRNA sense strand
guugagggcagucagcuuu

SEQ ID NO: 541541 - RNA, 19 nt, Homo sapiens
  misc_RNA (1)...(19): siRNA sense strand
gaaacugacauggcgauca

SEQ ID NO: 541542 - RNA, 19 nt, Homo sapiens
  misc_RNA (1)...(19): siRNA sense strand
cgacagcguauuacuggaa

SEQ ID NO: 541543 - RNA, 19 nt, Homo sapiens
  misc_RNA (1)...(19): siRNA sense strand
cucugaagcuggcauggua

SEQ ID NO: 541544 - RNA, 19 nt, Homo sapiens
  misc_RNA (1)...(19): siRNA sense strand
gaauauggaaacuaugucu

SEQ ID NO: 541545 - RNA, 19 nt, Homo sapiens
  misc_RNA (1)...(19): siRNA sense strand
cagcuuuccugaagaugau

SEQ ID NO: 541546 - RNA, 19 nt, Homo sapiens
  misc_RNA (1)...(19): siRNA sense strand
agaaaacugugcuaugaaa

SEQ ID NO: 541547 - RNA, 19 nt, Homo sapiens
  misc_RNA (1)...(19): siRNA sense strand
ccuuaauacugucgacuau

SEQ ID NO: 541548 - RNA, 19 nt, Homo sapiens
  misc_RNA (1)...(19): siRNA sense strand
uuugaacgacagcguauua

SEQ ID NO: 541549 - RNA, 19 nt, Homo sapiens
  misc_RNA (1)...(19): siRNA sense strand
gcauuuagcauggaugaca

SEQ ID NO: 541550 - RNA, 19 nt, Homo sapiens
  misc_RNA (1)...(19): siRNA sense strand
ucugcugucugugcauuua

SEQ ID NO: 541551 - RNA, 19 nt, Homo sapiens
  misc_RNA (1)...(19): siRNA sense strand
uaaaugaaaugcccaaaac

SEQ ID NO: 541552 - RNA, 19 nt, Homo sapiens
  misc_RNA (1)...(19): siRNA sense strand
gcguauuacuggaagagau

SEQ ID NO: 541553 - RNA, 19 nt, Homo sapiens
  misc_RNA (1)...(19): siRNA sense strand
ugucauucaucaaaucuca

SEQ ID NO: 541554 - RNA, 19 nt, Homo sapiens
  misc_RNA (1)...(19): siRNA sense strand
gaagacaaagugccaaagc

SEQ ID NO: 541555 - RNA, 19 nt, Homo sapiens
  misc_RNA (1)...(19): siRNA sense strand
aaccaauguugcccucuuu

SEQ ID NO: 541556 - RNA, 19 nt, Homo sapiens
  misc_RNA (1)...(19): siRNA sense strand
uugaguaccuuagaauaug

SEQ ID NO: 541557 - RNA, 19 nt, Homo sapiens
  misc_RNA (1)...(19): siRNA sense strand
gaaugccacaacuuuauca

SEQ ID NO: 541558 - RNA, 19 nt, Homo sapiens
  misc_RNA (1)...(19): siRNA sense strand
agaugaaugccacaacuuu

SEQ ID NO: 541559 - RNA, 19 nt, Homo sapiens
  misc_RNA (1)...(19): siRNA sense strand
ugucgacuaucacuauuca

SEQ ID NO: 541560 - RNA, 19 nt, Homo sapiens
  misc_RNA (1)...(19): siRNA sense strand
uuaaaguucuggcaaagac

SEQ ID NO: 541561 - RNA, 19 nt, Homo sapiens
  misc_RNA (1)...(19): siRNA sense strand
ugacauggcgaucaagaca

SEQ ID NO: 541562 - RNA, 19 nt, Homo sapiens
  misc_RNA (1)...(19): siRNA sense strand
ccaguccuuucucuuugaa

SEQ ID NO: 541563 - RNA, 19 nt, Homo sapiens
  misc_RNA (1)...(19): siRNA sense strand
gcauucaaucccaugugua

SEQ ID NO: 541564 - RNA, 19 nt, Homo sapiens
  misc_RNA (1)...(19): siRNA sense strand
caagaaacgaugagauggu

SEQ ID NO: 541565 - RNA, 19 nt, Homo sapiens
  misc_RNA (1)...(19): siRNA sense strand
aaggcaagcauaaagauga

SEQ ID NO: 541566 - RNA, 19 nt, Homo sapiens
  misc_RNA (1)...(19): siRNA sense strand
caucuuuguuggcucugaa

SEQ ID NO: 541567 - RNA, 19 nt, Homo sapiens
  misc_RNA (1)...(19): siRNA sense strand
uaaaggcucggcugaacug

SEQ ID NO: 541568 - RNA, 19 nt, Homo sapiens
  misc_RNA (1)...(19): siRNA sense strand
gaugggaagcuguauucug

SEQ ID NO: 541569 - RNA, 19 nt, Homo sapiens
  misc_RNA (1)...(19): siRNA sense strand
gagaaaucgcugucgaaca

SEQ ID NO: 541570 - RNA, 19 nt, Homo sapiens
  misc_RNA (1)...(19): siRNA sense strand
aggcaagcauaaagaugaa

SEQ ID NO: 541571 - RNA, 19 nt, Homo sapiens
  misc_RNA (1)...(19): siRNA sense strand
cuacacagucaucuuuguu

SEQ ID NO: 541572 - RNA, 19 nt, Homo sapiens
  misc_RNA (1)...(19): siRNA sense strand
ggacgcccuucaggcaaug

SEQ ID NO: 541573 - RNA, 19 nt, Homo sapiens
  misc_RNA (1)...(19): siRNA sense strand
guucugcagucuauuacag

SEQ ID NO: 541574 - RNA, 19 nt, Homo sapiens
  misc_RNA (1)...(19): siRNA sense strand
gacagcaguucccgaagac

SEQ ID NO: 541575 - RNA, 19 nt, Homo sapiens
  misc_RNA (1)...(19): siRNA sense strand
guucugcugucugugcauu

SEQ ID NO: 541576 - RNA, 19 nt, Homo sapiens
  misc_RNA (1)...(19): siRNA sense strand
gaaacagucuccuccuuua

SEQ ID NO: 541577 - RNA, 19 nt, Homo sapiens
  misc_RNA (1)...(19): siRNA sense strand
gcacgaaccuucauuuaug

SEQ ID NO: 541578 - RNA, 19 nt, Homo sapiens
  misc_RNA (1)...(19): siRNA sense strand
gaaugugacuccuuaaauu

SEQ ID NO: 541579 - RNA, 19 nt, Homo sapiens
  misc_RNA (1)...(19): siRNA sense strand
ugacaaagaugguggaauu

SEQ ID NO: 541580 - RNA, 19 nt, Homo sapiens
  misc_RNA (1)...(19): siRNA sense strand
gaagugcaauacuacaaua

SEQ ID NO: 541581 - RNA, 19 nt, Homo sapiens
  misc_RNA (1)...(19): siRNA sense strand
caucagaaguucauaauug

SEQ ID NO: 541582 - RNA, 19 nt, Homo sapiens
  misc_RNA (1)...(19): siRNA sense strand
ggagggagcugaaugugaa

SEQ ID NO: 541583 - RNA, 19 nt, Homo sapiens
  misc_RNA (1)...(19): siRNA sense strand
cgagauauaccaaacauua

SEQ ID NO: 541584 - RNA, 19 nt, Homo sapiens
  misc_RNA (1)...(19): siRNA sense strand
cgaaagauaucaagagaug

SEQ ID NO: 541585 - RNA, 19 nt, Homo sapiens
  misc_RNA (1)...(19): siRNA sense strand
gagaaauccuguagcauga

SEQ ID NO: 541586 - RNA, 19 nt, Homo sapiens
  misc_RNA (1)...(19): siRNA sense strand
gaacgacacuucccaggau

SEQ ID NO: 541587 - RNA, 19 nt, Homo sapiens
  misc_RNA (1)...(19): siRNA sense strand
agacacagcuucagaaugu

SEQ ID NO: 541588 - RNA, 19 nt, Homo sapiens
  misc_RNA (1)...(19): siRNA sense strand
acaaauggaugaugacaaa

SEQ ID NO: 541589 - RNA, 19 nt, Homo sapiens
  misc_RNA (1)...(19): siRNA sense strand
gagaugaggugucccuaga

SEQ ID NO: 541590 - RNA, 19 nt, Homo sapiens
  misc_RNA (1)...(19): siRNA sense strand
ccucacaguuucuauagua

SEQ ID NO: 541591 - RNA, 19 nt, Homo sapiens
  misc_RNA (1)...(19): siRNA sense strand
gagaagaucuguggcuuuc

SEQ ID NO: 541592 - RNA, 19 nt, Homo sapiens
  misc_RNA (1)...(19): siRNA sense strand
uggaggaguugaugacuua

SEQ ID NO: 541593 - RNA, 19 nt, Homo sapiens
  misc_RNA (1)...(19): siRNA sense strand
caaagaugguggaauugaa

SEQ ID NO: 541594 - RNA, 19 nt, Homo sapiens
  misc_RNA (1)...(19): siRNA sense strand
ggaaacagucuccuccuuu

SEQ ID NO: 541595 - RNA, 19 nt, Homo sapiens
  misc_RNA (1)...(19): siRNA sense strand
uuagagagcuuacaaacug

SEQ ID NO: 541596 - RNA, 19 nt, Homo sapiens
  misc_RNA (1)...(19): siRNA sense strand
cagaugcacuucagaaaug

SEQ ID NO: 541597 - RNA, 19 nt, Homo sapiens
  misc_RNA (1)...(19): siRNA sense strand
uaaaccuccuggaucauua

SEQ ID NO: 541598 - RNA, 19 nt, Homo sapiens
  misc_RNA (1)...(19): siRNA sense strand
ugacuuagaugaagacaca

SEQ ID NO: 541599 - RNA, 19 nt, Homo sapiens
  misc_RNA (1)...(19): siRNA sense strand
caaagaaagcucucucuga

SEQ ID NO: 541600 - RNA, 19 nt, Homo sapiens
  misc_RNA (1)...(19): siRNA sense strand
guuaacacaugaaguagaa

SEQ ID NO: 541601 - RNA, 19 nt, Homo sapiens
  misc_RNA (1)...(19): siRNA sense strand
gcacagagaagauaaacau

SEQ ID NO: 541602 - RNA, 19 nt, Homo sapiens
  misc_RNA (1)...(19): siRNA sense strand
gaaaugaagaggaggaaga

SEQ ID NO: 541603 - RNA, 19 nt, Homo sapiens
  misc_RNA (1)...(19): siRNA sense strand
agaaagcucucucugaguu

SEQ ID NO: 541604 - RNA, 19 nt, Homo sapiens
  misc_RNA (1)...(19): siRNA sense strand
cuaauggacuuacaagaga

SEQ ID NO: 541605 - RNA, 19 nt, Homo sapiens
  misc_RNA (1)...(19): siRNA sense strand
gauugaggauuuauggaaa

SEQ ID NO: 541606 - RNA, 19 nt, Homo sapiens
  misc_RNA (1)...(19): siRNA sense strand
caaguugcccugcgcuuua

SEQ ID NO: 541607 - RNA, 19 nt, Homo sapiens
  misc_RNA (1)...(19): siRNA sense strand
ucagauagcccauaacuca

SEQ ID NO: 541608 - RNA, 19 nt, Homo sapiens
  misc_RNA (1)...(19): siRNA sense strand
gaaaugcagcuagcuauug

SEQ ID NO: 541609 - RNA, 19 nt, Homo sapiens
  misc_RNA (1)...(19): siRNA sense strand
ucagaaauggcuucaguua

SEQ ID NO: 541610 - RNA, 19 nt, Homo sapiens
  misc_RNA (1)...(19): siRNA sense strand
caucagagaagauaugaaa

SEQ ID NO: 541611 - RNA, 19 nt, Homo sapiens
  misc_RNA (1)...(19): siRNA sense strand
gcccugcgcuuuaucgaaa

SEQ ID NO: 541612 - RNA, 19 nt, Homo sapiens
  misc_RNA (1)...(19): siRNA sense strand
ccaauagugucacaauuuc

SEQ ID NO: 541613 - RNA, 19 nt, Homo sapiens
  misc_RNA (1)...(19): siRNA sense strand
gaagaagacagauuuaguc

SEQ ID NO: 541614 - RNA, 19 nt, Homo sapiens
  misc_RNA (1)...(19): siRNA sense strand
gaaauggcuucaguuaaca

SEQ ID NO: 541615 - RNA, 19 nt, Homo sapiens
  misc_RNA (1)...(19): siRNA sense strand
ugacagaaacuaagaguau

SEQ ID NO: 541616 - RNA, 19 nt, Homo sapiens
  misc_RNA (1)...(19): siRNA sense strand
ccucuucccuuuauucuga

SEQ ID NO: 541617 - RNA, 19 nt, Homo sapiens
  misc_RNA (1)...(19): siRNA sense strand
ucaguuaacacaugaagua

SEQ ID NO: 541618 - RNA, 19 nt, Homo sapiens
  misc_RNA (1)...(19): siRNA sense strand
agaaauggcuucaguuaac

SEQ ID NO: 541619 - RNA, 19 nt, Homo sapiens
  misc_RNA (1)...(19): siRNA sense strand
gaauugaaguagaggaaag

SEQ ID NO: 541620 - RNA, 19 nt, Homo sapiens
  misc_RNA (1)...(19): siRNA sense strand
caacgacaguaaaccaguu

SEQ ID NO: 541621 - RNA, 19 nt, Homo sapiens
  misc_RNA (1)...(19): siRNA sense strand
agaggaaagugaugaauuc

SEQ ID NO: 541622 - RNA, 19 nt, Homo sapiens
  misc_RNA (1)...(19): siRNA sense strand
gaauucaucagagaagaua

SEQ ID NO: 541623 - RNA, 19 nt, Homo sapiens
  misc_RNA (1)...(19): siRNA sense strand
caagcaaaguguacaaugg

SEQ ID NO: 541624 - RNA, 19 nt, Homo sapiens
  misc_RNA (1)...(19): siRNA sense strand
cagaaauguugcuguagaa

SEQ ID NO: 541625 - RNA, 19 nt, Homo sapiens
  misc_RNA (1)...(19): siRNA sense strand
ccagauauccucucagugu

SEQ ID NO: 541626 - RNA, 19 nt, Homo sapiens
  misc_RNA (1)...(19): siRNA sense strand
gaagaucuguggcuuucag

SEQ ID NO: 541627 - RNA, 19 nt, Homo sapiens
  misc_RNA (1)...(19): siRNA sense strand
ggcaacaaauugagaagau

SEQ ID NO: 541628 - RNA, 19 nt, Homo sapiens
  misc_RNA (1)...(19): siRNA sense strand
gcucuucaaacaauacaua

SEQ ID NO: 541629 - RNA, 19 nt, Homo sapiens
  misc_RNA (1)...(19): siRNA sense strand
gcuuucagauagcccauaa

SEQ ID NO: 541630 - RNA, 19 nt, Homo sapiens
  misc_RNA (1)...(19): siRNA sense strand
gcaaaaugauggaugaaau

SEQ ID NO: 541631 - RNA, 19 nt, Homo sapiens
  misc_RNA (1)...(19): siRNA sense strand
uaacacgcccaccucauaa

SEQ ID NO: 541632 - RNA, 19 nt, Homo sapiens
  misc_RNA (1)...(19): siRNA sense strand
cuaacacgcccaccucaua

SEQ ID NO: 541633 - RNA, 19 nt, Homo sapiens
  misc_RNA (1)...(19): siRNA sense strand
cuuuaagccucgagauaua

SEQ ID NO: 541634 - RNA, 19 nt, Homo sapiens
  misc_RNA (1)...(19): siRNA sense strand
ggcuaaaccuccuggauca

SEQ ID NO: 541635 - RNA, 19 nt, Homo sapiens
  misc_RNA (1)...(19): siRNA sense strand
gaaugugaauugaguagac

SEQ ID NO: 541636 - RNA, 19 nt, Homo sapiens
  misc_RNA (1)...(19): siRNA sense strand
ugaaagauuuagagagcuu

SEQ ID NO: 541637 - RNA, 19 nt, Homo sapiens
  misc_RNA (1)...(19): siRNA sense strand
ggagcugaaugugaauuga

SEQ ID NO: 541638 - RNA, 19 nt, Homo sapiens
  misc_RNA (1)...(19): siRNA sense strand
uuuaugaucucccaguuga

SEQ ID NO: 541639 - RNA, 19 nt, Homo sapiens
  misc_RNA (1)...(19): siRNA sense strand
gaaacuaagaguaugaucu

SEQ ID NO: 541640 - RNA, 19 nt, Homo sapiens
  misc_RNA (1)...(19): siRNA sense strand
gggauucgccuguaacugu

SEQ ID NO: 541641 - RNA, 19 nt, Homo sapiens
  misc_RNA (1)...(19): siRNA sense strand
gagaagcaguuggucuguu

SEQ ID NO: 541642 - RNA, 19 nt, Homo sapiens
  misc_RNA (1)...(19): siRNA sense strand
ggaggcugcugguuugcuu

SEQ ID NO: 541643 - RNA, 19 nt, Homo sapiens
  misc_RNA (1)...(19): siRNA sense strand
guuggaggcugcugguuug

SEQ ID NO: 541644 - RNA, 19 nt, Homo sapiens
  misc_RNA (1)...(19): siRNA sense strand
gugcacgaaccuucauuua

SEQ ID NO: 541645 - RNA, 19 nt, Homo sapiens
  misc_RNA (1)...(19): siRNA sense strand
uaagcagcaucccacauga

SEQ ID NO: 541646 - RNA, 19 nt, Homo sapiens
  misc_RNA (1)...(19): siRNA sense strand
gcaagcaaaguguacaaug

SEQ ID NO: 541647 - RNA, 19 nt, Homo sapiens
  misc_RNA (1)...(19): siRNA sense strand
gacagaaacuaagaguaug

SEQ ID NO: 541648 - RNA, 19 nt, Homo sapiens
  misc_RNA (1)...(19): siRNA sense strand
gcaacaaauugagaagauc

SEQ ID NO: 541649 - RNA, 19 nt, Homo sapiens
  misc_RNA (1)...(19): siRNA sense strand
cccaauaugagaagaauuu

SEQ ID NO: 541650 - RNA, 19 nt, Homo sapiens
  misc_RNA (1)...(19): siRNA sense strand
gaggauuuauggaaacgau

SEQ ID NO: 541651 - RNA, 19 nt, Homo sapiens
  misc_RNA (1)...(19): siRNA sense strand
gaaauccuguagcaugaac

SEQ ID NO: 541652 - RNA, 19 nt, Homo sapiens
  misc_RNA (1)...(19): siRNA sense strand
uagaugagguagaccacaa

SEQ ID NO: 541653 - RNA, 19 nt, Homo sapiens
  misc_RNA (1)...(19): siRNA sense strand
cagaaauggcuucaguuaa

SEQ ID NO: 541654 - RNA, 19 nt, Homo sapiens
  misc_RNA (1)...(19): siRNA sense strand
gaaaucaauuaugcaaagg

SEQ ID NO: 541655 - RNA, 19 nt, Homo sapiens
  misc_RNA (1)...(19): siRNA sense strand
caaaagaacauguugcaaa

SEQ ID NO: 541656 - RNA, 19 nt, Homo sapiens
  misc_RNA (1)...(19): siRNA sense strand
ccaccaugcuuuacagaag

SEQ ID NO: 541657 - RNA, 19 nt, Homo sapiens
  misc_RNA (1)...(19): siRNA sense strand
uucagaaugugacuccuua

SEQ ID NO: 541658 - RNA, 19 nt, Homo sapiens
  misc_RNA (1)...(19): siRNA sense strand
cccaauagugucacaauuu

SEQ ID NO: 541659 - RNA, 19 nt, Homo sapiens
  misc_RNA (1)...(19): siRNA sense strand
guugauagaguuuguugaa

SEQ ID NO: 541660 - RNA, 19 nt, Homo sapiens
  misc_RNA (1)...(19): siRNA sense strand
ccaaguguugccagaauaa

SEQ ID NO: 541661 - RNA, 19 nt, Homo sapiens
  misc_RNA (1)...(19): siRNA sense strand
agaagcaguuggucuguuc

SEQ ID NO: 541662 - RNA, 19 nt, Homo sapiens
  misc_RNA (1)...(19): siRNA sense strand
gaaagauuuagagagcuua

SEQ ID NO: 541663 - RNA, 19 nt, Homo sapiens
  misc_RNA (1)...(19): siRNA sense strand
uauaguaauugguguugga

SEQ ID NO: 541664 - RNA, 19 nt, Homo sapiens
  misc_RNA (1)...(19): siRNA sense strand
uacagaagaagacagauuu

SEQ ID NO: 541665 - RNA, 19 nt, Homo sapiens
  misc_RNA (1)...(19): siRNA sense strand
gagaagaauuuuagagaca

SEQ ID NO: 541666 - RNA, 19 nt, Homo sapiens
  misc_RNA (1)...(19): siRNA sense strand
cccaaguguugccagaaua

SEQ ID NO: 541667 - RNA, 19 nt, Homo sapiens
  misc_RNA (1)...(19): siRNA sense strand
cgcgaaagauaucaagaga

SEQ ID NO: 541668 - RNA, 19 nt, Homo sapiens
  misc_RNA (1)...(19): siRNA sense strand
ggaggaagaggccauuuac

SEQ ID NO: 541669 - RNA, 19 nt, Homo sapiens
  misc_RNA (1)...(19): siRNA sense strand
ccugaccucuucccuuuau

SEQ ID NO: 541670 - RNA, 19 nt, Homo sapiens
  misc_RNA (1)...(19): siRNA sense strand
gcagagcaaagucuaaugg

SEQ ID NO: 541671 - RNA, 19 nt, Homo sapiens
  misc_RNA (1)...(19): siRNA sense strand
gccuaaaccucgccacaca

SEQ ID NO: 541672 - RNA, 19 nt, Homo sapiens
  misc_RNA (1)...(19): siRNA sense strand
agccugaccucuucccuuu

SEQ ID NO: 541673 - RNA, 19 nt, Homo sapiens
  misc_RNA (1)...(19): siRNA sense strand
gaauuugaacugagaagca

SEQ ID NO: 541674 - RNA, 19 nt, Homo sapiens
  misc_RNA (1)...(19): siRNA sense strand
uggaugaaaucaauuaugc

SEQ ID NO: 541675 - RNA, 19 nt, Homo sapiens
  misc_RNA (1)...(19): siRNA sense strand
caccaugcuuuacagaaga

SEQ ID NO: 541676 - RNA, 19 nt, Homo sapiens
  misc_RNA (1)...(19): siRNA sense strand
gaacacagaugccaguuua

SEQ ID NO: 541677 - RNA, 19 nt, Homo sapiens
  misc_RNA (1)...(19): siRNA sense strand
gaaacaggguucuaucuua

SEQ ID NO: 541678 - RNA, 19 nt, Homo sapiens
  misc_RNA (1)...(19): siRNA sense strand
guacugaaguuucuacuaa

SEQ ID NO: 541679 - RNA, 19 nt, Homo sapiens
  misc_RNA (1)...(19): siRNA sense strand
gagcaagucuucuagauga

SEQ ID NO: 541680 - RNA, 19 nt, Homo sapiens
  misc_RNA (1)...(19): siRNA sense strand
gcacagauauccugguuug

SEQ ID NO: 541681 - RNA, 19 nt, Homo sapiens
  misc_RNA (1)...(19): siRNA sense strand
gaaaggaacuagauauucu

SEQ ID NO: 541682 - RNA, 19 nt, Homo sapiens
  misc_RNA (1)...(19): siRNA sense strand
gaaaggaauuggcaaagga

SEQ ID NO: 541683 - RNA, 19 nt, Homo sapiens
  misc_RNA (1)...(19): siRNA sense strand
gcaguacugucagcuauua

SEQ ID NO: 541684 - RNA, 19 nt, Homo sapiens
  misc_RNA (1)...(19): siRNA sense strand
gagaaaagcugccuucgua

SEQ ID NO: 541685 - RNA, 19 nt, Homo sapiens
  misc_RNA (1)...(19): siRNA sense strand
gaucugaauuugauuguug

SEQ ID NO: 541686 - RNA, 19 nt, Homo sapiens
  misc_RNA (1)...(19): siRNA sense strand
gcacagagguuuccccaua

SEQ ID NO: 541687 - RNA, 19 nt, Homo sapiens
  misc_RNA (1)...(19): siRNA sense strand
gaagaaugauaaagaguca

SEQ ID NO: 541688 - RNA, 19 nt, Homo sapiens
  misc_RNA (1)...(19): siRNA sense strand
gauggaggaugauaaaguu

SEQ ID NO: 541689 - RNA, 19 nt, Homo sapiens
  misc_RNA (1)...(19): siRNA sense strand
gcaagggcauguaaauaga

SEQ ID NO: 541690 - RNA, 19 nt, Homo sapiens
  misc_RNA (1)...(19): siRNA sense strand
ugaaccagauggaacuuua

SEQ ID NO: 541691 - RNA, 19 nt, Homo sapiens
  misc_RNA (1)...(19): siRNA sense strand
gcauguaaauagacaagaa

SEQ ID NO: 541692 - RNA, 19 nt, Homo sapiens
  misc_RNA (1)...(19): siRNA sense strand
guagaugaguggauuguau

SEQ ID NO: 541693 - RNA, 19 nt, Homo sapiens
  misc_RNA (1)...(19): siRNA sense strand
aaacagacuuucacuacaa

SEQ ID NO: 541694 - RNA, 19 nt, Homo sapiens
  misc_RNA (1)...(19): siRNA sense strand
caucugugcugguuuauau

SEQ ID NO: 541695 - RNA, 19 nt, Homo sapiens
  misc_RNA (1)...(19): siRNA sense strand
ugauggagcugaacgcuuu

SEQ ID NO: 541696 - RNA, 19 nt, Homo sapiens
  misc_RNA (1)...(19): siRNA sense strand
gcugaacgcuuuggauaaa

SEQ ID NO: 541697 - RNA, 19 nt, Homo sapiens
  misc_RNA (1)...(19): siRNA sense strand
gcuaucaucuguauaaugg

SEQ ID NO: 541698 - RNA, 19 nt, Homo sapiens
  misc_RNA (1)...(19): siRNA sense strand
gaagaaaggaauuggcaaa

SEQ ID NO: 541699 - RNA, 19 nt, Homo sapiens
  misc_RNA (1)...(19): siRNA sense strand
gagcugaacgcuuuggaua

SEQ ID NO: 541700 - RNA, 19 nt, Homo sapiens
  misc_RNA (1)...(19): siRNA sense strand
gaacagaucauauauugac

SEQ ID NO: 541701 - RNA, 19 nt, Homo sapiens
  misc_RNA (1)...(19): siRNA sense strand
ggauaaacaagaagaauug

SEQ ID NO: 541702 - RNA, 19 nt, Homo sapiens
  misc_RNA (1)...(19): siRNA sense strand
aggaacagaucauauauug

SEQ ID NO: 541703 - RNA, 19 nt, Homo sapiens
  misc_RNA (1)...(19): siRNA sense strand
acaacuggcuuaucuauca

SEQ ID NO: 541704 - RNA, 19 nt, Homo sapiens
  misc_RNA (1)...(19): siRNA sense strand
aaacaggguucuaucuuau

SEQ ID NO: 541705 - RNA, 19 nt, Homo sapiens
  misc_RNA (1)...(19): siRNA sense strand
ugaccgagauucugaguau

SEQ ID NO: 541706 - RNA, 19 nt, Homo sapiens
  misc_RNA (1)...(19): siRNA sense strand
gaccuucgguauauugaaa

SEQ ID NO: 541707 - RNA, 19 nt, Homo sapiens
  misc_RNA (1)...(19): siRNA sense strand
ugaaaguccucauccugua

SEQ ID NO: 541708 - RNA, 19 nt, Homo sapiens
  misc_RNA (1)...(19): siRNA sense strand
agaagaggauggugcgaua

SEQ ID NO: 541709 - RNA, 19 nt, Homo sapiens
  misc_RNA (1)...(19): siRNA sense strand
ggaaagaguagcugcagaa

SEQ ID NO: 541710 - RNA, 19 nt, Homo sapiens
  misc_RNA (1)...(19): siRNA sense strand
ggaacuagauauucuucug

SEQ ID NO: 541711 - RNA, 19 nt, Homo sapiens
  misc_RNA (1)...(19): siRNA sense strand
ucaggaaacuauugcugua

SEQ ID NO: 541712 - RNA, 19 nt, Homo sapiens
  misc_RNA (1)...(19): siRNA sense strand
gcaaacagacuuucacuac

SEQ ID NO: 541713 - RNA, 19 nt, Homo sapiens
  misc_RNA (1)...(19): siRNA sense strand
uaccauagaugaugucguu

SEQ ID NO: 541714 - RNA, 19 nt, Homo sapiens
  misc_RNA (1)...(19): siRNA sense strand
gaacugcgaagaagguauu

SEQ ID NO: 541715 - RNA, 19 nt, Homo sapiens
  misc_RNA (1)...(19): siRNA sense strand
gcaaguacuguagauguua

SEQ ID NO: 541716 - RNA, 19 nt, Homo sapiens
  misc_RNA (1)...(19): siRNA sense strand
uagaugaugucguuuaugu

SEQ ID NO: 541717 - RNA, 19 nt, Homo sapiens
  misc_RNA (1)...(19): siRNA sense strand
gaaaugauggaggaugaua

SEQ ID NO: 541718 - RNA, 19 nt, Homo sapiens
  misc_RNA (1)...(19): siRNA sense strand
aaagaacguuggccagauu

SEQ ID NO: 541719 - RNA, 19 nt, Homo sapiens
  misc_RNA (1)...(19): siRNA sense strand
gaugagaacaagcaguaua

SEQ ID NO: 541720 - RNA, 19 nt, Homo sapiens
  misc_RNA (1)...(19): siRNA sense strand
gcaagagagagcuguagua

SEQ ID NO: 541721 - RNA, 19 nt, Homo sapiens
  misc_RNA (1)...(19): siRNA sense strand
ccacucaaguuacucaguu

SEQ ID NO: 541722 - RNA, 19 nt, Homo sapiens
  misc_RNA (1)...(19): siRNA sense strand
ugucaucugugcugguuua

SEQ ID NO: 541723 - RNA, 19 nt, Homo sapiens
  misc_RNA (1)...(19): siRNA sense strand
aauuaaagcugucaucugu

SEQ ID NO: 541724 - RNA, 19 nt, Homo sapiens
  misc_RNA (1)...(19): siRNA sense strand
uaacaugaaaggacaguuu

SEQ ID NO: 541725 - RNA, 19 nt, Homo sapiens
  misc_RNA (1)...(19): siRNA sense strand
uagguggaauugcuuauuu

SEQ ID NO: 541726 - RNA, 19 nt, Homo sapiens
  misc_RNA (1)...(19): siRNA sense strand
ggucauugcuaucaucugu

SEQ ID NO: 541727 - RNA, 19 nt, Homo sapiens
  misc_RNA (1)...(19): siRNA sense strand
uaguaaagcuaaugccaaa

SEQ ID NO: 541728 - RNA, 19 nt, Homo sapiens
  misc_RNA (1)...(19): siRNA sense strand
gaugaugucguuuauguga

SEQ ID NO: 541729 - RNA, 19 nt, Homo sapiens
  misc_RNA (1)...(19): siRNA sense strand
gguucuaucuuauacugua

SEQ ID NO: 541730 - RNA, 19 nt, Homo sapiens
  misc_RNA (1)...(19): siRNA sense strand
ugaaagaaaucugcaguca

SEQ ID NO: 541731 - RNA, 19 nt, Homo sapiens
  misc_RNA (1)...(19): siRNA sense strand
uagaaaugauggaggauga

SEQ ID NO: 541732 - RNA, 19 nt, Homo sapiens
  misc_RNA (1)...(19): siRNA sense strand
ugaugucguuuaugugaua

SEQ ID NO: 541733 - RNA, 19 nt, Homo sapiens
  misc_RNA (1)...(19): siRNA sense strand
gaauugcccaucuuguuaa

SEQ ID NO: 541734 - RNA, 19 nt, Homo sapiens
  misc_RNA (1)...(19): siRNA sense strand
gcacuguucugcugcuuag

SEQ ID NO: 541735 - RNA, 19 nt, Homo sapiens
  misc_RNA (1)...(19): siRNA sense strand
gcucagagaacaaacuuga

SEQ ID NO: 541736 - RNA, 19 nt, Homo sapiens
  misc_RNA (1)...(19): siRNA sense strand
uggcuuaucuaucaccuaa

SEQ ID NO: 541737 - RNA, 19 nt, Homo sapiens
  misc_RNA (1)...(19): siRNA sense strand
caaacagacuuucacuaca

SEQ ID NO: 541738 - RNA, 19 nt, Homo sapiens
  misc_RNA (1)...(19): siRNA sense strand
ucuuggagcuggauuugua

SEQ ID NO: 541739 - RNA, 19 nt, Homo sapiens
  misc_RNA (1)...(19): siRNA sense strand
ggaaacaggguucuaucuu

SEQ ID NO: 541740 - RNA, 19 nt, Homo sapiens
  misc_RNA (1)...(19): siRNA sense strand
gaugaaauccaugaaagaa

SEQ ID NO: 541741 - RNA, 19 nt, Homo sapiens
  misc_RNA (1)...(19): siRNA sense strand
agaauugcccaucuuguua

SEQ ID NO: 541742 - RNA, 19 nt, Homo sapiens
  misc_RNA (1)...(19): siRNA sense strand
caaaggauacuagaaguga

SEQ ID NO: 541743 - RNA, 19 nt, Homo sapiens
  misc_RNA (1)...(19): siRNA sense strand
gggacaauaucagcacuuu

SEQ ID NO: 541744 - RNA, 19 nt, Homo sapiens
  misc_RNA (1)...(19): siRNA sense strand
gcagucagauguuuuaaug

SEQ ID NO: 541745 - RNA, 19 nt, Homo sapiens
  misc_RNA (1)...(19): siRNA sense strand
gagaacuccuuuggaagaa

SEQ ID NO: 541746 - RNA, 19 nt, Homo sapiens
  misc_RNA (1)...(19): siRNA sense strand
cauagaugaugucguuuau

SEQ ID NO: 541747 - RNA, 19 nt, Homo sapiens
  misc_RNA (1)...(19): siRNA sense strand
aagaguagcugcagaaagg

SEQ ID NO: 541748 - RNA, 19 nt, Homo sapiens
  misc_RNA (1)...(19): siRNA sense strand
gagacuagcauuaccauag

SEQ ID NO: 541749 - RNA, 19 nt, Homo sapiens
  misc_RNA (1)...(19): siRNA sense strand
ggacaauaucagcacuuua

SEQ ID NO: 541750 - RNA, 19 nt, Homo sapiens
  misc_RNA (1)...(19): siRNA sense strand
aauaagguauguuccagaa

SEQ ID NO: 541751 - RNA, 19 nt, Homo sapiens
  misc_RNA (1)...(19): siRNA sense strand
caguagaaauccuaaagau

SEQ ID NO: 541752 - RNA, 19 nt, Homo sapiens
  misc_RNA (1)...(19): siRNA sense strand
ccauagaugaugucguuua

SEQ ID NO: 541753 - RNA, 19 nt, Homo sapiens
  misc_RNA (1)...(19): siRNA sense strand
caaguacuguagauguuau

SEQ ID NO: 541754 - RNA, 19 nt, Homo sapiens
  misc_RNA (1)...(19): siRNA sense strand
caaguuacucaguucauuu

SEQ ID NO: 541755 - RNA, 19 nt, Homo sapiens
  misc_RNA (1)...(19): siRNA sense strand
ggaaacuauugcuguagau

SEQ ID NO: 541756 - RNA, 19 nt, Homo sapiens
  misc_RNA (1)...(19): siRNA sense strand
cagagucgguugccaagga

SEQ ID NO: 541757 - RNA, 19 nt, Homo sapiens
  misc_RNA (1)...(19): siRNA sense strand
gcagaauaguuuguacuca

SEQ ID NO: 541758 - RNA, 19 nt, Homo sapiens
  misc_RNA (1)...(19): siRNA sense strand
ucaaguuacucaguucauu

SEQ ID NO: 541759 - RNA, 19 nt, Homo sapiens
  misc_RNA (1)...(19): siRNA sense strand
agacuggaaugacacuaaa

SEQ ID NO: 541760 - RNA, 19 nt, Homo sapiens
  misc_RNA (1)...(19): siRNA sense strand
gcaguguuacucuccauaa

SEQ ID NO: 541761 - RNA, 19 nt, Homo sapiens
  misc_RNA (1)...(19): siRNA sense strand
agacuagcauuaccauaga

SEQ ID NO: 541762 - RNA, 19 nt, Homo sapiens
  misc_RNA (1)...(19): siRNA sense strand
ugaaacugguuguggcaaa

SEQ ID NO: 541763 - RNA, 19 nt, Homo sapiens
  misc_RNA (1)...(19): siRNA sense strand
gaacuuuccgccacgauuc

SEQ ID NO: 541764 - RNA, 19 nt, Homo sapiens
  misc_RNA (1)...(19): siRNA sense strand
ggaauuaagaaaggaacua

SEQ ID NO: 541765 - RNA, 19 nt, Homo sapiens
  misc_RNA (1)...(19): siRNA sense strand
gcaguagaaauccuaaaga

SEQ ID NO: 541766 - RNA, 19 nt, Homo sapiens
  misc_RNA (1)...(19): siRNA sense strand
uuugagaacuccuuuggaa

SEQ ID NO: 541767 - RNA, 19 nt, Homo sapiens
  misc_RNA (1)...(19): siRNA sense strand
guaagggaacugcgaagaa

SEQ ID NO: 541768 - RNA, 19 nt, Homo sapiens
  misc_RNA (1)...(19): siRNA sense strand
uaucguacuugaugaaauc

SEQ ID NO: 541769 - RNA, 19 nt, Homo sapiens
  misc_RNA (1)...(19): siRNA sense strand
gaaagaguagcugcagaaa

SEQ ID NO: 541770 - RNA, 19 nt, Homo sapiens
  misc_RNA (1)...(19): siRNA sense strand
ggauaacuacauugaaaga

SEQ ID NO: 541771 - RNA, 19 nt, Homo sapiens
  misc_RNA (1)...(19): siRNA sense strand
gaugauaaaguugaucuga

SEQ ID NO: 541772 - RNA, 19 nt, Homo sapiens
  misc_RNA (1)...(19): siRNA sense strand
gaacgacgagaagaacaaa

SEQ ID NO: 541773 - RNA, 19 nt, Homo sapiens
  misc_RNA (1)...(19): siRNA sense strand
cauccuaaaucuguuaaug

SEQ ID NO: 541774 - RNA, 19 nt, Homo sapiens
  misc_RNA (1)...(19): siRNA sense strand
gaugucacaaguaauguuu

SEQ ID NO: 541775 - RNA, 19 nt, Homo sapiens
  misc_RNA (1)...(19): siRNA sense strand
gacaauaucagcacuuuac

SEQ ID NO: 541776 - RNA, 19 nt, Homo sapiens
  misc_RNA (1)...(19): siRNA sense strand
guacagaacuccacauaua

SEQ ID NO: 541777 - RNA, 19 nt, Homo sapiens
  misc_RNA (1)...(19): siRNA sense strand
gaagccaacuccuuugaaa

SEQ ID NO: 541778 - RNA, 19 nt, Homo sapiens
  misc_RNA (1)...(19): siRNA sense strand
ggacaaaccuucagaucgu

SEQ ID NO: 541779 - RNA, 19 nt, Homo sapiens
  misc_RNA (1)...(19): siRNA sense strand
caacauagcucaggaucug

SEQ ID NO: 541780 - RNA, 19 nt, Homo sapiens
  misc_RNA (1)...(19): siRNA sense strand
gaugggagccuagcuaaua

SEQ ID NO: 541781 - RNA, 19 nt, Homo sapiens
  misc_RNA (1)...(19): siRNA sense strand
ggcaacagcugaacagaug

SEQ ID NO: 541782 - RNA, 19 nt, Homo sapiens
  misc_RNA (1)...(19): siRNA sense strand
gaacuggcaucaaauacuc

SEQ ID NO: 541783 - RNA, 19 nt, Homo sapiens
  misc_RNA (1)...(19): siRNA sense strand
cagcagaugucacaggauu

SEQ ID NO: 541784 - RNA, 19 nt, Homo sapiens
  misc_RNA (1)...(19): siRNA sense strand
acacuggucuucccuacua

SEQ ID NO: 541785 - RNA, 19 nt, Homo sapiens
  misc_RNA (1)...(19): siRNA sense strand
ggaagggaauucagacaca

SEQ ID NO: 541786 - RNA, 19 nt, Homo sapiens
  misc_RNA (1)...(19): siRNA sense strand
uaagugagccuuugaauac

SEQ ID NO: 541787 - RNA, 19 nt, Homo sapiens
  misc_RNA (1)...(19): siRNA sense strand
uaauggagaugugaacaaa

SEQ ID NO: 541788 - RNA, 19 nt, Homo sapiens
  misc_RNA (1)...(19): siRNA sense strand
ccacuggucuaccugauau

SEQ ID NO: 541789 - RNA, 19 nt, Homo sapiens
  misc_RNA (1)...(19): siRNA sense strand
gcacaaccaguaccucgua

SEQ ID NO: 541790 - RNA, 19 nt, Homo sapiens
  misc_RNA (1)...(19): siRNA sense strand
gaucaucgcaggcaccaaa

SEQ ID NO: 541791 - RNA, 19 nt, Homo sapiens
  misc_RNA (1)...(19): siRNA sense strand
guugaaagcuccgaguuug

SEQ ID NO: 541792 - RNA, 19 nt, Homo sapiens
  misc_RNA (1)...(19): siRNA sense strand
ggaagaauucuguggaaga

SEQ ID NO: 541793 - RNA, 19 nt, Homo sapiens
  misc_RNA (1)...(19): siRNA sense strand
gaagucagcagacacuaga

SEQ ID NO: 541794 - RNA, 19 nt, Homo sapiens
  misc_RNA (1)...(19): siRNA sense strand
gauuaaaugugcaguuugg

SEQ ID NO: 541795 - RNA, 19 nt, Homo sapiens
  misc_RNA (1)...(19): siRNA sense strand
ccaaguacacagcagaaua

SEQ ID NO: 541796 - RNA, 19 nt, Homo sapiens
  misc_RNA (1)...(19): siRNA sense strand
gaagaauucuguggaagag

SEQ ID NO: 541797 - RNA, 19 nt, Homo sapiens
  misc_RNA (1)...(19): siRNA sense strand
gcacgaccauugaaaauau

SEQ ID NO: 541798 - RNA, 19 nt, Homo sapiens
  misc_RNA (1)...(19): siRNA sense strand
gcagaugucacaggauuaa

SEQ ID NO: 541799 - RNA, 19 nt, Homo sapiens
  misc_RNA (1)...(19): siRNA sense strand
gaagggaauucagacacaa

SEQ ID NO: 541800 - RNA, 19 nt, Homo sapiens
  misc_RNA (1)...(19): siRNA sense strand
acaauaagacacagacuuu

SEQ ID NO: 541801 - RNA, 19 nt, Homo sapiens
  misc_RNA (1)...(19): siRNA sense strand
cugacaagcucaucacuga

SEQ ID NO: 541802 - RNA, 19 nt, Homo sapiens
  misc_RNA (1)...(19): siRNA sense strand
gaauuuagaggugaagaaa

SEQ ID NO: 541803 - RNA, 19 nt, Homo sapiens
  misc_RNA (1)...(19): siRNA sense strand
aaacaagucugcagguucu

SEQ ID NO: 541804 - RNA, 19 nt, Homo sapiens
  misc_RNA (1)...(19): siRNA sense strand
cagcagagccaaucacaga

SEQ ID NO: 541805 - RNA, 19 nt, Homo sapiens
  misc_RNA (1)...(19): siRNA sense strand
aaaucaggaugaaugcaua

SEQ ID NO: 541806 - RNA, 19 nt, Homo sapiens
  misc_RNA (1)...(19): siRNA sense strand
gagccuagcuaauaaucca

SEQ ID NO: 541807 - RNA, 19 nt, Homo sapiens
  misc_RNA (1)...(19): siRNA sense strand
gcaaugucuuccucuuaug

SEQ ID NO: 541808 - RNA, 19 nt, Homo sapiens
  misc_RNA (1)...(19): siRNA sense strand
gaauuugggucagaaccuu

SEQ ID NO: 541809 - RNA, 19 nt, Homo sapiens
  misc_RNA (1)...(19): siRNA sense strand
caaauucgcaacacaacaa

SEQ ID NO: 541810 - RNA, 19 nt, Homo sapiens
  misc_RNA (1)...(19): siRNA sense strand
caaagagaauagagagaag

SEQ ID NO: 541811 - RNA, 19 nt, Homo sapiens
  misc_RNA (1)...(19): siRNA sense strand
ccaaacaagucugcagguu

SEQ ID NO: 541812 - RNA, 19 nt, Homo sapiens
  misc_RNA (1)...(19): siRNA sense strand
ccaguggacuacuauggaa

SEQ ID NO: 541813 - RNA, 19 nt, Homo sapiens
  misc_RNA (1)...(19): siRNA sense strand
ccaaagcccugugaguuca

SEQ ID NO: 541814 - RNA, 19 nt, Homo sapiens
  misc_RNA (1)...(19): siRNA sense strand
gugaacaaagcuaucaaua

SEQ ID NO: 541815 - RNA, 19 nt, Homo sapiens
  misc_RNA (1)...(19): siRNA sense strand
uauacaacuuccgucauua

SEQ ID NO: 541816 - RNA, 19 nt, Homo sapiens
  misc_RNA (1)...(19): siRNA sense strand
gaaaggaagaggcggcaau

SEQ ID NO: 541817 - RNA, 19 nt, Homo sapiens
  misc_RNA (1)...(19): siRNA sense strand
gagaugggagccuagcuaa

SEQ ID NO: 541818 - RNA, 19 nt, Homo sapiens
  misc_RNA (1)...(19): siRNA sense strand
auauacaacuuccgucauu

SEQ ID NO: 541819 - RNA, 19 nt, Homo sapiens
  misc_RNA (1)...(19): siRNA sense strand
acaagucacccuacaacua

SEQ ID NO: 541820 - RNA, 19 nt, Homo sapiens
  misc_RNA (1)...(19): siRNA sense strand
caacagaagacuggacuga

SEQ ID NO: 541821 - RNA, 19 nt, Homo sapiens
  misc_RNA (1)...(19): siRNA sense strand
cuacaacuacuacuucuug

SEQ ID NO: 541822 - RNA, 19 nt, Homo sapiens
  misc_RNA (1)...(19): siRNA sense strand
ggaauucagacacaacuuc

SEQ ID NO: 541823 - RNA, 19 nt, Homo sapiens
  misc_RNA (1)...(19): siRNA sense strand
uagcaaugucuuccucuua

SEQ ID NO: 541824 - RNA, 19 nt, Homo sapiens
  misc_RNA (1)...(19): siRNA sense strand
aaccuucucucucugaauu

SEQ ID NO: 541825 - RNA, 19 nt, Homo sapiens
  misc_RNA (1)...(19): siRNA sense strand
gcaaucaaguggacaaacc

SEQ ID NO: 541826 - RNA, 19 nt, Homo sapiens
  misc_RNA (1)...(19): siRNA sense strand
cugguucugucuacaauaa

SEQ ID NO: 541827 - RNA, 19 nt, Homo sapiens
  misc_RNA (1)...(19): siRNA sense strand
uuaagugagccuuugaaua

SEQ ID NO: 541828 - RNA, 19 nt, Homo sapiens
  misc_RNA (1)...(19): siRNA sense strand
aaacacaucaaacuugcua

SEQ ID NO: 541829 - RNA, 19 nt, Homo sapiens
  misc_RNA (1)...(19): siRNA sense strand
caaguacacagcagaauag

SEQ ID NO: 541830 - RNA, 19 nt, Homo sapiens
  misc_RNA (1)...(19): siRNA sense strand
gcauaguggcccuacauga

SEQ ID NO: 541831 - RNA, 19 nt, Homo sapiens
  misc_RNA (1)...(19): siRNA sense strand
gaguaucagugucuucaag

SEQ ID NO: 541832 - RNA, 19 nt, Homo sapiens
  misc_RNA (1)...(19): siRNA sense strand
caacgcaaccacagaaaca

SEQ ID NO: 541833 - RNA, 19 nt, Homo sapiens
  misc_RNA (1)...(19): siRNA sense strand
acagaagacuggacugaag

SEQ ID NO: 541834 - RNA, 19 nt, Homo sapiens
  misc_RNA (1)...(19): siRNA sense strand
caucaaauacucacaacau

SEQ ID NO: 541835 - RNA, 19 nt, Homo sapiens
  misc_RNA (1)...(19): siRNA sense strand
ugacuucagugagcaguga

SEQ ID NO: 541836 - RNA, 19 nt, Homo sapiens
  misc_RNA (1)...(19): siRNA sense strand
aggauuaaaugugcaguuu

SEQ ID NO: 541837 - RNA, 19 nt, Homo sapiens
  misc_RNA (1)...(19): siRNA sense strand
ggaaacaacaaccggaaag

SEQ ID NO: 541838 - RNA, 19 nt, Homo sapiens
  misc_RNA (1)...(19): siRNA sense strand
gaucagcuccaagcaguga

SEQ ID NO: 541839 - RNA, 19 nt, Homo sapiens
  misc_RNA (1)...(19): siRNA sense strand
caacaucccaguccucagu

SEQ ID NO: 541840 - RNA, 19 nt, Homo sapiens
  misc_RNA (1)...(19): siRNA sense strand
cucaggaucugucaaacaa

SEQ ID NO: 541841 - RNA, 19 nt, Homo sapiens
  misc_RNA (1)...(19): siRNA sense strand
ccaggaaccaucaugaaug

SEQ ID NO: 541842 - RNA, 19 nt, Homo sapiens
  misc_RNA (1)...(19): siRNA sense strand
guagcaaugucuuccucuu

SEQ ID NO: 541843 - RNA, 19 nt, Homo sapiens
  misc_RNA (1)...(19): siRNA sense strand
gccuuugaauacaucuuua

SEQ ID NO: 541844 - RNA, 19 nt, Homo sapiens
  misc_RNA (1)...(19): siRNA sense strand
ggagaugugaacaaagcua

SEQ ID NO: 541845 - RNA, 19 nt, Homo sapiens
  misc_RNA (1)...(19): siRNA sense strand
cgaccuccgucucaaguuc

SEQ ID NO: 541846 - RNA, 19 nt, Homo sapiens
  misc_RNA (1)...(19): siRNA sense strand
ccaacuccuuugaaacuuc

SEQ ID NO: 541847 - RNA, 19 nt, Homo sapiens
  misc_RNA (1)...(19): siRNA sense strand
aaucguggcagagaauuua

SEQ ID NO: 541848 - RNA, 19 nt, Homo sapiens
  misc_RNA (1)...(19): siRNA sense strand
gggagacuguaggguguaa

SEQ ID NO: 541849 - RNA, 19 nt, Homo sapiens
  misc_RNA (1)...(19): siRNA sense strand
gaauucagacacaacuuca

SEQ ID NO: 541850 - RNA, 19 nt, Homo sapiens
  misc_RNA (1)...(19): siRNA sense strand
gguucugucuacaauaaga

SEQ ID NO: 541851 - RNA, 19 nt, Homo sapiens
  misc_RNA (1)...(19): siRNA sense strand
gaacuccacauauacaacu

SEQ ID NO: 541852 - RNA, 19 nt, Homo sapiens
  misc_RNA (1)...(19): siRNA sense strand
ucacaaauucgcaacacaa

SEQ ID NO: 541853 - RNA, 19 nt, Homo sapiens
  misc_RNA (1)...(19): siRNA sense strand
gaagaaaagcgagaaagaa

SEQ ID NO: 541854 - RNA, 19 nt, Homo sapiens
  misc_RNA (1)...(19): siRNA sense strand
acaaagagaauagagagaa

SEQ ID NO: 541855 - RNA, 19 nt, Homo sapiens
  misc_RNA (1)...(19): siRNA sense strand
ccaccuggcuauagcuaca

SEQ ID NO: 541856 - RNA, 19 nt, Homo sapiens
  misc_RNA (1)...(19): siRNA sense strand
cagcagcccuucgugaauc

SEQ ID NO: 541857 - RNA, 19 nt, Homo sapiens
  misc_RNA (1)...(19): siRNA sense strand
gcagcgaccuccgucucaa

SEQ ID NO: 541858 - RNA, 19 nt, Homo sapiens
  misc_RNA (1)...(19): siRNA sense strand
caaugucuuccucuuauga

SEQ ID NO: 541859 - RNA, 19 nt, Homo sapiens
  misc_RNA (1)...(19): siRNA sense strand
gaugucacaggauuaaaug

SEQ ID NO: 541860 - RNA, 19 nt, Homo sapiens
  misc_RNA (1)...(19): siRNA sense strand
caagucacccuacaacuac

SEQ ID NO: 541861 - RNA, 19 nt, Homo sapiens
  misc_RNA (1)...(19): siRNA sense strand
gaagaguggacaacagaag

SEQ ID NO: 541862 - RNA, 19 nt, Homo sapiens
  misc_RNA (1)...(19): siRNA sense strand
guaauggagaugugaacaa

SEQ ID NO: 541863 - RNA, 19 nt, Homo sapiens
  misc_RNA (1)...(19): siRNA sense strand
gagaauagagagaagaaaa

SEQ ID NO: 541864 - RNA, 19 nt, Homo sapiens
  misc_RNA (1)...(19): siRNA sense strand
cagggacgccuccaccuuu

SEQ ID NO: 541865 - RNA, 19 nt, Homo sapiens
  misc_RNA (1)...(19): siRNA sense strand
caaaggaguaucagugucu

SEQ ID NO: 541866 - RNA, 19 nt, Homo sapiens
  misc_RNA (1)...(19): siRNA sense strand
ggccagcacggcuacagua

SEQ ID NO: 541867 - RNA, 19 nt, Homo sapiens
  misc_RNA (1)...(19): siRNA sense strand
gcccagugccuuccaguau

SEQ ID NO: 541868 - RNA, 19 nt, Homo sapiens
  misc_RNA (1)...(19): siRNA sense strand
ucucucagcuuagcaguuc

SEQ ID NO: 541869 - RNA, 19 nt, Homo sapiens
  misc_RNA (1)...(19): siRNA sense strand
caguacagaacuccacaua

SEQ ID NO: 541870 - RNA, 19 nt, Homo sapiens
  misc_RNA (1)...(19): siRNA sense strand
cagagaauuuagaggugaa

SEQ ID NO: 541871 - RNA, 19 nt, Homo sapiens
  misc_RNA (1)...(19): siRNA sense strand
caaaggggcuuggaagaau

SEQ ID NO: 541872 - RNA, 19 nt, Homo sapiens
  misc_RNA (1)...(19): siRNA sense strand
acacuagacacuccaaaga

SEQ ID NO: 541873 - RNA, 19 nt, Homo sapiens
  misc_RNA (1)...(19): siRNA sense strand
agcaaugucuuccucuuau

SEQ ID NO: 541874 - RNA, 19 nt, Homo sapiens
  misc_RNA (1)...(19): siRNA sense strand
cauaguggcccuacaugau

SEQ ID NO: 541875 - RNA, 19 nt, Homo sapiens
  misc_RNA (1)...(19): siRNA sense strand
gcuuguauucgaagucuuu

SEQ ID NO: 541876 - RNA, 19 nt, Homo sapiens
  misc_RNA (1)...(19): siRNA sense strand
guacagaacuccacauaua

SEQ ID NO: 541877 - RNA, 19 nt, Homo sapiens
  misc_RNA (1)...(19): siRNA sense strand
gaagccaacuccuuugaaa

SEQ ID NO: 541878 - RNA, 19 nt, Homo sapiens
  misc_RNA (1)...(19): siRNA sense strand
ggacaaaccuucagaucgu

SEQ ID NO: 541879 - RNA, 19 nt, Homo sapiens
  misc_RNA (1)...(19): siRNA sense strand
caacauagcucaggaucug

SEQ ID NO: 541880 - RNA, 19 nt, Homo sapiens
  misc_RNA (1)...(19): siRNA sense strand
gaugggagccuagcuaaua

SEQ ID NO: 541881 - RNA, 19 nt, Homo sapiens
  misc_RNA (1)...(19): siRNA sense strand
ggcaacagcugaacagaug

SEQ ID NO: 541882 - RNA, 19 nt, Homo sapiens
  misc_RNA (1)...(19): siRNA sense strand
gaacuggcaucaaauacuc

SEQ ID NO: 541883 - RNA, 19 nt, Homo sapiens
  misc_RNA (1)...(19): siRNA sense strand
cagcagaugucacaggauu

SEQ ID NO: 541884 - RNA, 19 nt, Homo sapiens
  misc_RNA (1)...(19): siRNA sense strand
acacuggucuucccuacua

SEQ ID NO: 541885 - RNA, 19 nt, Homo sapiens
  misc_RNA (1)...(19): siRNA sense strand
ggaagggaauucagacaca

SEQ ID NO: 541886 - RNA, 19 nt, Homo sapiens
  misc_RNA (1)...(19): siRNA sense strand
uaagugagccuuugaauac

SEQ ID NO: 541887 - RNA, 19 nt, Homo sapiens
  misc_RNA (1)...(19): siRNA sense strand
uaauggagaugugaacaaa

SEQ ID NO: 541888 - RNA, 19 nt, Homo sapiens
  misc_RNA (1)...(19): siRNA sense strand
ccacuggucuaccugauau

SEQ ID NO: 541889 - RNA, 19 nt, Homo sapiens
  misc_RNA (1)...(19): siRNA sense strand
gcacaaccaguaccucgua

SEQ ID NO: 541890 - RNA, 19 nt, Homo sapiens
  misc_RNA (1)...(19): siRNA sense strand
gaucaucgcaggcaccaaa

SEQ ID NO: 541891 - RNA, 19 nt, Homo sapiens
  misc_RNA (1)...(19): siRNA sense strand
guugaaagcuccgaguuug

SEQ ID NO: 541892 - RNA, 19 nt, Homo sapiens
  misc_RNA (1)...(19): siRNA sense strand
ggaagaauucuguggaaga

SEQ ID NO: 541893 - RNA, 19 nt, Homo sapiens
  misc_RNA (1)...(19): siRNA sense strand
gaagucagcagacacuaga

SEQ ID NO: 541894 - RNA, 19 nt, Homo sapiens
  misc_RNA (1)...(19): siRNA sense strand
gauuaaaugugcaguuugg

SEQ ID NO: 541895 - RNA, 19 nt, Homo sapiens
  misc_RNA (1)...(19): siRNA sense strand
ccaaguacacagcagaaua

SEQ ID NO: 541896 - RNA, 19 nt, Homo sapiens
  misc_RNA (1)...(19): siRNA sense strand
gaagaauucuguggaagag

SEQ ID NO: 541897 - RNA, 19 nt, Homo sapiens
  misc_RNA (1)...(19): siRNA sense strand
gcacgaccauugaaaauau

SEQ ID NO: 541898 - RNA, 19 nt, Homo sapiens
  misc_RNA (1)...(19): siRNA sense strand
gcagaugucacaggauuaa

SEQ ID NO: 541899 - RNA, 19 nt, Homo sapiens
  misc_RNA (1)...(19): siRNA sense strand
gaagggaauucagacacaa

SEQ ID NO: 541900 - RNA, 19 nt, Homo sapiens
  misc_RNA (1)...(19): siRNA sense strand
acaauaagacacagacuuu

SEQ ID NO: 541901 - RNA, 19 nt, Homo sapiens
  misc_RNA (1)...(19): siRNA sense strand
cugacaagcucaucacuga

SEQ ID NO: 541902 - RNA, 19 nt, Homo sapiens
  misc_RNA (1)...(19): siRNA sense strand
gaauuuagaggugaagaaa

SEQ ID NO: 541903 - RNA, 19 nt, Homo sapiens
  misc_RNA (1)...(19): siRNA sense strand
aaacaagucugcagguucu

SEQ ID NO: 541904 - RNA, 19 nt, Homo sapiens
  misc_RNA (1)...(19): siRNA sense strand
cagcagagccaaucacaga

SEQ ID NO: 541905 - RNA, 19 nt, Homo sapiens
  misc_RNA (1)...(19): siRNA sense strand
aaaucaggaugaaugcaua

SEQ ID NO: 541906 - RNA, 19 nt, Homo sapiens
  misc_RNA (1)...(19): siRNA sense strand
gagccuagcuaauaaucca

SEQ ID NO: 541907 - RNA, 19 nt, Homo sapiens
  misc_RNA (1)...(19): siRNA sense strand
gcaaugucuuccucuuaug

SEQ ID NO: 541908 - RNA, 19 nt, Homo sapiens
  misc_RNA (1)...(19): siRNA sense strand
gaauuugggucagaaccuu

SEQ ID NO: 541909 - RNA, 19 nt, Homo sapiens
  misc_RNA (1)...(19): siRNA sense strand
caaauucgcaacacaacaa

SEQ ID NO: 541910 - RNA, 19 nt, Homo sapiens
  misc_RNA (1)...(19): siRNA sense strand
caaagagaauagagagaag

SEQ ID NO: 541911 - RNA, 19 nt, Homo sapiens
  misc_RNA (1)...(19): siRNA sense strand
ccaaacaagucugcagguu

SEQ ID NO: 541912 - RNA, 19 nt, Homo sapiens
  misc_RNA (1)...(19): siRNA sense strand
ccaguggacuacuauggaa

SEQ ID NO: 541913 - RNA, 19 nt, Homo sapiens
  misc_RNA (1)...(19): siRNA sense strand
ccaaagcccugugaguuca

SEQ ID NO: 541914 - RNA, 19 nt, Homo sapiens
  misc_RNA (1)...(19): siRNA sense strand
gugaacaaagcuaucaaua

SEQ ID NO: 541915 - RNA, 19 nt, Homo sapiens
  misc_RNA (1)...(19): siRNA sense strand
uauacaacuuccgucauua

SEQ ID NO: 541916 - RNA, 19 nt, Homo sapiens
  misc_RNA (1)...(19): siRNA sense strand
gaaaggaagaggcggcaau

SEQ ID NO: 541917 - RNA, 19 nt, Homo sapiens
  misc_RNA (1)...(19): siRNA sense strand
gagaugggagccuagcuaa

SEQ ID NO: 541918 - RNA, 19 nt, Homo sapiens
  misc_RNA (1)...(19): siRNA sense strand
auauacaacuuccgucauu

SEQ ID NO: 541919 - RNA, 19 nt, Homo sapiens
  misc_RNA (1)...(19): siRNA sense strand
acaagucacccuacaacua

SEQ ID NO: 541920 - RNA, 19 nt, Homo sapiens
  misc_RNA (1)...(19): siRNA sense strand
caacagaagacuggacuga

SEQ ID NO: 541921 - RNA, 19 nt, Homo sapiens
  misc_RNA (1)...(19): siRNA sense strand
cuacaacuacuacuucuug

SEQ ID NO: 541922 - RNA, 19 nt, Homo sapiens
  misc_RNA (1)...(19): siRNA sense strand
ggaauucagacacaacuuc

SEQ ID NO: 541923 - RNA, 19 nt, Homo sapiens
  misc_RNA (1)...(19): siRNA sense strand
uagcaaugucuuccucuua

SEQ ID NO: 541924 - RNA, 19 nt, Homo sapiens
  misc_RNA (1)...(19): siRNA sense strand
aaccuucucucucugaauu

SEQ ID NO: 541925 - RNA, 19 nt, Homo sapiens
  misc_RNA (1)...(19): siRNA sense strand
gcaaucaaguggacaaacc

SEQ ID NO: 541926 - RNA, 19 nt, Homo sapiens
  misc_RNA (1)...(19): siRNA sense strand
cugguucugucuacaauaa

SEQ ID NO: 541927 - RNA, 19 nt, Homo sapiens
  misc_RNA (1)...(19): siRNA sense strand
uuaagugagccuuugaaua

SEQ ID NO: 541928 - RNA, 19 nt, Homo sapiens
  misc_RNA (1)...(19): siRNA sense strand
aaacacaucaaacuugcua

SEQ ID NO: 541929 - RNA, 19 nt, Homo sapiens
  misc_RNA (1)...(19): siRNA sense strand
caaguacacagcagaauag

SEQ ID NO: 541930 - RNA, 19 nt, Homo sapiens
  misc_RNA (1)...(19): siRNA sense strand
gcauaguggcccuacauga

SEQ ID NO: 541931 - RNA, 19 nt, Homo sapiens
  misc_RNA (1)...(19): siRNA sense strand
gaguaucagugucuucaag

SEQ ID NO: 541932 - RNA, 19 nt, Homo sapiens
  misc_RNA (1)...(19): siRNA sense strand
caacgcaaccacagaaaca

SEQ ID NO: 541933 - RNA, 19 nt, Homo sapiens
  misc_RNA (1)...(19): siRNA sense strand
acagaagacuggacugaag

SEQ ID NO: 541934 - RNA, 19 nt, Homo sapiens
  misc_RNA (1)...(19): siRNA sense strand
caucaaauacucacaacau

SEQ ID NO: 541935 - RNA, 19 nt, Homo sapiens
  misc_RNA (1)...(19): siRNA sense strand
ugacuucagugagcaguga

SEQ ID NO: 541936 - RNA, 19 nt, Homo sapiens
  misc_RNA (1)...(19): siRNA sense strand
aggauuaaaugugcaguuu

SEQ ID NO: 541937 - RNA, 19 nt, Homo sapiens
  misc_RNA (1)...(19): siRNA sense strand
ggaaacaacaaccggaaag

SEQ ID NO: 541938 - RNA, 19 nt, Homo sapiens
  misc_RNA (1)...(19): siRNA sense strand
gaucagcuccaagcaguga

SEQ ID NO: 541939 - RNA, 19 nt, Homo sapiens
  misc_RNA (1)...(19): siRNA sense strand
caacaucccaguccucagu

SEQ ID NO: 541940 - RNA, 19 nt, Homo sapiens
  misc_RNA (1)...(19): siRNA sense strand
cucaggaucugucaaacaa

SEQ ID NO: 541941 - RNA, 19 nt, Homo sapiens
  misc_RNA (1)...(19): siRNA sense strand
ccaggaaccaucaugaaug

SEQ ID NO: 541942 - RNA, 19 nt, Homo sapiens
  misc_RNA (1)...(19): siRNA sense strand
guagcaaugucuuccucuu

SEQ ID NO: 541943 - RNA, 19 nt, Homo sapiens
  misc_RNA (1)...(19): siRNA sense strand
gccuuugaauacaucuuua

SEQ ID NO: 541944 - RNA, 19 nt, Homo sapiens
  misc_RNA (1)...(19): siRNA sense strand
ggagaugugaacaaagcua

SEQ ID NO: 541945 - RNA, 19 nt, Homo sapiens
  misc_RNA (1)...(19): siRNA sense strand
cgaccuccgucucaaguuc

SEQ ID NO: 541946 - RNA, 19 nt, Homo sapiens
  misc_RNA (1)...(19): siRNA sense strand
ccaacuccuuugaaacuuc

SEQ ID NO: 541947 - RNA, 19 nt, Homo sapiens
  misc_RNA (1)...(19): siRNA sense strand
aaucguggcagagaauuua

SEQ ID NO: 541948 - RNA, 19 nt, Homo sapiens
  misc_RNA (1)...(19): siRNA sense strand
gggagacuguaggguguaa

SEQ ID NO: 541949 - RNA, 19 nt, Homo sapiens
  misc_RNA (1)...(19): siRNA sense strand
gaauucagacacaacuuca

SEQ ID NO: 541950 - RNA, 19 nt, Homo sapiens
  misc_RNA (1)...(19): siRNA sense strand
gguucugucuacaauaaga

SEQ ID NO: 541951 - RNA, 19 nt, Homo sapiens
  misc_RNA (1)...(19): siRNA sense strand
gaacuccacauauacaacu

SEQ ID NO: 541952 - RNA, 19 nt, Homo sapiens
  misc_RNA (1)...(19): siRNA sense strand
ucacaaauucgcaacacaa

SEQ ID NO: 541953 - RNA, 19 nt, Homo sapiens
  misc_RNA (1)...(19): siRNA sense strand
gaagaaaagcgagaaagaa

SEQ ID NO: 541954 - RNA, 19 nt, Homo sapiens
  misc_RNA (1)...(19): siRNA sense strand
acaaagagaauagagagaa

SEQ ID NO: 541955 - RNA, 19 nt, Homo sapiens
  misc_RNA (1)...(19): siRNA sense strand
ccaccuggcuauagcuaca

SEQ ID NO: 541956 - RNA, 19 nt, Homo sapiens
  misc_RNA (1)...(19): siRNA sense strand
cagcagcccuucgugaauc

SEQ ID NO: 541957 - RNA, 19 nt, Homo sapiens
  misc_RNA (1)...(19): siRNA sense strand
gcagcgaccuccgucucaa

SEQ ID NO: 541958 - RNA, 19 nt, Homo sapiens
  misc_RNA (1)...(19): siRNA sense strand
caaugucuuccucuuauga

SEQ ID NO: 541959 - RNA, 19 nt, Homo sapiens
  misc_RNA (1)...(19): siRNA sense strand
gaugucacaggauuaaaug

SEQ ID NO: 541960 - RNA, 19 nt, Homo sapiens
  misc_RNA (1)...(19): siRNA sense strand
caagucacccuacaacuac

SEQ ID NO: 541961 - RNA, 19 nt, Homo sapiens
  misc_RNA (1)...(19): siRNA sense strand
gaagaguggacaacagaag

SEQ ID NO: 541962 - RNA, 19 nt, Homo sapiens
  misc_RNA (1)...(19): siRNA sense strand
guaauggagaugugaacaa

SEQ ID NO: 541963 - RNA, 19 nt, Homo sapiens
  misc_RNA (1)...(19): siRNA sense strand
gagaauagagagaagaaaa

SEQ ID NO: 541964 - RNA, 19 nt, Homo sapiens
  misc_RNA (1)...(19): siRNA sense strand
cagggacgccuccaccuuu

SEQ ID NO: 541965 - RNA, 19 nt, Homo sapiens
  misc_RNA (1)...(19): siRNA sense strand
caaaggaguaucagugucu

SEQ ID NO: 541966 - RNA, 19 nt, Homo sapiens
  misc_RNA (1)...(19): siRNA sense strand
ggccagcacggcuacagua

SEQ ID NO: 541967 - RNA, 19 nt, Homo sapiens
  misc_RNA (1)...(19): siRNA sense strand
gcccagugccuuccaguau

SEQ ID NO: 541968 - RNA, 19 nt, Homo sapiens
  misc_RNA (1)...(19): siRNA sense strand
ucucucagcuuagcaguuc

SEQ ID NO: 541969 - RNA, 19 nt, Homo sapiens
  misc_RNA (1)...(19): siRNA sense strand
caguacagaacuccacaua

SEQ ID NO: 541970 - RNA, 19 nt, Homo sapiens
  misc_RNA (1)...(19): siRNA sense strand
cagagaauuuagaggugaa

SEQ ID NO: 541971 - RNA, 19 nt, Homo sapiens
  misc_RNA (1)...(19): siRNA sense strand
caaaggggcuuggaagaau

SEQ ID NO: 541972 - RNA, 19 nt, Homo sapiens
  misc_RNA (1)...(19): siRNA sense strand
acacuagacacuccaaaga

SEQ ID NO: 541973 - RNA, 19 nt, Homo sapiens
  misc_RNA (1)...(19): siRNA sense strand
agcaaugucuuccucuuau

SEQ ID NO: 541974 - RNA, 19 nt, Homo sapiens
  misc_RNA (1)...(19): siRNA sense strand
cauaguggcccuacaugau

SEQ ID NO: 541975 - RNA, 19 nt, Homo sapiens
  misc_RNA (1)...(19): siRNA sense strand
gcuuguauucgaagucuuu

SEQ ID NO: 541976 - RNA, 19 nt, Homo sapiens
  misc_RNA (1)...(19): siRNA sense strand
ggacaaaccuucagaucgu

SEQ ID NO: 541977 - RNA, 19 nt, Homo sapiens
  misc_RNA (1)...(19): siRNA sense strand
caacauagcucaggaucug

SEQ ID NO: 541978 - RNA, 19 nt, Homo sapiens
  misc_RNA (1)...(19): siRNA sense strand
ggcaacagcugaacagaug

SEQ ID NO: 541979 - RNA, 19 nt, Homo sapiens
  misc_RNA (1)...(19): siRNA sense strand
gaacuggcaucaaauacuc

SEQ ID NO: 541980 - RNA, 19 nt, Homo sapiens
  misc_RNA (1)...(19): siRNA sense strand
ggaagggaauucagacaca

SEQ ID NO: 541981 - RNA, 19 nt, Homo sapiens
  misc_RNA (1)...(19): siRNA sense strand
uaauggagaugugaacaaa

SEQ ID NO: 541982 - RNA, 19 nt, Homo sapiens
  misc_RNA (1)...(19): siRNA sense strand
ggaagaauucuguggaaga

SEQ ID NO: 541983 - RNA, 19 nt, Homo sapiens
  misc_RNA (1)...(19): siRNA sense strand
gaagaauucuguggaagag

SEQ ID NO: 541984 - RNA, 19 nt, Homo sapiens
  misc_RNA (1)...(19): siRNA sense strand
gaagggaauucagacacaa

SEQ ID NO: 541985 - RNA, 19 nt, Homo sapiens
  misc_RNA (1)...(19): siRNA sense strand
gaauuuagaggugaagaaa

SEQ ID NO: 541986 - RNA, 19 nt, Homo sapiens
  misc_RNA (1)...(19): siRNA sense strand
aaaucaggaugaaugcaua

SEQ ID NO: 541987 - RNA, 19 nt, Homo sapiens
  misc_RNA (1)...(19): siRNA sense strand
caaagagaauagagagaag

SEQ ID NO: 541988 - RNA, 19 nt, Homo sapiens
  misc_RNA (1)...(19): siRNA sense strand
gugaacaaagcuaucaaua

SEQ ID NO: 541989 - RNA, 19 nt, Homo sapiens
  misc_RNA (1)...(19): siRNA sense strand
gaaaggaagaggcggcaau

SEQ ID NO: 541990 - RNA, 19 nt, Homo sapiens
  misc_RNA (1)...(19): siRNA sense strand
caacagaagacuggacuga

SEQ ID NO: 541991 - RNA, 19 nt, Homo sapiens
  misc_RNA (1)...(19): siRNA sense strand
ggaauucagacacaacuuc

SEQ ID NO: 541992 - RNA, 19 nt, Homo sapiens
  misc_RNA (1)...(19): siRNA sense strand
gcaaucaaguggacaaacc

SEQ ID NO: 541993 - RNA, 19 nt, Homo sapiens
  misc_RNA (1)...(19): siRNA sense strand
gcauaguggcccuacauga

SEQ ID NO: 541994 - RNA, 19 nt, Homo sapiens
  misc_RNA (1)...(19): siRNA sense strand
acagaagacuggacugaag

SEQ ID NO: 541995 - RNA, 19 nt, Homo sapiens
  misc_RNA (1)...(19): siRNA sense strand
caacgcaaccacagaaaca

SEQ ID NO: 541996 - RNA, 19 nt, Homo sapiens
  misc_RNA (1)...(19): siRNA sense strand
ugacuucagugagcaguga

SEQ ID NO: 541997 - RNA, 19 nt, Homo sapiens
  misc_RNA (1)...(19): siRNA sense strand
caucaaauacucacaacau

SEQ ID NO: 541998 - RNA, 19 nt, Homo sapiens
  misc_RNA (1)...(19): siRNA sense strand
ggaaacaacaaccggaaag

SEQ ID NO: 541999 - RNA, 19 nt, Homo sapiens
  misc_RNA (1)...(19): siRNA sense strand
cucaggaucugucaaacaa

SEQ ID NO: 542000 - RNA, 19 nt, Homo sapiens
  misc_RNA (1)...(19): siRNA sense strand
ggagaugugaacaaagcua

SEQ ID NO: 542001 - RNA, 19 nt, Homo sapiens
  misc_RNA (1)...(19): siRNA sense strand
aaucguggcagagaauuua

SEQ ID NO: 542002 - RNA, 19 nt, Homo sapiens
  misc_RNA (1)...(19): siRNA sense strand
gggagacuguaggguguaa

SEQ ID NO: 542003 - RNA, 19 nt, Homo sapiens
  misc_RNA (1)...(19): siRNA sense strand
gaauucagacacaacuuca

SEQ ID NO: 542004 - RNA, 19 nt, Homo sapiens
  misc_RNA (1)...(19): siRNA sense strand
gaagaaaagcgagaaagaa

SEQ ID NO: 542005 - RNA, 19 nt, Homo sapiens
  misc_RNA (1)...(19): siRNA sense strand
guaauggagaugugaacaa

SEQ ID NO: 542006 - RNA, 19 nt, Homo sapiens
  misc_RNA (1)...(19): siRNA sense strand
gaagaguggacaacagaag

SEQ ID NO: 542007 - RNA, 19 nt, Homo sapiens
  misc_RNA (1)...(19): siRNA sense strand
acaaagagaauagagagaa

SEQ ID NO: 542008 - RNA, 19 nt, Homo sapiens
  misc_RNA (1)...(19): siRNA sense strand
gagaauagagagaagaaaa

SEQ ID NO: 542009 - RNA, 19 nt, Homo sapiens
  misc_RNA (1)...(19): siRNA sense strand
cagagaauuuagaggugaa

SEQ ID NO: 542010 - RNA, 19 nt, Homo sapiens
  misc_RNA (1)...(19): siRNA sense strand
cauaguggcccuacaugau

SEQ ID NO: 542011 - RNA, 19 nt, Homo sapiens
  misc_RNA (1)...(19): siRNA sense strand
caaaggggcuuggaagaau

SEQ ID NO: 542012 - RNA, 19 nt, Homo sapiens
  misc_RNA (1)...(19): siRNA sense strand
caacaaccggaaaggaaga

SEQ ID NO: 542013 - RNA, 19 nt, Homo sapiens
  misc_RNA (1)...(19): siRNA sense strand
gacuguaggguguaagaaa

SEQ ID NO: 542014 - RNA, 19 nt, Homo sapiens
  misc_RNA (1)...(19): siRNA sense strand
ggaagaguggacaacagaa

SEQ ID NO: 542015 - RNA, 19 nt, Homo sapiens
  misc_RNA (1)...(19): siRNA sense strand
ucaaauacucacaacauag

SEQ ID NO: 542016 - RNA, 19 nt, Homo sapiens
  misc_RNA (1)...(19): siRNA sense strand
gagaugugaacaaagcuau

SEQ ID NO: 542017 - RNA, 19 nt, Homo sapiens
  misc_RNA (1)...(19): siRNA sense strand
gaugugaacaaagcuauca

SEQ ID NO: 542018 - RNA, 19 nt, Homo sapiens
  misc_RNA (1)...(19): siRNA sense strand
gcgucucgcucaagugauc

SEQ ID NO: 542019 - RNA, 19 nt, Homo sapiens
  misc_RNA (1)...(19): siRNA sense strand
gagacuguaggguguaaga

SEQ ID NO: 542020 - RNA, 19 nt, Homo sapiens
  misc_RNA (1)...(19): siRNA sense strand
gggcuuggaagaauucugu

SEQ ID NO: 542021 - RNA, 19 nt, Homo sapiens
  misc_RNA (1)...(19): siRNA sense strand
gcucaggaucugucaaaca

SEQ ID NO: 542022 - RNA, 19 nt, Homo sapiens
  misc_RNA (1)...(19): siRNA sense strand
aaacaacaaccggaaagga

SEQ ID NO: 542023 - RNA, 19 nt, Homo sapiens
  misc_RNA (1)...(19): siRNA sense strand
uagcucaggaucugucaaa

SEQ ID NO: 542024 - RNA, 19 nt, Homo sapiens
  misc_RNA (1)...(19): siRNA sense strand
uaguggcccuacaugauug

SEQ ID NO: 542025 - RNA, 19 nt, Homo sapiens
  misc_RNA (1)...(19): siRNA sense strand
cagaagacuggacugaaga

SEQ ID NO: 542026 - RNA, 19 nt, Homo sapiens
  misc_RNA (1)...(19): siRNA sense strand
caggaucugucaaacaaaa

SEQ ID NO: 542027 - RNA, 19 nt, Homo sapiens
  misc_RNA (1)...(19): siRNA sense strand
caaauacucacaacauagc

SEQ ID NO: 542028 - RNA, 19 nt, Homo sapiens
  misc_RNA (1)...(19): siRNA sense strand
ucagugagcagugaccauu

SEQ ID NO: 542029 - RNA, 19 nt, Homo sapiens
  misc_RNA (1)...(19): siRNA sense strand
cggcaaucguggcagagaa

SEQ ID NO: 542030 - RNA, 19 nt, Homo sapiens
  misc_RNA (1)...(19): siRNA sense strand
acagaugcgucucgcucaa

SEQ ID NO: 542031 - RNA, 19 nt, Homo sapiens
  misc_RNA (1)...(19): siRNA sense strand
uuggaagaauucuguggaa

SEQ ID NO: 542032 - RNA, 19 nt, Homo sapiens
  misc_RNA (1)...(19): siRNA sense strand
aacaacaaccggaaaggaa

SEQ ID NO: 542033 - RNA, 19 nt, Homo sapiens
  misc_RNA (1)...(19): siRNA sense strand
gaaacaacaaccggaaagg

SEQ ID NO: 542034 - RNA, 19 nt, Homo sapiens
  misc_RNA (1)...(19): siRNA sense strand
aaucaacgcaaccacagaa

SEQ ID NO: 542035 - RNA, 19 nt, Homo sapiens
  misc_RNA (1)...(19): siRNA sense strand
gcaaucguggcagagaauu

SEQ ID NO: 542036 - RNA, 19 nt, Homo sapiens
  misc_RNA (1)...(19): siRNA sense strand
caaucguggcagagaauuu

SEQ ID NO: 542037 - RNA, 19 nt, Homo sapiens
  misc_RNA (1)...(19): siRNA sense strand
caacuucaugggagacugu

SEQ ID NO: 542038 - RNA, 19 nt, Homo sapiens
  misc_RNA (1)...(19): siRNA sense strand
auaguggcccuacaugauu

SEQ ID NO: 542039 - RNA, 19 nt, Homo sapiens
  misc_RNA (1)...(19): siRNA sense strand
gcaaccacagaaacaagug

SEQ ID NO: 542040 - RNA, 19 nt, Homo sapiens
  misc_RNA (1)...(19): siRNA sense strand
ucaaguggacaaaccuuca

SEQ ID NO: 542041 - RNA, 19 nt, Homo sapiens
  misc_RNA (1)...(19): siRNA sense strand
uggaagaguggacaacaga

SEQ ID NO: 542042 - RNA, 19 nt, Homo sapiens
  misc_RNA (1)...(19): siRNA sense strand
aagagaauagagagaagaa

SEQ ID NO: 542043 - RNA, 19 nt, Homo sapiens
  misc_RNA (1)...(19): siRNA sense strand
guggaagaguggacaacag

SEQ ID NO: 542044 - RNA, 19 nt, Homo sapiens
  misc_RNA (1)...(19): siRNA sense strand
agugagcagugaccauugu

SEQ ID NO: 542045 - RNA, 19 nt, Homo sapiens
  misc_RNA (1)...(19): siRNA sense strand
aaagagaauagagagaaga

SEQ ID NO: 542046 - RNA, 19 nt, Homo sapiens
  misc_RNA (1)...(19): siRNA sense strand
gaaaagcgagaaagaaucg

SEQ ID NO: 542047 - RNA, 19 nt, Homo sapiens
  misc_RNA (1)...(19): siRNA sense strand
ugaacaagcucuccgacua

SEQ ID NO: 542048 - RNA, 19 nt, Homo sapiens
  misc_RNA (1)...(19): siRNA sense strand
ggagcaggauggugacuuu

SEQ ID NO: 542049 - RNA, 19 nt, Homo sapiens
  misc_RNA (1)...(19): siRNA sense strand
cgugucagcuguucauuaa

SEQ ID NO: 542050 - RNA, 19 nt, Homo sapiens
  misc_RNA (1)...(19): siRNA sense strand
uuaaccacauccucaaaua

SEQ ID NO: 542051 - RNA, 19 nt, Homo sapiens
  misc_RNA (1)...(19): siRNA sense strand
caagaccuguucccacuga

SEQ ID NO: 542052 - RNA, 19 nt, Homo sapiens
  misc_RNA (1)...(19): siRNA sense strand
ggagagggaccaccuaugu

SEQ ID NO: 542053 - RNA, 19 nt, Homo sapiens
  misc_RNA (1)...(19): siRNA sense strand
ugaaggacaucgcccaguu

SEQ ID NO: 542054 - RNA, 19 nt, Homo sapiens
  misc_RNA (1)...(19): siRNA sense strand
gaaggacaucgcccaguuu

SEQ ID NO: 542055 - RNA, 19 nt, Homo sapiens
  misc_RNA (1)...(19): siRNA sense strand
ggucuucccuggagaacga

SEQ ID NO: 542056 - RNA, 19 nt, Homo sapiens
  misc_RNA (1)...(19): siRNA sense strand
gaggagaacaagagucuga

SEQ ID NO: 542057 - RNA, 19 nt, Homo sapiens
  misc_RNA (1)...(19): siRNA sense strand
gaaccgagccgaggauuac

SEQ ID NO: 542058 - RNA, 19 nt, Homo sapiens
  misc_RNA (1)...(19): siRNA sense strand
ucaaccagaucucgggaaa

SEQ ID NO: 542059 - RNA, 19 nt, Homo sapiens
  misc_RNA (1)...(19): siRNA sense strand
guaccugucuggcuucuac

SEQ ID NO: 542060 - RNA, 19 nt, Homo sapiens
  misc_RNA (1)...(19): siRNA sense strand
gcaccagcaucaaccagau

SEQ ID NO: 542061 - RNA, 19 nt, Homo sapiens
  misc_RNA (1)...(19): siRNA sense strand
cagcuggaauucaaacuca

SEQ ID NO: 542062 - RNA, 19 nt, Homo sapiens
  misc_RNA (1)...(19): siRNA sense strand
gcaaagccacgcucaccuu

SEQ ID NO: 542063 - RNA, 19 nt, Homo sapiens
  misc_RNA (1)...(19): siRNA sense strand
gaaggucaccaucgagugu

SEQ ID NO: 542064 - RNA, 19 nt, Homo sapiens
  misc_RNA (1)...(19): siRNA sense strand
gaacaagcucuccgacuac

SEQ ID NO: 542065 - RNA, 19 nt, Homo sapiens
  misc_RNA (1)...(19): siRNA sense strand
caacgggucagacaaggaa

SEQ ID NO: 542066 - RNA, 19 nt, Homo sapiens
  misc_RNA (1)...(19): siRNA sense strand
aaccagaucucgggaaaga

SEQ ID NO: 542067 - RNA, 19 nt, Homo sapiens
  misc_RNA (1)...(19): siRNA sense strand
gaaucaagaagccguacaa

SEQ ID NO: 542068 - RNA, 19 nt, Homo sapiens
  misc_RNA (1)...(19): siRNA sense strand
acaagaagcccaagggaau

SEQ ID NO: 542069 - RNA, 19 nt, Homo sapiens
  misc_RNA (1)...(19): siRNA sense strand
ggacagggacguguuuauc

SEQ ID NO: 542070 - RNA, 19 nt, Homo sapiens
  misc_RNA (1)...(19): siRNA sense strand
ggacaucgcccaguuugag

SEQ ID NO: 542071 - RNA, 19 nt, Homo sapiens
  misc_RNA (1)...(19): siRNA sense strand
gcaggauggugacuuuguc

SEQ ID NO: 542072 - RNA, 19 nt, Homo sapiens
  misc_RNA (1)...(19): siRNA sense strand
gagaacaagagucugaugu

SEQ ID NO: 542073 - RNA, 19 nt, Homo sapiens
  misc_RNA (1)...(19): siRNA sense strand
acagggacguguuuaucaa

SEQ ID NO: 542074 - RNA, 19 nt, Homo sapiens
  misc_RNA (1)...(19): siRNA sense strand
ggucagacaaggaaugugu

SEQ ID NO: 542075 - RNA, 19 nt, Homo sapiens
  misc_RNA (1)...(19): siRNA sense strand
gcgugucagcuguucauua

SEQ ID NO: 542076 - RNA, 19 nt, Homo sapiens
  misc_RNA (1)...(19): siRNA sense strand
gacagggacguguuuauca

SEQ ID NO: 542077 - RNA, 19 nt, Homo sapiens
  misc_RNA (1)...(19): siRNA sense strand
gaagcucacccggaacuug

SEQ ID NO: 542078 - RNA, 19 nt, Homo sapiens
  misc_RNA (1)...(19): siRNA sense strand
ucaaggcgcagaaggagaa

SEQ ID NO: 542079 - RNA, 19 nt, Homo sapiens
  misc_RNA (1)...(19): siRNA sense strand
gccgaggauuacacccuua

SEQ ID NO: 542080 - RNA, 19 nt, Homo sapiens
  misc_RNA (1)...(19): siRNA sense strand
aaggacggcuucugcauca

SEQ ID NO: 542081 - RNA, 19 nt, Homo sapiens
  misc_RNA (1)...(19): siRNA sense strand
gcgcugcucuagccuacug

SEQ ID NO: 542082 - RNA, 19 nt, Homo sapiens
  misc_RNA (1)...(19): siRNA sense strand
gaucacgucgggagaggaa

SEQ ID NO: 542083 - RNA, 19 nt, Homo sapiens
  misc_RNA (1)...(19): siRNA sense strand
agagaacccugaggaguca

SEQ ID NO: 542084 - RNA, 19 nt, Homo sapiens
  misc_RNA (1)...(19): siRNA sense strand
gcccuacgcccacugcaaa

SEQ ID NO: 542085 - RNA, 19 nt, Homo sapiens
  misc_RNA (1)...(19): siRNA sense strand
cagccgcacauucuacaua

SEQ ID NO: 542086 - RNA, 19 nt, Homo sapiens
  misc_RNA (1)...(19): siRNA sense strand
ccgccagggucaccaagaa

SEQ ID NO: 542087 - RNA, 19 nt, Homo sapiens
  misc_RNA (1)...(19): siRNA sense strand
ggagaacaagagucugaug

SEQ ID NO: 542088 - RNA, 19 nt, Homo sapiens
  misc_RNA (1)...(19): siRNA sense strand
gugggaaggucaccaucga

SEQ ID NO: 542089 - RNA, 19 nt, Homo sapiens
  misc_RNA (1)...(19): siRNA sense strand
gcucuagccuacugagacu

SEQ ID NO: 542090 - RNA, 19 nt, Homo sapiens
  misc_RNA (1)...(19): siRNA sense strand
gggacguguuuaucaagga

SEQ ID NO: 542091 - RNA, 19 nt, Homo sapiens
  misc_RNA (1)...(19): siRNA sense strand
ugaaccgagccgaggauua

SEQ ID NO: 542092 - RNA, 19 nt, Homo sapiens
  misc_RNA (1)...(19): siRNA sense strand
gagagggaccaccuaugug

SEQ ID NO: 542093 - RNA, 19 nt, Homo sapiens
  misc_RNA (1)...(19): siRNA sense strand
gcggagacaaugagcucua

SEQ ID NO: 542094 - RNA, 19 nt, Homo sapiens
  misc_RNA (1)...(19): siRNA sense strand
uaaccacauccucaaauag

SEQ ID NO: 542095 - RNA, 19 nt, Homo sapiens
  misc_RNA (1)...(19): siRNA sense strand
ggacggcuucugcaucagu

SEQ ID NO: 542096 - RNA, 19 nt, Homo sapiens
  misc_RNA (1)...(19): siRNA sense strand
gcaacgggucagacaagga

SEQ ID NO: 542097 - RNA, 19 nt, Homo sapiens
  misc_RNA (1)...(19): siRNA sense strand
caaacucaagcccuucuuc

SEQ ID NO: 542098 - RNA, 19 nt, Homo sapiens
  misc_RNA (1)...(19): siRNA sense strand
ucacagccaaguccagguu

SEQ ID NO: 542099 - RNA, 19 nt, Homo sapiens
  misc_RNA (1)...(19): siRNA sense strand
gggccacacaggagaaguu

SEQ ID NO: 542100 - RNA, 19 nt, Homo sapiens
  misc_RNA (1)...(19): siRNA sense strand
cagacaagucggagagaga

SEQ ID NO: 542101 - RNA, 19 nt, Homo sapiens
  misc_RNA (1)...(19): siRNA sense strand
ccuggaagccgcagcuguu

SEQ ID NO: 542102 - RNA, 19 nt, Homo sapiens
  misc_RNA (1)...(19): siRNA sense strand
ccacacaggagaaguuugc

SEQ ID NO: 542103 - RNA, 19 nt, Homo sapiens
  misc_RNA (1)...(19): siRNA sense strand
agaacuaccggcaggagaa

SEQ ID NO: 542104 - RNA, 19 nt, Homo sapiens
  misc_RNA (1)...(19): siRNA sense strand
aggcccagcuggaauucaa

SEQ ID NO: 542105 - RNA, 19 nt, Homo sapiens
  misc_RNA (1)...(19): siRNA sense strand
caagcucuccgacuacuac

SEQ ID NO: 542106 - RNA, 19 nt, Homo sapiens
  misc_RNA (1)...(19): siRNA sense strand
cagaggagaacaagagucu

SEQ ID NO: 542107 - RNA, 19 nt, Homo sapiens
  misc_RNA (1)...(19): siRNA sense strand
gcguguuccuggcguguca

SEQ ID NO: 542108 - RNA, 19 nt, Homo sapiens
  misc_RNA (1)...(19): siRNA sense strand
gcggagagggaccaccuau

SEQ ID NO: 542109 - RNA, 19 nt, Homo sapiens
  misc_RNA (1)...(19): siRNA sense strand
gggacagggacguguuuau

SEQ ID NO: 542110 - RNA, 19 nt, Homo sapiens
  misc_RNA (1)...(19): siRNA sense strand
caagaagcccaagggaauc

SEQ ID NO: 542111 - RNA, 19 nt, Homo sapiens
  misc_RNA (1)...(19): siRNA sense strand
gcuguucauuaaccacauc

SEQ ID NO: 542112 - RNA, 19 nt, Homo sapiens
  misc_RNA (1)...(19): siRNA sense strand
gaacuaccggcaggagaag

SEQ ID NO: 542113 - RNA, 19 nt, Homo sapiens
  misc_RNA (1)...(19): siRNA sense strand
gaugcauucucagacaagu

SEQ ID NO: 542114 - RNA, 19 nt, Homo sapiens
  misc_RNA (1)...(19): siRNA sense strand
agaacaagagucugaugug

SEQ ID NO: 542115 - RNA, 19 nt, Homo sapiens
  misc_RNA (1)...(19): siRNA sense strand
cccagcagcuaccugaucu

SEQ ID NO: 542116 - RNA, 19 nt, Homo sapiens
  misc_RNA (1)...(19): siRNA sense strand
cauuaaccacauccucaaa

SEQ ID NO: 542117 - RNA, 19 nt, Homo sapiens
  misc_RNA (1)...(19): siRNA sense strand
ggccacacaggagaaguuu

SEQ ID NO: 542118 - RNA, 19 nt, Homo sapiens
  misc_RNA (1)...(19): siRNA sense strand
cugucuggcuucuacaaga

SEQ ID NO: 542119 - RNA, 19 nt, Homo sapiens
  misc_RNA (1)...(19): siRNA sense strand
gcucuccgacuacuacuac

SEQ ID NO: 542120 - RNA, 19 nt, Homo sapiens
  misc_RNA (1)...(19): siRNA sense strand
gcuccuuccugaacaagcu

SEQ ID NO: 542121 - RNA, 19 nt, Homo sapiens
  misc_RNA (1)...(19): siRNA sense strand
ugucagaggagaacaagag

SEQ ID NO: 542122 - RNA, 19 nt, Homo sapiens
  misc_RNA (1)...(19): siRNA sense strand
ugaacaagcucuccgacua

SEQ ID NO: 542123 - RNA, 19 nt, Homo sapiens
  misc_RNA (1)...(19): siRNA sense strand
ggagcaggauggugacuuu

SEQ ID NO: 542124 - RNA, 19 nt, Homo sapiens
  misc_RNA (1)...(19): siRNA sense strand
cgugucagcuguucauuaa

SEQ ID NO: 542125 - RNA, 19 nt, Homo sapiens
  misc_RNA (1)...(19): siRNA sense strand
uuaaccacauccucaaaua

SEQ ID NO: 542126 - RNA, 19 nt, Homo sapiens
  misc_RNA (1)...(19): siRNA sense strand
caagaccuguucccacuga

SEQ ID NO: 542127 - RNA, 19 nt, Homo sapiens
  misc_RNA (1)...(19): siRNA sense strand
ggagagggaccaccuaugu

SEQ ID NO: 542128 - RNA, 19 nt, Homo sapiens
  misc_RNA (1)...(19): siRNA sense strand
ugaaggacaucgcccaguu

SEQ ID NO: 542129 - RNA, 19 nt, Homo sapiens
  misc_RNA (1)...(19): siRNA sense strand
gaaggacaucgcccaguuu

SEQ ID NO: 542130 - RNA, 19 nt, Homo sapiens
  misc_RNA (1)...(19): siRNA sense strand
ggucuucccuggagaacga

SEQ ID NO: 542131 - RNA, 19 nt, Homo sapiens
  misc_RNA (1)...(19): siRNA sense strand
gaggagaacaagagucuga

SEQ ID NO: 542132 - RNA, 19 nt, Homo sapiens
  misc_RNA (1)...(19): siRNA sense strand
gaaccgagccgaggauuac

SEQ ID NO: 542133 - RNA, 19 nt, Homo sapiens
  misc_RNA (1)...(19): siRNA sense strand
ucaaccagaucucgggaaa

SEQ ID NO: 542134 - RNA, 19 nt, Homo sapiens
  misc_RNA (1)...(19): siRNA sense strand
guaccugucuggcuucuac

SEQ ID NO: 542135 - RNA, 19 nt, Homo sapiens
  misc_RNA (1)...(19): siRNA sense strand
gcaccagcaucaaccagau

SEQ ID NO: 542136 - RNA, 19 nt, Homo sapiens
  misc_RNA (1)...(19): siRNA sense strand
cagcuggaauucaaacuca

SEQ ID NO: 542137 - RNA, 19 nt, Homo sapiens
  misc_RNA (1)...(19): siRNA sense strand
gcaaagccacgcucaccuu

SEQ ID NO: 542138 - RNA, 19 nt, Homo sapiens
  misc_RNA (1)...(19): siRNA sense strand
gaaggucaccaucgagugu

SEQ ID NO: 542139 - RNA, 19 nt, Homo sapiens
  misc_RNA (1)...(19): siRNA sense strand
gaacaagcucuccgacuac

SEQ ID NO: 542140 - RNA, 19 nt, Homo sapiens
  misc_RNA (1)...(19): siRNA sense strand
caacgggucagacaaggaa

SEQ ID NO: 542141 - RNA, 19 nt, Homo sapiens
  misc_RNA (1)...(19): siRNA sense strand
aaccagaucucgggaaaga

SEQ ID NO: 542142 - RNA, 19 nt, Homo sapiens
  misc_RNA (1)...(19): siRNA sense strand
gaaucaagaagccguacaa

SEQ ID NO: 542143 - RNA, 19 nt, Homo sapiens
  misc_RNA (1)...(19): siRNA sense strand
acaagaagcccaagggaau

SEQ ID NO: 542144 - RNA, 19 nt, Homo sapiens
  misc_RNA (1)...(19): siRNA sense strand
ggacagggacguguuuauc

SEQ ID NO: 542145 - RNA, 19 nt, Homo sapiens
  misc_RNA (1)...(19): siRNA sense strand
ggacaucgcccaguuugag

SEQ ID NO: 542146 - RNA, 19 nt, Homo sapiens
  misc_RNA (1)...(19): siRNA sense strand
gcaggauggugacuuuguc

SEQ ID NO: 542147 - RNA, 19 nt, Homo sapiens
  misc_RNA (1)...(19): siRNA sense strand
gagaacaagagucugaugu

SEQ ID NO: 542148 - RNA, 19 nt, Homo sapiens
  misc_RNA (1)...(19): siRNA sense strand
acagggacguguuuaucaa

SEQ ID NO: 542149 - RNA, 19 nt, Homo sapiens
  misc_RNA (1)...(19): siRNA sense strand
ggucagacaaggaaugugu

SEQ ID NO: 542150 - RNA, 19 nt, Homo sapiens
  misc_RNA (1)...(19): siRNA sense strand
gcgugucagcuguucauua

SEQ ID NO: 542151 - RNA, 19 nt, Homo sapiens
  misc_RNA (1)...(19): siRNA sense strand
gacagggacguguuuauca

SEQ ID NO: 542152 - RNA, 19 nt, Homo sapiens
  misc_RNA (1)...(19): siRNA sense strand
gaagcucacccggaacuug

SEQ ID NO: 542153 - RNA, 19 nt, Homo sapiens
  misc_RNA (1)...(19): siRNA sense strand
ucaaggcgcagaaggagaa

SEQ ID NO: 542154 - RNA, 19 nt, Homo sapiens
  misc_RNA (1)...(19): siRNA sense strand
gccgaggauuacacccuua

SEQ ID NO: 542155 - RNA, 19 nt, Homo sapiens
  misc_RNA (1)...(19): siRNA sense strand
aaggacggcuucugcauca

SEQ ID NO: 542156 - RNA, 19 nt, Homo sapiens
  misc_RNA (1)...(19): siRNA sense strand
gcgcugcucuagccuacug

SEQ ID NO: 542157 - RNA, 19 nt, Homo sapiens
  misc_RNA (1)...(19): siRNA sense strand
gaucacgucgggagaggaa

SEQ ID NO: 542158 - RNA, 19 nt, Homo sapiens
  misc_RNA (1)...(19): siRNA sense strand
agagaacccugaggaguca

SEQ ID NO: 542159 - RNA, 19 nt, Homo sapiens
  misc_RNA (1)...(19): siRNA sense strand
gcccuacgcccacugcaaa

SEQ ID NO: 542160 - RNA, 19 nt, Homo sapiens
  misc_RNA (1)...(19): siRNA sense strand
cagccgcacauucuacaua

SEQ ID NO: 542161 - RNA, 19 nt, Homo sapiens
  misc_RNA (1)...(19): siRNA sense strand
ccgccagggucaccaagaa

SEQ ID NO: 542162 - RNA, 19 nt, Homo sapiens
  misc_RNA (1)...(19): siRNA sense strand
ggagaacaagagucugaug

SEQ ID NO: 542163 - RNA, 19 nt, Homo sapiens
  misc_RNA (1)...(19): siRNA sense strand
gugggaaggucaccaucga

SEQ ID NO: 542164 - RNA, 19 nt, Homo sapiens
  misc_RNA (1)...(19): siRNA sense strand
gcucuagccuacugagacu

SEQ ID NO: 542165 - RNA, 19 nt, Homo sapiens
  misc_RNA (1)...(19): siRNA sense strand
gggacguguuuaucaagga

SEQ ID NO: 542166 - RNA, 19 nt, Homo sapiens
  misc_RNA (1)...(19): siRNA sense strand
ugaaccgagccgaggauua

SEQ ID NO: 542167 - RNA, 19 nt, Homo sapiens
  misc_RNA (1)...(19): siRNA sense strand
gagagggaccaccuaugug

SEQ ID NO: 542168 - RNA, 19 nt, Homo sapiens
  misc_RNA (1)...(19): siRNA sense strand
gcggagacaaugagcucua

SEQ ID NO: 542169 - RNA, 19 nt, Homo sapiens
  misc_RNA (1)...(19): siRNA sense strand
uaaccacauccucaaauag

SEQ ID NO: 542170 - RNA, 19 nt, Homo sapiens
  misc_RNA (1)...(19): siRNA sense strand
ggacggcuucugcaucagu

SEQ ID NO: 542171 - RNA, 19 nt, Homo sapiens
  misc_RNA (1)...(19): siRNA sense strand
gcaacgggucagacaagga

SEQ ID NO: 542172 - RNA, 19 nt, Homo sapiens
  misc_RNA (1)...(19): siRNA sense strand
caaacucaagcccuucuuc

SEQ ID NO: 542173 - RNA, 19 nt, Homo sapiens
  misc_RNA (1)...(19): siRNA sense strand
ucacagccaaguccagguu

SEQ ID NO: 542174 - RNA, 19 nt, Homo sapiens
  misc_RNA (1)...(19): siRNA sense strand
gggccacacaggagaaguu

SEQ ID NO: 542175 - RNA, 19 nt, Homo sapiens
  misc_RNA (1)...(19): siRNA sense strand
cagacaagucggagagaga

SEQ ID NO: 542176 - RNA, 19 nt, Homo sapiens
  misc_RNA (1)...(19): siRNA sense strand
ccuggaagccgcagcuguu

SEQ ID NO: 542177 - RNA, 19 nt, Homo sapiens
  misc_RNA (1)...(19): siRNA sense strand
ccacacaggagaaguuugc

SEQ ID NO: 542178 - RNA, 19 nt, Homo sapiens
  misc_RNA (1)...(19): siRNA sense strand
agaacuaccggcaggagaa

SEQ ID NO: 542179 - RNA, 19 nt, Homo sapiens
  misc_RNA (1)...(19): siRNA sense strand
aggcccagcuggaauucaa

SEQ ID NO: 542180 - RNA, 19 nt, Homo sapiens
  misc_RNA (1)...(19): siRNA sense strand
caagcucuccgacuacuac

SEQ ID NO: 542181 - RNA, 19 nt, Homo sapiens
  misc_RNA (1)...(19): siRNA sense strand
cagaggagaacaagagucu

SEQ ID NO: 542182 - RNA, 19 nt, Homo sapiens
  misc_RNA (1)...(19): siRNA sense strand
gcguguuccuggcguguca

SEQ ID NO: 542183 - RNA, 19 nt, Homo sapiens
  misc_RNA (1)...(19): siRNA sense strand
gcggagagggaccaccuau

SEQ ID NO: 542184 - RNA, 19 nt, Homo sapiens
  misc_RNA (1)...(19): siRNA sense strand
gggacagggacguguuuau

SEQ ID NO: 542185 - RNA, 19 nt, Homo sapiens
  misc_RNA (1)...(19): siRNA sense strand
caagaagcccaagggaauc

SEQ ID NO: 542186 - RNA, 19 nt, Homo sapiens
  misc_RNA (1)...(19): siRNA sense strand
gcuguucauuaaccacauc

SEQ ID NO: 542187 - RNA, 19 nt, Homo sapiens
  misc_RNA (1)...(19): siRNA sense strand
gaacuaccggcaggagaag

SEQ ID NO: 542188 - RNA, 19 nt, Homo sapiens
  misc_RNA (1)...(19): siRNA sense strand
gaugcauucucagacaagu

SEQ ID NO: 542189 - RNA, 19 nt, Homo sapiens
  misc_RNA (1)...(19): siRNA sense strand
agaacaagagucugaugug

SEQ ID NO: 542190 - RNA, 19 nt, Homo sapiens
  misc_RNA (1)...(19): siRNA sense strand
cccagcagcuaccugaucu

SEQ ID NO: 542191 - RNA, 19 nt, Homo sapiens
  misc_RNA (1)...(19): siRNA sense strand
cauuaaccacauccucaaa

SEQ ID NO: 542192 - RNA, 19 nt, Homo sapiens
  misc_RNA (1)...(19): siRNA sense strand
ggccacacaggagaaguuu

SEQ ID NO: 542193 - RNA, 19 nt, Homo sapiens
  misc_RNA (1)...(19): siRNA sense strand
cugucuggcuucuacaaga

SEQ ID NO: 542194 - RNA, 19 nt, Homo sapiens
  misc_RNA (1)...(19): siRNA sense strand
gcucuccgacuacuacuac

SEQ ID NO: 542195 - RNA, 19 nt, Homo sapiens
  misc_RNA (1)...(19): siRNA sense strand
gcuccuuccugaacaagcu

SEQ ID NO: 542196 - RNA, 19 nt, Homo sapiens
  misc_RNA (1)...(19): siRNA sense strand
ugucagaggagaacaagag

SEQ ID NO: 542197 - RNA, 19 nt, Homo sapiens
  misc_RNA (1)...(19): siRNA sense strand
caacaacccuccucgauuu

SEQ ID NO: 542198 - RNA, 19 nt, Homo sapiens
  misc_RNA (1)...(19): siRNA sense strand
ggaaucaguucuucuuauu

SEQ ID NO: 542199 - RNA, 19 nt, Homo sapiens
  misc_RNA (1)...(19): siRNA sense strand
caaagaaacuagacagaga

SEQ ID NO: 542200 - RNA, 19 nt, Homo sapiens
  misc_RNA (1)...(19): siRNA sense strand
gaaccggaaucggaauuua

SEQ ID NO: 542201 - RNA, 19 nt, Homo sapiens
  misc_RNA (1)...(19): siRNA sense strand
ugacaacgauuauccaauu

SEQ ID NO: 542202 - RNA, 19 nt, Homo sapiens
  misc_RNA (1)...(19): siRNA sense strand
agaaguagaugaagaugua

SEQ ID NO: 542203 - RNA, 19 nt, Homo sapiens
  misc_RNA (1)...(19): siRNA sense strand
cagaguacguaucaauuua

SEQ ID NO: 542204 - RNA, 19 nt, Homo sapiens
  misc_RNA (1)...(19): siRNA sense strand
gaaacuagacagagaagaa

SEQ ID NO: 542205 - RNA, 19 nt, Homo sapiens
  misc_RNA (1)...(19): siRNA sense strand
aaaggaaccucugauaauu

SEQ ID NO: 542206 - RNA, 19 nt, Homo sapiens
  misc_RNA (1)...(19): siRNA sense strand
gaacucaucuuggaaggau

SEQ ID NO: 542207 - RNA, 19 nt, Homo sapiens
  misc_RNA (1)...(19): siRNA sense strand
cagauucgcucaguucuuu

SEQ ID NO: 542208 - RNA, 19 nt, Homo sapiens
  misc_RNA (1)...(19): siRNA sense strand
guacaucuguuauacaagu

SEQ ID NO: 542209 - RNA, 19 nt, Homo sapiens
  misc_RNA (1)...(19): siRNA sense strand
gcagaagcccugauccuuu

SEQ ID NO: 542210 - RNA, 19 nt, Homo sapiens
  misc_RNA (1)...(19): siRNA sense strand
ccacaucccugucuucauc

SEQ ID NO: 542211 - RNA, 19 nt, Homo sapiens
  misc_RNA (1)...(19): siRNA sense strand
caaaguggucuauagcaua

SEQ ID NO: 542212 - RNA, 19 nt, Homo sapiens
  misc_RNA (1)...(19): siRNA sense strand
caagugcaccuccauauga

SEQ ID NO: 542213 - RNA, 19 nt, Homo sapiens
  misc_RNA (1)...(19): siRNA sense strand
gaaccagugccagaauuua

SEQ ID NO: 542214 - RNA, 19 nt, Homo sapiens
  misc_RNA (1)...(19): siRNA sense strand
ggaagaagauacccaagcu

SEQ ID NO: 542215 - RNA, 19 nt, Homo sapiens
  misc_RNA (1)...(19): siRNA sense strand
acaaguaacugcaacagau

SEQ ID NO: 542216 - RNA, 19 nt, Homo sapiens
  misc_RNA (1)...(19): siRNA sense strand
ugacaaggauacacaggaa

SEQ ID NO: 542217 - RNA, 19 nt, Homo sapiens
  misc_RNA (1)...(19): siRNA sense strand
uaggcaagcuucacacuga

SEQ ID NO: 542218 - RNA, 19 nt, Homo sapiens
  misc_RNA (1)...(19): siRNA sense strand
agagaagacaguaaacuua

SEQ ID NO: 542219 - RNA, 19 nt, Homo sapiens
  misc_RNA (1)...(19): siRNA sense strand
uguaaugccugaaacuauu

SEQ ID NO: 542220 - RNA, 19 nt, Homo sapiens
  misc_RNA (1)...(19): siRNA sense strand
ggaaucggaauuuaucauu

SEQ ID NO: 542221 - RNA, 19 nt, Homo sapiens
  misc_RNA (1)...(19): siRNA sense strand
aaacuuagacgggauguaa

SEQ ID NO: 542222 - RNA, 19 nt, Homo sapiens
  misc_RNA (1)...(19): siRNA sense strand
ccaaggcuauagacagaaa

SEQ ID NO: 542223 - RNA, 19 nt, Homo sapiens
  misc_RNA (1)...(19): siRNA sense strand
aaaguggucuauagcauau

SEQ ID NO: 542224 - RNA, 19 nt, Homo sapiens
  misc_RNA (1)...(19): siRNA sense strand
gcaguaccagguuguuaua

SEQ ID NO: 542225 - RNA, 19 nt, Homo sapiens
  misc_RNA (1)...(19): siRNA sense strand
cagaagcccugauccuuuc

SEQ ID NO: 542226 - RNA, 19 nt, Homo sapiens
  misc_RNA (1)...(19): siRNA sense strand
gccaggaacaauuuaauaa

SEQ ID NO: 542227 - RNA, 19 nt, Homo sapiens
  misc_RNA (1)...(19): siRNA sense strand
gacaaaagaugacgguaaa

SEQ ID NO: 542228 - RNA, 19 nt, Homo sapiens
  misc_RNA (1)...(19): siRNA sense strand
caacgauuauccaauucaa

SEQ ID NO: 542229 - RNA, 19 nt, Homo sapiens
  misc_RNA (1)...(19): siRNA sense strand
agacauggguggccagaug

SEQ ID NO: 542230 - RNA, 19 nt, Homo sapiens
  misc_RNA (1)...(19): siRNA sense strand
gcuggcagucuauuuguua

SEQ ID NO: 542231 - RNA, 19 nt, Homo sapiens
  misc_RNA (1)...(19): siRNA sense strand
ccagaguacguaucaauuu

SEQ ID NO: 542232 - RNA, 19 nt, Homo sapiens
  misc_RNA (1)...(19): siRNA sense strand
ugaccaugcuccggaauuu

SEQ ID NO: 542233 - RNA, 19 nt, Homo sapiens
  misc_RNA (1)...(19): siRNA sense strand
gaauuugccauguauuaug

SEQ ID NO: 542234 - RNA, 19 nt, Homo sapiens
  misc_RNA (1)...(19): siRNA sense strand
cggaauuugccauguauua

SEQ ID NO: 542235 - RNA, 19 nt, Homo sapiens
  misc_RNA (1)...(19): siRNA sense strand
guacugacacacaauaugu

SEQ ID NO: 542236 - RNA, 19 nt, Homo sapiens
  misc_RNA (1)...(19): siRNA sense strand
acacaggaagggauuauaa

SEQ ID NO: 542237 - RNA, 19 nt, Homo sapiens
  misc_RNA (1)...(19): siRNA sense strand
uuauucaucuggaccuaua

SEQ ID NO: 542238 - RNA, 19 nt, Homo sapiens
  misc_RNA (1)...(19): siRNA sense strand
ggacccagaaucaggcaua

SEQ ID NO: 542239 - RNA, 19 nt, Homo sapiens
  misc_RNA (1)...(19): siRNA sense strand
ggagucgguacaucuguua

SEQ ID NO: 542240 - RNA, 19 nt, Homo sapiens
  misc_RNA (1)...(19): siRNA sense strand
gauaauacagcaggaauca

SEQ ID NO: 542241 - RNA, 19 nt, Homo sapiens
  misc_RNA (1)...(19): siRNA sense strand
ugauagaaguagaugaaga

SEQ ID NO: 542242 - RNA, 19 nt, Homo sapiens
  misc_RNA (1)...(19): siRNA sense strand
agauacagcuguggucaaa

SEQ ID NO: 542243 - RNA, 19 nt, Homo sapiens
  misc_RNA (1)...(19): siRNA sense strand
gaagggauuauaacuguca

SEQ ID NO: 542244 - RNA, 19 nt, Homo sapiens
  misc_RNA (1)...(19): siRNA sense strand
gagcaguaccagguuguua

SEQ ID NO: 542245 - RNA, 19 nt, Homo sapiens
  misc_RNA (1)...(19): siRNA sense strand
gauaaaggagauggaaauu

SEQ ID NO: 542246 - RNA, 19 nt, Homo sapiens
  misc_RNA (1)...(19): siRNA sense strand
gagaagacaguaaacuuag

SEQ ID NO: 542247 - RNA, 19 nt, Homo sapiens
  misc_RNA (1)...(19): siRNA sense strand
gaauuucaccauuguagau

SEQ ID NO: 542248 - RNA, 19 nt, Homo sapiens
  misc_RNA (1)...(19): siRNA sense strand
gauagaaguagaugaagau

SEQ ID NO: 542249 - RNA, 19 nt, Homo sapiens
  misc_RNA (1)...(19): siRNA sense strand
ccaaaguggucuauagcau

SEQ ID NO: 542250 - RNA, 19 nt, Homo sapiens
  misc_RNA (1)...(19): siRNA sense strand
gacauuggcacauuaagga

SEQ ID NO: 542251 - RNA, 19 nt, Homo sapiens
  misc_RNA (1)...(19): siRNA sense strand
ggaauuugccauguauuau

SEQ ID NO: 542252 - RNA, 19 nt, Homo sapiens
  misc_RNA (1)...(19): siRNA sense strand
gaacaucacgcugacagau

SEQ ID NO: 542253 - RNA, 19 nt, Homo sapiens
  misc_RNA (1)...(19): siRNA sense strand
cccagaaucaggcauaaua

SEQ ID NO: 542254 - RNA, 19 nt, Homo sapiens
  misc_RNA (1)...(19): siRNA sense strand
gacgccaacuauggaaaua

SEQ ID NO: 542255 - RNA, 19 nt, Homo sapiens
  misc_RNA (1)...(19): siRNA sense strand
gauguaaugccugaaacua

SEQ ID NO: 542256 - RNA, 19 nt, Homo sapiens
  misc_RNA (1)...(19): siRNA sense strand
aaagauagcgggucugaca

SEQ ID NO: 542257 - RNA, 19 nt, Homo sapiens
  misc_RNA (1)...(19): siRNA sense strand
guaaaggagggcaguauca

SEQ ID NO: 542258 - RNA, 19 nt, Homo sapiens
  misc_RNA (1)...(19): siRNA sense strand
uaagaguggaugcaaguaa

SEQ ID NO: 542259 - RNA, 19 nt, Homo sapiens
  misc_RNA (1)...(19): siRNA sense strand
cgguacaucuguuauacaa

SEQ ID NO: 542260 - RNA, 19 nt, Homo sapiens
  misc_RNA (1)...(19): siRNA sense strand
augauucgcuggcaacgua

SEQ ID NO: 542261 - RNA, 19 nt, Homo sapiens
  misc_RNA (1)...(19): siRNA sense strand
ggcaagagaagacaguaaa

SEQ ID NO: 542262 - RNA, 19 nt, Homo sapiens
  misc_RNA (1)...(19): siRNA sense strand
aagaagauacccaagcuuu

SEQ ID NO: 542263 - RNA, 19 nt, Homo sapiens
  misc_RNA (1)...(19): siRNA sense strand
gcauugaagaggcaaagaa

SEQ ID NO: 542264 - RNA, 19 nt, Homo sapiens
  misc_RNA (1)...(19): siRNA sense strand
gcacugguacacucacuau

SEQ ID NO: 542265 - RNA, 19 nt, Homo sapiens
  misc_RNA (1)...(19): siRNA sense strand
gaaucaguucuucuuauug

SEQ ID NO: 542266 - RNA, 19 nt, Homo sapiens
  misc_RNA (1)...(19): siRNA sense strand
uaauacagcaggaaucaug

SEQ ID NO: 542267 - RNA, 19 nt, Homo sapiens
  misc_RNA (1)...(19): siRNA sense strand
ccagaugccaggaacaauu

SEQ ID NO: 542268 - RNA, 19 nt, Homo sapiens
  misc_RNA (1)...(19): siRNA sense strand
aggaagggauuauaacugu

SEQ ID NO: 542269 - RNA, 19 nt, Homo sapiens
  misc_RNA (1)...(19): siRNA sense strand
gaggacuuaccauuauaua

SEQ ID NO: 542270 - RNA, 19 nt, Homo sapiens
  misc_RNA (1)...(19): siRNA sense strand
gugccaaaguggucuauag

SEQ ID NO: 542271 - RNA, 19 nt, Homo sapiens
  misc_RNA (1)...(19): siRNA sense strand
gcagaugacgccaacuaug

SEQ ID NO: 542272 - RNA, 19 nt, Homo sapiens
  misc_RNA (1)...(19): siRNA sense strand
ugaccaagauaaaggagau

SEQ ID NO: 542273 - RNA, 19 nt, Homo sapiens
  misc_RNA (1)...(19): siRNA sense strand
uggaaucaguucuucuuau

SEQ ID NO: 542274 - RNA, 19 nt, Homo sapiens
  misc_RNA (1)...(19): siRNA sense strand
aaugagcaccuacuuauug

SEQ ID NO: 542275 - RNA, 19 nt, Homo sapiens
  misc_RNA (1)...(19): siRNA sense strand
ggagggcaguaucauugga

SEQ ID NO: 542276 - RNA, 19 nt, Homo sapiens
  misc_RNA (1)...(19): siRNA sense strand
ccagaaucaggcauaauaa

SEQ ID NO: 542277 - RNA, 19 nt, Homo sapiens
  misc_RNA (1)...(19): siRNA sense strand
gcucaguucuuuggaaucu

SEQ ID NO: 542278 - RNA, 19 nt, Homo sapiens
  misc_RNA (1)...(19): siRNA sense strand
gaaccucugauaauuucaa

SEQ ID NO: 542279 - RNA, 19 nt, Homo sapiens
  misc_RNA (1)...(19): siRNA sense strand
caaaaugagcaccuacuua

SEQ ID NO: 542280 - RNA, 19 nt, Homo sapiens
  misc_RNA (1)...(19): siRNA sense strand
uuggacagguuacagcaua

SEQ ID NO: 542281 - RNA, 19 nt, Homo sapiens
  misc_RNA (1)...(19): siRNA sense strand
uagaugagccuccuguguu

SEQ ID NO: 542282 - RNA, 19 nt, Homo sapiens
  misc_RNA (1)...(19): siRNA sense strand
gacaaugagccaaaauuua

SEQ ID NO: 542283 - RNA, 19 nt, Homo sapiens
  misc_RNA (1)...(19): siRNA sense strand
guaaugccugaaacuauuu

SEQ ID NO: 542284 - RNA, 19 nt, Homo sapiens
  misc_RNA (1)...(19): siRNA sense strand
agaagacaguaaacuuaga

SEQ ID NO: 542285 - RNA, 19 nt, Homo sapiens
  misc_RNA (1)...(19): siRNA sense strand
gacaacgauuauccaauuc

SEQ ID NO: 542286 - RNA, 19 nt, Homo sapiens
  misc_RNA (1)...(19): siRNA sense strand
guugaucggcauacugaua

SEQ ID NO: 542287 - RNA, 19 nt, Homo sapiens
  misc_RNA (1)...(19): siRNA sense strand
gauguggaaucaguucuuc

SEQ ID NO: 542288 - RNA, 19 nt, Homo sapiens
  misc_RNA (1)...(19): siRNA sense strand
cagaaucaggcauaauaaa

SEQ ID NO: 542289 - RNA, 19 nt, Homo sapiens
  misc_RNA (1)...(19): siRNA sense strand
gacccagaaucaggcauaa

SEQ ID NO: 542290 - RNA, 19 nt, Homo sapiens
  misc_RNA (1)...(19): siRNA sense strand
ucuacucuguguccucaua

SEQ ID NO: 542291 - RNA, 19 nt, Homo sapiens
  misc_RNA (1)...(19): siRNA sense strand
caucuggaccuauauguuc

SEQ ID NO: 542292 - RNA, 19 nt, Homo sapiens
  misc_RNA (1)...(19): siRNA sense strand
uguuacagccacagaaaua

SEQ ID NO: 542293 - RNA, 19 nt, Homo sapiens
  misc_RNA (1)...(19): siRNA sense strand
gaccgggaaucaucuccuu

SEQ ID NO: 542294 - RNA, 19 nt, Homo sapiens
  misc_RNA (1)...(19): siRNA sense strand
cagaugccaggaacaauuu

SEQ ID NO: 542295 - RNA, 19 nt, Homo sapiens
  misc_RNA (1)...(19): siRNA sense strand
augcagaaauggaguauag

SEQ ID NO: 542296 - RNA, 19 nt, Homo sapiens
  misc_RNA (1)...(19): siRNA sense strand
ucggaaagauggcuacagu

SEQ ID NO: 542297 - RNA, 19 nt, Homo sapiens
  misc_RNA (1)...(19): siRNA sense strand
gaagagaguugaagaaauc

SEQ ID NO: 542298 - RNA, 19 nt, Homo sapiens
  misc_RNA (1)...(19): siRNA sense strand
gaaagcagcugguaaagag

SEQ ID NO: 542299 - RNA, 19 nt, Homo sapiens
  misc_RNA (1)...(19): siRNA sense strand
gcgccaagcuaaauuuaua

SEQ ID NO: 542300 - RNA, 19 nt, Homo sapiens
  misc_RNA (1)...(19): siRNA sense strand
ggaaacaguuggaagagaa

SEQ ID NO: 542301 - RNA, 19 nt, Homo sapiens
  misc_RNA (1)...(19): siRNA sense strand
cauggaagaugcuccuuaa

SEQ ID NO: 542302 - RNA, 19 nt, Homo sapiens
  misc_RNA (1)...(19): siRNA sense strand
auaaagagcuacagaaagu

SEQ ID NO: 542303 - RNA, 19 nt, Homo sapiens
  misc_RNA (1)...(19): siRNA sense strand
gcgcaauccucgcaaaguu

SEQ ID NO: 542304 - RNA, 19 nt, Homo sapiens
  misc_RNA (1)...(19): siRNA sense strand
gaccaaagcauuccggaaa

SEQ ID NO: 542305 - RNA, 19 nt, Homo sapiens
  misc_RNA (1)...(19): siRNA sense strand
gaagcgcaauccucgcaaa

SEQ ID NO: 542306 - RNA, 19 nt, Homo sapiens
  misc_RNA (1)...(19): siRNA sense strand
gaaaguucaggauaucaaa

SEQ ID NO: 542307 - RNA, 19 nt, Homo sapiens
  misc_RNA (1)...(19): siRNA sense strand
aaaguuagguggaccaaag

SEQ ID NO: 542308 - RNA, 19 nt, Homo sapiens
  misc_RNA (1)...(19): siRNA sense strand
gaagcgccaagcuaaauuu

SEQ ID NO: 542309 - RNA, 19 nt, Homo sapiens
  misc_RNA (1)...(19): siRNA sense strand
ugaagagaguugaagaaau

SEQ ID NO: 542310 - RNA, 19 nt, Homo sapiens
  misc_RNA (1)...(19): siRNA sense strand
aaacagaagcgccaagcua

SEQ ID NO: 542311 - RNA, 19 nt, Homo sapiens
  misc_RNA (1)...(19): siRNA sense strand
ggaaagcagcugguaaaga

SEQ ID NO: 542312 - RNA, 19 nt, Homo sapiens
  misc_RNA (1)...(19): siRNA sense strand
ucaaagaagucaagcaaaa

SEQ ID NO: 542313 - RNA, 19 nt, Homo sapiens
  misc_RNA (1)...(19): siRNA sense strand
cuacagaaaguucaggaua

SEQ ID NO: 542314 - RNA, 19 nt, Homo sapiens
  misc_RNA (1)...(19): siRNA sense strand
uacagaaaguucaggauau

SEQ ID NO: 542315 - RNA, 19 nt, Homo sapiens
  misc_RNA (1)...(19): siRNA sense strand
gagcuuacaguggauaauu

SEQ ID NO: 542316 - RNA, 19 nt, Homo sapiens
  misc_RNA (1)...(19): siRNA sense strand
gggaaacaguuggaagaga

SEQ ID NO: 542317 - RNA, 19 nt, Homo sapiens
  misc_RNA (1)...(19): siRNA sense strand
gaugaagagaguugaagaa

SEQ ID NO: 542318 - RNA, 19 nt, Homo sapiens
  misc_RNA (1)...(19): siRNA sense strand
gaaacaguuggaagagaaa

SEQ ID NO: 542319 - RNA, 19 nt, Homo sapiens
  misc_RNA (1)...(19): siRNA sense strand
cgagagcuauggaauaaaa

SEQ ID NO: 542320 - RNA, 19 nt, Homo sapiens
  misc_RNA (1)...(19): siRNA sense strand
gaaaaugguacagcaguua

SEQ ID NO: 542321 - RNA, 19 nt, Homo sapiens
  misc_RNA (1)...(19): siRNA sense strand
cagcgagagcuauggaaua

SEQ ID NO: 542322 - RNA, 19 nt, Homo sapiens
  misc_RNA (1)...(19): siRNA sense strand
gcaaagggaaacaguugga

SEQ ID NO: 542323 - RNA, 19 nt, Homo sapiens
  misc_RNA (1)...(19): siRNA sense strand
agcgagagcuauggaauaa

SEQ ID NO: 542324 - RNA, 19 nt, Homo sapiens
  misc_RNA (1)...(19): siRNA sense strand
caaauaccagcgagagcua

SEQ ID NO: 542325 - RNA, 19 nt, Homo sapiens
  misc_RNA (1)...(19): siRNA sense strand
uaucaaagaagucaagcaa

SEQ ID NO: 542326 - RNA, 19 nt, Homo sapiens
  misc_RNA (1)...(19): siRNA sense strand
ccggaaagcagcugguaaa

SEQ ID NO: 542327 - RNA, 19 nt, Homo sapiens
  misc_RNA (1)...(19): siRNA sense strand
aagcaaaacauccaucuua

SEQ ID NO: 542328 - RNA, 19 nt, Homo sapiens
  misc_RNA (1)...(19): siRNA sense strand
acagaaaguucaggauauc

SEQ ID NO: 542329 - RNA, 19 nt, Homo sapiens
  misc_RNA (1)...(19): siRNA sense strand
gcaauccucgcaaaguuag

SEQ ID NO: 542330 - RNA, 19 nt, Homo sapiens
  misc_RNA (1)...(19): siRNA sense strand
uaaagagcuuacaguggau

SEQ ID NO: 542331 - RNA, 19 nt, Homo sapiens
  misc_RNA (1)...(19): siRNA sense strand
aacagaagcgccaagcuaa

SEQ ID NO: 542332 - RNA, 19 nt, Homo sapiens
  misc_RNA (1)...(19): siRNA sense strand
guagaaaugaaccuaucaa

SEQ ID NO: 542333 - RNA, 19 nt, Homo sapiens
  misc_RNA (1)...(19): siRNA sense strand
cagaagcgccaagcuaaau

SEQ ID NO: 542334 - RNA, 19 nt, Homo sapiens
  misc_RNA (1)...(19): siRNA sense strand
cgcaauccucgcaaaguua

SEQ ID NO: 542335 - RNA, 19 nt, Homo sapiens
  misc_RNA (1)...(19): siRNA sense strand
aaacguagaaaugaaccua

SEQ ID NO: 542336 - RNA, 19 nt, Homo sapiens
  misc_RNA (1)...(19): siRNA sense strand
ggauaucaaagaagucaag

SEQ ID NO: 542337 - RNA, 19 nt, Homo sapiens
  misc_RNA (1)...(19): siRNA sense strand
aaagagcuacagaaaguuc

SEQ ID NO: 542338 - RNA, 19 nt, Homo sapiens
  misc_RNA (1)...(19): siRNA sense strand
acauggaagaugcuccuua

SEQ ID NO: 542339 - RNA, 19 nt, Homo sapiens
  misc_RNA (1)...(19): siRNA sense strand
auugcaagguguucagauu

SEQ ID NO: 542340 - RNA, 19 nt, Homo sapiens
  misc_RNA (1)...(19): siRNA sense strand
caguggauaauucauuuga

SEQ ID NO: 542341 - RNA, 19 nt, Homo sapiens
  misc_RNA (1)...(19): siRNA sense strand
caaagggaaacaguuggaa

SEQ ID NO: 542342 - RNA, 19 nt, Homo sapiens
  misc_RNA (1)...(19): siRNA sense strand
aagcgccaagcuaaauuua

SEQ ID NO: 542343 - RNA, 19 nt, Homo sapiens
  misc_RNA (1)...(19): siRNA sense strand
cgaugaagagaguugaaga

SEQ ID NO: 542344 - RNA, 19 nt, Homo sapiens
  misc_RNA (1)...(19): siRNA sense strand
gcaguuacaagaggaugug

SEQ ID NO: 542345 - RNA, 19 nt, Homo sapiens
  misc_RNA (1)...(19): siRNA sense strand
agaaaguucaggauaucaa

SEQ ID NO: 542346 - RNA, 19 nt, Homo sapiens
  misc_RNA (1)...(19): siRNA sense strand
gcaagguguucagauuuug

SEQ ID NO: 542347 - RNA, 19 nt, Homo sapiens
  misc_RNA (1)...(19): siRNA sense strand
acagaagcgccaagcuaaa

SEQ ID NO: 542348 - RNA, 19 nt, Homo sapiens
  misc_RNA (1)...(19): siRNA sense strand
uuagguggaccaaagcauu

SEQ ID NO: 542349 - RNA, 19 nt, Homo sapiens
  misc_RNA (1)...(19): siRNA sense strand
gcaggcaaagggaaacagu

SEQ ID NO: 542350 - RNA, 19 nt, Homo sapiens
  misc_RNA (1)...(19): siRNA sense strand
uugaugcgaugaagagagu

SEQ ID NO: 542351 - RNA, 19 nt, Homo sapiens
  misc_RNA (1)...(19): siRNA sense strand
aagggaaacaguuggaaga

SEQ ID NO: 542352 - RNA, 19 nt, Homo sapiens
  misc_RNA (1)...(19): siRNA sense strand
aggcaaagggaaacaguug

SEQ ID NO: 542353 - RNA, 19 nt, Homo sapiens
  misc_RNA (1)...(19): siRNA sense strand
gaugcgaugaagagaguug

SEQ ID NO: 542354 - RNA, 19 nt, Homo sapiens
  misc_RNA (1)...(19): siRNA sense strand
agaagcgccaagcuaaauu

SEQ ID NO: 542355 - RNA, 19 nt, Homo sapiens
  misc_RNA (1)...(19): siRNA sense strand
ccaaagcauuccggaaagc

SEQ ID NO: 542356 - RNA, 19 nt, Homo sapiens
  misc_RNA (1)...(19): siRNA sense strand
uaaagagcuacagaaaguu

SEQ ID NO: 542357 - RNA, 19 nt, Homo sapiens
  misc_RNA (1)...(19): siRNA sense strand
aauaaagagcuacagaaag

SEQ ID NO: 542358 - RNA, 19 nt, Homo sapiens
  misc_RNA (1)...(19): siRNA sense strand
aaacuauugaugcgaugaa

SEQ ID NO: 542359 - RNA, 19 nt, Homo sapiens
  misc_RNA (1)...(19): siRNA sense strand
caggauaucaaagaaguca

SEQ ID NO: 542360 - RNA, 19 nt, Homo sapiens
  misc_RNA (1)...(19): siRNA sense strand
gcaaaguuagguggaccaa

SEQ ID NO: 542361 - RNA, 19 nt, Homo sapiens
  misc_RNA (1)...(19): siRNA sense strand
uugcaagguguucagauuu

SEQ ID NO: 542362 - RNA, 19 nt, Homo sapiens
  misc_RNA (1)...(19): siRNA sense strand
ugaagaaaucaaacagaag

SEQ ID NO: 542363 - RNA, 19 nt, Homo sapiens
  misc_RNA (1)...(19): siRNA sense strand
gcuuacaguggauaauuca

SEQ ID NO: 542364 - RNA, 19 nt, Homo sapiens
  misc_RNA (1)...(19): siRNA sense strand
cagacaagcugcaggaauu

SEQ ID NO: 542365 - RNA, 19 nt, Homo sapiens
  misc_RNA (1)...(19): siRNA sense strand
aaaccaugcugaagucauu

SEQ ID NO: 542366 - RNA, 19 nt, Homo sapiens
  misc_RNA (1)...(19): siRNA sense strand
cagcauaucaaucccaaua

SEQ ID NO: 542367 - RNA, 19 nt, Homo sapiens
  misc_RNA (1)...(19): siRNA sense strand
guaguacauuugaagauga

SEQ ID NO: 542368 - RNA, 19 nt, Homo sapiens
  misc_RNA (1)...(19): siRNA sense strand
gcauaucaaucccaauaag

SEQ ID NO: 542369 - RNA, 19 nt, Homo sapiens
  misc_RNA (1)...(19): siRNA sense strand
gcaggaauuccagggauua

SEQ ID NO: 542370 - RNA, 19 nt, Homo sapiens
  misc_RNA (1)...(19): siRNA sense strand
gguaguacauuugaagaug

SEQ ID NO: 542371 - RNA, 19 nt, Homo sapiens
  misc_RNA (1)...(19): siRNA sense strand
uaacuuugcccuccuccua

SEQ ID NO: 542372 - RNA, 19 nt, Homo sapiens
  misc_RNA (1)...(19): siRNA sense strand
ccuaaagcuuucagaagaa

SEQ ID NO: 542373 - RNA, 19 nt, Homo sapiens
  misc_RNA (1)...(19): siRNA sense strand
uugcaugaguuccugguua

SEQ ID NO: 542374 - RNA, 19 nt, Homo sapiens
  misc_RNA (1)...(19): siRNA sense strand
guacugaagcagcauauca

SEQ ID NO: 542375 - RNA, 19 nt, Homo sapiens
  misc_RNA (1)...(19): siRNA sense strand
uccuaaagcuuucagaaga

SEQ ID NO: 542376 - RNA, 19 nt, Homo sapiens
  misc_RNA (1)...(19): siRNA sense strand
gaaaaccacaugaggaaaa

SEQ ID NO: 542377 - RNA, 19 nt, Homo sapiens
  misc_RNA (1)...(19): siRNA sense strand
gaaaauggugugacugauu

SEQ ID NO: 542378 - RNA, 19 nt, Homo sapiens
  misc_RNA (1)...(19): siRNA sense strand
ugcaugaguuccugguuaa

SEQ ID NO: 542379 - RNA, 19 nt, Homo sapiens
  misc_RNA (1)...(19): siRNA sense strand
augaguuccugguuaauuu

SEQ ID NO: 542380 - RNA, 19 nt, Homo sapiens
  misc_RNA (1)...(19): siRNA sense strand
caugcugaagucauuauua

SEQ ID NO: 542381 - RNA, 19 nt, Homo sapiens
  misc_RNA (1)...(19): siRNA sense strand
ggauuacuccaacugaaga

SEQ ID NO: 542382 - RNA, 19 nt, Homo sapiens
  misc_RNA (1)...(19): siRNA sense strand
caacuggagucuguuuuaa

SEQ ID NO: 542383 - RNA, 19 nt, Homo sapiens
  misc_RNA (1)...(19): siRNA sense strand
gcaacuggagucuguuuua

SEQ ID NO: 542384 - RNA, 19 nt, Homo sapiens
  misc_RNA (1)...(19): siRNA sense strand
ucaugcaacuggagucugu

SEQ ID NO: 542385 - RNA, 19 nt, Homo sapiens
  misc_RNA (1)...(19): siRNA sense strand
guggaaguuugcaugaguu

SEQ ID NO: 542386 - RNA, 19 nt, Homo sapiens
  misc_RNA (1)...(19): siRNA sense strand
uuugggcacuguugaugua

SEQ ID NO: 542387 - RNA, 19 nt, Homo sapiens
  misc_RNA (1)...(19): siRNA sense strand
cuaaagcuuucagaagaau

SEQ ID NO: 542388 - RNA, 19 nt, Homo sapiens
  misc_RNA (1)...(19): siRNA sense strand
cauaucaaucccaauaaga

SEQ ID NO: 542389 - RNA, 19 nt, Homo sapiens
  misc_RNA (1)...(19): siRNA sense strand
gcugaagucauuauuaagg

SEQ ID NO: 542390 - RNA, 19 nt, Homo sapiens
  misc_RNA (1)...(19): siRNA sense strand
caugaguuccugguuaauu

SEQ ID NO: 542391 - RNA, 19 nt, Homo sapiens
  misc_RNA (1)...(19): siRNA sense strand
ggaauuccagggauuacuc

SEQ ID NO: 542392 - RNA, 19 nt, Homo sapiens
  misc_RNA (1)...(19): siRNA sense strand
gggcacuguugauguacug

SEQ ID NO: 542393 - RNA, 19 nt, Homo sapiens
  misc_RNA (1)...(19): siRNA sense strand
gaagaugaucaggaaguca

SEQ ID NO: 542394 - RNA, 19 nt, Homo sapiens
  misc_RNA (1)...(19): siRNA sense strand
gcccuccuccuaaagcuuu

SEQ ID NO: 542395 - RNA, 19 nt, Homo sapiens
  misc_RNA (1)...(19): siRNA sense strand
gaaaccaugcugaagucau

SEQ ID NO: 542396 - RNA, 19 nt, Homo sapiens
  misc_RNA (1)...(19): siRNA sense strand
gauguacugaagcagcaua

SEQ ID NO: 542397 - RNA, 19 nt, Homo sapiens
  misc_RNA (1)...(19): siRNA sense strand
gcacuguugauguacugaa

SEQ ID NO: 542398 - RNA, 19 nt, Homo sapiens
  misc_RNA (1)...(19): siRNA sense strand
ugaagaugaucaggaaguc

SEQ ID NO: 542399 - RNA, 19 nt, Homo sapiens
  misc_RNA (1)...(19): siRNA sense strand
gcuaugaagucuguuacac

SEQ ID NO: 542400 - RNA, 19 nt, Homo sapiens
  misc_RNA (1)...(19): siRNA sense strand
cugguuaauuugcaugaga

SEQ ID NO: 542401 - RNA, 19 nt, Homo sapiens
  misc_RNA (1)...(19): siRNA sense strand
gugacugauucucugaaga

SEQ ID NO: 542402 - RNA, 19 nt, Homo sapiens
  misc_RNA (1)...(19): siRNA sense strand
aaaauggugugacugauuc

SEQ ID NO: 542403 - RNA, 19 nt, Homo sapiens
  misc_RNA (1)...(19): siRNA sense strand
guacauuugaagaugauca

SEQ ID NO: 542404 - RNA, 19 nt, Homo sapiens
  misc_RNA (1)...(19): siRNA sense strand
ugugaauaguggaaguuug

SEQ ID NO: 542405 - RNA, 19 nt, Homo sapiens
  misc_RNA (1)...(19): siRNA sense strand
auuugaagaugaucaggaa

SEQ ID NO: 542406 - RNA, 19 nt, Homo sapiens
  misc_RNA (1)...(19): siRNA sense strand
gggauuacuccaacugaag

SEQ ID NO: 542407 - RNA, 19 nt, Homo sapiens
  misc_RNA (1)...(19): siRNA sense strand
ugaagcagcauaucaaucc

SEQ ID NO: 542408 - RNA, 19 nt, Homo sapiens
  misc_RNA (1)...(19): siRNA sense strand
ccagacaagcugcaggaau

SEQ ID NO: 542409 - RNA, 19 nt, Homo sapiens
  misc_RNA (1)...(19): siRNA sense strand
cagaugguaauggguagua

SEQ ID NO: 542410 - RNA, 19 nt, Homo sapiens
  misc_RNA (1)...(19): siRNA sense strand
uugaaaccaugcugaaguc

SEQ ID NO: 542411 - RNA, 19 nt, Homo sapiens
  misc_RNA (1)...(19): siRNA sense strand
uagauaaauggcucuccua

SEQ ID NO: 542412 - RNA, 19 nt, Homo sapiens
  misc_RNA (1)...(19): siRNA sense strand
uguggucuccuucugguuu

SEQ ID NO: 542413 - RNA, 19 nt, Homo sapiens
  misc_RNA (1)...(19): siRNA sense strand
gguggcagugugagugaaa

SEQ ID NO: 542414 - RNA, 19 nt, Homo sapiens
  misc_RNA (1)...(19): siRNA sense strand
cugaagucauuauuaaggu

SEQ ID NO: 542415 - RNA, 19 nt, Homo sapiens
  misc_RNA (1)...(19): siRNA sense strand
ugcaggaauuccagggauu

SEQ ID NO: 542416 - RNA, 19 nt, Homo sapiens
  misc_RNA (1)...(19): siRNA sense strand
agggauuacuccaacugaa

SEQ ID NO: 542417 - RNA, 19 nt, Homo sapiens
  misc_RNA (1)...(19): siRNA sense strand
gaaguuugcaugaguuccu

SEQ ID NO: 542418 - RNA, 19 nt, Homo sapiens
  misc_RNA (1)...(19): siRNA sense strand
guggucuccuucugguuug

SEQ ID NO: 542419 - RNA, 19 nt, Homo sapiens
  misc_RNA (1)...(19): siRNA sense strand
aguggaaguuugcaugagu

SEQ ID NO: 542420 - RNA, 19 nt, Homo sapiens
  misc_RNA (1)...(19): siRNA sense strand
uaagacaucggacccuuuu

SEQ ID NO: 542421 - RNA, 19 nt, Homo sapiens
  misc_RNA (1)...(19): siRNA sense strand
gaacuucagucaacauauu

SEQ ID NO: 542422 - RNA, 19 nt, Homo sapiens
  misc_RNA (1)...(19): siRNA sense strand
gagagacccucguccuuua

SEQ ID NO: 542423 - RNA, 19 nt, Homo sapiens
  misc_RNA (1)...(19): siRNA sense strand
cagacaagcugcaggaauu

SEQ ID NO: 542424 - RNA, 19 nt, Homo sapiens
  misc_RNA (1)...(19): siRNA sense strand
gaguugagguuugcauaua

SEQ ID NO: 542425 - RNA, 19 nt, Homo sapiens
  misc_RNA (1)...(19): siRNA sense strand
ggaagaagcuuggaucacu

SEQ ID NO: 542426 - RNA, 19 nt, Homo sapiens
  misc_RNA (1)...(19): siRNA sense strand
ccacaguacuucuuagugu

SEQ ID NO: 542427 - RNA, 19 nt, Homo sapiens
  misc_RNA (1)...(19): siRNA sense strand
aaaccaugcugaagucauu

SEQ ID NO: 542428 - RNA, 19 nt, Homo sapiens
  misc_RNA (1)...(19): siRNA sense strand
cagcauaucaaucccaaua

SEQ ID NO: 542429 - RNA, 19 nt, Homo sapiens
  misc_RNA (1)...(19): siRNA sense strand
guaguacauuugaagauga

SEQ ID NO: 542430 - RNA, 19 nt, Homo sapiens
  misc_RNA (1)...(19): siRNA sense strand
ucgguuugaugaugaauua

SEQ ID NO: 542431 - RNA, 19 nt, Homo sapiens
  misc_RNA (1)...(19): siRNA sense strand
gcucagauauugucagcau

SEQ ID NO: 542432 - RNA, 19 nt, Homo sapiens
  misc_RNA (1)...(19): siRNA sense strand
gcauaucaaucccaauaag

SEQ ID NO: 542433 - RNA, 19 nt, Homo sapiens
  misc_RNA (1)...(19): siRNA sense strand
gcaggaauuccagggauua

SEQ ID NO: 542434 - RNA, 19 nt, Homo sapiens
  misc_RNA (1)...(19): siRNA sense strand
gacagguuauugaaacaaa

SEQ ID NO: 542435 - RNA, 19 nt, Homo sapiens
  misc_RNA (1)...(19): siRNA sense strand
caacagauccuagaagaca

SEQ ID NO: 542436 - RNA, 19 nt, Homo sapiens
  misc_RNA (1)...(19): siRNA sense strand
gguaguacauuugaagaug

SEQ ID NO: 542437 - RNA, 19 nt, Homo sapiens
  misc_RNA (1)...(19): siRNA sense strand
guacuucaggauccuaaua

SEQ ID NO: 542438 - RNA, 19 nt, Homo sapiens
  misc_RNA (1)...(19): siRNA sense strand
gaagagacugcaccuacuu

SEQ ID NO: 542439 - RNA, 19 nt, Homo sapiens
  misc_RNA (1)...(19): siRNA sense strand
ccuagaagacaguaugaua

SEQ ID NO: 542440 - RNA, 19 nt, Homo sapiens
  misc_RNA (1)...(19): siRNA sense strand
aacaaaguaugaacuggua

SEQ ID NO: 542441 - RNA, 19 nt, Homo sapiens
  misc_RNA (1)...(19): siRNA sense strand
ccagaucgguuugaugaug

SEQ ID NO: 542442 - RNA, 19 nt, Homo sapiens
  misc_RNA (1)...(19): siRNA sense strand
uaacuuugcccuccuccua

SEQ ID NO: 542443 - RNA, 19 nt, Homo sapiens
  misc_RNA (1)...(19): siRNA sense strand
gaacugguaacaucaucaa

SEQ ID NO: 542444 - RNA, 19 nt, Homo sapiens
  misc_RNA (1)...(19): siRNA sense strand
ccuaaagcuuucagaagaa

SEQ ID NO: 542445 - RNA, 19 nt, Homo sapiens
  misc_RNA (1)...(19): siRNA sense strand
uugcaugaguuccugguua

SEQ ID NO: 542446 - RNA, 19 nt, Homo sapiens
  misc_RNA (1)...(19): siRNA sense strand
guacugaagcagcauauca

SEQ ID NO: 542447 - RNA, 19 nt, Homo sapiens
  misc_RNA (1)...(19): siRNA sense strand
uccuaaagcuuucagaaga

SEQ ID NO: 542448 - RNA, 19 nt, Homo sapiens
  misc_RNA (1)...(19): siRNA sense strand
cagaucgguuugaugauga

SEQ ID NO: 542449 - RNA, 19 nt, Homo sapiens
  misc_RNA (1)...(19): siRNA sense strand
cacaguacuucuuagugua

SEQ ID NO: 542450 - RNA, 19 nt, Homo sapiens
  misc_RNA (1)...(19): siRNA sense strand
ggagggacagguuauugaa

SEQ ID NO: 542451 - RNA, 19 nt, Homo sapiens
  misc_RNA (1)...(19): siRNA sense strand
aguaugaacugguaacauc

SEQ ID NO: 542452 - RNA, 19 nt, Homo sapiens
  misc_RNA (1)...(19): siRNA sense strand
gaaaaccacaugaggaaaa

SEQ ID NO: 542453 - RNA, 19 nt, Homo sapiens
  misc_RNA (1)...(19): siRNA sense strand
guaccugggcaaucuguuu

SEQ ID NO: 542454 - RNA, 19 nt, Homo sapiens
  misc_RNA (1)...(19): siRNA sense strand
gaaccuuaaugaccaacag

SEQ ID NO: 542455 - RNA, 19 nt, Homo sapiens
  misc_RNA (1)...(19): siRNA sense strand
gaaaauggugugacugauu

SEQ ID NO: 542456 - RNA, 19 nt, Homo sapiens
  misc_RNA (1)...(19): siRNA sense strand
ugcaugaguuccugguuaa

SEQ ID NO: 542457 - RNA, 19 nt, Homo sapiens
  misc_RNA (1)...(19): siRNA sense strand
aaccaccucugaagaaguu

SEQ ID NO: 542458 - RNA, 19 nt, Homo sapiens
  misc_RNA (1)...(19): siRNA sense strand
augaguuccugguuaauuu

SEQ ID NO: 542459 - RNA, 19 nt, Homo sapiens
  misc_RNA (1)...(19): siRNA sense strand
caugcugaagucauuauua

SEQ ID NO: 542460 - RNA, 19 nt, Homo sapiens
  misc_RNA (1)...(19): siRNA sense strand
cuagaagacaguaugauau

SEQ ID NO: 542461 - RNA, 19 nt, Homo sapiens
  misc_RNA (1)...(19): siRNA sense strand
ucaugcaacuggagucugu

SEQ ID NO: 542462 - RNA, 19 nt, Homo sapiens
  misc_RNA (1)...(19): siRNA sense strand
acaggaguguccagaguug

SEQ ID NO: 542463 - RNA, 19 nt, Homo sapiens
  misc_RNA (1)...(19): siRNA sense strand
ggauuacuccaacugaaga

SEQ ID NO: 542464 - RNA, 19 nt, Homo sapiens
  misc_RNA (1)...(19): siRNA sense strand
ucuggccaguugcauaaua

SEQ ID NO: 542465 - RNA, 19 nt, Homo sapiens
  misc_RNA (1)...(19): siRNA sense strand
caacuggagucuguuuuaa

SEQ ID NO: 542466 - RNA, 19 nt, Homo sapiens
  misc_RNA (1)...(19): siRNA sense strand
gcaacuggagucuguuuua

SEQ ID NO: 542467 - RNA, 19 nt, Homo sapiens
  misc_RNA (1)...(19): siRNA sense strand
gauccuagaagacaguaug

SEQ ID NO: 542468 - RNA, 19 nt, Homo sapiens
  misc_RNA (1)...(19): siRNA sense strand
guugagguuugcauauaug

SEQ ID NO: 542469 - RNA, 19 nt, Homo sapiens
  misc_RNA (1)...(19): siRNA sense strand
acacaaguuugauccagau

SEQ ID NO: 542470 - RNA, 19 nt, Homo sapiens
  misc_RNA (1)...(19): siRNA sense strand
uuugggcacuguugaugua

SEQ ID NO: 542471 - RNA, 19 nt, Homo sapiens
  misc_RNA (1)...(19): siRNA sense strand
gagggacagguuauugaaa

SEQ ID NO: 542472 - RNA, 19 nt, Homo sapiens
  misc_RNA (1)...(19): siRNA sense strand
ggccaucuccacacaaguu

SEQ ID NO: 542473 - RNA, 19 nt, Homo sapiens
  misc_RNA (1)...(19): siRNA sense strand
accaacagauccuagaaga

SEQ ID NO: 542474 - RNA, 19 nt, Homo sapiens
  misc_RNA (1)...(19): siRNA sense strand
guggaaguuugcaugaguu

SEQ ID NO: 542475 - RNA, 19 nt, Homo sapiens
  misc_RNA (1)...(19): siRNA sense strand
cuaaagcuuucagaagaau

SEQ ID NO: 542476 - RNA, 19 nt, Homo sapiens
  misc_RNA (1)...(19): siRNA sense strand
agagagacccucguccuuu

SEQ ID NO: 542477 - RNA, 19 nt, Homo sapiens
  misc_RNA (1)...(19): siRNA sense strand
cauaucaaucccaauaaga

SEQ ID NO: 542478 - RNA, 19 nt, Homo sapiens
  misc_RNA (1)...(19): siRNA sense strand
ggacagguuauugaaacaa

SEQ ID NO: 542479 - RNA, 19 nt, Homo sapiens
  misc_RNA (1)...(19): siRNA sense strand
gggacagguuauugaaaca

SEQ ID NO: 542480 - RNA, 19 nt, Homo sapiens
  misc_RNA (1)...(19): siRNA sense strand
ugaagagacugcaccuacu

SEQ ID NO: 542481 - RNA, 19 nt, Homo sapiens
  misc_RNA (1)...(19): siRNA sense strand
gcaugugcuuugugaaacu

SEQ ID NO: 542482 - RNA, 19 nt, Homo sapiens
  misc_RNA (1)...(19): siRNA sense strand
ggaucacugucucaaagag

SEQ ID NO: 542483 - RNA, 19 nt, Homo sapiens
  misc_RNA (1)...(19): siRNA sense strand
gcugaagucauuauuaagg

SEQ ID NO: 542484 - RNA, 19 nt, Homo sapiens
  misc_RNA (1)...(19): siRNA sense strand
ugaaacaaaguaugaacug

SEQ ID NO: 542485 - RNA, 19 nt, Homo sapiens
  misc_RNA (1)...(19): siRNA sense strand
gugaccacaguacuucuua

SEQ ID NO: 542486 - RNA, 19 nt, Homo sapiens
  misc_RNA (1)...(19): siRNA sense strand
ggaaaugguccuguuacuc

SEQ ID NO: 542487 - RNA, 19 nt, Homo sapiens
  misc_RNA (1)...(19): siRNA sense strand
cuggccaguugcauaauaa

SEQ ID NO: 542488 - RNA, 19 nt, Homo sapiens
  misc_RNA (1)...(19): siRNA sense strand
uuucauugacuccuuagua

SEQ ID NO: 542489 - RNA, 19 nt, Homo sapiens
  misc_RNA (1)...(19): siRNA sense strand
ggaacuucagucaacauau

SEQ ID NO: 542490 - RNA, 19 nt, Homo sapiens
  misc_RNA (1)...(19): siRNA sense strand
gacugcaccuacuuucugu

SEQ ID NO: 542491 - RNA, 19 nt, Homo sapiens
  misc_RNA (1)...(19): siRNA sense strand
ggaauuccagggauuacuc

SEQ ID NO: 542492 - RNA, 19 nt, Homo sapiens
  misc_RNA (1)...(19): siRNA sense strand
cagaguugagguuugcaua

SEQ ID NO: 542493 - RNA, 19 nt, Homo sapiens
  misc_RNA (1)...(19): siRNA sense strand
augaagagauaaaccaagu

SEQ ID NO: 542494 - RNA, 19 nt, Homo sapiens
  misc_RNA (1)...(19): siRNA sense strand
caugaguuccugguuaauu

SEQ ID NO: 542495 - RNA, 19 nt, Homo sapiens
  misc_RNA (1)...(19): siRNA sense strand
gggcacuguugauguacug

SEQ ID NO: 542496 - RNA, 19 nt, Homo sapiens
  misc_RNA (1)...(19): siRNA sense strand
caucuccacacaaguuuga

SEQ ID NO: 542497 - RNA, 19 nt, Homo sapiens
  misc_RNA (1)...(19): siRNA sense strand
gaagaugaucaggaaguca

SEQ ID NO: 542498 - RNA, 19 nt, Homo sapiens
  misc_RNA (1)...(19): siRNA sense strand
gcccuccuccuaaagcuuu

SEQ ID NO: 542499 - RNA, 19 nt, Homo sapiens
  misc_RNA (1)...(19): siRNA sense strand
gaaaccaugcugaagucau

SEQ ID NO: 542500 - RNA, 19 nt, Homo sapiens
  misc_RNA (1)...(19): siRNA sense strand
gauguacugaagcagcaua

SEQ ID NO: 542501 - RNA, 19 nt, Homo sapiens
  misc_RNA (1)...(19): siRNA sense strand
gcacuguugauguacugaa

SEQ ID NO: 542502 - RNA, 19 nt, Homo sapiens
  misc_RNA (1)...(19): siRNA sense strand
ucucuggccaguugcauaa

SEQ ID NO: 542503 - RNA, 19 nt, Homo sapiens
  misc_RNA (1)...(19): siRNA sense strand
ugaagaugaucaggaaguc

SEQ ID NO: 542504 - RNA, 19 nt, Homo sapiens
  misc_RNA (1)...(19): siRNA sense strand
gcuaugaagucuguuacac

SEQ ID NO: 542505 - RNA, 19 nt, Homo sapiens
  misc_RNA (1)...(19): siRNA sense strand
cugguuaauuugcaugaga

SEQ ID NO: 542506 - RNA, 19 nt, Homo sapiens
  misc_RNA (1)...(19): siRNA sense strand
gugacugauucucugaaga

SEQ ID NO: 542507 - RNA, 19 nt, Homo sapiens
  misc_RNA (1)...(19): siRNA sense strand
aaaauggugugacugauuc

SEQ ID NO: 542508 - RNA, 19 nt, Homo sapiens
  misc_RNA (1)...(19): siRNA sense strand
guacauuugaagaugauca

SEQ ID NO: 542509 - RNA, 19 nt, Homo sapiens
  misc_RNA (1)...(19): siRNA sense strand
ccuaauacuuggccaucuc

SEQ ID NO: 542510 - RNA, 19 nt, Homo sapiens
  misc_RNA (1)...(19): siRNA sense strand
ucagauauugucagcaugu

SEQ ID NO: 542511 - RNA, 19 nt, Homo sapiens
  misc_RNA (1)...(19): siRNA sense strand
cauugacuccuuaguacaa

SEQ ID NO: 542512 - RNA, 19 nt, Homo sapiens
  misc_RNA (1)...(19): siRNA sense strand
ugaagcagcauaucaaucc

SEQ ID NO: 542513 - RNA, 19 nt, Homo sapiens
  misc_RNA (1)...(19): siRNA sense strand
gggauuacuccaacugaag

SEQ ID NO: 542514 - RNA, 19 nt, Homo sapiens
  misc_RNA (1)...(19): siRNA sense strand
aguugagguuugcauauau

SEQ ID NO: 542515 - RNA, 19 nt, Homo sapiens
  misc_RNA (1)...(19): siRNA sense strand
uucaggauccuaauacuug

SEQ ID NO: 542516 - RNA, 19 nt, Homo sapiens
  misc_RNA (1)...(19): siRNA sense strand
ugugaauaguggaaguuug

SEQ ID NO: 542517 - RNA, 19 nt, Homo sapiens
  misc_RNA (1)...(19): siRNA sense strand
cauaaaagaacgaaaagga

SEQ ID NO: 542518 - RNA, 19 nt, Homo sapiens
  misc_RNA (1)...(19): siRNA sense strand
auuugaagaugaucaggaa

SEQ ID NO: 542519 - RNA, 19 nt, Homo sapiens
  misc_RNA (1)...(19): siRNA sense strand
ccagacaagcugcaggaau

SEQ ID NO: 542520 - RNA, 19 nt, Homo sapiens
  misc_RNA (1)...(19): siRNA sense strand
uuggaucacugucucaaag

SEQ ID NO: 542521 - RNA, 19 nt, Homo sapiens
  misc_RNA (1)...(19): siRNA sense strand
ggacgaggaugaugaugaa

SEQ ID NO: 542522 - RNA, 19 nt, Homo sapiens
  misc_RNA (1)...(19): siRNA sense strand
ccaaugacaucuucacaaa

SEQ ID NO: 542523 - RNA, 19 nt, Homo sapiens
  misc_RNA (1)...(19): siRNA sense strand
caacuguggugcuacuuaa

SEQ ID NO: 542524 - RNA, 19 nt, Homo sapiens
  misc_RNA (1)...(19): siRNA sense strand
gaaauauaacgcuugcaua

SEQ ID NO: 542525 - RNA, 19 nt, Homo sapiens
  misc_RNA (1)...(19): siRNA sense strand
ggccaacaaugcugaaauu

SEQ ID NO: 542526 - RNA, 19 nt, Homo sapiens
  misc_RNA (1)...(19): siRNA sense strand
gaacauggucaacggauug

SEQ ID NO: 542527 - RNA, 19 nt, Homo sapiens
  misc_RNA (1)...(19): siRNA sense strand
gaagacagaaaguggauga

SEQ ID NO: 542528 - RNA, 19 nt, Homo sapiens
  misc_RNA (1)...(19): siRNA sense strand
gcgcucaucguguuuauuu

SEQ ID NO: 542529 - RNA, 19 nt, Homo sapiens
  misc_RNA (1)...(19): siRNA sense strand
gcaacgaaacagagaauga

SEQ ID NO: 542530 - RNA, 19 nt, Homo sapiens
  misc_RNA (1)...(19): siRNA sense strand
gaaggagcuugaccucaug

SEQ ID NO: 542531 - RNA, 19 nt, Homo sapiens
  misc_RNA (1)...(19): siRNA sense strand
ggaacauggucaacggauu

SEQ ID NO: 542532 - RNA, 19 nt, Homo sapiens
  misc_RNA (1)...(19): siRNA sense strand
gcaacuguggugcuacuua

SEQ ID NO: 542533 - RNA, 19 nt, Homo sapiens
  misc_RNA (1)...(19): siRNA sense strand
caaaggcgaugugggaguu

SEQ ID NO: 542534 - RNA, 19 nt, Homo sapiens
  misc_RNA (1)...(19): siRNA sense strand
gagagacaaagauugauaa

SEQ ID NO: 542535 - RNA, 19 nt, Homo sapiens
  misc_RNA (1)...(19): siRNA sense strand
ugacugaguucaacguguu

SEQ ID NO: 542536 - RNA, 19 nt, Homo sapiens
  misc_RNA (1)...(19): siRNA sense strand
gaaccagcccugcaugaau

SEQ ID NO: 542537 - RNA, 19 nt, Homo sapiens
  misc_RNA (1)...(19): siRNA sense strand
caugauaaccagccacuuu

SEQ ID NO: 542538 - RNA, 19 nt, Homo sapiens
  misc_RNA (1)...(19): siRNA sense strand
gcugagggauucuauuuac

SEQ ID NO: 542539 - RNA, 19 nt, Homo sapiens
  misc_RNA (1)...(19): siRNA sense strand
gcaccucagugaagaugug

SEQ ID NO: 542540 - RNA, 19 nt, Homo sapiens
  misc_RNA (1)...(19): siRNA sense strand
cgacgcaacuguggugcua

SEQ ID NO: 542541 - RNA, 19 nt, Homo sapiens
  misc_RNA (1)...(19): siRNA sense strand
aaacgaggauagaagacaa

SEQ ID NO: 542542 - RNA, 19 nt, Homo sapiens
  misc_RNA (1)...(19): siRNA sense strand
ggaagcugaugcaggugaa

SEQ ID NO: 542543 - RNA, 19 nt, Homo sapiens
  misc_RNA (1)...(19): siRNA sense strand
caacgaaacagagaaugaa

SEQ ID NO: 542544 - RNA, 19 nt, Homo sapiens
  misc_RNA (1)...(19): siRNA sense strand
agaaggagcuugaccucau

SEQ ID NO: 542545 - RNA, 19 nt, Homo sapiens
  misc_RNA (1)...(19): siRNA sense strand
gcugauguaucuuaucuac

SEQ ID NO: 542546 - RNA, 19 nt, Homo sapiens
  misc_RNA (1)...(19): siRNA sense strand
gcucagcgguauucaacau

SEQ ID NO: 542547 - RNA, 19 nt, Homo sapiens
  misc_RNA (1)...(19): siRNA sense strand
aaccagcccugcaugaauu

SEQ ID NO: 542548 - RNA, 19 nt, Homo sapiens
  misc_RNA (1)...(19): siRNA sense strand
auacaucagugcuuugaga

SEQ ID NO: 542549 - RNA, 19 nt, Homo sapiens
  misc_RNA (1)...(19): siRNA sense strand
gcagccuucuccuacauga

SEQ ID NO: 542550 - RNA, 19 nt, Homo sapiens
  misc_RNA (1)...(19): siRNA sense strand
ucaccuggccgcugaguuu

SEQ ID NO: 542551 - RNA, 19 nt, Homo sapiens
  misc_RNA (1)...(19): siRNA sense strand
ugagagacaaagauugaua

SEQ ID NO: 542552 - RNA, 19 nt, Homo sapiens
  misc_RNA (1)...(19): siRNA sense strand
ucaaugagagacaaagauu

SEQ ID NO: 542553 - RNA, 19 nt, Homo sapiens
  misc_RNA (1)...(19): siRNA sense strand
ggagcaacguguuugacau

SEQ ID NO: 542554 - RNA, 19 nt, Homo sapiens
  misc_RNA (1)...(19): siRNA sense strand
gccgcugaguuucgucuua

SEQ ID NO: 542555 - RNA, 19 nt, Homo sapiens
  misc_RNA (1)...(19): siRNA sense strand
cgaggaugaugaugaagga

SEQ ID NO: 542556 - RNA, 19 nt, Homo sapiens
  misc_RNA (1)...(19): siRNA sense strand
caacauccugugcaucauu

SEQ ID NO: 542557 - RNA, 19 nt, Homo sapiens
  misc_RNA (1)...(19): siRNA sense strand
aaucugagguggccaucaa

SEQ ID NO: 542558 - RNA, 19 nt, Homo sapiens
  misc_RNA (1)...(19): siRNA sense strand
gcucaucguguuuauuuau

SEQ ID NO: 542559 - RNA, 19 nt, Homo sapiens
  misc_RNA (1)...(19): siRNA sense strand
ucuaugcgcuggccauugu

SEQ ID NO: 542560 - RNA, 19 nt, Homo sapiens
  misc_RNA (1)...(19): siRNA sense strand
ugagggauucuauuuacua

SEQ ID NO: 542561 - RNA, 19 nt, Homo sapiens
  misc_RNA (1)...(19): siRNA sense strand
gacaaagauugauaaacag

SEQ ID NO: 542562 - RNA, 19 nt, Homo sapiens
  misc_RNA (1)...(19): siRNA sense strand
gaucaaugagagacaaaga

SEQ ID NO: 542563 - RNA, 19 nt, Homo sapiens
  misc_RNA (1)...(19): siRNA sense strand
gugcugauguaucuuaucu

SEQ ID NO: 542564 - RNA, 19 nt, Homo sapiens
  misc_RNA (1)...(19): siRNA sense strand
gcucuuugcugggcagguu

SEQ ID NO: 542565 - RNA, 19 nt, Homo sapiens
  misc_RNA (1)...(19): siRNA sense strand
aguggcagcuggacaagaa

SEQ ID NO: 542566 - RNA, 19 nt, Homo sapiens
  misc_RNA (1)...(19): siRNA sense strand
gaaggaccguacacaccau

SEQ ID NO: 542567 - RNA, 19 nt, Homo sapiens
  misc_RNA (1)...(19): siRNA sense strand
ggccuucgaaucaugauaa

SEQ ID NO: 542568 - RNA, 19 nt, Homo sapiens
  misc_RNA (1)...(19): siRNA sense strand
gagagcagaaggagcuuga

SEQ ID NO: 542569 - RNA, 19 nt, Homo sapiens
  misc_RNA (1)...(19): siRNA sense strand
gugggugccuccuccugua

SEQ ID NO: 542570 - RNA, 19 nt, Homo sapiens
  misc_RNA (1)...(19): siRNA sense strand
gcauacaucagugcuuuga

SEQ ID NO: 542571 - RNA, 19 nt, Homo sapiens
  misc_RNA (1)...(19): siRNA sense strand
auauaacgcuugcauacau

SEQ ID NO: 542572 - RNA, 19 nt, Homo sapiens
  misc_RNA (1)...(19): siRNA sense strand
uaucuacauugucaucaug

SEQ ID NO: 542573 - RNA, 19 nt, Homo sapiens
  misc_RNA (1)...(19): siRNA sense strand
cgucuuauacuucacugua

SEQ ID NO: 542574 - RNA, 19 nt, Homo sapiens
  misc_RNA (1)...(19): siRNA sense strand
ggacacggagggacgaugu

SEQ ID NO: 542575 - RNA, 19 nt, Homo sapiens
  misc_RNA (1)...(19): siRNA sense strand
aaugagagacaaagauuga

SEQ ID NO: 542576 - RNA, 19 nt, Homo sapiens
  misc_RNA (1)...(19): siRNA sense strand
gcaaauuuccaccgcaaag

SEQ ID NO: 542577 - RNA, 19 nt, Homo sapiens
  misc_RNA (1)...(19): siRNA sense strand
caugugcucugugccauau

SEQ ID NO: 542578 - RNA, 19 nt, Homo sapiens
  misc_RNA (1)...(19): siRNA sense strand
gauccuacauccggcugaa

SEQ ID NO: 542579 - RNA, 19 nt, Homo sapiens
  misc_RNA (1)...(19): siRNA sense strand
gugggagucuuuaguccuu

SEQ ID NO: 542580 - RNA, 19 nt, Homo sapiens
  misc_RNA (1)...(19): siRNA sense strand
gagggauucuauuuacuac

SEQ ID NO: 542581 - RNA, 19 nt, Homo sapiens
  misc_RNA (1)...(19): siRNA sense strand
gugcaucauuggugucugu

SEQ ID NO: 542582 - RNA, 19 nt, Homo sapiens
  misc_RNA (1)...(19): siRNA sense strand
uugcauacaucagugcuuu

SEQ ID NO: 542583 - RNA, 19 nt, Homo sapiens
  misc_RNA (1)...(19): siRNA sense strand
caucaugacugaguucaac

SEQ ID NO: 542584 - RNA, 19 nt, Homo sapiens
  misc_RNA (1)...(19): siRNA sense strand
ugaguuucgucuuauacuu

SEQ ID NO: 542585 - RNA, 19 nt, Homo sapiens
  misc_RNA (1)...(19): siRNA sense strand
ggaagaggaggacgaggau

SEQ ID NO: 542586 - RNA, 19 nt, Homo sapiens
  misc_RNA (1)...(19): siRNA sense strand
ggcugaggcuggcaacgaa

SEQ ID NO: 542587 - RNA, 19 nt, Homo sapiens
  misc_RNA (1)...(19): siRNA sense strand
ugagaaugaugaggaggaa

SEQ ID NO: 542588 - RNA, 19 nt, Homo sapiens
  misc_RNA (1)...(19): siRNA sense strand
gggauucuauuuacuacac

SEQ ID NO: 542589 - RNA, 19 nt, Homo sapiens
  misc_RNA (1)...(19): siRNA sense strand
gagcaacguguuugacauc

SEQ ID NO: 542590 - RNA, 19 nt, Homo sapiens
  misc_RNA (1)...(19): siRNA sense strand
aaauauaacgcuugcauac

SEQ ID NO: 542591 - RNA, 19 nt, Homo sapiens
  misc_RNA (1)...(19): siRNA sense strand
gcuucuccaucaugacuga

SEQ ID NO: 542592 - RNA, 19 nt, Homo sapiens
  misc_RNA (1)...(19): siRNA sense strand
guucaacguguucaccuuu

SEQ ID NO: 542593 - RNA, 19 nt, Homo sapiens
  misc_RNA (1)...(19): siRNA sense strand
gcucugugccauauacaug

SEQ ID NO: 542594 - RNA, 19 nt, Homo sapiens
  misc_RNA (1)...(19): siRNA sense strand
ucacaaacgaggauagaag

SEQ ID NO: 542595 - RNA, 19 nt, Homo sapiens
  misc_RNA (1)...(19): siRNA sense strand
gaaugaaaaugaggacaau

SEQ ID NO: 542596 - RNA, 19 nt, Homo sapiens
  misc_RNA (1)...(19): siRNA sense strand
cauugugugugaugacuuc

SEQ ID NO: 542597 - RNA, 19 nt, Homo sapiens
  misc_RNA (1)...(19): siRNA sense strand
ggaggacgaggaugaugau

SEQ ID NO: 542598 - RNA, 19 nt, Homo sapiens
  misc_RNA (1)...(19): siRNA sense strand
aaugacaucuucacaaacg

SEQ ID NO: 542599 - RNA, 19 nt, Homo sapiens
  misc_RNA (1)...(19): siRNA sense strand
ccagucgcauguugaucaa

SEQ ID NO: 542600 - RNA, 19 nt, Homo sapiens
  misc_RNA (1)...(19): siRNA sense strand
gccagucgcauguugauca

SEQ ID NO: 542601 - RNA, 19 nt, Homo sapiens
  misc_RNA (1)...(19): siRNA sense strand
ugaaauauaacgcuugcau

SEQ ID NO: 542602 - RNA, 19 nt, Homo sapiens
  misc_RNA (1)...(19): siRNA sense strand
ugaucgcgcucaucguguu

SEQ ID NO: 542603 - RNA, 19 nt, Homo sapiens
  misc_RNA (1)...(19): siRNA sense strand
cugcugagggauucuauuu

SEQ ID NO: 542604 - RNA, 19 nt, Homo sapiens
  misc_RNA (1)...(19): siRNA sense strand
gcuguucacaucggucaua

SEQ ID NO: 542605 - RNA, 19 nt, Homo sapiens
  misc_RNA (1)...(19): siRNA sense strand
ucaacggauuggccaacaa

SEQ ID NO: 542606 - RNA, 19 nt, Homo sapiens
  misc_RNA (1)...(19): siRNA sense strand
cacaaacgaggauagaaga

SEQ ID NO: 542607 - RNA, 19 nt, Homo sapiens
  misc_RNA (1)...(19): siRNA sense strand
gcguccaccugaacaagug

SEQ ID NO: 542608 - RNA, 19 nt, Homo sapiens
  misc_RNA (1)...(19): siRNA sense strand
gacccuggcuguggauuac

SEQ ID NO: 542609 - RNA, 19 nt, Homo sapiens
  misc_RNA (1)...(19): siRNA sense strand
gaguuucgucuuauacuuc

SEQ ID NO: 542610 - RNA, 19 nt, Homo sapiens
  misc_RNA (1)...(19): siRNA sense strand
ccgcugaguuucgucuuau

SEQ ID NO: 542611 - RNA, 19 nt, Homo sapiens
  misc_RNA (1)...(19): siRNA sense strand
ugaacgacacucugacuuc

SEQ ID NO: 542612 - RNA, 19 nt, Homo sapiens
  misc_RNA (1)...(19): siRNA sense strand
ccaucaaaaucccaauuaa

SEQ ID NO: 542613 - RNA, 19 nt, Homo sapiens
  misc_RNA (1)...(19): siRNA sense strand
ugauaaacagcagggcuua

SEQ ID NO: 542614 - RNA, 19 nt, Homo sapiens
  misc_RNA (1)...(19): siRNA sense strand
aagaggaggacgaggauga

SEQ ID NO: 542615 - RNA, 19 nt, Homo sapiens
  misc_RNA (1)...(19): siRNA sense strand
agaaugaugaggaggaaga

SEQ ID NO: 542616 - RNA, 19 nt, Homo sapiens
  misc_RNA (1)...(19): siRNA sense strand
agucgcauguugaucaaug

SEQ ID NO: 542617 - RNA, 19 nt, Homo sapiens
  misc_RNA (1)...(19): siRNA sense strand
guugaucaaugagagacaa

SEQ ID NO: 542618 - RNA, 19 nt, Homo sapiens
  misc_RNA (1)...(19): siRNA sense strand
gugcggugguccuccaugu

SEQ ID NO: 542619 - RNA, 19 nt, Homo sapiens
  misc_RNA (1)...(19): siRNA sense strand
gaaaaugaggacaaugaga

SEQ ID NO: 542620 - RNA, 19 nt, Homo sapiens
  misc_RNA (1)...(19): siRNA sense strand
ggacuccggaacagcaaga

SEQ ID NO: 542621 - RNA, 19 nt, Homo sapiens
  misc_RNA (1)...(19): siRNA sense strand
cagcgguccuuaccagaaa

SEQ ID NO: 542622 - RNA, 19 nt, Homo sapiens
  misc_RNA (1)...(19): siRNA sense strand
gaaaggccacgugaagaug

SEQ ID NO: 542623 - RNA, 19 nt, Homo sapiens
  misc_RNA (1)...(19): siRNA sense strand
ggaagcuucuguucaaucc

SEQ ID NO: 542624 - RNA, 19 nt, Homo sapiens
  misc_RNA (1)...(19): siRNA sense strand
ugaaaggccacgugaagau

SEQ ID NO: 542625 - RNA, 19 nt, Homo sapiens
  misc_RNA (1)...(19): siRNA sense strand
gcacuugugacagcaguau

SEQ ID NO: 542626 - RNA, 19 nt, Homo sapiens
  misc_RNA (1)...(19): siRNA sense strand
accggaagcuucuguucaa

SEQ ID NO: 542627 - RNA, 19 nt, Homo sapiens
  misc_RNA (1)...(19): siRNA sense strand
gugaaaggccacgugaaga

SEQ ID NO: 542628 - RNA, 19 nt, Homo sapiens
  misc_RNA (1)...(19): siRNA sense strand
ccagcgguccuuaccagaa

SEQ ID NO: 542629 - RNA, 19 nt, Homo sapiens
  misc_RNA (1)...(19): siRNA sense strand
cagcgguccuuaccagaaa

SEQ ID NO: 542630 - RNA, 19 nt, Homo sapiens
  misc_RNA (1)...(19): siRNA sense strand
gaaaggccacgugaagaug

SEQ ID NO: 542631 - RNA, 19 nt, Homo sapiens
  misc_RNA (1)...(19): siRNA sense strand
ggaagcuucuguucaaucc

SEQ ID NO: 542632 - RNA, 19 nt, Homo sapiens
  misc_RNA (1)...(19): siRNA sense strand
ugaaaggccacgugaagau

SEQ ID NO: 542633 - RNA, 19 nt, Homo sapiens
  misc_RNA (1)...(19): siRNA sense strand
gcacuugugacagcaguau

SEQ ID NO: 542634 - RNA, 19 nt, Homo sapiens
  misc_RNA (1)...(19): siRNA sense strand
accggaagcuucuguucaa

SEQ ID NO: 542635 - RNA, 19 nt, Homo sapiens
  misc_RNA (1)...(19): siRNA sense strand
gugaaaggccacgugaaga

SEQ ID NO: 542636 - RNA, 19 nt, Homo sapiens
  misc_RNA (1)...(19): siRNA sense strand
ccagcgguccuuaccagaa

SEQ ID NO: 542637 - RNA, 19 nt, Homo sapiens
  misc_RNA (1)...(19): siRNA sense strand
cagcgguccuuaccagaaa

SEQ ID NO: 542638 - RNA, 19 nt, Homo sapiens
  misc_RNA (1)...(19): siRNA sense strand
gaaaggccacgugaagaug

SEQ ID NO: 542639 - RNA, 19 nt, Homo sapiens
  misc_RNA (1)...(19): siRNA sense strand
ggaagcuucuguucaaucc

SEQ ID NO: 542640 - RNA, 19 nt, Homo sapiens
  misc_RNA (1)...(19): siRNA sense strand
ugaaaggccacgugaagau

SEQ ID NO: 542641 - RNA, 19 nt, Homo sapiens
  misc_RNA (1)...(19): siRNA sense strand
gcacuugugacagcaguau

SEQ ID NO: 542642 - RNA, 19 nt, Homo sapiens
  misc_RNA (1)...(19): siRNA sense strand
accggaagcuucuguucaa

SEQ ID NO: 542643 - RNA, 19 nt, Homo sapiens
  misc_RNA (1)...(19): siRNA sense strand
gugaaaggccacgugaaga

SEQ ID NO: 542644 - RNA, 19 nt, Homo sapiens
  misc_RNA (1)...(19): siRNA sense strand
ccagcgguccuuaccagaa

SEQ ID NO: 542645 - RNA, 19 nt, Homo sapiens
  misc_RNA (1)...(19): siRNA sense strand
cagcgguccuuaccagaaa

SEQ ID NO: 542646 - RNA, 19 nt, Homo sapiens
  misc_RNA (1)...(19): siRNA sense strand
gaaaggccacgugaagaug

SEQ ID NO: 542647 - RNA, 19 nt, Homo sapiens
  misc_RNA (1)...(19): siRNA sense strand
ggaagcuucuguucaaucc

SEQ ID NO: 542648 - RNA, 19 nt, Homo sapiens
  misc_RNA (1)...(19): siRNA sense strand
ugaaaggccacgugaagau

SEQ ID NO: 542649 - RNA, 19 nt, Homo sapiens
  misc_RNA (1)...(19): siRNA sense strand
gcacuugugacagcaguau

SEQ ID NO: 542650 - RNA, 19 nt, Homo sapiens
  misc_RNA (1)...(19): siRNA sense strand
accggaagcuucuguucaa

SEQ ID NO: 542651 - RNA, 19 nt, Homo sapiens
  misc_RNA (1)...(19): siRNA sense strand
gugaaaggccacgugaaga

SEQ ID NO: 542652 - RNA, 19 nt, Homo sapiens
  misc_RNA (1)...(19): siRNA sense strand
ccagcgguccuuaccagaa

SEQ ID NO: 542653 - RNA, 19 nt, Homo sapiens
  misc_RNA (1)...(19): siRNA sense strand
gaaacaggcugccaagaaa

SEQ ID NO: 542654 - RNA, 19 nt, Homo sapiens
  misc_RNA (1)...(19): siRNA sense strand
ggaaacaggcugccaagaa

SEQ ID NO: 542655 - RNA, 19 nt, Homo sapiens
  misc_RNA (1)...(19): siRNA sense strand
ccacugcacuuggagauaa

SEQ ID NO: 542656 - RNA, 19 nt, Homo sapiens
  misc_RNA (1)...(19): siRNA sense strand
gaugaucuguuucaaaucu

SEQ ID NO: 542657 - RNA, 19 nt, Homo sapiens
  misc_RNA (1)...(19): siRNA sense strand
caaaucgucucgccaggaa

SEQ ID NO: 542658 - RNA, 19 nt, Homo sapiens
  misc_RNA (1)...(19): siRNA sense strand
gcagaaagaaagacaauca

SEQ ID NO: 542659 - RNA, 19 nt, Homo sapiens
  misc_RNA (1)...(19): siRNA sense strand
gacaaucacgcacucguua

SEQ ID NO: 542660 - RNA, 19 nt, Homo sapiens
  misc_RNA (1)...(19): siRNA sense strand
gaagaggccucagcacagu

SEQ ID NO: 542661 - RNA, 19 nt, Homo sapiens
  misc_RNA (1)...(19): siRNA sense strand
gaucagcuguaucgcagaa

SEQ ID NO: 542662 - RNA, 19 nt, Homo sapiens
  misc_RNA (1)...(19): siRNA sense strand
cgacuuugccagagacuua

SEQ ID NO: 542663 - RNA, 19 nt, Homo sapiens
  misc_RNA (1)...(19): siRNA sense strand
gccaagacgccuuaugaua

SEQ ID NO: 542664 - RNA, 19 nt, Homo sapiens
  misc_RNA (1)...(19): siRNA sense strand
gggauucggcuaagaaauu

SEQ ID NO: 542665 - RNA, 19 nt, Homo sapiens
  misc_RNA (1)...(19): siRNA sense strand
uagagagacagacgaauua

SEQ ID NO: 542666 - RNA, 19 nt, Homo sapiens
  misc_RNA (1)...(19): siRNA sense strand
gcacuuggagauaaacaaa

SEQ ID NO: 542667 - RNA, 19 nt, Homo sapiens
  misc_RNA (1)...(19): siRNA sense strand
ggauucggcuaagaaauug

SEQ ID NO: 542668 - RNA, 19 nt, Homo sapiens
  misc_RNA (1)...(19): siRNA sense strand
ggacgcagagugaaugcua

SEQ ID NO: 542669 - RNA, 19 nt, Homo sapiens
  misc_RNA (1)...(19): siRNA sense strand
gaauuacggaggaaucauu

SEQ ID NO: 542670 - RNA, 19 nt, Homo sapiens
  misc_RNA (1)...(19): siRNA sense strand
gcccagagcugagagaaag

SEQ ID NO: 542671 - RNA, 19 nt, Homo sapiens
  misc_RNA (1)...(19): siRNA sense strand
gcagagaggcaaagaugau

SEQ ID NO: 542672 - RNA, 19 nt, Homo sapiens
  misc_RNA (1)...(19): siRNA sense strand
ucacagcccugagcacaga

SEQ ID NO: 542673 - RNA, 19 nt, Homo sapiens
  misc_RNA (1)...(19): siRNA sense strand
cagagugaaugcuaagaug

SEQ ID NO: 542674 - RNA, 19 nt, Homo sapiens
  misc_RNA (1)...(19): siRNA sense strand
cacagucacucgaacaaga

SEQ ID NO: 542675 - RNA, 19 nt, Homo sapiens
  misc_RNA (1)...(19): siRNA sense strand
caagacgccuuaugauacu

SEQ ID NO: 542676 - RNA, 19 nt, Homo sapiens
  misc_RNA (1)...(19): siRNA sense strand
ggaaagcaaacgaauccaa

SEQ ID NO: 542677 - RNA, 19 nt, Homo sapiens
  misc_RNA (1)...(19): siRNA sense strand
ggagauaaacaaaggaaag

SEQ ID NO: 542678 - RNA, 19 nt, Homo sapiens
  misc_RNA (1)...(19): siRNA sense strand
agauauggcugaggaauuc

SEQ ID NO: 542679 - RNA, 19 nt, Homo sapiens
  misc_RNA (1)...(19): siRNA sense strand
aagagcagcuuuccaacga

SEQ ID NO: 542680 - RNA, 19 nt, Homo sapiens
  misc_RNA (1)...(19): siRNA sense strand
gcaauucgagacuacaaga

SEQ ID NO: 542681 - RNA, 19 nt, Homo sapiens
  misc_RNA (1)...(19): siRNA sense strand
ccaagacgccuuaugauac

SEQ ID NO: 542682 - RNA, 19 nt, Homo sapiens
  misc_RNA (1)...(19): siRNA sense strand
ccaaggcaauucgagacua

SEQ ID NO: 542683 - RNA, 19 nt, Homo sapiens
  misc_RNA (1)...(19): siRNA sense strand
caggaaagccagucagaga

SEQ ID NO: 542684 - RNA, 19 nt, Homo sapiens
  misc_RNA (1)...(19): siRNA sense strand
gugcccaggugcuuagaaa

SEQ ID NO: 542685 - RNA, 19 nt, Homo sapiens
  misc_RNA (1)...(19): siRNA sense strand
gauaaacaaaggaaagcaa

SEQ ID NO: 542686 - RNA, 19 nt, Homo sapiens
  misc_RNA (1)...(19): siRNA sense strand
ugagaguaaugacaacgaa

SEQ ID NO: 542687 - RNA, 19 nt, Homo sapiens
  misc_RNA (1)...(19): siRNA sense strand
aaacuuggagggagcagua

SEQ ID NO: 542688 - RNA, 19 nt, Homo sapiens
  misc_RNA (1)...(19): siRNA sense strand
gaagaaaagccacaggaaa

SEQ ID NO: 542689 - RNA, 19 nt, Homo sapiens
  misc_RNA (1)...(19): siRNA sense strand
gcccagccaugucuucuca

SEQ ID NO: 542690 - RNA, 19 nt, Homo sapiens
  misc_RNA (1)...(19): siRNA sense strand
caaaggaaagcaaacgaau

SEQ ID NO: 542691 - RNA, 19 nt, Homo sapiens
  misc_RNA (1)...(19): siRNA sense strand
agaguaaugacaacgaaua

SEQ ID NO: 542692 - RNA, 19 nt, Homo sapiens
  misc_RNA (1)...(19): siRNA sense strand
gagacuggaaucagaaaga

SEQ ID NO: 542693 - RNA, 19 nt, Homo sapiens
  misc_RNA (1)...(19): siRNA sense strand
aagauucucccgacgauaa

SEQ ID NO: 542694 - RNA, 19 nt, Homo sapiens
  misc_RNA (1)...(19): siRNA sense strand
gacgcagagugaaugcuaa

SEQ ID NO: 542695 - RNA, 19 nt, Homo sapiens
  misc_RNA (1)...(19): siRNA sense strand
ggcggagacuggaaucaga

SEQ ID NO: 542696 - RNA, 19 nt, Homo sapiens
  misc_RNA (1)...(19): siRNA sense strand
uuagagagacagacgaauu

SEQ ID NO: 542697 - RNA, 19 nt, Homo sapiens
  misc_RNA (1)...(19): siRNA sense strand
gagaaauauuugcagaaac

SEQ ID NO: 542698 - RNA, 19 nt, Homo sapiens
  misc_RNA (1)...(19): siRNA sense strand
ucaaaucuguggccaagac

SEQ ID NO: 542699 - RNA, 19 nt, Homo sapiens
  misc_RNA (1)...(19): siRNA sense strand
gagagaaagugccccagaa

SEQ ID NO: 542700 - RNA, 19 nt, Homo sapiens
  misc_RNA (1)...(19): siRNA sense strand
gcagagugaaugcuaagau

SEQ ID NO: 542701 - RNA, 19 nt, Homo sapiens
  misc_RNA (1)...(19): siRNA sense strand
gaagaggcccagucuagac

SEQ ID NO: 542702 - RNA, 19 nt, Homo sapiens
  misc_RNA (1)...(19): siRNA sense strand
gagaaagugccccagaaua

SEQ ID NO: 542703 - RNA, 19 nt, Homo sapiens
  misc_RNA (1)...(19): siRNA sense strand
caaggcaauucgagacuac

SEQ ID NO: 542704 - RNA, 19 nt, Homo sapiens
  misc_RNA (1)...(19): siRNA sense strand
gaguaaugacaacgaauau

SEQ ID NO: 542705 - RNA, 19 nt, Homo sapiens
  misc_RNA (1)...(19): siRNA sense strand
augcuaagaugccggugua

SEQ ID NO: 542706 - RNA, 19 nt, Homo sapiens
  misc_RNA (1)...(19): siRNA sense strand
caacuacgauccgcuuucg

SEQ ID NO: 542707 - RNA, 19 nt, Homo sapiens
  misc_RNA (1)...(19): siRNA sense strand
ccagccaugucuucucaga

SEQ ID NO: 542708 - RNA, 19 nt, Homo sapiens
  misc_RNA (1)...(19): siRNA sense strand
gaagauucucccgacgaua

SEQ ID NO: 542709 - RNA, 19 nt, Homo sapiens
  misc_RNA (1)...(19): siRNA sense strand
gcacucucuucaccaaagu

SEQ ID NO: 542710 - RNA, 19 nt, Homo sapiens
  misc_RNA (1)...(19): siRNA sense strand
aagaagaggcccagucuag

SEQ ID NO: 542711 - RNA, 19 nt, Homo sapiens
  misc_RNA (1)...(19): siRNA sense strand
gccaccgacugcucauuug

SEQ ID NO: 542712 - RNA, 19 nt, Homo sapiens
  misc_RNA (1)...(19): siRNA sense strand
gcugauggccaaggcaauu

SEQ ID NO: 542713 - RNA, 19 nt, Homo sapiens
  misc_RNA (1)...(19): siRNA sense strand
cuacuuugaucagggagaa

SEQ ID NO: 542714 - RNA, 19 nt, Homo sapiens
  misc_RNA (1)...(19): siRNA sense strand
uggccaagacgccuuauga

SEQ ID NO: 542715 - RNA, 19 nt, Homo sapiens
  misc_RNA (1)...(19): siRNA sense strand
cggcagagaggcaaagaug

SEQ ID NO: 542716 - RNA, 19 nt, Homo sapiens
  misc_RNA (1)...(19): siRNA sense strand
caagaagaggcccagucua

SEQ ID NO: 542717 - RNA, 19 nt, Homo sapiens
  misc_RNA (1)...(19): siRNA sense strand
gagacuacaagagaagauu

SEQ ID NO: 542718 - RNA, 19 nt, Homo sapiens
  misc_RNA (1)...(19): siRNA sense strand
gaucugcacguggaaacaa

SEQ ID NO: 542719 - RNA, 19 nt, Homo sapiens
  misc_RNA (1)...(19): siRNA sense strand
ggaugcaggccaacuacga

SEQ ID NO: 542720 - RNA, 19 nt, Homo sapiens
  misc_RNA (1)...(19): siRNA sense strand
gcagcccacucugucaugu

SEQ ID NO: 542721 - RNA, 19 nt, Homo sapiens
  misc_RNA (1)...(19): siRNA sense strand
acaaaggaaagcaaacgaa

SEQ ID NO: 542722 - RNA, 19 nt, Homo sapiens
  misc_RNA (1)...(19): siRNA sense strand
ucagaaagacggugaagcu

SEQ ID NO: 542723 - RNA, 19 nt, Homo sapiens
  misc_RNA (1)...(19): siRNA sense strand
gacaacgaauauccgaucu

SEQ ID NO: 542724 - RNA, 19 nt, Homo sapiens
  misc_RNA (1)...(19): siRNA sense strand
cuucggacuucaagacaga

SEQ ID NO: 542725 - RNA, 19 nt, Homo sapiens
  misc_RNA (1)...(19): siRNA sense strand
guaaugacaacgaauaucc

SEQ ID NO: 542726 - RNA, 19 nt, Homo sapiens
  misc_RNA (1)...(19): siRNA sense strand
uagauauggcugaggaauu

SEQ ID NO: 542727 - RNA, 19 nt, Homo sapiens
  misc_RNA (1)...(19): siRNA sense strand
ccaggugcuuagaaacaau

SEQ ID NO: 542728 - RNA, 19 nt, Homo sapiens
  misc_RNA (1)...(19): siRNA sense strand
caaggaggcaagagaaguc

SEQ ID NO: 542729 - RNA, 19 nt, Homo sapiens
  misc_RNA (1)...(19): siRNA sense strand
caaucacgcacucguuaga

SEQ ID NO: 542730 - RNA, 19 nt, Homo sapiens
  misc_RNA (1)...(19): siRNA sense strand
gcccaggugcuuagaaaca

SEQ ID NO: 542731 - RNA, 19 nt, Homo sapiens
  misc_RNA (1)...(19): siRNA sense strand
ccagacagucaccagaaga

SEQ ID NO: 542732 - RNA, 19 nt, Homo sapiens
  misc_RNA (1)...(19): siRNA sense strand
aagaaaagccacaggaaaa

SEQ ID NO: 542733 - RNA, 19 nt, Homo sapiens
  misc_RNA (1)...(19): siRNA sense strand
ggaagaaaagccacaggaa

SEQ ID NO: 542734 - RNA, 19 nt, Homo sapiens
  misc_RNA (1)...(19): siRNA sense strand
gaggcccgaucagcuguau

SEQ ID NO: 542735 - RNA, 19 nt, Homo sapiens
  misc_RNA (1)...(19): siRNA sense strand
gcggagacuggaaucagaa

SEQ ID NO: 542736 - RNA, 19 nt, Homo sapiens
  misc_RNA (1)...(19): siRNA sense strand
cccacucugucaugugaaa

SEQ ID NO: 542737 - RNA, 19 nt, Homo sapiens
  misc_RNA (1)...(19): siRNA sense strand
ggacuucaagacagacaag

SEQ ID NO: 542738 - RNA, 19 nt, Homo sapiens
  misc_RNA (1)...(19): siRNA sense strand
cggcugagaguaaugacaa

SEQ ID NO: 542739 - RNA, 19 nt, Homo sapiens
  misc_RNA (1)...(19): siRNA sense strand
uuacggaggaaucauuguu

SEQ ID NO: 542740 - RNA, 19 nt, Homo sapiens
  misc_RNA (1)...(19): siRNA sense strand
ccaacgaccgagagacuca

SEQ ID NO: 542741 - RNA, 19 nt, Homo sapiens
  misc_RNA (1)...(19): siRNA sense strand
aaaggaaagcaaacgaauc

SEQ ID NO: 542742 - RNA, 19 nt, Homo sapiens
  misc_RNA (1)...(19): siRNA sense strand
gguggaggagguagauaug

SEQ ID NO: 542743 - RNA, 19 nt, Homo sapiens
  misc_RNA (1)...(19): siRNA sense strand
gcacuccccuacuuugauc

SEQ ID NO: 542744 - RNA, 19 nt, Homo sapiens
  misc_RNA (1)...(19): siRNA sense strand
auucgagacuacaagagaa

SEQ ID NO: 542745 - RNA, 19 nt, Homo sapiens
  misc_RNA (1)...(19): siRNA sense strand
cccaggagcccaucucaca

SEQ ID NO: 542746 - RNA, 19 nt, Homo sapiens
  misc_RNA (1)...(19): siRNA sense strand
cccaggugcuuagaaacaa

SEQ ID NO: 542747 - RNA, 19 nt, Homo sapiens
  misc_RNA (1)...(19): siRNA sense strand
gcagugugcccaggugcuu

SEQ ID NO: 542748 - RNA, 19 nt, Homo sapiens
  misc_RNA (1)...(19): siRNA sense strand
gagcagcccacucugucau

SEQ ID NO: 542749 - RNA, 19 nt, Homo sapiens
  misc_RNA (1)...(19): siRNA sense strand
guagauauggcugaggaau

SEQ ID NO: 542750 - RNA, 19 nt, Homo sapiens
  misc_RNA (1)...(19): siRNA sense strand
cuucaagacagacaaggaa

SEQ ID NO: 542751 - RNA, 19 nt, Homo sapiens
  misc_RNA (1)...(19): siRNA sense strand
ggcagagaggcaaagauga

SEQ ID NO: 542752 - RNA, 19 nt, Homo sapiens
  misc_RNA (1)...(19): siRNA sense strand
ggccaagacgccuuaugau

SEQ ID NO: 542753 - RNA, 19 nt, Homo sapiens
  misc_RNA (1)...(19): siRNA sense strand
gcacgugccugucucauuc

SEQ ID NO: 542754 - RNA, 19 nt, Homo sapiens
  misc_RNA (1)...(19): siRNA sense strand
caaagugggagcccgauaa

SEQ ID NO: 542755 - RNA, 19 nt, Homo sapiens
  misc_RNA (1)...(19): siRNA sense strand
gcacaagucauaccuacau

SEQ ID NO: 542756 - RNA, 19 nt, Homo sapiens
  misc_RNA (1)...(19): siRNA sense strand
aagcaaggcacaagucaua

SEQ ID NO: 542757 - RNA, 19 nt, Homo sapiens
  misc_RNA (1)...(19): siRNA sense strand
caagucauaccuacauuca

SEQ ID NO: 542758 - RNA, 19 nt, Homo sapiens
  misc_RNA (1)...(19): siRNA sense strand
agucauaccuacauucaag

SEQ ID NO: 542759 - RNA, 19 nt, Homo sapiens
  misc_RNA (1)...(19): siRNA sense strand
cacaagucauaccuacauu

SEQ ID NO: 542760 - RNA, 19 nt, Homo sapiens
  misc_RNA (1)...(19): siRNA sense strand
gggaccaugcaaaggauaa

SEQ ID NO: 542761 - RNA, 19 nt, Homo sapiens
  misc_RNA (1)...(19): siRNA sense strand
gaagcaaggcacaagucau

SEQ ID NO: 542762 - RNA, 19 nt, Homo sapiens
  misc_RNA (1)...(19): siRNA sense strand
ggaccaugcaaaggauaaa

SEQ ID NO: 542763 - RNA, 19 nt, Homo sapiens
  misc_RNA (1)...(19): siRNA sense strand
gcacgugccugucucauuc

SEQ ID NO: 542764 - RNA, 19 nt, Homo sapiens
  misc_RNA (1)...(19): siRNA sense strand
caaagugggagcccgauaa

SEQ ID NO: 542765 - RNA, 19 nt, Homo sapiens
  misc_RNA (1)...(19): siRNA sense strand
gcacaagucauaccuacau

SEQ ID NO: 542766 - RNA, 19 nt, Homo sapiens
  misc_RNA (1)...(19): siRNA sense strand
aagcaaggcacaagucaua

SEQ ID NO: 542767 - RNA, 19 nt, Homo sapiens
  misc_RNA (1)...(19): siRNA sense strand
caagucauaccuacauuca

SEQ ID NO: 542768 - RNA, 19 nt, Homo sapiens
  misc_RNA (1)...(19): siRNA sense strand
agucauaccuacauucaag

SEQ ID NO: 542769 - RNA, 19 nt, Homo sapiens
  misc_RNA (1)...(19): siRNA sense strand
cacaagucauaccuacauu

SEQ ID NO: 542770 - RNA, 19 nt, Homo sapiens
  misc_RNA (1)...(19): siRNA sense strand
gggaccaugcaaaggauaa

SEQ ID NO: 542771 - RNA, 19 nt, Homo sapiens
  misc_RNA (1)...(19): siRNA sense strand
gaagcaaggcacaagucau

SEQ ID NO: 542772 - RNA, 19 nt, Homo sapiens
  misc_RNA (1)...(19): siRNA sense strand
ggaccaugcaaaggauaaa

SEQ ID NO: 542773 - RNA, 19 nt, Homo sapiens
  misc_RNA (1)...(19): siRNA sense strand
gcacgugccugucucauuc

SEQ ID NO: 542774 - RNA, 19 nt, Homo sapiens
  misc_RNA (1)...(19): siRNA sense strand
caaagugggagcccgauaa

SEQ ID NO: 542775 - RNA, 19 nt, Homo sapiens
  misc_RNA (1)...(19): siRNA sense strand
gcacaagucauaccuacau

SEQ ID NO: 542776 - RNA, 19 nt, Homo sapiens
  misc_RNA (1)...(19): siRNA sense strand
aagcaaggcacaagucaua

SEQ ID NO: 542777 - RNA, 19 nt, Homo sapiens
  misc_RNA (1)...(19): siRNA sense strand
caagucauaccuacauuca

SEQ ID NO: 542778 - RNA, 19 nt, Homo sapiens
  misc_RNA (1)...(19): siRNA sense strand
agucauaccuacauucaag

SEQ ID NO: 542779 - RNA, 19 nt, Homo sapiens
  misc_RNA (1)...(19): siRNA sense strand
cacaagucauaccuacauu

SEQ ID NO: 542780 - RNA, 19 nt, Homo sapiens
  misc_RNA (1)...(19): siRNA sense strand
gggaccaugcaaaggauaa

SEQ ID NO: 542781 - RNA, 19 nt, Homo sapiens
  misc_RNA (1)...(19): siRNA sense strand
gaagcaaggcacaagucau

SEQ ID NO: 542782 - RNA, 19 nt, Homo sapiens
  misc_RNA (1)...(19): siRNA sense strand
ggaccaugcaaaggauaaa

SEQ ID NO: 542783 - RNA, 19 nt, Homo sapiens
  misc_RNA (1)...(19): siRNA sense strand
gcacgugccugucucauuc

SEQ ID NO: 542784 - RNA, 19 nt, Homo sapiens
  misc_RNA (1)...(19): siRNA sense strand
caaagugggagcccgauaa

SEQ ID NO: 542785 - RNA, 19 nt, Homo sapiens
  misc_RNA (1)...(19): siRNA sense strand
gcacaagucauaccuacau

SEQ ID NO: 542786 - RNA, 19 nt, Homo sapiens
  misc_RNA (1)...(19): siRNA sense strand
aagcaaggcacaagucaua

SEQ ID NO: 542787 - RNA, 19 nt, Homo sapiens
  misc_RNA (1)...(19): siRNA sense strand
caagucauaccuacauuca

SEQ ID NO: 542788 - RNA, 19 nt, Homo sapiens
  misc_RNA (1)...(19): siRNA sense strand
agucauaccuacauucaag

SEQ ID NO: 542789 - RNA, 19 nt, Homo sapiens
  misc_RNA (1)...(19): siRNA sense strand
cacaagucauaccuacauu

SEQ ID NO: 542790 - RNA, 19 nt, Homo sapiens
  misc_RNA (1)...(19): siRNA sense strand
gggaccaugcaaaggauaa

SEQ ID NO: 542791 - RNA, 19 nt, Homo sapiens
  misc_RNA (1)...(19): siRNA sense strand
gaagcaaggcacaagucau

SEQ ID NO: 542792 - RNA, 19 nt, Homo sapiens
  misc_RNA (1)...(19): siRNA sense strand
ggaccaugcaaaggauaaa

SEQ ID NO: 542793 - RNA, 19 nt, Homo sapiens
  misc_RNA (1)...(19): siRNA sense strand
gcacgugccugucucauuc

SEQ ID NO: 542794 - RNA, 19 nt, Homo sapiens
  misc_RNA (1)...(19): siRNA sense strand
caaagugggagcccgauaa

SEQ ID NO: 542795 - RNA, 19 nt, Homo sapiens
  misc_RNA (1)...(19): siRNA sense strand
gcacaagucauaccuacau

SEQ ID NO: 542796 - RNA, 19 nt, Homo sapiens
  misc_RNA (1)...(19): siRNA sense strand
aagcaaggcacaagucaua

SEQ ID NO: 542797 - RNA, 19 nt, Homo sapiens
  misc_RNA (1)...(19): siRNA sense strand
caagucauaccuacauuca

SEQ ID NO: 542798 - RNA, 19 nt, Homo sapiens
  misc_RNA (1)...(19): siRNA sense strand
agucauaccuacauucaag

SEQ ID NO: 542799 - RNA, 19 nt, Homo sapiens
  misc_RNA (1)...(19): siRNA sense strand
cacaagucauaccuacauu

SEQ ID NO: 542800 - RNA, 19 nt, Homo sapiens
  misc_RNA (1)...(19): siRNA sense strand
gggaccaugcaaaggauaa

SEQ ID NO: 542801 - RNA, 19 nt, Homo sapiens
  misc_RNA (1)...(19): siRNA sense strand
gaagcaaggcacaagucau

SEQ ID NO: 542802 - RNA, 19 nt, Homo sapiens
  misc_RNA (1)...(19): siRNA sense strand
ggaccaugcaaaggauaaa

SEQ ID NO: 542803 - RNA, 19 nt, Homo sapiens
  misc_RNA (1)...(19): siRNA sense strand
gcacgugccugucucauuc

SEQ ID NO: 542804 - RNA, 19 nt, Homo sapiens
  misc_RNA (1)...(19): siRNA sense strand
caaagugggagcccgauaa

SEQ ID NO: 542805 - RNA, 19 nt, Homo sapiens
  misc_RNA (1)...(19): siRNA sense strand
gcacaagucauaccuacau

SEQ ID NO: 542806 - RNA, 19 nt, Homo sapiens
  misc_RNA (1)...(19): siRNA sense strand
aagcaaggcacaagucaua

SEQ ID NO: 542807 - RNA, 19 nt, Homo sapiens
  misc_RNA (1)...(19): siRNA sense strand
caagucauaccuacauuca

SEQ ID NO: 542808 - RNA, 19 nt, Homo sapiens
  misc_RNA (1)...(19): siRNA sense strand
agucauaccuacauucaag

SEQ ID NO: 542809 - RNA, 19 nt, Homo sapiens
  misc_RNA (1)...(19): siRNA sense strand
cacaagucauaccuacauu

SEQ ID NO: 542810 - RNA, 19 nt, Homo sapiens
  misc_RNA (1)...(19): siRNA sense strand
gggaccaugcaaaggauaa

SEQ ID NO: 542811 - RNA, 19 nt, Homo sapiens
  misc_RNA (1)...(19): siRNA sense strand
gaagcaaggcacaagucau

SEQ ID NO: 542812 - RNA, 19 nt, Homo sapiens
  misc_RNA (1)...(19): siRNA sense strand
ggaccaugcaaaggauaaa

SEQ ID NO: 542813 - RNA, 19 nt, Homo sapiens
  misc_RNA (1)...(19): siRNA sense strand
gcacgugccugucucauuc

SEQ ID NO: 542814 - RNA, 19 nt, Homo sapiens
  misc_RNA (1)...(19): siRNA sense strand
caaagugggagcccgauaa

SEQ ID NO: 542815 - RNA, 19 nt, Homo sapiens
  misc_RNA (1)...(19): siRNA sense strand
gcacaagucauaccuacau

SEQ ID NO: 542816 - RNA, 19 nt, Homo sapiens
  misc_RNA (1)...(19): siRNA sense strand
aagcaaggcacaagucaua

SEQ ID NO: 542817 - RNA, 19 nt, Homo sapiens
  misc_RNA (1)...(19): siRNA sense strand
caagucauaccuacauuca

SEQ ID NO: 542818 - RNA, 19 nt, Homo sapiens
  misc_RNA (1)...(19): siRNA sense strand
agucauaccuacauucaag

SEQ ID NO: 542819 - RNA, 19 nt, Homo sapiens
  misc_RNA (1)...(19): siRNA sense strand
cacaagucauaccuacauu

SEQ ID NO: 542820 - RNA, 19 nt, Homo sapiens
  misc_RNA (1)...(19): siRNA sense strand
gggaccaugcaaaggauaa

SEQ ID NO: 542821 - RNA, 19 nt, Homo sapiens
  misc_RNA (1)...(19): siRNA sense strand
gaagcaaggcacaagucau

SEQ ID NO: 542822 - RNA, 19 nt, Homo sapiens
  misc_RNA (1)...(19): siRNA sense strand
ggaccaugcaaaggauaaa

SEQ ID NO: 542823 - RNA, 19 nt, Homo sapiens
  misc_RNA (1)...(19): siRNA sense strand
gcacgugccugucucauuc

SEQ ID NO: 542824 - RNA, 19 nt, Homo sapiens
  misc_RNA (1)...(19): siRNA sense strand
caaagugggagcccgauaa

SEQ ID NO: 542825 - RNA, 19 nt, Homo sapiens
  misc_RNA (1)...(19): siRNA sense strand
gcacaagucauaccuacau

SEQ ID NO: 542826 - RNA, 19 nt, Homo sapiens
  misc_RNA (1)...(19): siRNA sense strand
aagcaaggcacaagucaua

SEQ ID NO: 542827 - RNA, 19 nt, Homo sapiens
  misc_RNA (1)...(19): siRNA sense strand
caagucauaccuacauuca

SEQ ID NO: 542828 - RNA, 19 nt, Homo sapiens
  misc_RNA (1)...(19): siRNA sense strand
agucauaccuacauucaag

SEQ ID NO: 542829 - RNA, 19 nt, Homo sapiens
  misc_RNA (1)...(19): siRNA sense strand
cacaagucauaccuacauu

SEQ ID NO: 542830 - RNA, 19 nt, Homo sapiens
  misc_RNA (1)...(19): siRNA sense strand
gggaccaugcaaaggauaa

SEQ ID NO: 542831 - RNA, 19 nt, Homo sapiens
  misc_RNA (1)...(19): siRNA sense strand
gaagcaaggcacaagucau

SEQ ID NO: 542832 - RNA, 19 nt, Homo sapiens
  misc_RNA (1)...(19): siRNA sense strand
ggaccaugcaaaggauaaa

SEQ ID NO: 542833 - RNA, 19 nt, Homo sapiens
  misc_RNA (1)...(19): siRNA sense strand
gcacgugccugucucauuc

SEQ ID NO: 542834 - RNA, 19 nt, Homo sapiens
  misc_RNA (1)...(19): siRNA sense strand
caaagugggagcccgauaa

SEQ ID NO: 542835 - RNA, 19 nt, Homo sapiens
  misc_RNA (1)...(19): siRNA sense strand
gcacaagucauaccuacau

SEQ ID NO: 542836 - RNA, 19 nt, Homo sapiens
  misc_RNA (1)...(19): siRNA sense strand
aagcaaggcacaagucaua

SEQ ID NO: 542837 - RNA, 19 nt, Homo sapiens
  misc_RNA (1)...(19): siRNA sense strand
caagucauaccuacauuca

SEQ ID NO: 542838 - RNA, 19 nt, Homo sapiens
  misc_RNA (1)...(19): siRNA sense strand
agucauaccuacauucaag

SEQ ID NO: 542839 - RNA, 19 nt, Homo sapiens
  misc_RNA (1)...(19): siRNA sense strand
cacaagucauaccuacauu

SEQ ID NO: 542840 - RNA, 19 nt, Homo sapiens
  misc_RNA (1)...(19): siRNA sense strand
gggaccaugcaaaggauaa

SEQ ID NO: 542841 - RNA, 19 nt, Homo sapiens
  misc_RNA (1)...(19): siRNA sense strand
gaagcaaggcacaagucau

SEQ ID NO: 542842 - RNA, 19 nt, Homo sapiens
  misc_RNA (1)...(19): siRNA sense strand
ggaccaugcaaaggauaaa

SEQ ID NO: 542843 - RNA, 19 nt, Homo sapiens
  misc_RNA (1)...(19): siRNA sense strand
gcacgugccugucucauuc

SEQ ID NO: 542844 - RNA, 19 nt, Homo sapiens
  misc_RNA (1)...(19): siRNA sense strand
caaagugggagcccgauaa

SEQ ID NO: 542845 - RNA, 19 nt, Homo sapiens
  misc_RNA (1)...(19): siRNA sense strand
gcacaagucauaccuacau

SEQ ID NO: 542846 - RNA, 19 nt, Homo sapiens
  misc_RNA (1)...(19): siRNA sense strand
aagcaaggcacaagucaua

SEQ ID NO: 542847 - RNA, 19 nt, Homo sapiens
  misc_RNA (1)...(19): siRNA sense strand
caagucauaccuacauuca

SEQ ID NO: 542848 - RNA, 19 nt, Homo sapiens
  misc_RNA (1)...(19): siRNA sense strand
agucauaccuacauucaag

SEQ ID NO: 542849 - RNA, 19 nt, Homo sapiens
  misc_RNA (1)...(19): siRNA sense strand
cacaagucauaccuacauu

SEQ ID NO: 542850 - RNA, 19 nt, Homo sapiens
  misc_RNA (1)...(19): siRNA sense strand
gggaccaugcaaaggauaa

SEQ ID NO: 542851 - RNA, 19 nt, Homo sapiens
  misc_RNA (1)...(19): siRNA sense strand
gaagcaaggcacaagucau

SEQ ID NO: 542852 - RNA, 19 nt, Homo sapiens
  misc_RNA (1)...(19): siRNA sense strand
ggaccaugcaaaggauaaa

SEQ ID NO: 542853 - RNA, 19 nt, Homo sapiens
  misc_RNA (1)...(19): siRNA sense strand
gcacgugccugucucauuc

SEQ ID NO: 542854 - RNA, 19 nt, Homo sapiens
  misc_RNA (1)...(19): siRNA sense strand
caaagugggagcccgauaa

SEQ ID NO: 542855 - RNA, 19 nt, Homo sapiens
  misc_RNA (1)...(19): siRNA sense strand
gcacaagucauaccuacau

SEQ ID NO: 542856 - RNA, 19 nt, Homo sapiens
  misc_RNA (1)...(19): siRNA sense strand
aagcaaggcacaagucaua

SEQ ID NO: 542857 - RNA, 19 nt, Homo sapiens
  misc_RNA (1)...(19): siRNA sense strand
caagucauaccuacauuca

SEQ ID NO: 542858 - RNA, 19 nt, Homo sapiens
  misc_RNA (1)...(19): siRNA sense strand
agucauaccuacauucaag

SEQ ID NO: 542859 - RNA, 19 nt, Homo sapiens
  misc_RNA (1)...(19): siRNA sense strand
cacaagucauaccuacauu

SEQ ID NO: 542860 - RNA, 19 nt, Homo sapiens
  misc_RNA (1)...(19): siRNA sense strand
gggaccaugcaaaggauaa

SEQ ID NO: 542861 - RNA, 19 nt, Homo sapiens
  misc_RNA (1)...(19): siRNA sense strand
gaagcaaggcacaagucau

SEQ ID NO: 542862 - RNA, 19 nt, Homo sapiens
  misc_RNA (1)...(19): siRNA sense strand
ggaccaugcaaaggauaaa

SEQ ID NO: 542863 - RNA, 19 nt, Homo sapiens
  misc_RNA (1)...(19): siRNA sense strand
gcacgugccugucucauuc

SEQ ID NO: 542864 - RNA, 19 nt, Homo sapiens
  misc_RNA (1)...(19): siRNA sense strand
caaagugggagcccgauaa

SEQ ID NO: 542865 - RNA, 19 nt, Homo sapiens
  misc_RNA (1)...(19): siRNA sense strand
gcacaagucauaccuacau

SEQ ID NO: 542866 - RNA, 19 nt, Homo sapiens
  misc_RNA (1)...(19): siRNA sense strand
aagcaaggcacaagucaua

SEQ ID NO: 542867 - RNA, 19 nt, Homo sapiens
  misc_RNA (1)...(19): siRNA sense strand
caagucauaccuacauuca

SEQ ID NO: 542868 - RNA, 19 nt, Homo sapiens
  misc_RNA (1)...(19): siRNA sense strand
agucauaccuacauucaag

SEQ ID NO: 542869 - RNA, 19 nt, Homo sapiens
  misc_RNA (1)...(19): siRNA sense strand
cacaagucauaccuacauu

SEQ ID NO: 542870 - RNA, 19 nt, Homo sapiens
  misc_RNA (1)...(19): siRNA sense strand
gggaccaugcaaaggauaa

SEQ ID NO: 542871 - RNA, 19 nt, Homo sapiens
  misc_RNA (1)...(19): siRNA sense strand
gaagcaaggcacaagucau

SEQ ID NO: 542872 - RNA, 19 nt, Homo sapiens
  misc_RNA (1)...(19): siRNA sense strand
ggaccaugcaaaggauaaa

SEQ ID NO: 542873 - RNA, 19 nt, Homo sapiens
  misc_RNA (1)...(19): siRNA sense strand
gcaaagaccuggagaagau

SEQ ID NO: 542874 - RNA, 19 nt, Homo sapiens
  misc_RNA (1)...(19): siRNA sense strand
gcaaagggaucaccaggaa

SEQ ID NO: 542875 - RNA, 19 nt, Homo sapiens
  misc_RNA (1)...(19): siRNA sense strand
gcacacggcugcaugagaa

SEQ ID NO: 542876 - RNA, 19 nt, Homo sapiens
  misc_RNA (1)...(19): siRNA sense strand
gcaacggccuuccaucuga

SEQ ID NO: 542877 - RNA, 19 nt, Homo sapiens
  misc_RNA (1)...(19): siRNA sense strand
uuaaauggauggcaauuga

SEQ ID NO: 542878 - RNA, 19 nt, Homo sapiens
  misc_RNA (1)...(19): siRNA sense strand
caggagggcucgccgauuu

SEQ ID NO: 542879 - RNA, 19 nt, Homo sapiens
  misc_RNA (1)...(19): siRNA sense strand
agaugaagauuucggauuu

SEQ ID NO: 542880 - RNA, 19 nt, Homo sapiens
  misc_RNA (1)...(19): siRNA sense strand
ugaagaugcugaaagagaa

SEQ ID NO: 542881 - RNA, 19 nt, Homo sapiens
  misc_RNA (1)...(19): siRNA sense strand
uggagaagaugaugguuaa

SEQ ID NO: 542882 - RNA, 19 nt, Homo sapiens
  misc_RNA (1)...(19): siRNA sense strand
gggaaagucuguguggaaa

SEQ ID NO: 542883 - RNA, 19 nt, Homo sapiens
  misc_RNA (1)...(19): siRNA sense strand
agagacggcuggaguguga

SEQ ID NO: 542884 - RNA, 19 nt, Homo sapiens
  misc_RNA (1)...(19): siRNA sense strand
ggagaaggcgaauuuggaa

SEQ ID NO: 542885 - RNA, 19 nt, Homo sapiens
  misc_RNA (1)...(19): siRNA sense strand
cccaagacaucaacauuug

SEQ ID NO: 542886 - RNA, 19 nt, Homo sapiens
  misc_RNA (1)...(19): siRNA sense strand
gcgagcagcgggagaagua

SEQ ID NO: 542887 - RNA, 19 nt, Homo sapiens
  misc_RNA (1)...(19): siRNA sense strand
caucugacucccugauuua

SEQ ID NO: 542888 - RNA, 19 nt, Homo sapiens
  misc_RNA (1)...(19): siRNA sense strand
gcaucaacguccaguacaa

SEQ ID NO: 542889 - RNA, 19 nt, Homo sapiens
  misc_RNA (1)...(19): siRNA sense strand
ggcggaagaugaagauuuc

SEQ ID NO: 542890 - RNA, 19 nt, Homo sapiens
  misc_RNA (1)...(19): siRNA sense strand
ccacccacaugucaucaaa

SEQ ID NO: 542891 - RNA, 19 nt, Homo sapiens
  misc_RNA (1)...(19): siRNA sense strand
ccaucugacucccugauuu

SEQ ID NO: 542892 - RNA, 19 nt, Homo sapiens
  misc_RNA (1)...(19): siRNA sense strand
ccacugcuaccacaaguuu

SEQ ID NO: 542893 - RNA, 19 nt, Homo sapiens
  misc_RNA (1)...(19): siRNA sense strand
gagaagaugaugguuaaga

SEQ ID NO: 542894 - RNA, 19 nt, Homo sapiens
  misc_RNA (1)...(19): siRNA sense strand
ccacaugucaucaaauugu

SEQ ID NO: 542895 - RNA, 19 nt, Homo sapiens
  misc_RNA (1)...(19): siRNA sense strand
ccacauggauugaaaacaa

SEQ ID NO: 542896 - RNA, 19 nt, Homo sapiens
  misc_RNA (1)...(19): siRNA sense strand
gggcggaagaugaagauuu

SEQ ID NO: 542897 - RNA, 19 nt, Homo sapiens
  misc_RNA (1)...(19): siRNA sense strand
uggcggugcuggucaauga

SEQ ID NO: 542898 - RNA, 19 nt, Homo sapiens
  misc_RNA (1)...(19): siRNA sense strand
gcgaggagguggugauggu

SEQ ID NO: 542899 - RNA, 19 nt, Homo sapiens
  misc_RNA (1)...(19): siRNA sense strand
ggagauguaccgccugaug

SEQ ID NO: 542900 - RNA, 19 nt, Homo sapiens
  misc_RNA (1)...(19): siRNA sense strand
gagaccugcugucagaguu

SEQ ID NO: 542901 - RNA, 19 nt, Homo sapiens
  misc_RNA (1)...(19): siRNA sense strand
ccgugaagaugcugaaaga

SEQ ID NO: 542902 - RNA, 19 nt, Homo sapiens
  misc_RNA (1)...(19): siRNA sense strand
caacggccuuccaucugaa

SEQ ID NO: 542903 - RNA, 19 nt, Homo sapiens
  misc_RNA (1)...(19): siRNA sense strand
gugaagaugcugaaagaga

SEQ ID NO: 542904 - RNA, 19 nt, Homo sapiens
  misc_RNA (1)...(19): siRNA sense strand
cugacucccugauuuauga

SEQ ID NO: 542905 - RNA, 19 nt, Homo sapiens
  misc_RNA (1)...(19): siRNA sense strand
gaccguacaugacuauagg

SEQ ID NO: 542906 - RNA, 19 nt, Homo sapiens
  misc_RNA (1)...(19): siRNA sense strand
gucccgagauguuuaugaa

SEQ ID NO: 542907 - RNA, 19 nt, Homo sapiens
  misc_RNA (1)...(19): siRNA sense strand
ucuaggagaaggcgaauuu

SEQ ID NO: 542908 - RNA, 19 nt, Homo sapiens
  misc_RNA (1)...(19): siRNA sense strand
cacaugucaucaaauugua

SEQ ID NO: 542909 - RNA, 19 nt, Homo sapiens
  misc_RNA (1)...(19): siRNA sense strand
gaugaagauuucggauuuc

SEQ ID NO: 542910 - RNA, 19 nt, Homo sapiens
  misc_RNA (1)...(19): siRNA sense strand
gugccgaacuucacuacau

SEQ ID NO: 542911 - RNA, 19 nt, Homo sapiens
  misc_RNA (1)...(19): siRNA sense strand
cccgagauguuuaugaaga

SEQ ID NO: 542912 - RNA, 19 nt, Homo sapiens
  misc_RNA (1)...(19): siRNA sense strand
ccacaaguuugcccacaag

SEQ ID NO: 542913 - RNA, 19 nt, Homo sapiens
  misc_RNA (1)...(19): siRNA sense strand
gggcgaccguacaugacua

SEQ ID NO: 542914 - RNA, 19 nt, Homo sapiens
  misc_RNA (1)...(19): siRNA sense strand
acccacaugucaucaaauu

SEQ ID NO: 542915 - RNA, 19 nt, Homo sapiens
  misc_RNA (1)...(19): siRNA sense strand
gacccaagacaucaacauu

SEQ ID NO: 542916 - RNA, 19 nt, Homo sapiens
  misc_RNA (1)...(19): siRNA sense strand
cagggucggauuccaguua

SEQ ID NO: 542917 - RNA, 19 nt, Homo sapiens
  misc_RNA (1)...(19): siRNA sense strand
gcguauacuucuccuucuu

SEQ ID NO: 542918 - RNA, 19 nt, Homo sapiens
  misc_RNA (1)...(19): siRNA sense strand
cugguggacuguaauaaug

SEQ ID NO: 542919 - RNA, 19 nt, Homo sapiens
  misc_RNA (1)...(19): siRNA sense strand
uaagaggagagacuacuug

SEQ ID NO: 542920 - RNA, 19 nt, Homo sapiens
  misc_RNA (1)...(19): siRNA sense strand
ggauccuguuugugaauga

SEQ ID NO: 542921 - RNA, 19 nt, Homo sapiens
  misc_RNA (1)...(19): siRNA sense strand
guauacuucuccuucuuca

SEQ ID NO: 542922 - RNA, 19 nt, Homo sapiens
  misc_RNA (1)...(19): siRNA sense strand
ggaagcaggagccggacaa

SEQ ID NO: 542923 - RNA, 19 nt, Homo sapiens
  misc_RNA (1)...(19): siRNA sense strand
ugggcgaccucaucucauu

SEQ ID NO: 542924 - RNA, 19 nt, Homo sapiens
  misc_RNA (1)...(19): siRNA sense strand
ugcgagaccugcugucaga

SEQ ID NO: 542925 - RNA, 19 nt, Homo sapiens
  misc_RNA (1)...(19): siRNA sense strand
agaagaugaugguuaagag

SEQ ID NO: 542926 - RNA, 19 nt, Homo sapiens
  misc_RNA (1)...(19): siRNA sense strand
acuauaggcugguucucaa

SEQ ID NO: 542927 - RNA, 19 nt, Homo sapiens
  misc_RNA (1)...(19): siRNA sense strand
gagaaggcgaauuuggaaa

SEQ ID NO: 542928 - RNA, 19 nt, Homo sapiens
  misc_RNA (1)...(19): siRNA sense strand
gcuguccucuucuccuuca

SEQ ID NO: 542929 - RNA, 19 nt, Homo sapiens
  misc_RNA (1)...(19): siRNA sense strand
ggagauggcaaagggauca

SEQ ID NO: 542930 - RNA, 19 nt, Homo sapiens
  misc_RNA (1)...(19): siRNA sense strand
gaaccaggucuccguggau

SEQ ID NO: 542931 - RNA, 19 nt, Homo sapiens
  misc_RNA (1)...(19): siRNA sense strand
ggauggagaggccagacaa

SEQ ID NO: 542932 - RNA, 19 nt, Homo sapiens
  misc_RNA (1)...(19): siRNA sense strand
gcugguggacuguaauaau

SEQ ID NO: 542933 - RNA, 19 nt, Homo sapiens
  misc_RNA (1)...(19): siRNA sense strand
gaggcaaggagauggcaaa

SEQ ID NO: 542934 - RNA, 19 nt, Homo sapiens
  misc_RNA (1)...(19): siRNA sense strand
gcauugggccucuacuucu

SEQ ID NO: 542935 - RNA, 19 nt, Homo sapiens
  misc_RNA (1)...(19): siRNA sense strand
cugaggaggugcccagcuu

SEQ ID NO: 542936 - RNA, 19 nt, Homo sapiens
  misc_RNA (1)...(19): siRNA sense strand
cuggagaagaugaugguua

SEQ ID NO: 542937 - RNA, 19 nt, Homo sapiens
  misc_RNA (1)...(19): siRNA sense strand
gaagcaggagccggacaaa

SEQ ID NO: 542938 - RNA, 19 nt, Homo sapiens
  misc_RNA (1)...(19): siRNA sense strand
uaaauggauggcaauugaa

SEQ ID NO: 542939 - RNA, 19 nt, Homo sapiens
  misc_RNA (1)...(19): siRNA sense strand
gggauccuguuugugaaug

SEQ ID NO: 542940 - RNA, 19 nt, Homo sapiens
  misc_RNA (1)...(19): siRNA sense strand
gacggccacugcgauguug

SEQ ID NO: 542941 - RNA, 19 nt, Homo sapiens
  misc_RNA (1)...(19): siRNA sense strand
ggacaaaaggccgguguuu

SEQ ID NO: 542942 - RNA, 19 nt, Homo sapiens
  misc_RNA (1)...(19): siRNA sense strand
gcucguucaucgggacuug

SEQ ID NO: 542943 - RNA, 19 nt, Homo sapiens
  misc_RNA (1)...(19): siRNA sense strand
gugaggcgguacacaagca

SEQ ID NO: 542944 - RNA, 19 nt, Homo sapiens
  misc_RNA (1)...(19): siRNA sense strand
cagcaaagaccuggagaag

SEQ ID NO: 542945 - RNA, 19 nt, Homo sapiens
  misc_RNA (1)...(19): siRNA sense strand
caaccacccacaugucauc

SEQ ID NO: 542946 - RNA, 19 nt, Homo sapiens
  misc_RNA (1)...(19): siRNA sense strand
ggauuaaagcuggcuaugg

SEQ ID NO: 542947 - RNA, 19 nt, Homo sapiens
  misc_RNA (1)...(19): siRNA sense strand
cgacggccacugcgauguu

SEQ ID NO: 542948 - RNA, 19 nt, Homo sapiens
  misc_RNA (1)...(19): siRNA sense strand
gaaagucuguguggaaaac

SEQ ID NO: 542949 - RNA, 19 nt, Homo sapiens
  misc_RNA (1)...(19): siRNA sense strand
ggcauugggccucuacuuc

SEQ ID NO: 542950 - RNA, 19 nt, Homo sapiens
  misc_RNA (1)...(19): siRNA sense strand
cgggaaagucuguguggaa

SEQ ID NO: 542951 - RNA, 19 nt, Homo sapiens
  misc_RNA (1)...(19): siRNA sense strand
gcccagaucgggaaagucu

SEQ ID NO: 542952 - RNA, 19 nt, Homo sapiens
  misc_RNA (1)...(19): siRNA sense strand
gacuauaggcugguucuca

SEQ ID NO: 542953 - RNA, 19 nt, Homo sapiens
  misc_RNA (1)...(19): siRNA sense strand
gcacgcccuugcuguacgu

SEQ ID NO: 542954 - RNA, 19 nt, Homo sapiens
  misc_RNA (1)...(19): siRNA sense strand
ggucggauuccaguuaaau

SEQ ID NO: 542955 - RNA, 19 nt, Homo sapiens
  misc_RNA (1)...(19): siRNA sense strand
gcuugucccgagauguuua

SEQ ID NO: 542956 - RNA, 19 nt, Homo sapiens
  misc_RNA (1)...(19): siRNA sense strand
caucguggaguacgccaaa

SEQ ID NO: 542957 - RNA, 19 nt, Homo sapiens
  misc_RNA (1)...(19): siRNA sense strand
gaccugcugucagaguuca

SEQ ID NO: 542958 - RNA, 19 nt, Homo sapiens
  misc_RNA (1)...(19): siRNA sense strand
acccaagacaucaacauuu

SEQ ID NO: 542959 - RNA, 19 nt, Homo sapiens
  misc_RNA (1)...(19): siRNA sense strand
caacugcagcgaggagaug

SEQ ID NO: 542960 - RNA, 19 nt, Homo sapiens
  misc_RNA (1)...(19): siRNA sense strand
cacgcaaagugauguaugg

SEQ ID NO: 542961 - RNA, 19 nt, Homo sapiens
  misc_RNA (1)...(19): siRNA sense strand
gaggagccagggucggauu

SEQ ID NO: 542962 - RNA, 19 nt, Homo sapiens
  misc_RNA (1)...(19): siRNA sense strand
gggcgaccucaucucauuu

SEQ ID NO: 542963 - RNA, 19 nt, Homo sapiens
  misc_RNA (1)...(19): siRNA sense strand
aaccggagccuggaccaua

SEQ ID NO: 542964 - RNA, 19 nt, Homo sapiens
  misc_RNA (1)...(19): siRNA sense strand
caagagacggcuggagugu

SEQ ID NO: 542965 - RNA, 19 nt, Homo sapiens
  misc_RNA (1)...(19): siRNA sense strand
guuaaauggauggcaauug

SEQ ID NO: 542966 - RNA, 19 nt, Homo sapiens
  misc_RNA (1)...(19): siRNA sense strand
aagaugaagauuucggauu

SEQ ID NO: 542967 - RNA, 19 nt, Homo sapiens
  misc_RNA (1)...(19): siRNA sense strand
ccgcuguccucuucuccuu

SEQ ID NO: 542968 - RNA, 19 nt, Homo sapiens
  misc_RNA (1)...(19): siRNA sense strand
gcgccgugguggaguucaa

SEQ ID NO: 542969 - RNA, 19 nt, Homo sapiens
  misc_RNA (1)...(19): siRNA sense strand
ggcauucaguggcaucaac

SEQ ID NO: 542970 - RNA, 19 nt, Homo sapiens
  misc_RNA (1)...(19): siRNA sense strand
agggucggauuccaguuaa

SEQ ID NO: 542971 - RNA, 19 nt, Homo sapiens
  misc_RNA (1)...(19): siRNA sense strand
cggcuugucccgagauguu

SEQ ID NO: 542972 - RNA, 19 nt, Homo sapiens
  misc_RNA (1)...(19): siRNA sense strand
ccacgcaaagugauguaug

SEQ ID NO: 542973 - RNA, 19 nt, Homo sapiens
  misc_RNA (1)...(19): siRNA sense strand
gcaaagaccuggagaagau

SEQ ID NO: 542974 - RNA, 19 nt, Homo sapiens
  misc_RNA (1)...(19): siRNA sense strand
gcaaagggaucaccaggaa

SEQ ID NO: 542975 - RNA, 19 nt, Homo sapiens
  misc_RNA (1)...(19): siRNA sense strand
gcacacggcugcaugagaa

SEQ ID NO: 542976 - RNA, 19 nt, Homo sapiens
  misc_RNA (1)...(19): siRNA sense strand
gcaacggccuuccaucuga

SEQ ID NO: 542977 - RNA, 19 nt, Homo sapiens
  misc_RNA (1)...(19): siRNA sense strand
uuaaauggauggcaauuga

SEQ ID NO: 542978 - RNA, 19 nt, Homo sapiens
  misc_RNA (1)...(19): siRNA sense strand
caggagggcucgccgauuu

SEQ ID NO: 542979 - RNA, 19 nt, Homo sapiens
  misc_RNA (1)...(19): siRNA sense strand
agaugaagauuucggauuu

SEQ ID NO: 542980 - RNA, 19 nt, Homo sapiens
  misc_RNA (1)...(19): siRNA sense strand
caacacuccuccagucuug

SEQ ID NO: 542981 - RNA, 19 nt, Homo sapiens
  misc_RNA (1)...(19): siRNA sense strand
ugaagaugcugaaagagaa

SEQ ID NO: 542982 - RNA, 19 nt, Homo sapiens
  misc_RNA (1)...(19): siRNA sense strand
uggagaagaugaugguuaa

SEQ ID NO: 542983 - RNA, 19 nt, Homo sapiens
  misc_RNA (1)...(19): siRNA sense strand
gggaaagucuguguggaaa

SEQ ID NO: 542984 - RNA, 19 nt, Homo sapiens
  misc_RNA (1)...(19): siRNA sense strand
ugccugcucuucagacuua

SEQ ID NO: 542985 - RNA, 19 nt, Homo sapiens
  misc_RNA (1)...(19): siRNA sense strand
agagacggcuggaguguga

SEQ ID NO: 542986 - RNA, 19 nt, Homo sapiens
  misc_RNA (1)...(19): siRNA sense strand
ggagaaggcgaauuuggaa

SEQ ID NO: 542987 - RNA, 19 nt, Homo sapiens
  misc_RNA (1)...(19): siRNA sense strand
cccaagacaucaacauuug

SEQ ID NO: 542988 - RNA, 19 nt, Homo sapiens
  misc_RNA (1)...(19): siRNA sense strand
gcgagcagcgggagaagua

SEQ ID NO: 542989 - RNA, 19 nt, Homo sapiens
  misc_RNA (1)...(19): siRNA sense strand
caucugacucccugauuua

SEQ ID NO: 542990 - RNA, 19 nt, Homo sapiens
  misc_RNA (1)...(19): siRNA sense strand
gcaucaacguccaguacaa

SEQ ID NO: 542991 - RNA, 19 nt, Homo sapiens
  misc_RNA (1)...(19): siRNA sense strand
ggcggaagaugaagauuuc

SEQ ID NO: 542992 - RNA, 19 nt, Homo sapiens
  misc_RNA (1)...(19): siRNA sense strand
ccacccacaugucaucaaa

SEQ ID NO: 542993 - RNA, 19 nt, Homo sapiens
  misc_RNA (1)...(19): siRNA sense strand
ccaucugacucccugauuu

SEQ ID NO: 542994 - RNA, 19 nt, Homo sapiens
  misc_RNA (1)...(19): siRNA sense strand
ccacugcuaccacaaguuu

SEQ ID NO: 542995 - RNA, 19 nt, Homo sapiens
  misc_RNA (1)...(19): siRNA sense strand
gcagaaaagagucggauua

SEQ ID NO: 542996 - RNA, 19 nt, Homo sapiens
  misc_RNA (1)...(19): siRNA sense strand
gagaagaugaugguuaaga

SEQ ID NO: 542997 - RNA, 19 nt, Homo sapiens
  misc_RNA (1)...(19): siRNA sense strand
ccacaugucaucaaauugu

SEQ ID NO: 542998 - RNA, 19 nt, Homo sapiens
  misc_RNA (1)...(19): siRNA sense strand
ccacauggauugaaaacaa

SEQ ID NO: 542999 - RNA, 19 nt, Homo sapiens
  misc_RNA (1)...(19): siRNA sense strand
gggcggaagaugaagauuu

SEQ ID NO: 543000 - RNA, 19 nt, Homo sapiens
  misc_RNA (1)...(19): siRNA sense strand
uggcggugcuggucaauga

SEQ ID NO: 543001 - RNA, 19 nt, Homo sapiens
  misc_RNA (1)...(19): siRNA sense strand
gcgaggagguggugauggu

SEQ ID NO: 543002 - RNA, 19 nt, Homo sapiens
  misc_RNA (1)...(19): siRNA sense strand
ggagauguaccgccugaug

SEQ ID NO: 543003 - RNA, 19 nt, Homo sapiens
  misc_RNA (1)...(19): siRNA sense strand
gagaccugcugucagaguu

SEQ ID NO: 543004 - RNA, 19 nt, Homo sapiens
  misc_RNA (1)...(19): siRNA sense strand
ccgugaagaugcugaaaga

SEQ ID NO: 543005 - RNA, 19 nt, Homo sapiens
  misc_RNA (1)...(19): siRNA sense strand
caacggccuuccaucugaa

SEQ ID NO: 543006 - RNA, 19 nt, Homo sapiens
  misc_RNA (1)...(19): siRNA sense strand
gugaagaugcugaaagaga

SEQ ID NO: 543007 - RNA, 19 nt, Homo sapiens
  misc_RNA (1)...(19): siRNA sense strand
cugacucccugauuuauga

SEQ ID NO: 543008 - RNA, 19 nt, Homo sapiens
  misc_RNA (1)...(19): siRNA sense strand
gaccguacaugacuauagg

SEQ ID NO: 543009 - RNA, 19 nt, Homo sapiens
  misc_RNA (1)...(19): siRNA sense strand
gucccgagauguuuaugaa

SEQ ID NO: 543010 - RNA, 19 nt, Homo sapiens
  misc_RNA (1)...(19): siRNA sense strand
ucuaggagaaggcgaauuu

SEQ ID NO: 543011 - RNA, 19 nt, Homo sapiens
  misc_RNA (1)...(19): siRNA sense strand
cacaugucaucaaauugua

SEQ ID NO: 543012 - RNA, 19 nt, Homo sapiens
  misc_RNA (1)...(19): siRNA sense strand
gaugaagauuucggauuuc

SEQ ID NO: 543013 - RNA, 19 nt, Homo sapiens
  misc_RNA (1)...(19): siRNA sense strand
gugccgaacuucacuacau

SEQ ID NO: 543014 - RNA, 19 nt, Homo sapiens
  misc_RNA (1)...(19): siRNA sense strand
cccgagauguuuaugaaga

SEQ ID NO: 543015 - RNA, 19 nt, Homo sapiens
  misc_RNA (1)...(19): siRNA sense strand
ccacaaguuugcccacaag

SEQ ID NO: 543016 - RNA, 19 nt, Homo sapiens
  misc_RNA (1)...(19): siRNA sense strand
gggcgaccguacaugacua

SEQ ID NO: 543017 - RNA, 19 nt, Homo sapiens
  misc_RNA (1)...(19): siRNA sense strand
gcacuguaacuucgcagaa

SEQ ID NO: 543018 - RNA, 19 nt, Homo sapiens
  misc_RNA (1)...(19): siRNA sense strand
acccacaugucaucaaauu

SEQ ID NO: 543019 - RNA, 19 nt, Homo sapiens
  misc_RNA (1)...(19): siRNA sense strand
gacccaagacaucaacauu

SEQ ID NO: 543020 - RNA, 19 nt, Homo sapiens
  misc_RNA (1)...(19): siRNA sense strand
cagggucggauuccaguua

SEQ ID NO: 543021 - RNA, 19 nt, Homo sapiens
  misc_RNA (1)...(19): siRNA sense strand
gcguauacuucuccuucuu

SEQ ID NO: 543022 - RNA, 19 nt, Homo sapiens
  misc_RNA (1)...(19): siRNA sense strand
cugguggacuguaauaaug

SEQ ID NO: 543023 - RNA, 19 nt, Homo sapiens
  misc_RNA (1)...(19): siRNA sense strand
uaagaggagagacuacuug

SEQ ID NO: 543024 - RNA, 19 nt, Homo sapiens
  misc_RNA (1)...(19): siRNA sense strand
ggauccuguuugugaauga

SEQ ID NO: 543025 - RNA, 19 nt, Homo sapiens
  misc_RNA (1)...(19): siRNA sense strand
guauacuucuccuucuuca

SEQ ID NO: 543026 - RNA, 19 nt, Homo sapiens
  misc_RNA (1)...(19): siRNA sense strand
ggaagucucagcagcucuu

SEQ ID NO: 543027 - RNA, 19 nt, Homo sapiens
  misc_RNA (1)...(19): siRNA sense strand
ggaagcaggagccggacaa

SEQ ID NO: 543028 - RNA, 19 nt, Homo sapiens
  misc_RNA (1)...(19): siRNA sense strand
ugggcgaccucaucucauu

SEQ ID NO: 543029 - RNA, 19 nt, Homo sapiens
  misc_RNA (1)...(19): siRNA sense strand
ugcgagaccugcugucaga

SEQ ID NO: 543030 - RNA, 19 nt, Homo sapiens
  misc_RNA (1)...(19): siRNA sense strand
agaagaugaugguuaagag

SEQ ID NO: 543031 - RNA, 19 nt, Homo sapiens
  misc_RNA (1)...(19): siRNA sense strand
gaaaagagucggauuacca

SEQ ID NO: 543032 - RNA, 19 nt, Homo sapiens
  misc_RNA (1)...(19): siRNA sense strand
acuauaggcugguucucaa

SEQ ID NO: 543033 - RNA, 19 nt, Homo sapiens
  misc_RNA (1)...(19): siRNA sense strand
cacuguaacuucgcagaaa

SEQ ID NO: 543034 - RNA, 19 nt, Homo sapiens
  misc_RNA (1)...(19): siRNA sense strand
gagaaggcgaauuuggaaa

SEQ ID NO: 543035 - RNA, 19 nt, Homo sapiens
  misc_RNA (1)...(19): siRNA sense strand
gcuguccucuucuccuuca

SEQ ID NO: 543036 - RNA, 19 nt, Homo sapiens
  misc_RNA (1)...(19): siRNA sense strand
ggagauggcaaagggauca

SEQ ID NO: 543037 - RNA, 19 nt, Homo sapiens
  misc_RNA (1)...(19): siRNA sense strand
gaaccaggucuccguggau

SEQ ID NO: 543038 - RNA, 19 nt, Homo sapiens
  misc_RNA (1)...(19): siRNA sense strand
ggauggagaggccagacaa

SEQ ID NO: 543039 - RNA, 19 nt, Homo sapiens
  misc_RNA (1)...(19): siRNA sense strand
gcugguggacuguaauaau

SEQ ID NO: 543040 - RNA, 19 nt, Homo sapiens
  misc_RNA (1)...(19): siRNA sense strand
gcauugggccucuacuucu

SEQ ID NO: 543041 - RNA, 19 nt, Homo sapiens
  misc_RNA (1)...(19): siRNA sense strand
gaggcaaggagauggcaaa

SEQ ID NO: 543042 - RNA, 19 nt, Homo sapiens
  misc_RNA (1)...(19): siRNA sense strand
cugaggaggugcccagcuu

SEQ ID NO: 543043 - RNA, 19 nt, Homo sapiens
  misc_RNA (1)...(19): siRNA sense strand
aaacacugccugcucuuca

SEQ ID NO: 543044 - RNA, 19 nt, Homo sapiens
  misc_RNA (1)...(19): siRNA sense strand
cuggagaagaugaugguua

SEQ ID NO: 543045 - RNA, 19 nt, Homo sapiens
  misc_RNA (1)...(19): siRNA sense strand
gaagcaggagccggacaaa

SEQ ID NO: 543046 - RNA, 19 nt, Homo sapiens
  misc_RNA (1)...(19): siRNA sense strand
uaaauggauggcaauugaa

SEQ ID NO: 543047 - RNA, 19 nt, Homo sapiens
  misc_RNA (1)...(19): siRNA sense strand
gggauccuguuugugaaug

SEQ ID NO: 543048 - RNA, 19 nt, Homo sapiens
  misc_RNA (1)...(19): siRNA sense strand
gacggccacugcgauguug

SEQ ID NO: 543049 - RNA, 19 nt, Homo sapiens
  misc_RNA (1)...(19): siRNA sense strand
ggacaaaaggccgguguuu

SEQ ID NO: 543050 - RNA, 19 nt, Homo sapiens
  misc_RNA (1)...(19): siRNA sense strand
gcucguucaucgggacuug

SEQ ID NO: 543051 - RNA, 19 nt, Homo sapiens
  misc_RNA (1)...(19): siRNA sense strand
gugaggcgguacacaagca

SEQ ID NO: 543052 - RNA, 19 nt, Homo sapiens
  misc_RNA (1)...(19): siRNA sense strand
ggcauugggccucuacuuc

SEQ ID NO: 543053 - RNA, 19 nt, Homo sapiens
  misc_RNA (1)...(19): siRNA sense strand
cagcaaagaccuggagaag

SEQ ID NO: 543054 - RNA, 19 nt, Homo sapiens
  misc_RNA (1)...(19): siRNA sense strand
caaccacccacaugucauc

SEQ ID NO: 543055 - RNA, 19 nt, Homo sapiens
  misc_RNA (1)...(19): siRNA sense strand
ggauuaaagcuggcuaugg

SEQ ID NO: 543056 - RNA, 19 nt, Homo sapiens
  misc_RNA (1)...(19): siRNA sense strand
cgacggccacugcgauguu

SEQ ID NO: 543057 - RNA, 19 nt, Homo sapiens
  misc_RNA (1)...(19): siRNA sense strand
gaaagucuguguggaaaac

SEQ ID NO: 543058 - RNA, 19 nt, Homo sapiens
  misc_RNA (1)...(19): siRNA sense strand
cgggaaagucuguguggaa

SEQ ID NO: 543059 - RNA, 19 nt, Homo sapiens
  misc_RNA (1)...(19): siRNA sense strand
gcccagaucgggaaagucu

SEQ ID NO: 543060 - RNA, 19 nt, Homo sapiens
  misc_RNA (1)...(19): siRNA sense strand
gacuauaggcugguucuca

SEQ ID NO: 543061 - RNA, 19 nt, Homo sapiens
  misc_RNA (1)...(19): siRNA sense strand
ggucggauuccaguuaaau

SEQ ID NO: 543062 - RNA, 19 nt, Homo sapiens
  misc_RNA (1)...(19): siRNA sense strand
gcuugucccgagauguuua

SEQ ID NO: 543063 - RNA, 19 nt, Homo sapiens
  misc_RNA (1)...(19): siRNA sense strand
caucguggaguacgccaaa

SEQ ID NO: 543064 - RNA, 19 nt, Homo sapiens
  misc_RNA (1)...(19): siRNA sense strand
gcacgcccuugcuguacgu

SEQ ID NO: 543065 - RNA, 19 nt, Homo sapiens
  misc_RNA (1)...(19): siRNA sense strand
gaccugcugucagaguuca

SEQ ID NO: 543066 - RNA, 19 nt, Homo sapiens
  misc_RNA (1)...(19): siRNA sense strand
acccaagacaucaacauuu

SEQ ID NO: 543067 - RNA, 19 nt, Homo sapiens
  misc_RNA (1)...(19): siRNA sense strand
aaccggagccuggaccaua

SEQ ID NO: 543068 - RNA, 19 nt, Homo sapiens
  misc_RNA (1)...(19): siRNA sense strand
caacugcagcgaggagaug

SEQ ID NO: 543069 - RNA, 19 nt, Homo sapiens
  misc_RNA (1)...(19): siRNA sense strand
cacgcaaagugauguaugg

SEQ ID NO: 543070 - RNA, 19 nt, Homo sapiens
  misc_RNA (1)...(19): siRNA sense strand
gaggagccagggucggauu

SEQ ID NO: 543071 - RNA, 19 nt, Homo sapiens
  misc_RNA (1)...(19): siRNA sense strand
gggcgaccucaucucauuu

SEQ ID NO: 543072 - RNA, 19 nt, Homo sapiens
  misc_RNA (1)...(19): siRNA sense strand
gcgccgugguggaguucaa

SEQ ID NO: 543073 - RNA, 19 nt, Homo sapiens
  misc_RNA (1)...(19): siRNA sense strand
gcaaagaccuggagaagau

SEQ ID NO: 543074 - RNA, 19 nt, Homo sapiens
  misc_RNA (1)...(19): siRNA sense strand
gcaaagggaucaccaggaa

SEQ ID NO: 543075 - RNA, 19 nt, Homo sapiens
  misc_RNA (1)...(19): siRNA sense strand
gcacacggcugcaugagaa

SEQ ID NO: 543076 - RNA, 19 nt, Homo sapiens
  misc_RNA (1)...(19): siRNA sense strand
gcaacggccuuccaucuga

SEQ ID NO: 543077 - RNA, 19 nt, Homo sapiens
  misc_RNA (1)...(19): siRNA sense strand
uuaaauggauggcaauuga

SEQ ID NO: 543078 - RNA, 19 nt, Homo sapiens
  misc_RNA (1)...(19): siRNA sense strand
caggagggcucgccgauuu

SEQ ID NO: 543079 - RNA, 19 nt, Homo sapiens
  misc_RNA (1)...(19): siRNA sense strand
agaugaagauuucggauuu

SEQ ID NO: 543080 - RNA, 19 nt, Homo sapiens
  misc_RNA (1)...(19): siRNA sense strand
ugaagaugcugaaagagaa

SEQ ID NO: 543081 - RNA, 19 nt, Homo sapiens
  misc_RNA (1)...(19): siRNA sense strand
uggagaagaugaugguuaa

SEQ ID NO: 543082 - RNA, 19 nt, Homo sapiens
  misc_RNA (1)...(19): siRNA sense strand
gggaaagucuguguggaaa

SEQ ID NO: 543083 - RNA, 19 nt, Homo sapiens
  misc_RNA (1)...(19): siRNA sense strand
agagacggcuggaguguga

SEQ ID NO: 543084 - RNA, 19 nt, Homo sapiens
  misc_RNA (1)...(19): siRNA sense strand
ggagaaggcgaauuuggaa

SEQ ID NO: 543085 - RNA, 19 nt, Homo sapiens
  misc_RNA (1)...(19): siRNA sense strand
cccaagacaucaacauuug

SEQ ID NO: 543086 - RNA, 19 nt, Homo sapiens
  misc_RNA (1)...(19): siRNA sense strand
gcgagcagcgggagaagua

SEQ ID NO: 543087 - RNA, 19 nt, Homo sapiens
  misc_RNA (1)...(19): siRNA sense strand
caucugacucccugauuua

SEQ ID NO: 543088 - RNA, 19 nt, Homo sapiens
  misc_RNA (1)...(19): siRNA sense strand
gcaucaacguccaguacaa

SEQ ID NO: 543089 - RNA, 19 nt, Homo sapiens
  misc_RNA (1)...(19): siRNA sense strand
ggcggaagaugaagauuuc

SEQ ID NO: 543090 - RNA, 19 nt, Homo sapiens
  misc_RNA (1)...(19): siRNA sense strand
ccacccacaugucaucaaa

SEQ ID NO: 543091 - RNA, 19 nt, Homo sapiens
  misc_RNA (1)...(19): siRNA sense strand
ccaucugacucccugauuu

SEQ ID NO: 543092 - RNA, 19 nt, Homo sapiens
  misc_RNA (1)...(19): siRNA sense strand
ccacugcuaccacaaguuu

SEQ ID NO: 543093 - RNA, 19 nt, Homo sapiens
  misc_RNA (1)...(19): siRNA sense strand
gagaagaugaugguuaaga

SEQ ID NO: 543094 - RNA, 19 nt, Homo sapiens
  misc_RNA (1)...(19): siRNA sense strand
ccacaugucaucaaauugu

SEQ ID NO: 543095 - RNA, 19 nt, Homo sapiens
  misc_RNA (1)...(19): siRNA sense strand
ccacauggauugaaaacaa

SEQ ID NO: 543096 - RNA, 19 nt, Homo sapiens
  misc_RNA (1)...(19): siRNA sense strand
gggcggaagaugaagauuu

SEQ ID NO: 543097 - RNA, 19 nt, Homo sapiens
  misc_RNA (1)...(19): siRNA sense strand
uggcggugcuggucaauga

SEQ ID NO: 543098 - RNA, 19 nt, Homo sapiens
  misc_RNA (1)...(19): siRNA sense strand
gcgaggagguggugauggu

SEQ ID NO: 543099 - RNA, 19 nt, Homo sapiens
  misc_RNA (1)...(19): siRNA sense strand
ggagauguaccgccugaug

SEQ ID NO: 543100 - RNA, 19 nt, Homo sapiens
  misc_RNA (1)...(19): siRNA sense strand
gagaccugcugucagaguu

SEQ ID NO: 543101 - RNA, 19 nt, Homo sapiens
  misc_RNA (1)...(19): siRNA sense strand
ccgugaagaugcugaaaga

SEQ ID NO: 543102 - RNA, 19 nt, Homo sapiens
  misc_RNA (1)...(19): siRNA sense strand
caacggccuuccaucugaa

SEQ ID NO: 543103 - RNA, 19 nt, Homo sapiens
  misc_RNA (1)...(19): siRNA sense strand
gugaagaugcugaaagaga

SEQ ID NO: 543104 - RNA, 19 nt, Homo sapiens
  misc_RNA (1)...(19): siRNA sense strand
cugacucccugauuuauga

SEQ ID NO: 543105 - RNA, 19 nt, Homo sapiens
  misc_RNA (1)...(19): siRNA sense strand
gaccguacaugacuauagg

SEQ ID NO: 543106 - RNA, 19 nt, Homo sapiens
  misc_RNA (1)...(19): siRNA sense strand
gucccgagauguuuaugaa

SEQ ID NO: 543107 - RNA, 19 nt, Homo sapiens
  misc_RNA (1)...(19): siRNA sense strand
ucuaggagaaggcgaauuu

SEQ ID NO: 543108 - RNA, 19 nt, Homo sapiens
  misc_RNA (1)...(19): siRNA sense strand
cacaugucaucaaauugua

SEQ ID NO: 543109 - RNA, 19 nt, Homo sapiens
  misc_RNA (1)...(19): siRNA sense strand
gaugaagauuucggauuuc

SEQ ID NO: 543110 - RNA, 19 nt, Homo sapiens
  misc_RNA (1)...(19): siRNA sense strand
gugccgaacuucacuacau

SEQ ID NO: 543111 - RNA, 19 nt, Homo sapiens
  misc_RNA (1)...(19): siRNA sense strand
cccgagauguuuaugaaga

SEQ ID NO: 543112 - RNA, 19 nt, Homo sapiens
  misc_RNA (1)...(19): siRNA sense strand
ccacaaguuugcccacaag

SEQ ID NO: 543113 - RNA, 19 nt, Homo sapiens
  misc_RNA (1)...(19): siRNA sense strand
gggcgaccguacaugacua

SEQ ID NO: 543114 - RNA, 19 nt, Homo sapiens
  misc_RNA (1)...(19): siRNA sense strand
acccacaugucaucaaauu

SEQ ID NO: 543115 - RNA, 19 nt, Homo sapiens
  misc_RNA (1)...(19): siRNA sense strand
gacccaagacaucaacauu

SEQ ID NO: 543116 - RNA, 19 nt, Homo sapiens
  misc_RNA (1)...(19): siRNA sense strand
cagggucggauuccaguua

SEQ ID NO: 543117 - RNA, 19 nt, Homo sapiens
  misc_RNA (1)...(19): siRNA sense strand
gcguauacuucuccuucuu

SEQ ID NO: 543118 - RNA, 19 nt, Homo sapiens
  misc_RNA (1)...(19): siRNA sense strand
cugguggacuguaauaaug

SEQ ID NO: 543119 - RNA, 19 nt, Homo sapiens
  misc_RNA (1)...(19): siRNA sense strand
uaagaggagagacuacuug

SEQ ID NO: 543120 - RNA, 19 nt, Homo sapiens
  misc_RNA (1)...(19): siRNA sense strand
ggauccuguuugugaauga

SEQ ID NO: 543121 - RNA, 19 nt, Homo sapiens
  misc_RNA (1)...(19): siRNA sense strand
guauacuucuccuucuuca

SEQ ID NO: 543122 - RNA, 19 nt, Homo sapiens
  misc_RNA (1)...(19): siRNA sense strand
ggaagcaggagccggacaa

SEQ ID NO: 543123 - RNA, 19 nt, Homo sapiens
  misc_RNA (1)...(19): siRNA sense strand
ugggcgaccucaucucauu

SEQ ID NO: 543124 - RNA, 19 nt, Homo sapiens
  misc_RNA (1)...(19): siRNA sense strand
ugcgagaccugcugucaga

SEQ ID NO: 543125 - RNA, 19 nt, Homo sapiens
  misc_RNA (1)...(19): siRNA sense strand
agaagaugaugguuaagag

SEQ ID NO: 543126 - RNA, 19 nt, Homo sapiens
  misc_RNA (1)...(19): siRNA sense strand
acuauaggcugguucucaa

SEQ ID NO: 543127 - RNA, 19 nt, Homo sapiens
  misc_RNA (1)...(19): siRNA sense strand
gagaaggcgaauuuggaaa

SEQ ID NO: 543128 - RNA, 19 nt, Homo sapiens
  misc_RNA (1)...(19): siRNA sense strand
gcuguccucuucuccuuca

SEQ ID NO: 543129 - RNA, 19 nt, Homo sapiens
  misc_RNA (1)...(19): siRNA sense strand
ggagauggcaaagggauca

SEQ ID NO: 543130 - RNA, 19 nt, Homo sapiens
  misc_RNA (1)...(19): siRNA sense strand
gaaccaggucuccguggau

SEQ ID NO: 543131 - RNA, 19 nt, Homo sapiens
  misc_RNA (1)...(19): siRNA sense strand
ggauggagaggccagacaa

SEQ ID NO: 543132 - RNA, 19 nt, Homo sapiens
  misc_RNA (1)...(19): siRNA sense strand
gcugguggacuguaauaau

SEQ ID NO: 543133 - RNA, 19 nt, Homo sapiens
  misc_RNA (1)...(19): siRNA sense strand
gaggcaaggagauggcaaa

SEQ ID NO: 543134 - RNA, 19 nt, Homo sapiens
  misc_RNA (1)...(19): siRNA sense strand
gcauugggccucuacuucu

SEQ ID NO: 543135 - RNA, 19 nt, Homo sapiens
  misc_RNA (1)...(19): siRNA sense strand
cugaggaggugcccagcuu

SEQ ID NO: 543136 - RNA, 19 nt, Homo sapiens
  misc_RNA (1)...(19): siRNA sense strand
cuggagaagaugaugguua

SEQ ID NO: 543137 - RNA, 19 nt, Homo sapiens
  misc_RNA (1)...(19): siRNA sense strand
gaagcaggagccggacaaa

SEQ ID NO: 543138 - RNA, 19 nt, Homo sapiens
  misc_RNA (1)...(19): siRNA sense strand
uaaauggauggcaauugaa

SEQ ID NO: 543139 - RNA, 19 nt, Homo sapiens
  misc_RNA (1)...(19): siRNA sense strand
gggauccuguuugugaaug

SEQ ID NO: 543140 - RNA, 19 nt, Homo sapiens
  misc_RNA (1)...(19): siRNA sense strand
gacggccacugcgauguug

SEQ ID NO: 543141 - RNA, 19 nt, Homo sapiens
  misc_RNA (1)...(19): siRNA sense strand
ggacaaaaggccgguguuu

SEQ ID NO: 543142 - RNA, 19 nt, Homo sapiens
  misc_RNA (1)...(19): siRNA sense strand
gcucguucaucgggacuug

SEQ ID NO: 543143 - RNA, 19 nt, Homo sapiens
  misc_RNA (1)...(19): siRNA sense strand
gugaggcgguacacaagca

SEQ ID NO: 543144 - RNA, 19 nt, Homo sapiens
  misc_RNA (1)...(19): siRNA sense strand
cagcaaagaccuggagaag

SEQ ID NO: 543145 - RNA, 19 nt, Homo sapiens
  misc_RNA (1)...(19): siRNA sense strand
caaccacccacaugucauc

SEQ ID NO: 543146 - RNA, 19 nt, Homo sapiens
  misc_RNA (1)...(19): siRNA sense strand
ggauuaaagcuggcuaugg

SEQ ID NO: 543147 - RNA, 19 nt, Homo sapiens
  misc_RNA (1)...(19): siRNA sense strand
cgacggccacugcgauguu

SEQ ID NO: 543148 - RNA, 19 nt, Homo sapiens
  misc_RNA (1)...(19): siRNA sense strand
gaaagucuguguggaaaac

SEQ ID NO: 543149 - RNA, 19 nt, Homo sapiens
  misc_RNA (1)...(19): siRNA sense strand
ggcauugggccucuacuuc

SEQ ID NO: 543150 - RNA, 19 nt, Homo sapiens
  misc_RNA (1)...(19): siRNA sense strand
cgggaaagucuguguggaa

SEQ ID NO: 543151 - RNA, 19 nt, Homo sapiens
  misc_RNA (1)...(19): siRNA sense strand
gcccagaucgggaaagucu

SEQ ID NO: 543152 - RNA, 19 nt, Homo sapiens
  misc_RNA (1)...(19): siRNA sense strand
gacuauaggcugguucuca

SEQ ID NO: 543153 - RNA, 19 nt, Homo sapiens
  misc_RNA (1)...(19): siRNA sense strand
gcacgcccuugcuguacgu

SEQ ID NO: 543154 - RNA, 19 nt, Homo sapiens
  misc_RNA (1)...(19): siRNA sense strand
ggucggauuccaguuaaau

SEQ ID NO: 543155 - RNA, 19 nt, Homo sapiens
  misc_RNA (1)...(19): siRNA sense strand
gcuugucccgagauguuua

SEQ ID NO: 543156 - RNA, 19 nt, Homo sapiens
  misc_RNA (1)...(19): siRNA sense strand
caucguggaguacgccaaa

SEQ ID NO: 543157 - RNA, 19 nt, Homo sapiens
  misc_RNA (1)...(19): siRNA sense strand
gaccugcugucagaguuca

SEQ ID NO: 543158 - RNA, 19 nt, Homo sapiens
  misc_RNA (1)...(19): siRNA sense strand
acccaagacaucaacauuu

SEQ ID NO: 543159 - RNA, 19 nt, Homo sapiens
  misc_RNA (1)...(19): siRNA sense strand
caacugcagcgaggagaug

SEQ ID NO: 543160 - RNA, 19 nt, Homo sapiens
  misc_RNA (1)...(19): siRNA sense strand
cacgcaaagugauguaugg

SEQ ID NO: 543161 - RNA, 19 nt, Homo sapiens
  misc_RNA (1)...(19): siRNA sense strand
gaggagccagggucggauu

SEQ ID NO: 543162 - RNA, 19 nt, Homo sapiens
  misc_RNA (1)...(19): siRNA sense strand
gggcgaccucaucucauuu

SEQ ID NO: 543163 - RNA, 19 nt, Homo sapiens
  misc_RNA (1)...(19): siRNA sense strand
aaccggagccuggaccaua

SEQ ID NO: 543164 - RNA, 19 nt, Homo sapiens
  misc_RNA (1)...(19): siRNA sense strand
caagagacggcuggagugu

SEQ ID NO: 543165 - RNA, 19 nt, Homo sapiens
  misc_RNA (1)...(19): siRNA sense strand
guuaaauggauggcaauug

SEQ ID NO: 543166 - RNA, 19 nt, Homo sapiens
  misc_RNA (1)...(19): siRNA sense strand
aagaugaagauuucggauu

SEQ ID NO: 543167 - RNA, 19 nt, Homo sapiens
  misc_RNA (1)...(19): siRNA sense strand
ccgcuguccucuucuccuu

SEQ ID NO: 543168 - RNA, 19 nt, Homo sapiens
  misc_RNA (1)...(19): siRNA sense strand
gcgccgugguggaguucaa

SEQ ID NO: 543169 - RNA, 19 nt, Homo sapiens
  misc_RNA (1)...(19): siRNA sense strand
ggcauucaguggcaucaac

SEQ ID NO: 543170 - RNA, 19 nt, Homo sapiens
  misc_RNA (1)...(19): siRNA sense strand
agggucggauuccaguuaa

SEQ ID NO: 543171 - RNA, 19 nt, Homo sapiens
  misc_RNA (1)...(19): siRNA sense strand
cggcuugucccgagauguu

SEQ ID NO: 543172 - RNA, 19 nt, Homo sapiens
  misc_RNA (1)...(19): siRNA sense strand
ccacgcaaagugauguaug

SEQ ID NO: 543173 - RNA, 19 nt, Homo sapiens
  misc_RNA (1)...(19): siRNA sense strand
gcaaagaccuggagaagau

SEQ ID NO: 543174 - RNA, 19 nt, Homo sapiens
  misc_RNA (1)...(19): siRNA sense strand
gcaaagggaucaccaggaa

SEQ ID NO: 543175 - RNA, 19 nt, Homo sapiens
  misc_RNA (1)...(19): siRNA sense strand
gcacacggcugcaugagaa

SEQ ID NO: 543176 - RNA, 19 nt, Homo sapiens
  misc_RNA (1)...(19): siRNA sense strand
gcaacggccuuccaucuga

SEQ ID NO: 543177 - RNA, 19 nt, Homo sapiens
  misc_RNA (1)...(19): siRNA sense strand
uuaaauggauggcaauuga

SEQ ID NO: 543178 - RNA, 19 nt, Homo sapiens
  misc_RNA (1)...(19): siRNA sense strand
caggagggcucgccgauuu

SEQ ID NO: 543179 - RNA, 19 nt, Homo sapiens
  misc_RNA (1)...(19): siRNA sense strand
agaugaagauuucggauuu

SEQ ID NO: 543180 - RNA, 19 nt, Homo sapiens
  misc_RNA (1)...(19): siRNA sense strand
ugaagaugcugaaagagaa

SEQ ID NO: 543181 - RNA, 19 nt, Homo sapiens
  misc_RNA (1)...(19): siRNA sense strand
uggagaagaugaugguuaa

SEQ ID NO: 543182 - RNA, 19 nt, Homo sapiens
  misc_RNA (1)...(19): siRNA sense strand
gggaaagucuguguggaaa

SEQ ID NO: 543183 - RNA, 19 nt, Homo sapiens
  misc_RNA (1)...(19): siRNA sense strand
agagacggcuggaguguga

SEQ ID NO: 543184 - RNA, 19 nt, Homo sapiens
  misc_RNA (1)...(19): siRNA sense strand
ggagaaggcgaauuuggaa

SEQ ID NO: 543185 - RNA, 19 nt, Homo sapiens
  misc_RNA (1)...(19): siRNA sense strand
cccaagacaucaacauuug

SEQ ID NO: 543186 - RNA, 19 nt, Homo sapiens
  misc_RNA (1)...(19): siRNA sense strand
gcgagcagcgggagaagua

SEQ ID NO: 543187 - RNA, 19 nt, Homo sapiens
  misc_RNA (1)...(19): siRNA sense strand
caucugacucccugauuua

SEQ ID NO: 543188 - RNA, 19 nt, Homo sapiens
  misc_RNA (1)...(19): siRNA sense strand
gcaucaacguccaguacaa

SEQ ID NO: 543189 - RNA, 19 nt, Homo sapiens
  misc_RNA (1)...(19): siRNA sense strand
ggcggaagaugaagauuuc

SEQ ID NO: 543190 - RNA, 19 nt, Homo sapiens
  misc_RNA (1)...(19): siRNA sense strand
ccacccacaugucaucaaa

SEQ ID NO: 543191 - RNA, 19 nt, Homo sapiens
  misc_RNA (1)...(19): siRNA sense strand
ccaucugacucccugauuu

SEQ ID NO: 543192 - RNA, 19 nt, Homo sapiens
  misc_RNA (1)...(19): siRNA sense strand
ccacugcuaccacaaguuu

SEQ ID NO: 543193 - RNA, 19 nt, Homo sapiens
  misc_RNA (1)...(19): siRNA sense strand
gagaagaugaugguuaaga

SEQ ID NO: 543194 - RNA, 19 nt, Homo sapiens
  misc_RNA (1)...(19): siRNA sense strand
ccacaugucaucaaauugu

SEQ ID NO: 543195 - RNA, 19 nt, Homo sapiens
  misc_RNA (1)...(19): siRNA sense strand
ccacauggauugaaaacaa

SEQ ID NO: 543196 - RNA, 19 nt, Homo sapiens
  misc_RNA (1)...(19): siRNA sense strand
gggcggaagaugaagauuu

SEQ ID NO: 543197 - RNA, 19 nt, Homo sapiens
  misc_RNA (1)...(19): siRNA sense strand
uggcggugcuggucaauga

SEQ ID NO: 543198 - RNA, 19 nt, Homo sapiens
  misc_RNA (1)...(19): siRNA sense strand
gcgaggagguggugauggu

SEQ ID NO: 543199 - RNA, 19 nt, Homo sapiens
  misc_RNA (1)...(19): siRNA sense strand
ggagauguaccgccugaug

SEQ ID NO: 543200 - RNA, 19 nt, Homo sapiens
  misc_RNA (1)...(19): siRNA sense strand
gagaccugcugucagaguu

SEQ ID NO: 543201 - RNA, 19 nt, Homo sapiens
  misc_RNA (1)...(19): siRNA sense strand
ccgugaagaugcugaaaga

SEQ ID NO: 543202 - RNA, 19 nt, Homo sapiens
  misc_RNA (1)...(19): siRNA sense strand
caacggccuuccaucugaa

SEQ ID NO: 543203 - RNA, 19 nt, Homo sapiens
  misc_RNA (1)...(19): siRNA sense strand
gugaagaugcugaaagaga

SEQ ID NO: 543204 - RNA, 19 nt, Homo sapiens
  misc_RNA (1)...(19): siRNA sense strand
cugacucccugauuuauga

SEQ ID NO: 543205 - RNA, 19 nt, Homo sapiens
  misc_RNA (1)...(19): siRNA sense strand
gaccguacaugacuauagg

SEQ ID NO: 543206 - RNA, 19 nt, Homo sapiens
  misc_RNA (1)...(19): siRNA sense strand
gucccgagauguuuaugaa

SEQ ID NO: 543207 - RNA, 19 nt, Homo sapiens
  misc_RNA (1)...(19): siRNA sense strand
ucuaggagaaggcgaauuu

SEQ ID NO: 543208 - RNA, 19 nt, Homo sapiens
  misc_RNA (1)...(19): siRNA sense strand
cacaugucaucaaauugua

SEQ ID NO: 543209 - RNA, 19 nt, Homo sapiens
  misc_RNA (1)...(19): siRNA sense strand
gaugaagauuucggauuuc

SEQ ID NO: 543210 - RNA, 19 nt, Homo sapiens
  misc_RNA (1)...(19): siRNA sense strand
gugccgaacuucacuacau

SEQ ID NO: 543211 - RNA, 19 nt, Homo sapiens
  misc_RNA (1)...(19): siRNA sense strand
cccgagauguuuaugaaga

SEQ ID NO: 543212 - RNA, 19 nt, Homo sapiens
  misc_RNA (1)...(19): siRNA sense strand
ccacaaguuugcccacaag

SEQ ID NO: 543213 - RNA, 19 nt, Homo sapiens
  misc_RNA (1)...(19): siRNA sense strand
gggcgaccguacaugacua

SEQ ID NO: 543214 - RNA, 19 nt, Homo sapiens
  misc_RNA (1)...(19): siRNA sense strand
acccacaugucaucaaauu

SEQ ID NO: 543215 - RNA, 19 nt, Homo sapiens
  misc_RNA (1)...(19): siRNA sense strand
gacccaagacaucaacauu

SEQ ID NO: 543216 - RNA, 19 nt, Homo sapiens
  misc_RNA (1)...(19): siRNA sense strand
cagggucggauuccaguua

SEQ ID NO: 543217 - RNA, 19 nt, Homo sapiens
  misc_RNA (1)...(19): siRNA sense strand
gcguauacuucuccuucuu

SEQ ID NO: 543218 - RNA, 19 nt, Homo sapiens
  misc_RNA (1)...(19): siRNA sense strand
cugguggacuguaauaaug

SEQ ID NO: 543219 - RNA, 19 nt, Homo sapiens
  misc_RNA (1)...(19): siRNA sense strand
uaagaggagagacuacuug

SEQ ID NO: 543220 - RNA, 19 nt, Homo sapiens
  misc_RNA (1)...(19): siRNA sense strand
ggauccuguuugugaauga

SEQ ID NO: 543221 - RNA, 19 nt, Homo sapiens
  misc_RNA (1)...(19): siRNA sense strand
guauacuucuccuucuuca

SEQ ID NO: 543222 - RNA, 19 nt, Homo sapiens
  misc_RNA (1)...(19): siRNA sense strand
ggaagcaggagccggacaa

SEQ ID NO: 543223 - RNA, 19 nt, Homo sapiens
  misc_RNA (1)...(19): siRNA sense strand
ugggcgaccucaucucauu

SEQ ID NO: 543224 - RNA, 19 nt, Homo sapiens
  misc_RNA (1)...(19): siRNA sense strand
ugcgagaccugcugucaga

SEQ ID NO: 543225 - RNA, 19 nt, Homo sapiens
  misc_RNA (1)...(19): siRNA sense strand
agaagaugaugguuaagag

SEQ ID NO: 543226 - RNA, 19 nt, Homo sapiens
  misc_RNA (1)...(19): siRNA sense strand
acuauaggcugguucucaa

SEQ ID NO: 543227 - RNA, 19 nt, Homo sapiens
  misc_RNA (1)...(19): siRNA sense strand
gagaaggcgaauuuggaaa

SEQ ID NO: 543228 - RNA, 19 nt, Homo sapiens
  misc_RNA (1)...(19): siRNA sense strand
gcuguccucuucuccuuca

SEQ ID NO: 543229 - RNA, 19 nt, Homo sapiens
  misc_RNA (1)...(19): siRNA sense strand
ggagauggcaaagggauca

SEQ ID NO: 543230 - RNA, 19 nt, Homo sapiens
  misc_RNA (1)...(19): siRNA sense strand
gaaccaggucuccguggau

SEQ ID NO: 543231 - RNA, 19 nt, Homo sapiens
  misc_RNA (1)...(19): siRNA sense strand
ggauggagaggccagacaa

SEQ ID NO: 543232 - RNA, 19 nt, Homo sapiens
  misc_RNA (1)...(19): siRNA sense strand
gcugguggacuguaauaau

SEQ ID NO: 543233 - RNA, 19 nt, Homo sapiens
  misc_RNA (1)...(19): siRNA sense strand
gaggcaaggagauggcaaa

SEQ ID NO: 543234 - RNA, 19 nt, Homo sapiens
  misc_RNA (1)...(19): siRNA sense strand
gcauugggccucuacuucu

SEQ ID NO: 543235 - RNA, 19 nt, Homo sapiens
  misc_RNA (1)...(19): siRNA sense strand
cugaggaggugcccagcuu

SEQ ID NO: 543236 - RNA, 19 nt, Homo sapiens
  misc_RNA (1)...(19): siRNA sense strand
cuggagaagaugaugguua

SEQ ID NO: 543237 - RNA, 19 nt, Homo sapiens
  misc_RNA (1)...(19): siRNA sense strand
gaagcaggagccggacaaa

SEQ ID NO: 543238 - RNA, 19 nt, Homo sapiens
  misc_RNA (1)...(19): siRNA sense strand
uaaauggauggcaauugaa

SEQ ID NO: 543239 - RNA, 19 nt, Homo sapiens
  misc_RNA (1)...(19): siRNA sense strand
gggauccuguuugugaaug

SEQ ID NO: 543240 - RNA, 19 nt, Homo sapiens
  misc_RNA (1)...(19): siRNA sense strand
gacggccacugcgauguug

SEQ ID NO: 543241 - RNA, 19 nt, Homo sapiens
  misc_RNA (1)...(19): siRNA sense strand
ggacaaaaggccgguguuu

SEQ ID NO: 543242 - RNA, 19 nt, Homo sapiens
  misc_RNA (1)...(19): siRNA sense strand
gcucguucaucgggacuug

SEQ ID NO: 543243 - RNA, 19 nt, Homo sapiens
  misc_RNA (1)...(19): siRNA sense strand
gugaggcgguacacaagca

SEQ ID NO: 543244 - RNA, 19 nt, Homo sapiens
  misc_RNA (1)...(19): siRNA sense strand
cagcaaagaccuggagaag

SEQ ID NO: 543245 - RNA, 19 nt, Homo sapiens
  misc_RNA (1)...(19): siRNA sense strand
caaccacccacaugucauc

SEQ ID NO: 543246 - RNA, 19 nt, Homo sapiens
  misc_RNA (1)...(19): siRNA sense strand
ggauuaaagcuggcuaugg

SEQ ID NO: 543247 - RNA, 19 nt, Homo sapiens
  misc_RNA (1)...(19): siRNA sense strand
cgacggccacugcgauguu

SEQ ID NO: 543248 - RNA, 19 nt, Homo sapiens
  misc_RNA (1)...(19): siRNA sense strand
gaaagucuguguggaaaac

SEQ ID NO: 543249 - RNA, 19 nt, Homo sapiens
  misc_RNA (1)...(19): siRNA sense strand
ggcauugggccucuacuuc

SEQ ID NO: 543250 - RNA, 19 nt, Homo sapiens
  misc_RNA (1)...(19): siRNA sense strand
cgggaaagucuguguggaa

SEQ ID NO: 543251 - RNA, 19 nt, Homo sapiens
  misc_RNA (1)...(19): siRNA sense strand
gcccagaucgggaaagucu

SEQ ID NO: 543252 - RNA, 19 nt, Homo sapiens
  misc_RNA (1)...(19): siRNA sense strand
gacuauaggcugguucuca

SEQ ID NO: 543253 - RNA, 19 nt, Homo sapiens
  misc_RNA (1)...(19): siRNA sense strand
gcacgcccuugcuguacgu

SEQ ID NO: 543254 - RNA, 19 nt, Homo sapiens
  misc_RNA (1)...(19): siRNA sense strand
ggucggauuccaguuaaau

SEQ ID NO: 543255 - RNA, 19 nt, Homo sapiens
  misc_RNA (1)...(19): siRNA sense strand
gcuugucccgagauguuua

SEQ ID NO: 543256 - RNA, 19 nt, Homo sapiens
  misc_RNA (1)...(19): siRNA sense strand
caucguggaguacgccaaa

SEQ ID NO: 543257 - RNA, 19 nt, Homo sapiens
  misc_RNA (1)...(19): siRNA sense strand
gaccugcugucagaguuca

SEQ ID NO: 543258 - RNA, 19 nt, Homo sapiens
  misc_RNA (1)...(19): siRNA sense strand
acccaagacaucaacauuu

SEQ ID NO: 543259 - RNA, 19 nt, Homo sapiens
  misc_RNA (1)...(19): siRNA sense strand
caacugcagcgaggagaug

SEQ ID NO: 543260 - RNA, 19 nt, Homo sapiens
  misc_RNA (1)...(19): siRNA sense strand
cacgcaaagugauguaugg

SEQ ID NO: 543261 - RNA, 19 nt, Homo sapiens
  misc_RNA (1)...(19): siRNA sense strand
gaggagccagggucggauu

SEQ ID NO: 543262 - RNA, 19 nt, Homo sapiens
  misc_RNA (1)...(19): siRNA sense strand
gggcgaccucaucucauuu

SEQ ID NO: 543263 - RNA, 19 nt, Homo sapiens
  misc_RNA (1)...(19): siRNA sense strand
aaccggagccuggaccaua

SEQ ID NO: 543264 - RNA, 19 nt, Homo sapiens
  misc_RNA (1)...(19): siRNA sense strand
caagagacggcuggagugu

SEQ ID NO: 543265 - RNA, 19 nt, Homo sapiens
  misc_RNA (1)...(19): siRNA sense strand
guuaaauggauggcaauug

SEQ ID NO: 543266 - RNA, 19 nt, Homo sapiens
  misc_RNA (1)...(19): siRNA sense strand
aagaugaagauuucggauu

SEQ ID NO: 543267 - RNA, 19 nt, Homo sapiens
  misc_RNA (1)...(19): siRNA sense strand
ccgcuguccucuucuccuu

SEQ ID NO: 543268 - RNA, 19 nt, Homo sapiens
  misc_RNA (1)...(19): siRNA sense strand
gcgccgugguggaguucaa

SEQ ID NO: 543269 - RNA, 19 nt, Homo sapiens
  misc_RNA (1)...(19): siRNA sense strand
ggcauucaguggcaucaac

SEQ ID NO: 543270 - RNA, 19 nt, Homo sapiens
  misc_RNA (1)...(19): siRNA sense strand
agggucggauuccaguuaa

SEQ ID NO: 543271 - RNA, 19 nt, Homo sapiens
  misc_RNA (1)...(19): siRNA sense strand
cggcuugucccgagauguu

SEQ ID NO: 543272 - RNA, 19 nt, Homo sapiens
  misc_RNA (1)...(19): siRNA sense strand
ccacgcaaagugauguaug

SEQ ID NO: 543273 - RNA, 19 nt, Homo sapiens
  misc_RNA (1)...(19): siRNA sense strand
gcaaagaccuggagaagau

SEQ ID NO: 543274 - RNA, 19 nt, Homo sapiens
  misc_RNA (1)...(19): siRNA sense strand
gcaaagggaucaccaggaa

SEQ ID NO: 543275 - RNA, 19 nt, Homo sapiens
  misc_RNA (1)...(19): siRNA sense strand
gcacacggcugcaugagaa

SEQ ID NO: 543276 - RNA, 19 nt, Homo sapiens
  misc_RNA (1)...(19): siRNA sense strand
gcaacggccuuccaucuga

SEQ ID NO: 543277 - RNA, 19 nt, Homo sapiens
  misc_RNA (1)...(19): siRNA sense strand
uuaaauggauggcaauuga

SEQ ID NO: 543278 - RNA, 19 nt, Homo sapiens
  misc_RNA (1)...(19): siRNA sense strand
caggagggcucgccgauuu

SEQ ID NO: 543279 - RNA, 19 nt, Homo sapiens
  misc_RNA (1)...(19): siRNA sense strand
agaugaagauuucggauuu

SEQ ID NO: 543280 - RNA, 19 nt, Homo sapiens
  misc_RNA (1)...(19): siRNA sense strand
ugaagaugcugaaagagaa

SEQ ID NO: 543281 - RNA, 19 nt, Homo sapiens
  misc_RNA (1)...(19): siRNA sense strand
uggagaagaugaugguuaa

SEQ ID NO: 543282 - RNA, 19 nt, Homo sapiens
  misc_RNA (1)...(19): siRNA sense strand
gggaaagucuguguggaaa

SEQ ID NO: 543283 - RNA, 19 nt, Homo sapiens
  misc_RNA (1)...(19): siRNA sense strand
agagacggcuggaguguga

SEQ ID NO: 543284 - RNA, 19 nt, Homo sapiens
  misc_RNA (1)...(19): siRNA sense strand
ggagaaggcgaauuuggaa

SEQ ID NO: 543285 - RNA, 19 nt, Homo sapiens
  misc_RNA (1)...(19): siRNA sense strand
cccaagacaucaacauuug

SEQ ID NO: 543286 - RNA, 19 nt, Homo sapiens
  misc_RNA (1)...(19): siRNA sense strand
gcgagcagcgggagaagua

SEQ ID NO: 543287 - RNA, 19 nt, Homo sapiens
  misc_RNA (1)...(19): siRNA sense strand
caucugacucccugauuua

SEQ ID NO: 543288 - RNA, 19 nt, Homo sapiens
  misc_RNA (1)...(19): siRNA sense strand
gcaucaacguccaguacaa

SEQ ID NO: 543289 - RNA, 19 nt, Homo sapiens
  misc_RNA (1)...(19): siRNA sense strand
ggcggaagaugaagauuuc

SEQ ID NO: 543290 - RNA, 19 nt, Homo sapiens
  misc_RNA (1)...(19): siRNA sense strand
ccacccacaugucaucaaa

SEQ ID NO: 543291 - RNA, 19 nt, Homo sapiens
  misc_RNA (1)...(19): siRNA sense strand
ccaucugacucccugauuu

SEQ ID NO: 543292 - RNA, 19 nt, Homo sapiens
  misc_RNA (1)...(19): siRNA sense strand
ccacugcuaccacaaguuu

SEQ ID NO: 543293 - RNA, 19 nt, Homo sapiens
  misc_RNA (1)...(19): siRNA sense strand
gagaagaugaugguuaaga

SEQ ID NO: 543294 - RNA, 19 nt, Homo sapiens
  misc_RNA (1)...(19): siRNA sense strand
ccacaugucaucaaauugu

SEQ ID NO: 543295 - RNA, 19 nt, Homo sapiens
  misc_RNA (1)...(19): siRNA sense strand
ccacauggauugaaaacaa

SEQ ID NO: 543296 - RNA, 19 nt, Homo sapiens
  misc_RNA (1)...(19): siRNA sense strand
gggcggaagaugaagauuu

SEQ ID NO: 543297 - RNA, 19 nt, Homo sapiens
  misc_RNA (1)...(19): siRNA sense strand
uggcggugcuggucaauga

SEQ ID NO: 543298 - RNA, 19 nt, Homo sapiens
  misc_RNA (1)...(19): siRNA sense strand
gcgaggagguggugauggu

SEQ ID NO: 543299 - RNA, 19 nt, Homo sapiens
  misc_RNA (1)...(19): siRNA sense strand
ggagauguaccgccugaug

SEQ ID NO: 543300 - RNA, 19 nt, Homo sapiens
  misc_RNA (1)...(19): siRNA sense strand
gagaccugcugucagaguu

SEQ ID NO: 543301 - RNA, 19 nt, Homo sapiens
  misc_RNA (1)...(19): siRNA sense strand
ccgugaagaugcugaaaga

SEQ ID NO: 543302 - RNA, 19 nt, Homo sapiens
  misc_RNA (1)...(19): siRNA sense strand
caacggccuuccaucugaa

SEQ ID NO: 543303 - RNA, 19 nt, Homo sapiens
  misc_RNA (1)...(19): siRNA sense strand
gugaagaugcugaaagaga

SEQ ID NO: 543304 - RNA, 19 nt, Homo sapiens
  misc_RNA (1)...(19): siRNA sense strand
cugacucccugauuuauga

SEQ ID NO: 543305 - RNA, 19 nt, Homo sapiens
  misc_RNA (1)...(19): siRNA sense strand
gaccguacaugacuauagg

SEQ ID NO: 543306 - RNA, 19 nt, Homo sapiens
  misc_RNA (1)...(19): siRNA sense strand
gucccgagauguuuaugaa

SEQ ID NO: 543307 - RNA, 19 nt, Homo sapiens
  misc_RNA (1)...(19): siRNA sense strand
ucuaggagaaggcgaauuu

SEQ ID NO: 543308 - RNA, 19 nt, Homo sapiens
  misc_RNA (1)...(19): siRNA sense strand
cacaugucaucaaauugua

SEQ ID NO: 543309 - RNA, 19 nt, Homo sapiens
  misc_RNA (1)...(19): siRNA sense strand
gaugaagauuucggauuuc

SEQ ID NO: 543310 - RNA, 19 nt, Homo sapiens
  misc_RNA (1)...(19): siRNA sense strand
gugccgaacuucacuacau

SEQ ID NO: 543311 - RNA, 19 nt, Homo sapiens
  misc_RNA (1)...(19): siRNA sense strand
cccgagauguuuaugaaga

SEQ ID NO: 543312 - RNA, 19 nt, Homo sapiens
  misc_RNA (1)...(19): siRNA sense strand
ccacaaguuugcccacaag

SEQ ID NO: 543313 - RNA, 19 nt, Homo sapiens
  misc_RNA (1)...(19): siRNA sense strand
gggcgaccguacaugacua

SEQ ID NO: 543314 - RNA, 19 nt, Homo sapiens
  misc_RNA (1)...(19): siRNA sense strand
acccacaugucaucaaauu

SEQ ID NO: 543315 - RNA, 19 nt, Homo sapiens
  misc_RNA (1)...(19): siRNA sense strand
gacccaagacaucaacauu

SEQ ID NO: 543316 - RNA, 19 nt, Homo sapiens
  misc_RNA (1)...(19): siRNA sense strand
cagggucggauuccaguua

SEQ ID NO: 543317 - RNA, 19 nt, Homo sapiens
  misc_RNA (1)...(19): siRNA sense strand
gcguauacuucuccuucuu

SEQ ID NO: 543318 - RNA, 19 nt, Homo sapiens
  misc_RNA (1)...(19): siRNA sense strand
cugguggacuguaauaaug

SEQ ID NO: 543319 - RNA, 19 nt, Homo sapiens
  misc_RNA (1)...(19): siRNA sense strand
uaagaggagagacuacuug

SEQ ID NO: 543320 - RNA, 19 nt, Homo sapiens
  misc_RNA (1)...(19): siRNA sense strand
ggauccuguuugugaauga

SEQ ID NO: 543321 - RNA, 19 nt, Homo sapiens
  misc_RNA (1)...(19): siRNA sense strand
guauacuucuccuucuuca

SEQ ID NO: 543322 - RNA, 19 nt, Homo sapiens
  misc_RNA (1)...(19): siRNA sense strand
ggaagcaggagccggacaa

SEQ ID NO: 543323 - RNA, 19 nt, Homo sapiens
  misc_RNA (1)...(19): siRNA sense strand
ugggcgaccucaucucauu

SEQ ID NO: 543324 - RNA, 19 nt, Homo sapiens
  misc_RNA (1)...(19): siRNA sense strand
ugcgagaccugcugucaga

SEQ ID NO: 543325 - RNA, 19 nt, Homo sapiens
  misc_RNA (1)...(19): siRNA sense strand
agaagaugaugguuaagag

SEQ ID NO: 543326 - RNA, 19 nt, Homo sapiens
  misc_RNA (1)...(19): siRNA sense strand
acuauaggcugguucucaa

SEQ ID NO: 543327 - RNA, 19 nt, Homo sapiens
  misc_RNA (1)...(19): siRNA sense strand
gagaaggcgaauuuggaaa

SEQ ID NO: 543328 - RNA, 19 nt, Homo sapiens
  misc_RNA (1)...(19): siRNA sense strand
gcuguccucuucuccuuca

SEQ ID NO: 543329 - RNA, 19 nt, Homo sapiens
  misc_RNA (1)...(19): siRNA sense strand
ggagauggcaaagggauca

SEQ ID NO: 543330 - RNA, 19 nt, Homo sapiens
  misc_RNA (1)...(19): siRNA sense strand
gaaccaggucuccguggau

SEQ ID NO: 543331 - RNA, 19 nt, Homo sapiens
  misc_RNA (1)...(19): siRNA sense strand
ggauggagaggccagacaa

SEQ ID NO: 543332 - RNA, 19 nt, Homo sapiens
  misc_RNA (1)...(19): siRNA sense strand
gcugguggacuguaauaau

SEQ ID NO: 543333 - RNA, 19 nt, Homo sapiens
  misc_RNA (1)...(19): siRNA sense strand
gaggcaaggagauggcaaa

SEQ ID NO: 543334 - RNA, 19 nt, Homo sapiens
  misc_RNA (1)...(19): siRNA sense strand
gcauugggccucuacuucu

SEQ ID NO: 543335 - RNA, 19 nt, Homo sapiens
  misc_RNA (1)...(19): siRNA sense strand
cugaggaggugcccagcuu

SEQ ID NO: 543336 - RNA, 19 nt, Homo sapiens
  misc_RNA (1)...(19): siRNA sense strand
cuggagaagaugaugguua

SEQ ID NO: 543337 - RNA, 19 nt, Homo sapiens
  misc_RNA (1)...(19): siRNA sense strand
gaagcaggagccggacaaa

SEQ ID NO: 543338 - RNA, 19 nt, Homo sapiens
  misc_RNA (1)...(19): siRNA sense strand
uaaauggauggcaauugaa

SEQ ID NO: 543339 - RNA, 19 nt, Homo sapiens
  misc_RNA (1)...(19): siRNA sense strand
gggauccuguuugugaaug

SEQ ID NO: 543340 - RNA, 19 nt, Homo sapiens
  misc_RNA (1)...(19): siRNA sense strand
gacggccacugcgauguug

SEQ ID NO: 543341 - RNA, 19 nt, Homo sapiens
  misc_RNA (1)...(19): siRNA sense strand
ggacaaaaggccgguguuu

SEQ ID NO: 543342 - RNA, 19 nt, Homo sapiens
  misc_RNA (1)...(19): siRNA sense strand
gcucguucaucgggacuug

SEQ ID NO: 543343 - RNA, 19 nt, Homo sapiens
  misc_RNA (1)...(19): siRNA sense strand
gugaggcgguacacaagca

SEQ ID NO: 543344 - RNA, 19 nt, Homo sapiens
  misc_RNA (1)...(19): siRNA sense strand
cagcaaagaccuggagaag

SEQ ID NO: 543345 - RNA, 19 nt, Homo sapiens
  misc_RNA (1)...(19): siRNA sense strand
caaccacccacaugucauc

SEQ ID NO: 543346 - RNA, 19 nt, Homo sapiens
  misc_RNA (1)...(19): siRNA sense strand
ggauuaaagcuggcuaugg

SEQ ID NO: 543347 - RNA, 19 nt, Homo sapiens
  misc_RNA (1)...(19): siRNA sense strand
cgacggccacugcgauguu

SEQ ID NO: 543348 - RNA, 19 nt, Homo sapiens
  misc_RNA (1)...(19): siRNA sense strand
gaaagucuguguggaaaac

SEQ ID NO: 543349 - RNA, 19 nt, Homo sapiens
  misc_RNA (1)...(19): siRNA sense strand
ggcauugggccucuacuuc

SEQ ID NO: 543350 - RNA, 19 nt, Homo sapiens
  misc_RNA (1)...(19): siRNA sense strand
cgggaaagucuguguggaa

SEQ ID NO: 543351 - RNA, 19 nt, Homo sapiens
  misc_RNA (1)...(19): siRNA sense strand
gcccagaucgggaaagucu

SEQ ID NO: 543352 - RNA, 19 nt, Homo sapiens
  misc_RNA (1)...(19): siRNA sense strand
gacuauaggcugguucuca

SEQ ID NO: 543353 - RNA, 19 nt, Homo sapiens
  misc_RNA (1)...(19): siRNA sense strand
gcacgcccuugcuguacgu

SEQ ID NO: 543354 - RNA, 19 nt, Homo sapiens
  misc_RNA (1)...(19): siRNA sense strand
ggucggauuccaguuaaau

SEQ ID NO: 543355 - RNA, 19 nt, Homo sapiens
  misc_RNA (1)...(19): siRNA sense strand
gcuugucccgagauguuua

SEQ ID NO: 543356 - RNA, 19 nt, Homo sapiens
  misc_RNA (1)...(19): siRNA sense strand
caucguggaguacgccaaa

SEQ ID NO: 543357 - RNA, 19 nt, Homo sapiens
  misc_RNA (1)...(19): siRNA sense strand
gaccugcugucagaguuca

SEQ ID NO: 543358 - RNA, 19 nt, Homo sapiens
  misc_RNA (1)...(19): siRNA sense strand
acccaagacaucaacauuu

SEQ ID NO: 543359 - RNA, 19 nt, Homo sapiens
  misc_RNA (1)...(19): siRNA sense strand
caacugcagcgaggagaug

SEQ ID NO: 543360 - RNA, 19 nt, Homo sapiens
  misc_RNA (1)...(19): siRNA sense strand
cacgcaaagugauguaugg

SEQ ID NO: 543361 - RNA, 19 nt, Homo sapiens
  misc_RNA (1)...(19): siRNA sense strand
gaggagccagggucggauu

SEQ ID NO: 543362 - RNA, 19 nt, Homo sapiens
  misc_RNA (1)...(19): siRNA sense strand
gggcgaccucaucucauuu

SEQ ID NO: 543363 - RNA, 19 nt, Homo sapiens
  misc_RNA (1)...(19): siRNA sense strand
aaccggagccuggaccaua

SEQ ID NO: 543364 - RNA, 19 nt, Homo sapiens
  misc_RNA (1)...(19): siRNA sense strand
caagagacggcuggagugu

SEQ ID NO: 543365 - RNA, 19 nt, Homo sapiens
  misc_RNA (1)...(19): siRNA sense strand
guuaaauggauggcaauug

SEQ ID NO: 543366 - RNA, 19 nt, Homo sapiens
  misc_RNA (1)...(19): siRNA sense strand
aagaugaagauuucggauu

SEQ ID NO: 543367 - RNA, 19 nt, Homo sapiens
  misc_RNA (1)...(19): siRNA sense strand
ccgcuguccucuucuccuu

SEQ ID NO: 543368 - RNA, 19 nt, Homo sapiens
  misc_RNA (1)...(19): siRNA sense strand
gcgccgugguggaguucaa

SEQ ID NO: 543369 - RNA, 19 nt, Homo sapiens
  misc_RNA (1)...(19): siRNA sense strand
ggcauucaguggcaucaac

SEQ ID NO: 543370 - RNA, 19 nt, Homo sapiens
  misc_RNA (1)...(19): siRNA sense strand
agggucggauuccaguuaa

SEQ ID NO: 543371 - RNA, 19 nt, Homo sapiens
  misc_RNA (1)...(19): siRNA sense strand
cggcuugucccgagauguu

SEQ ID NO: 543372 - RNA, 19 nt, Homo sapiens
  misc_RNA (1)...(19): siRNA sense strand
ccacgcaaagugauguaug

SEQ ID NO: 543373 - RNA, 19 nt, Homo sapiens
  misc_RNA (1)...(19): siRNA sense strand
gcaaagaccuggagaagau

SEQ ID NO: 543374 - RNA, 19 nt, Homo sapiens
  misc_RNA (1)...(19): siRNA sense strand
gcaaagggaucaccaggaa

SEQ ID NO: 543375 - RNA, 19 nt, Homo sapiens
  misc_RNA (1)...(19): siRNA sense strand
gcacacggcugcaugagaa

SEQ ID NO: 543376 - RNA, 19 nt, Homo sapiens
  misc_RNA (1)...(19): siRNA sense strand
gcaacggccuuccaucuga

SEQ ID NO: 543377 - RNA, 19 nt, Homo sapiens
  misc_RNA (1)...(19): siRNA sense strand
uuaaauggauggcaauuga

SEQ ID NO: 543378 - RNA, 19 nt, Homo sapiens
  misc_RNA (1)...(19): siRNA sense strand
caggagggcucgccgauuu

SEQ ID NO: 543379 - RNA, 19 nt, Homo sapiens
  misc_RNA (1)...(19): siRNA sense strand
agaugaagauuucggauuu

SEQ ID NO: 543380 - RNA, 19 nt, Homo sapiens
  misc_RNA (1)...(19): siRNA sense strand
caacacuccuccagucuug

SEQ ID NO: 543381 - RNA, 19 nt, Homo sapiens
  misc_RNA (1)...(19): siRNA sense strand
ugaagaugcugaaagagaa

SEQ ID NO: 543382 - RNA, 19 nt, Homo sapiens
  misc_RNA (1)...(19): siRNA sense strand
uggagaagaugaugguuaa

SEQ ID NO: 543383 - RNA, 19 nt, Homo sapiens
  misc_RNA (1)...(19): siRNA sense strand
gggaaagucuguguggaaa

SEQ ID NO: 543384 - RNA, 19 nt, Homo sapiens
  misc_RNA (1)...(19): siRNA sense strand
ugccugcucuucagacuua

SEQ ID NO: 543385 - RNA, 19 nt, Homo sapiens
  misc_RNA (1)...(19): siRNA sense strand
agagacggcuggaguguga

SEQ ID NO: 543386 - RNA, 19 nt, Homo sapiens
  misc_RNA (1)...(19): siRNA sense strand
ggagaaggcgaauuuggaa

SEQ ID NO: 543387 - RNA, 19 nt, Homo sapiens
  misc_RNA (1)...(19): siRNA sense strand
cccaagacaucaacauuug

SEQ ID NO: 543388 - RNA, 19 nt, Homo sapiens
  misc_RNA (1)...(19): siRNA sense strand
gcgagcagcgggagaagua

SEQ ID NO: 543389 - RNA, 19 nt, Homo sapiens
  misc_RNA (1)...(19): siRNA sense strand
caucugacucccugauuua

SEQ ID NO: 543390 - RNA, 19 nt, Homo sapiens
  misc_RNA (1)...(19): siRNA sense strand
gcaucaacguccaguacaa

SEQ ID NO: 543391 - RNA, 19 nt, Homo sapiens
  misc_RNA (1)...(19): siRNA sense strand
ggcggaagaugaagauuuc

SEQ ID NO: 543392 - RNA, 19 nt, Homo sapiens
  misc_RNA (1)...(19): siRNA sense strand
ccacccacaugucaucaaa

SEQ ID NO: 543393 - RNA, 19 nt, Homo sapiens
  misc_RNA (1)...(19): siRNA sense strand
ccaucugacucccugauuu

SEQ ID NO: 543394 - RNA, 19 nt, Homo sapiens
  misc_RNA (1)...(19): siRNA sense strand
ccacugcuaccacaaguuu

SEQ ID NO: 543395 - RNA, 19 nt, Homo sapiens
  misc_RNA (1)...(19): siRNA sense strand
gcagaaaagagucggauua

SEQ ID NO: 543396 - RNA, 19 nt, Homo sapiens
  misc_RNA (1)...(19): siRNA sense strand
gagaagaugaugguuaaga

SEQ ID NO: 543397 - RNA, 19 nt, Homo sapiens
  misc_RNA (1)...(19): siRNA sense strand
ccacaugucaucaaauugu

SEQ ID NO: 543398 - RNA, 19 nt, Homo sapiens
  misc_RNA (1)...(19): siRNA sense strand
ccacauggauugaaaacaa

SEQ ID NO: 543399 - RNA, 19 nt, Homo sapiens
  misc_RNA (1)...(19): siRNA sense strand
gggcggaagaugaagauuu

SEQ ID NO: 543400 - RNA, 19 nt, Homo sapiens
  misc_RNA (1)...(19): siRNA sense strand
uggcggugcuggucaauga

SEQ ID NO: 543401 - RNA, 19 nt, Homo sapiens
  misc_RNA (1)...(19): siRNA sense strand
gcgaggagguggugauggu

SEQ ID NO: 543402 - RNA, 19 nt, Homo sapiens
  misc_RNA (1)...(19): siRNA sense strand
ggagauguaccgccugaug

SEQ ID NO: 543403 - RNA, 19 nt, Homo sapiens
  misc_RNA (1)...(19): siRNA sense strand
gagaccugcugucagaguu

SEQ ID NO: 543404 - RNA, 19 nt, Homo sapiens
  misc_RNA (1)...(19): siRNA sense strand
ccgugaagaugcugaaaga

SEQ ID NO: 543405 - RNA, 19 nt, Homo sapiens
  misc_RNA (1)...(19): siRNA sense strand
caacggccuuccaucugaa

SEQ ID NO: 543406 - RNA, 19 nt, Homo sapiens
  misc_RNA (1)...(19): siRNA sense strand
gugaagaugcugaaagaga

SEQ ID NO: 543407 - RNA, 19 nt, Homo sapiens
  misc_RNA (1)...(19): siRNA sense strand
cugacucccugauuuauga

SEQ ID NO: 543408 - RNA, 19 nt, Homo sapiens
  misc_RNA (1)...(19): siRNA sense strand
gaccguacaugacuauagg

SEQ ID NO: 543409 - RNA, 19 nt, Homo sapiens
  misc_RNA (1)...(19): siRNA sense strand
gucccgagauguuuaugaa

SEQ ID NO: 543410 - RNA, 19 nt, Homo sapiens
  misc_RNA (1)...(19): siRNA sense strand
ucuaggagaaggcgaauuu

SEQ ID NO: 543411 - RNA, 19 nt, Homo sapiens
  misc_RNA (1)...(19): siRNA sense strand
cacaugucaucaaauugua

SEQ ID NO: 543412 - RNA, 19 nt, Homo sapiens
  misc_RNA (1)...(19): siRNA sense strand
gaugaagauuucggauuuc

SEQ ID NO: 543413 - RNA, 19 nt, Homo sapiens
  misc_RNA (1)...(19): siRNA sense strand
gugccgaacuucacuacau

SEQ ID NO: 543414 - RNA, 19 nt, Homo sapiens
  misc_RNA (1)...(19): siRNA sense strand
cccgagauguuuaugaaga

SEQ ID NO: 543415 - RNA, 19 nt, Homo sapiens
  misc_RNA (1)...(19): siRNA sense strand
ccacaaguuugcccacaag

SEQ ID NO: 543416 - RNA, 19 nt, Homo sapiens
  misc_RNA (1)...(19): siRNA sense strand
gggcgaccguacaugacua

SEQ ID NO: 543417 - RNA, 19 nt, Homo sapiens
  misc_RNA (1)...(19): siRNA sense strand
gcacuguaacuucgcagaa

SEQ ID NO: 543418 - RNA, 19 nt, Homo sapiens
  misc_RNA (1)...(19): siRNA sense strand
acccacaugucaucaaauu

SEQ ID NO: 543419 - RNA, 19 nt, Homo sapiens
  misc_RNA (1)...(19): siRNA sense strand
gacccaagacaucaacauu

SEQ ID NO: 543420 - RNA, 19 nt, Homo sapiens
  misc_RNA (1)...(19): siRNA sense strand
cagggucggauuccaguua

SEQ ID NO: 543421 - RNA, 19 nt, Homo sapiens
  misc_RNA (1)...(19): siRNA sense strand
gcguauacuucuccuucuu

SEQ ID NO: 543422 - RNA, 19 nt, Homo sapiens
  misc_RNA (1)...(19): siRNA sense strand
cugguggacuguaauaaug

SEQ ID NO: 543423 - RNA, 19 nt, Homo sapiens
  misc_RNA (1)...(19): siRNA sense strand
uaagaggagagacuacuug

SEQ ID NO: 543424 - RNA, 19 nt, Homo sapiens
  misc_RNA (1)...(19): siRNA sense strand
ggauccuguuugugaauga

SEQ ID NO: 543425 - RNA, 19 nt, Homo sapiens
  misc_RNA (1)...(19): siRNA sense strand
guauacuucuccuucuuca

SEQ ID NO: 543426 - RNA, 19 nt, Homo sapiens
  misc_RNA (1)...(19): siRNA sense strand
ggaagucucagcagcucuu

SEQ ID NO: 543427 - RNA, 19 nt, Homo sapiens
  misc_RNA (1)...(19): siRNA sense strand
ggaagcaggagccggacaa

SEQ ID NO: 543428 - RNA, 19 nt, Homo sapiens
  misc_RNA (1)...(19): siRNA sense strand
ugggcgaccucaucucauu

SEQ ID NO: 543429 - RNA, 19 nt, Homo sapiens
  misc_RNA (1)...(19): siRNA sense strand
ugcgagaccugcugucaga

SEQ ID NO: 543430 - RNA, 19 nt, Homo sapiens
  misc_RNA (1)...(19): siRNA sense strand
agaagaugaugguuaagag

SEQ ID NO: 543431 - RNA, 19 nt, Homo sapiens
  misc_RNA (1)...(19): siRNA sense strand
gaaaagagucggauuacca

SEQ ID NO: 543432 - RNA, 19 nt, Homo sapiens
  misc_RNA (1)...(19): siRNA sense strand
acuauaggcugguucucaa

SEQ ID NO: 543433 - RNA, 19 nt, Homo sapiens
  misc_RNA (1)...(19): siRNA sense strand
cacuguaacuucgcagaaa

SEQ ID NO: 543434 - RNA, 19 nt, Homo sapiens
  misc_RNA (1)...(19): siRNA sense strand
gagaaggcgaauuuggaaa

SEQ ID NO: 543435 - RNA, 19 nt, Homo sapiens
  misc_RNA (1)...(19): siRNA sense strand
gcuguccucuucuccuuca

SEQ ID NO: 543436 - RNA, 19 nt, Homo sapiens
  misc_RNA (1)...(19): siRNA sense strand
ggagauggcaaagggauca

SEQ ID NO: 543437 - RNA, 19 nt, Homo sapiens
  misc_RNA (1)...(19): siRNA sense strand
gaaccaggucuccguggau

SEQ ID NO: 543438 - RNA, 19 nt, Homo sapiens
  misc_RNA (1)...(19): siRNA sense strand
ggauggagaggccagacaa

SEQ ID NO: 543439 - RNA, 19 nt, Homo sapiens
  misc_RNA (1)...(19): siRNA sense strand
gcugguggacuguaauaau

SEQ ID NO: 543440 - RNA, 19 nt, Homo sapiens
  misc_RNA (1)...(19): siRNA sense strand
gcauugggccucuacuucu

SEQ ID NO: 543441 - RNA, 19 nt, Homo sapiens
  misc_RNA (1)...(19): siRNA sense strand
gaggcaaggagauggcaaa

SEQ ID NO: 543442 - RNA, 19 nt, Homo sapiens
  misc_RNA (1)...(19): siRNA sense strand
cugaggaggugcccagcuu

SEQ ID NO: 543443 - RNA, 19 nt, Homo sapiens
  misc_RNA (1)...(19): siRNA sense strand
aaacacugccugcucuuca

SEQ ID NO: 543444 - RNA, 19 nt, Homo sapiens
  misc_RNA (1)...(19): siRNA sense strand
cuggagaagaugaugguua

SEQ ID NO: 543445 - RNA, 19 nt, Homo sapiens
  misc_RNA (1)...(19): siRNA sense strand
gaagcaggagccggacaaa

SEQ ID NO: 543446 - RNA, 19 nt, Homo sapiens
  misc_RNA (1)...(19): siRNA sense strand
uaaauggauggcaauugaa

SEQ ID NO: 543447 - RNA, 19 nt, Homo sapiens
  misc_RNA (1)...(19): siRNA sense strand
gggauccuguuugugaaug

SEQ ID NO: 543448 - RNA, 19 nt, Homo sapiens
  misc_RNA (1)...(19): siRNA sense strand
gacggccacugcgauguug

SEQ ID NO: 543449 - RNA, 19 nt, Homo sapiens
  misc_RNA (1)...(19): siRNA sense strand
ggacaaaaggccgguguuu

SEQ ID NO: 543450 - RNA, 19 nt, Homo sapiens
  misc_RNA (1)...(19): siRNA sense strand
gcucguucaucgggacuug

SEQ ID NO: 543451 - RNA, 19 nt, Homo sapiens
  misc_RNA (1)...(19): siRNA sense strand
gugaggcgguacacaagca

SEQ ID NO: 543452 - RNA, 19 nt, Homo sapiens
  misc_RNA (1)...(19): siRNA sense strand
ggcauugggccucuacuuc

SEQ ID NO: 543453 - RNA, 19 nt, Homo sapiens
  misc_RNA (1)...(19): siRNA sense strand
cagcaaagaccuggagaag

SEQ ID NO: 543454 - RNA, 19 nt, Homo sapiens
  misc_RNA (1)...(19): siRNA sense strand
caaccacccacaugucauc

SEQ ID NO: 543455 - RNA, 19 nt, Homo sapiens
  misc_RNA (1)...(19): siRNA sense strand
ggauuaaagcuggcuaugg

SEQ ID NO: 543456 - RNA, 19 nt, Homo sapiens
  misc_RNA (1)...(19): siRNA sense strand
cgacggccacugcgauguu

SEQ ID NO: 543457 - RNA, 19 nt, Homo sapiens
  misc_RNA (1)...(19): siRNA sense strand
gaaagucuguguggaaaac

SEQ ID NO: 543458 - RNA, 19 nt, Homo sapiens
  misc_RNA (1)...(19): siRNA sense strand
cgggaaagucuguguggaa

SEQ ID NO: 543459 - RNA, 19 nt, Homo sapiens
  misc_RNA (1)...(19): siRNA sense strand
gcccagaucgggaaagucu

SEQ ID NO: 543460 - RNA, 19 nt, Homo sapiens
  misc_RNA (1)...(19): siRNA sense strand
gacuauaggcugguucuca

SEQ ID NO: 543461 - RNA, 19 nt, Homo sapiens
  misc_RNA (1)...(19): siRNA sense strand
ggucggauuccaguuaaau

SEQ ID NO: 543462 - RNA, 19 nt, Homo sapiens
  misc_RNA (1)...(19): siRNA sense strand
gcuugucccgagauguuua

SEQ ID NO: 543463 - RNA, 19 nt, Homo sapiens
  misc_RNA (1)...(19): siRNA sense strand
caucguggaguacgccaaa

SEQ ID NO: 543464 - RNA, 19 nt, Homo sapiens
  misc_RNA (1)...(19): siRNA sense strand
gcacgcccuugcuguacgu

SEQ ID NO: 543465 - RNA, 19 nt, Homo sapiens
  misc_RNA (1)...(19): siRNA sense strand
gaccugcugucagaguuca

SEQ ID NO: 543466 - RNA, 19 nt, Homo sapiens
  misc_RNA (1)...(19): siRNA sense strand
acccaagacaucaacauuu

SEQ ID NO: 543467 - RNA, 19 nt, Homo sapiens
  misc_RNA (1)...(19): siRNA sense strand
aaccggagccuggaccaua

SEQ ID NO: 543468 - RNA, 19 nt, Homo sapiens
  misc_RNA (1)...(19): siRNA sense strand
caacugcagcgaggagaug

SEQ ID NO: 543469 - RNA, 19 nt, Homo sapiens
  misc_RNA (1)...(19): siRNA sense strand
cacgcaaagugauguaugg

SEQ ID NO: 543470 - RNA, 19 nt, Homo sapiens
  misc_RNA (1)...(19): siRNA sense strand
gaggagccagggucggauu

SEQ ID NO: 543471 - RNA, 19 nt, Homo sapiens
  misc_RNA (1)...(19): siRNA sense strand
gggcgaccucaucucauuu

SEQ ID NO: 543472 - RNA, 19 nt, Homo sapiens
  misc_RNA (1)...(19): siRNA sense strand
gcgccgugguggaguucaa

SEQ ID NO: 543473 - RNA, 19 nt, Homo sapiens
  misc_RNA (1)...(19): siRNA sense strand
gcaaagaccuggagaagau

SEQ ID NO: 543474 - RNA, 19 nt, Homo sapiens
  misc_RNA (1)...(19): siRNA sense strand
gcaaagggaucaccaggaa

SEQ ID NO: 543475 - RNA, 19 nt, Homo sapiens
  misc_RNA (1)...(19): siRNA sense strand
gcacacggcugcaugagaa

SEQ ID NO: 543476 - RNA, 19 nt, Homo sapiens
  misc_RNA (1)...(19): siRNA sense strand
gcaacggccuuccaucuga

SEQ ID NO: 543477 - RNA, 19 nt, Homo sapiens
  misc_RNA (1)...(19): siRNA sense strand
uuaaauggauggcaauuga

SEQ ID NO: 543478 - RNA, 19 nt, Homo sapiens
  misc_RNA (1)...(19): siRNA sense strand
caggagggcucgccgauuu

SEQ ID NO: 543479 - RNA, 19 nt, Homo sapiens
  misc_RNA (1)...(19): siRNA sense strand
agaugaagauuucggauuu

SEQ ID NO: 543480 - RNA, 19 nt, Homo sapiens
  misc_RNA (1)...(19): siRNA sense strand
ugaagaugcugaaagagaa

SEQ ID NO: 543481 - RNA, 19 nt, Homo sapiens
  misc_RNA (1)...(19): siRNA sense strand
uggagaagaugaugguuaa

SEQ ID NO: 543482 - RNA, 19 nt, Homo sapiens
  misc_RNA (1)...(19): siRNA sense strand
gggaaagucuguguggaaa

SEQ ID NO: 543483 - RNA, 19 nt, Homo sapiens
  misc_RNA (1)...(19): siRNA sense strand
agagacggcuggaguguga

SEQ ID NO: 543484 - RNA, 19 nt, Homo sapiens
  misc_RNA (1)...(19): siRNA sense strand
ggagaaggcgaauuuggaa

SEQ ID NO: 543485 - RNA, 19 nt, Homo sapiens
  misc_RNA (1)...(19): siRNA sense strand
cccaagacaucaacauuug

SEQ ID NO: 543486 - RNA, 19 nt, Homo sapiens
  misc_RNA (1)...(19): siRNA sense strand
gcgagcagcgggagaagua

SEQ ID NO: 543487 - RNA, 19 nt, Homo sapiens
  misc_RNA (1)...(19): siRNA sense strand
caucugacucccugauuua

SEQ ID NO: 543488 - RNA, 19 nt, Homo sapiens
  misc_RNA (1)...(19): siRNA sense strand
gcaucaacguccaguacaa

SEQ ID NO: 543489 - RNA, 19 nt, Homo sapiens
  misc_RNA (1)...(19): siRNA sense strand
ggcggaagaugaagauuuc

SEQ ID NO: 543490 - RNA, 19 nt, Homo sapiens
  misc_RNA (1)...(19): siRNA sense strand
ccacccacaugucaucaaa

SEQ ID NO: 543491 - RNA, 19 nt, Homo sapiens
  misc_RNA (1)...(19): siRNA sense strand
ccaucugacucccugauuu

SEQ ID NO: 543492 - RNA, 19 nt, Homo sapiens
  misc_RNA (1)...(19): siRNA sense strand
ccacugcuaccacaaguuu

SEQ ID NO: 543493 - RNA, 19 nt, Homo sapiens
  misc_RNA (1)...(19): siRNA sense strand
gagaagaugaugguuaaga

SEQ ID NO: 543494 - RNA, 19 nt, Homo sapiens
  misc_RNA (1)...(19): siRNA sense strand
ccacaugucaucaaauugu

SEQ ID NO: 543495 - RNA, 19 nt, Homo sapiens
  misc_RNA (1)...(19): siRNA sense strand
ccacauggauugaaaacaa

SEQ ID NO: 543496 - RNA, 19 nt, Homo sapiens
  misc_RNA (1)...(19): siRNA sense strand
gggcggaagaugaagauuu

SEQ ID NO: 543497 - RNA, 19 nt, Homo sapiens
  misc_RNA (1)...(19): siRNA sense strand
uggcggugcuggucaauga

SEQ ID NO: 543498 - RNA, 19 nt, Homo sapiens
  misc_RNA (1)...(19): siRNA sense strand
gcgaggagguggugauggu

SEQ ID NO: 543499 - RNA, 19 nt, Homo sapiens
  misc_RNA (1)...(19): siRNA sense strand
ggagauguaccgccugaug

SEQ ID NO: 543500 - RNA, 19 nt, Homo sapiens
  misc_RNA (1)...(19): siRNA sense strand
gagaccugcugucagaguu

SEQ ID NO: 543501 - RNA, 19 nt, Homo sapiens
  misc_RNA (1)...(19): siRNA sense strand
ccgugaagaugcugaaaga

SEQ ID NO: 543502 - RNA, 19 nt, Homo sapiens
  misc_RNA (1)...(19): siRNA sense strand
caacggccuuccaucugaa

SEQ ID NO: 543503 - RNA, 19 nt, Homo sapiens
  misc_RNA (1)...(19): siRNA sense strand
gugaagaugcugaaagaga

SEQ ID NO: 543504 - RNA, 19 nt, Homo sapiens
  misc_RNA (1)...(19): siRNA sense strand
cugacucccugauuuauga

SEQ ID NO: 543505 - RNA, 19 nt, Homo sapiens
  misc_RNA (1)...(19): siRNA sense strand
gaccguacaugacuauagg

SEQ ID NO: 543506 - RNA, 19 nt, Homo sapiens
  misc_RNA (1)...(19): siRNA sense strand
gucccgagauguuuaugaa

SEQ ID NO: 543507 - RNA, 19 nt, Homo sapiens
  misc_RNA (1)...(19): siRNA sense strand
ucuaggagaaggcgaauuu

SEQ ID NO: 543508 - RNA, 19 nt, Homo sapiens
  misc_RNA (1)...(19): siRNA sense strand
cacaugucaucaaauugua

SEQ ID NO: 543509 - RNA, 19 nt, Homo sapiens
  misc_RNA (1)...(19): siRNA sense strand
gaugaagauuucggauuuc

SEQ ID NO: 543510 - RNA, 19 nt, Homo sapiens
  misc_RNA (1)...(19): siRNA sense strand
gugccgaacuucacuacau

SEQ ID NO: 543511 - RNA, 19 nt, Homo sapiens
  misc_RNA (1)...(19): siRNA sense strand
cccgagauguuuaugaaga

SEQ ID NO: 543512 - RNA, 19 nt, Homo sapiens
  misc_RNA (1)...(19): siRNA sense strand
ccacaaguuugcccacaag

SEQ ID NO: 543513 - RNA, 19 nt, Homo sapiens
  misc_RNA (1)...(19): siRNA sense strand
gggcgaccguacaugacua

SEQ ID NO: 543514 - RNA, 19 nt, Homo sapiens
  misc_RNA (1)...(19): siRNA sense strand
acccacaugucaucaaauu

SEQ ID NO: 543515 - RNA, 19 nt, Homo sapiens
  misc_RNA (1)...(19): siRNA sense strand
gacccaagacaucaacauu

SEQ ID NO: 543516 - RNA, 19 nt, Homo sapiens
  misc_RNA (1)...(19): siRNA sense strand
cagggucggauuccaguua

SEQ ID NO: 543517 - RNA, 19 nt, Homo sapiens
  misc_RNA (1)...(19): siRNA sense strand
gcguauacuucuccuucuu

SEQ ID NO: 543518 - RNA, 19 nt, Homo sapiens
  misc_RNA (1)...(19): siRNA sense strand
cugguggacuguaauaaug

SEQ ID NO: 543519 - RNA, 19 nt, Homo sapiens
  misc_RNA (1)...(19): siRNA sense strand
uaagaggagagacuacuug

SEQ ID NO: 543520 - RNA, 19 nt, Homo sapiens
  misc_RNA (1)...(19): siRNA sense strand
ggauccuguuugugaauga

SEQ ID NO: 543521 - RNA, 19 nt, Homo sapiens
  misc_RNA (1)...(19): siRNA sense strand
guauacuucuccuucuuca

SEQ ID NO: 543522 - RNA, 19 nt, Homo sapiens
  misc_RNA (1)...(19): siRNA sense strand
ggaagcaggagccggacaa

SEQ ID NO: 543523 - RNA, 19 nt, Homo sapiens
  misc_RNA (1)...(19): siRNA sense strand
ugggcgaccucaucucauu

SEQ ID NO: 543524 - RNA, 19 nt, Homo sapiens
  misc_RNA (1)...(19): siRNA sense strand
ugcgagaccugcugucaga

SEQ ID NO: 543525 - RNA, 19 nt, Homo sapiens
  misc_RNA (1)...(19): siRNA sense strand
agaagaugaugguuaagag

SEQ ID NO: 543526 - RNA, 19 nt, Homo sapiens
  misc_RNA (1)...(19): siRNA sense strand
acuauaggcugguucucaa

SEQ ID NO: 543527 - RNA, 19 nt, Homo sapiens
  misc_RNA (1)...(19): siRNA sense strand
gagaaggcgaauuuggaaa

SEQ ID NO: 543528 - RNA, 19 nt, Homo sapiens
  misc_RNA (1)...(19): siRNA sense strand
gcuguccucuucuccuuca

SEQ ID NO: 543529 - RNA, 19 nt, Homo sapiens
  misc_RNA (1)...(19): siRNA sense strand
ggagauggcaaagggauca

SEQ ID NO: 543530 - RNA, 19 nt, Homo sapiens
  misc_RNA (1)...(19): siRNA sense strand
gaaccaggucuccguggau

SEQ ID NO: 543531 - RNA, 19 nt, Homo sapiens
  misc_RNA (1)...(19): siRNA sense strand
ggauggagaggccagacaa

SEQ ID NO: 543532 - RNA, 19 nt, Homo sapiens
  misc_RNA (1)...(19): siRNA sense strand
gcugguggacuguaauaau

SEQ ID NO: 543533 - RNA, 19 nt, Homo sapiens
  misc_RNA (1)...(19): siRNA sense strand
gaggcaaggagauggcaaa

SEQ ID NO: 543534 - RNA, 19 nt, Homo sapiens
  misc_RNA (1)...(19): siRNA sense strand
gcauugggccucuacuucu

SEQ ID NO: 543535 - RNA, 19 nt, Homo sapiens
  misc_RNA (1)...(19): siRNA sense strand
cugaggaggugcccagcuu

SEQ ID NO: 543536 - RNA, 19 nt, Homo sapiens
  misc_RNA (1)...(19): siRNA sense strand
cuggagaagaugaugguua

SEQ ID NO: 543537 - RNA, 19 nt, Homo sapiens
  misc_RNA (1)...(19): siRNA sense strand
gaagcaggagccggacaaa

SEQ ID NO: 543538 - RNA, 19 nt, Homo sapiens
  misc_RNA (1)...(19): siRNA sense strand
uaaauggauggcaauugaa

SEQ ID NO: 543539 - RNA, 19 nt, Homo sapiens
  misc_RNA (1)...(19): siRNA sense strand
gggauccuguuugugaaug

SEQ ID NO: 543540 - RNA, 19 nt, Homo sapiens
  misc_RNA (1)...(19): siRNA sense strand
gacggccacugcgauguug

SEQ ID NO: 543541 - RNA, 19 nt, Homo sapiens
  misc_RNA (1)...(19): siRNA sense strand
ggacaaaaggccgguguuu

SEQ ID NO: 543542 - RNA, 19 nt, Homo sapiens
  misc_RNA (1)...(19): siRNA sense strand
gcucguucaucgggacuug

SEQ ID NO: 543543 - RNA, 19 nt, Homo sapiens
  misc_RNA (1)...(19): siRNA sense strand
gugaggcgguacacaagca

SEQ ID NO: 543544 - RNA, 19 nt, Homo sapiens
  misc_RNA (1)...(19): siRNA sense strand
cagcaaagaccuggagaag

SEQ ID NO: 543545 - RNA, 19 nt, Homo sapiens
  misc_RNA (1)...(19): siRNA sense strand
caaccacccacaugucauc

SEQ ID NO: 543546 - RNA, 19 nt, Homo sapiens
  misc_RNA (1)...(19): siRNA sense strand
ggauuaaagcuggcuaugg

SEQ ID NO: 543547 - RNA, 19 nt, Homo sapiens
  misc_RNA (1)...(19): siRNA sense strand
cgacggccacugcgauguu

SEQ ID NO: 543548 - RNA, 19 nt, Homo sapiens
  misc_RNA (1)...(19): siRNA sense strand
gaaagucuguguggaaaac

SEQ ID NO: 543549 - RNA, 19 nt, Homo sapiens
  misc_RNA (1)...(19): siRNA sense strand
ggcauugggccucuacuuc

SEQ ID NO: 543550 - RNA, 19 nt, Homo sapiens
  misc_RNA (1)...(19): siRNA sense strand
cgggaaagucuguguggaa

SEQ ID NO: 543551 - RNA, 19 nt, Homo sapiens
  misc_RNA (1)...(19): siRNA sense strand
gcccagaucgggaaagucu

SEQ ID NO: 543552 - RNA, 19 nt, Homo sapiens
  misc_RNA (1)...(19): siRNA sense strand
gacuauaggcugguucuca

SEQ ID NO: 543553 - RNA, 19 nt, Homo sapiens
  misc_RNA (1)...(19): siRNA sense strand
gcacgcccuugcuguacgu

SEQ ID NO: 543554 - RNA, 19 nt, Homo sapiens
  misc_RNA (1)...(19): siRNA sense strand
ggucggauuccaguuaaau

SEQ ID NO: 543555 - RNA, 19 nt, Homo sapiens
  misc_RNA (1)...(19): siRNA sense strand
gcuugucccgagauguuua

SEQ ID NO: 543556 - RNA, 19 nt, Homo sapiens
  misc_RNA (1)...(19): siRNA sense strand
caucguggaguacgccaaa

SEQ ID NO: 543557 - RNA, 19 nt, Homo sapiens
  misc_RNA (1)...(19): siRNA sense strand
gaccugcugucagaguuca

SEQ ID NO: 543558 - RNA, 19 nt, Homo sapiens
  misc_RNA (1)...(19): siRNA sense strand
acccaagacaucaacauuu

SEQ ID NO: 543559 - RNA, 19 nt, Homo sapiens
  misc_RNA (1)...(19): siRNA sense strand
caacugcagcgaggagaug

SEQ ID NO: 543560 - RNA, 19 nt, Homo sapiens
  misc_RNA (1)...(19): siRNA sense strand
cacgcaaagugauguaugg

SEQ ID NO: 543561 - RNA, 19 nt, Homo sapiens
  misc_RNA (1)...(19): siRNA sense strand
gaggagccagggucggauu

SEQ ID NO: 543562 - RNA, 19 nt, Homo sapiens
  misc_RNA (1)...(19): siRNA sense strand
gggcgaccucaucucauuu

SEQ ID NO: 543563 - RNA, 19 nt, Homo sapiens
  misc_RNA (1)...(19): siRNA sense strand
aaccggagccuggaccaua

SEQ ID NO: 543564 - RNA, 19 nt, Homo sapiens
  misc_RNA (1)...(19): siRNA sense strand
caagagacggcuggagugu

SEQ ID NO: 543565 - RNA, 19 nt, Homo sapiens
  misc_RNA (1)...(19): siRNA sense strand
guuaaauggauggcaauug

SEQ ID NO: 543566 - RNA, 19 nt, Homo sapiens
  misc_RNA (1)...(19): siRNA sense strand
aagaugaagauuucggauu

SEQ ID NO: 543567 - RNA, 19 nt, Homo sapiens
  misc_RNA (1)...(19): siRNA sense strand
ccgcuguccucuucuccuu

SEQ ID NO: 543568 - RNA, 19 nt, Homo sapiens
  misc_RNA (1)...(19): siRNA sense strand
gcgccgugguggaguucaa

SEQ ID NO: 543569 - RNA, 19 nt, Homo sapiens
  misc_RNA (1)...(19): siRNA sense strand
ggcauucaguggcaucaac

SEQ ID NO: 543570 - RNA, 19 nt, Homo sapiens
  misc_RNA (1)...(19): siRNA sense strand
agggucggauuccaguuaa

SEQ ID NO: 543571 - RNA, 19 nt, Homo sapiens
  misc_RNA (1)...(19): siRNA sense strand
cggcuugucccgagauguu

SEQ ID NO: 543572 - RNA, 19 nt, Homo sapiens
  misc_RNA (1)...(19): siRNA sense strand
ccacgcaaagugauguaug

SEQ ID NO: 543573 - RNA, 19 nt, Homo sapiens
  misc_RNA (1)...(19): siRNA sense strand
gcaaagaccuggagaagau

SEQ ID NO: 543574 - RNA, 19 nt, Homo sapiens
  misc_RNA (1)...(19): siRNA sense strand
gcaaagggaucaccaggaa

SEQ ID NO: 543575 - RNA, 19 nt, Homo sapiens
  misc_RNA (1)...(19): siRNA sense strand
gcacacggcugcaugagaa

SEQ ID NO: 543576 - RNA, 19 nt, Homo sapiens
  misc_RNA (1)...(19): siRNA sense strand
gcaacggccuuccaucuga

SEQ ID NO: 543577 - RNA, 19 nt, Homo sapiens
  misc_RNA (1)...(19): siRNA sense strand
uuaaauggauggcaauuga

SEQ ID NO: 543578 - RNA, 19 nt, Homo sapiens
  misc_RNA (1)...(19): siRNA sense strand
caggagggcucgccgauuu

SEQ ID NO: 543579 - RNA, 19 nt, Homo sapiens
  misc_RNA (1)...(19): siRNA sense strand
agaugaagauuucggauuu

SEQ ID NO: 543580 - RNA, 19 nt, Homo sapiens
  misc_RNA (1)...(19): siRNA sense strand
ugaagaugcugaaagagaa

SEQ ID NO: 543581 - RNA, 19 nt, Homo sapiens
  misc_RNA (1)...(19): siRNA sense strand
uggagaagaugaugguuaa

SEQ ID NO: 543582 - RNA, 19 nt, Homo sapiens
  misc_RNA (1)...(19): siRNA sense strand
gggaaagucuguguggaaa

SEQ ID NO: 543583 - RNA, 19 nt, Homo sapiens
  misc_RNA (1)...(19): siRNA sense strand
agagacggcuggaguguga

SEQ ID NO: 543584 - RNA, 19 nt, Homo sapiens
  misc_RNA (1)...(19): siRNA sense strand
ggagaaggcgaauuuggaa

SEQ ID NO: 543585 - RNA, 19 nt, Homo sapiens
  misc_RNA (1)...(19): siRNA sense strand
cccaagacaucaacauuug

SEQ ID NO: 543586 - RNA, 19 nt, Homo sapiens
  misc_RNA (1)...(19): siRNA sense strand
gcgagcagcgggagaagua

SEQ ID NO: 543587 - RNA, 19 nt, Homo sapiens
  misc_RNA (1)...(19): siRNA sense strand
caucugacucccugauuua

SEQ ID NO: 543588 - RNA, 19 nt, Homo sapiens
  misc_RNA (1)...(19): siRNA sense strand
gcaucaacguccaguacaa

SEQ ID NO: 543589 - RNA, 19 nt, Homo sapiens
  misc_RNA (1)...(19): siRNA sense strand
ggcggaagaugaagauuuc

SEQ ID NO: 543590 - RNA, 19 nt, Homo sapiens
  misc_RNA (1)...(19): siRNA sense strand
ccacccacaugucaucaaa

SEQ ID NO: 543591 - RNA, 19 nt, Homo sapiens
  misc_RNA (1)...(19): siRNA sense strand
ccaucugacucccugauuu

SEQ ID NO: 543592 - RNA, 19 nt, Homo sapiens
  misc_RNA (1)...(19): siRNA sense strand
ccacugcuaccacaaguuu

SEQ ID NO: 543593 - RNA, 19 nt, Homo sapiens
  misc_RNA (1)...(19): siRNA sense strand
gagaagaugaugguuaaga

SEQ ID NO: 543594 - RNA, 19 nt, Homo sapiens
  misc_RNA (1)...(19): siRNA sense strand
ccacaugucaucaaauugu

SEQ ID NO: 543595 - RNA, 19 nt, Homo sapiens
  misc_RNA (1)...(19): siRNA sense strand
ccacauggauugaaaacaa

SEQ ID NO: 543596 - RNA, 19 nt, Homo sapiens
  misc_RNA (1)...(19): siRNA sense strand
gggcggaagaugaagauuu

SEQ ID NO: 543597 - RNA, 19 nt, Homo sapiens
  misc_RNA (1)...(19): siRNA sense strand
uggcggugcuggucaauga

SEQ ID NO: 543598 - RNA, 19 nt, Homo sapiens
  misc_RNA (1)...(19): siRNA sense strand
gcgaggagguggugauggu

SEQ ID NO: 543599 - RNA, 19 nt, Homo sapiens
  misc_RNA (1)...(19): siRNA sense strand
ggagauguaccgccugaug

SEQ ID NO: 543600 - RNA, 19 nt, Homo sapiens
  misc_RNA (1)...(19): siRNA sense strand
gagaccugcugucagaguu

SEQ ID NO: 543601 - RNA, 19 nt, Homo sapiens
  misc_RNA (1)...(19): siRNA sense strand
ccgugaagaugcugaaaga

SEQ ID NO: 543602 - RNA, 19 nt, Homo sapiens
  misc_RNA (1)...(19): siRNA sense strand
caacggccuuccaucugaa

SEQ ID NO: 543603 - RNA, 19 nt, Homo sapiens
  misc_RNA (1)...(19): siRNA sense strand
gugaagaugcugaaagaga

SEQ ID NO: 543604 - RNA, 19 nt, Homo sapiens
  misc_RNA (1)...(19): siRNA sense strand
cugacucccugauuuauga

SEQ ID NO: 543605 - RNA, 19 nt, Homo sapiens
  misc_RNA (1)...(19): siRNA sense strand
gaccguacaugacuauagg

SEQ ID NO: 543606 - RNA, 19 nt, Homo sapiens
  misc_RNA (1)...(19): siRNA sense strand
gucccgagauguuuaugaa

SEQ ID NO: 543607 - RNA, 19 nt, Homo sapiens
  misc_RNA (1)...(19): siRNA sense strand
ucuaggagaaggcgaauuu

SEQ ID NO: 543608 - RNA, 19 nt, Homo sapiens
  misc_RNA (1)...(19): siRNA sense strand
cacaugucaucaaauugua

SEQ ID NO: 543609 - RNA, 19 nt, Homo sapiens
  misc_RNA (1)...(19): siRNA sense strand
gaugaagauuucggauuuc

SEQ ID NO: 543610 - RNA, 19 nt, Homo sapiens
  misc_RNA (1)...(19): siRNA sense strand
gugccgaacuucacuacau

SEQ ID NO: 543611 - RNA, 19 nt, Homo sapiens
  misc_RNA (1)...(19): siRNA sense strand
cccgagauguuuaugaaga

SEQ ID NO: 543612 - RNA, 19 nt, Homo sapiens
  misc_RNA (1)...(19): siRNA sense strand
ccacaaguuugcccacaag

SEQ ID NO: 543613 - RNA, 19 nt, Homo sapiens
  misc_RNA (1)...(19): siRNA sense strand
gggcgaccguacaugacua

SEQ ID NO: 543614 - RNA, 19 nt, Homo sapiens
  misc_RNA (1)...(19): siRNA sense strand
acccacaugucaucaaauu

SEQ ID NO: 543615 - RNA, 19 nt, Homo sapiens
  misc_RNA (1)...(19): siRNA sense strand
gacccaagacaucaacauu

SEQ ID NO: 543616 - RNA, 19 nt, Homo sapiens
  misc_RNA (1)...(19): siRNA sense strand
cagggucggauuccaguua

SEQ ID NO: 543617 - RNA, 19 nt, Homo sapiens
  misc_RNA (1)...(19): siRNA sense strand
gcguauacuucuccuucuu

SEQ ID NO: 543618 - RNA, 19 nt, Homo sapiens
  misc_RNA (1)...(19): siRNA sense strand
cugguggacuguaauaaug

SEQ ID NO: 543619 - RNA, 19 nt, Homo sapiens
  misc_RNA (1)...(19): siRNA sense strand
uaagaggagagacuacuug

SEQ ID NO: 543620 - RNA, 19 nt, Homo sapiens
  misc_RNA (1)...(19): siRNA sense strand
ggauccuguuugugaauga

SEQ ID NO: 543621 - RNA, 19 nt, Homo sapiens
  misc_RNA (1)...(19): siRNA sense strand
guauacuucuccuucuuca

SEQ ID NO: 543622 - RNA, 19 nt, Homo sapiens
  misc_RNA (1)...(19): siRNA sense strand
ggaagcaggagccggacaa

SEQ ID NO: 543623 - RNA, 19 nt, Homo sapiens
  misc_RNA (1)...(19): siRNA sense strand
ugggcgaccucaucucauu

SEQ ID NO: 543624 - RNA, 19 nt, Homo sapiens
  misc_RNA (1)...(19): siRNA sense strand
ugcgagaccugcugucaga

SEQ ID NO: 543625 - RNA, 19 nt, Homo sapiens
  misc_RNA (1)...(19): siRNA sense strand
agaagaugaugguuaagag

SEQ ID NO: 543626 - RNA, 19 nt, Homo sapiens
  misc_RNA (1)...(19): siRNA sense strand
acuauaggcugguucucaa

SEQ ID NO: 543627 - RNA, 19 nt, Homo sapiens
  misc_RNA (1)...(19): siRNA sense strand
gagaaggcgaauuuggaaa

SEQ ID NO: 543628 - RNA, 19 nt, Homo sapiens
  misc_RNA (1)...(19): siRNA sense strand
gcuguccucuucuccuuca

SEQ ID NO: 543629 - RNA, 19 nt, Homo sapiens
  misc_RNA (1)...(19): siRNA sense strand
ggagauggcaaagggauca

SEQ ID NO: 543630 - RNA, 19 nt, Homo sapiens
  misc_RNA (1)...(19): siRNA sense strand
gaaccaggucuccguggau

SEQ ID NO: 543631 - RNA, 19 nt, Homo sapiens
  misc_RNA (1)...(19): siRNA sense strand
ggauggagaggccagacaa

SEQ ID NO: 543632 - RNA, 19 nt, Homo sapiens
  misc_RNA (1)...(19): siRNA sense strand
gcugguggacuguaauaau

SEQ ID NO: 543633 - RNA, 19 nt, Homo sapiens
  misc_RNA (1)...(19): siRNA sense strand
gaggcaaggagauggcaaa

SEQ ID NO: 543634 - RNA, 19 nt, Homo sapiens
  misc_RNA (1)...(19): siRNA sense strand
gcauugggccucuacuucu

SEQ ID NO: 543635 - RNA, 19 nt, Homo sapiens
  misc_RNA (1)...(19): siRNA sense strand
cugaggaggugcccagcuu

SEQ ID NO: 543636 - RNA, 19 nt, Homo sapiens
  misc_RNA (1)...(19): siRNA sense strand
cuggagaagaugaugguua

SEQ ID NO: 543637 - RNA, 19 nt, Homo sapiens
  misc_RNA (1)...(19): siRNA sense strand
gaagcaggagccggacaaa

SEQ ID NO: 543638 - RNA, 19 nt, Homo sapiens
  misc_RNA (1)...(19): siRNA sense strand
uaaauggauggcaauugaa

SEQ ID NO: 543639 - RNA, 19 nt, Homo sapiens
  misc_RNA (1)...(19): siRNA sense strand
gggauccuguuugugaaug

SEQ ID NO: 543640 - RNA, 19 nt, Homo sapiens
  misc_RNA (1)...(19): siRNA sense strand
gacggccacugcgauguug

SEQ ID NO: 543641 - RNA, 19 nt, Homo sapiens
  misc_RNA (1)...(19): siRNA sense strand
ggacaaaaggccgguguuu

SEQ ID NO: 543642 - RNA, 19 nt, Homo sapiens
  misc_RNA (1)...(19): siRNA sense strand
gcucguucaucgggacuug

SEQ ID NO: 543643 - RNA, 19 nt, Homo sapiens
  misc_RNA (1)...(19): siRNA sense strand
gugaggcgguacacaagca

SEQ ID NO: 543644 - RNA, 19 nt, Homo sapiens
  misc_RNA (1)...(19): siRNA sense strand
cagcaaagaccuggagaag

SEQ ID NO: 543645 - RNA, 19 nt, Homo sapiens
  misc_RNA (1)...(19): siRNA sense strand
caaccacccacaugucauc

SEQ ID NO: 543646 - RNA, 19 nt, Homo sapiens
  misc_RNA (1)...(19): siRNA sense strand
ggauuaaagcuggcuaugg

SEQ ID NO: 543647 - RNA, 19 nt, Homo sapiens
  misc_RNA (1)...(19): siRNA sense strand
cgacggccacugcgauguu

SEQ ID NO: 543648 - RNA, 19 nt, Homo sapiens
  misc_RNA (1)...(19): siRNA sense strand
gaaagucuguguggaaaac

SEQ ID NO: 543649 - RNA, 19 nt, Homo sapiens
  misc_RNA (1)...(19): siRNA sense strand
ggcauugggccucuacuuc

SEQ ID NO: 543650 - RNA, 19 nt, Homo sapiens
  misc_RNA (1)...(19): siRNA sense strand
cgggaaagucuguguggaa

SEQ ID NO: 543651 - RNA, 19 nt, Homo sapiens
  misc_RNA (1)...(19): siRNA sense strand
gcccagaucgggaaagucu

SEQ ID NO: 543652 - RNA, 19 nt, Homo sapiens
  misc_RNA (1)...(19): siRNA sense strand
gacuauaggcugguucuca

SEQ ID NO: 543653 - RNA, 19 nt, Homo sapiens
  misc_RNA (1)...(19): siRNA sense strand
gcacgcccuugcuguacgu

SEQ ID NO: 543654 - RNA, 19 nt, Homo sapiens
  misc_RNA (1)...(19): siRNA sense strand
ggucggauuccaguuaaau

SEQ ID NO: 543655 - RNA, 19 nt, Homo sapiens
  misc_RNA (1)...(19): siRNA sense strand
gcuugucccgagauguuua

SEQ ID NO: 543656 - RNA, 19 nt, Homo sapiens
  misc_RNA (1)...(19): siRNA sense strand
caucguggaguacgccaaa

SEQ ID NO: 543657 - RNA, 19 nt, Homo sapiens
  misc_RNA (1)...(19): siRNA sense strand
gaccugcugucagaguuca

SEQ ID NO: 543658 - RNA, 19 nt, Homo sapiens
  misc_RNA (1)...(19): siRNA sense strand
acccaagacaucaacauuu

SEQ ID NO: 543659 - RNA, 19 nt, Homo sapiens
  misc_RNA (1)...(19): siRNA sense strand
caacugcagcgaggagaug

SEQ ID NO: 543660 - RNA, 19 nt, Homo sapiens
  misc_RNA (1)...(19): siRNA sense strand
cacgcaaagugauguaugg

SEQ ID NO: 543661 - RNA, 19 nt, Homo sapiens
  misc_RNA (1)...(19): siRNA sense strand
gaggagccagggucggauu

SEQ ID NO: 543662 - RNA, 19 nt, Homo sapiens
  misc_RNA (1)...(19): siRNA sense strand
gggcgaccucaucucauuu

SEQ ID NO: 543663 - RNA, 19 nt, Homo sapiens
  misc_RNA (1)...(19): siRNA sense strand
aaccggagccuggaccaua

SEQ ID NO: 543664 - RNA, 19 nt, Homo sapiens
  misc_RNA (1)...(19): siRNA sense strand
caagagacggcuggagugu

SEQ ID NO: 543665 - RNA, 19 nt, Homo sapiens
  misc_RNA (1)...(19): siRNA sense strand
guuaaauggauggcaauug

SEQ ID NO: 543666 - RNA, 19 nt, Homo sapiens
  misc_RNA (1)...(19): siRNA sense strand
aagaugaagauuucggauu

SEQ ID NO: 543667 - RNA, 19 nt, Homo sapiens
  misc_RNA (1)...(19): siRNA sense strand
ccgcuguccucuucuccuu

SEQ ID NO: 543668 - RNA, 19 nt, Homo sapiens
  misc_RNA (1)...(19): siRNA sense strand
gcgccgugguggaguucaa

SEQ ID NO: 543669 - RNA, 19 nt, Homo sapiens
  misc_RNA (1)...(19): siRNA sense strand
ggcauucaguggcaucaac

SEQ ID NO: 543670 - RNA, 19 nt, Homo sapiens
  misc_RNA (1)...(19): siRNA sense strand
agggucggauuccaguuaa

SEQ ID NO: 543671 - RNA, 19 nt, Homo sapiens
  misc_RNA (1)...(19): siRNA sense strand
cggcuugucccgagauguu

SEQ ID NO: 543672 - RNA, 19 nt, Homo sapiens
  misc_RNA (1)...(19): siRNA sense strand
ccacgcaaagugauguaug

SEQ ID NO: 543673 - RNA, 19 nt, Homo sapiens
  misc_RNA (1)...(19): siRNA sense strand
gaauaugucuuucuccaau

SEQ ID NO: 543674 - RNA, 19 nt, Homo sapiens
  misc_RNA (1)...(19): siRNA sense strand
gaccaagguuucuuucuuu

SEQ ID NO: 543675 - RNA, 19 nt, Homo sapiens
  misc_RNA (1)...(19): siRNA sense strand
caaagaagauagagacuca

SEQ ID NO: 543676 - RNA, 19 nt, Homo sapiens
  misc_RNA (1)...(19): siRNA sense strand
uaaccugucugccaucaaa

SEQ ID NO: 543677 - RNA, 19 nt, Homo sapiens
  misc_RNA (1)...(19): siRNA sense strand
cagaagcuccucuacuuua

SEQ ID NO: 543678 - RNA, 19 nt, Homo sapiens
  misc_RNA (1)...(19): siRNA sense strand
gcuuucagcuuccuguuaa

SEQ ID NO: 543679 - RNA, 19 nt, Homo sapiens
  misc_RNA (1)...(19): siRNA sense strand
caaagaaagggaacaguug

SEQ ID NO: 543680 - RNA, 19 nt, Homo sapiens
  misc_RNA (1)...(19): siRNA sense strand
caauuaugcuuucaugcaa

SEQ ID NO: 543681 - RNA, 19 nt, Homo sapiens
  misc_RNA (1)...(19): siRNA sense strand
gcagaagcuccucuacuuu

SEQ ID NO: 543682 - RNA, 19 nt, Homo sapiens
  misc_RNA (1)...(19): siRNA sense strand
gcaguccaauuucaagaau

SEQ ID NO: 543683 - RNA, 19 nt, Homo sapiens
  misc_RNA (1)...(19): siRNA sense strand
ggagauacuggucaaagaa

SEQ ID NO: 543684 - RNA, 19 nt, Homo sapiens
  misc_RNA (1)...(19): siRNA sense strand
cuaagaugcucccuucaug

SEQ ID NO: 543685 - RNA, 19 nt, Homo sapiens
  misc_RNA (1)...(19): siRNA sense strand
agaagcuccucuacuuuaa

SEQ ID NO: 543686 - RNA, 19 nt, Homo sapiens
  misc_RNA (1)...(19): siRNA sense strand
gucaccagcuauucauuaa

SEQ ID NO: 543687 - RNA, 19 nt, Homo sapiens
  misc_RNA (1)...(19): siRNA sense strand
acaaggugcuguucacuuc

SEQ ID NO: 543688 - RNA, 19 nt, Homo sapiens
  misc_RNA (1)...(19): siRNA sense strand
agaccaagguuucuuucuu

SEQ ID NO: 543689 - RNA, 19 nt, Homo sapiens
  misc_RNA (1)...(19): siRNA sense strand
ugcagaagcuccucuacuu

SEQ ID NO: 543690 - RNA, 19 nt, Homo sapiens
  misc_RNA (1)...(19): siRNA sense strand
ggauguagcuaaggauugg

SEQ ID NO: 543691 - RNA, 19 nt, Homo sapiens
  misc_RNA (1)...(19): siRNA sense strand
gggccaggcaguccaauuu

SEQ ID NO: 543692 - RNA, 19 nt, Homo sapiens
  misc_RNA (1)...(19): siRNA sense strand
aaagggaacaguugacauu

SEQ ID NO: 543693 - RNA, 19 nt, Homo sapiens
  misc_RNA (1)...(19): siRNA sense strand
gggcccaauucuuacuaua

SEQ ID NO: 543694 - RNA, 19 nt, Homo sapiens
  misc_RNA (1)...(19): siRNA sense strand
cucaacagcuccaauuaug

SEQ ID NO: 543695 - RNA, 19 nt, Homo sapiens
  misc_RNA (1)...(19): siRNA sense strand
gcuaaggauuggaaugaca

SEQ ID NO: 543696 - RNA, 19 nt, Homo sapiens
  misc_RNA (1)...(19): siRNA sense strand
ggaauguacuucgcuuucu

SEQ ID NO: 543697 - RNA, 19 nt, Homo sapiens
  misc_RNA (1)...(19): siRNA sense strand
uggcacaaguggaucauug

SEQ ID NO: 543698 - RNA, 19 nt, Homo sapiens
  misc_RNA (1)...(19): siRNA sense strand
ucaaagaaagggaacaguu

SEQ ID NO: 543699 - RNA, 19 nt, Homo sapiens
  misc_RNA (1)...(19): siRNA sense strand
cgagacuuaugcuacguaa

SEQ ID NO: 543700 - RNA, 19 nt, Homo sapiens
  misc_RNA (1)...(19): siRNA sense strand
gaauguacuucgcuuucuc

SEQ ID NO: 543701 - RNA, 19 nt, Homo sapiens
  misc_RNA (1)...(19): siRNA sense strand
cgucaccagcuauucauua

SEQ ID NO: 543702 - RNA, 19 nt, Homo sapiens
  misc_RNA (1)...(19): siRNA sense strand
caauuucugggcuuagaua

SEQ ID NO: 543703 - RNA, 19 nt, Homo sapiens
  misc_RNA (1)...(19): siRNA sense strand
agacaccugugccagacua

SEQ ID NO: 543704 - RNA, 19 nt, Homo sapiens
  misc_RNA (1)...(19): siRNA sense strand
ggcccaauucuuacuauaa

SEQ ID NO: 543705 - RNA, 19 nt, Homo sapiens
  misc_RNA (1)...(19): siRNA sense strand
ucacugaccaucucucuca

SEQ ID NO: 543706 - RNA, 19 nt, Homo sapiens
  misc_RNA (1)...(19): siRNA sense strand
accaagguuucuuucuuua

SEQ ID NO: 543707 - RNA, 19 nt, Homo sapiens
  misc_RNA (1)...(19): siRNA sense strand
ccaggacaauaaugacaau

SEQ ID NO: 543708 - RNA, 19 nt, Homo sapiens
  misc_RNA (1)...(19): siRNA sense strand
uggagauacuggucaaaga

SEQ ID NO: 543709 - RNA, 19 nt, Homo sapiens
  misc_RNA (1)...(19): siRNA sense strand
aaagaaagggaacaguuga

SEQ ID NO: 543710 - RNA, 19 nt, Homo sapiens
  misc_RNA (1)...(19): siRNA sense strand
gcccaauucuuacuauaac

SEQ ID NO: 543711 - RNA, 19 nt, Homo sapiens
  misc_RNA (1)...(19): siRNA sense strand
ccaauuaugcuuucaugca

SEQ ID NO: 543712 - RNA, 19 nt, Homo sapiens
  misc_RNA (1)...(19): siRNA sense strand
gugccacccuucucggaaa

SEQ ID NO: 543713 - RNA, 19 nt, Homo sapiens
  misc_RNA (1)...(19): siRNA sense strand
gccaggcaguccaauuuca

SEQ ID NO: 543714 - RNA, 19 nt, Homo sapiens
  misc_RNA (1)...(19): siRNA sense strand
caccagcuauucauuaacu

SEQ ID NO: 543715 - RNA, 19 nt, Homo sapiens
  misc_RNA (1)...(19): siRNA sense strand
ggaccuggguuggcacaag

SEQ ID NO: 543716 - RNA, 19 nt, Homo sapiens
  misc_RNA (1)...(19): siRNA sense strand
agacuuaugcuacguaaag

SEQ ID NO: 543717 - RNA, 19 nt, Homo sapiens
  misc_RNA (1)...(19): siRNA sense strand
accaagcugucucccauuu

SEQ ID NO: 543718 - RNA, 19 nt, Homo sapiens
  misc_RNA (1)...(19): siRNA sense strand
uagcuaaggauuggaauga

SEQ ID NO: 543719 - RNA, 19 nt, Homo sapiens
  misc_RNA (1)...(19): siRNA sense strand
gaaagggaacaguugacau

SEQ ID NO: 543720 - RNA, 19 nt, Homo sapiens
  misc_RNA (1)...(19): siRNA sense strand
gggaauguacuucgcuuuc

SEQ ID NO: 543721 - RNA, 19 nt, Homo sapiens
  misc_RNA (1)...(19): siRNA sense strand
caugguagucgaugaaugu

SEQ ID NO: 543722 - RNA, 19 nt, Homo sapiens
  misc_RNA (1)...(19): siRNA sense strand
uuacugccauggagagugu

SEQ ID NO: 543723 - RNA, 19 nt, Homo sapiens
  misc_RNA (1)...(19): siRNA sense strand
gaccuggguuggcacaagu

SEQ ID NO: 543724 - RNA, 19 nt, Homo sapiens
  misc_RNA (1)...(19): siRNA sense strand
caguccaauuucaagaaua

SEQ ID NO: 543725 - RNA, 19 nt, Homo sapiens
  misc_RNA (1)...(19): siRNA sense strand
cuucguuucuugccagauu

SEQ ID NO: 543726 - RNA, 19 nt, Homo sapiens
  misc_RNA (1)...(19): siRNA sense strand
guuccaaccugugccuuau

SEQ ID NO: 543727 - RNA, 19 nt, Homo sapiens
  misc_RNA (1)...(19): siRNA sense strand
caaccugugccuuauaucu

SEQ ID NO: 543728 - RNA, 19 nt, Homo sapiens
  misc_RNA (1)...(19): siRNA sense strand
cagcuccaauuaugcuuuc

SEQ ID NO: 543729 - RNA, 19 nt, Homo sapiens
  misc_RNA (1)...(19): siRNA sense strand
uccaaccugugccuuauau

SEQ ID NO: 543730 - RNA, 19 nt, Homo sapiens
  misc_RNA (1)...(19): siRNA sense strand
caacagcuccaauuaugcu

SEQ ID NO: 543731 - RNA, 19 nt, Homo sapiens
  misc_RNA (1)...(19): siRNA sense strand
ggcuuucagcuuccuguua

SEQ ID NO: 543732 - RNA, 19 nt, Homo sapiens
  misc_RNA (1)...(19): siRNA sense strand
uaagccagguaaaauguuu

SEQ ID NO: 543733 - RNA, 19 nt, Homo sapiens
  misc_RNA (1)...(19): siRNA sense strand
ucuccaauuucugggcuua

SEQ ID NO: 543734 - RNA, 19 nt, Homo sapiens
  misc_RNA (1)...(19): siRNA sense strand
caagguuucuuucuuuacc

SEQ ID NO: 543735 - RNA, 19 nt, Homo sapiens
  misc_RNA (1)...(19): siRNA sense strand
caagcugucucccauuucc

SEQ ID NO: 543736 - RNA, 19 nt, Homo sapiens
  misc_RNA (1)...(19): siRNA sense strand
ucucaacagcuccaauuau

SEQ ID NO: 543737 - RNA, 19 nt, Homo sapiens
  misc_RNA (1)...(19): siRNA sense strand
gagauacuggucaaagaag

SEQ ID NO: 543738 - RNA, 19 nt, Homo sapiens
  misc_RNA (1)...(19): siRNA sense strand
agauacuggucaaagaaga

SEQ ID NO: 543739 - RNA, 19 nt, Homo sapiens
  misc_RNA (1)...(19): siRNA sense strand
agacaugguagucgaugaa

SEQ ID NO: 543740 - RNA, 19 nt, Homo sapiens
  misc_RNA (1)...(19): siRNA sense strand
ggcaguccaauuucaagaa

SEQ ID NO: 543741 - RNA, 19 nt, Homo sapiens
  misc_RNA (1)...(19): siRNA sense strand
gguuauuccuggagauacu

SEQ ID NO: 543742 - RNA, 19 nt, Homo sapiens
  misc_RNA (1)...(19): siRNA sense strand
guucaggagccucaugugu

SEQ ID NO: 543743 - RNA, 19 nt, Homo sapiens
  misc_RNA (1)...(19): siRNA sense strand
ugucugccaucaaagaaag

SEQ ID NO: 543744 - RNA, 19 nt, Homo sapiens
  misc_RNA (1)...(19): siRNA sense strand
gcucuaccaggacaauaau

SEQ ID NO: 543745 - RNA, 19 nt, Homo sapiens
  misc_RNA (1)...(19): siRNA sense strand
ccaagggguucauggcaaa

SEQ ID NO: 543746 - RNA, 19 nt, Homo sapiens
  misc_RNA (1)...(19): siRNA sense strand
gauacuggucaaagaagau

SEQ ID NO: 543747 - RNA, 19 nt, Homo sapiens
  misc_RNA (1)...(19): siRNA sense strand
guuucuuucuuuacccaaa

SEQ ID NO: 543748 - RNA, 19 nt, Homo sapiens
  misc_RNA (1)...(19): siRNA sense strand
ccauuuccaugcucuacca

SEQ ID NO: 543749 - RNA, 19 nt, Homo sapiens
  misc_RNA (1)...(19): siRNA sense strand
ucucucaacagcuccaauu

SEQ ID NO: 543750 - RNA, 19 nt, Homo sapiens
  misc_RNA (1)...(19): siRNA sense strand
ucagcuuccuguuaauucu

SEQ ID NO: 543751 - RNA, 19 nt, Homo sapiens
  misc_RNA (1)...(19): siRNA sense strand
ccaggcaguccaauuucaa

SEQ ID NO: 543752 - RNA, 19 nt, Homo sapiens
  misc_RNA (1)...(19): siRNA sense strand
ucuaccaggacaauaauga

SEQ ID NO: 543753 - RNA, 19 nt, Homo sapiens
  misc_RNA (1)...(19): siRNA sense strand
aaggugcuguucacuucaa

SEQ ID NO: 543754 - RNA, 19 nt, Homo sapiens
  misc_RNA (1)...(19): siRNA sense strand
aagacaugguagucgauga

SEQ ID NO: 543755 - RNA, 19 nt, Homo sapiens
  misc_RNA (1)...(19): siRNA sense strand
gaucagugccacccuucuc

SEQ ID NO: 543756 - RNA, 19 nt, Homo sapiens
  misc_RNA (1)...(19): siRNA sense strand
cagguaaaauguuuguguu

SEQ ID NO: 543757 - RNA, 19 nt, Homo sapiens
  misc_RNA (1)...(19): siRNA sense strand
ucuacgacauuaugaagac

SEQ ID NO: 543758 - RNA, 19 nt, Homo sapiens
  misc_RNA (1)...(19): siRNA sense strand
ccuguuaauucuggcuuug

SEQ ID NO: 543759 - RNA, 19 nt, Homo sapiens
  misc_RNA (1)...(19): siRNA sense strand
cugaccaucucucucaaca

SEQ ID NO: 543760 - RNA, 19 nt, Homo sapiens
  misc_RNA (1)...(19): siRNA sense strand
cagauuuggcuuucagcuu

SEQ ID NO: 543761 - RNA, 19 nt, Homo sapiens
  misc_RNA (1)...(19): siRNA sense strand
gaagagaacggccacaaca

SEQ ID NO: 543762 - RNA, 19 nt, Homo sapiens
  misc_RNA (1)...(19): siRNA sense strand
gggagcgcaucgaagagaa

SEQ ID NO: 543763 - RNA, 19 nt, Homo sapiens
  misc_RNA (1)...(19): siRNA sense strand
gcuucuacguggccaugaa

SEQ ID NO: 543764 - RNA, 19 nt, Homo sapiens
  misc_RNA (1)...(19): siRNA sense strand
gggcgucguggucaucaaa

SEQ ID NO: 543765 - RNA, 19 nt, Homo sapiens
  misc_RNA (1)...(19): siRNA sense strand
ggacagcauccuggagauc

SEQ ID NO: 543766 - RNA, 19 nt, Homo sapiens
  misc_RNA (1)...(19): siRNA sense strand
gcaguguccucaggcuucu

SEQ ID NO: 543767 - RNA, 19 nt, Homo sapiens
  misc_RNA (1)...(19): siRNA sense strand
ggagauccgcucuguacac

SEQ ID NO: 543768 - RNA, 19 nt, Homo sapiens
  misc_RNA (1)...(19): siRNA sense strand
gaagauaccucugcaugga

SEQ ID NO: 543769 - RNA, 19 nt, Homo sapiens
  misc_RNA (1)...(19): siRNA sense strand
cuaccacucuccucaguau

SEQ ID NO: 543770 - RNA, 19 nt, Homo sapiens
  misc_RNA (1)...(19): siRNA sense strand
ccucagagccuaucccaau

SEQ ID NO: 543771 - RNA, 19 nt, Homo sapiens
  misc_RNA (1)...(19): siRNA sense strand
gauuucagaggcaacauuu

SEQ ID NO: 543772 - RNA, 19 nt, Homo sapiens
  misc_RNA (1)...(19): siRNA sense strand
agauaccucugcauggauu

SEQ ID NO: 543773 - RNA, 19 nt, Homo sapiens
  misc_RNA (1)...(19): siRNA sense strand
ccacagccaggaacagcua

SEQ ID NO: 543774 - RNA, 19 nt, Homo sapiens
  misc_RNA (1)...(19): siRNA sense strand
ggauuucagaggcaacauu

SEQ ID NO: 543775 - RNA, 19 nt, Homo sapiens
  misc_RNA (1)...(19): siRNA sense strand
agaggaugcuggcuuugug

SEQ ID NO: 543776 - RNA, 19 nt, Homo sapiens
  misc_RNA (1)...(19): siRNA sense strand
caagaauggccauguggau

SEQ ID NO: 543777 - RNA, 19 nt, Homo sapiens
  misc_RNA (1)...(19): siRNA sense strand
cugcagauccacaagaaug

SEQ ID NO: 543778 - RNA, 19 nt, Homo sapiens
  misc_RNA (1)...(19): siRNA sense strand
gcuaccaccugcagaucca

SEQ ID NO: 543779 - RNA, 19 nt, Homo sapiens
  misc_RNA (1)...(19): siRNA sense strand
guacgacgucuaccacucu

SEQ ID NO: 543780 - RNA, 19 nt, Homo sapiens
  misc_RNA (1)...(19): siRNA sense strand
ggugauuacaggugugaug

SEQ ID NO: 543781 - RNA, 19 nt, Homo sapiens
  misc_RNA (1)...(19): siRNA sense strand
ggugugaugagcagaagau

SEQ ID NO: 543782 - RNA, 19 nt, Homo sapiens
  misc_RNA (1)...(19): siRNA sense strand
acagcccgauggccaguga

SEQ ID NO: 543783 - RNA, 19 nt, Homo sapiens
  misc_RNA (1)...(19): siRNA sense strand
gugauuacaggugugauga

SEQ ID NO: 543784 - RNA, 19 nt, Homo sapiens
  misc_RNA (1)...(19): siRNA sense strand
aucagaggaugcuggcuuu

SEQ ID NO: 543785 - RNA, 19 nt, Homo sapiens
  misc_RNA (1)...(19): siRNA sense strand
ccaauggcaugaaguauga

SEQ ID NO: 543786 - RNA, 19 nt, Homo sapiens
  misc_RNA (1)...(19): siRNA sense strand
gaucagcuuuggcgaugua

SEQ ID NO: 543787 - RNA, 19 nt, Homo sapiens
  misc_RNA (1)...(19): siRNA sense strand
gggcgagacucaaccaaga

SEQ ID NO: 543788 - RNA, 19 nt, Homo sapiens
  misc_RNA (1)...(19): siRNA sense strand
gaaccaaaguggaaauagc

SEQ ID NO: 543789 - RNA, 19 nt, Homo sapiens
  misc_RNA (1)...(19): siRNA sense strand
gaagguggacagagcaauu

SEQ ID NO: 543790 - RNA, 19 nt, Homo sapiens
  misc_RNA (1)...(19): siRNA sense strand
ggagcugcauucucaguau

SEQ ID NO: 543791 - RNA, 19 nt, Homo sapiens
  misc_RNA (1)...(19): siRNA sense strand
gaacuugcuauaccaaaga

SEQ ID NO: 543792 - RNA, 19 nt, Homo sapiens
  misc_RNA (1)...(19): siRNA sense strand
gccaugagcagaauuaguu

SEQ ID NO: 543793 - RNA, 19 nt, Homo sapiens
  misc_RNA (1)...(19): siRNA sense strand
caaagaauccagcaagcaa

SEQ ID NO: 543794 - RNA, 19 nt, Homo sapiens
  misc_RNA (1)...(19): siRNA sense strand
gaaauagcaaauucaagga

SEQ ID NO: 543795 - RNA, 19 nt, Homo sapiens
  misc_RNA (1)...(19): siRNA sense strand
caaaggcucccacgaagga

SEQ ID NO: 543796 - RNA, 19 nt, Homo sapiens
  misc_RNA (1)...(19): siRNA sense strand
aaaggaguguggcugauga

SEQ ID NO: 543797 - RNA, 19 nt, Homo sapiens
  misc_RNA (1)...(19): siRNA sense strand
gaugccaacuccacgauca

SEQ ID NO: 543798 - RNA, 19 nt, Homo sapiens
  misc_RNA (1)...(19): siRNA sense strand
gaggguaccuggaguaacg

SEQ ID NO: 543799 - RNA, 19 nt, Homo sapiens
  misc_RNA (1)...(19): siRNA sense strand
cgauguagauugugauuuu

SEQ ID NO: 543800 - RNA, 19 nt, Homo sapiens
  misc_RNA (1)...(19): siRNA sense strand
gaaggggagugggcaaaua

SEQ ID NO: 543801 - RNA, 19 nt, Homo sapiens
  misc_RNA (1)...(19): siRNA sense strand
gcuacuacgugaagcugaa

SEQ ID NO: 543802 - RNA, 19 nt, Homo sapiens
  misc_RNA (1)...(19): siRNA sense strand
uaacaagaggcauggauau

SEQ ID NO: 543803 - RNA, 19 nt, Homo sapiens
  misc_RNA (1)...(19): siRNA sense strand
gcugucaccugauuucuac

SEQ ID NO: 543804 - RNA, 19 nt, Homo sapiens
  misc_RNA (1)...(19): siRNA sense strand
gaagaaaagguaccagaaa

SEQ ID NO: 543805 - RNA, 19 nt, Homo sapiens
  misc_RNA (1)...(19): siRNA sense strand
ggcccuaauucaaucauga

SEQ ID NO: 543806 - RNA, 19 nt, Homo sapiens
  misc_RNA (1)...(19): siRNA sense strand
gcuccaauggcaugaagua

SEQ ID NO: 543807 - RNA, 19 nt, Homo sapiens
  misc_RNA (1)...(19): siRNA sense strand
gaauccaagucuuccaucu

SEQ ID NO: 543808 - RNA, 19 nt, Homo sapiens
  misc_RNA (1)...(19): siRNA sense strand
caaaaccaguugccaaaga

SEQ ID NO: 543809 - RNA, 19 nt, Homo sapiens
  misc_RNA (1)...(19): siRNA sense strand
gagacucaaccaagacaaa

SEQ ID NO: 543810 - RNA, 19 nt, Homo sapiens
  misc_RNA (1)...(19): siRNA sense strand
ggaguaacgggcugcaaga

SEQ ID NO: 543811 - RNA, 19 nt, Homo sapiens
  misc_RNA (1)...(19): siRNA sense strand
ggccagaaccaaaguggaa

SEQ ID NO: 543812 - RNA, 19 nt, Homo sapiens
  misc_RNA (1)...(19): siRNA sense strand
ccacgcagacgcugagcua

SEQ ID NO: 543813 - RNA, 19 nt, Homo sapiens
  misc_RNA (1)...(19): siRNA sense strand
caaaguggaaauagcaaau

SEQ ID NO: 543814 - RNA, 19 nt, Homo sapiens
  misc_RNA (1)...(19): siRNA sense strand
agguguagaugcuaaagaa

SEQ ID NO: 543815 - RNA, 19 nt, Homo sapiens
  misc_RNA (1)...(19): siRNA sense strand
gguacggcguggagaccua

SEQ ID NO: 543816 - RNA, 19 nt, Homo sapiens
  misc_RNA (1)...(19): siRNA sense strand
gagcugcauucucaguauc

SEQ ID NO: 543817 - RNA, 19 nt, Homo sapiens
  misc_RNA (1)...(19): siRNA sense strand
ugucaaaggcucccacgaa

SEQ ID NO: 543818 - RNA, 19 nt, Homo sapiens
  misc_RNA (1)...(19): siRNA sense strand
gaauaucggguuggccauu

SEQ ID NO: 543819 - RNA, 19 nt, Homo sapiens
  misc_RNA (1)...(19): siRNA sense strand
aagcaaagcugagccaaaa

SEQ ID NO: 543820 - RNA, 19 nt, Homo sapiens
  misc_RNA (1)...(19): siRNA sense strand
ggaguggucacaugguuuc

SEQ ID NO: 543821 - RNA, 19 nt, Homo sapiens
  misc_RNA (1)...(19): siRNA sense strand
aagaaaagguaccagaaaa

SEQ ID NO: 543822 - RNA, 19 nt, Homo sapiens
  misc_RNA (1)...(19): siRNA sense strand
gaagagggaaaauacaaaa

SEQ ID NO: 543823 - RNA, 19 nt, Homo sapiens
  misc_RNA (1)...(19): siRNA sense strand
caacuccacgaucagcuuu

SEQ ID NO: 543824 - RNA, 19 nt, Homo sapiens
  misc_RNA (1)...(19): siRNA sense strand
ggagugggcaaauaacaag

SEQ ID NO: 543825 - RNA, 19 nt, Homo sapiens
  misc_RNA (1)...(19): siRNA sense strand
gcggccaugagcagaauua

SEQ ID NO: 543826 - RNA, 19 nt, Homo sapiens
  misc_RNA (1)...(19): siRNA sense strand
caauaagcccuugauguca

SEQ ID NO: 543827 - RNA, 19 nt, Homo sapiens
  misc_RNA (1)...(19): siRNA sense strand
ggaagguguagaugcuaaa

SEQ ID NO: 543828 - RNA, 19 nt, Homo sapiens
  misc_RNA (1)...(19): siRNA sense strand
aggaagguguagaugcuaa

SEQ ID NO: 543829 - RNA, 19 nt, Homo sapiens
  misc_RNA (1)...(19): siRNA sense strand
ucaggaagguguagaugcu

SEQ ID NO: 543830 - RNA, 19 nt, Homo sapiens
  misc_RNA (1)...(19): siRNA sense strand
gggagugggcaaauaacaa

SEQ ID NO: 543831 - RNA, 19 nt, Homo sapiens
  misc_RNA (1)...(19): siRNA sense strand
ugaacuugcuauaccaaag

SEQ ID NO: 543832 - RNA, 19 nt, Homo sapiens
  misc_RNA (1)...(19): siRNA sense strand
caaacagagauuucaggaa

SEQ ID NO: 543833 - RNA, 19 nt, Homo sapiens
  misc_RNA (1)...(19): siRNA sense strand
ccugacggcuccaaagaag

SEQ ID NO: 543834 - RNA, 19 nt, Homo sapiens
  misc_RNA (1)...(19): siRNA sense strand
gcacaagccauccgcuaac

SEQ ID NO: 543835 - RNA, 19 nt, Homo sapiens
  misc_RNA (1)...(19): siRNA sense strand
gaaaagccaccuacaccaa

SEQ ID NO: 543836 - RNA, 19 nt, Homo sapiens
  misc_RNA (1)...(19): siRNA sense strand
ggagcugucaccugauuuc

SEQ ID NO: 543837 - RNA, 19 nt, Homo sapiens
  misc_RNA (1)...(19): siRNA sense strand
auaacaagaggcauggaua

SEQ ID NO: 543838 - RNA, 19 nt, Homo sapiens
  misc_RNA (1)...(19): siRNA sense strand
gggagcugcauucucagua

SEQ ID NO: 543839 - RNA, 19 nt, Homo sapiens
  misc_RNA (1)...(19): siRNA sense strand
cagaaccaaaguggaaaua

SEQ ID NO: 543840 - RNA, 19 nt, Homo sapiens
  misc_RNA (1)...(19): siRNA sense strand
ccaaagaagagggaaaaua

SEQ ID NO: 543841 - RNA, 19 nt, Homo sapiens
  misc_RNA (1)...(19): siRNA sense strand
ccaaaguggaaauagcaaa

SEQ ID NO: 543842 - RNA, 19 nt, Homo sapiens
  misc_RNA (1)...(19): siRNA sense strand
aaguggaaauagcaaauuc

SEQ ID NO: 543843 - RNA, 19 nt, Homo sapiens
  misc_RNA (1)...(19): siRNA sense strand
gcgguuucgugcucaacuu

SEQ ID NO: 543844 - RNA, 19 nt, Homo sapiens
  misc_RNA (1)...(19): siRNA sense strand
gagcuagcgggcaagaaga

SEQ ID NO: 543845 - RNA, 19 nt, Homo sapiens
  misc_RNA (1)...(19): siRNA sense strand
gcagcgagcagagcaaugg

SEQ ID NO: 543846 - RNA, 19 nt, Homo sapiens
  misc_RNA (1)...(19): siRNA sense strand
gagauuucaggaaggugua

SEQ ID NO: 543847 - RNA, 19 nt, Homo sapiens
  misc_RNA (1)...(19): siRNA sense strand
gggaguggucacaugguuu

SEQ ID NO: 543848 - RNA, 19 nt, Homo sapiens
  misc_RNA (1)...(19): siRNA sense strand
caaaagcuaagaagucuga

SEQ ID NO: 543849 - RNA, 19 nt, Homo sapiens
  misc_RNA (1)...(19): siRNA sense strand
aaagcaaagcugagccaaa

SEQ ID NO: 543850 - RNA, 19 nt, Homo sapiens
  misc_RNA (1)...(19): siRNA sense strand
agggagcugucaccugauu

SEQ ID NO: 543851 - RNA, 19 nt, Homo sapiens
  misc_RNA (1)...(19): siRNA sense strand
caaagaagagggaaaauac

SEQ ID NO: 543852 - RNA, 19 nt, Homo sapiens
  misc_RNA (1)...(19): siRNA sense strand
gcgcuccaauggcaugaag

SEQ ID NO: 543853 - RNA, 19 nt, Homo sapiens
  misc_RNA (1)...(19): siRNA sense strand
guggaaauagcaaauucaa

SEQ ID NO: 543854 - RNA, 19 nt, Homo sapiens
  misc_RNA (1)...(19): siRNA sense strand
gacaaaaccaguugccaaa

SEQ ID NO: 543855 - RNA, 19 nt, Homo sapiens
  misc_RNA (1)...(19): siRNA sense strand
cagcaagcaacgauucaug

SEQ ID NO: 543856 - RNA, 19 nt, Homo sapiens
  misc_RNA (1)...(19): siRNA sense strand
ccaccaccacggaaaccua

SEQ ID NO: 543857 - RNA, 19 nt, Homo sapiens
  misc_RNA (1)...(19): siRNA sense strand
caagccauccgcuaacaag

SEQ ID NO: 543858 - RNA, 19 nt, Homo sapiens
  misc_RNA (1)...(19): siRNA sense strand
cacaagccauccgcuaaca

SEQ ID NO: 543859 - RNA, 19 nt, Homo sapiens
  misc_RNA (1)...(19): siRNA sense strand
gagcaggugacggccauug

SEQ ID NO: 543860 - RNA, 19 nt, Homo sapiens
  misc_RNA (1)...(19): siRNA sense strand
gcgaguggaagaacgacaa

SEQ ID NO: 543861 - RNA, 19 nt, Homo sapiens
  misc_RNA (1)...(19): siRNA sense strand
guggucacaugguuucaag

SEQ ID NO: 543862 - RNA, 19 nt, Homo sapiens
  misc_RNA (1)...(19): siRNA sense strand
ccaaagaauccagcaagca

SEQ ID NO: 543863 - RNA, 19 nt, Homo sapiens
  misc_RNA (1)...(19): siRNA sense strand
aaaaccaguugccaaagaa

SEQ ID NO: 543864 - RNA, 19 nt, Homo sapiens
  misc_RNA (1)...(19): siRNA sense strand
gcaggugacggccauuguc

SEQ ID NO: 543865 - RNA, 19 nt, Homo sapiens
  misc_RNA (1)...(19): siRNA sense strand
caaagccccugaagaagca

SEQ ID NO: 543866 - RNA, 19 nt, Homo sapiens
  misc_RNA (1)...(19): siRNA sense strand
cacagccacucuccugcuu

SEQ ID NO: 543867 - RNA, 19 nt, Homo sapiens
  misc_RNA (1)...(19): siRNA sense strand
aaagccaccuacaccaaag

SEQ ID NO: 543868 - RNA, 19 nt, Homo sapiens
  misc_RNA (1)...(19): siRNA sense strand
gcaaguccgaauccaaguc

SEQ ID NO: 543869 - RNA, 19 nt, Homo sapiens
  misc_RNA (1)...(19): siRNA sense strand
gucaugcuguugaauaucg

SEQ ID NO: 543870 - RNA, 19 nt, Homo sapiens
  misc_RNA (1)...(19): siRNA sense strand
cuugucaugcuguugaaua

SEQ ID NO: 543871 - RNA, 19 nt, Homo sapiens
  misc_RNA (1)...(19): siRNA sense strand
gaauccagcaagcaacgau

SEQ ID NO: 543872 - RNA, 19 nt, Homo sapiens
  misc_RNA (1)...(19): siRNA sense strand
ccagcacccuccaguagac

SEQ ID NO: 543873 - RNA, 19 nt, Homo sapiens
  misc_RNA (1)...(19): siRNA sense strand
gaggcaagucccaaacaca

SEQ ID NO: 543874 - RNA, 19 nt, Homo sapiens
  misc_RNA (1)...(19): siRNA sense strand
acagagauuucaggaaggu

SEQ ID NO: 543875 - RNA, 19 nt, Homo sapiens
  misc_RNA (1)...(19): siRNA sense strand
gagaagguggacagagcaa

SEQ ID NO: 543876 - RNA, 19 nt, Homo sapiens
  misc_RNA (1)...(19): siRNA sense strand
aggcauggauauggcugua

SEQ ID NO: 543877 - RNA, 19 nt, Homo sapiens
  misc_RNA (1)...(19): siRNA sense strand
uucaugcccugcuuuggaa

SEQ ID NO: 543878 - RNA, 19 nt, Homo sapiens
  misc_RNA (1)...(19): siRNA sense strand
gguguagaugcuaaagaaa

SEQ ID NO: 543879 - RNA, 19 nt, Homo sapiens
  misc_RNA (1)...(19): siRNA sense strand
agacgaagggcaaguggau

SEQ ID NO: 543880 - RNA, 19 nt, Homo sapiens
  misc_RNA (1)...(19): siRNA sense strand
cgaagggcaaguggaugua

SEQ ID NO: 543881 - RNA, 19 nt, Homo sapiens
  misc_RNA (1)...(19): siRNA sense strand
auauggcuguaccguguuu

SEQ ID NO: 543882 - RNA, 19 nt, Homo sapiens
  misc_RNA (1)...(19): siRNA sense strand
ccuccaaaucugugacaaa

SEQ ID NO: 543883 - RNA, 19 nt, Homo sapiens
  misc_RNA (1)...(19): siRNA sense strand
cagcuuuggcgauguagau

SEQ ID NO: 543884 - RNA, 19 nt, Homo sapiens
  misc_RNA (1)...(19): siRNA sense strand
cagcugccauggccagaac

SEQ ID NO: 543885 - RNA, 19 nt, Homo sapiens
  misc_RNA (1)...(19): siRNA sense strand
ggagagaaauccuauauau

SEQ ID NO: 543886 - RNA, 19 nt, Homo sapiens
  misc_RNA (1)...(19): siRNA sense strand
gaacaugccuuauucaaca

SEQ ID NO: 543887 - RNA, 19 nt, Homo sapiens
  misc_RNA (1)...(19): siRNA sense strand
ggagagaaguguuauaaau

SEQ ID NO: 543888 - RNA, 19 nt, Homo sapiens
  misc_RNA (1)...(19): siRNA sense strand
ggaaagaguuuaggcauau

SEQ ID NO: 543889 - RNA, 19 nt, Homo sapiens
  misc_RNA (1)...(19): siRNA sense strand
ggaagaaaccauauaaaug

SEQ ID NO: 543890 - RNA, 19 nt, Homo sapiens
  misc_RNA (1)...(19): siRNA sense strand
gagagacccuauaaaugua

SEQ ID NO: 543891 - RNA, 19 nt, Homo sapiens
  misc_RNA (1)...(19): siRNA sense strand
gcucauuccucaacccuua

SEQ ID NO: 543892 - RNA, 19 nt, Homo sapiens
  misc_RNA (1)...(19): siRNA sense strand
gaggauaugucuaaacuca

SEQ ID NO: 543893 - RNA, 19 nt, Homo sapiens
  misc_RNA (1)...(19): siRNA sense strand
ggagagagacccuauaaau

SEQ ID NO: 543894 - RNA, 19 nt, Homo sapiens
  misc_RNA (1)...(19): siRNA sense strand
gggaaagaguuuaggcaua

SEQ ID NO: 543895 - RNA, 19 nt, Homo sapiens
  misc_RNA (1)...(19): siRNA sense strand
gguaaaaccuucagucaua

SEQ ID NO: 543896 - RNA, 19 nt, Homo sapiens
  misc_RNA (1)...(19): siRNA sense strand
aggcauaucucaucccuua

SEQ ID NO: 543897 - RNA, 19 nt, Homo sapiens
  misc_RNA (1)...(19): siRNA sense strand
gaagaaacccauaccauca

SEQ ID NO: 543898 - RNA, 19 nt, Homo sapiens
  misc_RNA (1)...(19): siRNA sense strand
ggagagaaaccauauaaau

SEQ ID NO: 543899 - RNA, 19 nt, Homo sapiens
  misc_RNA (1)...(19): siRNA sense strand
ggagagaaaccauauaaau

SEQ ID NO: 543900 - RNA, 19 nt, Homo sapiens
  misc_RNA (1)...(19): siRNA sense strand
caacugugauucccauauu

SEQ ID NO: 543901 - RNA, 19 nt, Homo sapiens
  misc_RNA (1)...(19): siRNA sense strand
gaaaucguaugaaugugaa

SEQ ID NO: 543902 - RNA, 19 nt, Homo sapiens
  misc_RNA (1)...(19): siRNA sense strand
gagagaagccuuacaagug

SEQ ID NO: 543903 - RNA, 19 nt, Homo sapiens
  misc_RNA (1)...(19): siRNA sense strand
aaucaugucucauauggua

SEQ ID NO: 543904 - RNA, 19 nt, Homo sapiens
  misc_RNA (1)...(19): siRNA sense strand
gaagaaaccauauaaaugc

SEQ ID NO: 543905 - RNA, 19 nt, Homo sapiens
  misc_RNA (1)...(19): siRNA sense strand
agacaaggcgcaaaucuua

SEQ ID NO: 543906 - RNA, 19 nt, Homo sapiens
  misc_RNA (1)...(19): siRNA sense strand
gugcaaaucuuacucaaca

SEQ ID NO: 543907 - RNA, 19 nt, Homo sapiens
  misc_RNA (1)...(19): siRNA sense strand
ugacuacgaugauagacua

SEQ ID NO: 543908 - RNA, 19 nt, Homo sapiens
  misc_RNA (1)...(19): siRNA sense strand
gagagaaaccauauaaaug

SEQ ID NO: 543909 - RNA, 19 nt, Homo sapiens
  misc_RNA (1)...(19): siRNA sense strand
gagagaaaccauauaaaug

SEQ ID NO: 543910 - RNA, 19 nt, Homo sapiens
  misc_RNA (1)...(19): siRNA sense strand
ggaaauccuuacuucaaga

SEQ ID NO: 543911 - RNA, 19 nt, Homo sapiens
  misc_RNA (1)...(19): siRNA sense strand
caacaucagagaacucaua

SEQ ID NO: 543912 - RNA, 19 nt, Homo sapiens
  misc_RNA (1)...(19): siRNA sense strand
caacaucagaggauucaua

SEQ ID NO: 543913 - RNA, 19 nt, Homo sapiens
  misc_RNA (1)...(19): siRNA sense strand
gagagaaacccuauaagug

SEQ ID NO: 543914 - RNA, 19 nt, Homo sapiens
  misc_RNA (1)...(19): siRNA sense strand
ugacucagauucuagaaga

SEQ ID NO: 543915 - RNA, 19 nt, Homo sapiens
  misc_RNA (1)...(19): siRNA sense strand
cagagaacaugccuuauuc

SEQ ID NO: 543916 - RNA, 19 nt, Homo sapiens
  misc_RNA (1)...(19): siRNA sense strand
ccaaagagaaaucguauga

SEQ ID NO: 543917 - RNA, 19 nt, Homo sapiens
  misc_RNA (1)...(19): siRNA sense strand
gaaaagcauucaaaccuaa

SEQ ID NO: 543918 - RNA, 19 nt, Homo sapiens
  misc_RNA (1)...(19): siRNA sense strand
ucaaagauguggcuguaga

SEQ ID NO: 543919 - RNA, 19 nt, Homo sapiens
  misc_RNA (1)...(19): siRNA sense strand
guaugaaugugaagaaugu

SEQ ID NO: 543920 - RNA, 19 nt, Homo sapiens
  misc_RNA (1)...(19): siRNA sense strand
cagaaggaauuauacaaga

SEQ ID NO: 543921 - RNA, 19 nt, Homo sapiens
  misc_RNA (1)...(19): siRNA sense strand
gggaagaaaccauauaaau

SEQ ID NO: 543922 - RNA, 19 nt, Homo sapiens
  misc_RNA (1)...(19): siRNA sense strand
ucagaguacuuaccuuauu

SEQ ID NO: 543923 - RNA, 19 nt, Homo sapiens
  misc_RNA (1)...(19): siRNA sense strand
gagagagacccuauaaaug

SEQ ID NO: 543924 - RNA, 19 nt, Homo sapiens
  misc_RNA (1)...(19): siRNA sense strand
auacaagacugugacguua

SEQ ID NO: 543925 - RNA, 19 nt, Homo sapiens
  misc_RNA (1)...(19): siRNA sense strand
ugccaaacaucguaauuaa

SEQ ID NO: 543926 - RNA, 19 nt, Homo sapiens
  misc_RNA (1)...(19): siRNA sense strand
caacaucauagaacacaua

SEQ ID NO: 543927 - RNA, 19 nt, Homo sapiens
  misc_RNA (1)...(19): siRNA sense strand
ggagagaaacccuauaagu

SEQ ID NO: 543928 - RNA, 19 nt, Homo sapiens
  misc_RNA (1)...(19): siRNA sense strand
acaguuugauacccaauua

SEQ ID NO: 543929 - RNA, 19 nt, Homo sapiens
  misc_RNA (1)...(19): siRNA sense strand
cgagagcucugccuuaagu

SEQ ID NO: 543930 - RNA, 19 nt, Homo sapiens
  misc_RNA (1)...(19): siRNA sense strand
ggauaugucuaaacucaca

SEQ ID NO: 543931 - RNA, 19 nt, Homo sapiens
  misc_RNA (1)...(19): siRNA sense strand
ggauuugacucagauucua

SEQ ID NO: 543932 - RNA, 19 nt, Homo sapiens
  misc_RNA (1)...(19): siRNA sense strand
ccauauaaaugcagugugu

SEQ ID NO: 543933 - RNA, 19 nt, Homo sapiens
  misc_RNA (1)...(19): siRNA sense strand
gagagaaguguuauaaaug

SEQ ID NO: 543934 - RNA, 19 nt, Homo sapiens
  misc_RNA (1)...(19): siRNA sense strand
ugucuaaacucacaaagga

SEQ ID NO: 543935 - RNA, 19 nt, Homo sapiens
  misc_RNA (1)...(19): siRNA sense strand
ccaaagaaucgaugacauu

SEQ ID NO: 543936 - RNA, 19 nt, Homo sapiens
  misc_RNA (1)...(19): siRNA sense strand
gaacacauacuggagagaa

SEQ ID NO: 543937 - RNA, 19 nt, Homo sapiens
  misc_RNA (1)...(19): siRNA sense strand
uuacagaacuauuggaaca

SEQ ID NO: 543938 - RNA, 19 nt, Homo sapiens
  misc_RNA (1)...(19): siRNA sense strand
agucauaguucaucacuga

SEQ ID NO: 543939 - RNA, 19 nt, Homo sapiens
  misc_RNA (1)...(19): siRNA sense strand
ccagagaacaugccuuauu

SEQ ID NO: 543940 - RNA, 19 nt, Homo sapiens
  misc_RNA (1)...(19): siRNA sense strand
caucagaggauucauaaug

SEQ ID NO: 543941 - RNA, 19 nt, Homo sapiens
  misc_RNA (1)...(19): siRNA sense strand
gaaaguguuuagucagagu

SEQ ID NO: 543942 - RNA, 19 nt, Homo sapiens
  misc_RNA (1)...(19): siRNA sense strand
gcauaucucaucccuuauu

SEQ ID NO: 543943 - RNA, 19 nt, Homo sapiens
  misc_RNA (1)...(19): siRNA sense strand
ccucaucacuuaaucaaca

SEQ ID NO: 543944 - RNA, 19 nt, Homo sapiens
  misc_RNA (1)...(19): siRNA sense strand
ccauauaaaugcuuggaau

SEQ ID NO: 543945 - RNA, 19 nt, Homo sapiens
  misc_RNA (1)...(19): siRNA sense strand
gugcacaccuuacuauaca

SEQ ID NO: 543946 - RNA, 19 nt, Homo sapiens
  misc_RNA (1)...(19): siRNA sense strand
agagaagccuuacaagugu

SEQ ID NO: 543947 - RNA, 19 nt, Homo sapiens
  misc_RNA (1)...(19): siRNA sense strand
agagagacccuauaaaugu

SEQ ID NO: 543948 - RNA, 19 nt, Homo sapiens
  misc_RNA (1)...(19): siRNA sense strand
gcauucaaaccuaauugua

SEQ ID NO: 543949 - RNA, 19 nt, Homo sapiens
  misc_RNA (1)...(19): siRNA sense strand
gagaaaccauauaaaugca

SEQ ID NO: 543950 - RNA, 19 nt, Homo sapiens
  misc_RNA (1)...(19): siRNA sense strand
gagguuaggacuuggguaa

SEQ ID NO: 543951 - RNA, 19 nt, Homo sapiens
  misc_RNA (1)...(19): siRNA sense strand
ccucaacccuuauucaaca

SEQ ID NO: 543952 - RNA, 19 nt, Homo sapiens
  misc_RNA (1)...(19): siRNA sense strand
ggagagaagccuuacaagu

SEQ ID NO: 543953 - RNA, 19 nt, Homo sapiens
  misc_RNA (1)...(19): siRNA sense strand
ucaaucaugucucauaugg

SEQ ID NO: 543954 - RNA, 19 nt, Homo sapiens
  misc_RNA (1)...(19): siRNA sense strand
caggauggcuaaaugacuu

SEQ ID NO: 543955 - RNA, 19 nt, Homo sapiens
  misc_RNA (1)...(19): siRNA sense strand
cagacaggauggcuaaaug

SEQ ID NO: 543956 - RNA, 19 nt, Homo sapiens
  misc_RNA (1)...(19): siRNA sense strand
gagagaaauccuauauaug

SEQ ID NO: 543957 - RNA, 19 nt, Homo sapiens
  misc_RNA (1)...(19): siRNA sense strand
agaauaugauccuacagaa

SEQ ID NO: 543958 - RNA, 19 nt, Homo sapiens
  misc_RNA (1)...(19): siRNA sense strand
gacacauacuggagagaaa

SEQ ID NO: 543959 - RNA, 19 nt, Homo sapiens
  misc_RNA (1)...(19): siRNA sense strand
ugucucauaugguauugua

SEQ ID NO: 543960 - RNA, 19 nt, Homo sapiens
  misc_RNA (1)...(19): siRNA sense strand
ugacucugguggaggauuu

SEQ ID NO: 543961 - RNA, 19 nt, Homo sapiens
  misc_RNA (1)...(19): siRNA sense strand
gagaacaugccuuauucaa

SEQ ID NO: 543962 - RNA, 19 nt, Homo sapiens
  misc_RNA (1)...(19): siRNA sense strand
cagcaucaaaggauucaua

SEQ ID NO: 543963 - RNA, 19 nt, Homo sapiens
  misc_RNA (1)...(19): siRNA sense strand
cagaguacuuaccuuauuc

SEQ ID NO: 543964 - RNA, 19 nt, Homo sapiens
  misc_RNA (1)...(19): siRNA sense strand
guuggaaaguguuuaguca

SEQ ID NO: 543965 - RNA, 19 nt, Homo sapiens
  misc_RNA (1)...(19): siRNA sense strand
agagaaaucguaugaaugu

SEQ ID NO: 543966 - RNA, 19 nt, Homo sapiens
  misc_RNA (1)...(19): siRNA sense strand
gggcaaccuucaaucaugu

SEQ ID NO: 543967 - RNA, 19 nt, Homo sapiens
  misc_RNA (1)...(19): siRNA sense strand
gaagucaguccuuucacaa

SEQ ID NO: 543968 - RNA, 19 nt, Homo sapiens
  misc_RNA (1)...(19): siRNA sense strand
gcagaaggaauuauacaag

SEQ ID NO: 543969 - RNA, 19 nt, Homo sapiens
  misc_RNA (1)...(19): siRNA sense strand
caauauaugugggaaagca

SEQ ID NO: 543970 - RNA, 19 nt, Homo sapiens
  misc_RNA (1)...(19): siRNA sense strand
cgacaucagagaauucauu

SEQ ID NO: 543971 - RNA, 19 nt, Homo sapiens
  misc_RNA (1)...(19): siRNA sense strand
caaugaauguuggaaagug

SEQ ID NO: 543972 - RNA, 19 nt, Homo sapiens
  misc_RNA (1)...(19): siRNA sense strand
agagaaacccuauaagugu

SEQ ID NO: 543973 - RNA, 19 nt, Homo sapiens
  misc_RNA (1)...(19): siRNA sense strand
ccucaaaacucuacccuuu

SEQ ID NO: 543974 - RNA, 19 nt, Homo sapiens
  misc_RNA (1)...(19): siRNA sense strand
gugccaaacaucguaauua

SEQ ID NO: 543975 - RNA, 19 nt, Homo sapiens
  misc_RNA (1)...(19): siRNA sense strand
gcaucaacguguucauaca

SEQ ID NO: 543976 - RNA, 19 nt, Homo sapiens
  misc_RNA (1)...(19): siRNA sense strand
ggacacauacuggagagaa

SEQ ID NO: 543977 - RNA, 19 nt, Homo sapiens
  misc_RNA (1)...(19): siRNA sense strand
acaagaauaugauccuaca

SEQ ID NO: 543978 - RNA, 19 nt, Homo sapiens
  misc_RNA (1)...(19): siRNA sense strand
caggaggacugggaguuaa

SEQ ID NO: 543979 - RNA, 19 nt, Homo sapiens
  misc_RNA (1)...(19): siRNA sense strand
ucgaugacauucaaagaug

SEQ ID NO: 543980 - RNA, 19 nt, Homo sapiens
  misc_RNA (1)...(19): siRNA sense strand
ucacaagaauaugauccua

SEQ ID NO: 543981 - RNA, 19 nt, Homo sapiens
  misc_RNA (1)...(19): siRNA sense strand
gaggauucauaauggagaa

SEQ ID NO: 543982 - RNA, 19 nt, Homo sapiens
  misc_RNA (1)...(19): siRNA sense strand
uggaaaguguuuagucaga

SEQ ID NO: 543983 - RNA, 19 nt, Homo sapiens
  misc_RNA (1)...(19): siRNA sense strand
gcagggcaaccuucaauca

SEQ ID NO: 543984 - RNA, 19 nt, Homo sapiens
  misc_RNA (1)...(19): siRNA sense strand
agagaaacccuaugcaugu

SEQ ID NO: 543985 - RNA, 19 nt, Homo sapiens
  misc_RNA (1)...(19): siRNA sense strand
ggaacaaggucgcccacuu

SEQ ID NO: 543986 - RNA, 19 nt, Homo sapiens
  misc_RNA (1)...(19): siRNA sense strand
gaacaaggucgcccacuuc

SEQ ID NO: 543987 - RNA, 19 nt, Homo sapiens
  misc_RNA (1)...(19): siRNA sense strand
ggagucgccauucuguuua

SEQ ID NO: 543988 - RNA, 19 nt, Homo sapiens
  misc_RNA (1)...(19): siRNA sense strand
aggagaagcugagcaacua

SEQ ID NO: 543989 - RNA, 19 nt, Homo sapiens
  misc_RNA (1)...(19): siRNA sense strand
caacaucggagucgccauu

SEQ ID NO: 543990 - RNA, 19 nt, Homo sapiens
  misc_RNA (1)...(19): siRNA sense strand
gacauccacuccaccauca

SEQ ID NO: 543991 - RNA, 19 nt, Homo sapiens
  misc_RNA (1)...(19): siRNA sense strand
gcaaguacaagcagaacau

SEQ ID NO: 543992 - RNA, 19 nt, Homo sapiens
  misc_RNA (1)...(19): siRNA sense strand
gaugagcucaaguccagua

SEQ ID NO: 543993 - RNA, 19 nt, Homo sapiens
  misc_RNA (1)...(19): siRNA sense strand
gcucggacgggcucaagua

SEQ ID NO: 543994 - RNA, 19 nt, Homo sapiens
  misc_RNA (1)...(19): siRNA sense strand
caggaucacugccaaagag

SEQ ID NO: 543995 - RNA, 19 nt, Homo sapiens
  misc_RNA (1)...(19): siRNA sense strand
ccaaggaggagggcaagua

SEQ ID NO: 543996 - RNA, 19 nt, Homo sapiens
  misc_RNA (1)...(19): siRNA sense strand
ccucacagcagcucagaaa

SEQ ID NO: 543997 - RNA, 19 nt, Homo sapiens
  misc_RNA (1)...(19): siRNA sense strand
ucgccauucuguuuauuaa

SEQ ID NO: 543998 - RNA, 19 nt, Homo sapiens
  misc_RNA (1)...(19): siRNA sense strand
gcaacuaccggauggagau

SEQ ID NO: 543999 - RNA, 19 nt, Homo sapiens
  misc_RNA (1)...(19): siRNA sense strand
gcaucggccuggagagcaa

SEQ ID NO: 544000 - RNA, 19 nt, Homo sapiens
  misc_RNA (1)...(19): siRNA sense strand
gccauucuguuuauuaacu

SEQ ID NO: 544001 - RNA, 19 nt, Homo sapiens
  misc_RNA (1)...(19): siRNA sense strand
cggagucgccauucuguuu

SEQ ID NO: 544002 - RNA, 19 nt, Homo sapiens
  misc_RNA (1)...(19): siRNA sense strand
ccagcaagauccgcgagaa

SEQ ID NO: 544003 - RNA, 19 nt, Homo sapiens
  misc_RNA (1)...(19): siRNA sense strand
gagucgccauucuguuuau

SEQ ID NO: 544004 - RNA, 19 nt, Homo sapiens
  misc_RNA (1)...(19): siRNA sense strand
gaucacugccaaagaguuc

SEQ ID NO: 544005 - RNA, 19 nt, Homo sapiens
  misc_RNA (1)...(19): siRNA sense strand
gguccaaggcccagaacaa

SEQ ID NO: 544006 - RNA, 19 nt, Homo sapiens
  misc_RNA (1)...(19): siRNA sense strand
cgacggaggguccuacugu

SEQ ID NO: 544007 - RNA, 19 nt, Homo sapiens
  misc_RNA (1)...(19): siRNA sense strand
gcgaguggacgcacggauu

SEQ ID NO: 544008 - RNA, 19 nt, Homo sapiens
  misc_RNA (1)...(19): siRNA sense strand
ccaaggcccagaacaagga

SEQ ID NO: 544009 - RNA, 19 nt, Homo sapiens
  misc_RNA (1)...(19): siRNA sense strand
cggacgggcucaaguacga

SEQ ID NO: 544010 - RNA, 19 nt, Homo sapiens
  misc_RNA (1)...(19): siRNA sense strand
ggagacgcauccccagaaa

SEQ ID NO: 544011 - RNA, 19 nt, Homo sapiens
  misc_RNA (1)...(19): siRNA sense strand
ggucaucgaggacgacauc

SEQ ID NO: 544012 - RNA, 19 nt, Homo sapiens
  misc_RNA (1)...(19): siRNA sense strand
gaggagaagcugagcaacu

SEQ ID NO: 544013 - RNA, 19 nt, Homo sapiens
  misc_RNA (1)...(19): siRNA sense strand
ccacagugacuccgagauc

SEQ ID NO: 544014 - RNA, 19 nt, Homo sapiens
  misc_RNA (1)...(19): siRNA sense strand
ccgagauccucaagagcaa

SEQ ID NO: 544015 - RNA, 19 nt, Homo sapiens
  misc_RNA (1)...(19): siRNA sense strand
ugaaacccuugcugaggau

SEQ ID NO: 544016 - RNA, 19 nt, Homo sapiens
  misc_RNA (1)...(19): siRNA sense strand
gcuacgggaccgagaccua

SEQ ID NO: 544017 - RNA, 19 nt, Homo sapiens
  misc_RNA (1)...(19): siRNA sense strand
gaccuccugugacgacauc

SEQ ID NO: 544018 - RNA, 19 nt, Homo sapiens
  misc_RNA (1)...(19): siRNA sense strand
gcaagcagagcuccuuucg

SEQ ID NO: 544019 - RNA, 19 nt, Homo sapiens
  misc_RNA (1)...(19): siRNA sense strand
gcagcaagcagagcuccuu

SEQ ID NO: 544020 - RNA, 19 nt, Homo sapiens
  misc_RNA (1)...(19): siRNA sense strand
gcaagauccgcgagaaggu

SEQ ID NO: 544021 - RNA, 19 nt, Homo sapiens
  misc_RNA (1)...(19): siRNA sense strand
ccaagggccaaggcgaaua

SEQ ID NO: 544022 - RNA, 19 nt, Homo sapiens
  misc_RNA (1)...(19): siRNA sense strand
gagauccucaagagcaaga

SEQ ID NO: 544023 - RNA, 19 nt, Homo sapiens
  misc_RNA (1)...(19): siRNA sense strand
gcgaguggaagaacgacaa

SEQ ID NO: 544024 - RNA, 19 nt, Homo sapiens
  misc_RNA (1)...(19): siRNA sense strand
ggcugaagcugcgcaaguc

SEQ ID NO: 544025 - RNA, 19 nt, Homo sapiens
  misc_RNA (1)...(19): siRNA sense strand
gggcugaagcugcgcaagu

SEQ ID NO: 544026 - RNA, 19 nt, Homo sapiens
  misc_RNA (1)...(19): siRNA sense strand
ccaagcagaaggcugagau

SEQ ID NO: 544027 - RNA, 19 nt, Homo sapiens
  misc_RNA (1)...(19): siRNA sense strand
ggaucacugccaaagaguu

SEQ ID NO: 544028 - RNA, 19 nt, Homo sapiens
  misc_RNA (1)...(19): siRNA sense strand
cgaguggacgcacggauuc

SEQ ID NO: 544029 - RNA, 19 nt, Homo sapiens
  misc_RNA (1)...(19): siRNA sense strand
ccaccaccaccgagaccua

SEQ ID NO: 544030 - RNA, 19 nt, Homo sapiens
  misc_RNA (1)...(19): siRNA sense strand
gucgccauucuguuuauua

SEQ ID NO: 544031 - RNA, 19 nt, Homo sapiens
  misc_RNA (1)...(19): siRNA sense strand
auggugaucuugcucaaca

SEQ ID NO: 544032 - RNA, 19 nt, Homo sapiens
  misc_RNA (1)...(19): siRNA sense strand
caaggaggagggcaaguac

SEQ ID NO: 544033 - RNA, 19 nt, Homo sapiens
  misc_RNA (1)...(19): siRNA sense strand
cagcaagcagagcuccuuu

SEQ ID NO: 544034 - RNA, 19 nt, Homo sapiens
  misc_RNA (1)...(19): siRNA sense strand
ccaggaucacugccaaaga

SEQ ID NO: 544035 - RNA, 19 nt, Homo sapiens
  misc_RNA (1)...(19): siRNA sense strand
acuccgagauccucaagag

SEQ ID NO: 544036 - RNA, 19 nt, Homo sapiens
  misc_RNA (1)...(19): siRNA sense strand
gaacauuuaugacuacauc

SEQ ID NO: 544037 - RNA, 19 nt, Homo sapiens
  misc_RNA (1)...(19): siRNA sense strand
ggaaggagcagcagagaga

SEQ ID NO: 544038 - RNA, 19 nt, Homo sapiens
  misc_RNA (1)...(19): siRNA sense strand
cagcaacgaucguggacua

SEQ ID NO: 544039 - RNA, 19 nt, Homo sapiens
  misc_RNA (1)...(19): siRNA sense strand
gcccugaccuuguccuuga

SEQ ID NO: 544040 - RNA, 19 nt, Homo sapiens
  misc_RNA (1)...(19): siRNA sense strand
aaucggaacugcauggaaa

SEQ ID NO: 544041 - RNA, 19 nt, Homo sapiens
  misc_RNA (1)...(19): siRNA sense strand
gacaggagaugaugcuauc

SEQ ID NO: 544042 - RNA, 19 nt, Homo sapiens
  misc_RNA (1)...(19): siRNA sense strand
ggaacucgcccaucucuca

SEQ ID NO: 544043 - RNA, 19 nt, Homo sapiens
  misc_RNA (1)...(19): siRNA sense strand
caacgaucguggacuaucu

SEQ ID NO: 544044 - RNA, 19 nt, Homo sapiens
  misc_RNA (1)...(19): siRNA sense strand
cgacgcugcugcuagaugu

SEQ ID NO: 544045 - RNA, 19 nt, Homo sapiens
  misc_RNA (1)...(19): siRNA sense strand
cagaagggacgauauuuua

SEQ ID NO: 544046 - RNA, 19 nt, Homo sapiens
  misc_RNA (1)...(19): siRNA sense strand
ccagaacauuuaugacuac

SEQ ID NO: 544047 - RNA, 19 nt, Homo sapiens
  misc_RNA (1)...(19): siRNA sense strand
ucaugacgaugcaguuuca

SEQ ID NO: 544048 - RNA, 19 nt, Homo sapiens
  misc_RNA (1)...(19): siRNA sense strand
ucaguuaccuccgggugaa

SEQ ID NO: 544049 - RNA, 19 nt, Homo sapiens
  misc_RNA (1)...(19): siRNA sense strand
gugcagaagggacgauauu

SEQ ID NO: 544050 - RNA, 19 nt, Homo sapiens
  misc_RNA (1)...(19): siRNA sense strand
accagaacauuuaugacua

SEQ ID NO: 544051 - RNA, 19 nt, Homo sapiens
  misc_RNA (1)...(19): siRNA sense strand
gcagaagggacgauauuuu

SEQ ID NO: 544052 - RNA, 19 nt, Homo sapiens
  misc_RNA (1)...(19): siRNA sense strand
guccgacgcugcugcuaga

SEQ ID NO: 544053 - RNA, 19 nt, Homo sapiens
  misc_RNA (1)...(19): siRNA sense strand
ggcaacagguguacaucuc

SEQ ID NO: 544054 - RNA, 19 nt, Homo sapiens
  misc_RNA (1)...(19): siRNA sense strand
gcagacccaugcgggaugu

SEQ ID NO: 544055 - RNA, 19 nt, Homo sapiens
  misc_RNA (1)...(19): siRNA sense strand
ggaugcaccugaaaacaga

SEQ ID NO: 544056 - RNA, 19 nt, Homo sapiens
  misc_RNA (1)...(19): siRNA sense strand
ggugcacauuccugccaua

SEQ ID NO: 544057 - RNA, 19 nt, Homo sapiens
  misc_RNA (1)...(19): siRNA sense strand
agggaaggcugcuguugga

SEQ ID NO: 544058 - RNA, 19 nt, Homo sapiens
  misc_RNA (1)...(19): siRNA sense strand
gaaucggaacugcauggaa

SEQ ID NO: 544059 - RNA, 19 nt, Homo sapiens
  misc_RNA (1)...(19): siRNA sense strand
ggagucucuuaauggcuuu

SEQ ID NO: 544060 - RNA, 19 nt, Homo sapiens
  misc_RNA (1)...(19): siRNA sense strand
ggagggaaggcugcuguug

SEQ ID NO: 544061 - RNA, 19 nt, Homo sapiens
  misc_RNA (1)...(19): siRNA sense strand
ccaccagucugugcgaauc

SEQ ID NO: 544062 - RNA, 19 nt, Homo sapiens
  misc_RNA (1)...(19): siRNA sense strand
gacgauauuuuaugcauca

SEQ ID NO: 544063 - RNA, 19 nt, Homo sapiens
  misc_RNA (1)...(19): siRNA sense strand
gauguaaugcaccagaaca

SEQ ID NO: 544064 - RNA, 19 nt, Homo sapiens
  misc_RNA (1)...(19): siRNA sense strand
acgaugcaguuucaaggaa

SEQ ID NO: 544065 - RNA, 19 nt, Homo sapiens
  misc_RNA (1)...(19): siRNA sense strand
cgccugacaucaucuccaa

SEQ ID NO: 544066 - RNA, 19 nt, Homo sapiens
  misc_RNA (1)...(19): siRNA sense strand
gaagggacgauauuuuaug

SEQ ID NO: 544067 - RNA, 19 nt, Homo sapiens
  misc_RNA (1)...(19): siRNA sense strand
cggauguaaugcaccagaa

SEQ ID NO: 544068 - RNA, 19 nt, Homo sapiens
  misc_RNA (1)...(19): siRNA sense strand
gcuguuggagucucuuaau

SEQ ID NO: 544069 - RNA, 19 nt, Homo sapiens
  misc_RNA (1)...(19): siRNA sense strand
ccagccaccuucccuacca

SEQ ID NO: 544070 - RNA, 19 nt, Homo sapiens
  misc_RNA (1)...(19): siRNA sense strand
ggacaugaagcugcaaggu

SEQ ID NO: 544071 - RNA, 19 nt, Homo sapiens
  misc_RNA (1)...(19): siRNA sense strand
gacgaugcaguuucaagga

SEQ ID NO: 544072 - RNA, 19 nt, Homo sapiens
  misc_RNA (1)...(19): siRNA sense strand
gcaacgaucguggacuauc

SEQ ID NO: 544073 - RNA, 19 nt, Homo sapiens
  misc_RNA (1)...(19): siRNA sense strand
caccagaacauuuaugacu

SEQ ID NO: 544074 - RNA, 19 nt, Homo sapiens
  misc_RNA (1)...(19): siRNA sense strand
ggaggccccugcagaaaca

SEQ ID NO: 544075 - RNA, 19 nt, Homo sapiens
  misc_RNA (1)...(19): siRNA sense strand
guccugcgccucaguguca

SEQ ID NO: 544076 - RNA, 19 nt, Homo sapiens
  misc_RNA (1)...(19): siRNA sense strand
gcuaucccauggaggacau

SEQ ID NO: 544077 - RNA, 19 nt, Homo sapiens
  misc_RNA (1)...(19): siRNA sense strand
ccgagccacucaugacgau

SEQ ID NO: 544078 - RNA, 19 nt, Homo sapiens
  misc_RNA (1)...(19): siRNA sense strand
agacaggagaugaugcuau

SEQ ID NO: 544079 - RNA, 19 nt, Homo sapiens
  misc_RNA (1)...(19): siRNA sense strand
ggagacaggagaugaugcu

SEQ ID NO: 544080 - RNA, 19 nt, Homo sapiens
  misc_RNA (1)...(19): siRNA sense strand
ggcugucgcuguucugcau

SEQ ID NO: 544081 - RNA, 19 nt, Homo sapiens
  misc_RNA (1)...(19): siRNA sense strand
cagggccucuggagugaca

SEQ ID NO: 544082 - RNA, 19 nt, Homo sapiens
  misc_RNA (1)...(19): siRNA sense strand
cccaauuacucagcaggaa

SEQ ID NO: 544083 - RNA, 19 nt, Homo sapiens
  misc_RNA (1)...(19): siRNA sense strand
guucccgccugacaucauc

SEQ ID NO: 544084 - RNA, 19 nt, Homo sapiens
  misc_RNA (1)...(19): siRNA sense strand
cagcgggaaagcacaguga

SEQ ID NO: 544085 - RNA, 19 nt, Homo sapiens
  misc_RNA (1)...(19): siRNA sense strand
gcgccucagugucaguuac

SEQ ID NO: 544086 - RNA, 19 nt, Homo sapiens
  misc_RNA (1)...(19): siRNA sense strand
gcacgcagcugucaagaac

SEQ ID NO: 544087 - RNA, 19 nt, Homo sapiens
  misc_RNA (1)...(19): siRNA sense strand
gaacaugcauauggagaag

SEQ ID NO: 544088 - RNA, 19 nt, Homo sapiens
  misc_RNA (1)...(19): siRNA sense strand
acaaugagcucuccuucuc

SEQ ID NO: 544089 - RNA, 19 nt, Homo sapiens
  misc_RNA (1)...(19): siRNA sense strand
ugagggcacugucaucugu

SEQ ID NO: 544090 - RNA, 19 nt, Homo sapiens
  misc_RNA (1)...(19): siRNA sense strand
gcugggugccugccucaua

SEQ ID NO: 544091 - RNA, 19 nt, Homo sapiens
  misc_RNA (1)...(19): siRNA sense strand
gcagguggaagcccgugua

SEQ ID NO: 544092 - RNA, 19 nt, Homo sapiens
  misc_RNA (1)...(19): siRNA sense strand
cagcagccgucgagguguu

SEQ ID NO: 544093 - RNA, 19 nt, Homo sapiens
  misc_RNA (1)...(19): siRNA sense strand
uggugacacuguacccaua

SEQ ID NO: 544094 - RNA, 19 nt, Homo sapiens
  misc_RNA (1)...(19): siRNA sense strand
cuacugcgaggacaacuau

SEQ ID NO: 544095 - RNA, 19 nt, Homo sapiens
  misc_RNA (1)...(19): siRNA sense strand
ccagccagaaggacaauga

SEQ ID NO: 544096 - RNA, 19 nt, Homo sapiens
  misc_RNA (1)...(19): siRNA sense strand
gguggaagcccguguaagc

SEQ ID NO: 544097 - RNA, 19 nt, Homo sapiens
  misc_RNA (1)...(19): siRNA sense strand
caggagaccccucaacuuu

SEQ ID NO: 544098 - RNA, 19 nt, Homo sapiens
  misc_RNA (1)...(19): siRNA sense strand
gaggagaccauggccuuca

SEQ ID NO: 544099 - RNA, 19 nt, Homo sapiens
  misc_RNA (1)...(19): siRNA sense strand
ggagaccccucaacuuugg

SEQ ID NO: 544100 - RNA, 19 nt, Homo sapiens
  misc_RNA (1)...(19): siRNA sense strand
ugaacaugcauauggagaa

SEQ ID NO: 544101 - RNA, 19 nt, Homo sapiens
  misc_RNA (1)...(19): siRNA sense strand
gagaccauggccuucacua

SEQ ID NO: 544102 - RNA, 19 nt, Homo sapiens
  misc_RNA (1)...(19): siRNA sense strand
gacauuggccaugggauca

SEQ ID NO: 544103 - RNA, 19 nt, Homo sapiens
  misc_RNA (1)...(19): siRNA sense strand
ggcacccugucucgaaaga

SEQ ID NO: 544104 - RNA, 19 nt, Homo sapiens
  misc_RNA (1)...(19): siRNA sense strand
ggcacacucugcgcauguu

SEQ ID NO: 544105 - RNA, 19 nt, Homo sapiens
  misc_RNA (1)...(19): siRNA sense strand
gcacacucugcgcauguug

SEQ ID NO: 544106 - RNA, 19 nt, Homo sapiens
  misc_RNA (1)...(19): siRNA sense strand
cagauggugaacaugcaua

SEQ ID NO: 544107 - RNA, 19 nt, Homo sapiens
  misc_RNA (1)...(19): siRNA sense strand
gccagauggugaacaugca

SEQ ID NO: 544108 - RNA, 19 nt, Homo sapiens
  misc_RNA (1)...(19): siRNA sense strand
gggcacacucugcgcaugu

SEQ ID NO: 544109 - RNA, 19 nt, Homo sapiens
  misc_RNA (1)...(19): siRNA sense strand
gacaaugagcucuccuucu

SEQ ID NO: 544110 - RNA, 19 nt, Homo sapiens
  misc_RNA (1)...(19): siRNA sense strand
uggugaacaugcauaugga

SEQ ID NO: 544111 - RNA, 19 nt, Homo sapiens
  misc_RNA (1)...(19): siRNA sense strand
aaucuuggcuaaacucuuu

SEQ ID NO: 544112 - RNA, 19 nt, Homo sapiens
  misc_RNA (1)...(19): siRNA sense strand
ccacucgacuccauccaua

SEQ ID NO: 544113 - RNA, 19 nt, Homo sapiens
  misc_RNA (1)...(19): siRNA sense strand
gggauuaacaugaugagua

SEQ ID NO: 544114 - RNA, 19 nt, Homo sapiens
  misc_RNA (1)...(19): siRNA sense strand
ggauuaacaugaugaguac

SEQ ID NO: 544115 - RNA, 19 nt, Homo sapiens
  misc_RNA (1)...(19): siRNA sense strand
aaccaaauguucuuucuug

SEQ ID NO: 544116 - RNA, 19 nt, Homo sapiens
  misc_RNA (1)...(19): siRNA sense strand
gaaguaaaccaaauguucu

SEQ ID NO: 544117 - RNA, 19 nt, Homo sapiens
  misc_RNA (1)...(19): siRNA sense strand
gcaguugcauuaccugucu

SEQ ID NO: 544118 - RNA, 19 nt, Homo sapiens
  misc_RNA (1)...(19): siRNA sense strand
uuaccugucuaccuccuua

SEQ ID NO: 544119 - RNA, 19 nt, Homo sapiens
  misc_RNA (1)...(19): siRNA sense strand
ucacagauaacuaugcaaa

SEQ ID NO: 544120 - RNA, 19 nt, Homo sapiens
  misc_RNA (1)...(19): siRNA sense strand
ugaaguaaaccaaauguuc

SEQ ID NO: 544121 - RNA, 19 nt, Homo sapiens
  misc_RNA (1)...(19): siRNA sense strand
uccauacaaucacagauaa

SEQ ID NO: 544122 - RNA, 19 nt, Homo sapiens
  misc_RNA (1)...(19): siRNA sense strand
gcuacgugcucuuguuugg

SEQ ID NO: 544123 - RNA, 19 nt, Homo sapiens
  misc_RNA (1)...(19): siRNA sense strand
auuccagccuuaagagaua

SEQ ID NO: 544124 - RNA, 19 nt, Homo sapiens
  misc_RNA (1)...(19): siRNA sense strand
auauugggcaguugcauua

SEQ ID NO: 544125 - RNA, 19 nt, Homo sapiens
  misc_RNA (1)...(19): siRNA sense strand
gcagaagaaauaccaagag

SEQ ID NO: 544126 - RNA, 19 nt, Homo sapiens
  misc_RNA (1)...(19): siRNA sense strand
aucaacagcagaagaaaua

SEQ ID NO: 544127 - RNA, 19 nt, Homo sapiens
  misc_RNA (1)...(19): siRNA sense strand
aaucacagauaacuaugca

SEQ ID NO: 544128 - RNA, 19 nt, Homo sapiens
  misc_RNA (1)...(19): siRNA sense strand
gugcucuuguuugggauua

SEQ ID NO: 544129 - RNA, 19 nt, Homo sapiens
  misc_RNA (1)...(19): siRNA sense strand
cuaccuccuuauugcuaua

SEQ ID NO: 544130 - RNA, 19 nt, Homo sapiens
  misc_RNA (1)...(19): siRNA sense strand
guaaaccaaauguucuuuc

SEQ ID NO: 544131 - RNA, 19 nt, Homo sapiens
  misc_RNA (1)...(19): siRNA sense strand
ccuccuuauugcuauagua

SEQ ID NO: 544132 - RNA, 19 nt, Homo sapiens
  misc_RNA (1)...(19): siRNA sense strand
ccaaauguucuuucuugca

SEQ ID NO: 544133 - RNA, 19 nt, Homo sapiens
  misc_RNA (1)...(19): siRNA sense strand
ggccauuccagccuuaaga

SEQ ID NO: 544134 - RNA, 19 nt, Homo sapiens
  misc_RNA (1)...(19): siRNA sense strand
guucuuucuugcagccaaa

SEQ ID NO: 544135 - RNA, 19 nt, Homo sapiens
  misc_RNA (1)...(19): siRNA sense strand
gaaucuuggcuaaacucuu

SEQ ID NO: 544136 - RNA, 19 nt, Homo sapiens
  misc_RNA (1)...(19): siRNA sense strand
ucgacuccauccauacaau

SEQ ID NO: 544137 - RNA, 19 nt, Homo sapiens
  misc_RNA (1)...(19): siRNA sense strand
aaaaucaacagcagaagaa

SEQ ID NO: 544138 - RNA, 19 nt, Homo sapiens
  misc_RNA (1)...(19): siRNA sense strand
auccauacaaucacagaua

SEQ ID NO: 544139 - RNA, 19 nt, Homo sapiens
  misc_RNA (1)...(19): siRNA sense strand
aaucuuggcuaaacucuuu

SEQ ID NO: 544140 - RNA, 19 nt, Homo sapiens
  misc_RNA (1)...(19): siRNA sense strand
ccacucgacuccauccaua

SEQ ID NO: 544141 - RNA, 19 nt, Homo sapiens
  misc_RNA (1)...(19): siRNA sense strand
gggauuaacaugaugagua

SEQ ID NO: 544142 - RNA, 19 nt, Homo sapiens
  misc_RNA (1)...(19): siRNA sense strand
ggauuaacaugaugaguac

SEQ ID NO: 544143 - RNA, 19 nt, Homo sapiens
  misc_RNA (1)...(19): siRNA sense strand
aaccaaauguucuuucuug

SEQ ID NO: 544144 - RNA, 19 nt, Homo sapiens
  misc_RNA (1)...(19): siRNA sense strand
gaaguaaaccaaauguucu

SEQ ID NO: 544145 - RNA, 19 nt, Homo sapiens
  misc_RNA (1)...(19): siRNA sense strand
gcaguugcauuaccugucu

SEQ ID NO: 544146 - RNA, 19 nt, Homo sapiens
  misc_RNA (1)...(19): siRNA sense strand
ccagaaagagcgauuuaug

SEQ ID NO: 544147 - RNA, 19 nt, Homo sapiens
  misc_RNA (1)...(19): siRNA sense strand
uuaccugucuaccuccuua

SEQ ID NO: 544148 - RNA, 19 nt, Homo sapiens
  misc_RNA (1)...(19): siRNA sense strand
ucacagauaacuaugcaaa

SEQ ID NO: 544149 - RNA, 19 nt, Homo sapiens
  misc_RNA (1)...(19): siRNA sense strand
ugaaguaaaccaaauguuc

SEQ ID NO: 544150 - RNA, 19 nt, Homo sapiens
  misc_RNA (1)...(19): siRNA sense strand
uccauacaaucacagauaa

SEQ ID NO: 544151 - RNA, 19 nt, Homo sapiens
  misc_RNA (1)...(19): siRNA sense strand
uuucuuaagcucccaauuu

SEQ ID NO: 544152 - RNA, 19 nt, Homo sapiens
  misc_RNA (1)...(19): siRNA sense strand
gcuacgugcucuuguuugg

SEQ ID NO: 544153 - RNA, 19 nt, Homo sapiens
  misc_RNA (1)...(19): siRNA sense strand
auuccagccuuaagagaua

SEQ ID NO: 544154 - RNA, 19 nt, Homo sapiens
  misc_RNA (1)...(19): siRNA sense strand
auauugggcaguugcauua

SEQ ID NO: 544155 - RNA, 19 nt, Homo sapiens
  misc_RNA (1)...(19): siRNA sense strand
gcagaagaaauaccaagag

SEQ ID NO: 544156 - RNA, 19 nt, Homo sapiens
  misc_RNA (1)...(19): siRNA sense strand
aucaacagcagaagaaaua

SEQ ID NO: 544157 - RNA, 19 nt, Homo sapiens
  misc_RNA (1)...(19): siRNA sense strand
cagaaagagcgauuuaugg

SEQ ID NO: 544158 - RNA, 19 nt, Homo sapiens
  misc_RNA (1)...(19): siRNA sense strand
uucuuaagcucccaauuug

SEQ ID NO: 544159 - RNA, 19 nt, Homo sapiens
  misc_RNA (1)...(19): siRNA sense strand
aaucacagauaacuaugca

SEQ ID NO: 544160 - RNA, 19 nt, Homo sapiens
  misc_RNA (1)...(19): siRNA sense strand
gugcucuuguuugggauua

SEQ ID NO: 544161 - RNA, 19 nt, Homo sapiens
  misc_RNA (1)...(19): siRNA sense strand
cuaccuccuuauugcuaua

SEQ ID NO: 544162 - RNA, 19 nt, Homo sapiens
  misc_RNA (1)...(19): siRNA sense strand
guaaaccaaauguucuuuc

SEQ ID NO: 544163 - RNA, 19 nt, Homo sapiens
  misc_RNA (1)...(19): siRNA sense strand
ccuccuuauugcuauagua

SEQ ID NO: 544164 - RNA, 19 nt, Homo sapiens
  misc_RNA (1)...(19): siRNA sense strand
ugccagaaagagcgauuua

SEQ ID NO: 544165 - RNA, 19 nt, Homo sapiens
  misc_RNA (1)...(19): siRNA sense strand
aagagcgauuuauggcuuu

SEQ ID NO: 544166 - RNA, 19 nt, Homo sapiens
  misc_RNA (1)...(19): siRNA sense strand
ccaaauguucuuucuugca

SEQ ID NO: 544167 - RNA, 19 nt, Homo sapiens
  misc_RNA (1)...(19): siRNA sense strand
ggccauuccagccuuaaga

SEQ ID NO: 544168 - RNA, 19 nt, Homo sapiens
  misc_RNA (1)...(19): siRNA sense strand
guucuuucuugcagccaaa

SEQ ID NO: 544169 - RNA, 19 nt, Homo sapiens
  misc_RNA (1)...(19): siRNA sense strand
gauuuauggcuuuguucuu

SEQ ID NO: 544170 - RNA, 19 nt, Homo sapiens
  misc_RNA (1)...(19): siRNA sense strand
uggcuuuguucuuuucuua

SEQ ID NO: 544171 - RNA, 19 nt, Homo sapiens
  misc_RNA (1)...(19): siRNA sense strand
gaaucuuggcuaaacucuu

SEQ ID NO: 544172 - RNA, 19 nt, Homo sapiens
  misc_RNA (1)...(19): siRNA sense strand
ucgacuccauccauacaau

SEQ ID NO: 544173 - RNA, 19 nt, Homo sapiens
  misc_RNA (1)...(19): siRNA sense strand
aaaaucaacagcagaagaa

SEQ ID NO: 544174 - RNA, 19 nt, Homo sapiens
  misc_RNA (1)...(19): siRNA sense strand
auccauacaaucacagaua

SEQ ID NO: 544175 - RNA, 19 nt, Homo sapiens
  misc_RNA (1)...(19): siRNA sense strand
aaucuuggcuaaacucuuu

SEQ ID NO: 544176 - RNA, 19 nt, Homo sapiens
  misc_RNA (1)...(19): siRNA sense strand
ccacucgacuccauccaua

SEQ ID NO: 544177 - RNA, 19 nt, Homo sapiens
  misc_RNA (1)...(19): siRNA sense strand
gggauuaacaugaugagua

SEQ ID NO: 544178 - RNA, 19 nt, Homo sapiens
  misc_RNA (1)...(19): siRNA sense strand
ggauuaacaugaugaguac

SEQ ID NO: 544179 - RNA, 19 nt, Homo sapiens
  misc_RNA (1)...(19): siRNA sense strand
aaccaaauguucuuucuug

SEQ ID NO: 544180 - RNA, 19 nt, Homo sapiens
  misc_RNA (1)...(19): siRNA sense strand
gaaguaaaccaaauguucu

SEQ ID NO: 544181 - RNA, 19 nt, Homo sapiens
  misc_RNA (1)...(19): siRNA sense strand
gcaguugcauuaccugucu

SEQ ID NO: 544182 - RNA, 19 nt, Homo sapiens
  misc_RNA (1)...(19): siRNA sense strand
ccagaaagagcgauuuaug

SEQ ID NO: 544183 - RNA, 19 nt, Homo sapiens
  misc_RNA (1)...(19): siRNA sense strand
uuaccugucuaccuccuua

SEQ ID NO: 544184 - RNA, 19 nt, Homo sapiens
  misc_RNA (1)...(19): siRNA sense strand
ucacagauaacuaugcaaa

SEQ ID NO: 544185 - RNA, 19 nt, Homo sapiens
  misc_RNA (1)...(19): siRNA sense strand
ugaaguaaaccaaauguuc

SEQ ID NO: 544186 - RNA, 19 nt, Homo sapiens
  misc_RNA (1)...(19): siRNA sense strand
uccauacaaucacagauaa

SEQ ID NO: 544187 - RNA, 19 nt, Homo sapiens
  misc_RNA (1)...(19): siRNA sense strand
uuucuuaagcucccaauuu

SEQ ID NO: 544188 - RNA, 19 nt, Homo sapiens
  misc_RNA (1)...(19): siRNA sense strand
gcuacgugcucuuguuugg

SEQ ID NO: 544189 - RNA, 19 nt, Homo sapiens
  misc_RNA (1)...(19): siRNA sense strand
auuccagccuuaagagaua

SEQ ID NO: 544190 - RNA, 19 nt, Homo sapiens
  misc_RNA (1)...(19): siRNA sense strand
auauugggcaguugcauua

SEQ ID NO: 544191 - RNA, 19 nt, Homo sapiens
  misc_RNA (1)...(19): siRNA sense strand
gcagaagaaauaccaagag

SEQ ID NO: 544192 - RNA, 19 nt, Homo sapiens
  misc_RNA (1)...(19): siRNA sense strand
aucaacagcagaagaaaua

SEQ ID NO: 544193 - RNA, 19 nt, Homo sapiens
  misc_RNA (1)...(19): siRNA sense strand
cagaaagagcgauuuaugg

SEQ ID NO: 544194 - RNA, 19 nt, Homo sapiens
  misc_RNA (1)...(19): siRNA sense strand
uucuuaagcucccaauuug

SEQ ID NO: 544195 - RNA, 19 nt, Homo sapiens
  misc_RNA (1)...(19): siRNA sense strand
aaucacagauaacuaugca

SEQ ID NO: 544196 - RNA, 19 nt, Homo sapiens
  misc_RNA (1)...(19): siRNA sense strand
gugcucuuguuugggauua

SEQ ID NO: 544197 - RNA, 19 nt, Homo sapiens
  misc_RNA (1)...(19): siRNA sense strand
cuaccuccuuauugcuaua

SEQ ID NO: 544198 - RNA, 19 nt, Homo sapiens
  misc_RNA (1)...(19): siRNA sense strand
guaaaccaaauguucuuuc

SEQ ID NO: 544199 - RNA, 19 nt, Homo sapiens
  misc_RNA (1)...(19): siRNA sense strand
ccuccuuauugcuauagua

SEQ ID NO: 544200 - RNA, 19 nt, Homo sapiens
  misc_RNA (1)...(19): siRNA sense strand
ugccagaaagagcgauuua

SEQ ID NO: 544201 - RNA, 19 nt, Homo sapiens
  misc_RNA (1)...(19): siRNA sense strand
aagagcgauuuauggcuuu

SEQ ID NO: 544202 - RNA, 19 nt, Homo sapiens
  misc_RNA (1)...(19): siRNA sense strand
ccaaauguucuuucuugca

SEQ ID NO: 544203 - RNA, 19 nt, Homo sapiens
  misc_RNA (1)...(19): siRNA sense strand
ggccauuccagccuuaaga

SEQ ID NO: 544204 - RNA, 19 nt, Homo sapiens
  misc_RNA (1)...(19): siRNA sense strand
guucuuucuugcagccaaa

SEQ ID NO: 544205 - RNA, 19 nt, Homo sapiens
  misc_RNA (1)...(19): siRNA sense strand
gauuuauggcuuuguucuu

SEQ ID NO: 544206 - RNA, 19 nt, Homo sapiens
  misc_RNA (1)...(19): siRNA sense strand
uggcuuuguucuuuucuua

SEQ ID NO: 544207 - RNA, 19 nt, Homo sapiens
  misc_RNA (1)...(19): siRNA sense strand
gaaucuuggcuaaacucuu

SEQ ID NO: 544208 - RNA, 19 nt, Homo sapiens
  misc_RNA (1)...(19): siRNA sense strand
ucgacuccauccauacaau

SEQ ID NO: 544209 - RNA, 19 nt, Homo sapiens
  misc_RNA (1)...(19): siRNA sense strand
aaaaucaacagcagaagaa

SEQ ID NO: 544210 - RNA, 19 nt, Homo sapiens
  misc_RNA (1)...(19): siRNA sense strand
auccauacaaucacagaua

SEQ ID NO: 544211 - RNA, 19 nt, Homo sapiens
  misc_RNA (1)...(19): siRNA sense strand
gggauuagcuuccucauuc

SEQ ID NO: 544212 - RNA, 19 nt, Homo sapiens
  misc_RNA (1)...(19): siRNA sense strand
gaaugcaucuguucuucua

SEQ ID NO: 544213 - RNA, 19 nt, Homo sapiens
  misc_RNA (1)...(19): siRNA sense strand
ggauggagaucaagauuag

SEQ ID NO: 544214 - RNA, 19 nt, Homo sapiens
  misc_RNA (1)...(19): siRNA sense strand
gugaauggcccacugaaua

SEQ ID NO: 544215 - RNA, 19 nt, Homo sapiens
  misc_RNA (1)...(19): siRNA sense strand
agauuuagcucauuacaug

SEQ ID NO: 544216 - RNA, 19 nt, Homo sapiens
  misc_RNA (1)...(19): siRNA sense strand
aaacuucugucuccacuga

SEQ ID NO: 544217 - RNA, 19 nt, Homo sapiens
  misc_RNA (1)...(19): siRNA sense strand
gcagguggauggagaucaa

SEQ ID NO: 544218 - RNA, 19 nt, Homo sapiens
  misc_RNA (1)...(19): siRNA sense strand
ucaaagagauuuagcucau

SEQ ID NO: 544219 - RNA, 19 nt, Homo sapiens
  misc_RNA (1)...(19): siRNA sense strand
gaaugacacuggauguaag

SEQ ID NO: 544220 - RNA, 19 nt, Homo sapiens
  misc_RNA (1)...(19): siRNA sense strand
uuacaaagcaucaaagaga

SEQ ID NO: 544221 - RNA, 19 nt, Homo sapiens
  misc_RNA (1)...(19): siRNA sense strand
cucauuacaugcagucuua

SEQ ID NO: 544222 - RNA, 19 nt, Homo sapiens
  misc_RNA (1)...(19): siRNA sense strand
caaagagauuuagcucauu

SEQ ID NO: 544223 - RNA, 19 nt, Homo sapiens
  misc_RNA (1)...(19): siRNA sense strand
gacacuggauguaaguuug

SEQ ID NO: 544224 - RNA, 19 nt, Homo sapiens
  misc_RNA (1)...(19): siRNA sense strand
gaguugggauccugggaaa

SEQ ID NO: 544225 - RNA, 19 nt, Homo sapiens
  misc_RNA (1)...(19): siRNA sense strand
uggauacuguucuuacaaa

SEQ ID NO: 544226 - RNA, 19 nt, Homo sapiens
  misc_RNA (1)...(19): siRNA sense strand
ggagacacauuaaaacuuc

SEQ ID NO: 544227 - RNA, 19 nt, Homo sapiens
  misc_RNA (1)...(19): siRNA sense strand
ugaaugacacuggauguaa

SEQ ID NO: 544228 - RNA, 19 nt, Homo sapiens
  misc_RNA (1)...(19): siRNA sense strand
ggauuagcuuccucauuca

SEQ ID NO: 544229 - RNA, 19 nt, Homo sapiens
  misc_RNA (1)...(19): siRNA sense strand
caaagcaucaaagagauuu

SEQ ID NO: 544230 - RNA, 19 nt, Homo sapiens
  misc_RNA (1)...(19): siRNA sense strand
caacuggccuuggcuaacu

SEQ ID NO: 544231 - RNA, 19 nt, Homo sapiens
  misc_RNA (1)...(19): siRNA sense strand
caucuguucuucuauuagu

SEQ ID NO: 544232 - RNA, 19 nt, Homo sapiens
  misc_RNA (1)...(19): siRNA sense strand
auacucauaucucucaguu

SEQ ID NO: 544233 - RNA, 19 nt, Homo sapiens
  misc_RNA (1)...(19): siRNA sense strand
acucauaucucucaguucu

SEQ ID NO: 544234 - RNA, 19 nt, Homo sapiens
  misc_RNA (1)...(19): siRNA sense strand
gcagcaaguccaacacaau

SEQ ID NO: 544235 - RNA, 19 nt, Homo sapiens
  misc_RNA (1)...(19): siRNA sense strand
ccaggccaguggauaguga

SEQ ID NO: 544236 - RNA, 19 nt, Homo sapiens
  misc_RNA (1)...(19): siRNA sense strand
ucauaucucucaguucugu

SEQ ID NO: 544237 - RNA, 19 nt, Homo sapiens
  misc_RNA (1)...(19): siRNA sense strand
ugcaucuguucuucuauua

SEQ ID NO: 544238 - RNA, 19 nt, Homo sapiens
  misc_RNA (1)...(19): siRNA sense strand
agauacuucuuucugcuuu

SEQ ID NO: 544239 - RNA, 19 nt, Homo sapiens
  misc_RNA (1)...(19): siRNA sense strand
guucuucuauuagugaaug

SEQ ID NO: 544240 - RNA, 19 nt, Homo sapiens
  misc_RNA (1)...(19): siRNA sense strand
caagguuuauugacuucug

SEQ ID NO: 544241 - RNA, 19 nt, Homo sapiens
  misc_RNA (1)...(19): siRNA sense strand
ggauagugaccaacucugu

SEQ ID NO: 544242 - RNA, 19 nt, Homo sapiens
  misc_RNA (1)...(19): siRNA sense strand
uacaaagcaucaaagagau

SEQ ID NO: 544243 - RNA, 19 nt, Homo sapiens
  misc_RNA (1)...(19): siRNA sense strand
ugacacuggauguaaguuu

SEQ ID NO: 544244 - RNA, 19 nt, Homo sapiens
  misc_RNA (1)...(19): siRNA sense strand
ggauacuguucuuacaaag

SEQ ID NO: 544245 - RNA, 19 nt, Homo sapiens
  misc_RNA (1)...(19): siRNA sense strand
guugggauccugggaaauu

SEQ ID NO: 544246 - RNA, 19 nt, Homo sapiens
  misc_RNA (1)...(19): siRNA sense strand
ugaauggcccacugaauag

SEQ ID NO: 544247 - RNA, 19 nt, Homo sapiens
  misc_RNA (1)...(19): siRNA sense strand
ggauguaaguuugucuuuu

SEQ ID NO: 544248 - RNA, 19 nt, Homo sapiens
  misc_RNA (1)...(19): siRNA sense strand
uggauggagaucaagauua

SEQ ID NO: 544249 - RNA, 19 nt, Homo sapiens
  misc_RNA (1)...(19): siRNA sense strand
gccaguggauagugaccaa

SEQ ID NO: 544250 - RNA, 19 nt, Homo sapiens
  misc_RNA (1)...(19): siRNA sense strand
gauuagauccccaagguuu

SEQ ID NO: 544251 - RNA, 19 nt, Homo sapiens
  misc_RNA (1)...(19): siRNA sense strand
cuccacugaugacaagaua

SEQ ID NO: 544252 - RNA, 19 nt, Homo sapiens
  misc_RNA (1)...(19): siRNA sense strand
cauuacaugcagucuuaua

SEQ ID NO: 544253 - RNA, 19 nt, Homo sapiens
  misc_RNA (1)...(19): siRNA sense strand
auacuguucuuacaaagca

SEQ ID NO: 544254 - RNA, 19 nt, Homo sapiens
  misc_RNA (1)...(19): siRNA sense strand
caucugccuucucaaugga

SEQ ID NO: 544255 - RNA, 19 nt, Homo sapiens
  misc_RNA (1)...(19): siRNA sense strand
aaacacucuuuccuaaucu

SEQ ID NO: 544256 - RNA, 19 nt, Homo sapiens
  misc_RNA (1)...(19): siRNA sense strand
augcaucuguucuucuauu

SEQ ID NO: 544257 - RNA, 19 nt, Homo sapiens
  misc_RNA (1)...(19): siRNA sense strand
aaaacacucuuuccuaauc

SEQ ID NO: 544258 - RNA, 19 nt, Homo sapiens
  misc_RNA (1)...(19): siRNA sense strand
guucuuacaaagcaucaaa

SEQ ID NO: 544259 - RNA, 19 nt, Homo sapiens
  misc_RNA (1)...(19): siRNA sense strand
uauggauacuguucuuaca

SEQ ID NO: 544260 - RNA, 19 nt, Homo sapiens
  misc_RNA (1)...(19): siRNA sense strand
gcugagacccacggacuug

SEQ ID NO: 544261 - RNA, 19 nt, Homo sapiens
  misc_RNA (1)...(19): siRNA sense strand
gaagccagagccacacaca

SEQ ID NO: 544262 - RNA, 19 nt, Homo sapiens
  misc_RNA (1)...(19): siRNA sense strand
caacacaaucacagcaaca

SEQ ID NO: 544263 - RNA, 19 nt, Homo sapiens
  misc_RNA (1)...(19): siRNA sense strand
cagcaaguccaacacaauc

SEQ ID NO: 544264 - RNA, 19 nt, Homo sapiens
  misc_RNA (1)...(19): siRNA sense strand
caacauccccuagauuuug

SEQ ID NO: 544265 - RNA, 19 nt, Homo sapiens
  misc_RNA (1)...(19): siRNA sense strand
gagacccacggacuugauu

SEQ ID NO: 544266 - RNA, 19 nt, Homo sapiens
  misc_RNA (1)...(19): siRNA sense strand
gagauuuagcucauuacau

SEQ ID NO: 544267 - RNA, 19 nt, Homo sapiens
  misc_RNA (1)...(19): siRNA sense strand
acaaagcaucaaagagauu

SEQ ID NO: 544268 - RNA, 19 nt, Homo sapiens
  misc_RNA (1)...(19): siRNA sense strand
ccaugguccuuuucuuuaa

SEQ ID NO: 544269 - RNA, 19 nt, Homo sapiens
  misc_RNA (1)...(19): siRNA sense strand
ggucuucuuccucuacaga

SEQ ID NO: 544270 - RNA, 19 nt, Homo sapiens
  misc_RNA (1)...(19): siRNA sense strand
uuuauugacuucuguuguc

SEQ ID NO: 544271 - RNA, 19 nt, Homo sapiens
  misc_RNA (1)...(19): siRNA sense strand
auuccuuucuccuuuguuu

SEQ ID NO: 544272 - RNA, 19 nt, Homo sapiens
  misc_RNA (1)...(19): siRNA sense strand
guuggucgccucauguuuc

SEQ ID NO: 544273 - RNA, 19 nt, Homo sapiens
  misc_RNA (1)...(19): siRNA sense strand
aaacccaggccaguggaua

SEQ ID NO: 544274 - RNA, 19 nt, Homo sapiens
  misc_RNA (1)...(19): siRNA sense strand
acaauuauggauacuguuc

SEQ ID NO: 544275 - RNA, 19 nt, Homo sapiens
  misc_RNA (1)...(19): siRNA sense strand
ucacagggugggcacaaga

SEQ ID NO: 544276 - RNA, 19 nt, Homo sapiens
  misc_RNA (1)...(19): siRNA sense strand
aauggcagcuuuuggauug

SEQ ID NO: 544277 - RNA, 19 nt, Homo sapiens
  misc_RNA (1)...(19): siRNA sense strand
cccacggacuugauucuca

SEQ ID NO: 544278 - RNA, 19 nt, Homo sapiens
  misc_RNA (1)...(19): siRNA sense strand
cucagacaauggcagcuuu

SEQ ID NO: 544279 - RNA, 19 nt, Homo sapiens
  misc_RNA (1)...(19): siRNA sense strand
guggauggagaucaagauu

SEQ ID NO: 544280 - RNA, 19 nt, Homo sapiens
  misc_RNA (1)...(19): siRNA sense strand
agacucuccugcagaccuu

SEQ ID NO: 544281 - RNA, 19 nt, Homo sapiens
  misc_RNA (1)...(19): siRNA sense strand
ccacugaugacaagauacu

SEQ ID NO: 544282 - RNA, 19 nt, Homo sapiens
  misc_RNA (1)...(19): siRNA sense strand
gcucauuacaugcagucuu

SEQ ID NO: 544283 - RNA, 19 nt, Homo sapiens
  misc_RNA (1)...(19): siRNA sense strand
gaugaaauggcuuuuggaa

SEQ ID NO: 544284 - RNA, 19 nt, Homo sapiens
  misc_RNA (1)...(19): siRNA sense strand
caccaucugccuucucaau

SEQ ID NO: 544285 - RNA, 19 nt, Homo sapiens
  misc_RNA (1)...(19): siRNA sense strand
gaguuucccucagcaccau

SEQ ID NO: 544286 - RNA, 19 nt, Homo sapiens
  misc_RNA (1)...(19): siRNA sense strand
acucuuuccuaaucugguu

SEQ ID NO: 544287 - RNA, 19 nt, Homo sapiens
  misc_RNA (1)...(19): siRNA sense strand
gacaauuuggacaacugua

SEQ ID NO: 544288 - RNA, 19 nt, Homo sapiens
  misc_RNA (1)...(19): siRNA sense strand
guccauaguuuucugacaa

SEQ ID NO: 544289 - RNA, 19 nt, Homo sapiens
  misc_RNA (1)...(19): siRNA sense strand
cccaagguuuauugacuuc

SEQ ID NO: 544290 - RNA, 19 nt, Homo sapiens
  misc_RNA (1)...(19): siRNA sense strand
ggaaggcgauggagucaua

SEQ ID NO: 544291 - RNA, 19 nt, Homo sapiens
  misc_RNA (1)...(19): siRNA sense strand
gaacagcucaguuaccuua

SEQ ID NO: 544292 - RNA, 19 nt, Homo sapiens
  misc_RNA (1)...(19): siRNA sense strand
gagcagggauugcaacuuu

SEQ ID NO: 544293 - RNA, 19 nt, Homo sapiens
  misc_RNA (1)...(19): siRNA sense strand
gaagauaucugugcuuuua

SEQ ID NO: 544294 - RNA, 19 nt, Homo sapiens
  misc_RNA (1)...(19): siRNA sense strand
gguggaaacuuguucauaa

SEQ ID NO: 544295 - RNA, 19 nt, Homo sapiens
  misc_RNA (1)...(19): siRNA sense strand
ggauggauauugacaguga

SEQ ID NO: 544296 - RNA, 19 nt, Homo sapiens
  misc_RNA (1)...(19): siRNA sense strand
gaaguggacgucaagguua

SEQ ID NO: 544297 - RNA, 19 nt, Homo sapiens
  misc_RNA (1)...(19): siRNA sense strand
cagaggcccugaacagaua

SEQ ID NO: 544298 - RNA, 19 nt, Homo sapiens
  misc_RNA (1)...(19): siRNA sense strand
gaaauacaaugaagcuuac

SEQ ID NO: 544299 - RNA, 19 nt, Homo sapiens
  misc_RNA (1)...(19): siRNA sense strand
gaaggaggccgcuggcuuu

SEQ ID NO: 544300 - RNA, 19 nt, Homo sapiens
  misc_RNA (1)...(19): siRNA sense strand
gaaaagggauaggggauua

SEQ ID NO: 544301 - RNA, 19 nt, Homo sapiens
  misc_RNA (1)...(19): siRNA sense strand
ggaaggaaguggacgucaa

SEQ ID NO: 544302 - RNA, 19 nt, Homo sapiens
  misc_RNA (1)...(19): siRNA sense strand
gcaaggagcaguaugaaag

SEQ ID NO: 544303 - RNA, 19 nt, Homo sapiens
  misc_RNA (1)...(19): siRNA sense strand
aaacacgcauucuuucuga

SEQ ID NO: 544304 - RNA, 19 nt, Homo sapiens
  misc_RNA (1)...(19): siRNA sense strand
aaacacaucuuugcaaaca

SEQ ID NO: 544305 - RNA, 19 nt, Homo sapiens
  misc_RNA (1)...(19): siRNA sense strand
caacuugucucuggaagga

SEQ ID NO: 544306 - RNA, 19 nt, Homo sapiens
  misc_RNA (1)...(19): siRNA sense strand
ucagaauccuugaccgaua

SEQ ID NO: 544307 - RNA, 19 nt, Homo sapiens
  misc_RNA (1)...(19): siRNA sense strand
ggacaagccacguacagaa

SEQ ID NO: 544308 - RNA, 19 nt, Homo sapiens
  misc_RNA (1)...(19): siRNA sense strand
ggaaucugccauggaauua

SEQ ID NO: 544309 - RNA, 19 nt, Homo sapiens
  misc_RNA (1)...(19): siRNA sense strand
ggaaguggacgucaagguu

SEQ ID NO: 544310 - RNA, 19 nt, Homo sapiens
  misc_RNA (1)...(19): siRNA sense strand
agacacagauucaaacaca

SEQ ID NO: 544311 - RNA, 19 nt, Homo sapiens
  misc_RNA (1)...(19): siRNA sense strand
caaaucacaucccaacgau

SEQ ID NO: 544312 - RNA, 19 nt, Homo sapiens
  misc_RNA (1)...(19): siRNA sense strand
gaaguugucugccucuacu

SEQ ID NO: 544313 - RNA, 19 nt, Homo sapiens
  misc_RNA (1)...(19): siRNA sense strand
gauaggggauuaccacuuu

SEQ ID NO: 544314 - RNA, 19 nt, Homo sapiens
  misc_RNA (1)...(19): siRNA sense strand
gacaggagcacaucuucua

SEQ ID NO: 544315 - RNA, 19 nt, Homo sapiens
  misc_RNA (1)...(19): siRNA sense strand
ggaggccgcuggcuuucuu

SEQ ID NO: 544316 - RNA, 19 nt, Homo sapiens
  misc_RNA (1)...(19): siRNA sense strand
ucaguguuguuguucuuua

SEQ ID NO: 544317 - RNA, 19 nt, Homo sapiens
  misc_RNA (1)...(19): siRNA sense strand
cgaaagagcccagguauac

SEQ ID NO: 544318 - RNA, 19 nt, Homo sapiens
  misc_RNA (1)...(19): siRNA sense strand
aagaagauaucugugcuuu

SEQ ID NO: 544319 - RNA, 19 nt, Homo sapiens
  misc_RNA (1)...(19): siRNA sense strand
gauugcaacuuucaugauc

SEQ ID NO: 544320 - RNA, 19 nt, Homo sapiens
  misc_RNA (1)...(19): siRNA sense strand
gaugugaaauacaaugaag

SEQ ID NO: 544321 - RNA, 19 nt, Homo sapiens
  misc_RNA (1)...(19): siRNA sense strand
aaacaaagccacccaaacu

SEQ ID NO: 544322 - RNA, 19 nt, Homo sapiens
  misc_RNA (1)...(19): siRNA sense strand
cgacgcaccucucgauuac

SEQ ID NO: 544323 - RNA, 19 nt, Homo sapiens
  misc_RNA (1)...(19): siRNA sense strand
ccaggaugguggaaacuug

SEQ ID NO: 544324 - RNA, 19 nt, Homo sapiens
  misc_RNA (1)...(19): siRNA sense strand
gcagcaagucgucauguug

SEQ ID NO: 544325 - RNA, 19 nt, Homo sapiens
  misc_RNA (1)...(19): siRNA sense strand
agacuucaguguuguuguu

SEQ ID NO: 544326 - RNA, 19 nt, Homo sapiens
  misc_RNA (1)...(19): siRNA sense strand
ucucggaucuugaaaccuu

SEQ ID NO: 544327 - RNA, 19 nt, Homo sapiens
  misc_RNA (1)...(19): siRNA sense strand
gguaggaucagaagauaug

SEQ ID NO: 544328 - RNA, 19 nt, Homo sapiens
  misc_RNA (1)...(19): siRNA sense strand
aaucugccauggaauuaaa

SEQ ID NO: 544329 - RNA, 19 nt, Homo sapiens
  misc_RNA (1)...(19): siRNA sense strand
caugguuccugaugugaaa

SEQ ID NO: 544330 - RNA, 19 nt, Homo sapiens
  misc_RNA (1)...(19): siRNA sense strand
gaagacacagauucaaaca

SEQ ID NO: 544331 - RNA, 19 nt, Homo sapiens
  misc_RNA (1)...(19): siRNA sense strand
ggacgucaagguuauuuca

SEQ ID NO: 544332 - RNA, 19 nt, Homo sapiens
  misc_RNA (1)...(19): siRNA sense strand
agacugaaacgcaaacuga

SEQ ID NO: 544333 - RNA, 19 nt, Homo sapiens
  misc_RNA (1)...(19): siRNA sense strand
uguggaaucugccauggaa

SEQ ID NO: 544334 - RNA, 19 nt, Homo sapiens
  misc_RNA (1)...(19): siRNA sense strand
gaucccaucauuacuguug

SEQ ID NO: 544335 - RNA, 19 nt, Homo sapiens
  misc_RNA (1)...(19): siRNA sense strand
ccgacaggauggauauuga

SEQ ID NO: 544336 - RNA, 19 nt, Homo sapiens
  misc_RNA (1)...(19): siRNA sense strand
gaaacaaagccacccaaac

SEQ ID NO: 544337 - RNA, 19 nt, Homo sapiens
  misc_RNA (1)...(19): siRNA sense strand
caagacugaagaauaugua

SEQ ID NO: 544338 - RNA, 19 nt, Homo sapiens
  misc_RNA (1)...(19): siRNA sense strand
gaaggaaguggacgucaag

SEQ ID NO: 544339 - RNA, 19 nt, Homo sapiens
  misc_RNA (1)...(19): siRNA sense strand
ccaaaucacaucccaacga

SEQ ID NO: 544340 - RNA, 19 nt, Homo sapiens
  misc_RNA (1)...(19): siRNA sense strand
gagaaguugucugccucua

SEQ ID NO: 544341 - RNA, 19 nt, Homo sapiens
  misc_RNA (1)...(19): siRNA sense strand
ccagaaguuuggauucaag

SEQ ID NO: 544342 - RNA, 19 nt, Homo sapiens
  misc_RNA (1)...(19): siRNA sense strand
gcuuacauuucauuucugu

SEQ ID NO: 544343 - RNA, 19 nt, Homo sapiens
  misc_RNA (1)...(19): siRNA sense strand
gaagcuuacauuucauuuc

SEQ ID NO: 544344 - RNA, 19 nt, Homo sapiens
  misc_RNA (1)...(19): siRNA sense strand
uaaugcugcucuuuuguua

SEQ ID NO: 544345 - RNA, 19 nt, Homo sapiens
  misc_RNA (1)...(19): siRNA sense strand
aacuuuagaucccaucauu

SEQ ID NO: 544346 - RNA, 19 nt, Homo sapiens
  misc_RNA (1)...(19): siRNA sense strand
gagaagagcagggauugca

SEQ ID NO: 544347 - RNA, 19 nt, Homo sapiens
  misc_RNA (1)...(19): siRNA sense strand
gaaaagcugcugcucaaga

SEQ ID NO: 544348 - RNA, 19 nt, Homo sapiens
  misc_RNA (1)...(19): siRNA sense strand
ggaagccucagcuggagaa

SEQ ID NO: 544349 - RNA, 19 nt, Homo sapiens
  misc_RNA (1)...(19): siRNA sense strand
acaccuagcuugcuuucag

SEQ ID NO: 544350 - RNA, 19 nt, Homo sapiens
  misc_RNA (1)...(19): siRNA sense strand
ggcagcaagucgucauguu

SEQ ID NO: 544351 - RNA, 19 nt, Homo sapiens
  misc_RNA (1)...(19): siRNA sense strand
gaaucugccauggaauuaa

SEQ ID NO: 544352 - RNA, 19 nt, Homo sapiens
  misc_RNA (1)...(19): siRNA sense strand
gggaacagcucaguuaccu

SEQ ID NO: 544353 - RNA, 19 nt, Homo sapiens
  misc_RNA (1)...(19): siRNA sense strand
ccgacgcaccucucgauua

SEQ ID NO: 544354 - RNA, 19 nt, Homo sapiens
  misc_RNA (1)...(19): siRNA sense strand
acacaucuuugcaaacaag

SEQ ID NO: 544355 - RNA, 19 nt, Homo sapiens
  misc_RNA (1)...(19): siRNA sense strand
caggauggauauugacagu

SEQ ID NO: 544356 - RNA, 19 nt, Homo sapiens
  misc_RNA (1)...(19): siRNA sense strand
guucaggugcucaggaauu

SEQ ID NO: 544357 - RNA, 19 nt, Homo sapiens
  misc_RNA (1)...(19): siRNA sense strand
gauaaauauuacccauugg

SEQ ID NO: 544358 - RNA, 19 nt, Homo sapiens
  misc_RNA (1)...(19): siRNA sense strand
uaccagaaguuuggauuca

SEQ ID NO: 544359 - RNA, 19 nt, Homo sapiens
  misc_RNA (1)...(19): siRNA sense strand
uacccagacuucaguguug

SEQ ID NO: 544360 - RNA, 19 nt, Homo sapiens
  misc_RNA (1)...(19): siRNA sense strand
ccuuauaccucucggaucu

SEQ ID NO: 544361 - RNA, 19 nt, Homo sapiens
  misc_RNA (1)...(19): siRNA sense strand
gcuguggaccagaguauug

SEQ ID NO: 544362 - RNA, 19 nt, Homo sapiens
  misc_RNA (1)...(19): siRNA sense strand
aaacgcaaacugauuguca

SEQ ID NO: 544363 - RNA, 19 nt, Homo sapiens
  misc_RNA (1)...(19): siRNA sense strand
gguagagagugaggaggaa

SEQ ID NO: 544364 - RNA, 19 nt, Homo sapiens
  misc_RNA (1)...(19): siRNA sense strand
gagccaggaugguggaaac

SEQ ID NO: 544365 - RNA, 19 nt, Homo sapiens
  misc_RNA (1)...(19): siRNA sense strand
guacaccugccucucauuc

SEQ ID NO: 544366 - RNA, 19 nt, Homo sapiens
  misc_RNA (1)...(19): siRNA sense strand
guggaaagaagauaucugu

SEQ ID NO: 544367 - RNA, 19 nt, Homo sapiens
  misc_RNA (1)...(19): siRNA sense strand
gggauugcaacuuucauga

SEQ ID NO: 544368 - RNA, 19 nt, Homo sapiens
  misc_RNA (1)...(19): siRNA sense strand
ggauuuauggagccaaaga

SEQ ID NO: 544369 - RNA, 19 nt, Homo sapiens
  misc_RNA (1)...(19): siRNA sense strand
cagaauccuugaccgauac

SEQ ID NO: 544370 - RNA, 19 nt, Homo sapiens
  misc_RNA (1)...(19): siRNA sense strand
gcagggauugcaacuuuca

SEQ ID NO: 544371 - RNA, 19 nt, Homo sapiens
  misc_RNA (1)...(19): siRNA sense strand
aaucacaucccaacgauca

SEQ ID NO: 544372 - RNA, 19 nt, Homo sapiens
  misc_RNA (1)...(19): siRNA sense strand
ccgaaagagcccagguaua

SEQ ID NO: 544373 - RNA, 19 nt, Homo sapiens
  misc_RNA (1)...(19): siRNA sense strand
ugaaacaaagccacccaaa

SEQ ID NO: 544374 - RNA, 19 nt, Homo sapiens
  misc_RNA (1)...(19): siRNA sense strand
gaucuugaaaccuuauauc

SEQ ID NO: 544375 - RNA, 19 nt, Homo sapiens
  misc_RNA (1)...(19): siRNA sense strand
gacaccagaccaccaaguu

SEQ ID NO: 544376 - RNA, 19 nt, Homo sapiens
  misc_RNA (1)...(19): siRNA sense strand
ggaucaaguuguuaaugcu

SEQ ID NO: 544377 - RNA, 19 nt, Homo sapiens
  misc_RNA (1)...(19): siRNA sense strand
guacccagacuucaguguu

SEQ ID NO: 544378 - RNA, 19 nt, Homo sapiens
  misc_RNA (1)...(19): siRNA sense strand
gcaguacccagacuucagu

SEQ ID NO: 544379 - RNA, 19 nt, Homo sapiens
  misc_RNA (1)...(19): siRNA sense strand
uagaucccaucauuacugu

SEQ ID NO: 544380 - RNA, 19 nt, Homo sapiens
  misc_RNA (1)...(19): siRNA sense strand
guaaacacgcauucuuucu

SEQ ID NO: 544381 - RNA, 19 nt, Homo sapiens
  misc_RNA (1)...(19): siRNA sense strand
gccaaagaaggaggaauuu

SEQ ID NO: 544382 - RNA, 19 nt, Homo sapiens
  misc_RNA (1)...(19): siRNA sense strand
gauggauauugacagugaa

SEQ ID NO: 544383 - RNA, 19 nt, Homo sapiens
  misc_RNA (1)...(19): siRNA sense strand
agauaaagcaggagguaga

SEQ ID NO: 544384 - RNA, 19 nt, Homo sapiens
  misc_RNA (1)...(19): siRNA sense strand
guggaaacuuguucauaac

SEQ ID NO: 544385 - RNA, 19 nt, Homo sapiens
  misc_RNA (1)...(19): siRNA sense strand
uaaacacgcauucuuucug

SEQ ID NO: 544386 - RNA, 19 nt, Homo sapiens
  misc_RNA (1)...(19): siRNA sense strand
uugcaacuuucaugaucua

SEQ ID NO: 544387 - RNA, 19 nt, Homo sapiens
  misc_RNA (1)...(19): siRNA sense strand
ugucaggacuucagaaucc

SEQ ID NO: 544388 - RNA, 19 nt, Homo sapiens
  misc_RNA (1)...(19): siRNA sense strand
gaaggacacaaagccgaaa

SEQ ID NO: 544389 - RNA, 19 nt, Homo sapiens
  misc_RNA (1)...(19): siRNA sense strand
gccgcuggcuuucuugaca

SEQ ID NO: 544390 - RNA, 19 nt, Homo sapiens
  misc_RNA (1)...(19): siRNA sense strand
ggaaggcgauggagucaua

SEQ ID NO: 544391 - RNA, 19 nt, Homo sapiens
  misc_RNA (1)...(19): siRNA sense strand
gagcagggauugcaacuuu

SEQ ID NO: 544392 - RNA, 19 nt, Homo sapiens
  misc_RNA (1)...(19): siRNA sense strand
gaagauaucugugcuuuua

SEQ ID NO: 544393 - RNA, 19 nt, Homo sapiens
  misc_RNA (1)...(19): siRNA sense strand
gguggaaacuuguucauaa

SEQ ID NO: 544394 - RNA, 19 nt, Homo sapiens
  misc_RNA (1)...(19): siRNA sense strand
ggauggauauugacaguga

SEQ ID NO: 544395 - RNA, 19 nt, Homo sapiens
  misc_RNA (1)...(19): siRNA sense strand
gaaguggacgucaagguua

SEQ ID NO: 544396 - RNA, 19 nt, Homo sapiens
  misc_RNA (1)...(19): siRNA sense strand
cagaggcccugaacagaua

SEQ ID NO: 544397 - RNA, 19 nt, Homo sapiens
  misc_RNA (1)...(19): siRNA sense strand
gaaauacaaugaagcuuac

SEQ ID NO: 544398 - RNA, 19 nt, Homo sapiens
  misc_RNA (1)...(19): siRNA sense strand
gaaggaggccgcuggcuuu

SEQ ID NO: 544399 - RNA, 19 nt, Homo sapiens
  misc_RNA (1)...(19): siRNA sense strand
gaaaagggauaggggauua

SEQ ID NO: 544400 - RNA, 19 nt, Homo sapiens
  misc_RNA (1)...(19): siRNA sense strand
ggaaggaaguggacgucaa

SEQ ID NO: 544401 - RNA, 19 nt, Homo sapiens
  misc_RNA (1)...(19): siRNA sense strand
aaacacaucuuugcaaaca

SEQ ID NO: 544402 - RNA, 19 nt, Homo sapiens
  misc_RNA (1)...(19): siRNA sense strand
aaacacgcauucuuucuga

SEQ ID NO: 544403 - RNA, 19 nt, Homo sapiens
  misc_RNA (1)...(19): siRNA sense strand
caacuugucucuggaagga

SEQ ID NO: 544404 - RNA, 19 nt, Homo sapiens
  misc_RNA (1)...(19): siRNA sense strand
ucagaauccuugaccgaua

SEQ ID NO: 544405 - RNA, 19 nt, Homo sapiens
  misc_RNA (1)...(19): siRNA sense strand
ggacaagccacguacagaa

SEQ ID NO: 544406 - RNA, 19 nt, Homo sapiens
  misc_RNA (1)...(19): siRNA sense strand
ggaaucugccauggaauua

SEQ ID NO: 544407 - RNA, 19 nt, Homo sapiens
  misc_RNA (1)...(19): siRNA sense strand
ggaaguggacgucaagguu

SEQ ID NO: 544408 - RNA, 19 nt, Homo sapiens
  misc_RNA (1)...(19): siRNA sense strand
agacacagauucaaacaca

SEQ ID NO: 544409 - RNA, 19 nt, Homo sapiens
  misc_RNA (1)...(19): siRNA sense strand
caaaucacaucccaacgau

SEQ ID NO: 544410 - RNA, 19 nt, Homo sapiens
  misc_RNA (1)...(19): siRNA sense strand
gaaguugucugccucuacu

SEQ ID NO: 544411 - RNA, 19 nt, Homo sapiens
  misc_RNA (1)...(19): siRNA sense strand
gauaggggauuaccacuuu

SEQ ID NO: 544412 - RNA, 19 nt, Homo sapiens
  misc_RNA (1)...(19): siRNA sense strand
gacaggagcacaucuucua

SEQ ID NO: 544413 - RNA, 19 nt, Homo sapiens
  misc_RNA (1)...(19): siRNA sense strand
ggaggccgcuggcuuucuu

SEQ ID NO: 544414 - RNA, 19 nt, Homo sapiens
  misc_RNA (1)...(19): siRNA sense strand
ucaguguuguuguucuuua

SEQ ID NO: 544415 - RNA, 19 nt, Homo sapiens
  misc_RNA (1)...(19): siRNA sense strand
cgaaagagcccagguauac

SEQ ID NO: 544416 - RNA, 19 nt, Homo sapiens
  misc_RNA (1)...(19): siRNA sense strand
aagaagauaucugugcuuu

SEQ ID NO: 544417 - RNA, 19 nt, Homo sapiens
  misc_RNA (1)...(19): siRNA sense strand
gauugcaacuuucaugauc

SEQ ID NO: 544418 - RNA, 19 nt, Homo sapiens
  misc_RNA (1)...(19): siRNA sense strand
gaugugaaauacaaugaag

SEQ ID NO: 544419 - RNA, 19 nt, Homo sapiens
  misc_RNA (1)...(19): siRNA sense strand
aaacaaagccacccaaacu

SEQ ID NO: 544420 - RNA, 19 nt, Homo sapiens
  misc_RNA (1)...(19): siRNA sense strand
cgacgcaccucucgauuac

SEQ ID NO: 544421 - RNA, 19 nt, Homo sapiens
  misc_RNA (1)...(19): siRNA sense strand
ccaggaugguggaaacuug

SEQ ID NO: 544422 - RNA, 19 nt, Homo sapiens
  misc_RNA (1)...(19): siRNA sense strand
aaucugccauggaauuaaa

SEQ ID NO: 544423 - RNA, 19 nt, Homo sapiens
  misc_RNA (1)...(19): siRNA sense strand
agacuucaguguuguuguu

SEQ ID NO: 544424 - RNA, 19 nt, Homo sapiens
  misc_RNA (1)...(19): siRNA sense strand
ucucggaucuugaaaccuu

SEQ ID NO: 544425 - RNA, 19 nt, Homo sapiens
  misc_RNA (1)...(19): siRNA sense strand
gguaggaucagaagauaug

SEQ ID NO: 544426 - RNA, 19 nt, Homo sapiens
  misc_RNA (1)...(19): siRNA sense strand
caugguuccugaugugaaa

SEQ ID NO: 544427 - RNA, 19 nt, Homo sapiens
  misc_RNA (1)...(19): siRNA sense strand
gaagacacagauucaaaca

SEQ ID NO: 544428 - RNA, 19 nt, Homo sapiens
  misc_RNA (1)...(19): siRNA sense strand
uguggaaucugccauggaa

SEQ ID NO: 544429 - RNA, 19 nt, Homo sapiens
  misc_RNA (1)...(19): siRNA sense strand
ggacgucaagguuauuuca

SEQ ID NO: 544430 - RNA, 19 nt, Homo sapiens
  misc_RNA (1)...(19): siRNA sense strand
agacugaaacgcaaacuga

SEQ ID NO: 544431 - RNA, 19 nt, Homo sapiens
  misc_RNA (1)...(19): siRNA sense strand
gaucccaucauuacuguug

SEQ ID NO: 544432 - RNA, 19 nt, Homo sapiens
  misc_RNA (1)...(19): siRNA sense strand
ccgacaggauggauauuga

SEQ ID NO: 544433 - RNA, 19 nt, Homo sapiens
  misc_RNA (1)...(19): siRNA sense strand
gaaacaaagccacccaaac

SEQ ID NO: 544434 - RNA, 19 nt, Homo sapiens
  misc_RNA (1)...(19): siRNA sense strand
caagacugaagaauaugua

SEQ ID NO: 544435 - RNA, 19 nt, Homo sapiens
  misc_RNA (1)...(19): siRNA sense strand
gaaggaaguggacgucaag

SEQ ID NO: 544436 - RNA, 19 nt, Homo sapiens
  misc_RNA (1)...(19): siRNA sense strand
ccaaaucacaucccaacga

SEQ ID NO: 544437 - RNA, 19 nt, Homo sapiens
  misc_RNA (1)...(19): siRNA sense strand
gagaaguugucugccucua

SEQ ID NO: 544438 - RNA, 19 nt, Homo sapiens
  misc_RNA (1)...(19): siRNA sense strand
ccagaaguuuggauucaag

SEQ ID NO: 544439 - RNA, 19 nt, Homo sapiens
  misc_RNA (1)...(19): siRNA sense strand
gcuuacauuucauuucugu

SEQ ID NO: 544440 - RNA, 19 nt, Homo sapiens
  misc_RNA (1)...(19): siRNA sense strand
gaagcuuacauuucauuuc

SEQ ID NO: 544441 - RNA, 19 nt, Homo sapiens
  misc_RNA (1)...(19): siRNA sense strand
uaaugcugcucuuuuguua

SEQ ID NO: 544442 - RNA, 19 nt, Homo sapiens
  misc_RNA (1)...(19): siRNA sense strand
aacuuuagaucccaucauu

SEQ ID NO: 544443 - RNA, 19 nt, Homo sapiens
  misc_RNA (1)...(19): siRNA sense strand
gagaagagcagggauugca

SEQ ID NO: 544444 - RNA, 19 nt, Homo sapiens
  misc_RNA (1)...(19): siRNA sense strand
gaaaagcugcugcucaaga

SEQ ID NO: 544445 - RNA, 19 nt, Homo sapiens
  misc_RNA (1)...(19): siRNA sense strand
ggaagccucagcuggagaa

SEQ ID NO: 544446 - RNA, 19 nt, Homo sapiens
  misc_RNA (1)...(19): siRNA sense strand
acaccuagcuugcuuucag

SEQ ID NO: 544447 - RNA, 19 nt, Homo sapiens
  misc_RNA (1)...(19): siRNA sense strand
gaaucugccauggaauuaa

SEQ ID NO: 544448 - RNA, 19 nt, Homo sapiens
  misc_RNA (1)...(19): siRNA sense strand
caggauggauauugacagu

SEQ ID NO: 544449 - RNA, 19 nt, Homo sapiens
  misc_RNA (1)...(19): siRNA sense strand
ccgacgcaccucucgauua

SEQ ID NO: 544450 - RNA, 19 nt, Homo sapiens
  misc_RNA (1)...(19): siRNA sense strand
acacaucuuugcaaacaag

SEQ ID NO: 544451 - RNA, 19 nt, Homo sapiens
  misc_RNA (1)...(19): siRNA sense strand
guucaggugcucaggaauu

SEQ ID NO: 544452 - RNA, 19 nt, Homo sapiens
  misc_RNA (1)...(19): siRNA sense strand
gauaaauauuacccauugg

SEQ ID NO: 544453 - RNA, 19 nt, Homo sapiens
  misc_RNA (1)...(19): siRNA sense strand
uaccagaaguuuggauuca

SEQ ID NO: 544454 - RNA, 19 nt, Homo sapiens
  misc_RNA (1)...(19): siRNA sense strand
uacccagacuucaguguug

SEQ ID NO: 544455 - RNA, 19 nt, Homo sapiens
  misc_RNA (1)...(19): siRNA sense strand
ccuuauaccucucggaucu

SEQ ID NO: 544456 - RNA, 19 nt, Homo sapiens
  misc_RNA (1)...(19): siRNA sense strand
gcuguggaccagaguauug

SEQ ID NO: 544457 - RNA, 19 nt, Homo sapiens
  misc_RNA (1)...(19): siRNA sense strand
aaacgcaaacugauuguca

SEQ ID NO: 544458 - RNA, 19 nt, Homo sapiens
  misc_RNA (1)...(19): siRNA sense strand
gguagagagugaggaggaa

SEQ ID NO: 544459 - RNA, 19 nt, Homo sapiens
  misc_RNA (1)...(19): siRNA sense strand
gagccaggaugguggaaac

SEQ ID NO: 544460 - RNA, 19 nt, Homo sapiens
  misc_RNA (1)...(19): siRNA sense strand
guggaaagaagauaucugu

SEQ ID NO: 544461 - RNA, 19 nt, Homo sapiens
  misc_RNA (1)...(19): siRNA sense strand
gggauugcaacuuucauga

SEQ ID NO: 544462 - RNA, 19 nt, Homo sapiens
  misc_RNA (1)...(19): siRNA sense strand
ggauuuauggagccaaaga

SEQ ID NO: 544463 - RNA, 19 nt, Homo sapiens
  misc_RNA (1)...(19): siRNA sense strand
guacaccugccucucauuc

SEQ ID NO: 544464 - RNA, 19 nt, Homo sapiens
  misc_RNA (1)...(19): siRNA sense strand
cagaauccuugaccgauac

SEQ ID NO: 544465 - RNA, 19 nt, Homo sapiens
  misc_RNA (1)...(19): siRNA sense strand
gcagggauugcaacuuuca

SEQ ID NO: 544466 - RNA, 19 nt, Homo sapiens
  misc_RNA (1)...(19): siRNA sense strand
aaucacaucccaacgauca

SEQ ID NO: 544467 - RNA, 19 nt, Homo sapiens
  misc_RNA (1)...(19): siRNA sense strand
ccgaaagagcccagguaua

SEQ ID NO: 544468 - RNA, 19 nt, Homo sapiens
  misc_RNA (1)...(19): siRNA sense strand
ugaaacaaagccacccaaa

SEQ ID NO: 544469 - RNA, 19 nt, Homo sapiens
  misc_RNA (1)...(19): siRNA sense strand
gaucuugaaaccuuauauc

SEQ ID NO: 544470 - RNA, 19 nt, Homo sapiens
  misc_RNA (1)...(19): siRNA sense strand
gacaccagaccaccaaguu

SEQ ID NO: 544471 - RNA, 19 nt, Homo sapiens
  misc_RNA (1)...(19): siRNA sense strand
ggaucaaguuguuaaugcu

SEQ ID NO: 544472 - RNA, 19 nt, Homo sapiens
  misc_RNA (1)...(19): siRNA sense strand
guacccagacuucaguguu

SEQ ID NO: 544473 - RNA, 19 nt, Homo sapiens
  misc_RNA (1)...(19): siRNA sense strand
gcaguacccagacuucagu

SEQ ID NO: 544474 - RNA, 19 nt, Homo sapiens
  misc_RNA (1)...(19): siRNA sense strand
uagaucccaucauuacugu

SEQ ID NO: 544475 - RNA, 19 nt, Homo sapiens
  misc_RNA (1)...(19): siRNA sense strand
guaaacacgcauucuuucu

SEQ ID NO: 544476 - RNA, 19 nt, Homo sapiens
  misc_RNA (1)...(19): siRNA sense strand
gccaaagaaggaggaauuu

SEQ ID NO: 544477 - RNA, 19 nt, Homo sapiens
  misc_RNA (1)...(19): siRNA sense strand
gauggauauugacagugaa

SEQ ID NO: 544478 - RNA, 19 nt, Homo sapiens
  misc_RNA (1)...(19): siRNA sense strand
agauaaagcaggagguaga

SEQ ID NO: 544479 - RNA, 19 nt, Homo sapiens
  misc_RNA (1)...(19): siRNA sense strand
gccgcuggcuuucuugaca

SEQ ID NO: 544480 - RNA, 19 nt, Homo sapiens
  misc_RNA (1)...(19): siRNA sense strand
uaaacacgcauucuuucug

SEQ ID NO: 544481 - RNA, 19 nt, Homo sapiens
  misc_RNA (1)...(19): siRNA sense strand
uugcaacuuucaugaucua

SEQ ID NO: 544482 - RNA, 19 nt, Homo sapiens
  misc_RNA (1)...(19): siRNA sense strand
ugucaggacuucagaaucc

SEQ ID NO: 544483 - RNA, 19 nt, Homo sapiens
  misc_RNA (1)...(19): siRNA sense strand
guggaaacuuguucauaac

SEQ ID NO: 544484 - RNA, 19 nt, Homo sapiens
  misc_RNA (1)...(19): siRNA sense strand
gaaggacacaaagccgaaa

SEQ ID NO: 544485 - RNA, 19 nt, Homo sapiens
  misc_RNA (1)...(19): siRNA sense strand
agccucagcuggagaagga

SEQ ID NO: 544486 - RNA, 19 nt, Homo sapiens
  misc_RNA (1)...(19): siRNA sense strand
aguauugucagcccuuaua

SEQ ID NO: 544487 - RNA, 19 nt, Homo sapiens
  misc_RNA (1)...(19): siRNA sense strand
agaguauugucagcccuua

SEQ ID NO: 544488 - RNA, 19 nt, Homo sapiens
  misc_RNA (1)...(19): siRNA sense strand
uugguaggaucagaagaua

SEQ ID NO: 544489 - RNA, 19 nt, Homo sapiens
  misc_RNA (1)...(19): siRNA sense strand
gugagcaucuacgaggaaa

SEQ ID NO: 544490 - RNA, 19 nt, Homo sapiens
  misc_RNA (1)...(19): siRNA sense strand
gcacgugccugucucauuc

SEQ ID NO: 544491 - RNA, 19 nt, Homo sapiens
  misc_RNA (1)...(19): siRNA sense strand
caaagugggagcccgauaa

SEQ ID NO: 544492 - RNA, 19 nt, Homo sapiens
  misc_RNA (1)...(19): siRNA sense strand
gcacaagucauaccuacau

SEQ ID NO: 544493 - RNA, 19 nt, Homo sapiens
  misc_RNA (1)...(19): siRNA sense strand
aagcaaggcacaagucaua

SEQ ID NO: 544494 - RNA, 19 nt, Homo sapiens
  misc_RNA (1)...(19): siRNA sense strand
caagucauaccuacauuca

SEQ ID NO: 544495 - RNA, 19 nt, Homo sapiens
  misc_RNA (1)...(19): siRNA sense strand
agucauaccuacauucaag

SEQ ID NO: 544496 - RNA, 19 nt, Homo sapiens
  misc_RNA (1)...(19): siRNA sense strand
cacaagucauaccuacauu

SEQ ID NO: 544497 - RNA, 19 nt, Homo sapiens
  misc_RNA (1)...(19): siRNA sense strand
gggaccaugcaaaggauaa

SEQ ID NO: 544498 - RNA, 19 nt, Homo sapiens
  misc_RNA (1)...(19): siRNA sense strand
gaagcaaggcacaagucau

SEQ ID NO: 544499 - RNA, 19 nt, Homo sapiens
  misc_RNA (1)...(19): siRNA sense strand
ggaccaugcaaaggauaaa

SEQ ID NO: 544500 - RNA, 19 nt, Homo sapiens
  misc_RNA (1)...(19): siRNA sense strand
gcacgugccugucucauuc

SEQ ID NO: 544501 - RNA, 19 nt, Homo sapiens
  misc_RNA (1)...(19): siRNA sense strand
caaagugggagcccgauaa

SEQ ID NO: 544502 - RNA, 19 nt, Homo sapiens
  misc_RNA (1)...(19): siRNA sense strand
gcacaagucauaccuacau

SEQ ID NO: 544503 - RNA, 19 nt, Homo sapiens
  misc_RNA (1)...(19): siRNA sense strand
aagcaaggcacaagucaua

SEQ ID NO: 544504 - RNA, 19 nt, Homo sapiens
  misc_RNA (1)...(19): siRNA sense strand
caagucauaccuacauuca

SEQ ID NO: 544505 - RNA, 19 nt, Homo sapiens
  misc_RNA (1)...(19): siRNA sense strand
agucauaccuacauucaag

SEQ ID NO: 544506 - RNA, 19 nt, Homo sapiens
  misc_RNA (1)...(19): siRNA sense strand
cacaagucauaccuacauu

SEQ ID NO: 544507 - RNA, 19 nt, Homo sapiens
  misc_RNA (1)...(19): siRNA sense strand
gggaccaugcaaaggauaa

SEQ ID NO: 544508 - RNA, 19 nt, Homo sapiens
  misc_RNA (1)...(19): siRNA sense strand
gaagcaaggcacaagucau

SEQ ID NO: 544509 - RNA, 19 nt, Homo sapiens
  misc_RNA (1)...(19): siRNA sense strand
ggaccaugcaaaggauaaa

SEQ ID NO: 544510 - RNA, 19 nt, Homo sapiens
  misc_RNA (1)...(19): siRNA sense strand
gcacgugccugucucauuc

SEQ ID NO: 544511 - RNA, 19 nt, Homo sapiens
  misc_RNA (1)...(19): siRNA sense strand
caaagugggagcccgauaa

SEQ ID NO: 544512 - RNA, 19 nt, Homo sapiens
  misc_RNA (1)...(19): siRNA sense strand
gcacaagucauaccuacau

SEQ ID NO: 544513 - RNA, 19 nt, Homo sapiens
  misc_RNA (1)...(19): siRNA sense strand
aagcaaggcacaagucaua

SEQ ID NO: 544514 - RNA, 19 nt, Homo sapiens
  misc_RNA (1)...(19): siRNA sense strand
caagucauaccuacauuca

SEQ ID NO: 544515 - RNA, 19 nt, Homo sapiens
  misc_RNA (1)...(19): siRNA sense strand
agucauaccuacauucaag

SEQ ID NO: 544516 - RNA, 19 nt, Homo sapiens
  misc_RNA (1)...(19): siRNA sense strand
cacaagucauaccuacauu

SEQ ID NO: 544517 - RNA, 19 nt, Homo sapiens
  misc_RNA (1)...(19): siRNA sense strand
gggaccaugcaaaggauaa

SEQ ID NO: 544518 - RNA, 19 nt, Homo sapiens
  misc_RNA (1)...(19): siRNA sense strand
gaagcaaggcacaagucau

SEQ ID NO: 544519 - RNA, 19 nt, Homo sapiens
  misc_RNA (1)...(19): siRNA sense strand
ggaccaugcaaaggauaaa

SEQ ID NO: 544520 - RNA, 19 nt, Homo sapiens
  misc_RNA (1)...(19): siRNA sense strand
gaaggaagcucccuccaua

SEQ ID NO: 544521 - RNA, 19 nt, Homo sapiens
  misc_RNA (1)...(19): siRNA sense strand
ggaaagaggucccagaaga

SEQ ID NO: 544522 - RNA, 19 nt, Homo sapiens
  misc_RNA (1)...(19): siRNA sense strand
gaauauacguugugaagga

SEQ ID NO: 544523 - RNA, 19 nt, Homo sapiens
  misc_RNA (1)...(19): siRNA sense strand
aaagaugacucaacuugua

SEQ ID NO: 544524 - RNA, 19 nt, Homo sapiens
  misc_RNA (1)...(19): siRNA sense strand
ggagaaagauaucuguuca

SEQ ID NO: 544525 - RNA, 19 nt, Homo sapiens
  misc_RNA (1)...(19): siRNA sense strand
gcgaugagauccugaguga

SEQ ID NO: 544526 - RNA, 19 nt, Homo sapiens
  misc_RNA (1)...(19): siRNA sense strand
gaaauuugaucccuguauc

SEQ ID NO: 544527 - RNA, 19 nt, Homo sapiens
  misc_RNA (1)...(19): siRNA sense strand
caaauuaaccugcgugaau

SEQ ID NO: 544528 - RNA, 19 nt, Homo sapiens
  misc_RNA (1)...(19): siRNA sense strand
uaaggugacucaaaggaaa

SEQ ID NO: 544529 - RNA, 19 nt, Homo sapiens
  misc_RNA (1)...(19): siRNA sense strand
aaauuaaccugcgugaaua

SEQ ID NO: 544530 - RNA, 19 nt, Homo sapiens
  misc_RNA (1)...(19): siRNA sense strand
aaacacggauccucaguga

SEQ ID NO: 544531 - RNA, 19 nt, Homo sapiens
  misc_RNA (1)...(19): siRNA sense strand
gaauguacauggaaucucu

SEQ ID NO: 544532 - RNA, 19 nt, Homo sapiens
  misc_RNA (1)...(19): siRNA sense strand
aaagauaucuguucaagcu

SEQ ID NO: 544533 - RNA, 19 nt, Homo sapiens
  misc_RNA (1)...(19): siRNA sense strand
gaacucagaggucaugaug

SEQ ID NO: 544534 - RNA, 19 nt, Homo sapiens
  misc_RNA (1)...(19): siRNA sense strand
ggauggaacuugguuaaca

SEQ ID NO: 544535 - RNA, 19 nt, Homo sapiens
  misc_RNA (1)...(19): siRNA sense strand
ggaagccuguagaaauuug

SEQ ID NO: 544536 - RNA, 19 nt, Homo sapiens
  misc_RNA (1)...(19): siRNA sense strand
aaagaaagaugacucaacu

SEQ ID NO: 544537 - RNA, 19 nt, Homo sapiens
  misc_RNA (1)...(19): siRNA sense strand
gaacuggaaacggaauaua

SEQ ID NO: 544538 - RNA, 19 nt, Homo sapiens
  misc_RNA (1)...(19): siRNA sense strand
cuagacaacuccaucauca

SEQ ID NO: 544539 - RNA, 19 nt, Homo sapiens
  misc_RNA (1)...(19): siRNA sense strand
ggaacauccucccagcaaa

SEQ ID NO: 544540 - RNA, 19 nt, Homo sapiens
  misc_RNA (1)...(19): siRNA sense strand
gaacuaaaugugcccgaaa

SEQ ID NO: 544541 - RNA, 19 nt, Homo sapiens
  misc_RNA (1)...(19): siRNA sense strand
ggaaugaggauggaacuug

SEQ ID NO: 544542 - RNA, 19 nt, Homo sapiens
  misc_RNA (1)...(19): siRNA sense strand
agaagacccucaagagaug

SEQ ID NO: 544543 - RNA, 19 nt, Homo sapiens
  misc_RNA (1)...(19): siRNA sense strand
gaacugaaugugcccgaaa

SEQ ID NO: 544544 - RNA, 19 nt, Homo sapiens
  misc_RNA (1)...(19): siRNA sense strand
acaacuccaucaucacuaa

SEQ ID NO: 544545 - RNA, 19 nt, Homo sapiens
  misc_RNA (1)...(19): siRNA sense strand
caagccauuucccuucuuu

SEQ ID NO: 544546 - RNA, 19 nt, Homo sapiens
  misc_RNA (1)...(19): siRNA sense strand
gaaagaugacucaacuugu

SEQ ID NO: 544547 - RNA, 19 nt, Homo sapiens
  misc_RNA (1)...(19): siRNA sense strand
gaugagauccugagugagu

SEQ ID NO: 544548 - RNA, 19 nt, Homo sapiens
  misc_RNA (1)...(19): siRNA sense strand
cuggaagccuguagaaauu

SEQ ID NO: 544549 - RNA, 19 nt, Homo sapiens
  misc_RNA (1)...(19): siRNA sense strand
guacauggaaucucuggaa

SEQ ID NO: 544550 - RNA, 19 nt, Homo sapiens
  misc_RNA (1)...(19): siRNA sense strand
cagcacaccuucagacaag

SEQ ID NO: 544551 - RNA, 19 nt, Homo sapiens
  misc_RNA (1)...(19): siRNA sense strand
gaggauggaacuugguuaa

SEQ ID NO: 544552 - RNA, 19 nt, Homo sapiens
  misc_RNA (1)...(19): siRNA sense strand
ugauggcacuucagaaaug

SEQ ID NO: 544553 - RNA, 19 nt, Homo sapiens
  misc_RNA (1)...(19): siRNA sense strand
uaaagaagacccucaagag

SEQ ID NO: 544554 - RNA, 19 nt, Homo sapiens
  misc_RNA (1)...(19): siRNA sense strand
agaaaugaaugaaggaaag

SEQ ID NO: 544555 - RNA, 19 nt, Homo sapiens
  misc_RNA (1)...(19): siRNA sense strand
gagcagagacacaccaauc

SEQ ID NO: 544556 - RNA, 19 nt, Homo sapiens
  misc_RNA (1)...(19): siRNA sense strand
gggcauggcauccaagaga

SEQ ID NO: 544557 - RNA, 19 nt, Homo sapiens
  misc_RNA (1)...(19): siRNA sense strand
caucaucacuaagagaaug

SEQ ID NO: 544558 - RNA, 19 nt, Homo sapiens
  misc_RNA (1)...(19): siRNA sense strand
gauggcacuucagaaauga

SEQ ID NO: 544559 - RNA, 19 nt, Homo sapiens
  misc_RNA (1)...(19): siRNA sense strand
aaagaagacccucaagaga

SEQ ID NO: 544560 - RNA, 19 nt, Homo sapiens
  misc_RNA (1)...(19): siRNA sense strand
gaacauccucccagcaaag

SEQ ID NO: 544561 - RNA, 19 nt, Homo sapiens
  misc_RNA (1)...(19): siRNA sense strand
gaacgcaaagaacuggaaa

SEQ ID NO: 544562 - RNA, 19 nt, Homo sapiens
  misc_RNA (1)...(19): siRNA sense strand
ggaaggaacgcaaagaacu

SEQ ID NO: 544563 - RNA, 19 nt, Homo sapiens
  misc_RNA (1)...(19): siRNA sense strand
agaaagauaucuguucaag

SEQ ID NO: 544564 - RNA, 19 nt, Homo sapiens
  misc_RNA (1)...(19): siRNA sense strand
agaaagaugacucaacuug

SEQ ID NO: 544565 - RNA, 19 nt, Homo sapiens
  misc_RNA (1)...(19): siRNA sense strand
acacaccaauccuacuuga

SEQ ID NO: 544566 - RNA, 19 nt, Homo sapiens
  misc_RNA (1)...(19): siRNA sense strand
gaaggaacgcaaagaacug

SEQ ID NO: 544567 - RNA, 19 nt, Homo sapiens
  misc_RNA (1)...(19): siRNA sense strand
cuaagagaauguacaugga

SEQ ID NO: 544568 - RNA, 19 nt, Homo sapiens
  misc_RNA (1)...(19): siRNA sense strand
gauaaggugacucaaagga

SEQ ID NO: 544569 - RNA, 19 nt, Homo sapiens
  misc_RNA (1)...(19): siRNA sense strand
gaaaugaaugaaggaaaga

SEQ ID NO: 544570 - RNA, 19 nt, Homo sapiens
  misc_RNA (1)...(19): siRNA sense strand
ccagagauaagagauaauu

SEQ ID NO: 544571 - RNA, 19 nt, Homo sapiens
  misc_RNA (1)...(19): siRNA sense strand
agugaccaaugacaaguua

SEQ ID NO: 544572 - RNA, 19 nt, Homo sapiens
  misc_RNA (1)...(19): siRNA sense strand
ugccagagauaagagauaa

SEQ ID NO: 544573 - RNA, 19 nt, Homo sapiens
  misc_RNA (1)...(19): siRNA sense strand
gaggaaaacccaaaaguga

SEQ ID NO: 544574 - RNA, 19 nt, Homo sapiens
  misc_RNA (1)...(19): siRNA sense strand
uggauaaggugacucaaag

SEQ ID NO: 544575 - RNA, 19 nt, Homo sapiens
  misc_RNA (1)...(19): siRNA sense strand
ggcauggcauccaagagaa

SEQ ID NO: 544576 - RNA, 19 nt, Homo sapiens
  misc_RNA (1)...(19): siRNA sense strand
uaagagaauguacauggaa

SEQ ID NO: 544577 - RNA, 19 nt, Homo sapiens
  misc_RNA (1)...(19): siRNA sense strand
gaaagaggucccagaagac

SEQ ID NO: 544578 - RNA, 19 nt, Homo sapiens
  misc_RNA (1)...(19): siRNA sense strand
gguuaacaccaaaugaauu

SEQ ID NO: 544579 - RNA, 19 nt, Homo sapiens
  misc_RNA (1)...(19): siRNA sense strand
ccagaguggugcacaacau

SEQ ID NO: 544580 - RNA, 19 nt, Homo sapiens
  misc_RNA (1)...(19): siRNA sense strand
gcaaguggccagugacaac

SEQ ID NO: 544581 - RNA, 19 nt, Homo sapiens
  misc_RNA (1)...(19): siRNA sense strand
ugacaagagccauggaaga

SEQ ID NO: 544582 - RNA, 19 nt, Homo sapiens
  misc_RNA (1)...(19): siRNA sense strand
gcacaccuucagacaagaa

SEQ ID NO: 544583 - RNA, 19 nt, Homo sapiens
  misc_RNA (1)...(19): siRNA sense strand
gcacucauccaggaaggaa

SEQ ID NO: 544584 - RNA, 19 nt, Homo sapiens
  misc_RNA (1)...(19): siRNA sense strand
gcgaaagggauuuuauaua

SEQ ID NO: 544585 - RNA, 19 nt, Homo sapiens
  misc_RNA (1)...(19): siRNA sense strand
agaaccaaaugacccagaa

SEQ ID NO: 544586 - RNA, 19 nt, Homo sapiens
  misc_RNA (1)...(19): siRNA sense strand
ccaaugacaaguuaacauc

SEQ ID NO: 544587 - RNA, 19 nt, Homo sapiens
  misc_RNA (1)...(19): siRNA sense strand
aagaagacccucaagagau

SEQ ID NO: 544588 - RNA, 19 nt, Homo sapiens
  misc_RNA (1)...(19): siRNA sense strand
guggauaaggugacucaaa

SEQ ID NO: 544589 - RNA, 19 nt, Homo sapiens
  misc_RNA (1)...(19): siRNA sense strand
aauuugaagucgaaggaaa

SEQ ID NO: 544590 - RNA, 19 nt, Homo sapiens
  misc_RNA (1)...(19): siRNA sense strand
gacauuguucagucaaauu

SEQ ID NO: 544591 - RNA, 19 nt, Homo sapiens
  misc_RNA (1)...(19): siRNA sense strand
ggaacgcaaagaacuggaa

SEQ ID NO: 544592 - RNA, 19 nt, Homo sapiens
  misc_RNA (1)...(19): siRNA sense strand
gaaaaggaaggaacgcaaa

SEQ ID NO: 544593 - RNA, 19 nt, Homo sapiens
  misc_RNA (1)...(19): siRNA sense strand
gauccucagugaagugcau

SEQ ID NO: 544594 - RNA, 19 nt, Homo sapiens
  misc_RNA (1)...(19): siRNA sense strand
gagaaagauaucuguucaa

SEQ ID NO: 544595 - RNA, 19 nt, Homo sapiens
  misc_RNA (1)...(19): siRNA sense strand
gcccgaaaguccagaucga

SEQ ID NO: 544596 - RNA, 19 nt, Homo sapiens
  misc_RNA (1)...(19): siRNA sense strand
caaguuaacauccaaaaug

SEQ ID NO: 544597 - RNA, 19 nt, Homo sapiens
  misc_RNA (1)...(19): siRNA sense strand
cagagacacaccaauccua

SEQ ID NO: 544598 - RNA, 19 nt, Homo sapiens
  misc_RNA (1)...(19): siRNA sense strand
gauggaacuugguuaacac

SEQ ID NO: 544599 - RNA, 19 nt, Homo sapiens
  misc_RNA (1)...(19): siRNA sense strand
ucuggaagccuguagaaau

SEQ ID NO: 544600 - RNA, 19 nt, Homo sapiens
  misc_RNA (1)...(19): siRNA sense strand
gacaagagccauggaagag

SEQ ID NO: 544601 - RNA, 19 nt, Homo sapiens
  misc_RNA (1)...(19): siRNA sense strand
cagaaaugaaugaaggaaa

SEQ ID NO: 544602 - RNA, 19 nt, Homo sapiens
  misc_RNA (1)...(19): siRNA sense strand
uugaaggccuccuagacaa

SEQ ID NO: 544603 - RNA, 19 nt, Homo sapiens
  misc_RNA (1)...(19): siRNA sense strand
ccacgaagggucacacaag

SEQ ID NO: 544604 - RNA, 19 nt, Homo sapiens
  misc_RNA (1)...(19): siRNA sense strand
acacggauccucagugaag

SEQ ID NO: 544605 - RNA, 19 nt, Homo sapiens
  misc_RNA (1)...(19): siRNA sense strand
aauauucaccgaagaggaa

SEQ ID NO: 544606 - RNA, 19 nt, Homo sapiens
  misc_RNA (1)...(19): siRNA sense strand
gauaucuguucaagcucaa

SEQ ID NO: 544607 - RNA, 19 nt, Homo sapiens
  misc_RNA (1)...(19): siRNA sense strand
caacuggagaggacuuuua

SEQ ID NO: 544608 - RNA, 19 nt, Homo sapiens
  misc_RNA (1)...(19): siRNA sense strand
aagagaauguacauggaau

SEQ ID NO: 544609 - RNA, 19 nt, Homo sapiens
  misc_RNA (1)...(19): siRNA sense strand
gcgugaauaucccaaucug

SEQ ID NO: 544610 - RNA, 19 nt, Homo sapiens
  misc_RNA (1)...(19): siRNA sense strand
ucaaaggaaagacgacuca

SEQ ID NO: 544611 - RNA, 19 nt, Homo sapiens
  misc_RNA (1)...(19): siRNA sense strand
gggacagccucaucuagac

SEQ ID NO: 544612 - RNA, 19 nt, Homo sapiens
  misc_RNA (1)...(19): siRNA sense strand
ggacagccucaucuagaca

SEQ ID NO: 544613 - RNA, 19 nt, Homo sapiens
  misc_RNA (1)...(19): siRNA sense strand
cggaauauacguugugaag

SEQ ID NO: 544614 - RNA, 19 nt, Homo sapiens
  misc_RNA (1)...(19): siRNA sense strand
cgacucaaccuggaacuca

SEQ ID NO: 544615 - RNA, 19 nt, Homo sapiens
  misc_RNA (1)...(19): siRNA sense strand
auaaagaagacccucaaga

SEQ ID NO: 544616 - RNA, 19 nt, Homo sapiens
  misc_RNA (1)...(19): siRNA sense strand
aauauacguugugaaggaa

SEQ ID NO: 544617 - RNA, 19 nt, Homo sapiens
  misc_RNA (1)...(19): siRNA sense strand
gaccuguggugaggcgaaa

SEQ ID NO: 544618 - RNA, 19 nt, Homo sapiens
  misc_RNA (1)...(19): siRNA sense strand
ccgaaaguccagaucgaaa

SEQ ID NO: 544619 - RNA, 19 nt, Homo sapiens
  misc_RNA (1)...(19): siRNA sense strand
ucacuaagagaauguacau

SEQ ID NO: 544620 - RNA, 19 nt, Homo sapiens
  misc_RNA (1)...(19): siRNA sense strand
gaaggaagcucccuccaua

SEQ ID NO: 544621 - RNA, 19 nt, Homo sapiens
  misc_RNA (1)...(19): siRNA sense strand
ggaaagaggucccagaaga

SEQ ID NO: 544622 - RNA, 19 nt, Homo sapiens
  misc_RNA (1)...(19): siRNA sense strand
gaauauacguugugaagga

SEQ ID NO: 544623 - RNA, 19 nt, Homo sapiens
  misc_RNA (1)...(19): siRNA sense strand
aaagaugacucaacuugua

SEQ ID NO: 544624 - RNA, 19 nt, Homo sapiens
  misc_RNA (1)...(19): siRNA sense strand
ggagaaagauaucuguuca

SEQ ID NO: 544625 - RNA, 19 nt, Homo sapiens
  misc_RNA (1)...(19): siRNA sense strand
gcgaugagauccugaguga

SEQ ID NO: 544626 - RNA, 19 nt, Homo sapiens
  misc_RNA (1)...(19): siRNA sense strand
gaaauuugaucccuguauc

SEQ ID NO: 544627 - RNA, 19 nt, Homo sapiens
  misc_RNA (1)...(19): siRNA sense strand
caaauuaaccugcgugaau

SEQ ID NO: 544628 - RNA, 19 nt, Homo sapiens
  misc_RNA (1)...(19): siRNA sense strand
uaaggugacucaaaggaaa

SEQ ID NO: 544629 - RNA, 19 nt, Homo sapiens
  misc_RNA (1)...(19): siRNA sense strand
aaauuaaccugcgugaaua

SEQ ID NO: 544630 - RNA, 19 nt, Homo sapiens
  misc_RNA (1)...(19): siRNA sense strand
aaacacggauccucaguga

SEQ ID NO: 544631 - RNA, 19 nt, Homo sapiens
  misc_RNA (1)...(19): siRNA sense strand
gaauguacauggaaucucu

SEQ ID NO: 544632 - RNA, 19 nt, Homo sapiens
  misc_RNA (1)...(19): siRNA sense strand
aaagauaucuguucaagcu

SEQ ID NO: 544633 - RNA, 19 nt, Homo sapiens
  misc_RNA (1)...(19): siRNA sense strand
gaacucagaggucaugaug

SEQ ID NO: 544634 - RNA, 19 nt, Homo sapiens
  misc_RNA (1)...(19): siRNA sense strand
ggauggaacuugguuaaca

SEQ ID NO: 544635 - RNA, 19 nt, Homo sapiens
  misc_RNA (1)...(19): siRNA sense strand
ggaagccuguagaaauuug

SEQ ID NO: 544636 - RNA, 19 nt, Homo sapiens
  misc_RNA (1)...(19): siRNA sense strand
aaagaaagaugacucaacu

SEQ ID NO: 544637 - RNA, 19 nt, Homo sapiens
  misc_RNA (1)...(19): siRNA sense strand
gaacuggaaacggaauaua

SEQ ID NO: 544638 - RNA, 19 nt, Homo sapiens
  misc_RNA (1)...(19): siRNA sense strand
cuagacaacuccaucauca

SEQ ID NO: 544639 - RNA, 19 nt, Homo sapiens
  misc_RNA (1)...(19): siRNA sense strand
ggaacauccucccagcaaa

SEQ ID NO: 544640 - RNA, 19 nt, Homo sapiens
  misc_RNA (1)...(19): siRNA sense strand
gaacuaaaugugcccgaaa

SEQ ID NO: 544641 - RNA, 19 nt, Homo sapiens
  misc_RNA (1)...(19): siRNA sense strand
ggaaugaggauggaacuug

SEQ ID NO: 544642 - RNA, 19 nt, Homo sapiens
  misc_RNA (1)...(19): siRNA sense strand
agaagacccucaagagaug

SEQ ID NO: 544643 - RNA, 19 nt, Homo sapiens
  misc_RNA (1)...(19): siRNA sense strand
gaacugaaugugcccgaaa

SEQ ID NO: 544644 - RNA, 19 nt, Homo sapiens
  misc_RNA (1)...(19): siRNA sense strand
acaacuccaucaucacuaa

SEQ ID NO: 544645 - RNA, 19 nt, Homo sapiens
  misc_RNA (1)...(19): siRNA sense strand
caagccauuucccuucuuu

SEQ ID NO: 544646 - RNA, 19 nt, Homo sapiens
  misc_RNA (1)...(19): siRNA sense strand
gaaagaugacucaacuugu

SEQ ID NO: 544647 - RNA, 19 nt, Homo sapiens
  misc_RNA (1)...(19): siRNA sense strand
gaugagauccugagugagu

SEQ ID NO: 544648 - RNA, 19 nt, Homo sapiens
  misc_RNA (1)...(19): siRNA sense strand
cuggaagccuguagaaauu

SEQ ID NO: 544649 - RNA, 19 nt, Homo sapiens
  misc_RNA (1)...(19): siRNA sense strand
guacauggaaucucuggaa

SEQ ID NO: 544650 - RNA, 19 nt, Homo sapiens
  misc_RNA (1)...(19): siRNA sense strand
cagcacaccuucagacaag

SEQ ID NO: 544651 - RNA, 19 nt, Homo sapiens
  misc_RNA (1)...(19): siRNA sense strand
gaggauggaacuugguuaa

SEQ ID NO: 544652 - RNA, 19 nt, Homo sapiens
  misc_RNA (1)...(19): siRNA sense strand
ugauggcacuucagaaaug

SEQ ID NO: 544653 - RNA, 19 nt, Homo sapiens
  misc_RNA (1)...(19): siRNA sense strand
uaaagaagacccucaagag

SEQ ID NO: 544654 - RNA, 19 nt, Homo sapiens
  misc_RNA (1)...(19): siRNA sense strand
agaaaugaaugaaggaaag

SEQ ID NO: 544655 - RNA, 19 nt, Homo sapiens
  misc_RNA (1)...(19): siRNA sense strand
gagcagagacacaccaauc

SEQ ID NO: 544656 - RNA, 19 nt, Homo sapiens
  misc_RNA (1)...(19): siRNA sense strand
gggcauggcauccaagaga

SEQ ID NO: 544657 - RNA, 19 nt, Homo sapiens
  misc_RNA (1)...(19): siRNA sense strand
caucaucacuaagagaaug

SEQ ID NO: 544658 - RNA, 19 nt, Homo sapiens
  misc_RNA (1)...(19): siRNA sense strand
gauggcacuucagaaauga

SEQ ID NO: 544659 - RNA, 19 nt, Homo sapiens
  misc_RNA (1)...(19): siRNA sense strand
aaagaagacccucaagaga

SEQ ID NO: 544660 - RNA, 19 nt, Homo sapiens
  misc_RNA (1)...(19): siRNA sense strand
gaacauccucccagcaaag

SEQ ID NO: 544661 - RNA, 19 nt, Homo sapiens
  misc_RNA (1)...(19): siRNA sense strand
gaacgcaaagaacuggaaa

SEQ ID NO: 544662 - RNA, 19 nt, Homo sapiens
  misc_RNA (1)...(19): siRNA sense strand
ggaaggaacgcaaagaacu

SEQ ID NO: 544663 - RNA, 19 nt, Homo sapiens
  misc_RNA (1)...(19): siRNA sense strand
agaaagauaucuguucaag

SEQ ID NO: 544664 - RNA, 19 nt, Homo sapiens
  misc_RNA (1)...(19): siRNA sense strand
agaaagaugacucaacuug

SEQ ID NO: 544665 - RNA, 19 nt, Homo sapiens
  misc_RNA (1)...(19): siRNA sense strand
acacaccaauccuacuuga

SEQ ID NO: 544666 - RNA, 19 nt, Homo sapiens
  misc_RNA (1)...(19): siRNA sense strand
gaaggaacgcaaagaacug

SEQ ID NO: 544667 - RNA, 19 nt, Homo sapiens
  misc_RNA (1)...(19): siRNA sense strand
cuaagagaauguacaugga

SEQ ID NO: 544668 - RNA, 19 nt, Homo sapiens
  misc_RNA (1)...(19): siRNA sense strand
gauaaggugacucaaagga

SEQ ID NO: 544669 - RNA, 19 nt, Homo sapiens
  misc_RNA (1)...(19): siRNA sense strand
gaaaugaaugaaggaaaga

SEQ ID NO: 544670 - RNA, 19 nt, Homo sapiens
  misc_RNA (1)...(19): siRNA sense strand
ccagagauaagagauaauu

SEQ ID NO: 544671 - RNA, 19 nt, Homo sapiens
  misc_RNA (1)...(19): siRNA sense strand
agugaccaaugacaaguua

SEQ ID NO: 544672 - RNA, 19 nt, Homo sapiens
  misc_RNA (1)...(19): siRNA sense strand
ugccagagauaagagauaa

SEQ ID NO: 544673 - RNA, 19 nt, Homo sapiens
  misc_RNA (1)...(19): siRNA sense strand
gaggaaaacccaaaaguga

SEQ ID NO: 544674 - RNA, 19 nt, Homo sapiens
  misc_RNA (1)...(19): siRNA sense strand
uggauaaggugacucaaag

SEQ ID NO: 544675 - RNA, 19 nt, Homo sapiens
  misc_RNA (1)...(19): siRNA sense strand
ggcauggcauccaagagaa

SEQ ID NO: 544676 - RNA, 19 nt, Homo sapiens
  misc_RNA (1)...(19): siRNA sense strand
uaagagaauguacauggaa

SEQ ID NO: 544677 - RNA, 19 nt, Homo sapiens
  misc_RNA (1)...(19): siRNA sense strand
gaaagaggucccagaagac

SEQ ID NO: 544678 - RNA, 19 nt, Homo sapiens
  misc_RNA (1)...(19): siRNA sense strand
gguuaacaccaaaugaauu

SEQ ID NO: 544679 - RNA, 19 nt, Homo sapiens
  misc_RNA (1)...(19): siRNA sense strand
ccagaguggugcacaacau

SEQ ID NO: 544680 - RNA, 19 nt, Homo sapiens
  misc_RNA (1)...(19): siRNA sense strand
gcaaguggccagugacaac

SEQ ID NO: 544681 - RNA, 19 nt, Homo sapiens
  misc_RNA (1)...(19): siRNA sense strand
ugacaagagccauggaaga

SEQ ID NO: 544682 - RNA, 19 nt, Homo sapiens
  misc_RNA (1)...(19): siRNA sense strand
gcacaccuucagacaagaa

SEQ ID NO: 544683 - RNA, 19 nt, Homo sapiens
  misc_RNA (1)...(19): siRNA sense strand
gcacucauccaggaaggaa

SEQ ID NO: 544684 - RNA, 19 nt, Homo sapiens
  misc_RNA (1)...(19): siRNA sense strand
gcgaaagggauuuuauaua

SEQ ID NO: 544685 - RNA, 19 nt, Homo sapiens
  misc_RNA (1)...(19): siRNA sense strand
agaaccaaaugacccagaa

SEQ ID NO: 544686 - RNA, 19 nt, Homo sapiens
  misc_RNA (1)...(19): siRNA sense strand
ccaaugacaaguuaacauc

SEQ ID NO: 544687 - RNA, 19 nt, Homo sapiens
  misc_RNA (1)...(19): siRNA sense strand
aagaagacccucaagagau

SEQ ID NO: 544688 - RNA, 19 nt, Homo sapiens
  misc_RNA (1)...(19): siRNA sense strand
guggauaaggugacucaaa

SEQ ID NO: 544689 - RNA, 19 nt, Homo sapiens
  misc_RNA (1)...(19): siRNA sense strand
aauuugaagucgaaggaaa

SEQ ID NO: 544690 - RNA, 19 nt, Homo sapiens
  misc_RNA (1)...(19): siRNA sense strand
gacauuguucagucaaauu

SEQ ID NO: 544691 - RNA, 19 nt, Homo sapiens
  misc_RNA (1)...(19): siRNA sense strand
ggaacgcaaagaacuggaa

SEQ ID NO: 544692 - RNA, 19 nt, Homo sapiens
  misc_RNA (1)...(19): siRNA sense strand
gaaaaggaaggaacgcaaa

SEQ ID NO: 544693 - RNA, 19 nt, Homo sapiens
  misc_RNA (1)...(19): siRNA sense strand
gauccucagugaagugcau

SEQ ID NO: 544694 - RNA, 19 nt, Homo sapiens
  misc_RNA (1)...(19): siRNA sense strand
gagaaagauaucuguucaa

SEQ ID NO: 544695 - RNA, 19 nt, Homo sapiens
  misc_RNA (1)...(19): siRNA sense strand
gcccgaaaguccagaucga

SEQ ID NO: 544696 - RNA, 19 nt, Homo sapiens
  misc_RNA (1)...(19): siRNA sense strand
caaguuaacauccaaaaug

SEQ ID NO: 544697 - RNA, 19 nt, Homo sapiens
  misc_RNA (1)...(19): siRNA sense strand
cagagacacaccaauccua

SEQ ID NO: 544698 - RNA, 19 nt, Homo sapiens
  misc_RNA (1)...(19): siRNA sense strand
gauggaacuugguuaacac

SEQ ID NO: 544699 - RNA, 19 nt, Homo sapiens
  misc_RNA (1)...(19): siRNA sense strand
ucuggaagccuguagaaau

SEQ ID NO: 544700 - RNA, 19 nt, Homo sapiens
  misc_RNA (1)...(19): siRNA sense strand
gacaagagccauggaagag

SEQ ID NO: 544701 - RNA, 19 nt, Homo sapiens
  misc_RNA (1)...(19): siRNA sense strand
cagaaaugaaugaaggaaa

SEQ ID NO: 544702 - RNA, 19 nt, Homo sapiens
  misc_RNA (1)...(19): siRNA sense strand
uugaaggccuccuagacaa

SEQ ID NO: 544703 - RNA, 19 nt, Homo sapiens
  misc_RNA (1)...(19): siRNA sense strand
ccacgaagggucacacaag

SEQ ID NO: 544704 - RNA, 19 nt, Homo sapiens
  misc_RNA (1)...(19): siRNA sense strand
acacggauccucagugaag

SEQ ID NO: 544705 - RNA, 19 nt, Homo sapiens
  misc_RNA (1)...(19): siRNA sense strand
aauauucaccgaagaggaa

SEQ ID NO: 544706 - RNA, 19 nt, Homo sapiens
  misc_RNA (1)...(19): siRNA sense strand
gauaucuguucaagcucaa

SEQ ID NO: 544707 - RNA, 19 nt, Homo sapiens
  misc_RNA (1)...(19): siRNA sense strand
caacuggagaggacuuuua

SEQ ID NO: 544708 - RNA, 19 nt, Homo sapiens
  misc_RNA (1)...(19): siRNA sense strand
aagagaauguacauggaau

SEQ ID NO: 544709 - RNA, 19 nt, Homo sapiens
  misc_RNA (1)...(19): siRNA sense strand
gcgugaauaucccaaucug

SEQ ID NO: 544710 - RNA, 19 nt, Homo sapiens
  misc_RNA (1)...(19): siRNA sense strand
ucaaaggaaagacgacuca

SEQ ID NO: 544711 - RNA, 19 nt, Homo sapiens
  misc_RNA (1)...(19): siRNA sense strand
gggacagccucaucuagac

SEQ ID NO: 544712 - RNA, 19 nt, Homo sapiens
  misc_RNA (1)...(19): siRNA sense strand
ggacagccucaucuagaca

SEQ ID NO: 544713 - RNA, 19 nt, Homo sapiens
  misc_RNA (1)...(19): siRNA sense strand
cggaauauacguugugaag

SEQ ID NO: 544714 - RNA, 19 nt, Homo sapiens
  misc_RNA (1)...(19): siRNA sense strand
cgacucaaccuggaacuca

SEQ ID NO: 544715 - RNA, 19 nt, Homo sapiens
  misc_RNA (1)...(19): siRNA sense strand
auaaagaagacccucaaga

SEQ ID NO: 544716 - RNA, 19 nt, Homo sapiens
  misc_RNA (1)...(19): siRNA sense strand
aauauacguugugaaggaa

SEQ ID NO: 544717 - RNA, 19 nt, Homo sapiens
  misc_RNA (1)...(19): siRNA sense strand
gaccuguggugaggcgaaa

SEQ ID NO: 544718 - RNA, 19 nt, Homo sapiens
  misc_RNA (1)...(19): siRNA sense strand
ccgaaaguccagaucgaaa

SEQ ID NO: 544719 - RNA, 19 nt, Homo sapiens
  misc_RNA (1)...(19): siRNA sense strand
ucacuaagagaauguacau

SEQ ID NO: 544720 - RNA, 19 nt, Homo sapiens
  misc_RNA (1)...(19): siRNA sense strand
gaaggaagcucccuccaua

SEQ ID NO: 544721 - RNA, 19 nt, Homo sapiens
  misc_RNA (1)...(19): siRNA sense strand
ggaaagaggucccagaaga

SEQ ID NO: 544722 - RNA, 19 nt, Homo sapiens
  misc_RNA (1)...(19): siRNA sense strand
gaauauacguugugaagga

SEQ ID NO: 544723 - RNA, 19 nt, Homo sapiens
  misc_RNA (1)...(19): siRNA sense strand
aaagaugacucaacuugua

SEQ ID NO: 544724 - RNA, 19 nt, Homo sapiens
  misc_RNA (1)...(19): siRNA sense strand
ggagaaagauaucuguuca

SEQ ID NO: 544725 - RNA, 19 nt, Homo sapiens
  misc_RNA (1)...(19): siRNA sense strand
gcgaugagauccugaguga

SEQ ID NO: 544726 - RNA, 19 nt, Homo sapiens
  misc_RNA (1)...(19): siRNA sense strand
gaaauuugaucccuguauc

SEQ ID NO: 544727 - RNA, 19 nt, Homo sapiens
  misc_RNA (1)...(19): siRNA sense strand
caaauuaaccugcgugaau

SEQ ID NO: 544728 - RNA, 19 nt, Homo sapiens
  misc_RNA (1)...(19): siRNA sense strand
uaaggugacucaaaggaaa

SEQ ID NO: 544729 - RNA, 19 nt, Homo sapiens
  misc_RNA (1)...(19): siRNA sense strand
aaauuaaccugcgugaaua

SEQ ID NO: 544730 - RNA, 19 nt, Homo sapiens
  misc_RNA (1)...(19): siRNA sense strand
aaacacggauccucaguga

SEQ ID NO: 544731 - RNA, 19 nt, Homo sapiens
  misc_RNA (1)...(19): siRNA sense strand
gaauguacauggaaucucu

SEQ ID NO: 544732 - RNA, 19 nt, Homo sapiens
  misc_RNA (1)...(19): siRNA sense strand
aaagauaucuguucaagcu

SEQ ID NO: 544733 - RNA, 19 nt, Homo sapiens
  misc_RNA (1)...(19): siRNA sense strand
gaacucagaggucaugaug

SEQ ID NO: 544734 - RNA, 19 nt, Homo sapiens
  misc_RNA (1)...(19): siRNA sense strand
ggauggaacuugguuaaca

SEQ ID NO: 544735 - RNA, 19 nt, Homo sapiens
  misc_RNA (1)...(19): siRNA sense strand
ggaagccuguagaaauuug

SEQ ID NO: 544736 - RNA, 19 nt, Homo sapiens
  misc_RNA (1)...(19): siRNA sense strand
aaagaaagaugacucaacu

SEQ ID NO: 544737 - RNA, 19 nt, Homo sapiens
  misc_RNA (1)...(19): siRNA sense strand
gaacuggaaacggaauaua

SEQ ID NO: 544738 - RNA, 19 nt, Homo sapiens
  misc_RNA (1)...(19): siRNA sense strand
cuagacaacuccaucauca

SEQ ID NO: 544739 - RNA, 19 nt, Homo sapiens
  misc_RNA (1)...(19): siRNA sense strand
ggaacauccucccagcaaa

SEQ ID NO: 544740 - RNA, 19 nt, Homo sapiens
  misc_RNA (1)...(19): siRNA sense strand
gaacuaaaugugcccgaaa

SEQ ID NO: 544741 - RNA, 19 nt, Homo sapiens
  misc_RNA (1)...(19): siRNA sense strand
ggaaugaggauggaacuug

SEQ ID NO: 544742 - RNA, 19 nt, Homo sapiens
  misc_RNA (1)...(19): siRNA sense strand
agaagacccucaagagaug

SEQ ID NO: 544743 - RNA, 19 nt, Homo sapiens
  misc_RNA (1)...(19): siRNA sense strand
gaacugaaugugcccgaaa

SEQ ID NO: 544744 - RNA, 19 nt, Homo sapiens
  misc_RNA (1)...(19): siRNA sense strand
acaacuccaucaucacuaa

SEQ ID NO: 544745 - RNA, 19 nt, Homo sapiens
  misc_RNA (1)...(19): siRNA sense strand
caagccauuucccuucuuu

SEQ ID NO: 544746 - RNA, 19 nt, Homo sapiens
  misc_RNA (1)...(19): siRNA sense strand
gaaagaugacucaacuugu

SEQ ID NO: 544747 - RNA, 19 nt, Homo sapiens
  misc_RNA (1)...(19): siRNA sense strand
gaugagauccugagugagu

SEQ ID NO: 544748 - RNA, 19 nt, Homo sapiens
  misc_RNA (1)...(19): siRNA sense strand
cuggaagccuguagaaauu

SEQ ID NO: 544749 - RNA, 19 nt, Homo sapiens
  misc_RNA (1)...(19): siRNA sense strand
guacauggaaucucuggaa

SEQ ID NO: 544750 - RNA, 19 nt, Homo sapiens
  misc_RNA (1)...(19): siRNA sense strand
cagcacaccuucagacaag

SEQ ID NO: 544751 - RNA, 19 nt, Homo sapiens
  misc_RNA (1)...(19): siRNA sense strand
gaggauggaacuugguuaa

SEQ ID NO: 544752 - RNA, 19 nt, Homo sapiens
  misc_RNA (1)...(19): siRNA sense strand
ugauggcacuucagaaaug

SEQ ID NO: 544753 - RNA, 19 nt, Homo sapiens
  misc_RNA (1)...(19): siRNA sense strand
uaaagaagacccucaagag

SEQ ID NO: 544754 - RNA, 19 nt, Homo sapiens
  misc_RNA (1)...(19): siRNA sense strand
agaaaugaaugaaggaaag

SEQ ID NO: 544755 - RNA, 19 nt, Homo sapiens
  misc_RNA (1)...(19): siRNA sense strand
gagcagagacacaccaauc

SEQ ID NO: 544756 - RNA, 19 nt, Homo sapiens
  misc_RNA (1)...(19): siRNA sense strand
gggcauggcauccaagaga

SEQ ID NO: 544757 - RNA, 19 nt, Homo sapiens
  misc_RNA (1)...(19): siRNA sense strand
caucaucacuaagagaaug

SEQ ID NO: 544758 - RNA, 19 nt, Homo sapiens
  misc_RNA (1)...(19): siRNA sense strand
gauggcacuucagaaauga

SEQ ID NO: 544759 - RNA, 19 nt, Homo sapiens
  misc_RNA (1)...(19): siRNA sense strand
aaagaagacccucaagaga

SEQ ID NO: 544760 - RNA, 19 nt, Homo sapiens
  misc_RNA (1)...(19): siRNA sense strand
gaacauccucccagcaaag

SEQ ID NO: 544761 - RNA, 19 nt, Homo sapiens
  misc_RNA (1)...(19): siRNA sense strand
gaacgcaaagaacuggaaa

SEQ ID NO: 544762 - RNA, 19 nt, Homo sapiens
  misc_RNA (1)...(19): siRNA sense strand
ggaaggaacgcaaagaacu

SEQ ID NO: 544763 - RNA, 19 nt, Homo sapiens
  misc_RNA (1)...(19): siRNA sense strand
agaaagauaucuguucaag

SEQ ID NO: 544764 - RNA, 19 nt, Homo sapiens
  misc_RNA (1)...(19): siRNA sense strand
agaaagaugacucaacuug

SEQ ID NO: 544765 - RNA, 19 nt, Homo sapiens
  misc_RNA (1)...(19): siRNA sense strand
acacaccaauccuacuuga

SEQ ID NO: 544766 - RNA, 19 nt, Homo sapiens
  misc_RNA (1)...(19): siRNA sense strand
gaaggaacgcaaagaacug

SEQ ID NO: 544767 - RNA, 19 nt, Homo sapiens
  misc_RNA (1)...(19): siRNA sense strand
cuaagagaauguacaugga

SEQ ID NO: 544768 - RNA, 19 nt, Homo sapiens
  misc_RNA (1)...(19): siRNA sense strand
gauaaggugacucaaagga

SEQ ID NO: 544769 - RNA, 19 nt, Homo sapiens
  misc_RNA (1)...(19): siRNA sense strand
gaaaugaaugaaggaaaga

SEQ ID NO: 544770 - RNA, 19 nt, Homo sapiens
  misc_RNA (1)...(19): siRNA sense strand
ccagagauaagagauaauu

SEQ ID NO: 544771 - RNA, 19 nt, Homo sapiens
  misc_RNA (1)...(19): siRNA sense strand
agugaccaaugacaaguua

SEQ ID NO: 544772 - RNA, 19 nt, Homo sapiens
  misc_RNA (1)...(19): siRNA sense strand
ugccagagauaagagauaa

SEQ ID NO: 544773 - RNA, 19 nt, Homo sapiens
  misc_RNA (1)...(19): siRNA sense strand
gaggaaaacccaaaaguga

SEQ ID NO: 544774 - RNA, 19 nt, Homo sapiens
  misc_RNA (1)...(19): siRNA sense strand
uggauaaggugacucaaag

SEQ ID NO: 544775 - RNA, 19 nt, Homo sapiens
  misc_RNA (1)...(19): siRNA sense strand
ggcauggcauccaagagaa

SEQ ID NO: 544776 - RNA, 19 nt, Homo sapiens
  misc_RNA (1)...(19): siRNA sense strand
uaagagaauguacauggaa

SEQ ID NO: 544777 - RNA, 19 nt, Homo sapiens
  misc_RNA (1)...(19): siRNA sense strand
gaaagaggucccagaagac

SEQ ID NO: 544778 - RNA, 19 nt, Homo sapiens
  misc_RNA (1)...(19): siRNA sense strand
gguuaacaccaaaugaauu

SEQ ID NO: 544779 - RNA, 19 nt, Homo sapiens
  misc_RNA (1)...(19): siRNA sense strand
ccagaguggugcacaacau

SEQ ID NO: 544780 - RNA, 19 nt, Homo sapiens
  misc_RNA (1)...(19): siRNA sense strand
gcaaguggccagugacaac

SEQ ID NO: 544781 - RNA, 19 nt, Homo sapiens
  misc_RNA (1)...(19): siRNA sense strand
ugacaagagccauggaaga

SEQ ID NO: 544782 - RNA, 19 nt, Homo sapiens
  misc_RNA (1)...(19): siRNA sense strand
gcacaccuucagacaagaa

SEQ ID NO: 544783 - RNA, 19 nt, Homo sapiens
  misc_RNA (1)...(19): siRNA sense strand
gcacucauccaggaaggaa

SEQ ID NO: 544784 - RNA, 19 nt, Homo sapiens
  misc_RNA (1)...(19): siRNA sense strand
gcgaaagggauuuuauaua

SEQ ID NO: 544785 - RNA, 19 nt, Homo sapiens
  misc_RNA (1)...(19): siRNA sense strand
agaaccaaaugacccagaa

SEQ ID NO: 544786 - RNA, 19 nt, Homo sapiens
  misc_RNA (1)...(19): siRNA sense strand
ccaaugacaaguuaacauc

SEQ ID NO: 544787 - RNA, 19 nt, Homo sapiens
  misc_RNA (1)...(19): siRNA sense strand
aagaagacccucaagagau

SEQ ID NO: 544788 - RNA, 19 nt, Homo sapiens
  misc_RNA (1)...(19): siRNA sense strand
guggauaaggugacucaaa

SEQ ID NO: 544789 - RNA, 19 nt, Homo sapiens
  misc_RNA (1)...(19): siRNA sense strand
aauuugaagucgaaggaaa

SEQ ID NO: 544790 - RNA, 19 nt, Homo sapiens
  misc_RNA (1)...(19): siRNA sense strand
gacauuguucagucaaauu

SEQ ID NO: 544791 - RNA, 19 nt, Homo sapiens
  misc_RNA (1)...(19): siRNA sense strand
ggaacgcaaagaacuggaa

SEQ ID NO: 544792 - RNA, 19 nt, Homo sapiens
  misc_RNA (1)...(19): siRNA sense strand
gaaaaggaaggaacgcaaa

SEQ ID NO: 544793 - RNA, 19 nt, Homo sapiens
  misc_RNA (1)...(19): siRNA sense strand
gauccucagugaagugcau

SEQ ID NO: 544794 - RNA, 19 nt, Homo sapiens
  misc_RNA (1)...(19): siRNA sense strand
gagaaagauaucuguucaa

SEQ ID NO: 544795 - RNA, 19 nt, Homo sapiens
  misc_RNA (1)...(19): siRNA sense strand
gcccgaaaguccagaucga

SEQ ID NO: 544796 - RNA, 19 nt, Homo sapiens
  misc_RNA (1)...(19): siRNA sense strand
caaguuaacauccaaaaug

SEQ ID NO: 544797 - RNA, 19 nt, Homo sapiens
  misc_RNA (1)...(19): siRNA sense strand
cagagacacaccaauccua

SEQ ID NO: 544798 - RNA, 19 nt, Homo sapiens
  misc_RNA (1)...(19): siRNA sense strand
gauggaacuugguuaacac

SEQ ID NO: 544799 - RNA, 19 nt, Homo sapiens
  misc_RNA (1)...(19): siRNA sense strand
ucuggaagccuguagaaau

SEQ ID NO: 544800 - RNA, 19 nt, Homo sapiens
  misc_RNA (1)...(19): siRNA sense strand
gacaagagccauggaagag

SEQ ID NO: 544801 - RNA, 19 nt, Homo sapiens
  misc_RNA (1)...(19): siRNA sense strand
cagaaaugaaugaaggaaa

SEQ ID NO: 544802 - RNA, 19 nt, Homo sapiens
  misc_RNA (1)...(19): siRNA sense strand
uugaaggccuccuagacaa

SEQ ID NO: 544803 - RNA, 19 nt, Homo sapiens
  misc_RNA (1)...(19): siRNA sense strand
ccacgaagggucacacaag

SEQ ID NO: 544804 - RNA, 19 nt, Homo sapiens
  misc_RNA (1)...(19): siRNA sense strand
acacggauccucagugaag

SEQ ID NO: 544805 - RNA, 19 nt, Homo sapiens
  misc_RNA (1)...(19): siRNA sense strand
aauauucaccgaagaggaa

SEQ ID NO: 544806 - RNA, 19 nt, Homo sapiens
  misc_RNA (1)...(19): siRNA sense strand
gauaucuguucaagcucaa

SEQ ID NO: 544807 - RNA, 19 nt, Homo sapiens
  misc_RNA (1)...(19): siRNA sense strand
caacuggagaggacuuuua

SEQ ID NO: 544808 - RNA, 19 nt, Homo sapiens
  misc_RNA (1)...(19): siRNA sense strand
aagagaauguacauggaau

SEQ ID NO: 544809 - RNA, 19 nt, Homo sapiens
  misc_RNA (1)...(19): siRNA sense strand
gcgugaauaucccaaucug

SEQ ID NO: 544810 - RNA, 19 nt, Homo sapiens
  misc_RNA (1)...(19): siRNA sense strand
ucaaaggaaagacgacuca

SEQ ID NO: 544811 - RNA, 19 nt, Homo sapiens
  misc_RNA (1)...(19): siRNA sense strand
gggacagccucaucuagac

SEQ ID NO: 544812 - RNA, 19 nt, Homo sapiens
  misc_RNA (1)...(19): siRNA sense strand
ggacagccucaucuagaca

SEQ ID NO: 544813 - RNA, 19 nt, Homo sapiens
  misc_RNA (1)...(19): siRNA sense strand
cggaauauacguugugaag

SEQ ID NO: 544814 - RNA, 19 nt, Homo sapiens
  misc_RNA (1)...(19): siRNA sense strand
cgacucaaccuggaacuca

SEQ ID NO: 544815 - RNA, 19 nt, Homo sapiens
  misc_RNA (1)...(19): siRNA sense strand
auaaagaagacccucaaga

SEQ ID NO: 544816 - RNA, 19 nt, Homo sapiens
  misc_RNA (1)...(19): siRNA sense strand
aauauacguugugaaggaa

SEQ ID NO: 544817 - RNA, 19 nt, Homo sapiens
  misc_RNA (1)...(19): siRNA sense strand
gaccuguggugaggcgaaa

SEQ ID NO: 544818 - RNA, 19 nt, Homo sapiens
  misc_RNA (1)...(19): siRNA sense strand
ccgaaaguccagaucgaaa

SEQ ID NO: 544819 - RNA, 19 nt, Homo sapiens
  misc_RNA (1)...(19): siRNA sense strand
ucacuaagagaauguacau

SEQ ID NO: 544820 - RNA, 19 nt, Homo sapiens
  misc_RNA (1)...(19): siRNA sense strand
ggacuacuuuccagaauuu

SEQ ID NO: 544821 - RNA, 19 nt, Homo sapiens
  misc_RNA (1)...(19): siRNA sense strand
gaaaguccuugcugggaaa

SEQ ID NO: 544822 - RNA, 19 nt, Homo sapiens
  misc_RNA (1)...(19): siRNA sense strand
gcaaguggauccagugcuu

SEQ ID NO: 544823 - RNA, 19 nt, Homo sapiens
  misc_RNA (1)...(19): siRNA sense strand
gaagauugaggacuacuuu

SEQ ID NO: 544824 - RNA, 19 nt, Homo sapiens
  misc_RNA (1)...(19): siRNA sense strand
gagaugaguuucugaggau

SEQ ID NO: 544825 - RNA, 19 nt, Homo sapiens
  misc_RNA (1)...(19): siRNA sense strand
gaacgugccugacuuugac

SEQ ID NO: 544826 - RNA, 19 nt, Homo sapiens
  misc_RNA (1)...(19): siRNA sense strand
ugacuucccucccgaauuc

SEQ ID NO: 544827 - RNA, 19 nt, Homo sapiens
  misc_RNA (1)...(19): siRNA sense strand
gcaugcaccuucgucagua

SEQ ID NO: 544828 - RNA, 19 nt, Homo sapiens
  misc_RNA (1)...(19): siRNA sense strand
ugaggauccugcauguuaa

SEQ ID NO: 544829 - RNA, 19 nt, Homo sapiens
  misc_RNA (1)...(19): siRNA sense strand
gaggacuacuuuccagaau

SEQ ID NO: 544830 - RNA, 19 nt, Homo sapiens
  misc_RNA (1)...(19): siRNA sense strand
caaccaaagugcaggacau

SEQ ID NO: 544831 - RNA, 19 nt, Homo sapiens
  misc_RNA (1)...(19): siRNA sense strand
gaugaacgugccugacuuu

SEQ ID NO: 544832 - RNA, 19 nt, Homo sapiens
  misc_RNA (1)...(19): siRNA sense strand
caaagugcaggacaucaaa

SEQ ID NO: 544833 - RNA, 19 nt, Homo sapiens
  misc_RNA (1)...(19): siRNA sense strand
gguaaaagcaccauuguga

SEQ ID NO: 544834 - RNA, 19 nt, Homo sapiens
  misc_RNA (1)...(19): siRNA sense strand
augaggauccugcauguua

SEQ ID NO: 544835 - RNA, 19 nt, Homo sapiens
  misc_RNA (1)...(19): siRNA sense strand
ccugacuucuggaaucuuu

SEQ ID NO: 544836 - RNA, 19 nt, Homo sapiens
  misc_RNA (1)...(19): siRNA sense strand
ugaaagaggcgauugaaac

SEQ ID NO: 544837 - RNA, 19 nt, Homo sapiens
  misc_RNA (1)...(19): siRNA sense strand
gagaugggcgucacuacug

SEQ ID NO: 544838 - RNA, 19 nt, Homo sapiens
  misc_RNA (1)...(19): siRNA sense strand
gaauuugcucgcuacacua

SEQ ID NO: 544839 - RNA, 19 nt, Homo sapiens
  misc_RNA (1)...(19): siRNA sense strand
gcaccauugugaagcagau

SEQ ID NO: 544840 - RNA, 19 nt, Homo sapiens
  misc_RNA (1)...(19): siRNA sense strand
ccaaagugcaggacaucaa

SEQ ID NO: 544841 - RNA, 19 nt, Homo sapiens
  misc_RNA (1)...(19): siRNA sense strand
caacgaguaccagcugauu

SEQ ID NO: 544842 - RNA, 19 nt, Homo sapiens
  misc_RNA (1)...(19): siRNA sense strand
gaaagaggcgauugaaacc

SEQ ID NO: 544843 - RNA, 19 nt, Homo sapiens
  misc_RNA (1)...(19): siRNA sense strand
ugaacgugccugacuuuga

SEQ ID NO: 544844 - RNA, 19 nt, Homo sapiens
  misc_RNA (1)...(19): siRNA sense strand
agaauuugcucgcuacacu

SEQ ID NO: 544845 - RNA, 19 nt, Homo sapiens
  misc_RNA (1)...(19): siRNA sense strand
ugaugaacgugccugacuu

SEQ ID NO: 544846 - RNA, 19 nt, Homo sapiens
  misc_RNA (1)...(19): siRNA sense strand
cagcagcagcuacaacaug

SEQ ID NO: 544847 - RNA, 19 nt, Homo sapiens
  misc_RNA (1)...(19): siRNA sense strand
ugagaaggcaaccaaagug

SEQ ID NO: 544848 - RNA, 19 nt, Homo sapiens
  misc_RNA (1)...(19): siRNA sense strand
agaugaggauccugcaugu

SEQ ID NO: 544849 - RNA, 19 nt, Homo sapiens
  misc_RNA (1)...(19): siRNA sense strand
ggagaugggcgucacuacu

SEQ ID NO: 544850 - RNA, 19 nt, Homo sapiens
  misc_RNA (1)...(19): siRNA sense strand
aagaggcgauugaaaccau

SEQ ID NO: 544851 - RNA, 19 nt, Homo sapiens
  misc_RNA (1)...(19): siRNA sense strand
aggacuacuuuccagaauu

SEQ ID NO: 544852 - RNA, 19 nt, Homo sapiens
  misc_RNA (1)...(19): siRNA sense strand
aaagcaccauugugaagca

SEQ ID NO: 544853 - RNA, 19 nt, Homo sapiens
  misc_RNA (1)...(19): siRNA sense strand
ugaggacuacuuuccagaa

SEQ ID NO: 544854 - RNA, 19 nt, Homo sapiens
  misc_RNA (1)...(19): siRNA sense strand
gcuacgaacgcuccaacga

SEQ ID NO: 544855 - RNA, 19 nt, Homo sapiens
  misc_RNA (1)...(19): siRNA sense strand
cuacugcuacccucauuuc

SEQ ID NO: 544856 - RNA, 19 nt, Homo sapiens
  misc_RNA (1)...(19): siRNA sense strand
ugacugccaucaucuucgu

SEQ ID NO: 544857 - RNA, 19 nt, Homo sapiens
  misc_RNA (1)...(19): siRNA sense strand
ugacuucuggaaucuuuga

SEQ ID NO: 544858 - RNA, 19 nt, Homo sapiens
  misc_RNA (1)...(19): siRNA sense strand
uguccugacuucuggaauc

SEQ ID NO: 544859 - RNA, 19 nt, Homo sapiens
  misc_RNA (1)...(19): siRNA sense strand
acgaguaccagcugauuga

SEQ ID NO: 544860 - RNA, 19 nt, Homo sapiens
  misc_RNA (1)...(19): siRNA sense strand
agucaacuuccacauguuu

SEQ ID NO: 544861 - RNA, 19 nt, Homo sapiens
  misc_RNA (1)...(19): siRNA sense strand
gcgaugaacgccgcaagug

SEQ ID NO: 544862 - RNA, 19 nt, Homo sapiens
  misc_RNA (1)...(19): siRNA sense strand
uggacaagaucgacgugau

SEQ ID NO: 544863 - RNA, 19 nt, Homo sapiens
  misc_RNA (1)...(19): siRNA sense strand
gaugaguuucugaggauca

SEQ ID NO: 544864 - RNA, 19 nt, Homo sapiens
  misc_RNA (1)...(19): siRNA sense strand
gaggauccugcauguuaau

SEQ ID NO: 544865 - RNA, 19 nt, Homo sapiens
  misc_RNA (1)...(19): siRNA sense strand
gggaggacaaccagaccaa

SEQ ID NO: 544866 - RNA, 19 nt, Homo sapiens
  misc_RNA (1)...(19): siRNA sense strand
gaaucuuugagaccaaguu

SEQ ID NO: 544867 - RNA, 19 nt, Homo sapiens
  misc_RNA (1)...(19): siRNA sense strand
gauccagugcuucaacgau

SEQ ID NO: 544868 - RNA, 19 nt, Homo sapiens
  misc_RNA (1)...(19): siRNA sense strand
gccagcagcagcuacaaca

SEQ ID NO: 544869 - RNA, 19 nt, Homo sapiens
  misc_RNA (1)...(19): siRNA sense strand
ccaucucugugauccuguu

SEQ ID NO: 544870 - RNA, 19 nt, Homo sapiens
  misc_RNA (1)...(19): siRNA sense strand
cacuacugcuacccucauu

SEQ ID NO: 544871 - RNA, 19 nt, Homo sapiens
  misc_RNA (1)...(19): siRNA sense strand
ggacuacuuuccagaauuu

SEQ ID NO: 544872 - RNA, 19 nt, Homo sapiens
  misc_RNA (1)...(19): siRNA sense strand
gaaaguccuugcugggaaa

SEQ ID NO: 544873 - RNA, 19 nt, Homo sapiens
  misc_RNA (1)...(19): siRNA sense strand
gcaaguggauccagugcuu

SEQ ID NO: 544874 - RNA, 19 nt, Homo sapiens
  misc_RNA (1)...(19): siRNA sense strand
gaagauugaggacuacuuu

SEQ ID NO: 544875 - RNA, 19 nt, Homo sapiens
  misc_RNA (1)...(19): siRNA sense strand
gagaugaguuucugaggau

SEQ ID NO: 544876 - RNA, 19 nt, Homo sapiens
  misc_RNA (1)...(19): siRNA sense strand
gaacgugccugacuuugac

SEQ ID NO: 544877 - RNA, 19 nt, Homo sapiens
  misc_RNA (1)...(19): siRNA sense strand
ugacuucccucccgaauuc

SEQ ID NO: 544878 - RNA, 19 nt, Homo sapiens
  misc_RNA (1)...(19): siRNA sense strand
gcaugcaccuucgucagua

SEQ ID NO: 544879 - RNA, 19 nt, Homo sapiens
  misc_RNA (1)...(19): siRNA sense strand
ugaggauccugcauguuaa

SEQ ID NO: 544880 - RNA, 19 nt, Homo sapiens
  misc_RNA (1)...(19): siRNA sense strand
gaggacuacuuuccagaau

SEQ ID NO: 544881 - RNA, 19 nt, Homo sapiens
  misc_RNA (1)...(19): siRNA sense strand
caaccaaagugcaggacau

SEQ ID NO: 544882 - RNA, 19 nt, Homo sapiens
  misc_RNA (1)...(19): siRNA sense strand
gaugaacgugccugacuuu

SEQ ID NO: 544883 - RNA, 19 nt, Homo sapiens
  misc_RNA (1)...(19): siRNA sense strand
caaagugcaggacaucaaa

SEQ ID NO: 544884 - RNA, 19 nt, Homo sapiens
  misc_RNA (1)...(19): siRNA sense strand
gguaaaagcaccauuguga

SEQ ID NO: 544885 - RNA, 19 nt, Homo sapiens
  misc_RNA (1)...(19): siRNA sense strand
augaggauccugcauguua

SEQ ID NO: 544886 - RNA, 19 nt, Homo sapiens
  misc_RNA (1)...(19): siRNA sense strand
ccugacuucuggaaucuuu

SEQ ID NO: 544887 - RNA, 19 nt, Homo sapiens
  misc_RNA (1)...(19): siRNA sense strand
ugaaagaggcgauugaaac

SEQ ID NO: 544888 - RNA, 19 nt, Homo sapiens
  misc_RNA (1)...(19): siRNA sense strand
gacuacauccugaguguga

SEQ ID NO: 544889 - RNA, 19 nt, Homo sapiens
  misc_RNA (1)...(19): siRNA sense strand
gagaugggcgucacuacug

SEQ ID NO: 544890 - RNA, 19 nt, Homo sapiens
  misc_RNA (1)...(19): siRNA sense strand
gaauuugcucgcuacacua

SEQ ID NO: 544891 - RNA, 19 nt, Homo sapiens
  misc_RNA (1)...(19): siRNA sense strand
gcaccauugugaagcagau

SEQ ID NO: 544892 - RNA, 19 nt, Homo sapiens
  misc_RNA (1)...(19): siRNA sense strand
ccaaagugcaggacaucaa

SEQ ID NO: 544893 - RNA, 19 nt, Homo sapiens
  misc_RNA (1)...(19): siRNA sense strand
caacgaguaccagcugauu

SEQ ID NO: 544894 - RNA, 19 nt, Homo sapiens
  misc_RNA (1)...(19): siRNA sense strand
gaaagaggcgauugaaacc

SEQ ID NO: 544895 - RNA, 19 nt, Homo sapiens
  misc_RNA (1)...(19): siRNA sense strand
ugaacgugccugacuuuga

SEQ ID NO: 544896 - RNA, 19 nt, Homo sapiens
  misc_RNA (1)...(19): siRNA sense strand
agaauuugcucgcuacacu

SEQ ID NO: 544897 - RNA, 19 nt, Homo sapiens
  misc_RNA (1)...(19): siRNA sense strand
ugaugaacgugccugacuu

SEQ ID NO: 544898 - RNA, 19 nt, Homo sapiens
  misc_RNA (1)...(19): siRNA sense strand
cagcagcagcuacaacaug

SEQ ID NO: 544899 - RNA, 19 nt, Homo sapiens
  misc_RNA (1)...(19): siRNA sense strand
ugagaaggcaaccaaagug

SEQ ID NO: 544900 - RNA, 19 nt, Homo sapiens
  misc_RNA (1)...(19): siRNA sense strand
agaugaggauccugcaugu

SEQ ID NO: 544901 - RNA, 19 nt, Homo sapiens
  misc_RNA (1)...(19): siRNA sense strand
ggagaugggcgucacuacu

SEQ ID NO: 544902 - RNA, 19 nt, Homo sapiens
  misc_RNA (1)...(19): siRNA sense strand
aagaggcgauugaaaccau

SEQ ID NO: 544903 - RNA, 19 nt, Homo sapiens
  misc_RNA (1)...(19): siRNA sense strand
aggacuacuuuccagaauu

SEQ ID NO: 544904 - RNA, 19 nt, Homo sapiens
  misc_RNA (1)...(19): siRNA sense strand
aaagcaccauugugaagca

SEQ ID NO: 544905 - RNA, 19 nt, Homo sapiens
  misc_RNA (1)...(19): siRNA sense strand
uggacuacauccugagugu

SEQ ID NO: 544906 - RNA, 19 nt, Homo sapiens
  misc_RNA (1)...(19): siRNA sense strand
guucagaguggacuacauc

SEQ ID NO: 544907 - RNA, 19 nt, Homo sapiens
  misc_RNA (1)...(19): siRNA sense strand
ugaggacuacuuuccagaa

SEQ ID NO: 544908 - RNA, 19 nt, Homo sapiens
  misc_RNA (1)...(19): siRNA sense strand
gcuacgaacgcuccaacga

SEQ ID NO: 544909 - RNA, 19 nt, Homo sapiens
  misc_RNA (1)...(19): siRNA sense strand
cuacugcuacccucauuuc

SEQ ID NO: 544910 - RNA, 19 nt, Homo sapiens
  misc_RNA (1)...(19): siRNA sense strand
ugacugccaucaucuucgu

SEQ ID NO: 544911 - RNA, 19 nt, Homo sapiens
  misc_RNA (1)...(19): siRNA sense strand
ugacuucuggaaucuuuga

SEQ ID NO: 544912 - RNA, 19 nt, Homo sapiens
  misc_RNA (1)...(19): siRNA sense strand
uguccugacuucuggaauc

SEQ ID NO: 544913 - RNA, 19 nt, Homo sapiens
  misc_RNA (1)...(19): siRNA sense strand
acgaguaccagcugauuga

SEQ ID NO: 544914 - RNA, 19 nt, Homo sapiens
  misc_RNA (1)...(19): siRNA sense strand
agucaacuuccacauguuu

SEQ ID NO: 544915 - RNA, 19 nt, Homo sapiens
  misc_RNA (1)...(19): siRNA sense strand
gcgaugaacgccgcaagug

SEQ ID NO: 544916 - RNA, 19 nt, Homo sapiens
  misc_RNA (1)...(19): siRNA sense strand
gaggauccugcauguuaau

SEQ ID NO: 544917 - RNA, 19 nt, Homo sapiens
  misc_RNA (1)...(19): siRNA sense strand
gaugaguuucugaggauca

SEQ ID NO: 544918 - RNA, 19 nt, Homo sapiens
  misc_RNA (1)...(19): siRNA sense strand
gggaggacaaccagaccaa

SEQ ID NO: 544919 - RNA, 19 nt, Homo sapiens
  misc_RNA (1)...(19): siRNA sense strand
gaaucuuugagaccaaguu

SEQ ID NO: 544920 - RNA, 19 nt, Homo sapiens
  misc_RNA (1)...(19): siRNA sense strand
uggacaagaucgacgugau

SEQ ID NO: 544921 - RNA, 19 nt, Homo sapiens
  misc_RNA (1)...(19): siRNA sense strand
gauccagugcuucaacgau

SEQ ID NO: 544922 - RNA, 19 nt, Homo sapiens
  misc_RNA (1)...(19): siRNA sense strand
gccagcagcagcuacaaca

SEQ ID NO: 544923 - RNA, 19 nt, Homo sapiens
  misc_RNA (1)...(19): siRNA sense strand
ccaucucugugauccuguu

SEQ ID NO: 544924 - RNA, 19 nt, Homo sapiens
  misc_RNA (1)...(19): siRNA sense strand
cacuacugcuacccucauu

SEQ ID NO: 544925 - RNA, 19 nt, Homo sapiens
  misc_RNA (1)...(19): siRNA sense strand
ggacuacuuuccagaauuu

SEQ ID NO: 544926 - RNA, 19 nt, Homo sapiens
  misc_RNA (1)...(19): siRNA sense strand
gaaaguccuugcugggaaa

SEQ ID NO: 544927 - RNA, 19 nt, Homo sapiens
  misc_RNA (1)...(19): siRNA sense strand
gcaaguggauccagugcuu

SEQ ID NO: 544928 - RNA, 19 nt, Homo sapiens
  misc_RNA (1)...(19): siRNA sense strand
gaagauugaggacuacuuu

SEQ ID NO: 544929 - RNA, 19 nt, Homo sapiens
  misc_RNA (1)...(19): siRNA sense strand
gagaugaguuucugaggau

SEQ ID NO: 544930 - RNA, 19 nt, Homo sapiens
  misc_RNA (1)...(19): siRNA sense strand
gaacgugccugacuuugac

SEQ ID NO: 544931 - RNA, 19 nt, Homo sapiens
  misc_RNA (1)...(19): siRNA sense strand
ugacuucccucccgaauuc

SEQ ID NO: 544932 - RNA, 19 nt, Homo sapiens
  misc_RNA (1)...(19): siRNA sense strand
gcaugcaccuucgucagua

SEQ ID NO: 544933 - RNA, 19 nt, Homo sapiens
  misc_RNA (1)...(19): siRNA sense strand
ugaggauccugcauguuaa

SEQ ID NO: 544934 - RNA, 19 nt, Homo sapiens
  misc_RNA (1)...(19): siRNA sense strand
gaggacuacuuuccagaau

SEQ ID NO: 544935 - RNA, 19 nt, Homo sapiens
  misc_RNA (1)...(19): siRNA sense strand
caaccaaagugcaggacau

SEQ ID NO: 544936 - RNA, 19 nt, Homo sapiens
  misc_RNA (1)...(19): siRNA sense strand
gaugaacgugccugacuuu

SEQ ID NO: 544937 - RNA, 19 nt, Homo sapiens
  misc_RNA (1)...(19): siRNA sense strand
caaagugcaggacaucaaa

SEQ ID NO: 544938 - RNA, 19 nt, Homo sapiens
  misc_RNA (1)...(19): siRNA sense strand
gguaaaagcaccauuguga

SEQ ID NO: 544939 - RNA, 19 nt, Homo sapiens
  misc_RNA (1)...(19): siRNA sense strand
augaggauccugcauguua

SEQ ID NO: 544940 - RNA, 19 nt, Homo sapiens
  misc_RNA (1)...(19): siRNA sense strand
ccugacuucuggaaucuuu

SEQ ID NO: 544941 - RNA, 19 nt, Homo sapiens
  misc_RNA (1)...(19): siRNA sense strand
ugaaagaggcgauugaaac

SEQ ID NO: 544942 - RNA, 19 nt, Homo sapiens
  misc_RNA (1)...(19): siRNA sense strand
gagaugggcgucacuacug

SEQ ID NO: 544943 - RNA, 19 nt, Homo sapiens
  misc_RNA (1)...(19): siRNA sense strand
gaauuugcucgcuacacua

SEQ ID NO: 544944 - RNA, 19 nt, Homo sapiens
  misc_RNA (1)...(19): siRNA sense strand
gcaccauugugaagcagau

SEQ ID NO: 544945 - RNA, 19 nt, Homo sapiens
  misc_RNA (1)...(19): siRNA sense strand
ccaaagugcaggacaucaa

SEQ ID NO: 544946 - RNA, 19 nt, Homo sapiens
  misc_RNA (1)...(19): siRNA sense strand
caacgaguaccagcugauu

SEQ ID NO: 544947 - RNA, 19 nt, Homo sapiens
  misc_RNA (1)...(19): siRNA sense strand
gaaagaggcgauugaaacc

SEQ ID NO: 544948 - RNA, 19 nt, Homo sapiens
  misc_RNA (1)...(19): siRNA sense strand
ugaacgugccugacuuuga

SEQ ID NO: 544949 - RNA, 19 nt, Homo sapiens
  misc_RNA (1)...(19): siRNA sense strand
agaauuugcucgcuacacu

SEQ ID NO: 544950 - RNA, 19 nt, Homo sapiens
  misc_RNA (1)...(19): siRNA sense strand
ugaugaacgugccugacuu

SEQ ID NO: 544951 - RNA, 19 nt, Homo sapiens
  misc_RNA (1)...(19): siRNA sense strand
cagcagcagcuacaacaug

SEQ ID NO: 544952 - RNA, 19 nt, Homo sapiens
  misc_RNA (1)...(19): siRNA sense strand
ugagaaggcaaccaaagug

SEQ ID NO: 544953 - RNA, 19 nt, Homo sapiens
  misc_RNA (1)...(19): siRNA sense strand
agaugaggauccugcaugu

SEQ ID NO: 544954 - RNA, 19 nt, Homo sapiens
  misc_RNA (1)...(19): siRNA sense strand
ggagaugggcgucacuacu

SEQ ID NO: 544955 - RNA, 19 nt, Homo sapiens
  misc_RNA (1)...(19): siRNA sense strand
aagaggcgauugaaaccau

SEQ ID NO: 544956 - RNA, 19 nt, Homo sapiens
  misc_RNA (1)...(19): siRNA sense strand
aggacuacuuuccagaauu

SEQ ID NO: 544957 - RNA, 19 nt, Homo sapiens
  misc_RNA (1)...(19): siRNA sense strand
gugagaaggcaaccaaagu

SEQ ID NO: 544958 - RNA, 19 nt, Homo sapiens
  misc_RNA (1)...(19): siRNA sense strand
aaagcaccauugugaagca

SEQ ID NO: 544959 - RNA, 19 nt, Homo sapiens
  misc_RNA (1)...(19): siRNA sense strand
ugaggacuacuuuccagaa

SEQ ID NO: 544960 - RNA, 19 nt, Homo sapiens
  misc_RNA (1)...(19): siRNA sense strand
gcuacgaacgcuccaacga

SEQ ID NO: 544961 - RNA, 19 nt, Homo sapiens
  misc_RNA (1)...(19): siRNA sense strand
cuacugcuacccucauuuc

SEQ ID NO: 544962 - RNA, 19 nt, Homo sapiens
  misc_RNA (1)...(19): siRNA sense strand
ugacugccaucaucuucgu

SEQ ID NO: 544963 - RNA, 19 nt, Homo sapiens
  misc_RNA (1)...(19): siRNA sense strand
ugacuucuggaaucuuuga

SEQ ID NO: 544964 - RNA, 19 nt, Homo sapiens
  misc_RNA (1)...(19): siRNA sense strand
uguccugacuucuggaauc

SEQ ID NO: 544965 - RNA, 19 nt, Homo sapiens
  misc_RNA (1)...(19): siRNA sense strand
acgaguaccagcugauuga

SEQ ID NO: 544966 - RNA, 19 nt, Homo sapiens
  misc_RNA (1)...(19): siRNA sense strand
agucaacuuccacauguuu

SEQ ID NO: 544967 - RNA, 19 nt, Homo sapiens
  misc_RNA (1)...(19): siRNA sense strand
gcgaugaacgccgcaagug

SEQ ID NO: 544968 - RNA, 19 nt, Homo sapiens
  misc_RNA (1)...(19): siRNA sense strand
uggacaagaucgacgugau

SEQ ID NO: 544969 - RNA, 19 nt, Homo sapiens
  misc_RNA (1)...(19): siRNA sense strand
gaugaguuucugaggauca

SEQ ID NO: 544970 - RNA, 19 nt, Homo sapiens
  misc_RNA (1)...(19): siRNA sense strand
gggaggacaaccagaccaa

SEQ ID NO: 544971 - RNA, 19 nt, Homo sapiens
  misc_RNA (1)...(19): siRNA sense strand
gaggauccugcauguuaau

SEQ ID NO: 544972 - RNA, 19 nt, Homo sapiens
  misc_RNA (1)...(19): siRNA sense strand
gaaucuuugagaccaaguu

SEQ ID NO: 544973 - RNA, 19 nt, Homo sapiens
  misc_RNA (1)...(19): siRNA sense strand
gauccagugcuucaacgau

SEQ ID NO: 544974 - RNA, 19 nt, Homo sapiens
  misc_RNA (1)...(19): siRNA sense strand
gccagcagcagcuacaaca

SEQ ID NO: 544975 - RNA, 19 nt, Homo sapiens
  misc_RNA (1)...(19): siRNA sense strand
ccaucucugugauccuguu

SEQ ID NO: 544976 - RNA, 19 nt, Homo sapiens
  misc_RNA (1)...(19): siRNA sense strand
cacuacugcuacccucauu

SEQ ID NO: 544977 - RNA, 19 nt, Homo sapiens
  misc_RNA (1)...(19): siRNA sense strand
ggacuacuuuccagaauuu

SEQ ID NO: 544978 - RNA, 19 nt, Homo sapiens
  misc_RNA (1)...(19): siRNA sense strand
gaaaguccuugcugggaaa

SEQ ID NO: 544979 - RNA, 19 nt, Homo sapiens
  misc_RNA (1)...(19): siRNA sense strand
gcaaguggauccagugcuu

SEQ ID NO: 544980 - RNA, 19 nt, Homo sapiens
  misc_RNA (1)...(19): siRNA sense strand
gaagauugaggacuacuuu

SEQ ID NO: 544981 - RNA, 19 nt, Homo sapiens
  misc_RNA (1)...(19): siRNA sense strand
gagaugaguuucugaggau

SEQ ID NO: 544982 - RNA, 19 nt, Homo sapiens
  misc_RNA (1)...(19): siRNA sense strand
gaacgugccugacuuugac

SEQ ID NO: 544983 - RNA, 19 nt, Homo sapiens
  misc_RNA (1)...(19): siRNA sense strand
ugacuucccucccgaauuc

SEQ ID NO: 544984 - RNA, 19 nt, Homo sapiens
  misc_RNA (1)...(19): siRNA sense strand
gcaugcaccuucgucagua

SEQ ID NO: 544985 - RNA, 19 nt, Homo sapiens
  misc_RNA (1)...(19): siRNA sense strand
ugaggauccugcauguuaa

SEQ ID NO: 544986 - RNA, 19 nt, Homo sapiens
  misc_RNA (1)...(19): siRNA sense strand
gaggacuacuuuccagaau

SEQ ID NO: 544987 - RNA, 19 nt, Homo sapiens
  misc_RNA (1)...(19): siRNA sense strand
caaccaaagugcaggacau

SEQ ID NO: 544988 - RNA, 19 nt, Homo sapiens
  misc_RNA (1)...(19): siRNA sense strand
gaugaacgugccugacuuu

SEQ ID NO: 544989 - RNA, 19 nt, Homo sapiens
  misc_RNA (1)...(19): siRNA sense strand
caaagugcaggacaucaaa

SEQ ID NO: 544990 - RNA, 19 nt, Homo sapiens
  misc_RNA (1)...(19): siRNA sense strand
gguaaaagcaccauuguga

SEQ ID NO: 544991 - RNA, 19 nt, Homo sapiens
  misc_RNA (1)...(19): siRNA sense strand
augaggauccugcauguua

SEQ ID NO: 544992 - RNA, 19 nt, Homo sapiens
  misc_RNA (1)...(19): siRNA sense strand
ccugacuucuggaaucuuu

SEQ ID NO: 544993 - RNA, 19 nt, Homo sapiens
  misc_RNA (1)...(19): siRNA sense strand
ugaaagaggcgauugaaac

SEQ ID NO: 544994 - RNA, 19 nt, Homo sapiens
  misc_RNA (1)...(19): siRNA sense strand
gagaugggcgucacuacug

SEQ ID NO: 544995 - RNA, 19 nt, Homo sapiens
  misc_RNA (1)...(19): siRNA sense strand
gaauuugcucgcuacacua

SEQ ID NO: 544996 - RNA, 19 nt, Homo sapiens
  misc_RNA (1)...(19): siRNA sense strand
gcaccauugugaagcagau

SEQ ID NO: 544997 - RNA, 19 nt, Homo sapiens
  misc_RNA (1)...(19): siRNA sense strand
ccaaagugcaggacaucaa

SEQ ID NO: 544998 - RNA, 19 nt, Homo sapiens
  misc_RNA (1)...(19): siRNA sense strand
caacgaguaccagcugauu

SEQ ID NO: 544999 - RNA, 19 nt, Homo sapiens
  misc_RNA (1)...(19): siRNA sense strand
gaaagaggcgauugaaacc

SEQ ID NO: 545000 - RNA, 19 nt, Homo sapiens
  misc_RNA (1)...(19): siRNA sense strand
ugaacgugccugacuuuga

SEQ ID NO: 545001 - RNA, 19 nt, Homo sapiens
  misc_RNA (1)...(19): siRNA sense strand
agaauuugcucgcuacacu

SEQ ID NO: 545002 - RNA, 19 nt, Homo sapiens
  misc_RNA (1)...(19): siRNA sense strand
ugaugaacgugccugacuu

SEQ ID NO: 545003 - RNA, 19 nt, Homo sapiens
  misc_RNA (1)...(19): siRNA sense strand
cagcagcagcuacaacaug

SEQ ID NO: 545004 - RNA, 19 nt, Homo sapiens
  misc_RNA (1)...(19): siRNA sense strand
ugagaaggcaaccaaagug

SEQ ID NO: 545005 - RNA, 19 nt, Homo sapiens
  misc_RNA (1)...(19): siRNA sense strand
agaugaggauccugcaugu

SEQ ID NO: 545006 - RNA, 19 nt, Homo sapiens
  misc_RNA (1)...(19): siRNA sense strand
ggagaugggcgucacuacu

SEQ ID NO: 545007 - RNA, 19 nt, Homo sapiens
  misc_RNA (1)...(19): siRNA sense strand
aagaggcgauugaaaccau

SEQ ID NO: 545008 - RNA, 19 nt, Homo sapiens
  misc_RNA (1)...(19): siRNA sense strand
aggacuacuuuccagaauu

SEQ ID NO: 545009 - RNA, 19 nt, Homo sapiens
  misc_RNA (1)...(19): siRNA sense strand
aaagcaccauugugaagca

SEQ ID NO: 545010 - RNA, 19 nt, Homo sapiens
  misc_RNA (1)...(19): siRNA sense strand
ugaggacuacuuuccagaa

SEQ ID NO: 545011 - RNA, 19 nt, Homo sapiens
  misc_RNA (1)...(19): siRNA sense strand
gcuacgaacgcuccaacga

SEQ ID NO: 545012 - RNA, 19 nt, Homo sapiens
  misc_RNA (1)...(19): siRNA sense strand
cuacugcuacccucauuuc

SEQ ID NO: 545013 - RNA, 19 nt, Homo sapiens
  misc_RNA (1)...(19): siRNA sense strand
ugacugccaucaucuucgu

SEQ ID NO: 545014 - RNA, 19 nt, Homo sapiens
  misc_RNA (1)...(19): siRNA sense strand
ugacuucuggaaucuuuga

SEQ ID NO: 545015 - RNA, 19 nt, Homo sapiens
  misc_RNA (1)...(19): siRNA sense strand
uguccugacuucuggaauc

SEQ ID NO: 545016 - RNA, 19 nt, Homo sapiens
  misc_RNA (1)...(19): siRNA sense strand
acgaguaccagcugauuga

SEQ ID NO: 545017 - RNA, 19 nt, Homo sapiens
  misc_RNA (1)...(19): siRNA sense strand
agucaacuuccacauguuu

SEQ ID NO: 545018 - RNA, 19 nt, Homo sapiens
  misc_RNA (1)...(19): siRNA sense strand
gcgaugaacgccgcaagug

SEQ ID NO: 545019 - RNA, 19 nt, Homo sapiens
  misc_RNA (1)...(19): siRNA sense strand
uggacaagaucgacgugau

SEQ ID NO: 545020 - RNA, 19 nt, Homo sapiens
  misc_RNA (1)...(19): siRNA sense strand
gaugaguuucugaggauca

SEQ ID NO: 545021 - RNA, 19 nt, Homo sapiens
  misc_RNA (1)...(19): siRNA sense strand
gaggauccugcauguuaau

SEQ ID NO: 545022 - RNA, 19 nt, Homo sapiens
  misc_RNA (1)...(19): siRNA sense strand
gggaggacaaccagaccaa

SEQ ID NO: 545023 - RNA, 19 nt, Homo sapiens
  misc_RNA (1)...(19): siRNA sense strand
gaaucuuugagaccaaguu

SEQ ID NO: 545024 - RNA, 19 nt, Homo sapiens
  misc_RNA (1)...(19): siRNA sense strand
gauccagugcuucaacgau

SEQ ID NO: 545025 - RNA, 19 nt, Homo sapiens
  misc_RNA (1)...(19): siRNA sense strand
gccagcagcagcuacaaca

SEQ ID NO: 545026 - RNA, 19 nt, Homo sapiens
  misc_RNA (1)...(19): siRNA sense strand
ccaucucugugauccuguu

SEQ ID NO: 545027 - RNA, 19 nt, Homo sapiens
  misc_RNA (1)...(19): siRNA sense strand
cacuacugcuacccucauu

SEQ ID NO: 545028 - RNA, 19 nt, Homo sapiens
  misc_RNA (1)...(19): siRNA sense strand
ggacuacuuuccagaauuu

SEQ ID NO: 545029 - RNA, 19 nt, Homo sapiens
  misc_RNA (1)...(19): siRNA sense strand
gaaaguccuugcugggaaa

SEQ ID NO: 545030 - RNA, 19 nt, Homo sapiens
  misc_RNA (1)...(19): siRNA sense strand
gcaaguggauccagugcuu

SEQ ID NO: 545031 - RNA, 19 nt, Homo sapiens
  misc_RNA (1)...(19): siRNA sense strand
gaagauugaggacuacuuu

SEQ ID NO: 545032 - RNA, 19 nt, Homo sapiens
  misc_RNA (1)...(19): siRNA sense strand
gagaugaguuucugaggau

SEQ ID NO: 545033 - RNA, 19 nt, Homo sapiens
  misc_RNA (1)...(19): siRNA sense strand
gaacgugccugacuuugac

SEQ ID NO: 545034 - RNA, 19 nt, Homo sapiens
  misc_RNA (1)...(19): siRNA sense strand
ugacuucccucccgaauuc

SEQ ID NO: 545035 - RNA, 19 nt, Homo sapiens
  misc_RNA (1)...(19): siRNA sense strand
gcaugcaccuucgucagua

SEQ ID NO: 545036 - RNA, 19 nt, Homo sapiens
  misc_RNA (1)...(19): siRNA sense strand
ugaggauccugcauguuaa

SEQ ID NO: 545037 - RNA, 19 nt, Homo sapiens
  misc_RNA (1)...(19): siRNA sense strand
gaggacuacuuuccagaau

SEQ ID NO: 545038 - RNA, 19 nt, Homo sapiens
  misc_RNA (1)...(19): siRNA sense strand
caaccaaagugcaggacau

SEQ ID NO: 545039 - RNA, 19 nt, Homo sapiens
  misc_RNA (1)...(19): siRNA sense strand
gaugaacgugccugacuuu

SEQ ID NO: 545040 - RNA, 19 nt, Homo sapiens
  misc_RNA (1)...(19): siRNA sense strand
caaagugcaggacaucaaa

SEQ ID NO: 545041 - RNA, 19 nt, Homo sapiens
  misc_RNA (1)...(19): siRNA sense strand
gguaaaagcaccauuguga

SEQ ID NO: 545042 - RNA, 19 nt, Homo sapiens
  misc_RNA (1)...(19): siRNA sense strand
augaggauccugcauguua

SEQ ID NO: 545043 - RNA, 19 nt, Homo sapiens
  misc_RNA (1)...(19): siRNA sense strand
ccugacuucuggaaucuuu

SEQ ID NO: 545044 - RNA, 19 nt, Homo sapiens
  misc_RNA (1)...(19): siRNA sense strand
ugaaagaggcgauugaaac

SEQ ID NO: 545045 - RNA, 19 nt, Homo sapiens
  misc_RNA (1)...(19): siRNA sense strand
gacuacauccugaguguga

SEQ ID NO: 545046 - RNA, 19 nt, Homo sapiens
  misc_RNA (1)...(19): siRNA sense strand
gagaugggcgucacuacug

SEQ ID NO: 545047 - RNA, 19 nt, Homo sapiens
  misc_RNA (1)...(19): siRNA sense strand
gaauuugcucgcuacacua

SEQ ID NO: 545048 - RNA, 19 nt, Homo sapiens
  misc_RNA (1)...(19): siRNA sense strand
gcaccauugugaagcagau

SEQ ID NO: 545049 - RNA, 19 nt, Homo sapiens
  misc_RNA (1)...(19): siRNA sense strand
ccaaagugcaggacaucaa

SEQ ID NO: 545050 - RNA, 19 nt, Homo sapiens
  misc_RNA (1)...(19): siRNA sense strand
caacgaguaccagcugauu

SEQ ID NO: 545051 - RNA, 19 nt, Homo sapiens
  misc_RNA (1)...(19): siRNA sense strand
gaaagaggcgauugaaacc

SEQ ID NO: 545052 - RNA, 19 nt, Homo sapiens
  misc_RNA (1)...(19): siRNA sense strand
ugaacgugccugacuuuga

SEQ ID NO: 545053 - RNA, 19 nt, Homo sapiens
  misc_RNA (1)...(19): siRNA sense strand
agaauuugcucgcuacacu

SEQ ID NO: 545054 - RNA, 19 nt, Homo sapiens
  misc_RNA (1)...(19): siRNA sense strand
ugaugaacgugccugacuu

SEQ ID NO: 545055 - RNA, 19 nt, Homo sapiens
  misc_RNA (1)...(19): siRNA sense strand
cagcagcagcuacaacaug

SEQ ID NO: 545056 - RNA, 19 nt, Homo sapiens
  misc_RNA (1)...(19): siRNA sense strand
ugagaaggcaaccaaagug

SEQ ID NO: 545057 - RNA, 19 nt, Homo sapiens
  misc_RNA (1)...(19): siRNA sense strand
agaugaggauccugcaugu

SEQ ID NO: 545058 - RNA, 19 nt, Homo sapiens
  misc_RNA (1)...(19): siRNA sense strand
ggagaugggcgucacuacu

SEQ ID NO: 545059 - RNA, 19 nt, Homo sapiens
  misc_RNA (1)...(19): siRNA sense strand
aagaggcgauugaaaccau

SEQ ID NO: 545060 - RNA, 19 nt, Homo sapiens
  misc_RNA (1)...(19): siRNA sense strand
aggacuacuuuccagaauu

SEQ ID NO: 545061 - RNA, 19 nt, Homo sapiens
  misc_RNA (1)...(19): siRNA sense strand
aaagcaccauugugaagca

SEQ ID NO: 545062 - RNA, 19 nt, Homo sapiens
  misc_RNA (1)...(19): siRNA sense strand
uggacuacauccugagugu

SEQ ID NO: 545063 - RNA, 19 nt, Homo sapiens
  misc_RNA (1)...(19): siRNA sense strand
guucagaguggacuacauc

SEQ ID NO: 545064 - RNA, 19 nt, Homo sapiens
  misc_RNA (1)...(19): siRNA sense strand
ugaggacuacuuuccagaa

SEQ ID NO: 545065 - RNA, 19 nt, Homo sapiens
  misc_RNA (1)...(19): siRNA sense strand
gcuacgaacgcuccaacga

SEQ ID NO: 545066 - RNA, 19 nt, Homo sapiens
  misc_RNA (1)...(19): siRNA sense strand
cuacugcuacccucauuuc

SEQ ID NO: 545067 - RNA, 19 nt, Homo sapiens
  misc_RNA (1)...(19): siRNA sense strand
ugacugccaucaucuucgu

SEQ ID NO: 545068 - RNA, 19 nt, Homo sapiens
  misc_RNA (1)...(19): siRNA sense strand
ugacuucuggaaucuuuga

SEQ ID NO: 545069 - RNA, 19 nt, Homo sapiens
  misc_RNA (1)...(19): siRNA sense strand
uguccugacuucuggaauc

SEQ ID NO: 545070 - RNA, 19 nt, Homo sapiens
  misc_RNA (1)...(19): siRNA sense strand
acgaguaccagcugauuga

SEQ ID NO: 545071 - RNA, 19 nt, Homo sapiens
  misc_RNA (1)...(19): siRNA sense strand
agucaacuuccacauguuu

SEQ ID NO: 545072 - RNA, 19 nt, Homo sapiens
  misc_RNA (1)...(19): siRNA sense strand
gcgaugaacgccgcaagug

SEQ ID NO: 545073 - RNA, 19 nt, Homo sapiens
  misc_RNA (1)...(19): siRNA sense strand
gaggauccugcauguuaau

SEQ ID NO: 545074 - RNA, 19 nt, Homo sapiens
  misc_RNA (1)...(19): siRNA sense strand
gaugaguuucugaggauca

SEQ ID NO: 545075 - RNA, 19 nt, Homo sapiens
  misc_RNA (1)...(19): siRNA sense strand
gggaggacaaccagaccaa

SEQ ID NO: 545076 - RNA, 19 nt, Homo sapiens
  misc_RNA (1)...(19): siRNA sense strand
gaaucuuugagaccaaguu

SEQ ID NO: 545077 - RNA, 19 nt, Homo sapiens
  misc_RNA (1)...(19): siRNA sense strand
uggacaagaucgacgugau

SEQ ID NO: 545078 - RNA, 19 nt, Homo sapiens
  misc_RNA (1)...(19): siRNA sense strand
gauccagugcuucaacgau

SEQ ID NO: 545079 - RNA, 19 nt, Homo sapiens
  misc_RNA (1)...(19): siRNA sense strand
gccagcagcagcuacaaca

SEQ ID NO: 545080 - RNA, 19 nt, Homo sapiens
  misc_RNA (1)...(19): siRNA sense strand
ccaucucugugauccuguu

SEQ ID NO: 545081 - RNA, 19 nt, Homo sapiens
  misc_RNA (1)...(19): siRNA sense strand
cacuacugcuacccucauu

SEQ ID NO: 545082 - RNA, 19 nt, Homo sapiens
  misc_RNA (1)...(19): siRNA sense strand
ggacuacuuuccagaauuu

SEQ ID NO: 545083 - RNA, 19 nt, Homo sapiens
  misc_RNA (1)...(19): siRNA sense strand
gaaaguccuugcugggaaa

SEQ ID NO: 545084 - RNA, 19 nt, Homo sapiens
  misc_RNA (1)...(19): siRNA sense strand
gcaaguggauccagugcuu

SEQ ID NO: 545085 - RNA, 19 nt, Homo sapiens
  misc_RNA (1)...(19): siRNA sense strand
gaagauugaggacuacuuu

SEQ ID NO: 545086 - RNA, 19 nt, Homo sapiens
  misc_RNA (1)...(19): siRNA sense strand
gagaugaguuucugaggau

SEQ ID NO: 545087 - RNA, 19 nt, Homo sapiens
  misc_RNA (1)...(19): siRNA sense strand
gaacgugccugacuuugac

SEQ ID NO: 545088 - RNA, 19 nt, Homo sapiens
  misc_RNA (1)...(19): siRNA sense strand
ugacuucccucccgaauuc

SEQ ID NO: 545089 - RNA, 19 nt, Homo sapiens
  misc_RNA (1)...(19): siRNA sense strand
gcaugcaccuucgucagua

SEQ ID NO: 545090 - RNA, 19 nt, Homo sapiens
  misc_RNA (1)...(19): siRNA sense strand
ugaggauccugcauguuaa

SEQ ID NO: 545091 - RNA, 19 nt, Homo sapiens
  misc_RNA (1)...(19): siRNA sense strand
gaggacuacuuuccagaau

SEQ ID NO: 545092 - RNA, 19 nt, Homo sapiens
  misc_RNA (1)...(19): siRNA sense strand
caaccaaagugcaggacau

SEQ ID NO: 545093 - RNA, 19 nt, Homo sapiens
  misc_RNA (1)...(19): siRNA sense strand
gaugaacgugccugacuuu

SEQ ID NO: 545094 - RNA, 19 nt, Homo sapiens
  misc_RNA (1)...(19): siRNA sense strand
caaagugcaggacaucaaa

SEQ ID NO: 545095 - RNA, 19 nt, Homo sapiens
  misc_RNA (1)...(19): siRNA sense strand
gguaaaagcaccauuguga

SEQ ID NO: 545096 - RNA, 19 nt, Homo sapiens
  misc_RNA (1)...(19): siRNA sense strand
augaggauccugcauguua

SEQ ID NO: 545097 - RNA, 19 nt, Homo sapiens
  misc_RNA (1)...(19): siRNA sense strand
ccugacuucuggaaucuuu

SEQ ID NO: 545098 - RNA, 19 nt, Homo sapiens
  misc_RNA (1)...(19): siRNA sense strand
ugaaagaggcgauugaaac

SEQ ID NO: 545099 - RNA, 19 nt, Homo sapiens
  misc_RNA (1)...(19): siRNA sense strand
gagaugggcgucacuacug

SEQ ID NO: 545100 - RNA, 19 nt, Homo sapiens
  misc_RNA (1)...(19): siRNA sense strand
gaauuugcucgcuacacua

SEQ ID NO: 545101 - RNA, 19 nt, Homo sapiens
  misc_RNA (1)...(19): siRNA sense strand
gcaccauugugaagcagau

SEQ ID NO: 545102 - RNA, 19 nt, Homo sapiens
  misc_RNA (1)...(19): siRNA sense strand
ccaaagugcaggacaucaa

SEQ ID NO: 545103 - RNA, 19 nt, Homo sapiens
  misc_RNA (1)...(19): siRNA sense strand
caacgaguaccagcugauu

SEQ ID NO: 545104 - RNA, 19 nt, Homo sapiens
  misc_RNA (1)...(19): siRNA sense strand
gaaagaggcgauugaaacc

SEQ ID NO: 545105 - RNA, 19 nt, Homo sapiens
  misc_RNA (1)...(19): siRNA sense strand
ugaacgugccugacuuuga

SEQ ID NO: 545106 - RNA, 19 nt, Homo sapiens
  misc_RNA (1)...(19): siRNA sense strand
agaauuugcucgcuacacu

SEQ ID NO: 545107 - RNA, 19 nt, Homo sapiens
  misc_RNA (1)...(19): siRNA sense strand
ugaugaacgugccugacuu

SEQ ID NO: 545108 - RNA, 19 nt, Homo sapiens
  misc_RNA (1)...(19): siRNA sense strand
cagcagcagcuacaacaug

SEQ ID NO: 545109 - RNA, 19 nt, Homo sapiens
  misc_RNA (1)...(19): siRNA sense strand
ugagaaggcaaccaaagug

SEQ ID NO: 545110 - RNA, 19 nt, Homo sapiens
  misc_RNA (1)...(19): siRNA sense strand
agaugaggauccugcaugu

SEQ ID NO: 545111 - RNA, 19 nt, Homo sapiens
  misc_RNA (1)...(19): siRNA sense strand
ggagaugggcgucacuacu

SEQ ID NO: 545112 - RNA, 19 nt, Homo sapiens
  misc_RNA (1)...(19): siRNA sense strand
aagaggcgauugaaaccau

SEQ ID NO: 545113 - RNA, 19 nt, Homo sapiens
  misc_RNA (1)...(19): siRNA sense strand
aggacuacuuuccagaauu

SEQ ID NO: 545114 - RNA, 19 nt, Homo sapiens
  misc_RNA (1)...(19): siRNA sense strand
gugagaaggcaaccaaagu

SEQ ID NO: 545115 - RNA, 19 nt, Homo sapiens
  misc_RNA (1)...(19): siRNA sense strand
aaagcaccauugugaagca

SEQ ID NO: 545116 - RNA, 19 nt, Homo sapiens
  misc_RNA (1)...(19): siRNA sense strand
ugaggacuacuuuccagaa

SEQ ID NO: 545117 - RNA, 19 nt, Homo sapiens
  misc_RNA (1)...(19): siRNA sense strand
gcuacgaacgcuccaacga

SEQ ID NO: 545118 - RNA, 19 nt, Homo sapiens
  misc_RNA (1)...(19): siRNA sense strand
cuacugcuacccucauuuc

SEQ ID NO: 545119 - RNA, 19 nt, Homo sapiens
  misc_RNA (1)...(19): siRNA sense strand
ugacugccaucaucuucgu

SEQ ID NO: 545120 - RNA, 19 nt, Homo sapiens
  misc_RNA (1)...(19): siRNA sense strand
ugacuucuggaaucuuuga

SEQ ID NO: 545121 - RNA, 19 nt, Homo sapiens
  misc_RNA (1)...(19): siRNA sense strand
uguccugacuucuggaauc

SEQ ID NO: 545122 - RNA, 19 nt, Homo sapiens
  misc_RNA (1)...(19): siRNA sense strand
acgaguaccagcugauuga

SEQ ID NO: 545123 - RNA, 19 nt, Homo sapiens
  misc_RNA (1)...(19): siRNA sense strand
agucaacuuccacauguuu

SEQ ID NO: 545124 - RNA, 19 nt, Homo sapiens
  misc_RNA (1)...(19): siRNA sense strand
gcgaugaacgccgcaagug

SEQ ID NO: 545125 - RNA, 19 nt, Homo sapiens
  misc_RNA (1)...(19): siRNA sense strand
uggacaagaucgacgugau

SEQ ID NO: 545126 - RNA, 19 nt, Homo sapiens
  misc_RNA (1)...(19): siRNA sense strand
gaugaguuucugaggauca

SEQ ID NO: 545127 - RNA, 19 nt, Homo sapiens
  misc_RNA (1)...(19): siRNA sense strand
gggaggacaaccagaccaa

SEQ ID NO: 545128 - RNA, 19 nt, Homo sapiens
  misc_RNA (1)...(19): siRNA sense strand
gaggauccugcauguuaau

SEQ ID NO: 545129 - RNA, 19 nt, Homo sapiens
  misc_RNA (1)...(19): siRNA sense strand
gaaucuuugagaccaaguu

SEQ ID NO: 545130 - RNA, 19 nt, Homo sapiens
  misc_RNA (1)...(19): siRNA sense strand
gauccagugcuucaacgau

SEQ ID NO: 545131 - RNA, 19 nt, Homo sapiens
  misc_RNA (1)...(19): siRNA sense strand
gccagcagcagcuacaaca

SEQ ID NO: 545132 - RNA, 19 nt, Homo sapiens
  misc_RNA (1)...(19): siRNA sense strand
ccaucucugugauccuguu

SEQ ID NO: 545133 - RNA, 19 nt, Homo sapiens
  misc_RNA (1)...(19): siRNA sense strand
cacuacugcuacccucauu

SEQ ID NO: 545134 - RNA, 19 nt, Homo sapiens
  misc_RNA (1)...(19): siRNA sense strand
gggcguagcuuuguuauug

SEQ ID NO: 545135 - RNA, 19 nt, Homo sapiens
  misc_RNA (1)...(19): siRNA sense strand
gcaccuaucuggacaugaa

SEQ ID NO: 545136 - RNA, 19 nt, Homo sapiens
  misc_RNA (1)...(19): siRNA sense strand
gaaccgaaauggacagaag

SEQ ID NO: 545137 - RNA, 19 nt, Homo sapiens
  misc_RNA (1)...(19): siRNA sense strand
ggaggccgauuucugcuuu

SEQ ID NO: 545138 - RNA, 19 nt, Homo sapiens
  misc_RNA (1)...(19): siRNA sense strand
gcaaucagcugugcaugag

SEQ ID NO: 545139 - RNA, 19 nt, Homo sapiens
  misc_RNA (1)...(19): siRNA sense strand
ggagauugcccucaaguuc

SEQ ID NO: 545140 - RNA, 19 nt, Homo sapiens
  misc_RNA (1)...(19): siRNA sense strand
gcaccuuucuuccgucugu

SEQ ID NO: 545141 - RNA, 19 nt, Homo sapiens
  misc_RNA (1)...(19): siRNA sense strand
ucacaaagcagcgcauuga

SEQ ID NO: 545142 - RNA, 19 nt, Homo sapiens
  misc_RNA (1)...(19): siRNA sense strand
caaagcagcgcauugacuu

SEQ ID NO: 545143 - RNA, 19 nt, Homo sapiens
  misc_RNA (1)...(19): siRNA sense strand
gcuucgaucuggccaaaga

SEQ ID NO: 545144 - RNA, 19 nt, Homo sapiens
  misc_RNA (1)...(19): siRNA sense strand
ugaagcacauggugaagga

SEQ ID NO: 545145 - RNA, 19 nt, Homo sapiens
  misc_RNA (1)...(19): siRNA sense strand
gaugggcguagcuuuguua

SEQ ID NO: 545146 - RNA, 19 nt, Homo sapiens
  misc_RNA (1)...(19): siRNA sense strand
acagugaguuggccuucua

SEQ ID NO: 545147 - RNA, 19 nt, Homo sapiens
  misc_RNA (1)...(19): siRNA sense strand
gggaugguguguuguaugg

SEQ ID NO: 545148 - RNA, 19 nt, Homo sapiens
  misc_RNA (1)...(19): siRNA sense strand
gagcuacuuugaggagauu

SEQ ID NO: 545149 - RNA, 19 nt, Homo sapiens
  misc_RNA (1)...(19): siRNA sense strand
ggacaugaaccgcuucgau

SEQ ID NO: 545150 - RNA, 19 nt, Homo sapiens
  misc_RNA (1)...(19): siRNA sense strand
agaaggaagugcccaucuu

SEQ ID NO: 545151 - RNA, 19 nt, Homo sapiens
  misc_RNA (1)...(19): siRNA sense strand
agagagagcaccuuucuuc

SEQ ID NO: 545152 - RNA, 19 nt, Homo sapiens
  misc_RNA (1)...(19): siRNA sense strand
gcaugagccugggcaagga

SEQ ID NO: 545153 - RNA, 19 nt, Homo sapiens
  misc_RNA (1)...(19): siRNA sense strand
gggaucacuuccuggagaa

SEQ ID NO: 545154 - RNA, 19 nt, Homo sapiens
  misc_RNA (1)...(19): siRNA sense strand
gcucucaccugcugauugc

SEQ ID NO: 545155 - RNA, 19 nt, Homo sapiens
  misc_RNA (1)...(19): siRNA sense strand
gaagguacggccacuagca

SEQ ID NO: 545156 - RNA, 19 nt, Homo sapiens
  misc_RNA (1)...(19): siRNA sense strand
gauacacugcuccgcauug

SEQ ID NO: 545157 - RNA, 19 nt, Homo sapiens
  misc_RNA (1)...(19): siRNA sense strand
ucccagcucuucucucuca

SEQ ID NO: 545158 - RNA, 19 nt, Homo sapiens
  misc_RNA (1)...(19): siRNA sense strand
cgagagagagagagagaga

SEQ ID NO: 545159 - RNA, 19 nt, Homo sapiens
  misc_RNA (1)...(19): siRNA sense strand
gcccaaggccacaucuuug

SEQ ID NO: 545160 - RNA, 19 nt, Homo sapiens
  misc_RNA (1)...(19): siRNA sense strand
gacguaaggaugacgcaaa

SEQ ID NO: 545161 - RNA, 19 nt, Homo sapiens
  misc_RNA (1)...(19): siRNA sense strand
ggcagcgccucuuccaguu

SEQ ID NO: 545162 - RNA, 19 nt, Homo sapiens
  misc_RNA (1)...(19): siRNA sense strand
cagcgccucuuccaguuca

SEQ ID NO: 545163 - RNA, 19 nt, Homo sapiens
  misc_RNA (1)...(19): siRNA sense strand
agagagagagagcaccuuu

SEQ ID NO: 545164 - RNA, 19 nt, Homo sapiens
  misc_RNA (1)...(19): siRNA sense strand
auacacugcuccgcauuga

SEQ ID NO: 545165 - RNA, 19 nt, Homo sapiens
  misc_RNA (1)...(19): siRNA sense strand
aaucccagcucuucucucu

SEQ ID NO: 545166 - RNA, 19 nt, Homo sapiens
  misc_RNA (1)...(19): siRNA sense strand
gcgcaccuaucuggacaug

SEQ ID NO: 545167 - RNA, 19 nt, Homo sapiens
  misc_RNA (1)...(19): siRNA sense strand
ugaaugcccagcuggagaa

SEQ ID NO: 545168 - RNA, 19 nt, Homo sapiens
  misc_RNA (1)...(19): siRNA sense strand
aggaggcucuggcugaguu

SEQ ID NO: 545169 - RNA, 19 nt, Homo sapiens
  misc_RNA (1)...(19): siRNA sense strand
ucagggcucuuugcagcuu

SEQ ID NO: 545170 - RNA, 19 nt, Homo sapiens
  misc_RNA (1)...(19): siRNA sense strand
gaaaucugacccaauucca

SEQ ID NO: 545171 - RNA, 19 nt, Homo sapiens
  misc_RNA (1)...(19): siRNA sense strand
gagcgcauuaccagucuug

SEQ ID NO: 545172 - RNA, 19 nt, Homo sapiens
  misc_RNA (1)...(19): siRNA sense strand
ugacccagagcuacuuuga

SEQ ID NO: 545173 - RNA, 19 nt, Homo sapiens
  misc_RNA (1)...(19): siRNA sense strand
ccgcuucgaucuggccaaa

SEQ ID NO: 545174 - RNA, 19 nt, Homo sapiens
  misc_RNA (1)...(19): siRNA sense strand
gauguuccuugaccauacu

SEQ ID NO: 545175 - RNA, 19 nt, Homo sapiens
  misc_RNA (1)...(19): siRNA sense strand
ccacacacguccuguucac

SEQ ID NO: 545176 - RNA, 19 nt, Homo sapiens
  misc_RNA (1)...(19): siRNA sense strand
gagaaggaagugcccaucu

SEQ ID NO: 545177 - RNA, 19 nt, Homo sapiens
  misc_RNA (1)...(19): siRNA sense strand
ccaaggccacaucuuugaa

SEQ ID NO: 545178 - RNA, 19 nt, Homo sapiens
  misc_RNA (1)...(19): siRNA sense strand
cagaagguacggccacuag

SEQ ID NO: 545179 - RNA, 19 nt, Homo sapiens
  misc_RNA (1)...(19): siRNA sense strand
acacugagcgggcugucuu

SEQ ID NO: 545180 - RNA, 19 nt, Homo sapiens
  misc_RNA (1)...(19): siRNA sense strand
guacgugcuaaaugaagaa

SEQ ID NO: 545181 - RNA, 19 nt, Homo sapiens
  misc_RNA (1)...(19): siRNA sense strand
uguacgugcuaaaugaaga

SEQ ID NO: 545182 - RNA, 19 nt, Homo sapiens
  misc_RNA (1)...(19): siRNA sense strand
gaguguggguuggaacaag

SEQ ID NO: 545183 - RNA, 19 nt, Homo sapiens
  misc_RNA (1)...(19): siRNA sense strand
cuaccgagaagucagaaau

SEQ ID NO: 545184 - RNA, 19 nt, Homo sapiens
  misc_RNA (1)...(19): siRNA sense strand
gcucucagccagcgaaggu

SEQ ID NO: 545185 - RNA, 19 nt, Homo sapiens
  misc_RNA (1)...(19): siRNA sense strand
gaucacuuccuggagaaau

SEQ ID NO: 545186 - RNA, 19 nt, Homo sapiens
  misc_RNA (1)...(19): siRNA sense strand
gagagagagcaccuuucuu

SEQ ID NO: 545187 - RNA, 19 nt, Homo sapiens
  misc_RNA (1)...(19): siRNA sense strand
cugaguuccugcagcgaaa

SEQ ID NO: 545188 - RNA, 19 nt, Homo sapiens
  misc_RNA (1)...(19): siRNA sense strand
ucacuuccuggagaaauuu

SEQ ID NO: 545189 - RNA, 19 nt, Homo sapiens
  misc_RNA (1)...(19): siRNA sense strand
gagaguguggguuggaaca

SEQ ID NO: 545190 - RNA, 19 nt, Homo sapiens
  misc_RNA (1)...(19): siRNA sense strand
gagagagagagcaccuuuc

SEQ ID NO: 545191 - RNA, 19 nt, Homo sapiens
  misc_RNA (1)...(19): siRNA sense strand
gugcccaucuucacaaagc

SEQ ID NO: 545192 - RNA, 19 nt, Homo sapiens
  misc_RNA (1)...(19): siRNA sense strand
gcaaccugggcuacaguga

SEQ ID NO: 545193 - RNA, 19 nt, Homo sapiens
  misc_RNA (1)...(19): siRNA sense strand
gcccugcuccggaucucua

SEQ ID NO: 545194 - RNA, 19 nt, Homo sapiens
  misc_RNA (1)...(19): siRNA sense strand
cccaaggccacaucuuuga

SEQ ID NO: 545195 - RNA, 19 nt, Homo sapiens
  misc_RNA (1)...(19): siRNA sense strand
ccugaugggcguagcuuug

SEQ ID NO: 545196 - RNA, 19 nt, Homo sapiens
  misc_RNA (1)...(19): siRNA sense strand
agagagagagcaccuuucu

SEQ ID NO: 545197 - RNA, 19 nt, Homo sapiens
  misc_RNA (1)...(19): siRNA sense strand
ggauacacugcuccgcauu

SEQ ID NO: 545198 - RNA, 19 nt, Homo sapiens
  misc_RNA (1)...(19): siRNA sense strand
gaucuggccaaagaguauu

SEQ ID NO: 545199 - RNA, 19 nt, Homo sapiens
  misc_RNA (1)...(19): siRNA sense strand
cgaucuggccaaagaguau

SEQ ID NO: 545200 - RNA, 19 nt, Homo sapiens
  misc_RNA (1)...(19): siRNA sense strand
cagggcucuuugcagcuua

SEQ ID NO: 545201 - RNA, 19 nt, Homo sapiens
  misc_RNA (1)...(19): siRNA sense strand
caaaaguucacaagauguu

SEQ ID NO: 545202 - RNA, 19 nt, Homo sapiens
  misc_RNA (1)...(19): siRNA sense strand
ggccuucgccuggaugaug

SEQ ID NO: 545203 - RNA, 19 nt, Homo sapiens
  misc_RNA (1)...(19): siRNA sense strand
ugcccaaggccacaucuuu

SEQ ID NO: 545204 - RNA, 19 nt, Homo sapiens
  misc_RNA (1)...(19): siRNA sense strand
cuacgugaaccgaaaugga

SEQ ID NO: 545205 - RNA, 19 nt, Homo sapiens
  misc_RNA (1)...(19): siRNA sense strand
aaccugggcuacagugagu

SEQ ID NO: 545206 - RNA, 19 nt, Homo sapiens
  misc_RNA (1)...(19): siRNA sense strand
ugaugggcguagcuuuguu

SEQ ID NO: 545207 - RNA, 19 nt, Homo sapiens
  misc_RNA (1)...(19): siRNA sense strand
gaaauuaguugcagagaaa

SEQ ID NO: 545208 - RNA, 19 nt, Homo sapiens
  misc_RNA (1)...(19): siRNA sense strand
ggacucagcuggauauguu

SEQ ID NO: 545209 - RNA, 19 nt, Homo sapiens
  misc_RNA (1)...(19): siRNA sense strand
gaaacaaucagaagcuuua

SEQ ID NO: 545210 - RNA, 19 nt, Homo sapiens
  misc_RNA (1)...(19): siRNA sense strand
gcaaaggacucaucgaauc

SEQ ID NO: 545211 - RNA, 19 nt, Homo sapiens
  misc_RNA (1)...(19): siRNA sense strand
uaacaucucucaucaagga

SEQ ID NO: 545212 - RNA, 19 nt, Homo sapiens
  misc_RNA (1)...(19): siRNA sense strand
ggaaauuaguugcagagaa

SEQ ID NO: 545213 - RNA, 19 nt, Homo sapiens
  misc_RNA (1)...(19): siRNA sense strand
gcaaagaacugcaaaagga

SEQ ID NO: 545214 - RNA, 19 nt, Homo sapiens
  misc_RNA (1)...(19): siRNA sense strand
gaagaaauuccaauacgaa

SEQ ID NO: 545215 - RNA, 19 nt, Homo sapiens
  misc_RNA (1)...(19): siRNA sense strand
ggauauaggccaaguuuau

SEQ ID NO: 545216 - RNA, 19 nt, Homo sapiens
  misc_RNA (1)...(19): siRNA sense strand
gcagagaaauugaauaucc

SEQ ID NO: 545217 - RNA, 19 nt, Homo sapiens
  misc_RNA (1)...(19): siRNA sense strand
gaaauuccaauacgaaaug

SEQ ID NO: 545218 - RNA, 19 nt, Homo sapiens
  misc_RNA (1)...(19): siRNA sense strand
gaaaguuuaccaacaaaga

SEQ ID NO: 545219 - RNA, 19 nt, Homo sapiens
  misc_RNA (1)...(19): siRNA sense strand
cauauucguuugcaaagaa

SEQ ID NO: 545220 - RNA, 19 nt, Homo sapiens
  misc_RNA (1)...(19): siRNA sense strand
gaaacccgauggaucuaga

SEQ ID NO: 545221 - RNA, 19 nt, Homo sapiens
  misc_RNA (1)...(19): siRNA sense strand
cagaggcaauuuacuauuc

SEQ ID NO: 545222 - RNA, 19 nt, Homo sapiens
  misc_RNA (1)...(19): siRNA sense strand
gaauugggcacuuaaggaa

SEQ ID NO: 545223 - RNA, 19 nt, Homo sapiens
  misc_RNA (1)...(19): siRNA sense strand
ccauuaaacuuggauauag

SEQ ID NO: 545224 - RNA, 19 nt, Homo sapiens
  misc_RNA (1)...(19): siRNA sense strand
uauaggaauugggcacuua

SEQ ID NO: 545225 - RNA, 19 nt, Homo sapiens
  misc_RNA (1)...(19): siRNA sense strand
gaaaugguacaaagucaug

SEQ ID NO: 545226 - RNA, 19 nt, Homo sapiens
  misc_RNA (1)...(19): siRNA sense strand
gcaaguuggaauugauaua

SEQ ID NO: 545227 - RNA, 19 nt, Homo sapiens
  misc_RNA (1)...(19): siRNA sense strand
gaauaucccuuggaaucau

SEQ ID NO: 545228 - RNA, 19 nt, Homo sapiens
  misc_RNA (1)...(19): siRNA sense strand
ucagaagcuuuaaggauga

SEQ ID NO: 545229 - RNA, 19 nt, Homo sapiens
  misc_RNA (1)...(19): siRNA sense strand
ggaaacaaucagaagcuuu

SEQ ID NO: 545230 - RNA, 19 nt, Homo sapiens
  misc_RNA (1)...(19): siRNA sense strand
gaaccugagcugcaaguug

SEQ ID NO: 545231 - RNA, 19 nt, Homo sapiens
  misc_RNA (1)...(19): siRNA sense strand
gaaaaccaguucuugcaaa

SEQ ID NO: 545232 - RNA, 19 nt, Homo sapiens
  misc_RNA (1)...(19): siRNA sense strand
caacaaagaaugggaaaca

SEQ ID NO: 545233 - RNA, 19 nt, Homo sapiens
  misc_RNA (1)...(19): siRNA sense strand
ggaauugggcacuuaagga

SEQ ID NO: 545234 - RNA, 19 nt, Homo sapiens
  misc_RNA (1)...(19): siRNA sense strand
gcaauuuacuauucucaac

SEQ ID NO: 545235 - RNA, 19 nt, Homo sapiens
  misc_RNA (1)...(19): siRNA sense strand
ggacuaggauuugaauugc

SEQ ID NO: 545236 - RNA, 19 nt, Homo sapiens
  misc_RNA (1)...(19): siRNA sense strand
ggccaaguuuauaaagaaa

SEQ ID NO: 545237 - RNA, 19 nt, Homo sapiens
  misc_RNA (1)...(19): siRNA sense strand
agaagaaauuccaauacga

SEQ ID NO: 545238 - RNA, 19 nt, Homo sapiens
  misc_RNA (1)...(19): siRNA sense strand
uacccgaauuucaacuuua

SEQ ID NO: 545239 - RNA, 19 nt, Homo sapiens
  misc_RNA (1)...(19): siRNA sense strand
caaagaaugggaaacaauc

SEQ ID NO: 545240 - RNA, 19 nt, Homo sapiens
  misc_RNA (1)...(19): siRNA sense strand
cagaagaaauuccaauacg

SEQ ID NO: 545241 - RNA, 19 nt, Homo sapiens
  misc_RNA (1)...(19): siRNA sense strand
gggaaacaaucagaagcuu

SEQ ID NO: 545242 - RNA, 19 nt, Homo sapiens
  misc_RNA (1)...(19): siRNA sense strand
cacagaagaaauuccaaua

SEQ ID NO: 545243 - RNA, 19 nt, Homo sapiens
  misc_RNA (1)...(19): siRNA sense strand
aggccaaguuuauaaagaa

SEQ ID NO: 545244 - RNA, 19 nt, Homo sapiens
  misc_RNA (1)...(19): siRNA sense strand
aauaucccuuggaaucaua

SEQ ID NO: 545245 - RNA, 19 nt, Homo sapiens
  misc_RNA (1)...(19): siRNA sense strand
ugaucuaucuccauuaaac

SEQ ID NO: 545246 - RNA, 19 nt, Homo sapiens
  misc_RNA (1)...(19): siRNA sense strand
gaaugggaaacaaucagaa

SEQ ID NO: 545247 - RNA, 19 nt, Homo sapiens
  misc_RNA (1)...(19): siRNA sense strand
gcuggucgucugaugauaa

SEQ ID NO: 545248 - RNA, 19 nt, Homo sapiens
  misc_RNA (1)...(19): siRNA sense strand
uuacccgaauuucaacuuu

SEQ ID NO: 545249 - RNA, 19 nt, Homo sapiens
  misc_RNA (1)...(19): siRNA sense strand
gcacuuaaggaaagcuuca

SEQ ID NO: 545250 - RNA, 19 nt, Homo sapiens
  misc_RNA (1)...(19): siRNA sense strand
gcuugaauuugaucuaucu

SEQ ID NO: 545251 - RNA, 19 nt, Homo sapiens
  misc_RNA (1)...(19): siRNA sense strand
acccgaauuucaacuuuaa

SEQ ID NO: 545252 - RNA, 19 nt, Homo sapiens
  misc_RNA (1)...(19): siRNA sense strand
ugcagcggcuugaauuuga

SEQ ID NO: 545253 - RNA, 19 nt, Homo sapiens
  misc_RNA (1)...(19): siRNA sense strand
gaauugcagcggcuugaau

SEQ ID NO: 545254 - RNA, 19 nt, Homo sapiens
  misc_RNA (1)...(19): siRNA sense strand
aaggaaagcuucauaaaag

SEQ ID NO: 545255 - RNA, 19 nt, Homo sapiens
  misc_RNA (1)...(19): siRNA sense strand
uuuaacaucucucaucaag

SEQ ID NO: 545256 - RNA, 19 nt, Homo sapiens
  misc_RNA (1)...(19): siRNA sense strand
gcugcaaguuggaauugau

SEQ ID NO: 545257 - RNA, 19 nt, Homo sapiens
  misc_RNA (1)...(19): siRNA sense strand
uaggccaaguuuauaaaga

SEQ ID NO: 545258 - RNA, 19 nt, Homo sapiens
  misc_RNA (1)...(19): siRNA sense strand
caaaauagaugagcaccau

SEQ ID NO: 545259 - RNA, 19 nt, Homo sapiens
  misc_RNA (1)...(19): siRNA sense strand
gauaaggaaauuaguugca

SEQ ID NO: 545260 - RNA, 19 nt, Homo sapiens
  misc_RNA (1)...(19): siRNA sense strand
gaggagaaggagcgcauug

SEQ ID NO: 545261 - RNA, 19 nt, Homo sapiens
  misc_RNA (1)...(19): siRNA sense strand
ggagcgcauuggccaguuc

SEQ ID NO: 545262 - RNA, 19 nt, Homo sapiens
  misc_RNA (1)...(19): siRNA sense strand
aauugaauaucccuuggaa

SEQ ID NO: 545263 - RNA, 19 nt, Homo sapiens
  misc_RNA (1)...(19): siRNA sense strand
cgauucagcccgaggagaa

SEQ ID NO: 545264 - RNA, 19 nt, Homo sapiens
  misc_RNA (1)...(19): siRNA sense strand
caggaugauuccaaaccaa

SEQ ID NO: 545265 - RNA, 19 nt, Homo sapiens
  misc_RNA (1)...(19): siRNA sense strand
aaccaguucuugcaaagga

SEQ ID NO: 545266 - RNA, 19 nt, Homo sapiens
  misc_RNA (1)...(19): siRNA sense strand
gagcugcaaguuggaauug

SEQ ID NO: 545267 - RNA, 19 nt, Homo sapiens
  misc_RNA (1)...(19): siRNA sense strand
ccagaggcaauuuacuauu

SEQ ID NO: 545268 - RNA, 19 nt, Homo sapiens
  misc_RNA (1)...(19): siRNA sense strand
ugcaguugcucuuaggaaa

SEQ ID NO: 545269 - RNA, 19 nt, Homo sapiens
  misc_RNA (1)...(19): siRNA sense strand
cggcuugaauuugaucuau

SEQ ID NO: 545270 - RNA, 19 nt, Homo sapiens
  misc_RNA (1)...(19): siRNA sense strand
gcagcggcuugaauuugau

SEQ ID NO: 545271 - RNA, 19 nt, Homo sapiens
  misc_RNA (1)...(19): siRNA sense strand
aauacgaaaugguacaaag

SEQ ID NO: 545272 - RNA, 19 nt, Homo sapiens
  misc_RNA (1)...(19): siRNA sense strand
cgaauccuuacccgaauuu

SEQ ID NO: 545273 - RNA, 19 nt, Homo sapiens
  misc_RNA (1)...(19): siRNA sense strand
ccaacccagaggcaauuua

SEQ ID NO: 545274 - RNA, 19 nt, Homo sapiens
  misc_RNA (1)...(19): siRNA sense strand
uggacuaggauuugaauug

SEQ ID NO: 545275 - RNA, 19 nt, Homo sapiens
  misc_RNA (1)...(19): siRNA sense strand
aaucagaagcuuuaaggau

SEQ ID NO: 545276 - RNA, 19 nt, Homo sapiens
  misc_RNA (1)...(19): siRNA sense strand
acaaagaaugggaaacaau

SEQ ID NO: 545277 - RNA, 19 nt, Homo sapiens
  misc_RNA (1)...(19): siRNA sense strand
cuuaaggaaagcuucauaa

SEQ ID NO: 545278 - RNA, 19 nt, Homo sapiens
  misc_RNA (1)...(19): siRNA sense strand
ucgaauccuuacccgaauu

SEQ ID NO: 545279 - RNA, 19 nt, Homo sapiens
  misc_RNA (1)...(19): siRNA sense strand
uaggaaacccgauggaucu

SEQ ID NO: 545280 - RNA, 19 nt, Homo sapiens
  misc_RNA (1)...(19): siRNA sense strand
gaggaaagcaaaauagaug

SEQ ID NO: 545281 - RNA, 19 nt, Homo sapiens
  misc_RNA (1)...(19): siRNA sense strand
cauuaaacuuggauauagg

SEQ ID NO: 545282 - RNA, 19 nt, Homo sapiens
  misc_RNA (1)...(19): siRNA sense strand
ucauauucguuugcaaaga

SEQ ID NO: 545283 - RNA, 19 nt, Homo sapiens
  misc_RNA (1)...(19): siRNA sense strand
uugaauaucccuuggaauc

SEQ ID NO: 545284 - RNA, 19 nt, Homo sapiens
  misc_RNA (1)...(19): siRNA sense strand
ggacucaucgaauccuuac

SEQ ID NO: 545285 - RNA, 19 nt, Homo sapiens
  misc_RNA (1)...(19): siRNA sense strand
ucacagaagaaauuccaau

SEQ ID NO: 545286 - RNA, 19 nt, Homo sapiens
  misc_RNA (1)...(19): siRNA sense strand
gguguuggacuaggauuug

SEQ ID NO: 545287 - RNA, 19 nt, Homo sapiens
  misc_RNA (1)...(19): siRNA sense strand
aacaaagaaugggaaacaa

SEQ ID NO: 545288 - RNA, 19 nt, Homo sapiens
  misc_RNA (1)...(19): siRNA sense strand
acccagaggcaauuuacua

SEQ ID NO: 545289 - RNA, 19 nt, Homo sapiens
  misc_RNA (1)...(19): siRNA sense strand
ugaauaucccuuggaauca

SEQ ID NO: 545290 - RNA, 19 nt, Homo sapiens
  misc_RNA (1)...(19): siRNA sense strand
ucaggaugauuccaaacca

SEQ ID NO: 545291 - RNA, 19 nt, Homo sapiens
  misc_RNA (1)...(19): siRNA sense strand
ggucgucugaugauaagga

SEQ ID NO: 545292 - RNA, 19 nt, Homo sapiens
  misc_RNA (1)...(19): siRNA sense strand
acuuuaacaucucucauca

SEQ ID NO: 545293 - RNA, 19 nt, Homo sapiens
  misc_RNA (1)...(19): siRNA sense strand
acgaaaugguacaaaguca

SEQ ID NO: 545294 - RNA, 19 nt, Homo sapiens
  misc_RNA (1)...(19): siRNA sense strand
caacccagaggcaauuuac

SEQ ID NO: 545295 - RNA, 19 nt, Homo sapiens
  misc_RNA (1)...(19): siRNA sense strand
gaauuugaucuaucuccau

SEQ ID NO: 545296 - RNA, 19 nt, Homo sapiens
  misc_RNA (1)...(19): siRNA sense strand
aaagaaugggaaacaauca

SEQ ID NO: 545297 - RNA, 19 nt, Homo sapiens
  misc_RNA (1)...(19): siRNA sense strand
ccaggucgugguucaauuc

SEQ ID NO: 545298 - RNA, 19 nt, Homo sapiens
  misc_RNA (1)...(19): siRNA sense strand
caugacaccugaagauccu

SEQ ID NO: 545299 - RNA, 19 nt, Homo sapiens
  misc_RNA (1)...(19): siRNA sense strand
agccauugguguuggacua

SEQ ID NO: 545300 - RNA, 19 nt, Homo sapiens
  misc_RNA (1)...(19): siRNA sense strand
cauaaaagccauugguguu

SEQ ID NO: 545301 - RNA, 19 nt, Homo sapiens
  misc_RNA (1)...(19): siRNA sense strand
uugcaaaggacucaucgaa

SEQ ID NO: 545302 - RNA, 19 nt, Homo sapiens
  misc_RNA (1)...(19): siRNA sense strand
aaaccaacccagaggcaau

SEQ ID NO: 545303 - RNA, 19 nt, Homo sapiens
  misc_RNA (1)...(19): siRNA sense strand
gaugagcaccauuuuguug

SEQ ID NO: 545304 - RNA, 19 nt, Homo sapiens
  misc_RNA (1)...(19): siRNA sense strand
gcaaaaggaaaaccaguuc

SEQ ID NO: 545305 - RNA, 19 nt, Homo sapiens
  misc_RNA (1)...(19): siRNA sense strand
gacuaggauuugaauugca

SEQ ID NO: 545306 - RNA, 19 nt, Homo sapiens
  misc_RNA (1)...(19): siRNA sense strand
agaggcaauuuacuauucu

SEQ ID NO: 545307 - RNA, 19 nt, Homo sapiens
  misc_RNA (1)...(19): siRNA sense strand
aaacaaaguuccagagcua

SEQ ID NO: 545308 - RNA, 19 nt, Homo sapiens
  misc_RNA (1)...(19): siRNA sense strand
gauuaaagccugugguuuc

SEQ ID NO: 545309 - RNA, 19 nt, Homo sapiens
  misc_RNA (1)...(19): siRNA sense strand
gaagcaccaccuaucauau

SEQ ID NO: 545310 - RNA, 19 nt, Homo sapiens
  misc_RNA (1)...(19): siRNA sense strand
agaagcaccaccuaucaua

SEQ ID NO: 545311 - RNA, 19 nt, Homo sapiens
  misc_RNA (1)...(19): siRNA sense strand
ggauuaaagccugugguuu

SEQ ID NO: 545312 - RNA, 19 nt, Homo sapiens
  misc_RNA (1)...(19): siRNA sense strand
ccacagaagcaccaccuau

SEQ ID NO: 545313 - RNA, 19 nt, Homo sapiens
  misc_RNA (1)...(19): siRNA sense strand
auuccacaguguaugauua

SEQ ID NO: 545314 - RNA, 19 nt, Homo sapiens
  misc_RNA (1)...(19): siRNA sense strand
guaugauuaugcugggaaa

SEQ ID NO: 545315 - RNA, 19 nt, Homo sapiens
  misc_RNA (1)...(19): siRNA sense strand
gggauuaaagccugugguu

SEQ ID NO: 545316 - RNA, 19 nt, Homo sapiens
  misc_RNA (1)...(19): siRNA sense strand
aaacugaccuccgauucca

SEQ ID NO: 545317 - RNA, 19 nt, Homo sapiens
  misc_RNA (1)...(19): siRNA sense strand
aagcaccaccuaucauauu

SEQ ID NO: 545318 - RNA, 19 nt, Homo sapiens
  misc_RNA (1)...(19): siRNA sense strand
gcaccaccuaucauauuug

SEQ ID NO: 545319 - RNA, 19 nt, Homo sapiens
  misc_RNA (1)...(19): siRNA sense strand
ccugaucgcccucuacaug

SEQ ID NO: 545320 - RNA, 19 nt, Homo sapiens
  misc_RNA (1)...(19): siRNA sense strand
agcaccaccuaucauauuu

SEQ ID NO: 545321 - RNA, 19 nt, Homo sapiens
  misc_RNA (1)...(19): siRNA sense strand
gaccaucuacugccugauc

SEQ ID NO: 545322 - RNA, 19 nt, Homo sapiens
  misc_RNA (1)...(19): siRNA sense strand
acagaagcaccaccuauca

SEQ ID NO: 545323 - RNA, 19 nt, Homo sapiens
  misc_RNA (1)...(19): siRNA sense strand
gggcuucggaggccuauag

SEQ ID NO: 545324 - RNA, 19 nt, Homo sapiens
  misc_RNA (1)...(19): siRNA sense strand
cuauagcccgcagggauua

SEQ ID NO: 545325 - RNA, 19 nt, Homo sapiens
  misc_RNA (1)...(19): siRNA sense strand
ccuauagcccgcagggauu

SEQ ID NO: 545326 - RNA, 19 nt, Homo sapiens
  misc_RNA (1)...(19): siRNA sense strand
ugccugaccaaaugcuuua

SEQ ID NO: 545327 - RNA, 19 nt, Homo sapiens
  misc_RNA (1)...(19): siRNA sense strand
caaaguuccagagcuacaa

SEQ ID NO: 545328 - RNA, 19 nt, Homo sapiens
  misc_RNA (1)...(19): siRNA sense strand
ccgauuccacaguguauga

SEQ ID NO: 545329 - RNA, 19 nt, Homo sapiens
  misc_RNA (1)...(19): siRNA sense strand
uuaguggcuucacgcagaa

SEQ ID NO: 545330 - RNA, 19 nt, Homo sapiens
  misc_RNA (1)...(19): siRNA sense strand
cuaaacugaccuccgauuc

SEQ ID NO: 545331 - RNA, 19 nt, Homo sapiens
  misc_RNA (1)...(19): siRNA sense strand
cacagaagcaccaccuauc

SEQ ID NO: 545332 - RNA, 19 nt, Homo sapiens
  misc_RNA (1)...(19): siRNA sense strand
caccaccuaucauauuugc

SEQ ID NO: 545333 - RNA, 19 nt, Homo sapiens
  misc_RNA (1)...(19): siRNA sense strand
uuccagagcuacaaaaguu

SEQ ID NO: 545334 - RNA, 19 nt, Homo sapiens
  misc_RNA (1)...(19): siRNA sense strand
gaaaucugccuccaucaua

SEQ ID NO: 545335 - RNA, 19 nt, Homo sapiens
  misc_RNA (1)...(19): siRNA sense strand
gaagcaggcucucaaucaa

SEQ ID NO: 545336 - RNA, 19 nt, Homo sapiens
  misc_RNA (1)...(19): siRNA sense strand
gaccugaccucacaagaug

SEQ ID NO: 545337 - RNA, 19 nt, Homo sapiens
  misc_RNA (1)...(19): siRNA sense strand
ggauauuccucccauguug

SEQ ID NO: 545338 - RNA, 19 nt, Homo sapiens
  misc_RNA (1)...(19): siRNA sense strand
gcgcuuggcugcuucuuau

SEQ ID NO: 545339 - RNA, 19 nt, Homo sapiens
  misc_RNA (1)...(19): siRNA sense strand
gacaacgacuccuauacuu

SEQ ID NO: 545340 - RNA, 19 nt, Homo sapiens
  misc_RNA (1)...(19): siRNA sense strand
gcuaauaucuaccuuccau

SEQ ID NO: 545341 - RNA, 19 nt, Homo sapiens
  misc_RNA (1)...(19): siRNA sense strand
caucaaacauagcuucaug

SEQ ID NO: 545342 - RNA, 19 nt, Homo sapiens
  misc_RNA (1)...(19): siRNA sense strand
caacgacuccuauacuuug

SEQ ID NO: 545343 - RNA, 19 nt, Homo sapiens
  misc_RNA (1)...(19): siRNA sense strand
gggcagacccugacuacaa

SEQ ID NO: 545344 - RNA, 19 nt, Homo sapiens
  misc_RNA (1)...(19): siRNA sense strand
gaguauauccagcuguuaa

SEQ ID NO: 545345 - RNA, 19 nt, Homo sapiens
  misc_RNA (1)...(19): siRNA sense strand
cgucaaagcuaaacuacca

SEQ ID NO: 545346 - RNA, 19 nt, Homo sapiens
  misc_RNA (1)...(19): siRNA sense strand
aaaucugccuccaucauaa

SEQ ID NO: 545347 - RNA, 19 nt, Homo sapiens
  misc_RNA (1)...(19): siRNA sense strand
caacgucaaagcuaaacua

SEQ ID NO: 545348 - RNA, 19 nt, Homo sapiens
  misc_RNA (1)...(19): siRNA sense strand
cagaguauauccagcuguu

SEQ ID NO: 545349 - RNA, 19 nt, Homo sapiens
  misc_RNA (1)...(19): siRNA sense strand
uuacaaacguuucaucaac

SEQ ID NO: 545350 - RNA, 19 nt, Homo sapiens
  misc_RNA (1)...(19): siRNA sense strand
ggacaucaccaagaucuuc

SEQ ID NO: 545351 - RNA, 19 nt, Homo sapiens
  misc_RNA (1)...(19): siRNA sense strand
gcacugaccagggccuauu

SEQ ID NO: 545352 - RNA, 19 nt, Homo sapiens
  misc_RNA (1)...(19): siRNA sense strand
ugauaaaggcauugcauug

SEQ ID NO: 545353 - RNA, 19 nt, Homo sapiens
  misc_RNA (1)...(19): siRNA sense strand
ucaaucaagcaguguauga

SEQ ID NO: 545354 - RNA, 19 nt, Homo sapiens
  misc_RNA (1)...(19): siRNA sense strand
ucauggacaucaccaagau

SEQ ID NO: 545355 - RNA, 19 nt, Homo sapiens
  misc_RNA (1)...(19): siRNA sense strand
acaagaugauaaaggcauu

SEQ ID NO: 545356 - RNA, 19 nt, Homo sapiens
  misc_RNA (1)...(19): siRNA sense strand
uacaaacguuucaucaaca

SEQ ID NO: 545357 - RNA, 19 nt, Homo sapiens
  misc_RNA (1)...(19): siRNA sense strand
agaagcaggcucucaauca

SEQ ID NO: 545358 - RNA, 19 nt, Homo sapiens
  misc_RNA (1)...(19): siRNA sense strand
agucugggcaucaaacaua

SEQ ID NO: 545359 - RNA, 19 nt, Homo sapiens
  misc_RNA (1)...(19): siRNA sense strand
gauauuccucccauguuga

SEQ ID NO: 545360 - RNA, 19 nt, Homo sapiens
  misc_RNA (1)...(19): siRNA sense strand
gcacagacgccacuuuuca

SEQ ID NO: 545361 - RNA, 19 nt, Homo sapiens
  misc_RNA (1)...(19): siRNA sense strand
gaccucacaagaugauaaa

SEQ ID NO: 545362 - RNA, 19 nt, Homo sapiens
  misc_RNA (1)...(19): siRNA sense strand
acgggcaccuggacuguuu

SEQ ID NO: 545363 - RNA, 19 nt, Homo sapiens
  misc_RNA (1)...(19): siRNA sense strand
acaacgacuccuauacuuu

SEQ ID NO: 545364 - RNA, 19 nt, Homo sapiens
  misc_RNA (1)...(19): siRNA sense strand
uaucacagguccguuuagu

SEQ ID NO: 545365 - RNA, 19 nt, Homo sapiens
  misc_RNA (1)...(19): siRNA sense strand
aggccaacgucaaagcuaa

SEQ ID NO: 545366 - RNA, 19 nt, Homo sapiens
  misc_RNA (1)...(19): siRNA sense strand
ucaaccagcuggauauucc

SEQ ID NO: 545367 - RNA, 19 nt, Homo sapiens
  misc_RNA (1)...(19): siRNA sense strand
gccaucaaccagcuggaua

SEQ ID NO: 545368 - RNA, 19 nt, Homo sapiens
  misc_RNA (1)...(19): siRNA sense strand
gauaaaggcauugcauugc

SEQ ID NO: 545369 - RNA, 19 nt, Homo sapiens
  misc_RNA (1)...(19): siRNA sense strand
gaugauaaaggcauugcau

SEQ ID NO: 545370 - RNA, 19 nt, Homo sapiens
  misc_RNA (1)...(19): siRNA sense strand
gcacccuccuugaaaucug

SEQ ID NO: 545371 - RNA, 19 nt, Homo sapiens
  misc_RNA (1)...(19): siRNA sense strand
ugaccucacaagaugauaa

SEQ ID NO: 545372 - RNA, 19 nt, Homo sapiens
  misc_RNA (1)...(19): siRNA sense strand
ccacuugagcuguuugcaa

SEQ ID NO: 545373 - RNA, 19 nt, Homo sapiens
  misc_RNA (1)...(19): siRNA sense strand
cacggucacuucuaucaca

SEQ ID NO: 545374 - RNA, 19 nt, Homo sapiens
  misc_RNA (1)...(19): siRNA sense strand
ggcagacccugacuacaac

SEQ ID NO: 545375 - RNA, 19 nt, Homo sapiens
  misc_RNA (1)...(19): siRNA sense strand
gugcagaggccaacgucaa

SEQ ID NO: 545376 - RNA, 19 nt, Homo sapiens
  misc_RNA (1)...(19): siRNA sense strand
ugacaacgacuccuauacu

SEQ ID NO: 545377 - RNA, 19 nt, Homo sapiens
  misc_RNA (1)...(19): siRNA sense strand
uuccaucucucucccuuga

SEQ ID NO: 545378 - RNA, 19 nt, Homo sapiens
  misc_RNA (1)...(19): siRNA sense strand
ggaggaggacacugacaca

SEQ ID NO: 545379 - RNA, 19 nt, Homo sapiens
  misc_RNA (1)...(19): siRNA sense strand
cauguugauuagcuaccua

SEQ ID NO: 545380 - RNA, 19 nt, Homo sapiens
  misc_RNA (1)...(19): siRNA sense strand
gcauugcauugcugcuaca

SEQ ID NO: 545381 - RNA, 19 nt, Homo sapiens
  misc_RNA (1)...(19): siRNA sense strand
uaugacaacgacuccuaua

SEQ ID NO: 545382 - RNA, 19 nt, Homo sapiens
  misc_RNA (1)...(19): siRNA sense strand
guuacaaacguuucaucaa

SEQ ID NO: 545383 - RNA, 19 nt, Homo sapiens
  misc_RNA (1)...(19): siRNA sense strand
gaggccaacgucaaagcua

SEQ ID NO: 545384 - RNA, 19 nt, Homo sapiens
  misc_RNA (1)...(19): siRNA sense strand
ugaccugaccucacaagau

SEQ ID NO: 545385 - RNA, 19 nt, Homo sapiens
  misc_RNA (1)...(19): siRNA sense strand
ccuaaaacaccaacuguaa

SEQ ID NO: 545386 - RNA, 19 nt, Homo sapiens
  misc_RNA (1)...(19): siRNA sense strand
acuccacggucacuucuau

SEQ ID NO: 545387 - RNA, 19 nt, Homo sapiens
  misc_RNA (1)...(19): siRNA sense strand
gcgccaggagcguuacaaa

SEQ ID NO: 545388 - RNA, 19 nt, Homo sapiens
  misc_RNA (1)...(19): siRNA sense strand
uauggccacuugagcuguu

SEQ ID NO: 545389 - RNA, 19 nt, Homo sapiens
  misc_RNA (1)...(19): siRNA sense strand
uaauaucuaccuuccaucu

SEQ ID NO: 545390 - RNA, 19 nt, Homo sapiens
  misc_RNA (1)...(19): siRNA sense strand
acacugacacagaggagaa

SEQ ID NO: 545391 - RNA, 19 nt, Homo sapiens
  misc_RNA (1)...(19): siRNA sense strand
ugauggugcuguugcuauc

SEQ ID NO: 545392 - RNA, 19 nt, Homo sapiens
  misc_RNA (1)...(19): siRNA sense strand
ucuaucacagguccguuua

SEQ ID NO: 545393 - RNA, 19 nt, Homo sapiens
  misc_RNA (1)...(19): siRNA sense strand
ccaucaaccagcuggauau

SEQ ID NO: 545394 - RNA, 19 nt, Homo sapiens
  misc_RNA (1)...(19): siRNA sense strand
ugaaaucugccuccaucau

SEQ ID NO: 545395 - RNA, 19 nt, Homo sapiens
  misc_RNA (1)...(19): siRNA sense strand
guaugacaacgacuccuau

SEQ ID NO: 545396 - RNA, 19 nt, Homo sapiens
  misc_RNA (1)...(19): siRNA sense strand
ggccaacgucaaagcuaaa

SEQ ID NO: 545397 - RNA, 19 nt, Homo sapiens
  misc_RNA (1)...(19): siRNA sense strand
auugugagccagaguauau

SEQ ID NO: 545398 - RNA, 19 nt, Homo sapiens
  misc_RNA (1)...(19): siRNA sense strand
ggacuguguacgugugcuu

SEQ ID NO: 545399 - RNA, 19 nt, Homo sapiens
  misc_RNA (1)...(19): siRNA sense strand
caucaaccagcuggauauu

SEQ ID NO: 545400 - RNA, 19 nt, Homo sapiens
  misc_RNA (1)...(19): siRNA sense strand
auaauugugagccagagua

SEQ ID NO: 545401 - RNA, 19 nt, Homo sapiens
  misc_RNA (1)...(19): siRNA sense strand
acaaacguuucaucaacag

SEQ ID NO: 545402 - RNA, 19 nt, Homo sapiens
  misc_RNA (1)...(19): siRNA sense strand
uagcaucuacaacaacugu

SEQ ID NO: 545403 - RNA, 19 nt, Homo sapiens
  misc_RNA (1)...(19): siRNA sense strand
gugauggugcuguugcuau

SEQ ID NO: 545404 - RNA, 19 nt, Homo sapiens
  misc_RNA (1)...(19): siRNA sense strand
uguaugacaacgacuccua

SEQ ID NO: 545405 - RNA, 19 nt, Homo sapiens
  misc_RNA (1)...(19): siRNA sense strand
auaaaggcauugcauugcu

SEQ ID NO: 545406 - RNA, 19 nt, Homo sapiens
  misc_RNA (1)...(19): siRNA sense strand
agagagagcugcaaagauu

SEQ ID NO: 545407 - RNA, 19 nt, Homo sapiens
  misc_RNA (1)...(19): siRNA sense strand
gaagcauccuaaauaauga

SEQ ID NO: 545408 - RNA, 19 nt, Homo sapiens
  misc_RNA (1)...(19): siRNA sense strand
agaagacgcuggauaaguu

SEQ ID NO: 545409 - RNA, 19 nt, Homo sapiens
  misc_RNA (1)...(19): siRNA sense strand
ucaagaggcugaagaagga

SEQ ID NO: 545410 - RNA, 19 nt, Homo sapiens
  misc_RNA (1)...(19): siRNA sense strand
gcaaagauuggaagaagaa

SEQ ID NO: 545411 - RNA, 19 nt, Homo sapiens
  misc_RNA (1)...(19): siRNA sense strand
gacaaaggauacaaacaga

SEQ ID NO: 545412 - RNA, 19 nt, Homo sapiens
  misc_RNA (1)...(19): siRNA sense strand
caaggaaugucaggagaaa

SEQ ID NO: 545413 - RNA, 19 nt, Homo sapiens
  misc_RNA (1)...(19): siRNA sense strand
gguaucaguuacucauuug

SEQ ID NO: 545414 - RNA, 19 nt, Homo sapiens
  misc_RNA (1)...(19): siRNA sense strand
gaaaagaagacgcuggaua

SEQ ID NO: 545415 - RNA, 19 nt, Homo sapiens
  misc_RNA (1)...(19): siRNA sense strand
ugaguggaaucaugaaaug

SEQ ID NO: 545416 - RNA, 19 nt, Homo sapiens
  misc_RNA (1)...(19): siRNA sense strand
acagaacccuugagucuag

SEQ ID NO: 545417 - RNA, 19 nt, Homo sapiens
  misc_RNA (1)...(19): siRNA sense strand
ggaaguaucagguacaaac

SEQ ID NO: 545418 - RNA, 19 nt, Homo sapiens
  misc_RNA (1)...(19): siRNA sense strand
agaagcauccuaaauaaug

SEQ ID NO: 545419 - RNA, 19 nt, Homo sapiens
  misc_RNA (1)...(19): siRNA sense strand
caaaggauacaaacagaau

SEQ ID NO: 545420 - RNA, 19 nt, Homo sapiens
  misc_RNA (1)...(19): siRNA sense strand
gaagacgcuggauaaguuu

SEQ ID NO: 545421 - RNA, 19 nt, Homo sapiens
  misc_RNA (1)...(19): siRNA sense strand
gaagaaggaagaggaggaa

SEQ ID NO: 545422 - RNA, 19 nt, Homo sapiens
  misc_RNA (1)...(19): siRNA sense strand
ugacagaacccuugagucu

SEQ ID NO: 545423 - RNA, 19 nt, Homo sapiens
  misc_RNA (1)...(19): siRNA sense strand
gguacaaacugagagacaa

SEQ ID NO: 545424 - RNA, 19 nt, Homo sapiens
  misc_RNA (1)...(19): siRNA sense strand
gaacaucuacaggcuaauc

SEQ ID NO: 545425 - RNA, 19 nt, Homo sapiens
  misc_RNA (1)...(19): siRNA sense strand
gagagacaaaggauacaaa

SEQ ID NO: 545426 - RNA, 19 nt, Homo sapiens
  misc_RNA (1)...(19): siRNA sense strand
guacaaacugagagacaaa

SEQ ID NO: 545427 - RNA, 19 nt, Homo sapiens
  misc_RNA (1)...(19): siRNA sense strand
agaagcaguuggugagaga

SEQ ID NO: 545428 - RNA, 19 nt, Homo sapiens
  misc_RNA (1)...(19): siRNA sense strand
ugguaucaguuacucauuu

SEQ ID NO: 545429 - RNA, 19 nt, Homo sapiens
  misc_RNA (1)...(19): siRNA sense strand
uugaacaucuacaggcuaa

SEQ ID NO: 545430 - RNA, 19 nt, Homo sapiens
  misc_RNA (1)...(19): siRNA sense strand
ugacaucagagaagagaaa

SEQ ID NO: 545431 - RNA, 19 nt, Homo sapiens
  misc_RNA (1)...(19): siRNA sense strand
aaaagaagacgcuggauaa

SEQ ID NO: 545432 - RNA, 19 nt, Homo sapiens
  misc_RNA (1)...(19): siRNA sense strand
gaauuugaucagcuuagaa

SEQ ID NO: 545433 - RNA, 19 nt, Homo sapiens
  misc_RNA (1)...(19): siRNA sense strand
aaaagcagcuguccugugu

SEQ ID NO: 545434 - RNA, 19 nt, Homo sapiens
  misc_RNA (1)...(19): siRNA sense strand
gacagaacccuugagucua

SEQ ID NO: 545435 - RNA, 19 nt, Homo sapiens
  misc_RNA (1)...(19): siRNA sense strand
aagcagcuguccugugugu

SEQ ID NO: 545436 - RNA, 19 nt, Homo sapiens
  misc_RNA (1)...(19): siRNA sense strand
cggagucaguggucaacaa

SEQ ID NO: 545437 - RNA, 19 nt, Homo sapiens
  misc_RNA (1)...(19): siRNA sense strand
agaauuugaucagcuuaga

SEQ ID NO: 545438 - RNA, 19 nt, Homo sapiens
  misc_RNA (1)...(19): siRNA sense strand
caaguugagcccagacaau

SEQ ID NO: 545439 - RNA, 19 nt, Homo sapiens
  misc_RNA (1)...(19): siRNA sense strand
uugcagaggcugaggauga

SEQ ID NO: 545440 - RNA, 19 nt, Homo sapiens
  misc_RNA (1)...(19): siRNA sense strand
cugcaaagauuggaagaag

SEQ ID NO: 545441 - RNA, 19 nt, Homo sapiens
  misc_RNA (1)...(19): siRNA sense strand
gaaacuccuacucuucugu

SEQ ID NO: 545442 - RNA, 19 nt, Homo sapiens
  misc_RNA (1)...(19): siRNA sense strand
ggagucaguggucaacaau

SEQ ID NO: 545443 - RNA, 19 nt, Homo sapiens
  misc_RNA (1)...(19): siRNA sense strand
gagagagcugcaaagauug

SEQ ID NO: 545444 - RNA, 19 nt, Homo sapiens
  misc_RNA (1)...(19): siRNA sense strand
aaacuccuacucuucugua

SEQ ID NO: 545445 - RNA, 19 nt, Homo sapiens
  misc_RNA (1)...(19): siRNA sense strand
gcaucuggccaacauagug

SEQ ID NO: 545446 - RNA, 19 nt, Homo sapiens
  misc_RNA (1)...(19): siRNA sense strand
agacaaaggauacaaacag

SEQ ID NO: 545447 - RNA, 19 nt, Homo sapiens
  misc_RNA (1)...(19): siRNA sense strand
caaacugagagacaaagga

SEQ ID NO: 545448 - RNA, 19 nt, Homo sapiens
  misc_RNA (1)...(19): siRNA sense strand
aagauuggaagaagaagaa

SEQ ID NO: 545449 - RNA, 19 nt, Homo sapiens
  misc_RNA (1)...(19): siRNA sense strand
aaacugagagacaaaggau

SEQ ID NO: 545450 - RNA, 19 nt, Homo sapiens
  misc_RNA (1)...(19): siRNA sense strand
acaaugggaagaagagaga

SEQ ID NO: 545451 - RNA, 19 nt, Homo sapiens
  misc_RNA (1)...(19): siRNA sense strand
gcagaagcaguuggugaga

SEQ ID NO: 545452 - RNA, 19 nt, Homo sapiens
  misc_RNA (1)...(19): siRNA sense strand
ggaagaagaagaaaagaag

SEQ ID NO: 545453 - RNA, 19 nt, Homo sapiens
  misc_RNA (1)...(19): siRNA sense strand
gagacaaaggauacaaaca

SEQ ID NO: 545454 - RNA, 19 nt, Homo sapiens
  misc_RNA (1)...(19): siRNA sense strand
ucaaggaaugucaggagaa

SEQ ID NO: 545455 - RNA, 19 nt, Homo sapiens
  misc_RNA (1)...(19): siRNA sense strand
agucaguggucaacaaugg

SEQ ID NO: 545456 - RNA, 19 nt, Homo sapiens
  misc_RNA (1)...(19): siRNA sense strand
ugcaaagauuggaagaaga

SEQ ID NO: 545457 - RNA, 19 nt, Homo sapiens
  misc_RNA (1)...(19): siRNA sense strand
auaaugaggagcagagaga

SEQ ID NO: 545458 - RNA, 19 nt, Homo sapiens
  misc_RNA (1)...(19): siRNA sense strand
gaaggaagaggaggaagcu

SEQ ID NO: 545459 - RNA, 19 nt, Homo sapiens
  misc_RNA (1)...(19): siRNA sense strand
gaagaggaggaagcugaga

SEQ ID NO: 545460 - RNA, 19 nt, Homo sapiens
  misc_RNA (1)...(19): siRNA sense strand
ccaucugccuggagcuguu

SEQ ID NO: 545461 - RNA, 19 nt, Homo sapiens
  misc_RNA (1)...(19): siRNA sense strand
aacagaauuugaucagcuu

SEQ ID NO: 545462 - RNA, 19 nt, Homo sapiens
  misc_RNA (1)...(19): siRNA sense strand
gaaguaucagguacaaacu

SEQ ID NO: 545463 - RNA, 19 nt, Homo sapiens
  misc_RNA (1)...(19): siRNA sense strand
aaaucuugcuuaacguaca

SEQ ID NO: 545464 - RNA, 19 nt, Homo sapiens
  misc_RNA (1)...(19): siRNA sense strand
acaaaggauacaaacagaa

SEQ ID NO: 545465 - RNA, 19 nt, Homo sapiens
  misc_RNA (1)...(19): siRNA sense strand
aaucuugcuuaacguacaa

SEQ ID NO: 545466 - RNA, 19 nt, Homo sapiens
  misc_RNA (1)...(19): siRNA sense strand
ugaccagcaugggaggaaa

SEQ ID NO: 545467 - RNA, 19 nt, Homo sapiens
  misc_RNA (1)...(19): siRNA sense strand
ggcugaggaugagcuaguu

SEQ ID NO: 545468 - RNA, 19 nt, Homo sapiens
  misc_RNA (1)...(19): siRNA sense strand
cagagagagcugcaaagau

SEQ ID NO: 545469 - RNA, 19 nt, Homo sapiens
  misc_RNA (1)...(19): siRNA sense strand
acucaaggaggucaaguug

SEQ ID NO: 545470 - RNA, 19 nt, Homo sapiens
  misc_RNA (1)...(19): siRNA sense strand
gaagaagaagaaaagaaga

SEQ ID NO: 545471 - RNA, 19 nt, Homo sapiens
  misc_RNA (1)...(19): siRNA sense strand
ccagacaaugggaagaaga

SEQ ID NO: 545472 - RNA, 19 nt, Homo sapiens
  misc_RNA (1)...(19): siRNA sense strand
cagcaucuggccaacauag

SEQ ID NO: 545473 - RNA, 19 nt, Homo sapiens
  misc_RNA (1)...(19): siRNA sense strand
gacucaaggaggucaaguu

SEQ ID NO: 545474 - RNA, 19 nt, Homo sapiens
  misc_RNA (1)...(19): siRNA sense strand
aaagauuggaagaagaaga

SEQ ID NO: 545475 - RNA, 19 nt, Homo sapiens
  misc_RNA (1)...(19): siRNA sense strand
guuacucauuugaacaucu

SEQ ID NO: 545476 - RNA, 19 nt, Homo sapiens
  misc_RNA (1)...(19): siRNA sense strand
ugaguggaaucaugaaaug

SEQ ID NO: 545477 - RNA, 19 nt, Homo sapiens
  misc_RNA (1)...(19): siRNA sense strand
agagagagcugcaaagauu

SEQ ID NO: 545478 - RNA, 19 nt, Homo sapiens
  misc_RNA (1)...(19): siRNA sense strand
gaagcauccuaaauaauga

SEQ ID NO: 545479 - RNA, 19 nt, Homo sapiens
  misc_RNA (1)...(19): siRNA sense strand
agaagacgcuggauaaguu

SEQ ID NO: 545480 - RNA, 19 nt, Homo sapiens
  misc_RNA (1)...(19): siRNA sense strand
ucaagaggcugaagaagga

SEQ ID NO: 545481 - RNA, 19 nt, Homo sapiens
  misc_RNA (1)...(19): siRNA sense strand
gcaaagauuggaagaagaa

SEQ ID NO: 545482 - RNA, 19 nt, Homo sapiens
  misc_RNA (1)...(19): siRNA sense strand
gacaaaggauacaaacaga

SEQ ID NO: 545483 - RNA, 19 nt, Homo sapiens
  misc_RNA (1)...(19): siRNA sense strand
caaggaaugucaggagaaa

SEQ ID NO: 545484 - RNA, 19 nt, Homo sapiens
  misc_RNA (1)...(19): siRNA sense strand
gguaucaguuacucauuug

SEQ ID NO: 545485 - RNA, 19 nt, Homo sapiens
  misc_RNA (1)...(19): siRNA sense strand
gaaaagaagacgcuggaua

SEQ ID NO: 545486 - RNA, 19 nt, Homo sapiens
  misc_RNA (1)...(19): siRNA sense strand
ugaguggaaucaugaaaug

SEQ ID NO: 545487 - RNA, 19 nt, Homo sapiens
  misc_RNA (1)...(19): siRNA sense strand
acagaacccuugagucuag

SEQ ID NO: 545488 - RNA, 19 nt, Homo sapiens
  misc_RNA (1)...(19): siRNA sense strand
ggaaguaucagguacaaac

SEQ ID NO: 545489 - RNA, 19 nt, Homo sapiens
  misc_RNA (1)...(19): siRNA sense strand
agaagcauccuaaauaaug

SEQ ID NO: 545490 - RNA, 19 nt, Homo sapiens
  misc_RNA (1)...(19): siRNA sense strand
caaaggauacaaacagaau

SEQ ID NO: 545491 - RNA, 19 nt, Homo sapiens
  misc_RNA (1)...(19): siRNA sense strand
gaagacgcuggauaaguuu

SEQ ID NO: 545492 - RNA, 19 nt, Homo sapiens
  misc_RNA (1)...(19): siRNA sense strand
gaagaaggaagaggaggaa

SEQ ID NO: 545493 - RNA, 19 nt, Homo sapiens
  misc_RNA (1)...(19): siRNA sense strand
ugacagaacccuugagucu

SEQ ID NO: 545494 - RNA, 19 nt, Homo sapiens
  misc_RNA (1)...(19): siRNA sense strand
gguacaaacugagagacaa

SEQ ID NO: 545495 - RNA, 19 nt, Homo sapiens
  misc_RNA (1)...(19): siRNA sense strand
gaacaucuacaggcuaauc

SEQ ID NO: 545496 - RNA, 19 nt, Homo sapiens
  misc_RNA (1)...(19): siRNA sense strand
gagagacaaaggauacaaa

SEQ ID NO: 545497 - RNA, 19 nt, Homo sapiens
  misc_RNA (1)...(19): siRNA sense strand
guacaaacugagagacaaa

SEQ ID NO: 545498 - RNA, 19 nt, Homo sapiens
  misc_RNA (1)...(19): siRNA sense strand
agaagcaguuggugagaga

SEQ ID NO: 545499 - RNA, 19 nt, Homo sapiens
  misc_RNA (1)...(19): siRNA sense strand
ugguaucaguuacucauuu

SEQ ID NO: 545500 - RNA, 19 nt, Homo sapiens
  misc_RNA (1)...(19): siRNA sense strand
uugaacaucuacaggcuaa

SEQ ID NO: 545501 - RNA, 19 nt, Homo sapiens
  misc_RNA (1)...(19): siRNA sense strand
ugacaucagagaagagaaa

SEQ ID NO: 545502 - RNA, 19 nt, Homo sapiens
  misc_RNA (1)...(19): siRNA sense strand
aaaagaagacgcuggauaa

SEQ ID NO: 545503 - RNA, 19 nt, Homo sapiens
  misc_RNA (1)...(19): siRNA sense strand
gaauuugaucagcuuagaa

SEQ ID NO: 545504 - RNA, 19 nt, Homo sapiens
  misc_RNA (1)...(19): siRNA sense strand
aaaagcagcuguccugugu

SEQ ID NO: 545505 - RNA, 19 nt, Homo sapiens
  misc_RNA (1)...(19): siRNA sense strand
gacagaacccuugagucua

SEQ ID NO: 545506 - RNA, 19 nt, Homo sapiens
  misc_RNA (1)...(19): siRNA sense strand
aagcagcuguccugugugu

SEQ ID NO: 545507 - RNA, 19 nt, Homo sapiens
  misc_RNA (1)...(19): siRNA sense strand
cggagucaguggucaacaa

SEQ ID NO: 545508 - RNA, 19 nt, Homo sapiens
  misc_RNA (1)...(19): siRNA sense strand
agaauuugaucagcuuaga

SEQ ID NO: 545509 - RNA, 19 nt, Homo sapiens
  misc_RNA (1)...(19): siRNA sense strand
caaguugagcccagacaau

SEQ ID NO: 545510 - RNA, 19 nt, Homo sapiens
  misc_RNA (1)...(19): siRNA sense strand
uugcagaggcugaggauga

SEQ ID NO: 545511 - RNA, 19 nt, Homo sapiens
  misc_RNA (1)...(19): siRNA sense strand
cugcaaagauuggaagaag

SEQ ID NO: 545512 - RNA, 19 nt, Homo sapiens
  misc_RNA (1)...(19): siRNA sense strand
gaaacuccuacucuucugu

SEQ ID NO: 545513 - RNA, 19 nt, Homo sapiens
  misc_RNA (1)...(19): siRNA sense strand
ggagucaguggucaacaau

SEQ ID NO: 545514 - RNA, 19 nt, Homo sapiens
  misc_RNA (1)...(19): siRNA sense strand
gagagagcugcaaagauug

SEQ ID NO: 545515 - RNA, 19 nt, Homo sapiens
  misc_RNA (1)...(19): siRNA sense strand
aaacuccuacucuucugua

SEQ ID NO: 545516 - RNA, 19 nt, Homo sapiens
  misc_RNA (1)...(19): siRNA sense strand
gcaucuggccaacauagug

SEQ ID NO: 545517 - RNA, 19 nt, Homo sapiens
  misc_RNA (1)...(19): siRNA sense strand
agacaaaggauacaaacag

SEQ ID NO: 545518 - RNA, 19 nt, Homo sapiens
  misc_RNA (1)...(19): siRNA sense strand
caaacugagagacaaagga

SEQ ID NO: 545519 - RNA, 19 nt, Homo sapiens
  misc_RNA (1)...(19): siRNA sense strand
aagauuggaagaagaagaa

SEQ ID NO: 545520 - RNA, 19 nt, Homo sapiens
  misc_RNA (1)...(19): siRNA sense strand
aaacugagagacaaaggau

SEQ ID NO: 545521 - RNA, 19 nt, Homo sapiens
  misc_RNA (1)...(19): siRNA sense strand
acaaugggaagaagagaga

SEQ ID NO: 545522 - RNA, 19 nt, Homo sapiens
  misc_RNA (1)...(19): siRNA sense strand
gcagaagcaguuggugaga

SEQ ID NO: 545523 - RNA, 19 nt, Homo sapiens
  misc_RNA (1)...(19): siRNA sense strand
ggaagaagaagaaaagaag

SEQ ID NO: 545524 - RNA, 19 nt, Homo sapiens
  misc_RNA (1)...(19): siRNA sense strand
gagacaaaggauacaaaca

SEQ ID NO: 545525 - RNA, 19 nt, Homo sapiens
  misc_RNA (1)...(19): siRNA sense strand
ucaaggaaugucaggagaa

SEQ ID NO: 545526 - RNA, 19 nt, Homo sapiens
  misc_RNA (1)...(19): siRNA sense strand
agucaguggucaacaaugg

SEQ ID NO: 545527 - RNA, 19 nt, Homo sapiens
  misc_RNA (1)...(19): siRNA sense strand
ugcaaagauuggaagaaga

SEQ ID NO: 545528 - RNA, 19 nt, Homo sapiens
  misc_RNA (1)...(19): siRNA sense strand
auaaugaggagcagagaga

SEQ ID NO: 545529 - RNA, 19 nt, Homo sapiens
  misc_RNA (1)...(19): siRNA sense strand
gaaggaagaggaggaagcu

SEQ ID NO: 545530 - RNA, 19 nt, Homo sapiens
  misc_RNA (1)...(19): siRNA sense strand
gaagaggaggaagcugaga

SEQ ID NO: 545531 - RNA, 19 nt, Homo sapiens
  misc_RNA (1)...(19): siRNA sense strand
ccaucugccuggagcuguu

SEQ ID NO: 545532 - RNA, 19 nt, Homo sapiens
  misc_RNA (1)...(19): siRNA sense strand
aacagaauuugaucagcuu

SEQ ID NO: 545533 - RNA, 19 nt, Homo sapiens
  misc_RNA (1)...(19): siRNA sense strand
gaaguaucagguacaaacu

SEQ ID NO: 545534 - RNA, 19 nt, Homo sapiens
  misc_RNA (1)...(19): siRNA sense strand
aaaucuugcuuaacguaca

SEQ ID NO: 545535 - RNA, 19 nt, Homo sapiens
  misc_RNA (1)...(19): siRNA sense strand
acaaaggauacaaacagaa

SEQ ID NO: 545536 - RNA, 19 nt, Homo sapiens
  misc_RNA (1)...(19): siRNA sense strand
aaucuugcuuaacguacaa

SEQ ID NO: 545537 - RNA, 19 nt, Homo sapiens
  misc_RNA (1)...(19): siRNA sense strand
ugaccagcaugggaggaaa

SEQ ID NO: 545538 - RNA, 19 nt, Homo sapiens
  misc_RNA (1)...(19): siRNA sense strand
ggcugaggaugagcuaguu

SEQ ID NO: 545539 - RNA, 19 nt, Homo sapiens
  misc_RNA (1)...(19): siRNA sense strand
cagagagagcugcaaagau

SEQ ID NO: 545540 - RNA, 19 nt, Homo sapiens
  misc_RNA (1)...(19): siRNA sense strand
acucaaggaggucaaguug

SEQ ID NO: 545541 - RNA, 19 nt, Homo sapiens
  misc_RNA (1)...(19): siRNA sense strand
gaagaagaagaaaagaaga

SEQ ID NO: 545542 - RNA, 19 nt, Homo sapiens
  misc_RNA (1)...(19): siRNA sense strand
ccagacaaugggaagaaga

SEQ ID NO: 545543 - RNA, 19 nt, Homo sapiens
  misc_RNA (1)...(19): siRNA sense strand
cagcaucuggccaacauag

SEQ ID NO: 545544 - RNA, 19 nt, Homo sapiens
  misc_RNA (1)...(19): siRNA sense strand
gacucaaggaggucaaguu

SEQ ID NO: 545545 - RNA, 19 nt, Homo sapiens
  misc_RNA (1)...(19): siRNA sense strand
aaagauuggaagaagaaga

SEQ ID NO: 545546 - RNA, 19 nt, Homo sapiens
  misc_RNA (1)...(19): siRNA sense strand
guuacucauuugaacaucu

SEQ ID NO: 545547 - RNA, 19 nt, Homo sapiens
  misc_RNA (1)...(19): siRNA sense strand
gaaaguaguuaagcauuug

SEQ ID NO: 545548 - RNA, 19 nt, Homo sapiens
  misc_RNA (1)...(19): siRNA sense strand
gguguggagucucuuauuu

SEQ ID NO: 545549 - RNA, 19 nt, Homo sapiens
  misc_RNA (1)...(19): siRNA sense strand
caagaagacguccauauug

SEQ ID NO: 545550 - RNA, 19 nt, Homo sapiens
  misc_RNA (1)...(19): siRNA sense strand
uaaagaugcuuggauuaga

SEQ ID NO: 545551 - RNA, 19 nt, Homo sapiens
  misc_RNA (1)...(19): siRNA sense strand
aaagaugcuuggauuagaa

SEQ ID NO: 545552 - RNA, 19 nt, Homo sapiens
  misc_RNA (1)...(19): siRNA sense strand
aagaauaucccuucaguga

SEQ ID NO: 545553 - RNA, 19 nt, Homo sapiens
  misc_RNA (1)...(19): siRNA sense strand
ccucauaaacugcauauug

SEQ ID NO: 545554 - RNA, 19 nt, Homo sapiens
  misc_RNA (1)...(19): siRNA sense strand
gaucaagaauuccagaaaa

SEQ ID NO: 545555 - RNA, 19 nt, Homo sapiens
  misc_RNA (1)...(19): siRNA sense strand
ccacagaacccucauaaac

SEQ ID NO: 545556 - RNA, 19 nt, Homo sapiens
  misc_RNA (1)...(19): siRNA sense strand
acaagaagacguccauauu

SEQ ID NO: 545557 - RNA, 19 nt, Homo sapiens
  misc_RNA (1)...(19): siRNA sense strand
caaauucaccagaucaaga

SEQ ID NO: 545558 - RNA, 19 nt, Homo sapiens
  misc_RNA (1)...(19): siRNA sense strand
acagaacccucauaaacug

SEQ ID NO: 545559 - RNA, 19 nt, Homo sapiens
  misc_RNA (1)...(19): siRNA sense strand
acaagaauaucccuucagu

SEQ ID NO: 545560 - RNA, 19 nt, Homo sapiens
  misc_RNA (1)...(19): siRNA sense strand
gcacauaccccucaaguuc

SEQ ID NO: 545561 - RNA, 19 nt, Homo sapiens
  misc_RNA (1)...(19): siRNA sense strand
ucacaagaauaucccuuca

SEQ ID NO: 545562 - RNA, 19 nt, Homo sapiens
  misc_RNA (1)...(19): siRNA sense strand
aagaagacguccauauugg

SEQ ID NO: 545563 - RNA, 19 nt, Homo sapiens
  misc_RNA (1)...(19): siRNA sense strand
cucauaaacugcauauugu

SEQ ID NO: 545564 - RNA, 19 nt, Homo sapiens
  misc_RNA (1)...(19): siRNA sense strand
cgucacaaauucaccagau

SEQ ID NO: 545565 - RNA, 19 nt, Homo sapiens
  misc_RNA (1)...(19): siRNA sense strand
uggagucucuuauuuguac

SEQ ID NO: 545566 - RNA, 19 nt, Homo sapiens
  misc_RNA (1)...(19): siRNA sense strand
cagauuggauucgucacaa

SEQ ID NO: 545567 - RNA, 19 nt, Homo sapiens
  misc_RNA (1)...(19): siRNA sense strand
agacguccauauugggaaa

SEQ ID NO: 545568 - RNA, 19 nt, Homo sapiens
  misc_RNA (1)...(19): siRNA sense strand
uguggagucucuuauuugu

SEQ ID NO: 545569 - RNA, 19 nt, Homo sapiens
  misc_RNA (1)...(19): siRNA sense strand
ucacaaauucaccagauca

SEQ ID NO: 545570 - RNA, 19 nt, Homo sapiens
  misc_RNA (1)...(19): siRNA sense strand
aaagguguggagucucuua

SEQ ID NO: 545571 - RNA, 19 nt, Homo sapiens
  misc_RNA (1)...(19): siRNA sense strand
ggccucaccugaagaucau

SEQ ID NO: 545572 - RNA, 19 nt, Homo sapiens
  misc_RNA (1)...(19): siRNA sense strand
aaauucaccagaucaagaa

SEQ ID NO: 545573 - RNA, 19 nt, Homo sapiens
  misc_RNA (1)...(19): siRNA sense strand
gcgcuuaguaguucaaugg

SEQ ID NO: 545574 - RNA, 19 nt, Homo sapiens
  misc_RNA (1)...(19): siRNA sense strand
guacaagaagacguccaua

SEQ ID NO: 545575 - RNA, 19 nt, Homo sapiens
  misc_RNA (1)...(19): siRNA sense strand
ccucaaguucacaagaaua

SEQ ID NO: 545576 - RNA, 19 nt, Homo sapiens
  misc_RNA (1)...(19): siRNA sense strand
gauccacagaacccucaua

SEQ ID NO: 545577 - RNA, 19 nt, Homo sapiens
  misc_RNA (1)...(19): siRNA sense strand
caaaagguguggagucucu

SEQ ID NO: 545578 - RNA, 19 nt, Homo sapiens
  misc_RNA (1)...(19): siRNA sense strand
agauuggauucgucacaaa

SEQ ID NO: 545579 - RNA, 19 nt, Homo sapiens
  misc_RNA (1)...(19): siRNA sense strand
cacagaacccucauaaacu

SEQ ID NO: 545580 - RNA, 19 nt, Homo sapiens
  misc_RNA (1)...(19): siRNA sense strand
uacaagaagacguccauau

SEQ ID NO: 545581 - RNA, 19 nt, Homo sapiens
  misc_RNA (1)...(19): siRNA sense strand
gauuggauucgucacaaau

SEQ ID NO: 545582 - RNA, 19 nt, Homo sapiens
  misc_RNA (1)...(19): siRNA sense strand
guguggagucucuuauuug

SEQ ID NO: 545583 - RNA, 19 nt, Homo sapiens
  misc_RNA (1)...(19): siRNA sense strand
gaacccucauaaacugcau

SEQ ID NO: 545584 - RNA, 19 nt, Homo sapiens
  misc_RNA (1)...(19): siRNA sense strand
agaucaagaauuccagaaa

SEQ ID NO: 545585 - RNA, 19 nt, Homo sapiens
  misc_RNA (1)...(19): siRNA sense strand
gacaaaagguguggagucu

SEQ ID NO: 545586 - RNA, 19 nt, Homo sapiens
  misc_RNA (1)...(19): siRNA sense strand
auaaagaugcuuggauuag

SEQ ID NO: 545587 - RNA, 19 nt, Homo sapiens
  misc_RNA (1)...(19): siRNA sense strand
uucaccagaucaagaauuc

SEQ ID NO: 545588 - RNA, 19 nt, Homo sapiens
  misc_RNA (1)...(19): siRNA sense strand
uuggauucgucacaaauuc

SEQ ID NO: 545589 - RNA, 19 nt, Homo sapiens
  misc_RNA (1)...(19): siRNA sense strand
gaaaguaguuaagcauuug

SEQ ID NO: 545590 - RNA, 19 nt, Homo sapiens
  misc_RNA (1)...(19): siRNA sense strand
gguguggagucucuuauuu

SEQ ID NO: 545591 - RNA, 19 nt, Homo sapiens
  misc_RNA (1)...(19): siRNA sense strand
caagaagacguccauauug

SEQ ID NO: 545592 - RNA, 19 nt, Homo sapiens
  misc_RNA (1)...(19): siRNA sense strand
uaaagaugcuuggauuaga

SEQ ID NO: 545593 - RNA, 19 nt, Homo sapiens
  misc_RNA (1)...(19): siRNA sense strand
aaagaugcuuggauuagaa

SEQ ID NO: 545594 - RNA, 19 nt, Homo sapiens
  misc_RNA (1)...(19): siRNA sense strand
aagaauaucccuucaguga

SEQ ID NO: 545595 - RNA, 19 nt, Homo sapiens
  misc_RNA (1)...(19): siRNA sense strand
ccucauaaacugcauauug

SEQ ID NO: 545596 - RNA, 19 nt, Homo sapiens
  misc_RNA (1)...(19): siRNA sense strand
gaucaagaauuccagaaaa

SEQ ID NO: 545597 - RNA, 19 nt, Homo sapiens
  misc_RNA (1)...(19): siRNA sense strand
ccacagaacccucauaaac

SEQ ID NO: 545598 - RNA, 19 nt, Homo sapiens
  misc_RNA (1)...(19): siRNA sense strand
acaagaagacguccauauu

SEQ ID NO: 545599 - RNA, 19 nt, Homo sapiens
  misc_RNA (1)...(19): siRNA sense strand
caaauucaccagaucaaga

SEQ ID NO: 545600 - RNA, 19 nt, Homo sapiens
  misc_RNA (1)...(19): siRNA sense strand
acagaacccucauaaacug

SEQ ID NO: 545601 - RNA, 19 nt, Homo sapiens
  misc_RNA (1)...(19): siRNA sense strand
acaagaauaucccuucagu

SEQ ID NO: 545602 - RNA, 19 nt, Homo sapiens
  misc_RNA (1)...(19): siRNA sense strand
gcacauaccccucaaguuc

SEQ ID NO: 545603 - RNA, 19 nt, Homo sapiens
  misc_RNA (1)...(19): siRNA sense strand
ucacaagaauaucccuuca

SEQ ID NO: 545604 - RNA, 19 nt, Homo sapiens
  misc_RNA (1)...(19): siRNA sense strand
aagaagacguccauauugg

SEQ ID NO: 545605 - RNA, 19 nt, Homo sapiens
  misc_RNA (1)...(19): siRNA sense strand
cucauaaacugcauauugu

SEQ ID NO: 545606 - RNA, 19 nt, Homo sapiens
  misc_RNA (1)...(19): siRNA sense strand
cgucacaaauucaccagau

SEQ ID NO: 545607 - RNA, 19 nt, Homo sapiens
  misc_RNA (1)...(19): siRNA sense strand
uggagucucuuauuuguac

SEQ ID NO: 545608 - RNA, 19 nt, Homo sapiens
  misc_RNA (1)...(19): siRNA sense strand
cagauuggauucgucacaa

SEQ ID NO: 545609 - RNA, 19 nt, Homo sapiens
  misc_RNA (1)...(19): siRNA sense strand
agacguccauauugggaaa

SEQ ID NO: 545610 - RNA, 19 nt, Homo sapiens
  misc_RNA (1)...(19): siRNA sense strand
uguggagucucuuauuugu

SEQ ID NO: 545611 - RNA, 19 nt, Homo sapiens
  misc_RNA (1)...(19): siRNA sense strand
ucacaaauucaccagauca

SEQ ID NO: 545612 - RNA, 19 nt, Homo sapiens
  misc_RNA (1)...(19): siRNA sense strand
aaagguguggagucucuua

SEQ ID NO: 545613 - RNA, 19 nt, Homo sapiens
  misc_RNA (1)...(19): siRNA sense strand
ggccucaccugaagaucau

SEQ ID NO: 545614 - RNA, 19 nt, Homo sapiens
  misc_RNA (1)...(19): siRNA sense strand
aaauucaccagaucaagaa

SEQ ID NO: 545615 - RNA, 19 nt, Homo sapiens
  misc_RNA (1)...(19): siRNA sense strand
gcgcuuaguaguucaaugg

SEQ ID NO: 545616 - RNA, 19 nt, Homo sapiens
  misc_RNA (1)...(19): siRNA sense strand
guacaagaagacguccaua

SEQ ID NO: 545617 - RNA, 19 nt, Homo sapiens
  misc_RNA (1)...(19): siRNA sense strand
ccucaaguucacaagaaua

SEQ ID NO: 545618 - RNA, 19 nt, Homo sapiens
  misc_RNA (1)...(19): siRNA sense strand
gauccacagaacccucaua

SEQ ID NO: 545619 - RNA, 19 nt, Homo sapiens
  misc_RNA (1)...(19): siRNA sense strand
caaaagguguggagucucu

SEQ ID NO: 545620 - RNA, 19 nt, Homo sapiens
  misc_RNA (1)...(19): siRNA sense strand
agauuggauucgucacaaa

SEQ ID NO: 545621 - RNA, 19 nt, Homo sapiens
  misc_RNA (1)...(19): siRNA sense strand
cacagaacccucauaaacu

SEQ ID NO: 545622 - RNA, 19 nt, Homo sapiens
  misc_RNA (1)...(19): siRNA sense strand
uacaagaagacguccauau

SEQ ID NO: 545623 - RNA, 19 nt, Homo sapiens
  misc_RNA (1)...(19): siRNA sense strand
gauuggauucgucacaaau

SEQ ID NO: 545624 - RNA, 19 nt, Homo sapiens
  misc_RNA (1)...(19): siRNA sense strand
guguggagucucuuauuug

SEQ ID NO: 545625 - RNA, 19 nt, Homo sapiens
  misc_RNA (1)...(19): siRNA sense strand
gaacccucauaaacugcau

SEQ ID NO: 545626 - RNA, 19 nt, Homo sapiens
  misc_RNA (1)...(19): siRNA sense strand
agaucaagaauuccagaaa

SEQ ID NO: 545627 - RNA, 19 nt, Homo sapiens
  misc_RNA (1)...(19): siRNA sense strand
gacaaaagguguggagucu

SEQ ID NO: 545628 - RNA, 19 nt, Homo sapiens
  misc_RNA (1)...(19): siRNA sense strand
auaaagaugcuuggauuag

SEQ ID NO: 545629 - RNA, 19 nt, Homo sapiens
  misc_RNA (1)...(19): siRNA sense strand
uucaccagaucaagaauuc

SEQ ID NO: 545630 - RNA, 19 nt, Homo sapiens
  misc_RNA (1)...(19): siRNA sense strand
uuggauucgucacaaauuc

SEQ ID NO: 545631 - RNA, 19 nt, Homo sapiens
  misc_RNA (1)...(19): siRNA sense strand
gaaaguaguuaagcauuug

SEQ ID NO: 545632 - RNA, 19 nt, Homo sapiens
  misc_RNA (1)...(19): siRNA sense strand
gguguggagucucuuauuu

SEQ ID NO: 545633 - RNA, 19 nt, Homo sapiens
  misc_RNA (1)...(19): siRNA sense strand
caagaagacguccauauug

SEQ ID NO: 545634 - RNA, 19 nt, Homo sapiens
  misc_RNA (1)...(19): siRNA sense strand
uaaagaugcuuggauuaga

SEQ ID NO: 545635 - RNA, 19 nt, Homo sapiens
  misc_RNA (1)...(19): siRNA sense strand
aaagaugcuuggauuagaa

SEQ ID NO: 545636 - RNA, 19 nt, Homo sapiens
  misc_RNA (1)...(19): siRNA sense strand
aagaauaucccuucaguga

SEQ ID NO: 545637 - RNA, 19 nt, Homo sapiens
  misc_RNA (1)...(19): siRNA sense strand
ccucauaaacugcauauug

SEQ ID NO: 545638 - RNA, 19 nt, Homo sapiens
  misc_RNA (1)...(19): siRNA sense strand
gaucaagaauuccagaaaa

SEQ ID NO: 545639 - RNA, 19 nt, Homo sapiens
  misc_RNA (1)...(19): siRNA sense strand
ccacagaacccucauaaac

SEQ ID NO: 545640 - RNA, 19 nt, Homo sapiens
  misc_RNA (1)...(19): siRNA sense strand
acaagaagacguccauauu

SEQ ID NO: 545641 - RNA, 19 nt, Homo sapiens
  misc_RNA (1)...(19): siRNA sense strand
caaauucaccagaucaaga

SEQ ID NO: 545642 - RNA, 19 nt, Homo sapiens
  misc_RNA (1)...(19): siRNA sense strand
acagaacccucauaaacug

SEQ ID NO: 545643 - RNA, 19 nt, Homo sapiens
  misc_RNA (1)...(19): siRNA sense strand
acaagaauaucccuucagu

SEQ ID NO: 545644 - RNA, 19 nt, Homo sapiens
  misc_RNA (1)...(19): siRNA sense strand
gcacauaccccucaaguuc

SEQ ID NO: 545645 - RNA, 19 nt, Homo sapiens
  misc_RNA (1)...(19): siRNA sense strand
ucacaagaauaucccuuca

SEQ ID NO: 545646 - RNA, 19 nt, Homo sapiens
  misc_RNA (1)...(19): siRNA sense strand
aagaagacguccauauugg

SEQ ID NO: 545647 - RNA, 19 nt, Homo sapiens
  misc_RNA (1)...(19): siRNA sense strand
cucauaaacugcauauugu

SEQ ID NO: 545648 - RNA, 19 nt, Homo sapiens
  misc_RNA (1)...(19): siRNA sense strand
cgucacaaauucaccagau

SEQ ID NO: 545649 - RNA, 19 nt, Homo sapiens
  misc_RNA (1)...(19): siRNA sense strand
uggagucucuuauuuguac

SEQ ID NO: 545650 - RNA, 19 nt, Homo sapiens
  misc_RNA (1)...(19): siRNA sense strand
cagauuggauucgucacaa

SEQ ID NO: 545651 - RNA, 19 nt, Homo sapiens
  misc_RNA (1)...(19): siRNA sense strand
agacguccauauugggaaa

SEQ ID NO: 545652 - RNA, 19 nt, Homo sapiens
  misc_RNA (1)...(19): siRNA sense strand
uguggagucucuuauuugu

SEQ ID NO: 545653 - RNA, 19 nt, Homo sapiens
  misc_RNA (1)...(19): siRNA sense strand
ucacaaauucaccagauca

SEQ ID NO: 545654 - RNA, 19 nt, Homo sapiens
  misc_RNA (1)...(19): siRNA sense strand
aaagguguggagucucuua

SEQ ID NO: 545655 - RNA, 19 nt, Homo sapiens
  misc_RNA (1)...(19): siRNA sense strand
ggccucaccugaagaucau

SEQ ID NO: 545656 - RNA, 19 nt, Homo sapiens
  misc_RNA (1)...(19): siRNA sense strand
aaauucaccagaucaagaa

SEQ ID NO: 545657 - RNA, 19 nt, Homo sapiens
  misc_RNA (1)...(19): siRNA sense strand
gcgcuuaguaguucaaugg

SEQ ID NO: 545658 - RNA, 19 nt, Homo sapiens
  misc_RNA (1)...(19): siRNA sense strand
guacaagaagacguccaua

SEQ ID NO: 545659 - RNA, 19 nt, Homo sapiens
  misc_RNA (1)...(19): siRNA sense strand
ccucaaguucacaagaaua

SEQ ID NO: 545660 - RNA, 19 nt, Homo sapiens
  misc_RNA (1)...(19): siRNA sense strand
gauccacagaacccucaua

SEQ ID NO: 545661 - RNA, 19 nt, Homo sapiens
  misc_RNA (1)...(19): siRNA sense strand
caaaagguguggagucucu

SEQ ID NO: 545662 - RNA, 19 nt, Homo sapiens
  misc_RNA (1)...(19): siRNA sense strand
agauuggauucgucacaaa

SEQ ID NO: 545663 - RNA, 19 nt, Homo sapiens
  misc_RNA (1)...(19): siRNA sense strand
cacagaacccucauaaacu

SEQ ID NO: 545664 - RNA, 19 nt, Homo sapiens
  misc_RNA (1)...(19): siRNA sense strand
uacaagaagacguccauau

SEQ ID NO: 545665 - RNA, 19 nt, Homo sapiens
  misc_RNA (1)...(19): siRNA sense strand
gauuggauucgucacaaau

SEQ ID NO: 545666 - RNA, 19 nt, Homo sapiens
  misc_RNA (1)...(19): siRNA sense strand
guguggagucucuuauuug

SEQ ID NO: 545667 - RNA, 19 nt, Homo sapiens
  misc_RNA (1)...(19): siRNA sense strand
gaacccucauaaacugcau

SEQ ID NO: 545668 - RNA, 19 nt, Homo sapiens
  misc_RNA (1)...(19): siRNA sense strand
agaucaagaauuccagaaa

SEQ ID NO: 545669 - RNA, 19 nt, Homo sapiens
  misc_RNA (1)...(19): siRNA sense strand
gacaaaagguguggagucu

SEQ ID NO: 545670 - RNA, 19 nt, Homo sapiens
  misc_RNA (1)...(19): siRNA sense strand
auaaagaugcuuggauuag

SEQ ID NO: 545671 - RNA, 19 nt, Homo sapiens
  misc_RNA (1)...(19): siRNA sense strand
uucaccagaucaagaauuc

SEQ ID NO: 545672 - RNA, 19 nt, Homo sapiens
  misc_RNA (1)...(19): siRNA sense strand
uuggauucgucacaaauuc

SEQ ID NO: 545673 - RNA, 19 nt, Homo sapiens
  misc_RNA (1)...(19): siRNA sense strand
gaaggucacuauguucaug

SEQ ID NO: 545674 - RNA, 19 nt, Homo sapiens
  misc_RNA (1)...(19): siRNA sense strand
aaaccucgguggaaaguca

SEQ ID NO: 545675 - RNA, 19 nt, Homo sapiens
  misc_RNA (1)...(19): siRNA sense strand
aauggaaggucacuauguu

SEQ ID NO: 545676 - RNA, 19 nt, Homo sapiens
  misc_RNA (1)...(19): siRNA sense strand
gaaaauggaaggucacuau

SEQ ID NO: 545677 - RNA, 19 nt, Homo sapiens
  misc_RNA (1)...(19): siRNA sense strand
ggaacaucauugcaacaca

SEQ ID NO: 545678 - RNA, 19 nt, Homo sapiens
  misc_RNA (1)...(19): siRNA sense strand
ggaagaauaaaugucugua

SEQ ID NO: 545679 - RNA, 19 nt, Homo sapiens
  misc_RNA (1)...(19): siRNA sense strand
ucagauacgcauccaagaa

SEQ ID NO: 545680 - RNA, 19 nt, Homo sapiens
  misc_RNA (1)...(19): siRNA sense strand
gcugugcucuacaagacuu

SEQ ID NO: 545681 - RNA, 19 nt, Homo sapiens
  misc_RNA (1)...(19): siRNA sense strand
ggcagacgccaaggcauua

SEQ ID NO: 545682 - RNA, 19 nt, Homo sapiens
  misc_RNA (1)...(19): siRNA sense strand
aaacugguagcuaugcuuu

SEQ ID NO: 545683 - RNA, 19 nt, Homo sapiens
  misc_RNA (1)...(19): siRNA sense strand
caagggugcugugcucuac

SEQ ID NO: 545684 - RNA, 19 nt, Homo sapiens
  misc_RNA (1)...(19): siRNA sense strand
uccaagaagucggguggua

SEQ ID NO: 545685 - RNA, 19 nt, Homo sapiens
  misc_RNA (1)...(19): siRNA sense strand
acugguagcuaugcuuuga

SEQ ID NO: 545686 - RNA, 19 nt, Homo sapiens
  misc_RNA (1)...(19): siRNA sense strand
gcugggaacaucauugcaa

SEQ ID NO: 545687 - RNA, 19 nt, Homo sapiens
  misc_RNA (1)...(19): siRNA sense strand
ccuucaaacugguagcuau

SEQ ID NO: 545688 - RNA, 19 nt, Homo sapiens
  misc_RNA (1)...(19): siRNA sense strand
gcagacgccaaggcauuaa

SEQ ID NO: 545689 - RNA, 19 nt, Homo sapiens
  misc_RNA (1)...(19): siRNA sense strand
gugcugugcucuacaagac

SEQ ID NO: 545690 - RNA, 19 nt, Homo sapiens
  misc_RNA (1)...(19): siRNA sense strand
gccaaggcauuaagaaaau

SEQ ID NO: 545691 - RNA, 19 nt, Homo sapiens
  misc_RNA (1)...(19): siRNA sense strand
ccaagggugcugugcucua

SEQ ID NO: 545692 - RNA, 19 nt, Homo sapiens
  misc_RNA (1)...(19): siRNA sense strand
cagauacgcauccaagaag

SEQ ID NO: 545693 - RNA, 19 nt, Homo sapiens
  misc_RNA (1)...(19): siRNA sense strand
gggaagaauaaaugucugu

SEQ ID NO: 545694 - RNA, 19 nt, Homo sapiens
  misc_RNA (1)...(19): siRNA sense strand
aaauggaaggucacuaugu

SEQ ID NO: 545695 - RNA, 19 nt, Homo sapiens
  misc_RNA (1)...(19): siRNA sense strand
acacggaggcuguggaucu

SEQ ID NO: 545696 - RNA, 19 nt, Homo sapiens
  misc_RNA (1)...(19): siRNA sense strand
ggaaggucacuauguucau

SEQ ID NO: 545697 - RNA, 19 nt, Homo sapiens
  misc_RNA (1)...(19): siRNA sense strand
gguguugggaagaauaaau

SEQ ID NO: 545698 - RNA, 19 nt, Homo sapiens
  misc_RNA (1)...(19): siRNA sense strand
ugagggcaccuucaaacug

SEQ ID NO: 545699 - RNA, 19 nt, Homo sapiens
  misc_RNA (1)...(19): siRNA sense strand
caaacugguagcuaugcuu

SEQ ID NO: 545700 - RNA, 19 nt, Homo sapiens
  misc_RNA (1)...(19): siRNA sense strand
gggcaccuucaaacuggua

SEQ ID NO: 545701 - RNA, 19 nt, Homo sapiens
  misc_RNA (1)...(19): siRNA sense strand
gaaggucacuauguucaug

SEQ ID NO: 545702 - RNA, 19 nt, Homo sapiens
  misc_RNA (1)...(19): siRNA sense strand
ggaacaucauugcaacaca

SEQ ID NO: 545703 - RNA, 19 nt, Homo sapiens
  misc_RNA (1)...(19): siRNA sense strand
ggaagaauaaaugucugua

SEQ ID NO: 545704 - RNA, 19 nt, Homo sapiens
  misc_RNA (1)...(19): siRNA sense strand
gcugugcucuacaagacuu

SEQ ID NO: 545705 - RNA, 19 nt, Homo sapiens
  misc_RNA (1)...(19): siRNA sense strand
aaacugguagcuaugcuuu

SEQ ID NO: 545706 - RNA, 19 nt, Homo sapiens
  misc_RNA (1)...(19): siRNA sense strand
caagggugcugugcucuac

SEQ ID NO: 545707 - RNA, 19 nt, Homo sapiens
  misc_RNA (1)...(19): siRNA sense strand
acugguagcuaugcuuuga

SEQ ID NO: 545708 - RNA, 19 nt, Homo sapiens
  misc_RNA (1)...(19): siRNA sense strand
gcugggaacaucauugcaa

SEQ ID NO: 545709 - RNA, 19 nt, Homo sapiens
  misc_RNA (1)...(19): siRNA sense strand
ccuucaaacugguagcuau

SEQ ID NO: 545710 - RNA, 19 nt, Homo sapiens
  misc_RNA (1)...(19): siRNA sense strand
gugcugugcucuacaagac

SEQ ID NO: 545711 - RNA, 19 nt, Homo sapiens
  misc_RNA (1)...(19): siRNA sense strand
ccaagggugcugugcucua

SEQ ID NO: 545712 - RNA, 19 nt, Homo sapiens
  misc_RNA (1)...(19): siRNA sense strand
gggaagaauaaaugucugu

SEQ ID NO: 545713 - RNA, 19 nt, Homo sapiens
  misc_RNA (1)...(19): siRNA sense strand
ggaaggucacuauguucau

SEQ ID NO: 545714 - RNA, 19 nt, Homo sapiens
  misc_RNA (1)...(19): siRNA sense strand
acacggaggcuguggaucu

SEQ ID NO: 545715 - RNA, 19 nt, Homo sapiens
  misc_RNA (1)...(19): siRNA sense strand
gguguugggaagaauaaau

SEQ ID NO: 545716 - RNA, 19 nt, Homo sapiens
  misc_RNA (1)...(19): siRNA sense strand
ugagggcaccuucaaacug

SEQ ID NO: 545717 - RNA, 19 nt, Homo sapiens
  misc_RNA (1)...(19): siRNA sense strand
caaacugguagcuaugcuu

SEQ ID NO: 545718 - RNA, 19 nt, Homo sapiens
  misc_RNA (1)...(19): siRNA sense strand
gggcaccuucaaacuggua

SEQ ID NO: 545719 - RNA, 19 nt, Homo sapiens
  misc_RNA (1)...(19): siRNA sense strand
gaaggucacuauguucaug

SEQ ID NO: 545720 - RNA, 19 nt, Homo sapiens
  misc_RNA (1)...(19): siRNA sense strand
aaaccucgguggaaaguca

SEQ ID NO: 545721 - RNA, 19 nt, Homo sapiens
  misc_RNA (1)...(19): siRNA sense strand
aauggaaggucacuauguu

SEQ ID NO: 545722 - RNA, 19 nt, Homo sapiens
  misc_RNA (1)...(19): siRNA sense strand
gaaaauggaaggucacuau

SEQ ID NO: 545723 - RNA, 19 nt, Homo sapiens
  misc_RNA (1)...(19): siRNA sense strand
ggaacaucauugcaacaca

SEQ ID NO: 545724 - RNA, 19 nt, Homo sapiens
  misc_RNA (1)...(19): siRNA sense strand
ucagauacgcauccaagaa

SEQ ID NO: 545725 - RNA, 19 nt, Homo sapiens
  misc_RNA (1)...(19): siRNA sense strand
ggcagacgccaaggcauua

SEQ ID NO: 545726 - RNA, 19 nt, Homo sapiens
  misc_RNA (1)...(19): siRNA sense strand
uccaagaagucggguggua

SEQ ID NO: 545727 - RNA, 19 nt, Homo sapiens
  misc_RNA (1)...(19): siRNA sense strand
gcugggaacaucauugcaa

SEQ ID NO: 545728 - RNA, 19 nt, Homo sapiens
  misc_RNA (1)...(19): siRNA sense strand
gcagacgccaaggcauuaa

SEQ ID NO: 545729 - RNA, 19 nt, Homo sapiens
  misc_RNA (1)...(19): siRNA sense strand
gccaaggcauuaagaaaau

SEQ ID NO: 545730 - RNA, 19 nt, Homo sapiens
  misc_RNA (1)...(19): siRNA sense strand
cagauacgcauccaagaag

SEQ ID NO: 545731 - RNA, 19 nt, Homo sapiens
  misc_RNA (1)...(19): siRNA sense strand
aaauggaaggucacuaugu

SEQ ID NO: 545732 - RNA, 19 nt, Homo sapiens
  misc_RNA (1)...(19): siRNA sense strand
ggaaggucacuauguucau

SEQ ID NO: 545733 - RNA, 19 nt, Homo sapiens
  misc_RNA (1)...(19): siRNA sense strand
aaugugagcuucaaguaua

SEQ ID NO: 545734 - RNA, 19 nt, Homo sapiens
  misc_RNA (1)...(19): siRNA sense strand
acaccaaacuggaauuaaa

SEQ ID NO: 545735 - RNA, 19 nt, Homo sapiens
  misc_RNA (1)...(19): siRNA sense strand
gaaggaggcugccaaagcu

SEQ ID NO: 545736 - RNA, 19 nt, Homo sapiens
  misc_RNA (1)...(19): siRNA sense strand
gaagaaaugaggaagauca

SEQ ID NO: 545737 - RNA, 19 nt, Homo sapiens
  misc_RNA (1)...(19): siRNA sense strand
ggccuugcaucuacaauaa

SEQ ID NO: 545738 - RNA, 19 nt, Homo sapiens
  misc_RNA (1)...(19): siRNA sense strand
gaacuacauugcgagguuu

SEQ ID NO: 545739 - RNA, 19 nt, Homo sapiens
  misc_RNA (1)...(19): siRNA sense strand
ccaaggagcuagaggacuu

SEQ ID NO: 545740 - RNA, 19 nt, Homo sapiens
  misc_RNA (1)...(19): siRNA sense strand
guuauggccucauugguuu

SEQ ID NO: 545741 - RNA, 19 nt, Homo sapiens
  misc_RNA (1)...(19): siRNA sense strand
ggagaagacgcuacagaaa

SEQ ID NO: 545742 - RNA, 19 nt, Homo sapiens
  misc_RNA (1)...(19): siRNA sense strand
gcaagaagcuaaaagacuu

SEQ ID NO: 545743 - RNA, 19 nt, Homo sapiens
  misc_RNA (1)...(19): siRNA sense strand
gcagagagaccacagaagu

SEQ ID NO: 545744 - RNA, 19 nt, Homo sapiens
  misc_RNA (1)...(19): siRNA sense strand
ggcuagagcuggaggagaa

SEQ ID NO: 545745 - RNA, 19 nt, Homo sapiens
  misc_RNA (1)...(19): siRNA sense strand
gcugcuaacuggagagcua

SEQ ID NO: 545746 - RNA, 19 nt, Homo sapiens
  misc_RNA (1)...(19): siRNA sense strand
gaaaaggacaugaagaaaa

SEQ ID NO: 545747 - RNA, 19 nt, Homo sapiens
  misc_RNA (1)...(19): siRNA sense strand
ggaagaucauugggcgaua

SEQ ID NO: 545748 - RNA, 19 nt, Homo sapiens
  misc_RNA (1)...(19): siRNA sense strand
gaggagaaccagaugaaga

SEQ ID NO: 545749 - RNA, 19 nt, Homo sapiens
  misc_RNA (1)...(19): siRNA sense strand
caaguggccuggagacauc

SEQ ID NO: 545750 - RNA, 19 nt, Homo sapiens
  misc_RNA (1)...(19): siRNA sense strand
ccaaucaccuggauaucga

SEQ ID NO: 545751 - RNA, 19 nt, Homo sapiens
  misc_RNA (1)...(19): siRNA sense strand
gaucagauugcacacauga

SEQ ID NO: 545752 - RNA, 19 nt, Homo sapiens
  misc_RNA (1)...(19): siRNA sense strand
cuagaggacuuugagauga

SEQ ID NO: 545753 - RNA, 19 nt, Homo sapiens
  misc_RNA (1)...(19): siRNA sense strand
gaaauuugggucugugaga

SEQ ID NO: 545754 - RNA, 19 nt, Homo sapiens
  misc_RNA (1)...(19): siRNA sense strand
aagagcagcuggacuuaga

SEQ ID NO: 545755 - RNA, 19 nt, Homo sapiens
  misc_RNA (1)...(19): siRNA sense strand
gggccaugcuggagaaaga

SEQ ID NO: 545756 - RNA, 19 nt, Homo sapiens
  misc_RNA (1)...(19): siRNA sense strand
cuggagacauccuggcuua

SEQ ID NO: 545757 - RNA, 19 nt, Homo sapiens
  misc_RNA (1)...(19): siRNA sense strand
guaccaauaucauucacau

SEQ ID NO: 545758 - RNA, 19 nt, Homo sapiens
  misc_RNA (1)...(19): siRNA sense strand
uagauuugcugaccaagga

SEQ ID NO: 545759 - RNA, 19 nt, Homo sapiens
  misc_RNA (1)...(19): siRNA sense strand
aaauggagauguugucaca

SEQ ID NO: 545760 - RNA, 19 nt, Homo sapiens
  misc_RNA (1)...(19): siRNA sense strand
gagacauccuggcuuacaa

SEQ ID NO: 545761 - RNA, 19 nt, Homo sapiens
  misc_RNA (1)...(19): siRNA sense strand
gagagggucgugagcgaua

SEQ ID NO: 545762 - RNA, 19 nt, Homo sapiens
  misc_RNA (1)...(19): siRNA sense strand
gaccacagaaguagauuug

SEQ ID NO: 545763 - RNA, 19 nt, Homo sapiens
  misc_RNA (1)...(19): siRNA sense strand
acuuagaucucucaccuuu

SEQ ID NO: 545764 - RNA, 19 nt, Homo sapiens
  misc_RNA (1)...(19): siRNA sense strand
caaccucucacuuaccuuu

SEQ ID NO: 545765 - RNA, 19 nt, Homo sapiens
  misc_RNA (1)...(19): siRNA sense strand
gcguuaccaucagcauuua

SEQ ID NO: 545766 - RNA, 19 nt, Homo sapiens
  misc_RNA (1)...(19): siRNA sense strand
cgaaaacacucucauguca

SEQ ID NO: 545767 - RNA, 19 nt, Homo sapiens
  misc_RNA (1)...(19): siRNA sense strand
cagauggcaugauccgaaa

SEQ ID NO: 545768 - RNA, 19 nt, Homo sapiens
  misc_RNA (1)...(19): siRNA sense strand
ccuccgaccuggccaagaa

SEQ ID NO: 545769 - RNA, 19 nt, Homo sapiens
  misc_RNA (1)...(19): siRNA sense strand
uagaggacuuugagaugaa

SEQ ID NO: 545770 - RNA, 19 nt, Homo sapiens
  misc_RNA (1)...(19): siRNA sense strand
gaagaucauugggcgauac

SEQ ID NO: 545771 - RNA, 19 nt, Homo sapiens
  misc_RNA (1)...(19): siRNA sense strand
agaacuacauugcgagguu

SEQ ID NO: 545772 - RNA, 19 nt, Homo sapiens
  misc_RNA (1)...(19): siRNA sense strand
cagagagaccacagaagua

SEQ ID NO: 545773 - RNA, 19 nt, Homo sapiens
  misc_RNA (1)...(19): siRNA sense strand
ccaaccaccuggaccuaga

SEQ ID NO: 545774 - RNA, 19 nt, Homo sapiens
  misc_RNA (1)...(19): siRNA sense strand
uaaauggaauuggaaaguc

SEQ ID NO: 545775 - RNA, 19 nt, Homo sapiens
  misc_RNA (1)...(19): siRNA sense strand
uugcacacaugaagaacua

SEQ ID NO: 545776 - RNA, 19 nt, Homo sapiens
  misc_RNA (1)...(19): siRNA sense strand
uggaguacaugaugaagug

SEQ ID NO: 545777 - RNA, 19 nt, Homo sapiens
  misc_RNA (1)...(19): siRNA sense strand
acacucucaugucaagaua

SEQ ID NO: 545778 - RNA, 19 nt, Homo sapiens
  misc_RNA (1)...(19): siRNA sense strand
gcaaggagaagacgcuaca

SEQ ID NO: 545779 - RNA, 19 nt, Homo sapiens
  misc_RNA (1)...(19): siRNA sense strand
gcuagaggacuuugagaug

SEQ ID NO: 545780 - RNA, 19 nt, Homo sapiens
  misc_RNA (1)...(19): siRNA sense strand
gcagaagugccgagugugu

SEQ ID NO: 545781 - RNA, 19 nt, Homo sapiens
  misc_RNA (1)...(19): siRNA sense strand
acccagagaucaaggagaa

SEQ ID NO: 545782 - RNA, 19 nt, Homo sapiens
  misc_RNA (1)...(19): siRNA sense strand
ggagcuggaugccgacaag

SEQ ID NO: 545783 - RNA, 19 nt, Homo sapiens
  misc_RNA (1)...(19): siRNA sense strand
caaacuggaauuaaacuca

SEQ ID NO: 545784 - RNA, 19 nt, Homo sapiens
  misc_RNA (1)...(19): siRNA sense strand
gcacaucgacaucuaccau

SEQ ID NO: 545785 - RNA, 19 nt, Homo sapiens
  misc_RNA (1)...(19): siRNA sense strand
ccaccaaucaccuggauau

SEQ ID NO: 545786 - RNA, 19 nt, Homo sapiens
  misc_RNA (1)...(19): siRNA sense strand
ucaaggagaaggaagaaau

SEQ ID NO: 545787 - RNA, 19 nt, Homo sapiens
  misc_RNA (1)...(19): siRNA sense strand
gaagugcuacccagagauc

SEQ ID NO: 545788 - RNA, 19 nt, Homo sapiens
  misc_RNA (1)...(19): siRNA sense strand
uuagaucucucaccuuugg

SEQ ID NO: 545789 - RNA, 19 nt, Homo sapiens
  misc_RNA (1)...(19): siRNA sense strand
caacaagaaacugaaguau

SEQ ID NO: 545790 - RNA, 19 nt, Homo sapiens
  misc_RNA (1)...(19): siRNA sense strand
ugauggaagucgacacaga

SEQ ID NO: 545791 - RNA, 19 nt, Homo sapiens
  misc_RNA (1)...(19): siRNA sense strand
ugacaccaaacuggaauua

SEQ ID NO: 545792 - RNA, 19 nt, Homo sapiens
  misc_RNA (1)...(19): siRNA sense strand
gcagguugcacaggaaauu

SEQ ID NO: 545793 - RNA, 19 nt, Homo sapiens
  misc_RNA (1)...(19): siRNA sense strand
ggcguuaccaucagcauuu

SEQ ID NO: 545794 - RNA, 19 nt, Homo sapiens
  misc_RNA (1)...(19): siRNA sense strand
ccacagaaguagauuugcu

SEQ ID NO: 545795 - RNA, 19 nt, Homo sapiens
  misc_RNA (1)...(19): siRNA sense strand
ucacaugcacaacaagaaa

SEQ ID NO: 545796 - RNA, 19 nt, Homo sapiens
  misc_RNA (1)...(19): siRNA sense strand
acaacaagaaacugaagua

SEQ ID NO: 545797 - RNA, 19 nt, Homo sapiens
  misc_RNA (1)...(19): siRNA sense strand
gggccuugcaucuacaaua

SEQ ID NO: 545798 - RNA, 19 nt, Homo sapiens
  misc_RNA (1)...(19): siRNA sense strand
gagaagacgcuacagaaaa

SEQ ID NO: 545799 - RNA, 19 nt, Homo sapiens
  misc_RNA (1)...(19): siRNA sense strand
gagcuacuacccacagaug

SEQ ID NO: 545800 - RNA, 19 nt, Homo sapiens
  misc_RNA (1)...(19): siRNA sense strand
caagauagggcguuaccau

SEQ ID NO: 545801 - RNA, 19 nt, Homo sapiens
  misc_RNA (1)...(19): siRNA sense strand
caagaagaaggcagccaaa

SEQ ID NO: 545802 - RNA, 19 nt, Homo sapiens
  misc_RNA (1)...(19): siRNA sense strand
uggaugaacccaccaauca

SEQ ID NO: 545803 - RNA, 19 nt, Homo sapiens
  misc_RNA (1)...(19): siRNA sense strand
caaggagaaggaagaaaug

SEQ ID NO: 545804 - RNA, 19 nt, Homo sapiens
  misc_RNA (1)...(19): siRNA sense strand
gagagcuacuacccacaga

SEQ ID NO: 545805 - RNA, 19 nt, Homo sapiens
  misc_RNA (1)...(19): siRNA sense strand
aaacucaggccgucguuau

SEQ ID NO: 545806 - RNA, 19 nt, Homo sapiens
  misc_RNA (1)...(19): siRNA sense strand
ggagacauccuggcuuaca

SEQ ID NO: 545807 - RNA, 19 nt, Homo sapiens
  misc_RNA (1)...(19): siRNA sense strand
gaucaaggagaaggaagaa

SEQ ID NO: 545808 - RNA, 19 nt, Homo sapiens
  misc_RNA (1)...(19): siRNA sense strand
ucauucacaugcacaacaa

SEQ ID NO: 545809 - RNA, 19 nt, Homo sapiens
  misc_RNA (1)...(19): siRNA sense strand
ugaagaaaauggagauguu

SEQ ID NO: 545810 - RNA, 19 nt, Homo sapiens
  misc_RNA (1)...(19): siRNA sense strand
gcggcuggcucaugaggau

SEQ ID NO: 545811 - RNA, 19 nt, Homo sapiens
  misc_RNA (1)...(19): siRNA sense strand
ccaauaucauucacaugca

SEQ ID NO: 545812 - RNA, 19 nt, Homo sapiens
  misc_RNA (1)...(19): siRNA sense strand
acaaggagcaccucaaguc

SEQ ID NO: 545813 - RNA, 19 nt, Homo sapiens
  misc_RNA (1)...(19): siRNA sense strand
aaauuugggucugugagaa

SEQ ID NO: 545814 - RNA, 19 nt, Homo sapiens
  misc_RNA (1)...(19): siRNA sense strand
gagcagggaagucaacucu

SEQ ID NO: 545815 - RNA, 19 nt, Homo sapiens
  misc_RNA (1)...(19): siRNA sense strand
gcacaacaagaaacugaag

SEQ ID NO: 545816 - RNA, 19 nt, Homo sapiens
  misc_RNA (1)...(19): siRNA sense strand
aaagaaggaggcugccaaa

SEQ ID NO: 545817 - RNA, 19 nt, Homo sapiens
  misc_RNA (1)...(19): siRNA sense strand
gauagggcguuaccaucag

SEQ ID NO: 545818 - RNA, 19 nt, Homo sapiens
  misc_RNA (1)...(19): siRNA sense strand
guaauuaugaucaguacgu

SEQ ID NO: 545819 - RNA, 19 nt, Homo sapiens
  misc_RNA (1)...(19): siRNA sense strand
gcugcucagugacaccaaa

SEQ ID NO: 545820 - RNA, 19 nt, Homo sapiens
  misc_RNA (1)...(19): siRNA sense strand
agccaugacuucagacuca

SEQ ID NO: 545821 - RNA, 19 nt, Homo sapiens
  misc_RNA (1)...(19): siRNA sense strand
guuugagggugguaugaug

SEQ ID NO: 545822 - RNA, 19 nt, Homo sapiens
  misc_RNA (1)...(19): siRNA sense strand
gcgugugguuggaagaaga

SEQ ID NO: 545823 - RNA, 19 nt, Homo sapiens
  misc_RNA (1)...(19): siRNA sense strand
gcccaucccugagcacauc

SEQ ID NO: 545824 - RNA, 19 nt, Homo sapiens
  misc_RNA (1)...(19): siRNA sense strand
uacaagagcagcuggacuu

SEQ ID NO: 545825 - RNA, 19 nt, Homo sapiens
  misc_RNA (1)...(19): siRNA sense strand
aagaucagauugcacacau

SEQ ID NO: 545826 - RNA, 19 nt, Homo sapiens
  misc_RNA (1)...(19): siRNA sense strand
aggaagaaaugaggaagau

SEQ ID NO: 545827 - RNA, 19 nt, Homo sapiens
  misc_RNA (1)...(19): siRNA sense strand
cagcuggacuuagaucucu

SEQ ID NO: 545828 - RNA, 19 nt, Homo sapiens
  misc_RNA (1)...(19): siRNA sense strand
caucaucaaccucucacuu

SEQ ID NO: 545829 - RNA, 19 nt, Homo sapiens
  misc_RNA (1)...(19): siRNA sense strand
agaagacgcuacagaaaau

SEQ ID NO: 545830 - RNA, 19 nt, Homo sapiens
  misc_RNA (1)...(19): siRNA sense strand
cugagcacaucgacaucua

SEQ ID NO: 545831 - RNA, 19 nt, Homo sapiens
  misc_RNA (1)...(19): siRNA sense strand
caauggagcagggaaguca

SEQ ID NO: 545832 - RNA, 19 nt, Homo sapiens
  misc_RNA (1)...(19): siRNA sense strand
ggacuuugagaugaagaaa

SEQ ID NO: 545833 - RNA, 19 nt, Homo sapiens
  misc_RNA (1)...(19): siRNA sense strand
aaugugagcuucaaguaua

SEQ ID NO: 545834 - RNA, 19 nt, Homo sapiens
  misc_RNA (1)...(19): siRNA sense strand
acaccaaacuggaauuaaa

SEQ ID NO: 545835 - RNA, 19 nt, Homo sapiens
  misc_RNA (1)...(19): siRNA sense strand
gaaggaggcugccaaagcu

SEQ ID NO: 545836 - RNA, 19 nt, Homo sapiens
  misc_RNA (1)...(19): siRNA sense strand
gaagaaaugaggaagauca

SEQ ID NO: 545837 - RNA, 19 nt, Homo sapiens
  misc_RNA (1)...(19): siRNA sense strand
ggccuugcaucuacaauaa

SEQ ID NO: 545838 - RNA, 19 nt, Homo sapiens
  misc_RNA (1)...(19): siRNA sense strand
gaacuacauugcgagguuu

SEQ ID NO: 545839 - RNA, 19 nt, Homo sapiens
  misc_RNA (1)...(19): siRNA sense strand
ccaaggagcuagaggacuu

SEQ ID NO: 545840 - RNA, 19 nt, Homo sapiens
  misc_RNA (1)...(19): siRNA sense strand
guuauggccucauugguuu

SEQ ID NO: 545841 - RNA, 19 nt, Homo sapiens
  misc_RNA (1)...(19): siRNA sense strand
ggagaagacgcuacagaaa

SEQ ID NO: 545842 - RNA, 19 nt, Homo sapiens
  misc_RNA (1)...(19): siRNA sense strand
gcaagaagcuaaaagacuu

SEQ ID NO: 545843 - RNA, 19 nt, Homo sapiens
  misc_RNA (1)...(19): siRNA sense strand
gcagagagaccacagaagu

SEQ ID NO: 545844 - RNA, 19 nt, Homo sapiens
  misc_RNA (1)...(19): siRNA sense strand
ggcuagagcuggaggagaa

SEQ ID NO: 545845 - RNA, 19 nt, Homo sapiens
  misc_RNA (1)...(19): siRNA sense strand
gcugcuaacuggagagcua

SEQ ID NO: 545846 - RNA, 19 nt, Homo sapiens
  misc_RNA (1)...(19): siRNA sense strand
gaaaaggacaugaagaaaa

SEQ ID NO: 545847 - RNA, 19 nt, Homo sapiens
  misc_RNA (1)...(19): siRNA sense strand
ggaagaucauugggcgaua

SEQ ID NO: 545848 - RNA, 19 nt, Homo sapiens
  misc_RNA (1)...(19): siRNA sense strand
gaggagaaccagaugaaga

SEQ ID NO: 545849 - RNA, 19 nt, Homo sapiens
  misc_RNA (1)...(19): siRNA sense strand
caaguggccuggagacauc

SEQ ID NO: 545850 - RNA, 19 nt, Homo sapiens
  misc_RNA (1)...(19): siRNA sense strand
ccaaucaccuggauaucga

SEQ ID NO: 545851 - RNA, 19 nt, Homo sapiens
  misc_RNA (1)...(19): siRNA sense strand
gaucagauugcacacauga

SEQ ID NO: 545852 - RNA, 19 nt, Homo sapiens
  misc_RNA (1)...(19): siRNA sense strand
cuagaggacuuugagauga

SEQ ID NO: 545853 - RNA, 19 nt, Homo sapiens
  misc_RNA (1)...(19): siRNA sense strand
gaaauuugggucugugaga

SEQ ID NO: 545854 - RNA, 19 nt, Homo sapiens
  misc_RNA (1)...(19): siRNA sense strand
aagagcagcuggacuuaga

SEQ ID NO: 545855 - RNA, 19 nt, Homo sapiens
  misc_RNA (1)...(19): siRNA sense strand
gggccaugcuggagaaaga

SEQ ID NO: 545856 - RNA, 19 nt, Homo sapiens
  misc_RNA (1)...(19): siRNA sense strand
cuggagacauccuggcuua

SEQ ID NO: 545857 - RNA, 19 nt, Homo sapiens
  misc_RNA (1)...(19): siRNA sense strand
guaccaauaucauucacau

SEQ ID NO: 545858 - RNA, 19 nt, Homo sapiens
  misc_RNA (1)...(19): siRNA sense strand
uagauuugcugaccaagga

SEQ ID NO: 545859 - RNA, 19 nt, Homo sapiens
  misc_RNA (1)...(19): siRNA sense strand
aaauggagauguugucaca

SEQ ID NO: 545860 - RNA, 19 nt, Homo sapiens
  misc_RNA (1)...(19): siRNA sense strand
gagacauccuggcuuacaa

SEQ ID NO: 545861 - RNA, 19 nt, Homo sapiens
  misc_RNA (1)...(19): siRNA sense strand
gagagggucgugagcgaua

SEQ ID NO: 545862 - RNA, 19 nt, Homo sapiens
  misc_RNA (1)...(19): siRNA sense strand
gaccacagaaguagauuug

SEQ ID NO: 545863 - RNA, 19 nt, Homo sapiens
  misc_RNA (1)...(19): siRNA sense strand
acuuagaucucucaccuuu

SEQ ID NO: 545864 - RNA, 19 nt, Homo sapiens
  misc_RNA (1)...(19): siRNA sense strand
caaccucucacuuaccuuu

SEQ ID NO: 545865 - RNA, 19 nt, Homo sapiens
  misc_RNA (1)...(19): siRNA sense strand
gcguuaccaucagcauuua

SEQ ID NO: 545866 - RNA, 19 nt, Homo sapiens
  misc_RNA (1)...(19): siRNA sense strand
cgaaaacacucucauguca

SEQ ID NO: 545867 - RNA, 19 nt, Homo sapiens
  misc_RNA (1)...(19): siRNA sense strand
cagauggcaugauccgaaa

SEQ ID NO: 545868 - RNA, 19 nt, Homo sapiens
  misc_RNA (1)...(19): siRNA sense strand
ccuccgaccuggccaagaa

SEQ ID NO: 545869 - RNA, 19 nt, Homo sapiens
  misc_RNA (1)...(19): siRNA sense strand
uagaggacuuugagaugaa

SEQ ID NO: 545870 - RNA, 19 nt, Homo sapiens
  misc_RNA (1)...(19): siRNA sense strand
gaagaucauugggcgauac

SEQ ID NO: 545871 - RNA, 19 nt, Homo sapiens
  misc_RNA (1)...(19): siRNA sense strand
agaacuacauugcgagguu

SEQ ID NO: 545872 - RNA, 19 nt, Homo sapiens
  misc_RNA (1)...(19): siRNA sense strand
cagagagaccacagaagua

SEQ ID NO: 545873 - RNA, 19 nt, Homo sapiens
  misc_RNA (1)...(19): siRNA sense strand
ccaaccaccuggaccuaga

SEQ ID NO: 545874 - RNA, 19 nt, Homo sapiens
  misc_RNA (1)...(19): siRNA sense strand
uaaauggaauuggaaaguc

SEQ ID NO: 545875 - RNA, 19 nt, Homo sapiens
  misc_RNA (1)...(19): siRNA sense strand
uugcacacaugaagaacua

SEQ ID NO: 545876 - RNA, 19 nt, Homo sapiens
  misc_RNA (1)...(19): siRNA sense strand
uggaguacaugaugaagug

SEQ ID NO: 545877 - RNA, 19 nt, Homo sapiens
  misc_RNA (1)...(19): siRNA sense strand
acacucucaugucaagaua

SEQ ID NO: 545878 - RNA, 19 nt, Homo sapiens
  misc_RNA (1)...(19): siRNA sense strand
gcaaggagaagacgcuaca

SEQ ID NO: 545879 - RNA, 19 nt, Homo sapiens
  misc_RNA (1)...(19): siRNA sense strand
gcuagaggacuuugagaug

SEQ ID NO: 545880 - RNA, 19 nt, Homo sapiens
  misc_RNA (1)...(19): siRNA sense strand
gcagaagugccgagugugu

SEQ ID NO: 545881 - RNA, 19 nt, Homo sapiens
  misc_RNA (1)...(19): siRNA sense strand
acccagagaucaaggagaa

SEQ ID NO: 545882 - RNA, 19 nt, Homo sapiens
  misc_RNA (1)...(19): siRNA sense strand
ggagcuggaugccgacaag

SEQ ID NO: 545883 - RNA, 19 nt, Homo sapiens
  misc_RNA (1)...(19): siRNA sense strand
caaacuggaauuaaacuca

SEQ ID NO: 545884 - RNA, 19 nt, Homo sapiens
  misc_RNA (1)...(19): siRNA sense strand
gcacaucgacaucuaccau

SEQ ID NO: 545885 - RNA, 19 nt, Homo sapiens
  misc_RNA (1)...(19): siRNA sense strand
ccaccaaucaccuggauau

SEQ ID NO: 545886 - RNA, 19 nt, Homo sapiens
  misc_RNA (1)...(19): siRNA sense strand
ucaaggagaaggaagaaau

SEQ ID NO: 545887 - RNA, 19 nt, Homo sapiens
  misc_RNA (1)...(19): siRNA sense strand
gaagugcuacccagagauc

SEQ ID NO: 545888 - RNA, 19 nt, Homo sapiens
  misc_RNA (1)...(19): siRNA sense strand
uuagaucucucaccuuugg

SEQ ID NO: 545889 - RNA, 19 nt, Homo sapiens
  misc_RNA (1)...(19): siRNA sense strand
caacaagaaacugaaguau

SEQ ID NO: 545890 - RNA, 19 nt, Homo sapiens
  misc_RNA (1)...(19): siRNA sense strand
ugauggaagucgacacaga

SEQ ID NO: 545891 - RNA, 19 nt, Homo sapiens
  misc_RNA (1)...(19): siRNA sense strand
ugacaccaaacuggaauua

SEQ ID NO: 545892 - RNA, 19 nt, Homo sapiens
  misc_RNA (1)...(19): siRNA sense strand
gcagguugcacaggaaauu

SEQ ID NO: 545893 - RNA, 19 nt, Homo sapiens
  misc_RNA (1)...(19): siRNA sense strand
ggcguuaccaucagcauuu

SEQ ID NO: 545894 - RNA, 19 nt, Homo sapiens
  misc_RNA (1)...(19): siRNA sense strand
ccacagaaguagauuugcu

SEQ ID NO: 545895 - RNA, 19 nt, Homo sapiens
  misc_RNA (1)...(19): siRNA sense strand
ucacaugcacaacaagaaa

SEQ ID NO: 545896 - RNA, 19 nt, Homo sapiens
  misc_RNA (1)...(19): siRNA sense strand
acaacaagaaacugaagua

SEQ ID NO: 545897 - RNA, 19 nt, Homo sapiens
  misc_RNA (1)...(19): siRNA sense strand
gggccuugcaucuacaaua

SEQ ID NO: 545898 - RNA, 19 nt, Homo sapiens
  misc_RNA (1)...(19): siRNA sense strand
gagaagacgcuacagaaaa

SEQ ID NO: 545899 - RNA, 19 nt, Homo sapiens
  misc_RNA (1)...(19): siRNA sense strand
gagcuacuacccacagaug

SEQ ID NO: 545900 - RNA, 19 nt, Homo sapiens
  misc_RNA (1)...(19): siRNA sense strand
caagauagggcguuaccau

SEQ ID NO: 545901 - RNA, 19 nt, Homo sapiens
  misc_RNA (1)...(19): siRNA sense strand
caagaagaaggcagccaaa

SEQ ID NO: 545902 - RNA, 19 nt, Homo sapiens
  misc_RNA (1)...(19): siRNA sense strand
uggaugaacccaccaauca

SEQ ID NO: 545903 - RNA, 19 nt, Homo sapiens
  misc_RNA (1)...(19): siRNA sense strand
caaggagaaggaagaaaug

SEQ ID NO: 545904 - RNA, 19 nt, Homo sapiens
  misc_RNA (1)...(19): siRNA sense strand
gagagcuacuacccacaga

SEQ ID NO: 545905 - RNA, 19 nt, Homo sapiens
  misc_RNA (1)...(19): siRNA sense strand
aaacucaggccgucguuau

SEQ ID NO: 545906 - RNA, 19 nt, Homo sapiens
  misc_RNA (1)...(19): siRNA sense strand
ggagacauccuggcuuaca

SEQ ID NO: 545907 - RNA, 19 nt, Homo sapiens
  misc_RNA (1)...(19): siRNA sense strand
gaucaaggagaaggaagaa

SEQ ID NO: 545908 - RNA, 19 nt, Homo sapiens
  misc_RNA (1)...(19): siRNA sense strand
ucauucacaugcacaacaa

SEQ ID NO: 545909 - RNA, 19 nt, Homo sapiens
  misc_RNA (1)...(19): siRNA sense strand
ugaagaaaauggagauguu

SEQ ID NO: 545910 - RNA, 19 nt, Homo sapiens
  misc_RNA (1)...(19): siRNA sense strand
gcggcuggcucaugaggau

SEQ ID NO: 545911 - RNA, 19 nt, Homo sapiens
  misc_RNA (1)...(19): siRNA sense strand
ccaauaucauucacaugca

SEQ ID NO: 545912 - RNA, 19 nt, Homo sapiens
  misc_RNA (1)...(19): siRNA sense strand
acaaggagcaccucaaguc

SEQ ID NO: 545913 - RNA, 19 nt, Homo sapiens
  misc_RNA (1)...(19): siRNA sense strand
aaauuugggucugugagaa

SEQ ID NO: 545914 - RNA, 19 nt, Homo sapiens
  misc_RNA (1)...(19): siRNA sense strand
gagcagggaagucaacucu

SEQ ID NO: 545915 - RNA, 19 nt, Homo sapiens
  misc_RNA (1)...(19): siRNA sense strand
gcacaacaagaaacugaag

SEQ ID NO: 545916 - RNA, 19 nt, Homo sapiens
  misc_RNA (1)...(19): siRNA sense strand
aaagaaggaggcugccaaa

SEQ ID NO: 545917 - RNA, 19 nt, Homo sapiens
  misc_RNA (1)...(19): siRNA sense strand
gauagggcguuaccaucag

SEQ ID NO: 545918 - RNA, 19 nt, Homo sapiens
  misc_RNA (1)...(19): siRNA sense strand
guaauuaugaucaguacgu

SEQ ID NO: 545919 - RNA, 19 nt, Homo sapiens
  misc_RNA (1)...(19): siRNA sense strand
gcugcucagugacaccaaa

SEQ ID NO: 545920 - RNA, 19 nt, Homo sapiens
  misc_RNA (1)...(19): siRNA sense strand
agccaugacuucagacuca

SEQ ID NO: 545921 - RNA, 19 nt, Homo sapiens
  misc_RNA (1)...(19): siRNA sense strand
guuugagggugguaugaug

SEQ ID NO: 545922 - RNA, 19 nt, Homo sapiens
  misc_RNA (1)...(19): siRNA sense strand
gcgugugguuggaagaaga

SEQ ID NO: 545923 - RNA, 19 nt, Homo sapiens
  misc_RNA (1)...(19): siRNA sense strand
gcccaucccugagcacauc

SEQ ID NO: 545924 - RNA, 19 nt, Homo sapiens
  misc_RNA (1)...(19): siRNA sense strand
uacaagagcagcuggacuu

SEQ ID NO: 545925 - RNA, 19 nt, Homo sapiens
  misc_RNA (1)...(19): siRNA sense strand
aagaucagauugcacacau

SEQ ID NO: 545926 - RNA, 19 nt, Homo sapiens
  misc_RNA (1)...(19): siRNA sense strand
aggaagaaaugaggaagau

SEQ ID NO: 545927 - RNA, 19 nt, Homo sapiens
  misc_RNA (1)...(19): siRNA sense strand
cagcuggacuuagaucucu

SEQ ID NO: 545928 - RNA, 19 nt, Homo sapiens
  misc_RNA (1)...(19): siRNA sense strand
caucaucaaccucucacuu

SEQ ID NO: 545929 - RNA, 19 nt, Homo sapiens
  misc_RNA (1)...(19): siRNA sense strand
agaagacgcuacagaaaau

SEQ ID NO: 545930 - RNA, 19 nt, Homo sapiens
  misc_RNA (1)...(19): siRNA sense strand
cugagcacaucgacaucua

SEQ ID NO: 545931 - RNA, 19 nt, Homo sapiens
  misc_RNA (1)...(19): siRNA sense strand
caauggagcagggaaguca

SEQ ID NO: 545932 - RNA, 19 nt, Homo sapiens
  misc_RNA (1)...(19): siRNA sense strand
ggacuuugagaugaagaaa

SEQ ID NO: 545933 - RNA, 19 nt, Homo sapiens
  misc_RNA (1)...(19): siRNA sense strand
ucauuuggcuguuggauuu

SEQ ID NO: 545934 - RNA, 19 nt, Homo sapiens
  misc_RNA (1)...(19): siRNA sense strand
ggaagcagcucucauucuc

SEQ ID NO: 545935 - RNA, 19 nt, Homo sapiens
  misc_RNA (1)...(19): siRNA sense strand
ggucaucaguaauaucuuc

SEQ ID NO: 545936 - RNA, 19 nt, Homo sapiens
  misc_RNA (1)...(19): siRNA sense strand
ccacuaugacgcuuccuua

SEQ ID NO: 545937 - RNA, 19 nt, Homo sapiens
  misc_RNA (1)...(19): siRNA sense strand
gccaagaucugaccgugau

SEQ ID NO: 545938 - RNA, 19 nt, Homo sapiens
  misc_RNA (1)...(19): siRNA sense strand
ucauucuccucuucuauuu

SEQ ID NO: 545939 - RNA, 19 nt, Homo sapiens
  misc_RNA (1)...(19): siRNA sense strand
ggaagguggucaucacacu

SEQ ID NO: 545940 - RNA, 19 nt, Homo sapiens
  misc_RNA (1)...(19): siRNA sense strand
ggagcaguguggccuucaa

SEQ ID NO: 545941 - RNA, 19 nt, Homo sapiens
  misc_RNA (1)...(19): siRNA sense strand
cuaugacgcuuccuuagag

SEQ ID NO: 545942 - RNA, 19 nt, Homo sapiens
  misc_RNA (1)...(19): siRNA sense strand
ugguggaggugacagcuuu

SEQ ID NO: 545943 - RNA, 19 nt, Homo sapiens
  misc_RNA (1)...(19): siRNA sense strand
gcucguggcauccuaucaa

SEQ ID NO: 545944 - RNA, 19 nt, Homo sapiens
  misc_RNA (1)...(19): siRNA sense strand
guauucggcuggccaccau

SEQ ID NO: 545945 - RNA, 19 nt, Homo sapiens
  misc_RNA (1)...(19): siRNA sense strand
acuggaagcagcucucauu

SEQ ID NO: 545946 - RNA, 19 nt, Homo sapiens
  misc_RNA (1)...(19): siRNA sense strand
caucaguaauaucuucaac

SEQ ID NO: 545947 - RNA, 19 nt, Homo sapiens
  misc_RNA (1)...(19): siRNA sense strand
caaguuuucuggaaguuuc

SEQ ID NO: 545948 - RNA, 19 nt, Homo sapiens
  misc_RNA (1)...(19): siRNA sense strand
gguggaggugacagcuuua

SEQ ID NO: 545949 - RNA, 19 nt, Homo sapiens
  misc_RNA (1)...(19): siRNA sense strand
ggccuucaaccucuucaug

SEQ ID NO: 545950 - RNA, 19 nt, Homo sapiens
  misc_RNA (1)...(19): siRNA sense strand
ucauuuggcuguuggauuu

SEQ ID NO: 545951 - RNA, 19 nt, Homo sapiens
  misc_RNA (1)...(19): siRNA sense strand
ggaagcagcucucauucuc

SEQ ID NO: 545952 - RNA, 19 nt, Homo sapiens
  misc_RNA (1)...(19): siRNA sense strand
ggucaucaguaauaucuuc

SEQ ID NO: 545953 - RNA, 19 nt, Homo sapiens
  misc_RNA (1)...(19): siRNA sense strand
ccacuaugacgcuuccuua

SEQ ID NO: 545954 - RNA, 19 nt, Homo sapiens
  misc_RNA (1)...(19): siRNA sense strand
gccaagaucugaccgugau

SEQ ID NO: 545955 - RNA, 19 nt, Homo sapiens
  misc_RNA (1)...(19): siRNA sense strand
ucauucuccucuucuauuu

SEQ ID NO: 545956 - RNA, 19 nt, Homo sapiens
  misc_RNA (1)...(19): siRNA sense strand
ggaagguggucaucacacu

SEQ ID NO: 545957 - RNA, 19 nt, Homo sapiens
  misc_RNA (1)...(19): siRNA sense strand
ggagcaguguggccuucaa

SEQ ID NO: 545958 - RNA, 19 nt, Homo sapiens
  misc_RNA (1)...(19): siRNA sense strand
cuaugacgcuuccuuagag

SEQ ID NO: 545959 - RNA, 19 nt, Homo sapiens
  misc_RNA (1)...(19): siRNA sense strand
ugguggaggugacagcuuu

SEQ ID NO: 545960 - RNA, 19 nt, Homo sapiens
  misc_RNA (1)...(19): siRNA sense strand
gcucguggcauccuaucaa

SEQ ID NO: 545961 - RNA, 19 nt, Homo sapiens
  misc_RNA (1)...(19): siRNA sense strand
guauucggcuggccaccau

SEQ ID NO: 545962 - RNA, 19 nt, Homo sapiens
  misc_RNA (1)...(19): siRNA sense strand
acuggaagcagcucucauu

SEQ ID NO: 545963 - RNA, 19 nt, Homo sapiens
  misc_RNA (1)...(19): siRNA sense strand
caucaguaauaucuucaac

SEQ ID NO: 545964 - RNA, 19 nt, Homo sapiens
  misc_RNA (1)...(19): siRNA sense strand
caaguuuucuggaaguuuc

SEQ ID NO: 545965 - RNA, 19 nt, Homo sapiens
  misc_RNA (1)...(19): siRNA sense strand
gguggaggugacagcuuua

SEQ ID NO: 545966 - RNA, 19 nt, Homo sapiens
  misc_RNA (1)...(19): siRNA sense strand
ggccuucaaccucuucaug

SEQ ID NO: 545967 - RNA, 19 nt, Homo sapiens
  misc_RNA (1)...(19): siRNA sense strand
ggaagcagcucucauucuc

SEQ ID NO: 545968 - RNA, 19 nt, Homo sapiens
  misc_RNA (1)...(19): siRNA sense strand
ggucaucaguaauaucuuc

SEQ ID NO: 545969 - RNA, 19 nt, Homo sapiens
  misc_RNA (1)...(19): siRNA sense strand
gcuccuaaaucucaaaaua

SEQ ID NO: 545970 - RNA, 19 nt, Homo sapiens
  misc_RNA (1)...(19): siRNA sense strand
ccacuaugacgcuuccuua

SEQ ID NO: 545971 - RNA, 19 nt, Homo sapiens
  misc_RNA (1)...(19): siRNA sense strand
gccaagaucugaccgugau

SEQ ID NO: 545972 - RNA, 19 nt, Homo sapiens
  misc_RNA (1)...(19): siRNA sense strand
ucauucuccucuucuauuu

SEQ ID NO: 545973 - RNA, 19 nt, Homo sapiens
  misc_RNA (1)...(19): siRNA sense strand
ggaagguggucaucacacu

SEQ ID NO: 545974 - RNA, 19 nt, Homo sapiens
  misc_RNA (1)...(19): siRNA sense strand
ggagcaguguggccuucaa

SEQ ID NO: 545975 - RNA, 19 nt, Homo sapiens
  misc_RNA (1)...(19): siRNA sense strand
cuaugacgcuuccuuagag

SEQ ID NO: 545976 - RNA, 19 nt, Homo sapiens
  misc_RNA (1)...(19): siRNA sense strand
ugguggaggugacagcuuu

SEQ ID NO: 545977 - RNA, 19 nt, Homo sapiens
  misc_RNA (1)...(19): siRNA sense strand
gcucguggcauccuaucaa

SEQ ID NO: 545978 - RNA, 19 nt, Homo sapiens
  misc_RNA (1)...(19): siRNA sense strand
guauucggcuggccaccau

SEQ ID NO: 545979 - RNA, 19 nt, Homo sapiens
  misc_RNA (1)...(19): siRNA sense strand
acuggaagcagcucucauu

SEQ ID NO: 545980 - RNA, 19 nt, Homo sapiens
  misc_RNA (1)...(19): siRNA sense strand
caucaguaauaucuucaac

SEQ ID NO: 545981 - RNA, 19 nt, Homo sapiens
  misc_RNA (1)...(19): siRNA sense strand
gguggaggugacagcuuua

SEQ ID NO: 545982 - RNA, 19 nt, Homo sapiens
  misc_RNA (1)...(19): siRNA sense strand
ggccuucaaccucuucaug

SEQ ID NO: 545983 - RNA, 19 nt, Homo sapiens
  misc_RNA (1)...(19): siRNA sense strand
ggaagcagcucucauucuc

SEQ ID NO: 545984 - RNA, 19 nt, Homo sapiens
  misc_RNA (1)...(19): siRNA sense strand
ggucaucaguaauaucuuc

SEQ ID NO: 545985 - RNA, 19 nt, Homo sapiens
  misc_RNA (1)...(19): siRNA sense strand
ccacuaugacgcuuccuua

SEQ ID NO: 545986 - RNA, 19 nt, Homo sapiens
  misc_RNA (1)...(19): siRNA sense strand
gccaagaucugaccgugau

SEQ ID NO: 545987 - RNA, 19 nt, Homo sapiens
  misc_RNA (1)...(19): siRNA sense strand
ucauucuccucuucuauuu

SEQ ID NO: 545988 - RNA, 19 nt, Homo sapiens
  misc_RNA (1)...(19): siRNA sense strand
ggaagguggucaucacacu

SEQ ID NO: 545989 - RNA, 19 nt, Homo sapiens
  misc_RNA (1)...(19): siRNA sense strand
ggagcaguguggccuucaa

SEQ ID NO: 545990 - RNA, 19 nt, Homo sapiens
  misc_RNA (1)...(19): siRNA sense strand
cuaugacgcuuccuuagag

SEQ ID NO: 545991 - RNA, 19 nt, Homo sapiens
  misc_RNA (1)...(19): siRNA sense strand
ugguggaggugacagcuuu

SEQ ID NO: 545992 - RNA, 19 nt, Homo sapiens
  misc_RNA (1)...(19): siRNA sense strand
gcucguggcauccuaucaa

SEQ ID NO: 545993 - RNA, 19 nt, Homo sapiens
  misc_RNA (1)...(19): siRNA sense strand
guauucggcuggccaccau

SEQ ID NO: 545994 - RNA, 19 nt, Homo sapiens
  misc_RNA (1)...(19): siRNA sense strand
acuggaagcagcucucauu

SEQ ID NO: 545995 - RNA, 19 nt, Homo sapiens
  misc_RNA (1)...(19): siRNA sense strand
caucaguaauaucuucaac

SEQ ID NO: 545996 - RNA, 19 nt, Homo sapiens
  misc_RNA (1)...(19): siRNA sense strand
gguggaggugacagcuuua

SEQ ID NO: 545997 - RNA, 19 nt, Homo sapiens
  misc_RNA (1)...(19): siRNA sense strand
ggccuucaaccucuucaug

SEQ ID NO: 545998 - RNA, 19 nt, Homo sapiens
  misc_RNA (1)...(19): siRNA sense strand
gaagaucucugcucugcuu

SEQ ID NO: 545999 - RNA, 19 nt, Homo sapiens
  misc_RNA (1)...(19): siRNA sense strand
ggacgucacuguuggaaga

SEQ ID NO: 546000 - RNA, 19 nt, Homo sapiens
  misc_RNA (1)...(19): siRNA sense strand
guacuaugcuuucuaacuu

SEQ ID NO: 546001 - RNA, 19 nt, Homo sapiens
  misc_RNA (1)...(19): siRNA sense strand
ggaagaagucuccucauga

SEQ ID NO: 546002 - RNA, 19 nt, Homo sapiens
  misc_RNA (1)...(19): siRNA sense strand
gcaagucccauaauuggua

SEQ ID NO: 546003 - RNA, 19 nt, Homo sapiens
  misc_RNA (1)...(19): siRNA sense strand
aaaggaagaucuacaguca

SEQ ID NO: 546004 - RNA, 19 nt, Homo sapiens
  misc_RNA (1)...(19): siRNA sense strand
cagaggagauugagaagga

SEQ ID NO: 546005 - RNA, 19 nt, Homo sapiens
  misc_RNA (1)...(19): siRNA sense strand
gaagaagucuccucaugac

SEQ ID NO: 546006 - RNA, 19 nt, Homo sapiens
  misc_RNA (1)...(19): siRNA sense strand
gcagaaggcaaacuaauca

SEQ ID NO: 546007 - RNA, 19 nt, Homo sapiens
  misc_RNA (1)...(19): siRNA sense strand
cuacagucauccagagaua

SEQ ID NO: 546008 - RNA, 19 nt, Homo sapiens
  misc_RNA (1)...(19): siRNA sense strand
gcacagccauucucuucau

SEQ ID NO: 546009 - RNA, 19 nt, Homo sapiens
  misc_RNA (1)...(19): siRNA sense strand
gaagagccuuaugucagua

SEQ ID NO: 546010 - RNA, 19 nt, Homo sapiens
  misc_RNA (1)...(19): siRNA sense strand
caaguacgaugaguaugaa

SEQ ID NO: 546011 - RNA, 19 nt, Homo sapiens
  misc_RNA (1)...(19): siRNA sense strand
ugacagcccugaccucauc

SEQ ID NO: 546012 - RNA, 19 nt, Homo sapiens
  misc_RNA (1)...(19): siRNA sense strand
gcaacaaugaagagccuua

SEQ ID NO: 546013 - RNA, 19 nt, Homo sapiens
  misc_RNA (1)...(19): siRNA sense strand
gcaccaccauuguacuaug

SEQ ID NO: 546014 - RNA, 19 nt, Homo sapiens
  misc_RNA (1)...(19): siRNA sense strand
gauugccacucgaguugua

SEQ ID NO: 546015 - RNA, 19 nt, Homo sapiens
  misc_RNA (1)...(19): siRNA sense strand
uggaggagcuuugagauug

SEQ ID NO: 546016 - RNA, 19 nt, Homo sapiens
  misc_RNA (1)...(19): siRNA sense strand
ugaagagccuuaugucagu

SEQ ID NO: 546017 - RNA, 19 nt, Homo sapiens
  misc_RNA (1)...(19): siRNA sense strand
gagacaccuucuagcagua

SEQ ID NO: 546018 - RNA, 19 nt, Homo sapiens
  misc_RNA (1)...(19): siRNA sense strand
gauaggaaaggaagaucua

SEQ ID NO: 546019 - RNA, 19 nt, Homo sapiens
  misc_RNA (1)...(19): siRNA sense strand
ucaaguacgaugaguauga

SEQ ID NO: 546020 - RNA, 19 nt, Homo sapiens
  misc_RNA (1)...(19): siRNA sense strand
agagguggcucagguguuu

SEQ ID NO: 546021 - RNA, 19 nt, Homo sapiens
  misc_RNA (1)...(19): siRNA sense strand
uuucaagacugacaucuau

SEQ ID NO: 546022 - RNA, 19 nt, Homo sapiens
  misc_RNA (1)...(19): siRNA sense strand
cgaugaguaugaagucaaa

SEQ ID NO: 546023 - RNA, 19 nt, Homo sapiens
  misc_RNA (1)...(19): siRNA sense strand
gcucacgcuucucuucgua

SEQ ID NO: 546024 - RNA, 19 nt, Homo sapiens
  misc_RNA (1)...(19): siRNA sense strand
ugaagccucuggccuaugu

SEQ ID NO: 546025 - RNA, 19 nt, Homo sapiens
  misc_RNA (1)...(19): siRNA sense strand
uggaagaagucuccucaug

SEQ ID NO: 546026 - RNA, 19 nt, Homo sapiens
  misc_RNA (1)...(19): siRNA sense strand
gagauugccacucgaguug

SEQ ID NO: 546027 - RNA, 19 nt, Homo sapiens
  misc_RNA (1)...(19): siRNA sense strand
gagaugagacaccuucuag

SEQ ID NO: 546028 - RNA, 19 nt, Homo sapiens
  misc_RNA (1)...(19): siRNA sense strand
caacauccuagccaucaaa

SEQ ID NO: 546029 - RNA, 19 nt, Homo sapiens
  misc_RNA (1)...(19): siRNA sense strand
gagaaggcccucaguagag

SEQ ID NO: 546030 - RNA, 19 nt, Homo sapiens
  misc_RNA (1)...(19): siRNA sense strand
gaugagacaccuucuagca

SEQ ID NO: 546031 - RNA, 19 nt, Homo sapiens
  misc_RNA (1)...(19): siRNA sense strand
gaagucuccucaugaccau

SEQ ID NO: 546032 - RNA, 19 nt, Homo sapiens
  misc_RNA (1)...(19): siRNA sense strand
gcaacauccuagccaucaa

SEQ ID NO: 546033 - RNA, 19 nt, Homo sapiens
  misc_RNA (1)...(19): siRNA sense strand
cccauucccugagaacaua

SEQ ID NO: 546034 - RNA, 19 nt, Homo sapiens
  misc_RNA (1)...(19): siRNA sense strand
ccauaucccuguuguccau

SEQ ID NO: 546035 - RNA, 19 nt, Homo sapiens
  misc_RNA (1)...(19): siRNA sense strand
aggaagaucuacagucauc

SEQ ID NO: 546036 - RNA, 19 nt, Homo sapiens
  misc_RNA (1)...(19): siRNA sense strand
ugauaagauucaucgagaa

SEQ ID NO: 546037 - RNA, 19 nt, Homo sapiens
  misc_RNA (1)...(19): siRNA sense strand
gggcaccaccauuguacua

SEQ ID NO: 546038 - RNA, 19 nt, Homo sapiens
  misc_RNA (1)...(19): siRNA sense strand
cuucuucaguuucuucuug

SEQ ID NO: 546039 - RNA, 19 nt, Homo sapiens
  misc_RNA (1)...(19): siRNA sense strand
cagcaggacgucacuguug

SEQ ID NO: 546040 - RNA, 19 nt, Homo sapiens
  misc_RNA (1)...(19): siRNA sense strand
ccugugagccgauaggaaa

SEQ ID NO: 546041 - RNA, 19 nt, Homo sapiens
  misc_RNA (1)...(19): siRNA sense strand
ucaagacugacaucuauau

SEQ ID NO: 546042 - RNA, 19 nt, Homo sapiens
  misc_RNA (1)...(19): siRNA sense strand
gaguaugaagucaaaguga

SEQ ID NO: 546043 - RNA, 19 nt, Homo sapiens
  misc_RNA (1)...(19): siRNA sense strand
cuucaugcuuguauucuau

SEQ ID NO: 546044 - RNA, 19 nt, Homo sapiens
  misc_RNA (1)...(19): siRNA sense strand
ucagcaagucccauaauug

SEQ ID NO: 546045 - RNA, 19 nt, Homo sapiens
  misc_RNA (1)...(19): siRNA sense strand
aguaugaagucaaagugaa

SEQ ID NO: 546046 - RNA, 19 nt, Homo sapiens
  misc_RNA (1)...(19): siRNA sense strand
caguguuucugaaggcuuu

SEQ ID NO: 546047 - RNA, 19 nt, Homo sapiens
  misc_RNA (1)...(19): siRNA sense strand
ccaggcagaaggcaaacua

SEQ ID NO: 546048 - RNA, 19 nt, Homo sapiens
  misc_RNA (1)...(19): siRNA sense strand
cagcaagucccauaauugg

SEQ ID NO: 546049 - RNA, 19 nt, Homo sapiens
  misc_RNA (1)...(19): siRNA sense strand
cgucggugauccaggcuuu

SEQ ID NO: 546050 - RNA, 19 nt, Homo sapiens
  misc_RNA (1)...(19): siRNA sense strand
agaccuggguggugguuau

SEQ ID NO: 546051 - RNA, 19 nt, Homo sapiens
  misc_RNA (1)...(19): siRNA sense strand
ggaaaggaagaucuacagu

SEQ ID NO: 546052 - RNA, 19 nt, Homo sapiens
  misc_RNA (1)...(19): siRNA sense strand
agagaaggcccucaguaga

SEQ ID NO: 546053 - RNA, 19 nt, Homo sapiens
  misc_RNA (1)...(19): siRNA sense strand
aaucaaguacgaugaguau

SEQ ID NO: 546054 - RNA, 19 nt, Homo sapiens
  misc_RNA (1)...(19): siRNA sense strand
ggaggagcuuugagauugc

SEQ ID NO: 546055 - RNA, 19 nt, Homo sapiens
  misc_RNA (1)...(19): siRNA sense strand
acaaugaagagccuuaugu

SEQ ID NO: 546056 - RNA, 19 nt, Homo sapiens
  misc_RNA (1)...(19): siRNA sense strand
uagagaaggcccucaguag

SEQ ID NO: 546057 - RNA, 19 nt, Homo sapiens
  misc_RNA (1)...(19): siRNA sense strand
ggcagaaggcaaacuaauc

SEQ ID NO: 546058 - RNA, 19 nt, Homo sapiens
  misc_RNA (1)...(19): siRNA sense strand
guaguccugguccucuuua

SEQ ID NO: 546059 - RNA, 19 nt, Homo sapiens
  misc_RNA (1)...(19): siRNA sense strand
gaagaucuacagucaucca

SEQ ID NO: 546060 - RNA, 19 nt, Homo sapiens
  misc_RNA (1)...(19): siRNA sense strand
gcagcucacgcuucucuuc

SEQ ID NO: 546061 - RNA, 19 nt, Homo sapiens
  misc_RNA (1)...(19): siRNA sense strand
ggugauccaggcuuucuug

SEQ ID NO: 546062 - RNA, 19 nt, Homo sapiens
  misc_RNA (1)...(19): siRNA sense strand
ccuggucaguucuugaaug

SEQ ID NO: 546063 - RNA, 19 nt, Homo sapiens
  misc_RNA (1)...(19): siRNA sense strand
gcagcaggacgucacuguu

SEQ ID NO: 546064 - RNA, 19 nt, Homo sapiens
  misc_RNA (1)...(19): siRNA sense strand
guggaggagcuuugagauu

SEQ ID NO: 546065 - RNA, 19 nt, Homo sapiens
  misc_RNA (1)...(19): siRNA sense strand
caacaaugaagagccuuau

SEQ ID NO: 546066 - RNA, 19 nt, Homo sapiens
  misc_RNA (1)...(19): siRNA sense strand
gucaguaucaccaagaaga

SEQ ID NO: 546067 - RNA, 19 nt, Homo sapiens
  misc_RNA (1)...(19): siRNA sense strand
ugagauugccacucgaguu

SEQ ID NO: 546068 - RNA, 19 nt, Homo sapiens
  misc_RNA (1)...(19): siRNA sense strand
acuuuacucuauacuggua

SEQ ID NO: 546069 - RNA, 19 nt, Homo sapiens
  misc_RNA (1)...(19): siRNA sense strand
caaugaagagccuuauguc

SEQ ID NO: 546070 - RNA, 19 nt, Homo sapiens
  misc_RNA (1)...(19): siRNA sense strand
gggccaggcagaaggcaaa

SEQ ID NO: 546071 - RNA, 19 nt, Homo sapiens
  misc_RNA (1)...(19): siRNA sense strand
caagacugacaucuauaug

SEQ ID NO: 546072 - RNA, 19 nt, Homo sapiens
  misc_RNA (1)...(19): siRNA sense strand
agaaggcccucaguagagu

SEQ ID NO: 546073 - RNA, 19 nt, Homo sapiens
  misc_RNA (1)...(19): siRNA sense strand
guacgaugaguaugaaguc

SEQ ID NO: 546074 - RNA, 19 nt, Homo sapiens
  misc_RNA (1)...(19): siRNA sense strand
uguauucuaucaguucuuc

SEQ ID NO: 546075 - RNA, 19 nt, Homo sapiens
  misc_RNA (1)...(19): siRNA sense strand
auagagaaggcccucagua

SEQ ID NO: 546076 - RNA, 19 nt, Homo sapiens
  misc_RNA (1)...(19): siRNA sense strand
ccucuggccuaugucugua

SEQ ID NO: 546077 - RNA, 19 nt, Homo sapiens
  misc_RNA (1)...(19): siRNA sense strand
aaaucaaguacgaugagua

SEQ ID NO: 546078 - RNA, 19 nt, Homo sapiens
  misc_RNA (1)...(19): siRNA sense strand
caucagcaagucccauaau

SEQ ID NO: 546079 - RNA, 19 nt, Homo sapiens
  misc_RNA (1)...(19): siRNA sense strand
gguggugguuauaauacuc

SEQ ID NO: 546080 - RNA, 19 nt, Homo sapiens
  misc_RNA (1)...(19): siRNA sense strand
guucuuccacccuugcaaa

SEQ ID NO: 546081 - RNA, 19 nt, Homo sapiens
  misc_RNA (1)...(19): siRNA sense strand
acuaaucacccaccgauca

SEQ ID NO: 546082 - RNA, 19 nt, Homo sapiens
  misc_RNA (1)...(19): siRNA sense strand
ucagucaggcaacaaugaa

SEQ ID NO: 546083 - RNA, 19 nt, Homo sapiens
  misc_RNA (1)...(19): siRNA sense strand
gugguuauaauacucauca

SEQ ID NO: 546084 - RNA, 19 nt, Homo sapiens
  misc_RNA (1)...(19): siRNA sense strand
gaccuggguggugguuaua

SEQ ID NO: 546085 - RNA, 19 nt, Homo sapiens
  misc_RNA (1)...(19): siRNA sense strand
gacaccuucuagcaguaaa

SEQ ID NO: 546086 - RNA, 19 nt, Homo sapiens
  misc_RNA (1)...(19): siRNA sense strand
ucacgcuucucuucguaca

SEQ ID NO: 546087 - RNA, 19 nt, Homo sapiens
  misc_RNA (1)...(19): siRNA sense strand
gcuuguauucuaucaguuc

SEQ ID NO: 546088 - RNA, 19 nt, Homo sapiens
  misc_RNA (1)...(19): siRNA sense strand
ucuucaugcuuguauucua

SEQ ID NO: 546089 - RNA, 19 nt, Homo sapiens
  misc_RNA (1)...(19): siRNA sense strand
cugcacagccauucucuuc

SEQ ID NO: 546090 - RNA, 19 nt, Homo sapiens
  misc_RNA (1)...(19): siRNA sense strand
gaagaccuggguggugguu

SEQ ID NO: 546091 - RNA, 19 nt, Homo sapiens
  misc_RNA (1)...(19): siRNA sense strand
aucagcaagucccauaauu

SEQ ID NO: 546092 - RNA, 19 nt, Homo sapiens
  misc_RNA (1)...(19): siRNA sense strand
gcaggacgucacuguugga

SEQ ID NO: 546093 - RNA, 19 nt, Homo sapiens
  misc_RNA (1)...(19): siRNA sense strand
ccuggguggugguuauaau

SEQ ID NO: 546094 - RNA, 19 nt, Homo sapiens
  misc_RNA (1)...(19): siRNA sense strand
agagaugagacaccuucua

SEQ ID NO: 546095 - RNA, 19 nt, Homo sapiens
  misc_RNA (1)...(19): siRNA sense strand
cuccuccugugguaucuuu

SEQ ID NO: 546096 - RNA, 19 nt, Homo sapiens
  misc_RNA (1)...(19): siRNA sense strand
gagccuggucaguucuuga

SEQ ID NO: 546097 - RNA, 19 nt, Homo sapiens
  misc_RNA (1)...(19): siRNA sense strand
acagucauccagagauaga

SEQ ID NO: 546098 - RNA, 19 nt, Homo sapiens
  misc_RNA (1)...(19): siRNA sense strand
gaacuuggcuucaaacaaa

SEQ ID NO: 546099 - RNA, 19 nt, Homo sapiens
  misc_RNA (1)...(19): siRNA sense strand
ugaaauaccuccugaagaa

SEQ ID NO: 546100 - RNA, 19 nt, Homo sapiens
  misc_RNA (1)...(19): siRNA sense strand
gaagaucugugauggguuu

SEQ ID NO: 546101 - RNA, 19 nt, Homo sapiens
  misc_RNA (1)...(19): siRNA sense strand
caauuuagcugaugauuuc

SEQ ID NO: 546102 - RNA, 19 nt, Homo sapiens
  misc_RNA (1)...(19): siRNA sense strand
aaacaaagcuuccuagaac

SEQ ID NO: 546103 - RNA, 19 nt, Homo sapiens
  misc_RNA (1)...(19): siRNA sense strand
gaagaacucucaacaucau

SEQ ID NO: 546104 - RNA, 19 nt, Homo sapiens
  misc_RNA (1)...(19): siRNA sense strand
caacaucauucugcaauuu

SEQ ID NO: 546105 - RNA, 19 nt, Homo sapiens
  misc_RNA (1)...(19): siRNA sense strand
gaagugcucuggacuaugg

SEQ ID NO: 546106 - RNA, 19 nt, Homo sapiens
  misc_RNA (1)...(19): siRNA sense strand
gaggaaacguguacuugaa

SEQ ID NO: 546107 - RNA, 19 nt, Homo sapiens
  misc_RNA (1)...(19): siRNA sense strand
gaaacaaagcuuccuagaa

SEQ ID NO: 546108 - RNA, 19 nt, Homo sapiens
  misc_RNA (1)...(19): siRNA sense strand
ucacauuucugaacucgua

SEQ ID NO: 546109 - RNA, 19 nt, Homo sapiens
  misc_RNA (1)...(19): siRNA sense strand
cagcaggccuugaaacaaa

SEQ ID NO: 546110 - RNA, 19 nt, Homo sapiens
  misc_RNA (1)...(19): siRNA sense strand
gaagacagacaaugagauu

SEQ ID NO: 546111 - RNA, 19 nt, Homo sapiens
  misc_RNA (1)...(19): siRNA sense strand
cagaagaacucucaacauc

SEQ ID NO: 546112 - RNA, 19 nt, Homo sapiens
  misc_RNA (1)...(19): siRNA sense strand
caaacaaacucacauuucu

SEQ ID NO: 546113 - RNA, 19 nt, Homo sapiens
  misc_RNA (1)...(19): siRNA sense strand
ggaaauccauacccguuug

SEQ ID NO: 546114 - RNA, 19 nt, Homo sapiens
  misc_RNA (1)...(19): siRNA sense strand
ggaaauuugugaaugaagu

SEQ ID NO: 546115 - RNA, 19 nt, Homo sapiens
  misc_RNA (1)...(19): siRNA sense strand
gaagcgaggagauguguuu

SEQ ID NO: 546116 - RNA, 19 nt, Homo sapiens
  misc_RNA (1)...(19): siRNA sense strand
ggaaggagaguuacaggaa

SEQ ID NO: 546117 - RNA, 19 nt, Homo sapiens
  misc_RNA (1)...(19): siRNA sense strand
gaauauuguugaugccuau

SEQ ID NO: 546118 - RNA, 19 nt, Homo sapiens
  misc_RNA (1)...(19): siRNA sense strand
ggaauuguccagaugguuu

SEQ ID NO: 546119 - RNA, 19 nt, Homo sapiens
  misc_RNA (1)...(19): siRNA sense strand
uaacaggaccaauaaauuc

SEQ ID NO: 546120 - RNA, 19 nt, Homo sapiens
  misc_RNA (1)...(19): siRNA sense strand
cuacaaacaucagcaagaa

SEQ ID NO: 546121 - RNA, 19 nt, Homo sapiens
  misc_RNA (1)...(19): siRNA sense strand
ggaggaaagucuauaucug

SEQ ID NO: 546122 - RNA, 19 nt, Homo sapiens
  misc_RNA (1)...(19): siRNA sense strand
gaacaucuuuggcucuucu

SEQ ID NO: 546123 - RNA, 19 nt, Homo sapiens
  misc_RNA (1)...(19): siRNA sense strand
gagcaaggcauggaacuaa

SEQ ID NO: 546124 - RNA, 19 nt, Homo sapiens
  misc_RNA (1)...(19): siRNA sense strand
gaaagaagaaauucagaag

SEQ ID NO: 546125 - RNA, 19 nt, Homo sapiens
  misc_RNA (1)...(19): siRNA sense strand
ugacagaacugaaauaccu

SEQ ID NO: 546126 - RNA, 19 nt, Homo sapiens
  misc_RNA (1)...(19): siRNA sense strand
gcaagaaguccaaaguuuc

SEQ ID NO: 546127 - RNA, 19 nt, Homo sapiens
  misc_RNA (1)...(19): siRNA sense strand
ggaaaccaauuuagcugau

SEQ ID NO: 546128 - RNA, 19 nt, Homo sapiens
  misc_RNA (1)...(19): siRNA sense strand
gcagaugccacacguauca

SEQ ID NO: 546129 - RNA, 19 nt, Homo sapiens
  misc_RNA (1)...(19): siRNA sense strand
ugaccacagugcaaucuaa

SEQ ID NO: 546130 - RNA, 19 nt, Homo sapiens
  misc_RNA (1)...(19): siRNA sense strand
cagaagaacauauucauca

SEQ ID NO: 546131 - RNA, 19 nt, Homo sapiens
  misc_RNA (1)...(19): siRNA sense strand
ggacgaccauggagaagag

SEQ ID NO: 546132 - RNA, 19 nt, Homo sapiens
  misc_RNA (1)...(19): siRNA sense strand
gguggaagcugcauauugc

SEQ ID NO: 546133 - RNA, 19 nt, Homo sapiens
  misc_RNA (1)...(19): siRNA sense strand
gaacugacagaacugaaau

SEQ ID NO: 546134 - RNA, 19 nt, Homo sapiens
  misc_RNA (1)...(19): siRNA sense strand
cguggaugcuucugauuaa

SEQ ID NO: 546135 - RNA, 19 nt, Homo sapiens
  misc_RNA (1)...(19): siRNA sense strand
ggaauacucauguaaugga

SEQ ID NO: 546136 - RNA, 19 nt, Homo sapiens
  misc_RNA (1)...(19): siRNA sense strand
agaaacggcacauggaaua

SEQ ID NO: 546137 - RNA, 19 nt, Homo sapiens
  misc_RNA (1)...(19): siRNA sense strand
gaaaccaauuuagcugaug

SEQ ID NO: 546138 - RNA, 19 nt, Homo sapiens
  misc_RNA (1)...(19): siRNA sense strand
agcaagaaguccaaaguuu

SEQ ID NO: 546139 - RNA, 19 nt, Homo sapiens
  misc_RNA (1)...(19): siRNA sense strand
gaagaaauucagaagaaca

SEQ ID NO: 546140 - RNA, 19 nt, Homo sapiens
  misc_RNA (1)...(19): siRNA sense strand
gaagucagaaggugugaau

SEQ ID NO: 546141 - RNA, 19 nt, Homo sapiens
  misc_RNA (1)...(19): siRNA sense strand
ggacuauggugaugaacag

SEQ ID NO: 546142 - RNA, 19 nt, Homo sapiens
  misc_RNA (1)...(19): siRNA sense strand
gcacuuuggaugauucuga

SEQ ID NO: 546143 - RNA, 19 nt, Homo sapiens
  misc_RNA (1)...(19): siRNA sense strand
guucauagccggugugauc

SEQ ID NO: 546144 - RNA, 19 nt, Homo sapiens
  misc_RNA (1)...(19): siRNA sense strand
gaaauaccuccugaagaaa

SEQ ID NO: 546145 - RNA, 19 nt, Homo sapiens
  misc_RNA (1)...(19): siRNA sense strand
gcagcuaccgggagauaaa

SEQ ID NO: 546146 - RNA, 19 nt, Homo sapiens
  misc_RNA (1)...(19): siRNA sense strand
aaaccaauuuagcugauga

SEQ ID NO: 546147 - RNA, 19 nt, Homo sapiens
  misc_RNA (1)...(19): siRNA sense strand
caacuuuggagacgucuuu

SEQ ID NO: 546148 - RNA, 19 nt, Homo sapiens
  misc_RNA (1)...(19): siRNA sense strand
ccuguucgcugugauguuu

SEQ ID NO: 546149 - RNA, 19 nt, Homo sapiens
  misc_RNA (1)...(19): siRNA sense strand
cugcauauaugaccggaaa

SEQ ID NO: 546150 - RNA, 19 nt, Homo sapiens
  misc_RNA (1)...(19): siRNA sense strand
ccuggagacuguucuagaa

SEQ ID NO: 546151 - RNA, 19 nt, Homo sapiens
  misc_RNA (1)...(19): siRNA sense strand
ccaauuuagcugaugauuu

SEQ ID NO: 546152 - RNA, 19 nt, Homo sapiens
  misc_RNA (1)...(19): siRNA sense strand
uggcgaaucugccgaggaa

SEQ ID NO: 546153 - RNA, 19 nt, Homo sapiens
  misc_RNA (1)...(19): siRNA sense strand
gaaccagcaggccuugaaa

SEQ ID NO: 546154 - RNA, 19 nt, Homo sapiens
  misc_RNA (1)...(19): siRNA sense strand
ucaaacaaacucacauuuc

SEQ ID NO: 546155 - RNA, 19 nt, Homo sapiens
  misc_RNA (1)...(19): siRNA sense strand
cgaaagaagaaauucagaa

SEQ ID NO: 546156 - RNA, 19 nt, Homo sapiens
  misc_RNA (1)...(19): siRNA sense strand
ggaggauccugugacgaaa

SEQ ID NO: 546157 - RNA, 19 nt, Homo sapiens
  misc_RNA (1)...(19): siRNA sense strand
cugaugauuucuuuacuga

SEQ ID NO: 546158 - RNA, 19 nt, Homo sapiens
  misc_RNA (1)...(19): siRNA sense strand
agacagacaaugagauuug

SEQ ID NO: 546159 - RNA, 19 nt, Homo sapiens
  misc_RNA (1)...(19): siRNA sense strand
gaagaugaaagcugucuac

SEQ ID NO: 546160 - RNA, 19 nt, Homo sapiens
  misc_RNA (1)...(19): siRNA sense strand
cggguuugaucuacaauga

SEQ ID NO: 546161 - RNA, 19 nt, Homo sapiens
  misc_RNA (1)...(19): siRNA sense strand
uaucugauccuacuuaugg

SEQ ID NO: 546162 - RNA, 19 nt, Homo sapiens
  misc_RNA (1)...(19): siRNA sense strand
gcuccuggcugcacuuugg

SEQ ID NO: 546163 - RNA, 19 nt, Homo sapiens
  misc_RNA (1)...(19): siRNA sense strand
ccuacaccaucaucacuuu

SEQ ID NO: 546164 - RNA, 19 nt, Homo sapiens
  misc_RNA (1)...(19): siRNA sense strand
acauuuaacaggaccaaua

SEQ ID NO: 546165 - RNA, 19 nt, Homo sapiens
  misc_RNA (1)...(19): siRNA sense strand
gcugaugauuucuuuacug

SEQ ID NO: 546166 - RNA, 19 nt, Homo sapiens
  misc_RNA (1)...(19): siRNA sense strand
ugaaagcugucuaccacau

SEQ ID NO: 546167 - RNA, 19 nt, Homo sapiens
  misc_RNA (1)...(19): siRNA sense strand
cgaggaaacguguacuuga

SEQ ID NO: 546168 - RNA, 19 nt, Homo sapiens
  misc_RNA (1)...(19): siRNA sense strand
gcuaucugauccuacuuau

SEQ ID NO: 546169 - RNA, 19 nt, Homo sapiens
  misc_RNA (1)...(19): siRNA sense strand
gguuauggcuuugauuucu

SEQ ID NO: 546170 - RNA, 19 nt, Homo sapiens
  misc_RNA (1)...(19): siRNA sense strand
ucaacaucauucugcaauu

SEQ ID NO: 546171 - RNA, 19 nt, Homo sapiens
  misc_RNA (1)...(19): siRNA sense strand
ggaacuuggcuucaaacaa

SEQ ID NO: 546172 - RNA, 19 nt, Homo sapiens
  misc_RNA (1)...(19): siRNA sense strand
uaacacaaacagagucuca

SEQ ID NO: 546173 - RNA, 19 nt, Homo sapiens
  misc_RNA (1)...(19): siRNA sense strand
ggugucauccucagccuuu

SEQ ID NO: 546174 - RNA, 19 nt, Homo sapiens
  misc_RNA (1)...(19): siRNA sense strand
aaaugaagaugucggugau

SEQ ID NO: 546175 - RNA, 19 nt, Homo sapiens
  misc_RNA (1)...(19): siRNA sense strand
gcgaggagauguguuuguc

SEQ ID NO: 546176 - RNA, 19 nt, Homo sapiens
  misc_RNA (1)...(19): siRNA sense strand
aaacucacauuucugaacu

SEQ ID NO: 546177 - RNA, 19 nt, Homo sapiens
  misc_RNA (1)...(19): siRNA sense strand
cauuuaacaggaccaauaa

SEQ ID NO: 546178 - RNA, 19 nt, Homo sapiens
  misc_RNA (1)...(19): siRNA sense strand
gaagaugccacugagaaca

SEQ ID NO: 546179 - RNA, 19 nt, Homo sapiens
  misc_RNA (1)...(19): siRNA sense strand
ugauuacccuggagacugu

SEQ ID NO: 546180 - RNA, 19 nt, Homo sapiens
  misc_RNA (1)...(19): siRNA sense strand
ucaucaaggugcagaagau

SEQ ID NO: 546181 - RNA, 19 nt, Homo sapiens
  misc_RNA (1)...(19): siRNA sense strand
ugagacggaaaccaauuua

SEQ ID NO: 546182 - RNA, 19 nt, Homo sapiens
  misc_RNA (1)...(19): siRNA sense strand
ugauuaagccguuuauucu

SEQ ID NO: 546183 - RNA, 19 nt, Homo sapiens
  misc_RNA (1)...(19): siRNA sense strand
acacggguuugaucuacaa

SEQ ID NO: 546184 - RNA, 19 nt, Homo sapiens
  misc_RNA (1)...(19): siRNA sense strand
cgacugcacuggguugagu

SEQ ID NO: 546185 - RNA, 19 nt, Homo sapiens
  misc_RNA (1)...(19): siRNA sense strand
gcucuggacuauggugaug

SEQ ID NO: 546186 - RNA, 19 nt, Homo sapiens
  misc_RNA (1)...(19): siRNA sense strand
ccacuucaucaacauguuu

SEQ ID NO: 546187 - RNA, 19 nt, Homo sapiens
  misc_RNA (1)...(19): siRNA sense strand
ggagcaaggcauggaacua

SEQ ID NO: 546188 - RNA, 19 nt, Homo sapiens
  misc_RNA (1)...(19): siRNA sense strand
gggcugcauuucaaacaca

SEQ ID NO: 546189 - RNA, 19 nt, Homo sapiens
  misc_RNA (1)...(19): siRNA sense strand
aagaagaugccacugagaa

SEQ ID NO: 546190 - RNA, 19 nt, Homo sapiens
  misc_RNA (1)...(19): siRNA sense strand
gauuaagccguuuauucuu

SEQ ID NO: 546191 - RNA, 19 nt, Homo sapiens
  misc_RNA (1)...(19): siRNA sense strand
gugguuauggcuuugauuu

SEQ ID NO: 546192 - RNA, 19 nt, Homo sapiens
  misc_RNA (1)...(19): siRNA sense strand
cagcaagaaguccaaaguu

SEQ ID NO: 546193 - RNA, 19 nt, Homo sapiens
  misc_RNA (1)...(19): siRNA sense strand
gacgcuugcucucccagaa

SEQ ID NO: 546194 - RNA, 19 nt, Homo sapiens
  misc_RNA (1)...(19): siRNA sense strand
ccguggaugcuucugauua

SEQ ID NO: 546195 - RNA, 19 nt, Homo sapiens
  misc_RNA (1)...(19): siRNA sense strand
gacaguagccauccuucug

SEQ ID NO: 546196 - RNA, 19 nt, Homo sapiens
  misc_RNA (1)...(19): siRNA sense strand
ugguucaguucaaagauuu

SEQ ID NO: 546197 - RNA, 19 nt, Homo sapiens
  misc_RNA (1)...(19): siRNA sense strand
gaacauugaaggugauagc

SEQ ID NO: 546198 - RNA, 19 nt, Homo sapiens
  misc_RNA (1)...(19): siRNA sense strand
gaacuuggcuucaaacaaa

SEQ ID NO: 546199 - RNA, 19 nt, Homo sapiens
  misc_RNA (1)...(19): siRNA sense strand
ugaaauaccuccugaagaa

SEQ ID NO: 546200 - RNA, 19 nt, Homo sapiens
  misc_RNA (1)...(19): siRNA sense strand
gaagaucugugauggguuu

SEQ ID NO: 546201 - RNA, 19 nt, Homo sapiens
  misc_RNA (1)...(19): siRNA sense strand
caauuuagcugaugauuuc

SEQ ID NO: 546202 - RNA, 19 nt, Homo sapiens
  misc_RNA (1)...(19): siRNA sense strand
aaacaaagcuuccuagaac

SEQ ID NO: 546203 - RNA, 19 nt, Homo sapiens
  misc_RNA (1)...(19): siRNA sense strand
gaagaacucucaacaucau

SEQ ID NO: 546204 - RNA, 19 nt, Homo sapiens
  misc_RNA (1)...(19): siRNA sense strand
caacaucauucugcaauuu

SEQ ID NO: 546205 - RNA, 19 nt, Homo sapiens
  misc_RNA (1)...(19): siRNA sense strand
gaagugcucuggacuaugg

SEQ ID NO: 546206 - RNA, 19 nt, Homo sapiens
  misc_RNA (1)...(19): siRNA sense strand
gaggaaacguguacuugaa

SEQ ID NO: 546207 - RNA, 19 nt, Homo sapiens
  misc_RNA (1)...(19): siRNA sense strand
gaaacaaagcuuccuagaa

SEQ ID NO: 546208 - RNA, 19 nt, Homo sapiens
  misc_RNA (1)...(19): siRNA sense strand
ucacauuucugaacucgua

SEQ ID NO: 546209 - RNA, 19 nt, Homo sapiens
  misc_RNA (1)...(19): siRNA sense strand
cagcaggccuugaaacaaa

SEQ ID NO: 546210 - RNA, 19 nt, Homo sapiens
  misc_RNA (1)...(19): siRNA sense strand
gaagacagacaaugagauu

SEQ ID NO: 546211 - RNA, 19 nt, Homo sapiens
  misc_RNA (1)...(19): siRNA sense strand
cagaagaacucucaacauc

SEQ ID NO: 546212 - RNA, 19 nt, Homo sapiens
  misc_RNA (1)...(19): siRNA sense strand
caaacaaacucacauuucu

SEQ ID NO: 546213 - RNA, 19 nt, Homo sapiens
  misc_RNA (1)...(19): siRNA sense strand
ggaaauccauacccguuug

SEQ ID NO: 546214 - RNA, 19 nt, Homo sapiens
  misc_RNA (1)...(19): siRNA sense strand
ggaaauuugugaaugaagu

SEQ ID NO: 546215 - RNA, 19 nt, Homo sapiens
  misc_RNA (1)...(19): siRNA sense strand
gaagcgaggagauguguuu

SEQ ID NO: 546216 - RNA, 19 nt, Homo sapiens
  misc_RNA (1)...(19): siRNA sense strand
ggaaggagaguuacaggaa

SEQ ID NO: 546217 - RNA, 19 nt, Homo sapiens
  misc_RNA (1)...(19): siRNA sense strand
gaauauuguugaugccuau

SEQ ID NO: 546218 - RNA, 19 nt, Homo sapiens
  misc_RNA (1)...(19): siRNA sense strand
ggaauuguccagaugguuu

SEQ ID NO: 546219 - RNA, 19 nt, Homo sapiens
  misc_RNA (1)...(19): siRNA sense strand
uaacaggaccaauaaauuc

SEQ ID NO: 546220 - RNA, 19 nt, Homo sapiens
  misc_RNA (1)...(19): siRNA sense strand
cuacaaacaucagcaagaa

SEQ ID NO: 546221 - RNA, 19 nt, Homo sapiens
  misc_RNA (1)...(19): siRNA sense strand
ggaggaaagucuauaucug

SEQ ID NO: 546222 - RNA, 19 nt, Homo sapiens
  misc_RNA (1)...(19): siRNA sense strand
gaacaucuuuggcucuucu

SEQ ID NO: 546223 - RNA, 19 nt, Homo sapiens
  misc_RNA (1)...(19): siRNA sense strand
gagcaaggcauggaacuaa

SEQ ID NO: 546224 - RNA, 19 nt, Homo sapiens
  misc_RNA (1)...(19): siRNA sense strand
gaaagaagaaauucagaag

SEQ ID NO: 546225 - RNA, 19 nt, Homo sapiens
  misc_RNA (1)...(19): siRNA sense strand
ugacagaacugaaauaccu

SEQ ID NO: 546226 - RNA, 19 nt, Homo sapiens
  misc_RNA (1)...(19): siRNA sense strand
gcaagaaguccaaaguuuc

SEQ ID NO: 546227 - RNA, 19 nt, Homo sapiens
  misc_RNA (1)...(19): siRNA sense strand
ggaaaccaauuuagcugau

SEQ ID NO: 546228 - RNA, 19 nt, Homo sapiens
  misc_RNA (1)...(19): siRNA sense strand
gcagaugccacacguauca

SEQ ID NO: 546229 - RNA, 19 nt, Homo sapiens
  misc_RNA (1)...(19): siRNA sense strand
ugaccacagugcaaucuaa

SEQ ID NO: 546230 - RNA, 19 nt, Homo sapiens
  misc_RNA (1)...(19): siRNA sense strand
cagaagaacauauucauca

SEQ ID NO: 546231 - RNA, 19 nt, Homo sapiens
  misc_RNA (1)...(19): siRNA sense strand
ggacgaccauggagaagag

SEQ ID NO: 546232 - RNA, 19 nt, Homo sapiens
  misc_RNA (1)...(19): siRNA sense strand
gguggaagcugcauauugc

SEQ ID NO: 546233 - RNA, 19 nt, Homo sapiens
  misc_RNA (1)...(19): siRNA sense strand
gaacugacagaacugaaau

SEQ ID NO: 546234 - RNA, 19 nt, Homo sapiens
  misc_RNA (1)...(19): siRNA sense strand
cguggaugcuucugauuaa

SEQ ID NO: 546235 - RNA, 19 nt, Homo sapiens
  misc_RNA (1)...(19): siRNA sense strand
ggaauacucauguaaugga

SEQ ID NO: 546236 - RNA, 19 nt, Homo sapiens
  misc_RNA (1)...(19): siRNA sense strand
agaaacggcacauggaaua

SEQ ID NO: 546237 - RNA, 19 nt, Homo sapiens
  misc_RNA (1)...(19): siRNA sense strand
gaaaccaauuuagcugaug

SEQ ID NO: 546238 - RNA, 19 nt, Homo sapiens
  misc_RNA (1)...(19): siRNA sense strand
agcaagaaguccaaaguuu

SEQ ID NO: 546239 - RNA, 19 nt, Homo sapiens
  misc_RNA (1)...(19): siRNA sense strand
gaagaaauucagaagaaca

SEQ ID NO: 546240 - RNA, 19 nt, Homo sapiens
  misc_RNA (1)...(19): siRNA sense strand
gaagucagaaggugugaau

SEQ ID NO: 546241 - RNA, 19 nt, Homo sapiens
  misc_RNA (1)...(19): siRNA sense strand
ggacuauggugaugaacag

SEQ ID NO: 546242 - RNA, 19 nt, Homo sapiens
  misc_RNA (1)...(19): siRNA sense strand
gcacuuuggaugauucuga

SEQ ID NO: 546243 - RNA, 19 nt, Homo sapiens
  misc_RNA (1)...(19): siRNA sense strand
guucauagccggugugauc

SEQ ID NO: 546244 - RNA, 19 nt, Homo sapiens
  misc_RNA (1)...(19): siRNA sense strand
gaaauaccuccugaagaaa

SEQ ID NO: 546245 - RNA, 19 nt, Homo sapiens
  misc_RNA (1)...(19): siRNA sense strand
gcagcuaccgggagauaaa

SEQ ID NO: 546246 - RNA, 19 nt, Homo sapiens
  misc_RNA (1)...(19): siRNA sense strand
aaaccaauuuagcugauga

SEQ ID NO: 546247 - RNA, 19 nt, Homo sapiens
  misc_RNA (1)...(19): siRNA sense strand
caacuuuggagacgucuuu

SEQ ID NO: 546248 - RNA, 19 nt, Homo sapiens
  misc_RNA (1)...(19): siRNA sense strand
ccuguucgcugugauguuu

SEQ ID NO: 546249 - RNA, 19 nt, Homo sapiens
  misc_RNA (1)...(19): siRNA sense strand
cugcauauaugaccggaaa

SEQ ID NO: 546250 - RNA, 19 nt, Homo sapiens
  misc_RNA (1)...(19): siRNA sense strand
ccuggagacuguucuagaa

SEQ ID NO: 546251 - RNA, 19 nt, Homo sapiens
  misc_RNA (1)...(19): siRNA sense strand
ccaauuuagcugaugauuu

SEQ ID NO: 546252 - RNA, 19 nt, Homo sapiens
  misc_RNA (1)...(19): siRNA sense strand
uggcgaaucugccgaggaa

SEQ ID NO: 546253 - RNA, 19 nt, Homo sapiens
  misc_RNA (1)...(19): siRNA sense strand
gaaccagcaggccuugaaa

SEQ ID NO: 546254 - RNA, 19 nt, Homo sapiens
  misc_RNA (1)...(19): siRNA sense strand
ucaaacaaacucacauuuc

SEQ ID NO: 546255 - RNA, 19 nt, Homo sapiens
  misc_RNA (1)...(19): siRNA sense strand
cgaaagaagaaauucagaa

SEQ ID NO: 546256 - RNA, 19 nt, Homo sapiens
  misc_RNA (1)...(19): siRNA sense strand
ggaggauccugugacgaaa

SEQ ID NO: 546257 - RNA, 19 nt, Homo sapiens
  misc_RNA (1)...(19): siRNA sense strand
cugaugauuucuuuacuga

SEQ ID NO: 546258 - RNA, 19 nt, Homo sapiens
  misc_RNA (1)...(19): siRNA sense strand
agacagacaaugagauuug

SEQ ID NO: 546259 - RNA, 19 nt, Homo sapiens
  misc_RNA (1)...(19): siRNA sense strand
gaagaugaaagcugucuac

SEQ ID NO: 546260 - RNA, 19 nt, Homo sapiens
  misc_RNA (1)...(19): siRNA sense strand
cggguuugaucuacaauga

SEQ ID NO: 546261 - RNA, 19 nt, Homo sapiens
  misc_RNA (1)...(19): siRNA sense strand
uaucugauccuacuuaugg

SEQ ID NO: 546262 - RNA, 19 nt, Homo sapiens
  misc_RNA (1)...(19): siRNA sense strand
gcuccuggcugcacuuugg

SEQ ID NO: 546263 - RNA, 19 nt, Homo sapiens
  misc_RNA (1)...(19): siRNA sense strand
ccuacaccaucaucacuuu

SEQ ID NO: 546264 - RNA, 19 nt, Homo sapiens
  misc_RNA (1)...(19): siRNA sense strand
acauuuaacaggaccaaua

SEQ ID NO: 546265 - RNA, 19 nt, Homo sapiens
  misc_RNA (1)...(19): siRNA sense strand
gcugaugauuucuuuacug

SEQ ID NO: 546266 - RNA, 19 nt, Homo sapiens
  misc_RNA (1)...(19): siRNA sense strand
ugaaagcugucuaccacau

SEQ ID NO: 546267 - RNA, 19 nt, Homo sapiens
  misc_RNA (1)...(19): siRNA sense strand
cgaggaaacguguacuuga

SEQ ID NO: 546268 - RNA, 19 nt, Homo sapiens
  misc_RNA (1)...(19): siRNA sense strand
gcuaucugauccuacuuau

SEQ ID NO: 546269 - RNA, 19 nt, Homo sapiens
  misc_RNA (1)...(19): siRNA sense strand
gguuauggcuuugauuucu

SEQ ID NO: 546270 - RNA, 19 nt, Homo sapiens
  misc_RNA (1)...(19): siRNA sense strand
ucaacaucauucugcaauu

SEQ ID NO: 546271 - RNA, 19 nt, Homo sapiens
  misc_RNA (1)...(19): siRNA sense strand
ggaacuuggcuucaaacaa

SEQ ID NO: 546272 - RNA, 19 nt, Homo sapiens
  misc_RNA (1)...(19): siRNA sense strand
uaacacaaacagagucuca

SEQ ID NO: 546273 - RNA, 19 nt, Homo sapiens
  misc_RNA (1)...(19): siRNA sense strand
ggugucauccucagccuuu

SEQ ID NO: 546274 - RNA, 19 nt, Homo sapiens
  misc_RNA (1)...(19): siRNA sense strand
aaaugaagaugucggugau

SEQ ID NO: 546275 - RNA, 19 nt, Homo sapiens
  misc_RNA (1)...(19): siRNA sense strand
gcgaggagauguguuuguc

SEQ ID NO: 546276 - RNA, 19 nt, Homo sapiens
  misc_RNA (1)...(19): siRNA sense strand
aaacucacauuucugaacu

SEQ ID NO: 546277 - RNA, 19 nt, Homo sapiens
  misc_RNA (1)...(19): siRNA sense strand
cauuuaacaggaccaauaa

SEQ ID NO: 546278 - RNA, 19 nt, Homo sapiens
  misc_RNA (1)...(19): siRNA sense strand
gaagaugccacugagaaca

SEQ ID NO: 546279 - RNA, 19 nt, Homo sapiens
  misc_RNA (1)...(19): siRNA sense strand
ugauuacccuggagacugu

SEQ ID NO: 546280 - RNA, 19 nt, Homo sapiens
  misc_RNA (1)...(19): siRNA sense strand
ucaucaaggugcagaagau

SEQ ID NO: 546281 - RNA, 19 nt, Homo sapiens
  misc_RNA (1)...(19): siRNA sense strand
ugagacggaaaccaauuua

SEQ ID NO: 546282 - RNA, 19 nt, Homo sapiens
  misc_RNA (1)...(19): siRNA sense strand
ugauuaagccguuuauucu

SEQ ID NO: 546283 - RNA, 19 nt, Homo sapiens
  misc_RNA (1)...(19): siRNA sense strand
acacggguuugaucuacaa

SEQ ID NO: 546284 - RNA, 19 nt, Homo sapiens
  misc_RNA (1)...(19): siRNA sense strand
cgacugcacuggguugagu

SEQ ID NO: 546285 - RNA, 19 nt, Homo sapiens
  misc_RNA (1)...(19): siRNA sense strand
gcucuggacuauggugaug

SEQ ID NO: 546286 - RNA, 19 nt, Homo sapiens
  misc_RNA (1)...(19): siRNA sense strand
ccacuucaucaacauguuu

SEQ ID NO: 546287 - RNA, 19 nt, Homo sapiens
  misc_RNA (1)...(19): siRNA sense strand
ggagcaaggcauggaacua

SEQ ID NO: 546288 - RNA, 19 nt, Homo sapiens
  misc_RNA (1)...(19): siRNA sense strand
gggcugcauuucaaacaca

SEQ ID NO: 546289 - RNA, 19 nt, Homo sapiens
  misc_RNA (1)...(19): siRNA sense strand
aagaagaugccacugagaa

SEQ ID NO: 546290 - RNA, 19 nt, Homo sapiens
  misc_RNA (1)...(19): siRNA sense strand
gauuaagccguuuauucuu

SEQ ID NO: 546291 - RNA, 19 nt, Homo sapiens
  misc_RNA (1)...(19): siRNA sense strand
gugguuauggcuuugauuu

SEQ ID NO: 546292 - RNA, 19 nt, Homo sapiens
  misc_RNA (1)...(19): siRNA sense strand
cagcaagaaguccaaaguu

SEQ ID NO: 546293 - RNA, 19 nt, Homo sapiens
  misc_RNA (1)...(19): siRNA sense strand
gacgcuugcucucccagaa

SEQ ID NO: 546294 - RNA, 19 nt, Homo sapiens
  misc_RNA (1)...(19): siRNA sense strand
ccguggaugcuucugauua

SEQ ID NO: 546295 - RNA, 19 nt, Homo sapiens
  misc_RNA (1)...(19): siRNA sense strand
gacaguagccauccuucug

SEQ ID NO: 546296 - RNA, 19 nt, Homo sapiens
  misc_RNA (1)...(19): siRNA sense strand
ugguucaguucaaagauuu

SEQ ID NO: 546297 - RNA, 19 nt, Homo sapiens
  misc_RNA (1)...(19): siRNA sense strand
gaacauugaaggugauagc

SEQ ID NO: 546298 - RNA, 19 nt, Homo sapiens
  misc_RNA (1)...(19): siRNA sense strand
gaacuuggcuucaaacaaa

SEQ ID NO: 546299 - RNA, 19 nt, Homo sapiens
  misc_RNA (1)...(19): siRNA sense strand
ugaaauaccuccugaagaa

SEQ ID NO: 546300 - RNA, 19 nt, Homo sapiens
  misc_RNA (1)...(19): siRNA sense strand
gaagaucugugauggguuu

SEQ ID NO: 546301 - RNA, 19 nt, Homo sapiens
  misc_RNA (1)...(19): siRNA sense strand
caauuuagcugaugauuuc

SEQ ID NO: 546302 - RNA, 19 nt, Homo sapiens
  misc_RNA (1)...(19): siRNA sense strand
aaacaaagcuuccuagaac

SEQ ID NO: 546303 - RNA, 19 nt, Homo sapiens
  misc_RNA (1)...(19): siRNA sense strand
gaagaacucucaacaucau

SEQ ID NO: 546304 - RNA, 19 nt, Homo sapiens
  misc_RNA (1)...(19): siRNA sense strand
caacaucauucugcaauuu

SEQ ID NO: 546305 - RNA, 19 nt, Homo sapiens
  misc_RNA (1)...(19): siRNA sense strand
gaagugcucuggacuaugg

SEQ ID NO: 546306 - RNA, 19 nt, Homo sapiens
  misc_RNA (1)...(19): siRNA sense strand
gaggaaacguguacuugaa

SEQ ID NO: 546307 - RNA, 19 nt, Homo sapiens
  misc_RNA (1)...(19): siRNA sense strand
gaaacaaagcuuccuagaa

SEQ ID NO: 546308 - RNA, 19 nt, Homo sapiens
  misc_RNA (1)...(19): siRNA sense strand
ucacauuucugaacucgua

SEQ ID NO: 546309 - RNA, 19 nt, Homo sapiens
  misc_RNA (1)...(19): siRNA sense strand
cagcaggccuugaaacaaa

SEQ ID NO: 546310 - RNA, 19 nt, Homo sapiens
  misc_RNA (1)...(19): siRNA sense strand
gaagacagacaaugagauu

SEQ ID NO: 546311 - RNA, 19 nt, Homo sapiens
  misc_RNA (1)...(19): siRNA sense strand
cagaagaacucucaacauc

SEQ ID NO: 546312 - RNA, 19 nt, Homo sapiens
  misc_RNA (1)...(19): siRNA sense strand
caaacaaacucacauuucu

SEQ ID NO: 546313 - RNA, 19 nt, Homo sapiens
  misc_RNA (1)...(19): siRNA sense strand
ggaaauccauacccguuug

SEQ ID NO: 546314 - RNA, 19 nt, Homo sapiens
  misc_RNA (1)...(19): siRNA sense strand
ggaaauuugugaaugaagu

SEQ ID NO: 546315 - RNA, 19 nt, Homo sapiens
  misc_RNA (1)...(19): siRNA sense strand
gaagcgaggagauguguuu

SEQ ID NO: 546316 - RNA, 19 nt, Homo sapiens
  misc_RNA (1)...(19): siRNA sense strand
ggaaggagaguuacaggaa

SEQ ID NO: 546317 - RNA, 19 nt, Homo sapiens
  misc_RNA (1)...(19): siRNA sense strand
gaauauuguugaugccuau

SEQ ID NO: 546318 - RNA, 19 nt, Homo sapiens
  misc_RNA (1)...(19): siRNA sense strand
ggaauuguccagaugguuu

SEQ ID NO: 546319 - RNA, 19 nt, Homo sapiens
  misc_RNA (1)...(19): siRNA sense strand
uaacaggaccaauaaauuc

SEQ ID NO: 546320 - RNA, 19 nt, Homo sapiens
  misc_RNA (1)...(19): siRNA sense strand
cuacaaacaucagcaagaa

SEQ ID NO: 546321 - RNA, 19 nt, Homo sapiens
  misc_RNA (1)...(19): siRNA sense strand
ggaggaaagucuauaucug

SEQ ID NO: 546322 - RNA, 19 nt, Homo sapiens
  misc_RNA (1)...(19): siRNA sense strand
gaacaucuuuggcucuucu

SEQ ID NO: 546323 - RNA, 19 nt, Homo sapiens
  misc_RNA (1)...(19): siRNA sense strand
gagcaaggcauggaacuaa

SEQ ID NO: 546324 - RNA, 19 nt, Homo sapiens
  misc_RNA (1)...(19): siRNA sense strand
gaaagaagaaauucagaag

SEQ ID NO: 546325 - RNA, 19 nt, Homo sapiens
  misc_RNA (1)...(19): siRNA sense strand
ugacagaacugaaauaccu

SEQ ID NO: 546326 - RNA, 19 nt, Homo sapiens
  misc_RNA (1)...(19): siRNA sense strand
gcaagaaguccaaaguuuc

SEQ ID NO: 546327 - RNA, 19 nt, Homo sapiens
  misc_RNA (1)...(19): siRNA sense strand
ggaaaccaauuuagcugau

SEQ ID NO: 546328 - RNA, 19 nt, Homo sapiens
  misc_RNA (1)...(19): siRNA sense strand
gcagaugccacacguauca

SEQ ID NO: 546329 - RNA, 19 nt, Homo sapiens
  misc_RNA (1)...(19): siRNA sense strand
ugaccacagugcaaucuaa

SEQ ID NO: 546330 - RNA, 19 nt, Homo sapiens
  misc_RNA (1)...(19): siRNA sense strand
cagaagaacauauucauca

SEQ ID NO: 546331 - RNA, 19 nt, Homo sapiens
  misc_RNA (1)...(19): siRNA sense strand
ggacgaccauggagaagag

SEQ ID NO: 546332 - RNA, 19 nt, Homo sapiens
  misc_RNA (1)...(19): siRNA sense strand
gguggaagcugcauauugc

SEQ ID NO: 546333 - RNA, 19 nt, Homo sapiens
  misc_RNA (1)...(19): siRNA sense strand
gaacugacagaacugaaau

SEQ ID NO: 546334 - RNA, 19 nt, Homo sapiens
  misc_RNA (1)...(19): siRNA sense strand
cguggaugcuucugauuaa

SEQ ID NO: 546335 - RNA, 19 nt, Homo sapiens
  misc_RNA (1)...(19): siRNA sense strand
ggaauacucauguaaugga

SEQ ID NO: 546336 - RNA, 19 nt, Homo sapiens
  misc_RNA (1)...(19): siRNA sense strand
agaaacggcacauggaaua

SEQ ID NO: 546337 - RNA, 19 nt, Homo sapiens
  misc_RNA (1)...(19): siRNA sense strand
gaaaccaauuuagcugaug

SEQ ID NO: 546338 - RNA, 19 nt, Homo sapiens
  misc_RNA (1)...(19): siRNA sense strand
agcaagaaguccaaaguuu

SEQ ID NO: 546339 - RNA, 19 nt, Homo sapiens
  misc_RNA (1)...(19): siRNA sense strand
gaagaaauucagaagaaca

SEQ ID NO: 546340 - RNA, 19 nt, Homo sapiens
  misc_RNA (1)...(19): siRNA sense strand
gaagucagaaggugugaau

SEQ ID NO: 546341 - RNA, 19 nt, Homo sapiens
  misc_RNA (1)...(19): siRNA sense strand
ggacuauggugaugaacag

SEQ ID NO: 546342 - RNA, 19 nt, Homo sapiens
  misc_RNA (1)...(19): siRNA sense strand
gcacuuuggaugauucuga

SEQ ID NO: 546343 - RNA, 19 nt, Homo sapiens
  misc_RNA (1)...(19): siRNA sense strand
guucauagccggugugauc

SEQ ID NO: 546344 - RNA, 19 nt, Homo sapiens
  misc_RNA (1)...(19): siRNA sense strand
gaaauaccuccugaagaaa

SEQ ID NO: 546345 - RNA, 19 nt, Homo sapiens
  misc_RNA (1)...(19): siRNA sense strand
gcagcuaccgggagauaaa

SEQ ID NO: 546346 - RNA, 19 nt, Homo sapiens
  misc_RNA (1)...(19): siRNA sense strand
aaaccaauuuagcugauga

SEQ ID NO: 546347 - RNA, 19 nt, Homo sapiens
  misc_RNA (1)...(19): siRNA sense strand
caacuuuggagacgucuuu

SEQ ID NO: 546348 - RNA, 19 nt, Homo sapiens
  misc_RNA (1)...(19): siRNA sense strand
ccuguucgcugugauguuu

SEQ ID NO: 546349 - RNA, 19 nt, Homo sapiens
  misc_RNA (1)...(19): siRNA sense strand
cugcauauaugaccggaaa

SEQ ID NO: 546350 - RNA, 19 nt, Homo sapiens
  misc_RNA (1)...(19): siRNA sense strand
ccuggagacuguucuagaa

SEQ ID NO: 546351 - RNA, 19 nt, Homo sapiens
  misc_RNA (1)...(19): siRNA sense strand
ccaauuuagcugaugauuu

SEQ ID NO: 546352 - RNA, 19 nt, Homo sapiens
  misc_RNA (1)...(19): siRNA sense strand
uggcgaaucugccgaggaa

SEQ ID NO: 546353 - RNA, 19 nt, Homo sapiens
  misc_RNA (1)...(19): siRNA sense strand
gaaccagcaggccuugaaa

SEQ ID NO: 546354 - RNA, 19 nt, Homo sapiens
  misc_RNA (1)...(19): siRNA sense strand
ucaaacaaacucacauuuc

SEQ ID NO: 546355 - RNA, 19 nt, Homo sapiens
  misc_RNA (1)...(19): siRNA sense strand
cgaaagaagaaauucagaa

SEQ ID NO: 546356 - RNA, 19 nt, Homo sapiens
  misc_RNA (1)...(19): siRNA sense strand
ggaggauccugugacgaaa

SEQ ID NO: 546357 - RNA, 19 nt, Homo sapiens
  misc_RNA (1)...(19): siRNA sense strand
cugaugauuucuuuacuga

SEQ ID NO: 546358 - RNA, 19 nt, Homo sapiens
  misc_RNA (1)...(19): siRNA sense strand
agacagacaaugagauuug

SEQ ID NO: 546359 - RNA, 19 nt, Homo sapiens
  misc_RNA (1)...(19): siRNA sense strand
gaagaugaaagcugucuac

SEQ ID NO: 546360 - RNA, 19 nt, Homo sapiens
  misc_RNA (1)...(19): siRNA sense strand
cggguuugaucuacaauga

SEQ ID NO: 546361 - RNA, 19 nt, Homo sapiens
  misc_RNA (1)...(19): siRNA sense strand
uaucugauccuacuuaugg

SEQ ID NO: 546362 - RNA, 19 nt, Homo sapiens
  misc_RNA (1)...(19): siRNA sense strand
gcuccuggcugcacuuugg

SEQ ID NO: 546363 - RNA, 19 nt, Homo sapiens
  misc_RNA (1)...(19): siRNA sense strand
ccuacaccaucaucacuuu

SEQ ID NO: 546364 - RNA, 19 nt, Homo sapiens
  misc_RNA (1)...(19): siRNA sense strand
acauuuaacaggaccaaua

SEQ ID NO: 546365 - RNA, 19 nt, Homo sapiens
  misc_RNA (1)...(19): siRNA sense strand
gcugaugauuucuuuacug

SEQ ID NO: 546366 - RNA, 19 nt, Homo sapiens
  misc_RNA (1)...(19): siRNA sense strand
ugaaagcugucuaccacau

SEQ ID NO: 546367 - RNA, 19 nt, Homo sapiens
  misc_RNA (1)...(19): siRNA sense strand
cgaggaaacguguacuuga

SEQ ID NO: 546368 - RNA, 19 nt, Homo sapiens
  misc_RNA (1)...(19): siRNA sense strand
gcuaucugauccuacuuau

SEQ ID NO: 546369 - RNA, 19 nt, Homo sapiens
  misc_RNA (1)...(19): siRNA sense strand
gguuauggcuuugauuucu

SEQ ID NO: 546370 - RNA, 19 nt, Homo sapiens
  misc_RNA (1)...(19): siRNA sense strand
ucaacaucauucugcaauu

SEQ ID NO: 546371 - RNA, 19 nt, Homo sapiens
  misc_RNA (1)...(19): siRNA sense strand
ggaacuuggcuucaaacaa

SEQ ID NO: 546372 - RNA, 19 nt, Homo sapiens
  misc_RNA (1)...(19): siRNA sense strand
uaacacaaacagagucuca

SEQ ID NO: 546373 - RNA, 19 nt, Homo sapiens
  misc_RNA (1)...(19): siRNA sense strand
ggugucauccucagccuuu

SEQ ID NO: 546374 - RNA, 19 nt, Homo sapiens
  misc_RNA (1)...(19): siRNA sense strand
aaaugaagaugucggugau

SEQ ID NO: 546375 - RNA, 19 nt, Homo sapiens
  misc_RNA (1)...(19): siRNA sense strand
gcgaggagauguguuuguc

SEQ ID NO: 546376 - RNA, 19 nt, Homo sapiens
  misc_RNA (1)...(19): siRNA sense strand
aaacucacauuucugaacu

SEQ ID NO: 546377 - RNA, 19 nt, Homo sapiens
  misc_RNA (1)...(19): siRNA sense strand
cauuuaacaggaccaauaa

SEQ ID NO: 546378 - RNA, 19 nt, Homo sapiens
  misc_RNA (1)...(19): siRNA sense strand
gaagaugccacugagaaca

SEQ ID NO: 546379 - RNA, 19 nt, Homo sapiens
  misc_RNA (1)...(19): siRNA sense strand
ugauuacccuggagacugu

SEQ ID NO: 546380 - RNA, 19 nt, Homo sapiens
  misc_RNA (1)...(19): siRNA sense strand
ucaucaaggugcagaagau

SEQ ID NO: 546381 - RNA, 19 nt, Homo sapiens
  misc_RNA (1)...(19): siRNA sense strand
ugagacggaaaccaauuua

SEQ ID NO: 546382 - RNA, 19 nt, Homo sapiens
  misc_RNA (1)...(19): siRNA sense strand
ugauuaagccguuuauucu

SEQ ID NO: 546383 - RNA, 19 nt, Homo sapiens
  misc_RNA (1)...(19): siRNA sense strand
acacggguuugaucuacaa

SEQ ID NO: 546384 - RNA, 19 nt, Homo sapiens
  misc_RNA (1)...(19): siRNA sense strand
cgacugcacuggguugagu

SEQ ID NO: 546385 - RNA, 19 nt, Homo sapiens
  misc_RNA (1)...(19): siRNA sense strand
gcucuggacuauggugaug

SEQ ID NO: 546386 - RNA, 19 nt, Homo sapiens
  misc_RNA (1)...(19): siRNA sense strand
ccacuucaucaacauguuu

SEQ ID NO: 546387 - RNA, 19 nt, Homo sapiens
  misc_RNA (1)...(19): siRNA sense strand
ggagcaaggcauggaacua

SEQ ID NO: 546388 - RNA, 19 nt, Homo sapiens
  misc_RNA (1)...(19): siRNA sense strand
gggcugcauuucaaacaca

SEQ ID NO: 546389 - RNA, 19 nt, Homo sapiens
  misc_RNA (1)...(19): siRNA sense strand
aagaagaugccacugagaa

SEQ ID NO: 546390 - RNA, 19 nt, Homo sapiens
  misc_RNA (1)...(19): siRNA sense strand
gauuaagccguuuauucuu

SEQ ID NO: 546391 - RNA, 19 nt, Homo sapiens
  misc_RNA (1)...(19): siRNA sense strand
gugguuauggcuuugauuu

SEQ ID NO: 546392 - RNA, 19 nt, Homo sapiens
  misc_RNA (1)...(19): siRNA sense strand
cagcaagaaguccaaaguu

SEQ ID NO: 546393 - RNA, 19 nt, Homo sapiens
  misc_RNA (1)...(19): siRNA sense strand
gacgcuugcucucccagaa

SEQ ID NO: 546394 - RNA, 19 nt, Homo sapiens
  misc_RNA (1)...(19): siRNA sense strand
ccguggaugcuucugauua

SEQ ID NO: 546395 - RNA, 19 nt, Homo sapiens
  misc_RNA (1)...(19): siRNA sense strand
gacaguagccauccuucug

SEQ ID NO: 546396 - RNA, 19 nt, Homo sapiens
  misc_RNA (1)...(19): siRNA sense strand
ugguucaguucaaagauuu

SEQ ID NO: 546397 - RNA, 19 nt, Homo sapiens
  misc_RNA (1)...(19): siRNA sense strand
gaacauugaaggugauagc

SEQ ID NO: 546398 - RNA, 19 nt, Homo sapiens
  misc_RNA (1)...(19): siRNA sense strand
gaaacgagcccgcaucaaa

SEQ ID NO: 546399 - RNA, 19 nt, Homo sapiens
  misc_RNA (1)...(19): siRNA sense strand
gaaaucuucccgaucguua

SEQ ID NO: 546400 - RNA, 19 nt, Homo sapiens
  misc_RNA (1)...(19): siRNA sense strand
gguaguagauuccauggau

SEQ ID NO: 546401 - RNA, 19 nt, Homo sapiens
  misc_RNA (1)...(19): siRNA sense strand
gaaggaaaauuuagagaga

SEQ ID NO: 546402 - RNA, 19 nt, Homo sapiens
  misc_RNA (1)...(19): siRNA sense strand
gcgguuagauaagguagua

SEQ ID NO: 546403 - RNA, 19 nt, Homo sapiens
  misc_RNA (1)...(19): siRNA sense strand
guccagagcgguuagauaa

SEQ ID NO: 546404 - RNA, 19 nt, Homo sapiens
  misc_RNA (1)...(19): siRNA sense strand
uagauaagguaguagauuc

SEQ ID NO: 546405 - RNA, 19 nt, Homo sapiens
  misc_RNA (1)...(19): siRNA sense strand
gguuauaccuuggcaccua

SEQ ID NO: 546406 - RNA, 19 nt, Homo sapiens
  misc_RNA (1)...(19): siRNA sense strand
gaaagaaagaaacaugcuu

SEQ ID NO: 546407 - RNA, 19 nt, Homo sapiens
  misc_RNA (1)...(19): siRNA sense strand
agauaaaguuguccaggaa

SEQ ID NO: 546408 - RNA, 19 nt, Homo sapiens
  misc_RNA (1)...(19): siRNA sense strand
gaagaaucaucuggcacaa

SEQ ID NO: 546409 - RNA, 19 nt, Homo sapiens
  misc_RNA (1)...(19): siRNA sense strand
caauaggaaacgauucuuu

SEQ ID NO: 546410 - RNA, 19 nt, Homo sapiens
  misc_RNA (1)...(19): siRNA sense strand
agaaucaucuggcacaagu

SEQ ID NO: 546411 - RNA, 19 nt, Homo sapiens
  misc_RNA (1)...(19): siRNA sense strand
ugccuuauguggaccauuu

SEQ ID NO: 546412 - RNA, 19 nt, Homo sapiens
  misc_RNA (1)...(19): siRNA sense strand
uaccuuggcaccuaaauaa

SEQ ID NO: 546413 - RNA, 19 nt, Homo sapiens
  misc_RNA (1)...(19): siRNA sense strand
ucagacuggucaagaaaga

SEQ ID NO: 546414 - RNA, 19 nt, Homo sapiens
  misc_RNA (1)...(19): siRNA sense strand
uagauuccauggaugcauu

SEQ ID NO: 546415 - RNA, 19 nt, Homo sapiens
  misc_RNA (1)...(19): siRNA sense strand
cauccgcccugaaaucuuc

SEQ ID NO: 546416 - RNA, 19 nt, Homo sapiens
  misc_RNA (1)...(19): siRNA sense strand
gagaaacgagcccgcauca

SEQ ID NO: 546417 - RNA, 19 nt, Homo sapiens
  misc_RNA (1)...(19): siRNA sense strand
guuauaccuuggcaccuaa

SEQ ID NO: 546418 - RNA, 19 nt, Homo sapiens
  misc_RNA (1)...(19): siRNA sense strand
gauacaauaggaaacgauu

SEQ ID NO: 546419 - RNA, 19 nt, Homo sapiens
  misc_RNA (1)...(19): siRNA sense strand
caucaaagcacggaaggaa

SEQ ID NO: 546420 - RNA, 19 nt, Homo sapiens
  misc_RNA (1)...(19): siRNA sense strand
aagagaagaugcccuaagg

SEQ ID NO: 546421 - RNA, 19 nt, Homo sapiens
  misc_RNA (1)...(19): siRNA sense strand
caacuaaggaacaaaagua

SEQ ID NO: 546422 - RNA, 19 nt, Homo sapiens
  misc_RNA (1)...(19): siRNA sense strand
gcccuaaggcuucuucaga

SEQ ID NO: 546423 - RNA, 19 nt, Homo sapiens
  misc_RNA (1)...(19): siRNA sense strand
gauaaaguuguccaggaaa

SEQ ID NO: 546424 - RNA, 19 nt, Homo sapiens
  misc_RNA (1)...(19): siRNA sense strand
ccauggaugcauuagauaa

SEQ ID NO: 546425 - RNA, 19 nt, Homo sapiens
  misc_RNA (1)...(19): siRNA sense strand
gaaagagaagaugcccuaa

SEQ ID NO: 546426 - RNA, 19 nt, Homo sapiens
  misc_RNA (1)...(19): siRNA sense strand
ccagagcgguuagauaagg

SEQ ID NO: 546427 - RNA, 19 nt, Homo sapiens
  misc_RNA (1)...(19): siRNA sense strand
gguuuggcccuucuuugua

SEQ ID NO: 546428 - RNA, 19 nt, Homo sapiens
  misc_RNA (1)...(19): siRNA sense strand
cauggaugcauuagauaaa

SEQ ID NO: 546429 - RNA, 19 nt, Homo sapiens
  misc_RNA (1)...(19): siRNA sense strand
aauaggaaacgauucuuug

SEQ ID NO: 546430 - RNA, 19 nt, Homo sapiens
  misc_RNA (1)...(19): siRNA sense strand
guuuggcccuucuuuguag

SEQ ID NO: 546431 - RNA, 19 nt, Homo sapiens
  misc_RNA (1)...(19): siRNA sense strand
ggaugcauuagauaaaguu

SEQ ID NO: 546432 - RNA, 19 nt, Homo sapiens
  misc_RNA (1)...(19): siRNA sense strand
gcaccuaaauaaaagauac

SEQ ID NO: 546433 - RNA, 19 nt, Homo sapiens
  misc_RNA (1)...(19): siRNA sense strand
aaacgagcccgcaucaaag

SEQ ID NO: 546434 - RNA, 19 nt, Homo sapiens
  misc_RNA (1)...(19): siRNA sense strand
uuccauggaugcauuagau

SEQ ID NO: 546435 - RNA, 19 nt, Homo sapiens
  misc_RNA (1)...(19): siRNA sense strand
ugguaugucuuacugaaag

SEQ ID NO: 546436 - RNA, 19 nt, Homo sapiens
  misc_RNA (1)...(19): siRNA sense strand
ucuucccgaucguuaauaa

SEQ ID NO: 546437 - RNA, 19 nt, Homo sapiens
  misc_RNA (1)...(19): siRNA sense strand
guucaagcaguggguuaua

SEQ ID NO: 546438 - RNA, 19 nt, Homo sapiens
  misc_RNA (1)...(19): siRNA sense strand
gagcagcauggaccuguca

SEQ ID NO: 546439 - RNA, 19 nt, Homo sapiens
  misc_RNA (1)...(19): siRNA sense strand
uuugguaugucuuacugaa

SEQ ID NO: 546440 - RNA, 19 nt, Homo sapiens
  misc_RNA (1)...(19): siRNA sense strand
uaaaguuguccaggaaaga

SEQ ID NO: 546441 - RNA, 19 nt, Homo sapiens
  misc_RNA (1)...(19): siRNA sense strand
ugcauuagauaaaguuguc

SEQ ID NO: 546442 - RNA, 19 nt, Homo sapiens
  misc_RNA (1)...(19): siRNA sense strand
gguuagauaagguaguaga

SEQ ID NO: 546443 - RNA, 19 nt, Homo sapiens
  misc_RNA (1)...(19): siRNA sense strand
ggaccugucagcaacuaag

SEQ ID NO: 546444 - RNA, 19 nt, Homo sapiens
  misc_RNA (1)...(19): siRNA sense strand
cagacuggaacgugagaaa

SEQ ID NO: 546445 - RNA, 19 nt, Homo sapiens
  misc_RNA (1)...(19): siRNA sense strand
ggaacaaaaguaaugaaga

SEQ ID NO: 546446 - RNA, 19 nt, Homo sapiens
  misc_RNA (1)...(19): siRNA sense strand
auaaaguuguccaggaaag

SEQ ID NO: 546447 - RNA, 19 nt, Homo sapiens
  misc_RNA (1)...(19): siRNA sense strand
gauucuuugccuugccuua

SEQ ID NO: 546448 - RNA, 19 nt, Homo sapiens
  misc_RNA (1)...(19): siRNA sense strand
gucagcaacuaaggaacaa

SEQ ID NO: 546449 - RNA, 19 nt, Homo sapiens
  misc_RNA (1)...(19): siRNA sense strand
uuagagagaaagaaagcaa

SEQ ID NO: 546450 - RNA, 19 nt, Homo sapiens
  misc_RNA (1)...(19): siRNA sense strand
ucaaagcacggaaggaaaa

SEQ ID NO: 546451 - RNA, 19 nt, Homo sapiens
  misc_RNA (1)...(19): siRNA sense strand
uagagagaaagaaagcaaa

SEQ ID NO: 546452 - RNA, 19 nt, Homo sapiens
  misc_RNA (1)...(19): siRNA sense strand
gccaaguccagagcgguua

SEQ ID NO: 546453 - RNA, 19 nt, Homo sapiens
  misc_RNA (1)...(19): siRNA sense strand
gaaacgagcccgcaucaaa

SEQ ID NO: 546454 - RNA, 19 nt, Homo sapiens
  misc_RNA (1)...(19): siRNA sense strand
gguaguagauuccauggau

SEQ ID NO: 546455 - RNA, 19 nt, Homo sapiens
  misc_RNA (1)...(19): siRNA sense strand
gaaggaaaauuuagagaga

SEQ ID NO: 546456 - RNA, 19 nt, Homo sapiens
  misc_RNA (1)...(19): siRNA sense strand
gcgguuagauaagguagua

SEQ ID NO: 546457 - RNA, 19 nt, Homo sapiens
  misc_RNA (1)...(19): siRNA sense strand
guccagagcgguuagauaa

SEQ ID NO: 546458 - RNA, 19 nt, Homo sapiens
  misc_RNA (1)...(19): siRNA sense strand
uagauaagguaguagauuc

SEQ ID NO: 546459 - RNA, 19 nt, Homo sapiens
  misc_RNA (1)...(19): siRNA sense strand
gguuauaccuuggcaccua

SEQ ID NO: 546460 - RNA, 19 nt, Homo sapiens
  misc_RNA (1)...(19): siRNA sense strand
agauaaaguuguccaggaa

SEQ ID NO: 546461 - RNA, 19 nt, Homo sapiens
  misc_RNA (1)...(19): siRNA sense strand
gaagaaucaucuggcacaa

SEQ ID NO: 546462 - RNA, 19 nt, Homo sapiens
  misc_RNA (1)...(19): siRNA sense strand
caauaggaaacgauucuuu

SEQ ID NO: 546463 - RNA, 19 nt, Homo sapiens
  misc_RNA (1)...(19): siRNA sense strand
agaaucaucuggcacaagu

SEQ ID NO: 546464 - RNA, 19 nt, Homo sapiens
  misc_RNA (1)...(19): siRNA sense strand
ugccuuauguggaccauuu

SEQ ID NO: 546465 - RNA, 19 nt, Homo sapiens
  misc_RNA (1)...(19): siRNA sense strand
uaccuuggcaccuaaauaa

SEQ ID NO: 546466 - RNA, 19 nt, Homo sapiens
  misc_RNA (1)...(19): siRNA sense strand
ucagacuggucaagaaaga

SEQ ID NO: 546467 - RNA, 19 nt, Homo sapiens
  misc_RNA (1)...(19): siRNA sense strand
uagauuccauggaugcauu

SEQ ID NO: 546468 - RNA, 19 nt, Homo sapiens
  misc_RNA (1)...(19): siRNA sense strand
guuauaccuuggcaccuaa

SEQ ID NO: 546469 - RNA, 19 nt, Homo sapiens
  misc_RNA (1)...(19): siRNA sense strand
gagaaacgagcccgcauca

SEQ ID NO: 546470 - RNA, 19 nt, Homo sapiens
  misc_RNA (1)...(19): siRNA sense strand
gauacaauaggaaacgauu

SEQ ID NO: 546471 - RNA, 19 nt, Homo sapiens
  misc_RNA (1)...(19): siRNA sense strand
caucaaagcacggaaggaa

SEQ ID NO: 546472 - RNA, 19 nt, Homo sapiens
  misc_RNA (1)...(19): siRNA sense strand
aagagaagaugcccuaagg

SEQ ID NO: 546473 - RNA, 19 nt, Homo sapiens
  misc_RNA (1)...(19): siRNA sense strand
gcccuaaggcuucuucaga

SEQ ID NO: 546474 - RNA, 19 nt, Homo sapiens
  misc_RNA (1)...(19): siRNA sense strand
gauaaaguuguccaggaaa

SEQ ID NO: 546475 - RNA, 19 nt, Homo sapiens
  misc_RNA (1)...(19): siRNA sense strand
ccauggaugcauuagauaa

SEQ ID NO: 546476 - RNA, 19 nt, Homo sapiens
  misc_RNA (1)...(19): siRNA sense strand
gaaagagaagaugcccuaa

SEQ ID NO: 546477 - RNA, 19 nt, Homo sapiens
  misc_RNA (1)...(19): siRNA sense strand
ccagagcgguuagauaagg

SEQ ID NO: 546478 - RNA, 19 nt, Homo sapiens
  misc_RNA (1)...(19): siRNA sense strand
cauggaugcauuagauaaa

SEQ ID NO: 546479 - RNA, 19 nt, Homo sapiens
  misc_RNA (1)...(19): siRNA sense strand
aauaggaaacgauucuuug

SEQ ID NO: 546480 - RNA, 19 nt, Homo sapiens
  misc_RNA (1)...(19): siRNA sense strand
ggaugcauuagauaaaguu

SEQ ID NO: 546481 - RNA, 19 nt, Homo sapiens
  misc_RNA (1)...(19): siRNA sense strand
gcaccuaaauaaaagauac

SEQ ID NO: 546482 - RNA, 19 nt, Homo sapiens
  misc_RNA (1)...(19): siRNA sense strand
aaacgagcccgcaucaaag

SEQ ID NO: 546483 - RNA, 19 nt, Homo sapiens
  misc_RNA (1)...(19): siRNA sense strand
uuccauggaugcauuagau

SEQ ID NO: 546484 - RNA, 19 nt, Homo sapiens
  misc_RNA (1)...(19): siRNA sense strand
guucaagcaguggguuaua

SEQ ID NO: 546485 - RNA, 19 nt, Homo sapiens
  misc_RNA (1)...(19): siRNA sense strand
ugcauuagauaaaguuguc

SEQ ID NO: 546486 - RNA, 19 nt, Homo sapiens
  misc_RNA (1)...(19): siRNA sense strand
gguuagauaagguaguaga

SEQ ID NO: 546487 - RNA, 19 nt, Homo sapiens
  misc_RNA (1)...(19): siRNA sense strand
uaaaguuguccaggaaaga

SEQ ID NO: 546488 - RNA, 19 nt, Homo sapiens
  misc_RNA (1)...(19): siRNA sense strand
auaaaguuguccaggaaag

SEQ ID NO: 546489 - RNA, 19 nt, Homo sapiens
  misc_RNA (1)...(19): siRNA sense strand
cagacuggaacgugagaaa

SEQ ID NO: 546490 - RNA, 19 nt, Homo sapiens
  misc_RNA (1)...(19): siRNA sense strand
gauucuuugccuugccuua

SEQ ID NO: 546491 - RNA, 19 nt, Homo sapiens
  misc_RNA (1)...(19): siRNA sense strand
uuagagagaaagaaagcaa

SEQ ID NO: 546492 - RNA, 19 nt, Homo sapiens
  misc_RNA (1)...(19): siRNA sense strand
ucaaagcacggaaggaaaa

SEQ ID NO: 546493 - RNA, 19 nt, Homo sapiens
  misc_RNA (1)...(19): siRNA sense strand
uagagagaaagaaagcaaa

SEQ ID NO: 546494 - RNA, 19 nt, Homo sapiens
  misc_RNA (1)...(19): siRNA sense strand
gccaaguccagagcgguua

SEQ ID NO: 546495 - RNA, 19 nt, Homo sapiens
  misc_RNA (1)...(19): siRNA sense strand
gauaauaccuaaagaggaa

SEQ ID NO: 546496 - RNA, 19 nt, Homo sapiens
  misc_RNA (1)...(19): siRNA sense strand
gaagagcaaccacaaguuu

SEQ ID NO: 546497 - RNA, 19 nt, Homo sapiens
  misc_RNA (1)...(19): siRNA sense strand
ccugaggucuggauucuuu

SEQ ID NO: 546498 - RNA, 19 nt, Homo sapiens
  misc_RNA (1)...(19): siRNA sense strand
cuaaagaggaacacuguaa

SEQ ID NO: 546499 - RNA, 19 nt, Homo sapiens
  misc_RNA (1)...(19): siRNA sense strand
cauggaaggugaucugcaa

SEQ ID NO: 546500 - RNA, 19 nt, Homo sapiens
  misc_RNA (1)...(19): siRNA sense strand
gaagauaauaccuaaagag

SEQ ID NO: 546501 - RNA, 19 nt, Homo sapiens
  misc_RNA (1)...(19): siRNA sense strand
uaaagaggaacacuguaaa

SEQ ID NO: 546502 - RNA, 19 nt, Homo sapiens
  misc_RNA (1)...(19): siRNA sense strand
agaagcaggugaagagcaa

SEQ ID NO: 546503 - RNA, 19 nt, Homo sapiens
  misc_RNA (1)...(19): siRNA sense strand
agaagaagaucaggauaca

SEQ ID NO: 546504 - RNA, 19 nt, Homo sapiens
  misc_RNA (1)...(19): siRNA sense strand
gcgucaaggugaagauaau

SEQ ID NO: 546505 - RNA, 19 nt, Homo sapiens
  misc_RNA (1)...(19): siRNA sense strand
ggaaggugaucugcaagag

SEQ ID NO: 546506 - RNA, 19 nt, Homo sapiens
  misc_RNA (1)...(19): siRNA sense strand
aagagcaaccacaaguuua

SEQ ID NO: 546507 - RNA, 19 nt, Homo sapiens
  misc_RNA (1)...(19): siRNA sense strand
gugaagauaauaccuaaag

SEQ ID NO: 546508 - RNA, 19 nt, Homo sapiens
  misc_RNA (1)...(19): siRNA sense strand
agagcaaccacaaguuuaa

SEQ ID NO: 546509 - RNA, 19 nt, Homo sapiens
  misc_RNA (1)...(19): siRNA sense strand
gacagaagaagaucaggau

SEQ ID NO: 546510 - RNA, 19 nt, Homo sapiens
  misc_RNA (1)...(19): siRNA sense strand
gaggaacacuguaaaaugc

SEQ ID NO: 546511 - RNA, 19 nt, Homo sapiens
  misc_RNA (1)...(19): siRNA sense strand
gcagcagacagaagaagau

SEQ ID NO: 546512 - RNA, 19 nt, Homo sapiens
  misc_RNA (1)...(19): siRNA sense strand
gugaagagcaaccacaagu

SEQ ID NO: 546513 - RNA, 19 nt, Homo sapiens
  misc_RNA (1)...(19): siRNA sense strand
gcugaaagucgggauccua

SEQ ID NO: 546514 - RNA, 19 nt, Homo sapiens
  misc_RNA (1)...(19): siRNA sense strand
gcaagagcugcaucaguca

SEQ ID NO: 546515 - RNA, 19 nt, Homo sapiens
  misc_RNA (1)...(19): siRNA sense strand
ugaagagcaaccacaaguu

SEQ ID NO: 546516 - RNA, 19 nt, Homo sapiens
  misc_RNA (1)...(19): siRNA sense strand
cagaagaagaucaggauac

SEQ ID NO: 546517 - RNA, 19 nt, Homo sapiens
  misc_RNA (1)...(19): siRNA sense strand
gccagaagcaggugaagag

SEQ ID NO: 546518 - RNA, 19 nt, Homo sapiens
  misc_RNA (1)...(19): siRNA sense strand
gcagacagaagaagaucag

SEQ ID NO: 546519 - RNA, 19 nt, Homo sapiens
  misc_RNA (1)...(19): siRNA sense strand
cgacauggaaggugaucug

SEQ ID NO: 546520 - RNA, 19 nt, Homo sapiens
  misc_RNA (1)...(19): siRNA sense strand
gaaagucgggauccuacac

SEQ ID NO: 546521 - RNA, 19 nt, Homo sapiens
  misc_RNA (1)...(19): siRNA sense strand
cgucaaggugaagauaaua

SEQ ID NO: 546522 - RNA, 19 nt, Homo sapiens
  misc_RNA (1)...(19): siRNA sense strand
acagaagaagaucaggaua

SEQ ID NO: 546523 - RNA, 19 nt, Homo sapiens
  misc_RNA (1)...(19): siRNA sense strand
caagagcugcaucagucaa

SEQ ID NO: 546524 - RNA, 19 nt, Homo sapiens
  misc_RNA (1)...(19): siRNA sense strand
ggcgucaaggugaagauaa

SEQ ID NO: 546525 - RNA, 19 nt, Homo sapiens
  misc_RNA (1)...(19): siRNA sense strand
ggcagcagacagaagaaga

SEQ ID NO: 546526 - RNA, 19 nt, Homo sapiens
  misc_RNA (1)...(19): siRNA sense strand
gagcugcaucagucaaaca

SEQ ID NO: 546527 - RNA, 19 nt, Homo sapiens
  misc_RNA (1)...(19): siRNA sense strand
caccugggcagcagacaga

SEQ ID NO: 546528 - RNA, 19 nt, Homo sapiens
  misc_RNA (1)...(19): siRNA sense strand
guuccggcgucaaggugaa

SEQ ID NO: 546529 - RNA, 19 nt, Homo sapiens
  misc_RNA (1)...(19): siRNA sense strand
cauggaaggugaucugcaa

SEQ ID NO: 546530 - RNA, 19 nt, Homo sapiens
  misc_RNA (1)...(19): siRNA sense strand
agaagaagaucaggauaca

SEQ ID NO: 546531 - RNA, 19 nt, Homo sapiens
  misc_RNA (1)...(19): siRNA sense strand
gcgucaaggugaagauaau

SEQ ID NO: 546532 - RNA, 19 nt, Homo sapiens
  misc_RNA (1)...(19): siRNA sense strand
ggaaggugaucugcaagag

SEQ ID NO: 546533 - RNA, 19 nt, Homo sapiens
  misc_RNA (1)...(19): siRNA sense strand
gacagaagaagaucaggau

SEQ ID NO: 546534 - RNA, 19 nt, Homo sapiens
  misc_RNA (1)...(19): siRNA sense strand
gcagcagacagaagaagau

SEQ ID NO: 546535 - RNA, 19 nt, Homo sapiens
  misc_RNA (1)...(19): siRNA sense strand
gcugaaagucgggauccua

SEQ ID NO: 546536 - RNA, 19 nt, Homo sapiens
  misc_RNA (1)...(19): siRNA sense strand
gcaagagcugcaucaguca

SEQ ID NO: 546537 - RNA, 19 nt, Homo sapiens
  misc_RNA (1)...(19): siRNA sense strand
cagaagaagaucaggauac

SEQ ID NO: 546538 - RNA, 19 nt, Homo sapiens
  misc_RNA (1)...(19): siRNA sense strand
gcagacagaagaagaucag

SEQ ID NO: 546539 - RNA, 19 nt, Homo sapiens
  misc_RNA (1)...(19): siRNA sense strand
cgacauggaaggugaucug

SEQ ID NO: 546540 - RNA, 19 nt, Homo sapiens
  misc_RNA (1)...(19): siRNA sense strand
gaaagucgggauccuacac

SEQ ID NO: 546541 - RNA, 19 nt, Homo sapiens
  misc_RNA (1)...(19): siRNA sense strand
cgucaaggugaagauaaua

SEQ ID NO: 546542 - RNA, 19 nt, Homo sapiens
  misc_RNA (1)...(19): siRNA sense strand
acagaagaagaucaggaua

SEQ ID NO: 546543 - RNA, 19 nt, Homo sapiens
  misc_RNA (1)...(19): siRNA sense strand
caagagcugcaucagucaa

SEQ ID NO: 546544 - RNA, 19 nt, Homo sapiens
  misc_RNA (1)...(19): siRNA sense strand
ggcgucaaggugaagauaa

SEQ ID NO: 546545 - RNA, 19 nt, Homo sapiens
  misc_RNA (1)...(19): siRNA sense strand
gagcugcaucagucaaaca

SEQ ID NO: 546546 - RNA, 19 nt, Homo sapiens
  misc_RNA (1)...(19): siRNA sense strand
ggcagcagacagaagaaga

SEQ ID NO: 546547 - RNA, 19 nt, Homo sapiens
  misc_RNA (1)...(19): siRNA sense strand
caccugggcagcagacaga

SEQ ID NO: 546548 - RNA, 19 nt, Homo sapiens
  misc_RNA (1)...(19): siRNA sense strand
guuccggcgucaaggugaa

SEQ ID NO: 546549 - RNA, 19 nt, Homo sapiens
  misc_RNA (1)...(19): siRNA sense strand
gauaauaccuaaagaggaa

SEQ ID NO: 546550 - RNA, 19 nt, Homo sapiens
  misc_RNA (1)...(19): siRNA sense strand
gaagagcaaccacaaguuu

SEQ ID NO: 546551 - RNA, 19 nt, Homo sapiens
  misc_RNA (1)...(19): siRNA sense strand
cuaaagaggaacacuguaa

SEQ ID NO: 546552 - RNA, 19 nt, Homo sapiens
  misc_RNA (1)...(19): siRNA sense strand
cauggaaggugaucugcaa

SEQ ID NO: 546553 - RNA, 19 nt, Homo sapiens
  misc_RNA (1)...(19): siRNA sense strand
gaagauaauaccuaaagag

SEQ ID NO: 546554 - RNA, 19 nt, Homo sapiens
  misc_RNA (1)...(19): siRNA sense strand
uaaagaggaacacuguaaa

SEQ ID NO: 546555 - RNA, 19 nt, Homo sapiens
  misc_RNA (1)...(19): siRNA sense strand
agaagcaggugaagagcaa

SEQ ID NO: 546556 - RNA, 19 nt, Homo sapiens
  misc_RNA (1)...(19): siRNA sense strand
agaagaagaucaggauaca

SEQ ID NO: 546557 - RNA, 19 nt, Homo sapiens
  misc_RNA (1)...(19): siRNA sense strand
gcgucaaggugaagauaau

SEQ ID NO: 546558 - RNA, 19 nt, Homo sapiens
  misc_RNA (1)...(19): siRNA sense strand
ggaaggugaucugcaagag

SEQ ID NO: 546559 - RNA, 19 nt, Homo sapiens
  misc_RNA (1)...(19): siRNA sense strand
aagagcaaccacaaguuua

SEQ ID NO: 546560 - RNA, 19 nt, Homo sapiens
  misc_RNA (1)...(19): siRNA sense strand
gugaagauaauaccuaaag

SEQ ID NO: 546561 - RNA, 19 nt, Homo sapiens
  misc_RNA (1)...(19): siRNA sense strand
agagcaaccacaaguuuaa

SEQ ID NO: 546562 - RNA, 19 nt, Homo sapiens
  misc_RNA (1)...(19): siRNA sense strand
gacagaagaagaucaggau

SEQ ID NO: 546563 - RNA, 19 nt, Homo sapiens
  misc_RNA (1)...(19): siRNA sense strand
gaggaacacuguaaaaugc

SEQ ID NO: 546564 - RNA, 19 nt, Homo sapiens
  misc_RNA (1)...(19): siRNA sense strand
gcagcagacagaagaagau

SEQ ID NO: 546565 - RNA, 19 nt, Homo sapiens
  misc_RNA (1)...(19): siRNA sense strand
gugaagagcaaccacaagu

SEQ ID NO: 546566 - RNA, 19 nt, Homo sapiens
  misc_RNA (1)...(19): siRNA sense strand
gcaagagcugcaucaguca

SEQ ID NO: 546567 - RNA, 19 nt, Homo sapiens
  misc_RNA (1)...(19): siRNA sense strand
gcugaaagucgggauccua

SEQ ID NO: 546568 - RNA, 19 nt, Homo sapiens
  misc_RNA (1)...(19): siRNA sense strand
ugaagagcaaccacaaguu

SEQ ID NO: 546569 - RNA, 19 nt, Homo sapiens
  misc_RNA (1)...(19): siRNA sense strand
cagaagaagaucaggauac

SEQ ID NO: 546570 - RNA, 19 nt, Homo sapiens
  misc_RNA (1)...(19): siRNA sense strand
gccagaagcaggugaagag

SEQ ID NO: 546571 - RNA, 19 nt, Homo sapiens
  misc_RNA (1)...(19): siRNA sense strand
gcagacagaagaagaucag

SEQ ID NO: 546572 - RNA, 19 nt, Homo sapiens
  misc_RNA (1)...(19): siRNA sense strand
cgacauggaaggugaucug

SEQ ID NO: 546573 - RNA, 19 nt, Homo sapiens
  misc_RNA (1)...(19): siRNA sense strand
cgucaaggugaagauaaua

SEQ ID NO: 546574 - RNA, 19 nt, Homo sapiens
  misc_RNA (1)...(19): siRNA sense strand
gaaagucgggauccuacac

SEQ ID NO: 546575 - RNA, 19 nt, Homo sapiens
  misc_RNA (1)...(19): siRNA sense strand
acagaagaagaucaggaua

SEQ ID NO: 546576 - RNA, 19 nt, Homo sapiens
  misc_RNA (1)...(19): siRNA sense strand
caagagcugcaucagucaa

SEQ ID NO: 546577 - RNA, 19 nt, Homo sapiens
  misc_RNA (1)...(19): siRNA sense strand
ggcgucaaggugaagauaa

SEQ ID NO: 546578 - RNA, 19 nt, Homo sapiens
  misc_RNA (1)...(19): siRNA sense strand
gagcugcaucagucaaaca

SEQ ID NO: 546579 - RNA, 19 nt, Homo sapiens
  misc_RNA (1)...(19): siRNA sense strand
ggcagcagacagaagaaga

SEQ ID NO: 546580 - RNA, 19 nt, Homo sapiens
  misc_RNA (1)...(19): siRNA sense strand
guuccggcgucaaggugaa

SEQ ID NO: 546581 - RNA, 19 nt, Homo sapiens
  misc_RNA (1)...(19): siRNA sense strand
caccugggcagcagacaga

SEQ ID NO: 546582 - RNA, 19 nt, Homo sapiens
  misc_RNA (1)...(19): siRNA sense strand
ggauaaaguugucugauuu

SEQ ID NO: 546583 - RNA, 19 nt, Homo sapiens
  misc_RNA (1)...(19): siRNA sense strand
ggaaacaaguugcagugaa

SEQ ID NO: 546584 - RNA, 19 nt, Homo sapiens
  misc_RNA (1)...(19): siRNA sense strand
gacaagcgauggccggaua

SEQ ID NO: 546585 - RNA, 19 nt, Homo sapiens
  misc_RNA (1)...(19): siRNA sense strand
gaaacaaguugcagugaag

SEQ ID NO: 546586 - RNA, 19 nt, Homo sapiens
  misc_RNA (1)...(19): siRNA sense strand
ccucggacauccauucuua

SEQ ID NO: 546587 - RNA, 19 nt, Homo sapiens
  misc_RNA (1)...(19): siRNA sense strand
ugacagacauugugacuca

SEQ ID NO: 546588 - RNA, 19 nt, Homo sapiens
  misc_RNA (1)...(19): siRNA sense strand
caaacuaccucaaagucaa

SEQ ID NO: 546589 - RNA, 19 nt, Homo sapiens
  misc_RNA (1)...(19): siRNA sense strand
ccaaagaggugccgaagag

SEQ ID NO: 546590 - RNA, 19 nt, Homo sapiens
  misc_RNA (1)...(19): siRNA sense strand
aaacaaacccugcaaggaa

SEQ ID NO: 546591 - RNA, 19 nt, Homo sapiens
  misc_RNA (1)...(19): siRNA sense strand
gggaauacuuggccaacuu

SEQ ID NO: 546592 - RNA, 19 nt, Homo sapiens
  misc_RNA (1)...(19): siRNA sense strand
cggauaaaguugucugauu

SEQ ID NO: 546593 - RNA, 19 nt, Homo sapiens
  misc_RNA (1)...(19): siRNA sense strand
gaaacaaacccugcaagga

SEQ ID NO: 546594 - RNA, 19 nt, Homo sapiens
  misc_RNA (1)...(19): siRNA sense strand
gauuaucacucacauuugg

SEQ ID NO: 546595 - RNA, 19 nt, Homo sapiens
  misc_RNA (1)...(19): siRNA sense strand
gaaccgaugaugccauuug

SEQ ID NO: 546596 - RNA, 19 nt, Homo sapiens
  misc_RNA (1)...(19): siRNA sense strand
gaagaggaaaucauugguu

SEQ ID NO: 546597 - RNA, 19 nt, Homo sapiens
  misc_RNA (1)...(19): siRNA sense strand
gagaacugcuuuucaauga

SEQ ID NO: 546598 - RNA, 19 nt, Homo sapiens
  misc_RNA (1)...(19): siRNA sense strand
ccacaagagcagaaguuua

SEQ ID NO: 546599 - RNA, 19 nt, Homo sapiens
  misc_RNA (1)...(19): siRNA sense strand
gcaaggaaaccuccaucaa

SEQ ID NO: 546600 - RNA, 19 nt, Homo sapiens
  misc_RNA (1)...(19): siRNA sense strand
ggucauggaguuucuagaa

SEQ ID NO: 546601 - RNA, 19 nt, Homo sapiens
  misc_RNA (1)...(19): siRNA sense strand
caaagcaaaucgggcuauu

SEQ ID NO: 546602 - RNA, 19 nt, Homo sapiens
  misc_RNA (1)...(19): siRNA sense strand
gugcucaaguuuccaaaga

SEQ ID NO: 546603 - RNA, 19 nt, Homo sapiens
  misc_RNA (1)...(19): siRNA sense strand
gagcaaaccaagugaauac

SEQ ID NO: 546604 - RNA, 19 nt, Homo sapiens
  misc_RNA (1)...(19): siRNA sense strand
ggaauacuuggccaacuuu

SEQ ID NO: 546605 - RNA, 19 nt, Homo sapiens
  misc_RNA (1)...(19): siRNA sense strand
ccgauuaucacucacauuu

SEQ ID NO: 546606 - RNA, 19 nt, Homo sapiens
  misc_RNA (1)...(19): siRNA sense strand
uaucagagagccucgagua

SEQ ID NO: 546607 - RNA, 19 nt, Homo sapiens
  misc_RNA (1)...(19): siRNA sense strand
caaaccaagugaauacagu

SEQ ID NO: 546608 - RNA, 19 nt, Homo sapiens
  misc_RNA (1)...(19): siRNA sense strand
gcucucuccuaccuucaua

SEQ ID NO: 546609 - RNA, 19 nt, Homo sapiens
  misc_RNA (1)...(19): siRNA sense strand
ggugucccaugaacaguuu

SEQ ID NO: 546610 - RNA, 19 nt, Homo sapiens
  misc_RNA (1)...(19): siRNA sense strand
gaggauccgggacaguuua

SEQ ID NO: 546611 - RNA, 19 nt, Homo sapiens
  misc_RNA (1)...(19): siRNA sense strand
ccucagcccuccacuguca

SEQ ID NO: 546612 - RNA, 19 nt, Homo sapiens
  misc_RNA (1)...(19): siRNA sense strand
aacaaacccugcaaggaaa

SEQ ID NO: 546613 - RNA, 19 nt, Homo sapiens
  misc_RNA (1)...(19): siRNA sense strand
ccuaugaagacaaucguua

SEQ ID NO: 546614 - RNA, 19 nt, Homo sapiens
  misc_RNA (1)...(19): siRNA sense strand
ggacauccauucuuaaaac

SEQ ID NO: 546615 - RNA, 19 nt, Homo sapiens
  misc_RNA (1)...(19): siRNA sense strand
auucugaggugaagccuuu

SEQ ID NO: 546616 - RNA, 19 nt, Homo sapiens
  misc_RNA (1)...(19): siRNA sense strand
cagaaugaaugaagaacag

SEQ ID NO: 546617 - RNA, 19 nt, Homo sapiens
  misc_RNA (1)...(19): siRNA sense strand
gaauacuuggccaacuuua

SEQ ID NO: 546618 - RNA, 19 nt, Homo sapiens
  misc_RNA (1)...(19): siRNA sense strand
uggagcaagugcauuuaaa

SEQ ID NO: 546619 - RNA, 19 nt, Homo sapiens
  misc_RNA (1)...(19): siRNA sense strand
gaggugaagccuuugaaau

SEQ ID NO: 546620 - RNA, 19 nt, Homo sapiens
  misc_RNA (1)...(19): siRNA sense strand
ccagcuggcuccuaugaag

SEQ ID NO: 546621 - RNA, 19 nt, Homo sapiens
  misc_RNA (1)...(19): siRNA sense strand
ggaggauccgggacaguuu

SEQ ID NO: 546622 - RNA, 19 nt, Homo sapiens
  misc_RNA (1)...(19): siRNA sense strand
gguggugccuugacagaca

SEQ ID NO: 546623 - RNA, 19 nt, Homo sapiens
  misc_RNA (1)...(19): siRNA sense strand
aaagguggauuacgaucga

SEQ ID NO: 546624 - RNA, 19 nt, Homo sapiens
  misc_RNA (1)...(19): siRNA sense strand
ugaauacagugaccucaag

SEQ ID NO: 546625 - RNA, 19 nt, Homo sapiens
  misc_RNA (1)...(19): siRNA sense strand
caaggaaaccuccaucaac

SEQ ID NO: 546626 - RNA, 19 nt, Homo sapiens
  misc_RNA (1)...(19): siRNA sense strand
gaaacacacagggaaacaa

SEQ ID NO: 546627 - RNA, 19 nt, Homo sapiens
  misc_RNA (1)...(19): siRNA sense strand
gcagagcaguucgcaguac

SEQ ID NO: 546628 - RNA, 19 nt, Homo sapiens
  misc_RNA (1)...(19): siRNA sense strand
ccaacucccuaaggaaaga

SEQ ID NO: 546629 - RNA, 19 nt, Homo sapiens
  misc_RNA (1)...(19): siRNA sense strand
gcgauggccggauaaaguu

SEQ ID NO: 546630 - RNA, 19 nt, Homo sapiens
  misc_RNA (1)...(19): siRNA sense strand
acaccagaaugaaugaaga

SEQ ID NO: 546631 - RNA, 19 nt, Homo sapiens
  misc_RNA (1)...(19): siRNA sense strand
gggauuaccaccaugacaa

SEQ ID NO: 546632 - RNA, 19 nt, Homo sapiens
  misc_RNA (1)...(19): siRNA sense strand
caauucacaccuucuagaa

SEQ ID NO: 546633 - RNA, 19 nt, Homo sapiens
  misc_RNA (1)...(19): siRNA sense strand
caagugggaguaucagaga

SEQ ID NO: 546634 - RNA, 19 nt, Homo sapiens
  misc_RNA (1)...(19): siRNA sense strand
gagagcaacagcccaggaa

SEQ ID NO: 546635 - RNA, 19 nt, Homo sapiens
  misc_RNA (1)...(19): siRNA sense strand
ccauccagcuggcuccuau

SEQ ID NO: 546636 - RNA, 19 nt, Homo sapiens
  misc_RNA (1)...(19): siRNA sense strand
ggauuauucauuccaauuc

SEQ ID NO: 546637 - RNA, 19 nt, Homo sapiens
  misc_RNA (1)...(19): siRNA sense strand
cgagaaacacacagggaaa

SEQ ID NO: 546638 - RNA, 19 nt, Homo sapiens
  misc_RNA (1)...(19): siRNA sense strand
cacaagagcagaaguuuac

SEQ ID NO: 546639 - RNA, 19 nt, Homo sapiens
  misc_RNA (1)...(19): siRNA sense strand
gacgagaacugcuuuucaa

SEQ ID NO: 546640 - RNA, 19 nt, Homo sapiens
  misc_RNA (1)...(19): siRNA sense strand
ucacucacauuuggacuca

SEQ ID NO: 546641 - RNA, 19 nt, Homo sapiens
  misc_RNA (1)...(19): siRNA sense strand
ccaauucacaccuucuaga

SEQ ID NO: 546642 - RNA, 19 nt, Homo sapiens
  misc_RNA (1)...(19): siRNA sense strand
ccuccagggugucccauga

SEQ ID NO: 546643 - RNA, 19 nt, Homo sapiens
  misc_RNA (1)...(19): siRNA sense strand
ccaaacuaccucaaaguca

SEQ ID NO: 546644 - RNA, 19 nt, Homo sapiens
  misc_RNA (1)...(19): siRNA sense strand
gacaaucguuagaggaaac

SEQ ID NO: 546645 - RNA, 19 nt, Homo sapiens
  misc_RNA (1)...(19): siRNA sense strand
gaagcaacagagacgagaa

SEQ ID NO: 546646 - RNA, 19 nt, Homo sapiens
  misc_RNA (1)...(19): siRNA sense strand
gacaggaggccaaagucuu

SEQ ID NO: 546647 - RNA, 19 nt, Homo sapiens
  misc_RNA (1)...(19): siRNA sense strand
uacacaagguuucuucagu

SEQ ID NO: 546648 - RNA, 19 nt, Homo sapiens
  misc_RNA (1)...(19): siRNA sense strand
ggaggccaaagucuucgua

SEQ ID NO: 546649 - RNA, 19 nt, Homo sapiens
  misc_RNA (1)...(19): siRNA sense strand
gaacuccucggacauccau

SEQ ID NO: 546650 - RNA, 19 nt, Homo sapiens
  misc_RNA (1)...(19): siRNA sense strand
gaagaacagauagcuacug

SEQ ID NO: 546651 - RNA, 19 nt, Homo sapiens
  misc_RNA (1)...(19): siRNA sense strand
ggauuaccaccaugacaau

SEQ ID NO: 546652 - RNA, 19 nt, Homo sapiens
  misc_RNA (1)...(19): siRNA sense strand
caaagucuucguaccugaa

SEQ ID NO: 546653 - RNA, 19 nt, Homo sapiens
  misc_RNA (1)...(19): siRNA sense strand
ugagcaaaccaagugaaua

SEQ ID NO: 546654 - RNA, 19 nt, Homo sapiens
  misc_RNA (1)...(19): siRNA sense strand
gaaugaaugaagaacagau

SEQ ID NO: 546655 - RNA, 19 nt, Homo sapiens
  misc_RNA (1)...(19): siRNA sense strand
guacagcagcuaccuuguc

SEQ ID NO: 546656 - RNA, 19 nt, Homo sapiens
  misc_RNA (1)...(19): siRNA sense strand
acacacagggaaacaaguu

SEQ ID NO: 546657 - RNA, 19 nt, Homo sapiens
  misc_RNA (1)...(19): siRNA sense strand
aggaaccgaugaugccauu

SEQ ID NO: 546658 - RNA, 19 nt, Homo sapiens
  misc_RNA (1)...(19): siRNA sense strand
gagccuggcguacagugaa

SEQ ID NO: 546659 - RNA, 19 nt, Homo sapiens
  misc_RNA (1)...(19): siRNA sense strand
agacaaucguuagaggaaa

SEQ ID NO: 546660 - RNA, 19 nt, Homo sapiens
  misc_RNA (1)...(19): siRNA sense strand
cagagagccucgaguagcu

SEQ ID NO: 546661 - RNA, 19 nt, Homo sapiens
  misc_RNA (1)...(19): siRNA sense strand
ggugaagccuuugaaaucc

SEQ ID NO: 546662 - RNA, 19 nt, Homo sapiens
  misc_RNA (1)...(19): siRNA sense strand
ggacaguuuaccuccaaga

SEQ ID NO: 546663 - RNA, 19 nt, Homo sapiens
  misc_RNA (1)...(19): siRNA sense strand
gcaguucgcaguacaucuc

SEQ ID NO: 546664 - RNA, 19 nt, Homo sapiens
  misc_RNA (1)...(19): siRNA sense strand
ucuccuaccuucauaacca

SEQ ID NO: 546665 - RNA, 19 nt, Homo sapiens
  misc_RNA (1)...(19): siRNA sense strand
uagcagguccaccgucuug

SEQ ID NO: 546666 - RNA, 19 nt, Homo sapiens
  misc_RNA (1)...(19): siRNA sense strand
uuucuaggcuaccuuaugg

SEQ ID NO: 546667 - RNA, 19 nt, Homo sapiens
  misc_RNA (1)...(19): siRNA sense strand
ggcguacagugaaagugaa

SEQ ID NO: 546668 - RNA, 19 nt, Homo sapiens
  misc_RNA (1)...(19): siRNA sense strand
cgggacaguuuaccuccaa

SEQ ID NO: 546669 - RNA, 19 nt, Homo sapiens
  misc_RNA (1)...(19): siRNA sense strand
aaauggaccuccggaagca

SEQ ID NO: 546670 - RNA, 19 nt, Homo sapiens
  misc_RNA (1)...(19): siRNA sense strand
ccucaaagucaaagcaaau

SEQ ID NO: 546671 - RNA, 19 nt, Homo sapiens
  misc_RNA (1)...(19): siRNA sense strand
aaacuaccucaaagucaaa

SEQ ID NO: 546672 - RNA, 19 nt, Homo sapiens
  misc_RNA (1)...(19): siRNA sense strand
gcaaaccaagugaauacag

SEQ ID NO: 546673 - RNA, 19 nt, Homo sapiens
  misc_RNA (1)...(19): siRNA sense strand
gagugaaggaccuacacaa

SEQ ID NO: 546674 - RNA, 19 nt, Homo sapiens
  misc_RNA (1)...(19): siRNA sense strand
ugauuucuaggcuaccuua

SEQ ID NO: 546675 - RNA, 19 nt, Homo sapiens
  misc_RNA (1)...(19): siRNA sense strand
gggaaacaaguugcaguga

SEQ ID NO: 546676 - RNA, 19 nt, Homo sapiens
  misc_RNA (1)...(19): siRNA sense strand
cagagcaguucgcaguaca

SEQ ID NO: 546677 - RNA, 19 nt, Homo sapiens
  misc_RNA (1)...(19): siRNA sense strand
guacagugaaagugaaugg

SEQ ID NO: 546678 - RNA, 19 nt, Homo sapiens
  misc_RNA (1)...(19): siRNA sense strand
acaauacaggcaucacuga

SEQ ID NO: 546679 - RNA, 19 nt, Homo sapiens
  misc_RNA (1)...(19): siRNA sense strand
uaucuggcccguccaacuu

SEQ ID NO: 546680 - RNA, 19 nt, Homo sapiens
  misc_RNA (1)...(19): siRNA sense strand
gaggaaacaaacccugcaa

SEQ ID NO: 546681 - RNA, 19 nt, Homo sapiens
  misc_RNA (1)...(19): siRNA sense strand
ccucaagcagucaccagua

SEQ ID NO: 546682 - RNA, 19 nt, Homo sapiens
  misc_RNA (1)...(19): siRNA sense strand
ggauaaaguugucugauuu

SEQ ID NO: 546683 - RNA, 19 nt, Homo sapiens
  misc_RNA (1)...(19): siRNA sense strand
ggaaacaaguugcagugaa

SEQ ID NO: 546684 - RNA, 19 nt, Homo sapiens
  misc_RNA (1)...(19): siRNA sense strand
gacaagcgauggccggaua

SEQ ID NO: 546685 - RNA, 19 nt, Homo sapiens
  misc_RNA (1)...(19): siRNA sense strand
gaaacaaguugcagugaag

SEQ ID NO: 546686 - RNA, 19 nt, Homo sapiens
  misc_RNA (1)...(19): siRNA sense strand
ccucggacauccauucuua

SEQ ID NO: 546687 - RNA, 19 nt, Homo sapiens
  misc_RNA (1)...(19): siRNA sense strand
ugacagacauugugacuca

SEQ ID NO: 546688 - RNA, 19 nt, Homo sapiens
  misc_RNA (1)...(19): siRNA sense strand
caaacuaccucaaagucaa

SEQ ID NO: 546689 - RNA, 19 nt, Homo sapiens
  misc_RNA (1)...(19): siRNA sense strand
ccaaagaggugccgaagag

SEQ ID NO: 546690 - RNA, 19 nt, Homo sapiens
  misc_RNA (1)...(19): siRNA sense strand
aaacaaacccugcaaggaa

SEQ ID NO: 546691 - RNA, 19 nt, Homo sapiens
  misc_RNA (1)...(19): siRNA sense strand
gggaauacuuggccaacuu

SEQ ID NO: 546692 - RNA, 19 nt, Homo sapiens
  misc_RNA (1)...(19): siRNA sense strand
cggauaaaguugucugauu

SEQ ID NO: 546693 - RNA, 19 nt, Homo sapiens
  misc_RNA (1)...(19): siRNA sense strand
gaaacaaacccugcaagga

SEQ ID NO: 546694 - RNA, 19 nt, Homo sapiens
  misc_RNA (1)...(19): siRNA sense strand
gauuaucacucacauuugg

SEQ ID NO: 546695 - RNA, 19 nt, Homo sapiens
  misc_RNA (1)...(19): siRNA sense strand
gaaccgaugaugccauuug

SEQ ID NO: 546696 - RNA, 19 nt, Homo sapiens
  misc_RNA (1)...(19): siRNA sense strand
gaagaggaaaucauugguu

SEQ ID NO: 546697 - RNA, 19 nt, Homo sapiens
  misc_RNA (1)...(19): siRNA sense strand
gagaacugcuuuucaauga

SEQ ID NO: 546698 - RNA, 19 nt, Homo sapiens
  misc_RNA (1)...(19): siRNA sense strand
ccacaagagcagaaguuua

SEQ ID NO: 546699 - RNA, 19 nt, Homo sapiens
  misc_RNA (1)...(19): siRNA sense strand
gcaaggaaaccuccaucaa

SEQ ID NO: 546700 - RNA, 19 nt, Homo sapiens
  misc_RNA (1)...(19): siRNA sense strand
ggucauggaguuucuagaa

SEQ ID NO: 546701 - RNA, 19 nt, Homo sapiens
  misc_RNA (1)...(19): siRNA sense strand
caaagcaaaucgggcuauu

SEQ ID NO: 546702 - RNA, 19 nt, Homo sapiens
  misc_RNA (1)...(19): siRNA sense strand
gugcucaaguuuccaaaga

SEQ ID NO: 546703 - RNA, 19 nt, Homo sapiens
  misc_RNA (1)...(19): siRNA sense strand
gagcaaaccaagugaauac

SEQ ID NO: 546704 - RNA, 19 nt, Homo sapiens
  misc_RNA (1)...(19): siRNA sense strand
ggaauacuuggccaacuuu

SEQ ID NO: 546705 - RNA, 19 nt, Homo sapiens
  misc_RNA (1)...(19): siRNA sense strand
ccgauuaucacucacauuu

SEQ ID NO: 546706 - RNA, 19 nt, Homo sapiens
  misc_RNA (1)...(19): siRNA sense strand
uaucagagagccucgagua

SEQ ID NO: 546707 - RNA, 19 nt, Homo sapiens
  misc_RNA (1)...(19): siRNA sense strand
caaaccaagugaauacagu

SEQ ID NO: 546708 - RNA, 19 nt, Homo sapiens
  misc_RNA (1)...(19): siRNA sense strand
gcucucuccuaccuucaua

SEQ ID NO: 546709 - RNA, 19 nt, Homo sapiens
  misc_RNA (1)...(19): siRNA sense strand
ggugucccaugaacaguuu

SEQ ID NO: 546710 - RNA, 19 nt, Homo sapiens
  misc_RNA (1)...(19): siRNA sense strand
gaggauccgggacaguuua

SEQ ID NO: 546711 - RNA, 19 nt, Homo sapiens
  misc_RNA (1)...(19): siRNA sense strand
ccucagcccuccacuguca

SEQ ID NO: 546712 - RNA, 19 nt, Homo sapiens
  misc_RNA (1)...(19): siRNA sense strand
aacaaacccugcaaggaaa

SEQ ID NO: 546713 - RNA, 19 nt, Homo sapiens
  misc_RNA (1)...(19): siRNA sense strand
ccuaugaagacaaucguua

SEQ ID NO: 546714 - RNA, 19 nt, Homo sapiens
  misc_RNA (1)...(19): siRNA sense strand
ggacauccauucuuaaaac

SEQ ID NO: 546715 - RNA, 19 nt, Homo sapiens
  misc_RNA (1)...(19): siRNA sense strand
auucugaggugaagccuuu

SEQ ID NO: 546716 - RNA, 19 nt, Homo sapiens
  misc_RNA (1)...(19): siRNA sense strand
cagaaugaaugaagaacag

SEQ ID NO: 546717 - RNA, 19 nt, Homo sapiens
  misc_RNA (1)...(19): siRNA sense strand
gaauacuuggccaacuuua

SEQ ID NO: 546718 - RNA, 19 nt, Homo sapiens
  misc_RNA (1)...(19): siRNA sense strand
uggagcaagugcauuuaaa

SEQ ID NO: 546719 - RNA, 19 nt, Homo sapiens
  misc_RNA (1)...(19): siRNA sense strand
gaggugaagccuuugaaau

SEQ ID NO: 546720 - RNA, 19 nt, Homo sapiens
  misc_RNA (1)...(19): siRNA sense strand
ccagcuggcuccuaugaag

SEQ ID NO: 546721 - RNA, 19 nt, Homo sapiens
  misc_RNA (1)...(19): siRNA sense strand
ggaggauccgggacaguuu

SEQ ID NO: 546722 - RNA, 19 nt, Homo sapiens
  misc_RNA (1)...(19): siRNA sense strand
gguggugccuugacagaca

SEQ ID NO: 546723 - RNA, 19 nt, Homo sapiens
  misc_RNA (1)...(19): siRNA sense strand
aaagguggauuacgaucga

SEQ ID NO: 546724 - RNA, 19 nt, Homo sapiens
  misc_RNA (1)...(19): siRNA sense strand
ugaauacagugaccucaag

SEQ ID NO: 546725 - RNA, 19 nt, Homo sapiens
  misc_RNA (1)...(19): siRNA sense strand
caaggaaaccuccaucaac

SEQ ID NO: 546726 - RNA, 19 nt, Homo sapiens
  misc_RNA (1)...(19): siRNA sense strand
gaaacacacagggaaacaa

SEQ ID NO: 546727 - RNA, 19 nt, Homo sapiens
  misc_RNA (1)...(19): siRNA sense strand
gcagagcaguucgcaguac

SEQ ID NO: 546728 - RNA, 19 nt, Homo sapiens
  misc_RNA (1)...(19): siRNA sense strand
ccaacucccuaaggaaaga

SEQ ID NO: 546729 - RNA, 19 nt, Homo sapiens
  misc_RNA (1)...(19): siRNA sense strand
gcgauggccggauaaaguu

SEQ ID NO: 546730 - RNA, 19 nt, Homo sapiens
  misc_RNA (1)...(19): siRNA sense strand
acaccagaaugaaugaaga

SEQ ID NO: 546731 - RNA, 19 nt, Homo sapiens
  misc_RNA (1)...(19): siRNA sense strand
gggauuaccaccaugacaa

SEQ ID NO: 546732 - RNA, 19 nt, Homo sapiens
  misc_RNA (1)...(19): siRNA sense strand
caauucacaccuucuagaa

SEQ ID NO: 546733 - RNA, 19 nt, Homo sapiens
  misc_RNA (1)...(19): siRNA sense strand
caagugggaguaucagaga

SEQ ID NO: 546734 - RNA, 19 nt, Homo sapiens
  misc_RNA (1)...(19): siRNA sense strand
gagagcaacagcccaggaa

SEQ ID NO: 546735 - RNA, 19 nt, Homo sapiens
  misc_RNA (1)...(19): siRNA sense strand
ccauccagcuggcuccuau

SEQ ID NO: 546736 - RNA, 19 nt, Homo sapiens
  misc_RNA (1)...(19): siRNA sense strand
ggauuauucauuccaauuc

SEQ ID NO: 546737 - RNA, 19 nt, Homo sapiens
  misc_RNA (1)...(19): siRNA sense strand
cgagaaacacacagggaaa

SEQ ID NO: 546738 - RNA, 19 nt, Homo sapiens
  misc_RNA (1)...(19): siRNA sense strand
cacaagagcagaaguuuac

SEQ ID NO: 546739 - RNA, 19 nt, Homo sapiens
  misc_RNA (1)...(19): siRNA sense strand
gacgagaacugcuuuucaa

SEQ ID NO: 546740 - RNA, 19 nt, Homo sapiens
  misc_RNA (1)...(19): siRNA sense strand
ucacucacauuuggacuca

SEQ ID NO: 546741 - RNA, 19 nt, Homo sapiens
  misc_RNA (1)...(19): siRNA sense strand
ccaauucacaccuucuaga

SEQ ID NO: 546742 - RNA, 19 nt, Homo sapiens
  misc_RNA (1)...(19): siRNA sense strand
ccuccagggugucccauga

SEQ ID NO: 546743 - RNA, 19 nt, Homo sapiens
  misc_RNA (1)...(19): siRNA sense strand
ccaaacuaccucaaaguca

SEQ ID NO: 546744 - RNA, 19 nt, Homo sapiens
  misc_RNA (1)...(19): siRNA sense strand
gacaaucguuagaggaaac

SEQ ID NO: 546745 - RNA, 19 nt, Homo sapiens
  misc_RNA (1)...(19): siRNA sense strand
gaagcaacagagacgagaa

SEQ ID NO: 546746 - RNA, 19 nt, Homo sapiens
  misc_RNA (1)...(19): siRNA sense strand
gacaggaggccaaagucuu

SEQ ID NO: 546747 - RNA, 19 nt, Homo sapiens
  misc_RNA (1)...(19): siRNA sense strand
uacacaagguuucuucagu

SEQ ID NO: 546748 - RNA, 19 nt, Homo sapiens
  misc_RNA (1)...(19): siRNA sense strand
ggaggccaaagucuucgua

SEQ ID NO: 546749 - RNA, 19 nt, Homo sapiens
  misc_RNA (1)...(19): siRNA sense strand
gaacuccucggacauccau

SEQ ID NO: 546750 - RNA, 19 nt, Homo sapiens
  misc_RNA (1)...(19): siRNA sense strand
gaagaacagauagcuacug

SEQ ID NO: 546751 - RNA, 19 nt, Homo sapiens
  misc_RNA (1)...(19): siRNA sense strand
ggauuaccaccaugacaau

SEQ ID NO: 546752 - RNA, 19 nt, Homo sapiens
  misc_RNA (1)...(19): siRNA sense strand
caaagucuucguaccugaa

SEQ ID NO: 546753 - RNA, 19 nt, Homo sapiens
  misc_RNA (1)...(19): siRNA sense strand
ugagcaaaccaagugaaua

SEQ ID NO: 546754 - RNA, 19 nt, Homo sapiens
  misc_RNA (1)...(19): siRNA sense strand
gaaugaaugaagaacagau

SEQ ID NO: 546755 - RNA, 19 nt, Homo sapiens
  misc_RNA (1)...(19): siRNA sense strand
guacagcagcuaccuuguc

SEQ ID NO: 546756 - RNA, 19 nt, Homo sapiens
  misc_RNA (1)...(19): siRNA sense strand
acacacagggaaacaaguu

SEQ ID NO: 546757 - RNA, 19 nt, Homo sapiens
  misc_RNA (1)...(19): siRNA sense strand
aggaaccgaugaugccauu

SEQ ID NO: 546758 - RNA, 19 nt, Homo sapiens
  misc_RNA (1)...(19): siRNA sense strand
gagccuggcguacagugaa

SEQ ID NO: 546759 - RNA, 19 nt, Homo sapiens
  misc_RNA (1)...(19): siRNA sense strand
agacaaucguuagaggaaa

SEQ ID NO: 546760 - RNA, 19 nt, Homo sapiens
  misc_RNA (1)...(19): siRNA sense strand
cagagagccucgaguagcu

SEQ ID NO: 546761 - RNA, 19 nt, Homo sapiens
  misc_RNA (1)...(19): siRNA sense strand
ggugaagccuuugaaaucc

SEQ ID NO: 546762 - RNA, 19 nt, Homo sapiens
  misc_RNA (1)...(19): siRNA sense strand
ggacaguuuaccuccaaga

SEQ ID NO: 546763 - RNA, 19 nt, Homo sapiens
  misc_RNA (1)...(19): siRNA sense strand
gcaguucgcaguacaucuc

SEQ ID NO: 546764 - RNA, 19 nt, Homo sapiens
  misc_RNA (1)...(19): siRNA sense strand
ucuccuaccuucauaacca

SEQ ID NO: 546765 - RNA, 19 nt, Homo sapiens
  misc_RNA (1)...(19): siRNA sense strand
uagcagguccaccgucuug

SEQ ID NO: 546766 - RNA, 19 nt, Homo sapiens
  misc_RNA (1)...(19): siRNA sense strand
uuucuaggcuaccuuaugg

SEQ ID NO: 546767 - RNA, 19 nt, Homo sapiens
  misc_RNA (1)...(19): siRNA sense strand
ggcguacagugaaagugaa

SEQ ID NO: 546768 - RNA, 19 nt, Homo sapiens
  misc_RNA (1)...(19): siRNA sense strand
cgggacaguuuaccuccaa

SEQ ID NO: 546769 - RNA, 19 nt, Homo sapiens
  misc_RNA (1)...(19): siRNA sense strand
aaauggaccuccggaagca

SEQ ID NO: 546770 - RNA, 19 nt, Homo sapiens
  misc_RNA (1)...(19): siRNA sense strand
ccucaaagucaaagcaaau

SEQ ID NO: 546771 - RNA, 19 nt, Homo sapiens
  misc_RNA (1)...(19): siRNA sense strand
aaacuaccucaaagucaaa

SEQ ID NO: 546772 - RNA, 19 nt, Homo sapiens
  misc_RNA (1)...(19): siRNA sense strand
gcaaaccaagugaauacag

SEQ ID NO: 546773 - RNA, 19 nt, Homo sapiens
  misc_RNA (1)...(19): siRNA sense strand
gagugaaggaccuacacaa

SEQ ID NO: 546774 - RNA, 19 nt, Homo sapiens
  misc_RNA (1)...(19): siRNA sense strand
ugauuucuaggcuaccuua

SEQ ID NO: 546775 - RNA, 19 nt, Homo sapiens
  misc_RNA (1)...(19): siRNA sense strand
gggaaacaaguugcaguga

SEQ ID NO: 546776 - RNA, 19 nt, Homo sapiens
  misc_RNA (1)...(19): siRNA sense strand
cagagcaguucgcaguaca

SEQ ID NO: 546777 - RNA, 19 nt, Homo sapiens
  misc_RNA (1)...(19): siRNA sense strand
guacagugaaagugaaugg

SEQ ID NO: 546778 - RNA, 19 nt, Homo sapiens
  misc_RNA (1)...(19): siRNA sense strand
acaauacaggcaucacuga

SEQ ID NO: 546779 - RNA, 19 nt, Homo sapiens
  misc_RNA (1)...(19): siRNA sense strand
uaucuggcccguccaacuu

SEQ ID NO: 546780 - RNA, 19 nt, Homo sapiens
  misc_RNA (1)...(19): siRNA sense strand
gaggaaacaaacccugcaa

SEQ ID NO: 546781 - RNA, 19 nt, Homo sapiens
  misc_RNA (1)...(19): siRNA sense strand
ccucaagcagucaccagua

SEQ ID NO: 546782 - RNA, 19 nt, Homo sapiens
  misc_RNA (1)...(19): siRNA sense strand
gaggacacagccugcauga

SEQ ID NO: 546783 - RNA, 19 nt, Homo sapiens
  misc_RNA (1)...(19): siRNA sense strand
cugcaacucggaacucuga

SEQ ID NO: 546784 - RNA, 19 nt, Homo sapiens
  misc_RNA (1)...(19): siRNA sense strand
ugacgguggaggcagagua

SEQ ID NO: 546785 - RNA, 19 nt, Homo sapiens
  misc_RNA (1)...(19): siRNA sense strand
gcacuaugaucuauauguu

SEQ ID NO: 546786 - RNA, 19 nt, Homo sapiens
  misc_RNA (1)...(19): siRNA sense strand
gaacaacccaguuuacaga

SEQ ID NO: 546787 - RNA, 19 nt, Homo sapiens
  misc_RNA (1)...(19): siRNA sense strand
ggacaauauuuacauguug

SEQ ID NO: 546788 - RNA, 19 nt, Homo sapiens
  misc_RNA (1)...(19): siRNA sense strand
gaacugugaugaacuugga

SEQ ID NO: 546789 - RNA, 19 nt, Homo sapiens
  misc_RNA (1)...(19): siRNA sense strand
gaagucagaaguacaguuu

SEQ ID NO: 546790 - RNA, 19 nt, Homo sapiens
  misc_RNA (1)...(19): siRNA sense strand
gggaagaagguuuggauua

SEQ ID NO: 546791 - RNA, 19 nt, Homo sapiens
  misc_RNA (1)...(19): siRNA sense strand
aaagagaucuaguccagaa

SEQ ID NO: 546792 - RNA, 19 nt, Homo sapiens
  misc_RNA (1)...(19): siRNA sense strand
ggaagaagguuuggauuac

SEQ ID NO: 546793 - RNA, 19 nt, Homo sapiens
  misc_RNA (1)...(19): siRNA sense strand
ggacugcagaggacuguua

SEQ ID NO: 546794 - RNA, 19 nt, Homo sapiens
  misc_RNA (1)...(19): siRNA sense strand
ggaucgacauuccaccaua

SEQ ID NO: 546795 - RNA, 19 nt, Homo sapiens
  misc_RNA (1)...(19): siRNA sense strand
gcagaggacuguuagaaaa

SEQ ID NO: 546796 - RNA, 19 nt, Homo sapiens
  misc_RNA (1)...(19): siRNA sense strand
ucacagaggagaauaagaa

SEQ ID NO: 546797 - RNA, 19 nt, Homo sapiens
  misc_RNA (1)...(19): siRNA sense strand
ccagauaguggucaguuua

SEQ ID NO: 546798 - RNA, 19 nt, Homo sapiens
  misc_RNA (1)...(19): siRNA sense strand
gaggagaccugcggguuug

SEQ ID NO: 546799 - RNA, 19 nt, Homo sapiens
  misc_RNA (1)...(19): siRNA sense strand
gaaacccaauggcagaaau

SEQ ID NO: 546800 - RNA, 19 nt, Homo sapiens
  misc_RNA (1)...(19): siRNA sense strand
gaucgacauuccaccauau

SEQ ID NO: 546801 - RNA, 19 nt, Homo sapiens
  misc_RNA (1)...(19): siRNA sense strand
augaaaugcugaauccuua

SEQ ID NO: 546802 - RNA, 19 nt, Homo sapiens
  misc_RNA (1)...(19): siRNA sense strand
gaacuggagcugaucauag

SEQ ID NO: 546803 - RNA, 19 nt, Homo sapiens
  misc_RNA (1)...(19): siRNA sense strand
aaucgaagcccaguucuua

SEQ ID NO: 546804 - RNA, 19 nt, Homo sapiens
  misc_RNA (1)...(19): siRNA sense strand
gaaccagcacuaugaucua

SEQ ID NO: 546805 - RNA, 19 nt, Homo sapiens
  misc_RNA (1)...(19): siRNA sense strand
gaaaugcugaauccuuauu

SEQ ID NO: 546806 - RNA, 19 nt, Homo sapiens
  misc_RNA (1)...(19): siRNA sense strand
gaaggcccauaccugcuuu

SEQ ID NO: 546807 - RNA, 19 nt, Homo sapiens
  misc_RNA (1)...(19): siRNA sense strand
gcucaucccucaacaucug

SEQ ID NO: 546808 - RNA, 19 nt, Homo sapiens
  misc_RNA (1)...(19): siRNA sense strand
ccagcacuaugaucuauau

SEQ ID NO: 546809 - RNA, 19 nt, Homo sapiens
  misc_RNA (1)...(19): siRNA sense strand
ggaggagaccugcggguuu

SEQ ID NO: 546810 - RNA, 19 nt, Homo sapiens
  misc_RNA (1)...(19): siRNA sense strand
gcaucgaaguguccagaga

SEQ ID NO: 546811 - RNA, 19 nt, Homo sapiens
  misc_RNA (1)...(19): siRNA sense strand
ggcaagcgguggagacguu

SEQ ID NO: 546812 - RNA, 19 nt, Homo sapiens
  misc_RNA (1)...(19): siRNA sense strand
cagaggagaauaagaaaga

SEQ ID NO: 546813 - RNA, 19 nt, Homo sapiens
  misc_RNA (1)...(19): siRNA sense strand
aagaauacguccgguugua

SEQ ID NO: 546814 - RNA, 19 nt, Homo sapiens
  misc_RNA (1)...(19): siRNA sense strand
ccaaugccaucagcagauu

SEQ ID NO: 546815 - RNA, 19 nt, Homo sapiens
  misc_RNA (1)...(19): siRNA sense strand
augagaagcucuacgagaa

SEQ ID NO: 546816 - RNA, 19 nt, Homo sapiens
  misc_RNA (1)...(19): siRNA sense strand
agaaggaacuggagcugau

SEQ ID NO: 546817 - RNA, 19 nt, Homo sapiens
  misc_RNA (1)...(19): siRNA sense strand
aaacuaaaccccucagaua

SEQ ID NO: 546818 - RNA, 19 nt, Homo sapiens
  misc_RNA (1)...(19): siRNA sense strand
ggaacuggagcugaucaua

SEQ ID NO: 546819 - RNA, 19 nt, Homo sapiens
  misc_RNA (1)...(19): siRNA sense strand
ucacagugcccuucuacaa

SEQ ID NO: 546820 - RNA, 19 nt, Homo sapiens
  misc_RNA (1)...(19): siRNA sense strand
cggacaauauuuacauguu

SEQ ID NO: 546821 - RNA, 19 nt, Homo sapiens
  misc_RNA (1)...(19): siRNA sense strand
uaaccgaacaacccaguuu

SEQ ID NO: 546822 - RNA, 19 nt, Homo sapiens
  misc_RNA (1)...(19): siRNA sense strand
aaggaacgguguaugaaga

SEQ ID NO: 546823 - RNA, 19 nt, Homo sapiens
  misc_RNA (1)...(19): siRNA sense strand
gaacggcuccagcaucaag

SEQ ID NO: 546824 - RNA, 19 nt, Homo sapiens
  misc_RNA (1)...(19): siRNA sense strand
cgaaguguccagagaagaa

SEQ ID NO: 546825 - RNA, 19 nt, Homo sapiens
  misc_RNA (1)...(19): siRNA sense strand
gccagauaguggucaguuu

SEQ ID NO: 546826 - RNA, 19 nt, Homo sapiens
  misc_RNA (1)...(19): siRNA sense strand
gggaguggcuuuacuugcu

SEQ ID NO: 546827 - RNA, 19 nt, Homo sapiens
  misc_RNA (1)...(19): siRNA sense strand
ggagcuuccugcccagaga

SEQ ID NO: 546828 - RNA, 19 nt, Homo sapiens
  misc_RNA (1)...(19): siRNA sense strand
cgaaggcuacgaacaaaga

SEQ ID NO: 546829 - RNA, 19 nt, Homo sapiens
  misc_RNA (1)...(19): siRNA sense strand
gaaggaacgguguaugaag

SEQ ID NO: 546830 - RNA, 19 nt, Homo sapiens
  misc_RNA (1)...(19): siRNA sense strand
uuggaucuaugcaaacuaa

SEQ ID NO: 546831 - RNA, 19 nt, Homo sapiens
  misc_RNA (1)...(19): siRNA sense strand
gcccauaccugcuuuaacc

SEQ ID NO: 546832 - RNA, 19 nt, Homo sapiens
  misc_RNA (1)...(19): siRNA sense strand
gagcucaucccucaacauc

SEQ ID NO: 546833 - RNA, 19 nt, Homo sapiens
  misc_RNA (1)...(19): siRNA sense strand
guuuacagacccaagguua

SEQ ID NO: 546834 - RNA, 19 nt, Homo sapiens
  misc_RNA (1)...(19): siRNA sense strand
gaaaguccucagacacgaa

SEQ ID NO: 546835 - RNA, 19 nt, Homo sapiens
  misc_RNA (1)...(19): siRNA sense strand
gacguucgaugaagaaagg

SEQ ID NO: 546836 - RNA, 19 nt, Homo sapiens
  misc_RNA (1)...(19): siRNA sense strand
gaagaagguuuggauuacg

SEQ ID NO: 546837 - RNA, 19 nt, Homo sapiens
  misc_RNA (1)...(19): siRNA sense strand
ggaaccagcacuaugaucu

SEQ ID NO: 546838 - RNA, 19 nt, Homo sapiens
  misc_RNA (1)...(19): siRNA sense strand
ccgaccacuugucuuauuu

SEQ ID NO: 546839 - RNA, 19 nt, Homo sapiens
  misc_RNA (1)...(19): siRNA sense strand
ugaucuauauguugggaaa

SEQ ID NO: 546840 - RNA, 19 nt, Homo sapiens
  misc_RNA (1)...(19): siRNA sense strand
gaucauaauaaccgaacaa

SEQ ID NO: 546841 - RNA, 19 nt, Homo sapiens
  misc_RNA (1)...(19): siRNA sense strand
gugcgagguucacuacaga

SEQ ID NO: 546842 - RNA, 19 nt, Homo sapiens
  misc_RNA (1)...(19): siRNA sense strand
ggagacguucgaugaagaa

SEQ ID NO: 546843 - RNA, 19 nt, Homo sapiens
  misc_RNA (1)...(19): siRNA sense strand
acccagagcugcauaagag

SEQ ID NO: 546844 - RNA, 19 nt, Homo sapiens
  misc_RNA (1)...(19): siRNA sense strand
ccagagauacgaaagagau

SEQ ID NO: 546845 - RNA, 19 nt, Homo sapiens
  misc_RNA (1)...(19): siRNA sense strand
gaaguguccagagaagaaa

SEQ ID NO: 546846 - RNA, 19 nt, Homo sapiens
  misc_RNA (1)...(19): siRNA sense strand
gcccgaaggcuacgaacaa

SEQ ID NO: 546847 - RNA, 19 nt, Homo sapiens
  misc_RNA (1)...(19): siRNA sense strand
uacguccgguuguauguaa

SEQ ID NO: 546848 - RNA, 19 nt, Homo sapiens
  misc_RNA (1)...(19): siRNA sense strand
ugucuuauuuccacuuugu

SEQ ID NO: 546849 - RNA, 19 nt, Homo sapiens
  misc_RNA (1)...(19): siRNA sense strand
cggauucgauaaccauuag

SEQ ID NO: 546850 - RNA, 19 nt, Homo sapiens
  misc_RNA (1)...(19): siRNA sense strand
aggaacggcuccagcauca

SEQ ID NO: 546851 - RNA, 19 nt, Homo sapiens
  misc_RNA (1)...(19): siRNA sense strand
caugaaaugcugaauccuu

SEQ ID NO: 546852 - RNA, 19 nt, Homo sapiens
  misc_RNA (1)...(19): siRNA sense strand
ggagucuuaccgccagaua

SEQ ID NO: 546853 - RNA, 19 nt, Homo sapiens
  misc_RNA (1)...(19): siRNA sense strand
ggaagucagaaguacaguu

SEQ ID NO: 546854 - RNA, 19 nt, Homo sapiens
  misc_RNA (1)...(19): siRNA sense strand
ugugaacugugaugaacuu

SEQ ID NO: 546855 - RNA, 19 nt, Homo sapiens
  misc_RNA (1)...(19): siRNA sense strand
acagacacgagacagaaua

SEQ ID NO: 546856 - RNA, 19 nt, Homo sapiens
  misc_RNA (1)...(19): siRNA sense strand
cgacaucacgccuguacug

SEQ ID NO: 546857 - RNA, 19 nt, Homo sapiens
  misc_RNA (1)...(19): siRNA sense strand
auuacgggcucuuccagua

SEQ ID NO: 546858 - RNA, 19 nt, Homo sapiens
  misc_RNA (1)...(19): siRNA sense strand
gcacagcggcuucgaaacc

SEQ ID NO: 546859 - RNA, 19 nt, Homo sapiens
  misc_RNA (1)...(19): siRNA sense strand
gaaucgaagcccaguucuu

SEQ ID NO: 546860 - RNA, 19 nt, Homo sapiens
  misc_RNA (1)...(19): siRNA sense strand
cccgaccacuugucuuauu

SEQ ID NO: 546861 - RNA, 19 nt, Homo sapiens
  misc_RNA (1)...(19): siRNA sense strand
gccaugaaaugcugaaucc

SEQ ID NO: 546862 - RNA, 19 nt, Homo sapiens
  misc_RNA (1)...(19): siRNA sense strand
gaaggcuacgaacaaagaa

SEQ ID NO: 546863 - RNA, 19 nt, Homo sapiens
  misc_RNA (1)...(19): siRNA sense strand
ggcggauccugcagcauga

SEQ ID NO: 546864 - RNA, 19 nt, Homo sapiens
  misc_RNA (1)...(19): siRNA sense strand
ccauccagcucucagaucu

SEQ ID NO: 546865 - RNA, 19 nt, Homo sapiens
  misc_RNA (1)...(19): siRNA sense strand
gcccagagauacgaaagag

SEQ ID NO: 546866 - RNA, 19 nt, Homo sapiens
  misc_RNA (1)...(19): siRNA sense strand
gauaccagcguuuggaucu

SEQ ID NO: 546867 - RNA, 19 nt, Homo sapiens
  misc_RNA (1)...(19): siRNA sense strand
uggagacguucgaugaaga

SEQ ID NO: 546868 - RNA, 19 nt, Homo sapiens
  misc_RNA (1)...(19): siRNA sense strand
ugaaggaacgguguaugaa

SEQ ID NO: 546869 - RNA, 19 nt, Homo sapiens
  misc_RNA (1)...(19): siRNA sense strand
gacacgagacagaauagga

SEQ ID NO: 546870 - RNA, 19 nt, Homo sapiens
  misc_RNA (1)...(19): siRNA sense strand
gaugcgaccgaaagacuug

SEQ ID NO: 546871 - RNA, 19 nt, Homo sapiens
  misc_RNA (1)...(19): siRNA sense strand
ugauagacgcgaacacaga

SEQ ID NO: 546872 - RNA, 19 nt, Homo sapiens
  misc_RNA (1)...(19): siRNA sense strand
cuucaaggcuuugcaaggu

SEQ ID NO: 546873 - RNA, 19 nt, Homo sapiens
  misc_RNA (1)...(19): siRNA sense strand
aacaucugcugaagccuuu

SEQ ID NO: 546874 - RNA, 19 nt, Homo sapiens
  misc_RNA (1)...(19): siRNA sense strand
uacgggcucuuccaguauu

SEQ ID NO: 546875 - RNA, 19 nt, Homo sapiens
  misc_RNA (1)...(19): siRNA sense strand
acacgagacagaauaggaa

SEQ ID NO: 546876 - RNA, 19 nt, Homo sapiens
  misc_RNA (1)...(19): siRNA sense strand
ggagguuuaugagaggaau

SEQ ID NO: 546877 - RNA, 19 nt, Homo sapiens
  misc_RNA (1)...(19): siRNA sense strand
caucgaaguguccagagaa

SEQ ID NO: 546878 - RNA, 19 nt, Homo sapiens
  misc_RNA (1)...(19): siRNA sense strand
aaucaccagugccaacuca

SEQ ID NO: 546879 - RNA, 19 nt, Homo sapiens
  misc_RNA (1)...(19): siRNA sense strand
uacaccacaucaugaauca

SEQ ID NO: 546880 - RNA, 19 nt, Homo sapiens
  misc_RNA (1)...(19): siRNA sense strand
uuucugggaggauauauuu

SEQ ID NO: 546881 - RNA, 19 nt, Homo sapiens
  misc_RNA (1)...(19): siRNA sense strand
gguuacaccacaucaugaa

SEQ ID NO: 546882 - RNA, 19 nt, Homo sapiens
  misc_RNA (1)...(19): siRNA sense strand
guucaccauccaccugaua

SEQ ID NO: 546883 - RNA, 19 nt, Homo sapiens
  misc_RNA (1)...(19): siRNA sense strand
gcaacaucgugcggugguu

SEQ ID NO: 546884 - RNA, 19 nt, Homo sapiens
  misc_RNA (1)...(19): siRNA sense strand
gaggagaauaagaaagaau

SEQ ID NO: 546885 - RNA, 19 nt, Homo sapiens
  misc_RNA (1)...(19): siRNA sense strand
gcacuaugaucuauauguu

SEQ ID NO: 546886 - RNA, 19 nt, Homo sapiens
  misc_RNA (1)...(19): siRNA sense strand
gaacaacccaguuuacaga

SEQ ID NO: 546887 - RNA, 19 nt, Homo sapiens
  misc_RNA (1)...(19): siRNA sense strand
ggacaauauuuacauguug

SEQ ID NO: 546888 - RNA, 19 nt, Homo sapiens
  misc_RNA (1)...(19): siRNA sense strand
gaacugugaugaacuugga

SEQ ID NO: 546889 - RNA, 19 nt, Homo sapiens
  misc_RNA (1)...(19): siRNA sense strand
gaagucagaaguacaguuu

SEQ ID NO: 546890 - RNA, 19 nt, Homo sapiens
  misc_RNA (1)...(19): siRNA sense strand
gggaagaagguuuggauua

SEQ ID NO: 546891 - RNA, 19 nt, Homo sapiens
  misc_RNA (1)...(19): siRNA sense strand
aaagagaucuaguccagaa

SEQ ID NO: 546892 - RNA, 19 nt, Homo sapiens
  misc_RNA (1)...(19): siRNA sense strand
ggaagaagguuuggauuac

SEQ ID NO: 546893 - RNA, 19 nt, Homo sapiens
  misc_RNA (1)...(19): siRNA sense strand
ggacugcagaggacuguua

SEQ ID NO: 546894 - RNA, 19 nt, Homo sapiens
  misc_RNA (1)...(19): siRNA sense strand
ggaucgacauuccaccaua

SEQ ID NO: 546895 - RNA, 19 nt, Homo sapiens
  misc_RNA (1)...(19): siRNA sense strand
gcagaggacuguuagaaaa

SEQ ID NO: 546896 - RNA, 19 nt, Homo sapiens
  misc_RNA (1)...(19): siRNA sense strand
ucacagaggagaauaagaa

SEQ ID NO: 546897 - RNA, 19 nt, Homo sapiens
  misc_RNA (1)...(19): siRNA sense strand
ccagauaguggucaguuua

SEQ ID NO: 546898 - RNA, 19 nt, Homo sapiens
  misc_RNA (1)...(19): siRNA sense strand
gaggagaccugcggguuug

SEQ ID NO: 546899 - RNA, 19 nt, Homo sapiens
  misc_RNA (1)...(19): siRNA sense strand
gaaacccaauggcagaaau

SEQ ID NO: 546900 - RNA, 19 nt, Homo sapiens
  misc_RNA (1)...(19): siRNA sense strand
gaucgacauuccaccauau

SEQ ID NO: 546901 - RNA, 19 nt, Homo sapiens
  misc_RNA (1)...(19): siRNA sense strand
augaaaugcugaauccuua

SEQ ID NO: 546902 - RNA, 19 nt, Homo sapiens
  misc_RNA (1)...(19): siRNA sense strand
gaacuggagcugaucauag

SEQ ID NO: 546903 - RNA, 19 nt, Homo sapiens
  misc_RNA (1)...(19): siRNA sense strand
aaucgaagcccaguucuua

SEQ ID NO: 546904 - RNA, 19 nt, Homo sapiens
  misc_RNA (1)...(19): siRNA sense strand
gaaccagcacuaugaucua

SEQ ID NO: 546905 - RNA, 19 nt, Homo sapiens
  misc_RNA (1)...(19): siRNA sense strand
gaaaugcugaauccuuauu

SEQ ID NO: 546906 - RNA, 19 nt, Homo sapiens
  misc_RNA (1)...(19): siRNA sense strand
gaaggcccauaccugcuuu

SEQ ID NO: 546907 - RNA, 19 nt, Homo sapiens
  misc_RNA (1)...(19): siRNA sense strand
gcucaucccucaacaucug

SEQ ID NO: 546908 - RNA, 19 nt, Homo sapiens
  misc_RNA (1)...(19): siRNA sense strand
ccagcacuaugaucuauau

SEQ ID NO: 546909 - RNA, 19 nt, Homo sapiens
  misc_RNA (1)...(19): siRNA sense strand
ggaggagaccugcggguuu

SEQ ID NO: 546910 - RNA, 19 nt, Homo sapiens
  misc_RNA (1)...(19): siRNA sense strand
gcaucgaaguguccagaga

SEQ ID NO: 546911 - RNA, 19 nt, Homo sapiens
  misc_RNA (1)...(19): siRNA sense strand
ggcaagcgguggagacguu

SEQ ID NO: 546912 - RNA, 19 nt, Homo sapiens
  misc_RNA (1)...(19): siRNA sense strand
cagaggagaauaagaaaga

SEQ ID NO: 546913 - RNA, 19 nt, Homo sapiens
  misc_RNA (1)...(19): siRNA sense strand
aagaauacguccgguugua

SEQ ID NO: 546914 - RNA, 19 nt, Homo sapiens
  misc_RNA (1)...(19): siRNA sense strand
ccaaugccaucagcagauu

SEQ ID NO: 546915 - RNA, 19 nt, Homo sapiens
  misc_RNA (1)...(19): siRNA sense strand
augagaagcucuacgagaa

SEQ ID NO: 546916 - RNA, 19 nt, Homo sapiens
  misc_RNA (1)...(19): siRNA sense strand
agaaggaacuggagcugau

SEQ ID NO: 546917 - RNA, 19 nt, Homo sapiens
  misc_RNA (1)...(19): siRNA sense strand
aaacuaaaccccucagaua

SEQ ID NO: 546918 - RNA, 19 nt, Homo sapiens
  misc_RNA (1)...(19): siRNA sense strand
ggaacuggagcugaucaua

SEQ ID NO: 546919 - RNA, 19 nt, Homo sapiens
  misc_RNA (1)...(19): siRNA sense strand
ucacagugcccuucuacaa

SEQ ID NO: 546920 - RNA, 19 nt, Homo sapiens
  misc_RNA (1)...(19): siRNA sense strand
cggacaauauuuacauguu

SEQ ID NO: 546921 - RNA, 19 nt, Homo sapiens
  misc_RNA (1)...(19): siRNA sense strand
uaaccgaacaacccaguuu

SEQ ID NO: 546922 - RNA, 19 nt, Homo sapiens
  misc_RNA (1)...(19): siRNA sense strand
aaggaacgguguaugaaga

SEQ ID NO: 546923 - RNA, 19 nt, Homo sapiens
  misc_RNA (1)...(19): siRNA sense strand
gaacggcuccagcaucaag

SEQ ID NO: 546924 - RNA, 19 nt, Homo sapiens
  misc_RNA (1)...(19): siRNA sense strand
cgaaguguccagagaagaa

SEQ ID NO: 546925 - RNA, 19 nt, Homo sapiens
  misc_RNA (1)...(19): siRNA sense strand
gccagauaguggucaguuu

SEQ ID NO: 546926 - RNA, 19 nt, Homo sapiens
  misc_RNA (1)...(19): siRNA sense strand
gggaguggcuuuacuugcu

SEQ ID NO: 546927 - RNA, 19 nt, Homo sapiens
  misc_RNA (1)...(19): siRNA sense strand
ggagcuuccugcccagaga

SEQ ID NO: 546928 - RNA, 19 nt, Homo sapiens
  misc_RNA (1)...(19): siRNA sense strand
cgaaggcuacgaacaaaga

SEQ ID NO: 546929 - RNA, 19 nt, Homo sapiens
  misc_RNA (1)...(19): siRNA sense strand
gaaggaacgguguaugaag

SEQ ID NO: 546930 - RNA, 19 nt, Homo sapiens
  misc_RNA (1)...(19): siRNA sense strand
uuggaucuaugcaaacuaa

SEQ ID NO: 546931 - RNA, 19 nt, Homo sapiens
  misc_RNA (1)...(19): siRNA sense strand
gcccauaccugcuuuaacc

SEQ ID NO: 546932 - RNA, 19 nt, Homo sapiens
  misc_RNA (1)...(19): siRNA sense strand
gagcucaucccucaacauc

SEQ ID NO: 546933 - RNA, 19 nt, Homo sapiens
  misc_RNA (1)...(19): siRNA sense strand
guuuacagacccaagguua

SEQ ID NO: 546934 - RNA, 19 nt, Homo sapiens
  misc_RNA (1)...(19): siRNA sense strand
gaaaguccucagacacgaa

SEQ ID NO: 546935 - RNA, 19 nt, Homo sapiens
  misc_RNA (1)...(19): siRNA sense strand
gacguucgaugaagaaagg

SEQ ID NO: 546936 - RNA, 19 nt, Homo sapiens
  misc_RNA (1)...(19): siRNA sense strand
gaagaagguuuggauuacg

SEQ ID NO: 546937 - RNA, 19 nt, Homo sapiens
  misc_RNA (1)...(19): siRNA sense strand
ggaaccagcacuaugaucu

SEQ ID NO: 546938 - RNA, 19 nt, Homo sapiens
  misc_RNA (1)...(19): siRNA sense strand
ccgaccacuugucuuauuu

SEQ ID NO: 546939 - RNA, 19 nt, Homo sapiens
  misc_RNA (1)...(19): siRNA sense strand
ugaucuauauguugggaaa

SEQ ID NO: 546940 - RNA, 19 nt, Homo sapiens
  misc_RNA (1)...(19): siRNA sense strand
gaucauaauaaccgaacaa

SEQ ID NO: 546941 - RNA, 19 nt, Homo sapiens
  misc_RNA (1)...(19): siRNA sense strand
gugcgagguucacuacaga

SEQ ID NO: 546942 - RNA, 19 nt, Homo sapiens
  misc_RNA (1)...(19): siRNA sense strand
ggagacguucgaugaagaa

SEQ ID NO: 546943 - RNA, 19 nt, Homo sapiens
  misc_RNA (1)...(19): siRNA sense strand
acccagagcugcauaagag

SEQ ID NO: 546944 - RNA, 19 nt, Homo sapiens
  misc_RNA (1)...(19): siRNA sense strand
ccagagauacgaaagagau

SEQ ID NO: 546945 - RNA, 19 nt, Homo sapiens
  misc_RNA (1)...(19): siRNA sense strand
gaaguguccagagaagaaa

SEQ ID NO: 546946 - RNA, 19 nt, Homo sapiens
  misc_RNA (1)...(19): siRNA sense strand
gcccgaaggcuacgaacaa

SEQ ID NO: 546947 - RNA, 19 nt, Homo sapiens
  misc_RNA (1)...(19): siRNA sense strand
uacguccgguuguauguaa

SEQ ID NO: 546948 - RNA, 19 nt, Homo sapiens
  misc_RNA (1)...(19): siRNA sense strand
ugucuuauuuccacuuugu

SEQ ID NO: 546949 - RNA, 19 nt, Homo sapiens
  misc_RNA (1)...(19): siRNA sense strand
cggauucgauaaccauuag

SEQ ID NO: 546950 - RNA, 19 nt, Homo sapiens
  misc_RNA (1)...(19): siRNA sense strand
aggaacggcuccagcauca

SEQ ID NO: 546951 - RNA, 19 nt, Homo sapiens
  misc_RNA (1)...(19): siRNA sense strand
caugaaaugcugaauccuu

SEQ ID NO: 546952 - RNA, 19 nt, Homo sapiens
  misc_RNA (1)...(19): siRNA sense strand
ggagucuuaccgccagaua

SEQ ID NO: 546953 - RNA, 19 nt, Homo sapiens
  misc_RNA (1)...(19): siRNA sense strand
ggaagucagaaguacaguu

SEQ ID NO: 546954 - RNA, 19 nt, Homo sapiens
  misc_RNA (1)...(19): siRNA sense strand
ugugaacugugaugaacuu

SEQ ID NO: 546955 - RNA, 19 nt, Homo sapiens
  misc_RNA (1)...(19): siRNA sense strand
acagacacgagacagaaua

SEQ ID NO: 546956 - RNA, 19 nt, Homo sapiens
  misc_RNA (1)...(19): siRNA sense strand
cgacaucacgccuguacug

SEQ ID NO: 546957 - RNA, 19 nt, Homo sapiens
  misc_RNA (1)...(19): siRNA sense strand
auuacgggcucuuccagua

SEQ ID NO: 546958 - RNA, 19 nt, Homo sapiens
  misc_RNA (1)...(19): siRNA sense strand
gcacagcggcuucgaaacc

SEQ ID NO: 546959 - RNA, 19 nt, Homo sapiens
  misc_RNA (1)...(19): siRNA sense strand
gaaucgaagcccaguucuu

SEQ ID NO: 546960 - RNA, 19 nt, Homo sapiens
  misc_RNA (1)...(19): siRNA sense strand
cccgaccacuugucuuauu

SEQ ID NO: 546961 - RNA, 19 nt, Homo sapiens
  misc_RNA (1)...(19): siRNA sense strand
gccaugaaaugcugaaucc

SEQ ID NO: 546962 - RNA, 19 nt, Homo sapiens
  misc_RNA (1)...(19): siRNA sense strand
gaaggcuacgaacaaagaa

SEQ ID NO: 546963 - RNA, 19 nt, Homo sapiens
  misc_RNA (1)...(19): siRNA sense strand
ggcggauccugcagcauga

SEQ ID NO: 546964 - RNA, 19 nt, Homo sapiens
  misc_RNA (1)...(19): siRNA sense strand
ccauccagcucucagaucu

SEQ ID NO: 546965 - RNA, 19 nt, Homo sapiens
  misc_RNA (1)...(19): siRNA sense strand
gcccagagauacgaaagag

SEQ ID NO: 546966 - RNA, 19 nt, Homo sapiens
  misc_RNA (1)...(19): siRNA sense strand
gauaccagcguuuggaucu

SEQ ID NO: 546967 - RNA, 19 nt, Homo sapiens
  misc_RNA (1)...(19): siRNA sense strand
uggagacguucgaugaaga

SEQ ID NO: 546968 - RNA, 19 nt, Homo sapiens
  misc_RNA (1)...(19): siRNA sense strand
ugaaggaacgguguaugaa

SEQ ID NO: 546969 - RNA, 19 nt, Homo sapiens
  misc_RNA (1)...(19): siRNA sense strand
gacacgagacagaauagga

SEQ ID NO: 546970 - RNA, 19 nt, Homo sapiens
  misc_RNA (1)...(19): siRNA sense strand
gaugcgaccgaaagacuug

SEQ ID NO: 546971 - RNA, 19 nt, Homo sapiens
  misc_RNA (1)...(19): siRNA sense strand
ugauagacgcgaacacaga

SEQ ID NO: 546972 - RNA, 19 nt, Homo sapiens
  misc_RNA (1)...(19): siRNA sense strand
cuucaaggcuuugcaaggu

SEQ ID NO: 546973 - RNA, 19 nt, Homo sapiens
  misc_RNA (1)...(19): siRNA sense strand
aacaucugcugaagccuuu

SEQ ID NO: 546974 - RNA, 19 nt, Homo sapiens
  misc_RNA (1)...(19): siRNA sense strand
uacgggcucuuccaguauu

SEQ ID NO: 546975 - RNA, 19 nt, Homo sapiens
  misc_RNA (1)...(19): siRNA sense strand
acacgagacagaauaggaa

SEQ ID NO: 546976 - RNA, 19 nt, Homo sapiens
  misc_RNA (1)...(19): siRNA sense strand
ggagguuuaugagaggaau

SEQ ID NO: 546977 - RNA, 19 nt, Homo sapiens
  misc_RNA (1)...(19): siRNA sense strand
caucgaaguguccagagaa

SEQ ID NO: 546978 - RNA, 19 nt, Homo sapiens
  misc_RNA (1)...(19): siRNA sense strand
aaucaccagugccaacuca

SEQ ID NO: 546979 - RNA, 19 nt, Homo sapiens
  misc_RNA (1)...(19): siRNA sense strand
uacaccacaucaugaauca

SEQ ID NO: 546980 - RNA, 19 nt, Homo sapiens
  misc_RNA (1)...(19): siRNA sense strand
uuucugggaggauauauuu

SEQ ID NO: 546981 - RNA, 19 nt, Homo sapiens
  misc_RNA (1)...(19): siRNA sense strand
gguuacaccacaucaugaa

SEQ ID NO: 546982 - RNA, 19 nt, Homo sapiens
  misc_RNA (1)...(19): siRNA sense strand
guucaccauccaccugaua

SEQ ID NO: 546983 - RNA, 19 nt, Homo sapiens
  misc_RNA (1)...(19): siRNA sense strand
gcaacaucgugcggugguu

SEQ ID NO: 546984 - RNA, 19 nt, Homo sapiens
  misc_RNA (1)...(19): siRNA sense strand
gaggagaauaagaaagaau

SEQ ID NO: 546985 - RNA, 19 nt, Homo sapiens
  misc_RNA (1)...(19): siRNA sense strand
gaaacaccuuugagggaua

SEQ ID NO: 546986 - RNA, 19 nt, Homo sapiens
  misc_RNA (1)...(19): siRNA sense strand
gagggcaccuggaacaaug

SEQ ID NO: 546987 - RNA, 19 nt, Homo sapiens
  misc_RNA (1)...(19): siRNA sense strand
aagcagcggugccaaguau

SEQ ID NO: 546988 - RNA, 19 nt, Homo sapiens
  misc_RNA (1)...(19): siRNA sense strand
gcagcggugccaaguauga

SEQ ID NO: 546989 - RNA, 19 nt, Homo sapiens
  misc_RNA (1)...(19): siRNA sense strand
ggaacaauggccugcaaga

SEQ ID NO: 546990 - RNA, 19 nt, Homo sapiens
  misc_RNA (1)...(19): siRNA sense strand
ggcaugggcugggcauaga

SEQ ID NO: 546991 - RNA, 19 nt, Homo sapiens
  misc_RNA (1)...(19): siRNA sense strand
cgagaccuaugcugaugga

SEQ ID NO: 546992 - RNA, 19 nt, Homo sapiens
  misc_RNA (1)...(19): siRNA sense strand
caagggacgcuacggaauc

SEQ ID NO: 546993 - RNA, 19 nt, Homo sapiens
  misc_RNA (1)...(19): siRNA sense strand
ugagguggcaggugucuau

SEQ ID NO: 546994 - RNA, 19 nt, Homo sapiens
  misc_RNA (1)...(19): siRNA sense strand
ccaagggccagggcgaaua

SEQ ID NO: 546995 - RNA, 19 nt, Homo sapiens
  misc_RNA (1)...(19): siRNA sense strand
gcuauggcaccgagaccua

SEQ ID NO: 546996 - RNA, 19 nt, Homo sapiens
  misc_RNA (1)...(19): siRNA sense strand
gaacaauggccugcaagac

SEQ ID NO: 546997 - RNA, 19 nt, Homo sapiens
  misc_RNA (1)...(19): siRNA sense strand
caagcagcggugccaagua

SEQ ID NO: 546998 - RNA, 19 nt, Homo sapiens
  misc_RNA (1)...(19): siRNA sense strand
guggacacauggcuucaag

SEQ ID NO: 546999 - RNA, 19 nt, Homo sapiens
  misc_RNA (1)...(19): siRNA sense strand
ccuggaacuuuggcuuuga

SEQ ID NO: 547000 - RNA, 19 nt, Homo sapiens
  misc_RNA (1)...(19): siRNA sense strand
gcccagcggaaacaccuuu

SEQ ID NO: 547001 - RNA, 19 nt, Homo sapiens
  misc_RNA (1)...(19): siRNA sense strand
ggaauccggcagagcucaa

SEQ ID NO: 547002 - RNA, 19 nt, Homo sapiens
  misc_RNA (1)...(19): siRNA sense strand
ucaagggacgcuacggaau

SEQ ID NO: 547003 - RNA, 19 nt, Homo sapiens
  misc_RNA (1)...(19): siRNA sense strand
uaugagggcaccuggaaca

SEQ ID NO: 547004 - RNA, 19 nt, Homo sapiens
  misc_RNA (1)...(19): siRNA sense strand
gaaacaccuuugagggaua

SEQ ID NO: 547005 - RNA, 19 nt, Homo sapiens
  misc_RNA (1)...(19): siRNA sense strand
gagggcaccuggaacaaug

SEQ ID NO: 547006 - RNA, 19 nt, Homo sapiens
  misc_RNA (1)...(19): siRNA sense strand
aagcagcggugccaaguau

SEQ ID NO: 547007 - RNA, 19 nt, Homo sapiens
  misc_RNA (1)...(19): siRNA sense strand
gcagcggugccaaguauga

SEQ ID NO: 547008 - RNA, 19 nt, Homo sapiens
  misc_RNA (1)...(19): siRNA sense strand
ggaacaauggccugcaaga

SEQ ID NO: 547009 - RNA, 19 nt, Homo sapiens
  misc_RNA (1)...(19): siRNA sense strand
ggcaugggcugggcauaga

SEQ ID NO: 547010 - RNA, 19 nt, Homo sapiens
  misc_RNA (1)...(19): siRNA sense strand
cgagaccuaugcugaugga

SEQ ID NO: 547011 - RNA, 19 nt, Homo sapiens
  misc_RNA (1)...(19): siRNA sense strand
caagggacgcuacggaauc

SEQ ID NO: 547012 - RNA, 19 nt, Homo sapiens
  misc_RNA (1)...(19): siRNA sense strand
ugagguggcaggugucuau

SEQ ID NO: 547013 - RNA, 19 nt, Homo sapiens
  misc_RNA (1)...(19): siRNA sense strand
ccaagggccagggcgaaua

SEQ ID NO: 547014 - RNA, 19 nt, Homo sapiens
  misc_RNA (1)...(19): siRNA sense strand
gcuauggcaccgagaccua

SEQ ID NO: 547015 - RNA, 19 nt, Homo sapiens
  misc_RNA (1)...(19): siRNA sense strand
gaacaauggccugcaagac

SEQ ID NO: 547016 - RNA, 19 nt, Homo sapiens
  misc_RNA (1)...(19): siRNA sense strand
caagcagcggugccaagua

SEQ ID NO: 547017 - RNA, 19 nt, Homo sapiens
  misc_RNA (1)...(19): siRNA sense strand
guggacacauggcuucaag

SEQ ID NO: 547018 - RNA, 19 nt, Homo sapiens
  misc_RNA (1)...(19): siRNA sense strand
ccuggaacuuuggcuuuga

SEQ ID NO: 547019 - RNA, 19 nt, Homo sapiens
  misc_RNA (1)...(19): siRNA sense strand
gcccagcggaaacaccuuu

SEQ ID NO: 547020 - RNA, 19 nt, Homo sapiens
  misc_RNA (1)...(19): siRNA sense strand
ggaauccggcagagcucaa

SEQ ID NO: 547021 - RNA, 19 nt, Homo sapiens
  misc_RNA (1)...(19): siRNA sense strand
ucaagggacgcuacggaau

SEQ ID NO: 547022 - RNA, 19 nt, Homo sapiens
  misc_RNA (1)...(19): siRNA sense strand
uaugagggcaccuggaaca

SEQ ID NO: 547023 - RNA, 19 nt, Homo sapiens
  misc_RNA (1)...(19): siRNA sense strand
gaaacggagucuaagcuuu

SEQ ID NO: 547024 - RNA, 19 nt, Homo sapiens
  misc_RNA (1)...(19): siRNA sense strand
ugaaauaccuacaugagaa

SEQ ID NO: 547025 - RNA, 19 nt, Homo sapiens
  misc_RNA (1)...(19): siRNA sense strand
cagaagaacuuugcuaaga

SEQ ID NO: 547026 - RNA, 19 nt, Homo sapiens
  misc_RNA (1)...(19): siRNA sense strand
gagaaggccuugagucauc

SEQ ID NO: 547027 - RNA, 19 nt, Homo sapiens
  misc_RNA (1)...(19): siRNA sense strand
gcagugaaauaccuacaug

SEQ ID NO: 547028 - RNA, 19 nt, Homo sapiens
  misc_RNA (1)...(19): siRNA sense strand
gcucugaagugcaucaaga

SEQ ID NO: 547029 - RNA, 19 nt, Homo sapiens
  misc_RNA (1)...(19): siRNA sense strand
ugaggaagcuacacaugaa

SEQ ID NO: 547030 - RNA, 19 nt, Homo sapiens
  misc_RNA (1)...(19): siRNA sense strand
gggaagcucuuugcucuga

SEQ ID NO: 547031 - RNA, 19 nt, Homo sapiens
  misc_RNA (1)...(19): siRNA sense strand
gaaugagauugcuguguug

SEQ ID NO: 547032 - RNA, 19 nt, Homo sapiens
  misc_RNA (1)...(19): siRNA sense strand
agaaugagauugcuguguu

SEQ ID NO: 547033 - RNA, 19 nt, Homo sapiens
  misc_RNA (1)...(19): siRNA sense strand
gaacagaauggcaucaugu

SEQ ID NO: 547034 - RNA, 19 nt, Homo sapiens
  misc_RNA (1)...(19): siRNA sense strand
ggaacagaauggcaucaug

SEQ ID NO: 547035 - RNA, 19 nt, Homo sapiens
  misc_RNA (1)...(19): siRNA sense strand
ggacuuuauuugccacuug

SEQ ID NO: 547036 - RNA, 19 nt, Homo sapiens
  misc_RNA (1)...(19): siRNA sense strand
cuacguggcuccagaagug

SEQ ID NO: 547037 - RNA, 19 nt, Homo sapiens
  misc_RNA (1)...(19): siRNA sense strand
ggaagaaacagaccaccaa

SEQ ID NO: 547038 - RNA, 19 nt, Homo sapiens
  misc_RNA (1)...(19): siRNA sense strand
gaagaugacugcaguuccu

SEQ ID NO: 547039 - RNA, 19 nt, Homo sapiens
  misc_RNA (1)...(19): siRNA sense strand
ggagggcuacuaugaguuu

SEQ ID NO: 547040 - RNA, 19 nt, Homo sapiens
  misc_RNA (1)...(19): siRNA sense strand
ugagauugcuguguugaaa

SEQ ID NO: 547041 - RNA, 19 nt, Homo sapiens
  misc_RNA (1)...(19): siRNA sense strand
ucaaggagggcuacuauga

SEQ ID NO: 547042 - RNA, 19 nt, Homo sapiens
  misc_RNA (1)...(19): siRNA sense strand
acuggagucugucucauua

SEQ ID NO: 547043 - RNA, 19 nt, Homo sapiens
  misc_RNA (1)...(19): siRNA sense strand
gaucaagcaugaaaacauu

SEQ ID NO: 547044 - RNA, 19 nt, Homo sapiens
  misc_RNA (1)...(19): siRNA sense strand
gaucaaggagggcuacuau

SEQ ID NO: 547045 - RNA, 19 nt, Homo sapiens
  misc_RNA (1)...(19): siRNA sense strand
cgucaucaccuacauauug

SEQ ID NO: 547046 - RNA, 19 nt, Homo sapiens
  misc_RNA (1)...(19): siRNA sense strand
gaaaaccugcuuuaccuua

SEQ ID NO: 547047 - RNA, 19 nt, Homo sapiens
  misc_RNA (1)...(19): siRNA sense strand
gaaacucaagccucagaaa

SEQ ID NO: 547048 - RNA, 19 nt, Homo sapiens
  misc_RNA (1)...(19): siRNA sense strand
gaucaggagcuuucucaga

SEQ ID NO: 547049 - RNA, 19 nt, Homo sapiens
  misc_RNA (1)...(19): siRNA sense strand
gaggucaugguaccaguua

SEQ ID NO: 547050 - RNA, 19 nt, Homo sapiens
  misc_RNA (1)...(19): siRNA sense strand
gaacauugggagcaaagga

SEQ ID NO: 547051 - RNA, 19 nt, Homo sapiens
  misc_RNA (1)...(19): siRNA sense strand
acagcagccuggagaauga

SEQ ID NO: 547052 - RNA, 19 nt, Homo sapiens
  misc_RNA (1)...(19): siRNA sense strand
gaaauaccuacaugagaau

SEQ ID NO: 547053 - RNA, 19 nt, Homo sapiens
  misc_RNA (1)...(19): siRNA sense strand
ugaagugcaucaagaaguc

SEQ ID NO: 547054 - RNA, 19 nt, Homo sapiens
  misc_RNA (1)...(19): siRNA sense strand
gaaacagaccaccaacauc

SEQ ID NO: 547055 - RNA, 19 nt, Homo sapiens
  misc_RNA (1)...(19): siRNA sense strand
ucaacugccuggucaaugg

SEQ ID NO: 547056 - RNA, 19 nt, Homo sapiens
  misc_RNA (1)...(19): siRNA sense strand
gcccagagguggagaacag

SEQ ID NO: 547057 - RNA, 19 nt, Homo sapiens
  misc_RNA (1)...(19): siRNA sense strand
acauauugcucuguggaua

SEQ ID NO: 547058 - RNA, 19 nt, Homo sapiens
  misc_RNA (1)...(19): siRNA sense strand
caugaucacugacuuuggu

SEQ ID NO: 547059 - RNA, 19 nt, Homo sapiens
  misc_RNA (1)...(19): siRNA sense strand
gaagcucuuugcucugaag

SEQ ID NO: 547060 - RNA, 19 nt, Homo sapiens
  misc_RNA (1)...(19): siRNA sense strand
ggucaugguaccaguuaaa

SEQ ID NO: 547061 - RNA, 19 nt, Homo sapiens
  misc_RNA (1)...(19): siRNA sense strand
ggucuugucggcagugaaa

SEQ ID NO: 547062 - RNA, 19 nt, Homo sapiens
  misc_RNA (1)...(19): siRNA sense strand
caucguccacagagacuua

SEQ ID NO: 547063 - RNA, 19 nt, Homo sapiens
  misc_RNA (1)...(19): siRNA sense strand
agaagaacuuugcuaagag

SEQ ID NO: 547064 - RNA, 19 nt, Homo sapiens
  misc_RNA (1)...(19): siRNA sense strand
gagucugucucauuaugug

SEQ ID NO: 547065 - RNA, 19 nt, Homo sapiens
  misc_RNA (1)...(19): siRNA sense strand
gccacuugcuugagaagga

SEQ ID NO: 547066 - RNA, 19 nt, Homo sapiens
  misc_RNA (1)...(19): siRNA sense strand
gugagaaggccuugaguca

SEQ ID NO: 547067 - RNA, 19 nt, Homo sapiens
  misc_RNA (1)...(19): siRNA sense strand
ccaauuacccugccagcau

SEQ ID NO: 547068 - RNA, 19 nt, Homo sapiens
  misc_RNA (1)...(19): siRNA sense strand
gugaaauaccuacaugaga

SEQ ID NO: 547069 - RNA, 19 nt, Homo sapiens
  misc_RNA (1)...(19): siRNA sense strand
ggacagcagccuggagaau

SEQ ID NO: 547070 - RNA, 19 nt, Homo sapiens
  misc_RNA (1)...(19): siRNA sense strand
caagucggaggucauggua

SEQ ID NO: 547071 - RNA, 19 nt, Homo sapiens
  misc_RNA (1)...(19): siRNA sense strand
gaagaagaugacugcaguu

SEQ ID NO: 547072 - RNA, 19 nt, Homo sapiens
  misc_RNA (1)...(19): siRNA sense strand
cagccaaggacuuuauuug

SEQ ID NO: 547073 - RNA, 19 nt, Homo sapiens
  misc_RNA (1)...(19): siRNA sense strand
gagcaccacccacuacuac

SEQ ID NO: 547074 - RNA, 19 nt, Homo sapiens
  misc_RNA (1)...(19): siRNA sense strand
gaagaaacggagucuaagc

SEQ ID NO: 547075 - RNA, 19 nt, Homo sapiens
  misc_RNA (1)...(19): siRNA sense strand
ggaagcucuuugcucugaa

SEQ ID NO: 547076 - RNA, 19 nt, Homo sapiens
  misc_RNA (1)...(19): siRNA sense strand
agaaacagaccaccaacau

SEQ ID NO: 547077 - RNA, 19 nt, Homo sapiens
  misc_RNA (1)...(19): siRNA sense strand
uggagucugucucauuaug

SEQ ID NO: 547078 - RNA, 19 nt, Homo sapiens
  misc_RNA (1)...(19): siRNA sense strand
ccagcugccugaacauugg

SEQ ID NO: 547079 - RNA, 19 nt, Homo sapiens
  misc_RNA (1)...(19): siRNA sense strand
gaguuugagucuccauucu

SEQ ID NO: 547080 - RNA, 19 nt, Homo sapiens
  misc_RNA (1)...(19): siRNA sense strand
aaggagggcuacuaugagu

SEQ ID NO: 547081 - RNA, 19 nt, Homo sapiens
  misc_RNA (1)...(19): siRNA sense strand
augaagaaacggagucuaa

SEQ ID NO: 547082 - RNA, 19 nt, Homo sapiens
  misc_RNA (1)...(19): siRNA sense strand
gacagcagccuggagaaug

SEQ ID NO: 547083 - RNA, 19 nt, Homo sapiens
  misc_RNA (1)...(19): siRNA sense strand
ucccugcccugacccaauu

SEQ ID NO: 547084 - RNA, 19 nt, Homo sapiens
  misc_RNA (1)...(19): siRNA sense strand
agucuaagcuuuucgagaa

SEQ ID NO: 547085 - RNA, 19 nt, Homo sapiens
  misc_RNA (1)...(19): siRNA sense strand
gaauggcaucguccacaga

SEQ ID NO: 547086 - RNA, 19 nt, Homo sapiens
  misc_RNA (1)...(19): siRNA sense strand
gggaucaggagcuuucuca

SEQ ID NO: 547087 - RNA, 19 nt, Homo sapiens
  misc_RNA (1)...(19): siRNA sense strand
gccuccagauccagaagaa

SEQ ID NO: 547088 - RNA, 19 nt, Homo sapiens
  misc_RNA (1)...(19): siRNA sense strand
ggagucugucucauuaugu

SEQ ID NO: 547089 - RNA, 19 nt, Homo sapiens
  misc_RNA (1)...(19): siRNA sense strand
gagaaugagauugcugugu

SEQ ID NO: 547090 - RNA, 19 nt, Homo sapiens
  misc_RNA (1)...(19): siRNA sense strand
gagcgguacaccugugaga

SEQ ID NO: 547091 - RNA, 19 nt, Homo sapiens
  misc_RNA (1)...(19): siRNA sense strand
ccaucggcgucaucaccua

SEQ ID NO: 547092 - RNA, 19 nt, Homo sapiens
  misc_RNA (1)...(19): siRNA sense strand
gguggcaggucccucaacu

SEQ ID NO: 547093 - RNA, 19 nt, Homo sapiens
  misc_RNA (1)...(19): siRNA sense strand
uccagaagaacuuugcuaa

SEQ ID NO: 547094 - RNA, 19 nt, Homo sapiens
  misc_RNA (1)...(19): siRNA sense strand
caaggagggcuacuaugag

SEQ ID NO: 547095 - RNA, 19 nt, Homo sapiens
  misc_RNA (1)...(19): siRNA sense strand
caauggcucccuccacauc

SEQ ID NO: 547096 - RNA, 19 nt, Homo sapiens
  misc_RNA (1)...(19): siRNA sense strand
gcugggaucaggagcuuuc

SEQ ID NO: 547097 - RNA, 19 nt, Homo sapiens
  misc_RNA (1)...(19): siRNA sense strand
gugcugggaucaggagcuu

SEQ ID NO: 547098 - RNA, 19 nt, Homo sapiens
  misc_RNA (1)...(19): siRNA sense strand
ggaggucaugguaccaguu

SEQ ID NO: 547099 - RNA, 19 nt, Homo sapiens
  misc_RNA (1)...(19): siRNA sense strand
gucgaaaggaagaagauga

SEQ ID NO: 547100 - RNA, 19 nt, Homo sapiens
  misc_RNA (1)...(19): siRNA sense strand
aaacggagucuaagcuuuu

SEQ ID NO: 547101 - RNA, 19 nt, Homo sapiens
  misc_RNA (1)...(19): siRNA sense strand
gacccuggaggacaucuau

SEQ ID NO: 547102 - RNA, 19 nt, Homo sapiens
  misc_RNA (1)...(19): siRNA sense strand
ccagaagaacuuugcuaag

SEQ ID NO: 547103 - RNA, 19 nt, Homo sapiens
  misc_RNA (1)...(19): siRNA sense strand
ccacuugcuugagaaggau

SEQ ID NO: 547104 - RNA, 19 nt, Homo sapiens
  misc_RNA (1)...(19): siRNA sense strand
cagagaaggaugccagucu

SEQ ID NO: 547105 - RNA, 19 nt, Homo sapiens
  misc_RNA (1)...(19): siRNA sense strand
gggcuacuaugaguuugag

SEQ ID NO: 547106 - RNA, 19 nt, Homo sapiens
  misc_RNA (1)...(19): siRNA sense strand
acuacuaccuggucaugca

SEQ ID NO: 547107 - RNA, 19 nt, Homo sapiens
  misc_RNA (1)...(19): siRNA sense strand
ccagauccagaagaacuuu

SEQ ID NO: 547108 - RNA, 19 nt, Homo sapiens
  misc_RNA (1)...(19): siRNA sense strand
gcgguacaccugugagaag

SEQ ID NO: 547109 - RNA, 19 nt, Homo sapiens
  misc_RNA (1)...(19): siRNA sense strand
ggcgucaucaccuacauau

SEQ ID NO: 547110 - RNA, 19 nt, Homo sapiens
  misc_RNA (1)...(19): siRNA sense strand
cccagaaacccuacagcaa

SEQ ID NO: 547111 - RNA, 19 nt, Homo sapiens
  misc_RNA (1)...(19): siRNA sense strand
gaagugcaucaagaaguca

SEQ ID NO: 547112 - RNA, 19 nt, Homo sapiens
  misc_RNA (1)...(19): siRNA sense strand
ggucaugcagcuuguuucu

SEQ ID NO: 547113 - RNA, 19 nt, Homo sapiens
  misc_RNA (1)...(19): siRNA sense strand
ccacuacuaccuggucaug

SEQ ID NO: 547114 - RNA, 19 nt, Homo sapiens
  misc_RNA (1)...(19): siRNA sense strand
gacaucuacccaucaguca

SEQ ID NO: 547115 - RNA, 19 nt, Homo sapiens
  misc_RNA (1)...(19): siRNA sense strand
ggucauagcugugcuguuu

SEQ ID NO: 547116 - RNA, 19 nt, Homo sapiens
  misc_RNA (1)...(19): siRNA sense strand
gagaugaauugcacuauuu

SEQ ID NO: 547117 - RNA, 19 nt, Homo sapiens
  misc_RNA (1)...(19): siRNA sense strand
gaacucgaauccucuuuaa

SEQ ID NO: 547118 - RNA, 19 nt, Homo sapiens
  misc_RNA (1)...(19): siRNA sense strand
gaacauuggucugucuaua

SEQ ID NO: 547119 - RNA, 19 nt, Homo sapiens
  misc_RNA (1)...(19): siRNA sense strand
gagcuauguugccuaauua

SEQ ID NO: 547120 - RNA, 19 nt, Homo sapiens
  misc_RNA (1)...(19): siRNA sense strand
gaaaugcugucucuucaug

SEQ ID NO: 547121 - RNA, 19 nt, Homo sapiens
  misc_RNA (1)...(19): siRNA sense strand
ccaagaauaucuacagaaa

SEQ ID NO: 547122 - RNA, 19 nt, Homo sapiens
  misc_RNA (1)...(19): siRNA sense strand
gagaauguauuuacuccua

SEQ ID NO: 547123 - RNA, 19 nt, Homo sapiens
  misc_RNA (1)...(19): siRNA sense strand
ucucugaccuuacuuauaa

SEQ ID NO: 547124 - RNA, 19 nt, Homo sapiens
  misc_RNA (1)...(19): siRNA sense strand
ggagcuauguugccuaauu

SEQ ID NO: 547125 - RNA, 19 nt, Homo sapiens
  misc_RNA (1)...(19): siRNA sense strand
gaagaaaccaaguaugaaa

SEQ ID NO: 547126 - RNA, 19 nt, Homo sapiens
  misc_RNA (1)...(19): siRNA sense strand
ggaaucagcagaauaggua

SEQ ID NO: 547127 - RNA, 19 nt, Homo sapiens
  misc_RNA (1)...(19): siRNA sense strand
ugaagaagguauuguugua

SEQ ID NO: 547128 - RNA, 19 nt, Homo sapiens
  misc_RNA (1)...(19): siRNA sense strand
gauucucucuuaccaaaua

SEQ ID NO: 547129 - RNA, 19 nt, Homo sapiens
  misc_RNA (1)...(19): siRNA sense strand
agaaagaauuccuguguuu

SEQ ID NO: 547130 - RNA, 19 nt, Homo sapiens
  misc_RNA (1)...(19): siRNA sense strand
gaccagaauuaucaaauga

SEQ ID NO: 547131 - RNA, 19 nt, Homo sapiens
  misc_RNA (1)...(19): siRNA sense strand
gaauugcacuauuuaagga

SEQ ID NO: 547132 - RNA, 19 nt, Homo sapiens
  misc_RNA (1)...(19): siRNA sense strand
ggaugaaaguauugacaaa

SEQ ID NO: 547133 - RNA, 19 nt, Homo sapiens
  misc_RNA (1)...(19): siRNA sense strand
acaagcagcugacuuaugu

SEQ ID NO: 547134 - RNA, 19 nt, Homo sapiens
  misc_RNA (1)...(19): siRNA sense strand
gaugcuauauucugugaaa

SEQ ID NO: 547135 - RNA, 19 nt, Homo sapiens
  misc_RNA (1)...(19): siRNA sense strand
cagauacugugaaucauuu

SEQ ID NO: 547136 - RNA, 19 nt, Homo sapiens
  misc_RNA (1)...(19): siRNA sense strand
ucaacaagcagcugacuua

SEQ ID NO: 547137 - RNA, 19 nt, Homo sapiens
  misc_RNA (1)...(19): siRNA sense strand
guggaggaauuuaaugaua

SEQ ID NO: 547138 - RNA, 19 nt, Homo sapiens
  misc_RNA (1)...(19): siRNA sense strand
gugguaaagugaaauguaa

SEQ ID NO: 547139 - RNA, 19 nt, Homo sapiens
  misc_RNA (1)...(19): siRNA sense strand
ggaaauguauacugauuac

SEQ ID NO: 547140 - RNA, 19 nt, Homo sapiens
  misc_RNA (1)...(19): siRNA sense strand
gaaacuuacugaacugcuu

SEQ ID NO: 547141 - RNA, 19 nt, Homo sapiens
  misc_RNA (1)...(19): siRNA sense strand
gauaagauacuaccagaug

SEQ ID NO: 547142 - RNA, 19 nt, Homo sapiens
  misc_RNA (1)...(19): siRNA sense strand
acaagaagcuuuucaauga

SEQ ID NO: 547143 - RNA, 19 nt, Homo sapiens
  misc_RNA (1)...(19): siRNA sense strand
guuaggacuucaggaauua

SEQ ID NO: 547144 - RNA, 19 nt, Homo sapiens
  misc_RNA (1)...(19): siRNA sense strand
gagaugcuauauucuguga

SEQ ID NO: 547145 - RNA, 19 nt, Homo sapiens
  misc_RNA (1)...(19): siRNA sense strand
ggugaugacuguagaagga

SEQ ID NO: 547146 - RNA, 19 nt, Homo sapiens
  misc_RNA (1)...(19): siRNA sense strand
gaaguuaccucugugacau

SEQ ID NO: 547147 - RNA, 19 nt, Homo sapiens
  misc_RNA (1)...(19): siRNA sense strand
ggaggaauuuaaugauaga

SEQ ID NO: 547148 - RNA, 19 nt, Homo sapiens
  misc_RNA (1)...(19): siRNA sense strand
gcagcugacuuauguuuua

SEQ ID NO: 547149 - RNA, 19 nt, Homo sapiens
  misc_RNA (1)...(19): siRNA sense strand
ggaacucgaauccucuuua

SEQ ID NO: 547150 - RNA, 19 nt, Homo sapiens
  misc_RNA (1)...(19): siRNA sense strand
gaagagaugaauugcacua

SEQ ID NO: 547151 - RNA, 19 nt, Homo sapiens
  misc_RNA (1)...(19): siRNA sense strand
gugaagaaaccaaguauga

SEQ ID NO: 547152 - RNA, 19 nt, Homo sapiens
  misc_RNA (1)...(19): siRNA sense strand
gaagaauugcagaagauuu

SEQ ID NO: 547153 - RNA, 19 nt, Homo sapiens
  misc_RNA (1)...(19): siRNA sense strand
gaagaagguauuguuguaa

SEQ ID NO: 547154 - RNA, 19 nt, Homo sapiens
  misc_RNA (1)...(19): siRNA sense strand
gaaauuugcagaaccuaga

SEQ ID NO: 547155 - RNA, 19 nt, Homo sapiens
  misc_RNA (1)...(19): siRNA sense strand
cgaccagaauuaucaaaug

SEQ ID NO: 547156 - RNA, 19 nt, Homo sapiens
  misc_RNA (1)...(19): siRNA sense strand
uuuaagaggugcagaauca

SEQ ID NO: 547157 - RNA, 19 nt, Homo sapiens
  misc_RNA (1)...(19): siRNA sense strand
caaacuaugagaugucuuu

SEQ ID NO: 547158 - RNA, 19 nt, Homo sapiens
  misc_RNA (1)...(19): siRNA sense strand
caucugugcugaaguuaga

SEQ ID NO: 547159 - RNA, 19 nt, Homo sapiens
  misc_RNA (1)...(19): siRNA sense strand
agagaaaggucagcauuug

SEQ ID NO: 547160 - RNA, 19 nt, Homo sapiens
  misc_RNA (1)...(19): siRNA sense strand
gaaaaggggagaaucauuu

SEQ ID NO: 547161 - RNA, 19 nt, Homo sapiens
  misc_RNA (1)...(19): siRNA sense strand
ugaagcauaugaacauguu

SEQ ID NO: 547162 - RNA, 19 nt, Homo sapiens
  misc_RNA (1)...(19): siRNA sense strand
ggagaaucauuuggaauca

SEQ ID NO: 547163 - RNA, 19 nt, Homo sapiens
  misc_RNA (1)...(19): siRNA sense strand
gacacgagccugaacauug

SEQ ID NO: 547164 - RNA, 19 nt, Homo sapiens
  misc_RNA (1)...(19): siRNA sense strand
gcaguuaggacuucaggaa

SEQ ID NO: 547165 - RNA, 19 nt, Homo sapiens
  misc_RNA (1)...(19): siRNA sense strand
gauacuaccagauguaaau

SEQ ID NO: 547166 - RNA, 19 nt, Homo sapiens
  misc_RNA (1)...(19): siRNA sense strand
gaugaaaugcugucucuuc

SEQ ID NO: 547167 - RNA, 19 nt, Homo sapiens
  misc_RNA (1)...(19): siRNA sense strand
gugaaucauuugcuuauca

SEQ ID NO: 547168 - RNA, 19 nt, Homo sapiens
  misc_RNA (1)...(19): siRNA sense strand
gaauguauuuacuccuaug

SEQ ID NO: 547169 - RNA, 19 nt, Homo sapiens
  misc_RNA (1)...(19): siRNA sense strand
cagaauagguagcaaaauu

SEQ ID NO: 547170 - RNA, 19 nt, Homo sapiens
  misc_RNA (1)...(19): siRNA sense strand
gcauauagaagugauaguu

SEQ ID NO: 547171 - RNA, 19 nt, Homo sapiens
  misc_RNA (1)...(19): siRNA sense strand
agaauuucauggugcauuu

SEQ ID NO: 547172 - RNA, 19 nt, Homo sapiens
  misc_RNA (1)...(19): siRNA sense strand
aaaccuugcugcauggaaa

SEQ ID NO: 547173 - RNA, 19 nt, Homo sapiens
  misc_RNA (1)...(19): siRNA sense strand
caugaagaauugcagaaga

SEQ ID NO: 547174 - RNA, 19 nt, Homo sapiens
  misc_RNA (1)...(19): siRNA sense strand
acauaggccuucuuugcua

SEQ ID NO: 547175 - RNA, 19 nt, Homo sapiens
  misc_RNA (1)...(19): siRNA sense strand
gaaggcccauacauagaug

SEQ ID NO: 547176 - RNA, 19 nt, Homo sapiens
  misc_RNA (1)...(19): siRNA sense strand
uagauuugaucccuucauu

SEQ ID NO: 547177 - RNA, 19 nt, Homo sapiens
  misc_RNA (1)...(19): siRNA sense strand
gaaguuagaauugaagcaa

SEQ ID NO: 547178 - RNA, 19 nt, Homo sapiens
  misc_RNA (1)...(19): siRNA sense strand
gugcugaaguuagaauuga

SEQ ID NO: 547179 - RNA, 19 nt, Homo sapiens
  misc_RNA (1)...(19): siRNA sense strand
agagaugaauugcacuauu

SEQ ID NO: 547180 - RNA, 19 nt, Homo sapiens
  misc_RNA (1)...(19): siRNA sense strand
aagcagcaaugaagcauau

SEQ ID NO: 547181 - RNA, 19 nt, Homo sapiens
  misc_RNA (1)...(19): siRNA sense strand
uuacauuccagaucuguua

SEQ ID NO: 547182 - RNA, 19 nt, Homo sapiens
  misc_RNA (1)...(19): siRNA sense strand
ccaaguagaccagaacuga

SEQ ID NO: 547183 - RNA, 19 nt, Homo sapiens
  misc_RNA (1)...(19): siRNA sense strand
gaugacaguccaccugaaa

SEQ ID NO: 547184 - RNA, 19 nt, Homo sapiens
  misc_RNA (1)...(19): siRNA sense strand
uaagauacuaccagaugua

SEQ ID NO: 547185 - RNA, 19 nt, Homo sapiens
  misc_RNA (1)...(19): siRNA sense strand
gaauaucuacagaaacuuc

SEQ ID NO: 547186 - RNA, 19 nt, Homo sapiens
  misc_RNA (1)...(19): siRNA sense strand
gcagaaauuugcagaaccu

SEQ ID NO: 547187 - RNA, 19 nt, Homo sapiens
  misc_RNA (1)...(19): siRNA sense strand
gcaaugaagcauauagaag

SEQ ID NO: 547188 - RNA, 19 nt, Homo sapiens
  misc_RNA (1)...(19): siRNA sense strand
caaguguauuggugaagaa

SEQ ID NO: 547189 - RNA, 19 nt, Homo sapiens
  misc_RNA (1)...(19): siRNA sense strand
cguuuggucucacucauaa

SEQ ID NO: 547190 - RNA, 19 nt, Homo sapiens
  misc_RNA (1)...(19): siRNA sense strand
auacaaacccaagcaguua

SEQ ID NO: 547191 - RNA, 19 nt, Homo sapiens
  misc_RNA (1)...(19): siRNA sense strand
aaagaaagaauuccugugu

SEQ ID NO: 547192 - RNA, 19 nt, Homo sapiens
  misc_RNA (1)...(19): siRNA sense strand
gcugaaggcccauacauag

SEQ ID NO: 547193 - RNA, 19 nt, Homo sapiens
  misc_RNA (1)...(19): siRNA sense strand
guagaagagauucaaagaa

SEQ ID NO: 547194 - RNA, 19 nt, Homo sapiens
  misc_RNA (1)...(19): siRNA sense strand
gcaacagacugcagaucuc

SEQ ID NO: 547195 - RNA, 19 nt, Homo sapiens
  misc_RNA (1)...(19): siRNA sense strand
caaugaagcauauagaagu

SEQ ID NO: 547196 - RNA, 19 nt, Homo sapiens
  misc_RNA (1)...(19): siRNA sense strand
uaugaaagcaucagacuuc

SEQ ID NO: 547197 - RNA, 19 nt, Homo sapiens
  misc_RNA (1)...(19): siRNA sense strand
augauuaccugauguaugu

SEQ ID NO: 547198 - RNA, 19 nt, Homo sapiens
  misc_RNA (1)...(19): siRNA sense strand
gauuugaucccuucauugu

SEQ ID NO: 547199 - RNA, 19 nt, Homo sapiens
  misc_RNA (1)...(19): siRNA sense strand
ugcagaaccuagaaauaaa

SEQ ID NO: 547200 - RNA, 19 nt, Homo sapiens
  misc_RNA (1)...(19): siRNA sense strand
ugaaccggcuucuccuuug

SEQ ID NO: 547201 - RNA, 19 nt, Homo sapiens
  misc_RNA (1)...(19): siRNA sense strand
gaaaacaacaagaagcuuu

SEQ ID NO: 547202 - RNA, 19 nt, Homo sapiens
  misc_RNA (1)...(19): siRNA sense strand
cauccagaacugaguaaua

SEQ ID NO: 547203 - RNA, 19 nt, Homo sapiens
  misc_RNA (1)...(19): siRNA sense strand
uugcagaaccuagaaauaa

SEQ ID NO: 547204 - RNA, 19 nt, Homo sapiens
  misc_RNA (1)...(19): siRNA sense strand
uaucuucaguguaaacuag

SEQ ID NO: 547205 - RNA, 19 nt, Homo sapiens
  misc_RNA (1)...(19): siRNA sense strand
cugauucucucuuaccaaa

SEQ ID NO: 547206 - RNA, 19 nt, Homo sapiens
  misc_RNA (1)...(19): siRNA sense strand
cgacauaggccuucuuugc

SEQ ID NO: 547207 - RNA, 19 nt, Homo sapiens
  misc_RNA (1)...(19): siRNA sense strand
uaaaccaaguagaccagaa

SEQ ID NO: 547208 - RNA, 19 nt, Homo sapiens
  misc_RNA (1)...(19): siRNA sense strand
gaaaggucagcauuuggaa

SEQ ID NO: 547209 - RNA, 19 nt, Homo sapiens
  misc_RNA (1)...(19): siRNA sense strand
gaguauuucagacaacuuu

SEQ ID NO: 547210 - RNA, 19 nt, Homo sapiens
  misc_RNA (1)...(19): siRNA sense strand
gaaccggcuucuccuuugg

SEQ ID NO: 547211 - RNA, 19 nt, Homo sapiens
  misc_RNA (1)...(19): siRNA sense strand
aagaaagaauuccuguguu

SEQ ID NO: 547212 - RNA, 19 nt, Homo sapiens
  misc_RNA (1)...(19): siRNA sense strand
ggaaguuaccucugugaca

SEQ ID NO: 547213 - RNA, 19 nt, Homo sapiens
  misc_RNA (1)...(19): siRNA sense strand
gaaaccaaguaugaaagca

SEQ ID NO: 547214 - RNA, 19 nt, Homo sapiens
  misc_RNA (1)...(19): siRNA sense strand
ucaaguguauuggugaaga

SEQ ID NO: 547215 - RNA, 19 nt, Homo sapiens
  misc_RNA (1)...(19): siRNA sense strand
ggucauagcugugcuguuu

SEQ ID NO: 547216 - RNA, 19 nt, Homo sapiens
  misc_RNA (1)...(19): siRNA sense strand
gagaugaauugcacuauuu

SEQ ID NO: 547217 - RNA, 19 nt, Homo sapiens
  misc_RNA (1)...(19): siRNA sense strand
gaacucgaauccucuuuaa

SEQ ID NO: 547218 - RNA, 19 nt, Homo sapiens
  misc_RNA (1)...(19): siRNA sense strand
gaacauuggucugucuaua

SEQ ID NO: 547219 - RNA, 19 nt, Homo sapiens
  misc_RNA (1)...(19): siRNA sense strand
gagcuauguugccuaauua

SEQ ID NO: 547220 - RNA, 19 nt, Homo sapiens
  misc_RNA (1)...(19): siRNA sense strand
gaaaugcugucucuucaug

SEQ ID NO: 547221 - RNA, 19 nt, Homo sapiens
  misc_RNA (1)...(19): siRNA sense strand
ccaagaauaucuacagaaa

SEQ ID NO: 547222 - RNA, 19 nt, Homo sapiens
  misc_RNA (1)...(19): siRNA sense strand
gagaauguauuuacuccua

SEQ ID NO: 547223 - RNA, 19 nt, Homo sapiens
  misc_RNA (1)...(19): siRNA sense strand
ucucugaccuuacuuauaa

SEQ ID NO: 547224 - RNA, 19 nt, Homo sapiens
  misc_RNA (1)...(19): siRNA sense strand
ggagcuauguugccuaauu

SEQ ID NO: 547225 - RNA, 19 nt, Homo sapiens
  misc_RNA (1)...(19): siRNA sense strand
gaagaaaccaaguaugaaa

SEQ ID NO: 547226 - RNA, 19 nt, Homo sapiens
  misc_RNA (1)...(19): siRNA sense strand
ggaaucagcagaauaggua

SEQ ID NO: 547227 - RNA, 19 nt, Homo sapiens
  misc_RNA (1)...(19): siRNA sense strand
ugaagaagguauuguugua

SEQ ID NO: 547228 - RNA, 19 nt, Homo sapiens
  misc_RNA (1)...(19): siRNA sense strand
gauucucucuuaccaaaua

SEQ ID NO: 547229 - RNA, 19 nt, Homo sapiens
  misc_RNA (1)...(19): siRNA sense strand
agaaagaauuccuguguuu

SEQ ID NO: 547230 - RNA, 19 nt, Homo sapiens
  misc_RNA (1)...(19): siRNA sense strand
gaccagaauuaucaaauga

SEQ ID NO: 547231 - RNA, 19 nt, Homo sapiens
  misc_RNA (1)...(19): siRNA sense strand
gaauugcacuauuuaagga

SEQ ID NO: 547232 - RNA, 19 nt, Homo sapiens
  misc_RNA (1)...(19): siRNA sense strand
ggaugaaaguauugacaaa

SEQ ID NO: 547233 - RNA, 19 nt, Homo sapiens
  misc_RNA (1)...(19): siRNA sense strand
acaagcagcugacuuaugu

SEQ ID NO: 547234 - RNA, 19 nt, Homo sapiens
  misc_RNA (1)...(19): siRNA sense strand
gaugcuauauucugugaaa

SEQ ID NO: 547235 - RNA, 19 nt, Homo sapiens
  misc_RNA (1)...(19): siRNA sense strand
cagauacugugaaucauuu

SEQ ID NO: 547236 - RNA, 19 nt, Homo sapiens
  misc_RNA (1)...(19): siRNA sense strand
ucaacaagcagcugacuua

SEQ ID NO: 547237 - RNA, 19 nt, Homo sapiens
  misc_RNA (1)...(19): siRNA sense strand
guggaggaauuuaaugaua

SEQ ID NO: 547238 - RNA, 19 nt, Homo sapiens
  misc_RNA (1)...(19): siRNA sense strand
gugguaaagugaaauguaa

SEQ ID NO: 547239 - RNA, 19 nt, Homo sapiens
  misc_RNA (1)...(19): siRNA sense strand
ggaaauguauacugauuac

SEQ ID NO: 547240 - RNA, 19 nt, Homo sapiens
  misc_RNA (1)...(19): siRNA sense strand
gaaacuuacugaacugcuu

SEQ ID NO: 547241 - RNA, 19 nt, Homo sapiens
  misc_RNA (1)...(19): siRNA sense strand
gauaagauacuaccagaug

SEQ ID NO: 547242 - RNA, 19 nt, Homo sapiens
  misc_RNA (1)...(19): siRNA sense strand
acaagaagcuuuucaauga

SEQ ID NO: 547243 - RNA, 19 nt, Homo sapiens
  misc_RNA (1)...(19): siRNA sense strand
guuaggacuucaggaauua

SEQ ID NO: 547244 - RNA, 19 nt, Homo sapiens
  misc_RNA (1)...(19): siRNA sense strand
gagaugcuauauucuguga

SEQ ID NO: 547245 - RNA, 19 nt, Homo sapiens
  misc_RNA (1)...(19): siRNA sense strand
ggugaugacuguagaagga

SEQ ID NO: 547246 - RNA, 19 nt, Homo sapiens
  misc_RNA (1)...(19): siRNA sense strand
gaaguuaccucugugacau

SEQ ID NO: 547247 - RNA, 19 nt, Homo sapiens
  misc_RNA (1)...(19): siRNA sense strand
ggaggaauuuaaugauaga

SEQ ID NO: 547248 - RNA, 19 nt, Homo sapiens
  misc_RNA (1)...(19): siRNA sense strand
gcagcugacuuauguuuua

SEQ ID NO: 547249 - RNA, 19 nt, Homo sapiens
  misc_RNA (1)...(19): siRNA sense strand
ggaacucgaauccucuuua

SEQ ID NO: 547250 - RNA, 19 nt, Homo sapiens
  misc_RNA (1)...(19): siRNA sense strand
gaagagaugaauugcacua

SEQ ID NO: 547251 - RNA, 19 nt, Homo sapiens
  misc_RNA (1)...(19): siRNA sense strand
gugaagaaaccaaguauga

SEQ ID NO: 547252 - RNA, 19 nt, Homo sapiens
  misc_RNA (1)...(19): siRNA sense strand
gaagaauugcagaagauuu

SEQ ID NO: 547253 - RNA, 19 nt, Homo sapiens
  misc_RNA (1)...(19): siRNA sense strand
gaagaagguauuguuguaa

SEQ ID NO: 547254 - RNA, 19 nt, Homo sapiens
  misc_RNA (1)...(19): siRNA sense strand
gaaauuugcagaaccuaga

SEQ ID NO: 547255 - RNA, 19 nt, Homo sapiens
  misc_RNA (1)...(19): siRNA sense strand
cgaccagaauuaucaaaug

SEQ ID NO: 547256 - RNA, 19 nt, Homo sapiens
  misc_RNA (1)...(19): siRNA sense strand
uuuaagaggugcagaauca

SEQ ID NO: 547257 - RNA, 19 nt, Homo sapiens
  misc_RNA (1)...(19): siRNA sense strand
caaacuaugagaugucuuu

SEQ ID NO: 547258 - RNA, 19 nt, Homo sapiens
  misc_RNA (1)...(19): siRNA sense strand
caucugugcugaaguuaga

SEQ ID NO: 547259 - RNA, 19 nt, Homo sapiens
  misc_RNA (1)...(19): siRNA sense strand
agagaaaggucagcauuug

SEQ ID NO: 547260 - RNA, 19 nt, Homo sapiens
  misc_RNA (1)...(19): siRNA sense strand
gaaaaggggagaaucauuu

SEQ ID NO: 547261 - RNA, 19 nt, Homo sapiens
  misc_RNA (1)...(19): siRNA sense strand
ugaagcauaugaacauguu

SEQ ID NO: 547262 - RNA, 19 nt, Homo sapiens
  misc_RNA (1)...(19): siRNA sense strand
ggagaaucauuuggaauca

SEQ ID NO: 547263 - RNA, 19 nt, Homo sapiens
  misc_RNA (1)...(19): siRNA sense strand
gacacgagccugaacauug

SEQ ID NO: 547264 - RNA, 19 nt, Homo sapiens
  misc_RNA (1)...(19): siRNA sense strand
gcaguuaggacuucaggaa

SEQ ID NO: 547265 - RNA, 19 nt, Homo sapiens
  misc_RNA (1)...(19): siRNA sense strand
gauacuaccagauguaaau

SEQ ID NO: 547266 - RNA, 19 nt, Homo sapiens
  misc_RNA (1)...(19): siRNA sense strand
gaugaaaugcugucucuuc

SEQ ID NO: 547267 - RNA, 19 nt, Homo sapiens
  misc_RNA (1)...(19): siRNA sense strand
gugaaucauuugcuuauca

SEQ ID NO: 547268 - RNA, 19 nt, Homo sapiens
  misc_RNA (1)...(19): siRNA sense strand
gaauguauuuacuccuaug

SEQ ID NO: 547269 - RNA, 19 nt, Homo sapiens
  misc_RNA (1)...(19): siRNA sense strand
cagaauagguagcaaaauu

SEQ ID NO: 547270 - RNA, 19 nt, Homo sapiens
  misc_RNA (1)...(19): siRNA sense strand
gcauauagaagugauaguu

SEQ ID NO: 547271 - RNA, 19 nt, Homo sapiens
  misc_RNA (1)...(19): siRNA sense strand
agaauuucauggugcauuu

SEQ ID NO: 547272 - RNA, 19 nt, Homo sapiens
  misc_RNA (1)...(19): siRNA sense strand
aaaccuugcugcauggaaa

SEQ ID NO: 547273 - RNA, 19 nt, Homo sapiens
  misc_RNA (1)...(19): siRNA sense strand
caugaagaauugcagaaga

SEQ ID NO: 547274 - RNA, 19 nt, Homo sapiens
  misc_RNA (1)...(19): siRNA sense strand
acauaggccuucuuugcua

SEQ ID NO: 547275 - RNA, 19 nt, Homo sapiens
  misc_RNA (1)...(19): siRNA sense strand
gaaggcccauacauagaug

SEQ ID NO: 547276 - RNA, 19 nt, Homo sapiens
  misc_RNA (1)...(19): siRNA sense strand
uagauuugaucccuucauu

SEQ ID NO: 547277 - RNA, 19 nt, Homo sapiens
  misc_RNA (1)...(19): siRNA sense strand
gaaguuagaauugaagcaa

SEQ ID NO: 547278 - RNA, 19 nt, Homo sapiens
  misc_RNA (1)...(19): siRNA sense strand
gugcugaaguuagaauuga

SEQ ID NO: 547279 - RNA, 19 nt, Homo sapiens
  misc_RNA (1)...(19): siRNA sense strand
agagaugaauugcacuauu

SEQ ID NO: 547280 - RNA, 19 nt, Homo sapiens
  misc_RNA (1)...(19): siRNA sense strand
aagcagcaaugaagcauau

SEQ ID NO: 547281 - RNA, 19 nt, Homo sapiens
  misc_RNA (1)...(19): siRNA sense strand
uuacauuccagaucuguua

SEQ ID NO: 547282 - RNA, 19 nt, Homo sapiens
  misc_RNA (1)...(19): siRNA sense strand
ccaaguagaccagaacuga

SEQ ID NO: 547283 - RNA, 19 nt, Homo sapiens
  misc_RNA (1)...(19): siRNA sense strand
gaugacaguccaccugaaa

SEQ ID NO: 547284 - RNA, 19 nt, Homo sapiens
  misc_RNA (1)...(19): siRNA sense strand
uaagauacuaccagaugua

SEQ ID NO: 547285 - RNA, 19 nt, Homo sapiens
  misc_RNA (1)...(19): siRNA sense strand
gaauaucuacagaaacuuc

SEQ ID NO: 547286 - RNA, 19 nt, Homo sapiens
  misc_RNA (1)...(19): siRNA sense strand
gcagaaauuugcagaaccu

SEQ ID NO: 547287 - RNA, 19 nt, Homo sapiens
  misc_RNA (1)...(19): siRNA sense strand
gcaaugaagcauauagaag

SEQ ID NO: 547288 - RNA, 19 nt, Homo sapiens
  misc_RNA (1)...(19): siRNA sense strand
caaguguauuggugaagaa

SEQ ID NO: 547289 - RNA, 19 nt, Homo sapiens
  misc_RNA (1)...(19): siRNA sense strand
cguuuggucucacucauaa

SEQ ID NO: 547290 - RNA, 19 nt, Homo sapiens
  misc_RNA (1)...(19): siRNA sense strand
auacaaacccaagcaguua

SEQ ID NO: 547291 - RNA, 19 nt, Homo sapiens
  misc_RNA (1)...(19): siRNA sense strand
aaagaaagaauuccugugu

SEQ ID NO: 547292 - RNA, 19 nt, Homo sapiens
  misc_RNA (1)...(19): siRNA sense strand
gcugaaggcccauacauag

SEQ ID NO: 547293 - RNA, 19 nt, Homo sapiens
  misc_RNA (1)...(19): siRNA sense strand
guagaagagauucaaagaa

SEQ ID NO: 547294 - RNA, 19 nt, Homo sapiens
  misc_RNA (1)...(19): siRNA sense strand
gcaacagacugcagaucuc

SEQ ID NO: 547295 - RNA, 19 nt, Homo sapiens
  misc_RNA (1)...(19): siRNA sense strand
caaugaagcauauagaagu

SEQ ID NO: 547296 - RNA, 19 nt, Homo sapiens
  misc_RNA (1)...(19): siRNA sense strand
uaugaaagcaucagacuuc

SEQ ID NO: 547297 - RNA, 19 nt, Homo sapiens
  misc_RNA (1)...(19): siRNA sense strand
augauuaccugauguaugu

SEQ ID NO: 547298 - RNA, 19 nt, Homo sapiens
  misc_RNA (1)...(19): siRNA sense strand
gauuugaucccuucauugu

SEQ ID NO: 547299 - RNA, 19 nt, Homo sapiens
  misc_RNA (1)...(19): siRNA sense strand
ugcagaaccuagaaauaaa

SEQ ID NO: 547300 - RNA, 19 nt, Homo sapiens
  misc_RNA (1)...(19): siRNA sense strand
ugaaccggcuucuccuuug

SEQ ID NO: 547301 - RNA, 19 nt, Homo sapiens
  misc_RNA (1)...(19): siRNA sense strand
gaaaacaacaagaagcuuu

SEQ ID NO: 547302 - RNA, 19 nt, Homo sapiens
  misc_RNA (1)...(19): siRNA sense strand
cauccagaacugaguaaua

SEQ ID NO: 547303 - RNA, 19 nt, Homo sapiens
  misc_RNA (1)...(19): siRNA sense strand
uugcagaaccuagaaauaa

SEQ ID NO: 547304 - RNA, 19 nt, Homo sapiens
  misc_RNA (1)...(19): siRNA sense strand
uaucuucaguguaaacuag

SEQ ID NO: 547305 - RNA, 19 nt, Homo sapiens
  misc_RNA (1)...(19): siRNA sense strand
cugauucucucuuaccaaa

SEQ ID NO: 547306 - RNA, 19 nt, Homo sapiens
  misc_RNA (1)...(19): siRNA sense strand
cgacauaggccuucuuugc

SEQ ID NO: 547307 - RNA, 19 nt, Homo sapiens
  misc_RNA (1)...(19): siRNA sense strand
uaaaccaaguagaccagaa

SEQ ID NO: 547308 - RNA, 19 nt, Homo sapiens
  misc_RNA (1)...(19): siRNA sense strand
gaaaggucagcauuuggaa

SEQ ID NO: 547309 - RNA, 19 nt, Homo sapiens
  misc_RNA (1)...(19): siRNA sense strand
gaguauuucagacaacuuu

SEQ ID NO: 547310 - RNA, 19 nt, Homo sapiens
  misc_RNA (1)...(19): siRNA sense strand
gaaccggcuucuccuuugg

SEQ ID NO: 547311 - RNA, 19 nt, Homo sapiens
  misc_RNA (1)...(19): siRNA sense strand
aagaaagaauuccuguguu

SEQ ID NO: 547312 - RNA, 19 nt, Homo sapiens
  misc_RNA (1)...(19): siRNA sense strand
ggaaguuaccucugugaca

SEQ ID NO: 547313 - RNA, 19 nt, Homo sapiens
  misc_RNA (1)...(19): siRNA sense strand
gaaaccaaguaugaaagca

SEQ ID NO: 547314 - RNA, 19 nt, Homo sapiens
  misc_RNA (1)...(19): siRNA sense strand
ucaaguguauuggugaaga

SEQ ID NO: 547315 - RNA, 19 nt, Homo sapiens
  misc_RNA (1)...(19): siRNA sense strand
uauaauaccugaacucugu

SEQ ID NO: 547316 - RNA, 19 nt, Homo sapiens
  misc_RNA (1)...(19): siRNA sense strand
ggaagaaguucgggaaaga

SEQ ID NO: 547317 - RNA, 19 nt, Homo sapiens
  misc_RNA (1)...(19): siRNA sense strand
acacaaggauguuagaaau

SEQ ID NO: 547318 - RNA, 19 nt, Homo sapiens
  misc_RNA (1)...(19): siRNA sense strand
ggaggaauguugcagaaag

SEQ ID NO: 547319 - RNA, 19 nt, Homo sapiens
  misc_RNA (1)...(19): siRNA sense strand
guaacaggcuacaucuuug

SEQ ID NO: 547320 - RNA, 19 nt, Homo sapiens
  misc_RNA (1)...(19): siRNA sense strand
ggaccaaagagaaucauuu

SEQ ID NO: 547321 - RNA, 19 nt, Homo sapiens
  misc_RNA (1)...(19): siRNA sense strand
agaaagaacugaaaaggua

SEQ ID NO: 547322 - RNA, 19 nt, Homo sapiens
  misc_RNA (1)...(19): siRNA sense strand
cgacuggacagacuuauuu

SEQ ID NO: 547323 - RNA, 19 nt, Homo sapiens
  misc_RNA (1)...(19): siRNA sense strand
ggagagggaccaaagagaa

SEQ ID NO: 547324 - RNA, 19 nt, Homo sapiens
  misc_RNA (1)...(19): siRNA sense strand
gaggaauguugcagaaaga

SEQ ID NO: 547325 - RNA, 19 nt, Homo sapiens
  misc_RNA (1)...(19): siRNA sense strand
cuacaucuuugcuuuguug

SEQ ID NO: 547326 - RNA, 19 nt, Homo sapiens
  misc_RNA (1)...(19): siRNA sense strand
aaagauaccagcugcauga

SEQ ID NO: 547327 - RNA, 19 nt, Homo sapiens
  misc_RNA (1)...(19): siRNA sense strand
gaagcuguguugccaaugg

SEQ ID NO: 547328 - RNA, 19 nt, Homo sapiens
  misc_RNA (1)...(19): siRNA sense strand
ugucagaaauauccagauu

SEQ ID NO: 547329 - RNA, 19 nt, Homo sapiens
  misc_RNA (1)...(19): siRNA sense strand
gaacugaaaagguauauga

SEQ ID NO: 547330 - RNA, 19 nt, Homo sapiens
  misc_RNA (1)...(19): siRNA sense strand
acaaggauguuagaaaugu

SEQ ID NO: 547331 - RNA, 19 nt, Homo sapiens
  misc_RNA (1)...(19): siRNA sense strand
cugaauaccucccuuacug

SEQ ID NO: 547332 - RNA, 19 nt, Homo sapiens
  misc_RNA (1)...(19): siRNA sense strand
gaauaccucccuuacugaa

SEQ ID NO: 547333 - RNA, 19 nt, Homo sapiens
  misc_RNA (1)...(19): siRNA sense strand
gggugagaauaaugagaua

SEQ ID NO: 547334 - RNA, 19 nt, Homo sapiens
  misc_RNA (1)...(19): siRNA sense strand
caggcuacaucuuugcuuu

SEQ ID NO: 547335 - RNA, 19 nt, Homo sapiens
  misc_RNA (1)...(19): siRNA sense strand
uaugugagccuucaguaaa

SEQ ID NO: 547336 - RNA, 19 nt, Homo sapiens
  misc_RNA (1)...(19): siRNA sense strand
agaaaugucuuaguucaag

SEQ ID NO: 547337 - RNA, 19 nt, Homo sapiens
  misc_RNA (1)...(19): siRNA sense strand
gaaaacauccauaacauag

SEQ ID NO: 547338 - RNA, 19 nt, Homo sapiens
  misc_RNA (1)...(19): siRNA sense strand
caacuuccucuuccucauu

SEQ ID NO: 547339 - RNA, 19 nt, Homo sapiens
  misc_RNA (1)...(19): siRNA sense strand
ggacaaacgacuggacaga

SEQ ID NO: 547340 - RNA, 19 nt, Homo sapiens
  misc_RNA (1)...(19): siRNA sense strand
gacuccagauucuaucauu

SEQ ID NO: 547341 - RNA, 19 nt, Homo sapiens
  misc_RNA (1)...(19): siRNA sense strand
aguaacaggcuacaucuuu

SEQ ID NO: 547342 - RNA, 19 nt, Homo sapiens
  misc_RNA (1)...(19): siRNA sense strand
gaagcagccaguugugguu

SEQ ID NO: 547343 - RNA, 19 nt, Homo sapiens
  misc_RNA (1)...(19): siRNA sense strand
ggaugacuccagauucuau

SEQ ID NO: 547344 - RNA, 19 nt, Homo sapiens
  misc_RNA (1)...(19): siRNA sense strand
aaacgacuggacagacuua

SEQ ID NO: 547345 - RNA, 19 nt, Homo sapiens
  misc_RNA (1)...(19): siRNA sense strand
ggaaagauaccagcugcau

SEQ ID NO: 547346 - RNA, 19 nt, Homo sapiens
  misc_RNA (1)...(19): siRNA sense strand
gagagggaccaaagagaau

SEQ ID NO: 547347 - RNA, 19 nt, Homo sapiens
  misc_RNA (1)...(19): siRNA sense strand
caugacagggugcgucuuu

SEQ ID NO: 547348 - RNA, 19 nt, Homo sapiens
  misc_RNA (1)...(19): siRNA sense strand
gguuguaaguaccagaguu

SEQ ID NO: 547349 - RNA, 19 nt, Homo sapiens
  misc_RNA (1)...(19): siRNA sense strand
uggacagacuuauuucuca

SEQ ID NO: 547350 - RNA, 19 nt, Homo sapiens
  misc_RNA (1)...(19): siRNA sense strand
ggaggagagggaccaaaga

SEQ ID NO: 547351 - RNA, 19 nt, Homo sapiens
  misc_RNA (1)...(19): siRNA sense strand
gaagaaguucgggaaagau

SEQ ID NO: 547352 - RNA, 19 nt, Homo sapiens
  misc_RNA (1)...(19): siRNA sense strand
ggauguuagaaaugucuua

SEQ ID NO: 547353 - RNA, 19 nt, Homo sapiens
  misc_RNA (1)...(19): siRNA sense strand
aagaaguucgggaaagaua

SEQ ID NO: 547354 - RNA, 19 nt, Homo sapiens
  misc_RNA (1)...(19): siRNA sense strand
cgauuugcuuagugguaua

SEQ ID NO: 547355 - RNA, 19 nt, Homo sapiens
  misc_RNA (1)...(19): siRNA sense strand
gugccuggacuaauaacua

SEQ ID NO: 547356 - RNA, 19 nt, Homo sapiens
  misc_RNA (1)...(19): siRNA sense strand
gggaucgauuugcuuagug

SEQ ID NO: 547357 - RNA, 19 nt, Homo sapiens
  misc_RNA (1)...(19): siRNA sense strand
acaaacgacuggacagacu

SEQ ID NO: 547358 - RNA, 19 nt, Homo sapiens
  misc_RNA (1)...(19): siRNA sense strand
ugaauaccucccuuacuga

SEQ ID NO: 547359 - RNA, 19 nt, Homo sapiens
  misc_RNA (1)...(19): siRNA sense strand
gagaaucauuuuggaagaa

SEQ ID NO: 547360 - RNA, 19 nt, Homo sapiens
  misc_RNA (1)...(19): siRNA sense strand
gaccaaagagaaucauuuu

SEQ ID NO: 547361 - RNA, 19 nt, Homo sapiens
  misc_RNA (1)...(19): siRNA sense strand
cagaaaacauccauaacau

SEQ ID NO: 547362 - RNA, 19 nt, Homo sapiens
  misc_RNA (1)...(19): siRNA sense strand
gacauugccagcuccagaa

SEQ ID NO: 547363 - RNA, 19 nt, Homo sapiens
  misc_RNA (1)...(19): siRNA sense strand
ugccuggacuaauaacuau

SEQ ID NO: 547364 - RNA, 19 nt, Homo sapiens
  misc_RNA (1)...(19): siRNA sense strand
uggaagcuguguugccaau

SEQ ID NO: 547365 - RNA, 19 nt, Homo sapiens
  misc_RNA (1)...(19): siRNA sense strand
ggcuacaucuuugcuuugu

SEQ ID NO: 547366 - RNA, 19 nt, Homo sapiens
  misc_RNA (1)...(19): siRNA sense strand
caguugugguuuacagguu

SEQ ID NO: 547367 - RNA, 19 nt, Homo sapiens
  misc_RNA (1)...(19): siRNA sense strand
gagaauaaugagauaucug

SEQ ID NO: 547368 - RNA, 19 nt, Homo sapiens
  misc_RNA (1)...(19): siRNA sense strand
cggggugccuggacuaaua

SEQ ID NO: 547369 - RNA, 19 nt, Homo sapiens
  misc_RNA (1)...(19): siRNA sense strand
ucgauuugcuuagugguau

SEQ ID NO: 547370 - RNA, 19 nt, Homo sapiens
  misc_RNA (1)...(19): siRNA sense strand
gaauguugcagaaagaacu

SEQ ID NO: 547371 - RNA, 19 nt, Homo sapiens
  misc_RNA (1)...(19): siRNA sense strand
cuggaggaauguugcagaa

SEQ ID NO: 547372 - RNA, 19 nt, Homo sapiens
  misc_RNA (1)...(19): siRNA sense strand
gaggagagggaccaaagag

SEQ ID NO: 547373 - RNA, 19 nt, Homo sapiens
  misc_RNA (1)...(19): siRNA sense strand
gcuacaucuuugcuuuguu

SEQ ID NO: 547374 - RNA, 19 nt, Homo sapiens
  misc_RNA (1)...(19): siRNA sense strand
caaggauguuagaaauguc

SEQ ID NO: 547375 - RNA, 19 nt, Homo sapiens
  misc_RNA (1)...(19): siRNA sense strand
uauaugaccggguaucagu

SEQ ID NO: 547376 - RNA, 19 nt, Homo sapiens
  misc_RNA (1)...(19): siRNA sense strand
guuguaaguaccagaguug

SEQ ID NO: 547377 - RNA, 19 nt, Homo sapiens
  misc_RNA (1)...(19): siRNA sense strand
guuagaaaugucuuaguuc

SEQ ID NO: 547378 - RNA, 19 nt, Homo sapiens
  misc_RNA (1)...(19): siRNA sense strand
gugagaauaaugagauauc

SEQ ID NO: 547379 - RNA, 19 nt, Homo sapiens
  misc_RNA (1)...(19): siRNA sense strand
aacuuccucuuccucauuu

SEQ ID NO: 547380 - RNA, 19 nt, Homo sapiens
  misc_RNA (1)...(19): siRNA sense strand
uggaagaaguucgggaaag

SEQ ID NO: 547381 - RNA, 19 nt, Homo sapiens
  misc_RNA (1)...(19): siRNA sense strand
gcagccaguugugguuuac

SEQ ID NO: 547382 - RNA, 19 nt, Homo sapiens
  misc_RNA (1)...(19): siRNA sense strand
ccugaggugcuuccagaaa

SEQ ID NO: 547383 - RNA, 19 nt, Homo sapiens
  misc_RNA (1)...(19): siRNA sense strand
aaugagauaucugaaacca

SEQ ID NO: 547384 - RNA, 19 nt, Homo sapiens
  misc_RNA (1)...(19): siRNA sense strand
ccagaaaacauccauaaca

SEQ ID NO: 547385 - RNA, 19 nt, Homo sapiens
  misc_RNA (1)...(19): siRNA sense strand
agcagccaguugugguuua

SEQ ID NO: 547386 - RNA, 19 nt, Homo sapiens
  misc_RNA (1)...(19): siRNA sense strand
gguauaugaccggguauca

SEQ ID NO: 547387 - RNA, 19 nt, Homo sapiens
  misc_RNA (1)...(19): siRNA sense strand
uuaugugagccuucaguaa

SEQ ID NO: 547388 - RNA, 19 nt, Homo sapiens
  misc_RNA (1)...(19): siRNA sense strand
gauuugcuuagugguauaa

SEQ ID NO: 547389 - RNA, 19 nt, Homo sapiens
  misc_RNA (1)...(19): siRNA sense strand
caaacgacuggacagacuu

SEQ ID NO: 547390 - RNA, 19 nt, Homo sapiens
  misc_RNA (1)...(19): siRNA sense strand
uuugggagcuuuagaacac

SEQ ID NO: 547391 - RNA, 19 nt, Homo sapiens
  misc_RNA (1)...(19): siRNA sense strand
gagggaccaaagagaauca

SEQ ID NO: 547392 - RNA, 19 nt, Homo sapiens
  misc_RNA (1)...(19): siRNA sense strand
cacaaggauguuagaaaug

SEQ ID NO: 547393 - RNA, 19 nt, Homo sapiens
  misc_RNA (1)...(19): siRNA sense strand
cuccagauucuaucauuga

SEQ ID NO: 547394 - RNA, 19 nt, Homo sapiens
  misc_RNA (1)...(19): siRNA sense strand
cgauuugcuuagugguaua

SEQ ID NO: 547395 - RNA, 19 nt, Homo sapiens
  misc_RNA (1)...(19): siRNA sense strand
gggaucgauuugcuuagug

SEQ ID NO: 547396 - RNA, 19 nt, Homo sapiens
  misc_RNA (1)...(19): siRNA sense strand
ucgauuugcuuagugguau

SEQ ID NO: 547397 - RNA, 19 nt, Homo sapiens
  misc_RNA (1)...(19): siRNA sense strand
gauuugcuuagugguauaa

SEQ ID NO: 547398 - RNA, 19 nt, Homo sapiens
  misc_RNA (1)...(19): siRNA sense strand
uauaauaccugaacucugu

SEQ ID NO: 547399 - RNA, 19 nt, Homo sapiens
  misc_RNA (1)...(19): siRNA sense strand
ggaagaaguucgggaaaga

SEQ ID NO: 547400 - RNA, 19 nt, Homo sapiens
  misc_RNA (1)...(19): siRNA sense strand
acacaaggauguuagaaau

SEQ ID NO: 547401 - RNA, 19 nt, Homo sapiens
  misc_RNA (1)...(19): siRNA sense strand
ggaggaauguugcagaaag

SEQ ID NO: 547402 - RNA, 19 nt, Homo sapiens
  misc_RNA (1)...(19): siRNA sense strand
guaacaggcuacaucuuug

SEQ ID NO: 547403 - RNA, 19 nt, Homo sapiens
  misc_RNA (1)...(19): siRNA sense strand
ggaccaaagagaaucauuu

SEQ ID NO: 547404 - RNA, 19 nt, Homo sapiens
  misc_RNA (1)...(19): siRNA sense strand
agaaagaacugaaaaggua

SEQ ID NO: 547405 - RNA, 19 nt, Homo sapiens
  misc_RNA (1)...(19): siRNA sense strand
cgacuggacagacuuauuu

SEQ ID NO: 547406 - RNA, 19 nt, Homo sapiens
  misc_RNA (1)...(19): siRNA sense strand
ggagagggaccaaagagaa

SEQ ID NO: 547407 - RNA, 19 nt, Homo sapiens
  misc_RNA (1)...(19): siRNA sense strand
gaggaauguugcagaaaga

SEQ ID NO: 547408 - RNA, 19 nt, Homo sapiens
  misc_RNA (1)...(19): siRNA sense strand
cuacaucuuugcuuuguug

SEQ ID NO: 547409 - RNA, 19 nt, Homo sapiens
  misc_RNA (1)...(19): siRNA sense strand
aaagauaccagcugcauga

SEQ ID NO: 547410 - RNA, 19 nt, Homo sapiens
  misc_RNA (1)...(19): siRNA sense strand
gaagcuguguugccaaugg

SEQ ID NO: 547411 - RNA, 19 nt, Homo sapiens
  misc_RNA (1)...(19): siRNA sense strand
ugucagaaauauccagauu

SEQ ID NO: 547412 - RNA, 19 nt, Homo sapiens
  misc_RNA (1)...(19): siRNA sense strand
gaacugaaaagguauauga

SEQ ID NO: 547413 - RNA, 19 nt, Homo sapiens
  misc_RNA (1)...(19): siRNA sense strand
acaaggauguuagaaaugu

SEQ ID NO: 547414 - RNA, 19 nt, Homo sapiens
  misc_RNA (1)...(19): siRNA sense strand
cugaauaccucccuuacug

SEQ ID NO: 547415 - RNA, 19 nt, Homo sapiens
  misc_RNA (1)...(19): siRNA sense strand
gaauaccucccuuacugaa

SEQ ID NO: 547416 - RNA, 19 nt, Homo sapiens
  misc_RNA (1)...(19): siRNA sense strand
gggugagaauaaugagaua

SEQ ID NO: 547417 - RNA, 19 nt, Homo sapiens
  misc_RNA (1)...(19): siRNA sense strand
caggcuacaucuuugcuuu

SEQ ID NO: 547418 - RNA, 19 nt, Homo sapiens
  misc_RNA (1)...(19): siRNA sense strand
uaugugagccuucaguaaa

SEQ ID NO: 547419 - RNA, 19 nt, Homo sapiens
  misc_RNA (1)...(19): siRNA sense strand
agaaaugucuuaguucaag

SEQ ID NO: 547420 - RNA, 19 nt, Homo sapiens
  misc_RNA (1)...(19): siRNA sense strand
gaaaacauccauaacauag

SEQ ID NO: 547421 - RNA, 19 nt, Homo sapiens
  misc_RNA (1)...(19): siRNA sense strand
caacuuccucuuccucauu

SEQ ID NO: 547422 - RNA, 19 nt, Homo sapiens
  misc_RNA (1)...(19): siRNA sense strand
ggacaaacgacuggacaga

SEQ ID NO: 547423 - RNA, 19 nt, Homo sapiens
  misc_RNA (1)...(19): siRNA sense strand
gacuccagauucuaucauu

SEQ ID NO: 547424 - RNA, 19 nt, Homo sapiens
  misc_RNA (1)...(19): siRNA sense strand
aguaacaggcuacaucuuu

SEQ ID NO: 547425 - RNA, 19 nt, Homo sapiens
  misc_RNA (1)...(19): siRNA sense strand
gaagcagccaguugugguu

SEQ ID NO: 547426 - RNA, 19 nt, Homo sapiens
  misc_RNA (1)...(19): siRNA sense strand
ggaugacuccagauucuau

SEQ ID NO: 547427 - RNA, 19 nt, Homo sapiens
  misc_RNA (1)...(19): siRNA sense strand
aaacgacuggacagacuua

SEQ ID NO: 547428 - RNA, 19 nt, Homo sapiens
  misc_RNA (1)...(19): siRNA sense strand
ggaaagauaccagcugcau

SEQ ID NO: 547429 - RNA, 19 nt, Homo sapiens
  misc_RNA (1)...(19): siRNA sense strand
gagagggaccaaagagaau

SEQ ID NO: 547430 - RNA, 19 nt, Homo sapiens
  misc_RNA (1)...(19): siRNA sense strand
caugacagggugcgucuuu

SEQ ID NO: 547431 - RNA, 19 nt, Homo sapiens
  misc_RNA (1)...(19): siRNA sense strand
gguuguaaguaccagaguu

SEQ ID NO: 547432 - RNA, 19 nt, Homo sapiens
  misc_RNA (1)...(19): siRNA sense strand
uggacagacuuauuucuca

SEQ ID NO: 547433 - RNA, 19 nt, Homo sapiens
  misc_RNA (1)...(19): siRNA sense strand
ggaggagagggaccaaaga

SEQ ID NO: 547434 - RNA, 19 nt, Homo sapiens
  misc_RNA (1)...(19): siRNA sense strand
gaagaaguucgggaaagau

SEQ ID NO: 547435 - RNA, 19 nt, Homo sapiens
  misc_RNA (1)...(19): siRNA sense strand
ggauguuagaaaugucuua

SEQ ID NO: 547436 - RNA, 19 nt, Homo sapiens
  misc_RNA (1)...(19): siRNA sense strand
aagaaguucgggaaagaua

SEQ ID NO: 547437 - RNA, 19 nt, Homo sapiens
  misc_RNA (1)...(19): siRNA sense strand
cgauuugcuuagugguaua

SEQ ID NO: 547438 - RNA, 19 nt, Homo sapiens
  misc_RNA (1)...(19): siRNA sense strand
gugccuggacuaauaacua

SEQ ID NO: 547439 - RNA, 19 nt, Homo sapiens
  misc_RNA (1)...(19): siRNA sense strand
gggaucgauuugcuuagug

SEQ ID NO: 547440 - RNA, 19 nt, Homo sapiens
  misc_RNA (1)...(19): siRNA sense strand
acaaacgacuggacagacu

SEQ ID NO: 547441 - RNA, 19 nt, Homo sapiens
  misc_RNA (1)...(19): siRNA sense strand
ugaauaccucccuuacuga

SEQ ID NO: 547442 - RNA, 19 nt, Homo sapiens
  misc_RNA (1)...(19): siRNA sense strand
gagaaucauuuuggaagaa

SEQ ID NO: 547443 - RNA, 19 nt, Homo sapiens
  misc_RNA (1)...(19): siRNA sense strand
gaccaaagagaaucauuuu

SEQ ID NO: 547444 - RNA, 19 nt, Homo sapiens
  misc_RNA (1)...(19): siRNA sense strand
cagaaaacauccauaacau

SEQ ID NO: 547445 - RNA, 19 nt, Homo sapiens
  misc_RNA (1)...(19): siRNA sense strand
gacauugccagcuccagaa

SEQ ID NO: 547446 - RNA, 19 nt, Homo sapiens
  misc_RNA (1)...(19): siRNA sense strand
ugccuggacuaauaacuau

SEQ ID NO: 547447 - RNA, 19 nt, Homo sapiens
  misc_RNA (1)...(19): siRNA sense strand
uggaagcuguguugccaau

SEQ ID NO: 547448 - RNA, 19 nt, Homo sapiens
  misc_RNA (1)...(19): siRNA sense strand
ggcuacaucuuugcuuugu

SEQ ID NO: 547449 - RNA, 19 nt, Homo sapiens
  misc_RNA (1)...(19): siRNA sense strand
caguugugguuuacagguu

SEQ ID NO: 547450 - RNA, 19 nt, Homo sapiens
  misc_RNA (1)...(19): siRNA sense strand
gagaauaaugagauaucug

SEQ ID NO: 547451 - RNA, 19 nt, Homo sapiens
  misc_RNA (1)...(19): siRNA sense strand
cggggugccuggacuaaua

SEQ ID NO: 547452 - RNA, 19 nt, Homo sapiens
  misc_RNA (1)...(19): siRNA sense strand
ucgauuugcuuagugguau

SEQ ID NO: 547453 - RNA, 19 nt, Homo sapiens
  misc_RNA (1)...(19): siRNA sense strand
gaauguugcagaaagaacu

SEQ ID NO: 547454 - RNA, 19 nt, Homo sapiens
  misc_RNA (1)...(19): siRNA sense strand
cuggaggaauguugcagaa

SEQ ID NO: 547455 - RNA, 19 nt, Homo sapiens
  misc_RNA (1)...(19): siRNA sense strand
gaggagagggaccaaagag

SEQ ID NO: 547456 - RNA, 19 nt, Homo sapiens
  misc_RNA (1)...(19): siRNA sense strand
gcuacaucuuugcuuuguu

SEQ ID NO: 547457 - RNA, 19 nt, Homo sapiens
  misc_RNA (1)...(19): siRNA sense strand
caaggauguuagaaauguc

SEQ ID NO: 547458 - RNA, 19 nt, Homo sapiens
  misc_RNA (1)...(19): siRNA sense strand
uauaugaccggguaucagu

SEQ ID NO: 547459 - RNA, 19 nt, Homo sapiens
  misc_RNA (1)...(19): siRNA sense strand
guuguaaguaccagaguug

SEQ ID NO: 547460 - RNA, 19 nt, Homo sapiens
  misc_RNA (1)...(19): siRNA sense strand
guuagaaaugucuuaguuc

SEQ ID NO: 547461 - RNA, 19 nt, Homo sapiens
  misc_RNA (1)...(19): siRNA sense strand
gugagaauaaugagauauc

SEQ ID NO: 547462 - RNA, 19 nt, Homo sapiens
  misc_RNA (1)...(19): siRNA sense strand
aacuuccucuuccucauuu

SEQ ID NO: 547463 - RNA, 19 nt, Homo sapiens
  misc_RNA (1)...(19): siRNA sense strand
uggaagaaguucgggaaag

SEQ ID NO: 547464 - RNA, 19 nt, Homo sapiens
  misc_RNA (1)...(19): siRNA sense strand
gcagccaguugugguuuac

SEQ ID NO: 547465 - RNA, 19 nt, Homo sapiens
  misc_RNA (1)...(19): siRNA sense strand
ccugaggugcuuccagaaa

SEQ ID NO: 547466 - RNA, 19 nt, Homo sapiens
  misc_RNA (1)...(19): siRNA sense strand
aaugagauaucugaaacca

SEQ ID NO: 547467 - RNA, 19 nt, Homo sapiens
  misc_RNA (1)...(19): siRNA sense strand
ccagaaaacauccauaaca

SEQ ID NO: 547468 - RNA, 19 nt, Homo sapiens
  misc_RNA (1)...(19): siRNA sense strand
agcagccaguugugguuua

SEQ ID NO: 547469 - RNA, 19 nt, Homo sapiens
  misc_RNA (1)...(19): siRNA sense strand
gguauaugaccggguauca

SEQ ID NO: 547470 - RNA, 19 nt, Homo sapiens
  misc_RNA (1)...(19): siRNA sense strand
uuaugugagccuucaguaa

SEQ ID NO: 547471 - RNA, 19 nt, Homo sapiens
  misc_RNA (1)...(19): siRNA sense strand
gauuugcuuagugguauaa

SEQ ID NO: 547472 - RNA, 19 nt, Homo sapiens
  misc_RNA (1)...(19): siRNA sense strand
caaacgacuggacagacuu

SEQ ID NO: 547473 - RNA, 19 nt, Homo sapiens
  misc_RNA (1)...(19): siRNA sense strand
uuugggagcuuuagaacac

SEQ ID NO: 547474 - RNA, 19 nt, Homo sapiens
  misc_RNA (1)...(19): siRNA sense strand
gagggaccaaagagaauca

SEQ ID NO: 547475 - RNA, 19 nt, Homo sapiens
  misc_RNA (1)...(19): siRNA sense strand
cacaaggauguuagaaaug

SEQ ID NO: 547476 - RNA, 19 nt, Homo sapiens
  misc_RNA (1)...(19): siRNA sense strand
cuccagauucuaucauuga

SEQ ID NO: 547477 - RNA, 19 nt, Homo sapiens
  misc_RNA (1)...(19): siRNA sense strand
cgauuugcuuagugguaua

SEQ ID NO: 547478 - RNA, 19 nt, Homo sapiens
  misc_RNA (1)...(19): siRNA sense strand
gggaucgauuugcuuagug

SEQ ID NO: 547479 - RNA, 19 nt, Homo sapiens
  misc_RNA (1)...(19): siRNA sense strand
ucgauuugcuuagugguau

SEQ ID NO: 547480 - RNA, 19 nt, Homo sapiens
  misc_RNA (1)...(19): siRNA sense strand
gauuugcuuagugguauaa

SEQ ID NO: 547481 - RNA, 19 nt, Homo sapiens
  misc_RNA (1)...(19): siRNA sense strand
uaaagacccugcagaggaa

SEQ ID NO: 547482 - RNA, 19 nt, Homo sapiens
  misc_RNA (1)...(19): siRNA sense strand
ugaaggaggugaaggaaca

SEQ ID NO: 547483 - RNA, 19 nt, Homo sapiens
  misc_RNA (1)...(19): siRNA sense strand
caacauggaugaaaaugaa

SEQ ID NO: 547484 - RNA, 19 nt, Homo sapiens
  misc_RNA (1)...(19): siRNA sense strand
gaaaagagacaccauaaau

SEQ ID NO: 547485 - RNA, 19 nt, Homo sapiens
  misc_RNA (1)...(19): siRNA sense strand
agagacaaguugagaaaga

SEQ ID NO: 547486 - RNA, 19 nt, Homo sapiens
  misc_RNA (1)...(19): siRNA sense strand
ccguggagcugaagaagaa

SEQ ID NO: 547487 - RNA, 19 nt, Homo sapiens
  misc_RNA (1)...(19): siRNA sense strand
gggagcaggugguggaaga

SEQ ID NO: 547488 - RNA, 19 nt, Homo sapiens
  misc_RNA (1)...(19): siRNA sense strand
agaccaaccuggagaggaa

SEQ ID NO: 547489 - RNA, 19 nt, Homo sapiens
  misc_RNA (1)...(19): siRNA sense strand
agaaagaggaaaccaauga

SEQ ID NO: 547490 - RNA, 19 nt, Homo sapiens
  misc_RNA (1)...(19): siRNA sense strand
ggagaaaccagcagaaacu

SEQ ID NO: 547491 - RNA, 19 nt, Homo sapiens
  misc_RNA (1)...(19): siRNA sense strand
ggaaugacagaaacauaga

SEQ ID NO: 547492 - RNA, 19 nt, Homo sapiens
  misc_RNA (1)...(19): siRNA sense strand
aaagagacaaguugagaaa

SEQ ID NO: 547493 - RNA, 19 nt, Homo sapiens
  misc_RNA (1)...(19): siRNA sense strand
gaauagaagaggucaccaa

SEQ ID NO: 547494 - RNA, 19 nt, Homo sapiens
  misc_RNA (1)...(19): siRNA sense strand
gaaacgugcuugguaacag

SEQ ID NO: 547495 - RNA, 19 nt, Homo sapiens
  misc_RNA (1)...(19): siRNA sense strand
gagaagaugacuacaacau

SEQ ID NO: 547496 - RNA, 19 nt, Homo sapiens
  misc_RNA (1)...(19): siRNA sense strand
gaggagaagaugacuacaa

SEQ ID NO: 547497 - RNA, 19 nt, Homo sapiens
  misc_RNA (1)...(19): siRNA sense strand
gggagcagcuugacaaaau

SEQ ID NO: 547498 - RNA, 19 nt, Homo sapiens
  misc_RNA (1)...(19): siRNA sense strand
gaccugagccagugcauca

SEQ ID NO: 547499 - RNA, 19 nt, Homo sapiens
  misc_RNA (1)...(19): siRNA sense strand
caaagagacaaguugagaa

SEQ ID NO: 547500 - RNA, 19 nt, Homo sapiens
  misc_RNA (1)...(19): siRNA sense strand
gggaaugacagaaacauag

SEQ ID NO: 547501 - RNA, 19 nt, Homo sapiens
  misc_RNA (1)...(19): siRNA sense strand
agggaaacgugcuugguaa

SEQ ID NO: 547502 - RNA, 19 nt, Homo sapiens
  misc_RNA (1)...(19): siRNA sense strand
gagaggagaagaugacuac

SEQ ID NO: 547503 - RNA, 19 nt, Homo sapiens
  misc_RNA (1)...(19): siRNA sense strand
agggagagcuggagaagca

SEQ ID NO: 547504 - RNA, 19 nt, Homo sapiens
  misc_RNA (1)...(19): siRNA sense strand
ccagagaccugagugaaaa

SEQ ID NO: 547505 - RNA, 19 nt, Homo sapiens
  misc_RNA (1)...(19): siRNA sense strand
ggaugaaaaugaagcagaa

SEQ ID NO: 547506 - RNA, 19 nt, Homo sapiens
  misc_RNA (1)...(19): siRNA sense strand
gaaacugagaggagaagau

SEQ ID NO: 547507 - RNA, 19 nt, Homo sapiens
  misc_RNA (1)...(19): siRNA sense strand
gagacaaguugagaaagag

SEQ ID NO: 547508 - RNA, 19 nt, Homo sapiens
  misc_RNA (1)...(19): siRNA sense strand
gcggaaucauacacucuga

SEQ ID NO: 547509 - RNA, 19 nt, Homo sapiens
  misc_RNA (1)...(19): siRNA sense strand
agauccagguggugaauga

SEQ ID NO: 547510 - RNA, 19 nt, Homo sapiens
  misc_RNA (1)...(19): siRNA sense strand
ugagaaagaggaaaccaau

SEQ ID NO: 547511 - RNA, 19 nt, Homo sapiens
  misc_RNA (1)...(19): siRNA sense strand
gugaggagcgaauagaaga

SEQ ID NO: 547512 - RNA, 19 nt, Homo sapiens
  misc_RNA (1)...(19): siRNA sense strand
gcagaaacugagaggagaa

SEQ ID NO: 547513 - RNA, 19 nt, Homo sapiens
  misc_RNA (1)...(19): siRNA sense strand
gagcgagaccagcuuguca

SEQ ID NO: 547514 - RNA, 19 nt, Homo sapiens
  misc_RNA (1)...(19): siRNA sense strand
gaaagaggaaaccaaugag

SEQ ID NO: 547515 - RNA, 19 nt, Homo sapiens
  misc_RNA (1)...(19): siRNA sense strand
gagaaagaggaaaccaaug

SEQ ID NO: 547516 - RNA, 19 nt, Homo sapiens
  misc_RNA (1)...(19): siRNA sense strand
ggaaacgugcuugguaaca

SEQ ID NO: 547517 - RNA, 19 nt, Homo sapiens
  misc_RNA (1)...(19): siRNA sense strand
gggcuucaacuacuggauu

SEQ ID NO: 547518 - RNA, 19 nt, Homo sapiens
  misc_RNA (1)...(19): siRNA sense strand
gccagugcaucaaucagau

SEQ ID NO: 547519 - RNA, 19 nt, Homo sapiens
  misc_RNA (1)...(19): siRNA sense strand
ggcuucaacuacuggauug

SEQ ID NO: 547520 - RNA, 19 nt, Homo sapiens
  misc_RNA (1)...(19): siRNA sense strand
aauagaagaggucaccaaa

SEQ ID NO: 547521 - RNA, 19 nt, Homo sapiens
  misc_RNA (1)...(19): siRNA sense strand
aaacugagaggagaagaug

SEQ ID NO: 547522 - RNA, 19 nt, Homo sapiens
  misc_RNA (1)...(19): siRNA sense strand
gcaggugguggaagacaga

SEQ ID NO: 547523 - RNA, 19 nt, Homo sapiens
  misc_RNA (1)...(19): siRNA sense strand
gaugaaggaggugaaggaa

SEQ ID NO: 547524 - RNA, 19 nt, Homo sapiens
  misc_RNA (1)...(19): siRNA sense strand
gagacaccauaaauuuacu

SEQ ID NO: 547525 - RNA, 19 nt, Homo sapiens
  misc_RNA (1)...(19): siRNA sense strand
aggagaagaugacuacaac

SEQ ID NO: 547526 - RNA, 19 nt, Homo sapiens
  misc_RNA (1)...(19): siRNA sense strand
aaagaggaaaccaaugaga

SEQ ID NO: 547527 - RNA, 19 nt, Homo sapiens
  misc_RNA (1)...(19): siRNA sense strand
uaacagcaagucccagaca

SEQ ID NO: 547528 - RNA, 19 nt, Homo sapiens
  misc_RNA (1)...(19): siRNA sense strand
aagggaaacgugcuuggua

SEQ ID NO: 547529 - RNA, 19 nt, Homo sapiens
  misc_RNA (1)...(19): siRNA sense strand
ggaggugaaggaacagugu

SEQ ID NO: 547530 - RNA, 19 nt, Homo sapiens
  misc_RNA (1)...(19): siRNA sense strand
gaagggaaacgugcuuggu

SEQ ID NO: 547531 - RNA, 19 nt, Homo sapiens
  misc_RNA (1)...(19): siRNA sense strand
gaaugacagaaacauagau

SEQ ID NO: 547532 - RNA, 19 nt, Homo sapiens
  misc_RNA (1)...(19): siRNA sense strand
ccaggaaaauccagagaug

SEQ ID NO: 547533 - RNA, 19 nt, Homo sapiens
  misc_RNA (1)...(19): siRNA sense strand
gauucaaagagacaaguug

SEQ ID NO: 547534 - RNA, 19 nt, Homo sapiens
  misc_RNA (1)...(19): siRNA sense strand
ggauucaaagagacaaguu

SEQ ID NO: 547535 - RNA, 19 nt, Homo sapiens
  misc_RNA (1)...(19): siRNA sense strand
cugcaagaccaguuaaaga

SEQ ID NO: 547536 - RNA, 19 nt, Homo sapiens
  misc_RNA (1)...(19): siRNA sense strand
uggcagggaaugacagaaa

SEQ ID NO: 547537 - RNA, 19 nt, Homo sapiens
  misc_RNA (1)...(19): siRNA sense strand
agaagaugacuacaacaug

SEQ ID NO: 547538 - RNA, 19 nt, Homo sapiens
  misc_RNA (1)...(19): siRNA sense strand
gauguccuccaguuucaga

SEQ ID NO: 547539 - RNA, 19 nt, Homo sapiens
  misc_RNA (1)...(19): siRNA sense strand
gggcgucgcagcaugaagu

SEQ ID NO: 547540 - RNA, 19 nt, Homo sapiens
  misc_RNA (1)...(19): siRNA sense strand
cagaaaagagacaccauaa

SEQ ID NO: 547541 - RNA, 19 nt, Homo sapiens
  misc_RNA (1)...(19): siRNA sense strand
gggagaaaccagcagaaac

SEQ ID NO: 547542 - RNA, 19 nt, Homo sapiens
  misc_RNA (1)...(19): siRNA sense strand
gcagggaaugacagaaaca

SEQ ID NO: 547543 - RNA, 19 nt, Homo sapiens
  misc_RNA (1)...(19): siRNA sense strand
agagacaccauaaauuuac

SEQ ID NO: 547544 - RNA, 19 nt, Homo sapiens
  misc_RNA (1)...(19): siRNA sense strand
guccuccaguuucagaaga

SEQ ID NO: 547545 - RNA, 19 nt, Homo sapiens
  misc_RNA (1)...(19): siRNA sense strand
ggcagggaaugacagaaac

SEQ ID NO: 547546 - RNA, 19 nt, Homo sapiens
  misc_RNA (1)...(19): siRNA sense strand
gacuacaacauggaugaaa

SEQ ID NO: 547547 - RNA, 19 nt, Homo sapiens
  misc_RNA (1)...(19): siRNA sense strand
agaaaccagcagaaacuga

SEQ ID NO: 547548 - RNA, 19 nt, Homo sapiens
  misc_RNA (1)...(19): siRNA sense strand
agaggaaaccaaugagauc

SEQ ID NO: 547549 - RNA, 19 nt, Homo sapiens
  misc_RNA (1)...(19): siRNA sense strand
gaaacgggcgucgcagcau

SEQ ID NO: 547550 - RNA, 19 nt, Homo sapiens
  misc_RNA (1)...(19): siRNA sense strand
gagaaaccagcagaaacug

SEQ ID NO: 547551 - RNA, 19 nt, Homo sapiens
  misc_RNA (1)...(19): siRNA sense strand
aaaggggaaugaagcugua

SEQ ID NO: 547552 - RNA, 19 nt, Homo sapiens
  misc_RNA (1)...(19): siRNA sense strand
ggagaagaugacuacaaca

SEQ ID NO: 547553 - RNA, 19 nt, Homo sapiens
  misc_RNA (1)...(19): siRNA sense strand
aagaggaaaccaaugagau

SEQ ID NO: 547554 - RNA, 19 nt, Homo sapiens
  misc_RNA (1)...(19): siRNA sense strand
uccagagaccugagugaaa

SEQ ID NO: 547555 - RNA, 19 nt, Homo sapiens
  misc_RNA (1)...(19): siRNA sense strand
uaaagacccugcagaggaa

SEQ ID NO: 547556 - RNA, 19 nt, Homo sapiens
  misc_RNA (1)...(19): siRNA sense strand
ugaaggaggugaaggaaca

SEQ ID NO: 547557 - RNA, 19 nt, Homo sapiens
  misc_RNA (1)...(19): siRNA sense strand
caacauggaugaaaaugaa

SEQ ID NO: 547558 - RNA, 19 nt, Homo sapiens
  misc_RNA (1)...(19): siRNA sense strand
gaaaagagacaccauaaau

SEQ ID NO: 547559 - RNA, 19 nt, Homo sapiens
  misc_RNA (1)...(19): siRNA sense strand
agagacaaguugagaaaga

SEQ ID NO: 547560 - RNA, 19 nt, Homo sapiens
  misc_RNA (1)...(19): siRNA sense strand
ccguggagcugaagaagaa

SEQ ID NO: 547561 - RNA, 19 nt, Homo sapiens
  misc_RNA (1)...(19): siRNA sense strand
gggagcaggugguggaaga

SEQ ID NO: 547562 - RNA, 19 nt, Homo sapiens
  misc_RNA (1)...(19): siRNA sense strand
agaccaaccuggagaggaa

SEQ ID NO: 547563 - RNA, 19 nt, Homo sapiens
  misc_RNA (1)...(19): siRNA sense strand
agaaagaggaaaccaauga

SEQ ID NO: 547564 - RNA, 19 nt, Homo sapiens
  misc_RNA (1)...(19): siRNA sense strand
ggagaaaccagcagaaacu

SEQ ID NO: 547565 - RNA, 19 nt, Homo sapiens
  misc_RNA (1)...(19): siRNA sense strand
ggaaugacagaaacauaga

SEQ ID NO: 547566 - RNA, 19 nt, Homo sapiens
  misc_RNA (1)...(19): siRNA sense strand
aaagagacaaguugagaaa

SEQ ID NO: 547567 - RNA, 19 nt, Homo sapiens
  misc_RNA (1)...(19): siRNA sense strand
gaauagaagaggucaccaa

SEQ ID NO: 547568 - RNA, 19 nt, Homo sapiens
  misc_RNA (1)...(19): siRNA sense strand
gaaacgugcuugguaacag

SEQ ID NO: 547569 - RNA, 19 nt, Homo sapiens
  misc_RNA (1)...(19): siRNA sense strand
gagaagaugacuacaacau

SEQ ID NO: 547570 - RNA, 19 nt, Homo sapiens
  misc_RNA (1)...(19): siRNA sense strand
gaggagaagaugacuacaa

SEQ ID NO: 547571 - RNA, 19 nt, Homo sapiens
  misc_RNA (1)...(19): siRNA sense strand
gggagcagcuugacaaaau

SEQ ID NO: 547572 - RNA, 19 nt, Homo sapiens
  misc_RNA (1)...(19): siRNA sense strand
gaccugagccagugcauca

SEQ ID NO: 547573 - RNA, 19 nt, Homo sapiens
  misc_RNA (1)...(19): siRNA sense strand
caaagagacaaguugagaa

SEQ ID NO: 547574 - RNA, 19 nt, Homo sapiens
  misc_RNA (1)...(19): siRNA sense strand
gggaaugacagaaacauag

SEQ ID NO: 547575 - RNA, 19 nt, Homo sapiens
  misc_RNA (1)...(19): siRNA sense strand
agggaaacgugcuugguaa

SEQ ID NO: 547576 - RNA, 19 nt, Homo sapiens
  misc_RNA (1)...(19): siRNA sense strand
gagaggagaagaugacuac

SEQ ID NO: 547577 - RNA, 19 nt, Homo sapiens
  misc_RNA (1)...(19): siRNA sense strand
agggagagcuggagaagca

SEQ ID NO: 547578 - RNA, 19 nt, Homo sapiens
  misc_RNA (1)...(19): siRNA sense strand
ccagagaccugagugaaaa

SEQ ID NO: 547579 - RNA, 19 nt, Homo sapiens
  misc_RNA (1)...(19): siRNA sense strand
ggaugaaaaugaagcagaa

SEQ ID NO: 547580 - RNA, 19 nt, Homo sapiens
  misc_RNA (1)...(19): siRNA sense strand
gaaacugagaggagaagau

SEQ ID NO: 547581 - RNA, 19 nt, Homo sapiens
  misc_RNA (1)...(19): siRNA sense strand
gagacaaguugagaaagag

SEQ ID NO: 547582 - RNA, 19 nt, Homo sapiens
  misc_RNA (1)...(19): siRNA sense strand
gcggaaucauacacucuga

SEQ ID NO: 547583 - RNA, 19 nt, Homo sapiens
  misc_RNA (1)...(19): siRNA sense strand
agauccagguggugaauga

SEQ ID NO: 547584 - RNA, 19 nt, Homo sapiens
  misc_RNA (1)...(19): siRNA sense strand
ugagaaagaggaaaccaau

SEQ ID NO: 547585 - RNA, 19 nt, Homo sapiens
  misc_RNA (1)...(19): siRNA sense strand
gugaggagcgaauagaaga

SEQ ID NO: 547586 - RNA, 19 nt, Homo sapiens
  misc_RNA (1)...(19): siRNA sense strand
gcagaaacugagaggagaa

SEQ ID NO: 547587 - RNA, 19 nt, Homo sapiens
  misc_RNA (1)...(19): siRNA sense strand
gagcgagaccagcuuguca

SEQ ID NO: 547588 - RNA, 19 nt, Homo sapiens
  misc_RNA (1)...(19): siRNA sense strand
gaaagaggaaaccaaugag

SEQ ID NO: 547589 - RNA, 19 nt, Homo sapiens
  misc_RNA (1)...(19): siRNA sense strand
gagaaagaggaaaccaaug

SEQ ID NO: 547590 - RNA, 19 nt, Homo sapiens
  misc_RNA (1)...(19): siRNA sense strand
ggaaacgugcuugguaaca

SEQ ID NO: 547591 - RNA, 19 nt, Homo sapiens
  misc_RNA (1)...(19): siRNA sense strand
gggcuucaacuacuggauu

SEQ ID NO: 547592 - RNA, 19 nt, Homo sapiens
  misc_RNA (1)...(19): siRNA sense strand
gccagugcaucaaucagau

SEQ ID NO: 547593 - RNA, 19 nt, Homo sapiens
  misc_RNA (1)...(19): siRNA sense strand
ggcuucaacuacuggauug

SEQ ID NO: 547594 - RNA, 19 nt, Homo sapiens
  misc_RNA (1)...(19): siRNA sense strand
aauagaagaggucaccaaa

SEQ ID NO: 547595 - RNA, 19 nt, Homo sapiens
  misc_RNA (1)...(19): siRNA sense strand
aaacugagaggagaagaug

SEQ ID NO: 547596 - RNA, 19 nt, Homo sapiens
  misc_RNA (1)...(19): siRNA sense strand
gcaggugguggaagacaga

SEQ ID NO: 547597 - RNA, 19 nt, Homo sapiens
  misc_RNA (1)...(19): siRNA sense strand
gaugaaggaggugaaggaa

SEQ ID NO: 547598 - RNA, 19 nt, Homo sapiens
  misc_RNA (1)...(19): siRNA sense strand
gagacaccauaaauuuacu

SEQ ID NO: 547599 - RNA, 19 nt, Homo sapiens
  misc_RNA (1)...(19): siRNA sense strand
aggagaagaugacuacaac

SEQ ID NO: 547600 - RNA, 19 nt, Homo sapiens
  misc_RNA (1)...(19): siRNA sense strand
aaagaggaaaccaaugaga

SEQ ID NO: 547601 - RNA, 19 nt, Homo sapiens
  misc_RNA (1)...(19): siRNA sense strand
uaacagcaagucccagaca

SEQ ID NO: 547602 - RNA, 19 nt, Homo sapiens
  misc_RNA (1)...(19): siRNA sense strand
aagggaaacgugcuuggua

SEQ ID NO: 547603 - RNA, 19 nt, Homo sapiens
  misc_RNA (1)...(19): siRNA sense strand
ggaggugaaggaacagugu

SEQ ID NO: 547604 - RNA, 19 nt, Homo sapiens
  misc_RNA (1)...(19): siRNA sense strand
gaagggaaacgugcuuggu

SEQ ID NO: 547605 - RNA, 19 nt, Homo sapiens
  misc_RNA (1)...(19): siRNA sense strand
gaaugacagaaacauagau

SEQ ID NO: 547606 - RNA, 19 nt, Homo sapiens
  misc_RNA (1)...(19): siRNA sense strand
ccaggaaaauccagagaug

SEQ ID NO: 547607 - RNA, 19 nt, Homo sapiens
  misc_RNA (1)...(19): siRNA sense strand
gauucaaagagacaaguug

SEQ ID NO: 547608 - RNA, 19 nt, Homo sapiens
  misc_RNA (1)...(19): siRNA sense strand
ggauucaaagagacaaguu

SEQ ID NO: 547609 - RNA, 19 nt, Homo sapiens
  misc_RNA (1)...(19): siRNA sense strand
cugcaagaccaguuaaaga

SEQ ID NO: 547610 - RNA, 19 nt, Homo sapiens
  misc_RNA (1)...(19): siRNA sense strand
uggcagggaaugacagaaa

SEQ ID NO: 547611 - RNA, 19 nt, Homo sapiens
  misc_RNA (1)...(19): siRNA sense strand
agaagaugacuacaacaug

SEQ ID NO: 547612 - RNA, 19 nt, Homo sapiens
  misc_RNA (1)...(19): siRNA sense strand
gauguccuccaguuucaga

SEQ ID NO: 547613 - RNA, 19 nt, Homo sapiens
  misc_RNA (1)...(19): siRNA sense strand
gggcgucgcagcaugaagu

SEQ ID NO: 547614 - RNA, 19 nt, Homo sapiens
  misc_RNA (1)...(19): siRNA sense strand
cagaaaagagacaccauaa

SEQ ID NO: 547615 - RNA, 19 nt, Homo sapiens
  misc_RNA (1)...(19): siRNA sense strand
gggagaaaccagcagaaac

SEQ ID NO: 547616 - RNA, 19 nt, Homo sapiens
  misc_RNA (1)...(19): siRNA sense strand
gcagggaaugacagaaaca

SEQ ID NO: 547617 - RNA, 19 nt, Homo sapiens
  misc_RNA (1)...(19): siRNA sense strand
agagacaccauaaauuuac

SEQ ID NO: 547618 - RNA, 19 nt, Homo sapiens
  misc_RNA (1)...(19): siRNA sense strand
guccuccaguuucagaaga

SEQ ID NO: 547619 - RNA, 19 nt, Homo sapiens
  misc_RNA (1)...(19): siRNA sense strand
ggcagggaaugacagaaac

SEQ ID NO: 547620 - RNA, 19 nt, Homo sapiens
  misc_RNA (1)...(19): siRNA sense strand
gacuacaacauggaugaaa

SEQ ID NO: 547621 - RNA, 19 nt, Homo sapiens
  misc_RNA (1)...(19): siRNA sense strand
agaaaccagcagaaacuga

SEQ ID NO: 547622 - RNA, 19 nt, Homo sapiens
  misc_RNA (1)...(19): siRNA sense strand
agaggaaaccaaugagauc

SEQ ID NO: 547623 - RNA, 19 nt, Homo sapiens
  misc_RNA (1)...(19): siRNA sense strand
gaaacgggcgucgcagcau

SEQ ID NO: 547624 - RNA, 19 nt, Homo sapiens
  misc_RNA (1)...(19): siRNA sense strand
gagaaaccagcagaaacug

SEQ ID NO: 547625 - RNA, 19 nt, Homo sapiens
  misc_RNA (1)...(19): siRNA sense strand
aaaggggaaugaagcugua

SEQ ID NO: 547626 - RNA, 19 nt, Homo sapiens
  misc_RNA (1)...(19): siRNA sense strand
ggagaagaugacuacaaca

SEQ ID NO: 547627 - RNA, 19 nt, Homo sapiens
  misc_RNA (1)...(19): siRNA sense strand
aagaggaaaccaaugagau

SEQ ID NO: 547628 - RNA, 19 nt, Homo sapiens
  misc_RNA (1)...(19): siRNA sense strand
uccagagaccugagugaaa

SEQ ID NO: 547629 - RNA, 19 nt, Homo sapiens
  misc_RNA (1)...(19): siRNA sense strand
uggagaugcuggugcaaga

SEQ ID NO: 547630 - RNA, 19 nt, Homo sapiens
  misc_RNA (1)...(19): siRNA sense strand
gcaguuccgcuaccaggau

SEQ ID NO: 547631 - RNA, 19 nt, Homo sapiens
  misc_RNA (1)...(19): siRNA sense strand
ggccugacauccgcaccaa

SEQ ID NO: 547632 - RNA, 19 nt, Homo sapiens
  misc_RNA (1)...(19): siRNA sense strand
gcaccaaggagcagaucgu

SEQ ID NO: 547633 - RNA, 19 nt, Homo sapiens
  misc_RNA (1)...(19): siRNA sense strand
aggagcagaucguggagau

SEQ ID NO: 547634 - RNA, 19 nt, Homo sapiens
  misc_RNA (1)...(19): siRNA sense strand
uggagaugcuggugcaaga

SEQ ID NO: 547635 - RNA, 19 nt, Homo sapiens
  misc_RNA (1)...(19): siRNA sense strand
gcaguuccgcuaccaggau

SEQ ID NO: 547636 - RNA, 19 nt, Homo sapiens
  misc_RNA (1)...(19): siRNA sense strand
ggccugacauccgcaccaa

SEQ ID NO: 547637 - RNA, 19 nt, Homo sapiens
  misc_RNA (1)...(19): siRNA sense strand
gcaccaaggagcagaucgu

SEQ ID NO: 547638 - RNA, 19 nt, Homo sapiens
  misc_RNA (1)...(19): siRNA sense strand
aggagcagaucguggagau

SEQ ID NO: 547639 - RNA, 19 nt, Homo sapiens
  misc_RNA (1)...(19): siRNA sense strand
gauaauacuugcuccaugu

SEQ ID NO: 547640 - RNA, 19 nt, Homo sapiens
  misc_RNA (1)...(19): siRNA sense strand
cugaacaccugcaagaaua

SEQ ID NO: 547641 - RNA, 19 nt, Homo sapiens
  misc_RNA (1)...(19): siRNA sense strand
gguaugacaagaaagauaa

SEQ ID NO: 547642 - RNA, 19 nt, Homo sapiens
  misc_RNA (1)...(19): siRNA sense strand
gggaaacaauaacaacuuc

SEQ ID NO: 547643 - RNA, 19 nt, Homo sapiens
  misc_RNA (1)...(19): siRNA sense strand
aaagggauguguguacaaa

SEQ ID NO: 547644 - RNA, 19 nt, Homo sapiens
  misc_RNA (1)...(19): siRNA sense strand
guacaaaggacagacaaug

SEQ ID NO: 547645 - RNA, 19 nt, Homo sapiens
  misc_RNA (1)...(19): siRNA sense strand
uaacaacuuccaauccaaa

SEQ ID NO: 547646 - RNA, 19 nt, Homo sapiens
  misc_RNA (1)...(19): siRNA sense strand
gaaagggauguguguacaa

SEQ ID NO: 547647 - RNA, 19 nt, Homo sapiens
  misc_RNA (1)...(19): siRNA sense strand
gaacaccugcaagaauaaa

SEQ ID NO: 547648 - RNA, 19 nt, Homo sapiens
  misc_RNA (1)...(19): siRNA sense strand
caagauguaugcgaaaugc

SEQ ID NO: 547649 - RNA, 19 nt, Homo sapiens
  misc_RNA (1)...(19): siRNA sense strand
gacaaugccaggacaacaa

SEQ ID NO: 547650 - RNA, 19 nt, Homo sapiens
  misc_RNA (1)...(19): siRNA sense strand
caagaaagggaugugugua

SEQ ID NO: 547651 - RNA, 19 nt, Homo sapiens
  misc_RNA (1)...(19): siRNA sense strand
aauaacaacuuccaaucca

SEQ ID NO: 547652 - RNA, 19 nt, Homo sapiens
  misc_RNA (1)...(19): siRNA sense strand
gaaacaauaacaacuucca

SEQ ID NO: 547653 - RNA, 19 nt, Homo sapiens
  misc_RNA (1)...(19): siRNA sense strand
cugcaagaauaaacgcuuu

SEQ ID NO: 547654 - RNA, 19 nt, Homo sapiens
  misc_RNA (1)...(19): siRNA sense strand
ggugguaugacaagaaaga

SEQ ID NO: 547655 - RNA, 19 nt, Homo sapiens
  misc_RNA (1)...(19): siRNA sense strand
aauacuugcuccauguuug

SEQ ID NO: 547656 - RNA, 19 nt, Homo sapiens
  misc_RNA (1)...(19): siRNA sense strand
ccaagaaagggaugugugu

SEQ ID NO: 547657 - RNA, 19 nt, Homo sapiens
  misc_RNA (1)...(19): siRNA sense strand
aaagccaacugccugaaca

SEQ ID NO: 547658 - RNA, 19 nt, Homo sapiens
  misc_RNA (1)...(19): siRNA sense strand
aaucagagaagaaugugaa

SEQ ID NO: 547659 - RNA, 19 nt, Homo sapiens
  misc_RNA (1)...(19): siRNA sense strand
agaaagggauguguguaca

SEQ ID NO: 547660 - RNA, 19 nt, Homo sapiens
  misc_RNA (1)...(19): siRNA sense strand
aaacaagauguaugcgaaa

SEQ ID NO: 547661 - RNA, 19 nt, Homo sapiens
  misc_RNA (1)...(19): siRNA sense strand
ugaacaccugcaagaauaa

SEQ ID NO: 547662 - RNA, 19 nt, Homo sapiens
  misc_RNA (1)...(19): siRNA sense strand
uaauacuugcuccauguuu

SEQ ID NO: 547663 - RNA, 19 nt, Homo sapiens
  misc_RNA (1)...(19): siRNA sense strand
gccccugccuggcuuauuu

SEQ ID NO: 547664 - RNA, 19 nt, Homo sapiens
  misc_RNA (1)...(19): siRNA sense strand
acaauaacaacuuccaauc

SEQ ID NO: 547665 - RNA, 19 nt, Homo sapiens
  misc_RNA (1)...(19): siRNA sense strand
gcugccagggaaacaauaa

SEQ ID NO: 547666 - RNA, 19 nt, Homo sapiens
  misc_RNA (1)...(19): siRNA sense strand
caaaaucagagaagaaugu

SEQ ID NO: 547667 - RNA, 19 nt, Homo sapiens
  misc_RNA (1)...(19): siRNA sense strand
ccugaacaccugcaagaau

SEQ ID NO: 547668 - RNA, 19 nt, Homo sapiens
  misc_RNA (1)...(19): siRNA sense strand
auaacaacuuccaauccaa

SEQ ID NO: 547669 - RNA, 19 nt, Homo sapiens
  misc_RNA (1)...(19): siRNA sense strand
uuggugguaugacaagaaa

SEQ ID NO: 547670 - RNA, 19 nt, Homo sapiens
  misc_RNA (1)...(19): siRNA sense strand
aaugugaauuccaagaaag

SEQ ID NO: 547671 - RNA, 19 nt, Homo sapiens
  misc_RNA (1)...(19): siRNA sense strand
gccaggacaacaagaagug

SEQ ID NO: 547672 - RNA, 19 nt, Homo sapiens
  misc_RNA (1)...(19): siRNA sense strand
caauaacaacuuccaaucc

SEQ ID NO: 547673 - RNA, 19 nt, Homo sapiens
  misc_RNA (1)...(19): siRNA sense strand
ucagagaagaaugugaauu

SEQ ID NO: 547674 - RNA, 19 nt, Homo sapiens
  misc_RNA (1)...(19): siRNA sense strand
aacaagauguaugcgaaau

SEQ ID NO: 547675 - RNA, 19 nt, Homo sapiens
  misc_RNA (1)...(19): siRNA sense strand
ugguaugacaagaaagaua

SEQ ID NO: 547676 - RNA, 19 nt, Homo sapiens
  misc_RNA (1)...(19): siRNA sense strand
gauaauacuugcuccaugu

SEQ ID NO: 547677 - RNA, 19 nt, Homo sapiens
  misc_RNA (1)...(19): siRNA sense strand
cugaacaccugcaagaaua

SEQ ID NO: 547678 - RNA, 19 nt, Homo sapiens
  misc_RNA (1)...(19): siRNA sense strand
gguaugacaagaaagauaa

SEQ ID NO: 547679 - RNA, 19 nt, Homo sapiens
  misc_RNA (1)...(19): siRNA sense strand
gggaaacaauaacaacuuc

SEQ ID NO: 547680 - RNA, 19 nt, Homo sapiens
  misc_RNA (1)...(19): siRNA sense strand
aaagggauguguguacaaa

SEQ ID NO: 547681 - RNA, 19 nt, Homo sapiens
  misc_RNA (1)...(19): siRNA sense strand
guacaaaggacagacaaug

SEQ ID NO: 547682 - RNA, 19 nt, Homo sapiens
  misc_RNA (1)...(19): siRNA sense strand
uaacaacuuccaauccaaa

SEQ ID NO: 547683 - RNA, 19 nt, Homo sapiens
  misc_RNA (1)...(19): siRNA sense strand
gaaagggauguguguacaa

SEQ ID NO: 547684 - RNA, 19 nt, Homo sapiens
  misc_RNA (1)...(19): siRNA sense strand
gaacaccugcaagaauaaa

SEQ ID NO: 547685 - RNA, 19 nt, Homo sapiens
  misc_RNA (1)...(19): siRNA sense strand
caagauguaugcgaaaugc

SEQ ID NO: 547686 - RNA, 19 nt, Homo sapiens
  misc_RNA (1)...(19): siRNA sense strand
gacaaugccaggacaacaa

SEQ ID NO: 547687 - RNA, 19 nt, Homo sapiens
  misc_RNA (1)...(19): siRNA sense strand
caagaaagggaugugugua

SEQ ID NO: 547688 - RNA, 19 nt, Homo sapiens
  misc_RNA (1)...(19): siRNA sense strand
aauaacaacuuccaaucca

SEQ ID NO: 547689 - RNA, 19 nt, Homo sapiens
  misc_RNA (1)...(19): siRNA sense strand
gaaacaauaacaacuucca

SEQ ID NO: 547690 - RNA, 19 nt, Homo sapiens
  misc_RNA (1)...(19): siRNA sense strand
cugcaagaauaaacgcuuu

SEQ ID NO: 547691 - RNA, 19 nt, Homo sapiens
  misc_RNA (1)...(19): siRNA sense strand
ggugguaugacaagaaaga

SEQ ID NO: 547692 - RNA, 19 nt, Homo sapiens
  misc_RNA (1)...(19): siRNA sense strand
aauacuugcuccauguuug

SEQ ID NO: 547693 - RNA, 19 nt, Homo sapiens
  misc_RNA (1)...(19): siRNA sense strand
ccaagaaagggaugugugu

SEQ ID NO: 547694 - RNA, 19 nt, Homo sapiens
  misc_RNA (1)...(19): siRNA sense strand
aaagccaacugccugaaca

SEQ ID NO: 547695 - RNA, 19 nt, Homo sapiens
  misc_RNA (1)...(19): siRNA sense strand
aaucagagaagaaugugaa

SEQ ID NO: 547696 - RNA, 19 nt, Homo sapiens
  misc_RNA (1)...(19): siRNA sense strand
agaaagggauguguguaca

SEQ ID NO: 547697 - RNA, 19 nt, Homo sapiens
  misc_RNA (1)...(19): siRNA sense strand
aaacaagauguaugcgaaa

SEQ ID NO: 547698 - RNA, 19 nt, Homo sapiens
  misc_RNA (1)...(19): siRNA sense strand
ugaacaccugcaagaauaa

SEQ ID NO: 547699 - RNA, 19 nt, Homo sapiens
  misc_RNA (1)...(19): siRNA sense strand
uaauacuugcuccauguuu

SEQ ID NO: 547700 - RNA, 19 nt, Homo sapiens
  misc_RNA (1)...(19): siRNA sense strand
gccccugccuggcuuauuu

SEQ ID NO: 547701 - RNA, 19 nt, Homo sapiens
  misc_RNA (1)...(19): siRNA sense strand
acaauaacaacuuccaauc

SEQ ID NO: 547702 - RNA, 19 nt, Homo sapiens
  misc_RNA (1)...(19): siRNA sense strand
gcugccagggaaacaauaa

SEQ ID NO: 547703 - RNA, 19 nt, Homo sapiens
  misc_RNA (1)...(19): siRNA sense strand
caaaaucagagaagaaugu

SEQ ID NO: 547704 - RNA, 19 nt, Homo sapiens
  misc_RNA (1)...(19): siRNA sense strand
ccugaacaccugcaagaau

SEQ ID NO: 547705 - RNA, 19 nt, Homo sapiens
  misc_RNA (1)...(19): siRNA sense strand
auaacaacuuccaauccaa

SEQ ID NO: 547706 - RNA, 19 nt, Homo sapiens
  misc_RNA (1)...(19): siRNA sense strand
uuggugguaugacaagaaa

SEQ ID NO: 547707 - RNA, 19 nt, Homo sapiens
  misc_RNA (1)...(19): siRNA sense strand
aaugugaauuccaagaaag

SEQ ID NO: 547708 - RNA, 19 nt, Homo sapiens
  misc_RNA (1)...(19): siRNA sense strand
gccaggacaacaagaagug

SEQ ID NO: 547709 - RNA, 19 nt, Homo sapiens
  misc_RNA (1)...(19): siRNA sense strand
caauaacaacuuccaaucc

SEQ ID NO: 547710 - RNA, 19 nt, Homo sapiens
  misc_RNA (1)...(19): siRNA sense strand
ucagagaagaaugugaauu

SEQ ID NO: 547711 - RNA, 19 nt, Homo sapiens
  misc_RNA (1)...(19): siRNA sense strand
aacaagauguaugcgaaau

SEQ ID NO: 547712 - RNA, 19 nt, Homo sapiens
  misc_RNA (1)...(19): siRNA sense strand
ugguaugacaagaaagaua

SEQ ID NO: 547713 - RNA, 19 nt, Homo sapiens
  misc_RNA (1)...(19): siRNA sense strand
gaacauuucucacaucaau

SEQ ID NO: 547714 - RNA, 19 nt, Homo sapiens
  misc_RNA (1)...(19): siRNA sense strand
caaaggaucugaacauuuc

SEQ ID NO: 547715 - RNA, 19 nt, Homo sapiens
  misc_RNA (1)...(19): siRNA sense strand
uggcaaaucugaagucuua

SEQ ID NO: 547716 - RNA, 19 nt, Homo sapiens
  misc_RNA (1)...(19): siRNA sense strand
gaacaagaacgauucauuu

SEQ ID NO: 547717 - RNA, 19 nt, Homo sapiens
  misc_RNA (1)...(19): siRNA sense strand
guucagagguccuuagaua

SEQ ID NO: 547718 - RNA, 19 nt, Homo sapiens
  misc_RNA (1)...(19): siRNA sense strand
ggaaaugccuccuauaucu

SEQ ID NO: 547719 - RNA, 19 nt, Homo sapiens
  misc_RNA (1)...(19): siRNA sense strand
gaauaaagcugugacucuu

SEQ ID NO: 547720 - RNA, 19 nt, Homo sapiens
  misc_RNA (1)...(19): siRNA sense strand
caacaacauucaagccuaa

SEQ ID NO: 547721 - RNA, 19 nt, Homo sapiens
  misc_RNA (1)...(19): siRNA sense strand
ugauaacccuccuaauaua

SEQ ID NO: 547722 - RNA, 19 nt, Homo sapiens
  misc_RNA (1)...(19): siRNA sense strand
cgacguggguuauacuuaa

SEQ ID NO: 547723 - RNA, 19 nt, Homo sapiens
  misc_RNA (1)...(19): siRNA sense strand
gaaagauccugucaauaca

SEQ ID NO: 547724 - RNA, 19 nt, Homo sapiens
  misc_RNA (1)...(19): siRNA sense strand
ggguuaagcuugaggauga

SEQ ID NO: 547725 - RNA, 19 nt, Homo sapiens
  misc_RNA (1)...(19): siRNA sense strand
gagcaacgguuaccaucaa

SEQ ID NO: 547726 - RNA, 19 nt, Homo sapiens
  misc_RNA (1)...(19): siRNA sense strand
aaagagaggucccauuuca

SEQ ID NO: 547727 - RNA, 19 nt, Homo sapiens
  misc_RNA (1)...(19): siRNA sense strand
gaaugaguguuucuuugaa

SEQ ID NO: 547728 - RNA, 19 nt, Homo sapiens
  misc_RNA (1)...(19): siRNA sense strand
caaggaggcuucaagacaa

SEQ ID NO: 547729 - RNA, 19 nt, Homo sapiens
  misc_RNA (1)...(19): siRNA sense strand
ugagaaagauccugucaau

SEQ ID NO: 547730 - RNA, 19 nt, Homo sapiens
  misc_RNA (1)...(19): siRNA sense strand
ugacagugcuggcuaguga

SEQ ID NO: 547731 - RNA, 19 nt, Homo sapiens
  misc_RNA (1)...(19): siRNA sense strand
ggagacagccauucacaaa

SEQ ID NO: 547732 - RNA, 19 nt, Homo sapiens
  misc_RNA (1)...(19): siRNA sense strand
cgcaauagcucaagaacuu

SEQ ID NO: 547733 - RNA, 19 nt, Homo sapiens
  misc_RNA (1)...(19): siRNA sense strand
ggaaugaacgcugaacuaa

SEQ ID NO: 547734 - RNA, 19 nt, Homo sapiens
  misc_RNA (1)...(19): siRNA sense strand
cugagaaucugccaaagua

SEQ ID NO: 547735 - RNA, 19 nt, Homo sapiens
  misc_RNA (1)...(19): siRNA sense strand
uaauugagcugucaguuuc

SEQ ID NO: 547736 - RNA, 19 nt, Homo sapiens
  misc_RNA (1)...(19): siRNA sense strand
guagguaccucuguaauuc

SEQ ID NO: 547737 - RNA, 19 nt, Homo sapiens
  misc_RNA (1)...(19): siRNA sense strand
aaugauaacccuccuaaua

SEQ ID NO: 547738 - RNA, 19 nt, Homo sapiens
  misc_RNA (1)...(19): siRNA sense strand
gaacuuuguuacuaucgaa

SEQ ID NO: 547739 - RNA, 19 nt, Homo sapiens
  misc_RNA (1)...(19): siRNA sense strand
uaacgacacugcuggaaau

SEQ ID NO: 547740 - RNA, 19 nt, Homo sapiens
  misc_RNA (1)...(19): siRNA sense strand
gagaaucugccaaaguaua

SEQ ID NO: 547741 - RNA, 19 nt, Homo sapiens
  misc_RNA (1)...(19): siRNA sense strand
gcaaaucugaagucuuaua

SEQ ID NO: 547742 - RNA, 19 nt, Homo sapiens
  misc_RNA (1)...(19): siRNA sense strand
ucuaaacgcucuuccacua

SEQ ID NO: 547743 - RNA, 19 nt, Homo sapiens
  misc_RNA (1)...(19): siRNA sense strand
uaacauuacucuggaagaa

SEQ ID NO: 547744 - RNA, 19 nt, Homo sapiens
  misc_RNA (1)...(19): siRNA sense strand
gaaagauaccuaugugaug

SEQ ID NO: 547745 - RNA, 19 nt, Homo sapiens
  misc_RNA (1)...(19): siRNA sense strand
caagaggacugaagcagau

SEQ ID NO: 547746 - RNA, 19 nt, Homo sapiens
  misc_RNA (1)...(19): siRNA sense strand
caggaaagcugcagugaca

SEQ ID NO: 547747 - RNA, 19 nt, Homo sapiens
  misc_RNA (1)...(19): siRNA sense strand
ugaaagagaggucccauuu

SEQ ID NO: 547748 - RNA, 19 nt, Homo sapiens
  misc_RNA (1)...(19): siRNA sense strand
aaagauaccuaugugauga

SEQ ID NO: 547749 - RNA, 19 nt, Homo sapiens
  misc_RNA (1)...(19): siRNA sense strand
acaaagauugcccuaauua

SEQ ID NO: 547750 - RNA, 19 nt, Homo sapiens
  misc_RNA (1)...(19): siRNA sense strand
ucaaggauaccaaugauaa

SEQ ID NO: 547751 - RNA, 19 nt, Homo sapiens
  misc_RNA (1)...(19): siRNA sense strand
gcagauauaggcaguaaug

SEQ ID NO: 547752 - RNA, 19 nt, Homo sapiens
  misc_RNA (1)...(19): siRNA sense strand
ucaccgauguaaaugauaa

SEQ ID NO: 547753 - RNA, 19 nt, Homo sapiens
  misc_RNA (1)...(19): siRNA sense strand
ugacagagaagaacaagaa

SEQ ID NO: 547754 - RNA, 19 nt, Homo sapiens
  misc_RNA (1)...(19): siRNA sense strand
ccaguaacagguaacauua

SEQ ID NO: 547755 - RNA, 19 nt, Homo sapiens
  misc_RNA (1)...(19): siRNA sense strand
gaaguggccacaacugauu

SEQ ID NO: 547756 - RNA, 19 nt, Homo sapiens
  misc_RNA (1)...(19): siRNA sense strand
gaaaugccuccuauaucua

SEQ ID NO: 547757 - RNA, 19 nt, Homo sapiens
  misc_RNA (1)...(19): siRNA sense strand
gacaauagccccaaguuua

SEQ ID NO: 547758 - RNA, 19 nt, Homo sapiens
  misc_RNA (1)...(19): siRNA sense strand
guaauugagcugucaguuu

SEQ ID NO: 547759 - RNA, 19 nt, Homo sapiens
  misc_RNA (1)...(19): siRNA sense strand
caacagccgcuuuccaauu

SEQ ID NO: 547760 - RNA, 19 nt, Homo sapiens
  misc_RNA (1)...(19): siRNA sense strand
gaacuggaggagcaaagua

SEQ ID NO: 547761 - RNA, 19 nt, Homo sapiens
  misc_RNA (1)...(19): siRNA sense strand
gaacagaaagauaccuaug

SEQ ID NO: 547762 - RNA, 19 nt, Homo sapiens
  misc_RNA (1)...(19): siRNA sense strand
ggagagaaguggccacaac

SEQ ID NO: 547763 - RNA, 19 nt, Homo sapiens
  misc_RNA (1)...(19): siRNA sense strand
gaaugaacgcugaacuaaa

SEQ ID NO: 547764 - RNA, 19 nt, Homo sapiens
  misc_RNA (1)...(19): siRNA sense strand
gagaagaacaagaacgauu

SEQ ID NO: 547765 - RNA, 19 nt, Homo sapiens
  misc_RNA (1)...(19): siRNA sense strand
gauagagaacagaaagaua

SEQ ID NO: 547766 - RNA, 19 nt, Homo sapiens
  misc_RNA (1)...(19): siRNA sense strand
cacaguaagugauguaaau

SEQ ID NO: 547767 - RNA, 19 nt, Homo sapiens
  misc_RNA (1)...(19): siRNA sense strand
ucaaugaccguaagcagua

SEQ ID NO: 547768 - RNA, 19 nt, Homo sapiens
  misc_RNA (1)...(19): siRNA sense strand
cuacagagaugugcacuca

SEQ ID NO: 547769 - RNA, 19 nt, Homo sapiens
  misc_RNA (1)...(19): siRNA sense strand
ggagcaaaguauaggaaga

SEQ ID NO: 547770 - RNA, 19 nt, Homo sapiens
  misc_RNA (1)...(19): siRNA sense strand
cagcagaguuccuacacuu

SEQ ID NO: 547771 - RNA, 19 nt, Homo sapiens
  misc_RNA (1)...(19): siRNA sense strand
auacaaagauugcccuaau

SEQ ID NO: 547772 - RNA, 19 nt, Homo sapiens
  misc_RNA (1)...(19): siRNA sense strand
gaaauccaguacggccaua

SEQ ID NO: 547773 - RNA, 19 nt, Homo sapiens
  misc_RNA (1)...(19): siRNA sense strand
caagcaaggugccgaaugg

SEQ ID NO: 547774 - RNA, 19 nt, Homo sapiens
  misc_RNA (1)...(19): siRNA sense strand
uggaaacaauaaaggcuua

SEQ ID NO: 547775 - RNA, 19 nt, Homo sapiens
  misc_RNA (1)...(19): siRNA sense strand
uaaaugauaacccuccuaa

SEQ ID NO: 547776 - RNA, 19 nt, Homo sapiens
  misc_RNA (1)...(19): siRNA sense strand
ccaaaggaucugaacauuu

SEQ ID NO: 547777 - RNA, 19 nt, Homo sapiens
  misc_RNA (1)...(19): siRNA sense strand
aaugaacgcugaacuaaag

SEQ ID NO: 547778 - RNA, 19 nt, Homo sapiens
  misc_RNA (1)...(19): siRNA sense strand
agaaagauccugucaauac

SEQ ID NO: 547779 - RNA, 19 nt, Homo sapiens
  misc_RNA (1)...(19): siRNA sense strand
ccgaaugccuccuucuuug

SEQ ID NO: 547780 - RNA, 19 nt, Homo sapiens
  misc_RNA (1)...(19): siRNA sense strand
aagaaugggugaagaagga

SEQ ID NO: 547781 - RNA, 19 nt, Homo sapiens
  misc_RNA (1)...(19): siRNA sense strand
gcagcgccguguuacguuu

SEQ ID NO: 547782 - RNA, 19 nt, Homo sapiens
  misc_RNA (1)...(19): siRNA sense strand
cagaguauuugacagagaa

SEQ ID NO: 547783 - RNA, 19 nt, Homo sapiens
  misc_RNA (1)...(19): siRNA sense strand
agagaggaauugccugaaa

SEQ ID NO: 547784 - RNA, 19 nt, Homo sapiens
  misc_RNA (1)...(19): siRNA sense strand
caaacccgaugaugcaguu

SEQ ID NO: 547785 - RNA, 19 nt, Homo sapiens
  misc_RNA (1)...(19): siRNA sense strand
ccuguuggcugcucugauu

SEQ ID NO: 547786 - RNA, 19 nt, Homo sapiens
  misc_RNA (1)...(19): siRNA sense strand
gaggucccauuucauuuga

SEQ ID NO: 547787 - RNA, 19 nt, Homo sapiens
  misc_RNA (1)...(19): siRNA sense strand
ucuacagacugguuucuaa

SEQ ID NO: 547788 - RNA, 19 nt, Homo sapiens
  misc_RNA (1)...(19): siRNA sense strand
gcaaaguauaggaagauuu

SEQ ID NO: 547789 - RNA, 19 nt, Homo sapiens
  misc_RNA (1)...(19): siRNA sense strand
gaucugaacauuucucaca

SEQ ID NO: 547790 - RNA, 19 nt, Homo sapiens
  misc_RNA (1)...(19): siRNA sense strand
ucaauggcaccguguauuu

SEQ ID NO: 547791 - RNA, 19 nt, Homo sapiens
  misc_RNA (1)...(19): siRNA sense strand
gagaaguggccacaacuga

SEQ ID NO: 547792 - RNA, 19 nt, Homo sapiens
  misc_RNA (1)...(19): siRNA sense strand
caacagaauagacagagaa

SEQ ID NO: 547793 - RNA, 19 nt, Homo sapiens
  misc_RNA (1)...(19): siRNA sense strand
caucuccugucaucaauau

SEQ ID NO: 547794 - RNA, 19 nt, Homo sapiens
  misc_RNA (1)...(19): siRNA sense strand
cgucuaauacuuccuuuaa

SEQ ID NO: 547795 - RNA, 19 nt, Homo sapiens
  misc_RNA (1)...(19): siRNA sense strand
cauuauaagucccaucaau

SEQ ID NO: 547796 - RNA, 19 nt, Homo sapiens
  misc_RNA (1)...(19): siRNA sense strand
acagaaagauaccuaugug

SEQ ID NO: 547797 - RNA, 19 nt, Homo sapiens
  misc_RNA (1)...(19): siRNA sense strand
gagaacagaaagauaccua

SEQ ID NO: 547798 - RNA, 19 nt, Homo sapiens
  misc_RNA (1)...(19): siRNA sense strand
aaugacaacccaccaauuu

SEQ ID NO: 547799 - RNA, 19 nt, Homo sapiens
  misc_RNA (1)...(19): siRNA sense strand
gagaaagauccugucaaua

SEQ ID NO: 547800 - RNA, 19 nt, Homo sapiens
  misc_RNA (1)...(19): siRNA sense strand
caauggcaccguguauuua

SEQ ID NO: 547801 - RNA, 19 nt, Homo sapiens
  misc_RNA (1)...(19): siRNA sense strand
agacagccauucacaaagu

SEQ ID NO: 547802 - RNA, 19 nt, Homo sapiens
  misc_RNA (1)...(19): siRNA sense strand
gaaaacacuuugaucaaca

SEQ ID NO: 547803 - RNA, 19 nt, Homo sapiens
  misc_RNA (1)...(19): siRNA sense strand
gcaauagcucaagaacuua

SEQ ID NO: 547804 - RNA, 19 nt, Homo sapiens
  misc_RNA (1)...(19): siRNA sense strand
caaccaauauuuguuagag

SEQ ID NO: 547805 - RNA, 19 nt, Homo sapiens
  misc_RNA (1)...(19): siRNA sense strand
uacaaagauugcccuaauu

SEQ ID NO: 547806 - RNA, 19 nt, Homo sapiens
  misc_RNA (1)...(19): siRNA sense strand
caaccagccuguaauugag

SEQ ID NO: 547807 - RNA, 19 nt, Homo sapiens
  misc_RNA (1)...(19): siRNA sense strand
uaucuaaccaucaugauug

SEQ ID NO: 547808 - RNA, 19 nt, Homo sapiens
  misc_RNA (1)...(19): siRNA sense strand
ccaagcggcugugauuguu

SEQ ID NO: 547809 - RNA, 19 nt, Homo sapiens
  misc_RNA (1)...(19): siRNA sense strand
ggaauugccugaaaaugug

SEQ ID NO: 547810 - RNA, 19 nt, Homo sapiens
  misc_RNA (1)...(19): siRNA sense strand
gaacgcugaacuaaaguau

SEQ ID NO: 547811 - RNA, 19 nt, Homo sapiens
  misc_RNA (1)...(19): siRNA sense strand
uaaggagcaccaacucuaa

SEQ ID NO: 547812 - RNA, 19 nt, Homo sapiens
  misc_RNA (1)...(19): siRNA sense strand
gugcuuguauuccuuuaug

SEQ ID NO: 547813 - RNA, 19 nt, Homo sapiens
  misc_RNA (1)...(19): siRNA sense strand
cagaaacaaucgccaaaua

SEQ ID NO: 547814 - RNA, 19 nt, Homo sapiens
  misc_RNA (1)...(19): siRNA sense strand
ugagaagacugacagauuu

SEQ ID NO: 547815 - RNA, 19 nt, Homo sapiens
  misc_RNA (1)...(19): siRNA sense strand
gagcagaaguuaugauuuu

SEQ ID NO: 547816 - RNA, 19 nt, Homo sapiens
  misc_RNA (1)...(19): siRNA sense strand
gaaacaaucgccaaauaug

SEQ ID NO: 547817 - RNA, 19 nt, Homo sapiens
  misc_RNA (1)...(19): siRNA sense strand
gaaaauggcagaaaugaaa

SEQ ID NO: 547818 - RNA, 19 nt, Homo sapiens
  misc_RNA (1)...(19): siRNA sense strand
cgaacagccugaaauguga

SEQ ID NO: 547819 - RNA, 19 nt, Homo sapiens
  misc_RNA (1)...(19): siRNA sense strand
gaacaccaaggaauuagaa

SEQ ID NO: 547820 - RNA, 19 nt, Homo sapiens
  misc_RNA (1)...(19): siRNA sense strand
cgccaaauaugaaauaaug

SEQ ID NO: 547821 - RNA, 19 nt, Homo sapiens
  misc_RNA (1)...(19): siRNA sense strand
gaagauggcaaaguagaaa

SEQ ID NO: 547822 - RNA, 19 nt, Homo sapiens
  misc_RNA (1)...(19): siRNA sense strand
gaagauugucuacauauag

SEQ ID NO: 547823 - RNA, 19 nt, Homo sapiens
  misc_RNA (1)...(19): siRNA sense strand
ccaccuauccugauguuaa

SEQ ID NO: 547824 - RNA, 19 nt, Homo sapiens
  misc_RNA (1)...(19): siRNA sense strand
caacagaaacagaaacaau

SEQ ID NO: 547825 - RNA, 19 nt, Homo sapiens
  misc_RNA (1)...(19): siRNA sense strand
gaagugggcauugaagauu

SEQ ID NO: 547826 - RNA, 19 nt, Homo sapiens
  misc_RNA (1)...(19): siRNA sense strand
aacacuaucucuucuauga

SEQ ID NO: 547827 - RNA, 19 nt, Homo sapiens
  misc_RNA (1)...(19): siRNA sense strand
ggaaacagagaacaaacuu

SEQ ID NO: 547828 - RNA, 19 nt, Homo sapiens
  misc_RNA (1)...(19): siRNA sense strand
aaugagagaugugaacaaa

SEQ ID NO: 547829 - RNA, 19 nt, Homo sapiens
  misc_RNA (1)...(19): siRNA sense strand
gcuagaacaccaaggaauu

SEQ ID NO: 547830 - RNA, 19 nt, Homo sapiens
  misc_RNA (1)...(19): siRNA sense strand
gaaacagagaacaaacuuu

SEQ ID NO: 547831 - RNA, 19 nt, Homo sapiens
  misc_RNA (1)...(19): siRNA sense strand
aaaccuagccuuuaagcaa

SEQ ID NO: 547832 - RNA, 19 nt, Homo sapiens
  misc_RNA (1)...(19): siRNA sense strand
aaacagagaacaaacuuuc

SEQ ID NO: 547833 - RNA, 19 nt, Homo sapiens
  misc_RNA (1)...(19): siRNA sense strand
gugagaagacugacagauu

SEQ ID NO: 547834 - RNA, 19 nt, Homo sapiens
  misc_RNA (1)...(19): siRNA sense strand
aaacaaucgccaaauauga

SEQ ID NO: 547835 - RNA, 19 nt, Homo sapiens
  misc_RNA (1)...(19): siRNA sense strand
ugacccaacuccaacaaug

SEQ ID NO: 547836 - RNA, 19 nt, Homo sapiens
  misc_RNA (1)...(19): siRNA sense strand
aaacagcaggagauaauuu

SEQ ID NO: 547837 - RNA, 19 nt, Homo sapiens
  misc_RNA (1)...(19): siRNA sense strand
ucaaacagcaggagauaau

SEQ ID NO: 547838 - RNA, 19 nt, Homo sapiens
  misc_RNA (1)...(19): siRNA sense strand
cuagaacaccaaggaauua

SEQ ID NO: 547839 - RNA, 19 nt, Homo sapiens
  misc_RNA (1)...(19): siRNA sense strand
aaagagaucacaggaauug

SEQ ID NO: 547840 - RNA, 19 nt, Homo sapiens
  misc_RNA (1)...(19): siRNA sense strand
ugagaucgauauuguucuu

SEQ ID NO: 547841 - RNA, 19 nt, Homo sapiens
  misc_RNA (1)...(19): siRNA sense strand
aacugaagauggcaaagua

SEQ ID NO: 547842 - RNA, 19 nt, Homo sapiens
  misc_RNA (1)...(19): siRNA sense strand
ugaauuuagugcuuguuga

SEQ ID NO: 547843 - RNA, 19 nt, Homo sapiens
  misc_RNA (1)...(19): siRNA sense strand
ggauaugacccaacuccaa

SEQ ID NO: 547844 - RNA, 19 nt, Homo sapiens
  misc_RNA (1)...(19): siRNA sense strand
ggaagugggcauugaagau

SEQ ID NO: 547845 - RNA, 19 nt, Homo sapiens
  misc_RNA (1)...(19): siRNA sense strand
cauugaagauugucuacau

SEQ ID NO: 547846 - RNA, 19 nt, Homo sapiens
  misc_RNA (1)...(19): siRNA sense strand
ugacucagagcagaaguua

SEQ ID NO: 547847 - RNA, 19 nt, Homo sapiens
  misc_RNA (1)...(19): siRNA sense strand
ugacagauuugguaaaaga

SEQ ID NO: 547848 - RNA, 19 nt, Homo sapiens
  misc_RNA (1)...(19): siRNA sense strand
ggaauuggacccaguacca

SEQ ID NO: 547849 - RNA, 19 nt, Homo sapiens
  misc_RNA (1)...(19): siRNA sense strand
gagaagacugacagauuug

SEQ ID NO: 547850 - RNA, 19 nt, Homo sapiens
  misc_RNA (1)...(19): siRNA sense strand
gaauuuagugcuuguugau

SEQ ID NO: 547851 - RNA, 19 nt, Homo sapiens
  misc_RNA (1)...(19): siRNA sense strand
ggaguuacagcugaucaaa

SEQ ID NO: 547852 - RNA, 19 nt, Homo sapiens
  misc_RNA (1)...(19): siRNA sense strand
agaaacaaucgccaaauau

SEQ ID NO: 547853 - RNA, 19 nt, Homo sapiens
  misc_RNA (1)...(19): siRNA sense strand
gaauuuguaaaccuaguga

SEQ ID NO: 547854 - RNA, 19 nt, Homo sapiens
  misc_RNA (1)...(19): siRNA sense strand
gaccggagguacuucaaac

SEQ ID NO: 547855 - RNA, 19 nt, Homo sapiens
  misc_RNA (1)...(19): siRNA sense strand
uaaagugacaauagugaga

SEQ ID NO: 547856 - RNA, 19 nt, Homo sapiens
  misc_RNA (1)...(19): siRNA sense strand
agugaaagaacuagccuua

SEQ ID NO: 547857 - RNA, 19 nt, Homo sapiens
  misc_RNA (1)...(19): siRNA sense strand
cagagcagaaguuaugauu

SEQ ID NO: 547858 - RNA, 19 nt, Homo sapiens
  misc_RNA (1)...(19): siRNA sense strand
aaacugaggaaacagagaa

SEQ ID NO: 547859 - RNA, 19 nt, Homo sapiens
  misc_RNA (1)...(19): siRNA sense strand
ugaaagaacuagccuuacc

SEQ ID NO: 547860 - RNA, 19 nt, Homo sapiens
  misc_RNA (1)...(19): siRNA sense strand
uuguaaaccuagugaaaga

SEQ ID NO: 547861 - RNA, 19 nt, Homo sapiens
  misc_RNA (1)...(19): siRNA sense strand
ccgaacagccugaaaugug

SEQ ID NO: 547862 - RNA, 19 nt, Homo sapiens
  misc_RNA (1)...(19): siRNA sense strand
gacccaacuccaacaauga

SEQ ID NO: 547863 - RNA, 19 nt, Homo sapiens
  misc_RNA (1)...(19): siRNA sense strand
uacaacauauggaguuaca

SEQ ID NO: 547864 - RNA, 19 nt, Homo sapiens
  misc_RNA (1)...(19): siRNA sense strand
aauguccgcuugagguauu

SEQ ID NO: 547865 - RNA, 19 nt, Homo sapiens
  misc_RNA (1)...(19): siRNA sense strand
acucagagcagaaguuaug

SEQ ID NO: 547866 - RNA, 19 nt, Homo sapiens
  misc_RNA (1)...(19): siRNA sense strand
ccaauguccgcuugaggua

SEQ ID NO: 547867 - RNA, 19 nt, Homo sapiens
  misc_RNA (1)...(19): siRNA sense strand
uuugugagaucgauauugu

SEQ ID NO: 547868 - RNA, 19 nt, Homo sapiens
  misc_RNA (1)...(19): siRNA sense strand
gauggaagugggcauugaa

SEQ ID NO: 547869 - RNA, 19 nt, Homo sapiens
  misc_RNA (1)...(19): siRNA sense strand
acaacucuauuaagaugga

SEQ ID NO: 547870 - RNA, 19 nt, Homo sapiens
  misc_RNA (1)...(19): siRNA sense strand
gaaaagccauaugaaucuu

SEQ ID NO: 547871 - RNA, 19 nt, Homo sapiens
  misc_RNA (1)...(19): siRNA sense strand
uggcagaaaugaaaacuga

SEQ ID NO: 547872 - RNA, 19 nt, Homo sapiens
  misc_RNA (1)...(19): siRNA sense strand
ugaggaaacagagaacaaa

SEQ ID NO: 547873 - RNA, 19 nt, Homo sapiens
  misc_RNA (1)...(19): siRNA sense strand
gagaucgauauuguucuua

SEQ ID NO: 547874 - RNA, 19 nt, Homo sapiens
  misc_RNA (1)...(19): siRNA sense strand
gaggcuagaacaccaagga

SEQ ID NO: 547875 - RNA, 19 nt, Homo sapiens
  misc_RNA (1)...(19): siRNA sense strand
caacaaugagagaugugaa

SEQ ID NO: 547876 - RNA, 19 nt, Homo sapiens
  misc_RNA (1)...(19): siRNA sense strand
gaguaugaucuuauuguuc

SEQ ID NO: 547877 - RNA, 19 nt, Homo sapiens
  misc_RNA (1)...(19): siRNA sense strand
aacaaucgccaaauaugaa

SEQ ID NO: 547878 - RNA, 19 nt, Homo sapiens
  misc_RNA (1)...(19): siRNA sense strand
auuugaaucuccagaauca

SEQ ID NO: 547879 - RNA, 19 nt, Homo sapiens
  misc_RNA (1)...(19): siRNA sense strand
caaacagcaggagauaauu

SEQ ID NO: 547880 - RNA, 19 nt, Homo sapiens
  misc_RNA (1)...(19): siRNA sense strand
caauuugugagaucgauau

SEQ ID NO: 547881 - RNA, 19 nt, Homo sapiens
  misc_RNA (1)...(19): siRNA sense strand
gggcauugaagauugucua

SEQ ID NO: 547882 - RNA, 19 nt, Homo sapiens
  misc_RNA (1)...(19): siRNA sense strand
agacugacagauuugguaa

SEQ ID NO: 547883 - RNA, 19 nt, Homo sapiens
  misc_RNA (1)...(19): siRNA sense strand
ugaagauggcaaaguagaa

SEQ ID NO: 547884 - RNA, 19 nt, Homo sapiens
  misc_RNA (1)...(19): siRNA sense strand
gaaagaacuagccuuaccu

SEQ ID NO: 547885 - RNA, 19 nt, Homo sapiens
  misc_RNA (1)...(19): siRNA sense strand
auuuagugcuuguugauga

SEQ ID NO: 547886 - RNA, 19 nt, Homo sapiens
  misc_RNA (1)...(19): siRNA sense strand
caacuccaacaaugagaga

SEQ ID NO: 547887 - RNA, 19 nt, Homo sapiens
  misc_RNA (1)...(19): siRNA sense strand
aggaugugauuguuggaaa

SEQ ID NO: 547888 - RNA, 19 nt, Homo sapiens
  misc_RNA (1)...(19): siRNA sense strand
acaauagugagaagacuga

SEQ ID NO: 547889 - RNA, 19 nt, Homo sapiens
  misc_RNA (1)...(19): siRNA sense strand
agauggaagugggcauuga

SEQ ID NO: 547890 - RNA, 19 nt, Homo sapiens
  misc_RNA (1)...(19): siRNA sense strand
caaacuuucaccagcgauu

SEQ ID NO: 547891 - RNA, 19 nt, Homo sapiens
  misc_RNA (1)...(19): siRNA sense strand
cccaguaccacaacagaaa

SEQ ID NO: 547892 - RNA, 19 nt, Homo sapiens
  misc_RNA (1)...(19): siRNA sense strand
ccaggaaaauggcagaaau

SEQ ID NO: 547893 - RNA, 19 nt, Homo sapiens
  misc_RNA (1)...(19): siRNA sense strand
ucaauuccaauaaggcuau

SEQ ID NO: 547894 - RNA, 19 nt, Homo sapiens
  misc_RNA (1)...(19): siRNA sense strand
uaccacaacagaaacagaa

SEQ ID NO: 547895 - RNA, 19 nt, Homo sapiens
  misc_RNA (1)...(19): siRNA sense strand
ggaugugauuguuggaaaa

SEQ ID NO: 547896 - RNA, 19 nt, Homo sapiens
  misc_RNA (1)...(19): siRNA sense strand
uaagauggaagugggcauu

SEQ ID NO: 547897 - RNA, 19 nt, Homo sapiens
  misc_RNA (1)...(19): siRNA sense strand
agccuuaccuggagaacug

SEQ ID NO: 547898 - RNA, 19 nt, Homo sapiens
  misc_RNA (1)...(19): siRNA sense strand
uuaaaggaugugauuguug

SEQ ID NO: 547899 - RNA, 19 nt, Homo sapiens
  misc_RNA (1)...(19): siRNA sense strand
gaaaugaaaacugaagaug

SEQ ID NO: 547900 - RNA, 19 nt, Homo sapiens
  misc_RNA (1)...(19): siRNA sense strand
aaagccauaugaaucuuac

SEQ ID NO: 547901 - RNA, 19 nt, Homo sapiens
  misc_RNA (1)...(19): siRNA sense strand
aaacuuucaccagcgauuu

SEQ ID NO: 547902 - RNA, 19 nt, Homo sapiens
  misc_RNA (1)...(19): siRNA sense strand
ccaacaaugagagauguga

SEQ ID NO: 547903 - RNA, 19 nt, Homo sapiens
  misc_RNA (1)...(19): siRNA sense strand
guaccacaacagaaacaga

SEQ ID NO: 547904 - RNA, 19 nt, Homo sapiens
  misc_RNA (1)...(19): siRNA sense strand
aagugggcauugaagauug

SEQ ID NO: 547905 - RNA, 19 nt, Homo sapiens
  misc_RNA (1)...(19): siRNA sense strand
cuuaaagugacaauaguga

SEQ ID NO: 547906 - RNA, 19 nt, Homo sapiens
  misc_RNA (1)...(19): siRNA sense strand
cuucaaacagcaggagaua

SEQ ID NO: 547907 - RNA, 19 nt, Homo sapiens
  misc_RNA (1)...(19): siRNA sense strand
caaugagagaugugaacaa

SEQ ID NO: 547908 - RNA, 19 nt, Homo sapiens
  misc_RNA (1)...(19): siRNA sense strand
ccaauuugugagaucgaua

SEQ ID NO: 547909 - RNA, 19 nt, Homo sapiens
  misc_RNA (1)...(19): siRNA sense strand
ucaccagcuugccaccuau

SEQ ID NO: 547910 - RNA, 19 nt, Homo sapiens
  misc_RNA (1)...(19): siRNA sense strand
agagaucacaggaauugga

SEQ ID NO: 547911 - RNA, 19 nt, Homo sapiens
  misc_RNA (1)...(19): siRNA sense strand
ggaaaauggcagaaaugaa

SEQ ID NO: 547912 - RNA, 19 nt, Homo sapiens
  misc_RNA (1)...(19): siRNA sense strand
gaaaacugaagauggcaaa

SEQ ID NO: 547913 - RNA, 19 nt, Homo sapiens
  misc_RNA (1)...(19): siRNA sense strand
ucaaguaucggaagaauga

SEQ ID NO: 547914 - RNA, 19 nt, Homo sapiens
  misc_RNA (1)...(19): siRNA sense strand
gagcauccgggacaacuuu

SEQ ID NO: 547915 - RNA, 19 nt, Homo sapiens
  misc_RNA (1)...(19): siRNA sense strand
gaagaucauugagaagagu

SEQ ID NO: 547916 - RNA, 19 nt, Homo sapiens
  misc_RNA (1)...(19): siRNA sense strand
caacgacaagguccucuuu

SEQ ID NO: 547917 - RNA, 19 nt, Homo sapiens
  misc_RNA (1)...(19): siRNA sense strand
ugucagagguggagcacuu

SEQ ID NO: 547918 - RNA, 19 nt, Homo sapiens
  misc_RNA (1)...(19): siRNA sense strand
cgagaucccuuacuucacu

SEQ ID NO: 547919 - RNA, 19 nt, Homo sapiens
  misc_RNA (1)...(19): siRNA sense strand
gagaucgugugguccauca

SEQ ID NO: 547920 - RNA, 19 nt, Homo sapiens
  misc_RNA (1)...(19): siRNA sense strand
gagaaugaccgcaccaucu

SEQ ID NO: 547921 - RNA, 19 nt, Homo sapiens
  misc_RNA (1)...(19): siRNA sense strand
uaucacgcuucgagaauga

SEQ ID NO: 547922 - RNA, 19 nt, Homo sapiens
  misc_RNA (1)...(19): siRNA sense strand
gacaagguccucuuugaca

SEQ ID NO: 547923 - RNA, 19 nt, Homo sapiens
  misc_RNA (1)...(19): siRNA sense strand
ucacgcagaauggagauua

SEQ ID NO: 547924 - RNA, 19 nt, Homo sapiens
  misc_RNA (1)...(19): siRNA sense strand
caucaaguaucggaagaau

SEQ ID NO: 547925 - RNA, 19 nt, Homo sapiens
  misc_RNA (1)...(19): siRNA sense strand
caacuuuguuaucaucuac

SEQ ID NO: 547926 - RNA, 19 nt, Homo sapiens
  misc_RNA (1)...(19): siRNA sense strand
gcccaaugaugccgacuca

SEQ ID NO: 547927 - RNA, 19 nt, Homo sapiens
  misc_RNA (1)...(19): siRNA sense strand
acgacaagguccucuuuga

SEQ ID NO: 547928 - RNA, 19 nt, Homo sapiens
  misc_RNA (1)...(19): siRNA sense strand
uggacgagcucauggacuu

SEQ ID NO: 547929 - RNA, 19 nt, Homo sapiens
  misc_RNA (1)...(19): siRNA sense strand
gguccgaaggcaucaagua

SEQ ID NO: 547930 - RNA, 19 nt, Homo sapiens
  misc_RNA (1)...(19): siRNA sense strand
ucaaacacaacaaccugua

SEQ ID NO: 547931 - RNA, 19 nt, Homo sapiens
  misc_RNA (1)...(19): siRNA sense strand
gagaucccuuacuucacua

SEQ ID NO: 547932 - RNA, 19 nt, Homo sapiens
  misc_RNA (1)...(19): siRNA sense strand
acaagguccucuuugacaa

SEQ ID NO: 547933 - RNA, 19 nt, Homo sapiens
  misc_RNA (1)...(19): siRNA sense strand
ccguggagcuggaggaugu

SEQ ID NO: 547934 - RNA, 19 nt, Homo sapiens
  misc_RNA (1)...(19): siRNA sense strand
gcuggaggaugugaaguuc

SEQ ID NO: 547935 - RNA, 19 nt, Homo sapiens
  misc_RNA (1)...(19): siRNA sense strand
acacccacgucaagccuuu

SEQ ID NO: 547936 - RNA, 19 nt, Homo sapiens
  misc_RNA (1)...(19): siRNA sense strand
gaucgugggcuccaucaag

SEQ ID NO: 547937 - RNA, 19 nt, Homo sapiens
  misc_RNA (1)...(19): siRNA sense strand
caaacacaacaaccuguau

SEQ ID NO: 547938 - RNA, 19 nt, Homo sapiens
  misc_RNA (1)...(19): siRNA sense strand
ggcaucaaguaucggaaga

SEQ ID NO: 547939 - RNA, 19 nt, Homo sapiens
  misc_RNA (1)...(19): siRNA sense strand
ggucagcgccaacggcaau

SEQ ID NO: 547940 - RNA, 19 nt, Homo sapiens
  misc_RNA (1)...(19): siRNA sense strand
ugaagaucauugagaagag

SEQ ID NO: 547941 - RNA, 19 nt, Homo sapiens
  misc_RNA (1)...(19): siRNA sense strand
gaaggccacaagcuggaaa

SEQ ID NO: 547942 - RNA, 19 nt, Homo sapiens
  misc_RNA (1)...(19): siRNA sense strand
ggucuuuucuuuccucuau

SEQ ID NO: 547943 - RNA, 19 nt, Homo sapiens
  misc_RNA (1)...(19): siRNA sense strand
aguucgagcucauguccua

SEQ ID NO: 547944 - RNA, 19 nt, Homo sapiens
  misc_RNA (1)...(19): siRNA sense strand
ccgaaggcaucaaguaucg

SEQ ID NO: 547945 - RNA, 19 nt, Homo sapiens
  misc_RNA (1)...(19): siRNA sense strand
gcuaucacgcuucgagaau

SEQ ID NO: 547946 - RNA, 19 nt, Homo sapiens
  misc_RNA (1)...(19): siRNA sense strand
ucaaguucgagaucccuua

SEQ ID NO: 547947 - RNA, 19 nt, Homo sapiens
  misc_RNA (1)...(19): siRNA sense strand
gaugccgacucacccaagu

SEQ ID NO: 547948 - RNA, 19 nt, Homo sapiens
  misc_RNA (1)...(19): siRNA sense strand
gugcucaucugccggaacu

SEQ ID NO: 547949 - RNA, 19 nt, Homo sapiens
  misc_RNA (1)...(19): siRNA sense strand
guugccacauccaagaaga

SEQ ID NO: 547950 - RNA, 19 nt, Homo sapiens
  misc_RNA (1)...(19): siRNA sense strand
cccgaucagugucaaguuc

SEQ ID NO: 547951 - RNA, 19 nt, Homo sapiens
  misc_RNA (1)...(19): siRNA sense strand
guccgaaggcaucaaguau

SEQ ID NO: 547952 - RNA, 19 nt, Homo sapiens
  misc_RNA (1)...(19): siRNA sense strand
aaacacaacaaccuguauc

SEQ ID NO: 547953 - RNA, 19 nt, Homo sapiens
  misc_RNA (1)...(19): siRNA sense strand
cguuauaucacgcagaaug

SEQ ID NO: 547954 - RNA, 19 nt, Homo sapiens
  misc_RNA (1)...(19): siRNA sense strand
ggaaggccacaagcuggaa

SEQ ID NO: 547955 - RNA, 19 nt, Homo sapiens
  misc_RNA (1)...(19): siRNA sense strand
accugaagaucauugagaa

SEQ ID NO: 547956 - RNA, 19 nt, Homo sapiens
  misc_RNA (1)...(19): siRNA sense strand
cuaucacgcuucgagaaug

SEQ ID NO: 547957 - RNA, 19 nt, Homo sapiens
  misc_RNA (1)...(19): siRNA sense strand
auaagguggugcagguguu

SEQ ID NO: 547958 - RNA, 19 nt, Homo sapiens
  misc_RNA (1)...(19): siRNA sense strand
cggcaaggaguaccugaug

SEQ ID NO: 547959 - RNA, 19 nt, Homo sapiens
  misc_RNA (1)...(19): siRNA sense strand
ggucaacagccaacaacgu

SEQ ID NO: 547960 - RNA, 19 nt, Homo sapiens
  misc_RNA (1)...(19): siRNA sense strand
uaagguggugcagguguuu

SEQ ID NO: 547961 - RNA, 19 nt, Homo sapiens
  misc_RNA (1)...(19): siRNA sense strand
cugaagaucauugagaaga

SEQ ID NO: 547962 - RNA, 19 nt, Homo sapiens
  misc_RNA (1)...(19): siRNA sense strand
gaucgugugguccaucaag

SEQ ID NO: 547963 - RNA, 19 nt, Homo sapiens
  misc_RNA (1)...(19): siRNA sense strand
gcaucgaguacaugaucaa

SEQ ID NO: 547964 - RNA, 19 nt, Homo sapiens
  misc_RNA (1)...(19): siRNA sense strand
gccugggccucaacgacaa

SEQ ID NO: 547965 - RNA, 19 nt, Homo sapiens
  misc_RNA (1)...(19): siRNA sense strand
gcaucaaguaucggaagaa

SEQ ID NO: 547966 - RNA, 19 nt, Homo sapiens
  misc_RNA (1)...(19): siRNA sense strand
ucuacgugcuggaccugaa

SEQ ID NO: 547967 - RNA, 19 nt, Homo sapiens
  misc_RNA (1)...(19): siRNA sense strand
guacaugaucaaggccaaa

SEQ ID NO: 547968 - RNA, 19 nt, Homo sapiens
  misc_RNA (1)...(19): siRNA sense strand
gaccgcaccaucuccuuca

SEQ ID NO: 547969 - RNA, 19 nt, Homo sapiens
  misc_RNA (1)...(19): siRNA sense strand
gaacuucugugagcaggua

SEQ ID NO: 547970 - RNA, 19 nt, Homo sapiens
  misc_RNA (1)...(19): siRNA sense strand
cagaagaggacaugaauaa

SEQ ID NO: 547971 - RNA, 19 nt, Homo sapiens
  misc_RNA (1)...(19): siRNA sense strand
gaacaacaccgucaucgau

SEQ ID NO: 547972 - RNA, 19 nt, Homo sapiens
  misc_RNA (1)...(19): siRNA sense strand
ccucaaaccugaucggaaa

SEQ ID NO: 547973 - RNA, 19 nt, Homo sapiens
  misc_RNA (1)...(19): siRNA sense strand
agaaggagcugcaggauag

SEQ ID NO: 547974 - RNA, 19 nt, Homo sapiens
  misc_RNA (1)...(19): siRNA sense strand
ggccugaccuuuaacaaga

SEQ ID NO: 547975 - RNA, 19 nt, Homo sapiens
  misc_RNA (1)...(19): siRNA sense strand
gcacagacucccugagaaa

SEQ ID NO: 547976 - RNA, 19 nt, Homo sapiens
  misc_RNA (1)...(19): siRNA sense strand
gaagaggacaugaauaagu

SEQ ID NO: 547977 - RNA, 19 nt, Homo sapiens
  misc_RNA (1)...(19): siRNA sense strand
gaugcaggccugaccuuua

SEQ ID NO: 547978 - RNA, 19 nt, Homo sapiens
  misc_RNA (1)...(19): siRNA sense strand
ggaacgagcaggugauaau

SEQ ID NO: 547979 - RNA, 19 nt, Homo sapiens
  misc_RNA (1)...(19): siRNA sense strand
gacauucacucuggacaaa

SEQ ID NO: 547980 - RNA, 19 nt, Homo sapiens
  misc_RNA (1)...(19): siRNA sense strand
gcacaauacagaauucaga

SEQ ID NO: 547981 - RNA, 19 nt, Homo sapiens
  misc_RNA (1)...(19): siRNA sense strand
gcaacacccucccugcaau

SEQ ID NO: 547982 - RNA, 19 nt, Homo sapiens
  misc_RNA (1)...(19): siRNA sense strand
ucaaguccauggcuucuau

SEQ ID NO: 547983 - RNA, 19 nt, Homo sapiens
  misc_RNA (1)...(19): siRNA sense strand
gcaaagccaacaccacuug

SEQ ID NO: 547984 - RNA, 19 nt, Homo sapiens
  misc_RNA (1)...(19): siRNA sense strand
ggacagcaccaauucugaa

SEQ ID NO: 547985 - RNA, 19 nt, Homo sapiens
  misc_RNA (1)...(19): siRNA sense strand
gagcacagacucccugaga

SEQ ID NO: 547986 - RNA, 19 nt, Homo sapiens
  misc_RNA (1)...(19): siRNA sense strand
cagcagagaccgccaauca

SEQ ID NO: 547987 - RNA, 19 nt, Homo sapiens
  misc_RNA (1)...(19): siRNA sense strand
gaacgagcaggugauaauu

SEQ ID NO: 547988 - RNA, 19 nt, Homo sapiens
  misc_RNA (1)...(19): siRNA sense strand
ccagaucuguggcuucaau

SEQ ID NO: 547989 - RNA, 19 nt, Homo sapiens
  misc_RNA (1)...(19): siRNA sense strand
gcaccggcagcguugauua

SEQ ID NO: 547990 - RNA, 19 nt, Homo sapiens
  misc_RNA (1)...(19): siRNA sense strand
ucacuuggcuacccaucaa

SEQ ID NO: 547991 - RNA, 19 nt, Homo sapiens
  misc_RNA (1)...(19): siRNA sense strand
caacucuguucacguuuga

SEQ ID NO: 547992 - RNA, 19 nt, Homo sapiens
  misc_RNA (1)...(19): siRNA sense strand
aagaggacaugaauaagug

SEQ ID NO: 547993 - RNA, 19 nt, Homo sapiens
  misc_RNA (1)...(19): siRNA sense strand
gcagagaccgccaaucagu

SEQ ID NO: 547994 - RNA, 19 nt, Homo sapiens
  misc_RNA (1)...(19): siRNA sense strand
gaucaguggucaaguccau

SEQ ID NO: 547995 - RNA, 19 nt, Homo sapiens
  misc_RNA (1)...(19): siRNA sense strand
cgagacagauaaugaggau

SEQ ID NO: 547996 - RNA, 19 nt, Homo sapiens
  misc_RNA (1)...(19): siRNA sense strand
gcuccgagacagauaauga

SEQ ID NO: 547997 - RNA, 19 nt, Homo sapiens
  misc_RNA (1)...(19): siRNA sense strand
gaucggacagcaccaauuc

SEQ ID NO: 547998 - RNA, 19 nt, Homo sapiens
  misc_RNA (1)...(19): siRNA sense strand
augcaggccugaccuuuaa

SEQ ID NO: 547999 - RNA, 19 nt, Homo sapiens
  misc_RNA (1)...(19): siRNA sense strand
acaacuaugugcccaugaa

SEQ ID NO: 548000 - RNA, 19 nt, Homo sapiens
  misc_RNA (1)...(19): siRNA sense strand
ccaacucuguucacguuug

SEQ ID NO: 548001 - RNA, 19 nt, Homo sapiens
  misc_RNA (1)...(19): siRNA sense strand
gaacuaugucccuaugcaa

SEQ ID NO: 548002 - RNA, 19 nt, Homo sapiens
  misc_RNA (1)...(19): siRNA sense strand
gaggauguguacaccuuca

SEQ ID NO: 548003 - RNA, 19 nt, Homo sapiens
  misc_RNA (1)...(19): siRNA sense strand
gacagaagaggacaugaau

SEQ ID NO: 548004 - RNA, 19 nt, Homo sapiens
  misc_RNA (1)...(19): siRNA sense strand
gcagaggaagugagauuca

SEQ ID NO: 548005 - RNA, 19 nt, Homo sapiens
  misc_RNA (1)...(19): siRNA sense strand
ggacauucacucuggacaa

SEQ ID NO: 548006 - RNA, 19 nt, Homo sapiens
  misc_RNA (1)...(19): siRNA sense strand
gugauggaguuggcucuuu

SEQ ID NO: 548007 - RNA, 19 nt, Homo sapiens
  misc_RNA (1)...(19): siRNA sense strand
cagcagaggaagugagauu

SEQ ID NO: 548008 - RNA, 19 nt, Homo sapiens
  misc_RNA (1)...(19): siRNA sense strand
gcaggauaguuuuguguuu

SEQ ID NO: 548009 - RNA, 19 nt, Homo sapiens
  misc_RNA (1)...(19): siRNA sense strand
cuucauccgucaccucuga

SEQ ID NO: 548010 - RNA, 19 nt, Homo sapiens
  misc_RNA (1)...(19): siRNA sense strand
gcaccaauucugaagacaa

SEQ ID NO: 548011 - RNA, 19 nt, Homo sapiens
  misc_RNA (1)...(19): siRNA sense strand
ccagaucccuaggacauuc

SEQ ID NO: 548012 - RNA, 19 nt, Homo sapiens
  misc_RNA (1)...(19): siRNA sense strand
cagcgcaccucaggaguau

SEQ ID NO: 548013 - RNA, 19 nt, Homo sapiens
  misc_RNA (1)...(19): siRNA sense strand
guucuggaauacuacaaga

SEQ ID NO: 548014 - RNA, 19 nt, Homo sapiens
  misc_RNA (1)...(19): siRNA sense strand
agagaacuaugucccuaug

SEQ ID NO: 548015 - RNA, 19 nt, Homo sapiens
  misc_RNA (1)...(19): siRNA sense strand
gaucaucaaccugaacuuc

SEQ ID NO: 548016 - RNA, 19 nt, Homo sapiens
  misc_RNA (1)...(19): siRNA sense strand
ccagggcaauggacacugu

SEQ ID NO: 548017 - RNA, 19 nt, Homo sapiens
  misc_RNA (1)...(19): siRNA sense strand
cagauaaugaggaugugua

SEQ ID NO: 548018 - RNA, 19 nt, Homo sapiens
  misc_RNA (1)...(19): siRNA sense strand
ucaagucaccuaucaccaa

SEQ ID NO: 548019 - RNA, 19 nt, Homo sapiens
  misc_RNA (1)...(19): siRNA sense strand
gaacgaucacuccaagaag

SEQ ID NO: 548020 - RNA, 19 nt, Homo sapiens
  misc_RNA (1)...(19): siRNA sense strand
ccugugagaccuacgagua

SEQ ID NO: 548021 - RNA, 19 nt, Homo sapiens
  misc_RNA (1)...(19): siRNA sense strand
gggcaguccucagcagaga

SEQ ID NO: 548022 - RNA, 19 nt, Homo sapiens
  misc_RNA (1)...(19): siRNA sense strand
ccacuugaccugaggaaca

SEQ ID NO: 548023 - RNA, 19 nt, Homo sapiens
  misc_RNA (1)...(19): siRNA sense strand
agacagaagaggacaugaa

SEQ ID NO: 548024 - RNA, 19 nt, Homo sapiens
  misc_RNA (1)...(19): siRNA sense strand
ggaacaacaccgucaucga

SEQ ID NO: 548025 - RNA, 19 nt, Homo sapiens
  misc_RNA (1)...(19): siRNA sense strand
aaaccacaaugccaugaca

SEQ ID NO: 548026 - RNA, 19 nt, Homo sapiens
  misc_RNA (1)...(19): siRNA sense strand
agacagauaaugaggaugu

SEQ ID NO: 548027 - RNA, 19 nt, Homo sapiens
  misc_RNA (1)...(19): siRNA sense strand
cagacucccugagaaaugu

SEQ ID NO: 548028 - RNA, 19 nt, Homo sapiens
  misc_RNA (1)...(19): siRNA sense strand
agaacgaucacuccaagaa

SEQ ID NO: 548029 - RNA, 19 nt, Homo sapiens
  misc_RNA (1)...(19): siRNA sense strand
ccagugaacgcaccuuuua

SEQ ID NO: 548030 - RNA, 19 nt, Homo sapiens
  misc_RNA (1)...(19): siRNA sense strand
agccaacucuguucacguu

SEQ ID NO: 548031 - RNA, 19 nt, Homo sapiens
  misc_RNA (1)...(19): siRNA sense strand
gaagguggacuacguucag

SEQ ID NO: 548032 - RNA, 19 nt, Homo sapiens
  misc_RNA (1)...(19): siRNA sense strand
cgucaccucugaugagaag

SEQ ID NO: 548033 - RNA, 19 nt, Homo sapiens
  misc_RNA (1)...(19): siRNA sense strand
ccaauucugaagacaacua

SEQ ID NO: 548034 - RNA, 19 nt, Homo sapiens
  misc_RNA (1)...(19): siRNA sense strand
ugauggaguuggcucuuuc

SEQ ID NO: 548035 - RNA, 19 nt, Homo sapiens
  misc_RNA (1)...(19): siRNA sense strand
gguagacaauauggauguu

SEQ ID NO: 548036 - RNA, 19 nt, Homo sapiens
  misc_RNA (1)...(19): siRNA sense strand
aagaaggagcugcaggaua

SEQ ID NO: 548037 - RNA, 19 nt, Homo sapiens
  misc_RNA (1)...(19): siRNA sense strand
gaacaguccugccccuaag

SEQ ID NO: 548038 - RNA, 19 nt, Homo sapiens
  misc_RNA (1)...(19): siRNA sense strand
gaccagugaacgcaccuuu

SEQ ID NO: 548039 - RNA, 19 nt, Homo sapiens
  misc_RNA (1)...(19): siRNA sense strand
gagcggugacccagauguu

SEQ ID NO: 548040 - RNA, 19 nt, Homo sapiens
  misc_RNA (1)...(19): siRNA sense strand
ccagcgcaccucaggagua

SEQ ID NO: 548041 - RNA, 19 nt, Homo sapiens
  misc_RNA (1)...(19): siRNA sense strand
ccugguggcugagacagaa

SEQ ID NO: 548042 - RNA, 19 nt, Homo sapiens
  misc_RNA (1)...(19): siRNA sense strand
agaacuaugucccuaugca

SEQ ID NO: 548043 - RNA, 19 nt, Homo sapiens
  misc_RNA (1)...(19): siRNA sense strand
ucaucaaccugaacuucug

SEQ ID NO: 548044 - RNA, 19 nt, Homo sapiens
  misc_RNA (1)...(19): siRNA sense strand
gaggagugacacagcugua

SEQ ID NO: 548045 - RNA, 19 nt, Homo sapiens
  misc_RNA (1)...(19): siRNA sense strand
caagccaagucaggcagaa

SEQ ID NO: 548046 - RNA, 19 nt, Homo sapiens
  misc_RNA (1)...(19): siRNA sense strand
acagaagaggacaugaaua

SEQ ID NO: 548047 - RNA, 19 nt, Homo sapiens
  misc_RNA (1)...(19): siRNA sense strand
cggcagcguugauuaucug

SEQ ID NO: 548048 - RNA, 19 nt, Homo sapiens
  misc_RNA (1)...(19): siRNA sense strand
gagcgucuacaucccaaug

SEQ ID NO: 548049 - RNA, 19 nt, Homo sapiens
  misc_RNA (1)...(19): siRNA sense strand
gcccaugaauccagguucu

SEQ ID NO: 548050 - RNA, 19 nt, Homo sapiens
  misc_RNA (1)...(19): siRNA sense strand
caccaauucugaagacaac

SEQ ID NO: 548051 - RNA, 19 nt, Homo sapiens
  misc_RNA (1)...(19): siRNA sense strand
agagaccgccaaucaguga

SEQ ID NO: 548052 - RNA, 19 nt, Homo sapiens
  misc_RNA (1)...(19): siRNA sense strand
ggagugccagcuucucuca

SEQ ID NO: 548053 - RNA, 19 nt, Homo sapiens
  misc_RNA (1)...(19): siRNA sense strand
gcaaggagugccagcuucu

SEQ ID NO: 548054 - RNA, 19 nt, Homo sapiens
  misc_RNA (1)...(19): siRNA sense strand
gauguguacaccuucaaga

SEQ ID NO: 548055 - RNA, 19 nt, Homo sapiens
  misc_RNA (1)...(19): siRNA sense strand
caacacccucccugcaaug

SEQ ID NO: 548056 - RNA, 19 nt, Homo sapiens
  misc_RNA (1)...(19): siRNA sense strand
cagcaccaauucugaagac

SEQ ID NO: 548057 - RNA, 19 nt, Homo sapiens
  misc_RNA (1)...(19): siRNA sense strand
caggagacagcgaagagaa

SEQ ID NO: 548058 - RNA, 19 nt, Homo sapiens
  misc_RNA (1)...(19): siRNA sense strand
ggagugacacagcuguaca

SEQ ID NO: 548059 - RNA, 19 nt, Homo sapiens
  misc_RNA (1)...(19): siRNA sense strand
gcaagccaucuacuucauc

SEQ ID NO: 548060 - RNA, 19 nt, Homo sapiens
  misc_RNA (1)...(19): siRNA sense strand
gccugaccuuuaacaagaa

SEQ ID NO: 548061 - RNA, 19 nt, Homo sapiens
  misc_RNA (1)...(19): siRNA sense strand
caaagccaacaccacuuga

SEQ ID NO: 548062 - RNA, 19 nt, Homo sapiens
  misc_RNA (1)...(19): siRNA sense strand
ucagagacaguaccuacga

SEQ ID NO: 548063 - RNA, 19 nt, Homo sapiens
  misc_RNA (1)...(19): siRNA sense strand
gagugacacagcuguacaa

SEQ ID NO: 548064 - RNA, 19 nt, Homo sapiens
  misc_RNA (1)...(19): siRNA sense strand
cgggaucaguggucaaguc

SEQ ID NO: 548065 - RNA, 19 nt, Homo sapiens
  misc_RNA (1)...(19): siRNA sense strand
cacuugaccugaggaacaa

SEQ ID NO: 548066 - RNA, 19 nt, Homo sapiens
  misc_RNA (1)...(19): siRNA sense strand
caacuaugugcccaugaau

SEQ ID NO: 548067 - RNA, 19 nt, Homo sapiens
  misc_RNA (1)...(19): siRNA sense strand
agacagcgaagagaacuau

SEQ ID NO: 548068 - RNA, 19 nt, Homo sapiens
  misc_RNA (1)...(19): siRNA sense strand
auaaguggguccagagcau

SEQ ID NO: 548069 - RNA, 19 nt, Homo sapiens
  misc_RNA (1)...(19): siRNA sense strand
gaacuucugugagcaggua

SEQ ID NO: 548070 - RNA, 19 nt, Homo sapiens
  misc_RNA (1)...(19): siRNA sense strand
cagaagaggacaugaauaa

SEQ ID NO: 548071 - RNA, 19 nt, Homo sapiens
  misc_RNA (1)...(19): siRNA sense strand
gaacaacaccgucaucgau

SEQ ID NO: 548072 - RNA, 19 nt, Homo sapiens
  misc_RNA (1)...(19): siRNA sense strand
ccucaaaccugaucggaaa

SEQ ID NO: 548073 - RNA, 19 nt, Homo sapiens
  misc_RNA (1)...(19): siRNA sense strand
agaaggagcugcaggauag

SEQ ID NO: 548074 - RNA, 19 nt, Homo sapiens
  misc_RNA (1)...(19): siRNA sense strand
ggccugaccuuuaacaaga

SEQ ID NO: 548075 - RNA, 19 nt, Homo sapiens
  misc_RNA (1)...(19): siRNA sense strand
gcacagacucccugagaaa

SEQ ID NO: 548076 - RNA, 19 nt, Homo sapiens
  misc_RNA (1)...(19): siRNA sense strand
gaagaggacaugaauaagu

SEQ ID NO: 548077 - RNA, 19 nt, Homo sapiens
  misc_RNA (1)...(19): siRNA sense strand
gaugcaggccugaccuuua

SEQ ID NO: 548078 - RNA, 19 nt, Homo sapiens
  misc_RNA (1)...(19): siRNA sense strand
ggaacgagcaggugauaau

SEQ ID NO: 548079 - RNA, 19 nt, Homo sapiens
  misc_RNA (1)...(19): siRNA sense strand
gacauucacucuggacaaa

SEQ ID NO: 548080 - RNA, 19 nt, Homo sapiens
  misc_RNA (1)...(19): siRNA sense strand
gcacaauacagaauucaga

SEQ ID NO: 548081 - RNA, 19 nt, Homo sapiens
  misc_RNA (1)...(19): siRNA sense strand
gcaacacccucccugcaau

SEQ ID NO: 548082 - RNA, 19 nt, Homo sapiens
  misc_RNA (1)...(19): siRNA sense strand
ucaaguccauggcuucuau

SEQ ID NO: 548083 - RNA, 19 nt, Homo sapiens
  misc_RNA (1)...(19): siRNA sense strand
gcaaagccaacaccacuug

SEQ ID NO: 548084 - RNA, 19 nt, Homo sapiens
  misc_RNA (1)...(19): siRNA sense strand
ggacagcaccaauucugaa

SEQ ID NO: 548085 - RNA, 19 nt, Homo sapiens
  misc_RNA (1)...(19): siRNA sense strand
gaugagcggugacccagau

SEQ ID NO: 548086 - RNA, 19 nt, Homo sapiens
  misc_RNA (1)...(19): siRNA sense strand
gagcacagacucccugaga

SEQ ID NO: 548087 - RNA, 19 nt, Homo sapiens
  misc_RNA (1)...(19): siRNA sense strand
cagcagagaccgccaauca

SEQ ID NO: 548088 - RNA, 19 nt, Homo sapiens
  misc_RNA (1)...(19): siRNA sense strand
gaacgagcaggugauaauu

SEQ ID NO: 548089 - RNA, 19 nt, Homo sapiens
  misc_RNA (1)...(19): siRNA sense strand
ccagaucuguggcuucaau

SEQ ID NO: 548090 - RNA, 19 nt, Homo sapiens
  misc_RNA (1)...(19): siRNA sense strand
gcaccggcagcguugauua

SEQ ID NO: 548091 - RNA, 19 nt, Homo sapiens
  misc_RNA (1)...(19): siRNA sense strand
ucacuuggcuacccaucaa

SEQ ID NO: 548092 - RNA, 19 nt, Homo sapiens
  misc_RNA (1)...(19): siRNA sense strand
caacucuguucacguuuga

SEQ ID NO: 548093 - RNA, 19 nt, Homo sapiens
  misc_RNA (1)...(19): siRNA sense strand
aagaggacaugaauaagug

SEQ ID NO: 548094 - RNA, 19 nt, Homo sapiens
  misc_RNA (1)...(19): siRNA sense strand
gcagagaccgccaaucagu

SEQ ID NO: 548095 - RNA, 19 nt, Homo sapiens
  misc_RNA (1)...(19): siRNA sense strand
gaucaguggucaaguccau

SEQ ID NO: 548096 - RNA, 19 nt, Homo sapiens
  misc_RNA (1)...(19): siRNA sense strand
cgagacagauaaugaggau

SEQ ID NO: 548097 - RNA, 19 nt, Homo sapiens
  misc_RNA (1)...(19): siRNA sense strand
gcuccgagacagauaauga

SEQ ID NO: 548098 - RNA, 19 nt, Homo sapiens
  misc_RNA (1)...(19): siRNA sense strand
gaucggacagcaccaauuc

SEQ ID NO: 548099 - RNA, 19 nt, Homo sapiens
  misc_RNA (1)...(19): siRNA sense strand
augcaggccugaccuuuaa

SEQ ID NO: 548100 - RNA, 19 nt, Homo sapiens
  misc_RNA (1)...(19): siRNA sense strand
acaacuaugugcccaugaa

SEQ ID NO: 548101 - RNA, 19 nt, Homo sapiens
  misc_RNA (1)...(19): siRNA sense strand
ccaacucuguucacguuug

SEQ ID NO: 548102 - RNA, 19 nt, Homo sapiens
  misc_RNA (1)...(19): siRNA sense strand
gaacuaugucccuaugcaa

SEQ ID NO: 548103 - RNA, 19 nt, Homo sapiens
  misc_RNA (1)...(19): siRNA sense strand
gaggauguguacaccuuca

SEQ ID NO: 548104 - RNA, 19 nt, Homo sapiens
  misc_RNA (1)...(19): siRNA sense strand
gacagaagaggacaugaau

SEQ ID NO: 548105 - RNA, 19 nt, Homo sapiens
  misc_RNA (1)...(19): siRNA sense strand
gcagaggaagugagauuca

SEQ ID NO: 548106 - RNA, 19 nt, Homo sapiens
  misc_RNA (1)...(19): siRNA sense strand
ggacauucacucuggacaa

SEQ ID NO: 548107 - RNA, 19 nt, Homo sapiens
  misc_RNA (1)...(19): siRNA sense strand
gugauggaguuggcucuuu

SEQ ID NO: 548108 - RNA, 19 nt, Homo sapiens
  misc_RNA (1)...(19): siRNA sense strand
cagcagaggaagugagauu

SEQ ID NO: 548109 - RNA, 19 nt, Homo sapiens
  misc_RNA (1)...(19): siRNA sense strand
gcaggauaguuuuguguuu

SEQ ID NO: 548110 - RNA, 19 nt, Homo sapiens
  misc_RNA (1)...(19): siRNA sense strand
cuucauccgucaccucuga

SEQ ID NO: 548111 - RNA, 19 nt, Homo sapiens
  misc_RNA (1)...(19): siRNA sense strand
gcaccaauucugaagacaa

SEQ ID NO: 548112 - RNA, 19 nt, Homo sapiens
  misc_RNA (1)...(19): siRNA sense strand
ccagaucccuaggacauuc

SEQ ID NO: 548113 - RNA, 19 nt, Homo sapiens
  misc_RNA (1)...(19): siRNA sense strand
cagcgcaccucaggaguau

SEQ ID NO: 548114 - RNA, 19 nt, Homo sapiens
  misc_RNA (1)...(19): siRNA sense strand
ccagggcaauggacacugu

SEQ ID NO: 548115 - RNA, 19 nt, Homo sapiens
  misc_RNA (1)...(19): siRNA sense strand
gaucaucaaccugaacuuc

SEQ ID NO: 548116 - RNA, 19 nt, Homo sapiens
  misc_RNA (1)...(19): siRNA sense strand
agagaacuaugucccuaug

SEQ ID NO: 548117 - RNA, 19 nt, Homo sapiens
  misc_RNA (1)...(19): siRNA sense strand
guucuggaauacuacaaga

SEQ ID NO: 548118 - RNA, 19 nt, Homo sapiens
  misc_RNA (1)...(19): siRNA sense strand
cagauaaugaggaugugua

SEQ ID NO: 548119 - RNA, 19 nt, Homo sapiens
  misc_RNA (1)...(19): siRNA sense strand
ucaagucaccuaucaccaa

SEQ ID NO: 548120 - RNA, 19 nt, Homo sapiens
  misc_RNA (1)...(19): siRNA sense strand
gaacgaucacuccaagaag

SEQ ID NO: 548121 - RNA, 19 nt, Homo sapiens
  misc_RNA (1)...(19): siRNA sense strand
ccugugagaccuacgagua

SEQ ID NO: 548122 - RNA, 19 nt, Homo sapiens
  misc_RNA (1)...(19): siRNA sense strand
gggcaguccucagcagaga

SEQ ID NO: 548123 - RNA, 19 nt, Homo sapiens
  misc_RNA (1)...(19): siRNA sense strand
ccacuugaccugaggaaca

SEQ ID NO: 548124 - RNA, 19 nt, Homo sapiens
  misc_RNA (1)...(19): siRNA sense strand
agacagaagaggacaugaa

SEQ ID NO: 548125 - RNA, 19 nt, Homo sapiens
  misc_RNA (1)...(19): siRNA sense strand
agaacgaucacuccaagaa

SEQ ID NO: 548126 - RNA, 19 nt, Homo sapiens
  misc_RNA (1)...(19): siRNA sense strand
ggaacaacaccgucaucga

SEQ ID NO: 548127 - RNA, 19 nt, Homo sapiens
  misc_RNA (1)...(19): siRNA sense strand
aaaccacaaugccaugaca

SEQ ID NO: 548128 - RNA, 19 nt, Homo sapiens
  misc_RNA (1)...(19): siRNA sense strand
agacagauaaugaggaugu

SEQ ID NO: 548129 - RNA, 19 nt, Homo sapiens
  misc_RNA (1)...(19): siRNA sense strand
cagacucccugagaaaugu

SEQ ID NO: 548130 - RNA, 19 nt, Homo sapiens
  misc_RNA (1)...(19): siRNA sense strand
ccagugaacgcaccuuuua

SEQ ID NO: 548131 - RNA, 19 nt, Homo sapiens
  misc_RNA (1)...(19): siRNA sense strand
agccaacucuguucacguu

SEQ ID NO: 548132 - RNA, 19 nt, Homo sapiens
  misc_RNA (1)...(19): siRNA sense strand
gaagguggacuacguucag

SEQ ID NO: 548133 - RNA, 19 nt, Homo sapiens
  misc_RNA (1)...(19): siRNA sense strand
cgucaccucugaugagaag

SEQ ID NO: 548134 - RNA, 19 nt, Homo sapiens
  misc_RNA (1)...(19): siRNA sense strand
ccaauucugaagacaacua

SEQ ID NO: 548135 - RNA, 19 nt, Homo sapiens
  misc_RNA (1)...(19): siRNA sense strand
ugauggaguuggcucuuuc

SEQ ID NO: 548136 - RNA, 19 nt, Homo sapiens
  misc_RNA (1)...(19): siRNA sense strand
gguagacaauauggauguu

SEQ ID NO: 548137 - RNA, 19 nt, Homo sapiens
  misc_RNA (1)...(19): siRNA sense strand
gaacaguccugccccuaag

SEQ ID NO: 548138 - RNA, 19 nt, Homo sapiens
  misc_RNA (1)...(19): siRNA sense strand
aagaaggagcugcaggaua

SEQ ID NO: 548139 - RNA, 19 nt, Homo sapiens
  misc_RNA (1)...(19): siRNA sense strand
gaccagugaacgcaccuuu

SEQ ID NO: 548140 - RNA, 19 nt, Homo sapiens
  misc_RNA (1)...(19): siRNA sense strand
gagcggugacccagauguu

SEQ ID NO: 548141 - RNA, 19 nt, Homo sapiens
  misc_RNA (1)...(19): siRNA sense strand
ccagcgcaccucaggagua

SEQ ID NO: 548142 - RNA, 19 nt, Homo sapiens
  misc_RNA (1)...(19): siRNA sense strand
ccugguggcugagacagaa

SEQ ID NO: 548143 - RNA, 19 nt, Homo sapiens
  misc_RNA (1)...(19): siRNA sense strand
agaacuaugucccuaugca

SEQ ID NO: 548144 - RNA, 19 nt, Homo sapiens
  misc_RNA (1)...(19): siRNA sense strand
ucaucaaccugaacuucug

SEQ ID NO: 548145 - RNA, 19 nt, Homo sapiens
  misc_RNA (1)...(19): siRNA sense strand
gaggagugacacagcugua

SEQ ID NO: 548146 - RNA, 19 nt, Homo sapiens
  misc_RNA (1)...(19): siRNA sense strand
caagccaagucaggcagaa

SEQ ID NO: 548147 - RNA, 19 nt, Homo sapiens
  misc_RNA (1)...(19): siRNA sense strand
acagaagaggacaugaaua

SEQ ID NO: 548148 - RNA, 19 nt, Homo sapiens
  misc_RNA (1)...(19): siRNA sense strand
cggcagcguugauuaucug

SEQ ID NO: 548149 - RNA, 19 nt, Homo sapiens
  misc_RNA (1)...(19): siRNA sense strand
gagcgucuacaucccaaug

SEQ ID NO: 548150 - RNA, 19 nt, Homo sapiens
  misc_RNA (1)...(19): siRNA sense strand
gcccaugaauccagguucu

SEQ ID NO: 548151 - RNA, 19 nt, Homo sapiens
  misc_RNA (1)...(19): siRNA sense strand
caccaauucugaagacaac

SEQ ID NO: 548152 - RNA, 19 nt, Homo sapiens
  misc_RNA (1)...(19): siRNA sense strand
agagaccgccaaucaguga

SEQ ID NO: 548153 - RNA, 19 nt, Homo sapiens
  misc_RNA (1)...(19): siRNA sense strand
ggagugccagcuucucuca

SEQ ID NO: 548154 - RNA, 19 nt, Homo sapiens
  misc_RNA (1)...(19): siRNA sense strand
gcaaggagugccagcuucu

SEQ ID NO: 548155 - RNA, 19 nt, Homo sapiens
  misc_RNA (1)...(19): siRNA sense strand
gauguguacaccuucaaga

SEQ ID NO: 548156 - RNA, 19 nt, Homo sapiens
  misc_RNA (1)...(19): siRNA sense strand
caacacccucccugcaaug

SEQ ID NO: 548157 - RNA, 19 nt, Homo sapiens
  misc_RNA (1)...(19): siRNA sense strand
cagcaccaauucugaagac

SEQ ID NO: 548158 - RNA, 19 nt, Homo sapiens
  misc_RNA (1)...(19): siRNA sense strand
caggagacagcgaagagaa

SEQ ID NO: 548159 - RNA, 19 nt, Homo sapiens
  misc_RNA (1)...(19): siRNA sense strand
ggagugacacagcuguaca

SEQ ID NO: 548160 - RNA, 19 nt, Homo sapiens
  misc_RNA (1)...(19): siRNA sense strand
gcaagccaucuacuucauc

SEQ ID NO: 548161 - RNA, 19 nt, Homo sapiens
  misc_RNA (1)...(19): siRNA sense strand
caaagccaacaccacuuga

SEQ ID NO: 548162 - RNA, 19 nt, Homo sapiens
  misc_RNA (1)...(19): siRNA sense strand
gccugaccuuuaacaagaa

SEQ ID NO: 548163 - RNA, 19 nt, Homo sapiens
  misc_RNA (1)...(19): siRNA sense strand
ucagagacaguaccuacga

SEQ ID NO: 548164 - RNA, 19 nt, Homo sapiens
  misc_RNA (1)...(19): siRNA sense strand
gagugacacagcuguacaa

SEQ ID NO: 548165 - RNA, 19 nt, Homo sapiens
  misc_RNA (1)...(19): siRNA sense strand
cgggaucaguggucaaguc

SEQ ID NO: 548166 - RNA, 19 nt, Homo sapiens
  misc_RNA (1)...(19): siRNA sense strand
cacuugaccugaggaacaa

SEQ ID NO: 548167 - RNA, 19 nt, Homo sapiens
  misc_RNA (1)...(19): siRNA sense strand
caacuaugugcccaugaau

SEQ ID NO: 548168 - RNA, 19 nt, Homo sapiens
  misc_RNA (1)...(19): siRNA sense strand
agacagcgaagagaacuau

SEQ ID NO: 548169 - RNA, 19 nt, Homo sapiens
  misc_RNA (1)...(19): siRNA sense strand
gaaaggggauaguggaguu

SEQ ID NO: 548170 - RNA, 19 nt, Homo sapiens
  misc_RNA (1)...(19): siRNA sense strand
aaagggauccagaggugaa

SEQ ID NO: 548171 - RNA, 19 nt, Homo sapiens
  misc_RNA (1)...(19): siRNA sense strand
gaggaccaaugggcuccaa

SEQ ID NO: 548172 - RNA, 19 nt, Homo sapiens
  misc_RNA (1)...(19): siRNA sense strand
gaaaggggauaguggaguu

SEQ ID NO: 548173 - RNA, 19 nt, Homo sapiens
  misc_RNA (1)...(19): siRNA sense strand
aaagggauccagaggugaa

SEQ ID NO: 548174 - RNA, 19 nt, Homo sapiens
  misc_RNA (1)...(19): siRNA sense strand
gaggaccaaugggcuccaa

SEQ ID NO: 548175 - RNA, 19 nt, Homo sapiens
  misc_RNA (1)...(19): siRNA sense strand
gaaaggggauaguggaguu

SEQ ID NO: 548176 - RNA, 19 nt, Homo sapiens
  misc_RNA (1)...(19): siRNA sense strand
aaagggauccagaggugaa

SEQ ID NO: 548177 - RNA, 19 nt, Homo sapiens
  misc_RNA (1)...(19): siRNA sense strand
gaggaccaaugggcuccaa

SEQ ID NO: 548178 - RNA, 19 nt, Homo sapiens
  misc_RNA (1)...(19): siRNA sense strand
gaaaggggauaguggaguu

SEQ ID NO: 548179 - RNA, 19 nt, Homo sapiens
  misc_RNA (1)...(19): siRNA sense strand
aaagggauccagaggugaa

SEQ ID NO: 548180 - RNA, 19 nt, Homo sapiens
  misc_RNA (1)...(19): siRNA sense strand
gaggaccaaugggcuccaa

SEQ ID NO: 548181 - RNA, 19 nt, Homo sapiens
  misc_RNA (1)...(19): siRNA sense strand
gaaaggggauaguggaguu

SEQ ID NO: 548182 - RNA, 19 nt, Homo sapiens
  misc_RNA (1)...(19): siRNA sense strand
aaagggauccagaggugaa

SEQ ID NO: 548183 - RNA, 19 nt, Homo sapiens
  misc_RNA (1)...(19): siRNA sense strand
gaggaccaaugggcuccaa

SEQ ID NO: 548184 - RNA, 19 nt, Homo sapiens
  misc_RNA (1)...(19): siRNA sense strand
aaagggauccagaggugaa

SEQ ID NO: 548185 - RNA, 19 nt, Homo sapiens
  misc_RNA (1)...(19): siRNA sense strand
gaggaccaaugggcuccaa

SEQ ID NO: 548186 - RNA, 19 nt, Homo sapiens
  misc_RNA (1)...(19): siRNA sense strand
gaaaggggauaguggaguu

SEQ ID NO: 548187 - RNA, 19 nt, Homo sapiens
  misc_RNA (1)...(19): siRNA sense strand
aaagggauccagaggugaa

SEQ ID NO: 548188 - RNA, 19 nt, Homo sapiens
  misc_RNA (1)...(19): siRNA sense strand
gaggaccaaugggcuccaa

SEQ ID NO: 548189 - RNA, 19 nt, Homo sapiens
  misc_RNA (1)...(19): siRNA sense strand
gaaaggggauaguggaguu

SEQ ID NO: 548190 - RNA, 19 nt, Homo sapiens
  misc_RNA (1)...(19): siRNA sense strand
cuucuccacugucaucaaa

SEQ ID NO: 548191 - RNA, 19 nt, Homo sapiens
  misc_RNA (1)...(19): siRNA sense strand
gcagcagcuucuccacugu

SEQ ID NO: 548192 - RNA, 19 nt, Homo sapiens
  misc_RNA (1)...(19): siRNA sense strand
aaagggauccagaggugaa

SEQ ID NO: 548193 - RNA, 19 nt, Homo sapiens
  misc_RNA (1)...(19): siRNA sense strand
ucaucaaacuggccauguc

SEQ ID NO: 548194 - RNA, 19 nt, Homo sapiens
  misc_RNA (1)...(19): siRNA sense strand
gaggaccaaugggcuccaa

SEQ ID NO: 548195 - RNA, 19 nt, Homo sapiens
  misc_RNA (1)...(19): siRNA sense strand
gaaaggggauaguggaguu

SEQ ID NO: 548196 - RNA, 19 nt, Homo sapiens
  misc_RNA (1)...(19): siRNA sense strand
aaagggauccagaggugaa

SEQ ID NO: 548197 - RNA, 19 nt, Homo sapiens
  misc_RNA (1)...(19): siRNA sense strand
gaggaccaaugggcuccaa

SEQ ID NO: 548198 - RNA, 19 nt, Homo sapiens
  misc_RNA (1)...(19): siRNA sense strand
gaaaggggauaguggaguu

SEQ ID NO: 548199 - RNA, 19 nt, Homo sapiens
  misc_RNA (1)...(19): siRNA sense strand
aaagggauccagaggugaa

SEQ ID NO: 548200 - RNA, 19 nt, Homo sapiens
  misc_RNA (1)...(19): siRNA sense strand
gaggaccaaugggcuccaa

SEQ ID NO: 548201 - RNA, 19 nt, Homo sapiens
  misc_RNA (1)...(19): siRNA sense strand
gaaaggggauaguggaguu

SEQ ID NO: 548202 - RNA, 19 nt, Homo sapiens
  misc_RNA (1)...(19): siRNA sense strand
aaagggauccagaggugaa

SEQ ID NO: 548203 - RNA, 19 nt, Homo sapiens
  misc_RNA (1)...(19): siRNA sense strand
gaggaccaaugggcuccaa

SEQ ID NO: 548204 - RNA, 19 nt, Homo sapiens
  misc_RNA (1)...(19): siRNA sense strand
gaaaggggauaguggaguu

SEQ ID NO: 548205 - RNA, 19 nt, Homo sapiens
  misc_RNA (1)...(19): siRNA sense strand
aaagggauccagaggugaa

SEQ ID NO: 548206 - RNA, 19 nt, Homo sapiens
  misc_RNA (1)...(19): siRNA sense strand
gaggaccaaugggcuccaa

SEQ ID NO: 548207 - RNA, 19 nt, Homo sapiens
  misc_RNA (1)...(19): siRNA sense strand
gaaaggggauaguggaguu

SEQ ID NO: 548208 - RNA, 19 nt, Homo sapiens
  misc_RNA (1)...(19): siRNA sense strand
aaagggauccagaggugaa

SEQ ID NO: 548209 - RNA, 19 nt, Homo sapiens
  misc_RNA (1)...(19): siRNA sense strand
gaggaccaaugggcuccaa

SEQ ID NO: 548210 - RNA, 19 nt, Homo sapiens
  misc_RNA (1)...(19): siRNA sense strand
aaagggauccagaggugaa

SEQ ID NO: 548211 - RNA, 19 nt, Homo sapiens
  misc_RNA (1)...(19): siRNA sense strand
gaggaccaaugggcuccaa

SEQ ID NO: 548212 - RNA, 19 nt, Homo sapiens
  misc_RNA (1)...(19): siRNA sense strand
gaaaggggauaguggaguu

SEQ ID NO: 548213 - RNA, 19 nt, Homo sapiens
  misc_RNA (1)...(19): siRNA sense strand
aaagggauccagaggugaa

SEQ ID NO: 548214 - RNA, 19 nt, Homo sapiens
  misc_RNA (1)...(19): siRNA sense strand
gaggaccaaugggcuccaa

SEQ ID NO: 548215 - RNA, 19 nt, Homo sapiens
  misc_RNA (1)...(19): siRNA sense strand
gaaaggggauaguggaguu

SEQ ID NO: 548216 - RNA, 19 nt, Homo sapiens
  misc_RNA (1)...(19): siRNA sense strand
cuucuccacugucaucaaa

SEQ ID NO: 548217 - RNA, 19 nt, Homo sapiens
  misc_RNA (1)...(19): siRNA sense strand
gcagcagcuucuccacugu

SEQ ID NO: 548218 - RNA, 19 nt, Homo sapiens
  misc_RNA (1)...(19): siRNA sense strand
aaagggauccagaggugaa

SEQ ID NO: 548219 - RNA, 19 nt, Homo sapiens
  misc_RNA (1)...(19): siRNA sense strand
ucaucaaacuggccauguc

SEQ ID NO: 548220 - RNA, 19 nt, Homo sapiens
  misc_RNA (1)...(19): siRNA sense strand
gaggaccaaugggcuccaa

SEQ ID NO: 548221 - RNA, 19 nt, Homo sapiens
  misc_RNA (1)...(19): siRNA sense strand
gaaaggggauaguggaguu

SEQ ID NO: 548222 - RNA, 19 nt, Homo sapiens
  misc_RNA (1)...(19): siRNA sense strand
aaagggauccagaggugaa

SEQ ID NO: 548223 - RNA, 19 nt, Homo sapiens
  misc_RNA (1)...(19): siRNA sense strand
gaggaccaaugggcuccaa

SEQ ID NO: 548224 - RNA, 19 nt, Homo sapiens
  misc_RNA (1)...(19): siRNA sense strand
gaaaggggauaguggaguu

SEQ ID NO: 548225 - RNA, 19 nt, Homo sapiens
  misc_RNA (1)...(19): siRNA sense strand
aaagggauccagaggugaa

SEQ ID NO: 548226 - RNA, 19 nt, Homo sapiens
  misc_RNA (1)...(19): siRNA sense strand
gaggaccaaugggcuccaa

SEQ ID NO: 548227 - RNA, 19 nt, Homo sapiens
  misc_RNA (1)...(19): siRNA sense strand
gaaaggggauaguggaguu

SEQ ID NO: 548228 - RNA, 19 nt, Homo sapiens
  misc_RNA (1)...(19): siRNA sense strand
aaagggauccagaggugaa

SEQ ID NO: 548229 - RNA, 19 nt, Homo sapiens
  misc_RNA (1)...(19): siRNA sense strand
gaggaccaaugggcuccaa

SEQ ID NO: 548230 - RNA, 19 nt, Homo sapiens
  misc_RNA (1)...(19): siRNA sense strand
gaaaggggauaguggaguu

SEQ ID NO: 548231 - RNA, 19 nt, Homo sapiens
  misc_RNA (1)...(19): siRNA sense strand
aaagggauccagaggugaa

SEQ ID NO: 548232 - RNA, 19 nt, Homo sapiens
  misc_RNA (1)...(19): siRNA sense strand
gaggaccaaugggcuccaa

SEQ ID NO: 548233 - RNA, 19 nt, Homo sapiens
  misc_RNA (1)...(19): siRNA sense strand
gaaaggggauaguggaguu

SEQ ID NO: 548234 - RNA, 19 nt, Homo sapiens
  misc_RNA (1)...(19): siRNA sense strand
aaagggauccagaggugaa

SEQ ID NO: 548235 - RNA, 19 nt, Homo sapiens
  misc_RNA (1)...(19): siRNA sense strand
gaggaccaaugggcuccaa

SEQ ID NO: 548236 - RNA, 19 nt, Homo sapiens
  misc_RNA (1)...(19): siRNA sense strand
aaagggauccagaggugaa

SEQ ID NO: 548237 - RNA, 19 nt, Homo sapiens
  misc_RNA (1)...(19): siRNA sense strand
gaggaccaaugggcuccaa

SEQ ID NO: 548238 - RNA, 19 nt, Homo sapiens
  misc_RNA (1)...(19): siRNA sense strand
gaaaggggauaguggaguu

SEQ ID NO: 548239 - RNA, 19 nt, Homo sapiens
  misc_RNA (1)...(19): siRNA sense strand
aaagggauccagaggugaa

SEQ ID NO: 548240 - RNA, 19 nt, Homo sapiens
  misc_RNA (1)...(19): siRNA sense strand
gaggaccaaugggcuccaa

SEQ ID NO: 548241 - RNA, 19 nt, Homo sapiens
  misc_RNA (1)...(19): siRNA sense strand
gaaaggggauaguggaguu

SEQ ID NO: 548242 - RNA, 19 nt, Homo sapiens
  misc_RNA (1)...(19): siRNA sense strand
cuucuccacugucaucaaa

SEQ ID NO: 548243 - RNA, 19 nt, Homo sapiens
  misc_RNA (1)...(19): siRNA sense strand
gcagcagcuucuccacugu

SEQ ID NO: 548244 - RNA, 19 nt, Homo sapiens
  misc_RNA (1)...(19): siRNA sense strand
aaagggauccagaggugaa

SEQ ID NO: 548245 - RNA, 19 nt, Homo sapiens
  misc_RNA (1)...(19): siRNA sense strand
ucaucaaacuggccauguc

SEQ ID NO: 548246 - RNA, 19 nt, Homo sapiens
  misc_RNA (1)...(19): siRNA sense strand
gaggaccaaugggcuccaa

SEQ ID NO: 548247 - RNA, 19 nt, Homo sapiens
  misc_RNA (1)...(19): siRNA sense strand
gaaaggggauaguggaguu

SEQ ID NO: 548248 - RNA, 19 nt, Homo sapiens
  misc_RNA (1)...(19): siRNA sense strand
aaagggauccagaggugaa

SEQ ID NO: 548249 - RNA, 19 nt, Homo sapiens
  misc_RNA (1)...(19): siRNA sense strand
gaggaccaaugggcuccaa

SEQ ID NO: 548250 - RNA, 19 nt, Homo sapiens
  misc_RNA (1)...(19): siRNA sense strand
gaaaggggauaguggaguu

SEQ ID NO: 548251 - RNA, 19 nt, Homo sapiens
  misc_RNA (1)...(19): siRNA sense strand
aaagggauccagaggugaa

SEQ ID NO: 548252 - RNA, 19 nt, Homo sapiens
  misc_RNA (1)...(19): siRNA sense strand
gaggaccaaugggcuccaa

SEQ ID NO: 548253 - RNA, 19 nt, Homo sapiens
  misc_RNA (1)...(19): siRNA sense strand
gaaaggggauaguggaguu

SEQ ID NO: 548254 - RNA, 19 nt, Homo sapiens
  misc_RNA (1)...(19): siRNA sense strand
aaagggauccagaggugaa

SEQ ID NO: 548255 - RNA, 19 nt, Homo sapiens
  misc_RNA (1)...(19): siRNA sense strand
gaggaccaaugggcuccaa

SEQ ID NO: 548256 - RNA, 19 nt, Homo sapiens
  misc_RNA (1)...(19): siRNA sense strand
gaaaggggauaguggaguu

SEQ ID NO: 548257 - RNA, 19 nt, Homo sapiens
  misc_RNA (1)...(19): siRNA sense strand
aaagggauccagaggugaa

SEQ ID NO: 548258 - RNA, 19 nt, Homo sapiens
  misc_RNA (1)...(19): siRNA sense strand
gaggaccaaugggcuccaa

SEQ ID NO: 548259 - RNA, 19 nt, Homo sapiens
  misc_RNA (1)...(19): siRNA sense strand
gaaaggggauaguggaguu

SEQ ID NO: 548260 - RNA, 19 nt, Homo sapiens
  misc_RNA (1)...(19): siRNA sense strand
aaagggauccagaggugaa

SEQ ID NO: 548261 - RNA, 19 nt, Homo sapiens
  misc_RNA (1)...(19): siRNA sense strand
gaggaccaaugggcuccaa

SEQ ID NO: 548262 - RNA, 19 nt, Homo sapiens
  misc_RNA (1)...(19): siRNA sense strand
aaagggauccagaggugaa

SEQ ID NO: 548263 - RNA, 19 nt, Homo sapiens
  misc_RNA (1)...(19): siRNA sense strand
gaggaccaaugggcuccaa

SEQ ID NO: 548264 - RNA, 19 nt, Homo sapiens
  misc_RNA (1)...(19): siRNA sense strand
gaaaggggauaguggaguu

SEQ ID NO: 548265 - RNA, 19 nt, Homo sapiens
  misc_RNA (1)...(19): siRNA sense strand
aaagggauccagaggugaa

SEQ ID NO: 548266 - RNA, 19 nt, Homo sapiens
  misc_RNA (1)...(19): siRNA sense strand
gaggaccaaugggcuccaa

SEQ ID NO: 548267 - RNA, 19 nt, Homo sapiens
  misc_RNA (1)...(19): siRNA sense strand
gaaaggggauaguggaguu

SEQ ID NO: 548268 - RNA, 19 nt, Homo sapiens
  misc_RNA (1)...(19): siRNA sense strand
cuucuccacugucaucaaa

SEQ ID NO: 548269 - RNA, 19 nt, Homo sapiens
  misc_RNA (1)...(19): siRNA sense strand
gcagcagcuucuccacugu

SEQ ID NO: 548270 - RNA, 19 nt, Homo sapiens
  misc_RNA (1)...(19): siRNA sense strand
aaagggauccagaggugaa

SEQ ID NO: 548271 - RNA, 19 nt, Homo sapiens
  misc_RNA (1)...(19): siRNA sense strand
ucaucaaacuggccauguc

SEQ ID NO: 548272 - RNA, 19 nt, Homo sapiens
  misc_RNA (1)...(19): siRNA sense strand
gaggaccaaugggcuccaa

SEQ ID NO: 548273 - RNA, 19 nt, Homo sapiens
  misc_RNA (1)...(19): siRNA sense strand
gaaaggggauaguggaguu

SEQ ID NO: 548274 - RNA, 19 nt, Homo sapiens
  misc_RNA (1)...(19): siRNA sense strand
aaagggauccagaggugaa

SEQ ID NO: 548275 - RNA, 19 nt, Homo sapiens
  misc_RNA (1)...(19): siRNA sense strand
gaggaccaaugggcuccaa

SEQ ID NO: 548276 - RNA, 19 nt, Homo sapiens
  misc_RNA (1)...(19): siRNA sense strand
gaaaggggauaguggaguu

SEQ ID NO: 548277 - RNA, 19 nt, Homo sapiens
  misc_RNA (1)...(19): siRNA sense strand
aaagggauccagaggugaa

SEQ ID NO: 548278 - RNA, 19 nt, Homo sapiens
  misc_RNA (1)...(19): siRNA sense strand
gaggaccaaugggcuccaa

SEQ ID NO: 548279 - RNA, 19 nt, Homo sapiens
  misc_RNA (1)...(19): siRNA sense strand
gaaaggggauaguggaguu

SEQ ID NO: 548280 - RNA, 19 nt, Homo sapiens
  misc_RNA (1)...(19): siRNA sense strand
aaagggauccagaggugaa

SEQ ID NO: 548281 - RNA, 19 nt, Homo sapiens
  misc_RNA (1)...(19): siRNA sense strand
gaggaccaaugggcuccaa

SEQ ID NO: 548282 - RNA, 19 nt, Homo sapiens
  misc_RNA (1)...(19): siRNA sense strand
gaaaggggauaguggaguu

SEQ ID NO: 548283 - RNA, 19 nt, Homo sapiens
  misc_RNA (1)...(19): siRNA sense strand
aaagggauccagaggugaa

SEQ ID NO: 548284 - RNA, 19 nt, Homo sapiens
  misc_RNA (1)...(19): siRNA sense strand
gaggaccaaugggcuccaa

SEQ ID NO: 548285 - RNA, 19 nt, Homo sapiens
  misc_RNA (1)...(19): siRNA sense strand
gaaaggggauaguggaguu

SEQ ID NO: 548286 - RNA, 19 nt, Homo sapiens
  misc_RNA (1)...(19): siRNA sense strand
aaagggauccagaggugaa

SEQ ID NO: 548287 - RNA, 19 nt, Homo sapiens
  misc_RNA (1)...(19): siRNA sense strand
gaggaccaaugggcuccaa

SEQ ID NO: 548288 - RNA, 19 nt, Homo sapiens
  misc_RNA (1)...(19): siRNA sense strand
aaagggauccagaggugaa

SEQ ID NO: 548289 - RNA, 19 nt, Homo sapiens
  misc_RNA (1)...(19): siRNA sense strand
gaggaccaaugggcuccaa

SEQ ID NO: 548290 - RNA, 19 nt, Homo sapiens
  misc_RNA (1)...(19): siRNA sense strand
gaaaggggauaguggaguu

SEQ ID NO: 548291 - RNA, 19 nt, Homo sapiens
  misc_RNA (1)...(19): siRNA sense strand
aaagggauccagaggugaa

SEQ ID NO: 548292 - RNA, 19 nt, Homo sapiens
  misc_RNA (1)...(19): siRNA sense strand
gaggaccaaugggcuccaa

SEQ ID NO: 548293 - RNA, 19 nt, Homo sapiens
  misc_RNA (1)...(19): siRNA sense strand
gaaaggggauaguggaguu

SEQ ID NO: 548294 - RNA, 19 nt, Homo sapiens
  misc_RNA (1)...(19): siRNA sense strand
cuucuccacugucaucaaa

SEQ ID NO: 548295 - RNA, 19 nt, Homo sapiens
  misc_RNA (1)...(19): siRNA sense strand
gcagcagcuucuccacugu

SEQ ID NO: 548296 - RNA, 19 nt, Homo sapiens
  misc_RNA (1)...(19): siRNA sense strand
aaagggauccagaggugaa

SEQ ID NO: 548297 - RNA, 19 nt, Homo sapiens
  misc_RNA (1)...(19): siRNA sense strand
ucaucaaacuggccauguc

SEQ ID NO: 548298 - RNA, 19 nt, Homo sapiens
  misc_RNA (1)...(19): siRNA sense strand
gaggaccaaugggcuccaa

SEQ ID NO: 548299 - RNA, 19 nt, Homo sapiens
  misc_RNA (1)...(19): siRNA sense strand
gaaaggggauaguggaguu

SEQ ID NO: 548300 - RNA, 19 nt, Homo sapiens
  misc_RNA (1)...(19): siRNA sense strand
aaagggauccagaggugaa

SEQ ID NO: 548301 - RNA, 19 nt, Homo sapiens
  misc_RNA (1)...(19): siRNA sense strand
gaggaccaaugggcuccaa

SEQ ID NO: 548302 - RNA, 19 nt, Homo sapiens
  misc_RNA (1)...(19): siRNA sense strand
gaaaggggauaguggaguu

SEQ ID NO: 548303 - RNA, 19 nt, Homo sapiens
  misc_RNA (1)...(19): siRNA sense strand
aaagggauccagaggugaa

SEQ ID NO: 548304 - RNA, 19 nt, Homo sapiens
  misc_RNA (1)...(19): siRNA sense strand
gaggaccaaugggcuccaa

SEQ ID NO: 548305 - RNA, 19 nt, Homo sapiens
  misc_RNA (1)...(19): siRNA sense strand
gaaaggggauaguggaguu

SEQ ID NO: 548306 - RNA, 19 nt, Homo sapiens
  misc_RNA (1)...(19): siRNA sense strand
aaagggauccagaggugaa

SEQ ID NO: 548307 - RNA, 19 nt, Homo sapiens
  misc_RNA (1)...(19): siRNA sense strand
gaggaccaaugggcuccaa

SEQ ID NO: 548308 - RNA, 19 nt, Homo sapiens
  misc_RNA (1)...(19): siRNA sense strand
gaaaggggauaguggaguu

SEQ ID NO: 548309 - RNA, 19 nt, Homo sapiens
  misc_RNA (1)...(19): siRNA sense strand
aaagggauccagaggugaa

SEQ ID NO: 548310 - RNA, 19 nt, Homo sapiens
  misc_RNA (1)...(19): siRNA sense strand
gaggaccaaugggcuccaa

SEQ ID NO: 548311 - RNA, 19 nt, Homo sapiens
  misc_RNA (1)...(19): siRNA sense strand
gaaaggggauaguggaguu

SEQ ID NO: 548312 - RNA, 19 nt, Homo sapiens
  misc_RNA (1)...(19): siRNA sense strand
aaagggauccagaggugaa

SEQ ID NO: 548313 - RNA, 19 nt, Homo sapiens
  misc_RNA (1)...(19): siRNA sense strand
gaggaccaaugggcuccaa

SEQ ID NO: 548314 - RNA, 19 nt, Homo sapiens
  misc_RNA (1)...(19): siRNA sense strand
aaagggauccagaggugaa

SEQ ID NO: 548315 - RNA, 19 nt, Homo sapiens
  misc_RNA (1)...(19): siRNA sense strand
gaggaccaaugggcuccaa

SEQ ID NO: 548316 - RNA, 19 nt, Homo sapiens
  misc_RNA (1)...(19): siRNA sense strand
gaaaggggauaguggaguu

SEQ ID NO: 548317 - RNA, 19 nt, Homo sapiens
  misc_RNA (1)...(19): siRNA sense strand
aaagggauccagaggugaa

SEQ ID NO: 548318 - RNA, 19 nt, Homo sapiens
  misc_RNA (1)...(19): siRNA sense strand
gaggaccaaugggcuccaa

SEQ ID NO: 548319 - RNA, 19 nt, Homo sapiens
  misc_RNA (1)...(19): siRNA sense strand
gaaaggggauaguggaguu

SEQ ID NO: 548320 - RNA, 19 nt, Homo sapiens
  misc_RNA (1)...(19): siRNA sense strand
cuucuccacugucaucaaa

SEQ ID NO: 548321 - RNA, 19 nt, Homo sapiens
  misc_RNA (1)...(19): siRNA sense strand
gcagcagcuucuccacugu

SEQ ID NO: 548322 - RNA, 19 nt, Homo sapiens
  misc_RNA (1)...(19): siRNA sense strand
aaagggauccagaggugaa

SEQ ID NO: 548323 - RNA, 19 nt, Homo sapiens
  misc_RNA (1)...(19): siRNA sense strand
ucaucaaacuggccauguc

SEQ ID NO: 548324 - RNA, 19 nt, Homo sapiens
  misc_RNA (1)...(19): siRNA sense strand
gaggaccaaugggcuccaa

SEQ ID NO: 548325 - RNA, 19 nt, Homo sapiens
  misc_RNA (1)...(19): siRNA sense strand
gaaaggggauaguggaguu

SEQ ID NO: 548326 - RNA, 19 nt, Homo sapiens
  misc_RNA (1)...(19): siRNA sense strand
aaagggauccagaggugaa

SEQ ID NO: 548327 - RNA, 19 nt, Homo sapiens
  misc_RNA (1)...(19): siRNA sense strand
gaggaccaaugggcuccaa

SEQ ID NO: 548328 - RNA, 19 nt, Homo sapiens
  misc_RNA (1)...(19): siRNA sense strand
gaaaggggauaguggaguu

SEQ ID NO: 548329 - RNA, 19 nt, Homo sapiens
  misc_RNA (1)...(19): siRNA sense strand
aaagggauccagaggugaa

SEQ ID NO: 548330 - RNA, 19 nt, Homo sapiens
  misc_RNA (1)...(19): siRNA sense strand
gaggaccaaugggcuccaa

SEQ ID NO: 548331 - RNA, 19 nt, Homo sapiens
  misc_RNA (1)...(19): siRNA sense strand
gaaaggggauaguggaguu

SEQ ID NO: 548332 - RNA, 19 nt, Homo sapiens
  misc_RNA (1)...(19): siRNA sense strand
aaagggauccagaggugaa

SEQ ID NO: 548333 - RNA, 19 nt, Homo sapiens
  misc_RNA (1)...(19): siRNA sense strand
gaggaccaaugggcuccaa

SEQ ID NO: 548334 - RNA, 19 nt, Homo sapiens
  misc_RNA (1)...(19): siRNA sense strand
gaaaggggauaguggaguu

SEQ ID NO: 548335 - RNA, 19 nt, Homo sapiens
  misc_RNA (1)...(19): siRNA sense strand
aaagggauccagaggugaa

SEQ ID NO: 548336 - RNA, 19 nt, Homo sapiens
  misc_RNA (1)...(19): siRNA sense strand
gaggaccaaugggcuccaa

SEQ ID NO: 548337 - RNA, 19 nt, Homo sapiens
  misc_RNA (1)...(19): siRNA sense strand
gaaaggggauaguggaguu

SEQ ID NO: 548338 - RNA, 19 nt, Homo sapiens
  misc_RNA (1)...(19): siRNA sense strand
aaagggauccagaggugaa

SEQ ID NO: 548339 - RNA, 19 nt, Homo sapiens
  misc_RNA (1)...(19): siRNA sense strand
gaggaccaaugggcuccaa

SEQ ID NO: 548340 - RNA, 19 nt, Homo sapiens
  misc_RNA (1)...(19): siRNA sense strand
aaagggauccagaggugaa

SEQ ID NO: 548341 - RNA, 19 nt, Homo sapiens
  misc_RNA (1)...(19): siRNA sense strand
gaggaccaaugggcuccaa

SEQ ID NO: 548342 - RNA, 19 nt, Homo sapiens
  misc_RNA (1)...(19): siRNA sense strand
gaaaggggauaguggaguu

SEQ ID NO: 548343 - RNA, 19 nt, Homo sapiens
  misc_RNA (1)...(19): siRNA sense strand
aaagggauccagaggugaa

SEQ ID NO: 548344 - RNA, 19 nt, Homo sapiens
  misc_RNA (1)...(19): siRNA sense strand
gaggaccaaugggcuccaa

SEQ ID NO: 548345 - RNA, 19 nt, Homo sapiens
  misc_RNA (1)...(19): siRNA sense strand
gaaaggggauaguggaguu

SEQ ID NO: 548346 - RNA, 19 nt, Homo sapiens
  misc_RNA (1)...(19): siRNA sense strand
cuucuccacugucaucaaa

SEQ ID NO: 548347 - RNA, 19 nt, Homo sapiens
  misc_RNA (1)...(19): siRNA sense strand
gcagcagcuucuccacugu

SEQ ID NO: 548348 - RNA, 19 nt, Homo sapiens
  misc_RNA (1)...(19): siRNA sense strand
aaagggauccagaggugaa

SEQ ID NO: 548349 - RNA, 19 nt, Homo sapiens
  misc_RNA (1)...(19): siRNA sense strand
ucaucaaacuggccauguc

SEQ ID NO: 548350 - RNA, 19 nt, Homo sapiens
  misc_RNA (1)...(19): siRNA sense strand
gaggaccaaugggcuccaa

SEQ ID NO: 548351 - RNA, 19 nt, Homo sapiens
  misc_RNA (1)...(19): siRNA sense strand
gcaacugacugaagaauua

SEQ ID NO: 548352 - RNA, 19 nt, Homo sapiens
  misc_RNA (1)...(19): siRNA sense strand
gcauagaaauccaaaguau

SEQ ID NO: 548353 - RNA, 19 nt, Homo sapiens
  misc_RNA (1)...(19): siRNA sense strand
ucaaggaguuccaucagua

SEQ ID NO: 548354 - RNA, 19 nt, Homo sapiens
  misc_RNA (1)...(19): siRNA sense strand
aggcauaucuucuguguuu

SEQ ID NO: 548355 - RNA, 19 nt, Homo sapiens
  misc_RNA (1)...(19): siRNA sense strand
gaaagccccucuagaauuu

SEQ ID NO: 548356 - RNA, 19 nt, Homo sapiens
  misc_RNA (1)...(19): siRNA sense strand
caauggaccugaacaacuu

SEQ ID NO: 548357 - RNA, 19 nt, Homo sapiens
  misc_RNA (1)...(19): siRNA sense strand
gcaaagcaggcaaagauaa

SEQ ID NO: 548358 - RNA, 19 nt, Homo sapiens
  misc_RNA (1)...(19): siRNA sense strand
aaacagaguuaucuccauu

SEQ ID NO: 548359 - RNA, 19 nt, Homo sapiens
  misc_RNA (1)...(19): siRNA sense strand
aaucaaguauggaccaaua

SEQ ID NO: 548360 - RNA, 19 nt, Homo sapiens
  misc_RNA (1)...(19): siRNA sense strand
cagcaucaauuccaaagaa

SEQ ID NO: 548361 - RNA, 19 nt, Homo sapiens
  misc_RNA (1)...(19): siRNA sense strand
gaagaagaaggaauuaaug

SEQ ID NO: 548362 - RNA, 19 nt, Homo sapiens
  misc_RNA (1)...(19): siRNA sense strand
gaaugaccuuuguuacuga

SEQ ID NO: 548363 - RNA, 19 nt, Homo sapiens
  misc_RNA (1)...(19): siRNA sense strand
gaagaaggaauuaaugugu

SEQ ID NO: 548364 - RNA, 19 nt, Homo sapiens
  misc_RNA (1)...(19): siRNA sense strand
ggaccaauauuuacagucu

SEQ ID NO: 548365 - RNA, 19 nt, Homo sapiens
  misc_RNA (1)...(19): siRNA sense strand
ggugaagccuguggaaauu

SEQ ID NO: 548366 - RNA, 19 nt, Homo sapiens
  misc_RNA (1)...(19): siRNA sense strand
ggaguuggauuugaguuug

SEQ ID NO: 548367 - RNA, 19 nt, Homo sapiens
  misc_RNA (1)...(19): siRNA sense strand
gagguucagauguguauua

SEQ ID NO: 548368 - RNA, 19 nt, Homo sapiens
  misc_RNA (1)...(19): siRNA sense strand
augaacaacuggagaauuu

SEQ ID NO: 548369 - RNA, 19 nt, Homo sapiens
  misc_RNA (1)...(19): siRNA sense strand
cagugaauaugcucuuuaa

SEQ ID NO: 548370 - RNA, 19 nt, Homo sapiens
  misc_RNA (1)...(19): siRNA sense strand
cgaaugaccuuuguuacug

SEQ ID NO: 548371 - RNA, 19 nt, Homo sapiens
  misc_RNA (1)...(19): siRNA sense strand
gaaaccgaaugaccuuugu

SEQ ID NO: 548372 - RNA, 19 nt, Homo sapiens
  misc_RNA (1)...(19): siRNA sense strand
gcaggcaaagauaagauua

SEQ ID NO: 548373 - RNA, 19 nt, Homo sapiens
  misc_RNA (1)...(19): siRNA sense strand
agaauuacaugaacaacug

SEQ ID NO: 548374 - RNA, 19 nt, Homo sapiens
  misc_RNA (1)...(19): siRNA sense strand
uaagacaucuccuuuaucc

SEQ ID NO: 548375 - RNA, 19 nt, Homo sapiens
  misc_RNA (1)...(19): siRNA sense strand
gaccugaacaacuuaguaa

SEQ ID NO: 548376 - RNA, 19 nt, Homo sapiens
  misc_RNA (1)...(19): siRNA sense strand
aguaagacaucuccuuuau

SEQ ID NO: 548377 - RNA, 19 nt, Homo sapiens
  misc_RNA (1)...(19): siRNA sense strand
gaaagcaagaaucaaguau

SEQ ID NO: 548378 - RNA, 19 nt, Homo sapiens
  misc_RNA (1)...(19): siRNA sense strand
guagagacggaaacaagua

SEQ ID NO: 548379 - RNA, 19 nt, Homo sapiens
  misc_RNA (1)...(19): siRNA sense strand
caaguauggaccaauauuu

SEQ ID NO: 548380 - RNA, 19 nt, Homo sapiens
  misc_RNA (1)...(19): siRNA sense strand
gaacaacuggagaauuuag

SEQ ID NO: 548381 - RNA, 19 nt, Homo sapiens
  misc_RNA (1)...(19): siRNA sense strand
uaugggcucuuacugcuuu

SEQ ID NO: 548382 - RNA, 19 nt, Homo sapiens
  misc_RNA (1)...(19): siRNA sense strand
aagcuacgcuggauauugu

SEQ ID NO: 548383 - RNA, 19 nt, Homo sapiens
  misc_RNA (1)...(19): siRNA sense strand
ggaccugaacaacuuagua

SEQ ID NO: 548384 - RNA, 19 nt, Homo sapiens
  misc_RNA (1)...(19): siRNA sense strand
gaacuagcagugcaaaaua

SEQ ID NO: 548385 - RNA, 19 nt, Homo sapiens
  misc_RNA (1)...(19): siRNA sense strand
gggcuucucugucuaaugc

SEQ ID NO: 548386 - RNA, 19 nt, Homo sapiens
  misc_RNA (1)...(19): siRNA sense strand
ggaaaccgaaugaccuuug

SEQ ID NO: 548387 - RNA, 19 nt, Homo sapiens
  misc_RNA (1)...(19): siRNA sense strand
ggauuggaguuggauuuga

SEQ ID NO: 548388 - RNA, 19 nt, Homo sapiens
  misc_RNA (1)...(19): siRNA sense strand
caaggugguuugcucuguu

SEQ ID NO: 548389 - RNA, 19 nt, Homo sapiens
  misc_RNA (1)...(19): siRNA sense strand
ggacaauggaccugaacaa

SEQ ID NO: 548390 - RNA, 19 nt, Homo sapiens
  misc_RNA (1)...(19): siRNA sense strand
ggaaagccccucuagaauu

SEQ ID NO: 548391 - RNA, 19 nt, Homo sapiens
  misc_RNA (1)...(19): siRNA sense strand
cuaagaaacuggucaaaau

SEQ ID NO: 548392 - RNA, 19 nt, Homo sapiens
  misc_RNA (1)...(19): siRNA sense strand
gucaaucuccaucaguuua

SEQ ID NO: 548393 - RNA, 19 nt, Homo sapiens
  misc_RNA (1)...(19): siRNA sense strand
agaguuaucuccauuuggu

SEQ ID NO: 548394 - RNA, 19 nt, Homo sapiens
  misc_RNA (1)...(19): siRNA sense strand
aagcaagaaucaaguaugg

SEQ ID NO: 548395 - RNA, 19 nt, Homo sapiens
  misc_RNA (1)...(19): siRNA sense strand
aaggugguuugcucuguua

SEQ ID NO: 548396 - RNA, 19 nt, Homo sapiens
  misc_RNA (1)...(19): siRNA sense strand
acagaguuaucuccauuug

SEQ ID NO: 548397 - RNA, 19 nt, Homo sapiens
  misc_RNA (1)...(19): siRNA sense strand
caaacagaguuaucuccau

SEQ ID NO: 548398 - RNA, 19 nt, Homo sapiens
  misc_RNA (1)...(19): siRNA sense strand
gaccuuuguuacugaagaa

SEQ ID NO: 548399 - RNA, 19 nt, Homo sapiens
  misc_RNA (1)...(19): siRNA sense strand
aaaggcaaauuuagagaag

SEQ ID NO: 548400 - RNA, 19 nt, Homo sapiens
  misc_RNA (1)...(19): siRNA sense strand
gggcuggauuccuuggauu

SEQ ID NO: 548401 - RNA, 19 nt, Homo sapiens
  misc_RNA (1)...(19): siRNA sense strand
guagucuucuggacccauu

SEQ ID NO: 548402 - RNA, 19 nt, Homo sapiens
  misc_RNA (1)...(19): siRNA sense strand
ggcaaagcaggcaaagaua

SEQ ID NO: 548403 - RNA, 19 nt, Homo sapiens
  misc_RNA (1)...(19): siRNA sense strand
agaaagcaagaaucaagua

SEQ ID NO: 548404 - RNA, 19 nt, Homo sapiens
  misc_RNA (1)...(19): siRNA sense strand
aggaugaccuggagaaucu

SEQ ID NO: 548405 - RNA, 19 nt, Homo sapiens
  misc_RNA (1)...(19): siRNA sense strand
uugcauacguccuuucuca

SEQ ID NO: 548406 - RNA, 19 nt, Homo sapiens
  misc_RNA (1)...(19): siRNA sense strand
gcuuugggcuucucugucu

SEQ ID NO: 548407 - RNA, 19 nt, Homo sapiens
  misc_RNA (1)...(19): siRNA sense strand
ggaaaacucacccaauuau

SEQ ID NO: 548408 - RNA, 19 nt, Homo sapiens
  misc_RNA (1)...(19): siRNA sense strand
gauuggaguuggauuugag

SEQ ID NO: 548409 - RNA, 19 nt, Homo sapiens
  misc_RNA (1)...(19): siRNA sense strand
gcuaugggaaaccgaauga

SEQ ID NO: 548410 - RNA, 19 nt, Homo sapiens
  misc_RNA (1)...(19): siRNA sense strand
uaguaagacaucuccuuua

SEQ ID NO: 548411 - RNA, 19 nt, Homo sapiens
  misc_RNA (1)...(19): siRNA sense strand
ugacugaagaauuacauga

SEQ ID NO: 548412 - RNA, 19 nt, Homo sapiens
  misc_RNA (1)...(19): siRNA sense strand
gagaaagcaagaaucaagu

SEQ ID NO: 548413 - RNA, 19 nt, Homo sapiens
  misc_RNA (1)...(19): siRNA sense strand
uaaaugguguguuuuggaa

SEQ ID NO: 548414 - RNA, 19 nt, Homo sapiens
  misc_RNA (1)...(19): siRNA sense strand
uggcaaagcaggcaaagau

SEQ ID NO: 548415 - RNA, 19 nt, Homo sapiens
  misc_RNA (1)...(19): siRNA sense strand
gauauccacaaggccauua

SEQ ID NO: 548416 - RNA, 19 nt, Homo sapiens
  misc_RNA (1)...(19): siRNA sense strand
ggaguuccaucaguauuuu

SEQ ID NO: 548417 - RNA, 19 nt, Homo sapiens
  misc_RNA (1)...(19): siRNA sense strand
guacagcaucaauuccaaa

SEQ ID NO: 548418 - RNA, 19 nt, Homo sapiens
  misc_RNA (1)...(19): siRNA sense strand
ucaaguauggaccaauauu

SEQ ID NO: 548419 - RNA, 19 nt, Homo sapiens
  misc_RNA (1)...(19): siRNA sense strand
uguuagagguucagaugug

SEQ ID NO: 548420 - RNA, 19 nt, Homo sapiens
  misc_RNA (1)...(19): siRNA sense strand
caaagcaggcaaagauaag

SEQ ID NO: 548421 - RNA, 19 nt, Homo sapiens
  misc_RNA (1)...(19): siRNA sense strand
gcauacguccuuucucauc

SEQ ID NO: 548422 - RNA, 19 nt, Homo sapiens
  misc_RNA (1)...(19): siRNA sense strand
aaggaaaacucacccaauu

SEQ ID NO: 548423 - RNA, 19 nt, Homo sapiens
  misc_RNA (1)...(19): siRNA sense strand
caagcuacgcuggauauug

SEQ ID NO: 548424 - RNA, 19 nt, Homo sapiens
  misc_RNA (1)...(19): siRNA sense strand
uuaguaagacaucuccuuu

SEQ ID NO: 548425 - RNA, 19 nt, Homo sapiens
  misc_RNA (1)...(19): siRNA sense strand
gaacuaauuuccccaacag

SEQ ID NO: 548426 - RNA, 19 nt, Homo sapiens
  misc_RNA (1)...(19): siRNA sense strand
aaccgaaugaccuuuguua

SEQ ID NO: 548427 - RNA, 19 nt, Homo sapiens
  misc_RNA (1)...(19): siRNA sense strand
gcacucaugggacaaugga

SEQ ID NO: 548428 - RNA, 19 nt, Homo sapiens
  misc_RNA (1)...(19): siRNA sense strand
ugaccuuuguuacugaaga

SEQ ID NO: 548429 - RNA, 19 nt, Homo sapiens
  misc_RNA (1)...(19): siRNA sense strand
ucuggugacuuguugaugu

SEQ ID NO: 548430 - RNA, 19 nt, Homo sapiens
  misc_RNA (1)...(19): siRNA sense strand
caaggaguuccaucaguau

SEQ ID NO: 548431 - RNA, 19 nt, Homo sapiens
  misc_RNA (1)...(19): siRNA sense strand
acagugaauaugcucuuua

SEQ ID NO: 548432 - RNA, 19 nt, Homo sapiens
  misc_RNA (1)...(19): siRNA sense strand
uaucguacagcaucaauuc

SEQ ID NO: 548433 - RNA, 19 nt, Homo sapiens
  misc_RNA (1)...(19): siRNA sense strand
gacugaagaauuacaugaa

SEQ ID NO: 548434 - RNA, 19 nt, Homo sapiens
  misc_RNA (1)...(19): siRNA sense strand
uaaagugucugaggaugac

SEQ ID NO: 548435 - RNA, 19 nt, Homo sapiens
  misc_RNA (1)...(19): siRNA sense strand
gagaauuuaggcacucaug

SEQ ID NO: 548436 - RNA, 19 nt, Homo sapiens
  misc_RNA (1)...(19): siRNA sense strand
gcggaagaauuugcguaga

SEQ ID NO: 548437 - RNA, 19 nt, Homo sapiens
  misc_RNA (1)...(19): siRNA sense strand
gaccaauauuuacagucuu

SEQ ID NO: 548438 - RNA, 19 nt, Homo sapiens
  misc_RNA (1)...(19): siRNA sense strand
ggauuugaguuugggaaag

SEQ ID NO: 548439 - RNA, 19 nt, Homo sapiens
  misc_RNA (1)...(19): siRNA sense strand
ggacugcuucauggcauuu

SEQ ID NO: 548440 - RNA, 19 nt, Homo sapiens
  misc_RNA (1)...(19): siRNA sense strand
caggcaaagauaagauuaa

SEQ ID NO: 548441 - RNA, 19 nt, Homo sapiens
  misc_RNA (1)...(19): siRNA sense strand
uugccuugcucuguucuua

SEQ ID NO: 548442 - RNA, 19 nt, Homo sapiens
  misc_RNA (1)...(19): siRNA sense strand
agagaaagcaagaaucaag

SEQ ID NO: 548443 - RNA, 19 nt, Homo sapiens
  misc_RNA (1)...(19): siRNA sense strand
cauuuuggcugcauagaaa

SEQ ID NO: 548444 - RNA, 19 nt, Homo sapiens
  misc_RNA (1)...(19): siRNA sense strand
gauauuguagagacggaaa

SEQ ID NO: 548445 - RNA, 19 nt, Homo sapiens
  misc_RNA (1)...(19): siRNA sense strand
cacagugaauaugcucuuu

SEQ ID NO: 548446 - RNA, 19 nt, Homo sapiens
  misc_RNA (1)...(19): siRNA sense strand
ugaacaacuggagaauuua

SEQ ID NO: 548447 - RNA, 19 nt, Homo sapiens
  misc_RNA (1)...(19): siRNA sense strand
guaagacaucuccuuuauc

SEQ ID NO: 548448 - RNA, 19 nt, Homo sapiens
  misc_RNA (1)...(19): siRNA sense strand
gauuaaagugucugaggau

SEQ ID NO: 548449 - RNA, 19 nt, Homo sapiens
  misc_RNA (1)...(19): siRNA sense strand
gacggaaacaaguaaggaa

SEQ ID NO: 548450 - RNA, 19 nt, Homo sapiens
  misc_RNA (1)...(19): siRNA sense strand
uagagacggaaacaaguaa

SEQ ID NO: 548451 - RNA, 19 nt, Homo sapiens
  misc_RNA (1)...(19): siRNA sense strand
gccuuuagcuuuauguaua

SEQ ID NO: 548452 - RNA, 19 nt, Homo sapiens
  misc_RNA (1)...(19): siRNA sense strand
gaggagaucucaccaagca

SEQ ID NO: 548453 - RNA, 19 nt, Homo sapiens
  misc_RNA (1)...(19): siRNA sense strand
gaucucaccaagcacauua

SEQ ID NO: 548454 - RNA, 19 nt, Homo sapiens
  misc_RNA (1)...(19): siRNA sense strand
gcaacagcauggucauuca

SEQ ID NO: 548455 - RNA, 19 nt, Homo sapiens
  misc_RNA (1)...(19): siRNA sense strand
ggcaaggccuucugcaugu

SEQ ID NO: 548456 - RNA, 19 nt, Homo sapiens
  misc_RNA (1)...(19): siRNA sense strand
cuacguggccuuuagcuuu

SEQ ID NO: 548457 - RNA, 19 nt, Homo sapiens
  misc_RNA (1)...(19): siRNA sense strand
uacguggccuuuagcuuua

SEQ ID NO: 548458 - RNA, 19 nt, Homo sapiens
  misc_RNA (1)...(19): siRNA sense strand
cuccaucucuccuggguua

SEQ ID NO: 548459 - RNA, 19 nt, Homo sapiens
  misc_RNA (1)...(19): siRNA sense strand
gcaaggccuucugcauguu

SEQ ID NO: 548460 - RNA, 19 nt, Homo sapiens
  misc_RNA (1)...(19): siRNA sense strand
ugaagcgcauuaagaagug

SEQ ID NO: 548461 - RNA, 19 nt, Homo sapiens
  misc_RNA (1)...(19): siRNA sense strand
uggagaacauggugacugu

SEQ ID NO: 548462 - RNA, 19 nt, Homo sapiens
  misc_RNA (1)...(19): siRNA sense strand
agaagaagccgcucuacgu

SEQ ID NO: 548463 - RNA, 19 nt, Homo sapiens
  misc_RNA (1)...(19): siRNA sense strand
ggucaucaccaccauaggu

SEQ ID NO: 548464 - RNA, 19 nt, Homo sapiens
  misc_RNA (1)...(19): siRNA sense strand
ucccggaccugcagucugu

SEQ ID NO: 548465 - RNA, 19 nt, Homo sapiens
  misc_RNA (1)...(19): siRNA sense strand
gcgagcgcaugaacaccuu

SEQ ID NO: 548466 - RNA, 19 nt, Homo sapiens
  misc_RNA (1)...(19): siRNA sense strand
ccaugaacagugaggauga

SEQ ID NO: 548467 - RNA, 19 nt, Homo sapiens
  misc_RNA (1)...(19): siRNA sense strand
cuuacaagaucgaggagau

SEQ ID NO: 548468 - RNA, 19 nt, Homo sapiens
  misc_RNA (1)...(19): siRNA sense strand
gcgaggaggagaaacucaa

SEQ ID NO: 548469 - RNA, 19 nt, Homo sapiens
  misc_RNA (1)...(19): siRNA sense strand
cgaggaggagaaacucaaa

SEQ ID NO: 548470 - RNA, 19 nt, Homo sapiens
  misc_RNA (1)...(19): siRNA sense strand
caucaccaccauagguuau

SEQ ID NO: 548471 - RNA, 19 nt, Homo sapiens
  misc_RNA (1)...(19): siRNA sense strand
cugcugaagcgcauuaaga

SEQ ID NO: 548472 - RNA, 19 nt, Homo sapiens
  misc_RNA (1)...(19): siRNA sense strand
cucagguucuugaccauga

SEQ ID NO: 548473 - RNA, 19 nt, Homo sapiens
  misc_RNA (1)...(19): siRNA sense strand
caccagaggcugaugaaac

SEQ ID NO: 548474 - RNA, 19 nt, Homo sapiens
  misc_RNA (1)...(19): siRNA sense strand
ucuugaccaugaacaguga

SEQ ID NO: 548475 - RNA, 19 nt, Homo sapiens
  misc_RNA (1)...(19): siRNA sense strand
ucaucaccaccauagguua

SEQ ID NO: 548476 - RNA, 19 nt, Homo sapiens
  misc_RNA (1)...(19): siRNA sense strand
gaccaccagaggcugauga

SEQ ID NO: 548477 - RNA, 19 nt, Homo sapiens
  misc_RNA (1)...(19): siRNA sense strand
ucagguucuugaccaugaa

SEQ ID NO: 548478 - RNA, 19 nt, Homo sapiens
  misc_RNA (1)...(19): siRNA sense strand
cuacuacuacugcuucauc

SEQ ID NO: 548479 - RNA, 19 nt, Homo sapiens
  misc_RNA (1)...(19): siRNA sense strand
ggccuuuagcuuuauguau

SEQ ID NO: 548480 - RNA, 19 nt, Homo sapiens
  misc_RNA (1)...(19): siRNA sense strand
acucaaagccgaggagauc

SEQ ID NO: 548481 - RNA, 19 nt, Homo sapiens
  misc_RNA (1)...(19): siRNA sense strand
gaccaugaacagugaggau

SEQ ID NO: 548482 - RNA, 19 nt, Homo sapiens
  misc_RNA (1)...(19): siRNA sense strand
cugaagcgcauuaagaagu

SEQ ID NO: 548483 - RNA, 19 nt, Homo sapiens
  misc_RNA (1)...(19): siRNA sense strand
guaaagaacagaagccaaa

SEQ ID NO: 548484 - RNA, 19 nt, Homo sapiens
  misc_RNA (1)...(19): siRNA sense strand
gcaaugaggaggcaccuaa

SEQ ID NO: 548485 - RNA, 19 nt, Homo sapiens
  misc_RNA (1)...(19): siRNA sense strand
gaccgaagccugaauguga

SEQ ID NO: 548486 - RNA, 19 nt, Homo sapiens
  misc_RNA (1)...(19): siRNA sense strand
gaacaggagcccacugaga

SEQ ID NO: 548487 - RNA, 19 nt, Homo sapiens
  misc_RNA (1)...(19): siRNA sense strand
cgaccagccucuucugaaa

SEQ ID NO: 548488 - RNA, 19 nt, Homo sapiens
  misc_RNA (1)...(19): siRNA sense strand
caacaacagguuuaugauu

SEQ ID NO: 548489 - RNA, 19 nt, Homo sapiens
  misc_RNA (1)...(19): siRNA sense strand
ugagaaagcugcaaaucca

SEQ ID NO: 548490 - RNA, 19 nt, Homo sapiens
  misc_RNA (1)...(19): siRNA sense strand
cgccgucacuguuguauaa

SEQ ID NO: 548491 - RNA, 19 nt, Homo sapiens
  misc_RNA (1)...(19): siRNA sense strand
gcgauggccugaccuugaa

SEQ ID NO: 548492 - RNA, 19 nt, Homo sapiens
  misc_RNA (1)...(19): siRNA sense strand
gauaaaggguagaauugag

SEQ ID NO: 548493 - RNA, 19 nt, Homo sapiens
  misc_RNA (1)...(19): siRNA sense strand
gaugacaccuccgauagug

SEQ ID NO: 548494 - RNA, 19 nt, Homo sapiens
  misc_RNA (1)...(19): siRNA sense strand
caagagaccagcuccagaa

SEQ ID NO: 548495 - RNA, 19 nt, Homo sapiens
  misc_RNA (1)...(19): siRNA sense strand
gcaagaagaaacucaagau

SEQ ID NO: 548496 - RNA, 19 nt, Homo sapiens
  misc_RNA (1)...(19): siRNA sense strand
gagcaguuccugaccauug

SEQ ID NO: 548497 - RNA, 19 nt, Homo sapiens
  misc_RNA (1)...(19): siRNA sense strand
ugaggagccuggagacuug

SEQ ID NO: 548498 - RNA, 19 nt, Homo sapiens
  misc_RNA (1)...(19): siRNA sense strand
gacuauaucugcccaaacu

SEQ ID NO: 548499 - RNA, 19 nt, Homo sapiens
  misc_RNA (1)...(19): siRNA sense strand
gggcgagcgaucacaauua

SEQ ID NO: 548500 - RNA, 19 nt, Homo sapiens
  misc_RNA (1)...(19): siRNA sense strand
ggauaaaggguagaauuga

SEQ ID NO: 548501 - RNA, 19 nt, Homo sapiens
  misc_RNA (1)...(19): siRNA sense strand
gggauaaaggguagaauug

SEQ ID NO: 548502 - RNA, 19 nt, Homo sapiens
  misc_RNA (1)...(19): siRNA sense strand
gaucuuccagccugugaua

SEQ ID NO: 548503 - RNA, 19 nt, Homo sapiens
  misc_RNA (1)...(19): siRNA sense strand
cagcaaagaguucaggaaa

SEQ ID NO: 548504 - RNA, 19 nt, Homo sapiens
  misc_RNA (1)...(19): siRNA sense strand
uagcgaagaccaagggaua

SEQ ID NO: 548505 - RNA, 19 nt, Homo sapiens
  misc_RNA (1)...(19): siRNA sense strand
ugacagagagaguaaguug

SEQ ID NO: 548506 - RNA, 19 nt, Homo sapiens
  misc_RNA (1)...(19): siRNA sense strand
gaauugagaaagcugcaaa

SEQ ID NO: 548507 - RNA, 19 nt, Homo sapiens
  misc_RNA (1)...(19): siRNA sense strand
guacaaguauaggaacaau

SEQ ID NO: 548508 - RNA, 19 nt, Homo sapiens
  misc_RNA (1)...(19): siRNA sense strand
agaguaaguuggagggaaa

SEQ ID NO: 548509 - RNA, 19 nt, Homo sapiens
  misc_RNA (1)...(19): siRNA sense strand
acaacagguuuaugauuug

SEQ ID NO: 548510 - RNA, 19 nt, Homo sapiens
  misc_RNA (1)...(19): siRNA sense strand
cacaacaacagguuuauga

SEQ ID NO: 548511 - RNA, 19 nt, Homo sapiens
  misc_RNA (1)...(19): siRNA sense strand
caucaaacccaccagcaaa

SEQ ID NO: 548512 - RNA, 19 nt, Homo sapiens
  misc_RNA (1)...(19): siRNA sense strand
gaaaggcggcucaggacau

SEQ ID NO: 548513 - RNA, 19 nt, Homo sapiens
  misc_RNA (1)...(19): siRNA sense strand
cagaucagcaggaagcuaa

SEQ ID NO: 548514 - RNA, 19 nt, Homo sapiens
  misc_RNA (1)...(19): siRNA sense strand
uaaugacuguauccucaaa

SEQ ID NO: 548515 - RNA, 19 nt, Homo sapiens
  misc_RNA (1)...(19): siRNA sense strand
gaagccaaagccuaaagaa

SEQ ID NO: 548516 - RNA, 19 nt, Homo sapiens
  misc_RNA (1)...(19): siRNA sense strand
guggaaagcgcuucugaga

SEQ ID NO: 548517 - RNA, 19 nt, Homo sapiens
  misc_RNA (1)...(19): siRNA sense strand
acaaugaaguuucuaagcu

SEQ ID NO: 548518 - RNA, 19 nt, Homo sapiens
  misc_RNA (1)...(19): siRNA sense strand
gaacaauagagcagaaguc

SEQ ID NO: 548519 - RNA, 19 nt, Homo sapiens
  misc_RNA (1)...(19): siRNA sense strand
gaagaugaagccagagaag

SEQ ID NO: 548520 - RNA, 19 nt, Homo sapiens
  misc_RNA (1)...(19): siRNA sense strand
gugaagcacucgggaagga

SEQ ID NO: 548521 - RNA, 19 nt, Homo sapiens
  misc_RNA (1)...(19): siRNA sense strand
gggaacaggagcccacuga

SEQ ID NO: 548522 - RNA, 19 nt, Homo sapiens
  misc_RNA (1)...(19): siRNA sense strand
gcaccgauuguacaaguau

SEQ ID NO: 548523 - RNA, 19 nt, Homo sapiens
  misc_RNA (1)...(19): siRNA sense strand
gaaagaugacagagagagu

SEQ ID NO: 548524 - RNA, 19 nt, Homo sapiens
  misc_RNA (1)...(19): siRNA sense strand
cagagucgccugcggaaga

SEQ ID NO: 548525 - RNA, 19 nt, Homo sapiens
  misc_RNA (1)...(19): siRNA sense strand
ccucacaacaacagguuua

SEQ ID NO: 548526 - RNA, 19 nt, Homo sapiens
  misc_RNA (1)...(19): siRNA sense strand
gcugauggcaccgauugua

SEQ ID NO: 548527 - RNA, 19 nt, Homo sapiens
  misc_RNA (1)...(19): siRNA sense strand
ggcgagcgaucacaauuac

SEQ ID NO: 548528 - RNA, 19 nt, Homo sapiens
  misc_RNA (1)...(19): siRNA sense strand
uuucuaagcucagguaaag

SEQ ID NO: 548529 - RNA, 19 nt, Homo sapiens
  misc_RNA (1)...(19): siRNA sense strand
gcaaauccaaguggcaaga

SEQ ID NO: 548530 - RNA, 19 nt, Homo sapiens
  misc_RNA (1)...(19): siRNA sense strand
acaaguauaggaacaauag

SEQ ID NO: 548531 - RNA, 19 nt, Homo sapiens
  misc_RNA (1)...(19): siRNA sense strand
aaagaugacagagagagua

SEQ ID NO: 548532 - RNA, 19 nt, Homo sapiens
  misc_RNA (1)...(19): siRNA sense strand
gcaaagaguucaggaaaac

SEQ ID NO: 548533 - RNA, 19 nt, Homo sapiens
  misc_RNA (1)...(19): siRNA sense strand
ccaacgcccuguauugcau

SEQ ID NO: 548534 - RNA, 19 nt, Homo sapiens
  misc_RNA (1)...(19): siRNA sense strand
guaagcaggagcccgagaa

SEQ ID NO: 548535 - RNA, 19 nt, Homo sapiens
  misc_RNA (1)...(19): siRNA sense strand
cgucacuguuguauaaaug

SEQ ID NO: 548536 - RNA, 19 nt, Homo sapiens
  misc_RNA (1)...(19): siRNA sense strand
ucacaauuacaaugcagua

SEQ ID NO: 548537 - RNA, 19 nt, Homo sapiens
  misc_RNA (1)...(19): siRNA sense strand
cagcgacaaugaaguuucu

SEQ ID NO: 548538 - RNA, 19 nt, Homo sapiens
  misc_RNA (1)...(19): siRNA sense strand
gcgaagaccaagggauaaa

SEQ ID NO: 548539 - RNA, 19 nt, Homo sapiens
  misc_RNA (1)...(19): siRNA sense strand
uaggaacaauagagcagaa

SEQ ID NO: 548540 - RNA, 19 nt, Homo sapiens
  misc_RNA (1)...(19): siRNA sense strand
gcgauugugugggcauuuc

SEQ ID NO: 548541 - RNA, 19 nt, Homo sapiens
  misc_RNA (1)...(19): siRNA sense strand
aacagaagccaaagccuaa

SEQ ID NO: 548542 - RNA, 19 nt, Homo sapiens
  misc_RNA (1)...(19): siRNA sense strand
ucuaagcucagguaaagaa

SEQ ID NO: 548543 - RNA, 19 nt, Homo sapiens
  misc_RNA (1)...(19): siRNA sense strand
gcgacaaugaaguuucuaa

SEQ ID NO: 548544 - RNA, 19 nt, Homo sapiens
  misc_RNA (1)...(19): siRNA sense strand
caagaagaaacucaagauc

SEQ ID NO: 548545 - RNA, 19 nt, Homo sapiens
  misc_RNA (1)...(19): siRNA sense strand
gauuguacaaguauaggaa

SEQ ID NO: 548546 - RNA, 19 nt, Homo sapiens
  misc_RNA (1)...(19): siRNA sense strand
aaagagaccacagugaaga

SEQ ID NO: 548547 - RNA, 19 nt, Homo sapiens
  misc_RNA (1)...(19): siRNA sense strand
cgagcgaucacaauuacaa

SEQ ID NO: 548548 - RNA, 19 nt, Homo sapiens
  misc_RNA (1)...(19): siRNA sense strand
ugaccgcugugaagaaugg

SEQ ID NO: 548549 - RNA, 19 nt, Homo sapiens
  misc_RNA (1)...(19): siRNA sense strand
gaacgaccagccucuucug

SEQ ID NO: 548550 - RNA, 19 nt, Homo sapiens
  misc_RNA (1)...(19): siRNA sense strand
gaaagcugcaaauccaagu

SEQ ID NO: 548551 - RNA, 19 nt, Homo sapiens
  misc_RNA (1)...(19): siRNA sense strand
gaagaccaagggauaaagg

SEQ ID NO: 548552 - RNA, 19 nt, Homo sapiens
  misc_RNA (1)...(19): siRNA sense strand
gguuuaugauuugcuguga

SEQ ID NO: 548553 - RNA, 19 nt, Homo sapiens
  misc_RNA (1)...(19): siRNA sense strand
acagagagaguaaguugga

SEQ ID NO: 548554 - RNA, 19 nt, Homo sapiens
  misc_RNA (1)...(19): siRNA sense strand
gaugacagagagaguaagu

SEQ ID NO: 548555 - RNA, 19 nt, Homo sapiens
  misc_RNA (1)...(19): siRNA sense strand
ggcaccgauuguacaagua

SEQ ID NO: 548556 - RNA, 19 nt, Homo sapiens
  misc_RNA (1)...(19): siRNA sense strand
caccgauuguacaaguaua

SEQ ID NO: 548557 - RNA, 19 nt, Homo sapiens
  misc_RNA (1)...(19): siRNA sense strand
gagaaagcugcaaauccaa

SEQ ID NO: 548558 - RNA, 19 nt, Homo sapiens
  misc_RNA (1)...(19): siRNA sense strand
uaaaggguagaauugagaa

SEQ ID NO: 548559 - RNA, 19 nt, Homo sapiens
  misc_RNA (1)...(19): siRNA sense strand
ggaacgaccagccucuucu

SEQ ID NO: 548560 - RNA, 19 nt, Homo sapiens
  misc_RNA (1)...(19): siRNA sense strand
ccgcagcgacaaugaaguu

SEQ ID NO: 548561 - RNA, 19 nt, Homo sapiens
  misc_RNA (1)...(19): siRNA sense strand
aagaagaaacucaagaucu

SEQ ID NO: 548562 - RNA, 19 nt, Homo sapiens
  misc_RNA (1)...(19): siRNA sense strand
gcagaucagcaggaagcua

SEQ ID NO: 548563 - RNA, 19 nt, Homo sapiens
  misc_RNA (1)...(19): siRNA sense strand
ugcccaaacugcaccauuc

SEQ ID NO: 548564 - RNA, 19 nt, Homo sapiens
  misc_RNA (1)...(19): siRNA sense strand
agaaucgccuucgcaggaa

SEQ ID NO: 548565 - RNA, 19 nt, Homo sapiens
  misc_RNA (1)...(19): siRNA sense strand
gcagcgacaaugaaguuuc

SEQ ID NO: 548566 - RNA, 19 nt, Homo sapiens
  misc_RNA (1)...(19): siRNA sense strand
uggcaccgauuguacaagu

SEQ ID NO: 548567 - RNA, 19 nt, Homo sapiens
  misc_RNA (1)...(19): siRNA sense strand
caacagguuuaugauuugc

SEQ ID NO: 548568 - RNA, 19 nt, Homo sapiens
  misc_RNA (1)...(19): siRNA sense strand
cacgaugacaccuccgaua

SEQ ID NO: 548569 - RNA, 19 nt, Homo sapiens
  misc_RNA (1)...(19): siRNA sense strand
aagccaaagccuaaagaaa

SEQ ID NO: 548570 - RNA, 19 nt, Homo sapiens
  misc_RNA (1)...(19): siRNA sense strand
gcucagguaaagaacagaa

SEQ ID NO: 548571 - RNA, 19 nt, Homo sapiens
  misc_RNA (1)...(19): siRNA sense strand
guaaugacuguauccucaa

SEQ ID NO: 548572 - RNA, 19 nt, Homo sapiens
  misc_RNA (1)...(19): siRNA sense strand
ggcaagaagaaacucaaga

SEQ ID NO: 548573 - RNA, 19 nt, Homo sapiens
  misc_RNA (1)...(19): siRNA sense strand
ggaacaauagagcagaagu

SEQ ID NO: 548574 - RNA, 19 nt, Homo sapiens
  misc_RNA (1)...(19): siRNA sense strand
gauggcaccgauuguacaa

SEQ ID NO: 548575 - RNA, 19 nt, Homo sapiens
  misc_RNA (1)...(19): siRNA sense strand
aagaugacagagagaguaa

SEQ ID NO: 548576 - RNA, 19 nt, Homo sapiens
  misc_RNA (1)...(19): siRNA sense strand
aagacuauaucugcccaaa

SEQ ID NO: 548577 - RNA, 19 nt, Homo sapiens
  misc_RNA (1)...(19): siRNA sense strand
aaaggcggcucaggacauc

SEQ ID NO: 548578 - RNA, 19 nt, Homo sapiens
  misc_RNA (1)...(19): siRNA sense strand
caaaggcgacccgagcaau

SEQ ID NO: 548579 - RNA, 19 nt, Homo sapiens
  misc_RNA (1)...(19): siRNA sense strand
gcaccuaaggccaucaaac

SEQ ID NO: 548580 - RNA, 19 nt, Homo sapiens
  misc_RNA (1)...(19): siRNA sense strand
caagggauaaaggguagaa

SEQ ID NO: 548581 - RNA, 19 nt, Homo sapiens
  misc_RNA (1)...(19): siRNA sense strand
ggaauggggaagacuauau

SEQ ID NO: 548582 - RNA, 19 nt, Homo sapiens
  misc_RNA (1)...(19): siRNA sense strand
caaauccaaguggcaagaa

SEQ ID NO: 548583 - RNA, 19 nt, Homo sapiens
  misc_RNA (1)...(19): siRNA sense strand
guaaagaacagaagccaaa

SEQ ID NO: 548584 - RNA, 19 nt, Homo sapiens
  misc_RNA (1)...(19): siRNA sense strand
gcaaugaggaggcaccuaa

SEQ ID NO: 548585 - RNA, 19 nt, Homo sapiens
  misc_RNA (1)...(19): siRNA sense strand
gaccgaagccugaauguga

SEQ ID NO: 548586 - RNA, 19 nt, Homo sapiens
  misc_RNA (1)...(19): siRNA sense strand
gaacaggagcccacugaga

SEQ ID NO: 548587 - RNA, 19 nt, Homo sapiens
  misc_RNA (1)...(19): siRNA sense strand
cgaccagccucuucugaaa

SEQ ID NO: 548588 - RNA, 19 nt, Homo sapiens
  misc_RNA (1)...(19): siRNA sense strand
caacaacagguuuaugauu

SEQ ID NO: 548589 - RNA, 19 nt, Homo sapiens
  misc_RNA (1)...(19): siRNA sense strand
ugagaaagcugcaaaucca

SEQ ID NO: 548590 - RNA, 19 nt, Homo sapiens
  misc_RNA (1)...(19): siRNA sense strand
cgccgucacuguuguauaa

SEQ ID NO: 548591 - RNA, 19 nt, Homo sapiens
  misc_RNA (1)...(19): siRNA sense strand
gcgauggccugaccuugaa

SEQ ID NO: 548592 - RNA, 19 nt, Homo sapiens
  misc_RNA (1)...(19): siRNA sense strand
gauaaaggguagaauugag

SEQ ID NO: 548593 - RNA, 19 nt, Homo sapiens
  misc_RNA (1)...(19): siRNA sense strand
gaugacaccuccgauagug

SEQ ID NO: 548594 - RNA, 19 nt, Homo sapiens
  misc_RNA (1)...(19): siRNA sense strand
caagagaccagcuccagaa

SEQ ID NO: 548595 - RNA, 19 nt, Homo sapiens
  misc_RNA (1)...(19): siRNA sense strand
gcaagaagaaacucaagau

SEQ ID NO: 548596 - RNA, 19 nt, Homo sapiens
  misc_RNA (1)...(19): siRNA sense strand
gagcaguuccugaccauug

SEQ ID NO: 548597 - RNA, 19 nt, Homo sapiens
  misc_RNA (1)...(19): siRNA sense strand
ugaggagccuggagacuug

SEQ ID NO: 548598 - RNA, 19 nt, Homo sapiens
  misc_RNA (1)...(19): siRNA sense strand
gacuauaucugcccaaacu

SEQ ID NO: 548599 - RNA, 19 nt, Homo sapiens
  misc_RNA (1)...(19): siRNA sense strand
gggcgagcgaucacaauua

SEQ ID NO: 548600 - RNA, 19 nt, Homo sapiens
  misc_RNA (1)...(19): siRNA sense strand
ggauaaaggguagaauuga

SEQ ID NO: 548601 - RNA, 19 nt, Homo sapiens
  misc_RNA (1)...(19): siRNA sense strand
gggauaaaggguagaauug

SEQ ID NO: 548602 - RNA, 19 nt, Homo sapiens
  misc_RNA (1)...(19): siRNA sense strand
gaucuuccagccugugaua

SEQ ID NO: 548603 - RNA, 19 nt, Homo sapiens
  misc_RNA (1)...(19): siRNA sense strand
cagcaaagaguucaggaaa

SEQ ID NO: 548604 - RNA, 19 nt, Homo sapiens
  misc_RNA (1)...(19): siRNA sense strand
uagcgaagaccaagggaua

SEQ ID NO: 548605 - RNA, 19 nt, Homo sapiens
  misc_RNA (1)...(19): siRNA sense strand
ugacagagagaguaaguug

SEQ ID NO: 548606 - RNA, 19 nt, Homo sapiens
  misc_RNA (1)...(19): siRNA sense strand
gaauugagaaagcugcaaa

SEQ ID NO: 548607 - RNA, 19 nt, Homo sapiens
  misc_RNA (1)...(19): siRNA sense strand
guacaaguauaggaacaau

SEQ ID NO: 548608 - RNA, 19 nt, Homo sapiens
  misc_RNA (1)...(19): siRNA sense strand
agaguaaguuggagggaaa

SEQ ID NO: 548609 - RNA, 19 nt, Homo sapiens
  misc_RNA (1)...(19): siRNA sense strand
acaacagguuuaugauuug

SEQ ID NO: 548610 - RNA, 19 nt, Homo sapiens
  misc_RNA (1)...(19): siRNA sense strand
cacaacaacagguuuauga

SEQ ID NO: 548611 - RNA, 19 nt, Homo sapiens
  misc_RNA (1)...(19): siRNA sense strand
caucaaacccaccagcaaa

SEQ ID NO: 548612 - RNA, 19 nt, Homo sapiens
  misc_RNA (1)...(19): siRNA sense strand
gaaaggcggcucaggacau

SEQ ID NO: 548613 - RNA, 19 nt, Homo sapiens
  misc_RNA (1)...(19): siRNA sense strand
cagaucagcaggaagcuaa

SEQ ID NO: 548614 - RNA, 19 nt, Homo sapiens
  misc_RNA (1)...(19): siRNA sense strand
uaaugacuguauccucaaa

SEQ ID NO: 548615 - RNA, 19 nt, Homo sapiens
  misc_RNA (1)...(19): siRNA sense strand
gaagccaaagccuaaagaa

SEQ ID NO: 548616 - RNA, 19 nt, Homo sapiens
  misc_RNA (1)...(19): siRNA sense strand
guggaaagcgcuucugaga

SEQ ID NO: 548617 - RNA, 19 nt, Homo sapiens
  misc_RNA (1)...(19): siRNA sense strand
acaaugaaguuucuaagcu

SEQ ID NO: 548618 - RNA, 19 nt, Homo sapiens
  misc_RNA (1)...(19): siRNA sense strand
gaacaauagagcagaaguc

SEQ ID NO: 548619 - RNA, 19 nt, Homo sapiens
  misc_RNA (1)...(19): siRNA sense strand
gaagaugaagccagagaag

SEQ ID NO: 548620 - RNA, 19 nt, Homo sapiens
  misc_RNA (1)...(19): siRNA sense strand
gugaagcacucgggaagga

SEQ ID NO: 548621 - RNA, 19 nt, Homo sapiens
  misc_RNA (1)...(19): siRNA sense strand
gggaacaggagcccacuga

SEQ ID NO: 548622 - RNA, 19 nt, Homo sapiens
  misc_RNA (1)...(19): siRNA sense strand
gcaccgauuguacaaguau

SEQ ID NO: 548623 - RNA, 19 nt, Homo sapiens
  misc_RNA (1)...(19): siRNA sense strand
gaaagaugacagagagagu

SEQ ID NO: 548624 - RNA, 19 nt, Homo sapiens
  misc_RNA (1)...(19): siRNA sense strand
cagagucgccugcggaaga

SEQ ID NO: 548625 - RNA, 19 nt, Homo sapiens
  misc_RNA (1)...(19): siRNA sense strand
ccucacaacaacagguuua

SEQ ID NO: 548626 - RNA, 19 nt, Homo sapiens
  misc_RNA (1)...(19): siRNA sense strand
gcugauggcaccgauugua

SEQ ID NO: 548627 - RNA, 19 nt, Homo sapiens
  misc_RNA (1)...(19): siRNA sense strand
ggcgagcgaucacaauuac

SEQ ID NO: 548628 - RNA, 19 nt, Homo sapiens
  misc_RNA (1)...(19): siRNA sense strand
uuucuaagcucagguaaag

SEQ ID NO: 548629 - RNA, 19 nt, Homo sapiens
  misc_RNA (1)...(19): siRNA sense strand
gcaaauccaaguggcaaga

SEQ ID NO: 548630 - RNA, 19 nt, Homo sapiens
  misc_RNA (1)...(19): siRNA sense strand
acaaguauaggaacaauag

SEQ ID NO: 548631 - RNA, 19 nt, Homo sapiens
  misc_RNA (1)...(19): siRNA sense strand
aaagaugacagagagagua

SEQ ID NO: 548632 - RNA, 19 nt, Homo sapiens
  misc_RNA (1)...(19): siRNA sense strand
gcaaagaguucaggaaaac

SEQ ID NO: 548633 - RNA, 19 nt, Homo sapiens
  misc_RNA (1)...(19): siRNA sense strand
ccaacgcccuguauugcau

SEQ ID NO: 548634 - RNA, 19 nt, Homo sapiens
  misc_RNA (1)...(19): siRNA sense strand
guaagcaggagcccgagaa

SEQ ID NO: 548635 - RNA, 19 nt, Homo sapiens
  misc_RNA (1)...(19): siRNA sense strand
cgucacuguuguauaaaug

SEQ ID NO: 548636 - RNA, 19 nt, Homo sapiens
  misc_RNA (1)...(19): siRNA sense strand
ucacaauuacaaugcagua

SEQ ID NO: 548637 - RNA, 19 nt, Homo sapiens
  misc_RNA (1)...(19): siRNA sense strand
cagcgacaaugaaguuucu

SEQ ID NO: 548638 - RNA, 19 nt, Homo sapiens
  misc_RNA (1)...(19): siRNA sense strand
gcgaagaccaagggauaaa

SEQ ID NO: 548639 - RNA, 19 nt, Homo sapiens
  misc_RNA (1)...(19): siRNA sense strand
uaggaacaauagagcagaa

SEQ ID NO: 548640 - RNA, 19 nt, Homo sapiens
  misc_RNA (1)...(19): siRNA sense strand
gcgauugugugggcauuuc

SEQ ID NO: 548641 - RNA, 19 nt, Homo sapiens
  misc_RNA (1)...(19): siRNA sense strand
aacagaagccaaagccuaa

SEQ ID NO: 548642 - RNA, 19 nt, Homo sapiens
  misc_RNA (1)...(19): siRNA sense strand
ucuaagcucagguaaagaa

SEQ ID NO: 548643 - RNA, 19 nt, Homo sapiens
  misc_RNA (1)...(19): siRNA sense strand
gcgacaaugaaguuucuaa

SEQ ID NO: 548644 - RNA, 19 nt, Homo sapiens
  misc_RNA (1)...(19): siRNA sense strand
caagaagaaacucaagauc

SEQ ID NO: 548645 - RNA, 19 nt, Homo sapiens
  misc_RNA (1)...(19): siRNA sense strand
gauuguacaaguauaggaa

SEQ ID NO: 548646 - RNA, 19 nt, Homo sapiens
  misc_RNA (1)...(19): siRNA sense strand
aaagagaccacagugaaga

SEQ ID NO: 548647 - RNA, 19 nt, Homo sapiens
  misc_RNA (1)...(19): siRNA sense strand
cgagcgaucacaauuacaa

SEQ ID NO: 548648 - RNA, 19 nt, Homo sapiens
  misc_RNA (1)...(19): siRNA sense strand
ugaccgcugugaagaaugg

SEQ ID NO: 548649 - RNA, 19 nt, Homo sapiens
  misc_RNA (1)...(19): siRNA sense strand
gaacgaccagccucuucug

SEQ ID NO: 548650 - RNA, 19 nt, Homo sapiens
  misc_RNA (1)...(19): siRNA sense strand
gaaagcugcaaauccaagu

SEQ ID NO: 548651 - RNA, 19 nt, Homo sapiens
  misc_RNA (1)...(19): siRNA sense strand
gaagaccaagggauaaagg

SEQ ID NO: 548652 - RNA, 19 nt, Homo sapiens
  misc_RNA (1)...(19): siRNA sense strand
gguuuaugauuugcuguga

SEQ ID NO: 548653 - RNA, 19 nt, Homo sapiens
  misc_RNA (1)...(19): siRNA sense strand
acagagagaguaaguugga

SEQ ID NO: 548654 - RNA, 19 nt, Homo sapiens
  misc_RNA (1)...(19): siRNA sense strand
gaugacagagagaguaagu

SEQ ID NO: 548655 - RNA, 19 nt, Homo sapiens
  misc_RNA (1)...(19): siRNA sense strand
ggcaccgauuguacaagua

SEQ ID NO: 548656 - RNA, 19 nt, Homo sapiens
  misc_RNA (1)...(19): siRNA sense strand
caccgauuguacaaguaua

SEQ ID NO: 548657 - RNA, 19 nt, Homo sapiens
  misc_RNA (1)...(19): siRNA sense strand
gagaaagcugcaaauccaa

SEQ ID NO: 548658 - RNA, 19 nt, Homo sapiens
  misc_RNA (1)...(19): siRNA sense strand
uaaaggguagaauugagaa

SEQ ID NO: 548659 - RNA, 19 nt, Homo sapiens
  misc_RNA (1)...(19): siRNA sense strand
ggaacgaccagccucuucu

SEQ ID NO: 548660 - RNA, 19 nt, Homo sapiens
  misc_RNA (1)...(19): siRNA sense strand
ccgcagcgacaaugaaguu

SEQ ID NO: 548661 - RNA, 19 nt, Homo sapiens
  misc_RNA (1)...(19): siRNA sense strand
aagaagaaacucaagaucu

SEQ ID NO: 548662 - RNA, 19 nt, Homo sapiens
  misc_RNA (1)...(19): siRNA sense strand
gcagaucagcaggaagcua

SEQ ID NO: 548663 - RNA, 19 nt, Homo sapiens
  misc_RNA (1)...(19): siRNA sense strand
ugcccaaacugcaccauuc

SEQ ID NO: 548664 - RNA, 19 nt, Homo sapiens
  misc_RNA (1)...(19): siRNA sense strand
agaaucgccuucgcaggaa

SEQ ID NO: 548665 - RNA, 19 nt, Homo sapiens
  misc_RNA (1)...(19): siRNA sense strand
gcagcgacaaugaaguuuc

SEQ ID NO: 548666 - RNA, 19 nt, Homo sapiens
  misc_RNA (1)...(19): siRNA sense strand
uggcaccgauuguacaagu

SEQ ID NO: 548667 - RNA, 19 nt, Homo sapiens
  misc_RNA (1)...(19): siRNA sense strand
caacagguuuaugauuugc

SEQ ID NO: 548668 - RNA, 19 nt, Homo sapiens
  misc_RNA (1)...(19): siRNA sense strand
cacgaugacaccuccgaua

SEQ ID NO: 548669 - RNA, 19 nt, Homo sapiens
  misc_RNA (1)...(19): siRNA sense strand
aagccaaagccuaaagaaa

SEQ ID NO: 548670 - RNA, 19 nt, Homo sapiens
  misc_RNA (1)...(19): siRNA sense strand
gcucagguaaagaacagaa

SEQ ID NO: 548671 - RNA, 19 nt, Homo sapiens
  misc_RNA (1)...(19): siRNA sense strand
guaaugacuguauccucaa

SEQ ID NO: 548672 - RNA, 19 nt, Homo sapiens
  misc_RNA (1)...(19): siRNA sense strand
ggcaagaagaaacucaaga

SEQ ID NO: 548673 - RNA, 19 nt, Homo sapiens
  misc_RNA (1)...(19): siRNA sense strand
ggaacaauagagcagaagu

SEQ ID NO: 548674 - RNA, 19 nt, Homo sapiens
  misc_RNA (1)...(19): siRNA sense strand
gauggcaccgauuguacaa

SEQ ID NO: 548675 - RNA, 19 nt, Homo sapiens
  misc_RNA (1)...(19): siRNA sense strand
aagaugacagagagaguaa

SEQ ID NO: 548676 - RNA, 19 nt, Homo sapiens
  misc_RNA (1)...(19): siRNA sense strand
aagacuauaucugcccaaa

SEQ ID NO: 548677 - RNA, 19 nt, Homo sapiens
  misc_RNA (1)...(19): siRNA sense strand
aaaggcggcucaggacauc

SEQ ID NO: 548678 - RNA, 19 nt, Homo sapiens
  misc_RNA (1)...(19): siRNA sense strand
caaaggcgacccgagcaau

SEQ ID NO: 548679 - RNA, 19 nt, Homo sapiens
  misc_RNA (1)...(19): siRNA sense strand
gcaccuaaggccaucaaac

SEQ ID NO: 548680 - RNA, 19 nt, Homo sapiens
  misc_RNA (1)...(19): siRNA sense strand
caagggauaaaggguagaa

SEQ ID NO: 548681 - RNA, 19 nt, Homo sapiens
  misc_RNA (1)...(19): siRNA sense strand
ggaauggggaagacuauau

SEQ ID NO: 548682 - RNA, 19 nt, Homo sapiens
  misc_RNA (1)...(19): siRNA sense strand
caaauccaaguggcaagaa

SEQ ID NO: 548683 - RNA, 19 nt, Homo sapiens
  misc_RNA (1)...(19): siRNA sense strand
guaaagaacagaagccaaa

SEQ ID NO: 548684 - RNA, 19 nt, Homo sapiens
  misc_RNA (1)...(19): siRNA sense strand
gcaaugaggaggcaccuaa

SEQ ID NO: 548685 - RNA, 19 nt, Homo sapiens
  misc_RNA (1)...(19): siRNA sense strand
gaccgaagccugaauguga

SEQ ID NO: 548686 - RNA, 19 nt, Homo sapiens
  misc_RNA (1)...(19): siRNA sense strand
gaacaggagcccacugaga

SEQ ID NO: 548687 - RNA, 19 nt, Homo sapiens
  misc_RNA (1)...(19): siRNA sense strand
cgaccagccucuucugaaa

SEQ ID NO: 548688 - RNA, 19 nt, Homo sapiens
  misc_RNA (1)...(19): siRNA sense strand
caacaacagguuuaugauu

SEQ ID NO: 548689 - RNA, 19 nt, Homo sapiens
  misc_RNA (1)...(19): siRNA sense strand
ugagaaagcugcaaaucca

SEQ ID NO: 548690 - RNA, 19 nt, Homo sapiens
  misc_RNA (1)...(19): siRNA sense strand
cgccgucacuguuguauaa

SEQ ID NO: 548691 - RNA, 19 nt, Homo sapiens
  misc_RNA (1)...(19): siRNA sense strand
gcgauggccugaccuugaa

SEQ ID NO: 548692 - RNA, 19 nt, Homo sapiens
  misc_RNA (1)...(19): siRNA sense strand
gauaaaggguagaauugag

SEQ ID NO: 548693 - RNA, 19 nt, Homo sapiens
  misc_RNA (1)...(19): siRNA sense strand
gaugacaccuccgauagug

SEQ ID NO: 548694 - RNA, 19 nt, Homo sapiens
  misc_RNA (1)...(19): siRNA sense strand
caagagaccagcuccagaa

SEQ ID NO: 548695 - RNA, 19 nt, Homo sapiens
  misc_RNA (1)...(19): siRNA sense strand
gcaagaagaaacucaagau

SEQ ID NO: 548696 - RNA, 19 nt, Homo sapiens
  misc_RNA (1)...(19): siRNA sense strand
gagcaguuccugaccauug

SEQ ID NO: 548697 - RNA, 19 nt, Homo sapiens
  misc_RNA (1)...(19): siRNA sense strand
ugaggagccuggagacuug

SEQ ID NO: 548698 - RNA, 19 nt, Homo sapiens
  misc_RNA (1)...(19): siRNA sense strand
gacuauaucugcccaaacu

SEQ ID NO: 548699 - RNA, 19 nt, Homo sapiens
  misc_RNA (1)...(19): siRNA sense strand
gggcgagcgaucacaauua

SEQ ID NO: 548700 - RNA, 19 nt, Homo sapiens
  misc_RNA (1)...(19): siRNA sense strand
ggauaaaggguagaauuga

SEQ ID NO: 548701 - RNA, 19 nt, Homo sapiens
  misc_RNA (1)...(19): siRNA sense strand
gggauaaaggguagaauug

SEQ ID NO: 548702 - RNA, 19 nt, Homo sapiens
  misc_RNA (1)...(19): siRNA sense strand
gaucuuccagccugugaua

SEQ ID NO: 548703 - RNA, 19 nt, Homo sapiens
  misc_RNA (1)...(19): siRNA sense strand
cagcaaagaguucaggaaa

SEQ ID NO: 548704 - RNA, 19 nt, Homo sapiens
  misc_RNA (1)...(19): siRNA sense strand
uagcgaagaccaagggaua

SEQ ID NO: 548705 - RNA, 19 nt, Homo sapiens
  misc_RNA (1)...(19): siRNA sense strand
ugacagagagaguaaguug

SEQ ID NO: 548706 - RNA, 19 nt, Homo sapiens
  misc_RNA (1)...(19): siRNA sense strand
gaauugagaaagcugcaaa

SEQ ID NO: 548707 - RNA, 19 nt, Homo sapiens
  misc_RNA (1)...(19): siRNA sense strand
guacaaguauaggaacaau

SEQ ID NO: 548708 - RNA, 19 nt, Homo sapiens
  misc_RNA (1)...(19): siRNA sense strand
agaguaaguuggagggaaa

SEQ ID NO: 548709 - RNA, 19 nt, Homo sapiens
  misc_RNA (1)...(19): siRNA sense strand
acaacagguuuaugauuug

SEQ ID NO: 548710 - RNA, 19 nt, Homo sapiens
  misc_RNA (1)...(19): siRNA sense strand
cacaacaacagguuuauga

SEQ ID NO: 548711 - RNA, 19 nt, Homo sapiens
  misc_RNA (1)...(19): siRNA sense strand
caucaaacccaccagcaaa

SEQ ID NO: 548712 - RNA, 19 nt, Homo sapiens
  misc_RNA (1)...(19): siRNA sense strand
gaaaggcggcucaggacau

SEQ ID NO: 548713 - RNA, 19 nt, Homo sapiens
  misc_RNA (1)...(19): siRNA sense strand
cagaucagcaggaagcuaa

SEQ ID NO: 548714 - RNA, 19 nt, Homo sapiens
  misc_RNA (1)...(19): siRNA sense strand
uaaugacuguauccucaaa

SEQ ID NO: 548715 - RNA, 19 nt, Homo sapiens
  misc_RNA (1)...(19): siRNA sense strand
gaagccaaagccuaaagaa

SEQ ID NO: 548716 - RNA, 19 nt, Homo sapiens
  misc_RNA (1)...(19): siRNA sense strand
guggaaagcgcuucugaga

SEQ ID NO: 548717 - RNA, 19 nt, Homo sapiens
  misc_RNA (1)...(19): siRNA sense strand
acaaugaaguuucuaagcu

SEQ ID NO: 548718 - RNA, 19 nt, Homo sapiens
  misc_RNA (1)...(19): siRNA sense strand
gaacaauagagcagaaguc

SEQ ID NO: 548719 - RNA, 19 nt, Homo sapiens
  misc_RNA (1)...(19): siRNA sense strand
gaagaugaagccagagaag

SEQ ID NO: 548720 - RNA, 19 nt, Homo sapiens
  misc_RNA (1)...(19): siRNA sense strand
gugaagcacucgggaagga

SEQ ID NO: 548721 - RNA, 19 nt, Homo sapiens
  misc_RNA (1)...(19): siRNA sense strand
gggaacaggagcccacuga

SEQ ID NO: 548722 - RNA, 19 nt, Homo sapiens
  misc_RNA (1)...(19): siRNA sense strand
gcaccgauuguacaaguau

SEQ ID NO: 548723 - RNA, 19 nt, Homo sapiens
  misc_RNA (1)...(19): siRNA sense strand
gaaagaugacagagagagu

SEQ ID NO: 548724 - RNA, 19 nt, Homo sapiens
  misc_RNA (1)...(19): siRNA sense strand
cagagucgccugcggaaga

SEQ ID NO: 548725 - RNA, 19 nt, Homo sapiens
  misc_RNA (1)...(19): siRNA sense strand
guaaguauucguauucucu

SEQ ID NO: 548726 - RNA, 19 nt, Homo sapiens
  misc_RNA (1)...(19): siRNA sense strand
gcucugguaaguauucgua

SEQ ID NO: 548727 - RNA, 19 nt, Homo sapiens
  misc_RNA (1)...(19): siRNA sense strand
ccucacaacaacagguuua

SEQ ID NO: 548728 - RNA, 19 nt, Homo sapiens
  misc_RNA (1)...(19): siRNA sense strand
gcugauggcaccgauugua

SEQ ID NO: 548729 - RNA, 19 nt, Homo sapiens
  misc_RNA (1)...(19): siRNA sense strand
ggcgagcgaucacaauuac

SEQ ID NO: 548730 - RNA, 19 nt, Homo sapiens
  misc_RNA (1)...(19): siRNA sense strand
uuucuaagcucagguaaag

SEQ ID NO: 548731 - RNA, 19 nt, Homo sapiens
  misc_RNA (1)...(19): siRNA sense strand
gcaaauccaaguggcaaga

SEQ ID NO: 548732 - RNA, 19 nt, Homo sapiens
  misc_RNA (1)...(19): siRNA sense strand
acaaguauaggaacaauag

SEQ ID NO: 548733 - RNA, 19 nt, Homo sapiens
  misc_RNA (1)...(19): siRNA sense strand
aaagaugacagagagagua

SEQ ID NO: 548734 - RNA, 19 nt, Homo sapiens
  misc_RNA (1)...(19): siRNA sense strand
gcaaagaguucaggaaaac

SEQ ID NO: 548735 - RNA, 19 nt, Homo sapiens
  misc_RNA (1)...(19): siRNA sense strand
ccaacgcccuguauugcau

SEQ ID NO: 548736 - RNA, 19 nt, Homo sapiens
  misc_RNA (1)...(19): siRNA sense strand
guaagcaggagcccgagaa

SEQ ID NO: 548737 - RNA, 19 nt, Homo sapiens
  misc_RNA (1)...(19): siRNA sense strand
cgucacuguuguauaaaug

SEQ ID NO: 548738 - RNA, 19 nt, Homo sapiens
  misc_RNA (1)...(19): siRNA sense strand
ucacaauuacaaugcagua

SEQ ID NO: 548739 - RNA, 19 nt, Homo sapiens
  misc_RNA (1)...(19): siRNA sense strand
cagcgacaaugaaguuucu

SEQ ID NO: 548740 - RNA, 19 nt, Homo sapiens
  misc_RNA (1)...(19): siRNA sense strand
gcgaagaccaagggauaaa

SEQ ID NO: 548741 - RNA, 19 nt, Homo sapiens
  misc_RNA (1)...(19): siRNA sense strand
uaggaacaauagagcagaa

SEQ ID NO: 548742 - RNA, 19 nt, Homo sapiens
  misc_RNA (1)...(19): siRNA sense strand
gcgauugugugggcauuuc

SEQ ID NO: 548743 - RNA, 19 nt, Homo sapiens
  misc_RNA (1)...(19): siRNA sense strand
aacagaagccaaagccuaa

SEQ ID NO: 548744 - RNA, 19 nt, Homo sapiens
  misc_RNA (1)...(19): siRNA sense strand
ucuaagcucagguaaagaa

SEQ ID NO: 548745 - RNA, 19 nt, Homo sapiens
  misc_RNA (1)...(19): siRNA sense strand
gcgacaaugaaguuucuaa

SEQ ID NO: 548746 - RNA, 19 nt, Homo sapiens
  misc_RNA (1)...(19): siRNA sense strand
caagaagaaacucaagauc

SEQ ID NO: 548747 - RNA, 19 nt, Homo sapiens
  misc_RNA (1)...(19): siRNA sense strand
gauuguacaaguauaggaa

SEQ ID NO: 548748 - RNA, 19 nt, Homo sapiens
  misc_RNA (1)...(19): siRNA sense strand
aaagagaccacagugaaga

SEQ ID NO: 548749 - RNA, 19 nt, Homo sapiens
  misc_RNA (1)...(19): siRNA sense strand
cgagcgaucacaauuacaa

SEQ ID NO: 548750 - RNA, 19 nt, Homo sapiens
  misc_RNA (1)...(19): siRNA sense strand
ugaccgcugugaagaaugg

SEQ ID NO: 548751 - RNA, 19 nt, Homo sapiens
  misc_RNA (1)...(19): siRNA sense strand
gaugacagagagaguaagu

SEQ ID NO: 548752 - RNA, 19 nt, Homo sapiens
  misc_RNA (1)...(19): siRNA sense strand
gaacgaccagccucuucug

SEQ ID NO: 548753 - RNA, 19 nt, Homo sapiens
  misc_RNA (1)...(19): siRNA sense strand
gaaagcugcaaauccaagu

SEQ ID NO: 548754 - RNA, 19 nt, Homo sapiens
  misc_RNA (1)...(19): siRNA sense strand
gaagaccaagggauaaagg

SEQ ID NO: 548755 - RNA, 19 nt, Homo sapiens
  misc_RNA (1)...(19): siRNA sense strand
gguuuaugauuugcuguga

SEQ ID NO: 548756 - RNA, 19 nt, Homo sapiens
  misc_RNA (1)...(19): siRNA sense strand
acagagagaguaaguugga

SEQ ID NO: 548757 - RNA, 19 nt, Homo sapiens
  misc_RNA (1)...(19): siRNA sense strand
ggcaccgauuguacaagua

SEQ ID NO: 548758 - RNA, 19 nt, Homo sapiens
  misc_RNA (1)...(19): siRNA sense strand
ucugguaaguauucguauu

SEQ ID NO: 548759 - RNA, 19 nt, Homo sapiens
  misc_RNA (1)...(19): siRNA sense strand
caccgauuguacaaguaua

SEQ ID NO: 548760 - RNA, 19 nt, Homo sapiens
  misc_RNA (1)...(19): siRNA sense strand
gagaaagcugcaaauccaa

SEQ ID NO: 548761 - RNA, 19 nt, Homo sapiens
  misc_RNA (1)...(19): siRNA sense strand
uaaaggguagaauugagaa

SEQ ID NO: 548762 - RNA, 19 nt, Homo sapiens
  misc_RNA (1)...(19): siRNA sense strand
ugcccaaacugcaccauuc

SEQ ID NO: 548763 - RNA, 19 nt, Homo sapiens
  misc_RNA (1)...(19): siRNA sense strand
ccgcagcgacaaugaaguu

SEQ ID NO: 548764 - RNA, 19 nt, Homo sapiens
  misc_RNA (1)...(19): siRNA sense strand
aagaagaaacucaagaucu

SEQ ID NO: 548765 - RNA, 19 nt, Homo sapiens
  misc_RNA (1)...(19): siRNA sense strand
ggaacgaccagccucuucu

SEQ ID NO: 548766 - RNA, 19 nt, Homo sapiens
  misc_RNA (1)...(19): siRNA sense strand
gcagaucagcaggaagcua

SEQ ID NO: 548767 - RNA, 19 nt, Homo sapiens
  misc_RNA (1)...(19): siRNA sense strand
caacagguuuaugauuugc

SEQ ID NO: 548768 - RNA, 19 nt, Homo sapiens
  misc_RNA (1)...(19): siRNA sense strand
gcagcgacaaugaaguuuc

SEQ ID NO: 548769 - RNA, 19 nt, Homo sapiens
  misc_RNA (1)...(19): siRNA sense strand
uggcaccgauuguacaagu

SEQ ID NO: 548770 - RNA, 19 nt, Homo sapiens
  misc_RNA (1)...(19): siRNA sense strand
agaaucgccuucgcaggaa

SEQ ID NO: 548771 - RNA, 19 nt, Homo sapiens
  misc_RNA (1)...(19): siRNA sense strand
gauggcaccgauuguacaa

SEQ ID NO: 548772 - RNA, 19 nt, Homo sapiens
  misc_RNA (1)...(19): siRNA sense strand
aagccaaagccuaaagaaa

SEQ ID NO: 548773 - RNA, 19 nt, Homo sapiens
  misc_RNA (1)...(19): siRNA sense strand
gcucagguaaagaacagaa

SEQ ID NO: 548774 - RNA, 19 nt, Homo sapiens
  misc_RNA (1)...(19): siRNA sense strand
guaaugacuguauccucaa

SEQ ID NO: 548775 - RNA, 19 nt, Homo sapiens
  misc_RNA (1)...(19): siRNA sense strand
ggcaagaagaaacucaaga

SEQ ID NO: 548776 - RNA, 19 nt, Homo sapiens
  misc_RNA (1)...(19): siRNA sense strand
cacgaugacaccuccgaua

SEQ ID NO: 548777 - RNA, 19 nt, Homo sapiens
  misc_RNA (1)...(19): siRNA sense strand
ggaacaauagagcagaagu

SEQ ID NO: 548778 - RNA, 19 nt, Homo sapiens
  misc_RNA (1)...(19): siRNA sense strand
aagaugacagagagaguaa

SEQ ID NO: 548779 - RNA, 19 nt, Homo sapiens
  misc_RNA (1)...(19): siRNA sense strand
aagacuauaucugcccaaa

SEQ ID NO: 548780 - RNA, 19 nt, Homo sapiens
  misc_RNA (1)...(19): siRNA sense strand
aaaggcggcucaggacauc

SEQ ID NO: 548781 - RNA, 19 nt, Homo sapiens
  misc_RNA (1)...(19): siRNA sense strand
gguaaguauucguauucuc

SEQ ID NO: 548782 - RNA, 19 nt, Homo sapiens
  misc_RNA (1)...(19): siRNA sense strand
cuucaucccagucugauug

SEQ ID NO: 548783 - RNA, 19 nt, Homo sapiens
  misc_RNA (1)...(19): siRNA sense strand
aaggagagaugguggauua

SEQ ID NO: 548784 - RNA, 19 nt, Homo sapiens
  misc_RNA (1)...(19): siRNA sense strand
cagcugggcuuccugguuu

SEQ ID NO: 548785 - RNA, 19 nt, Homo sapiens
  misc_RNA (1)...(19): siRNA sense strand
ccaaagacaucuccaggau

SEQ ID NO: 548786 - RNA, 19 nt, Homo sapiens
  misc_RNA (1)...(19): siRNA sense strand
gagagaugguggauuacaa

SEQ ID NO: 548787 - RNA, 19 nt, Homo sapiens
  misc_RNA (1)...(19): siRNA sense strand
aaagggaccucgcgguaaa

SEQ ID NO: 548788 - RNA, 19 nt, Homo sapiens
  misc_RNA (1)...(19): siRNA sense strand
gaugguggauuacaaugga

SEQ ID NO: 548789 - RNA, 19 nt, Homo sapiens
  misc_RNA (1)...(19): siRNA sense strand
ggauuacaauggaaacauc

SEQ ID NO: 548790 - RNA, 19 nt, Homo sapiens
  misc_RNA (1)...(19): siRNA sense strand
caagggagaaccagggaaa

SEQ ID NO: 548791 - RNA, 19 nt, Homo sapiens
  misc_RNA (1)...(19): siRNA sense strand
ggaagcaggacuagaugga

SEQ ID NO: 548792 - RNA, 19 nt, Homo sapiens
  misc_RNA (1)...(19): siRNA sense strand
caaggcugcuggaacaagu

SEQ ID NO: 548793 - RNA, 19 nt, Homo sapiens
  misc_RNA (1)...(19): siRNA sense strand
gggagaagcaggugucgau

SEQ ID NO: 548794 - RNA, 19 nt, Homo sapiens
  misc_RNA (1)...(19): siRNA sense strand
ggagaacagggaccagaug

SEQ ID NO: 548795 - RNA, 19 nt, Homo sapiens
  misc_RNA (1)...(19): siRNA sense strand
acaauggaaacaucaauga

SEQ ID NO: 548796 - RNA, 19 nt, Homo sapiens
  misc_RNA (1)...(19): siRNA sense strand
gaaaggagagaugguggau

SEQ ID NO: 548797 - RNA, 19 nt, Homo sapiens
  misc_RNA (1)...(19): siRNA sense strand
cuagagguuucccuggauu

SEQ ID NO: 548798 - RNA, 19 nt, Homo sapiens
  misc_RNA (1)...(19): siRNA sense strand
gcaaauggagacggcuauu

SEQ ID NO: 548799 - RNA, 19 nt, Homo sapiens
  misc_RNA (1)...(19): siRNA sense strand
gaaaggcuuccagggagaa

SEQ ID NO: 548800 - RNA, 19 nt, Homo sapiens
  misc_RNA (1)...(19): siRNA sense strand
gcagcugggcuuccugguu

SEQ ID NO: 548801 - RNA, 19 nt, Homo sapiens
  misc_RNA (1)...(19): siRNA sense strand
ggagagaugguggauuaca

SEQ ID NO: 548802 - RNA, 19 nt, Homo sapiens
  misc_RNA (1)...(19): siRNA sense strand
gaugcuggcaacuccauug

SEQ ID NO: 548803 - RNA, 19 nt, Homo sapiens
  misc_RNA (1)...(19): siRNA sense strand
gcguggagcagcuggagaa

SEQ ID NO: 548804 - RNA, 19 nt, Homo sapiens
  misc_RNA (1)...(19): siRNA sense strand
uggagcagcuggagaacag

SEQ ID NO: 548805 - RNA, 19 nt, Homo sapiens
  misc_RNA (1)...(19): siRNA sense strand
ggauuuccgggucccauug

SEQ ID NO: 548806 - RNA, 19 nt, Homo sapiens
  misc_RNA (1)...(19): siRNA sense strand
gagaugguggauuacaaug

SEQ ID NO: 548807 - RNA, 19 nt, Homo sapiens
  misc_RNA (1)...(19): siRNA sense strand
uagcggagcgcacccacaa

SEQ ID NO: 548808 - RNA, 19 nt, Homo sapiens
  misc_RNA (1)...(19): siRNA sense strand
gggagaaccagggaaagga

SEQ ID NO: 548809 - RNA, 19 nt, Homo sapiens
  misc_RNA (1)...(19): siRNA sense strand
gagccaggccagcauccaa

SEQ ID NO: 548810 - RNA, 19 nt, Homo sapiens
  misc_RNA (1)...(19): siRNA sense strand
gguacuccaggaccaauug

SEQ ID NO: 548811 - RNA, 19 nt, Homo sapiens
  misc_RNA (1)...(19): siRNA sense strand
aaaggagacccugggauga

SEQ ID NO: 548812 - RNA, 19 nt, Homo sapiens
  misc_RNA (1)...(19): siRNA sense strand
gagccagggaucccaggaa

SEQ ID NO: 548813 - RNA, 19 nt, Homo sapiens
  misc_RNA (1)...(19): siRNA sense strand
gaaccagggaaaggagaga

SEQ ID NO: 548814 - RNA, 19 nt, Homo sapiens
  misc_RNA (1)...(19): siRNA sense strand
gauuacaauggaaacauca

SEQ ID NO: 548815 - RNA, 19 nt, Homo sapiens
  misc_RNA (1)...(19): siRNA sense strand
ggucaaccaggaacuagag

SEQ ID NO: 548816 - RNA, 19 nt, Homo sapiens
  misc_RNA (1)...(19): siRNA sense strand
aaggagagaugguggauua

SEQ ID NO: 548817 - RNA, 19 nt, Homo sapiens
  misc_RNA (1)...(19): siRNA sense strand
cagcugggcuuccugguuu

SEQ ID NO: 548818 - RNA, 19 nt, Homo sapiens
  misc_RNA (1)...(19): siRNA sense strand
ccaaagacaucuccaggau

SEQ ID NO: 548819 - RNA, 19 nt, Homo sapiens
  misc_RNA (1)...(19): siRNA sense strand
gagagaugguggauuacaa

SEQ ID NO: 548820 - RNA, 19 nt, Homo sapiens
  misc_RNA (1)...(19): siRNA sense strand
aaagggaccucgcgguaaa

SEQ ID NO: 548821 - RNA, 19 nt, Homo sapiens
  misc_RNA (1)...(19): siRNA sense strand
gaugguggauuacaaugga

SEQ ID NO: 548822 - RNA, 19 nt, Homo sapiens
  misc_RNA (1)...(19): siRNA sense strand
ggauuacaauggaaacauc

SEQ ID NO: 548823 - RNA, 19 nt, Homo sapiens
  misc_RNA (1)...(19): siRNA sense strand
caagggagaaccagggaaa

SEQ ID NO: 548824 - RNA, 19 nt, Homo sapiens
  misc_RNA (1)...(19): siRNA sense strand
ggaagcaggacuagaugga

SEQ ID NO: 548825 - RNA, 19 nt, Homo sapiens
  misc_RNA (1)...(19): siRNA sense strand
caaggcugcuggaacaagu

SEQ ID NO: 548826 - RNA, 19 nt, Homo sapiens
  misc_RNA (1)...(19): siRNA sense strand
gggagaagcaggugucgau

SEQ ID NO: 548827 - RNA, 19 nt, Homo sapiens
  misc_RNA (1)...(19): siRNA sense strand
ggagaacagggaccagaug

SEQ ID NO: 548828 - RNA, 19 nt, Homo sapiens
  misc_RNA (1)...(19): siRNA sense strand
acaauggaaacaucaauga

SEQ ID NO: 548829 - RNA, 19 nt, Homo sapiens
  misc_RNA (1)...(19): siRNA sense strand
gaaaggagagaugguggau

SEQ ID NO: 548830 - RNA, 19 nt, Homo sapiens
  misc_RNA (1)...(19): siRNA sense strand
cuagagguuucccuggauu

SEQ ID NO: 548831 - RNA, 19 nt, Homo sapiens
  misc_RNA (1)...(19): siRNA sense strand
gcaaauggagacggcuauu

SEQ ID NO: 548832 - RNA, 19 nt, Homo sapiens
  misc_RNA (1)...(19): siRNA sense strand
gaaaggcuuccagggagaa

SEQ ID NO: 548833 - RNA, 19 nt, Homo sapiens
  misc_RNA (1)...(19): siRNA sense strand
gcagcugggcuuccugguu

SEQ ID NO: 548834 - RNA, 19 nt, Homo sapiens
  misc_RNA (1)...(19): siRNA sense strand
ggagagaugguggauuaca

SEQ ID NO: 548835 - RNA, 19 nt, Homo sapiens
  misc_RNA (1)...(19): siRNA sense strand
gaugcuggcaacuccauug

SEQ ID NO: 548836 - RNA, 19 nt, Homo sapiens
  misc_RNA (1)...(19): siRNA sense strand
gcguggagcagcuggagaa

SEQ ID NO: 548837 - RNA, 19 nt, Homo sapiens
  misc_RNA (1)...(19): siRNA sense strand
uggagcagcuggagaacag

SEQ ID NO: 548838 - RNA, 19 nt, Homo sapiens
  misc_RNA (1)...(19): siRNA sense strand
ggauuuccgggucccauug

SEQ ID NO: 548839 - RNA, 19 nt, Homo sapiens
  misc_RNA (1)...(19): siRNA sense strand
gagaugguggauuacaaug

SEQ ID NO: 548840 - RNA, 19 nt, Homo sapiens
  misc_RNA (1)...(19): siRNA sense strand
uagcggagcgcacccacaa

SEQ ID NO: 548841 - RNA, 19 nt, Homo sapiens
  misc_RNA (1)...(19): siRNA sense strand
gggagaaccagggaaagga

SEQ ID NO: 548842 - RNA, 19 nt, Homo sapiens
  misc_RNA (1)...(19): siRNA sense strand
gagccaggccagcauccaa

SEQ ID NO: 548843 - RNA, 19 nt, Homo sapiens
  misc_RNA (1)...(19): siRNA sense strand
gguacuccaggaccaauug

SEQ ID NO: 548844 - RNA, 19 nt, Homo sapiens
  misc_RNA (1)...(19): siRNA sense strand
aaaggagacccugggauga

SEQ ID NO: 548845 - RNA, 19 nt, Homo sapiens
  misc_RNA (1)...(19): siRNA sense strand
gagccagggaucccaggaa

SEQ ID NO: 548846 - RNA, 19 nt, Homo sapiens
  misc_RNA (1)...(19): siRNA sense strand
gaaccagggaaaggagaga

SEQ ID NO: 548847 - RNA, 19 nt, Homo sapiens
  misc_RNA (1)...(19): siRNA sense strand
gauuacaauggaaacauca

SEQ ID NO: 548848 - RNA, 19 nt, Homo sapiens
  misc_RNA (1)...(19): siRNA sense strand
ggucaaccaggaacuagag

SEQ ID NO: 548849 - RNA, 19 nt, Homo sapiens
  misc_RNA (1)...(19): siRNA sense strand
aaggagagaugguggauua

SEQ ID NO: 548850 - RNA, 19 nt, Homo sapiens
  misc_RNA (1)...(19): siRNA sense strand
cagcugggcuuccugguuu

SEQ ID NO: 548851 - RNA, 19 nt, Homo sapiens
  misc_RNA (1)...(19): siRNA sense strand
ccaaagacaucuccaggau

SEQ ID NO: 548852 - RNA, 19 nt, Homo sapiens
  misc_RNA (1)...(19): siRNA sense strand
gagagaugguggauuacaa

SEQ ID NO: 548853 - RNA, 19 nt, Homo sapiens
  misc_RNA (1)...(19): siRNA sense strand
aaagggaccucgcgguaaa

SEQ ID NO: 548854 - RNA, 19 nt, Homo sapiens
  misc_RNA (1)...(19): siRNA sense strand
gaugguggauuacaaugga

SEQ ID NO: 548855 - RNA, 19 nt, Homo sapiens
  misc_RNA (1)...(19): siRNA sense strand
ggauuacaauggaaacauc

SEQ ID NO: 548856 - RNA, 19 nt, Homo sapiens
  misc_RNA (1)...(19): siRNA sense strand
caagggagaaccagggaaa

SEQ ID NO: 548857 - RNA, 19 nt, Homo sapiens
  misc_RNA (1)...(19): siRNA sense strand
ggaagcaggacuagaugga

SEQ ID NO: 548858 - RNA, 19 nt, Homo sapiens
  misc_RNA (1)...(19): siRNA sense strand
caaggcugcuggaacaagu

SEQ ID NO: 548859 - RNA, 19 nt, Homo sapiens
  misc_RNA (1)...(19): siRNA sense strand
gggagaagcaggugucgau

SEQ ID NO: 548860 - RNA, 19 nt, Homo sapiens
  misc_RNA (1)...(19): siRNA sense strand
ggagaacagggaccagaug

SEQ ID NO: 548861 - RNA, 19 nt, Homo sapiens
  misc_RNA (1)...(19): siRNA sense strand
acaauggaaacaucaauga

SEQ ID NO: 548862 - RNA, 19 nt, Homo sapiens
  misc_RNA (1)...(19): siRNA sense strand
gaaaggagagaugguggau

SEQ ID NO: 548863 - RNA, 19 nt, Homo sapiens
  misc_RNA (1)...(19): siRNA sense strand
cuagagguuucccuggauu

SEQ ID NO: 548864 - RNA, 19 nt, Homo sapiens
  misc_RNA (1)...(19): siRNA sense strand
gcaaauggagacggcuauu

SEQ ID NO: 548865 - RNA, 19 nt, Homo sapiens
  misc_RNA (1)...(19): siRNA sense strand
gaaaggcuuccagggagaa

SEQ ID NO: 548866 - RNA, 19 nt, Homo sapiens
  misc_RNA (1)...(19): siRNA sense strand
gcagcugggcuuccugguu

SEQ ID NO: 548867 - RNA, 19 nt, Homo sapiens
  misc_RNA (1)...(19): siRNA sense strand
ggagagaugguggauuaca

SEQ ID NO: 548868 - RNA, 19 nt, Homo sapiens
  misc_RNA (1)...(19): siRNA sense strand
gaugcuggcaacuccauug

SEQ ID NO: 548869 - RNA, 19 nt, Homo sapiens
  misc_RNA (1)...(19): siRNA sense strand
gcguggagcagcuggagaa

SEQ ID NO: 548870 - RNA, 19 nt, Homo sapiens
  misc_RNA (1)...(19): siRNA sense strand
uggagcagcuggagaacag

SEQ ID NO: 548871 - RNA, 19 nt, Homo sapiens
  misc_RNA (1)...(19): siRNA sense strand
ggauuuccgggucccauug

SEQ ID NO: 548872 - RNA, 19 nt, Homo sapiens
  misc_RNA (1)...(19): siRNA sense strand
gagaugguggauuacaaug

SEQ ID NO: 548873 - RNA, 19 nt, Homo sapiens
  misc_RNA (1)...(19): siRNA sense strand
uagcggagcgcacccacaa

SEQ ID NO: 548874 - RNA, 19 nt, Homo sapiens
  misc_RNA (1)...(19): siRNA sense strand
gggagaaccagggaaagga

SEQ ID NO: 548875 - RNA, 19 nt, Homo sapiens
  misc_RNA (1)...(19): siRNA sense strand
gagccaggccagcauccaa

SEQ ID NO: 548876 - RNA, 19 nt, Homo sapiens
  misc_RNA (1)...(19): siRNA sense strand
gguacuccaggaccaauug

SEQ ID NO: 548877 - RNA, 19 nt, Homo sapiens
  misc_RNA (1)...(19): siRNA sense strand
aaaggagacccugggauga

SEQ ID NO: 548878 - RNA, 19 nt, Homo sapiens
  misc_RNA (1)...(19): siRNA sense strand
gagccagggaucccaggaa

SEQ ID NO: 548879 - RNA, 19 nt, Homo sapiens
  misc_RNA (1)...(19): siRNA sense strand
gaaccagggaaaggagaga

SEQ ID NO: 548880 - RNA, 19 nt, Homo sapiens
  misc_RNA (1)...(19): siRNA sense strand
gauuacaauggaaacauca

SEQ ID NO: 548881 - RNA, 19 nt, Homo sapiens
  misc_RNA (1)...(19): siRNA sense strand
ggucaaccaggaacuagag

SEQ ID NO: 548882 - RNA, 19 nt, Homo sapiens
  misc_RNA (1)...(19): siRNA sense strand
aaggagagaugguggauua

SEQ ID NO: 548883 - RNA, 19 nt, Homo sapiens
  misc_RNA (1)...(19): siRNA sense strand
cagcugggcuuccugguuu

SEQ ID NO: 548884 - RNA, 19 nt, Homo sapiens
  misc_RNA (1)...(19): siRNA sense strand
ccaaagacaucuccaggau

SEQ ID NO: 548885 - RNA, 19 nt, Homo sapiens
  misc_RNA (1)...(19): siRNA sense strand
gagagaugguggauuacaa

SEQ ID NO: 548886 - RNA, 19 nt, Homo sapiens
  misc_RNA (1)...(19): siRNA sense strand
aaagggaccucgcgguaaa

SEQ ID NO: 548887 - RNA, 19 nt, Homo sapiens
  misc_RNA (1)...(19): siRNA sense strand
gaugguggauuacaaugga

SEQ ID NO: 548888 - RNA, 19 nt, Homo sapiens
  misc_RNA (1)...(19): siRNA sense strand
ggauuacaauggaaacauc

SEQ ID NO: 548889 - RNA, 19 nt, Homo sapiens
  misc_RNA (1)...(19): siRNA sense strand
caagggagaaccagggaaa

SEQ ID NO: 548890 - RNA, 19 nt, Homo sapiens
  misc_RNA (1)...(19): siRNA sense strand
ggaagcaggacuagaugga

SEQ ID NO: 548891 - RNA, 19 nt, Homo sapiens
  misc_RNA (1)...(19): siRNA sense strand
caaggcugcuggaacaagu

SEQ ID NO: 548892 - RNA, 19 nt, Homo sapiens
  misc_RNA (1)...(19): siRNA sense strand
gggagaagcaggugucgau

SEQ ID NO: 548893 - RNA, 19 nt, Homo sapiens
  misc_RNA (1)...(19): siRNA sense strand
ggagaacagggaccagaug

SEQ ID NO: 548894 - RNA, 19 nt, Homo sapiens
  misc_RNA (1)...(19): siRNA sense strand
acaauggaaacaucaauga

SEQ ID NO: 548895 - RNA, 19 nt, Homo sapiens
  misc_RNA (1)...(19): siRNA sense strand
gaaaggagagaugguggau

SEQ ID NO: 548896 - RNA, 19 nt, Homo sapiens
  misc_RNA (1)...(19): siRNA sense strand
cuagagguuucccuggauu

SEQ ID NO: 548897 - RNA, 19 nt, Homo sapiens
  misc_RNA (1)...(19): siRNA sense strand
gcaaauggagacggcuauu

SEQ ID NO: 548898 - RNA, 19 nt, Homo sapiens
  misc_RNA (1)...(19): siRNA sense strand
gaaaggcuuccagggagaa

SEQ ID NO: 548899 - RNA, 19 nt, Homo sapiens
  misc_RNA (1)...(19): siRNA sense strand
gcagcugggcuuccugguu

SEQ ID NO: 548900 - RNA, 19 nt, Homo sapiens
  misc_RNA (1)...(19): siRNA sense strand
ggagagaugguggauuaca

SEQ ID NO: 548901 - RNA, 19 nt, Homo sapiens
  misc_RNA (1)...(19): siRNA sense strand
gaugcuggcaacuccauug

SEQ ID NO: 548902 - RNA, 19 nt, Homo sapiens
  misc_RNA (1)...(19): siRNA sense strand
gcguggagcagcuggagaa

SEQ ID NO: 548903 - RNA, 19 nt, Homo sapiens
  misc_RNA (1)...(19): siRNA sense strand
uggagcagcuggagaacag

SEQ ID NO: 548904 - RNA, 19 nt, Homo sapiens
  misc_RNA (1)...(19): siRNA sense strand
ggauuuccgggucccauug

SEQ ID NO: 548905 - RNA, 19 nt, Homo sapiens
  misc_RNA (1)...(19): siRNA sense strand
gagaugguggauuacaaug

SEQ ID NO: 548906 - RNA, 19 nt, Homo sapiens
  misc_RNA (1)...(19): siRNA sense strand
uagcggagcgcacccacaa

SEQ ID NO: 548907 - RNA, 19 nt, Homo sapiens
  misc_RNA (1)...(19): siRNA sense strand
gggagaaccagggaaagga

SEQ ID NO: 548908 - RNA, 19 nt, Homo sapiens
  misc_RNA (1)...(19): siRNA sense strand
gagccaggccagcauccaa

SEQ ID NO: 548909 - RNA, 19 nt, Homo sapiens
  misc_RNA (1)...(19): siRNA sense strand
gguacuccaggaccaauug

SEQ ID NO: 548910 - RNA, 19 nt, Homo sapiens
  misc_RNA (1)...(19): siRNA sense strand
aaaggagacccugggauga

SEQ ID NO: 548911 - RNA, 19 nt, Homo sapiens
  misc_RNA (1)...(19): siRNA sense strand
gagccagggaucccaggaa

SEQ ID NO: 548912 - RNA, 19 nt, Homo sapiens
  misc_RNA (1)...(19): siRNA sense strand
gaaccagggaaaggagaga

SEQ ID NO: 548913 - RNA, 19 nt, Homo sapiens
  misc_RNA (1)...(19): siRNA sense strand
gauuacaauggaaacauca

SEQ ID NO: 548914 - RNA, 19 nt, Homo sapiens
  misc_RNA (1)...(19): siRNA sense strand
ggucaaccaggaacuagag

SEQ ID NO: 548915 - RNA, 19 nt, Homo sapiens
  misc_RNA (1)...(19): siRNA sense strand
aaggagagaugguggauua

SEQ ID NO: 548916 - RNA, 19 nt, Homo sapiens
  misc_RNA (1)...(19): siRNA sense strand
cagcugggcuuccugguuu

SEQ ID NO: 548917 - RNA, 19 nt, Homo sapiens
  misc_RNA (1)...(19): siRNA sense strand
ccaaagacaucuccaggau

SEQ ID NO: 548918 - RNA, 19 nt, Homo sapiens
  misc_RNA (1)...(19): siRNA sense strand
gagagaugguggauuacaa

SEQ ID NO: 548919 - RNA, 19 nt, Homo sapiens
  misc_RNA (1)...(19): siRNA sense strand
aaagggaccucgcgguaaa

SEQ ID NO: 548920 - RNA, 19 nt, Homo sapiens
  misc_RNA (1)...(19): siRNA sense strand
gaugguggauuacaaugga

SEQ ID NO: 548921 - RNA, 19 nt, Homo sapiens
  misc_RNA (1)...(19): siRNA sense strand
ggauuacaauggaaacauc

SEQ ID NO: 548922 - RNA, 19 nt, Homo sapiens
  misc_RNA (1)...(19): siRNA sense strand
caagggagaaccagggaaa

SEQ ID NO: 548923 - RNA, 19 nt, Homo sapiens
  misc_RNA (1)...(19): siRNA sense strand
ggaagcaggacuagaugga

SEQ ID NO: 548924 - RNA, 19 nt, Homo sapiens
  misc_RNA (1)...(19): siRNA sense strand
caaggcugcuggaacaagu

SEQ ID NO: 548925 - RNA, 19 nt, Homo sapiens
  misc_RNA (1)...(19): siRNA sense strand
gggagaagcaggugucgau

SEQ ID NO: 548926 - RNA, 19 nt, Homo sapiens
  misc_RNA (1)...(19): siRNA sense strand
ggagaacagggaccagaug

SEQ ID NO: 548927 - RNA, 19 nt, Homo sapiens
  misc_RNA (1)...(19): siRNA sense strand
acaauggaaacaucaauga

SEQ ID NO: 548928 - RNA, 19 nt, Homo sapiens
  misc_RNA (1)...(19): siRNA sense strand
gaaaggagagaugguggau

SEQ ID NO: 548929 - RNA, 19 nt, Homo sapiens
  misc_RNA (1)...(19): siRNA sense strand
cuagagguuucccuggauu

SEQ ID NO: 548930 - RNA, 19 nt, Homo sapiens
  misc_RNA (1)...(19): siRNA sense strand
gcaaauggagacggcuauu

SEQ ID NO: 548931 - RNA, 19 nt, Homo sapiens
  misc_RNA (1)...(19): siRNA sense strand
gaaaggcuuccagggagaa

SEQ ID NO: 548932 - RNA, 19 nt, Homo sapiens
  misc_RNA (1)...(19): siRNA sense strand
gcagcugggcuuccugguu

SEQ ID NO: 548933 - RNA, 19 nt, Homo sapiens
  misc_RNA (1)...(19): siRNA sense strand
ggagagaugguggauuaca

SEQ ID NO: 548934 - RNA, 19 nt, Homo sapiens
  misc_RNA (1)...(19): siRNA sense strand
gaugcuggcaacuccauug

SEQ ID NO: 548935 - RNA, 19 nt, Homo sapiens
  misc_RNA (1)...(19): siRNA sense strand
gcguggagcagcuggagaa

SEQ ID NO: 548936 - RNA, 19 nt, Homo sapiens
  misc_RNA (1)...(19): siRNA sense strand
uggagcagcuggagaacag

SEQ ID NO: 548937 - RNA, 19 nt, Homo sapiens
  misc_RNA (1)...(19): siRNA sense strand
ggauuuccgggucccauug

SEQ ID NO: 548938 - RNA, 19 nt, Homo sapiens
  misc_RNA (1)...(19): siRNA sense strand
gagaugguggauuacaaug

SEQ ID NO: 548939 - RNA, 19 nt, Homo sapiens
  misc_RNA (1)...(19): siRNA sense strand
uagcggagcgcacccacaa

SEQ ID NO: 548940 - RNA, 19 nt, Homo sapiens
  misc_RNA (1)...(19): siRNA sense strand
gggagaaccagggaaagga

SEQ ID NO: 548941 - RNA, 19 nt, Homo sapiens
  misc_RNA (1)...(19): siRNA sense strand
gagccaggccagcauccaa

SEQ ID NO: 548942 - RNA, 19 nt, Homo sapiens
  misc_RNA (1)...(19): siRNA sense strand
gguacuccaggaccaauug

SEQ ID NO: 548943 - RNA, 19 nt, Homo sapiens
  misc_RNA (1)...(19): siRNA sense strand
aaaggagacccugggauga

SEQ ID NO: 548944 - RNA, 19 nt, Homo sapiens
  misc_RNA (1)...(19): siRNA sense strand
gagccagggaucccaggaa

SEQ ID NO: 548945 - RNA, 19 nt, Homo sapiens
  misc_RNA (1)...(19): siRNA sense strand
gaaccagggaaaggagaga

SEQ ID NO: 548946 - RNA, 19 nt, Homo sapiens
  misc_RNA (1)...(19): siRNA sense strand
gauuacaauggaaacauca

SEQ ID NO: 548947 - RNA, 19 nt, Homo sapiens
  misc_RNA (1)...(19): siRNA sense strand
ggucaaccaggaacuagag

SEQ ID NO: 548948 - RNA, 19 nt, Homo sapiens
  misc_RNA (1)...(19): siRNA sense strand
aaggagagaugguggauua

SEQ ID NO: 548949 - RNA, 19 nt, Homo sapiens
  misc_RNA (1)...(19): siRNA sense strand
cagcugggcuuccugguuu

SEQ ID NO: 548950 - RNA, 19 nt, Homo sapiens
  misc_RNA (1)...(19): siRNA sense strand
ccaaagacaucuccaggau

SEQ ID NO: 548951 - RNA, 19 nt, Homo sapiens
  misc_RNA (1)...(19): siRNA sense strand
gagagaugguggauuacaa

SEQ ID NO: 548952 - RNA, 19 nt, Homo sapiens
  misc_RNA (1)...(19): siRNA sense strand
aaagggaccucgcgguaaa

SEQ ID NO: 548953 - RNA, 19 nt, Homo sapiens
  misc_RNA (1)...(19): siRNA sense strand
gaugguggauuacaaugga

SEQ ID NO: 548954 - RNA, 19 nt, Homo sapiens
  misc_RNA (1)...(19): siRNA sense strand
ggauuacaauggaaacauc

SEQ ID NO: 548955 - RNA, 19 nt, Homo sapiens
  misc_RNA (1)...(19): siRNA sense strand
caagggagaaccagggaaa

SEQ ID NO: 548956 - RNA, 19 nt, Homo sapiens
  misc_RNA (1)...(19): siRNA sense strand
ggaagcaggacuagaugga

SEQ ID NO: 548957 - RNA, 19 nt, Homo sapiens
  misc_RNA (1)...(19): siRNA sense strand
caaggcugcuggaacaagu

SEQ ID NO: 548958 - RNA, 19 nt, Homo sapiens
  misc_RNA (1)...(19): siRNA sense strand
gggagaagcaggugucgau

SEQ ID NO: 548959 - RNA, 19 nt, Homo sapiens
  misc_RNA (1)...(19): siRNA sense strand
ggagaacagggaccagaug

SEQ ID NO: 548960 - RNA, 19 nt, Homo sapiens
  misc_RNA (1)...(19): siRNA sense strand
acaauggaaacaucaauga

SEQ ID NO: 548961 - RNA, 19 nt, Homo sapiens
  misc_RNA (1)...(19): siRNA sense strand
gaaaggagagaugguggau

SEQ ID NO: 548962 - RNA, 19 nt, Homo sapiens
  misc_RNA (1)...(19): siRNA sense strand
cuagagguuucccuggauu

SEQ ID NO: 548963 - RNA, 19 nt, Homo sapiens
  misc_RNA (1)...(19): siRNA sense strand
gcaaauggagacggcuauu

SEQ ID NO: 548964 - RNA, 19 nt, Homo sapiens
  misc_RNA (1)...(19): siRNA sense strand
gaaaggcuuccagggagaa

SEQ ID NO: 548965 - RNA, 19 nt, Homo sapiens
  misc_RNA (1)...(19): siRNA sense strand
gcagcugggcuuccugguu

SEQ ID NO: 548966 - RNA, 19 nt, Homo sapiens
  misc_RNA (1)...(19): siRNA sense strand
ggagagaugguggauuaca

SEQ ID NO: 548967 - RNA, 19 nt, Homo sapiens
  misc_RNA (1)...(19): siRNA sense strand
gaugcuggcaacuccauug

SEQ ID NO: 548968 - RNA, 19 nt, Homo sapiens
  misc_RNA (1)...(19): siRNA sense strand
gcguggagcagcuggagaa

SEQ ID NO: 548969 - RNA, 19 nt, Homo sapiens
  misc_RNA (1)...(19): siRNA sense strand
uggagcagcuggagaacag

SEQ ID NO: 548970 - RNA, 19 nt, Homo sapiens
  misc_RNA (1)...(19): siRNA sense strand
ggauuuccgggucccauug

SEQ ID NO: 548971 - RNA, 19 nt, Homo sapiens
  misc_RNA (1)...(19): siRNA sense strand
gagaugguggauuacaaug

SEQ ID NO: 548972 - RNA, 19 nt, Homo sapiens
  misc_RNA (1)...(19): siRNA sense strand
uagcggagcgcacccacaa

SEQ ID NO: 548973 - RNA, 19 nt, Homo sapiens
  misc_RNA (1)...(19): siRNA sense strand
gggagaaccagggaaagga

SEQ ID NO: 548974 - RNA, 19 nt, Homo sapiens
  misc_RNA (1)...(19): siRNA sense strand
gagccaggccagcauccaa

SEQ ID NO: 548975 - RNA, 19 nt, Homo sapiens
  misc_RNA (1)...(19): siRNA sense strand
gguacuccaggaccaauug

SEQ ID NO: 548976 - RNA, 19 nt, Homo sapiens
  misc_RNA (1)...(19): siRNA sense strand
aaaggagacccugggauga

SEQ ID NO: 548977 - RNA, 19 nt, Homo sapiens
  misc_RNA (1)...(19): siRNA sense strand
gagccagggaucccaggaa

SEQ ID NO: 548978 - RNA, 19 nt, Homo sapiens
  misc_RNA (1)...(19): siRNA sense strand
gaaccagggaaaggagaga

SEQ ID NO: 548979 - RNA, 19 nt, Homo sapiens
  misc_RNA (1)...(19): siRNA sense strand
gauuacaauggaaacauca

SEQ ID NO: 548980 - RNA, 19 nt, Homo sapiens
  misc_RNA (1)...(19): siRNA sense strand
ggucaaccaggaacuagag

SEQ ID NO: 548981 - RNA, 19 nt, Homo sapiens
  misc_RNA (1)...(19): siRNA sense strand
aaggagagaugguggauua

SEQ ID NO: 548982 - RNA, 19 nt, Homo sapiens
  misc_RNA (1)...(19): siRNA sense strand
cagcugggcuuccugguuu

SEQ ID NO: 548983 - RNA, 19 nt, Homo sapiens
  misc_RNA (1)...(19): siRNA sense strand
ccaaagacaucuccaggau

SEQ ID NO: 548984 - RNA, 19 nt, Homo sapiens
  misc_RNA (1)...(19): siRNA sense strand
gagagaugguggauuacaa

SEQ ID NO: 548985 - RNA, 19 nt, Homo sapiens
  misc_RNA (1)...(19): siRNA sense strand
aaagggaccucgcgguaaa

SEQ ID NO: 548986 - RNA, 19 nt, Homo sapiens
  misc_RNA (1)...(19): siRNA sense strand
gaugguggauuacaaugga

SEQ ID NO: 548987 - RNA, 19 nt, Homo sapiens
  misc_RNA (1)...(19): siRNA sense strand
ggauuacaauggaaacauc

SEQ ID NO: 548988 - RNA, 19 nt, Homo sapiens
  misc_RNA (1)...(19): siRNA sense strand
caagggagaaccagggaaa

SEQ ID NO: 548989 - RNA, 19 nt, Homo sapiens
  misc_RNA (1)...(19): siRNA sense strand
ggaagcaggacuagaugga

SEQ ID NO: 548990 - RNA, 19 nt, Homo sapiens
  misc_RNA (1)...(19): siRNA sense strand
caaggcugcuggaacaagu

SEQ ID NO: 548991 - RNA, 19 nt, Homo sapiens
  misc_RNA (1)...(19): siRNA sense strand
gggagaagcaggugucgau

SEQ ID NO: 548992 - RNA, 19 nt, Homo sapiens
  misc_RNA (1)...(19): siRNA sense strand
ggagaacagggaccagaug

SEQ ID NO: 548993 - RNA, 19 nt, Homo sapiens
  misc_RNA (1)...(19): siRNA sense strand
acaauggaaacaucaauga

SEQ ID NO: 548994 - RNA, 19 nt, Homo sapiens
  misc_RNA (1)...(19): siRNA sense strand
gaaaggagagaugguggau

SEQ ID NO: 548995 - RNA, 19 nt, Homo sapiens
  misc_RNA (1)...(19): siRNA sense strand
cuagagguuucccuggauu

SEQ ID NO: 548996 - RNA, 19 nt, Homo sapiens
  misc_RNA (1)...(19): siRNA sense strand
gcaaauggagacggcuauu

SEQ ID NO: 548997 - RNA, 19 nt, Homo sapiens
  misc_RNA (1)...(19): siRNA sense strand
gaaaggcuuccagggagaa

SEQ ID NO: 548998 - RNA, 19 nt, Homo sapiens
  misc_RNA (1)...(19): siRNA sense strand
gcagcugggcuuccugguu

SEQ ID NO: 548999 - RNA, 19 nt, Homo sapiens
  misc_RNA (1)...(19): siRNA sense strand
ggagagaugguggauuaca

SEQ ID NO: 549000 - RNA, 19 nt, Homo sapiens
  misc_RNA (1)...(19): siRNA sense strand
gaugcuggcaacuccauug

SEQ ID NO: 549001 - RNA, 19 nt, Homo sapiens
  misc_RNA (1)...(19): siRNA sense strand
gcguggagcagcuggagaa

SEQ ID NO: 549002 - RNA, 19 nt, Homo sapiens
  misc_RNA (1)...(19): siRNA sense strand
uggagcagcuggagaacag

SEQ ID NO: 549003 - RNA, 19 nt, Homo sapiens
  misc_RNA (1)...(19): siRNA sense strand
ggauuuccgggucccauug

SEQ ID NO: 549004 - RNA, 19 nt, Homo sapiens
  misc_RNA (1)...(19): siRNA sense strand
gagaugguggauuacaaug

SEQ ID NO: 549005 - RNA, 19 nt, Homo sapiens
  misc_RNA (1)...(19): siRNA sense strand
uagcggagcgcacccacaa

SEQ ID NO: 549006 - RNA, 19 nt, Homo sapiens
  misc_RNA (1)...(19): siRNA sense strand
gggagaaccagggaaagga

SEQ ID NO: 549007 - RNA, 19 nt, Homo sapiens
  misc_RNA (1)...(19): siRNA sense strand
gagccaggccagcauccaa

SEQ ID NO: 549008 - RNA, 19 nt, Homo sapiens
  misc_RNA (1)...(19): siRNA sense strand
gguacuccaggaccaauug

SEQ ID NO: 549009 - RNA, 19 nt, Homo sapiens
  misc_RNA (1)...(19): siRNA sense strand
aaaggagacccugggauga

SEQ ID NO: 549010 - RNA, 19 nt, Homo sapiens
  misc_RNA (1)...(19): siRNA sense strand
gagccagggaucccaggaa

SEQ ID NO: 549011 - RNA, 19 nt, Homo sapiens
  misc_RNA (1)...(19): siRNA sense strand
gaaccagggaaaggagaga

SEQ ID NO: 549012 - RNA, 19 nt, Homo sapiens
  misc_RNA (1)...(19): siRNA sense strand
gauuacaauggaaacauca

SEQ ID NO: 549013 - RNA, 19 nt, Homo sapiens
  misc_RNA (1)...(19): siRNA sense strand
ggucaaccaggaacuagag

SEQ ID NO: 549014 - RNA, 19 nt, Homo sapiens
  misc_RNA (1)...(19): siRNA sense strand
aaggagagaugguggauua

SEQ ID NO: 549015 - RNA, 19 nt, Homo sapiens
  misc_RNA (1)...(19): siRNA sense strand
cagcugggcuuccugguuu

SEQ ID NO: 549016 - RNA, 19 nt, Homo sapiens
  misc_RNA (1)...(19): siRNA sense strand
ccaaagacaucuccaggau

SEQ ID NO: 549017 - RNA, 19 nt, Homo sapiens
  misc_RNA (1)...(19): siRNA sense strand
gagagaugguggauuacaa

SEQ ID NO: 549018 - RNA, 19 nt, Homo sapiens
  misc_RNA (1)...(19): siRNA sense strand
aaagggaccucgcgguaaa

SEQ ID NO: 549019 - RNA, 19 nt, Homo sapiens
  misc_RNA (1)...(19): siRNA sense strand
gaugguggauuacaaugga

SEQ ID NO: 549020 - RNA, 19 nt, Homo sapiens
  misc_RNA (1)...(19): siRNA sense strand
ggauuacaauggaaacauc

SEQ ID NO: 549021 - RNA, 19 nt, Homo sapiens
  misc_RNA (1)...(19): siRNA sense strand
caagggagaaccagggaaa

SEQ ID NO: 549022 - RNA, 19 nt, Homo sapiens
  misc_RNA (1)...(19): siRNA sense strand
ggaagcaggacuagaugga

SEQ ID NO: 549023 - RNA, 19 nt, Homo sapiens
  misc_RNA (1)...(19): siRNA sense strand
caaggcugcuggaacaagu

SEQ ID NO: 549024 - RNA, 19 nt, Homo sapiens
  misc_RNA (1)...(19): siRNA sense strand
gggagaagcaggugucgau

SEQ ID NO: 549025 - RNA, 19 nt, Homo sapiens
  misc_RNA (1)...(19): siRNA sense strand
ggagaacagggaccagaug

SEQ ID NO: 549026 - RNA, 19 nt, Homo sapiens
  misc_RNA (1)...(19): siRNA sense strand
acaauggaaacaucaauga

SEQ ID NO: 549027 - RNA, 19 nt, Homo sapiens
  misc_RNA (1)...(19): siRNA sense strand
gaaaggagagaugguggau

SEQ ID NO: 549028 - RNA, 19 nt, Homo sapiens
  misc_RNA (1)...(19): siRNA sense strand
cuagagguuucccuggauu

SEQ ID NO: 549029 - RNA, 19 nt, Homo sapiens
  misc_RNA (1)...(19): siRNA sense strand
gcaaauggagacggcuauu

SEQ ID NO: 549030 - RNA, 19 nt, Homo sapiens
  misc_RNA (1)...(19): siRNA sense strand
gaaaggcuuccagggagaa

SEQ ID NO: 549031 - RNA, 19 nt, Homo sapiens
  misc_RNA (1)...(19): siRNA sense strand
gcagcugggcuuccugguu

SEQ ID NO: 549032 - RNA, 19 nt, Homo sapiens
  misc_RNA (1)...(19): siRNA sense strand
ggagagaugguggauuaca

SEQ ID NO: 549033 - RNA, 19 nt, Homo sapiens
  misc_RNA (1)...(19): siRNA sense strand
gaugcuggcaacuccauug

SEQ ID NO: 549034 - RNA, 19 nt, Homo sapiens
  misc_RNA (1)...(19): siRNA sense strand
gcguggagcagcuggagaa

SEQ ID NO: 549035 - RNA, 19 nt, Homo sapiens
  misc_RNA (1)...(19): siRNA sense strand
uggagcagcuggagaacag

SEQ ID NO: 549036 - RNA, 19 nt, Homo sapiens
  misc_RNA (1)...(19): siRNA sense strand
ggauuuccgggucccauug

SEQ ID NO: 549037 - RNA, 19 nt, Homo sapiens
  misc_RNA (1)...(19): siRNA sense strand
gagaugguggauuacaaug

SEQ ID NO: 549038 - RNA, 19 nt, Homo sapiens
  misc_RNA (1)...(19): siRNA sense strand
uagcggagcgcacccacaa

SEQ ID NO: 549039 - RNA, 19 nt, Homo sapiens
  misc_RNA (1)...(19): siRNA sense strand
gggagaaccagggaaagga

SEQ ID NO: 549040 - RNA, 19 nt, Homo sapiens
  misc_RNA (1)...(19): siRNA sense strand
gagccaggccagcauccaa

SEQ ID NO: 549041 - RNA, 19 nt, Homo sapiens
  misc_RNA (1)...(19): siRNA sense strand
gguacuccaggaccaauug

SEQ ID NO: 549042 - RNA, 19 nt, Homo sapiens
  misc_RNA (1)...(19): siRNA sense strand
aaaggagacccugggauga

SEQ ID NO: 549043 - RNA, 19 nt, Homo sapiens
  misc_RNA (1)...(19): siRNA sense strand
gagccagggaucccaggaa

SEQ ID NO: 549044 - RNA, 19 nt, Homo sapiens
  misc_RNA (1)...(19): siRNA sense strand
gaaccagggaaaggagaga

SEQ ID NO: 549045 - RNA, 19 nt, Homo sapiens
  misc_RNA (1)...(19): siRNA sense strand
gauuacaauggaaacauca

SEQ ID NO: 549046 - RNA, 19 nt, Homo sapiens
  misc_RNA (1)...(19): siRNA sense strand
ggucaaccaggaacuagag

SEQ ID NO: 549047 - RNA, 19 nt, Homo sapiens
  misc_RNA (1)...(19): siRNA sense strand
aaggagagaugguggauua

SEQ ID NO: 549048 - RNA, 19 nt, Homo sapiens
  misc_RNA (1)...(19): siRNA sense strand
cagcugggcuuccugguuu

SEQ ID NO: 549049 - RNA, 19 nt, Homo sapiens
  misc_RNA (1)...(19): siRNA sense strand
ccaaagacaucuccaggau

SEQ ID NO: 549050 - RNA, 19 nt, Homo sapiens
  misc_RNA (1)...(19): siRNA sense strand
gagagaugguggauuacaa

SEQ ID NO: 549051 - RNA, 19 nt, Homo sapiens
  misc_RNA (1)...(19): siRNA sense strand
aaagggaccucgcgguaaa

SEQ ID NO: 549052 - RNA, 19 nt, Homo sapiens
  misc_RNA (1)...(19): siRNA sense strand
gaugguggauuacaaugga

SEQ ID NO: 549053 - RNA, 19 nt, Homo sapiens
  misc_RNA (1)...(19): siRNA sense strand
ggauuacaauggaaacauc

SEQ ID NO: 549054 - RNA, 19 nt, Homo sapiens
  misc_RNA (1)...(19): siRNA sense strand
caagggagaaccagggaaa

SEQ ID NO: 549055 - RNA, 19 nt, Homo sapiens
  misc_RNA (1)...(19): siRNA sense strand
ggaagcaggacuagaugga

SEQ ID NO: 549056 - RNA, 19 nt, Homo sapiens
  misc_RNA (1)...(19): siRNA sense strand
caaggcugcuggaacaagu

SEQ ID NO: 549057 - RNA, 19 nt, Homo sapiens
  misc_RNA (1)...(19): siRNA sense strand
gggagaagcaggugucgau

SEQ ID NO: 549058 - RNA, 19 nt, Homo sapiens
  misc_RNA (1)...(19): siRNA sense strand
ggagaacagggaccagaug

SEQ ID NO: 549059 - RNA, 19 nt, Homo sapiens
  misc_RNA (1)...(19): siRNA sense strand
acaauggaaacaucaauga

SEQ ID NO: 549060 - RNA, 19 nt, Homo sapiens
  misc_RNA (1)...(19): siRNA sense strand
gaaaggagagaugguggau

SEQ ID NO: 549061 - RNA, 19 nt, Homo sapiens
  misc_RNA (1)...(19): siRNA sense strand
cuagagguuucccuggauu

SEQ ID NO: 549062 - RNA, 19 nt, Homo sapiens
  misc_RNA (1)...(19): siRNA sense strand
gcaaauggagacggcuauu

SEQ ID NO: 549063 - RNA, 19 nt, Homo sapiens
  misc_RNA (1)...(19): siRNA sense strand
gaaaggcuuccagggagaa

SEQ ID NO: 549064 - RNA, 19 nt, Homo sapiens
  misc_RNA (1)...(19): siRNA sense strand
gcagcugggcuuccugguu

SEQ ID NO: 549065 - RNA, 19 nt, Homo sapiens
  misc_RNA (1)...(19): siRNA sense strand
ggagagaugguggauuaca

SEQ ID NO: 549066 - RNA, 19 nt, Homo sapiens
  misc_RNA (1)...(19): siRNA sense strand
gaugcuggcaacuccauug

SEQ ID NO: 549067 - RNA, 19 nt, Homo sapiens
  misc_RNA (1)...(19): siRNA sense strand
gcguggagcagcuggagaa

SEQ ID NO: 549068 - RNA, 19 nt, Homo sapiens
  misc_RNA (1)...(19): siRNA sense strand
uggagcagcuggagaacag

SEQ ID NO: 549069 - RNA, 19 nt, Homo sapiens
  misc_RNA (1)...(19): siRNA sense strand
ggauuuccgggucccauug

SEQ ID NO: 549070 - RNA, 19 nt, Homo sapiens
  misc_RNA (1)...(19): siRNA sense strand
gagaugguggauuacaaug

SEQ ID NO: 549071 - RNA, 19 nt, Homo sapiens
  misc_RNA (1)...(19): siRNA sense strand
uagcggagcgcacccacaa

SEQ ID NO: 549072 - RNA, 19 nt, Homo sapiens
  misc_RNA (1)...(19): siRNA sense strand
gggagaaccagggaaagga

SEQ ID NO: 549073 - RNA, 19 nt, Homo sapiens
  misc_RNA (1)...(19): siRNA sense strand
gagccaggccagcauccaa

SEQ ID NO: 549074 - RNA, 19 nt, Homo sapiens
  misc_RNA (1)...(19): siRNA sense strand
gguacuccaggaccaauug

SEQ ID NO: 549075 - RNA, 19 nt, Homo sapiens
  misc_RNA (1)...(19): siRNA sense strand
aaaggagacccugggauga

SEQ ID NO: 549076 - RNA, 19 nt, Homo sapiens
  misc_RNA (1)...(19): siRNA sense strand
gagccagggaucccaggaa

SEQ ID NO: 549077 - RNA, 19 nt, Homo sapiens
  misc_RNA (1)...(19): siRNA sense strand
gaaccagggaaaggagaga

SEQ ID NO: 549078 - RNA, 19 nt, Homo sapiens
  misc_RNA (1)...(19): siRNA sense strand
gauuacaauggaaacauca

SEQ ID NO: 549079 - RNA, 19 nt, Homo sapiens
  misc_RNA (1)...(19): siRNA sense strand
ggucaaccaggaacuagag

SEQ ID NO: 549080 - RNA, 19 nt, Homo sapiens
  misc_RNA (1)...(19): siRNA sense strand
aaggagagaugguggauua

SEQ ID NO: 549081 - RNA, 19 nt, Homo sapiens
  misc_RNA (1)...(19): siRNA sense strand
cagcugggcuuccugguuu

SEQ ID NO: 549082 - RNA, 19 nt, Homo sapiens
  misc_RNA (1)...(19): siRNA sense strand
ccaaagacaucuccaggau

SEQ ID NO: 549083 - RNA, 19 nt, Homo sapiens
  misc_RNA (1)...(19): siRNA sense strand
gagagaugguggauuacaa

SEQ ID NO: 549084 - RNA, 19 nt, Homo sapiens
  misc_RNA (1)...(19): siRNA sense strand
aaagggaccucgcgguaaa

SEQ ID NO: 549085 - RNA, 19 nt, Homo sapiens
  misc_RNA (1)...(19): siRNA sense strand
gaugguggauuacaaugga

SEQ ID NO: 549086 - RNA, 19 nt, Homo sapiens
  misc_RNA (1)...(19): siRNA sense strand
ggauuacaauggaaacauc

SEQ ID NO: 549087 - RNA, 19 nt, Homo sapiens
  misc_RNA (1)...(19): siRNA sense strand
caagggagaaccagggaaa

SEQ ID NO: 549088 - RNA, 19 nt, Homo sapiens
  misc_RNA (1)...(19): siRNA sense strand
ggaagcaggacuagaugga

SEQ ID NO: 549089 - RNA, 19 nt, Homo sapiens
  misc_RNA (1)...(19): siRNA sense strand
caaggcugcuggaacaagu

SEQ ID NO: 549090 - RNA, 19 nt, Homo sapiens
  misc_RNA (1)...(19): siRNA sense strand
gggagaagcaggugucgau

SEQ ID NO: 549091 - RNA, 19 nt, Homo sapiens
  misc_RNA (1)...(19): siRNA sense strand
ggagaacagggaccagaug

SEQ ID NO: 549092 - RNA, 19 nt, Homo sapiens
  misc_RNA (1)...(19): siRNA sense strand
acaauggaaacaucaauga

SEQ ID NO: 549093 - RNA, 19 nt, Homo sapiens
  misc_RNA (1)...(19): siRNA sense strand
gaaaggagagaugguggau

SEQ ID NO: 549094 - RNA, 19 nt, Homo sapiens
  misc_RNA (1)...(19): siRNA sense strand
cuagagguuucccuggauu

SEQ ID NO: 549095 - RNA, 19 nt, Homo sapiens
  misc_RNA (1)...(19): siRNA sense strand
gcaaauggagacggcuauu

SEQ ID NO: 549096 - RNA, 19 nt, Homo sapiens
  misc_RNA (1)...(19): siRNA sense strand
gaaaggcuuccagggagaa

SEQ ID NO: 549097 - RNA, 19 nt, Homo sapiens
  misc_RNA (1)...(19): siRNA sense strand
gcagcugggcuuccugguu

SEQ ID NO: 549098 - RNA, 19 nt, Homo sapiens
  misc_RNA (1)...(19): siRNA sense strand
ggagagaugguggauuaca

SEQ ID NO: 549099 - RNA, 19 nt, Homo sapiens
  misc_RNA (1)...(19): siRNA sense strand
gaugcuggcaacuccauug

SEQ ID NO: 549100 - RNA, 19 nt, Homo sapiens
  misc_RNA (1)...(19): siRNA sense strand
gcguggagcagcuggagaa

SEQ ID NO: 549101 - RNA, 19 nt, Homo sapiens
  misc_RNA (1)...(19): siRNA sense strand
uggagcagcuggagaacag

SEQ ID NO: 549102 - RNA, 19 nt, Homo sapiens
  misc_RNA (1)...(19): siRNA sense strand
ggauuuccgggucccauug

SEQ ID NO: 549103 - RNA, 19 nt, Homo sapiens
  misc_RNA (1)...(19): siRNA sense strand
gagaugguggauuacaaug

SEQ ID NO: 549104 - RNA, 19 nt, Homo sapiens
  misc_RNA (1)...(19): siRNA sense strand
uagcggagcgcacccacaa

SEQ ID NO: 549105 - RNA, 19 nt, Homo sapiens
  misc_RNA (1)...(19): siRNA sense strand
gggagaaccagggaaagga

SEQ ID NO: 549106 - RNA, 19 nt, Homo sapiens
  misc_RNA (1)...(19): siRNA sense strand
gagccaggccagcauccaa

SEQ ID NO: 549107 - RNA, 19 nt, Homo sapiens
  misc_RNA (1)...(19): siRNA sense strand
gguacuccaggaccaauug

SEQ ID NO: 549108 - RNA, 19 nt, Homo sapiens
  misc_RNA (1)...(19): siRNA sense strand
aaaggagacccugggauga

SEQ ID NO: 549109 - RNA, 19 nt, Homo sapiens
  misc_RNA (1)...(19): siRNA sense strand
gagccagggaucccaggaa

SEQ ID NO: 549110 - RNA, 19 nt, Homo sapiens
  misc_RNA (1)...(19): siRNA sense strand
gaaccagggaaaggagaga

SEQ ID NO: 549111 - RNA, 19 nt, Homo sapiens
  misc_RNA (1)...(19): siRNA sense strand
gauuacaauggaaacauca

SEQ ID NO: 549112 - RNA, 19 nt, Homo sapiens
  misc_RNA (1)...(19): siRNA sense strand
ggucaaccaggaacuagag

SEQ ID NO: 549113 - RNA, 19 nt, Homo sapiens
  misc_RNA (1)...(19): siRNA sense strand
aaggagagaugguggauua

SEQ ID NO: 549114 - RNA, 19 nt, Homo sapiens
  misc_RNA (1)...(19): siRNA sense strand
cagcugggcuuccugguuu

SEQ ID NO: 549115 - RNA, 19 nt, Homo sapiens
  misc_RNA (1)...(19): siRNA sense strand
ccaaagacaucuccaggau

SEQ ID NO: 549116 - RNA, 19 nt, Homo sapiens
  misc_RNA (1)...(19): siRNA sense strand
gagagaugguggauuacaa

SEQ ID NO: 549117 - RNA, 19 nt, Homo sapiens
  misc_RNA (1)...(19): siRNA sense strand
aaagggaccucgcgguaaa

SEQ ID NO: 549118 - RNA, 19 nt, Homo sapiens
  misc_RNA (1)...(19): siRNA sense strand
gaugguggauuacaaugga

SEQ ID NO: 549119 - RNA, 19 nt, Homo sapiens
  misc_RNA (1)...(19): siRNA sense strand
ggauuacaauggaaacauc

SEQ ID NO: 549120 - RNA, 19 nt, Homo sapiens
  misc_RNA (1)...(19): siRNA sense strand
caagggagaaccagggaaa

SEQ ID NO: 549121 - RNA, 19 nt, Homo sapiens
  misc_RNA (1)...(19): siRNA sense strand
ggaagcaggacuagaugga

SEQ ID NO: 549122 - RNA, 19 nt, Homo sapiens
  misc_RNA (1)...(19): siRNA sense strand
caaggcugcuggaacaagu

SEQ ID NO: 549123 - RNA, 19 nt, Homo sapiens
  misc_RNA (1)...(19): siRNA sense strand
gggagaagcaggugucgau

SEQ ID NO: 549124 - RNA, 19 nt, Homo sapiens
  misc_RNA (1)...(19): siRNA sense strand
ggagaacagggaccagaug

SEQ ID NO: 549125 - RNA, 19 nt, Homo sapiens
  misc_RNA (1)...(19): siRNA sense strand
acaauggaaacaucaauga

SEQ ID NO: 549126 - RNA, 19 nt, Homo sapiens
  misc_RNA (1)...(19): siRNA sense strand
gaaaggagagaugguggau

SEQ ID NO: 549127 - RNA, 19 nt, Homo sapiens
  misc_RNA (1)...(19): siRNA sense strand
cuagagguuucccuggauu

SEQ ID NO: 549128 - RNA, 19 nt, Homo sapiens
  misc_RNA (1)...(19): siRNA sense strand
gcaaauggagacggcuauu

SEQ ID NO: 549129 - RNA, 19 nt, Homo sapiens
  misc_RNA (1)...(19): siRNA sense strand
gaaaggcuuccagggagaa

SEQ ID NO: 549130 - RNA, 19 nt, Homo sapiens
  misc_RNA (1)...(19): siRNA sense strand
gcagcugggcuuccugguu

SEQ ID NO: 549131 - RNA, 19 nt, Homo sapiens
  misc_RNA (1)...(19): siRNA sense strand
ggagagaugguggauuaca

SEQ ID NO: 549132 - RNA, 19 nt, Homo sapiens
  misc_RNA (1)...(19): siRNA sense strand
gaugcuggcaacuccauug

SEQ ID NO: 549133 - RNA, 19 nt, Homo sapiens
  misc_RNA (1)...(19): siRNA sense strand
gcguggagcagcuggagaa

SEQ ID NO: 549134 - RNA, 19 nt, Homo sapiens
  misc_RNA (1)...(19): siRNA sense strand
uggagcagcuggagaacag

SEQ ID NO: 549135 - RNA, 19 nt, Homo sapiens
  misc_RNA (1)...(19): siRNA sense strand
ggauuuccgggucccauug

SEQ ID NO: 549136 - RNA, 19 nt, Homo sapiens
  misc_RNA (1)...(19): siRNA sense strand
gagaugguggauuacaaug

SEQ ID NO: 549137 - RNA, 19 nt, Homo sapiens
  misc_RNA (1)...(19): siRNA sense strand
uagcggagcgcacccacaa

SEQ ID NO: 549138 - RNA, 19 nt, Homo sapiens
  misc_RNA (1)...(19): siRNA sense strand
gggagaaccagggaaagga

SEQ ID NO: 549139 - RNA, 19 nt, Homo sapiens
  misc_RNA (1)...(19): siRNA sense strand
gagccaggccagcauccaa

SEQ ID NO: 549140 - RNA, 19 nt, Homo sapiens
  misc_RNA (1)...(19): siRNA sense strand
gguacuccaggaccaauug

SEQ ID NO: 549141 - RNA, 19 nt, Homo sapiens
  misc_RNA (1)...(19): siRNA sense strand
aaaggagacccugggauga

SEQ ID NO: 549142 - RNA, 19 nt, Homo sapiens
  misc_RNA (1)...(19): siRNA sense strand
gagccagggaucccaggaa

SEQ ID NO: 549143 - RNA, 19 nt, Homo sapiens
  misc_RNA (1)...(19): siRNA sense strand
gaaccagggaaaggagaga

SEQ ID NO: 549144 - RNA, 19 nt, Homo sapiens
  misc_RNA (1)...(19): siRNA sense strand
gauuacaauggaaacauca

SEQ ID NO: 549145 - RNA, 19 nt, Homo sapiens
  misc_RNA (1)...(19): siRNA sense strand
ggucaaccaggaacuagag

SEQ ID NO: 549146 - RNA, 19 nt, Homo sapiens
  misc_RNA (1)...(19): siRNA sense strand
aaggagagaugguggauua

SEQ ID NO: 549147 - RNA, 19 nt, Homo sapiens
  misc_RNA (1)...(19): siRNA sense strand
cagcugggcuuccugguuu

SEQ ID NO: 549148 - RNA, 19 nt, Homo sapiens
  misc_RNA (1)...(19): siRNA sense strand
ccaaagacaucuccaggau

SEQ ID NO: 549149 - RNA, 19 nt, Homo sapiens
  misc_RNA (1)...(19): siRNA sense strand
gagagaugguggauuacaa

SEQ ID NO: 549150 - RNA, 19 nt, Homo sapiens
  misc_RNA (1)...(19): siRNA sense strand
aaagggaccucgcgguaaa

SEQ ID NO: 549151 - RNA, 19 nt, Homo sapiens
  misc_RNA (1)...(19): siRNA sense strand
gaugguggauuacaaugga

SEQ ID NO: 549152 - RNA, 19 nt, Homo sapiens
  misc_RNA (1)...(19): siRNA sense strand
ggauuacaauggaaacauc

SEQ ID NO: 549153 - RNA, 19 nt, Homo sapiens
  misc_RNA (1)...(19): siRNA sense strand
caagggagaaccagggaaa

SEQ ID NO: 549154 - RNA, 19 nt, Homo sapiens
  misc_RNA (1)...(19): siRNA sense strand
ggaagcaggacuagaugga

SEQ ID NO: 549155 - RNA, 19 nt, Homo sapiens
  misc_RNA (1)...(19): siRNA sense strand
caaggcugcuggaacaagu

SEQ ID NO: 549156 - RNA, 19 nt, Homo sapiens
  misc_RNA (1)...(19): siRNA sense strand
gggagaagcaggugucgau

SEQ ID NO: 549157 - RNA, 19 nt, Homo sapiens
  misc_RNA (1)...(19): siRNA sense strand
ggagaacagggaccagaug

SEQ ID NO: 549158 - RNA, 19 nt, Homo sapiens
  misc_RNA (1)...(19): siRNA sense strand
acaauggaaacaucaauga

SEQ ID NO: 549159 - RNA, 19 nt, Homo sapiens
  misc_RNA (1)...(19): siRNA sense strand
gaaaggagagaugguggau

SEQ ID NO: 549160 - RNA, 19 nt, Homo sapiens
  misc_RNA (1)...(19): siRNA sense strand
cuagagguuucccuggauu

SEQ ID NO: 549161 - RNA, 19 nt, Homo sapiens
  misc_RNA (1)...(19): siRNA sense strand
gcaaauggagacggcuauu

SEQ ID NO: 549162 - RNA, 19 nt, Homo sapiens
  misc_RNA (1)...(19): siRNA sense strand
gaaaggcuuccagggagaa

SEQ ID NO: 549163 - RNA, 19 nt, Homo sapiens
  misc_RNA (1)...(19): siRNA sense strand
gcagcugggcuuccugguu

SEQ ID NO: 549164 - RNA, 19 nt, Homo sapiens
  misc_RNA (1)...(19): siRNA sense strand
ggagagaugguggauuaca

SEQ ID NO: 549165 - RNA, 19 nt, Homo sapiens
  misc_RNA (1)...(19): siRNA sense strand
gaugcuggcaacuccauug

SEQ ID NO: 549166 - RNA, 19 nt, Homo sapiens
  misc_RNA (1)...(19): siRNA sense strand
gcguggagcagcuggagaa

SEQ ID NO: 549167 - RNA, 19 nt, Homo sapiens
  misc_RNA (1)...(19): siRNA sense strand
uggagcagcuggagaacag

SEQ ID NO: 549168 - RNA, 19 nt, Homo sapiens
  misc_RNA (1)...(19): siRNA sense strand
ggauuuccgggucccauug

SEQ ID NO: 549169 - RNA, 19 nt, Homo sapiens
  misc_RNA (1)...(19): siRNA sense strand
gagaugguggauuacaaug

SEQ ID NO: 549170 - RNA, 19 nt, Homo sapiens
  misc_RNA (1)...(19): siRNA sense strand
uagcggagcgcacccacaa

SEQ ID NO: 549171 - RNA, 19 nt, Homo sapiens
  misc_RNA (1)...(19): siRNA sense strand
gggagaaccagggaaagga

SEQ ID NO: 549172 - RNA, 19 nt, Homo sapiens
  misc_RNA (1)...(19): siRNA sense strand
gagccaggccagcauccaa

SEQ ID NO: 549173 - RNA, 19 nt, Homo sapiens
  misc_RNA (1)...(19): siRNA sense strand
gguacuccaggaccaauug

SEQ ID NO: 549174 - RNA, 19 nt, Homo sapiens
  misc_RNA (1)...(19): siRNA sense strand
aaaggagacccugggauga

SEQ ID NO: 549175 - RNA, 19 nt, Homo sapiens
  misc_RNA (1)...(19): siRNA sense strand
gagccagggaucccaggaa

SEQ ID NO: 549176 - RNA, 19 nt, Homo sapiens
  misc_RNA (1)...(19): siRNA sense strand
gaaccagggaaaggagaga

SEQ ID NO: 549177 - RNA, 19 nt, Homo sapiens
  misc_RNA (1)...(19): siRNA sense strand
gauuacaauggaaacauca

SEQ ID NO: 549178 - RNA, 19 nt, Homo sapiens
  misc_RNA (1)...(19): siRNA sense strand
ggucaaccaggaacuagag

SEQ ID NO: 549179 - RNA, 19 nt, Homo sapiens
  misc_RNA (1)...(19): siRNA sense strand
aaggagagaugguggauua

SEQ ID NO: 549180 - RNA, 19 nt, Homo sapiens
  misc_RNA (1)...(19): siRNA sense strand
cagcugggcuuccugguuu

SEQ ID NO: 549181 - RNA, 19 nt, Homo sapiens
  misc_RNA (1)...(19): siRNA sense strand
ccaaagacaucuccaggau

SEQ ID NO: 549182 - RNA, 19 nt, Homo sapiens
  misc_RNA (1)...(19): siRNA sense strand
gagagaugguggauuacaa

SEQ ID NO: 549183 - RNA, 19 nt, Homo sapiens
  misc_RNA (1)...(19): siRNA sense strand
aaagggaccucgcgguaaa

SEQ ID NO: 549184 - RNA, 19 nt, Homo sapiens
  misc_RNA (1)...(19): siRNA sense strand
gaugguggauuacaaugga

SEQ ID NO: 549185 - RNA, 19 nt, Homo sapiens
  misc_RNA (1)...(19): siRNA sense strand
ggauuacaauggaaacauc

SEQ ID NO: 549186 - RNA, 19 nt, Homo sapiens
  misc_RNA (1)...(19): siRNA sense strand
caagggagaaccagggaaa

SEQ ID NO: 549187 - RNA, 19 nt, Homo sapiens
  misc_RNA (1)...(19): siRNA sense strand
ggaagcaggacuagaugga

SEQ ID NO: 549188 - RNA, 19 nt, Homo sapiens
  misc_RNA (1)...(19): siRNA sense strand
caaggcugcuggaacaagu

SEQ ID NO: 549189 - RNA, 19 nt, Homo sapiens
  misc_RNA (1)...(19): siRNA sense strand
gggagaagcaggugucgau

SEQ ID NO: 549190 - RNA, 19 nt, Homo sapiens
  misc_RNA (1)...(19): siRNA sense strand
ggagaacagggaccagaug

SEQ ID NO: 549191 - RNA, 19 nt, Homo sapiens
  misc_RNA (1)...(19): siRNA sense strand
acaauggaaacaucaauga

SEQ ID NO: 549192 - RNA, 19 nt, Homo sapiens
  misc_RNA (1)...(19): siRNA sense strand
gaaaggagagaugguggau

SEQ ID NO: 549193 - RNA, 19 nt, Homo sapiens
  misc_RNA (1)...(19): siRNA sense strand
cuagagguuucccuggauu

SEQ ID NO: 549194 - RNA, 19 nt, Homo sapiens
  misc_RNA (1)...(19): siRNA sense strand
gcaaauggagacggcuauu

SEQ ID NO: 549195 - RNA, 19 nt, Homo sapiens
  misc_RNA (1)...(19): siRNA sense strand
gaaaggcuuccagggagaa

SEQ ID NO: 549196 - RNA, 19 nt, Homo sapiens
  misc_RNA (1)...(19): siRNA sense strand
gcagcugggcuuccugguu

SEQ ID NO: 549197 - RNA, 19 nt, Homo sapiens
  misc_RNA (1)...(19): siRNA sense strand
ggagagaugguggauuaca

SEQ ID NO: 549198 - RNA, 19 nt, Homo sapiens
  misc_RNA (1)...(19): siRNA sense strand
gaugcuggcaacuccauug

SEQ ID NO: 549199 - RNA, 19 nt, Homo sapiens
  misc_RNA (1)...(19): siRNA sense strand
gcguggagcagcuggagaa

SEQ ID NO: 549200 - RNA, 19 nt, Homo sapiens
  misc_RNA (1)...(19): siRNA sense strand
uggagcagcuggagaacag

SEQ ID NO: 549201 - RNA, 19 nt, Homo sapiens
  misc_RNA (1)...(19): siRNA sense strand
ggauuuccgggucccauug

SEQ ID NO: 549202 - RNA, 19 nt, Homo sapiens
  misc_RNA (1)...(19): siRNA sense strand
gagaugguggauuacaaug

SEQ ID NO: 549203 - RNA, 19 nt, Homo sapiens
  misc_RNA (1)...(19): siRNA sense strand
uagcggagcgcacccacaa

SEQ ID NO: 549204 - RNA, 19 nt, Homo sapiens
  misc_RNA (1)...(19): siRNA sense strand
gggagaaccagggaaagga

SEQ ID NO: 549205 - RNA, 19 nt, Homo sapiens
  misc_RNA (1)...(19): siRNA sense strand
gagccaggccagcauccaa

SEQ ID NO: 549206 - RNA, 19 nt, Homo sapiens
  misc_RNA (1)...(19): siRNA sense strand
gguacuccaggaccaauug

SEQ ID NO: 549207 - RNA, 19 nt, Homo sapiens
  misc_RNA (1)...(19): siRNA sense strand
aaaggagacccugggauga

SEQ ID NO: 549208 - RNA, 19 nt, Homo sapiens
  misc_RNA (1)...(19): siRNA sense strand
gagccagggaucccaggaa

SEQ ID NO: 549209 - RNA, 19 nt, Homo sapiens
  misc_RNA (1)...(19): siRNA sense strand
gaaccagggaaaggagaga

SEQ ID NO: 549210 - RNA, 19 nt, Homo sapiens
  misc_RNA (1)...(19): siRNA sense strand
gauuacaauggaaacauca

SEQ ID NO: 549211 - RNA, 19 nt, Homo sapiens
  misc_RNA (1)...(19): siRNA sense strand
ggucaaccaggaacuagag

SEQ ID NO: 549212 - RNA, 19 nt, Homo sapiens
  misc_RNA (1)...(19): siRNA sense strand
aaggagagaugguggauua

SEQ ID NO: 549213 - RNA, 19 nt, Homo sapiens
  misc_RNA (1)...(19): siRNA sense strand
cagcugggcuuccugguuu

SEQ ID NO: 549214 - RNA, 19 nt, Homo sapiens
  misc_RNA (1)...(19): siRNA sense strand
ccaaagacaucuccaggau

SEQ ID NO: 549215 - RNA, 19 nt, Homo sapiens
  misc_RNA (1)...(19): siRNA sense strand
gagagaugguggauuacaa

SEQ ID NO: 549216 - RNA, 19 nt, Homo sapiens
  misc_RNA (1)...(19): siRNA sense strand
aaagggaccucgcgguaaa

SEQ ID NO: 549217 - RNA, 19 nt, Homo sapiens
  misc_RNA (1)...(19): siRNA sense strand
gaugguggauuacaaugga

SEQ ID NO: 549218 - RNA, 19 nt, Homo sapiens
  misc_RNA (1)...(19): siRNA sense strand
ggauuacaauggaaacauc

SEQ ID NO: 549219 - RNA, 19 nt, Homo sapiens
  misc_RNA (1)...(19): siRNA sense strand
caagggagaaccagggaaa

SEQ ID NO: 549220 - RNA, 19 nt, Homo sapiens
  misc_RNA (1)...(19): siRNA sense strand
ggaagcaggacuagaugga

SEQ ID NO: 549221 - RNA, 19 nt, Homo sapiens
  misc_RNA (1)...(19): siRNA sense strand
caaggcugcuggaacaagu

SEQ ID NO: 549222 - RNA, 19 nt, Homo sapiens
  misc_RNA (1)...(19): siRNA sense strand
gggagaagcaggugucgau

SEQ ID NO: 549223 - RNA, 19 nt, Homo sapiens
  misc_RNA (1)...(19): siRNA sense strand
ggagaacagggaccagaug

SEQ ID NO: 549224 - RNA, 19 nt, Homo sapiens
  misc_RNA (1)...(19): siRNA sense strand
acaauggaaacaucaauga

SEQ ID NO: 549225 - RNA, 19 nt, Homo sapiens
  misc_RNA (1)...(19): siRNA sense strand
gaaaggagagaugguggau

SEQ ID NO: 549226 - RNA, 19 nt, Homo sapiens
  misc_RNA (1)...(19): siRNA sense strand
cuagagguuucccuggauu

SEQ ID NO: 549227 - RNA, 19 nt, Homo sapiens
  misc_RNA (1)...(19): siRNA sense strand
gcaaauggagacggcuauu

SEQ ID NO: 549228 - RNA, 19 nt, Homo sapiens
  misc_RNA (1)...(19): siRNA sense strand
gaaaggcuuccagggagaa

SEQ ID NO: 549229 - RNA, 19 nt, Homo sapiens
  misc_RNA (1)...(19): siRNA sense strand
gcagcugggcuuccugguu

SEQ ID NO: 549230 - RNA, 19 nt, Homo sapiens
  misc_RNA (1)...(19): siRNA sense strand
ggagagaugguggauuaca

SEQ ID NO: 549231 - RNA, 19 nt, Homo sapiens
  misc_RNA (1)...(19): siRNA sense strand
gaugcuggcaacuccauug

SEQ ID NO: 549232 - RNA, 19 nt, Homo sapiens
  misc_RNA (1)...(19): siRNA sense strand
gcguggagcagcuggagaa

SEQ ID NO: 549233 - RNA, 19 nt, Homo sapiens
  misc_RNA (1)...(19): siRNA sense strand
uggagcagcuggagaacag

SEQ ID NO: 549234 - RNA, 19 nt, Homo sapiens
  misc_RNA (1)...(19): siRNA sense strand
ggauuuccgggucccauug

SEQ ID NO: 549235 - RNA, 19 nt, Homo sapiens
  misc_RNA (1)...(19): siRNA sense strand
gagaugguggauuacaaug

SEQ ID NO: 549236 - RNA, 19 nt, Homo sapiens
  misc_RNA (1)...(19): siRNA sense strand
uagcggagcgcacccacaa

SEQ ID NO: 549237 - RNA, 19 nt, Homo sapiens
  misc_RNA (1)...(19): siRNA sense strand
gggagaaccagggaaagga

SEQ ID NO: 549238 - RNA, 19 nt, Homo sapiens
  misc_RNA (1)...(19): siRNA sense strand
gagccaggccagcauccaa

SEQ ID NO: 549239 - RNA, 19 nt, Homo sapiens
  misc_RNA (1)...(19): siRNA sense strand
gguacuccaggaccaauug

SEQ ID NO: 549240 - RNA, 19 nt, Homo sapiens
  misc_RNA (1)...(19): siRNA sense strand
aaaggagacccugggauga

SEQ ID NO: 549241 - RNA, 19 nt, Homo sapiens
  misc_RNA (1)...(19): siRNA sense strand
gagccagggaucccaggaa

SEQ ID NO: 549242 - RNA, 19 nt, Homo sapiens
  misc_RNA (1)...(19): siRNA sense strand
gaaccagggaaaggagaga

SEQ ID NO: 549243 - RNA, 19 nt, Homo sapiens
  misc_RNA (1)...(19): siRNA sense strand
gauuacaauggaaacauca

SEQ ID NO: 549244 - RNA, 19 nt, Homo sapiens
  misc_RNA (1)...(19): siRNA sense strand
ggucaaccaggaacuagag

SEQ ID NO: 549245 - RNA, 19 nt, Homo sapiens
  misc_RNA (1)...(19): siRNA sense strand
aaggagagaugguggauua

SEQ ID NO: 549246 - RNA, 19 nt, Homo sapiens
  misc_RNA (1)...(19): siRNA sense strand
cagcugggcuuccugguuu

SEQ ID NO: 549247 - RNA, 19 nt, Homo sapiens
  misc_RNA (1)...(19): siRNA sense strand
ccaaagacaucuccaggau

SEQ ID NO: 549248 - RNA, 19 nt, Homo sapiens
  misc_RNA (1)...(19): siRNA sense strand
gagagaugguggauuacaa

SEQ ID NO: 549249 - RNA, 19 nt, Homo sapiens
  misc_RNA (1)...(19): siRNA sense strand
aaagggaccucgcgguaaa

SEQ ID NO: 549250 - RNA, 19 nt, Homo sapiens
  misc_RNA (1)...(19): siRNA sense strand
gaugguggauuacaaugga

SEQ ID NO: 549251 - RNA, 19 nt, Homo sapiens
  misc_RNA (1)...(19): siRNA sense strand
ggauuacaauggaaacauc

SEQ ID NO: 549252 - RNA, 19 nt, Homo sapiens
  misc_RNA (1)...(19): siRNA sense strand
caagggagaaccagggaaa

SEQ ID NO: 549253 - RNA, 19 nt, Homo sapiens
  misc_RNA (1)...(19): siRNA sense strand
ggaagcaggacuagaugga

SEQ ID NO: 549254 - RNA, 19 nt, Homo sapiens
  misc_RNA (1)...(19): siRNA sense strand
caaggcugcuggaacaagu

SEQ ID NO: 549255 - RNA, 19 nt, Homo sapiens
  misc_RNA (1)...(19): siRNA sense strand
gggagaagcaggugucgau

SEQ ID NO: 549256 - RNA, 19 nt, Homo sapiens
  misc_RNA (1)...(19): siRNA sense strand
ggagaacagggaccagaug

SEQ ID NO: 549257 - RNA, 19 nt, Homo sapiens
  misc_RNA (1)...(19): siRNA sense strand
acaauggaaacaucaauga

SEQ ID NO: 549258 - RNA, 19 nt, Homo sapiens
  misc_RNA (1)...(19): siRNA sense strand
gaaaggagagaugguggau

SEQ ID NO: 549259 - RNA, 19 nt, Homo sapiens
  misc_RNA (1)...(19): siRNA sense strand
cuagagguuucccuggauu

SEQ ID NO: 549260 - RNA, 19 nt, Homo sapiens
  misc_RNA (1)...(19): siRNA sense strand
gcaaauggagacggcuauu

SEQ ID NO: 549261 - RNA, 19 nt, Homo sapiens
  misc_RNA (1)...(19): siRNA sense strand
gaaaggcuuccagggagaa

SEQ ID NO: 549262 - RNA, 19 nt, Homo sapiens
  misc_RNA (1)...(19): siRNA sense strand
gcagcugggcuuccugguu

SEQ ID NO: 549263 - RNA, 19 nt, Homo sapiens
  misc_RNA (1)...(19): siRNA sense strand
ggagagaugguggauuaca

SEQ ID NO: 549264 - RNA, 19 nt, Homo sapiens
  misc_RNA (1)...(19): siRNA sense strand
gaugcuggcaacuccauug

SEQ ID NO: 549265 - RNA, 19 nt, Homo sapiens
  misc_RNA (1)...(19): siRNA sense strand
gcguggagcagcuggagaa

SEQ ID NO: 549266 - RNA, 19 nt, Homo sapiens
  misc_RNA (1)...(19): siRNA sense strand
uggagcagcuggagaacag

SEQ ID NO: 549267 - RNA, 19 nt, Homo sapiens
  misc_RNA (1)...(19): siRNA sense strand
ggauuuccgggucccauug

SEQ ID NO: 549268 - RNA, 19 nt, Homo sapiens
  misc_RNA (1)...(19): siRNA sense strand
gagaugguggauuacaaug

SEQ ID NO: 549269 - RNA, 19 nt, Homo sapiens
  misc_RNA (1)...(19): siRNA sense strand
uagcggagcgcacccacaa

SEQ ID NO: 549270 - RNA, 19 nt, Homo sapiens
  misc_RNA (1)...(19): siRNA sense strand
gggagaaccagggaaagga

SEQ ID NO: 549271 - RNA, 19 nt, Homo sapiens
  misc_RNA (1)...(19): siRNA sense strand
gagccaggccagcauccaa

SEQ ID NO: 549272 - RNA, 19 nt, Homo sapiens
  misc_RNA (1)...(19): siRNA sense strand
gguacuccaggaccaauug

SEQ ID NO: 549273 - RNA, 19 nt, Homo sapiens
  misc_RNA (1)...(19): siRNA sense strand
aaaggagacccugggauga

SEQ ID NO: 549274 - RNA, 19 nt, Homo sapiens
  misc_RNA (1)...(19): siRNA sense strand
gagccagggaucccaggaa

SEQ ID NO: 549275 - RNA, 19 nt, Homo sapiens
  misc_RNA (1)...(19): siRNA sense strand
gaaccagggaaaggagaga

SEQ ID NO: 549276 - RNA, 19 nt, Homo sapiens
  misc_RNA (1)...(19): siRNA sense strand
gauuacaauggaaacauca

SEQ ID NO: 549277 - RNA, 19 nt, Homo sapiens
  misc_RNA (1)...(19): siRNA sense strand
ggucaaccaggaacuagag

SEQ ID NO: 549278 - RNA, 19 nt, Homo sapiens
  misc_RNA (1)...(19): siRNA sense strand
aaggagagaugguggauua

SEQ ID NO: 549279 - RNA, 19 nt, Homo sapiens
  misc_RNA (1)...(19): siRNA sense strand
cagcugggcuuccugguuu

SEQ ID NO: 549280 - RNA, 19 nt, Homo sapiens
  misc_RNA (1)...(19): siRNA sense strand
ccaaagacaucuccaggau

SEQ ID NO: 549281 - RNA, 19 nt, Homo sapiens
  misc_RNA (1)...(19): siRNA sense strand
gagagaugguggauuacaa

SEQ ID NO: 549282 - RNA, 19 nt, Homo sapiens
  misc_RNA (1)...(19): siRNA sense strand
aaagggaccucgcgguaaa

SEQ ID NO: 549283 - RNA, 19 nt, Homo sapiens
  misc_RNA (1)...(19): siRNA sense strand
gaugguggauuacaaugga

SEQ ID NO: 549284 - RNA, 19 nt, Homo sapiens
  misc_RNA (1)...(19): siRNA sense strand
ggauuacaauggaaacauc

SEQ ID NO: 549285 - RNA, 19 nt, Homo sapiens
  misc_RNA (1)...(19): siRNA sense strand
caagggagaaccagggaaa

SEQ ID NO: 549286 - RNA, 19 nt, Homo sapiens
  misc_RNA (1)...(19): siRNA sense strand
ggaagcaggacuagaugga

SEQ ID NO: 549287 - RNA, 19 nt, Homo sapiens
  misc_RNA (1)...(19): siRNA sense strand
caaggcugcuggaacaagu

SEQ ID NO: 549288 - RNA, 19 nt, Homo sapiens
  misc_RNA (1)...(19): siRNA sense strand
gggagaagcaggugucgau

SEQ ID NO: 549289 - RNA, 19 nt, Homo sapiens
  misc_RNA (1)...(19): siRNA sense strand
ggagaacagggaccagaug

SEQ ID NO: 549290 - RNA, 19 nt, Homo sapiens
  misc_RNA (1)...(19): siRNA sense strand
acaauggaaacaucaauga

SEQ ID NO: 549291 - RNA, 19 nt, Homo sapiens
  misc_RNA (1)...(19): siRNA sense strand
gaaaggagagaugguggau

SEQ ID NO: 549292 - RNA, 19 nt, Homo sapiens
  misc_RNA (1)...(19): siRNA sense strand
cuagagguuucccuggauu

SEQ ID NO: 549293 - RNA, 19 nt, Homo sapiens
  misc_RNA (1)...(19): siRNA sense strand
gcaaauggagacggcuauu

SEQ ID NO: 549294 - RNA, 19 nt, Homo sapiens
  misc_RNA (1)...(19): siRNA sense strand
gaaaggcuuccagggagaa

SEQ ID NO: 549295 - RNA, 19 nt, Homo sapiens
  misc_RNA (1)...(19): siRNA sense strand
gcagcugggcuuccugguu

SEQ ID NO: 549296 - RNA, 19 nt, Homo sapiens
  misc_RNA (1)...(19): siRNA sense strand
ggagagaugguggauuaca

SEQ ID NO: 549297 - RNA, 19 nt, Homo sapiens
  misc_RNA (1)...(19): siRNA sense strand
gaugcuggcaacuccauug

SEQ ID NO: 549298 - RNA, 19 nt, Homo sapiens
  misc_RNA (1)...(19): siRNA sense strand
gcguggagcagcuggagaa

SEQ ID NO: 549299 - RNA, 19 nt, Homo sapiens
  misc_RNA (1)...(19): siRNA sense strand
uggagcagcuggagaacag

SEQ ID NO: 549300 - RNA, 19 nt, Homo sapiens
  misc_RNA (1)...(19): siRNA sense strand
ggauuuccgggucccauug

SEQ ID NO: 549301 - RNA, 19 nt, Homo sapiens
  misc_RNA (1)...(19): siRNA sense strand
gagaugguggauuacaaug

SEQ ID NO: 549302 - RNA, 19 nt, Homo sapiens
  misc_RNA (1)...(19): siRNA sense strand
uagcggagcgcacccacaa

SEQ ID NO: 549303 - RNA, 19 nt, Homo sapiens
  misc_RNA (1)...(19): siRNA sense strand
gggagaaccagggaaagga

SEQ ID NO: 549304 - RNA, 19 nt, Homo sapiens
  misc_RNA (1)...(19): siRNA sense strand
gagccaggccagcauccaa

SEQ ID NO: 549305 - RNA, 19 nt, Homo sapiens
  misc_RNA (1)...(19): siRNA sense strand
gguacuccaggaccaauug

SEQ ID NO: 549306 - RNA, 19 nt, Homo sapiens
  misc_RNA (1)...(19): siRNA sense strand
aaaggagacccugggauga

SEQ ID NO: 549307 - RNA, 19 nt, Homo sapiens
  misc_RNA (1)...(19): siRNA sense strand
gagccagggaucccaggaa

SEQ ID NO: 549308 - RNA, 19 nt, Homo sapiens
  misc_RNA (1)...(19): siRNA sense strand
gaaccagggaaaggagaga

SEQ ID NO: 549309 - RNA, 19 nt, Homo sapiens
  misc_RNA (1)...(19): siRNA sense strand
gauuacaauggaaacauca

SEQ ID NO: 549310 - RNA, 19 nt, Homo sapiens
  misc_RNA (1)...(19): siRNA sense strand
ggucaaccaggaacuagag

SEQ ID NO: 549311 - RNA, 19 nt, Homo sapiens
  misc_RNA (1)...(19): siRNA sense strand
aaggagagaugguggauua

SEQ ID NO: 549312 - RNA, 19 nt, Homo sapiens
  misc_RNA (1)...(19): siRNA sense strand
cagcugggcuuccugguuu

SEQ ID NO: 549313 - RNA, 19 nt, Homo sapiens
  misc_RNA (1)...(19): siRNA sense strand
ccaaagacaucuccaggau

SEQ ID NO: 549314 - RNA, 19 nt, Homo sapiens
  misc_RNA (1)...(19): siRNA sense strand
gagagaugguggauuacaa

SEQ ID NO: 549315 - RNA, 19 nt, Homo sapiens
  misc_RNA (1)...(19): siRNA sense strand
aaagggaccucgcgguaaa

SEQ ID NO: 549316 - RNA, 19 nt, Homo sapiens
  misc_RNA (1)...(19): siRNA sense strand
gaugguggauuacaaugga

SEQ ID NO: 549317 - RNA, 19 nt, Homo sapiens
  misc_RNA (1)...(19): siRNA sense strand
ggauuacaauggaaacauc

SEQ ID NO: 549318 - RNA, 19 nt, Homo sapiens
  misc_RNA (1)...(19): siRNA sense strand
caagggagaaccagggaaa

SEQ ID NO: 549319 - RNA, 19 nt, Homo sapiens
  misc_RNA (1)...(19): siRNA sense strand
ggaagcaggacuagaugga

SEQ ID NO: 549320 - RNA, 19 nt, Homo sapiens
  misc_RNA (1)...(19): siRNA sense strand
caaggcugcuggaacaagu

SEQ ID NO: 549321 - RNA, 19 nt, Homo sapiens
  misc_RNA (1)...(19): siRNA sense strand
gggagaagcaggugucgau

SEQ ID NO: 549322 - RNA, 19 nt, Homo sapiens
  misc_RNA (1)...(19): siRNA sense strand
ggagaacagggaccagaug

SEQ ID NO: 549323 - RNA, 19 nt, Homo sapiens
  misc_RNA (1)...(19): siRNA sense strand
acaauggaaacaucaauga

SEQ ID NO: 549324 - RNA, 19 nt, Homo sapiens
  misc_RNA (1)...(19): siRNA sense strand
gaaaggagagaugguggau

SEQ ID NO: 549325 - RNA, 19 nt, Homo sapiens
  misc_RNA (1)...(19): siRNA sense strand
cuagagguuucccuggauu

SEQ ID NO: 549326 - RNA, 19 nt, Homo sapiens
  misc_RNA (1)...(19): siRNA sense strand
gcaaauggagacggcuauu

SEQ ID NO: 549327 - RNA, 19 nt, Homo sapiens
  misc_RNA (1)...(19): siRNA sense strand
gaaaggcuuccagggagaa

SEQ ID NO: 549328 - RNA, 19 nt, Homo sapiens
  misc_RNA (1)...(19): siRNA sense strand
gcagcugggcuuccugguu

SEQ ID NO: 549329 - RNA, 19 nt, Homo sapiens
  misc_RNA (1)...(19): siRNA sense strand
ggagagaugguggauuaca

SEQ ID NO: 549330 - RNA, 19 nt, Homo sapiens
  misc_RNA (1)...(19): siRNA sense strand
gaugcuggcaacuccauug

SEQ ID NO: 549331 - RNA, 19 nt, Homo sapiens
  misc_RNA (1)...(19): siRNA sense strand
gcguggagcagcuggagaa

SEQ ID NO: 549332 - RNA, 19 nt, Homo sapiens
  misc_RNA (1)...(19): siRNA sense strand
uggagcagcuggagaacag

SEQ ID NO: 549333 - RNA, 19 nt, Homo sapiens
  misc_RNA (1)...(19): siRNA sense strand
ggauuuccgggucccauug

SEQ ID NO: 549334 - RNA, 19 nt, Homo sapiens
  misc_RNA (1)...(19): siRNA sense strand
gagaugguggauuacaaug

SEQ ID NO: 549335 - RNA, 19 nt, Homo sapiens
  misc_RNA (1)...(19): siRNA sense strand
uagcggagcgcacccacaa

SEQ ID NO: 549336 - RNA, 19 nt, Homo sapiens
  misc_RNA (1)...(19): siRNA sense strand
gggagaaccagggaaagga

SEQ ID NO: 549337 - RNA, 19 nt, Homo sapiens
  misc_RNA (1)...(19): siRNA sense strand
gagccaggccagcauccaa

SEQ ID NO: 549338 - RNA, 19 nt, Homo sapiens
  misc_RNA (1)...(19): siRNA sense strand
gguacuccaggaccaauug

SEQ ID NO: 549339 - RNA, 19 nt, Homo sapiens
  misc_RNA (1)...(19): siRNA sense strand
aaaggagacccugggauga

SEQ ID NO: 549340 - RNA, 19 nt, Homo sapiens
  misc_RNA (1)...(19): siRNA sense strand
gagccagggaucccaggaa

SEQ ID NO: 549341 - RNA, 19 nt, Homo sapiens
  misc_RNA (1)...(19): siRNA sense strand
gaaccagggaaaggagaga

SEQ ID NO: 549342 - RNA, 19 nt, Homo sapiens
  misc_RNA (1)...(19): siRNA sense strand
gauuacaauggaaacauca

SEQ ID NO: 549343 - RNA, 19 nt, Homo sapiens
  misc_RNA (1)...(19): siRNA sense strand
ggucaaccaggaacuagag

SEQ ID NO: 549344 - RNA, 19 nt, Homo sapiens
  misc_RNA (1)...(19): siRNA sense strand
aaggagagaugguggauua

SEQ ID NO: 549345 - RNA, 19 nt, Homo sapiens
  misc_RNA (1)...(19): siRNA sense strand
cagcugggcuuccugguuu

SEQ ID NO: 549346 - RNA, 19 nt, Homo sapiens
  misc_RNA (1)...(19): siRNA sense strand
ccaaagacaucuccaggau

SEQ ID NO: 549347 - RNA, 19 nt, Homo sapiens
  misc_RNA (1)...(19): siRNA sense strand
gagagaugguggauuacaa

SEQ ID NO: 549348 - RNA, 19 nt, Homo sapiens
  misc_RNA (1)...(19): siRNA sense strand
aaagggaccucgcgguaaa

SEQ ID NO: 549349 - RNA, 19 nt, Homo sapiens
  misc_RNA (1)...(19): siRNA sense strand
gaugguggauuacaaugga

SEQ ID NO: 549350 - RNA, 19 nt, Homo sapiens
  misc_RNA (1)...(19): siRNA sense strand
ggauuacaauggaaacauc

SEQ ID NO: 549351 - RNA, 19 nt, Homo sapiens
  misc_RNA (1)...(19): siRNA sense strand
caagggagaaccagggaaa

SEQ ID NO: 549352 - RNA, 19 nt, Homo sapiens
  misc_RNA (1)...(19): siRNA sense strand
ggaagcaggacuagaugga

SEQ ID NO: 549353 - RNA, 19 nt, Homo sapiens
  misc_RNA (1)...(19): siRNA sense strand
caaggcugcuggaacaagu

SEQ ID NO: 549354 - RNA, 19 nt, Homo sapiens
  misc_RNA (1)...(19): siRNA sense strand
gggagaagcaggugucgau

SEQ ID NO: 549355 - RNA, 19 nt, Homo sapiens
  misc_RNA (1)...(19): siRNA sense strand
ggagaacagggaccagaug

SEQ ID NO: 549356 - RNA, 19 nt, Homo sapiens
  misc_RNA (1)...(19): siRNA sense strand
acaauggaaacaucaauga

SEQ ID NO: 549357 - RNA, 19 nt, Homo sapiens
  misc_RNA (1)...(19): siRNA sense strand
gaaaggagagaugguggau

SEQ ID NO: 549358 - RNA, 19 nt, Homo sapiens
  misc_RNA (1)...(19): siRNA sense strand
cuagagguuucccuggauu

SEQ ID NO: 549359 - RNA, 19 nt, Homo sapiens
  misc_RNA (1)...(19): siRNA sense strand
gcaaauggagacggcuauu

SEQ ID NO: 549360 - RNA, 19 nt, Homo sapiens
  misc_RNA (1)...(19): siRNA sense strand
gaaaggcuuccagggagaa

SEQ ID NO: 549361 - RNA, 19 nt, Homo sapiens
  misc_RNA (1)...(19): siRNA sense strand
gcagcugggcuuccugguu

SEQ ID NO: 549362 - RNA, 19 nt, Homo sapiens
  misc_RNA (1)...(19): siRNA sense strand
ggagagaugguggauuaca

SEQ ID NO: 549363 - RNA, 19 nt, Homo sapiens
  misc_RNA (1)...(19): siRNA sense strand
gaugcuggcaacuccauug

SEQ ID NO: 549364 - RNA, 19 nt, Homo sapiens
  misc_RNA (1)...(19): siRNA sense strand
gcguggagcagcuggagaa

SEQ ID NO: 549365 - RNA, 19 nt, Homo sapiens
  misc_RNA (1)...(19): siRNA sense strand
uggagcagcuggagaacag

SEQ ID NO: 549366 - RNA, 19 nt, Homo sapiens
  misc_RNA (1)...(19): siRNA sense strand
ggauuuccgggucccauug

SEQ ID NO: 549367 - RNA, 19 nt, Homo sapiens
  misc_RNA (1)...(19): siRNA sense strand
gagaugguggauuacaaug

SEQ ID NO: 549368 - RNA, 19 nt, Homo sapiens
  misc_RNA (1)...(19): siRNA sense strand
uagcggagcgcacccacaa

SEQ ID NO: 549369 - RNA, 19 nt, Homo sapiens
  misc_RNA (1)...(19): siRNA sense strand
gggagaaccagggaaagga

SEQ ID NO: 549370 - RNA, 19 nt, Homo sapiens
  misc_RNA (1)...(19): siRNA sense strand
gagccaggccagcauccaa

SEQ ID NO: 549371 - RNA, 19 nt, Homo sapiens
  misc_RNA (1)...(19): siRNA sense strand
gguacuccaggaccaauug

SEQ ID NO: 549372 - RNA, 19 nt, Homo sapiens
  misc_RNA (1)...(19): siRNA sense strand
aaaggagacccugggauga

SEQ ID NO: 549373 - RNA, 19 nt, Homo sapiens
  misc_RNA (1)...(19): siRNA sense strand
gagccagggaucccaggaa

SEQ ID NO: 549374 - RNA, 19 nt, Homo sapiens
  misc_RNA (1)...(19): siRNA sense strand
gaaccagggaaaggagaga

SEQ ID NO: 549375 - RNA, 19 nt, Homo sapiens
  misc_RNA (1)...(19): siRNA sense strand
gauuacaauggaaacauca

SEQ ID NO: 549376 - RNA, 19 nt, Homo sapiens
  misc_RNA (1)...(19): siRNA sense strand
ggucaaccaggaacuagag

SEQ ID NO: 549377 - RNA, 19 nt, Homo sapiens
  misc_RNA (1)...(19): siRNA sense strand
aaggagagaugguggauua

SEQ ID NO: 549378 - RNA, 19 nt, Homo sapiens
  misc_RNA (1)...(19): siRNA sense strand
cagcugggcuuccugguuu

SEQ ID NO: 549379 - RNA, 19 nt, Homo sapiens
  misc_RNA (1)...(19): siRNA sense strand
ccaaagacaucuccaggau

SEQ ID NO: 549380 - RNA, 19 nt, Homo sapiens
  misc_RNA (1)...(19): siRNA sense strand
gagagaugguggauuacaa

SEQ ID NO: 549381 - RNA, 19 nt, Homo sapiens
  misc_RNA (1)...(19): siRNA sense strand
aaagggaccucgcgguaaa

SEQ ID NO: 549382 - RNA, 19 nt, Homo sapiens
  misc_RNA (1)...(19): siRNA sense strand
gaugguggauuacaaugga

SEQ ID NO: 549383 - RNA, 19 nt, Homo sapiens
  misc_RNA (1)...(19): siRNA sense strand
ggauuacaauggaaacauc

SEQ ID NO: 549384 - RNA, 19 nt, Homo sapiens
  misc_RNA (1)...(19): siRNA sense strand
gggcgaagauggcuuacca

SEQ ID NO: 549385 - RNA, 19 nt, Homo sapiens
  misc_RNA (1)...(19): siRNA sense strand
caagggagaaccagggaaa

SEQ ID NO: 549386 - RNA, 19 nt, Homo sapiens
  misc_RNA (1)...(19): siRNA sense strand
ggaagcaggacuagaugga

SEQ ID NO: 549387 - RNA, 19 nt, Homo sapiens
  misc_RNA (1)...(19): siRNA sense strand
caaggcugcuggaacaagu

SEQ ID NO: 549388 - RNA, 19 nt, Homo sapiens
  misc_RNA (1)...(19): siRNA sense strand
gggagaagcaggugucgau

SEQ ID NO: 549389 - RNA, 19 nt, Homo sapiens
  misc_RNA (1)...(19): siRNA sense strand
ggagaacagggaccagaug

SEQ ID NO: 549390 - RNA, 19 nt, Homo sapiens
  misc_RNA (1)...(19): siRNA sense strand
acaauggaaacaucaauga

SEQ ID NO: 549391 - RNA, 19 nt, Homo sapiens
  misc_RNA (1)...(19): siRNA sense strand
gaaaggagagaugguggau

SEQ ID NO: 549392 - RNA, 19 nt, Homo sapiens
  misc_RNA (1)...(19): siRNA sense strand
cuagagguuucccuggauu

SEQ ID NO: 549393 - RNA, 19 nt, Homo sapiens
  misc_RNA (1)...(19): siRNA sense strand
gcaaauggagacggcuauu

SEQ ID NO: 549394 - RNA, 19 nt, Homo sapiens
  misc_RNA (1)...(19): siRNA sense strand
gaaaggcuuccagggagaa

SEQ ID NO: 549395 - RNA, 19 nt, Homo sapiens
  misc_RNA (1)...(19): siRNA sense strand
gcagcugggcuuccugguu

SEQ ID NO: 549396 - RNA, 19 nt, Homo sapiens
  misc_RNA (1)...(19): siRNA sense strand
ggagagaugguggauuaca

SEQ ID NO: 549397 - RNA, 19 nt, Homo sapiens
  misc_RNA (1)...(19): siRNA sense strand
gaugcuggcaacuccauug

SEQ ID NO: 549398 - RNA, 19 nt, Homo sapiens
  misc_RNA (1)...(19): siRNA sense strand
gcguggagcagcuggagaa

SEQ ID NO: 549399 - RNA, 19 nt, Homo sapiens
  misc_RNA (1)...(19): siRNA sense strand
uggagcagcuggagaacag

SEQ ID NO: 549400 - RNA, 19 nt, Homo sapiens
  misc_RNA (1)...(19): siRNA sense strand
ggauuuccgggucccauug

SEQ ID NO: 549401 - RNA, 19 nt, Homo sapiens
  misc_RNA (1)...(19): siRNA sense strand
gagaugguggauuacaaug

SEQ ID NO: 549402 - RNA, 19 nt, Homo sapiens
  misc_RNA (1)...(19): siRNA sense strand
uagcggagcgcacccacaa

SEQ ID NO: 549403 - RNA, 19 nt, Homo sapiens
  misc_RNA (1)...(19): siRNA sense strand
gggagaaccagggaaagga

SEQ ID NO: 549404 - RNA, 19 nt, Homo sapiens
  misc_RNA (1)...(19): siRNA sense strand
gagccaggccagcauccaa

SEQ ID NO: 549405 - RNA, 19 nt, Homo sapiens
  misc_RNA (1)...(19): siRNA sense strand
gguacuccaggaccaauug

SEQ ID NO: 549406 - RNA, 19 nt, Homo sapiens
  misc_RNA (1)...(19): siRNA sense strand
aaaggagacccugggauga

SEQ ID NO: 549407 - RNA, 19 nt, Homo sapiens
  misc_RNA (1)...(19): siRNA sense strand
gagccagggaucccaggaa

SEQ ID NO: 549408 - RNA, 19 nt, Homo sapiens
  misc_RNA (1)...(19): siRNA sense strand
gaaccagggaaaggagaga

SEQ ID NO: 549409 - RNA, 19 nt, Homo sapiens
  misc_RNA (1)...(19): siRNA sense strand
gauuacaauggaaacauca

SEQ ID NO: 549410 - RNA, 19 nt, Homo sapiens
  misc_RNA (1)...(19): siRNA sense strand
ggucaaccaggaacuagag

SEQ ID NO: 549411 - RNA, 19 nt, Homo sapiens
  misc_RNA (1)...(19): siRNA sense strand
aaggagagaugguggauua

SEQ ID NO: 549412 - RNA, 19 nt, Homo sapiens
  misc_RNA (1)...(19): siRNA sense strand
cagcugggcuuccugguuu

SEQ ID NO: 549413 - RNA, 19 nt, Homo sapiens
  misc_RNA (1)...(19): siRNA sense strand
ccaaagacaucuccaggau

SEQ ID NO: 549414 - RNA, 19 nt, Homo sapiens
  misc_RNA (1)...(19): siRNA sense strand
gagagaugguggauuacaa

SEQ ID NO: 549415 - RNA, 19 nt, Homo sapiens
  misc_RNA (1)...(19): siRNA sense strand
aaagggaccucgcgguaaa

SEQ ID NO: 549416 - RNA, 19 nt, Homo sapiens
  misc_RNA (1)...(19): siRNA sense strand
gaugguggauuacaaugga

SEQ ID NO: 549417 - RNA, 19 nt, Homo sapiens
  misc_RNA (1)...(19): siRNA sense strand
ggauuacaauggaaacauc

SEQ ID NO: 549418 - RNA, 19 nt, Homo sapiens
  misc_RNA (1)...(19): siRNA sense strand
caagggagaaccagggaaa

SEQ ID NO: 549419 - RNA, 19 nt, Homo sapiens
  misc_RNA (1)...(19): siRNA sense strand
ggaagcaggacuagaugga

SEQ ID NO: 549420 - RNA, 19 nt, Homo sapiens
  misc_RNA (1)...(19): siRNA sense strand
caaggcugcuggaacaagu

SEQ ID NO: 549421 - RNA, 19 nt, Homo sapiens
  misc_RNA (1)...(19): siRNA sense strand
gggagaagcaggugucgau

SEQ ID NO: 549422 - RNA, 19 nt, Homo sapiens
  misc_RNA (1)...(19): siRNA sense strand
ggagaacagggaccagaug

SEQ ID NO: 549423 - RNA, 19 nt, Homo sapiens
  misc_RNA (1)...(19): siRNA sense strand
acaauggaaacaucaauga

SEQ ID NO: 549424 - RNA, 19 nt, Homo sapiens
  misc_RNA (1)...(19): siRNA sense strand
gaaaggagagaugguggau

SEQ ID NO: 549425 - RNA, 19 nt, Homo sapiens
  misc_RNA (1)...(19): siRNA sense strand
cuagagguuucccuggauu

SEQ ID NO: 549426 - RNA, 19 nt, Homo sapiens
  misc_RNA (1)...(19): siRNA sense strand
gcaaauggagacggcuauu

SEQ ID NO: 549427 - RNA, 19 nt, Homo sapiens
  misc_RNA (1)...(19): siRNA sense strand
gaaaggcuuccagggagaa

SEQ ID NO: 549428 - RNA, 19 nt, Homo sapiens
  misc_RNA (1)...(19): siRNA sense strand
gcagcugggcuuccugguu

SEQ ID NO: 549429 - RNA, 19 nt, Homo sapiens
  misc_RNA (1)...(19): siRNA sense strand
ggagagaugguggauuaca

SEQ ID NO: 549430 - RNA, 19 nt, Homo sapiens
  misc_RNA (1)...(19): siRNA sense strand
gaugcuggcaacuccauug

SEQ ID NO: 549431 - RNA, 19 nt, Homo sapiens
  misc_RNA (1)...(19): siRNA sense strand
gcguggagcagcuggagaa

SEQ ID NO: 549432 - RNA, 19 nt, Homo sapiens
  misc_RNA (1)...(19): siRNA sense strand
uggagcagcuggagaacag

SEQ ID NO: 549433 - RNA, 19 nt, Homo sapiens
  misc_RNA (1)...(19): siRNA sense strand
ggauuuccgggucccauug

SEQ ID NO: 549434 - RNA, 19 nt, Homo sapiens
  misc_RNA (1)...(19): siRNA sense strand
gagaugguggauuacaaug

SEQ ID NO: 549435 - RNA, 19 nt, Homo sapiens
  misc_RNA (1)...(19): siRNA sense strand
uagcggagcgcacccacaa

SEQ ID NO: 549436 - RNA, 19 nt, Homo sapiens
  misc_RNA (1)...(19): siRNA sense strand
gggagaaccagggaaagga

SEQ ID NO: 549437 - RNA, 19 nt, Homo sapiens
  misc_RNA (1)...(19): siRNA sense strand
gagccaggccagcauccaa

SEQ ID NO: 549438 - RNA, 19 nt, Homo sapiens
  misc_RNA (1)...(19): siRNA sense strand
gguacuccaggaccaauug

SEQ ID NO: 549439 - RNA, 19 nt, Homo sapiens
  misc_RNA (1)...(19): siRNA sense strand
aaaggagacccugggauga

SEQ ID NO: 549440 - RNA, 19 nt, Homo sapiens
  misc_RNA (1)...(19): siRNA sense strand
gagccagggaucccaggaa

SEQ ID NO: 549441 - RNA, 19 nt, Homo sapiens
  misc_RNA (1)...(19): siRNA sense strand
gaaccagggaaaggagaga

SEQ ID NO: 549442 - RNA, 19 nt, Homo sapiens
  misc_RNA (1)...(19): siRNA sense strand
gauuacaauggaaacauca

SEQ ID NO: 549443 - RNA, 19 nt, Homo sapiens
  misc_RNA (1)...(19): siRNA sense strand
ggucaaccaggaacuagag

SEQ ID NO: 549444 - RNA, 19 nt, Homo sapiens
  misc_RNA (1)...(19): siRNA sense strand
aaggagagaugguggauua

SEQ ID NO: 549445 - RNA, 19 nt, Homo sapiens
  misc_RNA (1)...(19): siRNA sense strand
cagcugggcuuccugguuu

SEQ ID NO: 549446 - RNA, 19 nt, Homo sapiens
  misc_RNA (1)...(19): siRNA sense strand
ccaaagacaucuccaggau

SEQ ID NO: 549447 - RNA, 19 nt, Homo sapiens
  misc_RNA (1)...(19): siRNA sense strand
gagagaugguggauuacaa

SEQ ID NO: 549448 - RNA, 19 nt, Homo sapiens
  misc_RNA (1)...(19): siRNA sense strand
aaagggaccucgcgguaaa

SEQ ID NO: 549449 - RNA, 19 nt, Homo sapiens
  misc_RNA (1)...(19): siRNA sense strand
gaugguggauuacaaugga

SEQ ID NO: 549450 - RNA, 19 nt, Homo sapiens
  misc_RNA (1)...(19): siRNA sense strand
ggauuacaauggaaacauc

SEQ ID NO: 549451 - RNA, 19 nt, Homo sapiens
  misc_RNA (1)...(19): siRNA sense strand
caagggagaaccagggaaa

SEQ ID NO: 549452 - RNA, 19 nt, Homo sapiens
  misc_RNA (1)...(19): siRNA sense strand
ggaagcaggacuagaugga

SEQ ID NO: 549453 - RNA, 19 nt, Homo sapiens
  misc_RNA (1)...(19): siRNA sense strand
caaggcugcuggaacaagu

SEQ ID NO: 549454 - RNA, 19 nt, Homo sapiens
  misc_RNA (1)...(19): siRNA sense strand
gggagaagcaggugucgau

SEQ ID NO: 549455 - RNA, 19 nt, Homo sapiens
  misc_RNA (1)...(19): siRNA sense strand
ggagaacagggaccagaug

SEQ ID NO: 549456 - RNA, 19 nt, Homo sapiens
  misc_RNA (1)...(19): siRNA sense strand
acaauggaaacaucaauga

SEQ ID NO: 549457 - RNA, 19 nt, Homo sapiens
  misc_RNA (1)...(19): siRNA sense strand
gaaaggagagaugguggau

SEQ ID NO: 549458 - RNA, 19 nt, Homo sapiens
  misc_RNA (1)...(19): siRNA sense strand
cuagagguuucccuggauu

SEQ ID NO: 549459 - RNA, 19 nt, Homo sapiens
  misc_RNA (1)...(19): siRNA sense strand
gcaaauggagacggcuauu

SEQ ID NO: 549460 - RNA, 19 nt, Homo sapiens
  misc_RNA (1)...(19): siRNA sense strand
gaaaggcuuccagggagaa

SEQ ID NO: 549461 - RNA, 19 nt, Homo sapiens
  misc_RNA (1)...(19): siRNA sense strand
gcagcugggcuuccugguu

SEQ ID NO: 549462 - RNA, 19 nt, Homo sapiens
  misc_RNA (1)...(19): siRNA sense strand
ggagagaugguggauuaca

SEQ ID NO: 549463 - RNA, 19 nt, Homo sapiens
  misc_RNA (1)...(19): siRNA sense strand
gaugcuggcaacuccauug

SEQ ID NO: 549464 - RNA, 19 nt, Homo sapiens
  misc_RNA (1)...(19): siRNA sense strand
gcguggagcagcuggagaa

SEQ ID NO: 549465 - RNA, 19 nt, Homo sapiens
  misc_RNA (1)...(19): siRNA sense strand
uggagcagcuggagaacag

SEQ ID NO: 549466 - RNA, 19 nt, Homo sapiens
  misc_RNA (1)...(19): siRNA sense strand
ggauuuccgggucccauug

SEQ ID NO: 549467 - RNA, 19 nt, Homo sapiens
  misc_RNA (1)...(19): siRNA sense strand
gagaugguggauuacaaug

SEQ ID NO: 549468 - RNA, 19 nt, Homo sapiens
  misc_RNA (1)...(19): siRNA sense strand
uagcggagcgcacccacaa

SEQ ID NO: 549469 - RNA, 19 nt, Homo sapiens
  misc_RNA (1)...(19): siRNA sense strand
gggagaaccagggaaagga

SEQ ID NO: 549470 - RNA, 19 nt, Homo sapiens
  misc_RNA (1)...(19): siRNA sense strand
gagccaggccagcauccaa

SEQ ID NO: 549471 - RNA, 19 nt, Homo sapiens
  misc_RNA (1)...(19): siRNA sense strand
gguacuccaggaccaauug

SEQ ID NO: 549472 - RNA, 19 nt, Homo sapiens
  misc_RNA (1)...(19): siRNA sense strand
aaaggagacccugggauga

SEQ ID NO: 549473 - RNA, 19 nt, Homo sapiens
  misc_RNA (1)...(19): siRNA sense strand
gagccagggaucccaggaa

SEQ ID NO: 549474 - RNA, 19 nt, Homo sapiens
  misc_RNA (1)...(19): siRNA sense strand
gaaccagggaaaggagaga

SEQ ID NO: 549475 - RNA, 19 nt, Homo sapiens
  misc_RNA (1)...(19): siRNA sense strand
gauuacaauggaaacauca

SEQ ID NO: 549476 - RNA, 19 nt, Homo sapiens
  misc_RNA (1)...(19): siRNA sense strand
ggucaaccaggaacuagag

SEQ ID NO: 549477 - RNA, 19 nt, Homo sapiens
  misc_RNA (1)...(19): siRNA sense strand
aaggagagaugguggauua

SEQ ID NO: 549478 - RNA, 19 nt, Homo sapiens
  misc_RNA (1)...(19): siRNA sense strand
cagcugggcuuccugguuu

SEQ ID NO: 549479 - RNA, 19 nt, Homo sapiens
  misc_RNA (1)...(19): siRNA sense strand
ccaaagacaucuccaggau

SEQ ID NO: 549480 - RNA, 19 nt, Homo sapiens
  misc_RNA (1)...(19): siRNA sense strand
gagagaugguggauuacaa

SEQ ID NO: 549481 - RNA, 19 nt, Homo sapiens
  misc_RNA (1)...(19): siRNA sense strand
aaagggaccucgcgguaaa

SEQ ID NO: 549482 - RNA, 19 nt, Homo sapiens
  misc_RNA (1)...(19): siRNA sense strand
gaugguggauuacaaugga

SEQ ID NO: 549483 - RNA, 19 nt, Homo sapiens
  misc_RNA (1)...(19): siRNA sense strand
ggauuacaauggaaacauc

SEQ ID NO: 549484 - RNA, 19 nt, Homo sapiens
  misc_RNA (1)...(19): siRNA sense strand
caagggagaaccagggaaa

SEQ ID NO: 549485 - RNA, 19 nt, Homo sapiens
  misc_RNA (1)...(19): siRNA sense strand
ggaagcaggacuagaugga

SEQ ID NO: 549486 - RNA, 19 nt, Homo sapiens
  misc_RNA (1)...(19): siRNA sense strand
caaggcugcuggaacaagu

SEQ ID NO: 549487 - RNA, 19 nt, Homo sapiens
  misc_RNA (1)...(19): siRNA sense strand
gggagaagcaggugucgau

SEQ ID NO: 549488 - RNA, 19 nt, Homo sapiens
  misc_RNA (1)...(19): siRNA sense strand
ggagaacagggaccagaug

SEQ ID NO: 549489 - RNA, 19 nt, Homo sapiens
  misc_RNA (1)...(19): siRNA sense strand
acaauggaaacaucaauga

SEQ ID NO: 549490 - RNA, 19 nt, Homo sapiens
  misc_RNA (1)...(19): siRNA sense strand
gaaaggagagaugguggau

SEQ ID NO: 549491 - RNA, 19 nt, Homo sapiens
  misc_RNA (1)...(19): siRNA sense strand
cuagagguuucccuggauu

SEQ ID NO: 549492 - RNA, 19 nt, Homo sapiens
  misc_RNA (1)...(19): siRNA sense strand
gcaaauggagacggcuauu

SEQ ID NO: 549493 - RNA, 19 nt, Homo sapiens
  misc_RNA (1)...(19): siRNA sense strand
gaaaggcuuccagggagaa

SEQ ID NO: 549494 - RNA, 19 nt, Homo sapiens
  misc_RNA (1)...(19): siRNA sense strand
gcagcugggcuuccugguu

SEQ ID NO: 549495 - RNA, 19 nt, Homo sapiens
  misc_RNA (1)...(19): siRNA sense strand
ggagagaugguggauuaca

SEQ ID NO: 549496 - RNA, 19 nt, Homo sapiens
  misc_RNA (1)...(19): siRNA sense strand
gaugcuggcaacuccauug

SEQ ID NO: 549497 - RNA, 19 nt, Homo sapiens
  misc_RNA (1)...(19): siRNA sense strand
gcguggagcagcuggagaa

SEQ ID NO: 549498 - RNA, 19 nt, Homo sapiens
  misc_RNA (1)...(19): siRNA sense strand
uggagcagcuggagaacag

SEQ ID NO: 549499 - RNA, 19 nt, Homo sapiens
  misc_RNA (1)...(19): siRNA sense strand
ggauuuccgggucccauug

SEQ ID NO: 549500 - RNA, 19 nt, Homo sapiens
  misc_RNA (1)...(19): siRNA sense strand
gagaugguggauuacaaug

SEQ ID NO: 549501 - RNA, 19 nt, Homo sapiens
  misc_RNA (1)...(19): siRNA sense strand
uagcggagcgcacccacaa

SEQ ID NO: 549502 - RNA, 19 nt, Homo sapiens
  misc_RNA (1)...(19): siRNA sense strand
gggagaaccagggaaagga

SEQ ID NO: 549503 - RNA, 19 nt, Homo sapiens
  misc_RNA (1)...(19): siRNA sense strand
gagccaggccagcauccaa

SEQ ID NO: 549504 - RNA, 19 nt, Homo sapiens
  misc_RNA (1)...(19): siRNA sense strand
gguacuccaggaccaauug

SEQ ID NO: 549505 - RNA, 19 nt, Homo sapiens
  misc_RNA (1)...(19): siRNA sense strand
aaaggagacccugggauga

SEQ ID NO: 549506 - RNA, 19 nt, Homo sapiens
  misc_RNA (1)...(19): siRNA sense strand
gagccagggaucccaggaa

SEQ ID NO: 549507 - RNA, 19 nt, Homo sapiens
  misc_RNA (1)...(19): siRNA sense strand
gaaccagggaaaggagaga

SEQ ID NO: 549508 - RNA, 19 nt, Homo sapiens
  misc_RNA (1)...(19): siRNA sense strand
gauuacaauggaaacauca

SEQ ID NO: 549509 - RNA, 19 nt, Homo sapiens
  misc_RNA (1)...(19): siRNA sense strand
ggucaaccaggaacuagag

SEQ ID NO: 549510 - RNA, 19 nt, Homo sapiens
  misc_RNA (1)...(19): siRNA sense strand
aaggagagaugguggauua

SEQ ID NO: 549511 - RNA, 19 nt, Homo sapiens
  misc_RNA (1)...(19): siRNA sense strand
cagcugggcuuccugguuu

SEQ ID NO: 549512 - RNA, 19 nt, Homo sapiens
  misc_RNA (1)...(19): siRNA sense strand
ccaaagacaucuccaggau

SEQ ID NO: 549513 - RNA, 19 nt, Homo sapiens
  misc_RNA (1)...(19): siRNA sense strand
gagagaugguggauuacaa

SEQ ID NO: 549514 - RNA, 19 nt, Homo sapiens
  misc_RNA (1)...(19): siRNA sense strand
aaagggaccucgcgguaaa

SEQ ID NO: 549515 - RNA, 19 nt, Homo sapiens
  misc_RNA (1)...(19): siRNA sense strand
gaugguggauuacaaugga

SEQ ID NO: 549516 - RNA, 19 nt, Homo sapiens
  misc_RNA (1)...(19): siRNA sense strand
ggauuacaauggaaacauc

SEQ ID NO: 549517 - RNA, 19 nt, Homo sapiens
  misc_RNA (1)...(19): siRNA sense strand
caagggagaaccagggaaa

SEQ ID NO: 549518 - RNA, 19 nt, Homo sapiens
  misc_RNA (1)...(19): siRNA sense strand
ggaagcaggacuagaugga

SEQ ID NO: 549519 - RNA, 19 nt, Homo sapiens
  misc_RNA (1)...(19): siRNA sense strand
caaggcugcuggaacaagu

SEQ ID NO: 549520 - RNA, 19 nt, Homo sapiens
  misc_RNA (1)...(19): siRNA sense strand
gggagaagcaggugucgau

SEQ ID NO: 549521 - RNA, 19 nt, Homo sapiens
  misc_RNA (1)...(19): siRNA sense strand
ggagaacagggaccagaug

SEQ ID NO: 549522 - RNA, 19 nt, Homo sapiens
  misc_RNA (1)...(19): siRNA sense strand
acaauggaaacaucaauga

SEQ ID NO: 549523 - RNA, 19 nt, Homo sapiens
  misc_RNA (1)...(19): siRNA sense strand
gaaaggagagaugguggau

SEQ ID NO: 549524 - RNA, 19 nt, Homo sapiens
  misc_RNA (1)...(19): siRNA sense strand
cuagagguuucccuggauu

SEQ ID NO: 549525 - RNA, 19 nt, Homo sapiens
  misc_RNA (1)...(19): siRNA sense strand
gcaaauggagacggcuauu

SEQ ID NO: 549526 - RNA, 19 nt, Homo sapiens
  misc_RNA (1)...(19): siRNA sense strand
gaaaggcuuccagggagaa

SEQ ID NO: 549527 - RNA, 19 nt, Homo sapiens
  misc_RNA (1)...(19): siRNA sense strand
gcagcugggcuuccugguu

SEQ ID NO: 549528 - RNA, 19 nt, Homo sapiens
  misc_RNA (1)...(19): siRNA sense strand
ggagagaugguggauuaca

SEQ ID NO: 549529 - RNA, 19 nt, Homo sapiens
  misc_RNA (1)...(19): siRNA sense strand
gaugcuggcaacuccauug

SEQ ID NO: 549530 - RNA, 19 nt, Homo sapiens
  misc_RNA (1)...(19): siRNA sense strand
gcguggagcagcuggagaa

SEQ ID NO: 549531 - RNA, 19 nt, Homo sapiens
  misc_RNA (1)...(19): siRNA sense strand
uggagcagcuggagaacag

SEQ ID NO: 549532 - RNA, 19 nt, Homo sapiens
  misc_RNA (1)...(19): siRNA sense strand
ggauuuccgggucccauug

SEQ ID NO: 549533 - RNA, 19 nt, Homo sapiens
  misc_RNA (1)...(19): siRNA sense strand
gagaugguggauuacaaug

SEQ ID NO: 549534 - RNA, 19 nt, Homo sapiens
  misc_RNA (1)...(19): siRNA sense strand
uagcggagcgcacccacaa

SEQ ID NO: 549535 - RNA, 19 nt, Homo sapiens
  misc_RNA (1)...(19): siRNA sense strand
gggagaaccagggaaagga

SEQ ID NO: 549536 - RNA, 19 nt, Homo sapiens
  misc_RNA (1)...(19): siRNA sense strand
gagccaggccagcauccaa

SEQ ID NO: 549537 - RNA, 19 nt, Homo sapiens
  misc_RNA (1)...(19): siRNA sense strand
gguacuccaggaccaauug

SEQ ID NO: 549538 - RNA, 19 nt, Homo sapiens
  misc_RNA (1)...(19): siRNA sense strand
aaaggagacccugggauga

SEQ ID NO: 549539 - RNA, 19 nt, Homo sapiens
  misc_RNA (1)...(19): siRNA sense strand
gagccagggaucccaggaa

SEQ ID NO: 549540 - RNA, 19 nt, Homo sapiens
  misc_RNA (1)...(19): siRNA sense strand
gaaccagggaaaggagaga

SEQ ID NO: 549541 - RNA, 19 nt, Homo sapiens
  misc_RNA (1)...(19): siRNA sense strand
gauuacaauggaaacauca

SEQ ID NO: 549542 - RNA, 19 nt, Homo sapiens
  misc_RNA (1)...(19): siRNA sense strand
ggucaaccaggaacuagag

SEQ ID NO: 549543 - RNA, 19 nt, Homo sapiens
  misc_RNA (1)...(19): siRNA sense strand
aaggagagaugguggauua

SEQ ID NO: 549544 - RNA, 19 nt, Homo sapiens
  misc_RNA (1)...(19): siRNA sense strand
cagcugggcuuccugguuu

SEQ ID NO: 549545 - RNA, 19 nt, Homo sapiens
  misc_RNA (1)...(19): siRNA sense strand
ccaaagacaucuccaggau

SEQ ID NO: 549546 - RNA, 19 nt, Homo sapiens
  misc_RNA (1)...(19): siRNA sense strand
gagagaugguggauuacaa

SEQ ID NO: 549547 - RNA, 19 nt, Homo sapiens
  misc_RNA (1)...(19): siRNA sense strand
aaagggaccucgcgguaaa

SEQ ID NO: 549548 - RNA, 19 nt, Homo sapiens
  misc_RNA (1)...(19): siRNA sense strand
gaugguggauuacaaugga

SEQ ID NO: 549549 - RNA, 19 nt, Homo sapiens
  misc_RNA (1)...(19): siRNA sense strand
ggauuacaauggaaacauc

SEQ ID NO: 549550 - RNA, 19 nt, Homo sapiens
  misc_RNA (1)...(19): siRNA sense strand
caagggagaaccagggaaa

SEQ ID NO: 549551 - RNA, 19 nt, Homo sapiens
  misc_RNA (1)...(19): siRNA sense strand
ggaagcaggacuagaugga

SEQ ID NO: 549552 - RNA, 19 nt, Homo sapiens
  misc_RNA (1)...(19): siRNA sense strand
caaggcugcuggaacaagu

SEQ ID NO: 549553 - RNA, 19 nt, Homo sapiens
  misc_RNA (1)...(19): siRNA sense strand
gggagaagcaggugucgau

SEQ ID NO: 549554 - RNA, 19 nt, Homo sapiens
  misc_RNA (1)...(19): siRNA sense strand
ggagaacagggaccagaug

SEQ ID NO: 549555 - RNA, 19 nt, Homo sapiens
  misc_RNA (1)...(19): siRNA sense strand
acaauggaaacaucaauga

SEQ ID NO: 549556 - RNA, 19 nt, Homo sapiens
  misc_RNA (1)...(19): siRNA sense strand
gaaaggagagaugguggau

SEQ ID NO: 549557 - RNA, 19 nt, Homo sapiens
  misc_RNA (1)...(19): siRNA sense strand
cuagagguuucccuggauu

SEQ ID NO: 549558 - RNA, 19 nt, Homo sapiens
  misc_RNA (1)...(19): siRNA sense strand
gcaaauggagacggcuauu

SEQ ID NO: 549559 - RNA, 19 nt, Homo sapiens
  misc_RNA (1)...(19): siRNA sense strand
gaaaggcuuccagggagaa

SEQ ID NO: 549560 - RNA, 19 nt, Homo sapiens
  misc_RNA (1)...(19): siRNA sense strand
gcagcugggcuuccugguu

SEQ ID NO: 549561 - RNA, 19 nt, Homo sapiens
  misc_RNA (1)...(19): siRNA sense strand
ggagagaugguggauuaca

SEQ ID NO: 549562 - RNA, 19 nt, Homo sapiens
  misc_RNA (1)...(19): siRNA sense strand
gaugcuggcaacuccauug

SEQ ID NO: 549563 - RNA, 19 nt, Homo sapiens
  misc_RNA (1)...(19): siRNA sense strand
gcguggagcagcuggagaa

SEQ ID NO: 549564 - RNA, 19 nt, Homo sapiens
  misc_RNA (1)...(19): siRNA sense strand
uggagcagcuggagaacag

SEQ ID NO: 549565 - RNA, 19 nt, Homo sapiens
  misc_RNA (1)...(19): siRNA sense strand
ggauuuccgggucccauug

SEQ ID NO: 549566 - RNA, 19 nt, Homo sapiens
  misc_RNA (1)...(19): siRNA sense strand
gagaugguggauuacaaug

SEQ ID NO: 549567 - RNA, 19 nt, Homo sapiens
  misc_RNA (1)...(19): siRNA sense strand
uagcggagcgcacccacaa

SEQ ID NO: 549568 - RNA, 19 nt, Homo sapiens
  misc_RNA (1)...(19): siRNA sense strand
gggagaaccagggaaagga

SEQ ID NO: 549569 - RNA, 19 nt, Homo sapiens
  misc_RNA (1)...(19): siRNA sense strand
gagccaggccagcauccaa

SEQ ID NO: 549570 - RNA, 19 nt, Homo sapiens
  misc_RNA (1)...(19): siRNA sense strand
gguacuccaggaccaauug

SEQ ID NO: 549571 - RNA, 19 nt, Homo sapiens
  misc_RNA (1)...(19): siRNA sense strand
aaaggagacccugggauga

SEQ ID NO: 549572 - RNA, 19 nt, Homo sapiens
  misc_RNA (1)...(19): siRNA sense strand
gagccagggaucccaggaa

SEQ ID NO: 549573 - RNA, 19 nt, Homo sapiens
  misc_RNA (1)...(19): siRNA sense strand
gaaccagggaaaggagaga

SEQ ID NO: 549574 - RNA, 19 nt, Homo sapiens
  misc_RNA (1)...(19): siRNA sense strand
gauuacaauggaaacauca

SEQ ID NO: 549575 - RNA, 19 nt, Homo sapiens
  misc_RNA (1)...(19): siRNA sense strand
ggucaaccaggaacuagag

SEQ ID NO: 549576 - RNA, 19 nt, Homo sapiens
  misc_RNA (1)...(19): siRNA sense strand
aaggagagaugguggauua

SEQ ID NO: 549577 - RNA, 19 nt, Homo sapiens
  misc_RNA (1)...(19): siRNA sense strand
cagcugggcuuccugguuu

SEQ ID NO: 549578 - RNA, 19 nt, Homo sapiens
  misc_RNA (1)...(19): siRNA sense strand
ccaaagacaucuccaggau

SEQ ID NO: 549579 - RNA, 19 nt, Homo sapiens
  misc_RNA (1)...(19): siRNA sense strand
gagagaugguggauuacaa

SEQ ID NO: 549580 - RNA, 19 nt, Homo sapiens
  misc_RNA (1)...(19): siRNA sense strand
aaagggaccucgcgguaaa

SEQ ID NO: 549581 - RNA, 19 nt, Homo sapiens
  misc_RNA (1)...(19): siRNA sense strand
gaugguggauuacaaugga

SEQ ID NO: 549582 - RNA, 19 nt, Homo sapiens
  misc_RNA (1)...(19): siRNA sense strand
ggauuacaauggaaacauc

SEQ ID NO: 549583 - RNA, 19 nt, Homo sapiens
  misc_RNA (1)...(19): siRNA sense strand
caagggagaaccagggaaa

SEQ ID NO: 549584 - RNA, 19 nt, Homo sapiens
  misc_RNA (1)...(19): siRNA sense strand
ggaagcaggacuagaugga

SEQ ID NO: 549585 - RNA, 19 nt, Homo sapiens
  misc_RNA (1)...(19): siRNA sense strand
caaggcugcuggaacaagu

SEQ ID NO: 549586 - RNA, 19 nt, Homo sapiens
  misc_RNA (1)...(19): siRNA sense strand
gggagaagcaggugucgau

SEQ ID NO: 549587 - RNA, 19 nt, Homo sapiens
  misc_RNA (1)...(19): siRNA sense strand
ggagaacagggaccagaug

SEQ ID NO: 549588 - RNA, 19 nt, Homo sapiens
  misc_RNA (1)...(19): siRNA sense strand
acaauggaaacaucaauga

SEQ ID NO: 549589 - RNA, 19 nt, Homo sapiens
  misc_RNA (1)...(19): siRNA sense strand
gaaaggagagaugguggau

SEQ ID NO: 549590 - RNA, 19 nt, Homo sapiens
  misc_RNA (1)...(19): siRNA sense strand
cuagagguuucccuggauu

SEQ ID NO: 549591 - RNA, 19 nt, Homo sapiens
  misc_RNA (1)...(19): siRNA sense strand
gcaaauggagacggcuauu

SEQ ID NO: 549592 - RNA, 19 nt, Homo sapiens
  misc_RNA (1)...(19): siRNA sense strand
gaaaggcuuccagggagaa

SEQ ID NO: 549593 - RNA, 19 nt, Homo sapiens
  misc_RNA (1)...(19): siRNA sense strand
gcagcugggcuuccugguu

SEQ ID NO: 549594 - RNA, 19 nt, Homo sapiens
  misc_RNA (1)...(19): siRNA sense strand
ggagagaugguggauuaca

SEQ ID NO: 549595 - RNA, 19 nt, Homo sapiens
  misc_RNA (1)...(19): siRNA sense strand
gaugcuggcaacuccauug

SEQ ID NO: 549596 - RNA, 19 nt, Homo sapiens
  misc_RNA (1)...(19): siRNA sense strand
gcguggagcagcuggagaa

SEQ ID NO: 549597 - RNA, 19 nt, Homo sapiens
  misc_RNA (1)...(19): siRNA sense strand
uggagcagcuggagaacag

SEQ ID NO: 549598 - RNA, 19 nt, Homo sapiens
  misc_RNA (1)...(19): siRNA sense strand
ggauuuccgggucccauug

SEQ ID NO: 549599 - RNA, 19 nt, Homo sapiens
  misc_RNA (1)...(19): siRNA sense strand
gagaugguggauuacaaug

SEQ ID NO: 549600 - RNA, 19 nt, Homo sapiens
  misc_RNA (1)...(19): siRNA sense strand
uagcggagcgcacccacaa

SEQ ID NO: 549601 - RNA, 19 nt, Homo sapiens
  misc_RNA (1)...(19): siRNA sense strand
gggagaaccagggaaagga

SEQ ID NO: 549602 - RNA, 19 nt, Homo sapiens
  misc_RNA (1)...(19): siRNA sense strand
gagccaggccagcauccaa

SEQ ID NO: 549603 - RNA, 19 nt, Homo sapiens
  misc_RNA (1)...(19): siRNA sense strand
gguacuccaggaccaauug

SEQ ID NO: 549604 - RNA, 19 nt, Homo sapiens
  misc_RNA (1)...(19): siRNA sense strand
aaaggagacccugggauga

SEQ ID NO: 549605 - RNA, 19 nt, Homo sapiens
  misc_RNA (1)...(19): siRNA sense strand
gagccagggaucccaggaa

SEQ ID NO: 549606 - RNA, 19 nt, Homo sapiens
  misc_RNA (1)...(19): siRNA sense strand
gaaccagggaaaggagaga

SEQ ID NO: 549607 - RNA, 19 nt, Homo sapiens
  misc_RNA (1)...(19): siRNA sense strand
gauuacaauggaaacauca

SEQ ID NO: 549608 - RNA, 19 nt, Homo sapiens
  misc_RNA (1)...(19): siRNA sense strand
ggucaaccaggaacuagag

SEQ ID NO: 549609 - RNA, 19 nt, Homo sapiens
  misc_RNA (1)...(19): siRNA sense strand
aaggagagaugguggauua

SEQ ID NO: 549610 - RNA, 19 nt, Homo sapiens
  misc_RNA (1)...(19): siRNA sense strand
cagcugggcuuccugguuu

SEQ ID NO: 549611 - RNA, 19 nt, Homo sapiens
  misc_RNA (1)...(19): siRNA sense strand
ccaaagacaucuccaggau

SEQ ID NO: 549612 - RNA, 19 nt, Homo sapiens
  misc_RNA (1)...(19): siRNA sense strand
gagagaugguggauuacaa

SEQ ID NO: 549613 - RNA, 19 nt, Homo sapiens
  misc_RNA (1)...(19): siRNA sense strand
aaagggaccucgcgguaaa

SEQ ID NO: 549614 - RNA, 19 nt, Homo sapiens
  misc_RNA (1)...(19): siRNA sense strand
gaugguggauuacaaugga

SEQ ID NO: 549615 - RNA, 19 nt, Homo sapiens
  misc_RNA (1)...(19): siRNA sense strand
ggauuacaauggaaacauc

SEQ ID NO: 549616 - RNA, 19 nt, Homo sapiens
  misc_RNA (1)...(19): siRNA sense strand
caagggagaaccagggaaa

SEQ ID NO: 549617 - RNA, 19 nt, Homo sapiens
  misc_RNA (1)...(19): siRNA sense strand
ggaagcaggacuagaugga

SEQ ID NO: 549618 - RNA, 19 nt, Homo sapiens
  misc_RNA (1)...(19): siRNA sense strand
caaggcugcuggaacaagu

SEQ ID NO: 549619 - RNA, 19 nt, Homo sapiens
  misc_RNA (1)...(19): siRNA sense strand
gggagaagcaggugucgau

SEQ ID NO: 549620 - RNA, 19 nt, Homo sapiens
  misc_RNA (1)...(19): siRNA sense strand
ggagaacagggaccagaug

SEQ ID NO: 549621 - RNA, 19 nt, Homo sapiens
  misc_RNA (1)...(19): siRNA sense strand
acaauggaaacaucaauga

SEQ ID NO: 549622 - RNA, 19 nt, Homo sapiens
  misc_RNA (1)...(19): siRNA sense strand
gaaaggagagaugguggau

SEQ ID NO: 549623 - RNA, 19 nt, Homo sapiens
  misc_RNA (1)...(19): siRNA sense strand
cuagagguuucccuggauu

SEQ ID NO: 549624 - RNA, 19 nt, Homo sapiens
  misc_RNA (1)...(19): siRNA sense strand
gcaaauggagacggcuauu

SEQ ID NO: 549625 - RNA, 19 nt, Homo sapiens
  misc_RNA (1)...(19): siRNA sense strand
gaaaggcuuccagggagaa

SEQ ID NO: 549626 - RNA, 19 nt, Homo sapiens
  misc_RNA (1)...(19): siRNA sense strand
gcagcugggcuuccugguu

SEQ ID NO: 549627 - RNA, 19 nt, Homo sapiens
  misc_RNA (1)...(19): siRNA sense strand
ggagagaugguggauuaca

SEQ ID NO: 549628 - RNA, 19 nt, Homo sapiens
  misc_RNA (1)...(19): siRNA sense strand
gaugcuggcaacuccauug

SEQ ID NO: 549629 - RNA, 19 nt, Homo sapiens
  misc_RNA (1)...(19): siRNA sense strand
gcguggagcagcuggagaa

SEQ ID NO: 549630 - RNA, 19 nt, Homo sapiens
  misc_RNA (1)...(19): siRNA sense strand
uggagcagcuggagaacag

SEQ ID NO: 549631 - RNA, 19 nt, Homo sapiens
  misc_RNA (1)...(19): siRNA sense strand
ggauuuccgggucccauug

SEQ ID NO: 549632 - RNA, 19 nt, Homo sapiens
  misc_RNA (1)...(19): siRNA sense strand
gagaugguggauuacaaug

SEQ ID NO: 549633 - RNA, 19 nt, Homo sapiens
  misc_RNA (1)...(19): siRNA sense strand
uagcggagcgcacccacaa

SEQ ID NO: 549634 - RNA, 19 nt, Homo sapiens
  misc_RNA (1)...(19): siRNA sense strand
gggagaaccagggaaagga

SEQ ID NO: 549635 - RNA, 19 nt, Homo sapiens
  misc_RNA (1)...(19): siRNA sense strand
gagccaggccagcauccaa

SEQ ID NO: 549636 - RNA, 19 nt, Homo sapiens
  misc_RNA (1)...(19): siRNA sense strand
gguacuccaggaccaauug

SEQ ID NO: 549637 - RNA, 19 nt, Homo sapiens
  misc_RNA (1)...(19): siRNA sense strand
aaaggagacccugggauga

SEQ ID NO: 549638 - RNA, 19 nt, Homo sapiens
  misc_RNA (1)...(19): siRNA sense strand
gagccagggaucccaggaa

SEQ ID NO: 549639 - RNA, 19 nt, Homo sapiens
  misc_RNA (1)...(19): siRNA sense strand
gaaccagggaaaggagaga

SEQ ID NO: 549640 - RNA, 19 nt, Homo sapiens
  misc_RNA (1)...(19): siRNA sense strand
gauuacaauggaaacauca

SEQ ID NO: 549641 - RNA, 19 nt, Homo sapiens
  misc_RNA (1)...(19): siRNA sense strand
ggucaaccaggaacuagag

SEQ ID NO: 549642 - RNA, 19 nt, Homo sapiens
  misc_RNA (1)...(19): siRNA sense strand
aaggagagaugguggauua

SEQ ID NO: 549643 - RNA, 19 nt, Homo sapiens
  misc_RNA (1)...(19): siRNA sense strand
cagcugggcuuccugguuu

SEQ ID NO: 549644 - RNA, 19 nt, Homo sapiens
  misc_RNA (1)...(19): siRNA sense strand
ccaaagacaucuccaggau

SEQ ID NO: 549645 - RNA, 19 nt, Homo sapiens
  misc_RNA (1)...(19): siRNA sense strand
gagagaugguggauuacaa

SEQ ID NO: 549646 - RNA, 19 nt, Homo sapiens
  misc_RNA (1)...(19): siRNA sense strand
aaagggaccucgcgguaaa

SEQ ID NO: 549647 - RNA, 19 nt, Homo sapiens
  misc_RNA (1)...(19): siRNA sense strand
gaugguggauuacaaugga

SEQ ID NO: 549648 - RNA, 19 nt, Homo sapiens
  misc_RNA (1)...(19): siRNA sense strand
ggauuacaauggaaacauc

SEQ ID NO: 549649 - RNA, 19 nt, Homo sapiens
  misc_RNA (1)...(19): siRNA sense strand
caagggagaaccagggaaa

SEQ ID NO: 549650 - RNA, 19 nt, Homo sapiens
  misc_RNA (1)...(19): siRNA sense strand
ggaagcaggacuagaugga

SEQ ID NO: 549651 - RNA, 19 nt, Homo sapiens
  misc_RNA (1)...(19): siRNA sense strand
caaggcugcuggaacaagu

SEQ ID NO: 549652 - RNA, 19 nt, Homo sapiens
  misc_RNA (1)...(19): siRNA sense strand
gggagaagcaggugucgau

SEQ ID NO: 549653 - RNA, 19 nt, Homo sapiens
  misc_RNA (1)...(19): siRNA sense strand
ggagaacagggaccagaug

SEQ ID NO: 549654 - RNA, 19 nt, Homo sapiens
  misc_RNA (1)...(19): siRNA sense strand
acaauggaaacaucaauga

SEQ ID NO: 549655 - RNA, 19 nt, Homo sapiens
  misc_RNA (1)...(19): siRNA sense strand
gaaaggagagaugguggau

SEQ ID NO: 549656 - RNA, 19 nt, Homo sapiens
  misc_RNA (1)...(19): siRNA sense strand
cuagagguuucccuggauu

SEQ ID NO: 549657 - RNA, 19 nt, Homo sapiens
  misc_RNA (1)...(19): siRNA sense strand
gcaaauggagacggcuauu

SEQ ID NO: 549658 - RNA, 19 nt, Homo sapiens
  misc_RNA (1)...(19): siRNA sense strand
gaaaggcuuccagggagaa

SEQ ID NO: 549659 - RNA, 19 nt, Homo sapiens
  misc_RNA (1)...(19): siRNA sense strand
gcagcugggcuuccugguu

SEQ ID NO: 549660 - RNA, 19 nt, Homo sapiens
  misc_RNA (1)...(19): siRNA sense strand
ggagagaugguggauuaca

SEQ ID NO: 549661 - RNA, 19 nt, Homo sapiens
  misc_RNA (1)...(19): siRNA sense strand
gaugcuggcaacuccauug

SEQ ID NO: 549662 - RNA, 19 nt, Homo sapiens
  misc_RNA (1)...(19): siRNA sense strand
gcguggagcagcuggagaa

SEQ ID NO: 549663 - RNA, 19 nt, Homo sapiens
  misc_RNA (1)...(19): siRNA sense strand
uggagcagcuggagaacag

SEQ ID NO: 549664 - RNA, 19 nt, Homo sapiens
  misc_RNA (1)...(19): siRNA sense strand
ggauuuccgggucccauug

SEQ ID NO: 549665 - RNA, 19 nt, Homo sapiens
  misc_RNA (1)...(19): siRNA sense strand
gagaugguggauuacaaug

SEQ ID NO: 549666 - RNA, 19 nt, Homo sapiens
  misc_RNA (1)...(19): siRNA sense strand
uagcggagcgcacccacaa

SEQ ID NO: 549667 - RNA, 19 nt, Homo sapiens
  misc_RNA (1)...(19): siRNA sense strand
gggagaaccagggaaagga

SEQ ID NO: 549668 - RNA, 19 nt, Homo sapiens
  misc_RNA (1)...(19): siRNA sense strand
gagccaggccagcauccaa

SEQ ID NO: 549669 - RNA, 19 nt, Homo sapiens
  misc_RNA (1)...(19): siRNA sense strand
gguacuccaggaccaauug

SEQ ID NO: 549670 - RNA, 19 nt, Homo sapiens
  misc_RNA (1)...(19): siRNA sense strand
aaaggagacccugggauga

SEQ ID NO: 549671 - RNA, 19 nt, Homo sapiens
  misc_RNA (1)...(19): siRNA sense strand
gagccagggaucccaggaa

SEQ ID NO: 549672 - RNA, 19 nt, Homo sapiens
  misc_RNA (1)...(19): siRNA sense strand
gaaccagggaaaggagaga

SEQ ID NO: 549673 - RNA, 19 nt, Homo sapiens
  misc_RNA (1)...(19): siRNA sense strand
gauuacaauggaaacauca

SEQ ID NO: 549674 - RNA, 19 nt, Homo sapiens
  misc_RNA (1)...(19): siRNA sense strand
ggucaaccaggaacuagag

SEQ ID NO: 549675 - RNA, 19 nt, Homo sapiens
  misc_RNA (1)...(19): siRNA sense strand
aaggagagaugguggauua

SEQ ID NO: 549676 - RNA, 19 nt, Homo sapiens
  misc_RNA (1)...(19): siRNA sense strand
cagcugggcuuccugguuu

SEQ ID NO: 549677 - RNA, 19 nt, Homo sapiens
  misc_RNA (1)...(19): siRNA sense strand
ccaaagacaucuccaggau

SEQ ID NO: 549678 - RNA, 19 nt, Homo sapiens
  misc_RNA (1)...(19): siRNA sense strand
gagagaugguggauuacaa

SEQ ID NO: 549679 - RNA, 19 nt, Homo sapiens
  misc_RNA (1)...(19): siRNA sense strand
aaagggaccucgcgguaaa

SEQ ID NO: 549680 - RNA, 19 nt, Homo sapiens
  misc_RNA (1)...(19): siRNA sense strand
gaugguggauuacaaugga

SEQ ID NO: 549681 - RNA, 19 nt, Homo sapiens
  misc_RNA (1)...(19): siRNA sense strand
ggauuacaauggaaacauc

SEQ ID NO: 549682 - RNA, 19 nt, Homo sapiens
  misc_RNA (1)...(19): siRNA sense strand
caagggagaaccagggaaa

SEQ ID NO: 549683 - RNA, 19 nt, Homo sapiens
  misc_RNA (1)...(19): siRNA sense strand
ggaagcaggacuagaugga

SEQ ID NO: 549684 - RNA, 19 nt, Homo sapiens
  misc_RNA (1)...(19): siRNA sense strand
caaggcugcuggaacaagu

SEQ ID NO: 549685 - RNA, 19 nt, Homo sapiens
  misc_RNA (1)...(19): siRNA sense strand
gggagaagcaggugucgau

SEQ ID NO: 549686 - RNA, 19 nt, Homo sapiens
  misc_RNA (1)...(19): siRNA sense strand
ggagaacagggaccagaug

SEQ ID NO: 549687 - RNA, 19 nt, Homo sapiens
  misc_RNA (1)...(19): siRNA sense strand
acaauggaaacaucaauga

SEQ ID NO: 549688 - RNA, 19 nt, Homo sapiens
  misc_RNA (1)...(19): siRNA sense strand
gaaaggagagaugguggau

SEQ ID NO: 549689 - RNA, 19 nt, Homo sapiens
  misc_RNA (1)...(19): siRNA sense strand
cuagagguuucccuggauu

SEQ ID NO: 549690 - RNA, 19 nt, Homo sapiens
  misc_RNA (1)...(19): siRNA sense strand
gcaaauggagacggcuauu

SEQ ID NO: 549691 - RNA, 19 nt, Homo sapiens
  misc_RNA (1)...(19): siRNA sense strand
gaaaggcuuccagggagaa

SEQ ID NO: 549692 - RNA, 19 nt, Homo sapiens
  misc_RNA (1)...(19): siRNA sense strand
gcagcugggcuuccugguu

SEQ ID NO: 549693 - RNA, 19 nt, Homo sapiens
  misc_RNA (1)...(19): siRNA sense strand
ggagagaugguggauuaca

SEQ ID NO: 549694 - RNA, 19 nt, Homo sapiens
  misc_RNA (1)...(19): siRNA sense strand
gaugcuggcaacuccauug

SEQ ID NO: 549695 - RNA, 19 nt, Homo sapiens
  misc_RNA (1)...(19): siRNA sense strand
gcguggagcagcuggagaa

SEQ ID NO: 549696 - RNA, 19 nt, Homo sapiens
  misc_RNA (1)...(19): siRNA sense strand
uggagcagcuggagaacag

SEQ ID NO: 549697 - RNA, 19 nt, Homo sapiens
  misc_RNA (1)...(19): siRNA sense strand
ggauuuccgggucccauug

SEQ ID NO: 549698 - RNA, 19 nt, Homo sapiens
  misc_RNA (1)...(19): siRNA sense strand
gagaugguggauuacaaug

SEQ ID NO: 549699 - RNA, 19 nt, Homo sapiens
  misc_RNA (1)...(19): siRNA sense strand
uagcggagcgcacccacaa

SEQ ID NO: 549700 - RNA, 19 nt, Homo sapiens
  misc_RNA (1)...(19): siRNA sense strand
gggagaaccagggaaagga

SEQ ID NO: 549701 - RNA, 19 nt, Homo sapiens
  misc_RNA (1)...(19): siRNA sense strand
gagccaggccagcauccaa

SEQ ID NO: 549702 - RNA, 19 nt, Homo sapiens
  misc_RNA (1)...(19): siRNA sense strand
gguacuccaggaccaauug

SEQ ID NO: 549703 - RNA, 19 nt, Homo sapiens
  misc_RNA (1)...(19): siRNA sense strand
aaaggagacccugggauga

SEQ ID NO: 549704 - RNA, 19 nt, Homo sapiens
  misc_RNA (1)...(19): siRNA sense strand
gagccagggaucccaggaa

SEQ ID NO: 549705 - RNA, 19 nt, Homo sapiens
  misc_RNA (1)...(19): siRNA sense strand
gaaccagggaaaggagaga

SEQ ID NO: 549706 - RNA, 19 nt, Homo sapiens
  misc_RNA (1)...(19): siRNA sense strand
gauuacaauggaaacauca

SEQ ID NO: 549707 - RNA, 19 nt, Homo sapiens
  misc_RNA (1)...(19): siRNA sense strand
ggucaaccaggaacuagag

SEQ ID NO: 549708 - RNA, 19 nt, Homo sapiens
  misc_RNA (1)...(19): siRNA sense strand
aaggagagaugguggauua

SEQ ID NO: 549709 - RNA, 19 nt, Homo sapiens
  misc_RNA (1)...(19): siRNA sense strand
cagcugggcuuccugguuu

SEQ ID NO: 549710 - RNA, 19 nt, Homo sapiens
  misc_RNA (1)...(19): siRNA sense strand
ccaaagacaucuccaggau

SEQ ID NO: 549711 - RNA, 19 nt, Homo sapiens
  misc_RNA (1)...(19): siRNA sense strand
gagagaugguggauuacaa

SEQ ID NO: 549712 - RNA, 19 nt, Homo sapiens
  misc_RNA (1)...(19): siRNA sense strand
aaagggaccucgcgguaaa

SEQ ID NO: 549713 - RNA, 19 nt, Homo sapiens
  misc_RNA (1)...(19): siRNA sense strand
gaugguggauuacaaugga

SEQ ID NO: 549714 - RNA, 19 nt, Homo sapiens
  misc_RNA (1)...(19): siRNA sense strand
ggauuacaauggaaacauc

SEQ ID NO: 549715 - RNA, 19 nt, Homo sapiens
  misc_RNA (1)...(19): siRNA sense strand
caagggagaaccagggaaa

SEQ ID NO: 549716 - RNA, 19 nt, Homo sapiens
  misc_RNA (1)...(19): siRNA sense strand
ggaagcaggacuagaugga

SEQ ID NO: 549717 - RNA, 19 nt, Homo sapiens
  misc_RNA (1)...(19): siRNA sense strand
caaggcugcuggaacaagu

SEQ ID NO: 549718 - RNA, 19 nt, Homo sapiens
  misc_RNA (1)...(19): siRNA sense strand
gggagaagcaggugucgau

SEQ ID NO: 549719 - RNA, 19 nt, Homo sapiens
  misc_RNA (1)...(19): siRNA sense strand
ggagaacagggaccagaug

SEQ ID NO: 549720 - RNA, 19 nt, Homo sapiens
  misc_RNA (1)...(19): siRNA sense strand
acaauggaaacaucaauga

SEQ ID NO: 549721 - RNA, 19 nt, Homo sapiens
  misc_RNA (1)...(19): siRNA sense strand
gaaaggagagaugguggau

SEQ ID NO: 549722 - RNA, 19 nt, Homo sapiens
  misc_RNA (1)...(19): siRNA sense strand
cuagagguuucccuggauu

SEQ ID NO: 549723 - RNA, 19 nt, Homo sapiens
  misc_RNA (1)...(19): siRNA sense strand
gcaaauggagacggcuauu

SEQ ID NO: 549724 - RNA, 19 nt, Homo sapiens
  misc_RNA (1)...(19): siRNA sense strand
gaaaggcuuccagggagaa

SEQ ID NO: 549725 - RNA, 19 nt, Homo sapiens
  misc_RNA (1)...(19): siRNA sense strand
gcagcugggcuuccugguu

SEQ ID NO: 549726 - RNA, 19 nt, Homo sapiens
  misc_RNA (1)...(19): siRNA sense strand
ggagagaugguggauuaca

SEQ ID NO: 549727 - RNA, 19 nt, Homo sapiens
  misc_RNA (1)...(19): siRNA sense strand
gaugcuggcaacuccauug

SEQ ID NO: 549728 - RNA, 19 nt, Homo sapiens
  misc_RNA (1)...(19): siRNA sense strand
gcguggagcagcuggagaa

SEQ ID NO: 549729 - RNA, 19 nt, Homo sapiens
  misc_RNA (1)...(19): siRNA sense strand
uggagcagcuggagaacag

SEQ ID NO: 549730 - RNA, 19 nt, Homo sapiens
  misc_RNA (1)...(19): siRNA sense strand
ggauuuccgggucccauug

SEQ ID NO: 549731 - RNA, 19 nt, Homo sapiens
  misc_RNA (1)...(19): siRNA sense strand
gagaugguggauuacaaug

SEQ ID NO: 549732 - RNA, 19 nt, Homo sapiens
  misc_RNA (1)...(19): siRNA sense strand
uagcggagcgcacccacaa

SEQ ID NO: 549733 - RNA, 19 nt, Homo sapiens
  misc_RNA (1)...(19): siRNA sense strand
gggagaaccagggaaagga

SEQ ID NO: 549734 - RNA, 19 nt, Homo sapiens
  misc_RNA (1)...(19): siRNA sense strand
gagccaggccagcauccaa

SEQ ID NO: 549735 - RNA, 19 nt, Homo sapiens
  misc_RNA (1)...(19): siRNA sense strand
gguacuccaggaccaauug

SEQ ID NO: 549736 - RNA, 19 nt, Homo sapiens
  misc_RNA (1)...(19): siRNA sense strand
aaaggagacccugggauga

SEQ ID NO: 549737 - RNA, 19 nt, Homo sapiens
  misc_RNA (1)...(19): siRNA sense strand
gagccagggaucccaggaa

SEQ ID NO: 549738 - RNA, 19 nt, Homo sapiens
  misc_RNA (1)...(19): siRNA sense strand
gaaccagggaaaggagaga

SEQ ID NO: 549739 - RNA, 19 nt, Homo sapiens
  misc_RNA (1)...(19): siRNA sense strand
gauuacaauggaaacauca

SEQ ID NO: 549740 - RNA, 19 nt, Homo sapiens
  misc_RNA (1)...(19): siRNA sense strand
ggucaaccaggaacuagag

SEQ ID NO: 549741 - RNA, 19 nt, Homo sapiens
  misc_RNA (1)...(19): siRNA sense strand
aaggagagaugguggauua

SEQ ID NO: 549742 - RNA, 19 nt, Homo sapiens
  misc_RNA (1)...(19): siRNA sense strand
cagcugggcuuccugguuu

SEQ ID NO: 549743 - RNA, 19 nt, Homo sapiens
  misc_RNA (1)...(19): siRNA sense strand
ccaaagacaucuccaggau

SEQ ID NO: 549744 - RNA, 19 nt, Homo sapiens
  misc_RNA (1)...(19): siRNA sense strand
gagagaugguggauuacaa

SEQ ID NO: 549745 - RNA, 19 nt, Homo sapiens
  misc_RNA (1)...(19): siRNA sense strand
aaagggaccucgcgguaaa

SEQ ID NO: 549746 - RNA, 19 nt, Homo sapiens
  misc_RNA (1)...(19): siRNA sense strand
gaugguggauuacaaugga

SEQ ID NO: 549747 - RNA, 19 nt, Homo sapiens
  misc_RNA (1)...(19): siRNA sense strand
ggauuacaauggaaacauc

SEQ ID NO: 549748 - RNA, 19 nt, Homo sapiens
  misc_RNA (1)...(19): siRNA sense strand
caagggagaaccagggaaa

SEQ ID NO: 549749 - RNA, 19 nt, Homo sapiens
  misc_RNA (1)...(19): siRNA sense strand
ggaagcaggacuagaugga

SEQ ID NO: 549750 - RNA, 19 nt, Homo sapiens
  misc_RNA (1)...(19): siRNA sense strand
caaggcugcuggaacaagu

SEQ ID NO: 549751 - RNA, 19 nt, Homo sapiens
  misc_RNA (1)...(19): siRNA sense strand
gggagaagcaggugucgau

SEQ ID NO: 549752 - RNA, 19 nt, Homo sapiens
  misc_RNA (1)...(19): siRNA sense strand
ggagaacagggaccagaug

SEQ ID NO: 549753 - RNA, 19 nt, Homo sapiens
  misc_RNA (1)...(19): siRNA sense strand
acaauggaaacaucaauga

SEQ ID NO: 549754 - RNA, 19 nt, Homo sapiens
  misc_RNA (1)...(19): siRNA sense strand
gaaaggagagaugguggau

SEQ ID NO: 549755 - RNA, 19 nt, Homo sapiens
  misc_RNA (1)...(19): siRNA sense strand
cuagagguuucccuggauu

SEQ ID NO: 549756 - RNA, 19 nt, Homo sapiens
  misc_RNA (1)...(19): siRNA sense strand
gcaaauggagacggcuauu

SEQ ID NO: 549757 - RNA, 19 nt, Homo sapiens
  misc_RNA (1)...(19): siRNA sense strand
gaaaggcuuccagggagaa

SEQ ID NO: 549758 - RNA, 19 nt, Homo sapiens
  misc_RNA (1)...(19): siRNA sense strand
gcagcugggcuuccugguu

SEQ ID NO: 549759 - RNA, 19 nt, Homo sapiens
  misc_RNA (1)...(19): siRNA sense strand
ggagagaugguggauuaca

SEQ ID NO: 549760 - RNA, 19 nt, Homo sapiens
  misc_RNA (1)...(19): siRNA sense strand
gaugcuggcaacuccauug

SEQ ID NO: 549761 - RNA, 19 nt, Homo sapiens
  misc_RNA (1)...(19): siRNA sense strand
gcguggagcagcuggagaa

SEQ ID NO: 549762 - RNA, 19 nt, Homo sapiens
  misc_RNA (1)...(19): siRNA sense strand
uggagcagcuggagaacag

SEQ ID NO: 549763 - RNA, 19 nt, Homo sapiens
  misc_RNA (1)...(19): siRNA sense strand
ggauuuccgggucccauug

SEQ ID NO: 549764 - RNA, 19 nt, Homo sapiens
  misc_RNA (1)...(19): siRNA sense strand
gagaugguggauuacaaug

SEQ ID NO: 549765 - RNA, 19 nt, Homo sapiens
  misc_RNA (1)...(19): siRNA sense strand
uagcggagcgcacccacaa

SEQ ID NO: 549766 - RNA, 19 nt, Homo sapiens
  misc_RNA (1)...(19): siRNA sense strand
gggagaaccagggaaagga

SEQ ID NO: 549767 - RNA, 19 nt, Homo sapiens
  misc_RNA (1)...(19): siRNA sense strand
gagccaggccagcauccaa

SEQ ID NO: 549768 - RNA, 19 nt, Homo sapiens
  misc_RNA (1)...(19): siRNA sense strand
gguacuccaggaccaauug

SEQ ID NO: 549769 - RNA, 19 nt, Homo sapiens
  misc_RNA (1)...(19): siRNA sense strand
aaaggagacccugggauga

SEQ ID NO: 549770 - RNA, 19 nt, Homo sapiens
  misc_RNA (1)...(19): siRNA sense strand
gagccagggaucccaggaa

SEQ ID NO: 549771 - RNA, 19 nt, Homo sapiens
  misc_RNA (1)...(19): siRNA sense strand
gaaccagggaaaggagaga

SEQ ID NO: 549772 - RNA, 19 nt, Homo sapiens
  misc_RNA (1)...(19): siRNA sense strand
gauuacaauggaaacauca

SEQ ID NO: 549773 - RNA, 19 nt, Homo sapiens
  misc_RNA (1)...(19): siRNA sense strand
ggucaaccaggaacuagag

SEQ ID NO: 549774 - RNA, 19 nt, Homo sapiens
  misc_RNA (1)...(19): siRNA sense strand
aaggagagaugguggauua

SEQ ID NO: 549775 - RNA, 19 nt, Homo sapiens
  misc_RNA (1)...(19): siRNA sense strand
cagcugggcuuccugguuu

SEQ ID NO: 549776 - RNA, 19 nt, Homo sapiens
  misc_RNA (1)...(19): siRNA sense strand
ccaaagacaucuccaggau

SEQ ID NO: 549777 - RNA, 19 nt, Homo sapiens
  misc_RNA (1)...(19): siRNA sense strand
gagagaugguggauuacaa

SEQ ID NO: 549778 - RNA, 19 nt, Homo sapiens
  misc_RNA (1)...(19): siRNA sense strand
aaagggaccucgcgguaaa

SEQ ID NO: 549779 - RNA, 19 nt, Homo sapiens
  misc_RNA (1)...(19): siRNA sense strand
gaugguggauuacaaugga

SEQ ID NO: 549780 - RNA, 19 nt, Homo sapiens
  misc_RNA (1)...(19): siRNA sense strand
ggauuacaauggaaacauc

SEQ ID NO: 549781 - RNA, 19 nt, Homo sapiens
  misc_RNA (1)...(19): siRNA sense strand
caagggagaaccagggaaa

SEQ ID NO: 549782 - RNA, 19 nt, Homo sapiens
  misc_RNA (1)...(19): siRNA sense strand
ggaagcaggacuagaugga

SEQ ID NO: 549783 - RNA, 19 nt, Homo sapiens
  misc_RNA (1)...(19): siRNA sense strand
caaggcugcuggaacaagu

SEQ ID NO: 549784 - RNA, 19 nt, Homo sapiens
  misc_RNA (1)...(19): siRNA sense strand
gggagaagcaggugucgau

SEQ ID NO: 549785 - RNA, 19 nt, Homo sapiens
  misc_RNA (1)...(19): siRNA sense strand
ggagaacagggaccagaug

SEQ ID NO: 549786 - RNA, 19 nt, Homo sapiens
  misc_RNA (1)...(19): siRNA sense strand
acaauggaaacaucaauga

SEQ ID NO: 549787 - RNA, 19 nt, Homo sapiens
  misc_RNA (1)...(19): siRNA sense strand
gaaaggagagaugguggau

SEQ ID NO: 549788 - RNA, 19 nt, Homo sapiens
  misc_RNA (1)...(19): siRNA sense strand
cuagagguuucccuggauu

SEQ ID NO: 549789 - RNA, 19 nt, Homo sapiens
  misc_RNA (1)...(19): siRNA sense strand
gcaaauggagacggcuauu

SEQ ID NO: 549790 - RNA, 19 nt, Homo sapiens
  misc_RNA (1)...(19): siRNA sense strand
gaaaggcuuccagggagaa

SEQ ID NO: 549791 - RNA, 19 nt, Homo sapiens
  misc_RNA (1)...(19): siRNA sense strand
gcagcugggcuuccugguu

SEQ ID NO: 549792 - RNA, 19 nt, Homo sapiens
  misc_RNA (1)...(19): siRNA sense strand
ggagagaugguggauuaca

SEQ ID NO: 549793 - RNA, 19 nt, Homo sapiens
  misc_RNA (1)...(19): siRNA sense strand
gaugcuggcaacuccauug

SEQ ID NO: 549794 - RNA, 19 nt, Homo sapiens
  misc_RNA (1)...(19): siRNA sense strand
gcguggagcagcuggagaa

SEQ ID NO: 549795 - RNA, 19 nt, Homo sapiens
  misc_RNA (1)...(19): siRNA sense strand
uggagcagcuggagaacag

SEQ ID NO: 549796 - RNA, 19 nt, Homo sapiens
  misc_RNA (1)...(19): siRNA sense strand
ggauuuccgggucccauug

SEQ ID NO: 549797 - RNA, 19 nt, Homo sapiens
  misc_RNA (1)...(19): siRNA sense strand
gagaugguggauuacaaug

SEQ ID NO: 549798 - RNA, 19 nt, Homo sapiens
  misc_RNA (1)...(19): siRNA sense strand
uagcggagcgcacccacaa

SEQ ID NO: 549799 - RNA, 19 nt, Homo sapiens
  misc_RNA (1)...(19): siRNA sense strand
gggagaaccagggaaagga

SEQ ID NO: 549800 - RNA, 19 nt, Homo sapiens
  misc_RNA (1)...(19): siRNA sense strand
gagccaggccagcauccaa

SEQ ID NO: 549801 - RNA, 19 nt, Homo sapiens
  misc_RNA (1)...(19): siRNA sense strand
gguacuccaggaccaauug

SEQ ID NO: 549802 - RNA, 19 nt, Homo sapiens
  misc_RNA (1)...(19): siRNA sense strand
aaaggagacccugggauga

SEQ ID NO: 549803 - RNA, 19 nt, Homo sapiens
  misc_RNA (1)...(19): siRNA sense strand
gagccagggaucccaggaa

SEQ ID NO: 549804 - RNA, 19 nt, Homo sapiens
  misc_RNA (1)...(19): siRNA sense strand
gaaccagggaaaggagaga

SEQ ID NO: 549805 - RNA, 19 nt, Homo sapiens
  misc_RNA (1)...(19): siRNA sense strand
gauuacaauggaaacauca

SEQ ID NO: 549806 - RNA, 19 nt, Homo sapiens
  misc_RNA (1)...(19): siRNA sense strand
ggucaaccaggaacuagag

SEQ ID NO: 549807 - RNA, 19 nt, Homo sapiens
  misc_RNA (1)...(19): siRNA sense strand
aaggagagaugguggauua

SEQ ID NO: 549808 - RNA, 19 nt, Homo sapiens
  misc_RNA (1)...(19): siRNA sense strand
cagcugggcuuccugguuu

SEQ ID NO: 549809 - RNA, 19 nt, Homo sapiens
  misc_RNA (1)...(19): siRNA sense strand
ccaaagacaucuccaggau

SEQ ID NO: 549810 - RNA, 19 nt, Homo sapiens
  misc_RNA (1)...(19): siRNA sense strand
gagagaugguggauuacaa

SEQ ID NO: 549811 - RNA, 19 nt, Homo sapiens
  misc_RNA (1)...(19): siRNA sense strand
aaagggaccucgcgguaaa

SEQ ID NO: 549812 - RNA, 19 nt, Homo sapiens
  misc_RNA (1)...(19): siRNA sense strand
gaugguggauuacaaugga

SEQ ID NO: 549813 - RNA, 19 nt, Homo sapiens
  misc_RNA (1)...(19): siRNA sense strand
ggauuacaauggaaacauc

SEQ ID NO: 549814 - RNA, 19 nt, Homo sapiens
  misc_RNA (1)...(19): siRNA sense strand
caagggagaaccagggaaa

SEQ ID NO: 549815 - RNA, 19 nt, Homo sapiens
  misc_RNA (1)...(19): siRNA sense strand
ggaagcaggacuagaugga

SEQ ID NO: 549816 - RNA, 19 nt, Homo sapiens
  misc_RNA (1)...(19): siRNA sense strand
caaggcugcuggaacaagu

SEQ ID NO: 549817 - RNA, 19 nt, Homo sapiens
  misc_RNA (1)...(19): siRNA sense strand
gggagaagcaggugucgau

SEQ ID NO: 549818 - RNA, 19 nt, Homo sapiens
  misc_RNA (1)...(19): siRNA sense strand
ggagaacagggaccagaug

SEQ ID NO: 549819 - RNA, 19 nt, Homo sapiens
  misc_RNA (1)...(19): siRNA sense strand
acaauggaaacaucaauga

SEQ ID NO: 549820 - RNA, 19 nt, Homo sapiens
  misc_RNA (1)...(19): siRNA sense strand
gaaaggagagaugguggau

SEQ ID NO: 549821 - RNA, 19 nt, Homo sapiens
  misc_RNA (1)...(19): siRNA sense strand
cuagagguuucccuggauu

SEQ ID NO: 549822 - RNA, 19 nt, Homo sapiens
  misc_RNA (1)...(19): siRNA sense strand
gcaaauggagacggcuauu

SEQ ID NO: 549823 - RNA, 19 nt, Homo sapiens
  misc_RNA (1)...(19): siRNA sense strand
gaaaggcuuccagggagaa

SEQ ID NO: 549824 - RNA, 19 nt, Homo sapiens
  misc_RNA (1)...(19): siRNA sense strand
gcagcugggcuuccugguu

SEQ ID NO: 549825 - RNA, 19 nt, Homo sapiens
  misc_RNA (1)...(19): siRNA sense strand
ggagagaugguggauuaca

SEQ ID NO: 549826 - RNA, 19 nt, Homo sapiens
  misc_RNA (1)...(19): siRNA sense strand
gaugcuggcaacuccauug

SEQ ID NO: 549827 - RNA, 19 nt, Homo sapiens
  misc_RNA (1)...(19): siRNA sense strand
gcguggagcagcuggagaa

SEQ ID NO: 549828 - RNA, 19 nt, Homo sapiens
  misc_RNA (1)...(19): siRNA sense strand
uggagcagcuggagaacag

SEQ ID NO: 549829 - RNA, 19 nt, Homo sapiens
  misc_RNA (1)...(19): siRNA sense strand
ggauuuccgggucccauug

SEQ ID NO: 549830 - RNA, 19 nt, Homo sapiens
  misc_RNA (1)...(19): siRNA sense strand
gagaugguggauuacaaug

SEQ ID NO: 549831 - RNA, 19 nt, Homo sapiens
  misc_RNA (1)...(19): siRNA sense strand
uagcggagcgcacccacaa

SEQ ID NO: 549832 - RNA, 19 nt, Homo sapiens
  misc_RNA (1)...(19): siRNA sense strand
gggagaaccagggaaagga

SEQ ID NO: 549833 - RNA, 19 nt, Homo sapiens
  misc_RNA (1)...(19): siRNA sense strand
gagccaggccagcauccaa

SEQ ID NO: 549834 - RNA, 19 nt, Homo sapiens
  misc_RNA (1)...(19): siRNA sense strand
gguacuccaggaccaauug

SEQ ID NO: 549835 - RNA, 19 nt, Homo sapiens
  misc_RNA (1)...(19): siRNA sense strand
aaaggagacccugggauga

SEQ ID NO: 549836 - RNA, 19 nt, Homo sapiens
  misc_RNA (1)...(19): siRNA sense strand
gagccagggaucccaggaa

SEQ ID NO: 549837 - RNA, 19 nt, Homo sapiens
  misc_RNA (1)...(19): siRNA sense strand
gaaccagggaaaggagaga

SEQ ID NO: 549838 - RNA, 19 nt, Homo sapiens
  misc_RNA (1)...(19): siRNA sense strand
gauuacaauggaaacauca

SEQ ID NO: 549839 - RNA, 19 nt, Homo sapiens
  misc_RNA (1)...(19): siRNA sense strand
ggucaaccaggaacuagag

SEQ ID NO: 549840 - RNA, 19 nt, Homo sapiens
  misc_RNA (1)...(19): siRNA sense strand
aaggagagaugguggauua

SEQ ID NO: 549841 - RNA, 19 nt, Homo sapiens
  misc_RNA (1)...(19): siRNA sense strand
cagcugggcuuccugguuu

SEQ ID NO: 549842 - RNA, 19 nt, Homo sapiens
  misc_RNA (1)...(19): siRNA sense strand
ccaaagacaucuccaggau

SEQ ID NO: 549843 - RNA, 19 nt, Homo sapiens
  misc_RNA (1)...(19): siRNA sense strand
gagagaugguggauuacaa

SEQ ID NO: 549844 - RNA, 19 nt, Homo sapiens
  misc_RNA (1)...(19): siRNA sense strand
aaagggaccucgcgguaaa

SEQ ID NO: 549845 - RNA, 19 nt, Homo sapiens
  misc_RNA (1)...(19): siRNA sense strand
gaugguggauuacaaugga

SEQ ID NO: 549846 - RNA, 19 nt, Homo sapiens
  misc_RNA (1)...(19): siRNA sense strand
ggauuacaauggaaacauc

SEQ ID NO: 549847 - RNA, 19 nt, Homo sapiens
  misc_RNA (1)...(19): siRNA sense strand
caagggagaaccagggaaa

SEQ ID NO: 549848 - RNA, 19 nt, Homo sapiens
  misc_RNA (1)...(19): siRNA sense strand
ggaagcaggacuagaugga

SEQ ID NO: 549849 - RNA, 19 nt, Homo sapiens
  misc_RNA (1)...(19): siRNA sense strand
caaggcugcuggaacaagu

SEQ ID NO: 549850 - RNA, 19 nt, Homo sapiens
  misc_RNA (1)...(19): siRNA sense strand
gggagaagcaggugucgau

SEQ ID NO: 549851 - RNA, 19 nt, Homo sapiens
  misc_RNA (1)...(19): siRNA sense strand
ggagaacagggaccagaug

SEQ ID NO: 549852 - RNA, 19 nt, Homo sapiens
  misc_RNA (1)...(19): siRNA sense strand
acaauggaaacaucaauga

SEQ ID NO: 549853 - RNA, 19 nt, Homo sapiens
  misc_RNA (1)...(19): siRNA sense strand
gaaaggagagaugguggau

SEQ ID NO: 549854 - RNA, 19 nt, Homo sapiens
  misc_RNA (1)...(19): siRNA sense strand
cuagagguuucccuggauu

SEQ ID NO: 549855 - RNA, 19 nt, Homo sapiens
  misc_RNA (1)...(19): siRNA sense strand
gcaaauggagacggcuauu

SEQ ID NO: 549856 - RNA, 19 nt, Homo sapiens
  misc_RNA (1)...(19): siRNA sense strand
gaaaggcuuccagggagaa

SEQ ID NO: 549857 - RNA, 19 nt, Homo sapiens
  misc_RNA (1)...(19): siRNA sense strand
gcagcugggcuuccugguu

SEQ ID NO: 549858 - RNA, 19 nt, Homo sapiens
  misc_RNA (1)...(19): siRNA sense strand
ggagagaugguggauuaca

SEQ ID NO: 549859 - RNA, 19 nt, Homo sapiens
  misc_RNA (1)...(19): siRNA sense strand
gaugcuggcaacuccauug

SEQ ID NO: 549860 - RNA, 19 nt, Homo sapiens
  misc_RNA (1)...(19): siRNA sense strand
gcguggagcagcuggagaa

SEQ ID NO: 549861 - RNA, 19 nt, Homo sapiens
  misc_RNA (1)...(19): siRNA sense strand
uggagcagcuggagaacag

SEQ ID NO: 549862 - RNA, 19 nt, Homo sapiens
  misc_RNA (1)...(19): siRNA sense strand
ggauuuccgggucccauug

SEQ ID NO: 549863 - RNA, 19 nt, Homo sapiens
  misc_RNA (1)...(19): siRNA sense strand
gagaugguggauuacaaug

SEQ ID NO: 549864 - RNA, 19 nt, Homo sapiens
  misc_RNA (1)...(19): siRNA sense strand
uagcggagcgcacccacaa

SEQ ID NO: 549865 - RNA, 19 nt, Homo sapiens
  misc_RNA (1)...(19): siRNA sense strand
gggagaaccagggaaagga

SEQ ID NO: 549866 - RNA, 19 nt, Homo sapiens
  misc_RNA (1)...(19): siRNA sense strand
gagccaggccagcauccaa

SEQ ID NO: 549867 - RNA, 19 nt, Homo sapiens
  misc_RNA (1)...(19): siRNA sense strand
gguacuccaggaccaauug

SEQ ID NO: 549868 - RNA, 19 nt, Homo sapiens
  misc_RNA (1)...(19): siRNA sense strand
aaaggagacccugggauga

SEQ ID NO: 549869 - RNA, 19 nt, Homo sapiens
  misc_RNA (1)...(19): siRNA sense strand
gagccagggaucccaggaa

SEQ ID NO: 549870 - RNA, 19 nt, Homo sapiens
  misc_RNA (1)...(19): siRNA sense strand
gaaccagggaaaggagaga

SEQ ID NO: 549871 - RNA, 19 nt, Homo sapiens
  misc_RNA (1)...(19): siRNA sense strand
gauuacaauggaaacauca

SEQ ID NO: 549872 - RNA, 19 nt, Homo sapiens
  misc_RNA (1)...(19): siRNA sense strand
ggucaaccaggaacuagag

SEQ ID NO: 549873 - RNA, 19 nt, Homo sapiens
  misc_RNA (1)...(19): siRNA sense strand
aaggagagaugguggauua

SEQ ID NO: 549874 - RNA, 19 nt, Homo sapiens
  misc_RNA (1)...(19): siRNA sense strand
cagcugggcuuccugguuu

SEQ ID NO: 549875 - RNA, 19 nt, Homo sapiens
  misc_RNA (1)...(19): siRNA sense strand
ccaaagacaucuccaggau

SEQ ID NO: 549876 - RNA, 19 nt, Homo sapiens
  misc_RNA (1)...(19): siRNA sense strand
gagagaugguggauuacaa

SEQ ID NO: 549877 - RNA, 19 nt, Homo sapiens
  misc_RNA (1)...(19): siRNA sense strand
aaagggaccucgcgguaaa

SEQ ID NO: 549878 - RNA, 19 nt, Homo sapiens
  misc_RNA (1)...(19): siRNA sense strand
gaugguggauuacaaugga

SEQ ID NO: 549879 - RNA, 19 nt, Homo sapiens
  misc_RNA (1)...(19): siRNA sense strand
ggauuacaauggaaacauc

SEQ ID NO: 549880 - RNA, 19 nt, Homo sapiens
  misc_RNA (1)...(19): siRNA sense strand
caagggagaaccagggaaa

SEQ ID NO: 549881 - RNA, 19 nt, Homo sapiens
  misc_RNA (1)...(19): siRNA sense strand
ggaagcaggacuagaugga

SEQ ID NO: 549882 - RNA, 19 nt, Homo sapiens
  misc_RNA (1)...(19): siRNA sense strand
caaggcugcuggaacaagu

SEQ ID NO: 549883 - RNA, 19 nt, Homo sapiens
  misc_RNA (1)...(19): siRNA sense strand
gggagaagcaggugucgau

SEQ ID NO: 549884 - RNA, 19 nt, Homo sapiens
  misc_RNA (1)...(19): siRNA sense strand
ggagaacagggaccagaug

SEQ ID NO: 549885 - RNA, 19 nt, Homo sapiens
  misc_RNA (1)...(19): siRNA sense strand
acaauggaaacaucaauga

SEQ ID NO: 549886 - RNA, 19 nt, Homo sapiens
  misc_RNA (1)...(19): siRNA sense strand
gaaaggagagaugguggau

SEQ ID NO: 549887 - RNA, 19 nt, Homo sapiens
  misc_RNA (1)...(19): siRNA sense strand
cuagagguuucccuggauu

SEQ ID NO: 549888 - RNA, 19 nt, Homo sapiens
  misc_RNA (1)...(19): siRNA sense strand
gcaaauggagacggcuauu

SEQ ID NO: 549889 - RNA, 19 nt, Homo sapiens
  misc_RNA (1)...(19): siRNA sense strand
gaaaggcuuccagggagaa

SEQ ID NO: 549890 - RNA, 19 nt, Homo sapiens
  misc_RNA (1)...(19): siRNA sense strand
gcagcugggcuuccugguu

SEQ ID NO: 549891 - RNA, 19 nt, Homo sapiens
  misc_RNA (1)...(19): siRNA sense strand
ggagagaugguggauuaca

SEQ ID NO: 549892 - RNA, 19 nt, Homo sapiens
  misc_RNA (1)...(19): siRNA sense strand
gaugcuggcaacuccauug

SEQ ID NO: 549893 - RNA, 19 nt, Homo sapiens
  misc_RNA (1)...(19): siRNA sense strand
gcguggagcagcuggagaa

SEQ ID NO: 549894 - RNA, 19 nt, Homo sapiens
  misc_RNA (1)...(19): siRNA sense strand
uggagcagcuggagaacag

SEQ ID NO: 549895 - RNA, 19 nt, Homo sapiens
  misc_RNA (1)...(19): siRNA sense strand
ggauuuccgggucccauug

SEQ ID NO: 549896 - RNA, 19 nt, Homo sapiens
  misc_RNA (1)...(19): siRNA sense strand
gagaugguggauuacaaug

SEQ ID NO: 549897 - RNA, 19 nt, Homo sapiens
  misc_RNA (1)...(19): siRNA sense strand
uagcggagcgcacccacaa

SEQ ID NO: 549898 - RNA, 19 nt, Homo sapiens
  misc_RNA (1)...(19): siRNA sense strand
gggagaaccagggaaagga

SEQ ID NO: 549899 - RNA, 19 nt, Homo sapiens
  misc_RNA (1)...(19): siRNA sense strand
gagccaggccagcauccaa

SEQ ID NO: 549900 - RNA, 19 nt, Homo sapiens
  misc_RNA (1)...(19): siRNA sense strand
gguacuccaggaccaauug

SEQ ID NO: 549901 - RNA, 19 nt, Homo sapiens
  misc_RNA (1)...(19): siRNA sense strand
aaaggagacccugggauga

SEQ ID NO: 549902 - RNA, 19 nt, Homo sapiens
  misc_RNA (1)...(19): siRNA sense strand
gagccagggaucccaggaa

SEQ ID NO: 549903 - RNA, 19 nt, Homo sapiens
  misc_RNA (1)...(19): siRNA sense strand
gaaccagggaaaggagaga

SEQ ID NO: 549904 - RNA, 19 nt, Homo sapiens
  misc_RNA (1)...(19): siRNA sense strand
gauuacaauggaaacauca

SEQ ID NO: 549905 - RNA, 19 nt, Homo sapiens
  misc_RNA (1)...(19): siRNA sense strand
ggucaaccaggaacuagag

SEQ ID NO: 549906 - RNA, 19 nt, Homo sapiens
  misc_RNA (1)...(19): siRNA sense strand
aaggagagaugguggauua

SEQ ID NO: 549907 - RNA, 19 nt, Homo sapiens
  misc_RNA (1)...(19): siRNA sense strand
cagcugggcuuccugguuu

SEQ ID NO: 549908 - RNA, 19 nt, Homo sapiens
  misc_RNA (1)...(19): siRNA sense strand
ccaaagacaucuccaggau

SEQ ID NO: 549909 - RNA, 19 nt, Homo sapiens
  misc_RNA (1)...(19): siRNA sense strand
gagagaugguggauuacaa

SEQ ID NO: 549910 - RNA, 19 nt, Homo sapiens
  misc_RNA (1)...(19): siRNA sense strand
aaagggaccucgcgguaaa

SEQ ID NO: 549911 - RNA, 19 nt, Homo sapiens
  misc_RNA (1)...(19): siRNA sense strand
gaugguggauuacaaugga

SEQ ID NO: 549912 - RNA, 19 nt, Homo sapiens
  misc_RNA (1)...(19): siRNA sense strand
ggauuacaauggaaacauc

SEQ ID NO: 549913 - RNA, 19 nt, Homo sapiens
  misc_RNA (1)...(19): siRNA sense strand
caagggagaaccagggaaa

SEQ ID NO: 549914 - RNA, 19 nt, Homo sapiens
  misc_RNA (1)...(19): siRNA sense strand
ggaagcaggacuagaugga

SEQ ID NO: 549915 - RNA, 19 nt, Homo sapiens
  misc_RNA (1)...(19): siRNA sense strand
caaggcugcuggaacaagu

SEQ ID NO: 549916 - RNA, 19 nt, Homo sapiens
  misc_RNA (1)...(19): siRNA sense strand
gggagaagcaggugucgau

SEQ ID NO: 549917 - RNA, 19 nt, Homo sapiens
  misc_RNA (1)...(19): siRNA sense strand
ggagaacagggaccagaug

SEQ ID NO: 549918 - RNA, 19 nt, Homo sapiens
  misc_RNA (1)...(19): siRNA sense strand
acaauggaaacaucaauga

SEQ ID NO: 549919 - RNA, 19 nt, Homo sapiens
  misc_RNA (1)...(19): siRNA sense strand
gaaaggagagaugguggau

SEQ ID NO: 549920 - RNA, 19 nt, Homo sapiens
  misc_RNA (1)...(19): siRNA sense strand
cuagagguuucccuggauu

SEQ ID NO: 549921 - RNA, 19 nt, Homo sapiens
  misc_RNA (1)...(19): siRNA sense strand
gcaaauggagacggcuauu

SEQ ID NO: 549922 - RNA, 19 nt, Homo sapiens
  misc_RNA (1)...(19): siRNA sense strand
gaaaggcuuccagggagaa

SEQ ID NO: 549923 - RNA, 19 nt, Homo sapiens
  misc_RNA (1)...(19): siRNA sense strand
gcagcugggcuuccugguu

SEQ ID NO: 549924 - RNA, 19 nt, Homo sapiens
  misc_RNA (1)...(19): siRNA sense strand
ggagagaugguggauuaca

SEQ ID NO: 549925 - RNA, 19 nt, Homo sapiens
  misc_RNA (1)...(19): siRNA sense strand
gaugcuggcaacuccauug

SEQ ID NO: 549926 - RNA, 19 nt, Homo sapiens
  misc_RNA (1)...(19): siRNA sense strand
gcguggagcagcuggagaa

SEQ ID NO: 549927 - RNA, 19 nt, Homo sapiens
  misc_RNA (1)...(19): siRNA sense strand
uggagcagcuggagaacag

SEQ ID NO: 549928 - RNA, 19 nt, Homo sapiens
  misc_RNA (1)...(19): siRNA sense strand
ggauuuccgggucccauug

SEQ ID NO: 549929 - RNA, 19 nt, Homo sapiens
  misc_RNA (1)...(19): siRNA sense strand
gagaugguggauuacaaug

SEQ ID NO: 549930 - RNA, 19 nt, Homo sapiens
  misc_RNA (1)...(19): siRNA sense strand
uagcggagcgcacccacaa

SEQ ID NO: 549931 - RNA, 19 nt, Homo sapiens
  misc_RNA (1)...(19): siRNA sense strand
gggagaaccagggaaagga

SEQ ID NO: 549932 - RNA, 19 nt, Homo sapiens
  misc_RNA (1)...(19): siRNA sense strand
gagccaggccagcauccaa

SEQ ID NO: 549933 - RNA, 19 nt, Homo sapiens
  misc_RNA (1)...(19): siRNA sense strand
gguacuccaggaccaauug

SEQ ID NO: 549934 - RNA, 19 nt, Homo sapiens
  misc_RNA (1)...(19): siRNA sense strand
aaaggagacccugggauga

SEQ ID NO: 549935 - RNA, 19 nt, Homo sapiens
  misc_RNA (1)...(19): siRNA sense strand
gagccagggaucccaggaa

SEQ ID NO: 549936 - RNA, 19 nt, Homo sapiens
  misc_RNA (1)...(19): siRNA sense strand
gaaccagggaaaggagaga

SEQ ID NO: 549937 - RNA, 19 nt, Homo sapiens
  misc_RNA (1)...(19): siRNA sense strand
gauuacaauggaaacauca

SEQ ID NO: 549938 - RNA, 19 nt, Homo sapiens
  misc_RNA (1)...(19): siRNA sense strand
ggucaaccaggaacuagag

SEQ ID NO: 549939 - RNA, 19 nt, Homo sapiens
  misc_RNA (1)...(19): siRNA sense strand
aaggagagaugguggauua

SEQ ID NO: 549940 - RNA, 19 nt, Homo sapiens
  misc_RNA (1)...(19): siRNA sense strand
cagcugggcuuccugguuu

SEQ ID NO: 549941 - RNA, 19 nt, Homo sapiens
  misc_RNA (1)...(19): siRNA sense strand
ccaaagacaucuccaggau

SEQ ID NO: 549942 - RNA, 19 nt, Homo sapiens
  misc_RNA (1)...(19): siRNA sense strand
gagagaugguggauuacaa

SEQ ID NO: 549943 - RNA, 19 nt, Homo sapiens
  misc_RNA (1)...(19): siRNA sense strand
aaagggaccucgcgguaaa

SEQ ID NO: 549944 - RNA, 19 nt, Homo sapiens
  misc_RNA (1)...(19): siRNA sense strand
gaugguggauuacaaugga

SEQ ID NO: 549945 - RNA, 19 nt, Homo sapiens
  misc_RNA (1)...(19): siRNA sense strand
ggauuacaauggaaacauc

SEQ ID NO: 549946 - RNA, 19 nt, Homo sapiens
  misc_RNA (1)...(19): siRNA sense strand
caagggagaaccagggaaa

SEQ ID NO: 549947 - RNA, 19 nt, Homo sapiens
  misc_RNA (1)...(19): siRNA sense strand
ggaagcaggacuagaugga

SEQ ID NO: 549948 - RNA, 19 nt, Homo sapiens
  misc_RNA (1)...(19): siRNA sense strand
caaggcugcuggaacaagu

SEQ ID NO: 549949 - RNA, 19 nt, Homo sapiens
  misc_RNA (1)...(19): siRNA sense strand
gggagaagcaggugucgau

SEQ ID NO: 549950 - RNA, 19 nt, Homo sapiens
  misc_RNA (1)...(19): siRNA sense strand
ggagaacagggaccagaug

SEQ ID NO: 549951 - RNA, 19 nt, Homo sapiens
  misc_RNA (1)...(19): siRNA sense strand
acaauggaaacaucaauga

SEQ ID NO: 549952 - RNA, 19 nt, Homo sapiens
  misc_RNA (1)...(19): siRNA sense strand
gaaaggagagaugguggau

SEQ ID NO: 549953 - RNA, 19 nt, Homo sapiens
  misc_RNA (1)...(19): siRNA sense strand
cuagagguuucccuggauu

SEQ ID NO: 549954 - RNA, 19 nt, Homo sapiens
  misc_RNA (1)...(19): siRNA sense strand
gcaaauggagacggcuauu

SEQ ID NO: 549955 - RNA, 19 nt, Homo sapiens
  misc_RNA (1)...(19): siRNA sense strand
gaaaggcuuccagggagaa

SEQ ID NO: 549956 - RNA, 19 nt, Homo sapiens
  misc_RNA (1)...(19): siRNA sense strand
gcagcugggcuuccugguu

SEQ ID NO: 549957 - RNA, 19 nt, Homo sapiens
  misc_RNA (1)...(19): siRNA sense strand
ggagagaugguggauuaca

SEQ ID NO: 549958 - RNA, 19 nt, Homo sapiens
  misc_RNA (1)...(19): siRNA sense strand
gaugcuggcaacuccauug

SEQ ID NO: 549959 - RNA, 19 nt, Homo sapiens
  misc_RNA (1)...(19): siRNA sense strand
gcguggagcagcuggagaa

SEQ ID NO: 549960 - RNA, 19 nt, Homo sapiens
  misc_RNA (1)...(19): siRNA sense strand
uggagcagcuggagaacag

SEQ ID NO: 549961 - RNA, 19 nt, Homo sapiens
  misc_RNA (1)...(19): siRNA sense strand
ggauuuccgggucccauug

SEQ ID NO: 549962 - RNA, 19 nt, Homo sapiens
  misc_RNA (1)...(19): siRNA sense strand
gagaugguggauuacaaug

SEQ ID NO: 549963 - RNA, 19 nt, Homo sapiens
  misc_RNA (1)...(19): siRNA sense strand
uagcggagcgcacccacaa

SEQ ID NO: 549964 - RNA, 19 nt, Homo sapiens
  misc_RNA (1)...(19): siRNA sense strand
gggagaaccagggaaagga

SEQ ID NO: 549965 - RNA, 19 nt, Homo sapiens
  misc_RNA (1)...(19): siRNA sense strand
gagccaggccagcauccaa

SEQ ID NO: 549966 - RNA, 19 nt, Homo sapiens
  misc_RNA (1)...(19): siRNA sense strand
gguacuccaggaccaauug

SEQ ID NO: 549967 - RNA, 19 nt, Homo sapiens
  misc_RNA (1)...(19): siRNA sense strand
aaaggagacccugggauga

SEQ ID NO: 549968 - RNA, 19 nt, Homo sapiens
  misc_RNA (1)...(19): siRNA sense strand
gagccagggaucccaggaa

SEQ ID NO: 549969 - RNA, 19 nt, Homo sapiens
  misc_RNA (1)...(19): siRNA sense strand
gaaccagggaaaggagaga

SEQ ID NO: 549970 - RNA, 19 nt, Homo sapiens
  misc_RNA (1)...(19): siRNA sense strand
gauuacaauggaaacauca

SEQ ID NO: 549971 - RNA, 19 nt, Homo sapiens
  misc_RNA (1)...(19): siRNA sense strand
ggucaaccaggaacuagag

SEQ ID NO: 549972 - RNA, 19 nt, Homo sapiens
  misc_RNA (1)...(19): siRNA sense strand
aaggagagaugguggauua

SEQ ID NO: 549973 - RNA, 19 nt, Homo sapiens
  misc_RNA (1)...(19): siRNA sense strand
cagcugggcuuccugguuu

SEQ ID NO: 549974 - RNA, 19 nt, Homo sapiens
  misc_RNA (1)...(19): siRNA sense strand
ccaaagacaucuccaggau

SEQ ID NO: 549975 - RNA, 19 nt, Homo sapiens
  misc_RNA (1)...(19): siRNA sense strand
gagagaugguggauuacaa

SEQ ID NO: 549976 - RNA, 19 nt, Homo sapiens
  misc_RNA (1)...(19): siRNA sense strand
aaagggaccucgcgguaaa

SEQ ID NO: 549977 - RNA, 19 nt, Homo sapiens
  misc_RNA (1)...(19): siRNA sense strand
gaugguggauuacaaugga

SEQ ID NO: 549978 - RNA, 19 nt, Homo sapiens
  misc_RNA (1)...(19): siRNA sense strand
ggauuacaauggaaacauc

SEQ ID NO: 549979 - RNA, 19 nt, Homo sapiens
  misc_RNA (1)...(19): siRNA sense strand
caagggagaaccagggaaa

SEQ ID NO: 549980 - RNA, 19 nt, Homo sapiens
  misc_RNA (1)...(19): siRNA sense strand
ggaagcaggacuagaugga

SEQ ID NO: 549981 - RNA, 19 nt, Homo sapiens
  misc_RNA (1)...(19): siRNA sense strand
caaggcugcuggaacaagu

SEQ ID NO: 549982 - RNA, 19 nt, Homo sapiens
  misc_RNA (1)...(19): siRNA sense strand
gggagaagcaggugucgau

SEQ ID NO: 549983 - RNA, 19 nt, Homo sapiens
  misc_RNA (1)...(19): siRNA sense strand
ggagaacagggaccagaug

SEQ ID NO: 549984 - RNA, 19 nt, Homo sapiens
  misc_RNA (1)...(19): siRNA sense strand
acaauggaaacaucaauga

SEQ ID NO: 549985 - RNA, 19 nt, Homo sapiens
  misc_RNA (1)...(19): siRNA sense strand
gaaaggagagaugguggau

SEQ ID NO: 549986 - RNA, 19 nt, Homo sapiens
  misc_RNA (1)...(19): siRNA sense strand
cuagagguuucccuggauu

SEQ ID NO: 549987 - RNA, 19 nt, Homo sapiens
  misc_RNA (1)...(19): siRNA sense strand
gcaaauggagacggcuauu

SEQ ID NO: 549988 - RNA, 19 nt, Homo sapiens
  misc_RNA (1)...(19): siRNA sense strand
gaaaggcuuccagggagaa

SEQ ID NO: 549989 - RNA, 19 nt, Homo sapiens
  misc_RNA (1)...(19): siRNA sense strand
gcagcugggcuuccugguu

SEQ ID NO: 549990 - RNA, 19 nt, Homo sapiens
  misc_RNA (1)...(19): siRNA sense strand
ggagagaugguggauuaca

SEQ ID NO: 549991 - RNA, 19 nt, Homo sapiens
  misc_RNA (1)...(19): siRNA sense strand
gaugcuggcaacuccauug

SEQ ID NO: 549992 - RNA, 19 nt, Homo sapiens
  misc_RNA (1)...(19): siRNA sense strand
gcguggagcagcuggagaa

SEQ ID NO: 549993 - RNA, 19 nt, Homo sapiens
  misc_RNA (1)...(19): siRNA sense strand
uggagcagcuggagaacag

SEQ ID NO: 549994 - RNA, 19 nt, Homo sapiens
  misc_RNA (1)...(19): siRNA sense strand
ggauuuccgggucccauug

SEQ ID NO: 549995 - RNA, 19 nt, Homo sapiens
  misc_RNA (1)...(19): siRNA sense strand
gagaugguggauuacaaug

SEQ ID NO: 549996 - RNA, 19 nt, Homo sapiens
  misc_RNA (1)...(19): siRNA sense strand
uagcggagcgcacccacaa

SEQ ID NO: 549997 - RNA, 19 nt, Homo sapiens
  misc_RNA (1)...(19): siRNA sense strand
gggagaaccagggaaagga

SEQ ID NO: 549998 - RNA, 19 nt, Homo sapiens
  misc_RNA (1)...(19): siRNA sense strand
gagccaggccagcauccaa

SEQ ID NO: 549999 - RNA, 19 nt, Homo sapiens
  misc_RNA (1)...(19): siRNA sense strand
gguacuccaggaccaauug

SEQ ID NO: 550000 - RNA, 19 nt, Homo sapiens
  misc_RNA (1)...(19): siRNA sense strand
aaaggagacccugggauga

SEQ ID NO: 550001 - RNA, 19 nt, Homo sapiens
  misc_RNA (1)...(19): siRNA sense strand
gagccagggaucccaggaa

SEQ ID NO: 550002 - RNA, 19 nt, Homo sapiens
  misc_RNA (1)...(19): siRNA sense strand
gaaccagggaaaggagaga

SEQ ID NO: 550003 - RNA, 19 nt, Homo sapiens
  misc_RNA (1)...(19): siRNA sense strand
gauuacaauggaaacauca

SEQ ID NO: 550004 - RNA, 19 nt, Homo sapiens
  misc_RNA (1)...(19): siRNA sense strand
ggucaaccaggaacuagag

SEQ ID NO: 550005 - RNA, 19 nt, Homo sapiens
  misc_RNA (1)...(19): siRNA sense strand
aaggagagaugguggauua

SEQ ID NO: 550006 - RNA, 19 nt, Homo sapiens
  misc_RNA (1)...(19): siRNA sense strand
cagcugggcuuccugguuu

SEQ ID NO: 550007 - RNA, 19 nt, Homo sapiens
  misc_RNA (1)...(19): siRNA sense strand
ccaaagacaucuccaggau

SEQ ID NO: 550008 - RNA, 19 nt, Homo sapiens
  misc_RNA (1)...(19): siRNA sense strand
gagagaugguggauuacaa

SEQ ID NO: 550009 - RNA, 19 nt, Homo sapiens
  misc_RNA (1)...(19): siRNA sense strand
aaagggaccucgcgguaaa

SEQ ID NO: 550010 - RNA, 19 nt, Homo sapiens
  misc_RNA (1)...(19): siRNA sense strand
gaugguggauuacaaugga

SEQ ID NO: 550011 - RNA, 19 nt, Homo sapiens
  misc_RNA (1)...(19): siRNA sense strand
ggauuacaauggaaacauc

SEQ ID NO: 550012 - RNA, 19 nt, Homo sapiens
  misc_RNA (1)...(19): siRNA sense strand
gggcgaagauggcuuacca

SEQ ID NO: 550013 - RNA, 19 nt, Homo sapiens
  misc_RNA (1)...(19): siRNA sense strand
caagggagaaccagggaaa

SEQ ID NO: 550014 - RNA, 19 nt, Homo sapiens
  misc_RNA (1)...(19): siRNA sense strand
ggaagcaggacuagaugga

SEQ ID NO: 550015 - RNA, 19 nt, Homo sapiens
  misc_RNA (1)...(19): siRNA sense strand
caaggcugcuggaacaagu

SEQ ID NO: 550016 - RNA, 19 nt, Homo sapiens
  misc_RNA (1)...(19): siRNA sense strand
gggagaagcaggugucgau

SEQ ID NO: 550017 - RNA, 19 nt, Homo sapiens
  misc_RNA (1)...(19): siRNA sense strand
ggagaacagggaccagaug

SEQ ID NO: 550018 - RNA, 19 nt, Homo sapiens
  misc_RNA (1)...(19): siRNA sense strand
acaauggaaacaucaauga

SEQ ID NO: 550019 - RNA, 19 nt, Homo sapiens
  misc_RNA (1)...(19): siRNA sense strand
gaaaggagagaugguggau

SEQ ID NO: 550020 - RNA, 19 nt, Homo sapiens
  misc_RNA (1)...(19): siRNA sense strand
cuagagguuucccuggauu

SEQ ID NO: 550021 - RNA, 19 nt, Homo sapiens
  misc_RNA (1)...(19): siRNA sense strand
gcaaauggagacggcuauu

SEQ ID NO: 550022 - RNA, 19 nt, Homo sapiens
  misc_RNA (1)...(19): siRNA sense strand
gaaaggcuuccagggagaa

SEQ ID NO: 550023 - RNA, 19 nt, Homo sapiens
  misc_RNA (1)...(19): siRNA sense strand
gcagcugggcuuccugguu

SEQ ID NO: 550024 - RNA, 19 nt, Homo sapiens
  misc_RNA (1)...(19): siRNA sense strand
ggagagaugguggauuaca

SEQ ID NO: 550025 - RNA, 19 nt, Homo sapiens
  misc_RNA (1)...(19): siRNA sense strand
gaugcuggcaacuccauug

SEQ ID NO: 550026 - RNA, 19 nt, Homo sapiens
  misc_RNA (1)...(19): siRNA sense strand
gcguggagcagcuggagaa

SEQ ID NO: 550027 - RNA, 19 nt, Homo sapiens
  misc_RNA (1)...(19): siRNA sense strand
uggagcagcuggagaacag

SEQ ID NO: 550028 - RNA, 19 nt, Homo sapiens
  misc_RNA (1)...(19): siRNA sense strand
ggauuuccgggucccauug

SEQ ID NO: 550029 - RNA, 19 nt, Homo sapiens
  misc_RNA (1)...(19): siRNA sense strand
gagaugguggauuacaaug

SEQ ID NO: 550030 - RNA, 19 nt, Homo sapiens
  misc_RNA (1)...(19): siRNA sense strand
uagcggagcgcacccacaa

SEQ ID NO: 550031 - RNA, 19 nt, Homo sapiens
  misc_RNA (1)...(19): siRNA sense strand
gggagaaccagggaaagga

SEQ ID NO: 550032 - RNA, 19 nt, Homo sapiens
  misc_RNA (1)...(19): siRNA sense strand
gagccaggccagcauccaa

SEQ ID NO: 550033 - RNA, 19 nt, Homo sapiens
  misc_RNA (1)...(19): siRNA sense strand
gguacuccaggaccaauug

SEQ ID NO: 550034 - RNA, 19 nt, Homo sapiens
  misc_RNA (1)...(19): siRNA sense strand
aaaggagacccugggauga

SEQ ID NO: 550035 - RNA, 19 nt, Homo sapiens
  misc_RNA (1)...(19): siRNA sense strand
gagccagggaucccaggaa

SEQ ID NO: 550036 - RNA, 19 nt, Homo sapiens
  misc_RNA (1)...(19): siRNA sense strand
gaaccagggaaaggagaga

SEQ ID NO: 550037 - RNA, 19 nt, Homo sapiens
  misc_RNA (1)...(19): siRNA sense strand
gauuacaauggaaacauca

SEQ ID NO: 550038 - RNA, 19 nt, Homo sapiens
  misc_RNA (1)...(19): siRNA sense strand
ggucaaccaggaacuagag

SEQ ID NO: 550039 - RNA, 19 nt, Homo sapiens
  misc_RNA (1)...(19): siRNA sense strand
aaggagagaugguggauua

SEQ ID NO: 550040 - RNA, 19 nt, Homo sapiens
  misc_RNA (1)...(19): siRNA sense strand
cagcugggcuuccugguuu

SEQ ID NO: 550041 - RNA, 19 nt, Homo sapiens
  misc_RNA (1)...(19): siRNA sense strand
ccaaagacaucuccaggau

SEQ ID NO: 550042 - RNA, 19 nt, Homo sapiens
  misc_RNA (1)...(19): siRNA sense strand
gagagaugguggauuacaa

SEQ ID NO: 550043 - RNA, 19 nt, Homo sapiens
  misc_RNA (1)...(19): siRNA sense strand
aaagggaccucgcgguaaa

SEQ ID NO: 550044 - RNA, 19 nt, Homo sapiens
  misc_RNA (1)...(19): siRNA sense strand
gaugguggauuacaaugga

SEQ ID NO: 550045 - RNA, 19 nt, Homo sapiens
  misc_RNA (1)...(19): siRNA sense strand
ggauuacaauggaaacauc

SEQ ID NO: 550046 - RNA, 19 nt, Homo sapiens
  misc_RNA (1)...(19): siRNA sense strand
caagggagaaccagggaaa

SEQ ID NO: 550047 - RNA, 19 nt, Homo sapiens
  misc_RNA (1)...(19): siRNA sense strand
ggaagcaggacuagaugga

SEQ ID NO: 550048 - RNA, 19 nt, Homo sapiens
  misc_RNA (1)...(19): siRNA sense strand
caaggcugcuggaacaagu

SEQ ID NO: 550049 - RNA, 19 nt, Homo sapiens
  misc_RNA (1)...(19): siRNA sense strand
gggagaagcaggugucgau

SEQ ID NO: 550050 - RNA, 19 nt, Homo sapiens
  misc_RNA (1)...(19): siRNA sense strand
ggagaacagggaccagaug

SEQ ID NO: 550051 - RNA, 19 nt, Homo sapiens
  misc_RNA (1)...(19): siRNA sense strand
acaauggaaacaucaauga

SEQ ID NO: 550052 - RNA, 19 nt, Homo sapiens
  misc_RNA (1)...(19): siRNA sense strand
gaaaggagagaugguggau

SEQ ID NO: 550053 - RNA, 19 nt, Homo sapiens
  misc_RNA (1)...(19): siRNA sense strand
cuagagguuucccuggauu

SEQ ID NO: 550054 - RNA, 19 nt, Homo sapiens
  misc_RNA (1)...(19): siRNA sense strand
gcaaauggagacggcuauu

SEQ ID NO: 550055 - RNA, 19 nt, Homo sapiens
  misc_RNA (1)...(19): siRNA sense strand
gaaaggcuuccagggagaa

SEQ ID NO: 550056 - RNA, 19 nt, Homo sapiens
  misc_RNA (1)...(19): siRNA sense strand
gcagcugggcuuccugguu

SEQ ID NO: 550057 - RNA, 19 nt, Homo sapiens
  misc_RNA (1)...(19): siRNA sense strand
ggagagaugguggauuaca

SEQ ID NO: 550058 - RNA, 19 nt, Homo sapiens
  misc_RNA (1)...(19): siRNA sense strand
gaugcuggcaacuccauug

SEQ ID NO: 550059 - RNA, 19 nt, Homo sapiens
  misc_RNA (1)...(19): siRNA sense strand
gcguggagcagcuggagaa

SEQ ID NO: 550060 - RNA, 19 nt, Homo sapiens
  misc_RNA (1)...(19): siRNA sense strand
uggagcagcuggagaacag

SEQ ID NO: 550061 - RNA, 19 nt, Homo sapiens
  misc_RNA (1)...(19): siRNA sense strand
ggauuuccgggucccauug

SEQ ID NO: 550062 - RNA, 19 nt, Homo sapiens
  misc_RNA (1)...(19): siRNA sense strand
gagaugguggauuacaaug

SEQ ID NO: 550063 - RNA, 19 nt, Homo sapiens
  misc_RNA (1)...(19): siRNA sense strand
uagcggagcgcacccacaa

SEQ ID NO: 550064 - RNA, 19 nt, Homo sapiens
  misc_RNA (1)...(19): siRNA sense strand
gggagaaccagggaaagga

SEQ ID NO: 550065 - RNA, 19 nt, Homo sapiens
  misc_RNA (1)...(19): siRNA sense strand
gagccaggccagcauccaa

SEQ ID NO: 550066 - RNA, 19 nt, Homo sapiens
  misc_RNA (1)...(19): siRNA sense strand
gguacuccaggaccaauug

SEQ ID NO: 550067 - RNA, 19 nt, Homo sapiens
  misc_RNA (1)...(19): siRNA sense strand
aaaggagacccugggauga

SEQ ID NO: 550068 - RNA, 19 nt, Homo sapiens
  misc_RNA (1)...(19): siRNA sense strand
gagccagggaucccaggaa

SEQ ID NO: 550069 - RNA, 19 nt, Homo sapiens
  misc_RNA (1)...(19): siRNA sense strand
gaaccagggaaaggagaga

SEQ ID NO: 550070 - RNA, 19 nt, Homo sapiens
  misc_RNA (1)...(19): siRNA sense strand
gauuacaauggaaacauca

SEQ ID NO: 550071 - RNA, 19 nt, Homo sapiens
  misc_RNA (1)...(19): siRNA sense strand
ggucaaccaggaacuagag

SEQ ID NO: 550072 - RNA, 19 nt, Homo sapiens
  misc_RNA (1)...(19): siRNA sense strand
aaggagagaugguggauua

SEQ ID NO: 550073 - RNA, 19 nt, Homo sapiens
  misc_RNA (1)...(19): siRNA sense strand
cagcugggcuuccugguuu

SEQ ID NO: 550074 - RNA, 19 nt, Homo sapiens
  misc_RNA (1)...(19): siRNA sense strand
ccaaagacaucuccaggau

SEQ ID NO: 550075 - RNA, 19 nt, Homo sapiens
  misc_RNA (1)...(19): siRNA sense strand
gagagaugguggauuacaa

SEQ ID NO: 550076 - RNA, 19 nt, Homo sapiens
  misc_RNA (1)...(19): siRNA sense strand
aaagggaccucgcgguaaa

SEQ ID NO: 550077 - RNA, 19 nt, Homo sapiens
  misc_RNA (1)...(19): siRNA sense strand
gaugguggauuacaaugga

SEQ ID NO: 550078 - RNA, 19 nt, Homo sapiens
  misc_RNA (1)...(19): siRNA sense strand
ggauuacaauggaaacauc

SEQ ID NO: 550079 - RNA, 19 nt, Homo sapiens
  misc_RNA (1)...(19): siRNA sense strand
caagggagaaccagggaaa

SEQ ID NO: 550080 - RNA, 19 nt, Homo sapiens
  misc_RNA (1)...(19): siRNA sense strand
ggaagcaggacuagaugga

SEQ ID NO: 550081 - RNA, 19 nt, Homo sapiens
  misc_RNA (1)...(19): siRNA sense strand
caaggcugcuggaacaagu

SEQ ID NO: 550082 - RNA, 19 nt, Homo sapiens
  misc_RNA (1)...(19): siRNA sense strand
gggagaagcaggugucgau

SEQ ID NO: 550083 - RNA, 19 nt, Homo sapiens
  misc_RNA (1)...(19): siRNA sense strand
ggagaacagggaccagaug

SEQ ID NO: 550084 - RNA, 19 nt, Homo sapiens
  misc_RNA (1)...(19): siRNA sense strand
acaauggaaacaucaauga

SEQ ID NO: 550085 - RNA, 19 nt, Homo sapiens
  misc_RNA (1)...(19): siRNA sense strand
gaaaggagagaugguggau

SEQ ID NO: 550086 - RNA, 19 nt, Homo sapiens
  misc_RNA (1)...(19): siRNA sense strand
cuagagguuucccuggauu

SEQ ID NO: 550087 - RNA, 19 nt, Homo sapiens
  misc_RNA (1)...(19): siRNA sense strand
gcaaauggagacggcuauu

SEQ ID NO: 550088 - RNA, 19 nt, Homo sapiens
  misc_RNA (1)...(19): siRNA sense strand
gaaaggcuuccagggagaa

SEQ ID NO: 550089 - RNA, 19 nt, Homo sapiens
  misc_RNA (1)...(19): siRNA sense strand
gcagcugggcuuccugguu

SEQ ID NO: 550090 - RNA, 19 nt, Homo sapiens
  misc_RNA (1)...(19): siRNA sense strand
ggagagaugguggauuaca

SEQ ID NO: 550091 - RNA, 19 nt, Homo sapiens
  misc_RNA (1)...(19): siRNA sense strand
gaugcuggcaacuccauug

SEQ ID NO: 550092 - RNA, 19 nt, Homo sapiens
  misc_RNA (1)...(19): siRNA sense strand
gcguggagcagcuggagaa

SEQ ID NO: 550093 - RNA, 19 nt, Homo sapiens
  misc_RNA (1)...(19): siRNA sense strand
uggagcagcuggagaacag

SEQ ID NO: 550094 - RNA, 19 nt, Homo sapiens
  misc_RNA (1)...(19): siRNA sense strand
ggauuuccgggucccauug

SEQ ID NO: 550095 - RNA, 19 nt, Homo sapiens
  misc_RNA (1)...(19): siRNA sense strand
gagaugguggauuacaaug

SEQ ID NO: 550096 - RNA, 19 nt, Homo sapiens
  misc_RNA (1)...(19): siRNA sense strand
uagcggagcgcacccacaa

SEQ ID NO: 550097 - RNA, 19 nt, Homo sapiens
  misc_RNA (1)...(19): siRNA sense strand
gggagaaccagggaaagga

SEQ ID NO: 550098 - RNA, 19 nt, Homo sapiens
  misc_RNA (1)...(19): siRNA sense strand
gagccaggccagcauccaa

SEQ ID NO: 550099 - RNA, 19 nt, Homo sapiens
  misc_RNA (1)...(19): siRNA sense strand
gguacuccaggaccaauug

SEQ ID NO: 550100 - RNA, 19 nt, Homo sapiens
  misc_RNA (1)...(19): siRNA sense strand
aaaggagacccugggauga

SEQ ID NO: 550101 - RNA, 19 nt, Homo sapiens
  misc_RNA (1)...(19): siRNA sense strand
gagccagggaucccaggaa

SEQ ID NO: 550102 - RNA, 19 nt, Homo sapiens
  misc_RNA (1)...(19): siRNA sense strand
gaaccagggaaaggagaga

SEQ ID NO: 550103 - RNA, 19 nt, Homo sapiens
  misc_RNA (1)...(19): siRNA sense strand
gauuacaauggaaacauca

SEQ ID NO: 550104 - RNA, 19 nt, Homo sapiens
  misc_RNA (1)...(19): siRNA sense strand
ggucaaccaggaacuagag

SEQ ID NO: 550105 - RNA, 19 nt, Homo sapiens
  misc_RNA (1)...(19): siRNA sense strand
aaggagagaugguggauua

SEQ ID NO: 550106 - RNA, 19 nt, Homo sapiens
  misc_RNA (1)...(19): siRNA sense strand
cagcugggcuuccugguuu

SEQ ID NO: 550107 - RNA, 19 nt, Homo sapiens
  misc_RNA (1)...(19): siRNA sense strand
ccaaagacaucuccaggau

SEQ ID NO: 550108 - RNA, 19 nt, Homo sapiens
  misc_RNA (1)...(19): siRNA sense strand
gagagaugguggauuacaa

SEQ ID NO: 550109 - RNA, 19 nt, Homo sapiens
  misc_RNA (1)...(19): siRNA sense strand
aaagggaccucgcgguaaa

SEQ ID NO: 550110 - RNA, 19 nt, Homo sapiens
  misc_RNA (1)...(19): siRNA sense strand
gaugguggauuacaaugga

SEQ ID NO: 550111 - RNA, 19 nt, Homo sapiens
  misc_RNA (1)...(19): siRNA sense strand
ggauuacaauggaaacauc

SEQ ID NO: 550112 - RNA, 19 nt, Homo sapiens
  misc_RNA (1)...(19): siRNA sense strand
caagggagaaccagggaaa

SEQ ID NO: 550113 - RNA, 19 nt, Homo sapiens
  misc_RNA (1)...(19): siRNA sense strand
ggaagcaggacuagaugga

SEQ ID NO: 550114 - RNA, 19 nt, Homo sapiens
  misc_RNA (1)...(19): siRNA sense strand
caaggcugcuggaacaagu

SEQ ID NO: 550115 - RNA, 19 nt, Homo sapiens
  misc_RNA (1)...(19): siRNA sense strand
gggagaagcaggugucgau

SEQ ID NO: 550116 - RNA, 19 nt, Homo sapiens
  misc_RNA (1)...(19): siRNA sense strand
ggagaacagggaccagaug

SEQ ID NO: 550117 - RNA, 19 nt, Homo sapiens
  misc_RNA (1)...(19): siRNA sense strand
acaauggaaacaucaauga

SEQ ID NO: 550118 - RNA, 19 nt, Homo sapiens
  misc_RNA (1)...(19): siRNA sense strand
gaaaggagagaugguggau

SEQ ID NO: 550119 - RNA, 19 nt, Homo sapiens
  misc_RNA (1)...(19): siRNA sense strand
cuagagguuucccuggauu

SEQ ID NO: 550120 - RNA, 19 nt, Homo sapiens
  misc_RNA (1)...(19): siRNA sense strand
gcaaauggagacggcuauu

SEQ ID NO: 550121 - RNA, 19 nt, Homo sapiens
  misc_RNA (1)...(19): siRNA sense strand
gaaaggcuuccagggagaa

SEQ ID NO: 550122 - RNA, 19 nt, Homo sapiens
  misc_RNA (1)...(19): siRNA sense strand
gcagcugggcuuccugguu

SEQ ID NO: 550123 - RNA, 19 nt, Homo sapiens
  misc_RNA (1)...(19): siRNA sense strand
ggagagaugguggauuaca

SEQ ID NO: 550124 - RNA, 19 nt, Homo sapiens
  misc_RNA (1)...(19): siRNA sense strand
gaugcuggcaacuccauug

SEQ ID NO: 550125 - RNA, 19 nt, Homo sapiens
  misc_RNA (1)...(19): siRNA sense strand
gcguggagcagcuggagaa

SEQ ID NO: 550126 - RNA, 19 nt, Homo sapiens
  misc_RNA (1)...(19): siRNA sense strand
uggagcagcuggagaacag

SEQ ID NO: 550127 - RNA, 19 nt, Homo sapiens
  misc_RNA (1)...(19): siRNA sense strand
ggauuuccgggucccauug

SEQ ID NO: 550128 - RNA, 19 nt, Homo sapiens
  misc_RNA (1)...(19): siRNA sense strand
gagaugguggauuacaaug

SEQ ID NO: 550129 - RNA, 19 nt, Homo sapiens
  misc_RNA (1)...(19): siRNA sense strand
uagcggagcgcacccacaa

SEQ ID NO: 550130 - RNA, 19 nt, Homo sapiens
  misc_RNA (1)...(19): siRNA sense strand
gggagaaccagggaaagga

SEQ ID NO: 550131 - RNA, 19 nt, Homo sapiens
  misc_RNA (1)...(19): siRNA sense strand
gagccaggccagcauccaa

SEQ ID NO: 550132 - RNA, 19 nt, Homo sapiens
  misc_RNA (1)...(19): siRNA sense strand
gguacuccaggaccaauug

SEQ ID NO: 550133 - RNA, 19 nt, Homo sapiens
  misc_RNA (1)...(19): siRNA sense strand
aaaggagacccugggauga

SEQ ID NO: 550134 - RNA, 19 nt, Homo sapiens
  misc_RNA (1)...(19): siRNA sense strand
gagccagggaucccaggaa

SEQ ID NO: 550135 - RNA, 19 nt, Homo sapiens
  misc_RNA (1)...(19): siRNA sense strand
gaaccagggaaaggagaga

SEQ ID NO: 550136 - RNA, 19 nt, Homo sapiens
  misc_RNA (1)...(19): siRNA sense strand
gauuacaauggaaacauca

SEQ ID NO: 550137 - RNA, 19 nt, Homo sapiens
  misc_RNA (1)...(19): siRNA sense strand
ggucaaccaggaacuagag

SEQ ID NO: 550138 - RNA, 19 nt, Homo sapiens
  misc_RNA (1)...(19): siRNA sense strand
aaggagagaugguggauua

SEQ ID NO: 550139 - RNA, 19 nt, Homo sapiens
  misc_RNA (1)...(19): siRNA sense strand
cagcugggcuuccugguuu

SEQ ID NO: 550140 - RNA, 19 nt, Homo sapiens
  misc_RNA (1)...(19): siRNA sense strand
ccaaagacaucuccaggau

SEQ ID NO: 550141 - RNA, 19 nt, Homo sapiens
  misc_RNA (1)...(19): siRNA sense strand
gagagaugguggauuacaa

SEQ ID NO: 550142 - RNA, 19 nt, Homo sapiens
  misc_RNA (1)...(19): siRNA sense strand
aaagggaccucgcgguaaa

SEQ ID NO: 550143 - RNA, 19 nt, Homo sapiens
  misc_RNA (1)...(19): siRNA sense strand
gaugguggauuacaaugga

SEQ ID NO: 550144 - RNA, 19 nt, Homo sapiens
  misc_RNA (1)...(19): siRNA sense strand
ggauuacaauggaaacauc

SEQ ID NO: 550145 - RNA, 19 nt, Homo sapiens
  misc_RNA (1)...(19): siRNA sense strand
caagggagaaccagggaaa

SEQ ID NO: 550146 - RNA, 19 nt, Homo sapiens
  misc_RNA (1)...(19): siRNA sense strand
ggaagcaggacuagaugga

SEQ ID NO: 550147 - RNA, 19 nt, Homo sapiens
  misc_RNA (1)...(19): siRNA sense strand
caaggcugcuggaacaagu

SEQ ID NO: 550148 - RNA, 19 nt, Homo sapiens
  misc_RNA (1)...(19): siRNA sense strand
gggagaagcaggugucgau

SEQ ID NO: 550149 - RNA, 19 nt, Homo sapiens
  misc_RNA (1)...(19): siRNA sense strand
ggagaacagggaccagaug

SEQ ID NO: 550150 - RNA, 19 nt, Homo sapiens
  misc_RNA (1)...(19): siRNA sense strand
acaauggaaacaucaauga

SEQ ID NO: 550151 - RNA, 19 nt, Homo sapiens
  misc_RNA (1)...(19): siRNA sense strand
gaaaggagagaugguggau

SEQ ID NO: 550152 - RNA, 19 nt, Homo sapiens
  misc_RNA (1)...(19): siRNA sense strand
cuagagguuucccuggauu

SEQ ID NO: 550153 - RNA, 19 nt, Homo sapiens
  misc_RNA (1)...(19): siRNA sense strand
gcaaauggagacggcuauu

SEQ ID NO: 550154 - RNA, 19 nt, Homo sapiens
  misc_RNA (1)...(19): siRNA sense strand
gaaaggcuuccagggagaa

SEQ ID NO: 550155 - RNA, 19 nt, Homo sapiens
  misc_RNA (1)...(19): siRNA sense strand
gcagcugggcuuccugguu

SEQ ID NO: 550156 - RNA, 19 nt, Homo sapiens
  misc_RNA (1)...(19): siRNA sense strand
ggagagaugguggauuaca

SEQ ID NO: 550157 - RNA, 19 nt, Homo sapiens
  misc_RNA (1)...(19): siRNA sense strand
gaugcuggcaacuccauug

SEQ ID NO: 550158 - RNA, 19 nt, Homo sapiens
  misc_RNA (1)...(19): siRNA sense strand
gcguggagcagcuggagaa

SEQ ID NO: 550159 - RNA, 19 nt, Homo sapiens
  misc_RNA (1)...(19): siRNA sense strand
uggagcagcuggagaacag

SEQ ID NO: 550160 - RNA, 19 nt, Homo sapiens
  misc_RNA (1)...(19): siRNA sense strand
ggauuuccgggucccauug

SEQ ID NO: 550161 - RNA, 19 nt, Homo sapiens
  misc_RNA (1)...(19): siRNA sense strand
gagaugguggauuacaaug

SEQ ID NO: 550162 - RNA, 19 nt, Homo sapiens
  misc_RNA (1)...(19): siRNA sense strand
uagcggagcgcacccacaa

SEQ ID NO: 550163 - RNA, 19 nt, Homo sapiens
  misc_RNA (1)...(19): siRNA sense strand
gggagaaccagggaaagga

SEQ ID NO: 550164 - RNA, 19 nt, Homo sapiens
  misc_RNA (1)...(19): siRNA sense strand
gagccaggccagcauccaa

SEQ ID NO: 550165 - RNA, 19 nt, Homo sapiens
  misc_RNA (1)...(19): siRNA sense strand
gguacuccaggaccaauug

SEQ ID NO: 550166 - RNA, 19 nt, Homo sapiens
  misc_RNA (1)...(19): siRNA sense strand
aaaggagacccugggauga

SEQ ID NO: 550167 - RNA, 19 nt, Homo sapiens
  misc_RNA (1)...(19): siRNA sense strand
gagccagggaucccaggaa

SEQ ID NO: 550168 - RNA, 19 nt, Homo sapiens
  misc_RNA (1)...(19): siRNA sense strand
gaaccagggaaaggagaga

SEQ ID NO: 550169 - RNA, 19 nt, Homo sapiens
  misc_RNA (1)...(19): siRNA sense strand
gauuacaauggaaacauca

SEQ ID NO: 550170 - RNA, 19 nt, Homo sapiens
  misc_RNA (1)...(19): siRNA sense strand
ggucaaccaggaacuagag

SEQ ID NO: 550171 - RNA, 19 nt, Homo sapiens
  misc_RNA (1)...(19): siRNA sense strand
aaggagagaugguggauua

SEQ ID NO: 550172 - RNA, 19 nt, Homo sapiens
  misc_RNA (1)...(19): siRNA sense strand
cagcugggcuuccugguuu

SEQ ID NO: 550173 - RNA, 19 nt, Homo sapiens
  misc_RNA (1)...(19): siRNA sense strand
ccaaagacaucuccaggau

SEQ ID NO: 550174 - RNA, 19 nt, Homo sapiens
  misc_RNA (1)...(19): siRNA sense strand
gagagaugguggauuacaa

SEQ ID NO: 550175 - RNA, 19 nt, Homo sapiens
  misc_RNA (1)...(19): siRNA sense strand
aaagggaccucgcgguaaa

SEQ ID NO: 550176 - RNA, 19 nt, Homo sapiens
  misc_RNA (1)...(19): siRNA sense strand
gaugguggauuacaaugga

SEQ ID NO: 550177 - RNA, 19 nt, Homo sapiens
  misc_RNA (1)...(19): siRNA sense strand
ggauuacaauggaaacauc

SEQ ID NO: 550178 - RNA, 19 nt, Homo sapiens
  misc_RNA (1)...(19): siRNA sense strand
caagggagaaccagggaaa

SEQ ID NO: 550179 - RNA, 19 nt, Homo sapiens
  misc_RNA (1)...(19): siRNA sense strand
ggaagcaggacuagaugga

SEQ ID NO: 550180 - RNA, 19 nt, Homo sapiens
  misc_RNA (1)...(19): siRNA sense strand
caaggcugcuggaacaagu

SEQ ID NO: 550181 - RNA, 19 nt, Homo sapiens
  misc_RNA (1)...(19): siRNA sense strand
gggagaagcaggugucgau

SEQ ID NO: 550182 - RNA, 19 nt, Homo sapiens
  misc_RNA (1)...(19): siRNA sense strand
ggagaacagggaccagaug

SEQ ID NO: 550183 - RNA, 19 nt, Homo sapiens
  misc_RNA (1)...(19): siRNA sense strand
acaauggaaacaucaauga

SEQ ID NO: 550184 - RNA, 19 nt, Homo sapiens
  misc_RNA (1)...(19): siRNA sense strand
gaaaggagagaugguggau

SEQ ID NO: 550185 - RNA, 19 nt, Homo sapiens
  misc_RNA (1)...(19): siRNA sense strand
cuagagguuucccuggauu

SEQ ID NO: 550186 - RNA, 19 nt, Homo sapiens
  misc_RNA (1)...(19): siRNA sense strand
gcaaauggagacggcuauu

SEQ ID NO: 550187 - RNA, 19 nt, Homo sapiens
  misc_RNA (1)...(19): siRNA sense strand
gaaaggcuuccagggagaa

SEQ ID NO: 550188 - RNA, 19 nt, Homo sapiens
  misc_RNA (1)...(19): siRNA sense strand
gcagcugggcuuccugguu

SEQ ID NO: 550189 - RNA, 19 nt, Homo sapiens
  misc_RNA (1)...(19): siRNA sense strand
ggagagaugguggauuaca

SEQ ID NO: 550190 - RNA, 19 nt, Homo sapiens
  misc_RNA (1)...(19): siRNA sense strand
gaugcuggcaacuccauug

SEQ ID NO: 550191 - RNA, 19 nt, Homo sapiens
  misc_RNA (1)...(19): siRNA sense strand
gcguggagcagcuggagaa

SEQ ID NO: 550192 - RNA, 19 nt, Homo sapiens
  misc_RNA (1)...(19): siRNA sense strand
uggagcagcuggagaacag

SEQ ID NO: 550193 - RNA, 19 nt, Homo sapiens
  misc_RNA (1)...(19): siRNA sense strand
ggauuuccgggucccauug

SEQ ID NO: 550194 - RNA, 19 nt, Homo sapiens
  misc_RNA (1)...(19): siRNA sense strand
gagaugguggauuacaaug

SEQ ID NO: 550195 - RNA, 19 nt, Homo sapiens
  misc_RNA (1)...(19): siRNA sense strand
uagcggagcgcacccacaa

SEQ ID NO: 550196 - RNA, 19 nt, Homo sapiens
  misc_RNA (1)...(19): siRNA sense strand
gggagaaccagggaaagga

SEQ ID NO: 550197 - RNA, 19 nt, Homo sapiens
  misc_RNA (1)...(19): siRNA sense strand
gagccaggccagcauccaa

SEQ ID NO: 550198 - RNA, 19 nt, Homo sapiens
  misc_RNA (1)...(19): siRNA sense strand
gguacuccaggaccaauug

SEQ ID NO: 550199 - RNA, 19 nt, Homo sapiens
  misc_RNA (1)...(19): siRNA sense strand
aaaggagacccugggauga

SEQ ID NO: 550200 - RNA, 19 nt, Homo sapiens
  misc_RNA (1)...(19): siRNA sense strand
gagccagggaucccaggaa

SEQ ID NO: 550201 - RNA, 19 nt, Homo sapiens
  misc_RNA (1)...(19): siRNA sense strand
gaaccagggaaaggagaga

SEQ ID NO: 550202 - RNA, 19 nt, Homo sapiens
  misc_RNA (1)...(19): siRNA sense strand
gauuacaauggaaacauca

SEQ ID NO: 550203 - RNA, 19 nt, Homo sapiens
  misc_RNA (1)...(19): siRNA sense strand
ggucaaccaggaacuagag

SEQ ID NO: 550204 - RNA, 19 nt, Homo sapiens
  misc_RNA (1)...(19): siRNA sense strand
aaggagagaugguggauua

SEQ ID NO: 550205 - RNA, 19 nt, Homo sapiens
  misc_RNA (1)...(19): siRNA sense strand
cagcugggcuuccugguuu

SEQ ID NO: 550206 - RNA, 19 nt, Homo sapiens
  misc_RNA (1)...(19): siRNA sense strand
ccaaagacaucuccaggau

SEQ ID NO: 550207 - RNA, 19 nt, Homo sapiens
  misc_RNA (1)...(19): siRNA sense strand
gagagaugguggauuacaa

SEQ ID NO: 550208 - RNA, 19 nt, Homo sapiens
  misc_RNA (1)...(19): siRNA sense strand
aaagggaccucgcgguaaa

SEQ ID NO: 550209 - RNA, 19 nt, Homo sapiens
  misc_RNA (1)...(19): siRNA sense strand
gaugguggauuacaaugga

SEQ ID NO: 550210 - RNA, 19 nt, Homo sapiens
  misc_RNA (1)...(19): siRNA sense strand
ggauuacaauggaaacauc

SEQ ID NO: 550211 - RNA, 19 nt, Homo sapiens
  misc_RNA (1)...(19): siRNA sense strand
caagggagaaccagggaaa

SEQ ID NO: 550212 - RNA, 19 nt, Homo sapiens
  misc_RNA (1)...(19): siRNA sense strand
ggaagcaggacuagaugga

SEQ ID NO: 550213 - RNA, 19 nt, Homo sapiens
  misc_RNA (1)...(19): siRNA sense strand
caaggcugcuggaacaagu

SEQ ID NO: 550214 - RNA, 19 nt, Homo sapiens
  misc_RNA (1)...(19): siRNA sense strand
gggagaagcaggugucgau

SEQ ID NO: 550215 - RNA, 19 nt, Homo sapiens
  misc_RNA (1)...(19): siRNA sense strand
ggagaacagggaccagaug

SEQ ID NO: 550216 - RNA, 19 nt, Homo sapiens
  misc_RNA (1)...(19): siRNA sense strand
acaauggaaacaucaauga

SEQ ID NO: 550217 - RNA, 19 nt, Homo sapiens
  misc_RNA (1)...(19): siRNA sense strand
gaaaggagagaugguggau

SEQ ID NO: 550218 - RNA, 19 nt, Homo sapiens
  misc_RNA (1)...(19): siRNA sense strand
cuagagguuucccuggauu

SEQ ID NO: 550219 - RNA, 19 nt, Homo sapiens
  misc_RNA (1)...(19): siRNA sense strand
gcaaauggagacggcuauu

SEQ ID NO: 550220 - RNA, 19 nt, Homo sapiens
  misc_RNA (1)...(19): siRNA sense strand
gaaaggcuuccagggagaa

SEQ ID NO: 550221 - RNA, 19 nt, Homo sapiens
  misc_RNA (1)...(19): siRNA sense strand
gcagcugggcuuccugguu

SEQ ID NO: 550222 - RNA, 19 nt, Homo sapiens
  misc_RNA (1)...(19): siRNA sense strand
ggagagaugguggauuaca

SEQ ID NO: 550223 - RNA, 19 nt, Homo sapiens
  misc_RNA (1)...(19): siRNA sense strand
gaugcuggcaacuccauug

SEQ ID NO: 550224 - RNA, 19 nt, Homo sapiens
  misc_RNA (1)...(19): siRNA sense strand
gcguggagcagcuggagaa

SEQ ID NO: 550225 - RNA, 19 nt, Homo sapiens
  misc_RNA (1)...(19): siRNA sense strand
uggagcagcuggagaacag

SEQ ID NO: 550226 - RNA, 19 nt, Homo sapiens
  misc_RNA (1)...(19): siRNA sense strand
ggauuuccgggucccauug

SEQ ID NO: 550227 - RNA, 19 nt, Homo sapiens
  misc_RNA (1)...(19): siRNA sense strand
gagaugguggauuacaaug

SEQ ID NO: 550228 - RNA, 19 nt, Homo sapiens
  misc_RNA (1)...(19): siRNA sense strand
uagcggagcgcacccacaa

SEQ ID NO: 550229 - RNA, 19 nt, Homo sapiens
  misc_RNA (1)...(19): siRNA sense strand
gggagaaccagggaaagga

SEQ ID NO: 550230 - RNA, 19 nt, Homo sapiens
  misc_RNA (1)...(19): siRNA sense strand
gagccaggccagcauccaa

SEQ ID NO: 550231 - RNA, 19 nt, Homo sapiens
  misc_RNA (1)...(19): siRNA sense strand
gguacuccaggaccaauug

SEQ ID NO: 550232 - RNA, 19 nt, Homo sapiens
  misc_RNA (1)...(19): siRNA sense strand
aaaggagacccugggauga

SEQ ID NO: 550233 - RNA, 19 nt, Homo sapiens
  misc_RNA (1)...(19): siRNA sense strand
gagccagggaucccaggaa

SEQ ID NO: 550234 - RNA, 19 nt, Homo sapiens
  misc_RNA (1)...(19): siRNA sense strand
gaaccagggaaaggagaga

SEQ ID NO: 550235 - RNA, 19 nt, Homo sapiens
  misc_RNA (1)...(19): siRNA sense strand
gauuacaauggaaacauca

SEQ ID NO: 550236 - RNA, 19 nt, Homo sapiens
  misc_RNA (1)...(19): siRNA sense strand
ggucaaccaggaacuagag

SEQ ID NO: 550237 - RNA, 19 nt, Homo sapiens
  misc_RNA (1)...(19): siRNA sense strand
aaggagagaugguggauua

SEQ ID NO: 550238 - RNA, 19 nt, Homo sapiens
  misc_RNA (1)...(19): siRNA sense strand
cagcugggcuuccugguuu

SEQ ID NO: 550239 - RNA, 19 nt, Homo sapiens
  misc_RNA (1)...(19): siRNA sense strand
ccaaagacaucuccaggau

SEQ ID NO: 550240 - RNA, 19 nt, Homo sapiens
  misc_RNA (1)...(19): siRNA sense strand
gagagaugguggauuacaa

SEQ ID NO: 550241 - RNA, 19 nt, Homo sapiens
  misc_RNA (1)...(19): siRNA sense strand
aaagggaccucgcgguaaa

SEQ ID NO: 550242 - RNA, 19 nt, Homo sapiens
  misc_RNA (1)...(19): siRNA sense strand
gaugguggauuacaaugga

SEQ ID NO: 550243 - RNA, 19 nt, Homo sapiens
  misc_RNA (1)...(19): siRNA sense strand
ggauuacaauggaaacauc

SEQ ID NO: 550244 - RNA, 19 nt, Homo sapiens
  misc_RNA (1)...(19): siRNA sense strand
caagggagaaccagggaaa

SEQ ID NO: 550245 - RNA, 19 nt, Homo sapiens
  misc_RNA (1)...(19): siRNA sense strand
ggaagcaggacuagaugga

SEQ ID NO: 550246 - RNA, 19 nt, Homo sapiens
  misc_RNA (1)...(19): siRNA sense strand
caaggcugcuggaacaagu

SEQ ID NO: 550247 - RNA, 19 nt, Homo sapiens
  misc_RNA (1)...(19): siRNA sense strand
gggagaagcaggugucgau

SEQ ID NO: 550248 - RNA, 19 nt, Homo sapiens
  misc_RNA (1)...(19): siRNA sense strand
ggagaacagggaccagaug

SEQ ID NO: 550249 - RNA, 19 nt, Homo sapiens
  misc_RNA (1)...(19): siRNA sense strand
acaauggaaacaucaauga

SEQ ID NO: 550250 - RNA, 19 nt, Homo sapiens
  misc_RNA (1)...(19): siRNA sense strand
gaaaggagagaugguggau

SEQ ID NO: 550251 - RNA, 19 nt, Homo sapiens
  misc_RNA (1)...(19): siRNA sense strand
cuagagguuucccuggauu

SEQ ID NO: 550252 - RNA, 19 nt, Homo sapiens
  misc_RNA (1)...(19): siRNA sense strand
gcaaauggagacggcuauu

SEQ ID NO: 550253 - RNA, 19 nt, Homo sapiens
  misc_RNA (1)...(19): siRNA sense strand
gaaaggcuuccagggagaa

SEQ ID NO: 550254 - RNA, 19 nt, Homo sapiens
  misc_RNA (1)...(19): siRNA sense strand
gcagcugggcuuccugguu

SEQ ID NO: 550255 - RNA, 19 nt, Homo sapiens
  misc_RNA (1)...(19): siRNA sense strand
ggagagaugguggauuaca

SEQ ID NO: 550256 - RNA, 19 nt, Homo sapiens
  misc_RNA (1)...(19): siRNA sense strand
gaugcuggcaacuccauug

SEQ ID NO: 550257 - RNA, 19 nt, Homo sapiens
  misc_RNA (1)...(19): siRNA sense strand
gcguggagcagcuggagaa

SEQ ID NO: 550258 - RNA, 19 nt, Homo sapiens
  misc_RNA (1)...(19): siRNA sense strand
uggagcagcuggagaacag

SEQ ID NO: 550259 - RNA, 19 nt, Homo sapiens
  misc_RNA (1)...(19): siRNA sense strand
ggauuuccgggucccauug

SEQ ID NO: 550260 - RNA, 19 nt, Homo sapiens
  misc_RNA (1)...(19): siRNA sense strand
gagaugguggauuacaaug

SEQ ID NO: 550261 - RNA, 19 nt, Homo sapiens
  misc_RNA (1)...(19): siRNA sense strand
uagcggagcgcacccacaa

SEQ ID NO: 550262 - RNA, 19 nt, Homo sapiens
  misc_RNA (1)...(19): siRNA sense strand
gggagaaccagggaaagga

SEQ ID NO: 550263 - RNA, 19 nt, Homo sapiens
  misc_RNA (1)...(19): siRNA sense strand
gagccaggccagcauccaa

SEQ ID NO: 550264 - RNA, 19 nt, Homo sapiens
  misc_RNA (1)...(19): siRNA sense strand
gguacuccaggaccaauug

SEQ ID NO: 550265 - RNA, 19 nt, Homo sapiens
  misc_RNA (1)...(19): siRNA sense strand
aaaggagacccugggauga

SEQ ID NO: 550266 - RNA, 19 nt, Homo sapiens
  misc_RNA (1)...(19): siRNA sense strand
gagccagggaucccaggaa

SEQ ID NO: 550267 - RNA, 19 nt, Homo sapiens
  misc_RNA (1)...(19): siRNA sense strand
gaaccagggaaaggagaga

SEQ ID NO: 550268 - RNA, 19 nt, Homo sapiens
  misc_RNA (1)...(19): siRNA sense strand
gauuacaauggaaacauca

SEQ ID NO: 550269 - RNA, 19 nt, Homo sapiens
  misc_RNA (1)...(19): siRNA sense strand
ggucaaccaggaacuagag

SEQ ID NO: 550270 - RNA, 19 nt, Homo sapiens
  misc_RNA (1)...(19): siRNA sense strand
aaggagagaugguggauua

SEQ ID NO: 550271 - RNA, 19 nt, Homo sapiens
  misc_RNA (1)...(19): siRNA sense strand
cagcugggcuuccugguuu

SEQ ID NO: 550272 - RNA, 19 nt, Homo sapiens
  misc_RNA (1)...(19): siRNA sense strand
ccaaagacaucuccaggau

SEQ ID NO: 550273 - RNA, 19 nt, Homo sapiens
  misc_RNA (1)...(19): siRNA sense strand
gagagaugguggauuacaa

SEQ ID NO: 550274 - RNA, 19 nt, Homo sapiens
  misc_RNA (1)...(19): siRNA sense strand
aaagggaccucgcgguaaa

SEQ ID NO: 550275 - RNA, 19 nt, Homo sapiens
  misc_RNA (1)...(19): siRNA sense strand
gaugguggauuacaaugga

SEQ ID NO: 550276 - RNA, 19 nt, Homo sapiens
  misc_RNA (1)...(19): siRNA sense strand
ggauuacaauggaaacauc

SEQ ID NO: 550277 - RNA, 19 nt, Homo sapiens
  misc_RNA (1)...(19): siRNA sense strand
caagggagaaccagggaaa

SEQ ID NO: 550278 - RNA, 19 nt, Homo sapiens
  misc_RNA (1)...(19): siRNA sense strand
ggaagcaggacuagaugga

SEQ ID NO: 550279 - RNA, 19 nt, Homo sapiens
  misc_RNA (1)...(19): siRNA sense strand
caaggcugcuggaacaagu

SEQ ID NO: 550280 - RNA, 19 nt, Homo sapiens
  misc_RNA (1)...(19): siRNA sense strand
gggagaagcaggugucgau

SEQ ID NO: 550281 - RNA, 19 nt, Homo sapiens
  misc_RNA (1)...(19): siRNA sense strand
ggagaacagggaccagaug

SEQ ID NO: 550282 - RNA, 19 nt, Homo sapiens
  misc_RNA (1)...(19): siRNA sense strand
acaauggaaacaucaauga

SEQ ID NO: 550283 - RNA, 19 nt, Homo sapiens
  misc_RNA (1)...(19): siRNA sense strand
gaaaggagagaugguggau

SEQ ID NO: 550284 - RNA, 19 nt, Homo sapiens
  misc_RNA (1)...(19): siRNA sense strand
cuagagguuucccuggauu

SEQ ID NO: 550285 - RNA, 19 nt, Homo sapiens
  misc_RNA (1)...(19): siRNA sense strand
gcaaauggagacggcuauu

SEQ ID NO: 550286 - RNA, 19 nt, Homo sapiens
  misc_RNA (1)...(19): siRNA sense strand
gaaaggcuuccagggagaa

SEQ ID NO: 550287 - RNA, 19 nt, Homo sapiens
  misc_RNA (1)...(19): siRNA sense strand
gcagcugggcuuccugguu

SEQ ID NO: 550288 - RNA, 19 nt, Homo sapiens
  misc_RNA (1)...(19): siRNA sense strand
ggagagaugguggauuaca

SEQ ID NO: 550289 - RNA, 19 nt, Homo sapiens
  misc_RNA (1)...(19): siRNA sense strand
gaugcuggcaacuccauug

SEQ ID NO: 550290 - RNA, 19 nt, Homo sapiens
  misc_RNA (1)...(19): siRNA sense strand
gcguggagcagcuggagaa

SEQ ID NO: 550291 - RNA, 19 nt, Homo sapiens
  misc_RNA (1)...(19): siRNA sense strand
uggagcagcuggagaacag

SEQ ID NO: 550292 - RNA, 19 nt, Homo sapiens
  misc_RNA (1)...(19): siRNA sense strand
ggauuuccgggucccauug

SEQ ID NO: 550293 - RNA, 19 nt, Homo sapiens
  misc_RNA (1)...(19): siRNA sense strand
gagaugguggauuacaaug

SEQ ID NO: 550294 - RNA, 19 nt, Homo sapiens
  misc_RNA (1)...(19): siRNA sense strand
uagcggagcgcacccacaa

SEQ ID NO: 550295 - RNA, 19 nt, Homo sapiens
  misc_RNA (1)...(19): siRNA sense strand
gggagaaccagggaaagga

SEQ ID NO: 550296 - RNA, 19 nt, Homo sapiens
  misc_RNA (1)...(19): siRNA sense strand
gagccaggccagcauccaa

SEQ ID NO: 550297 - RNA, 19 nt, Homo sapiens
  misc_RNA (1)...(19): siRNA sense strand
gguacuccaggaccaauug

SEQ ID NO: 550298 - RNA, 19 nt, Homo sapiens
  misc_RNA (1)...(19): siRNA sense strand
aaaggagacccugggauga

SEQ ID NO: 550299 - RNA, 19 nt, Homo sapiens
  misc_RNA (1)...(19): siRNA sense strand
gagccagggaucccaggaa

SEQ ID NO: 550300 - RNA, 19 nt, Homo sapiens
  misc_RNA (1)...(19): siRNA sense strand
gaaccagggaaaggagaga

SEQ ID NO: 550301 - RNA, 19 nt, Homo sapiens
  misc_RNA (1)...(19): siRNA sense strand
gauuacaauggaaacauca

SEQ ID NO: 550302 - RNA, 19 nt, Homo sapiens
  misc_RNA (1)...(19): siRNA sense strand
ggucaaccaggaacuagag

SEQ ID NO: 550303 - RNA, 19 nt, Homo sapiens
  misc_RNA (1)...(19): siRNA sense strand
aaggagagaugguggauua

SEQ ID NO: 550304 - RNA, 19 nt, Homo sapiens
  misc_RNA (1)...(19): siRNA sense strand
cagcugggcuuccugguuu

SEQ ID NO: 550305 - RNA, 19 nt, Homo sapiens
  misc_RNA (1)...(19): siRNA sense strand
ccaaagacaucuccaggau

SEQ ID NO: 550306 - RNA, 19 nt, Homo sapiens
  misc_RNA (1)...(19): siRNA sense strand
gagagaugguggauuacaa

SEQ ID NO: 550307 - RNA, 19 nt, Homo sapiens
  misc_RNA (1)...(19): siRNA sense strand
aaagggaccucgcgguaaa

SEQ ID NO: 550308 - RNA, 19 nt, Homo sapiens
  misc_RNA (1)...(19): siRNA sense strand
gaugguggauuacaaugga

SEQ ID NO: 550309 - RNA, 19 nt, Homo sapiens
  misc_RNA (1)...(19): siRNA sense strand
ggauuacaauggaaacauc

SEQ ID NO: 550310 - RNA, 19 nt, Homo sapiens
  misc_RNA (1)...(19): siRNA sense strand
caagggagaaccagggaaa

SEQ ID NO: 550311 - RNA, 19 nt, Homo sapiens
  misc_RNA (1)...(19): siRNA sense strand
ggaagcaggacuagaugga

SEQ ID NO: 550312 - RNA, 19 nt, Homo sapiens
  misc_RNA (1)...(19): siRNA sense strand
caaggcugcuggaacaagu

SEQ ID NO: 550313 - RNA, 19 nt, Homo sapiens
  misc_RNA (1)...(19): siRNA sense strand
gggagaagcaggugucgau

SEQ ID NO: 550314 - RNA, 19 nt, Homo sapiens
  misc_RNA (1)...(19): siRNA sense strand
ggagaacagggaccagaug

SEQ ID NO: 550315 - RNA, 19 nt, Homo sapiens
  misc_RNA (1)...(19): siRNA sense strand
acaauggaaacaucaauga

SEQ ID NO: 550316 - RNA, 19 nt, Homo sapiens
  misc_RNA (1)...(19): siRNA sense strand
gaaaggagagaugguggau

SEQ ID NO: 550317 - RNA, 19 nt, Homo sapiens
  misc_RNA (1)...(19): siRNA sense strand
cuagagguuucccuggauu

SEQ ID NO: 550318 - RNA, 19 nt, Homo sapiens
  misc_RNA (1)...(19): siRNA sense strand
gcaaauggagacggcuauu

SEQ ID NO: 550319 - RNA, 19 nt, Homo sapiens
  misc_RNA (1)...(19): siRNA sense strand
gaaaggcuuccagggagaa

SEQ ID NO: 550320 - RNA, 19 nt, Homo sapiens
  misc_RNA (1)...(19): siRNA sense strand
gcagcugggcuuccugguu

SEQ ID NO: 550321 - RNA, 19 nt, Homo sapiens
  misc_RNA (1)...(19): siRNA sense strand
ggagagaugguggauuaca

SEQ ID NO: 550322 - RNA, 19 nt, Homo sapiens
  misc_RNA (1)...(19): siRNA sense strand
gaugcuggcaacuccauug

SEQ ID NO: 550323 - RNA, 19 nt, Homo sapiens
  misc_RNA (1)...(19): siRNA sense strand
gcguggagcagcuggagaa

SEQ ID NO: 550324 - RNA, 19 nt, Homo sapiens
  misc_RNA (1)...(19): siRNA sense strand
uggagcagcuggagaacag

SEQ ID NO: 550325 - RNA, 19 nt, Homo sapiens
  misc_RNA (1)...(19): siRNA sense strand
ggauuuccgggucccauug

SEQ ID NO: 550326 - RNA, 19 nt, Homo sapiens
  misc_RNA (1)...(19): siRNA sense strand
gagaugguggauuacaaug

SEQ ID NO: 550327 - RNA, 19 nt, Homo sapiens
  misc_RNA (1)...(19): siRNA sense strand
uagcggagcgcacccacaa

SEQ ID NO: 550328 - RNA, 19 nt, Homo sapiens
  misc_RNA (1)...(19): siRNA sense strand
gggagaaccagggaaagga

SEQ ID NO: 550329 - RNA, 19 nt, Homo sapiens
  misc_RNA (1)...(19): siRNA sense strand
gagccaggccagcauccaa

SEQ ID NO: 550330 - RNA, 19 nt, Homo sapiens
  misc_RNA (1)...(19): siRNA sense strand
gguacuccaggaccaauug

SEQ ID NO: 550331 - RNA, 19 nt, Homo sapiens
  misc_RNA (1)...(19): siRNA sense strand
aaaggagacccugggauga

SEQ ID NO: 550332 - RNA, 19 nt, Homo sapiens
  misc_RNA (1)...(19): siRNA sense strand
gagccagggaucccaggaa

SEQ ID NO: 550333 - RNA, 19 nt, Homo sapiens
  misc_RNA (1)...(19): siRNA sense strand
gaaccagggaaaggagaga

SEQ ID NO: 550334 - RNA, 19 nt, Homo sapiens
  misc_RNA (1)...(19): siRNA sense strand
gauuacaauggaaacauca

SEQ ID NO: 550335 - RNA, 19 nt, Homo sapiens
  misc_RNA (1)...(19): siRNA sense strand
ggucaaccaggaacuagag

SEQ ID NO: 550336 - RNA, 19 nt, Homo sapiens
  misc_RNA (1)...(19): siRNA sense strand
aaggagagaugguggauua

SEQ ID NO: 550337 - RNA, 19 nt, Homo sapiens
  misc_RNA (1)...(19): siRNA sense strand
cagcugggcuuccugguuu

SEQ ID NO: 550338 - RNA, 19 nt, Homo sapiens
  misc_RNA (1)...(19): siRNA sense strand
ccaaagacaucuccaggau

SEQ ID NO: 550339 - RNA, 19 nt, Homo sapiens
  misc_RNA (1)...(19): siRNA sense strand
gagagaugguggauuacaa

SEQ ID NO: 550340 - RNA, 19 nt, Homo sapiens
  misc_RNA (1)...(19): siRNA sense strand
aaagggaccucgcgguaaa

SEQ ID NO: 550341 - RNA, 19 nt, Homo sapiens
  misc_RNA (1)...(19): siRNA sense strand
gaugguggauuacaaugga

SEQ ID NO: 550342 - RNA, 19 nt, Homo sapiens
  misc_RNA (1)...(19): siRNA sense strand
ggauuacaauggaaacauc

SEQ ID NO: 550343 - RNA, 19 nt, Homo sapiens
  misc_RNA (1)...(19): siRNA sense strand
caagggagaaccagggaaa

SEQ ID NO: 550344 - RNA, 19 nt, Homo sapiens
  misc_RNA (1)...(19): siRNA sense strand
ggaagcaggacuagaugga

SEQ ID NO: 550345 - RNA, 19 nt, Homo sapiens
  misc_RNA (1)...(19): siRNA sense strand
caaggcugcuggaacaagu

SEQ ID NO: 550346 - RNA, 19 nt, Homo sapiens
  misc_RNA (1)...(19): siRNA sense strand
gggagaagcaggugucgau

SEQ ID NO: 550347 - RNA, 19 nt, Homo sapiens
  misc_RNA (1)...(19): siRNA sense strand
ggagaacagggaccagaug

SEQ ID NO: 550348 - RNA, 19 nt, Homo sapiens
  misc_RNA (1)...(19): siRNA sense strand
acaauggaaacaucaauga

SEQ ID NO: 550349 - RNA, 19 nt, Homo sapiens
  misc_RNA (1)...(19): siRNA sense strand
gaaaggagagaugguggau

SEQ ID NO: 550350 - RNA, 19 nt, Homo sapiens
  misc_RNA (1)...(19): siRNA sense strand
cuagagguuucccuggauu

SEQ ID NO: 550351 - RNA, 19 nt, Homo sapiens
  misc_RNA (1)...(19): siRNA sense strand
gcaaauggagacggcuauu

SEQ ID NO: 550352 - RNA, 19 nt, Homo sapiens
  misc_RNA (1)...(19): siRNA sense strand
gaaaggcuuccagggagaa

SEQ ID NO: 550353 - RNA, 19 nt, Homo sapiens
  misc_RNA (1)...(19): siRNA sense strand
gcagcugggcuuccugguu

SEQ ID NO: 550354 - RNA, 19 nt, Homo sapiens
  misc_RNA (1)...(19): siRNA sense strand
ggagagaugguggauuaca

SEQ ID NO: 550355 - RNA, 19 nt, Homo sapiens
  misc_RNA (1)...(19): siRNA sense strand
gaugcuggcaacuccauug

SEQ ID NO: 550356 - RNA, 19 nt, Homo sapiens
  misc_RNA (1)...(19): siRNA sense strand
gcguggagcagcuggagaa

SEQ ID NO: 550357 - RNA, 19 nt, Homo sapiens
  misc_RNA (1)...(19): siRNA sense strand
uggagcagcuggagaacag

SEQ ID NO: 550358 - RNA, 19 nt, Homo sapiens
  misc_RNA (1)...(19): siRNA sense strand
ggauuuccgggucccauug

SEQ ID NO: 550359 - RNA, 19 nt, Homo sapiens
  misc_RNA (1)...(19): siRNA sense strand
gagaugguggauuacaaug

SEQ ID NO: 550360 - RNA, 19 nt, Homo sapiens
  misc_RNA (1)...(19): siRNA sense strand
uagcggagcgcacccacaa

SEQ ID NO: 550361 - RNA, 19 nt, Homo sapiens
  misc_RNA (1)...(19): siRNA sense strand
gggagaaccagggaaagga

SEQ ID NO: 550362 - RNA, 19 nt, Homo sapiens
  misc_RNA (1)...(19): siRNA sense strand
gagccaggccagcauccaa

SEQ ID NO: 550363 - RNA, 19 nt, Homo sapiens
  misc_RNA (1)...(19): siRNA sense strand
gguacuccaggaccaauug

SEQ ID NO: 550364 - RNA, 19 nt, Homo sapiens
  misc_RNA (1)...(19): siRNA sense strand
aaaggagacccugggauga

SEQ ID NO: 550365 - RNA, 19 nt, Homo sapiens
  misc_RNA (1)...(19): siRNA sense strand
gagccagggaucccaggaa

SEQ ID NO: 550366 - RNA, 19 nt, Homo sapiens
  misc_RNA (1)...(19): siRNA sense strand
gaaccagggaaaggagaga

SEQ ID NO: 550367 - RNA, 19 nt, Homo sapiens
  misc_RNA (1)...(19): siRNA sense strand
gauuacaauggaaacauca

SEQ ID NO: 550368 - RNA, 19 nt, Homo sapiens
  misc_RNA (1)...(19): siRNA sense strand
ggucaaccaggaacuagag

SEQ ID NO: 550369 - RNA, 19 nt, Homo sapiens
  misc_RNA (1)...(19): siRNA sense strand
aaggagagaugguggauua

SEQ ID NO: 550370 - RNA, 19 nt, Homo sapiens
  misc_RNA (1)...(19): siRNA sense strand
cagcugggcuuccugguuu

SEQ ID NO: 550371 - RNA, 19 nt, Homo sapiens
  misc_RNA (1)...(19): siRNA sense strand
ccaaagacaucuccaggau

SEQ ID NO: 550372 - RNA, 19 nt, Homo sapiens
  misc_RNA (1)...(19): siRNA sense strand
gagagaugguggauuacaa

SEQ ID NO: 550373 - RNA, 19 nt, Homo sapiens
  misc_RNA (1)...(19): siRNA sense strand
aaagggaccucgcgguaaa

SEQ ID NO: 550374 - RNA, 19 nt, Homo sapiens
  misc_RNA (1)...(19): siRNA sense strand
gaugguggauuacaaugga

SEQ ID NO: 550375 - RNA, 19 nt, Homo sapiens
  misc_RNA (1)...(19): siRNA sense strand
ggauuacaauggaaacauc

SEQ ID NO: 550376 - RNA, 19 nt, Homo sapiens
  misc_RNA (1)...(19): siRNA sense strand
caagggagaaccagggaaa

SEQ ID NO: 550377 - RNA, 19 nt, Homo sapiens
  misc_RNA (1)...(19): siRNA sense strand
ggaagcaggacuagaugga

SEQ ID NO: 550378 - RNA, 19 nt, Homo sapiens
  misc_RNA (1)...(19): siRNA sense strand
caaggcugcuggaacaagu

SEQ ID NO: 550379 - RNA, 19 nt, Homo sapiens
  misc_RNA (1)...(19): siRNA sense strand
gggagaagcaggugucgau

SEQ ID NO: 550380 - RNA, 19 nt, Homo sapiens
  misc_RNA (1)...(19): siRNA sense strand
ggagaacagggaccagaug

SEQ ID NO: 550381 - RNA, 19 nt, Homo sapiens
  misc_RNA (1)...(19): siRNA sense strand
acaauggaaacaucaauga

SEQ ID NO: 550382 - RNA, 19 nt, Homo sapiens
  misc_RNA (1)...(19): siRNA sense strand
gaaaggagagaugguggau

SEQ ID NO: 550383 - RNA, 19 nt, Homo sapiens
  misc_RNA (1)...(19): siRNA sense strand
cuagagguuucccuggauu

SEQ ID NO: 550384 - RNA, 19 nt, Homo sapiens
  misc_RNA (1)...(19): siRNA sense strand
gcaaauggagacggcuauu

SEQ ID NO: 550385 - RNA, 19 nt, Homo sapiens
  misc_RNA (1)...(19): siRNA sense strand
gaaaggcuuccagggagaa

SEQ ID NO: 550386 - RNA, 19 nt, Homo sapiens
  misc_RNA (1)...(19): siRNA sense strand
gcagcugggcuuccugguu

SEQ ID NO: 550387 - RNA, 19 nt, Homo sapiens
  misc_RNA (1)...(19): siRNA sense strand
ggagagaugguggauuaca

SEQ ID NO: 550388 - RNA, 19 nt, Homo sapiens
  misc_RNA (1)...(19): siRNA sense strand
gaugcuggcaacuccauug

SEQ ID NO: 550389 - RNA, 19 nt, Homo sapiens
  misc_RNA (1)...(19): siRNA sense strand
gcguggagcagcuggagaa

SEQ ID NO: 550390 - RNA, 19 nt, Homo sapiens
  misc_RNA (1)...(19): siRNA sense strand
uggagcagcuggagaacag

SEQ ID NO: 550391 - RNA, 19 nt, Homo sapiens
  misc_RNA (1)...(19): siRNA sense strand
ggauuuccgggucccauug

SEQ ID NO: 550392 - RNA, 19 nt, Homo sapiens
  misc_RNA (1)...(19): siRNA sense strand
gagaugguggauuacaaug

SEQ ID NO: 550393 - RNA, 19 nt, Homo sapiens
  misc_RNA (1)...(19): siRNA sense strand
uagcggagcgcacccacaa

SEQ ID NO: 550394 - RNA, 19 nt, Homo sapiens
  misc_RNA (1)...(19): siRNA sense strand
gggagaaccagggaaagga

SEQ ID NO: 550395 - RNA, 19 nt, Homo sapiens
  misc_RNA (1)...(19): siRNA sense strand
gagccaggccagcauccaa

SEQ ID NO: 550396 - RNA, 19 nt, Homo sapiens
  misc_RNA (1)...(19): siRNA sense strand
gguacuccaggaccaauug

SEQ ID NO: 550397 - RNA, 19 nt, Homo sapiens
  misc_RNA (1)...(19): siRNA sense strand
aaaggagacccugggauga

SEQ ID NO: 550398 - RNA, 19 nt, Homo sapiens
  misc_RNA (1)...(19): siRNA sense strand
gagccagggaucccaggaa

SEQ ID NO: 550399 - RNA, 19 nt, Homo sapiens
  misc_RNA (1)...(19): siRNA sense strand
gaaccagggaaaggagaga

SEQ ID NO: 550400 - RNA, 19 nt, Homo sapiens
  misc_RNA (1)...(19): siRNA sense strand
gauuacaauggaaacauca

SEQ ID NO: 550401 - RNA, 19 nt, Homo sapiens
  misc_RNA (1)...(19): siRNA sense strand
ggucaaccaggaacuagag

SEQ ID NO: 550402 - RNA, 19 nt, Homo sapiens
  misc_RNA (1)...(19): siRNA sense strand
aaggagagaugguggauua

SEQ ID NO: 550403 - RNA, 19 nt, Homo sapiens
  misc_RNA (1)...(19): siRNA sense strand
cagcugggcuuccugguuu

SEQ ID NO: 550404 - RNA, 19 nt, Homo sapiens
  misc_RNA (1)...(19): siRNA sense strand
ccaaagacaucuccaggau

SEQ ID NO: 550405 - RNA, 19 nt, Homo sapiens
  misc_RNA (1)...(19): siRNA sense strand
gagagaugguggauuacaa

SEQ ID NO: 550406 - RNA, 19 nt, Homo sapiens
  misc_RNA (1)...(19): siRNA sense strand
aaagggaccucgcgguaaa

SEQ ID NO: 550407 - RNA, 19 nt, Homo sapiens
  misc_RNA (1)...(19): siRNA sense strand
gaugguggauuacaaugga

SEQ ID NO: 550408 - RNA, 19 nt, Homo sapiens
  misc_RNA (1)...(19): siRNA sense strand
ggauuacaauggaaacauc

SEQ ID NO: 550409 - RNA, 19 nt, Homo sapiens
  misc_RNA (1)...(19): siRNA sense strand
caagggagaaccagggaaa

SEQ ID NO: 550410 - RNA, 19 nt, Homo sapiens
  misc_RNA (1)...(19): siRNA sense strand
ggaagcaggacuagaugga

SEQ ID NO: 550411 - RNA, 19 nt, Homo sapiens
  misc_RNA (1)...(19): siRNA sense strand
caaggcugcuggaacaagu

SEQ ID NO: 550412 - RNA, 19 nt, Homo sapiens
  misc_RNA (1)...(19): siRNA sense strand
gggagaagcaggugucgau

SEQ ID NO: 550413 - RNA, 19 nt, Homo sapiens
  misc_RNA (1)...(19): siRNA sense strand
ggagaacagggaccagaug

SEQ ID NO: 550414 - RNA, 19 nt, Homo sapiens
  misc_RNA (1)...(19): siRNA sense strand
acaauggaaacaucaauga

SEQ ID NO: 550415 - RNA, 19 nt, Homo sapiens
  misc_RNA (1)...(19): siRNA sense strand
gaaaggagagaugguggau

SEQ ID NO: 550416 - RNA, 19 nt, Homo sapiens
  misc_RNA (1)...(19): siRNA sense strand
cuagagguuucccuggauu

SEQ ID NO: 550417 - RNA, 19 nt, Homo sapiens
  misc_RNA (1)...(19): siRNA sense strand
gcaaauggagacggcuauu

SEQ ID NO: 550418 - RNA, 19 nt, Homo sapiens
  misc_RNA (1)...(19): siRNA sense strand
gaaaggcuuccagggagaa

SEQ ID NO: 550419 - RNA, 19 nt, Homo sapiens
  misc_RNA (1)...(19): siRNA sense strand
gcagcugggcuuccugguu

SEQ ID NO: 550420 - RNA, 19 nt, Homo sapiens
  misc_RNA (1)...(19): siRNA sense strand
ggagagaugguggauuaca

SEQ ID NO: 550421 - RNA, 19 nt, Homo sapiens
  misc_RNA (1)...(19): siRNA sense strand
gaugcuggcaacuccauug

SEQ ID NO: 550422 - RNA, 19 nt, Homo sapiens
  misc_RNA (1)...(19): siRNA sense strand
gcguggagcagcuggagaa

SEQ ID NO: 550423 - RNA, 19 nt, Homo sapiens
  misc_RNA (1)...(19): siRNA sense strand
uggagcagcuggagaacag

SEQ ID NO: 550424 - RNA, 19 nt, Homo sapiens
  misc_RNA (1)...(19): siRNA sense strand
ggauuuccgggucccauug

SEQ ID NO: 550425 - RNA, 19 nt, Homo sapiens
  misc_RNA (1)...(19): siRNA sense strand
gagaugguggauuacaaug

SEQ ID NO: 550426 - RNA, 19 nt, Homo sapiens
  misc_RNA (1)...(19): siRNA sense strand
uagcggagcgcacccacaa

SEQ ID NO: 550427 - RNA, 19 nt, Homo sapiens
  misc_RNA (1)...(19): siRNA sense strand
gggagaaccagggaaagga

SEQ ID NO: 550428 - RNA, 19 nt, Homo sapiens
  misc_RNA (1)...(19): siRNA sense strand
gagccaggccagcauccaa

SEQ ID NO: 550429 - RNA, 19 nt, Homo sapiens
  misc_RNA (1)...(19): siRNA sense strand
gguacuccaggaccaauug

SEQ ID NO: 550430 - RNA, 19 nt, Homo sapiens
  misc_RNA (1)...(19): siRNA sense strand
aaaggagacccugggauga

SEQ ID NO: 550431 - RNA, 19 nt, Homo sapiens
  misc_RNA (1)...(19): siRNA sense strand
gagccagggaucccaggaa

SEQ ID NO: 550432 - RNA, 19 nt, Homo sapiens
  misc_RNA (1)...(19): siRNA sense strand
gaaccagggaaaggagaga

SEQ ID NO: 550433 - RNA, 19 nt, Homo sapiens
  misc_RNA (1)...(19): siRNA sense strand
gauuacaauggaaacauca

SEQ ID NO: 550434 - RNA, 19 nt, Homo sapiens
  misc_RNA (1)...(19): siRNA sense strand
ggucaaccaggaacuagag

SEQ ID NO: 550435 - RNA, 19 nt, Homo sapiens
  misc_RNA (1)...(19): siRNA sense strand
aaggagagaugguggauua

SEQ ID NO: 550436 - RNA, 19 nt, Homo sapiens
  misc_RNA (1)...(19): siRNA sense strand
cagcugggcuuccugguuu

SEQ ID NO: 550437 - RNA, 19 nt, Homo sapiens
  misc_RNA (1)...(19): siRNA sense strand
ccaaagacaucuccaggau

SEQ ID NO: 550438 - RNA, 19 nt, Homo sapiens
  misc_RNA (1)...(19): siRNA sense strand
gagagaugguggauuacaa

SEQ ID NO: 550439 - RNA, 19 nt, Homo sapiens
  misc_RNA (1)...(19): siRNA sense strand
aaagggaccucgcgguaaa

SEQ ID NO: 550440 - RNA, 19 nt, Homo sapiens
  misc_RNA (1)...(19): siRNA sense strand
gaugguggauuacaaugga

SEQ ID NO: 550441 - RNA, 19 nt, Homo sapiens
  misc_RNA (1)...(19): siRNA sense strand
ggauuacaauggaaacauc

SEQ ID NO: 550442 - RNA, 19 nt, Homo sapiens
  misc_RNA (1)...(19): siRNA sense strand
caagggagaaccagggaaa

SEQ ID NO: 550443 - RNA, 19 nt, Homo sapiens
  misc_RNA (1)...(19): siRNA sense strand
ggaagcaggacuagaugga

SEQ ID NO: 550444 - RNA, 19 nt, Homo sapiens
  misc_RNA (1)...(19): siRNA sense strand
caaggcugcuggaacaagu

SEQ ID NO: 550445 - RNA, 19 nt, Homo sapiens
  misc_RNA (1)...(19): siRNA sense strand
gggagaagcaggugucgau

SEQ ID NO: 550446 - RNA, 19 nt, Homo sapiens
  misc_RNA (1)...(19): siRNA sense strand
ggagaacagggaccagaug

SEQ ID NO: 550447 - RNA, 19 nt, Homo sapiens
  misc_RNA (1)...(19): siRNA sense strand
acaauggaaacaucaauga

SEQ ID NO: 550448 - RNA, 19 nt, Homo sapiens
  misc_RNA (1)...(19): siRNA sense strand
gaaaggagagaugguggau

SEQ ID NO: 550449 - RNA, 19 nt, Homo sapiens
  misc_RNA (1)...(19): siRNA sense strand
cuagagguuucccuggauu

SEQ ID NO: 550450 - RNA, 19 nt, Homo sapiens
  misc_RNA (1)...(19): siRNA sense strand
gcaaauggagacggcuauu

SEQ ID NO: 550451 - RNA, 19 nt, Homo sapiens
  misc_RNA (1)...(19): siRNA sense strand
gaaaggcuuccagggagaa

SEQ ID NO: 550452 - RNA, 19 nt, Homo sapiens
  misc_RNA (1)...(19): siRNA sense strand
gcagcugggcuuccugguu

SEQ ID NO: 550453 - RNA, 19 nt, Homo sapiens
  misc_RNA (1)...(19): siRNA sense strand
ggagagaugguggauuaca

SEQ ID NO: 550454 - RNA, 19 nt, Homo sapiens
  misc_RNA (1)...(19): siRNA sense strand
gaugcuggcaacuccauug

SEQ ID NO: 550455 - RNA, 19 nt, Homo sapiens
  misc_RNA (1)...(19): siRNA sense strand
gcguggagcagcuggagaa

SEQ ID NO: 550456 - RNA, 19 nt, Homo sapiens
  misc_RNA (1)...(19): siRNA sense strand
uggagcagcuggagaacag

SEQ ID NO: 550457 - RNA, 19 nt, Homo sapiens
  misc_RNA (1)...(19): siRNA sense strand
ggauuuccgggucccauug

SEQ ID NO: 550458 - RNA, 19 nt, Homo sapiens
  misc_RNA (1)...(19): siRNA sense strand
gagaugguggauuacaaug

SEQ ID NO: 550459 - RNA, 19 nt, Homo sapiens
  misc_RNA (1)...(19): siRNA sense strand
uagcggagcgcacccacaa

SEQ ID NO: 550460 - RNA, 19 nt, Homo sapiens
  misc_RNA (1)...(19): siRNA sense strand
gggagaaccagggaaagga

SEQ ID NO: 550461 - RNA, 19 nt, Homo sapiens
  misc_RNA (1)...(19): siRNA sense strand
gagccaggccagcauccaa

SEQ ID NO: 550462 - RNA, 19 nt, Homo sapiens
  misc_RNA (1)...(19): siRNA sense strand
gguacuccaggaccaauug

SEQ ID NO: 550463 - RNA, 19 nt, Homo sapiens
  misc_RNA (1)...(19): siRNA sense strand
aaaggagacccugggauga

SEQ ID NO: 550464 - RNA, 19 nt, Homo sapiens
  misc_RNA (1)...(19): siRNA sense strand
gagccagggaucccaggaa

SEQ ID NO: 550465 - RNA, 19 nt, Homo sapiens
  misc_RNA (1)...(19): siRNA sense strand
gaaccagggaaaggagaga

SEQ ID NO: 550466 - RNA, 19 nt, Homo sapiens
  misc_RNA (1)...(19): siRNA sense strand
gauuacaauggaaacauca

SEQ ID NO: 550467 - RNA, 19 nt, Homo sapiens
  misc_RNA (1)...(19): siRNA sense strand
ggucaaccaggaacuagag

SEQ ID NO: 550468 - RNA, 19 nt, Homo sapiens
  misc_RNA (1)...(19): siRNA sense strand
aaggagagaugguggauua

SEQ ID NO: 550469 - RNA, 19 nt, Homo sapiens
  misc_RNA (1)...(19): siRNA sense strand
cagcugggcuuccugguuu

SEQ ID NO: 550470 - RNA, 19 nt, Homo sapiens
  misc_RNA (1)...(19): siRNA sense strand
ccaaagacaucuccaggau

SEQ ID NO: 550471 - RNA, 19 nt, Homo sapiens
  misc_RNA (1)...(19): siRNA sense strand
gagagaugguggauuacaa

SEQ ID NO: 550472 - RNA, 19 nt, Homo sapiens
  misc_RNA (1)...(19): siRNA sense strand
aaagggaccucgcgguaaa

SEQ ID NO: 550473 - RNA, 19 nt, Homo sapiens
  misc_RNA (1)...(19): siRNA sense strand
gaugguggauuacaaugga

SEQ ID NO: 550474 - RNA, 19 nt, Homo sapiens
  misc_RNA (1)...(19): siRNA sense strand
ggauuacaauggaaacauc

SEQ ID NO: 550475 - RNA, 19 nt, Homo sapiens
  misc_RNA (1)...(19): siRNA sense strand
caagggagaaccagggaaa

SEQ ID NO: 550476 - RNA, 19 nt, Homo sapiens
  misc_RNA (1)...(19): siRNA sense strand
ggaagcaggacuagaugga

SEQ ID NO: 550477 - RNA, 19 nt, Homo sapiens
  misc_RNA (1)...(19): siRNA sense strand
caaggcugcuggaacaagu

SEQ ID NO: 550478 - RNA, 19 nt, Homo sapiens
  misc_RNA (1)...(19): siRNA sense strand
gggagaagcaggugucgau

SEQ ID NO: 550479 - RNA, 19 nt, Homo sapiens
  misc_RNA (1)...(19): siRNA sense strand
ggagaacagggaccagaug

SEQ ID NO: 550480 - RNA, 19 nt, Homo sapiens
  misc_RNA (1)...(19): siRNA sense strand
acaauggaaacaucaauga

SEQ ID NO: 550481 - RNA, 19 nt, Homo sapiens
  misc_RNA (1)...(19): siRNA sense strand
gaaaggagagaugguggau

SEQ ID NO: 550482 - RNA, 19 nt, Homo sapiens
  misc_RNA (1)...(19): siRNA sense strand
cuagagguuucccuggauu

SEQ ID NO: 550483 - RNA, 19 nt, Homo sapiens
  misc_RNA (1)...(19): siRNA sense strand
gcaaauggagacggcuauu

SEQ ID NO: 550484 - RNA, 19 nt, Homo sapiens
  misc_RNA (1)...(19): siRNA sense strand
gaaaggcuuccagggagaa

SEQ ID NO: 550485 - RNA, 19 nt, Homo sapiens
  misc_RNA (1)...(19): siRNA sense strand
gcagcugggcuuccugguu

SEQ ID NO: 550486 - RNA, 19 nt, Homo sapiens
  misc_RNA (1)...(19): siRNA sense strand
ggagagaugguggauuaca

SEQ ID NO: 550487 - RNA, 19 nt, Homo sapiens
  misc_RNA (1)...(19): siRNA sense strand
gaugcuggcaacuccauug

SEQ ID NO: 550488 - RNA, 19 nt, Homo sapiens
  misc_RNA (1)...(19): siRNA sense strand
gcguggagcagcuggagaa

SEQ ID NO: 550489 - RNA, 19 nt, Homo sapiens
  misc_RNA (1)...(19): siRNA sense strand
uggagcagcuggagaacag

SEQ ID NO: 550490 - RNA, 19 nt, Homo sapiens
  misc_RNA (1)...(19): siRNA sense strand
ggauuuccgggucccauug

SEQ ID NO: 550491 - RNA, 19 nt, Homo sapiens
  misc_RNA (1)...(19): siRNA sense strand
gagaugguggauuacaaug

SEQ ID NO: 550492 - RNA, 19 nt, Homo sapiens
  misc_RNA (1)...(19): siRNA sense strand
uagcggagcgcacccacaa

SEQ ID NO: 550493 - RNA, 19 nt, Homo sapiens
  misc_RNA (1)...(19): siRNA sense strand
gggagaaccagggaaagga

SEQ ID NO: 550494 - RNA, 19 nt, Homo sapiens
  misc_RNA (1)...(19): siRNA sense strand
gagccaggccagcauccaa

SEQ ID NO: 550495 - RNA, 19 nt, Homo sapiens
  misc_RNA (1)...(19): siRNA sense strand
gguacuccaggaccaauug

SEQ ID NO: 550496 - RNA, 19 nt, Homo sapiens
  misc_RNA (1)...(19): siRNA sense strand
aaaggagacccugggauga

SEQ ID NO: 550497 - RNA, 19 nt, Homo sapiens
  misc_RNA (1)...(19): siRNA sense strand
gagccagggaucccaggaa

SEQ ID NO: 550498 - RNA, 19 nt, Homo sapiens
  misc_RNA (1)...(19): siRNA sense strand
gaaccagggaaaggagaga

SEQ ID NO: 550499 - RNA, 19 nt, Homo sapiens
  misc_RNA (1)...(19): siRNA sense strand
gauuacaauggaaacauca

SEQ ID NO: 550500 - RNA, 19 nt, Homo sapiens
  misc_RNA (1)...(19): siRNA sense strand
ggucaaccaggaacuagag

SEQ ID NO: 550501 - RNA, 19 nt, Homo sapiens
  misc_RNA (1)...(19): siRNA sense strand
aaggagagaugguggauua

SEQ ID NO: 550502 - RNA, 19 nt, Homo sapiens
  misc_RNA (1)...(19): siRNA sense strand
cagcugggcuuccugguuu

SEQ ID NO: 550503 - RNA, 19 nt, Homo sapiens
  misc_RNA (1)...(19): siRNA sense strand
ccaaagacaucuccaggau

SEQ ID NO: 550504 - RNA, 19 nt, Homo sapiens
  misc_RNA (1)...(19): siRNA sense strand
gagagaugguggauuacaa

SEQ ID NO: 550505 - RNA, 19 nt, Homo sapiens
  misc_RNA (1)...(19): siRNA sense strand
aaagggaccucgcgguaaa

SEQ ID NO: 550506 - RNA, 19 nt, Homo sapiens
  misc_RNA (1)...(19): siRNA sense strand
gaugguggauuacaaugga

SEQ ID NO: 550507 - RNA, 19 nt, Homo sapiens
  misc_RNA (1)...(19): siRNA sense strand
ggauuacaauggaaacauc

SEQ ID NO: 550508 - RNA, 19 nt, Homo sapiens
  misc_RNA (1)...(19): siRNA sense strand
caagggagaaccagggaaa

SEQ ID NO: 550509 - RNA, 19 nt, Homo sapiens
  misc_RNA (1)...(19): siRNA sense strand
ggaagcaggacuagaugga

SEQ ID NO: 550510 - RNA, 19 nt, Homo sapiens
  misc_RNA (1)...(19): siRNA sense strand
caaggcugcuggaacaagu

SEQ ID NO: 550511 - RNA, 19 nt, Homo sapiens
  misc_RNA (1)...(19): siRNA sense strand
gggagaagcaggugucgau

SEQ ID NO: 550512 - RNA, 19 nt, Homo sapiens
  misc_RNA (1)...(19): siRNA sense strand
ggagaacagggaccagaug

SEQ ID NO: 550513 - RNA, 19 nt, Homo sapiens
  misc_RNA (1)...(19): siRNA sense strand
acaauggaaacaucaauga

SEQ ID NO: 550514 - RNA, 19 nt, Homo sapiens
  misc_RNA (1)...(19): siRNA sense strand
gaaaggagagaugguggau

SEQ ID NO: 550515 - RNA, 19 nt, Homo sapiens
  misc_RNA (1)...(19): siRNA sense strand
cuagagguuucccuggauu

SEQ ID NO: 550516 - RNA, 19 nt, Homo sapiens
  misc_RNA (1)...(19): siRNA sense strand
gcaaauggagacggcuauu

SEQ ID NO: 550517 - RNA, 19 nt, Homo sapiens
  misc_RNA (1)...(19): siRNA sense strand
gaaaggcuuccagggagaa

SEQ ID NO: 550518 - RNA, 19 nt, Homo sapiens
  misc_RNA (1)...(19): siRNA sense strand
gcagcugggcuuccugguu

SEQ ID NO: 550519 - RNA, 19 nt, Homo sapiens
  misc_RNA (1)...(19): siRNA sense strand
ggagagaugguggauuaca

SEQ ID NO: 550520 - RNA, 19 nt, Homo sapiens
  misc_RNA (1)...(19): siRNA sense strand
gaugcuggcaacuccauug

SEQ ID NO: 550521 - RNA, 19 nt, Homo sapiens
  misc_RNA (1)...(19): siRNA sense strand
gcguggagcagcuggagaa

SEQ ID NO: 550522 - RNA, 19 nt, Homo sapiens
  misc_RNA (1)...(19): siRNA sense strand
uggagcagcuggagaacag

SEQ ID NO: 550523 - RNA, 19 nt, Homo sapiens
  misc_RNA (1)...(19): siRNA sense strand
ggauuuccgggucccauug

SEQ ID NO: 550524 - RNA, 19 nt, Homo sapiens
  misc_RNA (1)...(19): siRNA sense strand
gagaugguggauuacaaug

SEQ ID NO: 550525 - RNA, 19 nt, Homo sapiens
  misc_RNA (1)...(19): siRNA sense strand
uagcggagcgcacccacaa

SEQ ID NO: 550526 - RNA, 19 nt, Homo sapiens
  misc_RNA (1)...(19): siRNA sense strand
gggagaaccagggaaagga

SEQ ID NO: 550527 - RNA, 19 nt, Homo sapiens
  misc_RNA (1)...(19): siRNA sense strand
gagccaggccagcauccaa

SEQ ID NO: 550528 - RNA, 19 nt, Homo sapiens
  misc_RNA (1)...(19): siRNA sense strand
gguacuccaggaccaauug

SEQ ID NO: 550529 - RNA, 19 nt, Homo sapiens
  misc_RNA (1)...(19): siRNA sense strand
aaaggagacccugggauga

SEQ ID NO: 550530 - RNA, 19 nt, Homo sapiens
  misc_RNA (1)...(19): siRNA sense strand
gagccagggaucccaggaa

SEQ ID NO: 550531 - RNA, 19 nt, Homo sapiens
  misc_RNA (1)...(19): siRNA sense strand
gaaccagggaaaggagaga

SEQ ID NO: 550532 - RNA, 19 nt, Homo sapiens
  misc_RNA (1)...(19): siRNA sense strand
gauuacaauggaaacauca

SEQ ID NO: 550533 - RNA, 19 nt, Homo sapiens
  misc_RNA (1)...(19): siRNA sense strand
ggucaaccaggaacuagag

SEQ ID NO: 550534 - RNA, 19 nt, Homo sapiens
  misc_RNA (1)...(19): siRNA sense strand
aaggagagaugguggauua

SEQ ID NO: 550535 - RNA, 19 nt, Homo sapiens
  misc_RNA (1)...(19): siRNA sense strand
cagcugggcuuccugguuu

SEQ ID NO: 550536 - RNA, 19 nt, Homo sapiens
  misc_RNA (1)...(19): siRNA sense strand
ccaaagacaucuccaggau

SEQ ID NO: 550537 - RNA, 19 nt, Homo sapiens
  misc_RNA (1)...(19): siRNA sense strand
gagagaugguggauuacaa

SEQ ID NO: 550538 - RNA, 19 nt, Homo sapiens
  misc_RNA (1)...(19): siRNA sense strand
aaagggaccucgcgguaaa

SEQ ID NO: 550539 - RNA, 19 nt, Homo sapiens
  misc_RNA (1)...(19): siRNA sense strand
gaugguggauuacaaugga

SEQ ID NO: 550540 - RNA, 19 nt, Homo sapiens
  misc_RNA (1)...(19): siRNA sense strand
ggauuacaauggaaacauc

SEQ ID NO: 550541 - RNA, 19 nt, Homo sapiens
  misc_RNA (1)...(19): siRNA sense strand
caagggagaaccagggaaa

SEQ ID NO: 550542 - RNA, 19 nt, Homo sapiens
  misc_RNA (1)...(19): siRNA sense strand
ggaagcaggacuagaugga

SEQ ID NO: 550543 - RNA, 19 nt, Homo sapiens
  misc_RNA (1)...(19): siRNA sense strand
caaggcugcuggaacaagu

SEQ ID NO: 550544 - RNA, 19 nt, Homo sapiens
  misc_RNA (1)...(19): siRNA sense strand
gggagaagcaggugucgau

SEQ ID NO: 550545 - RNA, 19 nt, Homo sapiens
  misc_RNA (1)...(19): siRNA sense strand
ggagaacagggaccagaug

SEQ ID NO: 550546 - RNA, 19 nt, Homo sapiens
  misc_RNA (1)...(19): siRNA sense strand
acaauggaaacaucaauga

SEQ ID NO: 550547 - RNA, 19 nt, Homo sapiens
  misc_RNA (1)...(19): siRNA sense strand
gaaaggagagaugguggau

SEQ ID NO: 550548 - RNA, 19 nt, Homo sapiens
  misc_RNA (1)...(19): siRNA sense strand
cuagagguuucccuggauu

SEQ ID NO: 550549 - RNA, 19 nt, Homo sapiens
  misc_RNA (1)...(19): siRNA sense strand
gcaaauggagacggcuauu

SEQ ID NO: 550550 - RNA, 19 nt, Homo sapiens
  misc_RNA (1)...(19): siRNA sense strand
gaaaggcuuccagggagaa

SEQ ID NO: 550551 - RNA, 19 nt, Homo sapiens
  misc_RNA (1)...(19): siRNA sense strand
gcagcugggcuuccugguu

SEQ ID NO: 550552 - RNA, 19 nt, Homo sapiens
  misc_RNA (1)...(19): siRNA sense strand
ggagagaugguggauuaca

SEQ ID NO: 550553 - RNA, 19 nt, Homo sapiens
  misc_RNA (1)...(19): siRNA sense strand
gaugcuggcaacuccauug

SEQ ID NO: 550554 - RNA, 19 nt, Homo sapiens
  misc_RNA (1)...(19): siRNA sense strand
gcguggagcagcuggagaa

SEQ ID NO: 550555 - RNA, 19 nt, Homo sapiens
  misc_RNA (1)...(19): siRNA sense strand
uggagcagcuggagaacag

SEQ ID NO: 550556 - RNA, 19 nt, Homo sapiens
  misc_RNA (1)...(19): siRNA sense strand
ggauuuccgggucccauug

SEQ ID NO: 550557 - RNA, 19 nt, Homo sapiens
  misc_RNA (1)...(19): siRNA sense strand
gagaugguggauuacaaug

SEQ ID NO: 550558 - RNA, 19 nt, Homo sapiens
  misc_RNA (1)...(19): siRNA sense strand
uagcggagcgcacccacaa

SEQ ID NO: 550559 - RNA, 19 nt, Homo sapiens
  misc_RNA (1)...(19): siRNA sense strand
gggagaaccagggaaagga

SEQ ID NO: 550560 - RNA, 19 nt, Homo sapiens
  misc_RNA (1)...(19): siRNA sense strand
gagccaggccagcauccaa

SEQ ID NO: 550561 - RNA, 19 nt, Homo sapiens
  misc_RNA (1)...(19): siRNA sense strand
gguacuccaggaccaauug

SEQ ID NO: 550562 - RNA, 19 nt, Homo sapiens
  misc_RNA (1)...(19): siRNA sense strand
aaaggagacccugggauga

SEQ ID NO: 550563 - RNA, 19 nt, Homo sapiens
  misc_RNA (1)...(19): siRNA sense strand
gagccagggaucccaggaa

SEQ ID NO: 550564 - RNA, 19 nt, Homo sapiens
  misc_RNA (1)...(19): siRNA sense strand
gaaccagggaaaggagaga

SEQ ID NO: 550565 - RNA, 19 nt, Homo sapiens
  misc_RNA (1)...(19): siRNA sense strand
gauuacaauggaaacauca

SEQ ID NO: 550566 - RNA, 19 nt, Homo sapiens
  misc_RNA (1)...(19): siRNA sense strand
ggucaaccaggaacuagag

SEQ ID NO: 550567 - RNA, 19 nt, Homo sapiens
  misc_RNA (1)...(19): siRNA sense strand
aaggagagaugguggauua

SEQ ID NO: 550568 - RNA, 19 nt, Homo sapiens
  misc_RNA (1)...(19): siRNA sense strand
cagcugggcuuccugguuu

SEQ ID NO: 550569 - RNA, 19 nt, Homo sapiens
  misc_RNA (1)...(19): siRNA sense strand
ccaaagacaucuccaggau

SEQ ID NO: 550570 - RNA, 19 nt, Homo sapiens
  misc_RNA (1)...(19): siRNA sense strand
gagagaugguggauuacaa

SEQ ID NO: 550571 - RNA, 19 nt, Homo sapiens
  misc_RNA (1)...(19): siRNA sense strand
aaagggaccucgcgguaaa

SEQ ID NO: 550572 - RNA, 19 nt, Homo sapiens
  misc_RNA (1)...(19): siRNA sense strand
gaugguggauuacaaugga

SEQ ID NO: 550573 - RNA, 19 nt, Homo sapiens
  misc_RNA (1)...(19): siRNA sense strand
ggauuacaauggaaacauc

SEQ ID NO: 550574 - RNA, 19 nt, Homo sapiens
  misc_RNA (1)...(19): siRNA sense strand
caagggagaaccagggaaa

SEQ ID NO: 550575 - RNA, 19 nt, Homo sapiens
  misc_RNA (1)...(19): siRNA sense strand
ggaagcaggacuagaugga

SEQ ID NO: 550576 - RNA, 19 nt, Homo sapiens
  misc_RNA (1)...(19): siRNA sense strand
caaggcugcuggaacaagu

SEQ ID NO: 550577 - RNA, 19 nt, Homo sapiens
  misc_RNA (1)...(19): siRNA sense strand
gggagaagcaggugucgau

SEQ ID NO: 550578 - RNA, 19 nt, Homo sapiens
  misc_RNA (1)...(19): siRNA sense strand
ggagaacagggaccagaug

SEQ ID NO: 550579 - RNA, 19 nt, Homo sapiens
  misc_RNA (1)...(19): siRNA sense strand
acaauggaaacaucaauga

SEQ ID NO: 550580 - RNA, 19 nt, Homo sapiens
  misc_RNA (1)...(19): siRNA sense strand
gaaaggagagaugguggau

SEQ ID NO: 550581 - RNA, 19 nt, Homo sapiens
  misc_RNA (1)...(19): siRNA sense strand
cuagagguuucccuggauu

SEQ ID NO: 550582 - RNA, 19 nt, Homo sapiens
  misc_RNA (1)...(19): siRNA sense strand
gcaaauggagacggcuauu

SEQ ID NO: 550583 - RNA, 19 nt, Homo sapiens
  misc_RNA (1)...(19): siRNA sense strand
gaaaggcuuccagggagaa

SEQ ID NO: 550584 - RNA, 19 nt, Homo sapiens
  misc_RNA (1)...(19): siRNA sense strand
gcagcugggcuuccugguu

SEQ ID NO: 550585 - RNA, 19 nt, Homo sapiens
  misc_RNA (1)...(19): siRNA sense strand
ggagagaugguggauuaca

SEQ ID NO: 550586 - RNA, 19 nt, Homo sapiens
  misc_RNA (1)...(19): siRNA sense strand
gaugcuggcaacuccauug

SEQ ID NO: 550587 - RNA, 19 nt, Homo sapiens
  misc_RNA (1)...(19): siRNA sense strand
gcguggagcagcuggagaa

SEQ ID NO: 550588 - RNA, 19 nt, Homo sapiens
  misc_RNA (1)...(19): siRNA sense strand
uggagcagcuggagaacag

SEQ ID NO: 550589 - RNA, 19 nt, Homo sapiens
  misc_RNA (1)...(19): siRNA sense strand
ggauuuccgggucccauug

SEQ ID NO: 550590 - RNA, 19 nt, Homo sapiens
  misc_RNA (1)...(19): siRNA sense strand
gagaugguggauuacaaug

SEQ ID NO: 550591 - RNA, 19 nt, Homo sapiens
  misc_RNA (1)...(19): siRNA sense strand
uagcggagcgcacccacaa

SEQ ID NO: 550592 - RNA, 19 nt, Homo sapiens
  misc_RNA (1)...(19): siRNA sense strand
gggagaaccagggaaagga

SEQ ID NO: 550593 - RNA, 19 nt, Homo sapiens
  misc_RNA (1)...(19): siRNA sense strand
gagccaggccagcauccaa

SEQ ID NO: 550594 - RNA, 19 nt, Homo sapiens
  misc_RNA (1)...(19): siRNA sense strand
gguacuccaggaccaauug

SEQ ID NO: 550595 - RNA, 19 nt, Homo sapiens
  misc_RNA (1)...(19): siRNA sense strand
aaaggagacccugggauga

SEQ ID NO: 550596 - RNA, 19 nt, Homo sapiens
  misc_RNA (1)...(19): siRNA sense strand
gagccagggaucccaggaa

SEQ ID NO: 550597 - RNA, 19 nt, Homo sapiens
  misc_RNA (1)...(19): siRNA sense strand
gaaccagggaaaggagaga

SEQ ID NO: 550598 - RNA, 19 nt, Homo sapiens
  misc_RNA (1)...(19): siRNA sense strand
gauuacaauggaaacauca

SEQ ID NO: 550599 - RNA, 19 nt, Homo sapiens
  misc_RNA (1)...(19): siRNA sense strand
ggucaaccaggaacuagag

SEQ ID NO: 550600 - RNA, 19 nt, Homo sapiens
  misc_RNA (1)...(19): siRNA sense strand
aaggagagaugguggauua

SEQ ID NO: 550601 - RNA, 19 nt, Homo sapiens
  misc_RNA (1)...(19): siRNA sense strand
cagcugggcuuccugguuu

SEQ ID NO: 550602 - RNA, 19 nt, Homo sapiens
  misc_RNA (1)...(19): siRNA sense strand
ccaaagacaucuccaggau

SEQ ID NO: 550603 - RNA, 19 nt, Homo sapiens
  misc_RNA (1)...(19): siRNA sense strand
gagagaugguggauuacaa

SEQ ID NO: 550604 - RNA, 19 nt, Homo sapiens
  misc_RNA (1)...(19): siRNA sense strand
aaagggaccucgcgguaaa

SEQ ID NO: 550605 - RNA, 19 nt, Homo sapiens
  misc_RNA (1)...(19): siRNA sense strand
gaugguggauuacaaugga

SEQ ID NO: 550606 - RNA, 19 nt, Homo sapiens
  misc_RNA (1)...(19): siRNA sense strand
ggauuacaauggaaacauc

SEQ ID NO: 550607 - RNA, 19 nt, Homo sapiens
  misc_RNA (1)...(19): siRNA sense strand
caagggagaaccagggaaa

SEQ ID NO: 550608 - RNA, 19 nt, Homo sapiens
  misc_RNA (1)...(19): siRNA sense strand
ggaagcaggacuagaugga

SEQ ID NO: 550609 - RNA, 19 nt, Homo sapiens
  misc_RNA (1)...(19): siRNA sense strand
caaggcugcuggaacaagu

SEQ ID NO: 550610 - RNA, 19 nt, Homo sapiens
  misc_RNA (1)...(19): siRNA sense strand
gggagaagcaggugucgau

SEQ ID NO: 550611 - RNA, 19 nt, Homo sapiens
  misc_RNA (1)...(19): siRNA sense strand
ggagaacagggaccagaug

SEQ ID NO: 550612 - RNA, 19 nt, Homo sapiens
  misc_RNA (1)...(19): siRNA sense strand
acaauggaaacaucaauga

SEQ ID NO: 550613 - RNA, 19 nt, Homo sapiens
  misc_RNA (1)...(19): siRNA sense strand
gaaaggagagaugguggau

SEQ ID NO: 550614 - RNA, 19 nt, Homo sapiens
  misc_RNA (1)...(19): siRNA sense strand
cuagagguuucccuggauu

SEQ ID NO: 550615 - RNA, 19 nt, Homo sapiens
  misc_RNA (1)...(19): siRNA sense strand
gcaaauggagacggcuauu

SEQ ID NO: 550616 - RNA, 19 nt, Homo sapiens
  misc_RNA (1)...(19): siRNA sense strand
gaaaggcuuccagggagaa

SEQ ID NO: 550617 - RNA, 19 nt, Homo sapiens
  misc_RNA (1)...(19): siRNA sense strand
gcagcugggcuuccugguu

SEQ ID NO: 550618 - RNA, 19 nt, Homo sapiens
  misc_RNA (1)...(19): siRNA sense strand
ggagagaugguggauuaca

SEQ ID NO: 550619 - RNA, 19 nt, Homo sapiens
  misc_RNA (1)...(19): siRNA sense strand
gaugcuggcaacuccauug

SEQ ID NO: 550620 - RNA, 19 nt, Homo sapiens
  misc_RNA (1)...(19): siRNA sense strand
gcguggagcagcuggagaa

SEQ ID NO: 550621 - RNA, 19 nt, Homo sapiens
  misc_RNA (1)...(19): siRNA sense strand
uggagcagcuggagaacag

SEQ ID NO: 550622 - RNA, 19 nt, Homo sapiens
  misc_RNA (1)...(19): siRNA sense strand
ggauuuccgggucccauug

SEQ ID NO: 550623 - RNA, 19 nt, Homo sapiens
  misc_RNA (1)...(19): siRNA sense strand
gagaugguggauuacaaug

SEQ ID NO: 550624 - RNA, 19 nt, Homo sapiens
  misc_RNA (1)...(19): siRNA sense strand
uagcggagcgcacccacaa

SEQ ID NO: 550625 - RNA, 19 nt, Homo sapiens
  misc_RNA (1)...(19): siRNA sense strand
gggagaaccagggaaagga

SEQ ID NO: 550626 - RNA, 19 nt, Homo sapiens
  misc_RNA (1)...(19): siRNA sense strand
gagccaggccagcauccaa

SEQ ID NO: 550627 - RNA, 19 nt, Homo sapiens
  misc_RNA (1)...(19): siRNA sense strand
gguacuccaggaccaauug

SEQ ID NO: 550628 - RNA, 19 nt, Homo sapiens
  misc_RNA (1)...(19): siRNA sense strand
aaaggagacccugggauga

SEQ ID NO: 550629 - RNA, 19 nt, Homo sapiens
  misc_RNA (1)...(19): siRNA sense strand
gagccagggaucccaggaa

SEQ ID NO: 550630 - RNA, 19 nt, Homo sapiens
  misc_RNA (1)...(19): siRNA sense strand
gaaccagggaaaggagaga

SEQ ID NO: 550631 - RNA, 19 nt, Homo sapiens
  misc_RNA (1)...(19): siRNA sense strand
gauuacaauggaaacauca

SEQ ID NO: 550632 - RNA, 19 nt, Homo sapiens
  misc_RNA (1)...(19): siRNA sense strand
ggucaaccaggaacuagag

SEQ ID NO: 550633 - RNA, 19 nt, Homo sapiens
  misc_RNA (1)...(19): siRNA sense strand
aaggagagaugguggauua

SEQ ID NO: 550634 - RNA, 19 nt, Homo sapiens
  misc_RNA (1)...(19): siRNA sense strand
cagcugggcuuccugguuu

SEQ ID NO: 550635 - RNA, 19 nt, Homo sapiens
  misc_RNA (1)...(19): siRNA sense strand
ccaaagacaucuccaggau

SEQ ID NO: 550636 - RNA, 19 nt, Homo sapiens
  misc_RNA (1)...(19): siRNA sense strand
gagagaugguggauuacaa

SEQ ID NO: 550637 - RNA, 19 nt, Homo sapiens
  misc_RNA (1)...(19): siRNA sense strand
aaagggaccucgcgguaaa

SEQ ID NO: 550638 - RNA, 19 nt, Homo sapiens
  misc_RNA (1)...(19): siRNA sense strand
gaugguggauuacaaugga

SEQ ID NO: 550639 - RNA, 19 nt, Homo sapiens
  misc_RNA (1)...(19): siRNA sense strand
ggauuacaauggaaacauc

SEQ ID NO: 550640 - RNA, 19 nt, Homo sapiens
  misc_RNA (1)...(19): siRNA sense strand
gggcgaagauggcuuacca

SEQ ID NO: 550641 - RNA, 19 nt, Homo sapiens
  misc_RNA (1)...(19): siRNA sense strand
caagggagaaccagggaaa

SEQ ID NO: 550642 - RNA, 19 nt, Homo sapiens
  misc_RNA (1)...(19): siRNA sense strand
ggaagcaggacuagaugga

SEQ ID NO: 550643 - RNA, 19 nt, Homo sapiens
  misc_RNA (1)...(19): siRNA sense strand
caaggcugcuggaacaagu

SEQ ID NO: 550644 - RNA, 19 nt, Homo sapiens
  misc_RNA (1)...(19): siRNA sense strand
gggagaagcaggugucgau

SEQ ID NO: 550645 - RNA, 19 nt, Homo sapiens
  misc_RNA (1)...(19): siRNA sense strand
ggagaacagggaccagaug

SEQ ID NO: 550646 - RNA, 19 nt, Homo sapiens
  misc_RNA (1)...(19): siRNA sense strand
acaauggaaacaucaauga

SEQ ID NO: 550647 - RNA, 19 nt, Homo sapiens
  misc_RNA (1)...(19): siRNA sense strand
gaaaggagagaugguggau

SEQ ID NO: 550648 - RNA, 19 nt, Homo sapiens
  misc_RNA (1)...(19): siRNA sense strand
cuagagguuucccuggauu

SEQ ID NO: 550649 - RNA, 19 nt, Homo sapiens
  misc_RNA (1)...(19): siRNA sense strand
gcaaauggagacggcuauu

SEQ ID NO: 550650 - RNA, 19 nt, Homo sapiens
  misc_RNA (1)...(19): siRNA sense strand
gaaaggcuuccagggagaa

SEQ ID NO: 550651 - RNA, 19 nt, Homo sapiens
  misc_RNA (1)...(19): siRNA sense strand
gcagcugggcuuccugguu

SEQ ID NO: 550652 - RNA, 19 nt, Homo sapiens
  misc_RNA (1)...(19): siRNA sense strand
ggagagaugguggauuaca

SEQ ID NO: 550653 - RNA, 19 nt, Homo sapiens
  misc_RNA (1)...(19): siRNA sense strand
gaugcuggcaacuccauug

SEQ ID NO: 550654 - RNA, 19 nt, Homo sapiens
  misc_RNA (1)...(19): siRNA sense strand
gcguggagcagcuggagaa

SEQ ID NO: 550655 - RNA, 19 nt, Homo sapiens
  misc_RNA (1)...(19): siRNA sense strand
uggagcagcuggagaacag

SEQ ID NO: 550656 - RNA, 19 nt, Homo sapiens
  misc_RNA (1)...(19): siRNA sense strand
ggauuuccgggucccauug

SEQ ID NO: 550657 - RNA, 19 nt, Homo sapiens
  misc_RNA (1)...(19): siRNA sense strand
gagaugguggauuacaaug

SEQ ID NO: 550658 - RNA, 19 nt, Homo sapiens
  misc_RNA (1)...(19): siRNA sense strand
uagcggagcgcacccacaa

SEQ ID NO: 550659 - RNA, 19 nt, Homo sapiens
  misc_RNA (1)...(19): siRNA sense strand
gggagaaccagggaaagga

SEQ ID NO: 550660 - RNA, 19 nt, Homo sapiens
  misc_RNA (1)...(19): siRNA sense strand
gagccaggccagcauccaa

SEQ ID NO: 550661 - RNA, 19 nt, Homo sapiens
  misc_RNA (1)...(19): siRNA sense strand
gguacuccaggaccaauug

SEQ ID NO: 550662 - RNA, 19 nt, Homo sapiens
  misc_RNA (1)...(19): siRNA sense strand
aaaggagacccugggauga

SEQ ID NO: 550663 - RNA, 19 nt, Homo sapiens
  misc_RNA (1)...(19): siRNA sense strand
gagccagggaucccaggaa

SEQ ID NO: 550664 - RNA, 19 nt, Homo sapiens
  misc_RNA (1)...(19): siRNA sense strand
gaaccagggaaaggagaga

SEQ ID NO: 550665 - RNA, 19 nt, Homo sapiens
  misc_RNA (1)...(19): siRNA sense strand
gauuacaauggaaacauca

SEQ ID NO: 550666 - RNA, 19 nt, Homo sapiens
  misc_RNA (1)...(19): siRNA sense strand
ggucaaccaggaacuagag

SEQ ID NO: 550667 - RNA, 19 nt, Homo sapiens
  misc_RNA (1)...(19): siRNA sense strand
caagagagcuggucaguug

SEQ ID NO: 550668 - RNA, 19 nt, Homo sapiens
  misc_RNA (1)...(19): siRNA sense strand
ggaaaucacuucaccaaga

SEQ ID NO: 550669 - RNA, 19 nt, Homo sapiens
  misc_RNA (1)...(19): siRNA sense strand
gaauugauuucccucuuua

SEQ ID NO: 550670 - RNA, 19 nt, Homo sapiens
  misc_RNA (1)...(19): siRNA sense strand
gcagauggcugggcuaaga

SEQ ID NO: 550671 - RNA, 19 nt, Homo sapiens
  misc_RNA (1)...(19): siRNA sense strand
ggaaaggcccgaaguaaga

SEQ ID NO: 550672 - RNA, 19 nt, Homo sapiens
  misc_RNA (1)...(19): siRNA sense strand
cuuaauaacuugaguguga

SEQ ID NO: 550673 - RNA, 19 nt, Homo sapiens
  misc_RNA (1)...(19): siRNA sense strand
gaaaucacuucaccaagau

SEQ ID NO: 550674 - RNA, 19 nt, Homo sapiens
  misc_RNA (1)...(19): siRNA sense strand
uaaaguaccaucagaauug

SEQ ID NO: 550675 - RNA, 19 nt, Homo sapiens
  misc_RNA (1)...(19): siRNA sense strand
ggacucagcugugcagaug

SEQ ID NO: 550676 - RNA, 19 nt, Homo sapiens
  misc_RNA (1)...(19): siRNA sense strand
ucaaagcacuagcaaauca

SEQ ID NO: 550677 - RNA, 19 nt, Homo sapiens
  misc_RNA (1)...(19): siRNA sense strand
guacaucagucaagugugu

SEQ ID NO: 550678 - RNA, 19 nt, Homo sapiens
  misc_RNA (1)...(19): siRNA sense strand
gauagagagauucuucuua

SEQ ID NO: 550679 - RNA, 19 nt, Homo sapiens
  misc_RNA (1)...(19): siRNA sense strand
gcuggucaguuguaaagua

SEQ ID NO: 550680 - RNA, 19 nt, Homo sapiens
  misc_RNA (1)...(19): siRNA sense strand
caacaugacugugacuaau

SEQ ID NO: 550681 - RNA, 19 nt, Homo sapiens
  misc_RNA (1)...(19): siRNA sense strand
gaagagacgagaacgagaa

SEQ ID NO: 550682 - RNA, 19 nt, Homo sapiens
  misc_RNA (1)...(19): siRNA sense strand
acaaugcccuuaauaacuu

SEQ ID NO: 550683 - RNA, 19 nt, Homo sapiens
  misc_RNA (1)...(19): siRNA sense strand
acaaugaucugguggugaa

SEQ ID NO: 550684 - RNA, 19 nt, Homo sapiens
  misc_RNA (1)...(19): siRNA sense strand
ucaccaagauacagauuau

SEQ ID NO: 550685 - RNA, 19 nt, Homo sapiens
  misc_RNA (1)...(19): siRNA sense strand
ggaaagaauucagcagaag

SEQ ID NO: 550686 - RNA, 19 nt, Homo sapiens
  misc_RNA (1)...(19): siRNA sense strand
agaauugauuucccucuuu

SEQ ID NO: 550687 - RNA, 19 nt, Homo sapiens
  misc_RNA (1)...(19): siRNA sense strand
agaaugggauagagagauu

SEQ ID NO: 550688 - RNA, 19 nt, Homo sapiens
  misc_RNA (1)...(19): siRNA sense strand
guaaaguaccaucagaauu

SEQ ID NO: 550689 - RNA, 19 nt, Homo sapiens
  misc_RNA (1)...(19): siRNA sense strand
acaaaagaccccauaauua

SEQ ID NO: 550690 - RNA, 19 nt, Homo sapiens
  misc_RNA (1)...(19): siRNA sense strand
gaaaggagcuaaaacuaac

SEQ ID NO: 550691 - RNA, 19 nt, Homo sapiens
  misc_RNA (1)...(19): siRNA sense strand
gaucugguggugaaaguaa

SEQ ID NO: 550692 - RNA, 19 nt, Homo sapiens
  misc_RNA (1)...(19): siRNA sense strand
ucaacacgcugaaggaaca

SEQ ID NO: 550693 - RNA, 19 nt, Homo sapiens
  misc_RNA (1)...(19): siRNA sense strand
caacauuugcuuuccuauu

SEQ ID NO: 550694 - RNA, 19 nt, Homo sapiens
  misc_RNA (1)...(19): siRNA sense strand
gagagcuggucaguuguaa

SEQ ID NO: 550695 - RNA, 19 nt, Homo sapiens
  misc_RNA (1)...(19): siRNA sense strand
aaucaaagcacuagcaaau

SEQ ID NO: 550696 - RNA, 19 nt, Homo sapiens
  misc_RNA (1)...(19): siRNA sense strand
gaaagaauucagcagaagu

SEQ ID NO: 550697 - RNA, 19 nt, Homo sapiens
  misc_RNA (1)...(19): siRNA sense strand
gaaaguaaaaguccugaaa

SEQ ID NO: 550698 - RNA, 19 nt, Homo sapiens
  misc_RNA (1)...(19): siRNA sense strand
caaaagaccccauaauuag

SEQ ID NO: 550699 - RNA, 19 nt, Homo sapiens
  misc_RNA (1)...(19): siRNA sense strand
aacauuugcuuuccuauuc

SEQ ID NO: 550700 - RNA, 19 nt, Homo sapiens
  misc_RNA (1)...(19): siRNA sense strand
aaaguaccaucagaauuga

SEQ ID NO: 550701 - RNA, 19 nt, Homo sapiens
  misc_RNA (1)...(19): siRNA sense strand
gcgaacaaaugauccuuuu

SEQ ID NO: 550702 - RNA, 19 nt, Homo sapiens
  misc_RNA (1)...(19): siRNA sense strand
cuuaauauccuuacccuau

SEQ ID NO: 550703 - RNA, 19 nt, Homo sapiens
  misc_RNA (1)...(19): siRNA sense strand
cagaauugauuucccucuu

SEQ ID NO: 550704 - RNA, 19 nt, Homo sapiens
  misc_RNA (1)...(19): siRNA sense strand
ggucaagccugaggugagu

SEQ ID NO: 550705 - RNA, 19 nt, Homo sapiens
  misc_RNA (1)...(19): siRNA sense strand
guaaaaguccugaaaguau

SEQ ID NO: 550706 - RNA, 19 nt, Homo sapiens
  misc_RNA (1)...(19): siRNA sense strand
gagucuggaguuuguguua

SEQ ID NO: 550707 - RNA, 19 nt, Homo sapiens
  misc_RNA (1)...(19): siRNA sense strand
ggcuaagacuguuaaccaa

SEQ ID NO: 550708 - RNA, 19 nt, Homo sapiens
  misc_RNA (1)...(19): siRNA sense strand
ggauagagagauucuucuu

SEQ ID NO: 550709 - RNA, 19 nt, Homo sapiens
  misc_RNA (1)...(19): siRNA sense strand
guuguaaaguaccaucaga

SEQ ID NO: 550710 - RNA, 19 nt, Homo sapiens
  misc_RNA (1)...(19): siRNA sense strand
ccaacaugacugugacuaa

SEQ ID NO: 550711 - RNA, 19 nt, Homo sapiens
  misc_RNA (1)...(19): siRNA sense strand
caccagggcuccagcuaca

SEQ ID NO: 550712 - RNA, 19 nt, Homo sapiens
  misc_RNA (1)...(19): siRNA sense strand
aggaaagaauucagcagaa

SEQ ID NO: 550713 - RNA, 19 nt, Homo sapiens
  misc_RNA (1)...(19): siRNA sense strand
gagcuggucaguuguaaag

SEQ ID NO: 550714 - RNA, 19 nt, Homo sapiens
  misc_RNA (1)...(19): siRNA sense strand
agggcaagauuaagacgua

SEQ ID NO: 550715 - RNA, 19 nt, Homo sapiens
  misc_RNA (1)...(19): siRNA sense strand
guuugggacucgaggauug

SEQ ID NO: 550716 - RNA, 19 nt, Homo sapiens
  misc_RNA (1)...(19): siRNA sense strand
caucauccaggaaagaauu

SEQ ID NO: 550717 - RNA, 19 nt, Homo sapiens
  misc_RNA (1)...(19): siRNA sense strand
gggaaaggcccgaaguaag

SEQ ID NO: 550718 - RNA, 19 nt, Homo sapiens
  misc_RNA (1)...(19): siRNA sense strand
gagaaggcccauucaggau

SEQ ID NO: 550719 - RNA, 19 nt, Homo sapiens
  misc_RNA (1)...(19): siRNA sense strand
gggcuaagacuguuaacca

SEQ ID NO: 550720 - RNA, 19 nt, Homo sapiens
  misc_RNA (1)...(19): siRNA sense strand
ucagucaagugugugauga

SEQ ID NO: 550721 - RNA, 19 nt, Homo sapiens
  misc_RNA (1)...(19): siRNA sense strand
agacuuacaaugcccuuaa

SEQ ID NO: 550722 - RNA, 19 nt, Homo sapiens
  misc_RNA (1)...(19): siRNA sense strand
cuuacaaugcccuuaauaa

SEQ ID NO: 550723 - RNA, 19 nt, Homo sapiens
  misc_RNA (1)...(19): siRNA sense strand
gaaaguauuaaccaaacuc

SEQ ID NO: 550724 - RNA, 19 nt, Homo sapiens
  misc_RNA (1)...(19): siRNA sense strand
aaagaauucagcagaaguu

SEQ ID NO: 550725 - RNA, 19 nt, Homo sapiens
  misc_RNA (1)...(19): siRNA sense strand
cagaaugccauacgugaau

SEQ ID NO: 550726 - RNA, 19 nt, Homo sapiens
  misc_RNA (1)...(19): siRNA sense strand
gcacuagcaaaucacaaug

SEQ ID NO: 550727 - RNA, 19 nt, Homo sapiens
  misc_RNA (1)...(19): siRNA sense strand
ccaagauacagauuaugaa

SEQ ID NO: 550728 - RNA, 19 nt, Homo sapiens
  misc_RNA (1)...(19): siRNA sense strand
acaugacugugacuaauca

SEQ ID NO: 550729 - RNA, 19 nt, Homo sapiens
  misc_RNA (1)...(19): siRNA sense strand
uggaguuuguguuaagaaa

SEQ ID NO: 550730 - RNA, 19 nt, Homo sapiens
  misc_RNA (1)...(19): siRNA sense strand
gacuuacaaugcccuuaau

SEQ ID NO: 550731 - RNA, 19 nt, Homo sapiens
  misc_RNA (1)...(19): siRNA sense strand
gcucgcaucauccaggaaa

SEQ ID NO: 550732 - RNA, 19 nt, Homo sapiens
  misc_RNA (1)...(19): siRNA sense strand
uaaccagaaugccauacgu

SEQ ID NO: 550733 - RNA, 19 nt, Homo sapiens
  misc_RNA (1)...(19): siRNA sense strand
gguugagacugugaaagga

SEQ ID NO: 550734 - RNA, 19 nt, Homo sapiens
  misc_RNA (1)...(19): siRNA sense strand
gaacaggcaagugcaaagg

SEQ ID NO: 550735 - RNA, 19 nt, Homo sapiens
  misc_RNA (1)...(19): siRNA sense strand
agacguacaucagucaagu

SEQ ID NO: 550736 - RNA, 19 nt, Homo sapiens
  misc_RNA (1)...(19): siRNA sense strand
ugaaaggagcuaaaacuaa

SEQ ID NO: 550737 - RNA, 19 nt, Homo sapiens
  misc_RNA (1)...(19): siRNA sense strand
gauuaagacguacaucagu

SEQ ID NO: 550738 - RNA, 19 nt, Homo sapiens
  misc_RNA (1)...(19): siRNA sense strand
agaaugccauacgugaauu

SEQ ID NO: 550739 - RNA, 19 nt, Homo sapiens
  misc_RNA (1)...(19): siRNA sense strand
ggaacaggcaagugcaaag

SEQ ID NO: 550740 - RNA, 19 nt, Homo sapiens
  misc_RNA (1)...(19): siRNA sense strand
ccugaaaguauuaaccaaa

SEQ ID NO: 550741 - RNA, 19 nt, Homo sapiens
  misc_RNA (1)...(19): siRNA sense strand
caaugcccuuaauaacuug

SEQ ID NO: 550742 - RNA, 19 nt, Homo sapiens
  misc_RNA (1)...(19): siRNA sense strand
gaaugccauacgugaauug

SEQ ID NO: 550743 - RNA, 19 nt, Homo sapiens
  misc_RNA (1)...(19): siRNA sense strand
uaaaagagaaggcccauuc

SEQ ID NO: 550744 - RNA, 19 nt, Homo sapiens
  misc_RNA (1)...(19): siRNA sense strand
ccagaaugccauacgugaa

SEQ ID NO: 550745 - RNA, 19 nt, Homo sapiens
  misc_RNA (1)...(19): siRNA sense strand
gguaccaucucugggaaca

SEQ ID NO: 550746 - RNA, 19 nt, Homo sapiens
  misc_RNA (1)...(19): siRNA sense strand
gaggauuguccggguguaa

SEQ ID NO: 550747 - RNA, 19 nt, Homo sapiens
  misc_RNA (1)...(19): siRNA sense strand
cugaaaguauuaaccaaac

SEQ ID NO: 550748 - RNA, 19 nt, Homo sapiens
  misc_RNA (1)...(19): siRNA sense strand
gaaaaucaaagcacuagca

SEQ ID NO: 550749 - RNA, 19 nt, Homo sapiens
  misc_RNA (1)...(19): siRNA sense strand
gaagggcucgcaucaucca

SEQ ID NO: 550750 - RNA, 19 nt, Homo sapiens
  misc_RNA (1)...(19): siRNA sense strand
ggucaguuguaaaguacca

SEQ ID NO: 550751 - RNA, 19 nt, Homo sapiens
  misc_RNA (1)...(19): siRNA sense strand
gaaaauccagccaugacaa

SEQ ID NO: 550752 - RNA, 19 nt, Homo sapiens
  misc_RNA (1)...(19): siRNA sense strand
accaagauacagauuauga

SEQ ID NO: 550753 - RNA, 19 nt, Homo sapiens
  misc_RNA (1)...(19): siRNA sense strand
gaaaggcccgaaguaagag

SEQ ID NO: 550754 - RNA, 19 nt, Homo sapiens
  misc_RNA (1)...(19): siRNA sense strand
aauaaagaaugggauagag

SEQ ID NO: 550755 - RNA, 19 nt, Homo sapiens
  misc_RNA (1)...(19): siRNA sense strand
agagagcuggucaguugua

SEQ ID NO: 550756 - RNA, 19 nt, Homo sapiens
  misc_RNA (1)...(19): siRNA sense strand
acggacaccucagagauug

SEQ ID NO: 550757 - RNA, 19 nt, Homo sapiens
  misc_RNA (1)...(19): siRNA sense strand
gcaagauuaagacguacau

SEQ ID NO: 550758 - RNA, 19 nt, Homo sapiens
  misc_RNA (1)...(19): siRNA sense strand
uuacaaugcccuuaauaac

SEQ ID NO: 550759 - RNA, 19 nt, Homo sapiens
  misc_RNA (1)...(19): siRNA sense strand
uacaaugcccuuaauaacu

SEQ ID NO: 550760 - RNA, 19 nt, Homo sapiens
  misc_RNA (1)...(19): siRNA sense strand
gaauucagcagaaguucac

SEQ ID NO: 550761 - RNA, 19 nt, Homo sapiens
  misc_RNA (1)...(19): siRNA sense strand
uguaaaguaccaucagaau

SEQ ID NO: 550762 - RNA, 19 nt, Homo sapiens
  misc_RNA (1)...(19): siRNA sense strand
uuaaccaacaugacuguga

SEQ ID NO: 550763 - RNA, 19 nt, Homo sapiens
  misc_RNA (1)...(19): siRNA sense strand
auaaagaaugggauagaga

SEQ ID NO: 550764 - RNA, 19 nt, Homo sapiens
  misc_RNA (1)...(19): siRNA sense strand
agucuggaguuuguguuaa

SEQ ID NO: 550765 - RNA, 19 nt, Homo sapiens
  misc_RNA (1)...(19): siRNA sense strand
aaaugaagggcucgcauca

SEQ ID NO: 550766 - RNA, 19 nt, Homo sapiens
  misc_RNA (1)...(19): siRNA sense strand
ucaagccugaggugaguuu

SEQ ID NO: 550767 - RNA, 19 nt, Homo sapiens
  misc_RNA (1)...(19): siRNA sense strand
gaacggaaaucccgguaua

SEQ ID NO: 550768 - RNA, 19 nt, Homo sapiens
  misc_RNA (1)...(19): siRNA sense strand
cauagaagauggaguauuu

SEQ ID NO: 550769 - RNA, 19 nt, Homo sapiens
  misc_RNA (1)...(19): siRNA sense strand
gcaagucccugguagaauu

SEQ ID NO: 550770 - RNA, 19 nt, Homo sapiens
  misc_RNA (1)...(19): siRNA sense strand
gaaauguggucuugacuga

SEQ ID NO: 550771 - RNA, 19 nt, Homo sapiens
  misc_RNA (1)...(19): siRNA sense strand
gaagauggauggaugaaca

SEQ ID NO: 550772 - RNA, 19 nt, Homo sapiens
  misc_RNA (1)...(19): siRNA sense strand
aaacgacgcucaacagauu

SEQ ID NO: 550773 - RNA, 19 nt, Homo sapiens
  misc_RNA (1)...(19): siRNA sense strand
ggacauuacuccagcaguu

SEQ ID NO: 550774 - RNA, 19 nt, Homo sapiens
  misc_RNA (1)...(19): siRNA sense strand
gaagauggaguauuugaaa

SEQ ID NO: 550775 - RNA, 19 nt, Homo sapiens
  misc_RNA (1)...(19): siRNA sense strand
gcaaauaugugacagaacu

SEQ ID NO: 550776 - RNA, 19 nt, Homo sapiens
  misc_RNA (1)...(19): siRNA sense strand
uugaaacgcugacaaauuu

SEQ ID NO: 550777 - RNA, 19 nt, Homo sapiens
  misc_RNA (1)...(19): siRNA sense strand
uaacauagaagauggagua

SEQ ID NO: 550778 - RNA, 19 nt, Homo sapiens
  misc_RNA (1)...(19): siRNA sense strand
gaucaaagagggaagagua

SEQ ID NO: 550779 - RNA, 19 nt, Homo sapiens
  misc_RNA (1)...(19): siRNA sense strand
ugacuuacguggaaacaaa

SEQ ID NO: 550780 - RNA, 19 nt, Homo sapiens
  misc_RNA (1)...(19): siRNA sense strand
gagggcauuucaagacuua

SEQ ID NO: 550781 - RNA, 19 nt, Homo sapiens
  misc_RNA (1)...(19): siRNA sense strand
gauuuaagccucaacagua

SEQ ID NO: 550782 - RNA, 19 nt, Homo sapiens
  misc_RNA (1)...(19): siRNA sense strand
gcaacacccagaucaaaua

SEQ ID NO: 550783 - RNA, 19 nt, Homo sapiens
  misc_RNA (1)...(19): siRNA sense strand
gauuaaugcugccugguuu

SEQ ID NO: 550784 - RNA, 19 nt, Homo sapiens
  misc_RNA (1)...(19): siRNA sense strand
ggaaaagccuuagauuuaa

SEQ ID NO: 550785 - RNA, 19 nt, Homo sapiens
  misc_RNA (1)...(19): siRNA sense strand
ucaaaggucucaagaaucu

SEQ ID NO: 550786 - RNA, 19 nt, Homo sapiens
  misc_RNA (1)...(19): siRNA sense strand
caacagguauaucuccauu

SEQ ID NO: 550787 - RNA, 19 nt, Homo sapiens
  misc_RNA (1)...(19): siRNA sense strand
ucacacacauaacgaauga

SEQ ID NO: 550788 - RNA, 19 nt, Homo sapiens
  misc_RNA (1)...(19): siRNA sense strand
gaaaaugauucacgguaua

SEQ ID NO: 550789 - RNA, 19 nt, Homo sapiens
  misc_RNA (1)...(19): siRNA sense strand
caacuuguguuucagaugu

SEQ ID NO: 550790 - RNA, 19 nt, Homo sapiens
  misc_RNA (1)...(19): siRNA sense strand
gacauugccuguuuaaauc

SEQ ID NO: 550791 - RNA, 19 nt, Homo sapiens
  misc_RNA (1)...(19): siRNA sense strand
gaauaucaccguugguaaa

SEQ ID NO: 550792 - RNA, 19 nt, Homo sapiens
  misc_RNA (1)...(19): siRNA sense strand
gguggugcuucaauuaaua

SEQ ID NO: 550793 - RNA, 19 nt, Homo sapiens
  misc_RNA (1)...(19): siRNA sense strand
gaaggcagaaggcuuguuu

SEQ ID NO: 550794 - RNA, 19 nt, Homo sapiens
  misc_RNA (1)...(19): siRNA sense strand
uaagaccaccaccaaauua

SEQ ID NO: 550795 - RNA, 19 nt, Homo sapiens
  misc_RNA (1)...(19): siRNA sense strand
gcucaaguguuaaguggaa

SEQ ID NO: 550796 - RNA, 19 nt, Homo sapiens
  misc_RNA (1)...(19): siRNA sense strand
gcaaauaguuccucuuuuc

SEQ ID NO: 550797 - RNA, 19 nt, Homo sapiens
  misc_RNA (1)...(19): siRNA sense strand
guuuaaaucugucugcaaa

SEQ ID NO: 550798 - RNA, 19 nt, Homo sapiens
  misc_RNA (1)...(19): siRNA sense strand
uaacaggauuucccaccua

SEQ ID NO: 550799 - RNA, 19 nt, Homo sapiens
  misc_RNA (1)...(19): siRNA sense strand
ggaaaucccgguauacaau

SEQ ID NO: 550800 - RNA, 19 nt, Homo sapiens
  misc_RNA (1)...(19): siRNA sense strand
ggaagaguauugugagucu

SEQ ID NO: 550801 - RNA, 19 nt, Homo sapiens
  misc_RNA (1)...(19): siRNA sense strand
caaaaugacucaguuauug

SEQ ID NO: 550802 - RNA, 19 nt, Homo sapiens
  misc_RNA (1)...(19): siRNA sense strand
acuaucaacuuggguauua

SEQ ID NO: 550803 - RNA, 19 nt, Homo sapiens
  misc_RNA (1)...(19): siRNA sense strand
gaugcagcuuccaaacuua

SEQ ID NO: 550804 - RNA, 19 nt, Homo sapiens
  misc_RNA (1)...(19): siRNA sense strand
cuacgggcauugcauuuaa

SEQ ID NO: 550805 - RNA, 19 nt, Homo sapiens
  misc_RNA (1)...(19): siRNA sense strand
ggaguuauccacagcauau

SEQ ID NO: 550806 - RNA, 19 nt, Homo sapiens
  misc_RNA (1)...(19): siRNA sense strand
gggcaaauaugugacagaa

SEQ ID NO: 550807 - RNA, 19 nt, Homo sapiens
  misc_RNA (1)...(19): siRNA sense strand
gggcauuccucaaccuaaa

SEQ ID NO: 550808 - RNA, 19 nt, Homo sapiens
  misc_RNA (1)...(19): siRNA sense strand
uuacugggauguuugguuu

SEQ ID NO: 550809 - RNA, 19 nt, Homo sapiens
  misc_RNA (1)...(19): siRNA sense strand
gaagcuauccuugugauga

SEQ ID NO: 550810 - RNA, 19 nt, Homo sapiens
  misc_RNA (1)...(19): siRNA sense strand
ggaaagcaagucccuggua

SEQ ID NO: 550811 - RNA, 19 nt, Homo sapiens
  misc_RNA (1)...(19): siRNA sense strand
cuagugcucuuacugaauu

SEQ ID NO: 550812 - RNA, 19 nt, Homo sapiens
  misc_RNA (1)...(19): siRNA sense strand
acaauagacuagacuuuga

SEQ ID NO: 550813 - RNA, 19 nt, Homo sapiens
  misc_RNA (1)...(19): siRNA sense strand
gaugguggugcuucaauua

SEQ ID NO: 550814 - RNA, 19 nt, Homo sapiens
  misc_RNA (1)...(19): siRNA sense strand
gcuaauggaugagaacaug

SEQ ID NO: 550815 - RNA, 19 nt, Homo sapiens
  misc_RNA (1)...(19): siRNA sense strand
cguaacacaucaucuagaa

SEQ ID NO: 550816 - RNA, 19 nt, Homo sapiens
  misc_RNA (1)...(19): siRNA sense strand
caacagauuuugaguuuga

SEQ ID NO: 550817 - RNA, 19 nt, Homo sapiens
  misc_RNA (1)...(19): siRNA sense strand
ugaaggugcuggaucuuga

SEQ ID NO: 550818 - RNA, 19 nt, Homo sapiens
  misc_RNA (1)...(19): siRNA sense strand
gauucacgguauaacaaua

SEQ ID NO: 550819 - RNA, 19 nt, Homo sapiens
  misc_RNA (1)...(19): siRNA sense strand
uaaaugagcugcgcuacca

SEQ ID NO: 550820 - RNA, 19 nt, Homo sapiens
  misc_RNA (1)...(19): siRNA sense strand
ugacauugccuguuuaaau

SEQ ID NO: 550821 - RNA, 19 nt, Homo sapiens
  misc_RNA (1)...(19): siRNA sense strand
ucgauuccauuaagcaaua

SEQ ID NO: 550822 - RNA, 19 nt, Homo sapiens
  misc_RNA (1)...(19): siRNA sense strand
gcaaucgccuugacauuuu

SEQ ID NO: 550823 - RNA, 19 nt, Homo sapiens
  misc_RNA (1)...(19): siRNA sense strand
uuuaagagguuauguguuc

SEQ ID NO: 550824 - RNA, 19 nt, Homo sapiens
  misc_RNA (1)...(19): siRNA sense strand
caccaaagaugccucuguu

SEQ ID NO: 550825 - RNA, 19 nt, Homo sapiens
  misc_RNA (1)...(19): siRNA sense strand
agacuagacuuugauaaug

SEQ ID NO: 550826 - RNA, 19 nt, Homo sapiens
  misc_RNA (1)...(19): siRNA sense strand
gagcaacacccagaucaaa

SEQ ID NO: 550827 - RNA, 19 nt, Homo sapiens
  misc_RNA (1)...(19): siRNA sense strand
ggcaaacucugagaaaugu

SEQ ID NO: 550828 - RNA, 19 nt, Homo sapiens
  misc_RNA (1)...(19): siRNA sense strand
aauccgcacuugaaacuaa

SEQ ID NO: 550829 - RNA, 19 nt, Homo sapiens
  misc_RNA (1)...(19): siRNA sense strand
cagaauagcaggcguaaca

SEQ ID NO: 550830 - RNA, 19 nt, Homo sapiens
  misc_RNA (1)...(19): siRNA sense strand
gcagaguuaugcaaauagu

SEQ ID NO: 550831 - RNA, 19 nt, Homo sapiens
  misc_RNA (1)...(19): siRNA sense strand
gaaaacauguuccuucagu

SEQ ID NO: 550832 - RNA, 19 nt, Homo sapiens
  misc_RNA (1)...(19): siRNA sense strand
gaagagagccgagacaaaa

SEQ ID NO: 550833 - RNA, 19 nt, Homo sapiens
  misc_RNA (1)...(19): siRNA sense strand
ugacacgucuggauuuauc

SEQ ID NO: 550834 - RNA, 19 nt, Homo sapiens
  misc_RNA (1)...(19): siRNA sense strand
ccaaacuuaucgacuauca

SEQ ID NO: 550835 - RNA, 19 nt, Homo sapiens
  misc_RNA (1)...(19): siRNA sense strand
ugaugcagcuuccaaacuu

SEQ ID NO: 550836 - RNA, 19 nt, Homo sapiens
  misc_RNA (1)...(19): siRNA sense strand
gggaguuacugcuugaaga

SEQ ID NO: 550837 - RNA, 19 nt, Homo sapiens
  misc_RNA (1)...(19): siRNA sense strand
uaagggaguuacugcuuga

SEQ ID NO: 550838 - RNA, 19 nt, Homo sapiens
  misc_RNA (1)...(19): siRNA sense strand
gcuugaagacaaccaguua

SEQ ID NO: 550839 - RNA, 19 nt, Homo sapiens
  misc_RNA (1)...(19): siRNA sense strand
ugaagcaccucgauuuaag

SEQ ID NO: 550840 - RNA, 19 nt, Homo sapiens
  misc_RNA (1)...(19): siRNA sense strand
uuucaaaggucucaagaau

SEQ ID NO: 550841 - RNA, 19 nt, Homo sapiens
  misc_RNA (1)...(19): siRNA sense strand
uggaaaagccuuagauuua

SEQ ID NO: 550842 - RNA, 19 nt, Homo sapiens
  misc_RNA (1)...(19): siRNA sense strand
aagaagauuucaagggauu

SEQ ID NO: 550843 - RNA, 19 nt, Homo sapiens
  misc_RNA (1)...(19): siRNA sense strand
gagccaguguuacagcauu

SEQ ID NO: 550844 - RNA, 19 nt, Homo sapiens
  misc_RNA (1)...(19): siRNA sense strand
caaagagggaagaguauug

SEQ ID NO: 550845 - RNA, 19 nt, Homo sapiens
  misc_RNA (1)...(19): siRNA sense strand
cauuggagauuuccgaaga

SEQ ID NO: 550846 - RNA, 19 nt, Homo sapiens
  misc_RNA (1)...(19): siRNA sense strand
ggcaaucgccuugacauuu

SEQ ID NO: 550847 - RNA, 19 nt, Homo sapiens
  misc_RNA (1)...(19): siRNA sense strand
gugcagcaaucgucgacua

SEQ ID NO: 550848 - RNA, 19 nt, Homo sapiens
  misc_RNA (1)...(19): siRNA sense strand
ggaaacgacgcucaacaga

SEQ ID NO: 550849 - RNA, 19 nt, Homo sapiens
  misc_RNA (1)...(19): siRNA sense strand
cuaaaccucucuagcacuu

SEQ ID NO: 550850 - RNA, 19 nt, Homo sapiens
  misc_RNA (1)...(19): siRNA sense strand
gaugaugacaacagguaua

SEQ ID NO: 550851 - RNA, 19 nt, Homo sapiens
  misc_RNA (1)...(19): siRNA sense strand
gaaacgacgcucaacagau

SEQ ID NO: 550852 - RNA, 19 nt, Homo sapiens
  misc_RNA (1)...(19): siRNA sense strand
gcauugcauuuaagagguu

SEQ ID NO: 550853 - RNA, 19 nt, Homo sapiens
  misc_RNA (1)...(19): siRNA sense strand
ggugcuggaucuugaauuc

SEQ ID NO: 550854 - RNA, 19 nt, Homo sapiens
  misc_RNA (1)...(19): siRNA sense strand
gcugacaaauuuggaguug

SEQ ID NO: 550855 - RNA, 19 nt, Homo sapiens
  misc_RNA (1)...(19): siRNA sense strand
aauguggucuugacugaaa

SEQ ID NO: 550856 - RNA, 19 nt, Homo sapiens
  misc_RNA (1)...(19): siRNA sense strand
ccaccuacccucuggcuuu

SEQ ID NO: 550857 - RNA, 19 nt, Homo sapiens
  misc_RNA (1)...(19): siRNA sense strand
uaucugacuuuacaucuuc

SEQ ID NO: 550858 - RNA, 19 nt, Homo sapiens
  misc_RNA (1)...(19): siRNA sense strand
cuagaucucagcuauaauu

SEQ ID NO: 550859 - RNA, 19 nt, Homo sapiens
  misc_RNA (1)...(19): siRNA sense strand
acacauaacgaaugaauca

SEQ ID NO: 550860 - RNA, 19 nt, Homo sapiens
  misc_RNA (1)...(19): siRNA sense strand
gaacucagagaagaugauu

SEQ ID NO: 550861 - RNA, 19 nt, Homo sapiens
  misc_RNA (1)...(19): siRNA sense strand
agaaauacuugacuugucu

SEQ ID NO: 550862 - RNA, 19 nt, Homo sapiens
  misc_RNA (1)...(19): siRNA sense strand
aaauaugccucaucugaag

SEQ ID NO: 550863 - RNA, 19 nt, Homo sapiens
  misc_RNA (1)...(19): siRNA sense strand
aaacuaagaccaccaccaa

SEQ ID NO: 550864 - RNA, 19 nt, Homo sapiens
  misc_RNA (1)...(19): siRNA sense strand
gauaaugcuagugcucuua

SEQ ID NO: 550865 - RNA, 19 nt, Homo sapiens
  misc_RNA (1)...(19): siRNA sense strand
acaaugugcugcuuaugga

SEQ ID NO: 550866 - RNA, 19 nt, Homo sapiens
  misc_RNA (1)...(19): siRNA sense strand
cuuccaaacuuaucgacua

SEQ ID NO: 550867 - RNA, 19 nt, Homo sapiens
  misc_RNA (1)...(19): siRNA sense strand
gaacggaaaucccgguaua

SEQ ID NO: 550868 - RNA, 19 nt, Homo sapiens
  misc_RNA (1)...(19): siRNA sense strand
cauagaagauggaguauuu

SEQ ID NO: 550869 - RNA, 19 nt, Homo sapiens
  misc_RNA (1)...(19): siRNA sense strand
gcaagucccugguagaauu

SEQ ID NO: 550870 - RNA, 19 nt, Homo sapiens
  misc_RNA (1)...(19): siRNA sense strand
gaaauguggucuugacuga

SEQ ID NO: 550871 - RNA, 19 nt, Homo sapiens
  misc_RNA (1)...(19): siRNA sense strand
gaagauggauggaugaaca

SEQ ID NO: 550872 - RNA, 19 nt, Homo sapiens
  misc_RNA (1)...(19): siRNA sense strand
aaacgacgcucaacagauu

SEQ ID NO: 550873 - RNA, 19 nt, Homo sapiens
  misc_RNA (1)...(19): siRNA sense strand
ggacauuacuccagcaguu

SEQ ID NO: 550874 - RNA, 19 nt, Homo sapiens
  misc_RNA (1)...(19): siRNA sense strand
gaagauggaguauuugaaa

SEQ ID NO: 550875 - RNA, 19 nt, Homo sapiens
  misc_RNA (1)...(19): siRNA sense strand
gcaaauaugugacagaacu

SEQ ID NO: 550876 - RNA, 19 nt, Homo sapiens
  misc_RNA (1)...(19): siRNA sense strand
uugaaacgcugacaaauuu

SEQ ID NO: 550877 - RNA, 19 nt, Homo sapiens
  misc_RNA (1)...(19): siRNA sense strand
uaacauagaagauggagua

SEQ ID NO: 550878 - RNA, 19 nt, Homo sapiens
  misc_RNA (1)...(19): siRNA sense strand
gaucaaagagggaagagua

SEQ ID NO: 550879 - RNA, 19 nt, Homo sapiens
  misc_RNA (1)...(19): siRNA sense strand
ugacuuacguggaaacaaa

SEQ ID NO: 550880 - RNA, 19 nt, Homo sapiens
  misc_RNA (1)...(19): siRNA sense strand
gagggcauuucaagacuua

SEQ ID NO: 550881 - RNA, 19 nt, Homo sapiens
  misc_RNA (1)...(19): siRNA sense strand
gauuuaagccucaacagua

SEQ ID NO: 550882 - RNA, 19 nt, Homo sapiens
  misc_RNA (1)...(19): siRNA sense strand
gcaacacccagaucaaaua

SEQ ID NO: 550883 - RNA, 19 nt, Homo sapiens
  misc_RNA (1)...(19): siRNA sense strand
gauuaaugcugccugguuu

SEQ ID NO: 550884 - RNA, 19 nt, Homo sapiens
  misc_RNA (1)...(19): siRNA sense strand
ggaaaagccuuagauuuaa

SEQ ID NO: 550885 - RNA, 19 nt, Homo sapiens
  misc_RNA (1)...(19): siRNA sense strand
ucaaaggucucaagaaucu

SEQ ID NO: 550886 - RNA, 19 nt, Homo sapiens
  misc_RNA (1)...(19): siRNA sense strand
caacagguauaucuccauu

SEQ ID NO: 550887 - RNA, 19 nt, Homo sapiens
  misc_RNA (1)...(19): siRNA sense strand
ucacacacauaacgaauga

SEQ ID NO: 550888 - RNA, 19 nt, Homo sapiens
  misc_RNA (1)...(19): siRNA sense strand
gaaaaugauucacgguaua

SEQ ID NO: 550889 - RNA, 19 nt, Homo sapiens
  misc_RNA (1)...(19): siRNA sense strand
caacuuguguuucagaugu

SEQ ID NO: 550890 - RNA, 19 nt, Homo sapiens
  misc_RNA (1)...(19): siRNA sense strand
gacauugccuguuuaaauc

SEQ ID NO: 550891 - RNA, 19 nt, Homo sapiens
  misc_RNA (1)...(19): siRNA sense strand
gaauaucaccguugguaaa

SEQ ID NO: 550892 - RNA, 19 nt, Homo sapiens
  misc_RNA (1)...(19): siRNA sense strand
gguggugcuucaauuaaua

SEQ ID NO: 550893 - RNA, 19 nt, Homo sapiens
  misc_RNA (1)...(19): siRNA sense strand
gaaggcagaaggcuuguuu

SEQ ID NO: 550894 - RNA, 19 nt, Homo sapiens
  misc_RNA (1)...(19): siRNA sense strand
uaagaccaccaccaaauua

SEQ ID NO: 550895 - RNA, 19 nt, Homo sapiens
  misc_RNA (1)...(19): siRNA sense strand
gcucaaguguuaaguggaa

SEQ ID NO: 550896 - RNA, 19 nt, Homo sapiens
  misc_RNA (1)...(19): siRNA sense strand
gcaaauaguuccucuuuuc

SEQ ID NO: 550897 - RNA, 19 nt, Homo sapiens
  misc_RNA (1)...(19): siRNA sense strand
guuuaaaucugucugcaaa

SEQ ID NO: 550898 - RNA, 19 nt, Homo sapiens
  misc_RNA (1)...(19): siRNA sense strand
uaacaggauuucccaccua

SEQ ID NO: 550899 - RNA, 19 nt, Homo sapiens
  misc_RNA (1)...(19): siRNA sense strand
ggaaaucccgguauacaau

SEQ ID NO: 550900 - RNA, 19 nt, Homo sapiens
  misc_RNA (1)...(19): siRNA sense strand
ggaagaguauugugagucu

SEQ ID NO: 550901 - RNA, 19 nt, Homo sapiens
  misc_RNA (1)...(19): siRNA sense strand
caaaaugacucaguuauug

SEQ ID NO: 550902 - RNA, 19 nt, Homo sapiens
  misc_RNA (1)...(19): siRNA sense strand
acuaucaacuuggguauua

SEQ ID NO: 550903 - RNA, 19 nt, Homo sapiens
  misc_RNA (1)...(19): siRNA sense strand
gaugcagcuuccaaacuua

SEQ ID NO: 550904 - RNA, 19 nt, Homo sapiens
  misc_RNA (1)...(19): siRNA sense strand
cuacgggcauugcauuuaa

SEQ ID NO: 550905 - RNA, 19 nt, Homo sapiens
  misc_RNA (1)...(19): siRNA sense strand
ggaguuauccacagcauau

SEQ ID NO: 550906 - RNA, 19 nt, Homo sapiens
  misc_RNA (1)...(19): siRNA sense strand
gggcaaauaugugacagaa

SEQ ID NO: 550907 - RNA, 19 nt, Homo sapiens
  misc_RNA (1)...(19): siRNA sense strand
gggcauuccucaaccuaaa

SEQ ID NO: 550908 - RNA, 19 nt, Homo sapiens
  misc_RNA (1)...(19): siRNA sense strand
uuacugggauguuugguuu

SEQ ID NO: 550909 - RNA, 19 nt, Homo sapiens
  misc_RNA (1)...(19): siRNA sense strand
gaagcuauccuugugauga

SEQ ID NO: 550910 - RNA, 19 nt, Homo sapiens
  misc_RNA (1)...(19): siRNA sense strand
ggaaagcaagucccuggua

SEQ ID NO: 550911 - RNA, 19 nt, Homo sapiens
  misc_RNA (1)...(19): siRNA sense strand
cuagugcucuuacugaauu

SEQ ID NO: 550912 - RNA, 19 nt, Homo sapiens
  misc_RNA (1)...(19): siRNA sense strand
acaauagacuagacuuuga

SEQ ID NO: 550913 - RNA, 19 nt, Homo sapiens
  misc_RNA (1)...(19): siRNA sense strand
gaugguggugcuucaauua

SEQ ID NO: 550914 - RNA, 19 nt, Homo sapiens
  misc_RNA (1)...(19): siRNA sense strand
gcuaauggaugagaacaug

SEQ ID NO: 550915 - RNA, 19 nt, Homo sapiens
  misc_RNA (1)...(19): siRNA sense strand
cguaacacaucaucuagaa

SEQ ID NO: 550916 - RNA, 19 nt, Homo sapiens
  misc_RNA (1)...(19): siRNA sense strand
caacagauuuugaguuuga

SEQ ID NO: 550917 - RNA, 19 nt, Homo sapiens
  misc_RNA (1)...(19): siRNA sense strand
ugaaggugcuggaucuuga

SEQ ID NO: 550918 - RNA, 19 nt, Homo sapiens
  misc_RNA (1)...(19): siRNA sense strand
gauucacgguauaacaaua

SEQ ID NO: 550919 - RNA, 19 nt, Homo sapiens
  misc_RNA (1)...(19): siRNA sense strand
uaaaugagcugcgcuacca

SEQ ID NO: 550920 - RNA, 19 nt, Homo sapiens
  misc_RNA (1)...(19): siRNA sense strand
ugacauugccuguuuaaau

SEQ ID NO: 550921 - RNA, 19 nt, Homo sapiens
  misc_RNA (1)...(19): siRNA sense strand
ucgauuccauuaagcaaua

SEQ ID NO: 550922 - RNA, 19 nt, Homo sapiens
  misc_RNA (1)...(19): siRNA sense strand
gcaaucgccuugacauuuu

SEQ ID NO: 550923 - RNA, 19 nt, Homo sapiens
  misc_RNA (1)...(19): siRNA sense strand
uuuaagagguuauguguuc

SEQ ID NO: 550924 - RNA, 19 nt, Homo sapiens
  misc_RNA (1)...(19): siRNA sense strand
caccaaagaugccucuguu

SEQ ID NO: 550925 - RNA, 19 nt, Homo sapiens
  misc_RNA (1)...(19): siRNA sense strand
agacuagacuuugauaaug

SEQ ID NO: 550926 - RNA, 19 nt, Homo sapiens
  misc_RNA (1)...(19): siRNA sense strand
gagcaacacccagaucaaa

SEQ ID NO: 550927 - RNA, 19 nt, Homo sapiens
  misc_RNA (1)...(19): siRNA sense strand
ggcaaacucugagaaaugu

SEQ ID NO: 550928 - RNA, 19 nt, Homo sapiens
  misc_RNA (1)...(19): siRNA sense strand
aauccgcacuugaaacuaa

SEQ ID NO: 550929 - RNA, 19 nt, Homo sapiens
  misc_RNA (1)...(19): siRNA sense strand
cagaauagcaggcguaaca

SEQ ID NO: 550930 - RNA, 19 nt, Homo sapiens
  misc_RNA (1)...(19): siRNA sense strand
gcagaguuaugcaaauagu

SEQ ID NO: 550931 - RNA, 19 nt, Homo sapiens
  misc_RNA (1)...(19): siRNA sense strand
gaaaacauguuccuucagu

SEQ ID NO: 550932 - RNA, 19 nt, Homo sapiens
  misc_RNA (1)...(19): siRNA sense strand
gaagagagccgagacaaaa

SEQ ID NO: 550933 - RNA, 19 nt, Homo sapiens
  misc_RNA (1)...(19): siRNA sense strand
ugacacgucuggauuuauc

SEQ ID NO: 550934 - RNA, 19 nt, Homo sapiens
  misc_RNA (1)...(19): siRNA sense strand
ccaaacuuaucgacuauca

SEQ ID NO: 550935 - RNA, 19 nt, Homo sapiens
  misc_RNA (1)...(19): siRNA sense strand
ugaugcagcuuccaaacuu

SEQ ID NO: 550936 - RNA, 19 nt, Homo sapiens
  misc_RNA (1)...(19): siRNA sense strand
gggaguuacugcuugaaga

SEQ ID NO: 550937 - RNA, 19 nt, Homo sapiens
  misc_RNA (1)...(19): siRNA sense strand
uaagggaguuacugcuuga

SEQ ID NO: 550938 - RNA, 19 nt, Homo sapiens
  misc_RNA (1)...(19): siRNA sense strand
gcuugaagacaaccaguua

SEQ ID NO: 550939 - RNA, 19 nt, Homo sapiens
  misc_RNA (1)...(19): siRNA sense strand
ugaagcaccucgauuuaag

SEQ ID NO: 550940 - RNA, 19 nt, Homo sapiens
  misc_RNA (1)...(19): siRNA sense strand
uuucaaaggucucaagaau

SEQ ID NO: 550941 - RNA, 19 nt, Homo sapiens
  misc_RNA (1)...(19): siRNA sense strand
uggaaaagccuuagauuua

SEQ ID NO: 550942 - RNA, 19 nt, Homo sapiens
  misc_RNA (1)...(19): siRNA sense strand
aagaagauuucaagggauu

SEQ ID NO: 550943 - RNA, 19 nt, Homo sapiens
  misc_RNA (1)...(19): siRNA sense strand
gagccaguguuacagcauu

SEQ ID NO: 550944 - RNA, 19 nt, Homo sapiens
  misc_RNA (1)...(19): siRNA sense strand
caaagagggaagaguauug

SEQ ID NO: 550945 - RNA, 19 nt, Homo sapiens
  misc_RNA (1)...(19): siRNA sense strand
cauuggagauuuccgaaga

SEQ ID NO: 550946 - RNA, 19 nt, Homo sapiens
  misc_RNA (1)...(19): siRNA sense strand
ggcaaucgccuugacauuu

SEQ ID NO: 550947 - RNA, 19 nt, Homo sapiens
  misc_RNA (1)...(19): siRNA sense strand
gugcagcaaucgucgacua

SEQ ID NO: 550948 - RNA, 19 nt, Homo sapiens
  misc_RNA (1)...(19): siRNA sense strand
ggaaacgacgcucaacaga

SEQ ID NO: 550949 - RNA, 19 nt, Homo sapiens
  misc_RNA (1)...(19): siRNA sense strand
cuaaaccucucuagcacuu

SEQ ID NO: 550950 - RNA, 19 nt, Homo sapiens
  misc_RNA (1)...(19): siRNA sense strand
gaugaugacaacagguaua

SEQ ID NO: 550951 - RNA, 19 nt, Homo sapiens
  misc_RNA (1)...(19): siRNA sense strand
gaaacgacgcucaacagau

SEQ ID NO: 550952 - RNA, 19 nt, Homo sapiens
  misc_RNA (1)...(19): siRNA sense strand
gcauugcauuuaagagguu

SEQ ID NO: 550953 - RNA, 19 nt, Homo sapiens
  misc_RNA (1)...(19): siRNA sense strand
ggugcuggaucuugaauuc

SEQ ID NO: 550954 - RNA, 19 nt, Homo sapiens
  misc_RNA (1)...(19): siRNA sense strand
gcugacaaauuuggaguug

SEQ ID NO: 550955 - RNA, 19 nt, Homo sapiens
  misc_RNA (1)...(19): siRNA sense strand
aauguggucuugacugaaa

SEQ ID NO: 550956 - RNA, 19 nt, Homo sapiens
  misc_RNA (1)...(19): siRNA sense strand
ccaccuacccucuggcuuu

SEQ ID NO: 550957 - RNA, 19 nt, Homo sapiens
  misc_RNA (1)...(19): siRNA sense strand
uaucugacuuuacaucuuc

SEQ ID NO: 550958 - RNA, 19 nt, Homo sapiens
  misc_RNA (1)...(19): siRNA sense strand
cuagaucucagcuauaauu

SEQ ID NO: 550959 - RNA, 19 nt, Homo sapiens
  misc_RNA (1)...(19): siRNA sense strand
acacauaacgaaugaauca

SEQ ID NO: 550960 - RNA, 19 nt, Homo sapiens
  misc_RNA (1)...(19): siRNA sense strand
gaacucagagaagaugauu

SEQ ID NO: 550961 - RNA, 19 nt, Homo sapiens
  misc_RNA (1)...(19): siRNA sense strand
agaaauacuugacuugucu

SEQ ID NO: 550962 - RNA, 19 nt, Homo sapiens
  misc_RNA (1)...(19): siRNA sense strand
aaauaugccucaucugaag

SEQ ID NO: 550963 - RNA, 19 nt, Homo sapiens
  misc_RNA (1)...(19): siRNA sense strand
aaacuaagaccaccaccaa

SEQ ID NO: 550964 - RNA, 19 nt, Homo sapiens
  misc_RNA (1)...(19): siRNA sense strand
gauaaugcuagugcucuua

SEQ ID NO: 550965 - RNA, 19 nt, Homo sapiens
  misc_RNA (1)...(19): siRNA sense strand
acaaugugcugcuuaugga

SEQ ID NO: 550966 - RNA, 19 nt, Homo sapiens
  misc_RNA (1)...(19): siRNA sense strand
cuuccaaacuuaucgacua

SEQ ID NO: 550967 - RNA, 19 nt, Homo sapiens
  misc_RNA (1)...(19): siRNA sense strand
cuaauaggcugcauaauug

SEQ ID NO: 550968 - RNA, 19 nt, Homo sapiens
  misc_RNA (1)...(19): siRNA sense strand
gaagguggccugaauguga

SEQ ID NO: 550969 - RNA, 19 nt, Homo sapiens
  misc_RNA (1)...(19): siRNA sense strand
gagaaacugugaagaagau

SEQ ID NO: 550970 - RNA, 19 nt, Homo sapiens
  misc_RNA (1)...(19): siRNA sense strand
gagggaaacugcccagaga

SEQ ID NO: 550971 - RNA, 19 nt, Homo sapiens
  misc_RNA (1)...(19): siRNA sense strand
ugaccaagcuccaccaguu

SEQ ID NO: 550972 - RNA, 19 nt, Homo sapiens
  misc_RNA (1)...(19): siRNA sense strand
gaucuaauaggcugcauaa

SEQ ID NO: 550973 - RNA, 19 nt, Homo sapiens
  misc_RNA (1)...(19): siRNA sense strand
gaaaggaaguuggaagcau

SEQ ID NO: 550974 - RNA, 19 nt, Homo sapiens
  misc_RNA (1)...(19): siRNA sense strand
ucuaauaggcugcauaauu

SEQ ID NO: 550975 - RNA, 19 nt, Homo sapiens
  misc_RNA (1)...(19): siRNA sense strand
caugaucgcauacaaguuu

SEQ ID NO: 550976 - RNA, 19 nt, Homo sapiens
  misc_RNA (1)...(19): siRNA sense strand
gcugaugcauggaaaggaa

SEQ ID NO: 550977 - RNA, 19 nt, Homo sapiens
  misc_RNA (1)...(19): siRNA sense strand
gcagaucuguguggucaug

SEQ ID NO: 550978 - RNA, 19 nt, Homo sapiens
  misc_RNA (1)...(19): siRNA sense strand
gaaaggagaaacugugaag

SEQ ID NO: 550979 - RNA, 19 nt, Homo sapiens
  misc_RNA (1)...(19): siRNA sense strand
caaugaaauucgacagaug

SEQ ID NO: 550980 - RNA, 19 nt, Homo sapiens
  misc_RNA (1)...(19): siRNA sense strand
gaagaugcgugaggagagu

SEQ ID NO: 550981 - RNA, 19 nt, Homo sapiens
  misc_RNA (1)...(19): siRNA sense strand
ggagaaacugugaagaaga

SEQ ID NO: 550982 - RNA, 19 nt, Homo sapiens
  misc_RNA (1)...(19): siRNA sense strand
ggaccaaaaucaaugaaau

SEQ ID NO: 550983 - RNA, 19 nt, Homo sapiens
  misc_RNA (1)...(19): siRNA sense strand
ccacagacgccaucuucaa

SEQ ID NO: 550984 - RNA, 19 nt, Homo sapiens
  misc_RNA (1)...(19): siRNA sense strand
caucagccuugcccaguau

SEQ ID NO: 550985 - RNA, 19 nt, Homo sapiens
  misc_RNA (1)...(19): siRNA sense strand
cgaagaagcucaaaaucug

SEQ ID NO: 550986 - RNA, 19 nt, Homo sapiens
  misc_RNA (1)...(19): siRNA sense strand
ggaagaaaggagaaacugu

SEQ ID NO: 550987 - RNA, 19 nt, Homo sapiens
  misc_RNA (1)...(19): siRNA sense strand
ucaaugaaauucgacagau

SEQ ID NO: 550988 - RNA, 19 nt, Homo sapiens
  misc_RNA (1)...(19): siRNA sense strand
gaagcaucaucgggaagaa

SEQ ID NO: 550989 - RNA, 19 nt, Homo sapiens
  misc_RNA (1)...(19): siRNA sense strand
ggaagcaucaucgggaaga

SEQ ID NO: 550990 - RNA, 19 nt, Homo sapiens
  misc_RNA (1)...(19): siRNA sense strand
cagagaggauugugaccau

SEQ ID NO: 550991 - RNA, 19 nt, Homo sapiens
  misc_RNA (1)...(19): siRNA sense strand
gaaacugcccagagaggau

SEQ ID NO: 550992 - RNA, 19 nt, Homo sapiens
  misc_RNA (1)...(19): siRNA sense strand
gugcaaggaucaacaucuc

SEQ ID NO: 550993 - RNA, 19 nt, Homo sapiens
  misc_RNA (1)...(19): siRNA sense strand
aaggagaaacugugaagaa

SEQ ID NO: 550994 - RNA, 19 nt, Homo sapiens
  misc_RNA (1)...(19): siRNA sense strand
ggucaggccuacacaaucc

SEQ ID NO: 550995 - RNA, 19 nt, Homo sapiens
  misc_RNA (1)...(19): siRNA sense strand
gagaggauugugaccauca

SEQ ID NO: 550996 - RNA, 19 nt, Homo sapiens
  misc_RNA (1)...(19): siRNA sense strand
acaucagccuugcccagua

SEQ ID NO: 550997 - RNA, 19 nt, Homo sapiens
  misc_RNA (1)...(19): siRNA sense strand
gaccaagcuccaccaguug

SEQ ID NO: 550998 - RNA, 19 nt, Homo sapiens
  misc_RNA (1)...(19): siRNA sense strand
ccuuugccaugaucgcaua

SEQ ID NO: 550999 - RNA, 19 nt, Homo sapiens
  misc_RNA (1)...(19): siRNA sense strand
ccacggaaggguccucaga

SEQ ID NO: 551000 - RNA, 19 nt, Homo sapiens
  misc_RNA (1)...(19): siRNA sense strand
gagaguggugcaaggauca

SEQ ID NO: 551001 - RNA, 19 nt, Homo sapiens
  misc_RNA (1)...(19): siRNA sense strand
ggaaaggaaguuggaagca

SEQ ID NO: 551002 - RNA, 19 nt, Homo sapiens
  misc_RNA (1)...(19): siRNA sense strand
gcauggaaaggaaguugga

SEQ ID NO: 551003 - RNA, 19 nt, Homo sapiens
  misc_RNA (1)...(19): siRNA sense strand
ucaaggccuuugccaugau

SEQ ID NO: 551004 - RNA, 19 nt, Homo sapiens
  misc_RNA (1)...(19): siRNA sense strand
gagcgucagaucaccauca

SEQ ID NO: 551005 - RNA, 19 nt, Homo sapiens
  misc_RNA (1)...(19): siRNA sense strand
gggacaugcugcccaacuc

SEQ ID NO: 551006 - RNA, 19 nt, Homo sapiens
  misc_RNA (1)...(19): siRNA sense strand
cagaagguggccugaaugu

SEQ ID NO: 551007 - RNA, 19 nt, Homo sapiens
  misc_RNA (1)...(19): siRNA sense strand
aagaaaggagaaacuguga

SEQ ID NO: 551008 - RNA, 19 nt, Homo sapiens
  misc_RNA (1)...(19): siRNA sense strand
gccaugaucgcauacaagu

SEQ ID NO: 551009 - RNA, 19 nt, Homo sapiens
  misc_RNA (1)...(19): siRNA sense strand
caaggccuuugccaugauc

SEQ ID NO: 551010 - RNA, 19 nt, Homo sapiens
  misc_RNA (1)...(19): siRNA sense strand
ugaggaggauaucaucaac

SEQ ID NO: 551011 - RNA, 19 nt, Homo sapiens
  misc_RNA (1)...(19): siRNA sense strand
gaggagaguggugcaagga

SEQ ID NO: 551012 - RNA, 19 nt, Homo sapiens
  misc_RNA (1)...(19): siRNA sense strand
gaagaagcucaaaaucuga

SEQ ID NO: 551013 - RNA, 19 nt, Homo sapiens
  misc_RNA (1)...(19): siRNA sense strand
aggagaaacugugaagaag

SEQ ID NO: 551014 - RNA, 19 nt, Homo sapiens
  misc_RNA (1)...(19): siRNA sense strand
caacaucucagagggaaac

SEQ ID NO: 551015 - RNA, 19 nt, Homo sapiens
  misc_RNA (1)...(19): siRNA sense strand
ggaguccaaggucucagaa

SEQ ID NO: 551016 - RNA, 19 nt, Homo sapiens
  misc_RNA (1)...(19): siRNA sense strand
aggaggauaucaucaacuc

SEQ ID NO: 551017 - RNA, 19 nt, Homo sapiens
  misc_RNA (1)...(19): siRNA sense strand
ggaaguuggaagcaucauc

SEQ ID NO: 551018 - RNA, 19 nt, Homo sapiens
  misc_RNA (1)...(19): siRNA sense strand
gcacucaugagcucaccau

SEQ ID NO: 551019 - RNA, 19 nt, Homo sapiens
  misc_RNA (1)...(19): siRNA sense strand
gggaagaaaggagaaacug

SEQ ID NO: 551020 - RNA, 19 nt, Homo sapiens
  misc_RNA (1)...(19): siRNA sense strand
uucaaggccuuugccauga

SEQ ID NO: 551021 - RNA, 19 nt, Homo sapiens
  misc_RNA (1)...(19): siRNA sense strand
gcgucaagcagaucugugu

SEQ ID NO: 551022 - RNA, 19 nt, Homo sapiens
  misc_RNA (1)...(19): siRNA sense strand
aaugaaauucgacagaugu

SEQ ID NO: 551023 - RNA, 19 nt, Homo sapiens
  misc_RNA (1)...(19): siRNA sense strand
caaggaucaacaucucaga

SEQ ID NO: 551024 - RNA, 19 nt, Homo sapiens
  misc_RNA (1)...(19): siRNA sense strand
cacaauccagggacaguau

SEQ ID NO: 551025 - RNA, 19 nt, Homo sapiens
  misc_RNA (1)...(19): siRNA sense strand
aaacugcccagagaggauu

SEQ ID NO: 551026 - RNA, 19 nt, Homo sapiens
  misc_RNA (1)...(19): siRNA sense strand
caacauggccauauaauuu

SEQ ID NO: 551027 - RNA, 19 nt, Homo sapiens
  misc_RNA (1)...(19): siRNA sense strand
ucaaacagauggugucuuu

SEQ ID NO: 551028 - RNA, 19 nt, Homo sapiens
  misc_RNA (1)...(19): siRNA sense strand
ccugaagucugaagaauuu

SEQ ID NO: 551029 - RNA, 19 nt, Homo sapiens
  misc_RNA (1)...(19): siRNA sense strand
ucacugacauugagaggua

SEQ ID NO: 551030 - RNA, 19 nt, Homo sapiens
  misc_RNA (1)...(19): siRNA sense strand
ggaucaacauggccauaua

SEQ ID NO: 551031 - RNA, 19 nt, Homo sapiens
  misc_RNA (1)...(19): siRNA sense strand
uaacgaagcugaaaauaga

SEQ ID NO: 551032 - RNA, 19 nt, Homo sapiens
  misc_RNA (1)...(19): siRNA sense strand
ugaacucaaugcauaagua

SEQ ID NO: 551033 - RNA, 19 nt, Homo sapiens
  misc_RNA (1)...(19): siRNA sense strand
acaaugaacuggaucaaca

SEQ ID NO: 551034 - RNA, 19 nt, Homo sapiens
  misc_RNA (1)...(19): siRNA sense strand
gcacaucauuaagaagaaa

SEQ ID NO: 551035 - RNA, 19 nt, Homo sapiens
  misc_RNA (1)...(19): siRNA sense strand
gaucaacauggccauauaa

SEQ ID NO: 551036 - RNA, 19 nt, Homo sapiens
  misc_RNA (1)...(19): siRNA sense strand
gaaacucaccaacaaugaa

SEQ ID NO: 551037 - RNA, 19 nt, Homo sapiens
  misc_RNA (1)...(19): siRNA sense strand
gccaaaggauuccgggauu

SEQ ID NO: 551038 - RNA, 19 nt, Homo sapiens
  misc_RNA (1)...(19): siRNA sense strand
gagcaacuacucaaacaga

SEQ ID NO: 551039 - RNA, 19 nt, Homo sapiens
  misc_RNA (1)...(19): siRNA sense strand
gccaacgccuucuccauug

SEQ ID NO: 551040 - RNA, 19 nt, Homo sapiens
  misc_RNA (1)...(19): siRNA sense strand
caagggugcacaucauuaa

SEQ ID NO: 551041 - RNA, 19 nt, Homo sapiens
  misc_RNA (1)...(19): siRNA sense strand
ccaagggugcacaucauua

SEQ ID NO: 551042 - RNA, 19 nt, Homo sapiens
  misc_RNA (1)...(19): siRNA sense strand
ccucauugcucaaccugaa

SEQ ID NO: 551043 - RNA, 19 nt, Homo sapiens
  misc_RNA (1)...(19): siRNA sense strand
ggccaacgccuucuccauu

SEQ ID NO: 551044 - RNA, 19 nt, Homo sapiens
  misc_RNA (1)...(19): siRNA sense strand
gggugcacaucauuaagaa

SEQ ID NO: 551045 - RNA, 19 nt, Homo sapiens
  misc_RNA (1)...(19): siRNA sense strand
ccaaguacauaguccugau

SEQ ID NO: 551046 - RNA, 19 nt, Homo sapiens
  misc_RNA (1)...(19): siRNA sense strand
gaaaauagauagcaauccu

SEQ ID NO: 551047 - RNA, 19 nt, Homo sapiens
  misc_RNA (1)...(19): siRNA sense strand
cgacggagaacacaaucaa

SEQ ID NO: 551048 - RNA, 19 nt, Homo sapiens
  misc_RNA (1)...(19): siRNA sense strand
gugcacaucauuaagaaga

SEQ ID NO: 551049 - RNA, 19 nt, Homo sapiens
  misc_RNA (1)...(19): siRNA sense strand
gaacucaaugcauaaguac

SEQ ID NO: 551050 - RNA, 19 nt, Homo sapiens
  misc_RNA (1)...(19): siRNA sense strand
gaagucugaagaauuuaga

SEQ ID NO: 551051 - RNA, 19 nt, Homo sapiens
  misc_RNA (1)...(19): siRNA sense strand
gagcugggcaccgagauga

SEQ ID NO: 551052 - RNA, 19 nt, Homo sapiens
  misc_RNA (1)...(19): siRNA sense strand
ccaaaggauuccgggauuc

SEQ ID NO: 551053 - RNA, 19 nt, Homo sapiens
  misc_RNA (1)...(19): siRNA sense strand
agaaggaggcgacggagaa

SEQ ID NO: 551054 - RNA, 19 nt, Homo sapiens
  misc_RNA (1)...(19): siRNA sense strand
ucaacauggccauauaauu

SEQ ID NO: 551055 - RNA, 19 nt, Homo sapiens
  misc_RNA (1)...(19): siRNA sense strand
caccaacaaugaacuggau

SEQ ID NO: 551056 - RNA, 19 nt, Homo sapiens
  misc_RNA (1)...(19): siRNA sense strand
caaccugaagucugaagaa

SEQ ID NO: 551057 - RNA, 19 nt, Homo sapiens
  misc_RNA (1)...(19): siRNA sense strand
gcaacuacucaaacagaug

SEQ ID NO: 551058 - RNA, 19 nt, Homo sapiens
  misc_RNA (1)...(19): siRNA sense strand
ugaaacucaccaacaauga

SEQ ID NO: 551059 - RNA, 19 nt, Homo sapiens
  misc_RNA (1)...(19): siRNA sense strand
ggaggauguuuccaaccau

SEQ ID NO: 551060 - RNA, 19 nt, Homo sapiens
  misc_RNA (1)...(19): siRNA sense strand
ucaaaccccuggagcaauu

SEQ ID NO: 551061 - RNA, 19 nt, Homo sapiens
  misc_RNA (1)...(19): siRNA sense strand
gcauccagauucuccuuuu

SEQ ID NO: 551062 - RNA, 19 nt, Homo sapiens
  misc_RNA (1)...(19): siRNA sense strand
gaggaaauggccaaaauug

SEQ ID NO: 551063 - RNA, 19 nt, Homo sapiens
  misc_RNA (1)...(19): siRNA sense strand
ggagcaauuuguggagaag

SEQ ID NO: 551064 - RNA, 19 nt, Homo sapiens
  misc_RNA (1)...(19): siRNA sense strand
cagauggugucuuuugaaa

SEQ ID NO: 551065 - RNA, 19 nt, Homo sapiens
  misc_RNA (1)...(19): siRNA sense strand
gugaggaaauggccaaaau

SEQ ID NO: 551066 - RNA, 19 nt, Homo sapiens
  misc_RNA (1)...(19): siRNA sense strand
uaagaagaaagaccacaca

SEQ ID NO: 551067 - RNA, 19 nt, Homo sapiens
  misc_RNA (1)...(19): siRNA sense strand
gccaagggugcacaucauu

SEQ ID NO: 551068 - RNA, 19 nt, Homo sapiens
  misc_RNA (1)...(19): siRNA sense strand
ccuccucucugugcacuga

SEQ ID NO: 551069 - RNA, 19 nt, Homo sapiens
  misc_RNA (1)...(19): siRNA sense strand
cauccagauucuccuuuua

SEQ ID NO: 551070 - RNA, 19 nt, Homo sapiens
  misc_RNA (1)...(19): siRNA sense strand
uggagcaauuuguggagaa

SEQ ID NO: 551071 - RNA, 19 nt, Homo sapiens
  misc_RNA (1)...(19): siRNA sense strand
caacaaugaacuggaucaa

SEQ ID NO: 551072 - RNA, 19 nt, Homo sapiens
  misc_RNA (1)...(19): siRNA sense strand
ggcaggaggauguuuccaa

SEQ ID NO: 551073 - RNA, 19 nt, Homo sapiens
  misc_RNA (1)...(19): siRNA sense strand
ccuccaggcucacugacau

SEQ ID NO: 551074 - RNA, 19 nt, Homo sapiens
  misc_RNA (1)...(19): siRNA sense strand
aaacagauggugucuuuug

SEQ ID NO: 551075 - RNA, 19 nt, Homo sapiens
  misc_RNA (1)...(19): siRNA sense strand
gacggagaacacaaucaaa

SEQ ID NO: 551076 - RNA, 19 nt, Homo sapiens
  misc_RNA (1)...(19): siRNA sense strand
caaguacauaguccugaug

SEQ ID NO: 551077 - RNA, 19 nt, Homo sapiens
  misc_RNA (1)...(19): siRNA sense strand
ugcucaaccugaagucuga

SEQ ID NO: 551078 - RNA, 19 nt, Homo sapiens
  misc_RNA (1)...(19): siRNA sense strand
cagccaagggugcacauca

SEQ ID NO: 551079 - RNA, 19 nt, Homo sapiens
  misc_RNA (1)...(19): siRNA sense strand
aaccugaagucugaagaau

SEQ ID NO: 551080 - RNA, 19 nt, Homo sapiens
  misc_RNA (1)...(19): siRNA sense strand
aggaggauguuuccaacca

SEQ ID NO: 551081 - RNA, 19 nt, Homo sapiens
  misc_RNA (1)...(19): siRNA sense strand
gauaacgaagcugaaaaua

SEQ ID NO: 551082 - RNA, 19 nt, Homo sapiens
  misc_RNA (1)...(19): siRNA sense strand
agaccacacagccucauug

SEQ ID NO: 551083 - RNA, 19 nt, Homo sapiens
  misc_RNA (1)...(19): siRNA sense strand
ccaacaaugaacuggauca

SEQ ID NO: 551084 - RNA, 19 nt, Homo sapiens
  misc_RNA (1)...(19): siRNA sense strand
gcaccaagaucaaggagau

SEQ ID NO: 551085 - RNA, 19 nt, Homo sapiens
  misc_RNA (1)...(19): siRNA sense strand
cgccagaucugcgcuguua

SEQ ID NO: 551086 - RNA, 19 nt, Homo sapiens
  misc_RNA (1)...(19): siRNA sense strand
gaacgcaucaccaccauca

SEQ ID NO: 551087 - RNA, 19 nt, Homo sapiens
  misc_RNA (1)...(19): siRNA sense strand
caugauugcuuucaaacug

SEQ ID NO: 551088 - RNA, 19 nt, Homo sapiens
  misc_RNA (1)...(19): siRNA sense strand
ccucaucacugccugucua

SEQ ID NO: 551089 - RNA, 19 nt, Homo sapiens
  misc_RNA (1)...(19): siRNA sense strand
ggccuacacugccaagaug

SEQ ID NO: 551090 - RNA, 19 nt, Homo sapiens
  misc_RNA (1)...(19): siRNA sense strand
gcagcaagaucagcgagau

SEQ ID NO: 551091 - RNA, 19 nt, Homo sapiens
  misc_RNA (1)...(19): siRNA sense strand
caagauggcagcagcuaau

SEQ ID NO: 551092 - RNA, 19 nt, Homo sapiens
  misc_RNA (1)...(19): siRNA sense strand
gcaaaugguggaaaugucu

SEQ ID NO: 551093 - RNA, 19 nt, Homo sapiens
  misc_RNA (1)...(19): siRNA sense strand
caaacuggaugaggaccuu

SEQ ID NO: 551094 - RNA, 19 nt, Homo sapiens
  misc_RNA (1)...(19): siRNA sense strand
gacuacgggugcccaggua

SEQ ID NO: 551095 - RNA, 19 nt, Homo sapiens
  misc_RNA (1)...(19): siRNA sense strand
ccgagccucucccuaggua

SEQ ID NO: 551096 - RNA, 19 nt, Homo sapiens
  misc_RNA (1)...(19): siRNA sense strand
gcacacagaccagcucaca

SEQ ID NO: 551097 - RNA, 19 nt, Homo sapiens
  misc_RNA (1)...(19): siRNA sense strand
aggcugagcggcagaaauu

SEQ ID NO: 551098 - RNA, 19 nt, Homo sapiens
  misc_RNA (1)...(19): siRNA sense strand
ccaucucccucuccaacuu

SEQ ID NO: 551099 - RNA, 19 nt, Homo sapiens
  misc_RNA (1)...(19): siRNA sense strand
ggaaggcuggcaccaagau

SEQ ID NO: 551100 - RNA, 19 nt, Homo sapiens
  misc_RNA (1)...(19): siRNA sense strand
cuccaugauugcuuucaaa

SEQ ID NO: 551101 - RNA, 19 nt, Homo sapiens
  misc_RNA (1)...(19): siRNA sense strand
ccaagauggcagcagcuaa

SEQ ID NO: 551102 - RNA, 19 nt, Homo sapiens
  misc_RNA (1)...(19): siRNA sense strand
cagucuccaugauugcuuu

SEQ ID NO: 551103 - RNA, 19 nt, Homo sapiens
  misc_RNA (1)...(19): siRNA sense strand
ucaagcccaugcccuucuu

SEQ ID NO: 551104 - RNA, 19 nt, Homo sapiens
  misc_RNA (1)...(19): siRNA sense strand
gauuugauuggcuguguga

SEQ ID NO: 551105 - RNA, 19 nt, Homo sapiens
  misc_RNA (1)...(19): siRNA sense strand
ccagaucugcgcuguuauc

SEQ ID NO: 551106 - RNA, 19 nt, Homo sapiens
  misc_RNA (1)...(19): siRNA sense strand
gugcugcuccugcaaaugg

SEQ ID NO: 551107 - RNA, 19 nt, Homo sapiens
  misc_RNA (1)...(19): siRNA sense strand
gcagcuaaugggagcaaga

SEQ ID NO: 551108 - RNA, 19 nt, Homo sapiens
  misc_RNA (1)...(19): siRNA sense strand
caagaucgggaaccaagca

SEQ ID NO: 551109 - RNA, 19 nt, Homo sapiens
  misc_RNA (1)...(19): siRNA sense strand
caacuucaucggccucaag

SEQ ID NO: 551110 - RNA, 19 nt, Homo sapiens
  misc_RNA (1)...(19): siRNA sense strand
ccaugcccuucuuggcuuu

SEQ ID NO: 551111 - RNA, 19 nt, Homo sapiens
  misc_RNA (1)...(19): siRNA sense strand
gaccagcucacaggaguuc

SEQ ID NO: 551112 - RNA, 19 nt, Homo sapiens
  misc_RNA (1)...(19): siRNA sense strand
cagcuaaugggagcaagaa

SEQ ID NO: 551113 - RNA, 19 nt, Homo sapiens
  misc_RNA (1)...(19): siRNA sense strand
gcucacaggaguucuuggu

SEQ ID NO: 551114 - RNA, 19 nt, Homo sapiens
  misc_RNA (1)...(19): siRNA sense strand
gcagugcccggaucaccau

SEQ ID NO: 551115 - RNA, 19 nt, Homo sapiens
  misc_RNA (1)...(19): siRNA sense strand
ucagcgagauccggcagau

SEQ ID NO: 551116 - RNA, 19 nt, Homo sapiens
  misc_RNA (1)...(19): siRNA sense strand
caucacugccugucuagag

SEQ ID NO: 551117 - RNA, 19 nt, Homo sapiens
  misc_RNA (1)...(19): siRNA sense strand
gcaccaagaucaaggagau

SEQ ID NO: 551118 - RNA, 19 nt, Homo sapiens
  misc_RNA (1)...(19): siRNA sense strand
cgccagaucugcgcuguua

SEQ ID NO: 551119 - RNA, 19 nt, Homo sapiens
  misc_RNA (1)...(19): siRNA sense strand
gaacgcaucaccaccauca

SEQ ID NO: 551120 - RNA, 19 nt, Homo sapiens
  misc_RNA (1)...(19): siRNA sense strand
gaagaagggcgagacugua

SEQ ID NO: 551121 - RNA, 19 nt, Homo sapiens
  misc_RNA (1)...(19): siRNA sense strand
ggaagaagggcgagacugu

SEQ ID NO: 551122 - RNA, 19 nt, Homo sapiens
  misc_RNA (1)...(19): siRNA sense strand
caugauugcuuucaaacug

SEQ ID NO: 551123 - RNA, 19 nt, Homo sapiens
  misc_RNA (1)...(19): siRNA sense strand
ccucaucacugccugucua

SEQ ID NO: 551124 - RNA, 19 nt, Homo sapiens
  misc_RNA (1)...(19): siRNA sense strand
ggccuacacugccaagaug

SEQ ID NO: 551125 - RNA, 19 nt, Homo sapiens
  misc_RNA (1)...(19): siRNA sense strand
gcagcaagaucagcgagau

SEQ ID NO: 551126 - RNA, 19 nt, Homo sapiens
  misc_RNA (1)...(19): siRNA sense strand
caagauggcagcagcuaau

SEQ ID NO: 551127 - RNA, 19 nt, Homo sapiens
  misc_RNA (1)...(19): siRNA sense strand
ggaaggaagugggcagcau

SEQ ID NO: 551128 - RNA, 19 nt, Homo sapiens
  misc_RNA (1)...(19): siRNA sense strand
gcaaaugguggaaaugucu

SEQ ID NO: 551129 - RNA, 19 nt, Homo sapiens
  misc_RNA (1)...(19): siRNA sense strand
caaacuggaugaggaccuu

SEQ ID NO: 551130 - RNA, 19 nt, Homo sapiens
  misc_RNA (1)...(19): siRNA sense strand
gacuacgggugcccaggua

SEQ ID NO: 551131 - RNA, 19 nt, Homo sapiens
  misc_RNA (1)...(19): siRNA sense strand
ccgagccucucccuaggua

SEQ ID NO: 551132 - RNA, 19 nt, Homo sapiens
  misc_RNA (1)...(19): siRNA sense strand
gcacacagaccagcucaca

SEQ ID NO: 551133 - RNA, 19 nt, Homo sapiens
  misc_RNA (1)...(19): siRNA sense strand
aagaagggcgagacuguaa

SEQ ID NO: 551134 - RNA, 19 nt, Homo sapiens
  misc_RNA (1)...(19): siRNA sense strand
ggaagugggcagcaucauc

SEQ ID NO: 551135 - RNA, 19 nt, Homo sapiens
  misc_RNA (1)...(19): siRNA sense strand
aggcugagcggcagaaauu

SEQ ID NO: 551136 - RNA, 19 nt, Homo sapiens
  misc_RNA (1)...(19): siRNA sense strand
gaagggcgagacuguaaag

SEQ ID NO: 551137 - RNA, 19 nt, Homo sapiens
  misc_RNA (1)...(19): siRNA sense strand
ccaucucccucuccaacuu

SEQ ID NO: 551138 - RNA, 19 nt, Homo sapiens
  misc_RNA (1)...(19): siRNA sense strand
ggaaggcuggcaccaagau

SEQ ID NO: 551139 - RNA, 19 nt, Homo sapiens
  misc_RNA (1)...(19): siRNA sense strand
gcgagacuguaaagcgaau

SEQ ID NO: 551140 - RNA, 19 nt, Homo sapiens
  misc_RNA (1)...(19): siRNA sense strand
gcagcaucaucgggaagaa

SEQ ID NO: 551141 - RNA, 19 nt, Homo sapiens
  misc_RNA (1)...(19): siRNA sense strand
cuccaugauugcuuucaaa

SEQ ID NO: 551142 - RNA, 19 nt, Homo sapiens
  misc_RNA (1)...(19): siRNA sense strand
ccaagauggcagcagcuaa

SEQ ID NO: 551143 - RNA, 19 nt, Homo sapiens
  misc_RNA (1)...(19): siRNA sense strand
cagucuccaugauugcuuu

SEQ ID NO: 551144 - RNA, 19 nt, Homo sapiens
  misc_RNA (1)...(19): siRNA sense strand
ucaagcccaugcccuucuu

SEQ ID NO: 551145 - RNA, 19 nt, Homo sapiens
  misc_RNA (1)...(19): siRNA sense strand
gauuugauuggcuguguga

SEQ ID NO: 551146 - RNA, 19 nt, Homo sapiens
  misc_RNA (1)...(19): siRNA sense strand
ccagaucugcgcuguuauc

SEQ ID NO: 551147 - RNA, 19 nt, Homo sapiens
  misc_RNA (1)...(19): siRNA sense strand
gugcugcuccugcaaaugg

SEQ ID NO: 551148 - RNA, 19 nt, Homo sapiens
  misc_RNA (1)...(19): siRNA sense strand
gcagcuaaugggagcaaga

SEQ ID NO: 551149 - RNA, 19 nt, Homo sapiens
  misc_RNA (1)...(19): siRNA sense strand
caagaucgggaaccaagca

SEQ ID NO: 551150 - RNA, 19 nt, Homo sapiens
  misc_RNA (1)...(19): siRNA sense strand
caacuucaucggccucaag

SEQ ID NO: 551151 - RNA, 19 nt, Homo sapiens
  misc_RNA (1)...(19): siRNA sense strand
ccaugcccuucuuggcuuu

SEQ ID NO: 551152 - RNA, 19 nt, Homo sapiens
  misc_RNA (1)...(19): siRNA sense strand
gaccagcucacaggaguuc

SEQ ID NO: 551153 - RNA, 19 nt, Homo sapiens
  misc_RNA (1)...(19): siRNA sense strand
cagcuaaugggagcaagaa

SEQ ID NO: 551154 - RNA, 19 nt, Homo sapiens
  misc_RNA (1)...(19): siRNA sense strand
gcucacaggaguucuuggu

SEQ ID NO: 551155 - RNA, 19 nt, Homo sapiens
  misc_RNA (1)...(19): siRNA sense strand
gcagugcccggaucaccau

SEQ ID NO: 551156 - RNA, 19 nt, Homo sapiens
  misc_RNA (1)...(19): siRNA sense strand
ucagcgagauccggcagau

SEQ ID NO: 551157 - RNA, 19 nt, Homo sapiens
  misc_RNA (1)...(19): siRNA sense strand
caucacugccugucuagag

SEQ ID NO: 551158 - RNA, 19 nt, Homo sapiens
  misc_RNA (1)...(19): siRNA sense strand
gcaccaagaucaaggagau

SEQ ID NO: 551159 - RNA, 19 nt, Homo sapiens
  misc_RNA (1)...(19): siRNA sense strand
cgccagaucugcgcuguua

SEQ ID NO: 551160 - RNA, 19 nt, Homo sapiens
  misc_RNA (1)...(19): siRNA sense strand
gaacgcaucaccaccauca

SEQ ID NO: 551161 - RNA, 19 nt, Homo sapiens
  misc_RNA (1)...(19): siRNA sense strand
caugauugcuuucaaacug

SEQ ID NO: 551162 - RNA, 19 nt, Homo sapiens
  misc_RNA (1)...(19): siRNA sense strand
ccucaucacugccugucua

SEQ ID NO: 551163 - RNA, 19 nt, Homo sapiens
  misc_RNA (1)...(19): siRNA sense strand
ggccuacacugccaagaug

SEQ ID NO: 551164 - RNA, 19 nt, Homo sapiens
  misc_RNA (1)...(19): siRNA sense strand
gcagcaagaucagcgagau

SEQ ID NO: 551165 - RNA, 19 nt, Homo sapiens
  misc_RNA (1)...(19): siRNA sense strand
caagauggcagcagcuaau

SEQ ID NO: 551166 - RNA, 19 nt, Homo sapiens
  misc_RNA (1)...(19): siRNA sense strand
gcaaaugguggaaaugucu

SEQ ID NO: 551167 - RNA, 19 nt, Homo sapiens
  misc_RNA (1)...(19): siRNA sense strand
caaacuggaugaggaccuu

SEQ ID NO: 551168 - RNA, 19 nt, Homo sapiens
  misc_RNA (1)...(19): siRNA sense strand
gacuacgggugcccaggua

SEQ ID NO: 551169 - RNA, 19 nt, Homo sapiens
  misc_RNA (1)...(19): siRNA sense strand
ccgagccucucccuaggua

SEQ ID NO: 551170 - RNA, 19 nt, Homo sapiens
  misc_RNA (1)...(19): siRNA sense strand
gcacacagaccagcucaca

SEQ ID NO: 551171 - RNA, 19 nt, Homo sapiens
  misc_RNA (1)...(19): siRNA sense strand
aggcugagcggcagaaauu

SEQ ID NO: 551172 - RNA, 19 nt, Homo sapiens
  misc_RNA (1)...(19): siRNA sense strand
ccaucucccucuccaacuu

SEQ ID NO: 551173 - RNA, 19 nt, Homo sapiens
  misc_RNA (1)...(19): siRNA sense strand
ggaaggcuggcaccaagau

SEQ ID NO: 551174 - RNA, 19 nt, Homo sapiens
  misc_RNA (1)...(19): siRNA sense strand
cuccaugauugcuuucaaa

SEQ ID NO: 551175 - RNA, 19 nt, Homo sapiens
  misc_RNA (1)...(19): siRNA sense strand
ccaagauggcagcagcuaa

SEQ ID NO: 551176 - RNA, 19 nt, Homo sapiens
  misc_RNA (1)...(19): siRNA sense strand
cagucuccaugauugcuuu

SEQ ID NO: 551177 - RNA, 19 nt, Homo sapiens
  misc_RNA (1)...(19): siRNA sense strand
ucaagcccaugcccuucuu

SEQ ID NO: 551178 - RNA, 19 nt, Homo sapiens
  misc_RNA (1)...(19): siRNA sense strand
gauuugauuggcuguguga

SEQ ID NO: 551179 - RNA, 19 nt, Homo sapiens
  misc_RNA (1)...(19): siRNA sense strand
ccagaucugcgcuguuauc

SEQ ID NO: 551180 - RNA, 19 nt, Homo sapiens
  misc_RNA (1)...(19): siRNA sense strand
gugcugcuccugcaaaugg

SEQ ID NO: 551181 - RNA, 19 nt, Homo sapiens
  misc_RNA (1)...(19): siRNA sense strand
gcagcuaaugggagcaaga

SEQ ID NO: 551182 - RNA, 19 nt, Homo sapiens
  misc_RNA (1)...(19): siRNA sense strand
caagaucgggaaccaagca

SEQ ID NO: 551183 - RNA, 19 nt, Homo sapiens
  misc_RNA (1)...(19): siRNA sense strand
caacuucaucggccucaag

SEQ ID NO: 551184 - RNA, 19 nt, Homo sapiens
  misc_RNA (1)...(19): siRNA sense strand
ccaugcccuucuuggcuuu

SEQ ID NO: 551185 - RNA, 19 nt, Homo sapiens
  misc_RNA (1)...(19): siRNA sense strand
gaccagcucacaggaguuc

SEQ ID NO: 551186 - RNA, 19 nt, Homo sapiens
  misc_RNA (1)...(19): siRNA sense strand
cagcuaaugggagcaagaa

SEQ ID NO: 551187 - RNA, 19 nt, Homo sapiens
  misc_RNA (1)...(19): siRNA sense strand
gcucacaggaguucuuggu

SEQ ID NO: 551188 - RNA, 19 nt, Homo sapiens
  misc_RNA (1)...(19): siRNA sense strand
gcagugcccggaucaccau

SEQ ID NO: 551189 - RNA, 19 nt, Homo sapiens
  misc_RNA (1)...(19): siRNA sense strand
ucagcgagauccggcagau

SEQ ID NO: 551190 - RNA, 19 nt, Homo sapiens
  misc_RNA (1)...(19): siRNA sense strand
caucacugccugucuagag

SEQ ID NO: 551191 - RNA, 19 nt, Homo sapiens
  misc_RNA (1)...(19): siRNA sense strand
gcaccaagaucaaggagau

SEQ ID NO: 551192 - RNA, 19 nt, Homo sapiens
  misc_RNA (1)...(19): siRNA sense strand
cgccagaucugcgcuguua

SEQ ID NO: 551193 - RNA, 19 nt, Homo sapiens
  misc_RNA (1)...(19): siRNA sense strand
gaacgcaucaccaccauca

SEQ ID NO: 551194 - RNA, 19 nt, Homo sapiens
  misc_RNA (1)...(19): siRNA sense strand
gaagaagggcgagacugua

SEQ ID NO: 551195 - RNA, 19 nt, Homo sapiens
  misc_RNA (1)...(19): siRNA sense strand
ggaagaagggcgagacugu

SEQ ID NO: 551196 - RNA, 19 nt, Homo sapiens
  misc_RNA (1)...(19): siRNA sense strand
caugauugcuuucaaacug

SEQ ID NO: 551197 - RNA, 19 nt, Homo sapiens
  misc_RNA (1)...(19): siRNA sense strand
ccucaucacugccugucua

SEQ ID NO: 551198 - RNA, 19 nt, Homo sapiens
  misc_RNA (1)...(19): siRNA sense strand
ggccuacacugccaagaug

SEQ ID NO: 551199 - RNA, 19 nt, Homo sapiens
  misc_RNA (1)...(19): siRNA sense strand
gcagcaagaucagcgagau

SEQ ID NO: 551200 - RNA, 19 nt, Homo sapiens
  misc_RNA (1)...(19): siRNA sense strand
caagauggcagcagcuaau

SEQ ID NO: 551201 - RNA, 19 nt, Homo sapiens
  misc_RNA (1)...(19): siRNA sense strand
ggaaggaagugggcagcau

SEQ ID NO: 551202 - RNA, 19 nt, Homo sapiens
  misc_RNA (1)...(19): siRNA sense strand
gcaaaugguggaaaugucu

SEQ ID NO: 551203 - RNA, 19 nt, Homo sapiens
  misc_RNA (1)...(19): siRNA sense strand
caaacuggaugaggaccuu

SEQ ID NO: 551204 - RNA, 19 nt, Homo sapiens
  misc_RNA (1)...(19): siRNA sense strand
gacuacgggugcccaggua

SEQ ID NO: 551205 - RNA, 19 nt, Homo sapiens
  misc_RNA (1)...(19): siRNA sense strand
ccgagccucucccuaggua

SEQ ID NO: 551206 - RNA, 19 nt, Homo sapiens
  misc_RNA (1)...(19): siRNA sense strand
gcacacagaccagcucaca

SEQ ID NO: 551207 - RNA, 19 nt, Homo sapiens
  misc_RNA (1)...(19): siRNA sense strand
aagaagggcgagacuguaa

SEQ ID NO: 551208 - RNA, 19 nt, Homo sapiens
  misc_RNA (1)...(19): siRNA sense strand
ggaagugggcagcaucauc

SEQ ID NO: 551209 - RNA, 19 nt, Homo sapiens
  misc_RNA (1)...(19): siRNA sense strand
aggcugagcggcagaaauu

SEQ ID NO: 551210 - RNA, 19 nt, Homo sapiens
  misc_RNA (1)...(19): siRNA sense strand
gaagggcgagacuguaaag

SEQ ID NO: 551211 - RNA, 19 nt, Homo sapiens
  misc_RNA (1)...(19): siRNA sense strand
ccaucucccucuccaacuu

SEQ ID NO: 551212 - RNA, 19 nt, Homo sapiens
  misc_RNA (1)...(19): siRNA sense strand
ggaaggcuggcaccaagau

SEQ ID NO: 551213 - RNA, 19 nt, Homo sapiens
  misc_RNA (1)...(19): siRNA sense strand
gcgagacuguaaagcgaau

SEQ ID NO: 551214 - RNA, 19 nt, Homo sapiens
  misc_RNA (1)...(19): siRNA sense strand
gcagcaucaucgggaagaa

SEQ ID NO: 551215 - RNA, 19 nt, Homo sapiens
  misc_RNA (1)...(19): siRNA sense strand
cuccaugauugcuuucaaa

SEQ ID NO: 551216 - RNA, 19 nt, Homo sapiens
  misc_RNA (1)...(19): siRNA sense strand
ccaagauggcagcagcuaa

SEQ ID NO: 551217 - RNA, 19 nt, Homo sapiens
  misc_RNA (1)...(19): siRNA sense strand
cagucuccaugauugcuuu

SEQ ID NO: 551218 - RNA, 19 nt, Homo sapiens
  misc_RNA (1)...(19): siRNA sense strand
ucaagcccaugcccuucuu

SEQ ID NO: 551219 - RNA, 19 nt, Homo sapiens
  misc_RNA (1)...(19): siRNA sense strand
gauuugauuggcuguguga

SEQ ID NO: 551220 - RNA, 19 nt, Homo sapiens
  misc_RNA (1)...(19): siRNA sense strand
ccagaucugcgcuguuauc

SEQ ID NO: 551221 - RNA, 19 nt, Homo sapiens
  misc_RNA (1)...(19): siRNA sense strand
gugcugcuccugcaaaugg

SEQ ID NO: 551222 - RNA, 19 nt, Homo sapiens
  misc_RNA (1)...(19): siRNA sense strand
gcagcuaaugggagcaaga

SEQ ID NO: 551223 - RNA, 19 nt, Homo sapiens
  misc_RNA (1)...(19): siRNA sense strand
caagaucgggaaccaagca

SEQ ID NO: 551224 - RNA, 19 nt, Homo sapiens
  misc_RNA (1)...(19): siRNA sense strand
caacuucaucggccucaag

SEQ ID NO: 551225 - RNA, 19 nt, Homo sapiens
  misc_RNA (1)...(19): siRNA sense strand
ccaugcccuucuuggcuuu

SEQ ID NO: 551226 - RNA, 19 nt, Homo sapiens
  misc_RNA (1)...(19): siRNA sense strand
gaccagcucacaggaguuc

SEQ ID NO: 551227 - RNA, 19 nt, Homo sapiens
  misc_RNA (1)...(19): siRNA sense strand
cagcuaaugggagcaagaa

SEQ ID NO: 551228 - RNA, 19 nt, Homo sapiens
  misc_RNA (1)...(19): siRNA sense strand
gcucacaggaguucuuggu

SEQ ID NO: 551229 - RNA, 19 nt, Homo sapiens
  misc_RNA (1)...(19): siRNA sense strand
gcagugcccggaucaccau

SEQ ID NO: 551230 - RNA, 19 nt, Homo sapiens
  misc_RNA (1)...(19): siRNA sense strand
ucagcgagauccggcagau

SEQ ID NO: 551231 - RNA, 19 nt, Homo sapiens
  misc_RNA (1)...(19): siRNA sense strand
caucacugccugucuagag

SEQ ID NO: 551232 - RNA, 19 nt, Homo sapiens
  misc_RNA (1)...(19): siRNA sense strand
ggagaaaccuguucccaaa

SEQ ID NO: 551233 - RNA, 19 nt, Homo sapiens
  misc_RNA (1)...(19): siRNA sense strand
ggaaggaagugaagauuga

SEQ ID NO: 551234 - RNA, 19 nt, Homo sapiens
  misc_RNA (1)...(19): siRNA sense strand
gagaugacaugguuuguga

SEQ ID NO: 551235 - RNA, 19 nt, Homo sapiens
  misc_RNA (1)...(19): siRNA sense strand
ccacguaccucggagauuu

SEQ ID NO: 551236 - RNA, 19 nt, Homo sapiens
  misc_RNA (1)...(19): siRNA sense strand
gaacagccacagccaagua

SEQ ID NO: 551237 - RNA, 19 nt, Homo sapiens
  misc_RNA (1)...(19): siRNA sense strand
ucagaaaccuggagcaguu

SEQ ID NO: 551238 - RNA, 19 nt, Homo sapiens
  misc_RNA (1)...(19): siRNA sense strand
gaaucaaaguugugggaaa

SEQ ID NO: 551239 - RNA, 19 nt, Homo sapiens
  misc_RNA (1)...(19): siRNA sense strand
caaguacaagugcaaauua

SEQ ID NO: 551240 - RNA, 19 nt, Homo sapiens
  misc_RNA (1)...(19): siRNA sense strand
caagaaagaugaggauauc

SEQ ID NO: 551241 - RNA, 19 nt, Homo sapiens
  misc_RNA (1)...(19): siRNA sense strand
gaagaacgucggagacaaa

SEQ ID NO: 551242 - RNA, 19 nt, Homo sapiens
  misc_RNA (1)...(19): siRNA sense strand
ccaaacagaaugagaauga

SEQ ID NO: 551243 - RNA, 19 nt, Homo sapiens
  misc_RNA (1)...(19): siRNA sense strand
gcucgaauccuucauaaga

SEQ ID NO: 551244 - RNA, 19 nt, Homo sapiens
  misc_RNA (1)...(19): siRNA sense strand
ggcacaagcuguuucagaa

SEQ ID NO: 551245 - RNA, 19 nt, Homo sapiens
  misc_RNA (1)...(19): siRNA sense strand
ccagggagaugacaugguu

SEQ ID NO: 551246 - RNA, 19 nt, Homo sapiens
  misc_RNA (1)...(19): siRNA sense strand
agaccaagauccauuguga

SEQ ID NO: 551247 - RNA, 19 nt, Homo sapiens
  misc_RNA (1)...(19): siRNA sense strand
gugaucaacuuuaagaaga

SEQ ID NO: 551248 - RNA, 19 nt, Homo sapiens
  misc_RNA (1)...(19): siRNA sense strand
gucaagcuguggcaaauuu

SEQ ID NO: 551249 - RNA, 19 nt, Homo sapiens
  misc_RNA (1)...(19): siRNA sense strand
gaagauugacccaaauaug

SEQ ID NO: 551250 - RNA, 19 nt, Homo sapiens
  misc_RNA (1)...(19): siRNA sense strand
caaaguccuugauaucaug

SEQ ID NO: 551251 - RNA, 19 nt, Homo sapiens
  misc_RNA (1)...(19): siRNA sense strand
caaagggaaucaaaguugu

SEQ ID NO: 551252 - RNA, 19 nt, Homo sapiens
  misc_RNA (1)...(19): siRNA sense strand
gaaccgucguccugagauu

SEQ ID NO: 551253 - RNA, 19 nt, Homo sapiens
  misc_RNA (1)...(19): siRNA sense strand
gagcagacuggaaaucuaa

SEQ ID NO: 551254 - RNA, 19 nt, Homo sapiens
  misc_RNA (1)...(19): siRNA sense strand
gcacaacucuuggauugag

SEQ ID NO: 551255 - RNA, 19 nt, Homo sapiens
  misc_RNA (1)...(19): siRNA sense strand
agauugagcuggaagaaga

SEQ ID NO: 551256 - RNA, 19 nt, Homo sapiens
  misc_RNA (1)...(19): siRNA sense strand
ggaggaaaaucuugauaaa

SEQ ID NO: 551257 - RNA, 19 nt, Homo sapiens
  misc_RNA (1)...(19): siRNA sense strand
gaagaagacauguauaagg

SEQ ID NO: 551258 - RNA, 19 nt, Homo sapiens
  misc_RNA (1)...(19): siRNA sense strand
cagcugcccuggagauuga

SEQ ID NO: 551259 - RNA, 19 nt, Homo sapiens
  misc_RNA (1)...(19): siRNA sense strand
gaaccaguacccagaaaga

SEQ ID NO: 551260 - RNA, 19 nt, Homo sapiens
  misc_RNA (1)...(19): siRNA sense strand
cagaaagaauuugaaguga

SEQ ID NO: 551261 - RNA, 19 nt, Homo sapiens
  misc_RNA (1)...(19): siRNA sense strand
gaaagucuagcucaccaaa

SEQ ID NO: 551262 - RNA, 19 nt, Homo sapiens
  misc_RNA (1)...(19): siRNA sense strand
ccguuuagcucgacagauu

SEQ ID NO: 551263 - RNA, 19 nt, Homo sapiens
  misc_RNA (1)...(19): siRNA sense strand
gaggaugugaucaacuuua

SEQ ID NO: 551264 - RNA, 19 nt, Homo sapiens
  misc_RNA (1)...(19): siRNA sense strand
ucauugaccucacaaggaa

SEQ ID NO: 551265 - RNA, 19 nt, Homo sapiens
  misc_RNA (1)...(19): siRNA sense strand
uugaggaauugacagauua

SEQ ID NO: 551266 - RNA, 19 nt, Homo sapiens
  misc_RNA (1)...(19): siRNA sense strand
acaaaacgcucaagaaaga

SEQ ID NO: 551267 - RNA, 19 nt, Homo sapiens
  misc_RNA (1)...(19): siRNA sense strand
gagaaaggcacaagcuguu

SEQ ID NO: 551268 - RNA, 19 nt, Homo sapiens
  misc_RNA (1)...(19): siRNA sense strand
ccagaaagaauuugaagug

SEQ ID NO: 551269 - RNA, 19 nt, Homo sapiens
  misc_RNA (1)...(19): siRNA sense strand
cugcacaacucuuggauug

SEQ ID NO: 551270 - RNA, 19 nt, Homo sapiens
  misc_RNA (1)...(19): siRNA sense strand
gaccaggcguugcucuuug

SEQ ID NO: 551271 - RNA, 19 nt, Homo sapiens
  misc_RNA (1)...(19): siRNA sense strand
ucagaaagcagauguguca

SEQ ID NO: 551272 - RNA, 19 nt, Homo sapiens
  misc_RNA (1)...(19): siRNA sense strand
agacauggauuccugaagu

SEQ ID NO: 551273 - RNA, 19 nt, Homo sapiens
  misc_RNA (1)...(19): siRNA sense strand
ugacaugguuugugaugau

SEQ ID NO: 551274 - RNA, 19 nt, Homo sapiens
  misc_RNA (1)...(19): siRNA sense strand
gaugugaucaacuuuaaga

SEQ ID NO: 551275 - RNA, 19 nt, Homo sapiens
  misc_RNA (1)...(19): siRNA sense strand
gacauggauuccugaaguu

SEQ ID NO: 551276 - RNA, 19 nt, Homo sapiens
  misc_RNA (1)...(19): siRNA sense strand
gaaugagaaugaggaggaa

SEQ ID NO: 551277 - RNA, 19 nt, Homo sapiens
  misc_RNA (1)...(19): siRNA sense strand
uggaagaagacauguauaa

SEQ ID NO: 551278 - RNA, 19 nt, Homo sapiens
  misc_RNA (1)...(19): siRNA sense strand
agaagaagaagacaaagaa

SEQ ID NO: 551279 - RNA, 19 nt, Homo sapiens
  misc_RNA (1)...(19): siRNA sense strand
agaagaagaagaagacaaa

SEQ ID NO: 551280 - RNA, 19 nt, Homo sapiens
  misc_RNA (1)...(19): siRNA sense strand
auaaagagcagacuggaaa

SEQ ID NO: 551281 - RNA, 19 nt, Homo sapiens
  misc_RNA (1)...(19): siRNA sense strand
ucaaggagcgaauccguuu

SEQ ID NO: 551282 - RNA, 19 nt, Homo sapiens
  misc_RNA (1)...(19): siRNA sense strand
cacaagcuguuucagaaga

SEQ ID NO: 551283 - RNA, 19 nt, Homo sapiens
  misc_RNA (1)...(19): siRNA sense strand
uccagcaugucauccauua

SEQ ID NO: 551284 - RNA, 19 nt, Homo sapiens
  misc_RNA (1)...(19): siRNA sense strand
caagauccauugugagacu

SEQ ID NO: 551285 - RNA, 19 nt, Homo sapiens
  misc_RNA (1)...(19): siRNA sense strand
gcagaugugucagcuugga

SEQ ID NO: 551286 - RNA, 19 nt, Homo sapiens
  misc_RNA (1)...(19): siRNA sense strand
ugcuagagaugcucaauga

SEQ ID NO: 551287 - RNA, 19 nt, Homo sapiens
  misc_RNA (1)...(19): siRNA sense strand
ccaagcagaagaagaagaa

SEQ ID NO: 551288 - RNA, 19 nt, Homo sapiens
  misc_RNA (1)...(19): siRNA sense strand
gcaguuugcccgucuggaa

SEQ ID NO: 551289 - RNA, 19 nt, Homo sapiens
  misc_RNA (1)...(19): siRNA sense strand
gaaagacuucuacuuguac

SEQ ID NO: 551290 - RNA, 19 nt, Homo sapiens
  misc_RNA (1)...(19): siRNA sense strand
auaagaagcacaccaagaa

SEQ ID NO: 551291 - RNA, 19 nt, Homo sapiens
  misc_RNA (1)...(19): siRNA sense strand
ccuccagucucuucucaaa

SEQ ID NO: 551292 - RNA, 19 nt, Homo sapiens
  misc_RNA (1)...(19): siRNA sense strand
aacaguaucuccugcauca

SEQ ID NO: 551293 - RNA, 19 nt, Homo sapiens
  misc_RNA (1)...(19): siRNA sense strand
uaacagagaccaagaucca

SEQ ID NO: 551294 - RNA, 19 nt, Homo sapiens
  misc_RNA (1)...(19): siRNA sense strand
aaaggaagcacccaagaga

SEQ ID NO: 551295 - RNA, 19 nt, Homo sapiens
  misc_RNA (1)...(19): siRNA sense strand
acaaagggaaucaaaguug

SEQ ID NO: 551296 - RNA, 19 nt, Homo sapiens
  misc_RNA (1)...(19): siRNA sense strand
aagucuagcucaccaaaga

SEQ ID NO: 551297 - RNA, 19 nt, Homo sapiens
  misc_RNA (1)...(19): siRNA sense strand
ggccggagcugagacuaga

SEQ ID NO: 551298 - RNA, 19 nt, Homo sapiens
  misc_RNA (1)...(19): siRNA sense strand
aggaugugaucaacuuuaa

SEQ ID NO: 551299 - RNA, 19 nt, Homo sapiens
  misc_RNA (1)...(19): siRNA sense strand
gaacugcucgagcuaccaa

SEQ ID NO: 551300 - RNA, 19 nt, Homo sapiens
  misc_RNA (1)...(19): siRNA sense strand
ucucugggcuccucaaagu

SEQ ID NO: 551301 - RNA, 19 nt, Homo sapiens
  misc_RNA (1)...(19): siRNA sense strand
gauaaagagcagacuggaa

SEQ ID NO: 551302 - RNA, 19 nt, Homo sapiens
  misc_RNA (1)...(19): siRNA sense strand
ccaagaaucccuccagucu

SEQ ID NO: 551303 - RNA, 19 nt, Homo sapiens
  misc_RNA (1)...(19): siRNA sense strand
agacaaagaagccgaagga

SEQ ID NO: 551304 - RNA, 19 nt, Homo sapiens
  misc_RNA (1)...(19): siRNA sense strand
ucaagaaagaugaggauau

SEQ ID NO: 551305 - RNA, 19 nt, Homo sapiens
  misc_RNA (1)...(19): siRNA sense strand
gugaagauugacccaaaua

SEQ ID NO: 551306 - RNA, 19 nt, Homo sapiens
  misc_RNA (1)...(19): siRNA sense strand
ggccgcagcuuaguguuug

SEQ ID NO: 551307 - RNA, 19 nt, Homo sapiens
  misc_RNA (1)...(19): siRNA sense strand
ggaaaacucuugccuuugc

SEQ ID NO: 551308 - RNA, 19 nt, Homo sapiens
  misc_RNA (1)...(19): siRNA sense strand
gcagucaagcuguggcaaa

SEQ ID NO: 551309 - RNA, 19 nt, Homo sapiens
  misc_RNA (1)...(19): siRNA sense strand
ccaaguacaagugcaaauu

SEQ ID NO: 551310 - RNA, 19 nt, Homo sapiens
  misc_RNA (1)...(19): siRNA sense strand
ggaagaagacauguauaag

SEQ ID NO: 551311 - RNA, 19 nt, Homo sapiens
  misc_RNA (1)...(19): siRNA sense strand
gcuggaagaagacauguau

SEQ ID NO: 551312 - RNA, 19 nt, Homo sapiens
  misc_RNA (1)...(19): siRNA sense strand
gacaaagggaaucaaaguu

SEQ ID NO: 551313 - RNA, 19 nt, Homo sapiens
  misc_RNA (1)...(19): siRNA sense strand
agagcagacuggaaaucua

SEQ ID NO: 551314 - RNA, 19 nt, Homo sapiens
  misc_RNA (1)...(19): siRNA sense strand
gguccaaacugcuccaaaa

SEQ ID NO: 551315 - RNA, 19 nt, Homo sapiens
  misc_RNA (1)...(19): siRNA sense strand
uaagaagcacaccaagaaa

SEQ ID NO: 551316 - RNA, 19 nt, Homo sapiens
  misc_RNA (1)...(19): siRNA sense strand
aagugaagauugacccaaa

SEQ ID NO: 551317 - RNA, 19 nt, Homo sapiens
  misc_RNA (1)...(19): siRNA sense strand
ccaauacaacccaaagaga

SEQ ID NO: 551318 - RNA, 19 nt, Homo sapiens
  misc_RNA (1)...(19): siRNA sense strand
gcugugggaauuaauuaaa

SEQ ID NO: 551319 - RNA, 19 nt, Homo sapiens
  misc_RNA (1)...(19): siRNA sense strand
aagaaucccuccagucucu

SEQ ID NO: 551320 - RNA, 19 nt, Homo sapiens
  misc_RNA (1)...(19): siRNA sense strand
gaauguccacgcagaaaca

SEQ ID NO: 551321 - RNA, 19 nt, Homo sapiens
  misc_RNA (1)...(19): siRNA sense strand
aaacaggaguuggaugaca

SEQ ID NO: 551322 - RNA, 19 nt, Homo sapiens
  misc_RNA (1)...(19): siRNA sense strand
ugacgaugaugcuggugaa

SEQ ID NO: 551323 - RNA, 19 nt, Homo sapiens
  misc_RNA (1)...(19): siRNA sense strand
ccaguacccagaaagaauu

SEQ ID NO: 551324 - RNA, 19 nt, Homo sapiens
  misc_RNA (1)...(19): siRNA sense strand
gaagacauggauuccugaa

SEQ ID NO: 551325 - RNA, 19 nt, Homo sapiens
  misc_RNA (1)...(19): siRNA sense strand
uaagagcgagucugcuuug

SEQ ID NO: 551326 - RNA, 19 nt, Homo sapiens
  misc_RNA (1)...(19): siRNA sense strand
guaagagcgagucugcuuu

SEQ ID NO: 551327 - RNA, 19 nt, Homo sapiens
  misc_RNA (1)...(19): siRNA sense strand
cugaggaugugaucaacuu

SEQ ID NO: 551328 - RNA, 19 nt, Homo sapiens
  misc_RNA (1)...(19): siRNA sense strand
cauaagaagcacaccaaga

SEQ ID NO: 551329 - RNA, 19 nt, Homo sapiens
  misc_RNA (1)...(19): siRNA sense strand
gcucuuuggugacgaugau

SEQ ID NO: 551330 - RNA, 19 nt, Homo sapiens
  misc_RNA (1)...(19): siRNA sense strand
gccugacgauacuguaauu

SEQ ID NO: 551331 - RNA, 19 nt, Homo sapiens
  misc_RNA (1)...(19): siRNA sense strand
gaagaagaagacaaagaag

SEQ ID NO: 551332 - RNA, 19 nt, Homo sapiens
  misc_RNA (1)...(19): siRNA sense strand
caagaaaggcaaagaaaua

SEQ ID NO: 551333 - RNA, 19 nt, Homo sapiens
  misc_RNA (1)...(19): siRNA sense strand
caaagaguauccacaccua

SEQ ID NO: 551334 - RNA, 19 nt, Homo sapiens
  misc_RNA (1)...(19): siRNA sense strand
gaaauaccauuagccaguu

SEQ ID NO: 551335 - RNA, 19 nt, Homo sapiens
  misc_RNA (1)...(19): siRNA sense strand
caccacaaauuccacaaua

SEQ ID NO: 551336 - RNA, 19 nt, Homo sapiens
  misc_RNA (1)...(19): siRNA sense strand
gggaauugauggcgugaaa

SEQ ID NO: 551337 - RNA, 19 nt, Homo sapiens
  misc_RNA (1)...(19): siRNA sense strand
ugggauaccuggaauuaaa

SEQ ID NO: 551338 - RNA, 19 nt, Homo sapiens
  misc_RNA (1)...(19): siRNA sense strand
gaacaacgagcccgugaug

SEQ ID NO: 551339 - RNA, 19 nt, Homo sapiens
  misc_RNA (1)...(19): siRNA sense strand
gcaaagaaauaccauuagc

SEQ ID NO: 551340 - RNA, 19 nt, Homo sapiens
  misc_RNA (1)...(19): siRNA sense strand
ucaaauuccuccucagaug

SEQ ID NO: 551341 - RNA, 19 nt, Homo sapiens
  misc_RNA (1)...(19): siRNA sense strand
ggagugcugcuuaccauuu

SEQ ID NO: 551342 - RNA, 19 nt, Homo sapiens
  misc_RNA (1)...(19): siRNA sense strand
caaaggagaaggugggauu

SEQ ID NO: 551343 - RNA, 19 nt, Homo sapiens
  misc_RNA (1)...(19): siRNA sense strand
ggagaaaggaccaauaggu

SEQ ID NO: 551344 - RNA, 19 nt, Homo sapiens
  misc_RNA (1)...(19): siRNA sense strand
cccaauauaugaaggaaau

SEQ ID NO: 551345 - RNA, 19 nt, Homo sapiens
  misc_RNA (1)...(19): siRNA sense strand
acaacgagcccgugaugua

SEQ ID NO: 551346 - RNA, 19 nt, Homo sapiens
  misc_RNA (1)...(19): siRNA sense strand
caugggauaccuggaauua

SEQ ID NO: 551347 - RNA, 19 nt, Homo sapiens
  misc_RNA (1)...(19): siRNA sense strand
ucagaugccaccacaaauu

SEQ ID NO: 551348 - RNA, 19 nt, Homo sapiens
  misc_RNA (1)...(19): siRNA sense strand
gcuaagaaaggcaagaaug

SEQ ID NO: 551349 - RNA, 19 nt, Homo sapiens
  misc_RNA (1)...(19): siRNA sense strand
aggcaaagaaauaccauua

SEQ ID NO: 551350 - RNA, 19 nt, Homo sapiens
  misc_RNA (1)...(19): siRNA sense strand
gcaaggagaugccccacuu

SEQ ID NO: 551351 - RNA, 19 nt, Homo sapiens
  misc_RNA (1)...(19): siRNA sense strand
ggguugcucuauucaagaa

SEQ ID NO: 551352 - RNA, 19 nt, Homo sapiens
  misc_RNA (1)...(19): siRNA sense strand
acagggauauccaggaguu

SEQ ID NO: 551353 - RNA, 19 nt, Homo sapiens
  misc_RNA (1)...(19): siRNA sense strand
gaauggagggccagccuau

SEQ ID NO: 551354 - RNA, 19 nt, Homo sapiens
  misc_RNA (1)...(19): siRNA sense strand
gaaaggcaaagaaauacca

SEQ ID NO: 551355 - RNA, 19 nt, Homo sapiens
  misc_RNA (1)...(19): siRNA sense strand
ggaguuggaaagccaggua

SEQ ID NO: 551356 - RNA, 19 nt, Homo sapiens
  misc_RNA (1)...(19): siRNA sense strand
ccucagaugccaccacaaa

SEQ ID NO: 551357 - RNA, 19 nt, Homo sapiens
  misc_RNA (1)...(19): siRNA sense strand
ccaagaaaggcaaagaaau

SEQ ID NO: 551358 - RNA, 19 nt, Homo sapiens
  misc_RNA (1)...(19): siRNA sense strand
gagugcugcuuaccauuuc

SEQ ID NO: 551359 - RNA, 19 nt, Homo sapiens
  misc_RNA (1)...(19): siRNA sense strand
aggagaaggugggauugua

SEQ ID NO: 551360 - RNA, 19 nt, Homo sapiens
  misc_RNA (1)...(19): siRNA sense strand
gggcaaaccaggagugaca

SEQ ID NO: 551361 - RNA, 19 nt, Homo sapiens
  misc_RNA (1)...(19): siRNA sense strand
ggucaugggauaccuggaa

SEQ ID NO: 551362 - RNA, 19 nt, Homo sapiens
  misc_RNA (1)...(19): siRNA sense strand
uaccuggaauuaaaggaaa

SEQ ID NO: 551363 - RNA, 19 nt, Homo sapiens
  misc_RNA (1)...(19): siRNA sense strand
aggagaaauuggacagaaa

SEQ ID NO: 551364 - RNA, 19 nt, Homo sapiens
  misc_RNA (1)...(19): siRNA sense strand
ggagaaauuggacagaaag

SEQ ID NO: 551365 - RNA, 19 nt, Homo sapiens
  misc_RNA (1)...(19): siRNA sense strand
gcauuuaccgccgagcuaa

SEQ ID NO: 551366 - RNA, 19 nt, Homo sapiens
  misc_RNA (1)...(19): siRNA sense strand
ggagaaggugggauuguag

SEQ ID NO: 551367 - RNA, 19 nt, Homo sapiens
  misc_RNA (1)...(19): siRNA sense strand
gcaguauggcaaagaguau

SEQ ID NO: 551368 - RNA, 19 nt, Homo sapiens
  misc_RNA (1)...(19): siRNA sense strand
ggaagccguacccaagaaa

SEQ ID NO: 551369 - RNA, 19 nt, Homo sapiens
  misc_RNA (1)...(19): siRNA sense strand
aaggagaaauuggacagaa

SEQ ID NO: 551370 - RNA, 19 nt, Homo sapiens
  misc_RNA (1)...(19): siRNA sense strand
ugaggucccuggugucuac

SEQ ID NO: 551371 - RNA, 19 nt, Homo sapiens
  misc_RNA (1)...(19): siRNA sense strand
gggauacccggaauuggaa

SEQ ID NO: 551372 - RNA, 19 nt, Homo sapiens
  misc_RNA (1)...(19): siRNA sense strand
gaacuacaacccgcagaca

SEQ ID NO: 551373 - RNA, 19 nt, Homo sapiens
  misc_RNA (1)...(19): siRNA sense strand
aaauaccauuagccaguuu

SEQ ID NO: 551374 - RNA, 19 nt, Homo sapiens
  misc_RNA (1)...(19): siRNA sense strand
uggagagccuggcccaaga

SEQ ID NO: 551375 - RNA, 19 nt, Homo sapiens
  misc_RNA (1)...(19): siRNA sense strand
uaagaaaggcaagaaugga

SEQ ID NO: 551376 - RNA, 19 nt, Homo sapiens
  misc_RNA (1)...(19): siRNA sense strand
cguguggguugcucuauuc

SEQ ID NO: 551377 - RNA, 19 nt, Homo sapiens
  misc_RNA (1)...(19): siRNA sense strand
cagaugccaccacaaauuc

SEQ ID NO: 551378 - RNA, 19 nt, Homo sapiens
  misc_RNA (1)...(19): siRNA sense strand
ucauggacuuccuggcauu

SEQ ID NO: 551379 - RNA, 19 nt, Homo sapiens
  misc_RNA (1)...(19): siRNA sense strand
guggguugcucuauucaag

SEQ ID NO: 551380 - RNA, 19 nt, Homo sapiens
  misc_RNA (1)...(19): siRNA sense strand
ggacagaaaggggaaauug

SEQ ID NO: 551381 - RNA, 19 nt, Homo sapiens
  misc_RNA (1)...(19): siRNA sense strand
ccuggugucuacuacuuug

SEQ ID NO: 551382 - RNA, 19 nt, Homo sapiens
  misc_RNA (1)...(19): siRNA sense strand
uaagggagagccaggaauc

SEQ ID NO: 551383 - RNA, 19 nt, Homo sapiens
  misc_RNA (1)...(19): siRNA sense strand
ggaguggcaggacuucaug

SEQ ID NO: 551384 - RNA, 19 nt, Homo sapiens
  misc_RNA (1)...(19): siRNA sense strand
guauguccacuccuccuuu

SEQ ID NO: 551385 - RNA, 19 nt, Homo sapiens
  misc_RNA (1)...(19): siRNA sense strand
cauaccacguucacugcaa

SEQ ID NO: 551386 - RNA, 19 nt, Homo sapiens
  misc_RNA (1)...(19): siRNA sense strand
cccaagaaaggcaaagaaa

SEQ ID NO: 551387 - RNA, 19 nt, Homo sapiens
  misc_RNA (1)...(19): siRNA sense strand
ccucaaauuccuccucaga

SEQ ID NO: 551388 - RNA, 19 nt, Homo sapiens
  misc_RNA (1)...(19): siRNA sense strand
ggacuaccaggaccucaag

SEQ ID NO: 551389 - RNA, 19 nt, Homo sapiens
  misc_RNA (1)...(19): siRNA sense strand
cuacuuugcauaccacguu

SEQ ID NO: 551390 - RNA, 19 nt, Homo sapiens
  misc_RNA (1)...(19): siRNA sense strand
ggagggccagccuaugaga

SEQ ID NO: 551391 - RNA, 19 nt, Homo sapiens
  misc_RNA (1)...(19): siRNA sense strand
cuaagaaaggcaagaaugg

SEQ ID NO: 551392 - RNA, 19 nt, Homo sapiens
  misc_RNA (1)...(19): siRNA sense strand
aggaagccguacccaagaa

SEQ ID NO: 551393 - RNA, 19 nt, Homo sapiens
  misc_RNA (1)...(19): siRNA sense strand
cgagcuaaccgcaccuuuc

SEQ ID NO: 551394 - RNA, 19 nt, Homo sapiens
  misc_RNA (1)...(19): siRNA sense strand
gggcuaagaaaggcaagaa

SEQ ID NO: 551395 - RNA, 19 nt, Homo sapiens
  misc_RNA (1)...(19): siRNA sense strand
gaucccaggaccacaagga

SEQ ID NO: 551396 - RNA, 19 nt, Homo sapiens
  misc_RNA (1)...(19): siRNA sense strand
aaccagggccacagggaua

SEQ ID NO: 551397 - RNA, 19 nt, Homo sapiens
  misc_RNA (1)...(19): siRNA sense strand
caacgagcccgugauguac

SEQ ID NO: 551398 - RNA, 19 nt, Homo sapiens
  misc_RNA (1)...(19): siRNA sense strand
ggcaaagaaauaccauuag

SEQ ID NO: 551399 - RNA, 19 nt, Homo sapiens
  misc_RNA (1)...(19): siRNA sense strand
ccagaugcccucagaacag

SEQ ID NO: 551400 - RNA, 19 nt, Homo sapiens
  misc_RNA (1)...(19): siRNA sense strand
aaagccagguuuccuuggu

SEQ ID NO: 551401 - RNA, 19 nt, Homo sapiens
  misc_RNA (1)...(19): siRNA sense strand
ggaaucccagguccuaugg

SEQ ID NO: 551402 - RNA, 19 nt, Homo sapiens
  misc_RNA (1)...(19): siRNA sense strand
ucgaggacccaaaggacua

SEQ ID NO: 551403 - RNA, 19 nt, Homo sapiens
  misc_RNA (1)...(19): siRNA sense strand
ugggauacccggaauugga

SEQ ID NO: 551404 - RNA, 19 nt, Homo sapiens
  misc_RNA (1)...(19): siRNA sense strand
gccaagaaugggcaaggaa

SEQ ID NO: 551405 - RNA, 19 nt, Homo sapiens
  misc_RNA (1)...(19): siRNA sense strand
gagcuaaccgcaccuuucc

SEQ ID NO: 551406 - RNA, 19 nt, Homo sapiens
  misc_RNA (1)...(19): siRNA sense strand
ggguuugccaggucccaua

SEQ ID NO: 551407 - RNA, 19 nt, Homo sapiens
  misc_RNA (1)...(19): siRNA sense strand
ggucagcaaguaccucaca

SEQ ID NO: 551408 - RNA, 19 nt, Homo sapiens
  misc_RNA (1)...(19): siRNA sense strand
uuugccaggucaugggaua

SEQ ID NO: 551409 - RNA, 19 nt, Homo sapiens
  misc_RNA (1)...(19): siRNA sense strand
guugcucuauucaagaaca

SEQ ID NO: 551410 - RNA, 19 nt, Homo sapiens
  misc_RNA (1)...(19): siRNA sense strand
gaagccuggugcccuuggu

SEQ ID NO: 551411 - RNA, 19 nt, Homo sapiens
  misc_RNA (1)...(19): siRNA sense strand
cugcugggagugcugcuua

SEQ ID NO: 551412 - RNA, 19 nt, Homo sapiens
  misc_RNA (1)...(19): siRNA sense strand
ccacaccuaccccaauaua

SEQ ID NO: 551413 - RNA, 19 nt, Homo sapiens
  misc_RNA (1)...(19): siRNA sense strand
gucaugggauaccuggaau

SEQ ID NO: 551414 - RNA, 19 nt, Homo sapiens
  misc_RNA (1)...(19): siRNA sense strand
guaccucacaugccuuugg

SEQ ID NO: 551415 - RNA, 19 nt, Homo sapiens
  misc_RNA (1)...(19): siRNA sense strand
ucccuggugucuacuacuu

SEQ ID NO: 551416 - RNA, 19 nt, Homo sapiens
  misc_RNA (1)...(19): siRNA sense strand
ccaggugcgccagguguaa

SEQ ID NO: 551417 - RNA, 19 nt, Homo sapiens
  misc_RNA (1)...(19): siRNA sense strand
caagaaaggcaaagaaaua

SEQ ID NO: 551418 - RNA, 19 nt, Homo sapiens
  misc_RNA (1)...(19): siRNA sense strand
caaagaguauccacaccua

SEQ ID NO: 551419 - RNA, 19 nt, Homo sapiens
  misc_RNA (1)...(19): siRNA sense strand
gaaauaccauuagccaguu

SEQ ID NO: 551420 - RNA, 19 nt, Homo sapiens
  misc_RNA (1)...(19): siRNA sense strand
caccacaaauuccacaaua

SEQ ID NO: 551421 - RNA, 19 nt, Homo sapiens
  misc_RNA (1)...(19): siRNA sense strand
gggaauugauggcgugaaa

SEQ ID NO: 551422 - RNA, 19 nt, Homo sapiens
  misc_RNA (1)...(19): siRNA sense strand
ugggauaccuggaauuaaa

SEQ ID NO: 551423 - RNA, 19 nt, Homo sapiens
  misc_RNA (1)...(19): siRNA sense strand
gaacaacgagcccgugaug

SEQ ID NO: 551424 - RNA, 19 nt, Homo sapiens
  misc_RNA (1)...(19): siRNA sense strand
gcaaagaaauaccauuagc

SEQ ID NO: 551425 - RNA, 19 nt, Homo sapiens
  misc_RNA (1)...(19): siRNA sense strand
ucaaauuccuccucagaug

SEQ ID NO: 551426 - RNA, 19 nt, Homo sapiens
  misc_RNA (1)...(19): siRNA sense strand
ggagugcugcuuaccauuu

SEQ ID NO: 551427 - RNA, 19 nt, Homo sapiens
  misc_RNA (1)...(19): siRNA sense strand
caaaggagaaggugggauu

SEQ ID NO: 551428 - RNA, 19 nt, Homo sapiens
  misc_RNA (1)...(19): siRNA sense strand
ggagaaaggaccaauaggu

SEQ ID NO: 551429 - RNA, 19 nt, Homo sapiens
  misc_RNA (1)...(19): siRNA sense strand
cccaauauaugaaggaaau

SEQ ID NO: 551430 - RNA, 19 nt, Homo sapiens
  misc_RNA (1)...(19): siRNA sense strand
acaacgagcccgugaugua

SEQ ID NO: 551431 - RNA, 19 nt, Homo sapiens
  misc_RNA (1)...(19): siRNA sense strand
caugggauaccuggaauua

SEQ ID NO: 551432 - RNA, 19 nt, Homo sapiens
  misc_RNA (1)...(19): siRNA sense strand
ucagaugccaccacaaauu

SEQ ID NO: 551433 - RNA, 19 nt, Homo sapiens
  misc_RNA (1)...(19): siRNA sense strand
gcuaagaaaggcaagaaug

SEQ ID NO: 551434 - RNA, 19 nt, Homo sapiens
  misc_RNA (1)...(19): siRNA sense strand
aggcaaagaaauaccauua

SEQ ID NO: 551435 - RNA, 19 nt, Homo sapiens
  misc_RNA (1)...(19): siRNA sense strand
gcaaggagaugccccacuu

SEQ ID NO: 551436 - RNA, 19 nt, Homo sapiens
  misc_RNA (1)...(19): siRNA sense strand
ggguugcucuauucaagaa

SEQ ID NO: 551437 - RNA, 19 nt, Homo sapiens
  misc_RNA (1)...(19): siRNA sense strand
acagggauauccaggaguu

SEQ ID NO: 551438 - RNA, 19 nt, Homo sapiens
  misc_RNA (1)...(19): siRNA sense strand
gaauggagggccagccuau

SEQ ID NO: 551439 - RNA, 19 nt, Homo sapiens
  misc_RNA (1)...(19): siRNA sense strand
gaaaggcaaagaaauacca

SEQ ID NO: 551440 - RNA, 19 nt, Homo sapiens
  misc_RNA (1)...(19): siRNA sense strand
ggaguuggaaagccaggua

SEQ ID NO: 551441 - RNA, 19 nt, Homo sapiens
  misc_RNA (1)...(19): siRNA sense strand
ccucagaugccaccacaaa

SEQ ID NO: 551442 - RNA, 19 nt, Homo sapiens
  misc_RNA (1)...(19): siRNA sense strand
ccaagaaaggcaaagaaau

SEQ ID NO: 551443 - RNA, 19 nt, Homo sapiens
  misc_RNA (1)...(19): siRNA sense strand
gagugcugcuuaccauuuc

SEQ ID NO: 551444 - RNA, 19 nt, Homo sapiens
  misc_RNA (1)...(19): siRNA sense strand
aggagaaggugggauugua

SEQ ID NO: 551445 - RNA, 19 nt, Homo sapiens
  misc_RNA (1)...(19): siRNA sense strand
gggcaaaccaggagugaca

SEQ ID NO: 551446 - RNA, 19 nt, Homo sapiens
  misc_RNA (1)...(19): siRNA sense strand
ggucaugggauaccuggaa

SEQ ID NO: 551447 - RNA, 19 nt, Homo sapiens
  misc_RNA (1)...(19): siRNA sense strand
uaccuggaauuaaaggaaa

SEQ ID NO: 551448 - RNA, 19 nt, Homo sapiens
  misc_RNA (1)...(19): siRNA sense strand
aggagaaauuggacagaaa

SEQ ID NO: 551449 - RNA, 19 nt, Homo sapiens
  misc_RNA (1)...(19): siRNA sense strand
ggagaaauuggacagaaag

SEQ ID NO: 551450 - RNA, 19 nt, Homo sapiens
  misc_RNA (1)...(19): siRNA sense strand
gcauuuaccgccgagcuaa

SEQ ID NO: 551451 - RNA, 19 nt, Homo sapiens
  misc_RNA (1)...(19): siRNA sense strand
ggagaaggugggauuguag

SEQ ID NO: 551452 - RNA, 19 nt, Homo sapiens
  misc_RNA (1)...(19): siRNA sense strand
gcaguauggcaaagaguau

SEQ ID NO: 551453 - RNA, 19 nt, Homo sapiens
  misc_RNA (1)...(19): siRNA sense strand
ggaagccguacccaagaaa

SEQ ID NO: 551454 - RNA, 19 nt, Homo sapiens
  misc_RNA (1)...(19): siRNA sense strand
aaggagaaauuggacagaa

SEQ ID NO: 551455 - RNA, 19 nt, Homo sapiens
  misc_RNA (1)...(19): siRNA sense strand
ugaggucccuggugucuac

SEQ ID NO: 551456 - RNA, 19 nt, Homo sapiens
  misc_RNA (1)...(19): siRNA sense strand
gggauacccggaauuggaa

SEQ ID NO: 551457 - RNA, 19 nt, Homo sapiens
  misc_RNA (1)...(19): siRNA sense strand
gaacuacaacccgcagaca

SEQ ID NO: 551458 - RNA, 19 nt, Homo sapiens
  misc_RNA (1)...(19): siRNA sense strand
aaauaccauuagccaguuu

SEQ ID NO: 551459 - RNA, 19 nt, Homo sapiens
  misc_RNA (1)...(19): siRNA sense strand
uggagagccuggcccaaga

SEQ ID NO: 551460 - RNA, 19 nt, Homo sapiens
  misc_RNA (1)...(19): siRNA sense strand
uaagaaaggcaagaaugga

SEQ ID NO: 551461 - RNA, 19 nt, Homo sapiens
  misc_RNA (1)...(19): siRNA sense strand
cguguggguugcucuauuc

SEQ ID NO: 551462 - RNA, 19 nt, Homo sapiens
  misc_RNA (1)...(19): siRNA sense strand
cagaugccaccacaaauuc

SEQ ID NO: 551463 - RNA, 19 nt, Homo sapiens
  misc_RNA (1)...(19): siRNA sense strand
ucauggacuuccuggcauu

SEQ ID NO: 551464 - RNA, 19 nt, Homo sapiens
  misc_RNA (1)...(19): siRNA sense strand
guggguugcucuauucaag

SEQ ID NO: 551465 - RNA, 19 nt, Homo sapiens
  misc_RNA (1)...(19): siRNA sense strand
ggacagaaaggggaaauug

SEQ ID NO: 551466 - RNA, 19 nt, Homo sapiens
  misc_RNA (1)...(19): siRNA sense strand
ccuggugucuacuacuuug

SEQ ID NO: 551467 - RNA, 19 nt, Homo sapiens
  misc_RNA (1)...(19): siRNA sense strand
uaagggagagccaggaauc

SEQ ID NO: 551468 - RNA, 19 nt, Homo sapiens
  misc_RNA (1)...(19): siRNA sense strand
ggaguggcaggacuucaug

SEQ ID NO: 551469 - RNA, 19 nt, Homo sapiens
  misc_RNA (1)...(19): siRNA sense strand
guauguccacuccuccuuu

SEQ ID NO: 551470 - RNA, 19 nt, Homo sapiens
  misc_RNA (1)...(19): siRNA sense strand
cauaccacguucacugcaa

SEQ ID NO: 551471 - RNA, 19 nt, Homo sapiens
  misc_RNA (1)...(19): siRNA sense strand
cccaagaaaggcaaagaaa

SEQ ID NO: 551472 - RNA, 19 nt, Homo sapiens
  misc_RNA (1)...(19): siRNA sense strand
ccucaaauuccuccucaga

SEQ ID NO: 551473 - RNA, 19 nt, Homo sapiens
  misc_RNA (1)...(19): siRNA sense strand
ggacuaccaggaccucaag

SEQ ID NO: 551474 - RNA, 19 nt, Homo sapiens
  misc_RNA (1)...(19): siRNA sense strand
cuacuuugcauaccacguu

SEQ ID NO: 551475 - RNA, 19 nt, Homo sapiens
  misc_RNA (1)...(19): siRNA sense strand
ggagggccagccuaugaga

SEQ ID NO: 551476 - RNA, 19 nt, Homo sapiens
  misc_RNA (1)...(19): siRNA sense strand
cuaagaaaggcaagaaugg

SEQ ID NO: 551477 - RNA, 19 nt, Homo sapiens
  misc_RNA (1)...(19): siRNA sense strand
aggaagccguacccaagaa

SEQ ID NO: 551478 - RNA, 19 nt, Homo sapiens
  misc_RNA (1)...(19): siRNA sense strand
cgagcuaaccgcaccuuuc

SEQ ID NO: 551479 - RNA, 19 nt, Homo sapiens
  misc_RNA (1)...(19): siRNA sense strand
gggcuaagaaaggcaagaa

SEQ ID NO: 551480 - RNA, 19 nt, Homo sapiens
  misc_RNA (1)...(19): siRNA sense strand
gaucccaggaccacaagga

SEQ ID NO: 551481 - RNA, 19 nt, Homo sapiens
  misc_RNA (1)...(19): siRNA sense strand
aaccagggccacagggaua

SEQ ID NO: 551482 - RNA, 19 nt, Homo sapiens
  misc_RNA (1)...(19): siRNA sense strand
caacgagcccgugauguac

SEQ ID NO: 551483 - RNA, 19 nt, Homo sapiens
  misc_RNA (1)...(19): siRNA sense strand
ggcaaagaaauaccauuag

SEQ ID NO: 551484 - RNA, 19 nt, Homo sapiens
  misc_RNA (1)...(19): siRNA sense strand
ccagaugcccucagaacag

SEQ ID NO: 551485 - RNA, 19 nt, Homo sapiens
  misc_RNA (1)...(19): siRNA sense strand
aaagccagguuuccuuggu

SEQ ID NO: 551486 - RNA, 19 nt, Homo sapiens
  misc_RNA (1)...(19): siRNA sense strand
ggaaucccagguccuaugg

SEQ ID NO: 551487 - RNA, 19 nt, Homo sapiens
  misc_RNA (1)...(19): siRNA sense strand
ucgaggacccaaaggacua

SEQ ID NO: 551488 - RNA, 19 nt, Homo sapiens
  misc_RNA (1)...(19): siRNA sense strand
ugggauacccggaauugga

SEQ ID NO: 551489 - RNA, 19 nt, Homo sapiens
  misc_RNA (1)...(19): siRNA sense strand
gccaagaaugggcaaggaa

SEQ ID NO: 551490 - RNA, 19 nt, Homo sapiens
  misc_RNA (1)...(19): siRNA sense strand
gagcuaaccgcaccuuucc

SEQ ID NO: 551491 - RNA, 19 nt, Homo sapiens
  misc_RNA (1)...(19): siRNA sense strand
ggguuugccaggucccaua

SEQ ID NO: 551492 - RNA, 19 nt, Homo sapiens
  misc_RNA (1)...(19): siRNA sense strand
ggucagcaaguaccucaca

SEQ ID NO: 551493 - RNA, 19 nt, Homo sapiens
  misc_RNA (1)...(19): siRNA sense strand
uuugccaggucaugggaua

SEQ ID NO: 551494 - RNA, 19 nt, Homo sapiens
  misc_RNA (1)...(19): siRNA sense strand
guugcucuauucaagaaca

SEQ ID NO: 551495 - RNA, 19 nt, Homo sapiens
  misc_RNA (1)...(19): siRNA sense strand
gaagccuggugcccuuggu

SEQ ID NO: 551496 - RNA, 19 nt, Homo sapiens
  misc_RNA (1)...(19): siRNA sense strand
cugcugggagugcugcuua

SEQ ID NO: 551497 - RNA, 19 nt, Homo sapiens
  misc_RNA (1)...(19): siRNA sense strand
ccacaccuaccccaauaua

SEQ ID NO: 551498 - RNA, 19 nt, Homo sapiens
  misc_RNA (1)...(19): siRNA sense strand
gucaugggauaccuggaau

SEQ ID NO: 551499 - RNA, 19 nt, Homo sapiens
  misc_RNA (1)...(19): siRNA sense strand
guaccucacaugccuuugg

SEQ ID NO: 551500 - RNA, 19 nt, Homo sapiens
  misc_RNA (1)...(19): siRNA sense strand
ucccuggugucuacuacuu

SEQ ID NO: 551501 - RNA, 19 nt, Homo sapiens
  misc_RNA (1)...(19): siRNA sense strand
ccaggugcgccagguguaa

SEQ ID NO: 551502 - RNA, 19 nt, Homo sapiens
  misc_RNA (1)...(19): siRNA sense strand
aaucaaagcucccuaauau

SEQ ID NO: 551503 - RNA, 19 nt, Homo sapiens
  misc_RNA (1)...(19): siRNA sense strand
gaagaagccaacaaugaua

SEQ ID NO: 551504 - RNA, 19 nt, Homo sapiens
  misc_RNA (1)...(19): siRNA sense strand
ggaaggauuaugugaauuu

SEQ ID NO: 551505 - RNA, 19 nt, Homo sapiens
  misc_RNA (1)...(19): siRNA sense strand
ccacuuaugcugcaauaua

SEQ ID NO: 551506 - RNA, 19 nt, Homo sapiens
  misc_RNA (1)...(19): siRNA sense strand
gaagauauucugugaagug

SEQ ID NO: 551507 - RNA, 19 nt, Homo sapiens
  misc_RNA (1)...(19): siRNA sense strand
gggacaggcucaaccaauu

SEQ ID NO: 551508 - RNA, 19 nt, Homo sapiens
  misc_RNA (1)...(19): siRNA sense strand
gaacgaaaugugccauaaa

SEQ ID NO: 551509 - RNA, 19 nt, Homo sapiens
  misc_RNA (1)...(19): siRNA sense strand
gauuauuccuggauuguga

SEQ ID NO: 551510 - RNA, 19 nt, Homo sapiens
  misc_RNA (1)...(19): siRNA sense strand
gaaucagaaugagaagaua

SEQ ID NO: 551511 - RNA, 19 nt, Homo sapiens
  misc_RNA (1)...(19): siRNA sense strand
gcgggacucuuucuucuug

SEQ ID NO: 551512 - RNA, 19 nt, Homo sapiens
  misc_RNA (1)...(19): siRNA sense strand
gggagaagcuuuuacagaa

SEQ ID NO: 551513 - RNA, 19 nt, Homo sapiens
  misc_RNA (1)...(19): siRNA sense strand
ugagugggcugcugaggaa

SEQ ID NO: 551514 - RNA, 19 nt, Homo sapiens
  misc_RNA (1)...(19): siRNA sense strand
ugaacgaaaugugccauaa

SEQ ID NO: 551515 - RNA, 19 nt, Homo sapiens
  misc_RNA (1)...(19): siRNA sense strand
uaauauacaccaucccuaa

SEQ ID NO: 551516 - RNA, 19 nt, Homo sapiens
  misc_RNA (1)...(19): siRNA sense strand
gcucauaggauggagauuu

SEQ ID NO: 551517 - RNA, 19 nt, Homo sapiens
  misc_RNA (1)...(19): siRNA sense strand
ucaccucgggcaaauauua

SEQ ID NO: 551518 - RNA, 19 nt, Homo sapiens
  misc_RNA (1)...(19): siRNA sense strand
caacaaugauaucuuucug

SEQ ID NO: 551519 - RNA, 19 nt, Homo sapiens
  misc_RNA (1)...(19): siRNA sense strand
caauuccgagugcauauua

SEQ ID NO: 551520 - RNA, 19 nt, Homo sapiens
  misc_RNA (1)...(19): siRNA sense strand
gaacaccgggagaagcuuu

SEQ ID NO: 551521 - RNA, 19 nt, Homo sapiens
  misc_RNA (1)...(19): siRNA sense strand
gagcuuuguugauguuaau

SEQ ID NO: 551522 - RNA, 19 nt, Homo sapiens
  misc_RNA (1)...(19): siRNA sense strand
uaaucaaagcucccuaaua

SEQ ID NO: 551523 - RNA, 19 nt, Homo sapiens
  misc_RNA (1)...(19): siRNA sense strand
ucaaagcucccuaauauac

SEQ ID NO: 551524 - RNA, 19 nt, Homo sapiens
  misc_RNA (1)...(19): siRNA sense strand
gcauguguauuggauguga

SEQ ID NO: 551525 - RNA, 19 nt, Homo sapiens
  misc_RNA (1)...(19): siRNA sense strand
uaaaccagauguggagcua

SEQ ID NO: 551526 - RNA, 19 nt, Homo sapiens
  misc_RNA (1)...(19): siRNA sense strand
caagauguacccuauuuca

SEQ ID NO: 551527 - RNA, 19 nt, Homo sapiens
  misc_RNA (1)...(19): siRNA sense strand
ggcaagacaucccauuucu

SEQ ID NO: 551528 - RNA, 19 nt, Homo sapiens
  misc_RNA (1)...(19): siRNA sense strand
uauacaccaucccuaauug

SEQ ID NO: 551529 - RNA, 19 nt, Homo sapiens
  misc_RNA (1)...(19): siRNA sense strand
gagaagaaucagaaugaga

SEQ ID NO: 551530 - RNA, 19 nt, Homo sapiens
  misc_RNA (1)...(19): siRNA sense strand
gcacucacagggagacaaa

SEQ ID NO: 551531 - RNA, 19 nt, Homo sapiens
  misc_RNA (1)...(19): siRNA sense strand
agaagaaucagaaugagaa

SEQ ID NO: 551532 - RNA, 19 nt, Homo sapiens
  misc_RNA (1)...(19): siRNA sense strand
ucacagacaccgucccauu

SEQ ID NO: 551533 - RNA, 19 nt, Homo sapiens
  misc_RNA (1)...(19): siRNA sense strand
agccaacaaugauaucuuu

SEQ ID NO: 551534 - RNA, 19 nt, Homo sapiens
  misc_RNA (1)...(19): siRNA sense strand
ugaagaagccaacaaugau

SEQ ID NO: 551535 - RNA, 19 nt, Homo sapiens
  misc_RNA (1)...(19): siRNA sense strand
ggagaagcuuuuacagaaa

SEQ ID NO: 551536 - RNA, 19 nt, Homo sapiens
  misc_RNA (1)...(19): siRNA sense strand
ggacaggcucaaccaauuc

SEQ ID NO: 551537 - RNA, 19 nt, Homo sapiens
  misc_RNA (1)...(19): siRNA sense strand
cacuuaugcugcaauauau

SEQ ID NO: 551538 - RNA, 19 nt, Homo sapiens
  misc_RNA (1)...(19): siRNA sense strand
augaggagcugaacgaaau

SEQ ID NO: 551539 - RNA, 19 nt, Homo sapiens
  misc_RNA (1)...(19): siRNA sense strand
gaaaccaccagaaccagau

SEQ ID NO: 551540 - RNA, 19 nt, Homo sapiens
  misc_RNA (1)...(19): siRNA sense strand
auauuacucugcaucauga

SEQ ID NO: 551541 - RNA, 19 nt, Homo sapiens
  misc_RNA (1)...(19): siRNA sense strand
gaauuuaaggcuagaagca

SEQ ID NO: 551542 - RNA, 19 nt, Homo sapiens
  misc_RNA (1)...(19): siRNA sense strand
uugagaagcauguguauug

SEQ ID NO: 551543 - RNA, 19 nt, Homo sapiens
  misc_RNA (1)...(19): siRNA sense strand
gaauguaugaggagcugaa

SEQ ID NO: 551544 - RNA, 19 nt, Homo sapiens
  misc_RNA (1)...(19): siRNA sense strand
aucaagauguacccuauuu

SEQ ID NO: 551545 - RNA, 19 nt, Homo sapiens
  misc_RNA (1)...(19): siRNA sense strand
agaagcauguguauuggau

SEQ ID NO: 551546 - RNA, 19 nt, Homo sapiens
  misc_RNA (1)...(19): siRNA sense strand
caauauaucccaaaaccua

SEQ ID NO: 551547 - RNA, 19 nt, Homo sapiens
  misc_RNA (1)...(19): siRNA sense strand
cuggaaggauuaugugaau

SEQ ID NO: 551548 - RNA, 19 nt, Homo sapiens
  misc_RNA (1)...(19): siRNA sense strand
caauuagagcugaguauca

SEQ ID NO: 551549 - RNA, 19 nt, Homo sapiens
  misc_RNA (1)...(19): siRNA sense strand
gcaauuagagcugaguauc

SEQ ID NO: 551550 - RNA, 19 nt, Homo sapiens
  misc_RNA (1)...(19): siRNA sense strand
ggcuaagacugugagcuuu

SEQ ID NO: 551551 - RNA, 19 nt, Homo sapiens
  misc_RNA (1)...(19): siRNA sense strand
gggagacaaagaagauauu

SEQ ID NO: 551552 - RNA, 19 nt, Homo sapiens
  misc_RNA (1)...(19): siRNA sense strand
guuaaucaaagcucccuaa

SEQ ID NO: 551553 - RNA, 19 nt, Homo sapiens
  misc_RNA (1)...(19): siRNA sense strand
acugugagcuuuguugaug

SEQ ID NO: 551554 - RNA, 19 nt, Homo sapiens
  misc_RNA (1)...(19): siRNA sense strand
guaggggacuccuggaauu

SEQ ID NO: 551555 - RNA, 19 nt, Homo sapiens
  misc_RNA (1)...(19): siRNA sense strand
uuuggugucuguaauaugu

SEQ ID NO: 551556 - RNA, 19 nt, Homo sapiens
  misc_RNA (1)...(19): siRNA sense strand
ugagcuuuguugauguuaa

SEQ ID NO: 551557 - RNA, 19 nt, Homo sapiens
  misc_RNA (1)...(19): siRNA sense strand
gcuaagacugugagcuuug

SEQ ID NO: 551558 - RNA, 19 nt, Homo sapiens
  misc_RNA (1)...(19): siRNA sense strand
gcauauuacucugcaucau

SEQ ID NO: 551559 - RNA, 19 nt, Homo sapiens
  misc_RNA (1)...(19): siRNA sense strand
aagcauguguauuggaugu

SEQ ID NO: 551560 - RNA, 19 nt, Homo sapiens
  misc_RNA (1)...(19): siRNA sense strand
cauauuacucugcaucaug

SEQ ID NO: 551561 - RNA, 19 nt, Homo sapiens
  misc_RNA (1)...(19): siRNA sense strand
gcuggaaggauuaugugaa

SEQ ID NO: 551562 - RNA, 19 nt, Homo sapiens
  misc_RNA (1)...(19): siRNA sense strand
uaccagccgaguaggauua

SEQ ID NO: 551563 - RNA, 19 nt, Homo sapiens
  misc_RNA (1)...(19): siRNA sense strand
augagaagauagauggaaa

SEQ ID NO: 551564 - RNA, 19 nt, Homo sapiens
  misc_RNA (1)...(19): siRNA sense strand
augaagaagccaacaauga

SEQ ID NO: 551565 - RNA, 19 nt, Homo sapiens
  misc_RNA (1)...(19): siRNA sense strand
cgaaaugugccauaaacca

SEQ ID NO: 551566 - RNA, 19 nt, Homo sapiens
  misc_RNA (1)...(19): siRNA sense strand
ggagacaaagaagauauuc

SEQ ID NO: 551567 - RNA, 19 nt, Homo sapiens
  misc_RNA (1)...(19): siRNA sense strand
uuggguguguuaagaauga

SEQ ID NO: 551568 - RNA, 19 nt, Homo sapiens
  misc_RNA (1)...(19): siRNA sense strand
uaccucaacuggcaagaca

SEQ ID NO: 551569 - RNA, 19 nt, Homo sapiens
  misc_RNA (1)...(19): siRNA sense strand
acagacaccgucccauuga

SEQ ID NO: 551570 - RNA, 19 nt, Homo sapiens
  misc_RNA (1)...(19): siRNA sense strand
caaagcucccuaauauaca

SEQ ID NO: 551571 - RNA, 19 nt, Homo sapiens
  misc_RNA (1)...(19): siRNA sense strand
uacagaaaaugcagucuuu

SEQ ID NO: 551572 - RNA, 19 nt, Homo sapiens
  misc_RNA (1)...(19): siRNA sense strand
gaugcuggaaggauuaugu

SEQ ID NO: 551573 - RNA, 19 nt, Homo sapiens
  misc_RNA (1)...(19): siRNA sense strand
cuaagacugugagcuuugu

SEQ ID NO: 551574 - RNA, 19 nt, Homo sapiens
  misc_RNA (1)...(19): siRNA sense strand
uuacugggagguccaugua

SEQ ID NO: 551575 - RNA, 19 nt, Homo sapiens
  misc_RNA (1)...(19): siRNA sense strand
gagaagcauguguauugga

SEQ ID NO: 551576 - RNA, 19 nt, Homo sapiens
  misc_RNA (1)...(19): siRNA sense strand
cacagacaccgucccauug

SEQ ID NO: 551577 - RNA, 19 nt, Homo sapiens
  misc_RNA (1)...(19): siRNA sense strand
agaaucagaaugagaagau

SEQ ID NO: 551578 - RNA, 19 nt, Homo sapiens
  misc_RNA (1)...(19): siRNA sense strand
cugcaacaccuagaaguuu

SEQ ID NO: 551579 - RNA, 19 nt, Homo sapiens
  misc_RNA (1)...(19): siRNA sense strand
uugcaggccuuguuucuac

SEQ ID NO: 551580 - RNA, 19 nt, Homo sapiens
  misc_RNA (1)...(19): siRNA sense strand
aacgaaaugugccauaaac

SEQ ID NO: 551581 - RNA, 19 nt, Homo sapiens
  misc_RNA (1)...(19): siRNA sense strand
auucaaugcagucucuuua

SEQ ID NO: 551582 - RNA, 19 nt, Homo sapiens
  misc_RNA (1)...(19): siRNA sense strand
ugagaagcauguguauugg

SEQ ID NO: 551583 - RNA, 19 nt, Homo sapiens
  misc_RNA (1)...(19): siRNA sense strand
agauaaaccucaaaaccaa

SEQ ID NO: 551584 - RNA, 19 nt, Homo sapiens
  misc_RNA (1)...(19): siRNA sense strand
ugugagcuuuguugauguu

SEQ ID NO: 551585 - RNA, 19 nt, Homo sapiens
  misc_RNA (1)...(19): siRNA sense strand
uggagcuacuucaggcuuu

SEQ ID NO: 551586 - RNA, 19 nt, Homo sapiens
  misc_RNA (1)...(19): siRNA sense strand
uuaaggcuagaagcaauua

SEQ ID NO: 551587 - RNA, 19 nt, Homo sapiens
  misc_RNA (1)...(19): siRNA sense strand
auauacaccaucccuaauu

SEQ ID NO: 551588 - RNA, 19 nt, Homo sapiens
  misc_RNA (1)...(19): siRNA sense strand
gaaucuuacaggucuuuca

SEQ ID NO: 551589 - RNA, 19 nt, Homo sapiens
  misc_RNA (1)...(19): siRNA sense strand
gaagaaucagaaugagaag

SEQ ID NO: 551590 - RNA, 19 nt, Homo sapiens
  misc_RNA (1)...(19): siRNA sense strand
aagaagccaacaaugauau

SEQ ID NO: 551591 - RNA, 19 nt, Homo sapiens
  misc_RNA (1)...(19): siRNA sense strand
acagggagacaaagaagau

SEQ ID NO: 551592 - RNA, 19 nt, Homo sapiens
  misc_RNA (1)...(19): siRNA sense strand
cagccgaguaggauuauuc

SEQ ID NO: 551593 - RNA, 19 nt, Homo sapiens
  misc_RNA (1)...(19): siRNA sense strand
gaaugagaagauagaugga

SEQ ID NO: 551594 - RNA, 19 nt, Homo sapiens
  misc_RNA (1)...(19): siRNA sense strand
gagcagauaaaccucaaaa

SEQ ID NO: 551595 - RNA, 19 nt, Homo sapiens
  misc_RNA (1)...(19): siRNA sense strand
ccaacaaugauaucuuucu

SEQ ID NO: 551596 - RNA, 19 nt, Homo sapiens
  misc_RNA (1)...(19): siRNA sense strand
ucaugaagaagccaacaau

SEQ ID NO: 551597 - RNA, 19 nt, Homo sapiens
  misc_RNA (1)...(19): siRNA sense strand
aaagucagucucuggcuau

SEQ ID NO: 551598 - RNA, 19 nt, Homo sapiens
  misc_RNA (1)...(19): siRNA sense strand
uaugaggagcugaacgaaa

SEQ ID NO: 551599 - RNA, 19 nt, Homo sapiens
  misc_RNA (1)...(19): siRNA sense strand
caggagcaccgguaucaca

SEQ ID NO: 551600 - RNA, 19 nt, Homo sapiens
  misc_RNA (1)...(19): siRNA sense strand
ggcuauuccugagcucuga

SEQ ID NO: 551601 - RNA, 19 nt, Homo sapiens
  misc_RNA (1)...(19): siRNA sense strand
cagaaugagaagauagaug

SEQ ID NO: 551602 - RNA, 19 nt, Homo sapiens
  misc_RNA (1)...(19): siRNA sense strand
gaaaguggguuuaugcaaa

SEQ ID NO: 551603 - RNA, 19 nt, Homo sapiens
  misc_RNA (1)...(19): siRNA sense strand
uaucauggcuuccucaaua

SEQ ID NO: 551604 - RNA, 19 nt, Homo sapiens
  misc_RNA (1)...(19): siRNA sense strand
ucaauccucugcucuauua

SEQ ID NO: 551605 - RNA, 19 nt, Homo sapiens
  misc_RNA (1)...(19): siRNA sense strand
gaacggcagugucacauca

SEQ ID NO: 551606 - RNA, 19 nt, Homo sapiens
  misc_RNA (1)...(19): siRNA sense strand
gcaaagacaaaguguguuu

SEQ ID NO: 551607 - RNA, 19 nt, Homo sapiens
  misc_RNA (1)...(19): siRNA sense strand
gcaaagacagacugcauaa

SEQ ID NO: 551608 - RNA, 19 nt, Homo sapiens
  misc_RNA (1)...(19): siRNA sense strand
uaucagaaauggaaccaaa

SEQ ID NO: 551609 - RNA, 19 nt, Homo sapiens
  misc_RNA (1)...(19): siRNA sense strand
guacagcaguauuuauuuc

SEQ ID NO: 551610 - RNA, 19 nt, Homo sapiens
  misc_RNA (1)...(19): siRNA sense strand
gaaaggaaacaagaguaua

SEQ ID NO: 551611 - RNA, 19 nt, Homo sapiens
  misc_RNA (1)...(19): siRNA sense strand
gcaggauuaugucuuauuc

SEQ ID NO: 551612 - RNA, 19 nt, Homo sapiens
  misc_RNA (1)...(19): siRNA sense strand
ucagaucuccuguucauaa

SEQ ID NO: 551613 - RNA, 19 nt, Homo sapiens
  misc_RNA (1)...(19): siRNA sense strand
gcacugaccaccaucauca

SEQ ID NO: 551614 - RNA, 19 nt, Homo sapiens
  misc_RNA (1)...(19): siRNA sense strand
ggaaggcacugaccaccau

SEQ ID NO: 551615 - RNA, 19 nt, Homo sapiens
  misc_RNA (1)...(19): siRNA sense strand
gaucauucggguucuguua

SEQ ID NO: 551616 - RNA, 19 nt, Homo sapiens
  misc_RNA (1)...(19): siRNA sense strand
gagaaaggaaacaagagua

SEQ ID NO: 551617 - RNA, 19 nt, Homo sapiens
  misc_RNA (1)...(19): siRNA sense strand
aauggcaccuucagcaaua

SEQ ID NO: 551618 - RNA, 19 nt, Homo sapiens
  misc_RNA (1)...(19): siRNA sense strand
gagcagaacggcaguguca

SEQ ID NO: 551619 - RNA, 19 nt, Homo sapiens
  misc_RNA (1)...(19): siRNA sense strand
ccugcaggauuaugucuua

SEQ ID NO: 551620 - RNA, 19 nt, Homo sapiens
  misc_RNA (1)...(19): siRNA sense strand
gccaaugccugcuucaauc

SEQ ID NO: 551621 - RNA, 19 nt, Homo sapiens
  misc_RNA (1)...(19): siRNA sense strand
uauaagaaguccacaucug

SEQ ID NO: 551622 - RNA, 19 nt, Homo sapiens
  misc_RNA (1)...(19): siRNA sense strand
caacauguacagcaguauu

SEQ ID NO: 551623 - RNA, 19 nt, Homo sapiens
  misc_RNA (1)...(19): siRNA sense strand
gaucuccuguucauaagca

SEQ ID NO: 551624 - RNA, 19 nt, Homo sapiens
  misc_RNA (1)...(19): siRNA sense strand
guuagugugugguugagaa

SEQ ID NO: 551625 - RNA, 19 nt, Homo sapiens
  misc_RNA (1)...(19): siRNA sense strand
ggaaaguggguuuaugcaa

SEQ ID NO: 551626 - RNA, 19 nt, Homo sapiens
  misc_RNA (1)...(19): siRNA sense strand
gucaacauguacagcagua

SEQ ID NO: 551627 - RNA, 19 nt, Homo sapiens
  misc_RNA (1)...(19): siRNA sense strand
gaucaucuucuucuugugu

SEQ ID NO: 551628 - RNA, 19 nt, Homo sapiens
  misc_RNA (1)...(19): siRNA sense strand
gcaauaacaacagcaggaa

SEQ ID NO: 551629 - RNA, 19 nt, Homo sapiens
  misc_RNA (1)...(19): siRNA sense strand
aaagacagacugcauaaag

SEQ ID NO: 551630 - RNA, 19 nt, Homo sapiens
  misc_RNA (1)...(19): siRNA sense strand
uaucuuagaggcuccaauu

SEQ ID NO: 551631 - RNA, 19 nt, Homo sapiens
  misc_RNA (1)...(19): siRNA sense strand
ucauucggguucuguuaaa

SEQ ID NO: 551632 - RNA, 19 nt, Homo sapiens
  misc_RNA (1)...(19): siRNA sense strand
ccucugcucuauuacuuug

SEQ ID NO: 551633 - RNA, 19 nt, Homo sapiens
  misc_RNA (1)...(19): siRNA sense strand
cugcauaaagcuuugguua

SEQ ID NO: 551634 - RNA, 19 nt, Homo sapiens
  misc_RNA (1)...(19): siRNA sense strand
cgacauggaaaguggguuu

SEQ ID NO: 551635 - RNA, 19 nt, Homo sapiens
  misc_RNA (1)...(19): siRNA sense strand
cugcagaccaugaacuaua

SEQ ID NO: 551636 - RNA, 19 nt, Homo sapiens
  misc_RNA (1)...(19): siRNA sense strand
ccacagaaggcaaagacaa

SEQ ID NO: 551637 - RNA, 19 nt, Homo sapiens
  misc_RNA (1)...(19): siRNA sense strand
gaaaaggccauccacagaa

SEQ ID NO: 551638 - RNA, 19 nt, Homo sapiens
  misc_RNA (1)...(19): siRNA sense strand
cauuucagaucuccuguuc

SEQ ID NO: 551639 - RNA, 19 nt, Homo sapiens
  misc_RNA (1)...(19): siRNA sense strand
ucauauggauccuuaucau

SEQ ID NO: 551640 - RNA, 19 nt, Homo sapiens
  misc_RNA (1)...(19): siRNA sense strand
aaaguggguuuaugcaaag

SEQ ID NO: 551641 - RNA, 19 nt, Homo sapiens
  misc_RNA (1)...(19): siRNA sense strand
gaaaauuuauguccuugca

SEQ ID NO: 551642 - RNA, 19 nt, Homo sapiens
  misc_RNA (1)...(19): siRNA sense strand
caaauggcaccuucagcaa

SEQ ID NO: 551643 - RNA, 19 nt, Homo sapiens
  misc_RNA (1)...(19): siRNA sense strand
agggcugacuauuaucuua

SEQ ID NO: 551644 - RNA, 19 nt, Homo sapiens
  misc_RNA (1)...(19): siRNA sense strand
ugaacuauauugccuuggu

SEQ ID NO: 551645 - RNA, 19 nt, Homo sapiens
  misc_RNA (1)...(19): siRNA sense strand
uuucagaucuccuguucau

SEQ ID NO: 551646 - RNA, 19 nt, Homo sapiens
  misc_RNA (1)...(19): siRNA sense strand
gcuaagcugcagaccauga

SEQ ID NO: 551647 - RNA, 19 nt, Homo sapiens
  misc_RNA (1)...(19): siRNA sense strand
gcagaacggcagugucaca

SEQ ID NO: 551648 - RNA, 19 nt, Homo sapiens
  misc_RNA (1)...(19): siRNA sense strand
ugcagaccaugaacuauau

SEQ ID NO: 551649 - RNA, 19 nt, Homo sapiens
  misc_RNA (1)...(19): siRNA sense strand
cacagaaggcaaagacaaa

SEQ ID NO: 551650 - RNA, 19 nt, Homo sapiens
  misc_RNA (1)...(19): siRNA sense strand
cauggaaaguggguuuaug

SEQ ID NO: 551651 - RNA, 19 nt, Homo sapiens
  misc_RNA (1)...(19): siRNA sense strand
gagcugaaucucuauaaaa

SEQ ID NO: 551652 - RNA, 19 nt, Homo sapiens
  misc_RNA (1)...(19): siRNA sense strand
agaaaggaaacaagaguau

SEQ ID NO: 551653 - RNA, 19 nt, Homo sapiens
  misc_RNA (1)...(19): siRNA sense strand
gaaccaaauggcaccuuca

SEQ ID NO: 551654 - RNA, 19 nt, Homo sapiens
  misc_RNA (1)...(19): siRNA sense strand
ucacacucagcaucuguua

SEQ ID NO: 551655 - RNA, 19 nt, Homo sapiens
  misc_RNA (1)...(19): siRNA sense strand
ucagaaauggaaccaaaug

SEQ ID NO: 551656 - RNA, 19 nt, Homo sapiens
  misc_RNA (1)...(19): siRNA sense strand
gaaggcaaagacaaagugu

SEQ ID NO: 551657 - RNA, 19 nt, Homo sapiens
  misc_RNA (1)...(19): siRNA sense strand
caaagacagacugcauaaa

SEQ ID NO: 551658 - RNA, 19 nt, Homo sapiens
  misc_RNA (1)...(19): siRNA sense strand
ucaccuugaucaucuucuu

SEQ ID NO: 551659 - RNA, 19 nt, Homo sapiens
  misc_RNA (1)...(19): siRNA sense strand
uugcuaagcugcagaccau

SEQ ID NO: 551660 - RNA, 19 nt, Homo sapiens
  misc_RNA (1)...(19): siRNA sense strand
cagugucacaucaugcuua

SEQ ID NO: 551661 - RNA, 19 nt, Homo sapiens
  misc_RNA (1)...(19): siRNA sense strand
guugagaaaggaaacaaga

SEQ ID NO: 551662 - RNA, 19 nt, Homo sapiens
  misc_RNA (1)...(19): siRNA sense strand
ucuguuaucugcugaucau

SEQ ID NO: 551663 - RNA, 19 nt, Homo sapiens
  misc_RNA (1)...(19): siRNA sense strand
caucaugcuuagagcugaa

SEQ ID NO: 551664 - RNA, 19 nt, Homo sapiens
  misc_RNA (1)...(19): siRNA sense strand
ggcugacuauuaucuuaga

SEQ ID NO: 551665 - RNA, 19 nt, Homo sapiens
  misc_RNA (1)...(19): siRNA sense strand
ccacuugacgacauggaaa

SEQ ID NO: 551666 - RNA, 19 nt, Homo sapiens
  misc_RNA (1)...(19): siRNA sense strand
acacucagcaucuguuauc

SEQ ID NO: 551667 - RNA, 19 nt, Homo sapiens
  misc_RNA (1)...(19): siRNA sense strand
uugaucaucuucuucuugu

SEQ ID NO: 551668 - RNA, 19 nt, Homo sapiens
  misc_RNA (1)...(19): siRNA sense strand
gacauggaaaguggguuua

SEQ ID NO: 551669 - RNA, 19 nt, Homo sapiens
  misc_RNA (1)...(19): siRNA sense strand
cagacugcauaaagcuuug

SEQ ID NO: 551670 - RNA, 19 nt, Homo sapiens
  misc_RNA (1)...(19): siRNA sense strand
ucuuauuccuuguauguca

SEQ ID NO: 551671 - RNA, 19 nt, Homo sapiens
  misc_RNA (1)...(19): siRNA sense strand
caugcuaaaucuggccauu

SEQ ID NO: 551672 - RNA, 19 nt, Homo sapiens
  misc_RNA (1)...(19): siRNA sense strand
uguguuuccugcccuauca

SEQ ID NO: 551673 - RNA, 19 nt, Homo sapiens
  misc_RNA (1)...(19): siRNA sense strand
ccaccaucaucaucaccuu

SEQ ID NO: 551674 - RNA, 19 nt, Homo sapiens
  misc_RNA (1)...(19): siRNA sense strand
cagaucuccuguucauaag

SEQ ID NO: 551675 - RNA, 19 nt, Homo sapiens
  misc_RNA (1)...(19): siRNA sense strand
auaagaaguccacaucugu

SEQ ID NO: 551676 - RNA, 19 nt, Homo sapiens
  misc_RNA (1)...(19): siRNA sense strand
ugagaaaggaaacaagagu

SEQ ID NO: 551677 - RNA, 19 nt, Homo sapiens
  misc_RNA (1)...(19): siRNA sense strand
cuucaauccucugcucuau

SEQ ID NO: 551678 - RNA, 19 nt, Homo sapiens
  misc_RNA (1)...(19): siRNA sense strand
acagacugcauaaagcuuu

SEQ ID NO: 551679 - RNA, 19 nt, Homo sapiens
  misc_RNA (1)...(19): siRNA sense strand
gcagaccaugaacuauauu

SEQ ID NO: 551680 - RNA, 19 nt, Homo sapiens
  misc_RNA (1)...(19): siRNA sense strand
acauguacagcaguauuua

SEQ ID NO: 551681 - RNA, 19 nt, Homo sapiens
  misc_RNA (1)...(19): siRNA sense strand
ugucuuauuccuuguaugu

SEQ ID NO: 551682 - RNA, 19 nt, Homo sapiens
  misc_RNA (1)...(19): siRNA sense strand
gcaccuucagcaauaacaa

SEQ ID NO: 551683 - RNA, 19 nt, Homo sapiens
  misc_RNA (1)...(19): siRNA sense strand
ggguuguccauauauguuu

SEQ ID NO: 551684 - RNA, 19 nt, Homo sapiens
  misc_RNA (1)...(19): siRNA sense strand
ucugugggaucauauggau

SEQ ID NO: 551685 - RNA, 19 nt, Homo sapiens
  misc_RNA (1)...(19): siRNA sense strand
ggcaaugguucaccccuuu

SEQ ID NO: 551686 - RNA, 19 nt, Homo sapiens
  misc_RNA (1)...(19): siRNA sense strand
ggauuaugucuuauuccuu

SEQ ID NO: 551687 - RNA, 19 nt, Homo sapiens
  misc_RNA (1)...(19): siRNA sense strand
gcuucaauccucugcucua

SEQ ID NO: 551688 - RNA, 19 nt, Homo sapiens
  misc_RNA (1)...(19): siRNA sense strand
aaguggaggucccagaauc

SEQ ID NO: 551689 - RNA, 19 nt, Homo sapiens
  misc_RNA (1)...(19): siRNA sense strand
guuaucugcugaucauucg

SEQ ID NO: 551690 - RNA, 19 nt, Homo sapiens
  misc_RNA (1)...(19): siRNA sense strand
cauauggauccuuaucaug

SEQ ID NO: 551691 - RNA, 19 nt, Homo sapiens
  misc_RNA (1)...(19): siRNA sense strand
ccuuucggcuucugcaugu

SEQ ID NO: 551692 - RNA, 19 nt, Homo sapiens
  misc_RNA (1)...(19): siRNA sense strand
aggcaaagacaaagugugu

SEQ ID NO: 551693 - RNA, 19 nt, Homo sapiens
  misc_RNA (1)...(19): siRNA sense strand
aacauguacagcaguauuu

SEQ ID NO: 551694 - RNA, 19 nt, Homo sapiens
  misc_RNA (1)...(19): siRNA sense strand
ucaucuucuucuuguguuu

SEQ ID NO: 551695 - RNA, 19 nt, Homo sapiens
  misc_RNA (1)...(19): siRNA sense strand
caaccauccaucuccguau

SEQ ID NO: 551696 - RNA, 19 nt, Homo sapiens
  misc_RNA (1)...(19): siRNA sense strand
aucauggcuuccucaauaa

SEQ ID NO: 551697 - RNA, 19 nt, Homo sapiens
  misc_RNA (1)...(19): siRNA sense strand
ccugcagccuuauaagaag

SEQ ID NO: 551698 - RNA, 19 nt, Homo sapiens
  misc_RNA (1)...(19): siRNA sense strand
ugaccgugcugaguguugu

SEQ ID NO: 551699 - RNA, 19 nt, Homo sapiens
  misc_RNA (1)...(19): siRNA sense strand
aagacagacugcauaaagc

SEQ ID NO: 551700 - RNA, 19 nt, Homo sapiens
  misc_RNA (1)...(19): siRNA sense strand
ggguuuaugcaaagacaga

SEQ ID NO: 551701 - RNA, 19 nt, Homo sapiens
  misc_RNA (1)...(19): siRNA sense strand
caggaacugcacaauugaa

SEQ ID NO: 551702 - RNA, 19 nt, Homo sapiens
  misc_RNA (1)...(19): siRNA sense strand
gagaagauaugaaagaugu

SEQ ID NO: 551703 - RNA, 19 nt, Homo sapiens
  misc_RNA (1)...(19): siRNA sense strand
gauguugucuugagaaauu

SEQ ID NO: 551704 - RNA, 19 nt, Homo sapiens
  misc_RNA (1)...(19): siRNA sense strand
gaggauagcuucaauaugc

SEQ ID NO: 551705 - RNA, 19 nt, Homo sapiens
  misc_RNA (1)...(19): siRNA sense strand
ggauguggcucuagaauuc

SEQ ID NO: 551706 - RNA, 19 nt, Homo sapiens
  misc_RNA (1)...(19): siRNA sense strand
guauagggaugugauguua

SEQ ID NO: 551707 - RNA, 19 nt, Homo sapiens
  misc_RNA (1)...(19): siRNA sense strand
gaagacagccaaacacuca

SEQ ID NO: 551708 - RNA, 19 nt, Homo sapiens
  misc_RNA (1)...(19): siRNA sense strand
gaaauuacgcuuaaggaau

SEQ ID NO: 551709 - RNA, 19 nt, Homo sapiens
  misc_RNA (1)...(19): siRNA sense strand
aaauuacgcuuaaggaaug

SEQ ID NO: 551710 - RNA, 19 nt, Homo sapiens
  misc_RNA (1)...(19): siRNA sense strand
gggaugugauguuagagaa

SEQ ID NO: 551711 - RNA, 19 nt, Homo sapiens
  misc_RNA (1)...(19): siRNA sense strand
acucagcuuugucuucuua

SEQ ID NO: 551712 - RNA, 19 nt, Homo sapiens
  misc_RNA (1)...(19): siRNA sense strand
ggaaagagcccuggaacgu

SEQ ID NO: 551713 - RNA, 19 nt, Homo sapiens
  misc_RNA (1)...(19): siRNA sense strand
cuugagaaauuacgcuuaa

SEQ ID NO: 551714 - RNA, 19 nt, Homo sapiens
  misc_RNA (1)...(19): siRNA sense strand
gaagauaugaaagauguug

SEQ ID NO: 551715 - RNA, 19 nt, Homo sapiens
  misc_RNA (1)...(19): siRNA sense strand
gcucagcggaguuuguaua

SEQ ID NO: 551716 - RNA, 19 nt, Homo sapiens
  misc_RNA (1)...(19): siRNA sense strand
gcugagaagauaugaaaga

SEQ ID NO: 551717 - RNA, 19 nt, Homo sapiens
  misc_RNA (1)...(19): siRNA sense strand
ggaaauuguggccauguga

SEQ ID NO: 551718 - RNA, 19 nt, Homo sapiens
  misc_RNA (1)...(19): siRNA sense strand
gcuuugucuucuuaucuua

SEQ ID NO: 551719 - RNA, 19 nt, Homo sapiens
  misc_RNA (1)...(19): siRNA sense strand
aggaaugacugggaaauug

SEQ ID NO: 551720 - RNA, 19 nt, Homo sapiens
  misc_RNA (1)...(19): siRNA sense strand
gagaaauuacgcuuaagga

SEQ ID NO: 551721 - RNA, 19 nt, Homo sapiens
  misc_RNA (1)...(19): siRNA sense strand
ggaaugacugggaaauugu

SEQ ID NO: 551722 - RNA, 19 nt, Homo sapiens
  misc_RNA (1)...(19): siRNA sense strand
ucagggauguggcucuaga

SEQ ID NO: 551723 - RNA, 19 nt, Homo sapiens
  misc_RNA (1)...(19): siRNA sense strand
gauguuagagaacuacaga

SEQ ID NO: 551724 - RNA, 19 nt, Homo sapiens
  misc_RNA (1)...(19): siRNA sense strand
auagggaugugauguuaga

SEQ ID NO: 551725 - RNA, 19 nt, Homo sapiens
  misc_RNA (1)...(19): siRNA sense strand
gaacgugaacacagagaag

SEQ ID NO: 551726 - RNA, 19 nt, Homo sapiens
  misc_RNA (1)...(19): siRNA sense strand
gugaggauagcuucaauau

SEQ ID NO: 551727 - RNA, 19 nt, Homo sapiens
  misc_RNA (1)...(19): siRNA sense strand
gggaaauuguggccaugug

SEQ ID NO: 551728 - RNA, 19 nt, Homo sapiens
  misc_RNA (1)...(19): siRNA sense strand
ccuggaacgugaacacaga

SEQ ID NO: 551729 - RNA, 19 nt, Homo sapiens
  misc_RNA (1)...(19): siRNA sense strand
gaacuacagaaaccugauc

SEQ ID NO: 551730 - RNA, 19 nt, Homo sapiens
  misc_RNA (1)...(19): siRNA sense strand
gggauguggcucuagaauu

SEQ ID NO: 551731 - RNA, 19 nt, Homo sapiens
  misc_RNA (1)...(19): siRNA sense strand
gaugugauguuagagaacu

SEQ ID NO: 551732 - RNA, 19 nt, Homo sapiens
  misc_RNA (1)...(19): siRNA sense strand
aaagugaugcugagaagau

SEQ ID NO: 551733 - RNA, 19 nt, Homo sapiens
  misc_RNA (1)...(19): siRNA sense strand
cagccaaacacucagcuuu

SEQ ID NO: 551734 - RNA, 19 nt, Homo sapiens
  misc_RNA (1)...(19): siRNA sense strand
caaggaaagagcccuggaa

SEQ ID NO: 551735 - RNA, 19 nt, Homo sapiens
  misc_RNA (1)...(19): siRNA sense strand
ggugaggauagcuucaaua

SEQ ID NO: 551736 - RNA, 19 nt, Homo sapiens
  misc_RNA (1)...(19): siRNA sense strand
cagagaagacagccaaaca

SEQ ID NO: 551737 - RNA, 19 nt, Homo sapiens
  misc_RNA (1)...(19): siRNA sense strand
gagaagacagccaaacacu

SEQ ID NO: 551738 - RNA, 19 nt, Homo sapiens
  misc_RNA (1)...(19): siRNA sense strand
agaaauuacgcuuaaggaa

SEQ ID NO: 551739 - RNA, 19 nt, Homo sapiens
  misc_RNA (1)...(19): siRNA sense strand
cugcaaguuucauuccaaa

SEQ ID NO: 551740 - RNA, 19 nt, Homo sapiens
  misc_RNA (1)...(19): siRNA sense strand
acacucagcuuugucuucu

SEQ ID NO: 551741 - RNA, 19 nt, Homo sapiens
  misc_RNA (1)...(19): siRNA sense strand
aagugaugcugagaagaua

SEQ ID NO: 551742 - RNA, 19 nt, Homo sapiens
  misc_RNA (1)...(19): siRNA sense strand
cagcucagcggaguuugua

SEQ ID NO: 551743 - RNA, 19 nt, Homo sapiens
  misc_RNA (1)...(19): siRNA sense strand
ggaacgugaacacagagaa

SEQ ID NO: 551744 - RNA, 19 nt, Homo sapiens
  misc_RNA (1)...(19): siRNA sense strand
uagcuucaauaugcaauuc

SEQ ID NO: 551745 - RNA, 19 nt, Homo sapiens
  misc_RNA (1)...(19): siRNA sense strand
gaaugacugggaaauugug

SEQ ID NO: 551746 - RNA, 19 nt, Homo sapiens
  misc_RNA (1)...(19): siRNA sense strand
gcaauuccuauuucacagu

SEQ ID NO: 551747 - RNA, 19 nt, Homo sapiens
  misc_RNA (1)...(19): siRNA sense strand
uuagagaacuacagaaacc

SEQ ID NO: 551748 - RNA, 19 nt, Homo sapiens
  misc_RNA (1)...(19): siRNA sense strand
gaucucccuuggugaggau

SEQ ID NO: 551749 - RNA, 19 nt, Homo sapiens
  misc_RNA (1)...(19): siRNA sense strand
uguuagagaacuacagaaa

SEQ ID NO: 551750 - RNA, 19 nt, Homo sapiens
  misc_RNA (1)...(19): siRNA sense strand
ucacagucuugcuaugucu

SEQ ID NO: 551751 - RNA, 19 nt, Homo sapiens
  misc_RNA (1)...(19): siRNA sense strand
cugagaagauaugaaagau

SEQ ID NO: 551752 - RNA, 19 nt, Homo sapiens
  misc_RNA (1)...(19): siRNA sense strand
ccugcaaguuucauuccaa

SEQ ID NO: 551753 - RNA, 19 nt, Homo sapiens
  misc_RNA (1)...(19): siRNA sense strand
ggauagcuucaauaugcaa

SEQ ID NO: 551754 - RNA, 19 nt, Homo sapiens
  misc_RNA (1)...(19): siRNA sense strand
augcugagaagauaugaaa

SEQ ID NO: 551755 - RNA, 19 nt, Homo sapiens
  misc_RNA (1)...(19): siRNA sense strand
ugagaagauaugaaagaug

SEQ ID NO: 551756 - RNA, 19 nt, Homo sapiens
  misc_RNA (1)...(19): siRNA sense strand
cuauuucacagucuugcua

SEQ ID NO: 551757 - RNA, 19 nt, Homo sapiens
  misc_RNA (1)...(19): siRNA sense strand
gaaaggggauaguggaguu

SEQ ID NO: 551758 - RNA, 19 nt, Homo sapiens
  misc_RNA (1)...(19): siRNA sense strand
aaagggauccagaggugaa

SEQ ID NO: 551759 - RNA, 19 nt, Homo sapiens
  misc_RNA (1)...(19): siRNA sense strand
gaggaccaaugggcuccaa

SEQ ID NO: 551760 - RNA, 19 nt, Homo sapiens
  misc_RNA (1)...(19): siRNA sense strand
gaaaggggauaguggaguu

SEQ ID NO: 551761 - RNA, 19 nt, Homo sapiens
  misc_RNA (1)...(19): siRNA sense strand
aaagggauccagaggugaa

SEQ ID NO: 551762 - RNA, 19 nt, Homo sapiens
  misc_RNA (1)...(19): siRNA sense strand
gaggaccaaugggcuccaa

SEQ ID NO: 551763 - RNA, 19 nt, Homo sapiens
  misc_RNA (1)...(19): siRNA sense strand
gaaaggggauaguggaguu

SEQ ID NO: 551764 - RNA, 19 nt, Homo sapiens
  misc_RNA (1)...(19): siRNA sense strand
aaagggauccagaggugaa

SEQ ID NO: 551765 - RNA, 19 nt, Homo sapiens
  misc_RNA (1)...(19): siRNA sense strand
gaggaccaaugggcuccaa

SEQ ID NO: 551766 - RNA, 19 nt, Homo sapiens
  misc_RNA (1)...(19): siRNA sense strand
gaaaggggauaguggaguu

SEQ ID NO: 551767 - RNA, 19 nt, Homo sapiens
  misc_RNA (1)...(19): siRNA sense strand
aaagggauccagaggugaa

SEQ ID NO: 551768 - RNA, 19 nt, Homo sapiens
  misc_RNA (1)...(19): siRNA sense strand
gaggaccaaugggcuccaa

SEQ ID NO: 551769 - RNA, 19 nt, Homo sapiens
  misc_RNA (1)...(19): siRNA sense strand
gaaaggggauaguggaguu

SEQ ID NO: 551770 - RNA, 19 nt, Homo sapiens
  misc_RNA (1)...(19): siRNA sense strand
aaagggauccagaggugaa

SEQ ID NO: 551771 - RNA, 19 nt, Homo sapiens
  misc_RNA (1)...(19): siRNA sense strand
gaggaccaaugggcuccaa

SEQ ID NO: 551772 - RNA, 19 nt, Homo sapiens
  misc_RNA (1)...(19): siRNA sense strand
aaagggauccagaggugaa

SEQ ID NO: 551773 - RNA, 19 nt, Homo sapiens
  misc_RNA (1)...(19): siRNA sense strand
gaggaccaaugggcuccaa

SEQ ID NO: 551774 - RNA, 19 nt, Homo sapiens
  misc_RNA (1)...(19): siRNA sense strand
gaaaggggauaguggaguu

SEQ ID NO: 551775 - RNA, 19 nt, Homo sapiens
  misc_RNA (1)...(19): siRNA sense strand
aaagggauccagaggugaa

SEQ ID NO: 551776 - RNA, 19 nt, Homo sapiens
  misc_RNA (1)...(19): siRNA sense strand
gaggaccaaugggcuccaa

SEQ ID NO: 551777 - RNA, 19 nt, Homo sapiens
  misc_RNA (1)...(19): siRNA sense strand
gaaaggggauaguggaguu

SEQ ID NO: 551778 - RNA, 19 nt, Homo sapiens
  misc_RNA (1)...(19): siRNA sense strand
cuucuccacugucaucaaa

SEQ ID NO: 551779 - RNA, 19 nt, Homo sapiens
  misc_RNA (1)...(19): siRNA sense strand
gcagcagcuucuccacugu

SEQ ID NO: 551780 - RNA, 19 nt, Homo sapiens
  misc_RNA (1)...(19): siRNA sense strand
aaagggauccagaggugaa

SEQ ID NO: 551781 - RNA, 19 nt, Homo sapiens
  misc_RNA (1)...(19): siRNA sense strand
ucaucaaacuggccauguc

SEQ ID NO: 551782 - RNA, 19 nt, Homo sapiens
  misc_RNA (1)...(19): siRNA sense strand
gaggaccaaugggcuccaa

SEQ ID NO: 551783 - RNA, 19 nt, Homo sapiens
  misc_RNA (1)...(19): siRNA sense strand
ggaacacacagaucuacaa

SEQ ID NO: 551784 - RNA, 19 nt, Homo sapiens
  misc_RNA (1)...(19): siRNA sense strand
gaacacacagaucuacaag

SEQ ID NO: 551785 - RNA, 19 nt, Homo sapiens
  misc_RNA (1)...(19): siRNA sense strand
ccagggcucugaugugucu

SEQ ID NO: 551786 - RNA, 19 nt, Homo sapiens
  misc_RNA (1)...(19): siRNA sense strand
gcugggcccuggguuucua

SEQ ID NO: 551787 - RNA, 19 nt, Homo sapiens
  misc_RNA (1)...(19): siRNA sense strand
ccuacgacggcaaggauua

SEQ ID NO: 551788 - RNA, 19 nt, Homo sapiens
  misc_RNA (1)...(19): siRNA sense strand
gaccggaacacacagaucu

SEQ ID NO: 551789 - RNA, 19 nt, Homo sapiens
  misc_RNA (1)...(19): siRNA sense strand
aggauuacaucgcccugaa

SEQ ID NO: 551790 - RNA, 19 nt, Homo sapiens
  misc_RNA (1)...(19): siRNA sense strand
ugagaugggagccgucuuc

SEQ ID NO: 551791 - RNA, 19 nt, Homo sapiens
  misc_RNA (1)...(19): siRNA sense strand
uggccuggcuguccuagca

SEQ ID NO: 551792 - RNA, 19 nt, Homo sapiens
  misc_RNA (1)...(19): siRNA sense strand
cccacuccaugagguauuu

SEQ ID NO: 551793 - RNA, 19 nt, Homo sapiens
  misc_RNA (1)...(19): siRNA sense strand
uccaugagguauuucuaca

SEQ ID NO: 551794 - RNA, 19 nt, Homo sapiens
  misc_RNA (1)...(19): siRNA sense strand
gcucccacuccaugaggua

SEQ ID NO: 551795 - RNA, 19 nt, Homo sapiens
  misc_RNA (1)...(19): siRNA sense strand
gcauugaagucaggugguu

SEQ ID NO: 551796 - RNA, 19 nt, Homo sapiens
  misc_RNA (1)...(19): siRNA sense strand
ugagugucauuucuucaau

SEQ ID NO: 551797 - RNA, 19 nt, Homo sapiens
  misc_RNA (1)...(19): siRNA sense strand
ggacacccgaccacguuuc

SEQ ID NO: 551798 - RNA, 19 nt, Homo sapiens
  misc_RNA (1)...(19): siRNA sense strand
cacccgaccacguuucuug

SEQ ID NO: 551799 - RNA, 19 nt, Homo sapiens
  misc_RNA (1)...(19): siRNA sense strand
gaaaugcgguccuguuuga

SEQ ID NO: 551800 - RNA, 19 nt, Homo sapiens
  misc_RNA (1)...(19): siRNA sense strand
gcagugagaccaugaauga

SEQ ID NO: 551801 - RNA, 19 nt, Homo sapiens
  misc_RNA (1)...(19): siRNA sense strand
gcagagagguuugcuccaa

SEQ ID NO: 551802 - RNA, 19 nt, Homo sapiens
  misc_RNA (1)...(19): siRNA sense strand
gguucuagcugucaacauu

SEQ ID NO: 551803 - RNA, 19 nt, Homo sapiens
  misc_RNA (1)...(19): siRNA sense strand
ccaacagcaucaagaauga

SEQ ID NO: 551804 - RNA, 19 nt, Homo sapiens
  misc_RNA (1)...(19): siRNA sense strand
ucagaauccucaauccuaa

SEQ ID NO: 551805 - RNA, 19 nt, Homo sapiens
  misc_RNA (1)...(19): siRNA sense strand
gcucagcacucgccucugu

SEQ ID NO: 551806 - RNA, 19 nt, Homo sapiens
  misc_RNA (1)...(19): siRNA sense strand
ggagagcccuggaacuaag

SEQ ID NO: 551807 - RNA, 19 nt, Homo sapiens
  misc_RNA (1)...(19): siRNA sense strand
ucacccagcucuucagaau

SEQ ID NO: 551808 - RNA, 19 nt, Homo sapiens
  misc_RNA (1)...(19): siRNA sense strand
aaacccugcuuugcuguua

SEQ ID NO: 551809 - RNA, 19 nt, Homo sapiens
  misc_RNA (1)...(19): siRNA sense strand
gaacaacuugccuguggaa

SEQ ID NO: 551810 - RNA, 19 nt, Homo sapiens
  misc_RNA (1)...(19): siRNA sense strand
ggaaaugcgguccuguuug

SEQ ID NO: 551811 - RNA, 19 nt, Homo sapiens
  misc_RNA (1)...(19): siRNA sense strand
gugcccaacugcuucauga

SEQ ID NO: 551812 - RNA, 19 nt, Homo sapiens
  misc_RNA (1)...(19): siRNA sense strand
ccucacagcuccuggaucu

SEQ ID NO: 551813 - RNA, 19 nt, Homo sapiens
  misc_RNA (1)...(19): siRNA sense strand
ggaagcaaaggaaagcaaa

SEQ ID NO: 551814 - RNA, 19 nt, Homo sapiens
  misc_RNA (1)...(19): siRNA sense strand
gacacacucuuccggaaau

SEQ ID NO: 551815 - RNA, 19 nt, Homo sapiens
  misc_RNA (1)...(19): siRNA sense strand
ggagcuacaugccuacucu

SEQ ID NO: 551816 - RNA, 19 nt, Homo sapiens
  misc_RNA (1)...(19): siRNA sense strand
gaugcccaccugcucauua

SEQ ID NO: 551817 - RNA, 19 nt, Homo sapiens
  misc_RNA (1)...(19): siRNA sense strand
caacuugccuguggaaucg

SEQ ID NO: 551818 - RNA, 19 nt, Homo sapiens
  misc_RNA (1)...(19): siRNA sense strand
ucccagaucucaaaguguu

SEQ ID NO: 551819 - RNA, 19 nt, Homo sapiens
  misc_RNA (1)...(19): siRNA sense strand
ucacagcccucaugaagcu

SEQ ID NO: 551820 - RNA, 19 nt, Homo sapiens
  misc_RNA (1)...(19): siRNA sense strand
caucccagaucucaaagug

SEQ ID NO: 551821 - RNA, 19 nt, Homo sapiens
  misc_RNA (1)...(19): siRNA sense strand
ggaaauacgaccacaugag

SEQ ID NO: 551822 - RNA, 19 nt, Homo sapiens
  misc_RNA (1)...(19): siRNA sense strand
gcaaaggaaagcaaagaag

SEQ ID NO: 551823 - RNA, 19 nt, Homo sapiens
  misc_RNA (1)...(19): siRNA sense strand
caugggcucugcugagaug

SEQ ID NO: 551824 - RNA, 19 nt, Homo sapiens
  misc_RNA (1)...(19): siRNA sense strand
aagaggaagugcuggcauu

SEQ ID NO: 551825 - RNA, 19 nt, Homo sapiens
  misc_RNA (1)...(19): siRNA sense strand
gggccaugcuucuauugga

SEQ ID NO: 551826 - RNA, 19 nt, Homo sapiens
  misc_RNA (1)...(19): siRNA sense strand
gccagccacucgaggauau

SEQ ID NO: 551827 - RNA, 19 nt, Homo sapiens
  misc_RNA (1)...(19): siRNA sense strand
gacaggaacauuagguaug

SEQ ID NO: 551828 - RNA, 19 nt, Homo sapiens
  misc_RNA (1)...(19): siRNA sense strand
gugcuggcauugcuggaaa

SEQ ID NO: 551829 - RNA, 19 nt, Homo sapiens
  misc_RNA (1)...(19): siRNA sense strand
cagccgaaaugccggaaau

SEQ ID NO: 551830 - RNA, 19 nt, Homo sapiens
  misc_RNA (1)...(19): siRNA sense strand
ggaccucaucgaagagauu

SEQ ID NO: 551831 - RNA, 19 nt, Homo sapiens
  misc_RNA (1)...(19): siRNA sense strand
gcucuacguccacauguug

SEQ ID NO: 551832 - RNA, 19 nt, Homo sapiens
  misc_RNA (1)...(19): siRNA sense strand
gaugaggaagcaaaggaaa

SEQ ID NO: 551833 - RNA, 19 nt, Homo sapiens
  misc_RNA (1)...(19): siRNA sense strand
guccugcccuccugaccua

SEQ ID NO: 551834 - RNA, 19 nt, Homo sapiens
  misc_RNA (1)...(19): siRNA sense strand
gugagaccaugaaugacuu

SEQ ID NO: 551835 - RNA, 19 nt, Homo sapiens
  misc_RNA (1)...(19): siRNA sense strand
cggaaaugcgguccuguuu

SEQ ID NO: 551836 - RNA, 19 nt, Homo sapiens
  misc_RNA (1)...(19): siRNA sense strand
ucuuugaggugaacaacuu

SEQ ID NO: 551837 - RNA, 19 nt, Homo sapiens
  misc_RNA (1)...(19): siRNA sense strand
gccaggugguguccaucua

SEQ ID NO: 551838 - RNA, 19 nt, Homo sapiens
  misc_RNA (1)...(19): siRNA sense strand
ggaacugcgaggagauuga

SEQ ID NO: 551839 - RNA, 19 nt, Homo sapiens
  misc_RNA (1)...(19): siRNA sense strand
accaaacgcuggcacauag

SEQ ID NO: 551840 - RNA, 19 nt, Homo sapiens
  misc_RNA (1)...(19): siRNA sense strand
gaucgccuccuccagauuc

SEQ ID NO: 551841 - RNA, 19 nt, Homo sapiens
  misc_RNA (1)...(19): siRNA sense strand
ucccugaacucuccagugu

SEQ ID NO: 551842 - RNA, 19 nt, Homo sapiens
  misc_RNA (1)...(19): siRNA sense strand
gccuggcucugguaaauag

SEQ ID NO: 551843 - RNA, 19 nt, Homo sapiens
  misc_RNA (1)...(19): siRNA sense strand
ccggagagcccuggaacua

SEQ ID NO: 551844 - RNA, 19 nt, Homo sapiens
  misc_RNA (1)...(19): siRNA sense strand
aacagugacaggaacauua

SEQ ID NO: 551845 - RNA, 19 nt, Homo sapiens
  misc_RNA (1)...(19): siRNA sense strand
ccacagaacacagcauauc

SEQ ID NO: 551846 - RNA, 19 nt, Homo sapiens
  misc_RNA (1)...(19): siRNA sense strand
caaccugacccagcugauu

SEQ ID NO: 551847 - RNA, 19 nt, Homo sapiens
  misc_RNA (1)...(19): siRNA sense strand
caacagugacaggaacauu

SEQ ID NO: 551848 - RNA, 19 nt, Homo sapiens
  misc_RNA (1)...(19): siRNA sense strand
cuuggucgcuuccuacuca

SEQ ID NO: 551849 - RNA, 19 nt, Homo sapiens
  misc_RNA (1)...(19): siRNA sense strand
agacaguacucaccaucau

SEQ ID NO: 551850 - RNA, 19 nt, Homo sapiens
  misc_RNA (1)...(19): siRNA sense strand
ccugaacucuccagugucu

SEQ ID NO: 551851 - RNA, 19 nt, Homo sapiens
  misc_RNA (1)...(19): siRNA sense strand
ggugcagucugaucacagu

SEQ ID NO: 551852 - RNA, 19 nt, Homo sapiens
  misc_RNA (1)...(19): siRNA sense strand
gugcugcagucccacaugu

SEQ ID NO: 551853 - RNA, 19 nt, Homo sapiens
  misc_RNA (1)...(19): siRNA sense strand
guggcagccuggugcauug

SEQ ID NO: 551854 - RNA, 19 nt, Homo sapiens
  misc_RNA (1)...(19): siRNA sense strand
uucaggaccucaucgaaga

SEQ ID NO: 551855 - RNA, 19 nt, Homo sapiens
  misc_RNA (1)...(19): siRNA sense strand
acacacucuuccggaaaua

SEQ ID NO: 551856 - RNA, 19 nt, Homo sapiens
  misc_RNA (1)...(19): siRNA sense strand
ggccaugcuucuauuggau

SEQ ID NO: 551857 - RNA, 19 nt, Homo sapiens
  misc_RNA (1)...(19): siRNA sense strand
acagauggagugccugaaa

SEQ ID NO: 551858 - RNA, 19 nt, Homo sapiens
  misc_RNA (1)...(19): siRNA sense strand
gagacaguacucaccauca

SEQ ID NO: 551859 - RNA, 19 nt, Homo sapiens
  misc_RNA (1)...(19): siRNA sense strand
ggagaucuuugaggugaac

SEQ ID NO: 551860 - RNA, 19 nt, Homo sapiens
  misc_RNA (1)...(19): siRNA sense strand
ccucacagcccucaugaag

SEQ ID NO: 551861 - RNA, 19 nt, Homo sapiens
  misc_RNA (1)...(19): siRNA sense strand
agaagacauuucccagcaa

SEQ ID NO: 551862 - RNA, 19 nt, Homo sapiens
  misc_RNA (1)...(19): siRNA sense strand
ugacaggaacauuagguau

SEQ ID NO: 551863 - RNA, 19 nt, Homo sapiens
  misc_RNA (1)...(19): siRNA sense strand
ugacacacucuuccggaaa

SEQ ID NO: 551864 - RNA, 19 nt, Homo sapiens
  misc_RNA (1)...(19): siRNA sense strand
gagagcagugagaccauga

SEQ ID NO: 551865 - RNA, 19 nt, Homo sapiens
  misc_RNA (1)...(19): siRNA sense strand
uaaagcugcgccucaccua

SEQ ID NO: 551866 - RNA, 19 nt, Homo sapiens
  misc_RNA (1)...(19): siRNA sense strand
ucagguggacgaagaggaa

SEQ ID NO: 551867 - RNA, 19 nt, Homo sapiens
  misc_RNA (1)...(19): siRNA sense strand
gagcgggaggugauccaaa

SEQ ID NO: 551868 - RNA, 19 nt, Homo sapiens
  misc_RNA (1)...(19): siRNA sense strand
ccaugcuucuauuggauga

SEQ ID NO: 551869 - RNA, 19 nt, Homo sapiens
  misc_RNA (1)...(19): siRNA sense strand
gcacuuccgaaagguggua

SEQ ID NO: 551870 - RNA, 19 nt, Homo sapiens
  misc_RNA (1)...(19): siRNA sense strand
ccucaccuacgaccacuuu

SEQ ID NO: 551871 - RNA, 19 nt, Homo sapiens
  misc_RNA (1)...(19): siRNA sense strand
gcuugaccuucccugugua

SEQ ID NO: 551872 - RNA, 19 nt, Homo sapiens
  misc_RNA (1)...(19): siRNA sense strand
gaagcaaaggaaagcaaag

SEQ ID NO: 551873 - RNA, 19 nt, Homo sapiens
  misc_RNA (1)...(19): siRNA sense strand
gaacugcgaggagauugag

SEQ ID NO: 551874 - RNA, 19 nt, Homo sapiens
  misc_RNA (1)...(19): siRNA sense strand
gugacaggaacauuaggua

SEQ ID NO: 551875 - RNA, 19 nt, Homo sapiens
  misc_RNA (1)...(19): siRNA sense strand
cagauggagugccugaaac

SEQ ID NO: 551876 - RNA, 19 nt, Homo sapiens
  misc_RNA (1)...(19): siRNA sense strand
ccggaaauacgaccacaug

SEQ ID NO: 551877 - RNA, 19 nt, Homo sapiens
  misc_RNA (1)...(19): siRNA sense strand
uagacaccauccugcaugu

SEQ ID NO: 551878 - RNA, 19 nt, Homo sapiens
  misc_RNA (1)...(19): siRNA sense strand
gguaaauagcuccaaugug

SEQ ID NO: 551879 - RNA, 19 nt, Homo sapiens
  misc_RNA (1)...(19): siRNA sense strand
uggagugccugaaacugau

SEQ ID NO: 551880 - RNA, 19 nt, Homo sapiens
  misc_RNA (1)...(19): siRNA sense strand
aaccaaacgcuggcacaua

SEQ ID NO: 551881 - RNA, 19 nt, Homo sapiens
  misc_RNA (1)...(19): siRNA sense strand
gagcagugagaccaugaau

SEQ ID NO: 551882 - RNA, 19 nt, Homo sapiens
  misc_RNA (1)...(19): siRNA sense strand
cggagagcccuggaacuaa

SEQ ID NO: 551883 - RNA, 19 nt, Homo sapiens
  misc_RNA (1)...(19): siRNA sense strand
uuaccaacagcaucaagaa

SEQ ID NO: 551884 - RNA, 19 nt, Homo sapiens
  misc_RNA (1)...(19): siRNA sense strand
gggcugccauccuggaaaa

SEQ ID NO: 551885 - RNA, 19 nt, Homo sapiens
  misc_RNA (1)...(19): siRNA sense strand
gacaguacucaccaucaug

SEQ ID NO: 551886 - RNA, 19 nt, Homo sapiens
  misc_RNA (1)...(19): siRNA sense strand
gugagggaguacagcugaa

SEQ ID NO: 551887 - RNA, 19 nt, Homo sapiens
  misc_RNA (1)...(19): siRNA sense strand
gguggcagccuggugcauu

SEQ ID NO: 551888 - RNA, 19 nt, Homo sapiens
  misc_RNA (1)...(19): siRNA sense strand
gcuuccuacucaacaguga

SEQ ID NO: 551889 - RNA, 19 nt, Homo sapiens
  misc_RNA (1)...(19): siRNA sense strand
uggccaaacugcucuacgu

SEQ ID NO: 551890 - RNA, 19 nt, Homo sapiens
  misc_RNA (1)...(19): siRNA sense strand
uucagaauccucaauccua

SEQ ID NO: 551891 - RNA, 19 nt, Homo sapiens
  misc_RNA (1)...(19): siRNA sense strand
ucugcuagaucuccuggau

SEQ ID NO: 551892 - RNA, 19 nt, Homo sapiens
  misc_RNA (1)...(19): siRNA sense strand
aaaggaaagcaaagaagca

SEQ ID NO: 551893 - RNA, 19 nt, Homo sapiens
  misc_RNA (1)...(19): siRNA sense strand
gcaagagcugcaggccuuu

SEQ ID NO: 551894 - RNA, 19 nt, Homo sapiens
  misc_RNA (1)...(19): siRNA sense strand
ugaacucuccagugucuuc

SEQ ID NO: 551895 - RNA, 19 nt, Homo sapiens
  misc_RNA (1)...(19): siRNA sense strand
aagcaaaggaaagcaaaga

SEQ ID NO: 551896 - RNA, 19 nt, Homo sapiens
  misc_RNA (1)...(19): siRNA sense strand
gaaugucuacgggaaacug

SEQ ID NO: 551897 - RNA, 19 nt, Homo sapiens
  misc_RNA (1)...(19): siRNA sense strand
cacagcauaucuggaguca

SEQ ID NO: 551898 - RNA, 19 nt, Homo sapiens
  misc_RNA (1)...(19): siRNA sense strand
caucacugccaccaacuuc

SEQ ID NO: 551899 - RNA, 19 nt, Homo sapiens
  misc_RNA (1)...(19): siRNA sense strand
gaaaugcgguccuguuuga

SEQ ID NO: 551900 - RNA, 19 nt, Homo sapiens
  misc_RNA (1)...(19): siRNA sense strand
gcagugagaccaugaauga

SEQ ID NO: 551901 - RNA, 19 nt, Homo sapiens
  misc_RNA (1)...(19): siRNA sense strand
gcagagagguuugcuccaa

SEQ ID NO: 551902 - RNA, 19 nt, Homo sapiens
  misc_RNA (1)...(19): siRNA sense strand
gguucuagcugucaacauu

SEQ ID NO: 551903 - RNA, 19 nt, Homo sapiens
  misc_RNA (1)...(19): siRNA sense strand
ccaacagcaucaagaauga

SEQ ID NO: 551904 - RNA, 19 nt, Homo sapiens
  misc_RNA (1)...(19): siRNA sense strand
ucagaauccucaauccuaa

SEQ ID NO: 551905 - RNA, 19 nt, Homo sapiens
  misc_RNA (1)...(19): siRNA sense strand
gcucagcacucgccucugu

SEQ ID NO: 551906 - RNA, 19 nt, Homo sapiens
  misc_RNA (1)...(19): siRNA sense strand
ggagagcccuggaacuaag

SEQ ID NO: 551907 - RNA, 19 nt, Homo sapiens
  misc_RNA (1)...(19): siRNA sense strand
ucacccagcucuucagaau

SEQ ID NO: 551908 - RNA, 19 nt, Homo sapiens
  misc_RNA (1)...(19): siRNA sense strand
aaacccugcuuugcuguua

SEQ ID NO: 551909 - RNA, 19 nt, Homo sapiens
  misc_RNA (1)...(19): siRNA sense strand
gaacaacuugccuguggaa

SEQ ID NO: 551910 - RNA, 19 nt, Homo sapiens
  misc_RNA (1)...(19): siRNA sense strand
ggaaaugcgguccuguuug

SEQ ID NO: 551911 - RNA, 19 nt, Homo sapiens
  misc_RNA (1)...(19): siRNA sense strand
gugcccaacugcuucauga

SEQ ID NO: 551912 - RNA, 19 nt, Homo sapiens
  misc_RNA (1)...(19): siRNA sense strand
ccucacagcuccuggaucu

SEQ ID NO: 551913 - RNA, 19 nt, Homo sapiens
  misc_RNA (1)...(19): siRNA sense strand
ggaagcaaaggaaagcaaa

SEQ ID NO: 551914 - RNA, 19 nt, Homo sapiens
  misc_RNA (1)...(19): siRNA sense strand
gacacacucuuccggaaau

SEQ ID NO: 551915 - RNA, 19 nt, Homo sapiens
  misc_RNA (1)...(19): siRNA sense strand
ggagcuacaugccuacucu

SEQ ID NO: 551916 - RNA, 19 nt, Homo sapiens
  misc_RNA (1)...(19): siRNA sense strand
gaugcccaccugcucauua

SEQ ID NO: 551917 - RNA, 19 nt, Homo sapiens
  misc_RNA (1)...(19): siRNA sense strand
caacuugccuguggaaucg

SEQ ID NO: 551918 - RNA, 19 nt, Homo sapiens
  misc_RNA (1)...(19): siRNA sense strand
ucccagaucucaaaguguu

SEQ ID NO: 551919 - RNA, 19 nt, Homo sapiens
  misc_RNA (1)...(19): siRNA sense strand
ucacagcccucaugaagcu

SEQ ID NO: 551920 - RNA, 19 nt, Homo sapiens
  misc_RNA (1)...(19): siRNA sense strand
caucccagaucucaaagug

SEQ ID NO: 551921 - RNA, 19 nt, Homo sapiens
  misc_RNA (1)...(19): siRNA sense strand
ggaaauacgaccacaugag

SEQ ID NO: 551922 - RNA, 19 nt, Homo sapiens
  misc_RNA (1)...(19): siRNA sense strand
gcaaaggaaagcaaagaag

SEQ ID NO: 551923 - RNA, 19 nt, Homo sapiens
  misc_RNA (1)...(19): siRNA sense strand
caugggcucugcugagaug

SEQ ID NO: 551924 - RNA, 19 nt, Homo sapiens
  misc_RNA (1)...(19): siRNA sense strand
aagaggaagugcuggcauu

SEQ ID NO: 551925 - RNA, 19 nt, Homo sapiens
  misc_RNA (1)...(19): siRNA sense strand
gggccaugcuucuauugga

SEQ ID NO: 551926 - RNA, 19 nt, Homo sapiens
  misc_RNA (1)...(19): siRNA sense strand
gccagccacucgaggauau

SEQ ID NO: 551927 - RNA, 19 nt, Homo sapiens
  misc_RNA (1)...(19): siRNA sense strand
gacaggaacauuagguaug

SEQ ID NO: 551928 - RNA, 19 nt, Homo sapiens
  misc_RNA (1)...(19): siRNA sense strand
gugcuggcauugcuggaaa

SEQ ID NO: 551929 - RNA, 19 nt, Homo sapiens
  misc_RNA (1)...(19): siRNA sense strand
cagccgaaaugccggaaau

SEQ ID NO: 551930 - RNA, 19 nt, Homo sapiens
  misc_RNA (1)...(19): siRNA sense strand
ggaccucaucgaagagauu

SEQ ID NO: 551931 - RNA, 19 nt, Homo sapiens
  misc_RNA (1)...(19): siRNA sense strand
gcucuacguccacauguug

SEQ ID NO: 551932 - RNA, 19 nt, Homo sapiens
  misc_RNA (1)...(19): siRNA sense strand
gaugaggaagcaaaggaaa

SEQ ID NO: 551933 - RNA, 19 nt, Homo sapiens
  misc_RNA (1)...(19): siRNA sense strand
guccugcccuccugaccua

SEQ ID NO: 551934 - RNA, 19 nt, Homo sapiens
  misc_RNA (1)...(19): siRNA sense strand
gugagaccaugaaugacuu

SEQ ID NO: 551935 - RNA, 19 nt, Homo sapiens
  misc_RNA (1)...(19): siRNA sense strand
cggaaaugcgguccuguuu

SEQ ID NO: 551936 - RNA, 19 nt, Homo sapiens
  misc_RNA (1)...(19): siRNA sense strand
ucuuugaggugaacaacuu

SEQ ID NO: 551937 - RNA, 19 nt, Homo sapiens
  misc_RNA (1)...(19): siRNA sense strand
gccaggugguguccaucua

SEQ ID NO: 551938 - RNA, 19 nt, Homo sapiens
  misc_RNA (1)...(19): siRNA sense strand
ggaacugcgaggagauuga

SEQ ID NO: 551939 - RNA, 19 nt, Homo sapiens
  misc_RNA (1)...(19): siRNA sense strand
accaaacgcuggcacauag

SEQ ID NO: 551940 - RNA, 19 nt, Homo sapiens
  misc_RNA (1)...(19): siRNA sense strand
gaucgccuccuccagauuc

SEQ ID NO: 551941 - RNA, 19 nt, Homo sapiens
  misc_RNA (1)...(19): siRNA sense strand
ucccugaacucuccagugu

SEQ ID NO: 551942 - RNA, 19 nt, Homo sapiens
  misc_RNA (1)...(19): siRNA sense strand
gccuggcucugguaaauag

SEQ ID NO: 551943 - RNA, 19 nt, Homo sapiens
  misc_RNA (1)...(19): siRNA sense strand
ccggagagcccuggaacua

SEQ ID NO: 551944 - RNA, 19 nt, Homo sapiens
  misc_RNA (1)...(19): siRNA sense strand
aacagugacaggaacauua

SEQ ID NO: 551945 - RNA, 19 nt, Homo sapiens
  misc_RNA (1)...(19): siRNA sense strand
ccacagaacacagcauauc

SEQ ID NO: 551946 - RNA, 19 nt, Homo sapiens
  misc_RNA (1)...(19): siRNA sense strand
caaccugacccagcugauu

SEQ ID NO: 551947 - RNA, 19 nt, Homo sapiens
  misc_RNA (1)...(19): siRNA sense strand
caacagugacaggaacauu

SEQ ID NO: 551948 - RNA, 19 nt, Homo sapiens
  misc_RNA (1)...(19): siRNA sense strand
cuuggucgcuuccuacuca

SEQ ID NO: 551949 - RNA, 19 nt, Homo sapiens
  misc_RNA (1)...(19): siRNA sense strand
agacaguacucaccaucau

SEQ ID NO: 551950 - RNA, 19 nt, Homo sapiens
  misc_RNA (1)...(19): siRNA sense strand
ccugaacucuccagugucu

SEQ ID NO: 551951 - RNA, 19 nt, Homo sapiens
  misc_RNA (1)...(19): siRNA sense strand
ggugcagucugaucacagu

SEQ ID NO: 551952 - RNA, 19 nt, Homo sapiens
  misc_RNA (1)...(19): siRNA sense strand
gugcugcagucccacaugu

SEQ ID NO: 551953 - RNA, 19 nt, Homo sapiens
  misc_RNA (1)...(19): siRNA sense strand
guggcagccuggugcauug

SEQ ID NO: 551954 - RNA, 19 nt, Homo sapiens
  misc_RNA (1)...(19): siRNA sense strand
uucaggaccucaucgaaga

SEQ ID NO: 551955 - RNA, 19 nt, Homo sapiens
  misc_RNA (1)...(19): siRNA sense strand
acacacucuuccggaaaua

SEQ ID NO: 551956 - RNA, 19 nt, Homo sapiens
  misc_RNA (1)...(19): siRNA sense strand
ggccaugcuucuauuggau

SEQ ID NO: 551957 - RNA, 19 nt, Homo sapiens
  misc_RNA (1)...(19): siRNA sense strand
acagauggagugccugaaa

SEQ ID NO: 551958 - RNA, 19 nt, Homo sapiens
  misc_RNA (1)...(19): siRNA sense strand
gagacaguacucaccauca

SEQ ID NO: 551959 - RNA, 19 nt, Homo sapiens
  misc_RNA (1)...(19): siRNA sense strand
ggagaucuuugaggugaac

SEQ ID NO: 551960 - RNA, 19 nt, Homo sapiens
  misc_RNA (1)...(19): siRNA sense strand
ccucacagcccucaugaag

SEQ ID NO: 551961 - RNA, 19 nt, Homo sapiens
  misc_RNA (1)...(19): siRNA sense strand
agaagacauuucccagcaa

SEQ ID NO: 551962 - RNA, 19 nt, Homo sapiens
  misc_RNA (1)...(19): siRNA sense strand
ugacaggaacauuagguau

SEQ ID NO: 551963 - RNA, 19 nt, Homo sapiens
  misc_RNA (1)...(19): siRNA sense strand
ugacacacucuuccggaaa

SEQ ID NO: 551964 - RNA, 19 nt, Homo sapiens
  misc_RNA (1)...(19): siRNA sense strand
gagagcagugagaccauga

SEQ ID NO: 551965 - RNA, 19 nt, Homo sapiens
  misc_RNA (1)...(19): siRNA sense strand
uaaagcugcgccucaccua

SEQ ID NO: 551966 - RNA, 19 nt, Homo sapiens
  misc_RNA (1)...(19): siRNA sense strand
ucagguggacgaagaggaa

SEQ ID NO: 551967 - RNA, 19 nt, Homo sapiens
  misc_RNA (1)...(19): siRNA sense strand
gagcgggaggugauccaaa

SEQ ID NO: 551968 - RNA, 19 nt, Homo sapiens
  misc_RNA (1)...(19): siRNA sense strand
ccaugcuucuauuggauga

SEQ ID NO: 551969 - RNA, 19 nt, Homo sapiens
  misc_RNA (1)...(19): siRNA sense strand
gcacuuccgaaagguggua

SEQ ID NO: 551970 - RNA, 19 nt, Homo sapiens
  misc_RNA (1)...(19): siRNA sense strand
ccucaccuacgaccacuuu

SEQ ID NO: 551971 - RNA, 19 nt, Homo sapiens
  misc_RNA (1)...(19): siRNA sense strand
gcuugaccuucccugugua

SEQ ID NO: 551972 - RNA, 19 nt, Homo sapiens
  misc_RNA (1)...(19): siRNA sense strand
gaagcaaaggaaagcaaag

SEQ ID NO: 551973 - RNA, 19 nt, Homo sapiens
  misc_RNA (1)...(19): siRNA sense strand
gaacugcgaggagauugag

SEQ ID NO: 551974 - RNA, 19 nt, Homo sapiens
  misc_RNA (1)...(19): siRNA sense strand
gugacaggaacauuaggua

SEQ ID NO: 551975 - RNA, 19 nt, Homo sapiens
  misc_RNA (1)...(19): siRNA sense strand
cagauggagugccugaaac

SEQ ID NO: 551976 - RNA, 19 nt, Homo sapiens
  misc_RNA (1)...(19): siRNA sense strand
ccggaaauacgaccacaug

SEQ ID NO: 551977 - RNA, 19 nt, Homo sapiens
  misc_RNA (1)...(19): siRNA sense strand
uagacaccauccugcaugu

SEQ ID NO: 551978 - RNA, 19 nt, Homo sapiens
  misc_RNA (1)...(19): siRNA sense strand
gguaaauagcuccaaugug

SEQ ID NO: 551979 - RNA, 19 nt, Homo sapiens
  misc_RNA (1)...(19): siRNA sense strand
uggagugccugaaacugau

SEQ ID NO: 551980 - RNA, 19 nt, Homo sapiens
  misc_RNA (1)...(19): siRNA sense strand
aaccaaacgcuggcacaua

SEQ ID NO: 551981 - RNA, 19 nt, Homo sapiens
  misc_RNA (1)...(19): siRNA sense strand
gagcagugagaccaugaau

SEQ ID NO: 551982 - RNA, 19 nt, Homo sapiens
  misc_RNA (1)...(19): siRNA sense strand
cggagagcccuggaacuaa

SEQ ID NO: 551983 - RNA, 19 nt, Homo sapiens
  misc_RNA (1)...(19): siRNA sense strand
uuaccaacagcaucaagaa

SEQ ID NO: 551984 - RNA, 19 nt, Homo sapiens
  misc_RNA (1)...(19): siRNA sense strand
gggcugccauccuggaaaa

SEQ ID NO: 551985 - RNA, 19 nt, Homo sapiens
  misc_RNA (1)...(19): siRNA sense strand
gacaguacucaccaucaug

SEQ ID NO: 551986 - RNA, 19 nt, Homo sapiens
  misc_RNA (1)...(19): siRNA sense strand
gugagggaguacagcugaa

SEQ ID NO: 551987 - RNA, 19 nt, Homo sapiens
  misc_RNA (1)...(19): siRNA sense strand
gguggcagccuggugcauu

SEQ ID NO: 551988 - RNA, 19 nt, Homo sapiens
  misc_RNA (1)...(19): siRNA sense strand
gcuuccuacucaacaguga

SEQ ID NO: 551989 - RNA, 19 nt, Homo sapiens
  misc_RNA (1)...(19): siRNA sense strand
uggccaaacugcucuacgu

SEQ ID NO: 551990 - RNA, 19 nt, Homo sapiens
  misc_RNA (1)...(19): siRNA sense strand
uucagaauccucaauccua

SEQ ID NO: 551991 - RNA, 19 nt, Homo sapiens
  misc_RNA (1)...(19): siRNA sense strand
ucugcuagaucuccuggau

SEQ ID NO: 551992 - RNA, 19 nt, Homo sapiens
  misc_RNA (1)...(19): siRNA sense strand
aaaggaaagcaaagaagca

SEQ ID NO: 551993 - RNA, 19 nt, Homo sapiens
  misc_RNA (1)...(19): siRNA sense strand
gcaagagcugcaggccuuu

SEQ ID NO: 551994 - RNA, 19 nt, Homo sapiens
  misc_RNA (1)...(19): siRNA sense strand
ugaacucuccagugucuuc

SEQ ID NO: 551995 - RNA, 19 nt, Homo sapiens
  misc_RNA (1)...(19): siRNA sense strand
aagcaaaggaaagcaaaga

SEQ ID NO: 551996 - RNA, 19 nt, Homo sapiens
  misc_RNA (1)...(19): siRNA sense strand
gaaugucuacgggaaacug

SEQ ID NO: 551997 - RNA, 19 nt, Homo sapiens
  misc_RNA (1)...(19): siRNA sense strand
cacagcauaucuggaguca

SEQ ID NO: 551998 - RNA, 19 nt, Homo sapiens
  misc_RNA (1)...(19): siRNA sense strand
caucacugccaccaacuuc

SEQ ID NO: 551999 - RNA, 19 nt, Homo sapiens
  misc_RNA (1)...(19): siRNA sense strand
ucucagagcucuaaagaua

SEQ ID NO: 552000 - RNA, 19 nt, Homo sapiens
  misc_RNA (1)...(19): siRNA sense strand
ggaagucagcuuuguauuu

SEQ ID NO: 552001 - RNA, 19 nt, Homo sapiens
  misc_RNA (1)...(19): siRNA sense strand
gcaauacacucugaaagau

SEQ ID NO: 552002 - RNA, 19 nt, Homo sapiens
  misc_RNA (1)...(19): siRNA sense strand
gcacugcaauacacucuga

SEQ ID NO: 552003 - RNA, 19 nt, Homo sapiens
  misc_RNA (1)...(19): siRNA sense strand
gaagucagcuuuguauuuu

SEQ ID NO: 552004 - RNA, 19 nt, Homo sapiens
  misc_RNA (1)...(19): siRNA sense strand
gaguuaacccuuuacauuu

SEQ ID NO: 552005 - RNA, 19 nt, Homo sapiens
  misc_RNA (1)...(19): siRNA sense strand
guugaaggcuggacaucua

SEQ ID NO: 552006 - RNA, 19 nt, Homo sapiens
  misc_RNA (1)...(19): siRNA sense strand
caaaguccauccuuccuau

SEQ ID NO: 552007 - RNA, 19 nt, Homo sapiens
  misc_RNA (1)...(19): siRNA sense strand
caucuacaguuaucaaaga

SEQ ID NO: 552008 - RNA, 19 nt, Homo sapiens
  misc_RNA (1)...(19): siRNA sense strand
caugucauuucuuccauua

SEQ ID NO: 552009 - RNA, 19 nt, Homo sapiens
  misc_RNA (1)...(19): siRNA sense strand
guucggaucuguucaaagu

SEQ ID NO: 552010 - RNA, 19 nt, Homo sapiens
  misc_RNA (1)...(19): siRNA sense strand
gaaaugcaugggacgguua

SEQ ID NO: 552011 - RNA, 19 nt, Homo sapiens
  misc_RNA (1)...(19): siRNA sense strand
gagugaugcuugauuaugu

SEQ ID NO: 552012 - RNA, 19 nt, Homo sapiens
  misc_RNA (1)...(19): siRNA sense strand
aagcauauguccuuuacaa

SEQ ID NO: 552013 - RNA, 19 nt, Homo sapiens
  misc_RNA (1)...(19): siRNA sense strand
ggcuggacaucuacaguua

SEQ ID NO: 552014 - RNA, 19 nt, Homo sapiens
  misc_RNA (1)...(19): siRNA sense strand
caacaucucucuggaaagg

SEQ ID NO: 552015 - RNA, 19 nt, Homo sapiens
  misc_RNA (1)...(19): siRNA sense strand
aaacauuugugccgccuaa

SEQ ID NO: 552016 - RNA, 19 nt, Homo sapiens
  misc_RNA (1)...(19): siRNA sense strand
gauacuaaguucugugaag

SEQ ID NO: 552017 - RNA, 19 nt, Homo sapiens
  misc_RNA (1)...(19): siRNA sense strand
gggccaaugucaauuacuu

SEQ ID NO: 552018 - RNA, 19 nt, Homo sapiens
  misc_RNA (1)...(19): siRNA sense strand
gcgcugcccugucuucaug

SEQ ID NO: 552019 - RNA, 19 nt, Homo sapiens
  misc_RNA (1)...(19): siRNA sense strand
cugcagaguuaacccuuua

SEQ ID NO: 552020 - RNA, 19 nt, Homo sapiens
  misc_RNA (1)...(19): siRNA sense strand
gaucagagaauuaacaaac

SEQ ID NO: 552021 - RNA, 19 nt, Homo sapiens
  misc_RNA (1)...(19): siRNA sense strand
guugaaagcugugcuccaa

SEQ ID NO: 552022 - RNA, 19 nt, Homo sapiens
  misc_RNA (1)...(19): siRNA sense strand
agaguuaacccuuuacauu

SEQ ID NO: 552023 - RNA, 19 nt, Homo sapiens
  misc_RNA (1)...(19): siRNA sense strand
aauacacucugaaagauga

SEQ ID NO: 552024 - RNA, 19 nt, Homo sapiens
  misc_RNA (1)...(19): siRNA sense strand
ggaaagguuguucgaguga

SEQ ID NO: 552025 - RNA, 19 nt, Homo sapiens
  misc_RNA (1)...(19): siRNA sense strand
gcaugggacgguuacauuu

SEQ ID NO: 552026 - RNA, 19 nt, Homo sapiens
  misc_RNA (1)...(19): siRNA sense strand
ggacaucuacaguuaucaa

SEQ ID NO: 552027 - RNA, 19 nt, Homo sapiens
  misc_RNA (1)...(19): siRNA sense strand
ugucauggcugcaacaucu

SEQ ID NO: 552028 - RNA, 19 nt, Homo sapiens
  misc_RNA (1)...(19): siRNA sense strand
acagugaccucucuucagu

SEQ ID NO: 552029 - RNA, 19 nt, Homo sapiens
  misc_RNA (1)...(19): siRNA sense strand
acuaugagcugaucagucu

SEQ ID NO: 552030 - RNA, 19 nt, Homo sapiens
  misc_RNA (1)...(19): siRNA sense strand
aauuacuucugcagaguua

SEQ ID NO: 552031 - RNA, 19 nt, Homo sapiens
  misc_RNA (1)...(19): siRNA sense strand
caaagauacuaaguucugu

SEQ ID NO: 552032 - RNA, 19 nt, Homo sapiens
  misc_RNA (1)...(19): siRNA sense strand
ggaugcugcugaacuaugg

SEQ ID NO: 552033 - RNA, 19 nt, Homo sapiens
  misc_RNA (1)...(19): siRNA sense strand
gaacuauggguaugacaca

SEQ ID NO: 552034 - RNA, 19 nt, Homo sapiens
  misc_RNA (1)...(19): siRNA sense strand
gccuaaagauccggaaaug

SEQ ID NO: 552035 - RNA, 19 nt, Homo sapiens
  misc_RNA (1)...(19): siRNA sense strand
ugcaacaucucucuggaaa

SEQ ID NO: 552036 - RNA, 19 nt, Homo sapiens
  misc_RNA (1)...(19): siRNA sense strand
ucaaagauacuaaguucug

SEQ ID NO: 552037 - RNA, 19 nt, Homo sapiens
  misc_RNA (1)...(19): siRNA sense strand
cuaaagauccggaaaugca

SEQ ID NO: 552038 - RNA, 19 nt, Homo sapiens
  misc_RNA (1)...(19): siRNA sense strand
gagcucugccuaaucaaga

SEQ ID NO: 552039 - RNA, 19 nt, Homo sapiens
  misc_RNA (1)...(19): siRNA sense strand
gcucuaaagauacugauuc

SEQ ID NO: 552040 - RNA, 19 nt, Homo sapiens
  misc_RNA (1)...(19): siRNA sense strand
ucggaucuguucaaaguug

SEQ ID NO: 552041 - RNA, 19 nt, Homo sapiens
  misc_RNA (1)...(19): siRNA sense strand
acuaaguucugugaaguaa

SEQ ID NO: 552042 - RNA, 19 nt, Homo sapiens
  misc_RNA (1)...(19): siRNA sense strand
caucagcacugcaauacac

SEQ ID NO: 552043 - RNA, 19 nt, Homo sapiens
  misc_RNA (1)...(19): siRNA sense strand
gguuaacugccuccagaua

SEQ ID NO: 552044 - RNA, 19 nt, Homo sapiens
  misc_RNA (1)...(19): siRNA sense strand
cuggagcucugccuaauca

SEQ ID NO: 552045 - RNA, 19 nt, Homo sapiens
  misc_RNA (1)...(19): siRNA sense strand
ggaucuugcugccauuaag

SEQ ID NO: 552046 - RNA, 19 nt, Homo sapiens
  misc_RNA (1)...(19): siRNA sense strand
gcugaucagucugcugcua

SEQ ID NO: 552047 - RNA, 19 nt, Homo sapiens
  misc_RNA (1)...(19): siRNA sense strand
gaaagguuguucgagugau

SEQ ID NO: 552048 - RNA, 19 nt, Homo sapiens
  misc_RNA (1)...(19): siRNA sense strand
uuacaaagaauacgaccuu

SEQ ID NO: 552049 - RNA, 19 nt, Homo sapiens
  misc_RNA (1)...(19): siRNA sense strand
uuaacaaacacuacgauga

SEQ ID NO: 552050 - RNA, 19 nt, Homo sapiens
  misc_RNA (1)...(19): siRNA sense strand
gaugcuugauuauguugau

SEQ ID NO: 552051 - RNA, 19 nt, Homo sapiens
  misc_RNA (1)...(19): siRNA sense strand
uaacaaacacuacgaugac

SEQ ID NO: 552052 - RNA, 19 nt, Homo sapiens
  misc_RNA (1)...(19): siRNA sense strand
gggcaacuaugagcugauc

SEQ ID NO: 552053 - RNA, 19 nt, Homo sapiens
  misc_RNA (1)...(19): siRNA sense strand
ugaaagcugugcuccaaaa

SEQ ID NO: 552054 - RNA, 19 nt, Homo sapiens
  misc_RNA (1)...(19): siRNA sense strand
uucgagugaugcuugauua

SEQ ID NO: 552055 - RNA, 19 nt, Homo sapiens
  misc_RNA (1)...(19): siRNA sense strand
ggagacaaaguccauccuu

SEQ ID NO: 552056 - RNA, 19 nt, Homo sapiens
  misc_RNA (1)...(19): siRNA sense strand
gaauuaacaaacacuacga

SEQ ID NO: 552057 - RNA, 19 nt, Homo sapiens
  misc_RNA (1)...(19): siRNA sense strand
ucagagcucuaaagauacu

SEQ ID NO: 552058 - RNA, 19 nt, Homo sapiens
  misc_RNA (1)...(19): siRNA sense strand
caggaagucagcuuuguau

SEQ ID NO: 552059 - RNA, 19 nt, Homo sapiens
  misc_RNA (1)...(19): siRNA sense strand
cauccuuccuauacuguug

SEQ ID NO: 552060 - RNA, 19 nt, Homo sapiens
  misc_RNA (1)...(19): siRNA sense strand
ccacaggaagucagcuuug

SEQ ID NO: 552061 - RNA, 19 nt, Homo sapiens
  misc_RNA (1)...(19): siRNA sense strand
ccaaucgucuaaaagcaua

SEQ ID NO: 552062 - RNA, 19 nt, Homo sapiens
  misc_RNA (1)...(19): siRNA sense strand
aaagguuguucgagugaug

SEQ ID NO: 552063 - RNA, 19 nt, Homo sapiens
  misc_RNA (1)...(19): siRNA sense strand
acagagcgauguuuugauu

SEQ ID NO: 552064 - RNA, 19 nt, Homo sapiens
  misc_RNA (1)...(19): siRNA sense strand
aguuaacccuuuacauuuc

SEQ ID NO: 552065 - RNA, 19 nt, Homo sapiens
  misc_RNA (1)...(19): siRNA sense strand
ugcaauacacucugaaaga

SEQ ID NO: 552066 - RNA, 19 nt, Homo sapiens
  misc_RNA (1)...(19): siRNA sense strand
agaauacgaccuuuaugga

SEQ ID NO: 552067 - RNA, 19 nt, Homo sapiens
  misc_RNA (1)...(19): siRNA sense strand
caaguucggaucuguucaa

SEQ ID NO: 552068 - RNA, 19 nt, Homo sapiens
  misc_RNA (1)...(19): siRNA sense strand
aaacagugaccucucuuca

SEQ ID NO: 552069 - RNA, 19 nt, Homo sapiens
  misc_RNA (1)...(19): siRNA sense strand
caugcuggaucagagaauu

SEQ ID NO: 552070 - RNA, 19 nt, Homo sapiens
  misc_RNA (1)...(19): siRNA sense strand
caauacacucugaaagaug

SEQ ID NO: 552071 - RNA, 19 nt, Homo sapiens
  misc_RNA (1)...(19): siRNA sense strand
ucaauuacuucugcagagu

SEQ ID NO: 552072 - RNA, 19 nt, Homo sapiens
  misc_RNA (1)...(19): siRNA sense strand
ucaugucauuucuuccauu

SEQ ID NO: 552073 - RNA, 19 nt, Homo sapiens
  misc_RNA (1)...(19): siRNA sense strand
caggcuggauuugauguga

SEQ ID NO: 552074 - RNA, 19 nt, Homo sapiens
  misc_RNA (1)...(19): siRNA sense strand
cauuugcgcugcccugucu

SEQ ID NO: 552075 - RNA, 19 nt, Homo sapiens
  misc_RNA (1)...(19): siRNA sense strand
acaggaagucagcuuugua

SEQ ID NO: 552076 - RNA, 19 nt, Homo sapiens
  misc_RNA (1)...(19): siRNA sense strand
acaucucucuggaaagguu

SEQ ID NO: 552077 - RNA, 19 nt, Homo sapiens
  misc_RNA (1)...(19): siRNA sense strand
acaaaguccauccuuccua

SEQ ID NO: 552078 - RNA, 19 nt, Homo sapiens
  misc_RNA (1)...(19): siRNA sense strand
cacaggaagucagcuuugu

SEQ ID NO: 552079 - RNA, 19 nt, Homo sapiens
  misc_RNA (1)...(19): siRNA sense strand
ccauuacccaaucgucuaa

SEQ ID NO: 552080 - RNA, 19 nt, Homo sapiens
  misc_RNA (1)...(19): siRNA sense strand
gcccugucuucaugucauu

SEQ ID NO: 552081 - RNA, 19 nt, Homo sapiens
  misc_RNA (1)...(19): siRNA sense strand
gacaucuacaguuaucaaa

SEQ ID NO: 552082 - RNA, 19 nt, Homo sapiens
  misc_RNA (1)...(19): siRNA sense strand
ccuaaucaagacccgguua

SEQ ID NO: 552083 - RNA, 19 nt, Homo sapiens
  misc_RNA (1)...(19): siRNA sense strand
caugggacgguuacauuug

SEQ ID NO: 552084 - RNA, 19 nt, Homo sapiens
  misc_RNA (1)...(19): siRNA sense strand
cgagugaugcuugauuaug

SEQ ID NO: 552085 - RNA, 19 nt, Homo sapiens
  misc_RNA (1)...(19): siRNA sense strand
auacuaaguucugugaagu

SEQ ID NO: 552086 - RNA, 19 nt, Homo sapiens
  misc_RNA (1)...(19): siRNA sense strand
gagaauuaacaaacacuac

SEQ ID NO: 552087 - RNA, 19 nt, Homo sapiens
  misc_RNA (1)...(19): siRNA sense strand
cuaaucaagacccgguuaa

SEQ ID NO: 552088 - RNA, 19 nt, Homo sapiens
  misc_RNA (1)...(19): siRNA sense strand
guuaacugccuccagauag

SEQ ID NO: 552089 - RNA, 19 nt, Homo sapiens
  misc_RNA (1)...(19): siRNA sense strand
aagaauacgaccuuuaugg

SEQ ID NO: 552090 - RNA, 19 nt, Homo sapiens
  misc_RNA (1)...(19): siRNA sense strand
caaacagugaccucucuuc

SEQ ID NO: 552091 - RNA, 19 nt, Homo sapiens
  misc_RNA (1)...(19): siRNA sense strand
ucaggaugggcaacuauga

SEQ ID NO: 552092 - RNA, 19 nt, Homo sapiens
  misc_RNA (1)...(19): siRNA sense strand
gugcuggagcucugccuaa

SEQ ID NO: 552093 - RNA, 19 nt, Homo sapiens
  misc_RNA (1)...(19): siRNA sense strand
ucagagaauuaacaaacac

SEQ ID NO: 552094 - RNA, 19 nt, Homo sapiens
  misc_RNA (1)...(19): siRNA sense strand
caaacccucgcucccuaaa

SEQ ID NO: 552095 - RNA, 19 nt, Homo sapiens
  misc_RNA (1)...(19): siRNA sense strand
gcagaguuaacccuuuaca

SEQ ID NO: 552096 - RNA, 19 nt, Homo sapiens
  misc_RNA (1)...(19): siRNA sense strand
guccauccuuccuauacug

SEQ ID NO: 552097 - RNA, 19 nt, Homo sapiens
  misc_RNA (1)...(19): siRNA sense strand
cauuugugccgccuaaaga

SEQ ID NO: 552098 - RNA, 19 nt, Homo sapiens
  misc_RNA (1)...(19): siRNA sense strand
agugaugcuugauuauguu

SEQ ID NO: 552099 - RNA, 19 nt, Homo sapiens
  misc_RNA (1)...(19): siRNA sense strand
gagaaaggcuggcuauaag

SEQ ID NO: 552100 - RNA, 19 nt, Homo sapiens
  misc_RNA (1)...(19): siRNA sense strand
ggagaaaggcuggcuauaa

SEQ ID NO: 552101 - RNA, 19 nt, Homo sapiens
  misc_RNA (1)...(19): siRNA sense strand
gagagcagcuucaggaauc

SEQ ID NO: 552102 - RNA, 19 nt, Homo sapiens
  misc_RNA (1)...(19): siRNA sense strand
gaaaggcuggcuauaagaa

SEQ ID NO: 552103 - RNA, 19 nt, Homo sapiens
  misc_RNA (1)...(19): siRNA sense strand
cgugaaagcugucaucgau

SEQ ID NO: 552104 - RNA, 19 nt, Homo sapiens
  misc_RNA (1)...(19): siRNA sense strand
ugaaagcugucaucgauag

SEQ ID NO: 552105 - RNA, 19 nt, Homo sapiens
  misc_RNA (1)...(19): siRNA sense strand
gagagaaaccugacaugug

SEQ ID NO: 552106 - RNA, 19 nt, Homo sapiens
  misc_RNA (1)...(19): siRNA sense strand
gcaaggaagaagcgauuga

SEQ ID NO: 552107 - RNA, 19 nt, Homo sapiens
  misc_RNA (1)...(19): siRNA sense strand
caagagaaagaccgugaaa

SEQ ID NO: 552108 - RNA, 19 nt, Homo sapiens
  misc_RNA (1)...(19): siRNA sense strand
aagaagcgauugagggaau

SEQ ID NO: 552109 - RNA, 19 nt, Homo sapiens
  misc_RNA (1)...(19): siRNA sense strand
agacuuaccacaucugaga

SEQ ID NO: 552110 - RNA, 19 nt, Homo sapiens
  misc_RNA (1)...(19): siRNA sense strand
cgacuucauuguggccuuu

SEQ ID NO: 552111 - RNA, 19 nt, Homo sapiens
  misc_RNA (1)...(19): siRNA sense strand
gcgauugagggaauuugua

SEQ ID NO: 552112 - RNA, 19 nt, Homo sapiens
  misc_RNA (1)...(19): siRNA sense strand
gaggagaaaggcuggcuau

SEQ ID NO: 552113 - RNA, 19 nt, Homo sapiens
  misc_RNA (1)...(19): siRNA sense strand
gcaagagaaagaccgugaa

SEQ ID NO: 552114 - RNA, 19 nt, Homo sapiens
  misc_RNA (1)...(19): siRNA sense strand
cuaacauacuucagugcaa

SEQ ID NO: 552115 - RNA, 19 nt, Homo sapiens
  misc_RNA (1)...(19): siRNA sense strand
cgauagguuucuucgacuu

SEQ ID NO: 552116 - RNA, 19 nt, Homo sapiens
  misc_RNA (1)...(19): siRNA sense strand
gaagcgauugagggaauuu

SEQ ID NO: 552117 - RNA, 19 nt, Homo sapiens
  misc_RNA (1)...(19): siRNA sense strand
aaccugacaugugggcaua

SEQ ID NO: 552118 - RNA, 19 nt, Homo sapiens
  misc_RNA (1)...(19): siRNA sense strand
caagaaaaggcaagagaaa

SEQ ID NO: 552119 - RNA, 19 nt, Homo sapiens
  misc_RNA (1)...(19): siRNA sense strand
cgauugagggaauuuguau

SEQ ID NO: 552120 - RNA, 19 nt, Homo sapiens
  misc_RNA (1)...(19): siRNA sense strand
cauauucagacaccaguug

SEQ ID NO: 552121 - RNA, 19 nt, Homo sapiens
  misc_RNA (1)...(19): siRNA sense strand
gugaaagcugucaucgaua

SEQ ID NO: 552122 - RNA, 19 nt, Homo sapiens
  misc_RNA (1)...(19): siRNA sense strand
gagaaagaccgugaaagcu

SEQ ID NO: 552123 - RNA, 19 nt, Homo sapiens
  misc_RNA (1)...(19): siRNA sense strand
gcaagaaaaggcaagagaa

SEQ ID NO: 552124 - RNA, 19 nt, Homo sapiens
  misc_RNA (1)...(19): siRNA sense strand
ugagagaaaccugacaugu

SEQ ID NO: 552125 - RNA, 19 nt, Homo sapiens
  misc_RNA (1)...(19): siRNA sense strand
agagaaagaccgugaaagc

SEQ ID NO: 552126 - RNA, 19 nt, Homo sapiens
  misc_RNA (1)...(19): siRNA sense strand
agaaaggcuggcuauaaga

SEQ ID NO: 552127 - RNA, 19 nt, Homo sapiens
  misc_RNA (1)...(19): siRNA sense strand
aagcugucaucgauagguu

SEQ ID NO: 552128 - RNA, 19 nt, Homo sapiens
  misc_RNA (1)...(19): siRNA sense strand
aaaggcuggcuauaagaaa

SEQ ID NO: 552129 - RNA, 19 nt, Homo sapiens
  misc_RNA (1)...(19): siRNA sense strand
gccuuugggugaggagaaa

SEQ ID NO: 552130 - RNA, 19 nt, Homo sapiens
  misc_RNA (1)...(19): siRNA sense strand
gauagguuucuucgacuuc

SEQ ID NO: 552131 - RNA, 19 nt, Homo sapiens
  misc_RNA (1)...(19): siRNA sense strand
ucucuuauuucugcauugu

SEQ ID NO: 552132 - RNA, 19 nt, Homo sapiens
  misc_RNA (1)...(19): siRNA sense strand
ccucucuuauuucugcauu

SEQ ID NO: 552133 - RNA, 19 nt, Homo sapiens
  misc_RNA (1)...(19): siRNA sense strand
gauugagggaauuuguauu

SEQ ID NO: 552134 - RNA, 19 nt, Homo sapiens
  misc_RNA (1)...(19): siRNA sense strand
ugucaucgauagguuucuu

SEQ ID NO: 552135 - RNA, 19 nt, Homo sapiens
  misc_RNA (1)...(19): siRNA sense strand
uaccacaucugagagaaac

SEQ ID NO: 552136 - RNA, 19 nt, Homo sapiens
  misc_RNA (1)...(19): siRNA sense strand
ugagagcagcuucaggaau

SEQ ID NO: 552137 - RNA, 19 nt, Homo sapiens
  misc_RNA (1)...(19): siRNA sense strand
gagaaaggcuggcuauaag

SEQ ID NO: 552138 - RNA, 19 nt, Homo sapiens
  misc_RNA (1)...(19): siRNA sense strand
ggagaaaggcuggcuauaa

SEQ ID NO: 552139 - RNA, 19 nt, Homo sapiens
  misc_RNA (1)...(19): siRNA sense strand
gagagcagcuucaggaauc

SEQ ID NO: 552140 - RNA, 19 nt, Homo sapiens
  misc_RNA (1)...(19): siRNA sense strand
gaaaggcuggcuauaagaa

SEQ ID NO: 552141 - RNA, 19 nt, Homo sapiens
  misc_RNA (1)...(19): siRNA sense strand
cgugaaagcugucaucgau

SEQ ID NO: 552142 - RNA, 19 nt, Homo sapiens
  misc_RNA (1)...(19): siRNA sense strand
ugaaagcugucaucgauag

SEQ ID NO: 552143 - RNA, 19 nt, Homo sapiens
  misc_RNA (1)...(19): siRNA sense strand
gagagaaaccugacaugug

SEQ ID NO: 552144 - RNA, 19 nt, Homo sapiens
  misc_RNA (1)...(19): siRNA sense strand
gcaaggaagaagcgauuga

SEQ ID NO: 552145 - RNA, 19 nt, Homo sapiens
  misc_RNA (1)...(19): siRNA sense strand
caagagaaagaccgugaaa

SEQ ID NO: 552146 - RNA, 19 nt, Homo sapiens
  misc_RNA (1)...(19): siRNA sense strand
aagaagcgauugagggaau

SEQ ID NO: 552147 - RNA, 19 nt, Homo sapiens
  misc_RNA (1)...(19): siRNA sense strand
agacuuaccacaucugaga

SEQ ID NO: 552148 - RNA, 19 nt, Homo sapiens
  misc_RNA (1)...(19): siRNA sense strand
cgacuucauuguggccuuu

SEQ ID NO: 552149 - RNA, 19 nt, Homo sapiens
  misc_RNA (1)...(19): siRNA sense strand
gcgauugagggaauuugua

SEQ ID NO: 552150 - RNA, 19 nt, Homo sapiens
  misc_RNA (1)...(19): siRNA sense strand
gaggagaaaggcuggcuau

SEQ ID NO: 552151 - RNA, 19 nt, Homo sapiens
  misc_RNA (1)...(19): siRNA sense strand
gcaagagaaagaccgugaa

SEQ ID NO: 552152 - RNA, 19 nt, Homo sapiens
  misc_RNA (1)...(19): siRNA sense strand
cuaacauacuucagugcaa

SEQ ID NO: 552153 - RNA, 19 nt, Homo sapiens
  misc_RNA (1)...(19): siRNA sense strand
cgauagguuucuucgacuu

SEQ ID NO: 552154 - RNA, 19 nt, Homo sapiens
  misc_RNA (1)...(19): siRNA sense strand
gaagcgauugagggaauuu

SEQ ID NO: 552155 - RNA, 19 nt, Homo sapiens
  misc_RNA (1)...(19): siRNA sense strand
aaccugacaugugggcaua

SEQ ID NO: 552156 - RNA, 19 nt, Homo sapiens
  misc_RNA (1)...(19): siRNA sense strand
caagaaaaggcaagagaaa

SEQ ID NO: 552157 - RNA, 19 nt, Homo sapiens
  misc_RNA (1)...(19): siRNA sense strand
cgauugagggaauuuguau

SEQ ID NO: 552158 - RNA, 19 nt, Homo sapiens
  misc_RNA (1)...(19): siRNA sense strand
cauauucagacaccaguug

SEQ ID NO: 552159 - RNA, 19 nt, Homo sapiens
  misc_RNA (1)...(19): siRNA sense strand
gugaaagcugucaucgaua

SEQ ID NO: 552160 - RNA, 19 nt, Homo sapiens
  misc_RNA (1)...(19): siRNA sense strand
gagaaagaccgugaaagcu

SEQ ID NO: 552161 - RNA, 19 nt, Homo sapiens
  misc_RNA (1)...(19): siRNA sense strand
gcaagaaaaggcaagagaa

SEQ ID NO: 552162 - RNA, 19 nt, Homo sapiens
  misc_RNA (1)...(19): siRNA sense strand
ugagagaaaccugacaugu

SEQ ID NO: 552163 - RNA, 19 nt, Homo sapiens
  misc_RNA (1)...(19): siRNA sense strand
agagaaagaccgugaaagc

SEQ ID NO: 552164 - RNA, 19 nt, Homo sapiens
  misc_RNA (1)...(19): siRNA sense strand
agaaaggcuggcuauaaga

SEQ ID NO: 552165 - RNA, 19 nt, Homo sapiens
  misc_RNA (1)...(19): siRNA sense strand
aagcugucaucgauagguu

SEQ ID NO: 552166 - RNA, 19 nt, Homo sapiens
  misc_RNA (1)...(19): siRNA sense strand
aaaggcuggcuauaagaaa

SEQ ID NO: 552167 - RNA, 19 nt, Homo sapiens
  misc_RNA (1)...(19): siRNA sense strand
gccuuugggugaggagaaa

SEQ ID NO: 552168 - RNA, 19 nt, Homo sapiens
  misc_RNA (1)...(19): siRNA sense strand
gauagguuucuucgacuuc

SEQ ID NO: 552169 - RNA, 19 nt, Homo sapiens
  misc_RNA (1)...(19): siRNA sense strand
ucucuuauuucugcauugu

SEQ ID NO: 552170 - RNA, 19 nt, Homo sapiens
  misc_RNA (1)...(19): siRNA sense strand
ccucucuuauuucugcauu

SEQ ID NO: 552171 - RNA, 19 nt, Homo sapiens
  misc_RNA (1)...(19): siRNA sense strand
gauugagggaauuuguauu

SEQ ID NO: 552172 - RNA, 19 nt, Homo sapiens
  misc_RNA (1)...(19): siRNA sense strand
ugucaucgauagguuucuu

SEQ ID NO: 552173 - RNA, 19 nt, Homo sapiens
  misc_RNA (1)...(19): siRNA sense strand
uaccacaucugagagaaac

SEQ ID NO: 552174 - RNA, 19 nt, Homo sapiens
  misc_RNA (1)...(19): siRNA sense strand
ugagagcagcuucaggaau

SEQ ID NO: 552175 - RNA, 19 nt, Homo sapiens
  misc_RNA (1)...(19): siRNA sense strand
ucuguuaccugacaaauua

SEQ ID NO: 552176 - RNA, 19 nt, Homo sapiens
  misc_RNA (1)...(19): siRNA sense strand
aaacugugcugaucagaua

SEQ ID NO: 552177 - RNA, 19 nt, Homo sapiens
  misc_RNA (1)...(19): siRNA sense strand
gauuauagaugcccaguuc

SEQ ID NO: 552178 - RNA, 19 nt, Homo sapiens
  misc_RNA (1)...(19): siRNA sense strand
gauaccagauagaugauaa

SEQ ID NO: 552179 - RNA, 19 nt, Homo sapiens
  misc_RNA (1)...(19): siRNA sense strand
gcuaccagcuaaauacuuu

SEQ ID NO: 552180 - RNA, 19 nt, Homo sapiens
  misc_RNA (1)...(19): siRNA sense strand
ggauuauucuguuccuaua

SEQ ID NO: 552181 - RNA, 19 nt, Homo sapiens
  misc_RNA (1)...(19): siRNA sense strand
ucagauaguucacuuucua

SEQ ID NO: 552182 - RNA, 19 nt, Homo sapiens
  misc_RNA (1)...(19): siRNA sense strand
cagacaaacuuccauuauu

SEQ ID NO: 552183 - RNA, 19 nt, Homo sapiens
  misc_RNA (1)...(19): siRNA sense strand
agacaaacuuccauuauuc

SEQ ID NO: 552184 - RNA, 19 nt, Homo sapiens
  misc_RNA (1)...(19): siRNA sense strand
ucaccaagaugcaguuuau

SEQ ID NO: 552185 - RNA, 19 nt, Homo sapiens
  misc_RNA (1)...(19): siRNA sense strand
caaaauaacccucguaaaa

SEQ ID NO: 552186 - RNA, 19 nt, Homo sapiens
  misc_RNA (1)...(19): siRNA sense strand
ccagauagaugauaaacca

SEQ ID NO: 552187 - RNA, 19 nt, Homo sapiens
  misc_RNA (1)...(19): siRNA sense strand
gaagaggucgaauugauga

SEQ ID NO: 552188 - RNA, 19 nt, Homo sapiens
  misc_RNA (1)...(19): siRNA sense strand
agagcgaggucauaucuuu

SEQ ID NO: 552189 - RNA, 19 nt, Homo sapiens
  misc_RNA (1)...(19): siRNA sense strand
gaauugaugacuugcgaua

SEQ ID NO: 552190 - RNA, 19 nt, Homo sapiens
  misc_RNA (1)...(19): siRNA sense strand
gagcacaagcuauguauca

SEQ ID NO: 552191 - RNA, 19 nt, Homo sapiens
  misc_RNA (1)...(19): siRNA sense strand
cuaaauacuuuggcacuga

SEQ ID NO: 552192 - RNA, 19 nt, Homo sapiens
  misc_RNA (1)...(19): siRNA sense strand
auaguucacuuucuacuga

SEQ ID NO: 552193 - RNA, 19 nt, Homo sapiens
  misc_RNA (1)...(19): siRNA sense strand
agaugcaguuuaugaagua

SEQ ID NO: 552194 - RNA, 19 nt, Homo sapiens
  misc_RNA (1)...(19): siRNA sense strand
gccauuggauuauucuguu

SEQ ID NO: 552195 - RNA, 19 nt, Homo sapiens
  misc_RNA (1)...(19): siRNA sense strand
ccaaacaaccagauucgaa

SEQ ID NO: 552196 - RNA, 19 nt, Homo sapiens
  misc_RNA (1)...(19): siRNA sense strand
guaagccucuuuaugaaac

SEQ ID NO: 552197 - RNA, 19 nt, Homo sapiens
  misc_RNA (1)...(19): siRNA sense strand
gaucacagauggaaaauac

SEQ ID NO: 552198 - RNA, 19 nt, Homo sapiens
  misc_RNA (1)...(19): siRNA sense strand
gaucagauagaaguuguuu

SEQ ID NO: 552199 - RNA, 19 nt, Homo sapiens
  misc_RNA (1)...(19): siRNA sense strand
ucgcagaguuugugccauu

SEQ ID NO: 552200 - RNA, 19 nt, Homo sapiens
  misc_RNA (1)...(19): siRNA sense strand
aaacaaccagauucgaaua

SEQ ID NO: 552201 - RNA, 19 nt, Homo sapiens
  misc_RNA (1)...(19): siRNA sense strand
cugcagauccuugcuguua

SEQ ID NO: 552202 - RNA, 19 nt, Homo sapiens
  misc_RNA (1)...(19): siRNA sense strand
gaaaaccacauauuuguug

SEQ ID NO: 552203 - RNA, 19 nt, Homo sapiens
  misc_RNA (1)...(19): siRNA sense strand
ccagacaaacuuccauuau

SEQ ID NO: 552204 - RNA, 19 nt, Homo sapiens
  misc_RNA (1)...(19): siRNA sense strand
ugaggauaaugaugugaaa

SEQ ID NO: 552205 - RNA, 19 nt, Homo sapiens
  misc_RNA (1)...(19): siRNA sense strand
caugacagccgacagcaaa

SEQ ID NO: 552206 - RNA, 19 nt, Homo sapiens
  misc_RNA (1)...(19): siRNA sense strand
caaggauucuggagugaag

SEQ ID NO: 552207 - RNA, 19 nt, Homo sapiens
  misc_RNA (1)...(19): siRNA sense strand
ggagagcgaggucauaucu

SEQ ID NO: 552208 - RNA, 19 nt, Homo sapiens
  misc_RNA (1)...(19): siRNA sense strand
aaucacagcuguuggaaaa

SEQ ID NO: 552209 - RNA, 19 nt, Homo sapiens
  misc_RNA (1)...(19): siRNA sense strand
cacccaguuucaucuguua

SEQ ID NO: 552210 - RNA, 19 nt, Homo sapiens
  misc_RNA (1)...(19): siRNA sense strand
ggugcguggugaagaaauu

SEQ ID NO: 552211 - RNA, 19 nt, Homo sapiens
  misc_RNA (1)...(19): siRNA sense strand
caaacaaccagauucgaau

SEQ ID NO: 552212 - RNA, 19 nt, Homo sapiens
  misc_RNA (1)...(19): siRNA sense strand
caauugaggauaaugaugu

SEQ ID NO: 552213 - RNA, 19 nt, Homo sapiens
  misc_RNA (1)...(19): siRNA sense strand
aaguaagccucuuuaugaa

SEQ ID NO: 552214 - RNA, 19 nt, Homo sapiens
  misc_RNA (1)...(19): siRNA sense strand
ccaagaugcaguuuaugaa

SEQ ID NO: 552215 - RNA, 19 nt, Homo sapiens
  misc_RNA (1)...(19): siRNA sense strand
gauaaugaugugaaagguu

SEQ ID NO: 552216 - RNA, 19 nt, Homo sapiens
  misc_RNA (1)...(19): siRNA sense strand
caagcuauguaucaaggau

SEQ ID NO: 552217 - RNA, 19 nt, Homo sapiens
  misc_RNA (1)...(19): siRNA sense strand
ugacuugcgauaccagaua

SEQ ID NO: 552218 - RNA, 19 nt, Homo sapiens
  misc_RNA (1)...(19): siRNA sense strand
uaccaguacuucaccaaga

SEQ ID NO: 552219 - RNA, 19 nt, Homo sapiens
  misc_RNA (1)...(19): siRNA sense strand
gaugauguucuacuucaga

SEQ ID NO: 552220 - RNA, 19 nt, Homo sapiens
  misc_RNA (1)...(19): siRNA sense strand
ggauaaugaugugaaaggu

SEQ ID NO: 552221 - RNA, 19 nt, Homo sapiens
  misc_RNA (1)...(19): siRNA sense strand
gauagaugauaaaccaaac

SEQ ID NO: 552222 - RNA, 19 nt, Homo sapiens
  misc_RNA (1)...(19): siRNA sense strand
gaggagagcgaggucauau

SEQ ID NO: 552223 - RNA, 19 nt, Homo sapiens
  misc_RNA (1)...(19): siRNA sense strand
gaggucgaauugaugacuu

SEQ ID NO: 552224 - RNA, 19 nt, Homo sapiens
  misc_RNA (1)...(19): siRNA sense strand
gacaaacuuccauuauuca

SEQ ID NO: 552225 - RNA, 19 nt, Homo sapiens
  misc_RNA (1)...(19): siRNA sense strand
gaauagaccaaaagaagaa

SEQ ID NO: 552226 - RNA, 19 nt, Homo sapiens
  misc_RNA (1)...(19): siRNA sense strand
cgaagaggucgaauugaug

SEQ ID NO: 552227 - RNA, 19 nt, Homo sapiens
  misc_RNA (1)...(19): siRNA sense strand
gauguucuacuucagauag

SEQ ID NO: 552228 - RNA, 19 nt, Homo sapiens
  misc_RNA (1)...(19): siRNA sense strand
ggacuggagcacaagcuau

SEQ ID NO: 552229 - RNA, 19 nt, Homo sapiens
  misc_RNA (1)...(19): siRNA sense strand
gcacaagcuauguaucaag

SEQ ID NO: 552230 - RNA, 19 nt, Homo sapiens
  misc_RNA (1)...(19): siRNA sense strand
guccgaggcuuucauugca

SEQ ID NO: 552231 - RNA, 19 nt, Homo sapiens
  misc_RNA (1)...(19): siRNA sense strand
gaaacaauugaggauaaug

SEQ ID NO: 552232 - RNA, 19 nt, Homo sapiens
  misc_RNA (1)...(19): siRNA sense strand
caagaugcaguuuaugaag

SEQ ID NO: 552233 - RNA, 19 nt, Homo sapiens
  misc_RNA (1)...(19): siRNA sense strand
gauuguggccuccaugaca

SEQ ID NO: 552234 - RNA, 19 nt, Homo sapiens
  misc_RNA (1)...(19): siRNA sense strand
ggucacacccaguuucauc

SEQ ID NO: 552235 - RNA, 19 nt, Homo sapiens
  misc_RNA (1)...(19): siRNA sense strand
gcagauccuugcuguuacg

SEQ ID NO: 552236 - RNA, 19 nt, Homo sapiens
  misc_RNA (1)...(19): siRNA sense strand
gaaauccccacuauaaaau

SEQ ID NO: 552237 - RNA, 19 nt, Homo sapiens
  misc_RNA (1)...(19): siRNA sense strand
uaaaccaaacaaccagauu

SEQ ID NO: 552238 - RNA, 19 nt, Homo sapiens
  misc_RNA (1)...(19): siRNA sense strand
auagaugcccaguucauuu

SEQ ID NO: 552239 - RNA, 19 nt, Homo sapiens
  misc_RNA (1)...(19): siRNA sense strand
gagcgaggucauaucuuug

SEQ ID NO: 552240 - RNA, 19 nt, Homo sapiens
  misc_RNA (1)...(19): siRNA sense strand
aagaugcaguuuaugaagu

SEQ ID NO: 552241 - RNA, 19 nt, Homo sapiens
  misc_RNA (1)...(19): siRNA sense strand
cggagucgguagacgagaa

SEQ ID NO: 552242 - RNA, 19 nt, Homo sapiens
  misc_RNA (1)...(19): siRNA sense strand
uggaucagcuggugucaac

SEQ ID NO: 552243 - RNA, 19 nt, Homo sapiens
  misc_RNA (1)...(19): siRNA sense strand
aaaccaaacaaccagauuc

SEQ ID NO: 552244 - RNA, 19 nt, Homo sapiens
  misc_RNA (1)...(19): siRNA sense strand
uacacaagcugaucaaaau

SEQ ID NO: 552245 - RNA, 19 nt, Homo sapiens
  misc_RNA (1)...(19): siRNA sense strand
gcccgaacccgaaccugaa

SEQ ID NO: 552246 - RNA, 19 nt, Homo sapiens
  misc_RNA (1)...(19): siRNA sense strand
gacuugcgauaccagauag

SEQ ID NO: 552247 - RNA, 19 nt, Homo sapiens
  misc_RNA (1)...(19): siRNA sense strand
gauaguucacuuucuacug

SEQ ID NO: 552248 - RNA, 19 nt, Homo sapiens
  misc_RNA (1)...(19): siRNA sense strand
gugaaagguuuuaaugaug

SEQ ID NO: 552249 - RNA, 19 nt, Homo sapiens
  misc_RNA (1)...(19): siRNA sense strand
gacaaauuaagaagggaaa

SEQ ID NO: 552250 - RNA, 19 nt, Homo sapiens
  misc_RNA (1)...(19): siRNA sense strand
acacccaguuucaucuguu

SEQ ID NO: 552251 - RNA, 19 nt, Homo sapiens
  misc_RNA (1)...(19): siRNA sense strand
caaccagauucgaauaucc

SEQ ID NO: 552252 - RNA, 19 nt, Homo sapiens
  misc_RNA (1)...(19): siRNA sense strand
cagaguuugugccauugga

SEQ ID NO: 552253 - RNA, 19 nt, Homo sapiens
  misc_RNA (1)...(19): siRNA sense strand
gagugaagcagauguuacu

SEQ ID NO: 552254 - RNA, 19 nt, Homo sapiens
  misc_RNA (1)...(19): siRNA sense strand
gugcugaucagauagaagu

SEQ ID NO: 552255 - RNA, 19 nt, Homo sapiens
  misc_RNA (1)...(19): siRNA sense strand
gaguuugugccauuggauu

SEQ ID NO: 552256 - RNA, 19 nt, Homo sapiens
  misc_RNA (1)...(19): siRNA sense strand
gcagauguuacucgaccuu

SEQ ID NO: 552257 - RNA, 19 nt, Homo sapiens
  misc_RNA (1)...(19): siRNA sense strand
ggagugaagcagauguuac

SEQ ID NO: 552258 - RNA, 19 nt, Homo sapiens
  misc_RNA (1)...(19): siRNA sense strand
uauagaugcccaguucauu

SEQ ID NO: 552259 - RNA, 19 nt, Homo sapiens
  misc_RNA (1)...(19): siRNA sense strand
cgaggagagcgaggucaua

SEQ ID NO: 552260 - RNA, 19 nt, Homo sapiens
  misc_RNA (1)...(19): siRNA sense strand
uuucaucuguuaccugaca

SEQ ID NO: 552261 - RNA, 19 nt, Homo sapiens
  misc_RNA (1)...(19): siRNA sense strand
acaaccagauucgaauauc

SEQ ID NO: 552262 - RNA, 19 nt, Homo sapiens
  misc_RNA (1)...(19): siRNA sense strand
ugcgauaccagauagauga

SEQ ID NO: 552263 - RNA, 19 nt, Homo sapiens
  misc_RNA (1)...(19): siRNA sense strand
augaugauguucuacuuca

SEQ ID NO: 552264 - RNA, 19 nt, Homo sapiens
  misc_RNA (1)...(19): siRNA sense strand
gacuggagcacaagcuaug

SEQ ID NO: 552265 - RNA, 19 nt, Homo sapiens
  misc_RNA (1)...(19): siRNA sense strand
uauucaaacggcaguauga

SEQ ID NO: 552266 - RNA, 19 nt, Homo sapiens
  misc_RNA (1)...(19): siRNA sense strand
agaaauccccacuauaaaa

SEQ ID NO: 552267 - RNA, 19 nt, Homo sapiens
  misc_RNA (1)...(19): siRNA sense strand
ccauuggauuauucuguuc

SEQ ID NO: 552268 - RNA, 19 nt, Homo sapiens
  misc_RNA (1)...(19): siRNA sense strand
gugcguggugaagaaauua

SEQ ID NO: 552269 - RNA, 19 nt, Homo sapiens
  misc_RNA (1)...(19): siRNA sense strand
ugacuacacaagcugauca

SEQ ID NO: 552270 - RNA, 19 nt, Homo sapiens
  misc_RNA (1)...(19): siRNA sense strand
agacaaaacugugcugauc

SEQ ID NO: 552271 - RNA, 19 nt, Homo sapiens
  misc_RNA (1)...(19): siRNA sense strand
accaagaugcaguuuauga

SEQ ID NO: 552272 - RNA, 19 nt, Homo sapiens
  misc_RNA (1)...(19): siRNA sense strand
ucaaacggcaguaugaaaa

SEQ ID NO: 552273 - RNA, 19 nt, Homo sapiens
  misc_RNA (1)...(19): siRNA sense strand
cugaucagauagaaguugu

SEQ ID NO: 552274 - RNA, 19 nt, Homo sapiens
  misc_RNA (1)...(19): siRNA sense strand
gaugugaaagguuuuaaug

SEQ ID NO: 552275 - RNA, 19 nt, Homo sapiens
  misc_RNA (1)...(19): siRNA sense strand
caacaucgauaguguauua

SEQ ID NO: 552276 - RNA, 19 nt, Homo sapiens
  misc_RNA (1)...(19): siRNA sense strand
gauaacauguccacuguaa

SEQ ID NO: 552277 - RNA, 19 nt, Homo sapiens
  misc_RNA (1)...(19): siRNA sense strand
caacauugccuacuuauuu

SEQ ID NO: 552278 - RNA, 19 nt, Homo sapiens
  misc_RNA (1)...(19): siRNA sense strand
ugaagaaggugaacaguuu

SEQ ID NO: 552279 - RNA, 19 nt, Homo sapiens
  misc_RNA (1)...(19): siRNA sense strand
uaacacaacuggaauuuca

SEQ ID NO: 552280 - RNA, 19 nt, Homo sapiens
  misc_RNA (1)...(19): siRNA sense strand
aaacaacauugccuacuua

SEQ ID NO: 552281 - RNA, 19 nt, Homo sapiens
  misc_RNA (1)...(19): siRNA sense strand
gcuauuaaaugcuacagua

SEQ ID NO: 552282 - RNA, 19 nt, Homo sapiens
  misc_RNA (1)...(19): siRNA sense strand
ugagagcaguaacaaauua

SEQ ID NO: 552283 - RNA, 19 nt, Homo sapiens
  misc_RNA (1)...(19): siRNA sense strand
ccauugggaugauuucuua

SEQ ID NO: 552284 - RNA, 19 nt, Homo sapiens
  misc_RNA (1)...(19): siRNA sense strand
cgucaaggcuuacaucaaa

SEQ ID NO: 552285 - RNA, 19 nt, Homo sapiens
  misc_RNA (1)...(19): siRNA sense strand
ggacauaaccugagaugga

SEQ ID NO: 552286 - RNA, 19 nt, Homo sapiens
  misc_RNA (1)...(19): siRNA sense strand
cagaaacccucucaucaaa

SEQ ID NO: 552287 - RNA, 19 nt, Homo sapiens
  misc_RNA (1)...(19): siRNA sense strand
gaaagaugcauaugaagaa

SEQ ID NO: 552288 - RNA, 19 nt, Homo sapiens
  misc_RNA (1)...(19): siRNA sense strand
ugagauggauucuuacauu

SEQ ID NO: 552289 - RNA, 19 nt, Homo sapiens
  misc_RNA (1)...(19): siRNA sense strand
aaccugagauggauucuua

SEQ ID NO: 552290 - RNA, 19 nt, Homo sapiens
  misc_RNA (1)...(19): siRNA sense strand
uaucaacgaugguguacua

SEQ ID NO: 552291 - RNA, 19 nt, Homo sapiens
  misc_RNA (1)...(19): siRNA sense strand
cuauauggcuugcaaugua

SEQ ID NO: 552292 - RNA, 19 nt, Homo sapiens
  misc_RNA (1)...(19): siRNA sense strand
ugaaauuccugcaagauga

SEQ ID NO: 552293 - RNA, 19 nt, Homo sapiens
  misc_RNA (1)...(19): siRNA sense strand
gaaaccagauuuaaacaac

SEQ ID NO: 552294 - RNA, 19 nt, Homo sapiens
  misc_RNA (1)...(19): siRNA sense strand
gaaggacauucaaaccaaa

SEQ ID NO: 552295 - RNA, 19 nt, Homo sapiens
  misc_RNA (1)...(19): siRNA sense strand
caaacaacauugccuacuu

SEQ ID NO: 552296 - RNA, 19 nt, Homo sapiens
  misc_RNA (1)...(19): siRNA sense strand
ggacgaagacgaagaggaa

SEQ ID NO: 552297 - RNA, 19 nt, Homo sapiens
  misc_RNA (1)...(19): siRNA sense strand
ggagugagauuucuucaac

SEQ ID NO: 552298 - RNA, 19 nt, Homo sapiens
  misc_RNA (1)...(19): siRNA sense strand
ucggcaagaucaagaauua

SEQ ID NO: 552299 - RNA, 19 nt, Homo sapiens
  misc_RNA (1)...(19): siRNA sense strand
gcaacauacugguggauga

SEQ ID NO: 552300 - RNA, 19 nt, Homo sapiens
  misc_RNA (1)...(19): siRNA sense strand
ugaagaauauggucaaauc

SEQ ID NO: 552301 - RNA, 19 nt, Homo sapiens
  misc_RNA (1)...(19): siRNA sense strand
uacauucgcucuccuguuu

SEQ ID NO: 552302 - RNA, 19 nt, Homo sapiens
  misc_RNA (1)...(19): siRNA sense strand
gcacuuacgauaaccaauu

SEQ ID NO: 552303 - RNA, 19 nt, Homo sapiens
  misc_RNA (1)...(19): siRNA sense strand
ugaaauagcagaaggcauu

SEQ ID NO: 552304 - RNA, 19 nt, Homo sapiens
  misc_RNA (1)...(19): siRNA sense strand
gggaugauuucuuaugcua

SEQ ID NO: 552305 - RNA, 19 nt, Homo sapiens
  misc_RNA (1)...(19): siRNA sense strand
uggaugaacacacuuauua

SEQ ID NO: 552306 - RNA, 19 nt, Homo sapiens
  misc_RNA (1)...(19): siRNA sense strand
ggacaucggaguacaguau

SEQ ID NO: 552307 - RNA, 19 nt, Homo sapiens
  misc_RNA (1)...(19): siRNA sense strand
ccugaaagaugcauaugaa

SEQ ID NO: 552308 - RNA, 19 nt, Homo sapiens
  misc_RNA (1)...(19): siRNA sense strand
gagauuucuucaaccauuu

SEQ ID NO: 552309 - RNA, 19 nt, Homo sapiens
  misc_RNA (1)...(19): siRNA sense strand
acacuacguucuagacuuu

SEQ ID NO: 552310 - RNA, 19 nt, Homo sapiens
  misc_RNA (1)...(19): siRNA sense strand
ugaauuggguugugaggaa

SEQ ID NO: 552311 - RNA, 19 nt, Homo sapiens
  misc_RNA (1)...(19): siRNA sense strand
cuaaucaacucaugugguu

SEQ ID NO: 552312 - RNA, 19 nt, Homo sapiens
  misc_RNA (1)...(19): siRNA sense strand
gccagauauugacuuauua

SEQ ID NO: 552313 - RNA, 19 nt, Homo sapiens
  misc_RNA (1)...(19): siRNA sense strand
gaaacccucucaucaaagg

SEQ ID NO: 552314 - RNA, 19 nt, Homo sapiens
  misc_RNA (1)...(19): siRNA sense strand
gcaugaaaccagauuuaaa

SEQ ID NO: 552315 - RNA, 19 nt, Homo sapiens
  misc_RNA (1)...(19): siRNA sense strand
ggacagaggcagagaaucu

SEQ ID NO: 552316 - RNA, 19 nt, Homo sapiens
  misc_RNA (1)...(19): siRNA sense strand
ucagccagauauugacuua

SEQ ID NO: 552317 - RNA, 19 nt, Homo sapiens
  misc_RNA (1)...(19): siRNA sense strand
ucaaagccaucauaagugu

SEQ ID NO: 552318 - RNA, 19 nt, Homo sapiens
  misc_RNA (1)...(19): siRNA sense strand
gaaaguaaagccuccugaa

SEQ ID NO: 552319 - RNA, 19 nt, Homo sapiens
  misc_RNA (1)...(19): siRNA sense strand
uaacauguccacuguaaug

SEQ ID NO: 552320 - RNA, 19 nt, Homo sapiens
  misc_RNA (1)...(19): siRNA sense strand
ggaggaaacaagaaugaaa

SEQ ID NO: 552321 - RNA, 19 nt, Homo sapiens
  misc_RNA (1)...(19): siRNA sense strand
gagauggauucuuacauuc

SEQ ID NO: 552322 - RNA, 19 nt, Homo sapiens
  misc_RNA (1)...(19): siRNA sense strand
gguguugccuuuuauuuua

SEQ ID NO: 552323 - RNA, 19 nt, Homo sapiens
  misc_RNA (1)...(19): siRNA sense strand
ggaguacaguauaaacaau

SEQ ID NO: 552324 - RNA, 19 nt, Homo sapiens
  misc_RNA (1)...(19): siRNA sense strand
caacuuagucgccauugaa

SEQ ID NO: 552325 - RNA, 19 nt, Homo sapiens
  misc_RNA (1)...(19): siRNA sense strand
cagaaggcauuguuucaga

SEQ ID NO: 552326 - RNA, 19 nt, Homo sapiens
  misc_RNA (1)...(19): siRNA sense strand
ugagauuucuucaaccauu

SEQ ID NO: 552327 - RNA, 19 nt, Homo sapiens
  misc_RNA (1)...(19): siRNA sense strand
gugaacaguuuccugacua

SEQ ID NO: 552328 - RNA, 19 nt, Homo sapiens
  misc_RNA (1)...(19): siRNA sense strand
ggaggaagaugaggaugau

SEQ ID NO: 552329 - RNA, 19 nt, Homo sapiens
  misc_RNA (1)...(19): siRNA sense strand
aaaguucacuggagcaaug

SEQ ID NO: 552330 - RNA, 19 nt, Homo sapiens
  misc_RNA (1)...(19): siRNA sense strand
gaguuucucuugagugaug

SEQ ID NO: 552331 - RNA, 19 nt, Homo sapiens
  misc_RNA (1)...(19): siRNA sense strand
gcgugauucugcucuauaa

SEQ ID NO: 552332 - RNA, 19 nt, Homo sapiens
  misc_RNA (1)...(19): siRNA sense strand
ggugaaaguucgcuuccuu

SEQ ID NO: 552333 - RNA, 19 nt, Homo sapiens
  misc_RNA (1)...(19): siRNA sense strand
uagaugcgguugucacuga

SEQ ID NO: 552334 - RNA, 19 nt, Homo sapiens
  misc_RNA (1)...(19): siRNA sense strand
cacuuacgauaaccaauua

SEQ ID NO: 552335 - RNA, 19 nt, Homo sapiens
  misc_RNA (1)...(19): siRNA sense strand
ggucuucuguaugcacuua

SEQ ID NO: 552336 - RNA, 19 nt, Homo sapiens
  misc_RNA (1)...(19): siRNA sense strand
gcaucuauagcauccauua

SEQ ID NO: 552337 - RNA, 19 nt, Homo sapiens
  misc_RNA (1)...(19): siRNA sense strand
caccacaaccuucucaaua

SEQ ID NO: 552338 - RNA, 19 nt, Homo sapiens
  misc_RNA (1)...(19): siRNA sense strand
gcacgagcgcuguaucaaa

SEQ ID NO: 552339 - RNA, 19 nt, Homo sapiens
  misc_RNA (1)...(19): siRNA sense strand
gaagcaaccagaaguagga

SEQ ID NO: 552340 - RNA, 19 nt, Homo sapiens
  misc_RNA (1)...(19): siRNA sense strand
uugcucagcugaagaauau

SEQ ID NO: 552341 - RNA, 19 nt, Homo sapiens
  misc_RNA (1)...(19): siRNA sense strand
gaacauuggccacaagaag

SEQ ID NO: 552342 - RNA, 19 nt, Homo sapiens
  misc_RNA (1)...(19): siRNA sense strand
ggacuaaaaugccauggaa

SEQ ID NO: 552343 - RNA, 19 nt, Homo sapiens
  misc_RNA (1)...(19): siRNA sense strand
ggccauguauucaagagaa

SEQ ID NO: 552344 - RNA, 19 nt, Homo sapiens
  misc_RNA (1)...(19): siRNA sense strand
caugaauccucagaaagua

SEQ ID NO: 552345 - RNA, 19 nt, Homo sapiens
  misc_RNA (1)...(19): siRNA sense strand
ggacagagacagcuauuuu

SEQ ID NO: 552346 - RNA, 19 nt, Homo sapiens
  misc_RNA (1)...(19): siRNA sense strand
ggaaaacacuuaugaaucg

SEQ ID NO: 552347 - RNA, 19 nt, Homo sapiens
  misc_RNA (1)...(19): siRNA sense strand
gagaaggaacuuugaagga

SEQ ID NO: 552348 - RNA, 19 nt, Homo sapiens
  misc_RNA (1)...(19): siRNA sense strand
cagcuguucuugcuacauu

SEQ ID NO: 552349 - RNA, 19 nt, Homo sapiens
  misc_RNA (1)...(19): siRNA sense strand
acaaauaacacaacuggaa

SEQ ID NO: 552350 - RNA, 19 nt, Homo sapiens
  misc_RNA (1)...(19): siRNA sense strand
gugcaugucugugaaauag

SEQ ID NO: 552351 - RNA, 19 nt, Homo sapiens
  misc_RNA (1)...(19): siRNA sense strand
cacaacacauggcuucauu

SEQ ID NO: 552352 - RNA, 19 nt, Homo sapiens
  misc_RNA (1)...(19): siRNA sense strand
gaacugacggauacaaaca

SEQ ID NO: 552353 - RNA, 19 nt, Homo sapiens
  misc_RNA (1)...(19): siRNA sense strand
ggaaguguccuaagagaag

SEQ ID NO: 552354 - RNA, 19 nt, Homo sapiens
  misc_RNA (1)...(19): siRNA sense strand
gcagugguuuagcuacauu

SEQ ID NO: 552355 - RNA, 19 nt, Homo sapiens
  misc_RNA (1)...(19): siRNA sense strand
gcagucaaagccaucauaa

SEQ ID NO: 552356 - RNA, 19 nt, Homo sapiens
  misc_RNA (1)...(19): siRNA sense strand
gcaaugagagcaguaacaa

SEQ ID NO: 552357 - RNA, 19 nt, Homo sapiens
  misc_RNA (1)...(19): siRNA sense strand
gcagcauucuuauuaugga

SEQ ID NO: 552358 - RNA, 19 nt, Homo sapiens
  misc_RNA (1)...(19): siRNA sense strand
accacaaccuucucaauaa

SEQ ID NO: 552359 - RNA, 19 nt, Homo sapiens
  misc_RNA (1)...(19): siRNA sense strand
ccacauggacaucggagua

SEQ ID NO: 552360 - RNA, 19 nt, Homo sapiens
  misc_RNA (1)...(19): siRNA sense strand
ggagcaauguaaaugaauc

SEQ ID NO: 552361 - RNA, 19 nt, Homo sapiens
  misc_RNA (1)...(19): siRNA sense strand
gaaacaagaaugaaagaac

SEQ ID NO: 552362 - RNA, 19 nt, Homo sapiens
  misc_RNA (1)...(19): siRNA sense strand
gacauaaccugagauggau

SEQ ID NO: 552363 - RNA, 19 nt, Homo sapiens
  misc_RNA (1)...(19): siRNA sense strand
ccuggucccucaugucuuu

SEQ ID NO: 552364 - RNA, 19 nt, Homo sapiens
  misc_RNA (1)...(19): siRNA sense strand
caaaugcacagaugacaga

SEQ ID NO: 552365 - RNA, 19 nt, Homo sapiens
  misc_RNA (1)...(19): siRNA sense strand
gaacuaugaaggcacaaug

SEQ ID NO: 552366 - RNA, 19 nt, Homo sapiens
  misc_RNA (1)...(19): siRNA sense strand
gaaggacucaccaccauuc

SEQ ID NO: 552367 - RNA, 19 nt, Homo sapiens
  misc_RNA (1)...(19): siRNA sense strand
uauggaagcugaccaaacu

SEQ ID NO: 552368 - RNA, 19 nt, Homo sapiens
  misc_RNA (1)...(19): siRNA sense strand
ccucaugucuuucuguugu

SEQ ID NO: 552369 - RNA, 19 nt, Homo sapiens
  misc_RNA (1)...(19): siRNA sense strand
gaaaggcaucaaacuucua

SEQ ID NO: 552370 - RNA, 19 nt, Homo sapiens
  misc_RNA (1)...(19): siRNA sense strand
aaaucggacuccaucuaua

SEQ ID NO: 552371 - RNA, 19 nt, Homo sapiens
  misc_RNA (1)...(19): siRNA sense strand
caaaucggacuccaucuau

SEQ ID NO: 552372 - RNA, 19 nt, Homo sapiens
  misc_RNA (1)...(19): siRNA sense strand
caacguaugcuggaacuga

SEQ ID NO: 552373 - RNA, 19 nt, Homo sapiens
  misc_RNA (1)...(19): siRNA sense strand
ccagaugggugcagugaag

SEQ ID NO: 552374 - RNA, 19 nt, Homo sapiens
  misc_RNA (1)...(19): siRNA sense strand
ucucucagcugccaacaga

SEQ ID NO: 552375 - RNA, 19 nt, Homo sapiens
  misc_RNA (1)...(19): siRNA sense strand
caacaucgauaguguauua

SEQ ID NO: 552376 - RNA, 19 nt, Homo sapiens
  misc_RNA (1)...(19): siRNA sense strand
gauaacauguccacuguaa

SEQ ID NO: 552377 - RNA, 19 nt, Homo sapiens
  misc_RNA (1)...(19): siRNA sense strand
caacauugccuacuuauuu

SEQ ID NO: 552378 - RNA, 19 nt, Homo sapiens
  misc_RNA (1)...(19): siRNA sense strand
ugaagaaggugaacaguuu

SEQ ID NO: 552379 - RNA, 19 nt, Homo sapiens
  misc_RNA (1)...(19): siRNA sense strand
uaacacaacuggaauuuca

SEQ ID NO: 552380 - RNA, 19 nt, Homo sapiens
  misc_RNA (1)...(19): siRNA sense strand
aaacaacauugccuacuua

SEQ ID NO: 552381 - RNA, 19 nt, Homo sapiens
  misc_RNA (1)...(19): siRNA sense strand
gcuauuaaaugcuacagua

SEQ ID NO: 552382 - RNA, 19 nt, Homo sapiens
  misc_RNA (1)...(19): siRNA sense strand
ugagagcaguaacaaauua

SEQ ID NO: 552383 - RNA, 19 nt, Homo sapiens
  misc_RNA (1)...(19): siRNA sense strand
ccauugggaugauuucuua

SEQ ID NO: 552384 - RNA, 19 nt, Homo sapiens
  misc_RNA (1)...(19): siRNA sense strand
cgucaaggcuuacaucaaa

SEQ ID NO: 552385 - RNA, 19 nt, Homo sapiens
  misc_RNA (1)...(19): siRNA sense strand
ggacauaaccugagaugga

SEQ ID NO: 552386 - RNA, 19 nt, Homo sapiens
  misc_RNA (1)...(19): siRNA sense strand
cagaaacccucucaucaaa

SEQ ID NO: 552387 - RNA, 19 nt, Homo sapiens
  misc_RNA (1)...(19): siRNA sense strand
gaaagaugcauaugaagaa

SEQ ID NO: 552388 - RNA, 19 nt, Homo sapiens
  misc_RNA (1)...(19): siRNA sense strand
ugagauggauucuuacauu

SEQ ID NO: 552389 - RNA, 19 nt, Homo sapiens
  misc_RNA (1)...(19): siRNA sense strand
aaccugagauggauucuua

SEQ ID NO: 552390 - RNA, 19 nt, Homo sapiens
  misc_RNA (1)...(19): siRNA sense strand
uaucaacgaugguguacua

SEQ ID NO: 552391 - RNA, 19 nt, Homo sapiens
  misc_RNA (1)...(19): siRNA sense strand
cuauauggcuugcaaugua

SEQ ID NO: 552392 - RNA, 19 nt, Homo sapiens
  misc_RNA (1)...(19): siRNA sense strand
ugaaauuccugcaagauga

SEQ ID NO: 552393 - RNA, 19 nt, Homo sapiens
  misc_RNA (1)...(19): siRNA sense strand
gaaaccagauuuaaacaac

SEQ ID NO: 552394 - RNA, 19 nt, Homo sapiens
  misc_RNA (1)...(19): siRNA sense strand
gaaggacauucaaaccaaa

SEQ ID NO: 552395 - RNA, 19 nt, Homo sapiens
  misc_RNA (1)...(19): siRNA sense strand
caaacaacauugccuacuu

SEQ ID NO: 552396 - RNA, 19 nt, Homo sapiens
  misc_RNA (1)...(19): siRNA sense strand
ggacgaagacgaagaggaa

SEQ ID NO: 552397 - RNA, 19 nt, Homo sapiens
  misc_RNA (1)...(19): siRNA sense strand
ggagugagauuucuucaac

SEQ ID NO: 552398 - RNA, 19 nt, Homo sapiens
  misc_RNA (1)...(19): siRNA sense strand
ucggcaagaucaagaauua

SEQ ID NO: 552399 - RNA, 19 nt, Homo sapiens
  misc_RNA (1)...(19): siRNA sense strand
gcaacauacugguggauga

SEQ ID NO: 552400 - RNA, 19 nt, Homo sapiens
  misc_RNA (1)...(19): siRNA sense strand
ugaagaauauggucaaauc

SEQ ID NO: 552401 - RNA, 19 nt, Homo sapiens
  misc_RNA (1)...(19): siRNA sense strand
uacauucgcucuccuguuu

SEQ ID NO: 552402 - RNA, 19 nt, Homo sapiens
  misc_RNA (1)...(19): siRNA sense strand
gcacuuacgauaaccaauu

SEQ ID NO: 552403 - RNA, 19 nt, Homo sapiens
  misc_RNA (1)...(19): siRNA sense strand
ugaaauagcagaaggcauu

SEQ ID NO: 552404 - RNA, 19 nt, Homo sapiens
  misc_RNA (1)...(19): siRNA sense strand
gggaugauuucuuaugcua

SEQ ID NO: 552405 - RNA, 19 nt, Homo sapiens
  misc_RNA (1)...(19): siRNA sense strand
uggaugaacacacuuauua

SEQ ID NO: 552406 - RNA, 19 nt, Homo sapiens
  misc_RNA (1)...(19): siRNA sense strand
ggacaucggaguacaguau

SEQ ID NO: 552407 - RNA, 19 nt, Homo sapiens
  misc_RNA (1)...(19): siRNA sense strand
ccugaaagaugcauaugaa

SEQ ID NO: 552408 - RNA, 19 nt, Homo sapiens
  misc_RNA (1)...(19): siRNA sense strand
gagauuucuucaaccauuu

SEQ ID NO: 552409 - RNA, 19 nt, Homo sapiens
  misc_RNA (1)...(19): siRNA sense strand
acacuacguucuagacuuu

SEQ ID NO: 552410 - RNA, 19 nt, Homo sapiens
  misc_RNA (1)...(19): siRNA sense strand
ugaauuggguugugaggaa

SEQ ID NO: 552411 - RNA, 19 nt, Homo sapiens
  misc_RNA (1)...(19): siRNA sense strand
cuaaucaacucaugugguu

SEQ ID NO: 552412 - RNA, 19 nt, Homo sapiens
  misc_RNA (1)...(19): siRNA sense strand
gccagauauugacuuauua

SEQ ID NO: 552413 - RNA, 19 nt, Homo sapiens
  misc_RNA (1)...(19): siRNA sense strand
gaaacccucucaucaaagg

SEQ ID NO: 552414 - RNA, 19 nt, Homo sapiens
  misc_RNA (1)...(19): siRNA sense strand
gcaugaaaccagauuuaaa

SEQ ID NO: 552415 - RNA, 19 nt, Homo sapiens
  misc_RNA (1)...(19): siRNA sense strand
ggacagaggcagagaaucu

SEQ ID NO: 552416 - RNA, 19 nt, Homo sapiens
  misc_RNA (1)...(19): siRNA sense strand
ucagccagauauugacuua

SEQ ID NO: 552417 - RNA, 19 nt, Homo sapiens
  misc_RNA (1)...(19): siRNA sense strand
ucaaagccaucauaagugu

SEQ ID NO: 552418 - RNA, 19 nt, Homo sapiens
  misc_RNA (1)...(19): siRNA sense strand
gaaaguaaagccuccugaa

SEQ ID NO: 552419 - RNA, 19 nt, Homo sapiens
  misc_RNA (1)...(19): siRNA sense strand
uaacauguccacuguaaug

SEQ ID NO: 552420 - RNA, 19 nt, Homo sapiens
  misc_RNA (1)...(19): siRNA sense strand
ggaggaaacaagaaugaaa

SEQ ID NO: 552421 - RNA, 19 nt, Homo sapiens
  misc_RNA (1)...(19): siRNA sense strand
gagauggauucuuacauuc

SEQ ID NO: 552422 - RNA, 19 nt, Homo sapiens
  misc_RNA (1)...(19): siRNA sense strand
gguguugccuuuuauuuua

SEQ ID NO: 552423 - RNA, 19 nt, Homo sapiens
  misc_RNA (1)...(19): siRNA sense strand
ggaguacaguauaaacaau

SEQ ID NO: 552424 - RNA, 19 nt, Homo sapiens
  misc_RNA (1)...(19): siRNA sense strand
caacuuagucgccauugaa

SEQ ID NO: 552425 - RNA, 19 nt, Homo sapiens
  misc_RNA (1)...(19): siRNA sense strand
cagaaggcauuguuucaga

SEQ ID NO: 552426 - RNA, 19 nt, Homo sapiens
  misc_RNA (1)...(19): siRNA sense strand
ugagauuucuucaaccauu

SEQ ID NO: 552427 - RNA, 19 nt, Homo sapiens
  misc_RNA (1)...(19): siRNA sense strand
gugaacaguuuccugacua

SEQ ID NO: 552428 - RNA, 19 nt, Homo sapiens
  misc_RNA (1)...(19): siRNA sense strand
ggaggaagaugaggaugau

SEQ ID NO: 552429 - RNA, 19 nt, Homo sapiens
  misc_RNA (1)...(19): siRNA sense strand
aaaguucacuggagcaaug

SEQ ID NO: 552430 - RNA, 19 nt, Homo sapiens
  misc_RNA (1)...(19): siRNA sense strand
gaguuucucuugagugaug

SEQ ID NO: 552431 - RNA, 19 nt, Homo sapiens
  misc_RNA (1)...(19): siRNA sense strand
gcgugauucugcucuauaa

SEQ ID NO: 552432 - RNA, 19 nt, Homo sapiens
  misc_RNA (1)...(19): siRNA sense strand
ggugaaaguucgcuuccuu

SEQ ID NO: 552433 - RNA, 19 nt, Homo sapiens
  misc_RNA (1)...(19): siRNA sense strand
uagaugcgguugucacuga

SEQ ID NO: 552434 - RNA, 19 nt, Homo sapiens
  misc_RNA (1)...(19): siRNA sense strand
cacuuacgauaaccaauua

SEQ ID NO: 552435 - RNA, 19 nt, Homo sapiens
  misc_RNA (1)...(19): siRNA sense strand
ggucuucuguaugcacuua

SEQ ID NO: 552436 - RNA, 19 nt, Homo sapiens
  misc_RNA (1)...(19): siRNA sense strand
gcaucuauagcauccauua

SEQ ID NO: 552437 - RNA, 19 nt, Homo sapiens
  misc_RNA (1)...(19): siRNA sense strand
caccacaaccuucucaaua

SEQ ID NO: 552438 - RNA, 19 nt, Homo sapiens
  misc_RNA (1)...(19): siRNA sense strand
gcacgagcgcuguaucaaa

SEQ ID NO: 552439 - RNA, 19 nt, Homo sapiens
  misc_RNA (1)...(19): siRNA sense strand
gaagcaaccagaaguagga

SEQ ID NO: 552440 - RNA, 19 nt, Homo sapiens
  misc_RNA (1)...(19): siRNA sense strand
uugcucagcugaagaauau

SEQ ID NO: 552441 - RNA, 19 nt, Homo sapiens
  misc_RNA (1)...(19): siRNA sense strand
gaacauuggccacaagaag

SEQ ID NO: 552442 - RNA, 19 nt, Homo sapiens
  misc_RNA (1)...(19): siRNA sense strand
ggacuaaaaugccauggaa

SEQ ID NO: 552443 - RNA, 19 nt, Homo sapiens
  misc_RNA (1)...(19): siRNA sense strand
ggccauguauucaagagaa

SEQ ID NO: 552444 - RNA, 19 nt, Homo sapiens
  misc_RNA (1)...(19): siRNA sense strand
caugaauccucagaaagua

SEQ ID NO: 552445 - RNA, 19 nt, Homo sapiens
  misc_RNA (1)...(19): siRNA sense strand
ggacagagacagcuauuuu

SEQ ID NO: 552446 - RNA, 19 nt, Homo sapiens
  misc_RNA (1)...(19): siRNA sense strand
ggaaaacacuuaugaaucg

SEQ ID NO: 552447 - RNA, 19 nt, Homo sapiens
  misc_RNA (1)...(19): siRNA sense strand
gagaaggaacuuugaagga

SEQ ID NO: 552448 - RNA, 19 nt, Homo sapiens
  misc_RNA (1)...(19): siRNA sense strand
cagcuguucuugcuacauu

SEQ ID NO: 552449 - RNA, 19 nt, Homo sapiens
  misc_RNA (1)...(19): siRNA sense strand
acaaauaacacaacuggaa

SEQ ID NO: 552450 - RNA, 19 nt, Homo sapiens
  misc_RNA (1)...(19): siRNA sense strand
gugcaugucugugaaauag

SEQ ID NO: 552451 - RNA, 19 nt, Homo sapiens
  misc_RNA (1)...(19): siRNA sense strand
cacaacacauggcuucauu

SEQ ID NO: 552452 - RNA, 19 nt, Homo sapiens
  misc_RNA (1)...(19): siRNA sense strand
gaacugacggauacaaaca

SEQ ID NO: 552453 - RNA, 19 nt, Homo sapiens
  misc_RNA (1)...(19): siRNA sense strand
ggaaguguccuaagagaag

SEQ ID NO: 552454 - RNA, 19 nt, Homo sapiens
  misc_RNA (1)...(19): siRNA sense strand
gcagugguuuagcuacauu

SEQ ID NO: 552455 - RNA, 19 nt, Homo sapiens
  misc_RNA (1)...(19): siRNA sense strand
gcagucaaagccaucauaa

SEQ ID NO: 552456 - RNA, 19 nt, Homo sapiens
  misc_RNA (1)...(19): siRNA sense strand
gcaaugagagcaguaacaa

SEQ ID NO: 552457 - RNA, 19 nt, Homo sapiens
  misc_RNA (1)...(19): siRNA sense strand
gcagcauucuuauuaugga

SEQ ID NO: 552458 - RNA, 19 nt, Homo sapiens
  misc_RNA (1)...(19): siRNA sense strand
accacaaccuucucaauaa

SEQ ID NO: 552459 - RNA, 19 nt, Homo sapiens
  misc_RNA (1)...(19): siRNA sense strand
ccacauggacaucggagua

SEQ ID NO: 552460 - RNA, 19 nt, Homo sapiens
  misc_RNA (1)...(19): siRNA sense strand
ggagcaauguaaaugaauc

SEQ ID NO: 552461 - RNA, 19 nt, Homo sapiens
  misc_RNA (1)...(19): siRNA sense strand
gaaacaagaaugaaagaac

SEQ ID NO: 552462 - RNA, 19 nt, Homo sapiens
  misc_RNA (1)...(19): siRNA sense strand
gacauaaccugagauggau

SEQ ID NO: 552463 - RNA, 19 nt, Homo sapiens
  misc_RNA (1)...(19): siRNA sense strand
ccuggucccucaugucuuu

SEQ ID NO: 552464 - RNA, 19 nt, Homo sapiens
  misc_RNA (1)...(19): siRNA sense strand
caaaugcacagaugacaga

SEQ ID NO: 552465 - RNA, 19 nt, Homo sapiens
  misc_RNA (1)...(19): siRNA sense strand
gaacuaugaaggcacaaug

SEQ ID NO: 552466 - RNA, 19 nt, Homo sapiens
  misc_RNA (1)...(19): siRNA sense strand
gaaggacucaccaccauuc

SEQ ID NO: 552467 - RNA, 19 nt, Homo sapiens
  misc_RNA (1)...(19): siRNA sense strand
uauggaagcugaccaaacu

SEQ ID NO: 552468 - RNA, 19 nt, Homo sapiens
  misc_RNA (1)...(19): siRNA sense strand
ccucaugucuuucuguugu

SEQ ID NO: 552469 - RNA, 19 nt, Homo sapiens
  misc_RNA (1)...(19): siRNA sense strand
gaaaggcaucaaacuucua

SEQ ID NO: 552470 - RNA, 19 nt, Homo sapiens
  misc_RNA (1)...(19): siRNA sense strand
aaaucggacuccaucuaua

SEQ ID NO: 552471 - RNA, 19 nt, Homo sapiens
  misc_RNA (1)...(19): siRNA sense strand
caaaucggacuccaucuau

SEQ ID NO: 552472 - RNA, 19 nt, Homo sapiens
  misc_RNA (1)...(19): siRNA sense strand
caacguaugcuggaacuga

SEQ ID NO: 552473 - RNA, 19 nt, Homo sapiens
  misc_RNA (1)...(19): siRNA sense strand
ccagaugggugcagugaag

SEQ ID NO: 552474 - RNA, 19 nt, Homo sapiens
  misc_RNA (1)...(19): siRNA sense strand
ucucucagcugccaacaga

SEQ ID NO: 552475 - RNA, 19 nt, Homo sapiens
  misc_RNA (1)...(19): siRNA sense strand
caacaucgauaguguauua

SEQ ID NO: 552476 - RNA, 19 nt, Homo sapiens
  misc_RNA (1)...(19): siRNA sense strand
gauaacauguccacuguaa

SEQ ID NO: 552477 - RNA, 19 nt, Homo sapiens
  misc_RNA (1)...(19): siRNA sense strand
caacauugccuacuuauuu

SEQ ID NO: 552478 - RNA, 19 nt, Homo sapiens
  misc_RNA (1)...(19): siRNA sense strand
ugaagaaggugaacaguuu

SEQ ID NO: 552479 - RNA, 19 nt, Homo sapiens
  misc_RNA (1)...(19): siRNA sense strand
uaacacaacuggaauuuca

SEQ ID NO: 552480 - RNA, 19 nt, Homo sapiens
  misc_RNA (1)...(19): siRNA sense strand
aaacaacauugccuacuua

SEQ ID NO: 552481 - RNA, 19 nt, Homo sapiens
  misc_RNA (1)...(19): siRNA sense strand
gcuauuaaaugcuacagua

SEQ ID NO: 552482 - RNA, 19 nt, Homo sapiens
  misc_RNA (1)...(19): siRNA sense strand
ugagagcaguaacaaauua

SEQ ID NO: 552483 - RNA, 19 nt, Homo sapiens
  misc_RNA (1)...(19): siRNA sense strand
ccauugggaugauuucuua

SEQ ID NO: 552484 - RNA, 19 nt, Homo sapiens
  misc_RNA (1)...(19): siRNA sense strand
cgucaaggcuuacaucaaa

SEQ ID NO: 552485 - RNA, 19 nt, Homo sapiens
  misc_RNA (1)...(19): siRNA sense strand
ggacauaaccugagaugga

SEQ ID NO: 552486 - RNA, 19 nt, Homo sapiens
  misc_RNA (1)...(19): siRNA sense strand
cagaaacccucucaucaaa

SEQ ID NO: 552487 - RNA, 19 nt, Homo sapiens
  misc_RNA (1)...(19): siRNA sense strand
gaaagaugcauaugaagaa

SEQ ID NO: 552488 - RNA, 19 nt, Homo sapiens
  misc_RNA (1)...(19): siRNA sense strand
ugagauggauucuuacauu

SEQ ID NO: 552489 - RNA, 19 nt, Homo sapiens
  misc_RNA (1)...(19): siRNA sense strand
aaccugagauggauucuua

SEQ ID NO: 552490 - RNA, 19 nt, Homo sapiens
  misc_RNA (1)...(19): siRNA sense strand
uaucaacgaugguguacua

SEQ ID NO: 552491 - RNA, 19 nt, Homo sapiens
  misc_RNA (1)...(19): siRNA sense strand
cuauauggcuugcaaugua

SEQ ID NO: 552492 - RNA, 19 nt, Homo sapiens
  misc_RNA (1)...(19): siRNA sense strand
ugaaauuccugcaagauga

SEQ ID NO: 552493 - RNA, 19 nt, Homo sapiens
  misc_RNA (1)...(19): siRNA sense strand
gaaaccagauuuaaacaac

SEQ ID NO: 552494 - RNA, 19 nt, Homo sapiens
  misc_RNA (1)...(19): siRNA sense strand
gaaggacauucaaaccaaa

SEQ ID NO: 552495 - RNA, 19 nt, Homo sapiens
  misc_RNA (1)...(19): siRNA sense strand
caaacaacauugccuacuu

SEQ ID NO: 552496 - RNA, 19 nt, Homo sapiens
  misc_RNA (1)...(19): siRNA sense strand
ggacgaagacgaagaggaa

SEQ ID NO: 552497 - RNA, 19 nt, Homo sapiens
  misc_RNA (1)...(19): siRNA sense strand
ggagugagauuucuucaac

SEQ ID NO: 552498 - RNA, 19 nt, Homo sapiens
  misc_RNA (1)...(19): siRNA sense strand
ucggcaagaucaagaauua

SEQ ID NO: 552499 - RNA, 19 nt, Homo sapiens
  misc_RNA (1)...(19): siRNA sense strand
gcaacauacugguggauga

SEQ ID NO: 552500 - RNA, 19 nt, Homo sapiens
  misc_RNA (1)...(19): siRNA sense strand
ugaagaauauggucaaauc

SEQ ID NO: 552501 - RNA, 19 nt, Homo sapiens
  misc_RNA (1)...(19): siRNA sense strand
uacauucgcucuccuguuu

SEQ ID NO: 552502 - RNA, 19 nt, Homo sapiens
  misc_RNA (1)...(19): siRNA sense strand
gcacuuacgauaaccaauu

SEQ ID NO: 552503 - RNA, 19 nt, Homo sapiens
  misc_RNA (1)...(19): siRNA sense strand
ugaaauagcagaaggcauu

SEQ ID NO: 552504 - RNA, 19 nt, Homo sapiens
  misc_RNA (1)...(19): siRNA sense strand
gggaugauuucuuaugcua

SEQ ID NO: 552505 - RNA, 19 nt, Homo sapiens
  misc_RNA (1)...(19): siRNA sense strand
uggaugaacacacuuauua

SEQ ID NO: 552506 - RNA, 19 nt, Homo sapiens
  misc_RNA (1)...(19): siRNA sense strand
ggacaucggaguacaguau

SEQ ID NO: 552507 - RNA, 19 nt, Homo sapiens
  misc_RNA (1)...(19): siRNA sense strand
ccugaaagaugcauaugaa

SEQ ID NO: 552508 - RNA, 19 nt, Homo sapiens
  misc_RNA (1)...(19): siRNA sense strand
gagauuucuucaaccauuu

SEQ ID NO: 552509 - RNA, 19 nt, Homo sapiens
  misc_RNA (1)...(19): siRNA sense strand
acacuacguucuagacuuu

SEQ ID NO: 552510 - RNA, 19 nt, Homo sapiens
  misc_RNA (1)...(19): siRNA sense strand
ugaauuggguugugaggaa

SEQ ID NO: 552511 - RNA, 19 nt, Homo sapiens
  misc_RNA (1)...(19): siRNA sense strand
cuaaucaacucaugugguu

SEQ ID NO: 552512 - RNA, 19 nt, Homo sapiens
  misc_RNA (1)...(19): siRNA sense strand
gccagauauugacuuauua

SEQ ID NO: 552513 - RNA, 19 nt, Homo sapiens
  misc_RNA (1)...(19): siRNA sense strand
gaaacccucucaucaaagg

SEQ ID NO: 552514 - RNA, 19 nt, Homo sapiens
  misc_RNA (1)...(19): siRNA sense strand
gcaugaaaccagauuuaaa

SEQ ID NO: 552515 - RNA, 19 nt, Homo sapiens
  misc_RNA (1)...(19): siRNA sense strand
ggacagaggcagagaaucu

SEQ ID NO: 552516 - RNA, 19 nt, Homo sapiens
  misc_RNA (1)...(19): siRNA sense strand
ucagccagauauugacuua

SEQ ID NO: 552517 - RNA, 19 nt, Homo sapiens
  misc_RNA (1)...(19): siRNA sense strand
ucaaagccaucauaagugu

SEQ ID NO: 552518 - RNA, 19 nt, Homo sapiens
  misc_RNA (1)...(19): siRNA sense strand
gaaaguaaagccuccugaa

SEQ ID NO: 552519 - RNA, 19 nt, Homo sapiens
  misc_RNA (1)...(19): siRNA sense strand
uaacauguccacuguaaug

SEQ ID NO: 552520 - RNA, 19 nt, Homo sapiens
  misc_RNA (1)...(19): siRNA sense strand
ggaggaaacaagaaugaaa

SEQ ID NO: 552521 - RNA, 19 nt, Homo sapiens
  misc_RNA (1)...(19): siRNA sense strand
gagauggauucuuacauuc

SEQ ID NO: 552522 - RNA, 19 nt, Homo sapiens
  misc_RNA (1)...(19): siRNA sense strand
gguguugccuuuuauuuua

SEQ ID NO: 552523 - RNA, 19 nt, Homo sapiens
  misc_RNA (1)...(19): siRNA sense strand
ggaguacaguauaaacaau

SEQ ID NO: 552524 - RNA, 19 nt, Homo sapiens
  misc_RNA (1)...(19): siRNA sense strand
caacuuagucgccauugaa

SEQ ID NO: 552525 - RNA, 19 nt, Homo sapiens
  misc_RNA (1)...(19): siRNA sense strand
cagaaggcauuguuucaga

SEQ ID NO: 552526 - RNA, 19 nt, Homo sapiens
  misc_RNA (1)...(19): siRNA sense strand
ugagauuucuucaaccauu

SEQ ID NO: 552527 - RNA, 19 nt, Homo sapiens
  misc_RNA (1)...(19): siRNA sense strand
gugaacaguuuccugacua

SEQ ID NO: 552528 - RNA, 19 nt, Homo sapiens
  misc_RNA (1)...(19): siRNA sense strand
ggaggaagaugaggaugau

SEQ ID NO: 552529 - RNA, 19 nt, Homo sapiens
  misc_RNA (1)...(19): siRNA sense strand
aaaguucacuggagcaaug

SEQ ID NO: 552530 - RNA, 19 nt, Homo sapiens
  misc_RNA (1)...(19): siRNA sense strand
gaguuucucuugagugaug

SEQ ID NO: 552531 - RNA, 19 nt, Homo sapiens
  misc_RNA (1)...(19): siRNA sense strand
gcgugauucugcucuauaa

SEQ ID NO: 552532 - RNA, 19 nt, Homo sapiens
  misc_RNA (1)...(19): siRNA sense strand
ggugaaaguucgcuuccuu

SEQ ID NO: 552533 - RNA, 19 nt, Homo sapiens
  misc_RNA (1)...(19): siRNA sense strand
uagaugcgguugucacuga

SEQ ID NO: 552534 - RNA, 19 nt, Homo sapiens
  misc_RNA (1)...(19): siRNA sense strand
cacuuacgauaaccaauua

SEQ ID NO: 552535 - RNA, 19 nt, Homo sapiens
  misc_RNA (1)...(19): siRNA sense strand
ggucuucuguaugcacuua

SEQ ID NO: 552536 - RNA, 19 nt, Homo sapiens
  misc_RNA (1)...(19): siRNA sense strand
gcaucuauagcauccauua

SEQ ID NO: 552537 - RNA, 19 nt, Homo sapiens
  misc_RNA (1)...(19): siRNA sense strand
caccacaaccuucucaaua

SEQ ID NO: 552538 - RNA, 19 nt, Homo sapiens
  misc_RNA (1)...(19): siRNA sense strand
gcacgagcgcuguaucaaa

SEQ ID NO: 552539 - RNA, 19 nt, Homo sapiens
  misc_RNA (1)...(19): siRNA sense strand
gaagcaaccagaaguagga

SEQ ID NO: 552540 - RNA, 19 nt, Homo sapiens
  misc_RNA (1)...(19): siRNA sense strand
uugcucagcugaagaauau

SEQ ID NO: 552541 - RNA, 19 nt, Homo sapiens
  misc_RNA (1)...(19): siRNA sense strand
gaacauuggccacaagaag

SEQ ID NO: 552542 - RNA, 19 nt, Homo sapiens
  misc_RNA (1)...(19): siRNA sense strand
ggacuaaaaugccauggaa

SEQ ID NO: 552543 - RNA, 19 nt, Homo sapiens
  misc_RNA (1)...(19): siRNA sense strand
ggccauguauucaagagaa

SEQ ID NO: 552544 - RNA, 19 nt, Homo sapiens
  misc_RNA (1)...(19): siRNA sense strand
caugaauccucagaaagua

SEQ ID NO: 552545 - RNA, 19 nt, Homo sapiens
  misc_RNA (1)...(19): siRNA sense strand
ggacagagacagcuauuuu

SEQ ID NO: 552546 - RNA, 19 nt, Homo sapiens
  misc_RNA (1)...(19): siRNA sense strand
ggaaaacacuuaugaaucg

SEQ ID NO: 552547 - RNA, 19 nt, Homo sapiens
  misc_RNA (1)...(19): siRNA sense strand
gagaaggaacuuugaagga

SEQ ID NO: 552548 - RNA, 19 nt, Homo sapiens
  misc_RNA (1)...(19): siRNA sense strand
cagcuguucuugcuacauu

SEQ ID NO: 552549 - RNA, 19 nt, Homo sapiens
  misc_RNA (1)...(19): siRNA sense strand
acaaauaacacaacuggaa

SEQ ID NO: 552550 - RNA, 19 nt, Homo sapiens
  misc_RNA (1)...(19): siRNA sense strand
gugcaugucugugaaauag

SEQ ID NO: 552551 - RNA, 19 nt, Homo sapiens
  misc_RNA (1)...(19): siRNA sense strand
cacaacacauggcuucauu

SEQ ID NO: 552552 - RNA, 19 nt, Homo sapiens
  misc_RNA (1)...(19): siRNA sense strand
gaacugacggauacaaaca

SEQ ID NO: 552553 - RNA, 19 nt, Homo sapiens
  misc_RNA (1)...(19): siRNA sense strand
ggaaguguccuaagagaag

SEQ ID NO: 552554 - RNA, 19 nt, Homo sapiens
  misc_RNA (1)...(19): siRNA sense strand
gcagugguuuagcuacauu

SEQ ID NO: 552555 - RNA, 19 nt, Homo sapiens
  misc_RNA (1)...(19): siRNA sense strand
gcagucaaagccaucauaa

SEQ ID NO: 552556 - RNA, 19 nt, Homo sapiens
  misc_RNA (1)...(19): siRNA sense strand
gcaaugagagcaguaacaa

SEQ ID NO: 552557 - RNA, 19 nt, Homo sapiens
  misc_RNA (1)...(19): siRNA sense strand
gcagcauucuuauuaugga

SEQ ID NO: 552558 - RNA, 19 nt, Homo sapiens
  misc_RNA (1)...(19): siRNA sense strand
accacaaccuucucaauaa

SEQ ID NO: 552559 - RNA, 19 nt, Homo sapiens
  misc_RNA (1)...(19): siRNA sense strand
ccacauggacaucggagua

SEQ ID NO: 552560 - RNA, 19 nt, Homo sapiens
  misc_RNA (1)...(19): siRNA sense strand
ggagcaauguaaaugaauc

SEQ ID NO: 552561 - RNA, 19 nt, Homo sapiens
  misc_RNA (1)...(19): siRNA sense strand
gaaacaagaaugaaagaac

SEQ ID NO: 552562 - RNA, 19 nt, Homo sapiens
  misc_RNA (1)...(19): siRNA sense strand
gacauaaccugagauggau

SEQ ID NO: 552563 - RNA, 19 nt, Homo sapiens
  misc_RNA (1)...(19): siRNA sense strand
ccuggucccucaugucuuu

SEQ ID NO: 552564 - RNA, 19 nt, Homo sapiens
  misc_RNA (1)...(19): siRNA sense strand
caaaugcacagaugacaga

SEQ ID NO: 552565 - RNA, 19 nt, Homo sapiens
  misc_RNA (1)...(19): siRNA sense strand
gaacuaugaaggcacaaug

SEQ ID NO: 552566 - RNA, 19 nt, Homo sapiens
  misc_RNA (1)...(19): siRNA sense strand
gaaggacucaccaccauuc

SEQ ID NO: 552567 - RNA, 19 nt, Homo sapiens
  misc_RNA (1)...(19): siRNA sense strand
uauggaagcugaccaaacu

SEQ ID NO: 552568 - RNA, 19 nt, Homo sapiens
  misc_RNA (1)...(19): siRNA sense strand
ccucaugucuuucuguugu

SEQ ID NO: 552569 - RNA, 19 nt, Homo sapiens
  misc_RNA (1)...(19): siRNA sense strand
gaaaggcaucaaacuucua

SEQ ID NO: 552570 - RNA, 19 nt, Homo sapiens
  misc_RNA (1)...(19): siRNA sense strand
aaaucggacuccaucuaua

SEQ ID NO: 552571 - RNA, 19 nt, Homo sapiens
  misc_RNA (1)...(19): siRNA sense strand
caaaucggacuccaucuau

SEQ ID NO: 552572 - RNA, 19 nt, Homo sapiens
  misc_RNA (1)...(19): siRNA sense strand
caacguaugcuggaacuga

SEQ ID NO: 552573 - RNA, 19 nt, Homo sapiens
  misc_RNA (1)...(19): siRNA sense strand
ccagaugggugcagugaag

SEQ ID NO: 552574 - RNA, 19 nt, Homo sapiens
  misc_RNA (1)...(19): siRNA sense strand
ucucucagcugccaacaga

SEQ ID NO: 552575 - RNA, 19 nt, Homo sapiens
  misc_RNA (1)...(19): siRNA sense strand
gaagaagccaucaaugaga

SEQ ID NO: 552576 - RNA, 19 nt, Homo sapiens
  misc_RNA (1)...(19): siRNA sense strand
ggaagaagccaucaaugag

SEQ ID NO: 552577 - RNA, 19 nt, Homo sapiens
  misc_RNA (1)...(19): siRNA sense strand
uggaagaagccaucaauga

SEQ ID NO: 552578 - RNA, 19 nt, Homo sapiens
  misc_RNA (1)...(19): siRNA sense strand
gcaagacccugugcuccau

SEQ ID NO: 552579 - RNA, 19 nt, Homo sapiens
  misc_RNA (1)...(19): siRNA sense strand
gcgccgagaccacauguca

SEQ ID NO: 552580 - RNA, 19 nt, Homo sapiens
  misc_RNA (1)...(19): siRNA sense strand
gccggcucccuaauauuua

SEQ ID NO: 552581 - RNA, 19 nt, Homo sapiens
  misc_RNA (1)...(19): siRNA sense strand
ggagagagcgcgaaacuca

SEQ ID NO: 552582 - RNA, 19 nt, Homo sapiens
  misc_RNA (1)...(19): siRNA sense strand
ggucugggcuucugcauca

SEQ ID NO: 552583 - RNA, 19 nt, Homo sapiens
  misc_RNA (1)...(19): siRNA sense strand
caacagaguuuucggcuuu

SEQ ID NO: 552584 - RNA, 19 nt, Homo sapiens
  misc_RNA (1)...(19): siRNA sense strand
caugggaucuggagcaaau

SEQ ID NO: 552585 - RNA, 19 nt, Homo sapiens
  misc_RNA (1)...(19): siRNA sense strand
gggcagagccugaggagau

SEQ ID NO: 552586 - RNA, 19 nt, Homo sapiens
  misc_RNA (1)...(19): siRNA sense strand
gcaguacguguuccuaauu

SEQ ID NO: 552587 - RNA, 19 nt, Homo sapiens
  misc_RNA (1)...(19): siRNA sense strand
caacauccacucuaaacau

SEQ ID NO: 552588 - RNA, 19 nt, Homo sapiens
  misc_RNA (1)...(19): siRNA sense strand
ucacgucuaugccagucua

SEQ ID NO: 552589 - RNA, 19 nt, Homo sapiens
  misc_RNA (1)...(19): siRNA sense strand
cuauggaggugucaucuuc

SEQ ID NO: 552590 - RNA, 19 nt, Homo sapiens
  misc_RNA (1)...(19): siRNA sense strand
acagcgaaauggaggauga

SEQ ID NO: 552591 - RNA, 19 nt, Homo sapiens
  misc_RNA (1)...(19): siRNA sense strand
gcuucgggaucuucuggua

SEQ ID NO: 552592 - RNA, 19 nt, Homo sapiens
  misc_RNA (1)...(19): siRNA sense strand
caguacguguuccuaauug

SEQ ID NO: 552593 - RNA, 19 nt, Homo sapiens
  misc_RNA (1)...(19): siRNA sense strand
ggcaguacguguuccuaau

SEQ ID NO: 552594 - RNA, 19 nt, Homo sapiens
  misc_RNA (1)...(19): siRNA sense strand
ccaccaacgugcgcaaguu

SEQ ID NO: 552595 - RNA, 19 nt, Homo sapiens
  misc_RNA (1)...(19): siRNA sense strand
ccucauacacggcuccuuu

SEQ ID NO: 552596 - RNA, 19 nt, Homo sapiens
  misc_RNA (1)...(19): siRNA sense strand
ggaggaguuucggaagcua

SEQ ID NO: 552597 - RNA, 19 nt, Homo sapiens
  misc_RNA (1)...(19): siRNA sense strand
caggaggauuuaucuguca

SEQ ID NO: 552598 - RNA, 19 nt, Homo sapiens
  misc_RNA (1)...(19): siRNA sense strand
uacauuaucgccaucauga

SEQ ID NO: 552599 - RNA, 19 nt, Homo sapiens
  misc_RNA (1)...(19): siRNA sense strand
ucagauuccaggaggauuu

SEQ ID NO: 552600 - RNA, 19 nt, Homo sapiens
  misc_RNA (1)...(19): siRNA sense strand
ccacacacagcacauuuca

SEQ ID NO: 552601 - RNA, 19 nt, Homo sapiens
  misc_RNA (1)...(19): siRNA sense strand
gaucuucugguaccuguuc

SEQ ID NO: 552602 - RNA, 19 nt, Homo sapiens
  misc_RNA (1)...(19): siRNA sense strand
gcaacauccacucuaaaca

SEQ ID NO: 552603 - RNA, 19 nt, Homo sapiens
  misc_RNA (1)...(19): siRNA sense strand
gccagucuaugccaucauc

SEQ ID NO: 552604 - RNA, 19 nt, Homo sapiens
  misc_RNA (1)...(19): siRNA sense strand
ggccacacacagcacauuu

SEQ ID NO: 552605 - RNA, 19 nt, Homo sapiens
  misc_RNA (1)...(19): siRNA sense strand
cagauuccaggaggauuua

SEQ ID NO: 552606 - RNA, 19 nt, Homo sapiens
  misc_RNA (1)...(19): siRNA sense strand
ggcagagccugaggagaug

SEQ ID NO: 552607 - RNA, 19 nt, Homo sapiens
  misc_RNA (1)...(19): siRNA sense strand
aacauccacucuaaacaug

SEQ ID NO: 552608 - RNA, 19 nt, Homo sapiens
  misc_RNA (1)...(19): siRNA sense strand
gcacuauggaggugucauc

SEQ ID NO: 552609 - RNA, 19 nt, Homo sapiens
  misc_RNA (1)...(19): siRNA sense strand
ggaguggcaguacguguuc

SEQ ID NO: 552610 - RNA, 19 nt, Homo sapiens
  misc_RNA (1)...(19): siRNA sense strand
ggaagccacgcugcuguug

SEQ ID NO: 552611 - RNA, 19 nt, Homo sapiens
  misc_RNA (1)...(19): siRNA sense strand
gggcuucugcaucagcuuu

SEQ ID NO: 552612 - RNA, 19 nt, Homo sapiens
  misc_RNA (1)...(19): siRNA sense strand
ggaggauuuaucugucaaa

SEQ ID NO: 552613 - RNA, 19 nt, Homo sapiens
  misc_RNA (1)...(19): siRNA sense strand
gagaugagcgaggagaagu

SEQ ID NO: 552614 - RNA, 19 nt, Homo sapiens
  misc_RNA (1)...(19): siRNA sense strand
cuauggcugugucaucuuc

SEQ ID NO: 552615 - RNA, 19 nt, Homo sapiens
  misc_RNA (1)...(19): siRNA sense strand
gccaugggaucuggagcaa

SEQ ID NO: 552616 - RNA, 19 nt, Homo sapiens
  misc_RNA (1)...(19): siRNA sense strand
cucccucgccgcuacauua

SEQ ID NO: 552617 - RNA, 19 nt, Homo sapiens
  misc_RNA (1)...(19): siRNA sense strand
ucgucuccauggucaauaa

SEQ ID NO: 552618 - RNA, 19 nt, Homo sapiens
  misc_RNA (1)...(19): siRNA sense strand
ggaggaggagcgcaaguac

SEQ ID NO: 552619 - RNA, 19 nt, Homo sapiens
  misc_RNA (1)...(19): siRNA sense strand
ggauggagcucuguuuucu

SEQ ID NO: 552620 - RNA, 19 nt, Homo sapiens
  misc_RNA (1)...(19): siRNA sense strand
gugcaguacucaggaugga

SEQ ID NO: 552621 - RNA, 19 nt, Homo sapiens
  misc_RNA (1)...(19): siRNA sense strand
ggccaugacuaagcacaag

SEQ ID NO: 552622 - RNA, 19 nt, Homo sapiens
  misc_RNA (1)...(19): siRNA sense strand
gcuacauugucacucagau

SEQ ID NO: 552623 - RNA, 19 nt, Homo sapiens
  misc_RNA (1)...(19): siRNA sense strand
gcagugacgacagcgaaau

SEQ ID NO: 552624 - RNA, 19 nt, Homo sapiens
  misc_RNA (1)...(19): siRNA sense strand
caucaucguggccaacuuc

SEQ ID NO: 552625 - RNA, 19 nt, Homo sapiens
  misc_RNA (1)...(19): siRNA sense strand
ccacuauggcugugucauc

SEQ ID NO: 552626 - RNA, 19 nt, Homo sapiens
  misc_RNA (1)...(19): siRNA sense strand
cuacauugucacucagauu

SEQ ID NO: 552627 - RNA, 19 nt, Homo sapiens
  misc_RNA (1)...(19): siRNA sense strand
ucaggauggagcucuguuu

SEQ ID NO: 552628 - RNA, 19 nt, Homo sapiens
  misc_RNA (1)...(19): siRNA sense strand
gaugagcgaggagaagugu

SEQ ID NO: 552629 - RNA, 19 nt, Homo sapiens
  misc_RNA (1)...(19): siRNA sense strand
ugaaccaccuggacauagc

SEQ ID NO: 552630 - RNA, 19 nt, Homo sapiens
  misc_RNA (1)...(19): siRNA sense strand
agagagcgcgaaacucaug

SEQ ID NO: 552631 - RNA, 19 nt, Homo sapiens
  misc_RNA (1)...(19): siRNA sense strand
caucggagagagcgcgaaa

SEQ ID NO: 552632 - RNA, 19 nt, Homo sapiens
  misc_RNA (1)...(19): siRNA sense strand
cggaggaggagcgcaagua

SEQ ID NO: 552633 - RNA, 19 nt, Homo sapiens
  misc_RNA (1)...(19): siRNA sense strand
ggcaacauccacucuaaac

SEQ ID NO: 552634 - RNA, 19 nt, Homo sapiens
  misc_RNA (1)...(19): siRNA sense strand
ggagaugagcgaggagaag

SEQ ID NO: 552635 - RNA, 19 nt, Homo sapiens
  misc_RNA (1)...(19): siRNA sense strand
gugcagaaagcccaguuca

SEQ ID NO: 552636 - RNA, 19 nt, Homo sapiens
  misc_RNA (1)...(19): siRNA sense strand
gaggauuuaucugucaaaa

SEQ ID NO: 552637 - RNA, 19 nt, Homo sapiens
  misc_RNA (1)...(19): siRNA sense strand
gaggaggagcgcaaguaca

SEQ ID NO: 552638 - RNA, 19 nt, Homo sapiens
  misc_RNA (1)...(19): siRNA sense strand
cacuauggcugugucaucu

SEQ ID NO: 552639 - RNA, 19 nt, Homo sapiens
  misc_RNA (1)...(19): siRNA sense strand
cauuaucgccaucaugagu

SEQ ID NO: 552640 - RNA, 19 nt, Homo sapiens
  misc_RNA (1)...(19): siRNA sense strand
auggaggugucaucuucua

SEQ ID NO: 552641 - RNA, 19 nt, Homo sapiens
  misc_RNA (1)...(19): siRNA sense strand
aagccacgcugcuguuggu

SEQ ID NO: 552642 - RNA, 19 nt, Homo sapiens
  misc_RNA (1)...(19): siRNA sense strand
ccucgccgcuacauuaucg

SEQ ID NO: 552643 - RNA, 19 nt, Homo sapiens
  misc_RNA (1)...(19): siRNA sense strand
uacuagagcucuuugauua

SEQ ID NO: 552644 - RNA, 19 nt, Homo sapiens
  misc_RNA (1)...(19): siRNA sense strand
gaagaaggcguaugaaguu

SEQ ID NO: 552645 - RNA, 19 nt, Homo sapiens
  misc_RNA (1)...(19): siRNA sense strand
gaucaaagagaagcuauua

SEQ ID NO: 552646 - RNA, 19 nt, Homo sapiens
  misc_RNA (1)...(19): siRNA sense strand
guaugaaguugcugccuua

SEQ ID NO: 552647 - RNA, 19 nt, Homo sapiens
  misc_RNA (1)...(19): siRNA sense strand
cuagagcucuuugauuaua

SEQ ID NO: 552648 - RNA, 19 nt, Homo sapiens
  misc_RNA (1)...(19): siRNA sense strand
uuuaugagcugaucaaaga

SEQ ID NO: 552649 - RNA, 19 nt, Homo sapiens
  misc_RNA (1)...(19): siRNA sense strand
cagaugggauuguucauug

SEQ ID NO: 552650 - RNA, 19 nt, Homo sapiens
  misc_RNA (1)...(19): siRNA sense strand
acaaagagcucuccauggu

SEQ ID NO: 552651 - RNA, 19 nt, Homo sapiens
  misc_RNA (1)...(19): siRNA sense strand
gggaaguguuacauguuua

SEQ ID NO: 552652 - RNA, 19 nt, Homo sapiens
  misc_RNA (1)...(19): siRNA sense strand
caaaauaugggaaguguua

SEQ ID NO: 552653 - RNA, 19 nt, Homo sapiens
  misc_RNA (1)...(19): siRNA sense strand
gcaacgggcuggagaucau

SEQ ID NO: 552654 - RNA, 19 nt, Homo sapiens
  misc_RNA (1)...(19): siRNA sense strand
ucaaagagaagcuauuaga

SEQ ID NO: 552655 - RNA, 19 nt, Homo sapiens
  misc_RNA (1)...(19): siRNA sense strand
ggaaguguuacauguuuaa

SEQ ID NO: 552656 - RNA, 19 nt, Homo sapiens
  misc_RNA (1)...(19): siRNA sense strand
gaagggagccacgaugaga

SEQ ID NO: 552657 - RNA, 19 nt, Homo sapiens
  misc_RNA (1)...(19): siRNA sense strand
gcaagacaucagccaagua

SEQ ID NO: 552658 - RNA, 19 nt, Homo sapiens
  misc_RNA (1)...(19): siRNA sense strand
ugggaaguguuacauguuu

SEQ ID NO: 552659 - RNA, 19 nt, Homo sapiens
  misc_RNA (1)...(19): siRNA sense strand
cagaggaaacgacauuuga

SEQ ID NO: 552660 - RNA, 19 nt, Homo sapiens
  misc_RNA (1)...(19): siRNA sense strand
ccuguaggauugacuguga

SEQ ID NO: 552661 - RNA, 19 nt, Homo sapiens
  misc_RNA (1)...(19): siRNA sense strand
ggaaacgacauuugaagca

SEQ ID NO: 552662 - RNA, 19 nt, Homo sapiens
  misc_RNA (1)...(19): siRNA sense strand
uaugggaaguguuacaugu

SEQ ID NO: 552663 - RNA, 19 nt, Homo sapiens
  misc_RNA (1)...(19): siRNA sense strand
gugcuaguauccuuacaau

SEQ ID NO: 552664 - RNA, 19 nt, Homo sapiens
  misc_RNA (1)...(19): siRNA sense strand
gaagcaggagugaaaguuc

SEQ ID NO: 552665 - RNA, 19 nt, Homo sapiens
  misc_RNA (1)...(19): siRNA sense strand
agagaugggccucgacuuu

SEQ ID NO: 552666 - RNA, 19 nt, Homo sapiens
  misc_RNA (1)...(19): siRNA sense strand
caucaccgccuguaggauu

SEQ ID NO: 552667 - RNA, 19 nt, Homo sapiens
  misc_RNA (1)...(19): siRNA sense strand
agacagaggaaacgacauu

SEQ ID NO: 552668 - RNA, 19 nt, Homo sapiens
  misc_RNA (1)...(19): siRNA sense strand
gaugagaaugugaguacuu

SEQ ID NO: 552669 - RNA, 19 nt, Homo sapiens
  misc_RNA (1)...(19): siRNA sense strand
ugauauugguggucagaug

SEQ ID NO: 552670 - RNA, 19 nt, Homo sapiens
  misc_RNA (1)...(19): siRNA sense strand
gaacagaagaaggcguaug

SEQ ID NO: 552671 - RNA, 19 nt, Homo sapiens
  misc_RNA (1)...(19): siRNA sense strand
gagugccgauccucagaga

SEQ ID NO: 552672 - RNA, 19 nt, Homo sapiens
  misc_RNA (1)...(19): siRNA sense strand
gagaaugugaguacuugug

SEQ ID NO: 552673 - RNA, 19 nt, Homo sapiens
  misc_RNA (1)...(19): siRNA sense strand
caagacaucagccaaguac

SEQ ID NO: 552674 - RNA, 19 nt, Homo sapiens
  misc_RNA (1)...(19): siRNA sense strand
ugugagacccgcuacauug

SEQ ID NO: 552675 - RNA, 19 nt, Homo sapiens
  misc_RNA (1)...(19): siRNA sense strand
gaggaaacgacauuugaag

SEQ ID NO: 552676 - RNA, 19 nt, Homo sapiens
  misc_RNA (1)...(19): siRNA sense strand
ccaaaccacucugaaacca

SEQ ID NO: 552677 - RNA, 19 nt, Homo sapiens
  misc_RNA (1)...(19): siRNA sense strand
gagccacgaugagaaugug

SEQ ID NO: 552678 - RNA, 19 nt, Homo sapiens
  misc_RNA (1)...(19): siRNA sense strand
guucauuggugcuaguauc

SEQ ID NO: 552679 - RNA, 19 nt, Homo sapiens
  misc_RNA (1)...(19): siRNA sense strand
ggucagaugggauuguuca

SEQ ID NO: 552680 - RNA, 19 nt, Homo sapiens
  misc_RNA (1)...(19): siRNA sense strand
agaagaaggcguaugaagu

SEQ ID NO: 552681 - RNA, 19 nt, Homo sapiens
  misc_RNA (1)...(19): siRNA sense strand
ugagacaauugaacagaag

SEQ ID NO: 552682 - RNA, 19 nt, Homo sapiens
  misc_RNA (1)...(19): siRNA sense strand
caaccuaacccgcuacaac

SEQ ID NO: 552683 - RNA, 19 nt, Homo sapiens
  misc_RNA (1)...(19): siRNA sense strand
ugagccaccuuucauccaa

SEQ ID NO: 552684 - RNA, 19 nt, Homo sapiens
  misc_RNA (1)...(19): siRNA sense strand
gaaggcguaugaaguugcu

SEQ ID NO: 552685 - RNA, 19 nt, Homo sapiens
  misc_RNA (1)...(19): siRNA sense strand
ggacgaagggagccacgau

SEQ ID NO: 552686 - RNA, 19 nt, Homo sapiens
  misc_RNA (1)...(19): siRNA sense strand
ugccuuacuuggugauauu

SEQ ID NO: 552687 - RNA, 19 nt, Homo sapiens
  misc_RNA (1)...(19): siRNA sense strand
guucagauccacagucagu

SEQ ID NO: 552688 - RNA, 19 nt, Homo sapiens
  misc_RNA (1)...(19): siRNA sense strand
gcaacugccgcaugguuca

SEQ ID NO: 552689 - RNA, 19 nt, Homo sapiens
  misc_RNA (1)...(19): siRNA sense strand
acauucagcaggaugagua

SEQ ID NO: 552690 - RNA, 19 nt, Homo sapiens
  misc_RNA (1)...(19): siRNA sense strand
aacagaagaaggcguauga

SEQ ID NO: 552691 - RNA, 19 nt, Homo sapiens
  misc_RNA (1)...(19): siRNA sense strand
aggacacccugcaaccuaa

SEQ ID NO: 552692 - RNA, 19 nt, Homo sapiens
  misc_RNA (1)...(19): siRNA sense strand
uuacaauacuagagcucuu

SEQ ID NO: 552693 - RNA, 19 nt, Homo sapiens
  misc_RNA (1)...(19): siRNA sense strand
gugccgauccucagagaug

SEQ ID NO: 552694 - RNA, 19 nt, Homo sapiens
  misc_RNA (1)...(19): siRNA sense strand
gagaucaugcuggacauuc

SEQ ID NO: 552695 - RNA, 19 nt, Homo sapiens
  misc_RNA (1)...(19): siRNA sense strand
auacuagagcucuuugauu

SEQ ID NO: 552696 - RNA, 19 nt, Homo sapiens
  misc_RNA (1)...(19): siRNA sense strand
ucagaugggauuguucauu

SEQ ID NO: 552697 - RNA, 19 nt, Homo sapiens
  misc_RNA (1)...(19): siRNA sense strand
guggucagaugggauuguu

SEQ ID NO: 552698 - RNA, 19 nt, Homo sapiens
  misc_RNA (1)...(19): siRNA sense strand
ggagaucaugcuggacauu

SEQ ID NO: 552699 - RNA, 19 nt, Homo sapiens
  misc_RNA (1)...(19): siRNA sense strand
agaaugugaguacuuguga

SEQ ID NO: 552700 - RNA, 19 nt, Homo sapiens
  misc_RNA (1)...(19): siRNA sense strand
aagaaggcguaugaaguug

SEQ ID NO: 552701 - RNA, 19 nt, Homo sapiens
  misc_RNA (1)...(19): siRNA sense strand
cagaagaaggcguaugaag

SEQ ID NO: 552702 - RNA, 19 nt, Homo sapiens
  misc_RNA (1)...(19): siRNA sense strand
cggaaaaggacagcaauua

SEQ ID NO: 552703 - RNA, 19 nt, Homo sapiens
  misc_RNA (1)...(19): siRNA sense strand
caaagagaagcuauuagac

SEQ ID NO: 552704 - RNA, 19 nt, Homo sapiens
  misc_RNA (1)...(19): siRNA sense strand
aaguucagauccacaguca

SEQ ID NO: 552705 - RNA, 19 nt, Homo sapiens
  misc_RNA (1)...(19): siRNA sense strand
gaaaaggacagcaauuacu

SEQ ID NO: 552706 - RNA, 19 nt, Homo sapiens
  misc_RNA (1)...(19): siRNA sense strand
agaggaaacgacauuugaa

SEQ ID NO: 552707 - RNA, 19 nt, Homo sapiens
  misc_RNA (1)...(19): siRNA sense strand
ggagccacgaugagaaugu

SEQ ID NO: 552708 - RNA, 19 nt, Homo sapiens
  misc_RNA (1)...(19): siRNA sense strand
ugaagcaggagugaaaguu

SEQ ID NO: 552709 - RNA, 19 nt, Homo sapiens
  misc_RNA (1)...(19): siRNA sense strand
cuaacccgcuacaacaaag

SEQ ID NO: 552710 - RNA, 19 nt, Homo sapiens
  misc_RNA (1)...(19): siRNA sense strand
ccuaacccgcuacaacaaa

SEQ ID NO: 552711 - RNA, 19 nt, Homo sapiens
  misc_RNA (1)...(19): siRNA sense strand
gacagaggaaacgacauuu

SEQ ID NO: 552712 - RNA, 19 nt, Homo sapiens
  misc_RNA (1)...(19): siRNA sense strand
acagaggaaacgacauuug

SEQ ID NO: 552713 - RNA, 19 nt, Homo sapiens
  misc_RNA (1)...(19): siRNA sense strand
augagacaauugaacagaa

SEQ ID NO: 552714 - RNA, 19 nt, Homo sapiens
  misc_RNA (1)...(19): siRNA sense strand
guaccuugagaagaaauuu

SEQ ID NO: 552715 - RNA, 19 nt, Homo sapiens
  misc_RNA (1)...(19): siRNA sense strand
agaucaugcuggacauuca

SEQ ID NO: 552716 - RNA, 19 nt, Homo sapiens
  misc_RNA (1)...(19): siRNA sense strand
gaaaguucagauccacagu

SEQ ID NO: 552717 - RNA, 19 nt, Homo sapiens
  misc_RNA (1)...(19): siRNA sense strand
augagaaugugaguacuug

SEQ ID NO: 552718 - RNA, 19 nt, Homo sapiens
  misc_RNA (1)...(19): siRNA sense strand
gagacaauugaacagaaga

SEQ ID NO: 552719 - RNA, 19 nt, Homo sapiens
  misc_RNA (1)...(19): siRNA sense strand
cauuggugcuaguauccuu

SEQ ID NO: 552720 - RNA, 19 nt, Homo sapiens
  misc_RNA (1)...(19): siRNA sense strand
gagaugggccucgacuuuu

SEQ ID NO: 552721 - RNA, 19 nt, Homo sapiens
  misc_RNA (1)...(19): siRNA sense strand
ggagagacagaggaaacga

SEQ ID NO: 552722 - RNA, 19 nt, Homo sapiens
  misc_RNA (1)...(19): siRNA sense strand
gacaucagccaaguaccuu

SEQ ID NO: 552723 - RNA, 19 nt, Homo sapiens
  misc_RNA (1)...(19): siRNA sense strand
ggaaaaggacagcaauuac

SEQ ID NO: 552724 - RNA, 19 nt, Homo sapiens
  misc_RNA (1)...(19): siRNA sense strand
cuaggucuguuggcggaaa

SEQ ID NO: 552725 - RNA, 19 nt, Homo sapiens
  misc_RNA (1)...(19): siRNA sense strand
gugaagauccccagcaaga

SEQ ID NO: 552726 - RNA, 19 nt, Homo sapiens
  misc_RNA (1)...(19): siRNA sense strand
uagaccugcuuggcaaaga

SEQ ID NO: 552727 - RNA, 19 nt, Homo sapiens
  misc_RNA (1)...(19): siRNA sense strand
ggugcuaguauccuuacaa

SEQ ID NO: 552728 - RNA, 19 nt, Homo sapiens
  misc_RNA (1)...(19): siRNA sense strand
gaagauccccagcaagaca

SEQ ID NO: 552729 - RNA, 19 nt, Homo sapiens
  misc_RNA (1)...(19): siRNA sense strand
uacuagagcucuuugauua

SEQ ID NO: 552730 - RNA, 19 nt, Homo sapiens
  misc_RNA (1)...(19): siRNA sense strand
gaagaaggcguaugaaguu

SEQ ID NO: 552731 - RNA, 19 nt, Homo sapiens
  misc_RNA (1)...(19): siRNA sense strand
gaucaaagagaagcuauua

SEQ ID NO: 552732 - RNA, 19 nt, Homo sapiens
  misc_RNA (1)...(19): siRNA sense strand
guaugaaguugcugccuua

SEQ ID NO: 552733 - RNA, 19 nt, Homo sapiens
  misc_RNA (1)...(19): siRNA sense strand
cuagagcucuuugauuaua

SEQ ID NO: 552734 - RNA, 19 nt, Homo sapiens
  misc_RNA (1)...(19): siRNA sense strand
uuuaugagcugaucaaaga

SEQ ID NO: 552735 - RNA, 19 nt, Homo sapiens
  misc_RNA (1)...(19): siRNA sense strand
cagaugggauuguucauug

SEQ ID NO: 552736 - RNA, 19 nt, Homo sapiens
  misc_RNA (1)...(19): siRNA sense strand
acaaagagcucuccauggu

SEQ ID NO: 552737 - RNA, 19 nt, Homo sapiens
  misc_RNA (1)...(19): siRNA sense strand
gggaaguguuacauguuua

SEQ ID NO: 552738 - RNA, 19 nt, Homo sapiens
  misc_RNA (1)...(19): siRNA sense strand
caaaauaugggaaguguua

SEQ ID NO: 552739 - RNA, 19 nt, Homo sapiens
  misc_RNA (1)...(19): siRNA sense strand
gcaacgggcuggagaucau

SEQ ID NO: 552740 - RNA, 19 nt, Homo sapiens
  misc_RNA (1)...(19): siRNA sense strand
ucaaagagaagcuauuaga

SEQ ID NO: 552741 - RNA, 19 nt, Homo sapiens
  misc_RNA (1)...(19): siRNA sense strand
ggaaguguuacauguuuaa

SEQ ID NO: 552742 - RNA, 19 nt, Homo sapiens
  misc_RNA (1)...(19): siRNA sense strand
gaagggagccacgaugaga

SEQ ID NO: 552743 - RNA, 19 nt, Homo sapiens
  misc_RNA (1)...(19): siRNA sense strand
gcaagacaucagccaagua

SEQ ID NO: 552744 - RNA, 19 nt, Homo sapiens
  misc_RNA (1)...(19): siRNA sense strand
ugggaaguguuacauguuu

SEQ ID NO: 552745 - RNA, 19 nt, Homo sapiens
  misc_RNA (1)...(19): siRNA sense strand
cagaggaaacgacauuuga

SEQ ID NO: 552746 - RNA, 19 nt, Homo sapiens
  misc_RNA (1)...(19): siRNA sense strand
ccuguaggauugacuguga

SEQ ID NO: 552747 - RNA, 19 nt, Homo sapiens
  misc_RNA (1)...(19): siRNA sense strand
ggaaacgacauuugaagca

SEQ ID NO: 552748 - RNA, 19 nt, Homo sapiens
  misc_RNA (1)...(19): siRNA sense strand
uaugggaaguguuacaugu

SEQ ID NO: 552749 - RNA, 19 nt, Homo sapiens
  misc_RNA (1)...(19): siRNA sense strand
gugcuaguauccuuacaau

SEQ ID NO: 552750 - RNA, 19 nt, Homo sapiens
  misc_RNA (1)...(19): siRNA sense strand
gaagcaggagugaaaguuc

SEQ ID NO: 552751 - RNA, 19 nt, Homo sapiens
  misc_RNA (1)...(19): siRNA sense strand
agagaugggccucgacuuu

SEQ ID NO: 552752 - RNA, 19 nt, Homo sapiens
  misc_RNA (1)...(19): siRNA sense strand
caucaccgccuguaggauu

SEQ ID NO: 552753 - RNA, 19 nt, Homo sapiens
  misc_RNA (1)...(19): siRNA sense strand
agacagaggaaacgacauu

SEQ ID NO: 552754 - RNA, 19 nt, Homo sapiens
  misc_RNA (1)...(19): siRNA sense strand
gaugagaaugugaguacuu

SEQ ID NO: 552755 - RNA, 19 nt, Homo sapiens
  misc_RNA (1)...(19): siRNA sense strand
ugauauugguggucagaug

SEQ ID NO: 552756 - RNA, 19 nt, Homo sapiens
  misc_RNA (1)...(19): siRNA sense strand
gaacagaagaaggcguaug

SEQ ID NO: 552757 - RNA, 19 nt, Homo sapiens
  misc_RNA (1)...(19): siRNA sense strand
gagugccgauccucagaga

SEQ ID NO: 552758 - RNA, 19 nt, Homo sapiens
  misc_RNA (1)...(19): siRNA sense strand
gagaaugugaguacuugug

SEQ ID NO: 552759 - RNA, 19 nt, Homo sapiens
  misc_RNA (1)...(19): siRNA sense strand
caagacaucagccaaguac

SEQ ID NO: 552760 - RNA, 19 nt, Homo sapiens
  misc_RNA (1)...(19): siRNA sense strand
ugugagacccgcuacauug

SEQ ID NO: 552761 - RNA, 19 nt, Homo sapiens
  misc_RNA (1)...(19): siRNA sense strand
gaggaaacgacauuugaag

SEQ ID NO: 552762 - RNA, 19 nt, Homo sapiens
  misc_RNA (1)...(19): siRNA sense strand
ccaaaccacucugaaacca

SEQ ID NO: 552763 - RNA, 19 nt, Homo sapiens
  misc_RNA (1)...(19): siRNA sense strand
gagccacgaugagaaugug

SEQ ID NO: 552764 - RNA, 19 nt, Homo sapiens
  misc_RNA (1)...(19): siRNA sense strand
guucauuggugcuaguauc

SEQ ID NO: 552765 - RNA, 19 nt, Homo sapiens
  misc_RNA (1)...(19): siRNA sense strand
ggucagaugggauuguuca

SEQ ID NO: 552766 - RNA, 19 nt, Homo sapiens
  misc_RNA (1)...(19): siRNA sense strand
agaagaaggcguaugaagu

SEQ ID NO: 552767 - RNA, 19 nt, Homo sapiens
  misc_RNA (1)...(19): siRNA sense strand
ugagacaauugaacagaag

SEQ ID NO: 552768 - RNA, 19 nt, Homo sapiens
  misc_RNA (1)...(19): siRNA sense strand
caaccuaacccgcuacaac

SEQ ID NO: 552769 - RNA, 19 nt, Homo sapiens
  misc_RNA (1)...(19): siRNA sense strand
ugagccaccuuucauccaa

SEQ ID NO: 552770 - RNA, 19 nt, Homo sapiens
  misc_RNA (1)...(19): siRNA sense strand
gaaggcguaugaaguugcu

SEQ ID NO: 552771 - RNA, 19 nt, Homo sapiens
  misc_RNA (1)...(19): siRNA sense strand
ggacgaagggagccacgau

SEQ ID NO: 552772 - RNA, 19 nt, Homo sapiens
  misc_RNA (1)...(19): siRNA sense strand
ugccuuacuuggugauauu

SEQ ID NO: 552773 - RNA, 19 nt, Homo sapiens
  misc_RNA (1)...(19): siRNA sense strand
guucagauccacagucagu

SEQ ID NO: 552774 - RNA, 19 nt, Homo sapiens
  misc_RNA (1)...(19): siRNA sense strand
gcaacugccgcaugguuca

SEQ ID NO: 552775 - RNA, 19 nt, Homo sapiens
  misc_RNA (1)...(19): siRNA sense strand
acauucagcaggaugagua

SEQ ID NO: 552776 - RNA, 19 nt, Homo sapiens
  misc_RNA (1)...(19): siRNA sense strand
aacagaagaaggcguauga

SEQ ID NO: 552777 - RNA, 19 nt, Homo sapiens
  misc_RNA (1)...(19): siRNA sense strand
aggacacccugcaaccuaa

SEQ ID NO: 552778 - RNA, 19 nt, Homo sapiens
  misc_RNA (1)...(19): siRNA sense strand
uuacaauacuagagcucuu

SEQ ID NO: 552779 - RNA, 19 nt, Homo sapiens
  misc_RNA (1)...(19): siRNA sense strand
gugccgauccucagagaug

SEQ ID NO: 552780 - RNA, 19 nt, Homo sapiens
  misc_RNA (1)...(19): siRNA sense strand
gagaucaugcuggacauuc

SEQ ID NO: 552781 - RNA, 19 nt, Homo sapiens
  misc_RNA (1)...(19): siRNA sense strand
auacuagagcucuuugauu

SEQ ID NO: 552782 - RNA, 19 nt, Homo sapiens
  misc_RNA (1)...(19): siRNA sense strand
ucagaugggauuguucauu

SEQ ID NO: 552783 - RNA, 19 nt, Homo sapiens
  misc_RNA (1)...(19): siRNA sense strand
guggucagaugggauuguu

SEQ ID NO: 552784 - RNA, 19 nt, Homo sapiens
  misc_RNA (1)...(19): siRNA sense strand
ggagaucaugcuggacauu

SEQ ID NO: 552785 - RNA, 19 nt, Homo sapiens
  misc_RNA (1)...(19): siRNA sense strand
agaaugugaguacuuguga

SEQ ID NO: 552786 - RNA, 19 nt, Homo sapiens
  misc_RNA (1)...(19): siRNA sense strand
aagaaggcguaugaaguug

SEQ ID NO: 552787 - RNA, 19 nt, Homo sapiens
  misc_RNA (1)...(19): siRNA sense strand
cagaagaaggcguaugaag

SEQ ID NO: 552788 - RNA, 19 nt, Homo sapiens
  misc_RNA (1)...(19): siRNA sense strand
cggaaaaggacagcaauua

SEQ ID NO: 552789 - RNA, 19 nt, Homo sapiens
  misc_RNA (1)...(19): siRNA sense strand
caaagagaagcuauuagac

SEQ ID NO: 552790 - RNA, 19 nt, Homo sapiens
  misc_RNA (1)...(19): siRNA sense strand
aaguucagauccacaguca

SEQ ID NO: 552791 - RNA, 19 nt, Homo sapiens
  misc_RNA (1)...(19): siRNA sense strand
gaaaaggacagcaauuacu

SEQ ID NO: 552792 - RNA, 19 nt, Homo sapiens
  misc_RNA (1)...(19): siRNA sense strand
agaggaaacgacauuugaa

SEQ ID NO: 552793 - RNA, 19 nt, Homo sapiens
  misc_RNA (1)...(19): siRNA sense strand
ggagccacgaugagaaugu

SEQ ID NO: 552794 - RNA, 19 nt, Homo sapiens
  misc_RNA (1)...(19): siRNA sense strand
ugaagcaggagugaaaguu

SEQ ID NO: 552795 - RNA, 19 nt, Homo sapiens
  misc_RNA (1)...(19): siRNA sense strand
cuaacccgcuacaacaaag

SEQ ID NO: 552796 - RNA, 19 nt, Homo sapiens
  misc_RNA (1)...(19): siRNA sense strand
ccuaacccgcuacaacaaa

SEQ ID NO: 552797 - RNA, 19 nt, Homo sapiens
  misc_RNA (1)...(19): siRNA sense strand
gacagaggaaacgacauuu

SEQ ID NO: 552798 - RNA, 19 nt, Homo sapiens
  misc_RNA (1)...(19): siRNA sense strand
acagaggaaacgacauuug

SEQ ID NO: 552799 - RNA, 19 nt, Homo sapiens
  misc_RNA (1)...(19): siRNA sense strand
augagacaauugaacagaa

SEQ ID NO: 552800 - RNA, 19 nt, Homo sapiens
  misc_RNA (1)...(19): siRNA sense strand
guaccuugagaagaaauuu

SEQ ID NO: 552801 - RNA, 19 nt, Homo sapiens
  misc_RNA (1)...(19): siRNA sense strand
agaucaugcuggacauuca

SEQ ID NO: 552802 - RNA, 19 nt, Homo sapiens
  misc_RNA (1)...(19): siRNA sense strand
gaaaguucagauccacagu

SEQ ID NO: 552803 - RNA, 19 nt, Homo sapiens
  misc_RNA (1)...(19): siRNA sense strand
augagaaugugaguacuug

SEQ ID NO: 552804 - RNA, 19 nt, Homo sapiens
  misc_RNA (1)...(19): siRNA sense strand
gagacaauugaacagaaga

SEQ ID NO: 552805 - RNA, 19 nt, Homo sapiens
  misc_RNA (1)...(19): siRNA sense strand
cauuggugcuaguauccuu

SEQ ID NO: 552806 - RNA, 19 nt, Homo sapiens
  misc_RNA (1)...(19): siRNA sense strand
gagaugggccucgacuuuu

SEQ ID NO: 552807 - RNA, 19 nt, Homo sapiens
  misc_RNA (1)...(19): siRNA sense strand
ggagagacagaggaaacga

SEQ ID NO: 552808 - RNA, 19 nt, Homo sapiens
  misc_RNA (1)...(19): siRNA sense strand
gacaucagccaaguaccuu

SEQ ID NO: 552809 - RNA, 19 nt, Homo sapiens
  misc_RNA (1)...(19): siRNA sense strand
ggaaaaggacagcaauuac

SEQ ID NO: 552810 - RNA, 19 nt, Homo sapiens
  misc_RNA (1)...(19): siRNA sense strand
cuaggucuguuggcggaaa

SEQ ID NO: 552811 - RNA, 19 nt, Homo sapiens
  misc_RNA (1)...(19): siRNA sense strand
gugaagauccccagcaaga

SEQ ID NO: 552812 - RNA, 19 nt, Homo sapiens
  misc_RNA (1)...(19): siRNA sense strand
uagaccugcuuggcaaaga

SEQ ID NO: 552813 - RNA, 19 nt, Homo sapiens
  misc_RNA (1)...(19): siRNA sense strand
ggugcuaguauccuuacaa

SEQ ID NO: 552814 - RNA, 19 nt, Homo sapiens
  misc_RNA (1)...(19): siRNA sense strand
gaagauccccagcaagaca

SEQ ID NO: 552815 - RNA, 19 nt, Homo sapiens
  misc_RNA (1)...(19): siRNA sense strand
gaagaacacguguaaauua

SEQ ID NO: 552816 - RNA, 19 nt, Homo sapiens
  misc_RNA (1)...(19): siRNA sense strand
gaacacguguaaauuauug

SEQ ID NO: 552817 - RNA, 19 nt, Homo sapiens
  misc_RNA (1)...(19): siRNA sense strand
gcacaaagaauuaugguaa

SEQ ID NO: 552818 - RNA, 19 nt, Homo sapiens
  misc_RNA (1)...(19): siRNA sense strand
ggaaagcccuguacaguag

SEQ ID NO: 552819 - RNA, 19 nt, Homo sapiens
  misc_RNA (1)...(19): siRNA sense strand
gaucaucgcuucuacagau

SEQ ID NO: 552820 - RNA, 19 nt, Homo sapiens
  misc_RNA (1)...(19): siRNA sense strand
uaugggaacucuuggauua

SEQ ID NO: 552821 - RNA, 19 nt, Homo sapiens
  misc_RNA (1)...(19): siRNA sense strand
cauaagagaugaugauguu

SEQ ID NO: 552822 - RNA, 19 nt, Homo sapiens
  misc_RNA (1)...(19): siRNA sense strand
gaggaagcaucuaaaguuu

SEQ ID NO: 552823 - RNA, 19 nt, Homo sapiens
  misc_RNA (1)...(19): siRNA sense strand
gaacgcagcaauaaaguuu

SEQ ID NO: 552824 - RNA, 19 nt, Homo sapiens
  misc_RNA (1)...(19): siRNA sense strand
ggaaauaugucauguaucc

SEQ ID NO: 552825 - RNA, 19 nt, Homo sapiens
  misc_RNA (1)...(19): siRNA sense strand
ggauguaauugaacgauuu

SEQ ID NO: 552826 - RNA, 19 nt, Homo sapiens
  misc_RNA (1)...(19): siRNA sense strand
ucaagaauguuucacguuu

SEQ ID NO: 552827 - RNA, 19 nt, Homo sapiens
  misc_RNA (1)...(19): siRNA sense strand
aaaggaagcugaccugguu

SEQ ID NO: 552828 - RNA, 19 nt, Homo sapiens
  misc_RNA (1)...(19): siRNA sense strand
gguuacaacucaugaauug

SEQ ID NO: 552829 - RNA, 19 nt, Homo sapiens
  misc_RNA (1)...(19): siRNA sense strand
aaagagaucuacagacuuc

SEQ ID NO: 552830 - RNA, 19 nt, Homo sapiens
  misc_RNA (1)...(19): siRNA sense strand
gaagagaguacaacuacaa

SEQ ID NO: 552831 - RNA, 19 nt, Homo sapiens
  misc_RNA (1)...(19): siRNA sense strand
gcaaagaaacagagugcua

SEQ ID NO: 552832 - RNA, 19 nt, Homo sapiens
  misc_RNA (1)...(19): siRNA sense strand
gcaaaggcguguccuacug

SEQ ID NO: 552833 - RNA, 19 nt, Homo sapiens
  misc_RNA (1)...(19): siRNA sense strand
gagaguacaacuacaaauu

SEQ ID NO: 552834 - RNA, 19 nt, Homo sapiens
  misc_RNA (1)...(19): siRNA sense strand
gaauacagauagagcagau

SEQ ID NO: 552835 - RNA, 19 nt, Homo sapiens
  misc_RNA (1)...(19): siRNA sense strand
gcacagcugccaagucauu

SEQ ID NO: 552836 - RNA, 19 nt, Homo sapiens
  misc_RNA (1)...(19): siRNA sense strand
aagaagagcugacccagau

SEQ ID NO: 552837 - RNA, 19 nt, Homo sapiens
  misc_RNA (1)...(19): siRNA sense strand
gaggguggaugaaggagaa

SEQ ID NO: 552838 - RNA, 19 nt, Homo sapiens
  misc_RNA (1)...(19): siRNA sense strand
gauuaaugcuacuugcaaa

SEQ ID NO: 552839 - RNA, 19 nt, Homo sapiens
  misc_RNA (1)...(19): siRNA sense strand
ggagauuuguuaaugauac

SEQ ID NO: 552840 - RNA, 19 nt, Homo sapiens
  misc_RNA (1)...(19): siRNA sense strand
gcaguaaacaaucaaucua

SEQ ID NO: 552841 - RNA, 19 nt, Homo sapiens
  misc_RNA (1)...(19): siRNA sense strand
ggaagcaucuaaaguuugc

SEQ ID NO: 552842 - RNA, 19 nt, Homo sapiens
  misc_RNA (1)...(19): siRNA sense strand
caagaauguuucacguuug

SEQ ID NO: 552843 - RNA, 19 nt, Homo sapiens
  misc_RNA (1)...(19): siRNA sense strand
cuacagacuucaacacaug

SEQ ID NO: 552844 - RNA, 19 nt, Homo sapiens
  misc_RNA (1)...(19): siRNA sense strand
caaagaaacagagugcuaa

SEQ ID NO: 552845 - RNA, 19 nt, Homo sapiens
  misc_RNA (1)...(19): siRNA sense strand
gaggcagucucuccuauuc

SEQ ID NO: 552846 - RNA, 19 nt, Homo sapiens
  misc_RNA (1)...(19): siRNA sense strand
cugaagauaucaagaaugu

SEQ ID NO: 552847 - RNA, 19 nt, Homo sapiens
  misc_RNA (1)...(19): siRNA sense strand
ugacgagcacaaagaauua

SEQ ID NO: 552848 - RNA, 19 nt, Homo sapiens
  misc_RNA (1)...(19): siRNA sense strand
ccacuuuggagauuuguua

SEQ ID NO: 552849 - RNA, 19 nt, Homo sapiens
  misc_RNA (1)...(19): siRNA sense strand
caagaacgcagcaauaaag

SEQ ID NO: 552850 - RNA, 19 nt, Homo sapiens
  misc_RNA (1)...(19): siRNA sense strand
aaacugcaguaaacaauca

SEQ ID NO: 552851 - RNA, 19 nt, Homo sapiens
  misc_RNA (1)...(19): siRNA sense strand
ugaggaagcaucuaaaguu

SEQ ID NO: 552852 - RNA, 19 nt, Homo sapiens
  misc_RNA (1)...(19): siRNA sense strand
guaaggcccaggaguguuu

SEQ ID NO: 552853 - RNA, 19 nt, Homo sapiens
  misc_RNA (1)...(19): siRNA sense strand
ucauguaucugaacaacga

SEQ ID NO: 552854 - RNA, 19 nt, Homo sapiens
  misc_RNA (1)...(19): siRNA sense strand
gcucucagacuacgauauu

SEQ ID NO: 552855 - RNA, 19 nt, Homo sapiens
  misc_RNA (1)...(19): siRNA sense strand
cuagagcaauuuagcuuug

SEQ ID NO: 552856 - RNA, 19 nt, Homo sapiens
  misc_RNA (1)...(19): siRNA sense strand
gguaaaaccuggugaaaag

SEQ ID NO: 552857 - RNA, 19 nt, Homo sapiens
  misc_RNA (1)...(19): siRNA sense strand
uaacauagagccacuuugg

SEQ ID NO: 552858 - RNA, 19 nt, Homo sapiens
  misc_RNA (1)...(19): siRNA sense strand
cagcugagcaucaauacuu

SEQ ID NO: 552859 - RNA, 19 nt, Homo sapiens
  misc_RNA (1)...(19): siRNA sense strand
ugauauagcugaggaagca

SEQ ID NO: 552860 - RNA, 19 nt, Homo sapiens
  misc_RNA (1)...(19): siRNA sense strand
gagcagauucgcauucuca

SEQ ID NO: 552861 - RNA, 19 nt, Homo sapiens
  misc_RNA (1)...(19): siRNA sense strand
gaguacaacuacaaauuac

SEQ ID NO: 552862 - RNA, 19 nt, Homo sapiens
  misc_RNA (1)...(19): siRNA sense strand
cuacgauauucucucuuua

SEQ ID NO: 552863 - RNA, 19 nt, Homo sapiens
  misc_RNA (1)...(19): siRNA sense strand
caacacauguagaaacacu

SEQ ID NO: 552864 - RNA, 19 nt, Homo sapiens
  misc_RNA (1)...(19): siRNA sense strand
ggagggaaauaugucaugu

SEQ ID NO: 552865 - RNA, 19 nt, Homo sapiens
  misc_RNA (1)...(19): siRNA sense strand
guccaaaggcuuauuauag

SEQ ID NO: 552866 - RNA, 19 nt, Homo sapiens
  misc_RNA (1)...(19): siRNA sense strand
ggaagagaguacaacuaca

SEQ ID NO: 552867 - RNA, 19 nt, Homo sapiens
  misc_RNA (1)...(19): siRNA sense strand
caucaaguacugaacguuu

SEQ ID NO: 552868 - RNA, 19 nt, Homo sapiens
  misc_RNA (1)...(19): siRNA sense strand
gaccagcugagcaucaaua

SEQ ID NO: 552869 - RNA, 19 nt, Homo sapiens
  misc_RNA (1)...(19): siRNA sense strand
gcgaucacgagaacaauaa

SEQ ID NO: 552870 - RNA, 19 nt, Homo sapiens
  misc_RNA (1)...(19): siRNA sense strand
cggaacacuucaugggaua

SEQ ID NO: 552871 - RNA, 19 nt, Homo sapiens
  misc_RNA (1)...(19): siRNA sense strand
gagccacuuuggagauuug

SEQ ID NO: 552872 - RNA, 19 nt, Homo sapiens
  misc_RNA (1)...(19): siRNA sense strand
ugaagaacacguguaaauu

SEQ ID NO: 552873 - RNA, 19 nt, Homo sapiens
  misc_RNA (1)...(19): siRNA sense strand
acuacgauauucucucuuu

SEQ ID NO: 552874 - RNA, 19 nt, Homo sapiens
  misc_RNA (1)...(19): siRNA sense strand
gaaaggaaagcccuguaca

SEQ ID NO: 552875 - RNA, 19 nt, Homo sapiens
  misc_RNA (1)...(19): siRNA sense strand
agggaaauaugucauguau

SEQ ID NO: 552876 - RNA, 19 nt, Homo sapiens
  misc_RNA (1)...(19): siRNA sense strand
ccaugaagaacacguguaa

SEQ ID NO: 552877 - RNA, 19 nt, Homo sapiens
  misc_RNA (1)...(19): siRNA sense strand
gaauggcaaaugugagaaa

SEQ ID NO: 552878 - RNA, 19 nt, Homo sapiens
  misc_RNA (1)...(19): siRNA sense strand
gagcaauuuagcuuugaua

SEQ ID NO: 552879 - RNA, 19 nt, Homo sapiens
  misc_RNA (1)...(19): siRNA sense strand
uaaaggcuauggaauacag

SEQ ID NO: 552880 - RNA, 19 nt, Homo sapiens
  misc_RNA (1)...(19): siRNA sense strand
aaaguuacccaaaugaaga

SEQ ID NO: 552881 - RNA, 19 nt, Homo sapiens
  misc_RNA (1)...(19): siRNA sense strand
gcacagguaauagcaguga

SEQ ID NO: 552882 - RNA, 19 nt, Homo sapiens
  misc_RNA (1)...(19): siRNA sense strand
ggaacucgaggguggauga

SEQ ID NO: 552883 - RNA, 19 nt, Homo sapiens
  misc_RNA (1)...(19): siRNA sense strand
gaacucuuggauuagcuua

SEQ ID NO: 552884 - RNA, 19 nt, Homo sapiens
  misc_RNA (1)...(19): siRNA sense strand
gguucuagcccacauaaga

SEQ ID NO: 552885 - RNA, 19 nt, Homo sapiens
  misc_RNA (1)...(19): siRNA sense strand
ggacgaggauggguuugag

SEQ ID NO: 552886 - RNA, 19 nt, Homo sapiens
  misc_RNA (1)...(19): siRNA sense strand
guaaugaaacugacaacuc

SEQ ID NO: 552887 - RNA, 19 nt, Homo sapiens
  misc_RNA (1)...(19): siRNA sense strand
aauuauaccugacaucaag

SEQ ID NO: 552888 - RNA, 19 nt, Homo sapiens
  misc_RNA (1)...(19): siRNA sense strand
gggaagagaguacaacuac

SEQ ID NO: 552889 - RNA, 19 nt, Homo sapiens
  misc_RNA (1)...(19): siRNA sense strand
acucaugaauugggacaua

SEQ ID NO: 552890 - RNA, 19 nt, Homo sapiens
  misc_RNA (1)...(19): siRNA sense strand
ggaguccugugcauguaau

SEQ ID NO: 552891 - RNA, 19 nt, Homo sapiens
  misc_RNA (1)...(19): siRNA sense strand
ucaagaacgcagcaauaaa

SEQ ID NO: 552892 - RNA, 19 nt, Homo sapiens
  misc_RNA (1)...(19): siRNA sense strand
gagggaaauaugucaugua

SEQ ID NO: 552893 - RNA, 19 nt, Homo sapiens
  misc_RNA (1)...(19): siRNA sense strand
ccacauaagagaugaugau

SEQ ID NO: 552894 - RNA, 19 nt, Homo sapiens
  misc_RNA (1)...(19): siRNA sense strand
caaaugugagaaacgagua

SEQ ID NO: 552895 - RNA, 19 nt, Homo sapiens
  misc_RNA (1)...(19): siRNA sense strand
ggaugaaggagaagagugu

SEQ ID NO: 552896 - RNA, 19 nt, Homo sapiens
  misc_RNA (1)...(19): siRNA sense strand
ucucaagucuccacaagag

SEQ ID NO: 552897 - RNA, 19 nt, Homo sapiens
  misc_RNA (1)...(19): siRNA sense strand
ucagcauucuuguccauug

SEQ ID NO: 552898 - RNA, 19 nt, Homo sapiens
  misc_RNA (1)...(19): siRNA sense strand
uggcacaccuuuucacaua

SEQ ID NO: 552899 - RNA, 19 nt, Homo sapiens
  misc_RNA (1)...(19): siRNA sense strand
uaaucagaaucaacacaga

SEQ ID NO: 552900 - RNA, 19 nt, Homo sapiens
  misc_RNA (1)...(19): siRNA sense strand
cuaugucgaugcugaacaa

SEQ ID NO: 552901 - RNA, 19 nt, Homo sapiens
  misc_RNA (1)...(19): siRNA sense strand
gaagcugaccugguuacaa

SEQ ID NO: 552902 - RNA, 19 nt, Homo sapiens
  misc_RNA (1)...(19): siRNA sense strand
cagcagcauucgguaagaa

SEQ ID NO: 552903 - RNA, 19 nt, Homo sapiens
  misc_RNA (1)...(19): siRNA sense strand
ccaagucauuugaggaucu

SEQ ID NO: 552904 - RNA, 19 nt, Homo sapiens
  misc_RNA (1)...(19): siRNA sense strand
ggaaaggaaagcccuguac

SEQ ID NO: 552905 - RNA, 19 nt, Homo sapiens
  misc_RNA (1)...(19): siRNA sense strand
agaaccaccugaagagcuu

SEQ ID NO: 552906 - RNA, 19 nt, Homo sapiens
  misc_RNA (1)...(19): siRNA sense strand
gaccagggagggaaauaug

SEQ ID NO: 552907 - RNA, 19 nt, Homo sapiens
  misc_RNA (1)...(19): siRNA sense strand
aagcugaccugguuacaac

SEQ ID NO: 552908 - RNA, 19 nt, Homo sapiens
  misc_RNA (1)...(19): siRNA sense strand
ucuaauauccagcagcauu

SEQ ID NO: 552909 - RNA, 19 nt, Homo sapiens
  misc_RNA (1)...(19): siRNA sense strand
uagcugaggaagcaucuaa

SEQ ID NO: 552910 - RNA, 19 nt, Homo sapiens
  misc_RNA (1)...(19): siRNA sense strand
agacuacgauauucucucu

SEQ ID NO: 552911 - RNA, 19 nt, Homo sapiens
  misc_RNA (1)...(19): siRNA sense strand
aggaaagcccuguacagua

SEQ ID NO: 552912 - RNA, 19 nt, Homo sapiens
  misc_RNA (1)...(19): siRNA sense strand
gugcauguaaugaaacuga

SEQ ID NO: 552913 - RNA, 19 nt, Homo sapiens
  misc_RNA (1)...(19): siRNA sense strand
cggauggucuagcagaaug

SEQ ID NO: 552914 - RNA, 19 nt, Homo sapiens
  misc_RNA (1)...(19): siRNA sense strand
augaagaguugcucccaaa

SEQ ID NO: 552915 - RNA, 19 nt, Homo sapiens
  misc_RNA (1)...(19): siRNA sense strand
gaagaacacguguaaauua

SEQ ID NO: 552916 - RNA, 19 nt, Homo sapiens
  misc_RNA (1)...(19): siRNA sense strand
gaacacguguaaauuauug

SEQ ID NO: 552917 - RNA, 19 nt, Homo sapiens
  misc_RNA (1)...(19): siRNA sense strand
gcacaaagaauuaugguaa

SEQ ID NO: 552918 - RNA, 19 nt, Homo sapiens
  misc_RNA (1)...(19): siRNA sense strand
ggaaagcccuguacaguag

SEQ ID NO: 552919 - RNA, 19 nt, Homo sapiens
  misc_RNA (1)...(19): siRNA sense strand
gaucaucgcuucuacagau

SEQ ID NO: 552920 - RNA, 19 nt, Homo sapiens
  misc_RNA (1)...(19): siRNA sense strand
uaugggaacucuuggauua

SEQ ID NO: 552921 - RNA, 19 nt, Homo sapiens
  misc_RNA (1)...(19): siRNA sense strand
cauaagagaugaugauguu

SEQ ID NO: 552922 - RNA, 19 nt, Homo sapiens
  misc_RNA (1)...(19): siRNA sense strand
gaggaagcaucuaaaguuu

SEQ ID NO: 552923 - RNA, 19 nt, Homo sapiens
  misc_RNA (1)...(19): siRNA sense strand
gaacgcagcaauaaaguuu

SEQ ID NO: 552924 - RNA, 19 nt, Homo sapiens
  misc_RNA (1)...(19): siRNA sense strand
ggaaauaugucauguaucc

SEQ ID NO: 552925 - RNA, 19 nt, Homo sapiens
  misc_RNA (1)...(19): siRNA sense strand
ggauguaauugaacgauuu

SEQ ID NO: 552926 - RNA, 19 nt, Homo sapiens
  misc_RNA (1)...(19): siRNA sense strand
ucaagaauguuucacguuu

SEQ ID NO: 552927 - RNA, 19 nt, Homo sapiens
  misc_RNA (1)...(19): siRNA sense strand
aaaggaagcugaccugguu

SEQ ID NO: 552928 - RNA, 19 nt, Homo sapiens
  misc_RNA (1)...(19): siRNA sense strand
gguuacaacucaugaauug

SEQ ID NO: 552929 - RNA, 19 nt, Homo sapiens
  misc_RNA (1)...(19): siRNA sense strand
aaagagaucuacagacuuc

SEQ ID NO: 552930 - RNA, 19 nt, Homo sapiens
  misc_RNA (1)...(19): siRNA sense strand
gaagagaguacaacuacaa

SEQ ID NO: 552931 - RNA, 19 nt, Homo sapiens
  misc_RNA (1)...(19): siRNA sense strand
gcaaaggcguguccuacug

SEQ ID NO: 552932 - RNA, 19 nt, Homo sapiens
  misc_RNA (1)...(19): siRNA sense strand
gagaguacaacuacaaauu

SEQ ID NO: 552933 - RNA, 19 nt, Homo sapiens
  misc_RNA (1)...(19): siRNA sense strand
gaauacagauagagcagau

SEQ ID NO: 552934 - RNA, 19 nt, Homo sapiens
  misc_RNA (1)...(19): siRNA sense strand
aagaagagcugacccagau

SEQ ID NO: 552935 - RNA, 19 nt, Homo sapiens
  misc_RNA (1)...(19): siRNA sense strand
gaggguggaugaaggagaa

SEQ ID NO: 552936 - RNA, 19 nt, Homo sapiens
  misc_RNA (1)...(19): siRNA sense strand
gauuaaugcuacuugcaaa

SEQ ID NO: 552937 - RNA, 19 nt, Homo sapiens
  misc_RNA (1)...(19): siRNA sense strand
ggagauuuguuaaugauac

SEQ ID NO: 552938 - RNA, 19 nt, Homo sapiens
  misc_RNA (1)...(19): siRNA sense strand
gcaguaaacaaucaaucua

SEQ ID NO: 552939 - RNA, 19 nt, Homo sapiens
  misc_RNA (1)...(19): siRNA sense strand
ggaagcaucuaaaguuugc

SEQ ID NO: 552940 - RNA, 19 nt, Homo sapiens
  misc_RNA (1)...(19): siRNA sense strand
caagaauguuucacguuug

SEQ ID NO: 552941 - RNA, 19 nt, Homo sapiens
  misc_RNA (1)...(19): siRNA sense strand
cuacagacuucaacacaug

SEQ ID NO: 552942 - RNA, 19 nt, Homo sapiens
  misc_RNA (1)...(19): siRNA sense strand
gaggcagucucuccuauuc

SEQ ID NO: 552943 - RNA, 19 nt, Homo sapiens
  misc_RNA (1)...(19): siRNA sense strand
cugaagauaucaagaaugu

SEQ ID NO: 552944 - RNA, 19 nt, Homo sapiens
  misc_RNA (1)...(19): siRNA sense strand
ugacgagcacaaagaauua

SEQ ID NO: 552945 - RNA, 19 nt, Homo sapiens
  misc_RNA (1)...(19): siRNA sense strand
ccacuuuggagauuuguua

SEQ ID NO: 552946 - RNA, 19 nt, Homo sapiens
  misc_RNA (1)...(19): siRNA sense strand
caagaacgcagcaauaaag

SEQ ID NO: 552947 - RNA, 19 nt, Homo sapiens
  misc_RNA (1)...(19): siRNA sense strand
aaacugcaguaaacaauca

SEQ ID NO: 552948 - RNA, 19 nt, Homo sapiens
  misc_RNA (1)...(19): siRNA sense strand
ugaggaagcaucuaaaguu

SEQ ID NO: 552949 - RNA, 19 nt, Homo sapiens
  misc_RNA (1)...(19): siRNA sense strand
guaaggcccaggaguguuu

SEQ ID NO: 552950 - RNA, 19 nt, Homo sapiens
  misc_RNA (1)...(19): siRNA sense strand
ucauguaucugaacaacga

SEQ ID NO: 552951 - RNA, 19 nt, Homo sapiens
  misc_RNA (1)...(19): siRNA sense strand
gguaaaaccuggugaaaag

SEQ ID NO: 552952 - RNA, 19 nt, Homo sapiens
  misc_RNA (1)...(19): siRNA sense strand
gcucucagacuacgauauu

SEQ ID NO: 552953 - RNA, 19 nt, Homo sapiens
  misc_RNA (1)...(19): siRNA sense strand
cuagagcaauuuagcuuug

SEQ ID NO: 552954 - RNA, 19 nt, Homo sapiens
  misc_RNA (1)...(19): siRNA sense strand
uaacauagagccacuuugg

SEQ ID NO: 552955 - RNA, 19 nt, Homo sapiens
  misc_RNA (1)...(19): siRNA sense strand
cagcugagcaucaauacuu

SEQ ID NO: 552956 - RNA, 19 nt, Homo sapiens
  misc_RNA (1)...(19): siRNA sense strand
cuacgauauucucucuuua

SEQ ID NO: 552957 - RNA, 19 nt, Homo sapiens
  misc_RNA (1)...(19): siRNA sense strand
ugauauagcugaggaagca

SEQ ID NO: 552958 - RNA, 19 nt, Homo sapiens
  misc_RNA (1)...(19): siRNA sense strand
gagcagauucgcauucuca

SEQ ID NO: 552959 - RNA, 19 nt, Homo sapiens
  misc_RNA (1)...(19): siRNA sense strand
gaguacaacuacaaauuac

SEQ ID NO: 552960 - RNA, 19 nt, Homo sapiens
  misc_RNA (1)...(19): siRNA sense strand
caacacauguagaaacacu

SEQ ID NO: 552961 - RNA, 19 nt, Homo sapiens
  misc_RNA (1)...(19): siRNA sense strand
ggagggaaauaugucaugu

SEQ ID NO: 552962 - RNA, 19 nt, Homo sapiens
  misc_RNA (1)...(19): siRNA sense strand
guccaaaggcuuauuauag

SEQ ID NO: 552963 - RNA, 19 nt, Homo sapiens
  misc_RNA (1)...(19): siRNA sense strand
ggaagagaguacaacuaca

SEQ ID NO: 552964 - RNA, 19 nt, Homo sapiens
  misc_RNA (1)...(19): siRNA sense strand
caucaaguacugaacguuu

SEQ ID NO: 552965 - RNA, 19 nt, Homo sapiens
  misc_RNA (1)...(19): siRNA sense strand
gaccagcugagcaucaaua

SEQ ID NO: 552966 - RNA, 19 nt, Homo sapiens
  misc_RNA (1)...(19): siRNA sense strand
gcgaucacgagaacaauaa

SEQ ID NO: 552967 - RNA, 19 nt, Homo sapiens
  misc_RNA (1)...(19): siRNA sense strand
cggaacacuucaugggaua

SEQ ID NO: 552968 - RNA, 19 nt, Homo sapiens
  misc_RNA (1)...(19): siRNA sense strand
gagccacuuuggagauuug

SEQ ID NO: 552969 - RNA, 19 nt, Homo sapiens
  misc_RNA (1)...(19): siRNA sense strand
ugaagaacacguguaaauu

SEQ ID NO: 552970 - RNA, 19 nt, Homo sapiens
  misc_RNA (1)...(19): siRNA sense strand
gaaaggaaagcccuguaca

SEQ ID NO: 552971 - RNA, 19 nt, Homo sapiens
  misc_RNA (1)...(19): siRNA sense strand
acuacgauauucucucuuu

SEQ ID NO: 552972 - RNA, 19 nt, Homo sapiens
  misc_RNA (1)...(19): siRNA sense strand
agggaaauaugucauguau

SEQ ID NO: 552973 - RNA, 19 nt, Homo sapiens
  misc_RNA (1)...(19): siRNA sense strand
ccaugaagaacacguguaa

SEQ ID NO: 552974 - RNA, 19 nt, Homo sapiens
  misc_RNA (1)...(19): siRNA sense strand
gaauggcaaaugugagaaa

SEQ ID NO: 552975 - RNA, 19 nt, Homo sapiens
  misc_RNA (1)...(19): siRNA sense strand
gagcaauuuagcuuugaua

SEQ ID NO: 552976 - RNA, 19 nt, Homo sapiens
  misc_RNA (1)...(19): siRNA sense strand
uaaaggcuauggaauacag

SEQ ID NO: 552977 - RNA, 19 nt, Homo sapiens
  misc_RNA (1)...(19): siRNA sense strand
aaaguuacccaaaugaaga

SEQ ID NO: 552978 - RNA, 19 nt, Homo sapiens
  misc_RNA (1)...(19): siRNA sense strand
gcacagguaauagcaguga

SEQ ID NO: 552979 - RNA, 19 nt, Homo sapiens
  misc_RNA (1)...(19): siRNA sense strand
ggaacucgaggguggauga

SEQ ID NO: 552980 - RNA, 19 nt, Homo sapiens
  misc_RNA (1)...(19): siRNA sense strand
gaacucuuggauuagcuua

SEQ ID NO: 552981 - RNA, 19 nt, Homo sapiens
  misc_RNA (1)...(19): siRNA sense strand
gguucuagcccacauaaga

SEQ ID NO: 552982 - RNA, 19 nt, Homo sapiens
  misc_RNA (1)...(19): siRNA sense strand
guaaugaaacugacaacuc

SEQ ID NO: 552983 - RNA, 19 nt, Homo sapiens
  misc_RNA (1)...(19): siRNA sense strand
aauuauaccugacaucaag

SEQ ID NO: 552984 - RNA, 19 nt, Homo sapiens
  misc_RNA (1)...(19): siRNA sense strand
gggaagagaguacaacuac

SEQ ID NO: 552985 - RNA, 19 nt, Homo sapiens
  misc_RNA (1)...(19): siRNA sense strand
acucaugaauugggacaua

SEQ ID NO: 552986 - RNA, 19 nt, Homo sapiens
  misc_RNA (1)...(19): siRNA sense strand
ggaguccugugcauguaau

SEQ ID NO: 552987 - RNA, 19 nt, Homo sapiens
  misc_RNA (1)...(19): siRNA sense strand
ucaagaacgcagcaauaaa

SEQ ID NO: 552988 - RNA, 19 nt, Homo sapiens
  misc_RNA (1)...(19): siRNA sense strand
gagggaaauaugucaugua

SEQ ID NO: 552989 - RNA, 19 nt, Homo sapiens
  misc_RNA (1)...(19): siRNA sense strand
ccacauaagagaugaugau

SEQ ID NO: 552990 - RNA, 19 nt, Homo sapiens
  misc_RNA (1)...(19): siRNA sense strand
caaaugugagaaacgagua

SEQ ID NO: 552991 - RNA, 19 nt, Homo sapiens
  misc_RNA (1)...(19): siRNA sense strand
ggaugaaggagaagagugu

SEQ ID NO: 552992 - RNA, 19 nt, Homo sapiens
  misc_RNA (1)...(19): siRNA sense strand
ucucaagucuccacaagag

SEQ ID NO: 552993 - RNA, 19 nt, Homo sapiens
  misc_RNA (1)...(19): siRNA sense strand
ucagcauucuuguccauug

SEQ ID NO: 552994 - RNA, 19 nt, Homo sapiens
  misc_RNA (1)...(19): siRNA sense strand
uggcacaccuuuucacaua

SEQ ID NO: 552995 - RNA, 19 nt, Homo sapiens
  misc_RNA (1)...(19): siRNA sense strand
uaaucagaaucaacacaga

SEQ ID NO: 552996 - RNA, 19 nt, Homo sapiens
  misc_RNA (1)...(19): siRNA sense strand
cuaugucgaugcugaacaa

SEQ ID NO: 552997 - RNA, 19 nt, Homo sapiens
  misc_RNA (1)...(19): siRNA sense strand
gaagcugaccugguuacaa

SEQ ID NO: 552998 - RNA, 19 nt, Homo sapiens
  misc_RNA (1)...(19): siRNA sense strand
cagcagcauucgguaagaa

SEQ ID NO: 552999 - RNA, 19 nt, Homo sapiens
  misc_RNA (1)...(19): siRNA sense strand
ggaaaggaaagcccuguac

SEQ ID NO: 553000 - RNA, 19 nt, Homo sapiens
  misc_RNA (1)...(19): siRNA sense strand
agaaccaccugaagagcuu

SEQ ID NO: 553001 - RNA, 19 nt, Homo sapiens
  misc_RNA (1)...(19): siRNA sense strand
gaccagggagggaaauaug

SEQ ID NO: 553002 - RNA, 19 nt, Homo sapiens
  misc_RNA (1)...(19): siRNA sense strand
aagcugaccugguuacaac

SEQ ID NO: 553003 - RNA, 19 nt, Homo sapiens
  misc_RNA (1)...(19): siRNA sense strand
ucuaauauccagcagcauu

SEQ ID NO: 553004 - RNA, 19 nt, Homo sapiens
  misc_RNA (1)...(19): siRNA sense strand
uagcugaggaagcaucuaa

SEQ ID NO: 553005 - RNA, 19 nt, Homo sapiens
  misc_RNA (1)...(19): siRNA sense strand
ggccgaauauaacauagag

SEQ ID NO: 553006 - RNA, 19 nt, Homo sapiens
  misc_RNA (1)...(19): siRNA sense strand
aggaaagcccuguacagua

SEQ ID NO: 553007 - RNA, 19 nt, Homo sapiens
  misc_RNA (1)...(19): siRNA sense strand
gugcauguaaugaaacuga

SEQ ID NO: 553008 - RNA, 19 nt, Homo sapiens
  misc_RNA (1)...(19): siRNA sense strand
cggauggucuagcagaaug

SEQ ID NO: 553009 - RNA, 19 nt, Homo sapiens
  misc_RNA (1)...(19): siRNA sense strand
agacuacgauauucucucu

SEQ ID NO: 553010 - RNA, 19 nt, Homo sapiens
  misc_RNA (1)...(19): siRNA sense strand
augaagaguugcucccaaa

SEQ ID NO: 553011 - RNA, 19 nt, Homo sapiens
  misc_RNA (1)...(19): siRNA sense strand
gagcuaauugacagaguug

SEQ ID NO: 553012 - RNA, 19 nt, Homo sapiens
  misc_RNA (1)...(19): siRNA sense strand
uaccugacaucaaguacug

SEQ ID NO: 553013 - RNA, 19 nt, Homo sapiens
  misc_RNA (1)...(19): siRNA sense strand
gauaugggaacucuuggau

SEQ ID NO: 553014 - RNA, 19 nt, Homo sapiens
  misc_RNA (1)...(19): siRNA sense strand
gaacacuucaugggauaau

SEQ ID NO: 553015 - RNA, 19 nt, Homo sapiens
  misc_RNA (1)...(19): siRNA sense strand
gaaaggaggucaaugaaug

SEQ ID NO: 553016 - RNA, 19 nt, Homo sapiens
  misc_RNA (1)...(19): siRNA sense strand
gaaauaacaugccgaaugg

SEQ ID NO: 553017 - RNA, 19 nt, Homo sapiens
  misc_RNA (1)...(19): siRNA sense strand
ugacagaaauucccaauau

SEQ ID NO: 553018 - RNA, 19 nt, Homo sapiens
  misc_RNA (1)...(19): siRNA sense strand
ggaaaucugugcaccugua

SEQ ID NO: 553019 - RNA, 19 nt, Homo sapiens
  misc_RNA (1)...(19): siRNA sense strand
gaaggcaacccaccaauaa

SEQ ID NO: 553020 - RNA, 19 nt, Homo sapiens
  misc_RNA (1)...(19): siRNA sense strand
gaaacacauuauccacaua

SEQ ID NO: 553021 - RNA, 19 nt, Homo sapiens
  misc_RNA (1)...(19): siRNA sense strand
ggaaugguguuguugaaga

SEQ ID NO: 553022 - RNA, 19 nt, Homo sapiens
  misc_RNA (1)...(19): siRNA sense strand
gaagggaccugauauuggu

SEQ ID NO: 553023 - RNA, 19 nt, Homo sapiens
  misc_RNA (1)...(19): siRNA sense strand
gaaguucuguuaucugugu

SEQ ID NO: 553024 - RNA, 19 nt, Homo sapiens
  misc_RNA (1)...(19): siRNA sense strand
caugacaccucacaucuuu

SEQ ID NO: 553025 - RNA, 19 nt, Homo sapiens
  misc_RNA (1)...(19): siRNA sense strand
gaggauacaugucguuguu

SEQ ID NO: 553026 - RNA, 19 nt, Homo sapiens
  misc_RNA (1)...(19): siRNA sense strand
uuucacaacucuaggauua

SEQ ID NO: 553027 - RNA, 19 nt, Homo sapiens
  misc_RNA (1)...(19): siRNA sense strand
gaagcaaaguucuuaugug

SEQ ID NO: 553028 - RNA, 19 nt, Homo sapiens
  misc_RNA (1)...(19): siRNA sense strand
guagaaaggaggucaauga

SEQ ID NO: 553029 - RNA, 19 nt, Homo sapiens
  misc_RNA (1)...(19): siRNA sense strand
cagaauaacugcuacuauc

SEQ ID NO: 553030 - RNA, 19 nt, Homo sapiens
  misc_RNA (1)...(19): siRNA sense strand
gcgucgaccucaugaguua

SEQ ID NO: 553031 - RNA, 19 nt, Homo sapiens
  misc_RNA (1)...(19): siRNA sense strand
gaagauggaauucccugua

SEQ ID NO: 553032 - RNA, 19 nt, Homo sapiens
  misc_RNA (1)...(19): siRNA sense strand
gaacaucugguauacaaga

SEQ ID NO: 553033 - RNA, 19 nt, Homo sapiens
  misc_RNA (1)...(19): siRNA sense strand
ugacuuugcuuaugaaauc

SEQ ID NO: 553034 - RNA, 19 nt, Homo sapiens
  misc_RNA (1)...(19): siRNA sense strand
gaacaguguaggaggauuu

SEQ ID NO: 553035 - RNA, 19 nt, Homo sapiens
  misc_RNA (1)...(19): siRNA sense strand
uauacaagauggacaguga

SEQ ID NO: 553036 - RNA, 19 nt, Homo sapiens
  misc_RNA (1)...(19): siRNA sense strand
gcagcaagauguucaaacu

SEQ ID NO: 553037 - RNA, 19 nt, Homo sapiens
  misc_RNA (1)...(19): siRNA sense strand
gaaugguguuguugaagaa

SEQ ID NO: 553038 - RNA, 19 nt, Homo sapiens
  misc_RNA (1)...(19): siRNA sense strand
gaaaggaacgacucaaagu

SEQ ID NO: 553039 - RNA, 19 nt, Homo sapiens
  misc_RNA (1)...(19): siRNA sense strand
ccagaguggugcaauggua

SEQ ID NO: 553040 - RNA, 19 nt, Homo sapiens
  misc_RNA (1)...(19): siRNA sense strand
caaaguugcuggaggaucu

SEQ ID NO: 553041 - RNA, 19 nt, Homo sapiens
  misc_RNA (1)...(19): siRNA sense strand
gcgcaaauacugcaaguga

SEQ ID NO: 553042 - RNA, 19 nt, Homo sapiens
  misc_RNA (1)...(19): siRNA sense strand
gaggaucuauauguuauug

SEQ ID NO: 553043 - RNA, 19 nt, Homo sapiens
  misc_RNA (1)...(19): siRNA sense strand
aaagaucccugcugucugu

SEQ ID NO: 553044 - RNA, 19 nt, Homo sapiens
  misc_RNA (1)...(19): siRNA sense strand
cgaauggaauuugaagaaa

SEQ ID NO: 553045 - RNA, 19 nt, Homo sapiens
  misc_RNA (1)...(19): siRNA sense strand
aaacaucacugccauugca

SEQ ID NO: 553046 - RNA, 19 nt, Homo sapiens
  misc_RNA (1)...(19): siRNA sense strand
ucaagaagcuuuuguuuuc

SEQ ID NO: 553047 - RNA, 19 nt, Homo sapiens
  misc_RNA (1)...(19): siRNA sense strand
ucacugccauugcaauuau

SEQ ID NO: 553048 - RNA, 19 nt, Homo sapiens
  misc_RNA (1)...(19): siRNA sense strand
gacagaaauucccaauaug

SEQ ID NO: 553049 - RNA, 19 nt, Homo sapiens
  misc_RNA (1)...(19): siRNA sense strand
gcaaauacugcaagugaga

SEQ ID NO: 553050 - RNA, 19 nt, Homo sapiens
  misc_RNA (1)...(19): siRNA sense strand
ugaaauaacaugccgaaug

SEQ ID NO: 553051 - RNA, 19 nt, Homo sapiens
  misc_RNA (1)...(19): siRNA sense strand
gaacagagugugggauaga

SEQ ID NO: 553052 - RNA, 19 nt, Homo sapiens
  misc_RNA (1)...(19): siRNA sense strand
caaauugcacucugacuga

SEQ ID NO: 553053 - RNA, 19 nt, Homo sapiens
  misc_RNA (1)...(19): siRNA sense strand
ggauacaugucguuguuca

SEQ ID NO: 553054 - RNA, 19 nt, Homo sapiens
  misc_RNA (1)...(19): siRNA sense strand
guugugcaauuguuacuuu

SEQ ID NO: 553055 - RNA, 19 nt, Homo sapiens
  misc_RNA (1)...(19): siRNA sense strand
gcuggaggaucuauauguu

SEQ ID NO: 553056 - RNA, 19 nt, Homo sapiens
  misc_RNA (1)...(19): siRNA sense strand
ucaucuaggucauaauuug

SEQ ID NO: 553057 - RNA, 19 nt, Homo sapiens
  misc_RNA (1)...(19): siRNA sense strand
caaagaauugaacaccuua

SEQ ID NO: 553058 - RNA, 19 nt, Homo sapiens
  misc_RNA (1)...(19): siRNA sense strand
caggcuggcucuccuauau

SEQ ID NO: 553059 - RNA, 19 nt, Homo sapiens
  misc_RNA (1)...(19): siRNA sense strand
ggaguacugauuaccauuu

SEQ ID NO: 553060 - RNA, 19 nt, Homo sapiens
  misc_RNA (1)...(19): siRNA sense strand
gugagaaugugacagaaau

SEQ ID NO: 553061 - RNA, 19 nt, Homo sapiens
  misc_RNA (1)...(19): siRNA sense strand
acaaagaauugaacaccuu

SEQ ID NO: 553062 - RNA, 19 nt, Homo sapiens
  misc_RNA (1)...(19): siRNA sense strand
aagauggaauucccuguaa

SEQ ID NO: 553063 - RNA, 19 nt, Homo sapiens
  misc_RNA (1)...(19): siRNA sense strand
guggaagaauucaguguga

SEQ ID NO: 553064 - RNA, 19 nt, Homo sapiens
  misc_RNA (1)...(19): siRNA sense strand
guacauucguuaugaaagg

SEQ ID NO: 553065 - RNA, 19 nt, Homo sapiens
  misc_RNA (1)...(19): siRNA sense strand
ugauauuggugaagugaaa

SEQ ID NO: 553066 - RNA, 19 nt, Homo sapiens
  misc_RNA (1)...(19): siRNA sense strand
uaacaugccgaauggaauu

SEQ ID NO: 553067 - RNA, 19 nt, Homo sapiens
  misc_RNA (1)...(19): siRNA sense strand
gagacuugcuacaaagaau

SEQ ID NO: 553068 - RNA, 19 nt, Homo sapiens
  misc_RNA (1)...(19): siRNA sense strand
gggaaaguguguagaaagg

SEQ ID NO: 553069 - RNA, 19 nt, Homo sapiens
  misc_RNA (1)...(19): siRNA sense strand
gcaauuguuacuuucauga

SEQ ID NO: 553070 - RNA, 19 nt, Homo sapiens
  misc_RNA (1)...(19): siRNA sense strand
gaaauuguagucgucauug

SEQ ID NO: 553071 - RNA, 19 nt, Homo sapiens
  misc_RNA (1)...(19): siRNA sense strand
caugagauccggauuuaug

SEQ ID NO: 553072 - RNA, 19 nt, Homo sapiens
  misc_RNA (1)...(19): siRNA sense strand
ccucccaacugccugauaa

SEQ ID NO: 553073 - RNA, 19 nt, Homo sapiens
  misc_RNA (1)...(19): siRNA sense strand
gaugaagggaccugauauu

SEQ ID NO: 553074 - RNA, 19 nt, Homo sapiens
  misc_RNA (1)...(19): siRNA sense strand
gggaugaagggaccugaua

SEQ ID NO: 553075 - RNA, 19 nt, Homo sapiens
  misc_RNA (1)...(19): siRNA sense strand
gaguacugauuaccauuug

SEQ ID NO: 553076 - RNA, 19 nt, Homo sapiens
  misc_RNA (1)...(19): siRNA sense strand
gugaagcgcugugggaaug

SEQ ID NO: 553077 - RNA, 19 nt, Homo sapiens
  misc_RNA (1)...(19): siRNA sense strand
gcaacccaccaauaacuaa

SEQ ID NO: 553078 - RNA, 19 nt, Homo sapiens
  misc_RNA (1)...(19): siRNA sense strand
gcaaguggaagucggagaa

SEQ ID NO: 553079 - RNA, 19 nt, Homo sapiens
  misc_RNA (1)...(19): siRNA sense strand
ggaggucaaugaaugugau

SEQ ID NO: 553080 - RNA, 19 nt, Homo sapiens
  misc_RNA (1)...(19): siRNA sense strand
uugaacaucugguauacaa

SEQ ID NO: 553081 - RNA, 19 nt, Homo sapiens
  misc_RNA (1)...(19): siRNA sense strand
ggugaugccuucccagagu

SEQ ID NO: 553082 - RNA, 19 nt, Homo sapiens
  misc_RNA (1)...(19): siRNA sense strand
acagaaauucccaauauga

SEQ ID NO: 553083 - RNA, 19 nt, Homo sapiens
  misc_RNA (1)...(19): siRNA sense strand
caucaucuaggucauaauu

SEQ ID NO: 553084 - RNA, 19 nt, Homo sapiens
  misc_RNA (1)...(19): siRNA sense strand
caacaugacaccucacauc

SEQ ID NO: 553085 - RNA, 19 nt, Homo sapiens
  misc_RNA (1)...(19): siRNA sense strand
uggaggaucuauauguuau

SEQ ID NO: 553086 - RNA, 19 nt, Homo sapiens
  misc_RNA (1)...(19): siRNA sense strand
ggaagaauucagugugaga

SEQ ID NO: 553087 - RNA, 19 nt, Homo sapiens
  misc_RNA (1)...(19): siRNA sense strand
guagagaggacaaaguguu

SEQ ID NO: 553088 - RNA, 19 nt, Homo sapiens
  misc_RNA (1)...(19): siRNA sense strand
ugaaggcaacccaccaaua

SEQ ID NO: 553089 - RNA, 19 nt, Homo sapiens
  misc_RNA (1)...(19): siRNA sense strand
gauggacagugaggagaaa

SEQ ID NO: 553090 - RNA, 19 nt, Homo sapiens
  misc_RNA (1)...(19): siRNA sense strand
cuguguauauuguugcuua

SEQ ID NO: 553091 - RNA, 19 nt, Homo sapiens
  misc_RNA (1)...(19): siRNA sense strand
ggauagaucauauaugcau

SEQ ID NO: 553092 - RNA, 19 nt, Homo sapiens
  misc_RNA (1)...(19): siRNA sense strand
ugggauagaucauauaugc

SEQ ID NO: 553093 - RNA, 19 nt, Homo sapiens
  misc_RNA (1)...(19): siRNA sense strand
gaaccaugaugaggauaca

SEQ ID NO: 553094 - RNA, 19 nt, Homo sapiens
  misc_RNA (1)...(19): siRNA sense strand
uguaguagaugauguaagg

SEQ ID NO: 553095 - RNA, 19 nt, Homo sapiens
  misc_RNA (1)...(19): siRNA sense strand
accaugagauccggauuua

SEQ ID NO: 553096 - RNA, 19 nt, Homo sapiens
  misc_RNA (1)...(19): siRNA sense strand
caccguaguugugcaauug

SEQ ID NO: 553097 - RNA, 19 nt, Homo sapiens
  misc_RNA (1)...(19): siRNA sense strand
caauugcaguggcucauca

SEQ ID NO: 553098 - RNA, 19 nt, Homo sapiens
  misc_RNA (1)...(19): siRNA sense strand
ugcaguggcucaucaucua

SEQ ID NO: 553099 - RNA, 19 nt, Homo sapiens
  misc_RNA (1)...(19): siRNA sense strand
caggcacuguguccauaua

SEQ ID NO: 553100 - RNA, 19 nt, Homo sapiens
  misc_RNA (1)...(19): siRNA sense strand
cagggaaaguguguagaaa

SEQ ID NO: 553101 - RNA, 19 nt, Homo sapiens
  misc_RNA (1)...(19): siRNA sense strand
ccugcugucugucaaauug

SEQ ID NO: 553102 - RNA, 19 nt, Homo sapiens
  misc_RNA (1)...(19): siRNA sense strand
ggagaucuggaccaauaaa

SEQ ID NO: 553103 - RNA, 19 nt, Homo sapiens
  misc_RNA (1)...(19): siRNA sense strand
ccauauaaccaucuugaau

SEQ ID NO: 553104 - RNA, 19 nt, Homo sapiens
  misc_RNA (1)...(19): siRNA sense strand
ucgcuucaaugacauaaug

SEQ ID NO: 553105 - RNA, 19 nt, Homo sapiens
  misc_RNA (1)...(19): siRNA sense strand
gaagaauucagugugagaa

SEQ ID NO: 553106 - RNA, 19 nt, Homo sapiens
  misc_RNA (1)...(19): siRNA sense strand
agaaacacauuauccacau

SEQ ID NO: 553107 - RNA, 19 nt, Homo sapiens
  misc_RNA (1)...(19): siRNA sense strand
ugacugaugguucuacuug

SEQ ID NO: 553108 - RNA, 19 nt, Homo sapiens
  misc_RNA (1)...(19): siRNA sense strand
ggaagucggagaacauuac

SEQ ID NO: 553109 - RNA, 19 nt, Homo sapiens
  misc_RNA (1)...(19): siRNA sense strand
gggcaucugcaacaauaaa

SEQ ID NO: 553110 - RNA, 19 nt, Homo sapiens
  misc_RNA (1)...(19): siRNA sense strand
uaauugcucaccugcauuu

SEQ ID NO: 553111 - RNA, 19 nt, Homo sapiens
  misc_RNA (1)...(19): siRNA sense strand
ggaacagagugugggauag

SEQ ID NO: 553112 - RNA, 19 nt, Homo sapiens
  misc_RNA (1)...(19): siRNA sense strand
gaauaacugcuacuaucau

SEQ ID NO: 553113 - RNA, 19 nt, Homo sapiens
  misc_RNA (1)...(19): siRNA sense strand
gugugacuguggaccuuua

SEQ ID NO: 553114 - RNA, 19 nt, Homo sapiens
  misc_RNA (1)...(19): siRNA sense strand
gaccugauauuggugaagu

SEQ ID NO: 553115 - RNA, 19 nt, Homo sapiens
  misc_RNA (1)...(19): siRNA sense strand
gaaaggaggucaaugaaug

SEQ ID NO: 553116 - RNA, 19 nt, Homo sapiens
  misc_RNA (1)...(19): siRNA sense strand
gaaauaacaugccgaaugg

SEQ ID NO: 553117 - RNA, 19 nt, Homo sapiens
  misc_RNA (1)...(19): siRNA sense strand
ugacagaaauucccaauau

SEQ ID NO: 553118 - RNA, 19 nt, Homo sapiens
  misc_RNA (1)...(19): siRNA sense strand
ggaaaucugugcaccugua

SEQ ID NO: 553119 - RNA, 19 nt, Homo sapiens
  misc_RNA (1)...(19): siRNA sense strand
gaaggcaacccaccaauaa

SEQ ID NO: 553120 - RNA, 19 nt, Homo sapiens
  misc_RNA (1)...(19): siRNA sense strand
gaaacacauuauccacaua

SEQ ID NO: 553121 - RNA, 19 nt, Homo sapiens
  misc_RNA (1)...(19): siRNA sense strand
ggaaugguguuguugaaga

SEQ ID NO: 553122 - RNA, 19 nt, Homo sapiens
  misc_RNA (1)...(19): siRNA sense strand
gaagggaccugauauuggu

SEQ ID NO: 553123 - RNA, 19 nt, Homo sapiens
  misc_RNA (1)...(19): siRNA sense strand
gaaguucuguuaucugugu

SEQ ID NO: 553124 - RNA, 19 nt, Homo sapiens
  misc_RNA (1)...(19): siRNA sense strand
caugacaccucacaucuuu

SEQ ID NO: 553125 - RNA, 19 nt, Homo sapiens
  misc_RNA (1)...(19): siRNA sense strand
gaggauacaugucguuguu

SEQ ID NO: 553126 - RNA, 19 nt, Homo sapiens
  misc_RNA (1)...(19): siRNA sense strand
uuucacaacucuaggauua

SEQ ID NO: 553127 - RNA, 19 nt, Homo sapiens
  misc_RNA (1)...(19): siRNA sense strand
gaagcaaaguucuuaugug

SEQ ID NO: 553128 - RNA, 19 nt, Homo sapiens
  misc_RNA (1)...(19): siRNA sense strand
guagaaaggaggucaauga

SEQ ID NO: 553129 - RNA, 19 nt, Homo sapiens
  misc_RNA (1)...(19): siRNA sense strand
cagaauaacugcuacuauc

SEQ ID NO: 553130 - RNA, 19 nt, Homo sapiens
  misc_RNA (1)...(19): siRNA sense strand
gcgucgaccucaugaguua

SEQ ID NO: 553131 - RNA, 19 nt, Homo sapiens
  misc_RNA (1)...(19): siRNA sense strand
gaagauggaauucccugua

SEQ ID NO: 553132 - RNA, 19 nt, Homo sapiens
  misc_RNA (1)...(19): siRNA sense strand
gaacaucugguauacaaga

SEQ ID NO: 553133 - RNA, 19 nt, Homo sapiens
  misc_RNA (1)...(19): siRNA sense strand
ugacuuugcuuaugaaauc

SEQ ID NO: 553134 - RNA, 19 nt, Homo sapiens
  misc_RNA (1)...(19): siRNA sense strand
gaacaguguaggaggauuu

SEQ ID NO: 553135 - RNA, 19 nt, Homo sapiens
  misc_RNA (1)...(19): siRNA sense strand
uauacaagauggacaguga

SEQ ID NO: 553136 - RNA, 19 nt, Homo sapiens
  misc_RNA (1)...(19): siRNA sense strand
gcagcaagauguucaaacu

SEQ ID NO: 553137 - RNA, 19 nt, Homo sapiens
  misc_RNA (1)...(19): siRNA sense strand
gaaugguguuguugaagaa

SEQ ID NO: 553138 - RNA, 19 nt, Homo sapiens
  misc_RNA (1)...(19): siRNA sense strand
gaaaggaacgacucaaagu

SEQ ID NO: 553139 - RNA, 19 nt, Homo sapiens
  misc_RNA (1)...(19): siRNA sense strand
ccagaguggugcaauggua

SEQ ID NO: 553140 - RNA, 19 nt, Homo sapiens
  misc_RNA (1)...(19): siRNA sense strand
caaaguugcuggaggaucu

SEQ ID NO: 553141 - RNA, 19 nt, Homo sapiens
  misc_RNA (1)...(19): siRNA sense strand
gcgcaaauacugcaaguga

SEQ ID NO: 553142 - RNA, 19 nt, Homo sapiens
  misc_RNA (1)...(19): siRNA sense strand
gaggaucuauauguuauug

SEQ ID NO: 553143 - RNA, 19 nt, Homo sapiens
  misc_RNA (1)...(19): siRNA sense strand
aaagaucccugcugucugu

SEQ ID NO: 553144 - RNA, 19 nt, Homo sapiens
  misc_RNA (1)...(19): siRNA sense strand
cgaauggaauuugaagaaa

SEQ ID NO: 553145 - RNA, 19 nt, Homo sapiens
  misc_RNA (1)...(19): siRNA sense strand
aaacaucacugccauugca

SEQ ID NO: 553146 - RNA, 19 nt, Homo sapiens
  misc_RNA (1)...(19): siRNA sense strand
ucaagaagcuuuuguuuuc

SEQ ID NO: 553147 - RNA, 19 nt, Homo sapiens
  misc_RNA (1)...(19): siRNA sense strand
ucacugccauugcaauuau

SEQ ID NO: 553148 - RNA, 19 nt, Homo sapiens
  misc_RNA (1)...(19): siRNA sense strand
gacagaaauucccaauaug

SEQ ID NO: 553149 - RNA, 19 nt, Homo sapiens
  misc_RNA (1)...(19): siRNA sense strand
gcaaauacugcaagugaga

SEQ ID NO: 553150 - RNA, 19 nt, Homo sapiens
  misc_RNA (1)...(19): siRNA sense strand
ugaaauaacaugccgaaug

SEQ ID NO: 553151 - RNA, 19 nt, Homo sapiens
  misc_RNA (1)...(19): siRNA sense strand
gaacagagugugggauaga

SEQ ID NO: 553152 - RNA, 19 nt, Homo sapiens
  misc_RNA (1)...(19): siRNA sense strand
caaauugcacucugacuga

SEQ ID NO: 553153 - RNA, 19 nt, Homo sapiens
  misc_RNA (1)...(19): siRNA sense strand
ggauacaugucguuguuca

SEQ ID NO: 553154 - RNA, 19 nt, Homo sapiens
  misc_RNA (1)...(19): siRNA sense strand
guugugcaauuguuacuuu

SEQ ID NO: 553155 - RNA, 19 nt, Homo sapiens
  misc_RNA (1)...(19): siRNA sense strand
gcuggaggaucuauauguu

SEQ ID NO: 553156 - RNA, 19 nt, Homo sapiens
  misc_RNA (1)...(19): siRNA sense strand
ucaucuaggucauaauuug

SEQ ID NO: 553157 - RNA, 19 nt, Homo sapiens
  misc_RNA (1)...(19): siRNA sense strand
caaagaauugaacaccuua

SEQ ID NO: 553158 - RNA, 19 nt, Homo sapiens
  misc_RNA (1)...(19): siRNA sense strand
caggcuggcucuccuauau

SEQ ID NO: 553159 - RNA, 19 nt, Homo sapiens
  misc_RNA (1)...(19): siRNA sense strand
ggaguacugauuaccauuu

SEQ ID NO: 553160 - RNA, 19 nt, Homo sapiens
  misc_RNA (1)...(19): siRNA sense strand
gugagaaugugacagaaau

SEQ ID NO: 553161 - RNA, 19 nt, Homo sapiens
  misc_RNA (1)...(19): siRNA sense strand
acaaagaauugaacaccuu

SEQ ID NO: 553162 - RNA, 19 nt, Homo sapiens
  misc_RNA (1)...(19): siRNA sense strand
aagauggaauucccuguaa

SEQ ID NO: 553163 - RNA, 19 nt, Homo sapiens
  misc_RNA (1)...(19): siRNA sense strand
guggaagaauucaguguga

SEQ ID NO: 553164 - RNA, 19 nt, Homo sapiens
  misc_RNA (1)...(19): siRNA sense strand
guacauucguuaugaaagg

SEQ ID NO: 553165 - RNA, 19 nt, Homo sapiens
  misc_RNA (1)...(19): siRNA sense strand
ugauauuggugaagugaaa

SEQ ID NO: 553166 - RNA, 19 nt, Homo sapiens
  misc_RNA (1)...(19): siRNA sense strand
uaacaugccgaauggaauu

SEQ ID NO: 553167 - RNA, 19 nt, Homo sapiens
  misc_RNA (1)...(19): siRNA sense strand
gagacuugcuacaaagaau

SEQ ID NO: 553168 - RNA, 19 nt, Homo sapiens
  misc_RNA (1)...(19): siRNA sense strand
gggaaaguguguagaaagg

SEQ ID NO: 553169 - RNA, 19 nt, Homo sapiens
  misc_RNA (1)...(19): siRNA sense strand
gcaauuguuacuuucauga

SEQ ID NO: 553170 - RNA, 19 nt, Homo sapiens
  misc_RNA (1)...(19): siRNA sense strand
gaaauuguagucgucauug

SEQ ID NO: 553171 - RNA, 19 nt, Homo sapiens
  misc_RNA (1)...(19): siRNA sense strand
caugagauccggauuuaug

SEQ ID NO: 553172 - RNA, 19 nt, Homo sapiens
  misc_RNA (1)...(19): siRNA sense strand
ccucccaacugccugauaa

SEQ ID NO: 553173 - RNA, 19 nt, Homo sapiens
  misc_RNA (1)...(19): siRNA sense strand
gaugaagggaccugauauu

SEQ ID NO: 553174 - RNA, 19 nt, Homo sapiens
  misc_RNA (1)...(19): siRNA sense strand
gggaugaagggaccugaua

SEQ ID NO: 553175 - RNA, 19 nt, Homo sapiens
  misc_RNA (1)...(19): siRNA sense strand
gaguacugauuaccauuug

SEQ ID NO: 553176 - RNA, 19 nt, Homo sapiens
  misc_RNA (1)...(19): siRNA sense strand
gugaagcgcugugggaaug

SEQ ID NO: 553177 - RNA, 19 nt, Homo sapiens
  misc_RNA (1)...(19): siRNA sense strand
gcaacccaccaauaacuaa

SEQ ID NO: 553178 - RNA, 19 nt, Homo sapiens
  misc_RNA (1)...(19): siRNA sense strand
gcaaguggaagucggagaa

SEQ ID NO: 553179 - RNA, 19 nt, Homo sapiens
  misc_RNA (1)...(19): siRNA sense strand
ggaggucaaugaaugugau

SEQ ID NO: 553180 - RNA, 19 nt, Homo sapiens
  misc_RNA (1)...(19): siRNA sense strand
uugaacaucugguauacaa

SEQ ID NO: 553181 - RNA, 19 nt, Homo sapiens
  misc_RNA (1)...(19): siRNA sense strand
ggugaugccuucccagagu

SEQ ID NO: 553182 - RNA, 19 nt, Homo sapiens
  misc_RNA (1)...(19): siRNA sense strand
acagaaauucccaauauga

SEQ ID NO: 553183 - RNA, 19 nt, Homo sapiens
  misc_RNA (1)...(19): siRNA sense strand
caucaucuaggucauaauu

SEQ ID NO: 553184 - RNA, 19 nt, Homo sapiens
  misc_RNA (1)...(19): siRNA sense strand
caacaugacaccucacauc

SEQ ID NO: 553185 - RNA, 19 nt, Homo sapiens
  misc_RNA (1)...(19): siRNA sense strand
uggaggaucuauauguuau

SEQ ID NO: 553186 - RNA, 19 nt, Homo sapiens
  misc_RNA (1)...(19): siRNA sense strand
ggaagaauucagugugaga

SEQ ID NO: 553187 - RNA, 19 nt, Homo sapiens
  misc_RNA (1)...(19): siRNA sense strand
guagagaggacaaaguguu

SEQ ID NO: 553188 - RNA, 19 nt, Homo sapiens
  misc_RNA (1)...(19): siRNA sense strand
ugaaggcaacccaccaaua

SEQ ID NO: 553189 - RNA, 19 nt, Homo sapiens
  misc_RNA (1)...(19): siRNA sense strand
gauggacagugaggagaaa

SEQ ID NO: 553190 - RNA, 19 nt, Homo sapiens
  misc_RNA (1)...(19): siRNA sense strand
cuguguauauuguugcuua

SEQ ID NO: 553191 - RNA, 19 nt, Homo sapiens
  misc_RNA (1)...(19): siRNA sense strand
ggauagaucauauaugcau

SEQ ID NO: 553192 - RNA, 19 nt, Homo sapiens
  misc_RNA (1)...(19): siRNA sense strand
ugggauagaucauauaugc

SEQ ID NO: 553193 - RNA, 19 nt, Homo sapiens
  misc_RNA (1)...(19): siRNA sense strand
gaaccaugaugaggauaca

SEQ ID NO: 553194 - RNA, 19 nt, Homo sapiens
  misc_RNA (1)...(19): siRNA sense strand
uguaguagaugauguaagg

SEQ ID NO: 553195 - RNA, 19 nt, Homo sapiens
  misc_RNA (1)...(19): siRNA sense strand
accaugagauccggauuua

SEQ ID NO: 553196 - RNA, 19 nt, Homo sapiens
  misc_RNA (1)...(19): siRNA sense strand
caccguaguugugcaauug

SEQ ID NO: 553197 - RNA, 19 nt, Homo sapiens
  misc_RNA (1)...(19): siRNA sense strand
caauugcaguggcucauca

SEQ ID NO: 553198 - RNA, 19 nt, Homo sapiens
  misc_RNA (1)...(19): siRNA sense strand
ugcaguggcucaucaucua

SEQ ID NO: 553199 - RNA, 19 nt, Homo sapiens
  misc_RNA (1)...(19): siRNA sense strand
caggcacuguguccauaua

SEQ ID NO: 553200 - RNA, 19 nt, Homo sapiens
  misc_RNA (1)...(19): siRNA sense strand
cagggaaaguguguagaaa

SEQ ID NO: 553201 - RNA, 19 nt, Homo sapiens
  misc_RNA (1)...(19): siRNA sense strand
ccugcugucugucaaauug

SEQ ID NO: 553202 - RNA, 19 nt, Homo sapiens
  misc_RNA (1)...(19): siRNA sense strand
ggagaucuggaccaauaaa

SEQ ID NO: 553203 - RNA, 19 nt, Homo sapiens
  misc_RNA (1)...(19): siRNA sense strand
ccauauaaccaucuugaau

SEQ ID NO: 553204 - RNA, 19 nt, Homo sapiens
  misc_RNA (1)...(19): siRNA sense strand
ucgcuucaaugacauaaug

SEQ ID NO: 553205 - RNA, 19 nt, Homo sapiens
  misc_RNA (1)...(19): siRNA sense strand
gaagaauucagugugagaa

SEQ ID NO: 553206 - RNA, 19 nt, Homo sapiens
  misc_RNA (1)...(19): siRNA sense strand
agaaacacauuauccacau

SEQ ID NO: 553207 - RNA, 19 nt, Homo sapiens
  misc_RNA (1)...(19): siRNA sense strand
ugacugaugguucuacuug

SEQ ID NO: 553208 - RNA, 19 nt, Homo sapiens
  misc_RNA (1)...(19): siRNA sense strand
ggaagucggagaacauuac

SEQ ID NO: 553209 - RNA, 19 nt, Homo sapiens
  misc_RNA (1)...(19): siRNA sense strand
gggcaucugcaacaauaaa

SEQ ID NO: 553210 - RNA, 19 nt, Homo sapiens
  misc_RNA (1)...(19): siRNA sense strand
uaauugcucaccugcauuu

SEQ ID NO: 553211 - RNA, 19 nt, Homo sapiens
  misc_RNA (1)...(19): siRNA sense strand
ggaacagagugugggauag

SEQ ID NO: 553212 - RNA, 19 nt, Homo sapiens
  misc_RNA (1)...(19): siRNA sense strand
gaauaacugcuacuaucau

SEQ ID NO: 553213 - RNA, 19 nt, Homo sapiens
  misc_RNA (1)...(19): siRNA sense strand
gugugacuguggaccuuua

SEQ ID NO: 553214 - RNA, 19 nt, Homo sapiens
  misc_RNA (1)...(19): siRNA sense strand
gaccugauauuggugaagu

SEQ ID NO: 553215 - RNA, 19 nt, Homo sapiens
  misc_RNA (1)...(19): siRNA sense strand
gaaaggaggucaaugaaug

SEQ ID NO: 553216 - RNA, 19 nt, Homo sapiens
  misc_RNA (1)...(19): siRNA sense strand
gaaauaacaugccgaaugg

SEQ ID NO: 553217 - RNA, 19 nt, Homo sapiens
  misc_RNA (1)...(19): siRNA sense strand
ugacagaaauucccaauau

SEQ ID NO: 553218 - RNA, 19 nt, Homo sapiens
  misc_RNA (1)...(19): siRNA sense strand
ggaaaucugugcaccugua

SEQ ID NO: 553219 - RNA, 19 nt, Homo sapiens
  misc_RNA (1)...(19): siRNA sense strand
gaaggcaacccaccaauaa

SEQ ID NO: 553220 - RNA, 19 nt, Homo sapiens
  misc_RNA (1)...(19): siRNA sense strand
gaaacacauuauccacaua

SEQ ID NO: 553221 - RNA, 19 nt, Homo sapiens
  misc_RNA (1)...(19): siRNA sense strand
ggaaugguguuguugaaga

SEQ ID NO: 553222 - RNA, 19 nt, Homo sapiens
  misc_RNA (1)...(19): siRNA sense strand
gaagggaccugauauuggu

SEQ ID NO: 553223 - RNA, 19 nt, Homo sapiens
  misc_RNA (1)...(19): siRNA sense strand
gaaguucuguuaucugugu

SEQ ID NO: 553224 - RNA, 19 nt, Homo sapiens
  misc_RNA (1)...(19): siRNA sense strand
caugacaccucacaucuuu

SEQ ID NO: 553225 - RNA, 19 nt, Homo sapiens
  misc_RNA (1)...(19): siRNA sense strand
gaggauacaugucguuguu

SEQ ID NO: 553226 - RNA, 19 nt, Homo sapiens
  misc_RNA (1)...(19): siRNA sense strand
uuucacaacucuaggauua

SEQ ID NO: 553227 - RNA, 19 nt, Homo sapiens
  misc_RNA (1)...(19): siRNA sense strand
gaagcaaaguucuuaugug

SEQ ID NO: 553228 - RNA, 19 nt, Homo sapiens
  misc_RNA (1)...(19): siRNA sense strand
guagaaaggaggucaauga

SEQ ID NO: 553229 - RNA, 19 nt, Homo sapiens
  misc_RNA (1)...(19): siRNA sense strand
cagaauaacugcuacuauc

SEQ ID NO: 553230 - RNA, 19 nt, Homo sapiens
  misc_RNA (1)...(19): siRNA sense strand
gcgucgaccucaugaguua

SEQ ID NO: 553231 - RNA, 19 nt, Homo sapiens
  misc_RNA (1)...(19): siRNA sense strand
gaagauggaauucccugua

SEQ ID NO: 553232 - RNA, 19 nt, Homo sapiens
  misc_RNA (1)...(19): siRNA sense strand
gaacaucugguauacaaga

SEQ ID NO: 553233 - RNA, 19 nt, Homo sapiens
  misc_RNA (1)...(19): siRNA sense strand
ugacuuugcuuaugaaauc

SEQ ID NO: 553234 - RNA, 19 nt, Homo sapiens
  misc_RNA (1)...(19): siRNA sense strand
gaacaguguaggaggauuu

SEQ ID NO: 553235 - RNA, 19 nt, Homo sapiens
  misc_RNA (1)...(19): siRNA sense strand
uauacaagauggacaguga

SEQ ID NO: 553236 - RNA, 19 nt, Homo sapiens
  misc_RNA (1)...(19): siRNA sense strand
gcagcaagauguucaaacu

SEQ ID NO: 553237 - RNA, 19 nt, Homo sapiens
  misc_RNA (1)...(19): siRNA sense strand
gaaugguguuguugaagaa

SEQ ID NO: 553238 - RNA, 19 nt, Homo sapiens
  misc_RNA (1)...(19): siRNA sense strand
gaaaggaacgacucaaagu

SEQ ID NO: 553239 - RNA, 19 nt, Homo sapiens
  misc_RNA (1)...(19): siRNA sense strand
ccagaguggugcaauggua

SEQ ID NO: 553240 - RNA, 19 nt, Homo sapiens
  misc_RNA (1)...(19): siRNA sense strand
caaaguugcuggaggaucu

SEQ ID NO: 553241 - RNA, 19 nt, Homo sapiens
  misc_RNA (1)...(19): siRNA sense strand
gcgcaaauacugcaaguga

SEQ ID NO: 553242 - RNA, 19 nt, Homo sapiens
  misc_RNA (1)...(19): siRNA sense strand
gaggaucuauauguuauug

SEQ ID NO: 553243 - RNA, 19 nt, Homo sapiens
  misc_RNA (1)...(19): siRNA sense strand
aaagaucccugcugucugu

SEQ ID NO: 553244 - RNA, 19 nt, Homo sapiens
  misc_RNA (1)...(19): siRNA sense strand
cgaauggaauuugaagaaa

SEQ ID NO: 553245 - RNA, 19 nt, Homo sapiens
  misc_RNA (1)...(19): siRNA sense strand
aaacaucacugccauugca

SEQ ID NO: 553246 - RNA, 19 nt, Homo sapiens
  misc_RNA (1)...(19): siRNA sense strand
ucaagaagcuuuuguuuuc

SEQ ID NO: 553247 - RNA, 19 nt, Homo sapiens
  misc_RNA (1)...(19): siRNA sense strand
ucacugccauugcaauuau

SEQ ID NO: 553248 - RNA, 19 nt, Homo sapiens
  misc_RNA (1)...(19): siRNA sense strand
gacagaaauucccaauaug

SEQ ID NO: 553249 - RNA, 19 nt, Homo sapiens
  misc_RNA (1)...(19): siRNA sense strand
gcaaauacugcaagugaga

SEQ ID NO: 553250 - RNA, 19 nt, Homo sapiens
  misc_RNA (1)...(19): siRNA sense strand
ugaaauaacaugccgaaug

SEQ ID NO: 553251 - RNA, 19 nt, Homo sapiens
  misc_RNA (1)...(19): siRNA sense strand
gaacagagugugggauaga

SEQ ID NO: 553252 - RNA, 19 nt, Homo sapiens
  misc_RNA (1)...(19): siRNA sense strand
caaauugcacucugacuga

SEQ ID NO: 553253 - RNA, 19 nt, Homo sapiens
  misc_RNA (1)...(19): siRNA sense strand
ggauacaugucguuguuca

SEQ ID NO: 553254 - RNA, 19 nt, Homo sapiens
  misc_RNA (1)...(19): siRNA sense strand
guugugcaauuguuacuuu

SEQ ID NO: 553255 - RNA, 19 nt, Homo sapiens
  misc_RNA (1)...(19): siRNA sense strand
gcuggaggaucuauauguu

SEQ ID NO: 553256 - RNA, 19 nt, Homo sapiens
  misc_RNA (1)...(19): siRNA sense strand
ucaucuaggucauaauuug

SEQ ID NO: 553257 - RNA, 19 nt, Homo sapiens
  misc_RNA (1)...(19): siRNA sense strand
caaagaauugaacaccuua

SEQ ID NO: 553258 - RNA, 19 nt, Homo sapiens
  misc_RNA (1)...(19): siRNA sense strand
caggcuggcucuccuauau

SEQ ID NO: 553259 - RNA, 19 nt, Homo sapiens
  misc_RNA (1)...(19): siRNA sense strand
ggaguacugauuaccauuu

SEQ ID NO: 553260 - RNA, 19 nt, Homo sapiens
  misc_RNA (1)...(19): siRNA sense strand
gugagaaugugacagaaau

SEQ ID NO: 553261 - RNA, 19 nt, Homo sapiens
  misc_RNA (1)...(19): siRNA sense strand
acaaagaauugaacaccuu

SEQ ID NO: 553262 - RNA, 19 nt, Homo sapiens
  misc_RNA (1)...(19): siRNA sense strand
aagauggaauucccuguaa

SEQ ID NO: 553263 - RNA, 19 nt, Homo sapiens
  misc_RNA (1)...(19): siRNA sense strand
guggaagaauucaguguga

SEQ ID NO: 553264 - RNA, 19 nt, Homo sapiens
  misc_RNA (1)...(19): siRNA sense strand
guacauucguuaugaaagg

SEQ ID NO: 553265 - RNA, 19 nt, Homo sapiens
  misc_RNA (1)...(19): siRNA sense strand
ugauauuggugaagugaaa

SEQ ID NO: 553266 - RNA, 19 nt, Homo sapiens
  misc_RNA (1)...(19): siRNA sense strand
uaacaugccgaauggaauu

SEQ ID NO: 553267 - RNA, 19 nt, Homo sapiens
  misc_RNA (1)...(19): siRNA sense strand
gagacuugcuacaaagaau

SEQ ID NO: 553268 - RNA, 19 nt, Homo sapiens
  misc_RNA (1)...(19): siRNA sense strand
gggaaaguguguagaaagg

SEQ ID NO: 553269 - RNA, 19 nt, Homo sapiens
  misc_RNA (1)...(19): siRNA sense strand
gcaauuguuacuuucauga

SEQ ID NO: 553270 - RNA, 19 nt, Homo sapiens
  misc_RNA (1)...(19): siRNA sense strand
gaaauuguagucgucauug

SEQ ID NO: 553271 - RNA, 19 nt, Homo sapiens
  misc_RNA (1)...(19): siRNA sense strand
caugagauccggauuuaug

SEQ ID NO: 553272 - RNA, 19 nt, Homo sapiens
  misc_RNA (1)...(19): siRNA sense strand
ccucccaacugccugauaa

SEQ ID NO: 553273 - RNA, 19 nt, Homo sapiens
  misc_RNA (1)...(19): siRNA sense strand
gaugaagggaccugauauu

SEQ ID NO: 553274 - RNA, 19 nt, Homo sapiens
  misc_RNA (1)...(19): siRNA sense strand
gggaugaagggaccugaua

SEQ ID NO: 553275 - RNA, 19 nt, Homo sapiens
  misc_RNA (1)...(19): siRNA sense strand
gaguacugauuaccauuug

SEQ ID NO: 553276 - RNA, 19 nt, Homo sapiens
  misc_RNA (1)...(19): siRNA sense strand
gugaagcgcugugggaaug

SEQ ID NO: 553277 - RNA, 19 nt, Homo sapiens
  misc_RNA (1)...(19): siRNA sense strand
gcaacccaccaauaacuaa

SEQ ID NO: 553278 - RNA, 19 nt, Homo sapiens
  misc_RNA (1)...(19): siRNA sense strand
gcaaguggaagucggagaa

SEQ ID NO: 553279 - RNA, 19 nt, Homo sapiens
  misc_RNA (1)...(19): siRNA sense strand
ggaggucaaugaaugugau

SEQ ID NO: 553280 - RNA, 19 nt, Homo sapiens
  misc_RNA (1)...(19): siRNA sense strand
uugaacaucugguauacaa

SEQ ID NO: 553281 - RNA, 19 nt, Homo sapiens
  misc_RNA (1)...(19): siRNA sense strand
ggugaugccuucccagagu

SEQ ID NO: 553282 - RNA, 19 nt, Homo sapiens
  misc_RNA (1)...(19): siRNA sense strand
ggugaugccuucccagagu

SEQ ID NO: 553283 - RNA, 19 nt, Homo sapiens
  misc_RNA (1)...(19): siRNA sense strand
acagaaauucccaauauga

SEQ ID NO: 553284 - RNA, 19 nt, Homo sapiens
  misc_RNA (1)...(19): siRNA sense strand
caucaucuaggucauaauu

SEQ ID NO: 553285 - RNA, 19 nt, Homo sapiens
  misc_RNA (1)...(19): siRNA sense strand
caacaugacaccucacauc

SEQ ID NO: 553286 - RNA, 19 nt, Homo sapiens
  misc_RNA (1)...(19): siRNA sense strand
uggaggaucuauauguuau

SEQ ID NO: 553287 - RNA, 19 nt, Homo sapiens
  misc_RNA (1)...(19): siRNA sense strand
ggaagaauucagugugaga

SEQ ID NO: 553288 - RNA, 19 nt, Homo sapiens
  misc_RNA (1)...(19): siRNA sense strand
guagagaggacaaaguguu

SEQ ID NO: 553289 - RNA, 19 nt, Homo sapiens
  misc_RNA (1)...(19): siRNA sense strand
ugaaggcaacccaccaaua

SEQ ID NO: 553290 - RNA, 19 nt, Homo sapiens
  misc_RNA (1)...(19): siRNA sense strand
gauggacagugaggagaaa

SEQ ID NO: 553291 - RNA, 19 nt, Homo sapiens
  misc_RNA (1)...(19): siRNA sense strand
cuguguauauuguugcuua

SEQ ID NO: 553292 - RNA, 19 nt, Homo sapiens
  misc_RNA (1)...(19): siRNA sense strand
ggauagaucauauaugcau

SEQ ID NO: 553293 - RNA, 19 nt, Homo sapiens
  misc_RNA (1)...(19): siRNA sense strand
ugggauagaucauauaugc

SEQ ID NO: 553294 - RNA, 19 nt, Homo sapiens
  misc_RNA (1)...(19): siRNA sense strand
gaaccaugaugaggauaca

SEQ ID NO: 553295 - RNA, 19 nt, Homo sapiens
  misc_RNA (1)...(19): siRNA sense strand
uguaguagaugauguaagg

SEQ ID NO: 553296 - RNA, 19 nt, Homo sapiens
  misc_RNA (1)...(19): siRNA sense strand
accaugagauccggauuua

SEQ ID NO: 553297 - RNA, 19 nt, Homo sapiens
  misc_RNA (1)...(19): siRNA sense strand
caccguaguugugcaauug

SEQ ID NO: 553298 - RNA, 19 nt, Homo sapiens
  misc_RNA (1)...(19): siRNA sense strand
caauugcaguggcucauca

SEQ ID NO: 553299 - RNA, 19 nt, Homo sapiens
  misc_RNA (1)...(19): siRNA sense strand
ugcaguggcucaucaucua

SEQ ID NO: 553300 - RNA, 19 nt, Homo sapiens
  misc_RNA (1)...(19): siRNA sense strand
caggcacuguguccauaua

SEQ ID NO: 553301 - RNA, 19 nt, Homo sapiens
  misc_RNA (1)...(19): siRNA sense strand
cagggaaaguguguagaaa

SEQ ID NO: 553302 - RNA, 19 nt, Homo sapiens
  misc_RNA (1)...(19): siRNA sense strand
ccugcugucugucaaauug

SEQ ID NO: 553303 - RNA, 19 nt, Homo sapiens
  misc_RNA (1)...(19): siRNA sense strand
ggagaucuggaccaauaaa

SEQ ID NO: 553304 - RNA, 19 nt, Homo sapiens
  misc_RNA (1)...(19): siRNA sense strand
ccauauaaccaucuugaau

SEQ ID NO: 553305 - RNA, 19 nt, Homo sapiens
  misc_RNA (1)...(19): siRNA sense strand
ucgcuucaaugacauaaug

SEQ ID NO: 553306 - RNA, 19 nt, Homo sapiens
  misc_RNA (1)...(19): siRNA sense strand
gaagaauucagugugagaa

SEQ ID NO: 553307 - RNA, 19 nt, Homo sapiens
  misc_RNA (1)...(19): siRNA sense strand
agaaacacauuauccacau

SEQ ID NO: 553308 - RNA, 19 nt, Homo sapiens
  misc_RNA (1)...(19): siRNA sense strand
ugacugaugguucuacuug

SEQ ID NO: 553309 - RNA, 19 nt, Homo sapiens
  misc_RNA (1)...(19): siRNA sense strand
ggaagucggagaacauuac

SEQ ID NO: 553310 - RNA, 19 nt, Homo sapiens
  misc_RNA (1)...(19): siRNA sense strand
gggcaucugcaacaauaaa

SEQ ID NO: 553311 - RNA, 19 nt, Homo sapiens
  misc_RNA (1)...(19): siRNA sense strand
uaauugcucaccugcauuu

SEQ ID NO: 553312 - RNA, 19 nt, Homo sapiens
  misc_RNA (1)...(19): siRNA sense strand
gaauaacugcuacuaucau

SEQ ID NO: 553313 - RNA, 19 nt, Homo sapiens
  misc_RNA (1)...(19): siRNA sense strand
ggaacagagugugggauag

SEQ ID NO: 553314 - RNA, 19 nt, Homo sapiens
  misc_RNA (1)...(19): siRNA sense strand
gugugacuguggaccuuua

SEQ ID NO: 553315 - RNA, 19 nt, Homo sapiens
  misc_RNA (1)...(19): siRNA sense strand
ggaaagugcuacacauuua

SEQ ID NO: 553316 - RNA, 19 nt, Homo sapiens
  misc_RNA (1)...(19): siRNA sense strand
gaagaaggccuaugagaug

SEQ ID NO: 553317 - RNA, 19 nt, Homo sapiens
  misc_RNA (1)...(19): siRNA sense strand
gagacaagguccugggaua

SEQ ID NO: 553318 - RNA, 19 nt, Homo sapiens
  misc_RNA (1)...(19): siRNA sense strand
gcaaugggcuggacaucau

SEQ ID NO: 553319 - RNA, 19 nt, Homo sapiens
  misc_RNA (1)...(19): siRNA sense strand
gaaagugcuacacauuuaa

SEQ ID NO: 553320 - RNA, 19 nt, Homo sapiens
  misc_RNA (1)...(19): siRNA sense strand
ggccauagaugccaugcuu

SEQ ID NO: 553321 - RNA, 19 nt, Homo sapiens
  misc_RNA (1)...(19): siRNA sense strand
gggaaagugcuacacauuu

SEQ ID NO: 553322 - RNA, 19 nt, Homo sapiens
  misc_RNA (1)...(19): siRNA sense strand
ugacauggcgcaacucuau

SEQ ID NO: 553323 - RNA, 19 nt, Homo sapiens
  misc_RNA (1)...(19): siRNA sense strand
acaagguccugggauauuu

SEQ ID NO: 553324 - RNA, 19 nt, Homo sapiens
  misc_RNA (1)...(19): siRNA sense strand
gauccuagacuaccucugu

SEQ ID NO: 553325 - RNA, 19 nt, Homo sapiens
  misc_RNA (1)...(19): siRNA sense strand
gaacuucaccacgaucuuc

SEQ ID NO: 553326 - RNA, 19 nt, Homo sapiens
  misc_RNA (1)...(19): siRNA sense strand
gaaggccuaugagauguca

SEQ ID NO: 553327 - RNA, 19 nt, Homo sapiens
  misc_RNA (1)...(19): siRNA sense strand
uaccagaccuuuguuucuu

SEQ ID NO: 553328 - RNA, 19 nt, Homo sapiens
  misc_RNA (1)...(19): siRNA sense strand
gacaagguccugggauauu

SEQ ID NO: 553329 - RNA, 19 nt, Homo sapiens
  misc_RNA (1)...(19): siRNA sense strand
gcagcaggaggaauaucua

SEQ ID NO: 553330 - RNA, 19 nt, Homo sapiens
  misc_RNA (1)...(19): siRNA sense strand
cagaagaaggccuaugaga

SEQ ID NO: 553331 - RNA, 19 nt, Homo sapiens
  misc_RNA (1)...(19): siRNA sense strand
agaagaaggccuaugagau

SEQ ID NO: 553332 - RNA, 19 nt, Homo sapiens
  misc_RNA (1)...(19): siRNA sense strand
ccugcuaccuugucacaca

SEQ ID NO: 553333 - RNA, 19 nt, Homo sapiens
  misc_RNA (1)...(19): siRNA sense strand
gaugggaaagugcuacaca

SEQ ID NO: 553334 - RNA, 19 nt, Homo sapiens
  misc_RNA (1)...(19): siRNA sense strand
aagaaggccuaugagaugu

SEQ ID NO: 553335 - RNA, 19 nt, Homo sapiens
  misc_RNA (1)...(19): siRNA sense strand
cccuggacaucuucuuuga

SEQ ID NO: 553336 - RNA, 19 nt, Homo sapiens
  misc_RNA (1)...(19): siRNA sense strand
cugagagggugcgcuacua

SEQ ID NO: 553337 - RNA, 19 nt, Homo sapiens
  misc_RNA (1)...(19): siRNA sense strand
cgauugcaguucagcaucu

SEQ ID NO: 553338 - RNA, 19 nt, Homo sapiens
  misc_RNA (1)...(19): siRNA sense strand
gcuaccagaccuuuguuuc

SEQ ID NO: 553339 - RNA, 19 nt, Homo sapiens
  misc_RNA (1)...(19): siRNA sense strand
gcagaagaaggccuaugag

SEQ ID NO: 553340 - RNA, 19 nt, Homo sapiens
  misc_RNA (1)...(19): siRNA sense strand
ugggaaagugcuacacauu

SEQ ID NO: 553341 - RNA, 19 nt, Homo sapiens
  misc_RNA (1)...(19): siRNA sense strand
gcugucacccugugcaaca

SEQ ID NO: 553342 - RNA, 19 nt, Homo sapiens
  misc_RNA (1)...(19): siRNA sense strand
gcccuggacaucuucuuug

SEQ ID NO: 553343 - RNA, 19 nt, Homo sapiens
  misc_RNA (1)...(19): siRNA sense strand
ggcccuggacaucuucuuu

SEQ ID NO: 553344 - RNA, 19 nt, Homo sapiens
  misc_RNA (1)...(19): siRNA sense strand
ggacgugcagcaggaggaa

SEQ ID NO: 553345 - RNA, 19 nt, Homo sapiens
  misc_RNA (1)...(19): siRNA sense strand
ccaccgcaccugcuaccuu

SEQ ID NO: 553346 - RNA, 19 nt, Homo sapiens
  misc_RNA (1)...(19): siRNA sense strand
agagcugcuuggugacauu

SEQ ID NO: 553347 - RNA, 19 nt, Homo sapiens
  misc_RNA (1)...(19): siRNA sense strand
ggcacucccuggaugacau

SEQ ID NO: 553348 - RNA, 19 nt, Homo sapiens
  misc_RNA (1)...(19): siRNA sense strand
gagagggugcgcuacuaca

SEQ ID NO: 553349 - RNA, 19 nt, Homo sapiens
  misc_RNA (1)...(19): siRNA sense strand
agacaagguccugggauau

SEQ ID NO: 553350 - RNA, 19 nt, Homo sapiens
  misc_RNA (1)...(19): siRNA sense strand
gaggaauaucuaccugugu

SEQ ID NO: 553351 - RNA, 19 nt, Homo sapiens
  misc_RNA (1)...(19): siRNA sense strand
ggcaaugggcuggacauca

SEQ ID NO: 553352 - RNA, 19 nt, Homo sapiens
  misc_RNA (1)...(19): siRNA sense strand
ugugagguguuccgagaca

SEQ ID NO: 553353 - RNA, 19 nt, Homo sapiens
  misc_RNA (1)...(19): siRNA sense strand
agcagaagaaggccuauga

SEQ ID NO: 553354 - RNA, 19 nt, Homo sapiens
  misc_RNA (1)...(19): siRNA sense strand
aggccuacaucgcggagaa

SEQ ID NO: 553355 - RNA, 19 nt, Homo sapiens
  misc_RNA (1)...(19): siRNA sense strand
ggaaagugcuacacauuua

SEQ ID NO: 553356 - RNA, 19 nt, Homo sapiens
  misc_RNA (1)...(19): siRNA sense strand
gaagaaggccuaugagaug

SEQ ID NO: 553357 - RNA, 19 nt, Homo sapiens
  misc_RNA (1)...(19): siRNA sense strand
gagacaagguccugggaua

SEQ ID NO: 553358 - RNA, 19 nt, Homo sapiens
  misc_RNA (1)...(19): siRNA sense strand
gcaaugggcuggacaucau

SEQ ID NO: 553359 - RNA, 19 nt, Homo sapiens
  misc_RNA (1)...(19): siRNA sense strand
gaaagugcuacacauuuaa

SEQ ID NO: 553360 - RNA, 19 nt, Homo sapiens
  misc_RNA (1)...(19): siRNA sense strand
ggccauagaugccaugcuu

SEQ ID NO: 553361 - RNA, 19 nt, Homo sapiens
  misc_RNA (1)...(19): siRNA sense strand
gggaaagugcuacacauuu

SEQ ID NO: 553362 - RNA, 19 nt, Homo sapiens
  misc_RNA (1)...(19): siRNA sense strand
ugacauggcgcaacucuau

SEQ ID NO: 553363 - RNA, 19 nt, Homo sapiens
  misc_RNA (1)...(19): siRNA sense strand
acaagguccugggauauuu

SEQ ID NO: 553364 - RNA, 19 nt, Homo sapiens
  misc_RNA (1)...(19): siRNA sense strand
gauccuagacuaccucugu

SEQ ID NO: 553365 - RNA, 19 nt, Homo sapiens
  misc_RNA (1)...(19): siRNA sense strand
gaacuucaccacgaucuuc

SEQ ID NO: 553366 - RNA, 19 nt, Homo sapiens
  misc_RNA (1)...(19): siRNA sense strand
gaaggccuaugagauguca

SEQ ID NO: 553367 - RNA, 19 nt, Homo sapiens
  misc_RNA (1)...(19): siRNA sense strand
uaccagaccuuuguuucuu

SEQ ID NO: 553368 - RNA, 19 nt, Homo sapiens
  misc_RNA (1)...(19): siRNA sense strand
gacaagguccugggauauu

SEQ ID NO: 553369 - RNA, 19 nt, Homo sapiens
  misc_RNA (1)...(19): siRNA sense strand
gcagcaggaggaauaucua

SEQ ID NO: 553370 - RNA, 19 nt, Homo sapiens
  misc_RNA (1)...(19): siRNA sense strand
cagaagaaggccuaugaga

SEQ ID NO: 553371 - RNA, 19 nt, Homo sapiens
  misc_RNA (1)...(19): siRNA sense strand
agaagaaggccuaugagau

SEQ ID NO: 553372 - RNA, 19 nt, Homo sapiens
  misc_RNA (1)...(19): siRNA sense strand
ccugcuaccuugucacaca

SEQ ID NO: 553373 - RNA, 19 nt, Homo sapiens
  misc_RNA (1)...(19): siRNA sense strand
gaugggaaagugcuacaca

SEQ ID NO: 553374 - RNA, 19 nt, Homo sapiens
  misc_RNA (1)...(19): siRNA sense strand
aagaaggccuaugagaugu

SEQ ID NO: 553375 - RNA, 19 nt, Homo sapiens
  misc_RNA (1)...(19): siRNA sense strand
cccuggacaucuucuuuga

SEQ ID NO: 553376 - RNA, 19 nt, Homo sapiens
  misc_RNA (1)...(19): siRNA sense strand
cugagagggugcgcuacua

SEQ ID NO: 553377 - RNA, 19 nt, Homo sapiens
  misc_RNA (1)...(19): siRNA sense strand
cgauugcaguucagcaucu

SEQ ID NO: 553378 - RNA, 19 nt, Homo sapiens
  misc_RNA (1)...(19): siRNA sense strand
gcuaccagaccuuuguuuc

SEQ ID NO: 553379 - RNA, 19 nt, Homo sapiens
  misc_RNA (1)...(19): siRNA sense strand
gcagaagaaggccuaugag

SEQ ID NO: 553380 - RNA, 19 nt, Homo sapiens
  misc_RNA (1)...(19): siRNA sense strand
ugggaaagugcuacacauu

SEQ ID NO: 553381 - RNA, 19 nt, Homo sapiens
  misc_RNA (1)...(19): siRNA sense strand
gcugucacccugugcaaca

SEQ ID NO: 553382 - RNA, 19 nt, Homo sapiens
  misc_RNA (1)...(19): siRNA sense strand
gcccuggacaucuucuuug

SEQ ID NO: 553383 - RNA, 19 nt, Homo sapiens
  misc_RNA (1)...(19): siRNA sense strand
ggcccuggacaucuucuuu

SEQ ID NO: 553384 - RNA, 19 nt, Homo sapiens
  misc_RNA (1)...(19): siRNA sense strand
ggacgugcagcaggaggaa

SEQ ID NO: 553385 - RNA, 19 nt, Homo sapiens
  misc_RNA (1)...(19): siRNA sense strand
ccaccgcaccugcuaccuu

SEQ ID NO: 553386 - RNA, 19 nt, Homo sapiens
  misc_RNA (1)...(19): siRNA sense strand
agagcugcuuggugacauu

SEQ ID NO: 553387 - RNA, 19 nt, Homo sapiens
  misc_RNA (1)...(19): siRNA sense strand
ggcacucccuggaugacau

SEQ ID NO: 553388 - RNA, 19 nt, Homo sapiens
  misc_RNA (1)...(19): siRNA sense strand
gagagggugcgcuacuaca

SEQ ID NO: 553389 - RNA, 19 nt, Homo sapiens
  misc_RNA (1)...(19): siRNA sense strand
agacaagguccugggauau

SEQ ID NO: 553390 - RNA, 19 nt, Homo sapiens
  misc_RNA (1)...(19): siRNA sense strand
gaggaauaucuaccugugu

SEQ ID NO: 553391 - RNA, 19 nt, Homo sapiens
  misc_RNA (1)...(19): siRNA sense strand
ggcaaugggcuggacauca

SEQ ID NO: 553392 - RNA, 19 nt, Homo sapiens
  misc_RNA (1)...(19): siRNA sense strand
ugugagguguuccgagaca

SEQ ID NO: 553393 - RNA, 19 nt, Homo sapiens
  misc_RNA (1)...(19): siRNA sense strand
agcagaagaaggccuauga

SEQ ID NO: 553394 - RNA, 19 nt, Homo sapiens
  misc_RNA (1)...(19): siRNA sense strand
aggccuacaucgcggagaa

SEQ ID NO: 553395 - RNA, 19 nt, Homo sapiens
  misc_RNA (1)...(19): siRNA sense strand
ggaaagugcuacacauuua

SEQ ID NO: 553396 - RNA, 19 nt, Homo sapiens
  misc_RNA (1)...(19): siRNA sense strand
gaagaaggccuaugagaug

SEQ ID NO: 553397 - RNA, 19 nt, Homo sapiens
  misc_RNA (1)...(19): siRNA sense strand
gagacaagguccugggaua

SEQ ID NO: 553398 - RNA, 19 nt, Homo sapiens
  misc_RNA (1)...(19): siRNA sense strand
gcaaugggcuggacaucau

SEQ ID NO: 553399 - RNA, 19 nt, Homo sapiens
  misc_RNA (1)...(19): siRNA sense strand
gaaagugcuacacauuuaa

SEQ ID NO: 553400 - RNA, 19 nt, Homo sapiens
  misc_RNA (1)...(19): siRNA sense strand
ggccauagaugccaugcuu

SEQ ID NO: 553401 - RNA, 19 nt, Homo sapiens
  misc_RNA (1)...(19): siRNA sense strand
gggaaagugcuacacauuu

SEQ ID NO: 553402 - RNA, 19 nt, Homo sapiens
  misc_RNA (1)...(19): siRNA sense strand
ugacauggcgcaacucuau

SEQ ID NO: 553403 - RNA, 19 nt, Homo sapiens
  misc_RNA (1)...(19): siRNA sense strand
acaagguccugggauauuu

SEQ ID NO: 553404 - RNA, 19 nt, Homo sapiens
  misc_RNA (1)...(19): siRNA sense strand
gauccuagacuaccucugu

SEQ ID NO: 553405 - RNA, 19 nt, Homo sapiens
  misc_RNA (1)...(19): siRNA sense strand
gaacuucaccacgaucuuc

SEQ ID NO: 553406 - RNA, 19 nt, Homo sapiens
  misc_RNA (1)...(19): siRNA sense strand
gaaggccuaugagauguca

SEQ ID NO: 553407 - RNA, 19 nt, Homo sapiens
  misc_RNA (1)...(19): siRNA sense strand
uaccagaccuuuguuucuu

SEQ ID NO: 553408 - RNA, 19 nt, Homo sapiens
  misc_RNA (1)...(19): siRNA sense strand
gacaagguccugggauauu

SEQ ID NO: 553409 - RNA, 19 nt, Homo sapiens
  misc_RNA (1)...(19): siRNA sense strand
gcagcaggaggaauaucua

SEQ ID NO: 553410 - RNA, 19 nt, Homo sapiens
  misc_RNA (1)...(19): siRNA sense strand
cagaagaaggccuaugaga

SEQ ID NO: 553411 - RNA, 19 nt, Homo sapiens
  misc_RNA (1)...(19): siRNA sense strand
agaagaaggccuaugagau

SEQ ID NO: 553412 - RNA, 19 nt, Homo sapiens
  misc_RNA (1)...(19): siRNA sense strand
ccugcuaccuugucacaca

SEQ ID NO: 553413 - RNA, 19 nt, Homo sapiens
  misc_RNA (1)...(19): siRNA sense strand
gcccugacauccuggacau

SEQ ID NO: 553414 - RNA, 19 nt, Homo sapiens
  misc_RNA (1)...(19): siRNA sense strand
gaugggaaagugcuacaca

SEQ ID NO: 553415 - RNA, 19 nt, Homo sapiens
  misc_RNA (1)...(19): siRNA sense strand
aagaaggccuaugagaugu

SEQ ID NO: 553416 - RNA, 19 nt, Homo sapiens
  misc_RNA (1)...(19): siRNA sense strand
cccuggacaucuucuuuga

SEQ ID NO: 553417 - RNA, 19 nt, Homo sapiens
  misc_RNA (1)...(19): siRNA sense strand
cugagagggugcgcuacua

SEQ ID NO: 553418 - RNA, 19 nt, Homo sapiens
  misc_RNA (1)...(19): siRNA sense strand
cgauugcaguucagcaucu

SEQ ID NO: 553419 - RNA, 19 nt, Homo sapiens
  misc_RNA (1)...(19): siRNA sense strand
gcuaccagaccuuuguuuc

SEQ ID NO: 553420 - RNA, 19 nt, Homo sapiens
  misc_RNA (1)...(19): siRNA sense strand
gcagaagaaggccuaugag

SEQ ID NO: 553421 - RNA, 19 nt, Homo sapiens
  misc_RNA (1)...(19): siRNA sense strand
gcugucacccugugcaaca

SEQ ID NO: 553422 - RNA, 19 nt, Homo sapiens
  misc_RNA (1)...(19): siRNA sense strand
gcccuggacaucuucuuug

SEQ ID NO: 553423 - RNA, 19 nt, Homo sapiens
  misc_RNA (1)...(19): siRNA sense strand
ggcccuggacaucuucuuu

SEQ ID NO: 553424 - RNA, 19 nt, Homo sapiens
  misc_RNA (1)...(19): siRNA sense strand
ugggaaagugcuacacauu

SEQ ID NO: 553425 - RNA, 19 nt, Homo sapiens
  misc_RNA (1)...(19): siRNA sense strand
ggacgugcagcaggaggaa

SEQ ID NO: 553426 - RNA, 19 nt, Homo sapiens
  misc_RNA (1)...(19): siRNA sense strand
ccaccgcaccugcuaccuu

SEQ ID NO: 553427 - RNA, 19 nt, Homo sapiens
  misc_RNA (1)...(19): siRNA sense strand
agagcugcuuggugacauu

SEQ ID NO: 553428 - RNA, 19 nt, Homo sapiens
  misc_RNA (1)...(19): siRNA sense strand
ggcacucccuggaugacau

SEQ ID NO: 553429 - RNA, 19 nt, Homo sapiens
  misc_RNA (1)...(19): siRNA sense strand
gagagggugcgcuacuaca

SEQ ID NO: 553430 - RNA, 19 nt, Homo sapiens
  misc_RNA (1)...(19): siRNA sense strand
agacaagguccugggauau

SEQ ID NO: 553431 - RNA, 19 nt, Homo sapiens
  misc_RNA (1)...(19): siRNA sense strand
gaggaauaucuaccugugu

SEQ ID NO: 553432 - RNA, 19 nt, Homo sapiens
  misc_RNA (1)...(19): siRNA sense strand
ggcaaugggcuggacauca

SEQ ID NO: 553433 - RNA, 19 nt, Homo sapiens
  misc_RNA (1)...(19): siRNA sense strand
ugugagguguuccgagaca

SEQ ID NO: 553434 - RNA, 19 nt, Homo sapiens
  misc_RNA (1)...(19): siRNA sense strand
agcagaagaaggccuauga

SEQ ID NO: 553435 - RNA, 19 nt, Homo sapiens
  misc_RNA (1)...(19): siRNA sense strand
aggccuacaucgcggagaa

SEQ ID NO: 553436 - RNA, 19 nt, Homo sapiens
  misc_RNA (1)...(19): siRNA sense strand
gaugggagcugaugagaau

SEQ ID NO: 553437 - RNA, 19 nt, Homo sapiens
  misc_RNA (1)...(19): siRNA sense strand
ccaaggagcucuggcugua

SEQ ID NO: 553438 - RNA, 19 nt, Homo sapiens
  misc_RNA (1)...(19): siRNA sense strand
cagguuagaucugcaauuu

SEQ ID NO: 553439 - RNA, 19 nt, Homo sapiens
  misc_RNA (1)...(19): siRNA sense strand
ccacgacgcucucagaugu

SEQ ID NO: 553440 - RNA, 19 nt, Homo sapiens
  misc_RNA (1)...(19): siRNA sense strand
gagaggaucuugagguucu

SEQ ID NO: 553441 - RNA, 19 nt, Homo sapiens
  misc_RNA (1)...(19): siRNA sense strand
ucaaggaucugagccuaaa

SEQ ID NO: 553442 - RNA, 19 nt, Homo sapiens
  misc_RNA (1)...(19): siRNA sense strand
gguuagaucugcaauuucu

SEQ ID NO: 553443 - RNA, 19 nt, Homo sapiens
  misc_RNA (1)...(19): siRNA sense strand
cuacagagcugggcaugug

SEQ ID NO: 553444 - RNA, 19 nt, Homo sapiens
  misc_RNA (1)...(19): siRNA sense strand
gcacagaauugggcagcuu

SEQ ID NO: 553445 - RNA, 19 nt, Homo sapiens
  misc_RNA (1)...(19): siRNA sense strand
agagggagcugauguccaa

SEQ ID NO: 553446 - RNA, 19 nt, Homo sapiens
  misc_RNA (1)...(19): siRNA sense strand
gacuggaacugguaugaug

SEQ ID NO: 553447 - RNA, 19 nt, Homo sapiens
  misc_RNA (1)...(19): siRNA sense strand
gggagacgcuucuggacau

SEQ ID NO: 553448 - RNA, 19 nt, Homo sapiens
  misc_RNA (1)...(19): siRNA sense strand
gguggccucuggacgagua

SEQ ID NO: 553449 - RNA, 19 nt, Homo sapiens
  misc_RNA (1)...(19): siRNA sense strand
cagcaagaaugccuuugug

SEQ ID NO: 553450 - RNA, 19 nt, Homo sapiens
  misc_RNA (1)...(19): siRNA sense strand
gagaaucaaaguggaauga

SEQ ID NO: 553451 - RNA, 19 nt, Homo sapiens
  misc_RNA (1)...(19): siRNA sense strand
acacagcauuucuccuuga

SEQ ID NO: 553452 - RNA, 19 nt, Homo sapiens
  misc_RNA (1)...(19): siRNA sense strand
gccaggacguggagcgauu

SEQ ID NO: 553453 - RNA, 19 nt, Homo sapiens
  misc_RNA (1)...(19): siRNA sense strand
ccagcaagcucaucaucuc

SEQ ID NO: 553454 - RNA, 19 nt, Homo sapiens
  misc_RNA (1)...(19): siRNA sense strand
uggcaggccuguccaacuu

SEQ ID NO: 553455 - RNA, 19 nt, Homo sapiens
  misc_RNA (1)...(19): siRNA sense strand
caacaccuuugacuaucug

SEQ ID NO: 553456 - RNA, 19 nt, Homo sapiens
  misc_RNA (1)...(19): siRNA sense strand
gaagaugggagcugaugag

SEQ ID NO: 553457 - RNA, 19 nt, Homo sapiens
  misc_RNA (1)...(19): siRNA sense strand
gaugagaaucaaaguggaa

SEQ ID NO: 553458 - RNA, 19 nt, Homo sapiens
  misc_RNA (1)...(19): siRNA sense strand
agacacagcauuucuccuu

SEQ ID NO: 553459 - RNA, 19 nt, Homo sapiens
  misc_RNA (1)...(19): siRNA sense strand
gugagcaucuucggguauu

SEQ ID NO: 553460 - RNA, 19 nt, Homo sapiens
  misc_RNA (1)...(19): siRNA sense strand
gaaguacgcagugcuugau

SEQ ID NO: 553461 - RNA, 19 nt, Homo sapiens
  misc_RNA (1)...(19): siRNA sense strand
gaucuugagguucuuggaa

SEQ ID NO: 553462 - RNA, 19 nt, Homo sapiens
  misc_RNA (1)...(19): siRNA sense strand
gaugaugagaggaucuuga

SEQ ID NO: 553463 - RNA, 19 nt, Homo sapiens
  misc_RNA (1)...(19): siRNA sense strand
cugcagauacugaagguuu

SEQ ID NO: 553464 - RNA, 19 nt, Homo sapiens
  misc_RNA (1)...(19): siRNA sense strand
ggaagaugggagcugauga

SEQ ID NO: 553465 - RNA, 19 nt, Homo sapiens
  misc_RNA (1)...(19): siRNA sense strand
ggagccugcugcuuucuac

SEQ ID NO: 553466 - RNA, 19 nt, Homo sapiens
  misc_RNA (1)...(19): siRNA sense strand
cgaaguacgcagugcuuga

SEQ ID NO: 553467 - RNA, 19 nt, Homo sapiens
  misc_RNA (1)...(19): siRNA sense strand
gcacccuggucagcaagaa

SEQ ID NO: 553468 - RNA, 19 nt, Homo sapiens
  misc_RNA (1)...(19): siRNA sense strand
gggagcugauguccaagga

SEQ ID NO: 553469 - RNA, 19 nt, Homo sapiens
  misc_RNA (1)...(19): siRNA sense strand
ugggcagcauccugaguua

SEQ ID NO: 553470 - RNA, 19 nt, Homo sapiens
  misc_RNA (1)...(19): siRNA sense strand
cugcagagacuccuucaga

SEQ ID NO: 553471 - RNA, 19 nt, Homo sapiens
  misc_RNA (1)...(19): siRNA sense strand
guacgcagugcuugaugaa

SEQ ID NO: 553472 - RNA, 19 nt, Homo sapiens
  misc_RNA (1)...(19): siRNA sense strand
gccagcagacacagcauuu

SEQ ID NO: 553473 - RNA, 19 nt, Homo sapiens
  misc_RNA (1)...(19): siRNA sense strand
ggagacgcuucuggacaug

SEQ ID NO: 553474 - RNA, 19 nt, Homo sapiens
  misc_RNA (1)...(19): siRNA sense strand
ggucagcaagaaugccuuu

SEQ ID NO: 553475 - RNA, 19 nt, Homo sapiens
  misc_RNA (1)...(19): siRNA sense strand
ucaagcacaugcagauucg

SEQ ID NO: 553476 - RNA, 19 nt, Homo sapiens
  misc_RNA (1)...(19): siRNA sense strand
gaugcaacggcucuccuuu

SEQ ID NO: 553477 - RNA, 19 nt, Homo sapiens
  misc_RNA (1)...(19): siRNA sense strand
gcacuggcaagaccuccuu

SEQ ID NO: 553478 - RNA, 19 nt, Homo sapiens
  misc_RNA (1)...(19): siRNA sense strand
gugcuauuccugccacaaa

SEQ ID NO: 553479 - RNA, 19 nt, Homo sapiens
  misc_RNA (1)...(19): siRNA sense strand
cguucacccucgucuacua

SEQ ID NO: 553480 - RNA, 19 nt, Homo sapiens
  misc_RNA (1)...(19): siRNA sense strand
acaugucccugaagucaca

SEQ ID NO: 553481 - RNA, 19 nt, Homo sapiens
  misc_RNA (1)...(19): siRNA sense strand
ggacuggaacugguaugau

SEQ ID NO: 553482 - RNA, 19 nt, Homo sapiens
  misc_RNA (1)...(19): siRNA sense strand
uuucauuccuugguucuga

SEQ ID NO: 553483 - RNA, 19 nt, Homo sapiens
  misc_RNA (1)...(19): siRNA sense strand
gagcaucuucggguauuuc

SEQ ID NO: 553484 - RNA, 19 nt, Homo sapiens
  misc_RNA (1)...(19): siRNA sense strand
augagaggaucuugagguu

SEQ ID NO: 553485 - RNA, 19 nt, Homo sapiens
  misc_RNA (1)...(19): siRNA sense strand
aaggagcucuggcuguaca

SEQ ID NO: 553486 - RNA, 19 nt, Homo sapiens
  misc_RNA (1)...(19): siRNA sense strand
augcggagccugcugcuuu

SEQ ID NO: 553487 - RNA, 19 nt, Homo sapiens
  misc_RNA (1)...(19): siRNA sense strand
gaagcuggagggagauuuu

SEQ ID NO: 553488 - RNA, 19 nt, Homo sapiens
  misc_RNA (1)...(19): siRNA sense strand
ucuugagguucuuggaauu

SEQ ID NO: 553489 - RNA, 19 nt, Homo sapiens
  misc_RNA (1)...(19): siRNA sense strand
caucuucggguauuucauc

SEQ ID NO: 553490 - RNA, 19 nt, Homo sapiens
  misc_RNA (1)...(19): siRNA sense strand
cagguucugccgaugauga

SEQ ID NO: 553491 - RNA, 19 nt, Homo sapiens
  misc_RNA (1)...(19): siRNA sense strand
gugugcaucuaccucauca

SEQ ID NO: 553492 - RNA, 19 nt, Homo sapiens
  misc_RNA (1)...(19): siRNA sense strand
ggugauauauccccugaag

SEQ ID NO: 553493 - RNA, 19 nt, Homo sapiens
  misc_RNA (1)...(19): siRNA sense strand
aguacgcagugcuugauga

SEQ ID NO: 553494 - RNA, 19 nt, Homo sapiens
  misc_RNA (1)...(19): siRNA sense strand
uuagcacccuggucagcaa

SEQ ID NO: 553495 - RNA, 19 nt, Homo sapiens
  misc_RNA (1)...(19): siRNA sense strand
ugacaaaccccuaaucaag

SEQ ID NO: 553496 - RNA, 19 nt, Homo sapiens
  misc_RNA (1)...(19): siRNA sense strand
cagcagacacagcauuucu

SEQ ID NO: 553497 - RNA, 19 nt, Homo sapiens
  misc_RNA (1)...(19): siRNA sense strand
gagaagcuggagggagauu

SEQ ID NO: 553498 - RNA, 19 nt, Homo sapiens
  misc_RNA (1)...(19): siRNA sense strand
gcagaugcugacggacuuu

SEQ ID NO: 553499 - RNA, 19 nt, Homo sapiens
  misc_RNA (1)...(19): siRNA sense strand
uggcuacacgcacagaauu

SEQ ID NO: 553500 - RNA, 19 nt, Homo sapiens
  misc_RNA (1)...(19): siRNA sense strand
ucagcaagaaugccuuugu

SEQ ID NO: 553501 - RNA, 19 nt, Homo sapiens
  misc_RNA (1)...(19): siRNA sense strand
gccugcugcuuucuacaga

SEQ ID NO: 553502 - RNA, 19 nt, Homo sapiens
  misc_RNA (1)...(19): siRNA sense strand
ccacaaaagccauucuuca

SEQ ID NO: 553503 - RNA, 19 nt, Homo sapiens
  misc_RNA (1)...(19): siRNA sense strand
gaugggagcugaugagaau

SEQ ID NO: 553504 - RNA, 19 nt, Homo sapiens
  misc_RNA (1)...(19): siRNA sense strand
ccaaggagcucuggcugua

SEQ ID NO: 553505 - RNA, 19 nt, Homo sapiens
  misc_RNA (1)...(19): siRNA sense strand
cagguuagaucugcaauuu

SEQ ID NO: 553506 - RNA, 19 nt, Homo sapiens
  misc_RNA (1)...(19): siRNA sense strand
ccacgacgcucucagaugu

SEQ ID NO: 553507 - RNA, 19 nt, Homo sapiens
  misc_RNA (1)...(19): siRNA sense strand
gagaggaucuugagguucu

SEQ ID NO: 553508 - RNA, 19 nt, Homo sapiens
  misc_RNA (1)...(19): siRNA sense strand
ucaaggaucugagccuaaa

SEQ ID NO: 553509 - RNA, 19 nt, Homo sapiens
  misc_RNA (1)...(19): siRNA sense strand
gguuagaucugcaauuucu

SEQ ID NO: 553510 - RNA, 19 nt, Homo sapiens
  misc_RNA (1)...(19): siRNA sense strand
cuacagagcugggcaugug

SEQ ID NO: 553511 - RNA, 19 nt, Homo sapiens
  misc_RNA (1)...(19): siRNA sense strand
gcacagaauugggcagcuu

SEQ ID NO: 553512 - RNA, 19 nt, Homo sapiens
  misc_RNA (1)...(19): siRNA sense strand
agagggagcugauguccaa

SEQ ID NO: 553513 - RNA, 19 nt, Homo sapiens
  misc_RNA (1)...(19): siRNA sense strand
gacuggaacugguaugaug

SEQ ID NO: 553514 - RNA, 19 nt, Homo sapiens
  misc_RNA (1)...(19): siRNA sense strand
gggagacgcuucuggacau

SEQ ID NO: 553515 - RNA, 19 nt, Homo sapiens
  misc_RNA (1)...(19): siRNA sense strand
gguggccucuggacgagua

SEQ ID NO: 553516 - RNA, 19 nt, Homo sapiens
  misc_RNA (1)...(19): siRNA sense strand
cagcaagaaugccuuugug

SEQ ID NO: 553517 - RNA, 19 nt, Homo sapiens
  misc_RNA (1)...(19): siRNA sense strand
gagaaucaaaguggaauga

SEQ ID NO: 553518 - RNA, 19 nt, Homo sapiens
  misc_RNA (1)...(19): siRNA sense strand
acacagcauuucuccuuga

SEQ ID NO: 553519 - RNA, 19 nt, Homo sapiens
  misc_RNA (1)...(19): siRNA sense strand
gccaggacguggagcgauu

SEQ ID NO: 553520 - RNA, 19 nt, Homo sapiens
  misc_RNA (1)...(19): siRNA sense strand
ccagcaagcucaucaucuc

SEQ ID NO: 553521 - RNA, 19 nt, Homo sapiens
  misc_RNA (1)...(19): siRNA sense strand
uggcaggccuguccaacuu

SEQ ID NO: 553522 - RNA, 19 nt, Homo sapiens
  misc_RNA (1)...(19): siRNA sense strand
caacaccuuugacuaucug

SEQ ID NO: 553523 - RNA, 19 nt, Homo sapiens
  misc_RNA (1)...(19): siRNA sense strand
gaagaugggagcugaugag

SEQ ID NO: 553524 - RNA, 19 nt, Homo sapiens
  misc_RNA (1)...(19): siRNA sense strand
gaugagaaucaaaguggaa

SEQ ID NO: 553525 - RNA, 19 nt, Homo sapiens
  misc_RNA (1)...(19): siRNA sense strand
agacacagcauuucuccuu

SEQ ID NO: 553526 - RNA, 19 nt, Homo sapiens
  misc_RNA (1)...(19): siRNA sense strand
gugagcaucuucggguauu

SEQ ID NO: 553527 - RNA, 19 nt, Homo sapiens
  misc_RNA (1)...(19): siRNA sense strand
gaaguacgcagugcuugau

SEQ ID NO: 553528 - RNA, 19 nt, Homo sapiens
  misc_RNA (1)...(19): siRNA sense strand
gaucuugagguucuuggaa

SEQ ID NO: 553529 - RNA, 19 nt, Homo sapiens
  misc_RNA (1)...(19): siRNA sense strand
gaugaugagaggaucuuga

SEQ ID NO: 553530 - RNA, 19 nt, Homo sapiens
  misc_RNA (1)...(19): siRNA sense strand
cugcagauacugaagguuu

SEQ ID NO: 553531 - RNA, 19 nt, Homo sapiens
  misc_RNA (1)...(19): siRNA sense strand
ggaagaugggagcugauga

SEQ ID NO: 553532 - RNA, 19 nt, Homo sapiens
  misc_RNA (1)...(19): siRNA sense strand
ggagccugcugcuuucuac

SEQ ID NO: 553533 - RNA, 19 nt, Homo sapiens
  misc_RNA (1)...(19): siRNA sense strand
cgaaguacgcagugcuuga

SEQ ID NO: 553534 - RNA, 19 nt, Homo sapiens
  misc_RNA (1)...(19): siRNA sense strand
gcacccuggucagcaagaa

SEQ ID NO: 553535 - RNA, 19 nt, Homo sapiens
  misc_RNA (1)...(19): siRNA sense strand
gggagcugauguccaagga

SEQ ID NO: 553536 - RNA, 19 nt, Homo sapiens
  misc_RNA (1)...(19): siRNA sense strand
ugggcagcauccugaguua

SEQ ID NO: 553537 - RNA, 19 nt, Homo sapiens
  misc_RNA (1)...(19): siRNA sense strand
cugcagagacuccuucaga

SEQ ID NO: 553538 - RNA, 19 nt, Homo sapiens
  misc_RNA (1)...(19): siRNA sense strand
guacgcagugcuugaugaa

SEQ ID NO: 553539 - RNA, 19 nt, Homo sapiens
  misc_RNA (1)...(19): siRNA sense strand
gccagcagacacagcauuu

SEQ ID NO: 553540 - RNA, 19 nt, Homo sapiens
  misc_RNA (1)...(19): siRNA sense strand
ggagacgcuucuggacaug

SEQ ID NO: 553541 - RNA, 19 nt, Homo sapiens
  misc_RNA (1)...(19): siRNA sense strand
ggucagcaagaaugccuuu

SEQ ID NO: 553542 - RNA, 19 nt, Homo sapiens
  misc_RNA (1)...(19): siRNA sense strand
ucaagcacaugcagauucg

SEQ ID NO: 553543 - RNA, 19 nt, Homo sapiens
  misc_RNA (1)...(19): siRNA sense strand
gaugcaacggcucuccuuu

SEQ ID NO: 553544 - RNA, 19 nt, Homo sapiens
  misc_RNA (1)...(19): siRNA sense strand
gcacuggcaagaccuccuu

SEQ ID NO: 553545 - RNA, 19 nt, Homo sapiens
  misc_RNA (1)...(19): siRNA sense strand
gugcuauuccugccacaaa

SEQ ID NO: 553546 - RNA, 19 nt, Homo sapiens
  misc_RNA (1)...(19): siRNA sense strand
cguucacccucgucuacua

SEQ ID NO: 553547 - RNA, 19 nt, Homo sapiens
  misc_RNA (1)...(19): siRNA sense strand
acaugucccugaagucaca

SEQ ID NO: 553548 - RNA, 19 nt, Homo sapiens
  misc_RNA (1)...(19): siRNA sense strand
ggacuggaacugguaugau

SEQ ID NO: 553549 - RNA, 19 nt, Homo sapiens
  misc_RNA (1)...(19): siRNA sense strand
uuucauuccuugguucuga

SEQ ID NO: 553550 - RNA, 19 nt, Homo sapiens
  misc_RNA (1)...(19): siRNA sense strand
gagcaucuucggguauuuc

SEQ ID NO: 553551 - RNA, 19 nt, Homo sapiens
  misc_RNA (1)...(19): siRNA sense strand
augagaggaucuugagguu

SEQ ID NO: 553552 - RNA, 19 nt, Homo sapiens
  misc_RNA (1)...(19): siRNA sense strand
aaggagcucuggcuguaca

SEQ ID NO: 553553 - RNA, 19 nt, Homo sapiens
  misc_RNA (1)...(19): siRNA sense strand
augcggagccugcugcuuu

SEQ ID NO: 553554 - RNA, 19 nt, Homo sapiens
  misc_RNA (1)...(19): siRNA sense strand
gaagcuggagggagauuuu

SEQ ID NO: 553555 - RNA, 19 nt, Homo sapiens
  misc_RNA (1)...(19): siRNA sense strand
ucuugagguucuuggaauu

SEQ ID NO: 553556 - RNA, 19 nt, Homo sapiens
  misc_RNA (1)...(19): siRNA sense strand
caucuucggguauuucauc

SEQ ID NO: 553557 - RNA, 19 nt, Homo sapiens
  misc_RNA (1)...(19): siRNA sense strand
cagguucugccgaugauga

SEQ ID NO: 553558 - RNA, 19 nt, Homo sapiens
  misc_RNA (1)...(19): siRNA sense strand
gugugcaucuaccucauca

SEQ ID NO: 553559 - RNA, 19 nt, Homo sapiens
  misc_RNA (1)...(19): siRNA sense strand
ggugauauauccccugaag

SEQ ID NO: 553560 - RNA, 19 nt, Homo sapiens
  misc_RNA (1)...(19): siRNA sense strand
aguacgcagugcuugauga

SEQ ID NO: 553561 - RNA, 19 nt, Homo sapiens
  misc_RNA (1)...(19): siRNA sense strand
uuagcacccuggucagcaa

SEQ ID NO: 553562 - RNA, 19 nt, Homo sapiens
  misc_RNA (1)...(19): siRNA sense strand
ugacaaaccccuaaucaag

SEQ ID NO: 553563 - RNA, 19 nt, Homo sapiens
  misc_RNA (1)...(19): siRNA sense strand
cagcagacacagcauuucu

SEQ ID NO: 553564 - RNA, 19 nt, Homo sapiens
  misc_RNA (1)...(19): siRNA sense strand
gagaagcuggagggagauu

SEQ ID NO: 553565 - RNA, 19 nt, Homo sapiens
  misc_RNA (1)...(19): siRNA sense strand
gcagaugcugacggacuuu

SEQ ID NO: 553566 - RNA, 19 nt, Homo sapiens
  misc_RNA (1)...(19): siRNA sense strand
uggcuacacgcacagaauu

SEQ ID NO: 553567 - RNA, 19 nt, Homo sapiens
  misc_RNA (1)...(19): siRNA sense strand
ucagcaagaaugccuuugu

SEQ ID NO: 553568 - RNA, 19 nt, Homo sapiens
  misc_RNA (1)...(19): siRNA sense strand
gccugcugcuuucuacaga

SEQ ID NO: 553569 - RNA, 19 nt, Homo sapiens
  misc_RNA (1)...(19): siRNA sense strand
ccacaaaagccauucuuca

SEQ ID NO: 553570 - RNA, 19 nt, Homo sapiens
  misc_RNA (1)...(19): siRNA sense strand
gaugggagcugaugagaau

SEQ ID NO: 553571 - RNA, 19 nt, Homo sapiens
  misc_RNA (1)...(19): siRNA sense strand
ccaaggagcucuggcugua

SEQ ID NO: 553572 - RNA, 19 nt, Homo sapiens
  misc_RNA (1)...(19): siRNA sense strand
ccacgacgcucucagaugu

SEQ ID NO: 553573 - RNA, 19 nt, Homo sapiens
  misc_RNA (1)...(19): siRNA sense strand
gagaggaucuugagguucu

SEQ ID NO: 553574 - RNA, 19 nt, Homo sapiens
  misc_RNA (1)...(19): siRNA sense strand
ucaaggaucugagccuaaa

SEQ ID NO: 553575 - RNA, 19 nt, Homo sapiens
  misc_RNA (1)...(19): siRNA sense strand
cuacagagcugggcaugug

SEQ ID NO: 553576 - RNA, 19 nt, Homo sapiens
  misc_RNA (1)...(19): siRNA sense strand
gcacagaauugggcagcuu

SEQ ID NO: 553577 - RNA, 19 nt, Homo sapiens
  misc_RNA (1)...(19): siRNA sense strand
agagggagcugauguccaa

SEQ ID NO: 553578 - RNA, 19 nt, Homo sapiens
  misc_RNA (1)...(19): siRNA sense strand
gacuggaacugguaugaug

SEQ ID NO: 553579 - RNA, 19 nt, Homo sapiens
  misc_RNA (1)...(19): siRNA sense strand
gggagacgcuucuggacau

SEQ ID NO: 553580 - RNA, 19 nt, Homo sapiens
  misc_RNA (1)...(19): siRNA sense strand
gguggccucuggacgagua

SEQ ID NO: 553581 - RNA, 19 nt, Homo sapiens
  misc_RNA (1)...(19): siRNA sense strand
cagcaagaaugccuuugug

SEQ ID NO: 553582 - RNA, 19 nt, Homo sapiens
  misc_RNA (1)...(19): siRNA sense strand
gagaaucaaaguggaauga

SEQ ID NO: 553583 - RNA, 19 nt, Homo sapiens
  misc_RNA (1)...(19): siRNA sense strand
acacagcauuucuccuuga

SEQ ID NO: 553584 - RNA, 19 nt, Homo sapiens
  misc_RNA (1)...(19): siRNA sense strand
ccagcaagcucaucaucuc

SEQ ID NO: 553585 - RNA, 19 nt, Homo sapiens
  misc_RNA (1)...(19): siRNA sense strand
uggcaggccuguccaacuu

SEQ ID NO: 553586 - RNA, 19 nt, Homo sapiens
  misc_RNA (1)...(19): siRNA sense strand
caacaccuuugacuaucug

SEQ ID NO: 553587 - RNA, 19 nt, Homo sapiens
  misc_RNA (1)...(19): siRNA sense strand
gaagaugggagcugaugag

SEQ ID NO: 553588 - RNA, 19 nt, Homo sapiens
  misc_RNA (1)...(19): siRNA sense strand
gaugagaaucaaaguggaa

SEQ ID NO: 553589 - RNA, 19 nt, Homo sapiens
  misc_RNA (1)...(19): siRNA sense strand
agacacagcauuucuccuu

SEQ ID NO: 553590 - RNA, 19 nt, Homo sapiens
  misc_RNA (1)...(19): siRNA sense strand
gugagcaucuucggguauu

SEQ ID NO: 553591 - RNA, 19 nt, Homo sapiens
  misc_RNA (1)...(19): siRNA sense strand
gaaguacgcagugcuugau

SEQ ID NO: 553592 - RNA, 19 nt, Homo sapiens
  misc_RNA (1)...(19): siRNA sense strand
gaucuugagguucuuggaa

SEQ ID NO: 553593 - RNA, 19 nt, Homo sapiens
  misc_RNA (1)...(19): siRNA sense strand
gaugaugagaggaucuuga

SEQ ID NO: 553594 - RNA, 19 nt, Homo sapiens
  misc_RNA (1)...(19): siRNA sense strand
ggaagaugggagcugauga

SEQ ID NO: 553595 - RNA, 19 nt, Homo sapiens
  misc_RNA (1)...(19): siRNA sense strand
ggagccugcugcuuucuac

SEQ ID NO: 553596 - RNA, 19 nt, Homo sapiens
  misc_RNA (1)...(19): siRNA sense strand
cgaaguacgcagugcuuga

SEQ ID NO: 553597 - RNA, 19 nt, Homo sapiens
  misc_RNA (1)...(19): siRNA sense strand
gcacccuggucagcaagaa

SEQ ID NO: 553598 - RNA, 19 nt, Homo sapiens
  misc_RNA (1)...(19): siRNA sense strand
gggagcugauguccaagga

SEQ ID NO: 553599 - RNA, 19 nt, Homo sapiens
  misc_RNA (1)...(19): siRNA sense strand
ugggcagcauccugaguua

SEQ ID NO: 553600 - RNA, 19 nt, Homo sapiens
  misc_RNA (1)...(19): siRNA sense strand
cugcagagacuccuucaga

SEQ ID NO: 553601 - RNA, 19 nt, Homo sapiens
  misc_RNA (1)...(19): siRNA sense strand
guacgcagugcuugaugaa

SEQ ID NO: 553602 - RNA, 19 nt, Homo sapiens
  misc_RNA (1)...(19): siRNA sense strand
gccagcagacacagcauuu

SEQ ID NO: 553603 - RNA, 19 nt, Homo sapiens
  misc_RNA (1)...(19): siRNA sense strand
ggagacgcuucuggacaug

SEQ ID NO: 553604 - RNA, 19 nt, Homo sapiens
  misc_RNA (1)...(19): siRNA sense strand
ggucagcaagaaugccuuu

SEQ ID NO: 553605 - RNA, 19 nt, Homo sapiens
  misc_RNA (1)...(19): siRNA sense strand
ucaagcacaugcagauucg

SEQ ID NO: 553606 - RNA, 19 nt, Homo sapiens
  misc_RNA (1)...(19): siRNA sense strand
gaugcaacggcucuccuuu

SEQ ID NO: 553607 - RNA, 19 nt, Homo sapiens
  misc_RNA (1)...(19): siRNA sense strand
gcacuggcaagaccuccuu

SEQ ID NO: 553608 - RNA, 19 nt, Homo sapiens
  misc_RNA (1)...(19): siRNA sense strand
gugcuauuccugccacaaa

SEQ ID NO: 553609 - RNA, 19 nt, Homo sapiens
  misc_RNA (1)...(19): siRNA sense strand
acaugucccugaagucaca

SEQ ID NO: 553610 - RNA, 19 nt, Homo sapiens
  misc_RNA (1)...(19): siRNA sense strand
cguucacccucgucuacua

SEQ ID NO: 553611 - RNA, 19 nt, Homo sapiens
  misc_RNA (1)...(19): siRNA sense strand
ggacuggaacugguaugau

SEQ ID NO: 553612 - RNA, 19 nt, Homo sapiens
  misc_RNA (1)...(19): siRNA sense strand
uuucauuccuugguucuga

SEQ ID NO: 553613 - RNA, 19 nt, Homo sapiens
  misc_RNA (1)...(19): siRNA sense strand
augcggagccugcugcuuu

SEQ ID NO: 553614 - RNA, 19 nt, Homo sapiens
  misc_RNA (1)...(19): siRNA sense strand
augagaggaucuugagguu

SEQ ID NO: 553615 - RNA, 19 nt, Homo sapiens
  misc_RNA (1)...(19): siRNA sense strand
gagcaucuucggguauuuc

SEQ ID NO: 553616 - RNA, 19 nt, Homo sapiens
  misc_RNA (1)...(19): siRNA sense strand
aaggagcucuggcuguaca

SEQ ID NO: 553617 - RNA, 19 nt, Homo sapiens
  misc_RNA (1)...(19): siRNA sense strand
gaagcuggagggagauuuu

SEQ ID NO: 553618 - RNA, 19 nt, Homo sapiens
  misc_RNA (1)...(19): siRNA sense strand
ucuugagguucuuggaauu

SEQ ID NO: 553619 - RNA, 19 nt, Homo sapiens
  misc_RNA (1)...(19): siRNA sense strand
caucuucggguauuucauc

SEQ ID NO: 553620 - RNA, 19 nt, Homo sapiens
  misc_RNA (1)...(19): siRNA sense strand
cagguucugccgaugauga

SEQ ID NO: 553621 - RNA, 19 nt, Homo sapiens
  misc_RNA (1)...(19): siRNA sense strand
gugugcaucuaccucauca

SEQ ID NO: 553622 - RNA, 19 nt, Homo sapiens
  misc_RNA (1)...(19): siRNA sense strand
ggugauauauccccugaag

SEQ ID NO: 553623 - RNA, 19 nt, Homo sapiens
  misc_RNA (1)...(19): siRNA sense strand
aguacgcagugcuugauga

SEQ ID NO: 553624 - RNA, 19 nt, Homo sapiens
  misc_RNA (1)...(19): siRNA sense strand
uuagcacccuggucagcaa

SEQ ID NO: 553625 - RNA, 19 nt, Homo sapiens
  misc_RNA (1)...(19): siRNA sense strand
ugacaaaccccuaaucaag

SEQ ID NO: 553626 - RNA, 19 nt, Homo sapiens
  misc_RNA (1)...(19): siRNA sense strand
cagcagacacagcauuucu

SEQ ID NO: 553627 - RNA, 19 nt, Homo sapiens
  misc_RNA (1)...(19): siRNA sense strand
gagaagcuggagggagauu

SEQ ID NO: 553628 - RNA, 19 nt, Homo sapiens
  misc_RNA (1)...(19): siRNA sense strand
gcagaugcugacggacuuu

SEQ ID NO: 553629 - RNA, 19 nt, Homo sapiens
  misc_RNA (1)...(19): siRNA sense strand
uggcuacacgcacagaauu

SEQ ID NO: 553630 - RNA, 19 nt, Homo sapiens
  misc_RNA (1)...(19): siRNA sense strand
ucagcaagaaugccuuugu

SEQ ID NO: 553631 - RNA, 19 nt, Homo sapiens
  misc_RNA (1)...(19): siRNA sense strand
gccugcugcuuucuacaga

SEQ ID NO: 553632 - RNA, 19 nt, Homo sapiens
  misc_RNA (1)...(19): siRNA sense strand
ccacaaaagccauucuuca

SEQ ID NO: 553633 - RNA, 19 nt, Homo sapiens
  misc_RNA (1)...(19): siRNA sense strand
ccaaggagcucuggcugua

SEQ ID NO: 553634 - RNA, 19 nt, Homo sapiens
  misc_RNA (1)...(19): siRNA sense strand
cagguuagaucugcaauuu

SEQ ID NO: 553635 - RNA, 19 nt, Homo sapiens
  misc_RNA (1)...(19): siRNA sense strand
ccacgacgcucucagaugu

SEQ ID NO: 553636 - RNA, 19 nt, Homo sapiens
  misc_RNA (1)...(19): siRNA sense strand
gagaggaucuugagguucu

SEQ ID NO: 553637 - RNA, 19 nt, Homo sapiens
  misc_RNA (1)...(19): siRNA sense strand
ucaaggaucugagccuaaa

SEQ ID NO: 553638 - RNA, 19 nt, Homo sapiens
  misc_RNA (1)...(19): siRNA sense strand
gguuagaucugcaauuucu

SEQ ID NO: 553639 - RNA, 19 nt, Homo sapiens
  misc_RNA (1)...(19): siRNA sense strand
cuacagagcugggcaugug

SEQ ID NO: 553640 - RNA, 19 nt, Homo sapiens
  misc_RNA (1)...(19): siRNA sense strand
gcacagaauugggcagcuu

SEQ ID NO: 553641 - RNA, 19 nt, Homo sapiens
  misc_RNA (1)...(19): siRNA sense strand
agagggagcugauguccaa

SEQ ID NO: 553642 - RNA, 19 nt, Homo sapiens
  misc_RNA (1)...(19): siRNA sense strand
gacuggaacugguaugaug

SEQ ID NO: 553643 - RNA, 19 nt, Homo sapiens
  misc_RNA (1)...(19): siRNA sense strand
gggagacgcuucuggacau

SEQ ID NO: 553644 - RNA, 19 nt, Homo sapiens
  misc_RNA (1)...(19): siRNA sense strand
gguggccucuggacgagua

SEQ ID NO: 553645 - RNA, 19 nt, Homo sapiens
  misc_RNA (1)...(19): siRNA sense strand
cagcaagaaugccuuugug

SEQ ID NO: 553646 - RNA, 19 nt, Homo sapiens
  misc_RNA (1)...(19): siRNA sense strand
acacagcauuucuccuuga

SEQ ID NO: 553647 - RNA, 19 nt, Homo sapiens
  misc_RNA (1)...(19): siRNA sense strand
gccaggacguggagcgauu

SEQ ID NO: 553648 - RNA, 19 nt, Homo sapiens
  misc_RNA (1)...(19): siRNA sense strand
ccagcaagcucaucaucuc

SEQ ID NO: 553649 - RNA, 19 nt, Homo sapiens
  misc_RNA (1)...(19): siRNA sense strand
uggcaggccuguccaacuu

SEQ ID NO: 553650 - RNA, 19 nt, Homo sapiens
  misc_RNA (1)...(19): siRNA sense strand
caacaccuuugacuaucug

SEQ ID NO: 553651 - RNA, 19 nt, Homo sapiens
  misc_RNA (1)...(19): siRNA sense strand
agacacagcauuucuccuu

SEQ ID NO: 553652 - RNA, 19 nt, Homo sapiens
  misc_RNA (1)...(19): siRNA sense strand
gugagcaucuucggguauu

SEQ ID NO: 553653 - RNA, 19 nt, Homo sapiens
  misc_RNA (1)...(19): siRNA sense strand
gaaguacgcagugcuugau

SEQ ID NO: 553654 - RNA, 19 nt, Homo sapiens
  misc_RNA (1)...(19): siRNA sense strand
gaucuugagguucuuggaa

SEQ ID NO: 553655 - RNA, 19 nt, Homo sapiens
  misc_RNA (1)...(19): siRNA sense strand
gaugaugagaggaucuuga

SEQ ID NO: 553656 - RNA, 19 nt, Homo sapiens
  misc_RNA (1)...(19): siRNA sense strand
cugcagauacugaagguuu

SEQ ID NO: 553657 - RNA, 19 nt, Homo sapiens
  misc_RNA (1)...(19): siRNA sense strand
ggagccugcugcuuucuac

SEQ ID NO: 553658 - RNA, 19 nt, Homo sapiens
  misc_RNA (1)...(19): siRNA sense strand
cgaaguacgcagugcuuga

SEQ ID NO: 553659 - RNA, 19 nt, Homo sapiens
  misc_RNA (1)...(19): siRNA sense strand
gcacccuggucagcaagaa

SEQ ID NO: 553660 - RNA, 19 nt, Homo sapiens
  misc_RNA (1)...(19): siRNA sense strand
gggagcugauguccaagga

SEQ ID NO: 553661 - RNA, 19 nt, Homo sapiens
  misc_RNA (1)...(19): siRNA sense strand
ugggcagcauccugaguua

SEQ ID NO: 553662 - RNA, 19 nt, Homo sapiens
  misc_RNA (1)...(19): siRNA sense strand
cugcagagacuccuucaga

SEQ ID NO: 553663 - RNA, 19 nt, Homo sapiens
  misc_RNA (1)...(19): siRNA sense strand
guacgcagugcuugaugaa

SEQ ID NO: 553664 - RNA, 19 nt, Homo sapiens
  misc_RNA (1)...(19): siRNA sense strand
gccagcagacacagcauuu

SEQ ID NO: 553665 - RNA, 19 nt, Homo sapiens
  misc_RNA (1)...(19): siRNA sense strand
ggagacgcuucuggacaug

SEQ ID NO: 553666 - RNA, 19 nt, Homo sapiens
  misc_RNA (1)...(19): siRNA sense strand
ggucagcaagaaugccuuu

SEQ ID NO: 553667 - RNA, 19 nt, Homo sapiens
  misc_RNA (1)...(19): siRNA sense strand
ucaagcacaugcagauucg

SEQ ID NO: 553668 - RNA, 19 nt, Homo sapiens
  misc_RNA (1)...(19): siRNA sense strand
gaugcaacggcucuccuuu

SEQ ID NO: 553669 - RNA, 19 nt, Homo sapiens
  misc_RNA (1)...(19): siRNA sense strand
gcacuggcaagaccuccuu

SEQ ID NO: 553670 - RNA, 19 nt, Homo sapiens
  misc_RNA (1)...(19): siRNA sense strand
gugcuauuccugccacaaa

SEQ ID NO: 553671 - RNA, 19 nt, Homo sapiens
  misc_RNA (1)...(19): siRNA sense strand
cguucacccucgucuacua

SEQ ID NO: 553672 - RNA, 19 nt, Homo sapiens
  misc_RNA (1)...(19): siRNA sense strand
acaugucccugaagucaca

SEQ ID NO: 553673 - RNA, 19 nt, Homo sapiens
  misc_RNA (1)...(19): siRNA sense strand
ggacuggaacugguaugau

SEQ ID NO: 553674 - RNA, 19 nt, Homo sapiens
  misc_RNA (1)...(19): siRNA sense strand
gagcaucuucggguauuuc

SEQ ID NO: 553675 - RNA, 19 nt, Homo sapiens
  misc_RNA (1)...(19): siRNA sense strand
augagaggaucuugagguu

SEQ ID NO: 553676 - RNA, 19 nt, Homo sapiens
  misc_RNA (1)...(19): siRNA sense strand
aaggagcucuggcuguaca

SEQ ID NO: 553677 - RNA, 19 nt, Homo sapiens
  misc_RNA (1)...(19): siRNA sense strand
augcggagccugcugcuuu

SEQ ID NO: 553678 - RNA, 19 nt, Homo sapiens
  misc_RNA (1)...(19): siRNA sense strand
gaagcuggagggagauuuu

SEQ ID NO: 553679 - RNA, 19 nt, Homo sapiens
  misc_RNA (1)...(19): siRNA sense strand
ucuugagguucuuggaauu

SEQ ID NO: 553680 - RNA, 19 nt, Homo sapiens
  misc_RNA (1)...(19): siRNA sense strand
caucuucggguauuucauc

SEQ ID NO: 553681 - RNA, 19 nt, Homo sapiens
  misc_RNA (1)...(19): siRNA sense strand
cagguucugccgaugauga

SEQ ID NO: 553682 - RNA, 19 nt, Homo sapiens
  misc_RNA (1)...(19): siRNA sense strand
gugugcaucuaccucauca

SEQ ID NO: 553683 - RNA, 19 nt, Homo sapiens
  misc_RNA (1)...(19): siRNA sense strand
ggugauauauccccugaag

SEQ ID NO: 553684 - RNA, 19 nt, Homo sapiens
  misc_RNA (1)...(19): siRNA sense strand
aguacgcagugcuugauga

SEQ ID NO: 553685 - RNA, 19 nt, Homo sapiens
  misc_RNA (1)...(19): siRNA sense strand
uuagcacccuggucagcaa

SEQ ID NO: 553686 - RNA, 19 nt, Homo sapiens
  misc_RNA (1)...(19): siRNA sense strand
ugacaaaccccuaaucaag

SEQ ID NO: 553687 - RNA, 19 nt, Homo sapiens
  misc_RNA (1)...(19): siRNA sense strand
cagcagacacagcauuucu

SEQ ID NO: 553688 - RNA, 19 nt, Homo sapiens
  misc_RNA (1)...(19): siRNA sense strand
gagaagcuggagggagauu

SEQ ID NO: 553689 - RNA, 19 nt, Homo sapiens
  misc_RNA (1)...(19): siRNA sense strand
gcagaugcugacggacuuu

SEQ ID NO: 553690 - RNA, 19 nt, Homo sapiens
  misc_RNA (1)...(19): siRNA sense strand
uggcuacacgcacagaauu

SEQ ID NO: 553691 - RNA, 19 nt, Homo sapiens
  misc_RNA (1)...(19): siRNA sense strand
ucagcaagaaugccuuugu

SEQ ID NO: 553692 - RNA, 19 nt, Homo sapiens
  misc_RNA (1)...(19): siRNA sense strand
gccugcugcuuucuacaga

SEQ ID NO: 553693 - RNA, 19 nt, Homo sapiens
  misc_RNA (1)...(19): siRNA sense strand
ccacaaaagccauucuuca

SEQ ID NO: 553694 - RNA, 19 nt, Homo sapiens
  misc_RNA (1)...(19): siRNA sense strand
ccaaggagcucuggcugua

SEQ ID NO: 553695 - RNA, 19 nt, Homo sapiens
  misc_RNA (1)...(19): siRNA sense strand
cagguuagaucugcaauuu

SEQ ID NO: 553696 - RNA, 19 nt, Homo sapiens
  misc_RNA (1)...(19): siRNA sense strand
ccacgacgcucucagaugu

SEQ ID NO: 553697 - RNA, 19 nt, Homo sapiens
  misc_RNA (1)...(19): siRNA sense strand
ucaaggaucugagccuaaa

SEQ ID NO: 553698 - RNA, 19 nt, Homo sapiens
  misc_RNA (1)...(19): siRNA sense strand
gguuagaucugcaauuucu

SEQ ID NO: 553699 - RNA, 19 nt, Homo sapiens
  misc_RNA (1)...(19): siRNA sense strand
cuacagagcugggcaugug

SEQ ID NO: 553700 - RNA, 19 nt, Homo sapiens
  misc_RNA (1)...(19): siRNA sense strand
gcacagaauugggcagcuu

SEQ ID NO: 553701 - RNA, 19 nt, Homo sapiens
  misc_RNA (1)...(19): siRNA sense strand
agagggagcugauguccaa

SEQ ID NO: 553702 - RNA, 19 nt, Homo sapiens
  misc_RNA (1)...(19): siRNA sense strand
gggagacgcuucuggacau

SEQ ID NO: 553703 - RNA, 19 nt, Homo sapiens
  misc_RNA (1)...(19): siRNA sense strand
gguggccucuggacgagua

SEQ ID NO: 553704 - RNA, 19 nt, Homo sapiens
  misc_RNA (1)...(19): siRNA sense strand
cagcaagaaugccuuugug

SEQ ID NO: 553705 - RNA, 19 nt, Homo sapiens
  misc_RNA (1)...(19): siRNA sense strand
acacagcauuucuccuuga

SEQ ID NO: 553706 - RNA, 19 nt, Homo sapiens
  misc_RNA (1)...(19): siRNA sense strand
gccaggacguggagcgauu

SEQ ID NO: 553707 - RNA, 19 nt, Homo sapiens
  misc_RNA (1)...(19): siRNA sense strand
ccagcaagcucaucaucuc

SEQ ID NO: 553708 - RNA, 19 nt, Homo sapiens
  misc_RNA (1)...(19): siRNA sense strand
caacaccuuugacuaucug

SEQ ID NO: 553709 - RNA, 19 nt, Homo sapiens
  misc_RNA (1)...(19): siRNA sense strand
agacacagcauuucuccuu

SEQ ID NO: 553710 - RNA, 19 nt, Homo sapiens
  misc_RNA (1)...(19): siRNA sense strand
gugagcaucuucggguauu

SEQ ID NO: 553711 - RNA, 19 nt, Homo sapiens
  misc_RNA (1)...(19): siRNA sense strand
cugcagauacugaagguuu

SEQ ID NO: 553712 - RNA, 19 nt, Homo sapiens
  misc_RNA (1)...(19): siRNA sense strand
ggagccugcugcuuucuac

SEQ ID NO: 553713 - RNA, 19 nt, Homo sapiens
  misc_RNA (1)...(19): siRNA sense strand
gcacccuggucagcaagaa

SEQ ID NO: 553714 - RNA, 19 nt, Homo sapiens
  misc_RNA (1)...(19): siRNA sense strand
gggagcugauguccaagga

SEQ ID NO: 553715 - RNA, 19 nt, Homo sapiens
  misc_RNA (1)...(19): siRNA sense strand
ugggcagcauccugaguua

SEQ ID NO: 553716 - RNA, 19 nt, Homo sapiens
  misc_RNA (1)...(19): siRNA sense strand
cugcagagacuccuucaga

SEQ ID NO: 553717 - RNA, 19 nt, Homo sapiens
  misc_RNA (1)...(19): siRNA sense strand
gccagcagacacagcauuu

SEQ ID NO: 553718 - RNA, 19 nt, Homo sapiens
  misc_RNA (1)...(19): siRNA sense strand
ggagacgcuucuggacaug

SEQ ID NO: 553719 - RNA, 19 nt, Homo sapiens
  misc_RNA (1)...(19): siRNA sense strand
ggucagcaagaaugccuuu

SEQ ID NO: 553720 - RNA, 19 nt, Homo sapiens
  misc_RNA (1)...(19): siRNA sense strand
ucaagcacaugcagauucg

SEQ ID NO: 553721 - RNA, 19 nt, Homo sapiens
  misc_RNA (1)...(19): siRNA sense strand
gcacuggcaagaccuccuu

SEQ ID NO: 553722 - RNA, 19 nt, Homo sapiens
  misc_RNA (1)...(19): siRNA sense strand
gugcuauuccugccacaaa

SEQ ID NO: 553723 - RNA, 19 nt, Homo sapiens
  misc_RNA (1)...(19): siRNA sense strand
cguucacccucgucuacua

SEQ ID NO: 553724 - RNA, 19 nt, Homo sapiens
  misc_RNA (1)...(19): siRNA sense strand
acaugucccugaagucaca

SEQ ID NO: 553725 - RNA, 19 nt, Homo sapiens
  misc_RNA (1)...(19): siRNA sense strand
gagcaucuucggguauuuc

SEQ ID NO: 553726 - RNA, 19 nt, Homo sapiens
  misc_RNA (1)...(19): siRNA sense strand
aaggagcucuggcuguaca

SEQ ID NO: 553727 - RNA, 19 nt, Homo sapiens
  misc_RNA (1)...(19): siRNA sense strand
augcggagccugcugcuuu

SEQ ID NO: 553728 - RNA, 19 nt, Homo sapiens
  misc_RNA (1)...(19): siRNA sense strand
gaagcuggagggagauuuu

SEQ ID NO: 553729 - RNA, 19 nt, Homo sapiens
  misc_RNA (1)...(19): siRNA sense strand
caucuucggguauuucauc

SEQ ID NO: 553730 - RNA, 19 nt, Homo sapiens
  misc_RNA (1)...(19): siRNA sense strand
gugugcaucuaccucauca

SEQ ID NO: 553731 - RNA, 19 nt, Homo sapiens
  misc_RNA (1)...(19): siRNA sense strand
uuagcacccuggucagcaa

SEQ ID NO: 553732 - RNA, 19 nt, Homo sapiens
  misc_RNA (1)...(19): siRNA sense strand
ugacaaaccccuaaucaag

SEQ ID NO: 553733 - RNA, 19 nt, Homo sapiens
  misc_RNA (1)...(19): siRNA sense strand
cagcagacacagcauuucu

SEQ ID NO: 553734 - RNA, 19 nt, Homo sapiens
  misc_RNA (1)...(19): siRNA sense strand
gagaagcuggagggagauu

SEQ ID NO: 553735 - RNA, 19 nt, Homo sapiens
  misc_RNA (1)...(19): siRNA sense strand
gcagaugcugacggacuuu

SEQ ID NO: 553736 - RNA, 19 nt, Homo sapiens
  misc_RNA (1)...(19): siRNA sense strand
uggcuacacgcacagaauu

SEQ ID NO: 553737 - RNA, 19 nt, Homo sapiens
  misc_RNA (1)...(19): siRNA sense strand
ucagcaagaaugccuuugu

SEQ ID NO: 553738 - RNA, 19 nt, Homo sapiens
  misc_RNA (1)...(19): siRNA sense strand
gccugcugcuuucuacaga

SEQ ID NO: 553739 - RNA, 19 nt, Homo sapiens
  misc_RNA (1)...(19): siRNA sense strand
ccacaaaagccauucuuca

SEQ ID NO: 553740 - RNA, 19 nt, Homo sapiens
  misc_RNA (1)...(19): siRNA sense strand
gaaacacuuugacuccuuu

SEQ ID NO: 553741 - RNA, 19 nt, Homo sapiens
  misc_RNA (1)...(19): siRNA sense strand
gagcacgggucccuguuug

SEQ ID NO: 553742 - RNA, 19 nt, Homo sapiens
  misc_RNA (1)...(19): siRNA sense strand
gcucgaagaugcaauucug

SEQ ID NO: 553743 - RNA, 19 nt, Homo sapiens
  misc_RNA (1)...(19): siRNA sense strand
gguacacagugacaauuga

SEQ ID NO: 553744 - RNA, 19 nt, Homo sapiens
  misc_RNA (1)...(19): siRNA sense strand
acgggucccuguuugauua

SEQ ID NO: 553745 - RNA, 19 nt, Homo sapiens
  misc_RNA (1)...(19): siRNA sense strand
gcaacaggaucgacuugag

SEQ ID NO: 553746 - RNA, 19 nt, Homo sapiens
  misc_RNA (1)...(19): siRNA sense strand
uggaagaucccucauguga

SEQ ID NO: 553747 - RNA, 19 nt, Homo sapiens
  misc_RNA (1)...(19): siRNA sense strand
acaagacgcuccaggaucu

SEQ ID NO: 553748 - RNA, 19 nt, Homo sapiens
  misc_RNA (1)...(19): siRNA sense strand
guucagggaagcagagaua

SEQ ID NO: 553749 - RNA, 19 nt, Homo sapiens
  misc_RNA (1)...(19): siRNA sense strand
aauauucucuucucgugaa

SEQ ID NO: 553750 - RNA, 19 nt, Homo sapiens
  misc_RNA (1)...(19): siRNA sense strand
ugaaacacuuugacuccuu

SEQ ID NO: 553751 - RNA, 19 nt, Homo sapiens
  misc_RNA (1)...(19): siRNA sense strand
guacuugaugaaaccauua

SEQ ID NO: 553752 - RNA, 19 nt, Homo sapiens
  misc_RNA (1)...(19): siRNA sense strand
ugauuaagcuggccuuguc

SEQ ID NO: 553753 - RNA, 19 nt, Homo sapiens
  misc_RNA (1)...(19): siRNA sense strand
agaugugucucuccaaaga

SEQ ID NO: 553754 - RNA, 19 nt, Homo sapiens
  misc_RNA (1)...(19): siRNA sense strand
caagggaagccuggaauug

SEQ ID NO: 553755 - RNA, 19 nt, Homo sapiens
  misc_RNA (1)...(19): siRNA sense strand
gcuuguauauugggagauu

SEQ ID NO: 553756 - RNA, 19 nt, Homo sapiens
  misc_RNA (1)...(19): siRNA sense strand
ucagggaagcagagauaua

SEQ ID NO: 553757 - RNA, 19 nt, Homo sapiens
  misc_RNA (1)...(19): siRNA sense strand
caacuacacgugugagaca

SEQ ID NO: 553758 - RNA, 19 nt, Homo sapiens
  misc_RNA (1)...(19): siRNA sense strand
cacuuugacuccuuuaaau

SEQ ID NO: 553759 - RNA, 19 nt, Homo sapiens
  misc_RNA (1)...(19): siRNA sense strand
gcuccaggaucuugucuac

SEQ ID NO: 553760 - RNA, 19 nt, Homo sapiens
  misc_RNA (1)...(19): siRNA sense strand
uggcacaccugcacaugga

SEQ ID NO: 553761 - RNA, 19 nt, Homo sapiens
  misc_RNA (1)...(19): siRNA sense strand
gguccaggcucugcugugu

SEQ ID NO: 553762 - RNA, 19 nt, Homo sapiens
  misc_RNA (1)...(19): siRNA sense strand
uccaggaucuugucuacga

SEQ ID NO: 553763 - RNA, 19 nt, Homo sapiens
  misc_RNA (1)...(19): siRNA sense strand
acacuuugacuccuuuaaa

SEQ ID NO: 553764 - RNA, 19 nt, Homo sapiens
  misc_RNA (1)...(19): siRNA sense strand
ugauguggcugugaaaaua

SEQ ID NO: 553765 - RNA, 19 nt, Homo sapiens
  misc_RNA (1)...(19): siRNA sense strand
guggugauguggcugugaa

SEQ ID NO: 553766 - RNA, 19 nt, Homo sapiens
  misc_RNA (1)...(19): siRNA sense strand
gauggggccugcaugguuu

SEQ ID NO: 553767 - RNA, 19 nt, Homo sapiens
  misc_RNA (1)...(19): siRNA sense strand
gaaccaucguuuuacaaga

SEQ ID NO: 553768 - RNA, 19 nt, Homo sapiens
  misc_RNA (1)...(19): siRNA sense strand
cugcugacaauaaagauaa

SEQ ID NO: 553769 - RNA, 19 nt, Homo sapiens
  misc_RNA (1)...(19): siRNA sense strand
ccaagggaagccuggaauu

SEQ ID NO: 553770 - RNA, 19 nt, Homo sapiens
  misc_RNA (1)...(19): siRNA sense strand
gcacgggucccuguuugau

SEQ ID NO: 553771 - RNA, 19 nt, Homo sapiens
  misc_RNA (1)...(19): siRNA sense strand
gcugcugacaauaaagaua

SEQ ID NO: 553772 - RNA, 19 nt, Homo sapiens
  misc_RNA (1)...(19): siRNA sense strand
ggccuugucugcugcuagu

SEQ ID NO: 553773 - RNA, 19 nt, Homo sapiens
  misc_RNA (1)...(19): siRNA sense strand
ugaaguacuugaugaaacc

SEQ ID NO: 553774 - RNA, 19 nt, Homo sapiens
  misc_RNA (1)...(19): siRNA sense strand
cccucgggcuuguauauug

SEQ ID NO: 553775 - RNA, 19 nt, Homo sapiens
  misc_RNA (1)...(19): siRNA sense strand
gcccaguggucaccucaag

SEQ ID NO: 553776 - RNA, 19 nt, Homo sapiens
  misc_RNA (1)...(19): siRNA sense strand
gaaccgguacacagugaca

SEQ ID NO: 553777 - RNA, 19 nt, Homo sapiens
  misc_RNA (1)...(19): siRNA sense strand
cugaaccgguacacaguga

SEQ ID NO: 553778 - RNA, 19 nt, Homo sapiens
  misc_RNA (1)...(19): siRNA sense strand
gcaacacccacugcugcua

SEQ ID NO: 553779 - RNA, 19 nt, Homo sapiens
  misc_RNA (1)...(19): siRNA sense strand
auacauggccccugaagua

SEQ ID NO: 553780 - RNA, 19 nt, Homo sapiens
  misc_RNA (1)...(19): siRNA sense strand
caauugaggggaugauuaa

SEQ ID NO: 553781 - RNA, 19 nt, Homo sapiens
  misc_RNA (1)...(19): siRNA sense strand
ccaguggucaccucaagga

SEQ ID NO: 553782 - RNA, 19 nt, Homo sapiens
  misc_RNA (1)...(19): siRNA sense strand
ucacugacaccauugacau

SEQ ID NO: 553783 - RNA, 19 nt, Homo sapiens
  misc_RNA (1)...(19): siRNA sense strand
gaauugcucaucgagacuu

SEQ ID NO: 553784 - RNA, 19 nt, Homo sapiens
  misc_RNA (1)...(19): siRNA sense strand
agcuguggcuuguuucuga

SEQ ID NO: 553785 - RNA, 19 nt, Homo sapiens
  misc_RNA (1)...(19): siRNA sense strand
uccuuuaaaugugcugaua

SEQ ID NO: 553786 - RNA, 19 nt, Homo sapiens
  misc_RNA (1)...(19): siRNA sense strand
aauugcucaucgagacuua

SEQ ID NO: 553787 - RNA, 19 nt, Homo sapiens
  misc_RNA (1)...(19): siRNA sense strand
cugaaguacuugaugaaac

SEQ ID NO: 553788 - RNA, 19 nt, Homo sapiens
  misc_RNA (1)...(19): siRNA sense strand
cucaucaucaucauuguuu

SEQ ID NO: 553789 - RNA, 19 nt, Homo sapiens
  misc_RNA (1)...(19): siRNA sense strand
gcuuguuucugacuaucau

SEQ ID NO: 553790 - RNA, 19 nt, Homo sapiens
  misc_RNA (1)...(19): siRNA sense strand
cagggaagcagagauauac

SEQ ID NO: 553791 - RNA, 19 nt, Homo sapiens
  misc_RNA (1)...(19): siRNA sense strand
agacaagacgcuccaggau

SEQ ID NO: 553792 - RNA, 19 nt, Homo sapiens
  misc_RNA (1)...(19): siRNA sense strand
gcaccugcauccccaaagu

SEQ ID NO: 553793 - RNA, 19 nt, Homo sapiens
  misc_RNA (1)...(19): siRNA sense strand
aguacuugaugaaaccauu

SEQ ID NO: 553794 - RNA, 19 nt, Homo sapiens
  misc_RNA (1)...(19): siRNA sense strand
ugagcacgggucccuguuu

SEQ ID NO: 553795 - RNA, 19 nt, Homo sapiens
  misc_RNA (1)...(19): siRNA sense strand
gaaacacuuugacuccuuu

SEQ ID NO: 553796 - RNA, 19 nt, Homo sapiens
  misc_RNA (1)...(19): siRNA sense strand
gagcacgggucccuguuug

SEQ ID NO: 553797 - RNA, 19 nt, Homo sapiens
  misc_RNA (1)...(19): siRNA sense strand
gcucgaagaugcaauucug

SEQ ID NO: 553798 - RNA, 19 nt, Homo sapiens
  misc_RNA (1)...(19): siRNA sense strand
gguacacagugacaauuga

SEQ ID NO: 553799 - RNA, 19 nt, Homo sapiens
  misc_RNA (1)...(19): siRNA sense strand
acgggucccuguuugauua

SEQ ID NO: 553800 - RNA, 19 nt, Homo sapiens
  misc_RNA (1)...(19): siRNA sense strand
gcaacaggaucgacuugag

SEQ ID NO: 553801 - RNA, 19 nt, Homo sapiens
  misc_RNA (1)...(19): siRNA sense strand
uggaagaucccucauguga

SEQ ID NO: 553802 - RNA, 19 nt, Homo sapiens
  misc_RNA (1)...(19): siRNA sense strand
acaagacgcuccaggaucu

SEQ ID NO: 553803 - RNA, 19 nt, Homo sapiens
  misc_RNA (1)...(19): siRNA sense strand
guucagggaagcagagaua

SEQ ID NO: 553804 - RNA, 19 nt, Homo sapiens
  misc_RNA (1)...(19): siRNA sense strand
aauauucucuucucgugaa

SEQ ID NO: 553805 - RNA, 19 nt, Homo sapiens
  misc_RNA (1)...(19): siRNA sense strand
ugaaacacuuugacuccuu

SEQ ID NO: 553806 - RNA, 19 nt, Homo sapiens
  misc_RNA (1)...(19): siRNA sense strand
guacuugaugaaaccauua

SEQ ID NO: 553807 - RNA, 19 nt, Homo sapiens
  misc_RNA (1)...(19): siRNA sense strand
ugauuaagcuggccuuguc

SEQ ID NO: 553808 - RNA, 19 nt, Homo sapiens
  misc_RNA (1)...(19): siRNA sense strand
agaugugucucuccaaaga

SEQ ID NO: 553809 - RNA, 19 nt, Homo sapiens
  misc_RNA (1)...(19): siRNA sense strand
caagggaagccuggaauug

SEQ ID NO: 553810 - RNA, 19 nt, Homo sapiens
  misc_RNA (1)...(19): siRNA sense strand
gcuuguauauugggagauu

SEQ ID NO: 553811 - RNA, 19 nt, Homo sapiens
  misc_RNA (1)...(19): siRNA sense strand
ucagggaagcagagauaua

SEQ ID NO: 553812 - RNA, 19 nt, Homo sapiens
  misc_RNA (1)...(19): siRNA sense strand
caacuacacgugugagaca

SEQ ID NO: 553813 - RNA, 19 nt, Homo sapiens
  misc_RNA (1)...(19): siRNA sense strand
cacuuugacuccuuuaaau

SEQ ID NO: 553814 - RNA, 19 nt, Homo sapiens
  misc_RNA (1)...(19): siRNA sense strand
gcuccaggaucuugucuac

SEQ ID NO: 553815 - RNA, 19 nt, Homo sapiens
  misc_RNA (1)...(19): siRNA sense strand
uggcacaccugcacaugga

SEQ ID NO: 553816 - RNA, 19 nt, Homo sapiens
  misc_RNA (1)...(19): siRNA sense strand
gguccaggcucugcugugu

SEQ ID NO: 553817 - RNA, 19 nt, Homo sapiens
  misc_RNA (1)...(19): siRNA sense strand
uccaggaucuugucuacga

SEQ ID NO: 553818 - RNA, 19 nt, Homo sapiens
  misc_RNA (1)...(19): siRNA sense strand
acacuuugacuccuuuaaa

SEQ ID NO: 553819 - RNA, 19 nt, Homo sapiens
  misc_RNA (1)...(19): siRNA sense strand
ugauguggcugugaaaaua

SEQ ID NO: 553820 - RNA, 19 nt, Homo sapiens
  misc_RNA (1)...(19): siRNA sense strand
guggugauguggcugugaa

SEQ ID NO: 553821 - RNA, 19 nt, Homo sapiens
  misc_RNA (1)...(19): siRNA sense strand
gauggggccugcaugguuu

SEQ ID NO: 553822 - RNA, 19 nt, Homo sapiens
  misc_RNA (1)...(19): siRNA sense strand
gaaccaucguuuuacaaga

SEQ ID NO: 553823 - RNA, 19 nt, Homo sapiens
  misc_RNA (1)...(19): siRNA sense strand
cugcugacaauaaagauaa

SEQ ID NO: 553824 - RNA, 19 nt, Homo sapiens
  misc_RNA (1)...(19): siRNA sense strand
ccaagggaagccuggaauu

SEQ ID NO: 553825 - RNA, 19 nt, Homo sapiens
  misc_RNA (1)...(19): siRNA sense strand
gcacgggucccuguuugau

SEQ ID NO: 553826 - RNA, 19 nt, Homo sapiens
  misc_RNA (1)...(19): siRNA sense strand
gcugcugacaauaaagaua

SEQ ID NO: 553827 - RNA, 19 nt, Homo sapiens
  misc_RNA (1)...(19): siRNA sense strand
ggccuugucugcugcuagu

SEQ ID NO: 553828 - RNA, 19 nt, Homo sapiens
  misc_RNA (1)...(19): siRNA sense strand
ugaaguacuugaugaaacc

SEQ ID NO: 553829 - RNA, 19 nt, Homo sapiens
  misc_RNA (1)...(19): siRNA sense strand
cccucgggcuuguauauug

SEQ ID NO: 553830 - RNA, 19 nt, Homo sapiens
  misc_RNA (1)...(19): siRNA sense strand
gcccaguggucaccucaag

SEQ ID NO: 553831 - RNA, 19 nt, Homo sapiens
  misc_RNA (1)...(19): siRNA sense strand
gaaccgguacacagugaca

SEQ ID NO: 553832 - RNA, 19 nt, Homo sapiens
  misc_RNA (1)...(19): siRNA sense strand
cugaaccgguacacaguga

SEQ ID NO: 553833 - RNA, 19 nt, Homo sapiens
  misc_RNA (1)...(19): siRNA sense strand
gcaacacccacugcugcua

SEQ ID NO: 553834 - RNA, 19 nt, Homo sapiens
  misc_RNA (1)...(19): siRNA sense strand
auacauggccccugaagua

SEQ ID NO: 553835 - RNA, 19 nt, Homo sapiens
  misc_RNA (1)...(19): siRNA sense strand
caauugaggggaugauuaa

SEQ ID NO: 553836 - RNA, 19 nt, Homo sapiens
  misc_RNA (1)...(19): siRNA sense strand
ccaguggucaccucaagga

SEQ ID NO: 553837 - RNA, 19 nt, Homo sapiens
  misc_RNA (1)...(19): siRNA sense strand
ucacugacaccauugacau

SEQ ID NO: 553838 - RNA, 19 nt, Homo sapiens
  misc_RNA (1)...(19): siRNA sense strand
gaauugcucaucgagacuu

SEQ ID NO: 553839 - RNA, 19 nt, Homo sapiens
  misc_RNA (1)...(19): siRNA sense strand
agcuguggcuuguuucuga

SEQ ID NO: 553840 - RNA, 19 nt, Homo sapiens
  misc_RNA (1)...(19): siRNA sense strand
uccuuuaaaugugcugaua

SEQ ID NO: 553841 - RNA, 19 nt, Homo sapiens
  misc_RNA (1)...(19): siRNA sense strand
aauugcucaucgagacuua

SEQ ID NO: 553842 - RNA, 19 nt, Homo sapiens
  misc_RNA (1)...(19): siRNA sense strand
cugaaguacuugaugaaac

SEQ ID NO: 553843 - RNA, 19 nt, Homo sapiens
  misc_RNA (1)...(19): siRNA sense strand
cucaucaucaucauuguuu

SEQ ID NO: 553844 - RNA, 19 nt, Homo sapiens
  misc_RNA (1)...(19): siRNA sense strand
gcuuguuucugacuaucau

SEQ ID NO: 553845 - RNA, 19 nt, Homo sapiens
  misc_RNA (1)...(19): siRNA sense strand
cagggaagcagagauauac

SEQ ID NO: 553846 - RNA, 19 nt, Homo sapiens
  misc_RNA (1)...(19): siRNA sense strand
agacaagacgcuccaggau

SEQ ID NO: 553847 - RNA, 19 nt, Homo sapiens
  misc_RNA (1)...(19): siRNA sense strand
gcaccugcauccccaaagu

SEQ ID NO: 553848 - RNA, 19 nt, Homo sapiens
  misc_RNA (1)...(19): siRNA sense strand
aguacuugaugaaaccauu

SEQ ID NO: 553849 - RNA, 19 nt, Homo sapiens
  misc_RNA (1)...(19): siRNA sense strand
ugagcacgggucccuguuu

SEQ ID NO: 553850 - RNA, 19 nt, Homo sapiens
  misc_RNA (1)...(19): siRNA sense strand
gaaacacuuugacuccuuu

SEQ ID NO: 553851 - RNA, 19 nt, Homo sapiens
  misc_RNA (1)...(19): siRNA sense strand
gagcacgggucccuguuug

SEQ ID NO: 553852 - RNA, 19 nt, Homo sapiens
  misc_RNA (1)...(19): siRNA sense strand
gcucgaagaugcaauucug

SEQ ID NO: 553853 - RNA, 19 nt, Homo sapiens
  misc_RNA (1)...(19): siRNA sense strand
gguacacagugacaauuga

SEQ ID NO: 553854 - RNA, 19 nt, Homo sapiens
  misc_RNA (1)...(19): siRNA sense strand
acgggucccuguuugauua

SEQ ID NO: 553855 - RNA, 19 nt, Homo sapiens
  misc_RNA (1)...(19): siRNA sense strand
gcaacaggaucgacuugag

SEQ ID NO: 553856 - RNA, 19 nt, Homo sapiens
  misc_RNA (1)...(19): siRNA sense strand
uggaagaucccucauguga

SEQ ID NO: 553857 - RNA, 19 nt, Homo sapiens
  misc_RNA (1)...(19): siRNA sense strand
acaagacgcuccaggaucu

SEQ ID NO: 553858 - RNA, 19 nt, Homo sapiens
  misc_RNA (1)...(19): siRNA sense strand
guucagggaagcagagaua

SEQ ID NO: 553859 - RNA, 19 nt, Homo sapiens
  misc_RNA (1)...(19): siRNA sense strand
aauauucucuucucgugaa

SEQ ID NO: 553860 - RNA, 19 nt, Homo sapiens
  misc_RNA (1)...(19): siRNA sense strand
ugaaacacuuugacuccuu

SEQ ID NO: 553861 - RNA, 19 nt, Homo sapiens
  misc_RNA (1)...(19): siRNA sense strand
guacuugaugaaaccauua

SEQ ID NO: 553862 - RNA, 19 nt, Homo sapiens
  misc_RNA (1)...(19): siRNA sense strand
ugauuaagcuggccuuguc

SEQ ID NO: 553863 - RNA, 19 nt, Homo sapiens
  misc_RNA (1)...(19): siRNA sense strand
agaugugucucuccaaaga

SEQ ID NO: 553864 - RNA, 19 nt, Homo sapiens
  misc_RNA (1)...(19): siRNA sense strand
caagggaagccuggaauug

SEQ ID NO: 553865 - RNA, 19 nt, Homo sapiens
  misc_RNA (1)...(19): siRNA sense strand
gcuuguauauugggagauu

SEQ ID NO: 553866 - RNA, 19 nt, Homo sapiens
  misc_RNA (1)...(19): siRNA sense strand
ucagggaagcagagauaua

SEQ ID NO: 553867 - RNA, 19 nt, Homo sapiens
  misc_RNA (1)...(19): siRNA sense strand
caacuacacgugugagaca

SEQ ID NO: 553868 - RNA, 19 nt, Homo sapiens
  misc_RNA (1)...(19): siRNA sense strand
cacuuugacuccuuuaaau

SEQ ID NO: 553869 - RNA, 19 nt, Homo sapiens
  misc_RNA (1)...(19): siRNA sense strand
gcuccaggaucuugucuac

SEQ ID NO: 553870 - RNA, 19 nt, Homo sapiens
  misc_RNA (1)...(19): siRNA sense strand
uggcacaccugcacaugga

SEQ ID NO: 553871 - RNA, 19 nt, Homo sapiens
  misc_RNA (1)...(19): siRNA sense strand
gguccaggcucugcugugu

SEQ ID NO: 553872 - RNA, 19 nt, Homo sapiens
  misc_RNA (1)...(19): siRNA sense strand
uccaggaucuugucuacga

SEQ ID NO: 553873 - RNA, 19 nt, Homo sapiens
  misc_RNA (1)...(19): siRNA sense strand
acacuuugacuccuuuaaa

SEQ ID NO: 553874 - RNA, 19 nt, Homo sapiens
  misc_RNA (1)...(19): siRNA sense strand
ugauguggcugugaaaaua

SEQ ID NO: 553875 - RNA, 19 nt, Homo sapiens
  misc_RNA (1)...(19): siRNA sense strand
guggugauguggcugugaa

SEQ ID NO: 553876 - RNA, 19 nt, Homo sapiens
  misc_RNA (1)...(19): siRNA sense strand
gauggggccugcaugguuu

SEQ ID NO: 553877 - RNA, 19 nt, Homo sapiens
  misc_RNA (1)...(19): siRNA sense strand
gaaccaucguuuuacaaga

SEQ ID NO: 553878 - RNA, 19 nt, Homo sapiens
  misc_RNA (1)...(19): siRNA sense strand
cugcugacaauaaagauaa

SEQ ID NO: 553879 - RNA, 19 nt, Homo sapiens
  misc_RNA (1)...(19): siRNA sense strand
ccaagggaagccuggaauu

SEQ ID NO: 553880 - RNA, 19 nt, Homo sapiens
  misc_RNA (1)...(19): siRNA sense strand
gcacgggucccuguuugau

SEQ ID NO: 553881 - RNA, 19 nt, Homo sapiens
  misc_RNA (1)...(19): siRNA sense strand
gcugcugacaauaaagaua

SEQ ID NO: 553882 - RNA, 19 nt, Homo sapiens
  misc_RNA (1)...(19): siRNA sense strand
ggccuugucugcugcuagu

SEQ ID NO: 553883 - RNA, 19 nt, Homo sapiens
  misc_RNA (1)...(19): siRNA sense strand
ugaaguacuugaugaaacc

SEQ ID NO: 553884 - RNA, 19 nt, Homo sapiens
  misc_RNA (1)...(19): siRNA sense strand
cccucgggcuuguauauug

SEQ ID NO: 553885 - RNA, 19 nt, Homo sapiens
  misc_RNA (1)...(19): siRNA sense strand
gcccaguggucaccucaag

SEQ ID NO: 553886 - RNA, 19 nt, Homo sapiens
  misc_RNA (1)...(19): siRNA sense strand
gaaccgguacacagugaca

SEQ ID NO: 553887 - RNA, 19 nt, Homo sapiens
  misc_RNA (1)...(19): siRNA sense strand
cugaaccgguacacaguga

SEQ ID NO: 553888 - RNA, 19 nt, Homo sapiens
  misc_RNA (1)...(19): siRNA sense strand
gcaacacccacugcugcua

SEQ ID NO: 553889 - RNA, 19 nt, Homo sapiens
  misc_RNA (1)...(19): siRNA sense strand
auacauggccccugaagua

SEQ ID NO: 553890 - RNA, 19 nt, Homo sapiens
  misc_RNA (1)...(19): siRNA sense strand
caauugaggggaugauuaa

SEQ ID NO: 553891 - RNA, 19 nt, Homo sapiens
  misc_RNA (1)...(19): siRNA sense strand
ccaguggucaccucaagga

SEQ ID NO: 553892 - RNA, 19 nt, Homo sapiens
  misc_RNA (1)...(19): siRNA sense strand
ucacugacaccauugacau

SEQ ID NO: 553893 - RNA, 19 nt, Homo sapiens
  misc_RNA (1)...(19): siRNA sense strand
gaauugcucaucgagacuu

SEQ ID NO: 553894 - RNA, 19 nt, Homo sapiens
  misc_RNA (1)...(19): siRNA sense strand
agcuguggcuuguuucuga

SEQ ID NO: 553895 - RNA, 19 nt, Homo sapiens
  misc_RNA (1)...(19): siRNA sense strand
uccuuuaaaugugcugaua

SEQ ID NO: 553896 - RNA, 19 nt, Homo sapiens
  misc_RNA (1)...(19): siRNA sense strand
aauugcucaucgagacuua

SEQ ID NO: 553897 - RNA, 19 nt, Homo sapiens
  misc_RNA (1)...(19): siRNA sense strand
cugaaguacuugaugaaac

SEQ ID NO: 553898 - RNA, 19 nt, Homo sapiens
  misc_RNA (1)...(19): siRNA sense strand
cucaucaucaucauuguuu

SEQ ID NO: 553899 - RNA, 19 nt, Homo sapiens
  misc_RNA (1)...(19): siRNA sense strand
gcuuguuucugacuaucau

SEQ ID NO: 553900 - RNA, 19 nt, Homo sapiens
  misc_RNA (1)...(19): siRNA sense strand
cagggaagcagagauauac

SEQ ID NO: 553901 - RNA, 19 nt, Homo sapiens
  misc_RNA (1)...(19): siRNA sense strand
agacaagacgcuccaggau

SEQ ID NO: 553902 - RNA, 19 nt, Homo sapiens
  misc_RNA (1)...(19): siRNA sense strand
gcaccugcauccccaaagu

SEQ ID NO: 553903 - RNA, 19 nt, Homo sapiens
  misc_RNA (1)...(19): siRNA sense strand
aguacuugaugaaaccauu

SEQ ID NO: 553904 - RNA, 19 nt, Homo sapiens
  misc_RNA (1)...(19): siRNA sense strand
ugagcacgggucccuguuu

SEQ ID NO: 553905 - RNA, 19 nt, Homo sapiens
  misc_RNA (1)...(19): siRNA sense strand
gaaacacuuugacuccuuu

SEQ ID NO: 553906 - RNA, 19 nt, Homo sapiens
  misc_RNA (1)...(19): siRNA sense strand
gagcacgggucccuguuug

SEQ ID NO: 553907 - RNA, 19 nt, Homo sapiens
  misc_RNA (1)...(19): siRNA sense strand
gcucgaagaugcaauucug

SEQ ID NO: 553908 - RNA, 19 nt, Homo sapiens
  misc_RNA (1)...(19): siRNA sense strand
gguacacagugacaauuga

SEQ ID NO: 553909 - RNA, 19 nt, Homo sapiens
  misc_RNA (1)...(19): siRNA sense strand
acgggucccuguuugauua

SEQ ID NO: 553910 - RNA, 19 nt, Homo sapiens
  misc_RNA (1)...(19): siRNA sense strand
gcaacaggaucgacuugag

SEQ ID NO: 553911 - RNA, 19 nt, Homo sapiens
  misc_RNA (1)...(19): siRNA sense strand
uggaagaucccucauguga

SEQ ID NO: 553912 - RNA, 19 nt, Homo sapiens
  misc_RNA (1)...(19): siRNA sense strand
acaagacgcuccaggaucu

SEQ ID NO: 553913 - RNA, 19 nt, Homo sapiens
  misc_RNA (1)...(19): siRNA sense strand
guucagggaagcagagaua

SEQ ID NO: 553914 - RNA, 19 nt, Homo sapiens
  misc_RNA (1)...(19): siRNA sense strand
aauauucucuucucgugaa

SEQ ID NO: 553915 - RNA, 19 nt, Homo sapiens
  misc_RNA (1)...(19): siRNA sense strand
ugaaacacuuugacuccuu

SEQ ID NO: 553916 - RNA, 19 nt, Homo sapiens
  misc_RNA (1)...(19): siRNA sense strand
guacuugaugaaaccauua

SEQ ID NO: 553917 - RNA, 19 nt, Homo sapiens
  misc_RNA (1)...(19): siRNA sense strand
ugauuaagcuggccuuguc

SEQ ID NO: 553918 - RNA, 19 nt, Homo sapiens
  misc_RNA (1)...(19): siRNA sense strand
agaugugucucuccaaaga

SEQ ID NO: 553919 - RNA, 19 nt, Homo sapiens
  misc_RNA (1)...(19): siRNA sense strand
caagggaagccuggaauug

SEQ ID NO: 553920 - RNA, 19 nt, Homo sapiens
  misc_RNA (1)...(19): siRNA sense strand
gcuuguauauugggagauu

SEQ ID NO: 553921 - RNA, 19 nt, Homo sapiens
  misc_RNA (1)...(19): siRNA sense strand
ucagggaagcagagauaua

SEQ ID NO: 553922 - RNA, 19 nt, Homo sapiens
  misc_RNA (1)...(19): siRNA sense strand
caacuacacgugugagaca

SEQ ID NO: 553923 - RNA, 19 nt, Homo sapiens
  misc_RNA (1)...(19): siRNA sense strand
cacuuugacuccuuuaaau

SEQ ID NO: 553924 - RNA, 19 nt, Homo sapiens
  misc_RNA (1)...(19): siRNA sense strand
gcuccaggaucuugucuac

SEQ ID NO: 553925 - RNA, 19 nt, Homo sapiens
  misc_RNA (1)...(19): siRNA sense strand
uggcacaccugcacaugga

SEQ ID NO: 553926 - RNA, 19 nt, Homo sapiens
  misc_RNA (1)...(19): siRNA sense strand
gguccaggcucugcugugu

SEQ ID NO: 553927 - RNA, 19 nt, Homo sapiens
  misc_RNA (1)...(19): siRNA sense strand
uccaggaucuugucuacga

SEQ ID NO: 553928 - RNA, 19 nt, Homo sapiens
  misc_RNA (1)...(19): siRNA sense strand
acacuuugacuccuuuaaa

SEQ ID NO: 553929 - RNA, 19 nt, Homo sapiens
  misc_RNA (1)...(19): siRNA sense strand
ugauguggcugugaaaaua

SEQ ID NO: 553930 - RNA, 19 nt, Homo sapiens
  misc_RNA (1)...(19): siRNA sense strand
guggugauguggcugugaa

SEQ ID NO: 553931 - RNA, 19 nt, Homo sapiens
  misc_RNA (1)...(19): siRNA sense strand
gauggggccugcaugguuu

SEQ ID NO: 553932 - RNA, 19 nt, Homo sapiens
  misc_RNA (1)...(19): siRNA sense strand
gaaccaucguuuuacaaga

SEQ ID NO: 553933 - RNA, 19 nt, Homo sapiens
  misc_RNA (1)...(19): siRNA sense strand
cugcugacaauaaagauaa

SEQ ID NO: 553934 - RNA, 19 nt, Homo sapiens
  misc_RNA (1)...(19): siRNA sense strand
ccaagggaagccuggaauu

SEQ ID NO: 553935 - RNA, 19 nt, Homo sapiens
  misc_RNA (1)...(19): siRNA sense strand
gcacgggucccuguuugau

SEQ ID NO: 553936 - RNA, 19 nt, Homo sapiens
  misc_RNA (1)...(19): siRNA sense strand
gcugcugacaauaaagaua

SEQ ID NO: 553937 - RNA, 19 nt, Homo sapiens
  misc_RNA (1)...(19): siRNA sense strand
ggccuugucugcugcuagu

SEQ ID NO: 553938 - RNA, 19 nt, Homo sapiens
  misc_RNA (1)...(19): siRNA sense strand
ugaaguacuugaugaaacc

SEQ ID NO: 553939 - RNA, 19 nt, Homo sapiens
  misc_RNA (1)...(19): siRNA sense strand
cccucgggcuuguauauug

SEQ ID NO: 553940 - RNA, 19 nt, Homo sapiens
  misc_RNA (1)...(19): siRNA sense strand
gcccaguggucaccucaag

SEQ ID NO: 553941 - RNA, 19 nt, Homo sapiens
  misc_RNA (1)...(19): siRNA sense strand
gaaccgguacacagugaca

SEQ ID NO: 553942 - RNA, 19 nt, Homo sapiens
  misc_RNA (1)...(19): siRNA sense strand
cugaaccgguacacaguga

SEQ ID NO: 553943 - RNA, 19 nt, Homo sapiens
  misc_RNA (1)...(19): siRNA sense strand
gcaacacccacugcugcua

SEQ ID NO: 553944 - RNA, 19 nt, Homo sapiens
  misc_RNA (1)...(19): siRNA sense strand
auacauggccccugaagua

SEQ ID NO: 553945 - RNA, 19 nt, Homo sapiens
  misc_RNA (1)...(19): siRNA sense strand
caauugaggggaugauuaa

SEQ ID NO: 553946 - RNA, 19 nt, Homo sapiens
  misc_RNA (1)...(19): siRNA sense strand
ccaguggucaccucaagga

SEQ ID NO: 553947 - RNA, 19 nt, Homo sapiens
  misc_RNA (1)...(19): siRNA sense strand
ucacugacaccauugacau

SEQ ID NO: 553948 - RNA, 19 nt, Homo sapiens
  misc_RNA (1)...(19): siRNA sense strand
gaauugcucaucgagacuu

SEQ ID NO: 553949 - RNA, 19 nt, Homo sapiens
  misc_RNA (1)...(19): siRNA sense strand
agcuguggcuuguuucuga

SEQ ID NO: 553950 - RNA, 19 nt, Homo sapiens
  misc_RNA (1)...(19): siRNA sense strand
uccuuuaaaugugcugaua

SEQ ID NO: 553951 - RNA, 19 nt, Homo sapiens
  misc_RNA (1)...(19): siRNA sense strand
aauugcucaucgagacuua

SEQ ID NO: 553952 - RNA, 19 nt, Homo sapiens
  misc_RNA (1)...(19): siRNA sense strand
cugaaguacuugaugaaac

SEQ ID NO: 553953 - RNA, 19 nt, Homo sapiens
  misc_RNA (1)...(19): siRNA sense strand
cucaucaucaucauuguuu

SEQ ID NO: 553954 - RNA, 19 nt, Homo sapiens
  misc_RNA (1)...(19): siRNA sense strand
gcuuguuucugacuaucau

SEQ ID NO: 553955 - RNA, 19 nt, Homo sapiens
  misc_RNA (1)...(19): siRNA sense strand
cagggaagcagagauauac

SEQ ID NO: 553956 - RNA, 19 nt, Homo sapiens
  misc_RNA (1)...(19): siRNA sense strand
agacaagacgcuccaggau

SEQ ID NO: 553957 - RNA, 19 nt, Homo sapiens
  misc_RNA (1)...(19): siRNA sense strand
gcaccugcauccccaaagu

SEQ ID NO: 553958 - RNA, 19 nt, Homo sapiens
  misc_RNA (1)...(19): siRNA sense strand
aguacuugaugaaaccauu

SEQ ID NO: 553959 - RNA, 19 nt, Homo sapiens
  misc_RNA (1)...(19): siRNA sense strand
ugagcacgggucccuguuu

SEQ ID NO: 553960 - RNA, 19 nt, Homo sapiens
  misc_RNA (1)...(19): siRNA sense strand
gaaacacuuugacuccuuu

SEQ ID NO: 553961 - RNA, 19 nt, Homo sapiens
  misc_RNA (1)...(19): siRNA sense strand
gagcacgggucccuguuug

SEQ ID NO: 553962 - RNA, 19 nt, Homo sapiens
  misc_RNA (1)...(19): siRNA sense strand
gcucgaagaugcaauucug

SEQ ID NO: 553963 - RNA, 19 nt, Homo sapiens
  misc_RNA (1)...(19): siRNA sense strand
gguacacagugacaauuga

SEQ ID NO: 553964 - RNA, 19 nt, Homo sapiens
  misc_RNA (1)...(19): siRNA sense strand
acgggucccuguuugauua

SEQ ID NO: 553965 - RNA, 19 nt, Homo sapiens
  misc_RNA (1)...(19): siRNA sense strand
gcaacaggaucgacuugag

SEQ ID NO: 553966 - RNA, 19 nt, Homo sapiens
  misc_RNA (1)...(19): siRNA sense strand
uggaagaucccucauguga

SEQ ID NO: 553967 - RNA, 19 nt, Homo sapiens
  misc_RNA (1)...(19): siRNA sense strand
acaagacgcuccaggaucu

SEQ ID NO: 553968 - RNA, 19 nt, Homo sapiens
  misc_RNA (1)...(19): siRNA sense strand
guucagggaagcagagaua

SEQ ID NO: 553969 - RNA, 19 nt, Homo sapiens
  misc_RNA (1)...(19): siRNA sense strand
aauauucucuucucgugaa

SEQ ID NO: 553970 - RNA, 19 nt, Homo sapiens
  misc_RNA (1)...(19): siRNA sense strand
ugaaacacuuugacuccuu

SEQ ID NO: 553971 - RNA, 19 nt, Homo sapiens
  misc_RNA (1)...(19): siRNA sense strand
guacuugaugaaaccauua

SEQ ID NO: 553972 - RNA, 19 nt, Homo sapiens
  misc_RNA (1)...(19): siRNA sense strand
ugauuaagcuggccuuguc

SEQ ID NO: 553973 - RNA, 19 nt, Homo sapiens
  misc_RNA (1)...(19): siRNA sense strand
agaugugucucuccaaaga

SEQ ID NO: 553974 - RNA, 19 nt, Homo sapiens
  misc_RNA (1)...(19): siRNA sense strand
caagggaagccuggaauug

SEQ ID NO: 553975 - RNA, 19 nt, Homo sapiens
  misc_RNA (1)...(19): siRNA sense strand
gcuuguauauugggagauu

SEQ ID NO: 553976 - RNA, 19 nt, Homo sapiens
  misc_RNA (1)...(19): siRNA sense strand
ucagggaagcagagauaua

SEQ ID NO: 553977 - RNA, 19 nt, Homo sapiens
  misc_RNA (1)...(19): siRNA sense strand
caacuacacgugugagaca

SEQ ID NO: 553978 - RNA, 19 nt, Homo sapiens
  misc_RNA (1)...(19): siRNA sense strand
cacuuugacuccuuuaaau

SEQ ID NO: 553979 - RNA, 19 nt, Homo sapiens
  misc_RNA (1)...(19): siRNA sense strand
gcuccaggaucuugucuac

SEQ ID NO: 553980 - RNA, 19 nt, Homo sapiens
  misc_RNA (1)...(19): siRNA sense strand
uggcacaccugcacaugga

SEQ ID NO: 553981 - RNA, 19 nt, Homo sapiens
  misc_RNA (1)...(19): siRNA sense strand
gguccaggcucugcugugu

SEQ ID NO: 553982 - RNA, 19 nt, Homo sapiens
  misc_RNA (1)...(19): siRNA sense strand
uccaggaucuugucuacga

SEQ ID NO: 553983 - RNA, 19 nt, Homo sapiens
  misc_RNA (1)...(19): siRNA sense strand
acacuuugacuccuuuaaa

SEQ ID NO: 553984 - RNA, 19 nt, Homo sapiens
  misc_RNA (1)...(19): siRNA sense strand
ugauguggcugugaaaaua

SEQ ID NO: 553985 - RNA, 19 nt, Homo sapiens
  misc_RNA (1)...(19): siRNA sense strand
guggugauguggcugugaa

SEQ ID NO: 553986 - RNA, 19 nt, Homo sapiens
  misc_RNA (1)...(19): siRNA sense strand
gauggggccugcaugguuu

SEQ ID NO: 553987 - RNA, 19 nt, Homo sapiens
  misc_RNA (1)...(19): siRNA sense strand
gaaccaucguuuuacaaga

SEQ ID NO: 553988 - RNA, 19 nt, Homo sapiens
  misc_RNA (1)...(19): siRNA sense strand
cugcugacaauaaagauaa

SEQ ID NO: 553989 - RNA, 19 nt, Homo sapiens
  misc_RNA (1)...(19): siRNA sense strand
ccaagggaagccuggaauu

SEQ ID NO: 553990 - RNA, 19 nt, Homo sapiens
  misc_RNA (1)...(19): siRNA sense strand
gcacgggucccuguuugau

SEQ ID NO: 553991 - RNA, 19 nt, Homo sapiens
  misc_RNA (1)...(19): siRNA sense strand
gcugcugacaauaaagaua

SEQ ID NO: 553992 - RNA, 19 nt, Homo sapiens
  misc_RNA (1)...(19): siRNA sense strand
ggccuugucugcugcuagu

SEQ ID NO: 553993 - RNA, 19 nt, Homo sapiens
  misc_RNA (1)...(19): siRNA sense strand
ugaaguacuugaugaaacc

SEQ ID NO: 553994 - RNA, 19 nt, Homo sapiens
  misc_RNA (1)...(19): siRNA sense strand
cccucgggcuuguauauug

SEQ ID NO: 553995 - RNA, 19 nt, Homo sapiens
  misc_RNA (1)...(19): siRNA sense strand
gcccaguggucaccucaag

SEQ ID NO: 553996 - RNA, 19 nt, Homo sapiens
  misc_RNA (1)...(19): siRNA sense strand
gaaccgguacacagugaca

SEQ ID NO: 553997 - RNA, 19 nt, Homo sapiens
  misc_RNA (1)...(19): siRNA sense strand
cugaaccgguacacaguga

SEQ ID NO: 553998 - RNA, 19 nt, Homo sapiens
  misc_RNA (1)...(19): siRNA sense strand
gcaacacccacugcugcua

SEQ ID NO: 553999 - RNA, 19 nt, Homo sapiens
  misc_RNA (1)...(19): siRNA sense strand
auacauggccccugaagua

SEQ ID NO: 554000 - RNA, 19 nt, Homo sapiens
  misc_RNA (1)...(19): siRNA sense strand
caauugaggggaugauuaa

SEQ ID NO: 554001 - RNA, 19 nt, Homo sapiens
  misc_RNA (1)...(19): siRNA sense strand
ccaguggucaccucaagga

SEQ ID NO: 554002 - RNA, 19 nt, Homo sapiens
  misc_RNA (1)...(19): siRNA sense strand
ucacugacaccauugacau

SEQ ID NO: 554003 - RNA, 19 nt, Homo sapiens
  misc_RNA (1)...(19): siRNA sense strand
gaauugcucaucgagacuu

SEQ ID NO: 554004 - RNA, 19 nt, Homo sapiens
  misc_RNA (1)...(19): siRNA sense strand
agcuguggcuuguuucuga

SEQ ID NO: 554005 - RNA, 19 nt, Homo sapiens
  misc_RNA (1)...(19): siRNA sense strand
uccuuuaaaugugcugaua

SEQ ID NO: 554006 - RNA, 19 nt, Homo sapiens
  misc_RNA (1)...(19): siRNA sense strand
aauugcucaucgagacuua

SEQ ID NO: 554007 - RNA, 19 nt, Homo sapiens
  misc_RNA (1)...(19): siRNA sense strand
cugaaguacuugaugaaac

SEQ ID NO: 554008 - RNA, 19 nt, Homo sapiens
  misc_RNA (1)...(19): siRNA sense strand
cucaucaucaucauuguuu

SEQ ID NO: 554009 - RNA, 19 nt, Homo sapiens
  misc_RNA (1)...(19): siRNA sense strand
gcuuguuucugacuaucau

SEQ ID NO: 554010 - RNA, 19 nt, Homo sapiens
  misc_RNA (1)...(19): siRNA sense strand
cagggaagcagagauauac

SEQ ID NO: 554011 - RNA, 19 nt, Homo sapiens
  misc_RNA (1)...(19): siRNA sense strand
agacaagacgcuccaggau

SEQ ID NO: 554012 - RNA, 19 nt, Homo sapiens
  misc_RNA (1)...(19): siRNA sense strand
gcaccugcauccccaaagu

SEQ ID NO: 554013 - RNA, 19 nt, Homo sapiens
  misc_RNA (1)...(19): siRNA sense strand
aguacuugaugaaaccauu

SEQ ID NO: 554014 - RNA, 19 nt, Homo sapiens
  misc_RNA (1)...(19): siRNA sense strand
ugagcacgggucccuguuu

SEQ ID NO: 554015 - RNA, 19 nt, Homo sapiens
  misc_RNA (1)...(19): siRNA sense strand
gaaacacuuugacuccuuu

SEQ ID NO: 554016 - RNA, 19 nt, Homo sapiens
  misc_RNA (1)...(19): siRNA sense strand
gagcacgggucccuguuug

SEQ ID NO: 554017 - RNA, 19 nt, Homo sapiens
  misc_RNA (1)...(19): siRNA sense strand
gcucgaagaugcaauucug

SEQ ID NO: 554018 - RNA, 19 nt, Homo sapiens
  misc_RNA (1)...(19): siRNA sense strand
gguacacagugacaauuga

SEQ ID NO: 554019 - RNA, 19 nt, Homo sapiens
  misc_RNA (1)...(19): siRNA sense strand
acgggucccuguuugauua

SEQ ID NO: 554020 - RNA, 19 nt, Homo sapiens
  misc_RNA (1)...(19): siRNA sense strand
gcaacaggaucgacuugag

SEQ ID NO: 554021 - RNA, 19 nt, Homo sapiens
  misc_RNA (1)...(19): siRNA sense strand
uggaagaucccucauguga

SEQ ID NO: 554022 - RNA, 19 nt, Homo sapiens
  misc_RNA (1)...(19): siRNA sense strand
acaagacgcuccaggaucu

SEQ ID NO: 554023 - RNA, 19 nt, Homo sapiens
  misc_RNA (1)...(19): siRNA sense strand
guucagggaagcagagaua

SEQ ID NO: 554024 - RNA, 19 nt, Homo sapiens
  misc_RNA (1)...(19): siRNA sense strand
aauauucucuucucgugaa

SEQ ID NO: 554025 - RNA, 19 nt, Homo sapiens
  misc_RNA (1)...(19): siRNA sense strand
ugaaacacuuugacuccuu

SEQ ID NO: 554026 - RNA, 19 nt, Homo sapiens
  misc_RNA (1)...(19): siRNA sense strand
guacuugaugaaaccauua

SEQ ID NO: 554027 - RNA, 19 nt, Homo sapiens
  misc_RNA (1)...(19): siRNA sense strand
ugauuaagcuggccuuguc

SEQ ID NO: 554028 - RNA, 19 nt, Homo sapiens
  misc_RNA (1)...(19): siRNA sense strand
agaugugucucuccaaaga

SEQ ID NO: 554029 - RNA, 19 nt, Homo sapiens
  misc_RNA (1)...(19): siRNA sense strand
caagggaagccuggaauug

SEQ ID NO: 554030 - RNA, 19 nt, Homo sapiens
  misc_RNA (1)...(19): siRNA sense strand
gcuuguauauugggagauu

SEQ ID NO: 554031 - RNA, 19 nt, Homo sapiens
  misc_RNA (1)...(19): siRNA sense strand
ucagggaagcagagauaua

SEQ ID NO: 554032 - RNA, 19 nt, Homo sapiens
  misc_RNA (1)...(19): siRNA sense strand
caacuacacgugugagaca

SEQ ID NO: 554033 - RNA, 19 nt, Homo sapiens
  misc_RNA (1)...(19): siRNA sense strand
cacuuugacuccuuuaaau

SEQ ID NO: 554034 - RNA, 19 nt, Homo sapiens
  misc_RNA (1)...(19): siRNA sense strand
gcuccaggaucuugucuac

SEQ ID NO: 554035 - RNA, 19 nt, Homo sapiens
  misc_RNA (1)...(19): siRNA sense strand
uggcacaccugcacaugga

SEQ ID NO: 554036 - RNA, 19 nt, Homo sapiens
  misc_RNA (1)...(19): siRNA sense strand
gguccaggcucugcugugu

SEQ ID NO: 554037 - RNA, 19 nt, Homo sapiens
  misc_RNA (1)...(19): siRNA sense strand
uccaggaucuugucuacga

SEQ ID NO: 554038 - RNA, 19 nt, Homo sapiens
  misc_RNA (1)...(19): siRNA sense strand
acacuuugacuccuuuaaa

SEQ ID NO: 554039 - RNA, 19 nt, Homo sapiens
  misc_RNA (1)...(19): siRNA sense strand
ugauguggcugugaaaaua

SEQ ID NO: 554040 - RNA, 19 nt, Homo sapiens
  misc_RNA (1)...(19): siRNA sense strand
guggugauguggcugugaa

SEQ ID NO: 554041 - RNA, 19 nt, Homo sapiens
  misc_RNA (1)...(19): siRNA sense strand
gauggggccugcaugguuu

SEQ ID NO: 554042 - RNA, 19 nt, Homo sapiens
  misc_RNA (1)...(19): siRNA sense strand
gaaccaucguuuuacaaga

SEQ ID NO: 554043 - RNA, 19 nt, Homo sapiens
  misc_RNA (1)...(19): siRNA sense strand
cugcugacaauaaagauaa

SEQ ID NO: 554044 - RNA, 19 nt, Homo sapiens
  misc_RNA (1)...(19): siRNA sense strand
ccaagggaagccuggaauu

SEQ ID NO: 554045 - RNA, 19 nt, Homo sapiens
  misc_RNA (1)...(19): siRNA sense strand
gcacgggucccuguuugau

SEQ ID NO: 554046 - RNA, 19 nt, Homo sapiens
  misc_RNA (1)...(19): siRNA sense strand
gcugcugacaauaaagaua

SEQ ID NO: 554047 - RNA, 19 nt, Homo sapiens
  misc_RNA (1)...(19): siRNA sense strand
ggccuugucugcugcuagu

SEQ ID NO: 554048 - RNA, 19 nt, Homo sapiens
  misc_RNA (1)...(19): siRNA sense strand
ugaaguacuugaugaaacc

SEQ ID NO: 554049 - RNA, 19 nt, Homo sapiens
  misc_RNA (1)...(19): siRNA sense strand
cccucgggcuuguauauug

SEQ ID NO: 554050 - RNA, 19 nt, Homo sapiens
  misc_RNA (1)...(19): siRNA sense strand
gcccaguggucaccucaag

SEQ ID NO: 554051 - RNA, 19 nt, Homo sapiens
  misc_RNA (1)...(19): siRNA sense strand
gaaccgguacacagugaca

SEQ ID NO: 554052 - RNA, 19 nt, Homo sapiens
  misc_RNA (1)...(19): siRNA sense strand
cugaaccgguacacaguga

SEQ ID NO: 554053 - RNA, 19 nt, Homo sapiens
  misc_RNA (1)...(19): siRNA sense strand
gcaacacccacugcugcua

SEQ ID NO: 554054 - RNA, 19 nt, Homo sapiens
  misc_RNA (1)...(19): siRNA sense strand
auacauggccccugaagua

SEQ ID NO: 554055 - RNA, 19 nt, Homo sapiens
  misc_RNA (1)...(19): siRNA sense strand
caauugaggggaugauuaa

SEQ ID NO: 554056 - RNA, 19 nt, Homo sapiens
  misc_RNA (1)...(19): siRNA sense strand
ccaguggucaccucaagga

SEQ ID NO: 554057 - RNA, 19 nt, Homo sapiens
  misc_RNA (1)...(19): siRNA sense strand
ucacugacaccauugacau

SEQ ID NO: 554058 - RNA, 19 nt, Homo sapiens
  misc_RNA (1)...(19): siRNA sense strand
gaauugcucaucgagacuu

SEQ ID NO: 554059 - RNA, 19 nt, Homo sapiens
  misc_RNA (1)...(19): siRNA sense strand
agcuguggcuuguuucuga

SEQ ID NO: 554060 - RNA, 19 nt, Homo sapiens
  misc_RNA (1)...(19): siRNA sense strand
uccuuuaaaugugcugaua

SEQ ID NO: 554061 - RNA, 19 nt, Homo sapiens
  misc_RNA (1)...(19): siRNA sense strand
aauugcucaucgagacuua

SEQ ID NO: 554062 - RNA, 19 nt, Homo sapiens
  misc_RNA (1)...(19): siRNA sense strand
cugaaguacuugaugaaac

SEQ ID NO: 554063 - RNA, 19 nt, Homo sapiens
  misc_RNA (1)...(19): siRNA sense strand
cucaucaucaucauuguuu

SEQ ID NO: 554064 - RNA, 19 nt, Homo sapiens
  misc_RNA (1)...(19): siRNA sense strand
gcuuguuucugacuaucau

SEQ ID NO: 554065 - RNA, 19 nt, Homo sapiens
  misc_RNA (1)...(19): siRNA sense strand
cagggaagcagagauauac

SEQ ID NO: 554066 - RNA, 19 nt, Homo sapiens
  misc_RNA (1)...(19): siRNA sense strand
agacaagacgcuccaggau

SEQ ID NO: 554067 - RNA, 19 nt, Homo sapiens
  misc_RNA (1)...(19): siRNA sense strand
gcaccugcauccccaaagu

SEQ ID NO: 554068 - RNA, 19 nt, Homo sapiens
  misc_RNA (1)...(19): siRNA sense strand
aguacuugaugaaaccauu

SEQ ID NO: 554069 - RNA, 19 nt, Homo sapiens
  misc_RNA (1)...(19): siRNA sense strand
ugagcacgggucccuguuu

SEQ ID NO: 554070 - RNA, 19 nt, Homo sapiens
  misc_RNA (1)...(19): siRNA sense strand
ggacaucgauuucaacuaa

SEQ ID NO: 554071 - RNA, 19 nt, Homo sapiens
  misc_RNA (1)...(19): siRNA sense strand
aaugaaagcuggagaauaa

SEQ ID NO: 554072 - RNA, 19 nt, Homo sapiens
  misc_RNA (1)...(19): siRNA sense strand
gaaacuguguguaaggaua

SEQ ID NO: 554073 - RNA, 19 nt, Homo sapiens
  misc_RNA (1)...(19): siRNA sense strand
gagaaagaauggcuaaguu

SEQ ID NO: 554074 - RNA, 19 nt, Homo sapiens
  misc_RNA (1)...(19): siRNA sense strand
gaacauuccucuguaauag

SEQ ID NO: 554075 - RNA, 19 nt, Homo sapiens
  misc_RNA (1)...(19): siRNA sense strand
gaagauccauauuugagaa

SEQ ID NO: 554076 - RNA, 19 nt, Homo sapiens
  misc_RNA (1)...(19): siRNA sense strand
cagcaaauauuccugauga

SEQ ID NO: 554077 - RNA, 19 nt, Homo sapiens
  misc_RNA (1)...(19): siRNA sense strand
acaagaagauccauauuug

SEQ ID NO: 554078 - RNA, 19 nt, Homo sapiens
  misc_RNA (1)...(19): siRNA sense strand
ggccaaagauguaacuuau

SEQ ID NO: 554079 - RNA, 19 nt, Homo sapiens
  misc_RNA (1)...(19): siRNA sense strand
uguccaaacuguuguauaa

SEQ ID NO: 554080 - RNA, 19 nt, Homo sapiens
  misc_RNA (1)...(19): siRNA sense strand
uuaaagacauggccaaaga

SEQ ID NO: 554081 - RNA, 19 nt, Homo sapiens
  misc_RNA (1)...(19): siRNA sense strand
gacaagaagauccauauuu

SEQ ID NO: 554082 - RNA, 19 nt, Homo sapiens
  misc_RNA (1)...(19): siRNA sense strand
aaagaaguauucccugaaa

SEQ ID NO: 554083 - RNA, 19 nt, Homo sapiens
  misc_RNA (1)...(19): siRNA sense strand
gauaugaacuuugugauac

SEQ ID NO: 554084 - RNA, 19 nt, Homo sapiens
  misc_RNA (1)...(19): siRNA sense strand
gcagggaauuccaaaugaa

SEQ ID NO: 554085 - RNA, 19 nt, Homo sapiens
  misc_RNA (1)...(19): siRNA sense strand
gaaaauggguggaagcuau

SEQ ID NO: 554086 - RNA, 19 nt, Homo sapiens
  misc_RNA (1)...(19): siRNA sense strand
ucacuguggucuuacauaa

SEQ ID NO: 554087 - RNA, 19 nt, Homo sapiens
  misc_RNA (1)...(19): siRNA sense strand
caaguuagcagaaauggaa

SEQ ID NO: 554088 - RNA, 19 nt, Homo sapiens
  misc_RNA (1)...(19): siRNA sense strand
gaagacgucugugguagug

SEQ ID NO: 554089 - RNA, 19 nt, Homo sapiens
  misc_RNA (1)...(19): siRNA sense strand
gaagaugccuaucaaaaug

SEQ ID NO: 554090 - RNA, 19 nt, Homo sapiens
  misc_RNA (1)...(19): siRNA sense strand
uaggauugcugacaaggua

SEQ ID NO: 554091 - RNA, 19 nt, Homo sapiens
  misc_RNA (1)...(19): siRNA sense strand
caacagauacaaagaacuu

SEQ ID NO: 554092 - RNA, 19 nt, Homo sapiens
  misc_RNA (1)...(19): siRNA sense strand
ucuaauaaccugccucuuu

SEQ ID NO: 554093 - RNA, 19 nt, Homo sapiens
  misc_RNA (1)...(19): siRNA sense strand
gcagaugacaagacaguuu

SEQ ID NO: 554094 - RNA, 19 nt, Homo sapiens
  misc_RNA (1)...(19): siRNA sense strand
gaaagucaagccacaauca

SEQ ID NO: 554095 - RNA, 19 nt, Homo sapiens
  misc_RNA (1)...(19): siRNA sense strand
gaagcuauaugacccucuu

SEQ ID NO: 554096 - RNA, 19 nt, Homo sapiens
  misc_RNA (1)...(19): siRNA sense strand
aaaaucagcuucuguugua

SEQ ID NO: 554097 - RNA, 19 nt, Homo sapiens
  misc_RNA (1)...(19): siRNA sense strand
agaauucagugcauacaaa

SEQ ID NO: 554098 - RNA, 19 nt, Homo sapiens
  misc_RNA (1)...(19): siRNA sense strand
ggcagggaauuccaaauga

SEQ ID NO: 554099 - RNA, 19 nt, Homo sapiens
  misc_RNA (1)...(19): siRNA sense strand
gauauuacauaagguggaa

SEQ ID NO: 554100 - RNA, 19 nt, Homo sapiens
  misc_RNA (1)...(19): siRNA sense strand
gaacuaguuuuccuggaua

SEQ ID NO: 554101 - RNA, 19 nt, Homo sapiens
  misc_RNA (1)...(19): siRNA sense strand
ugucacgaauuauagguua

SEQ ID NO: 554102 - RNA, 19 nt, Homo sapiens
  misc_RNA (1)...(19): siRNA sense strand
gaacuacagagagagauuu

SEQ ID NO: 554103 - RNA, 19 nt, Homo sapiens
  misc_RNA (1)...(19): siRNA sense strand
cauguuggauggauacuau

SEQ ID NO: 554104 - RNA, 19 nt, Homo sapiens
  misc_RNA (1)...(19): siRNA sense strand
gcuagaacauauuaagcuu

SEQ ID NO: 554105 - RNA, 19 nt, Homo sapiens
  misc_RNA (1)...(19): siRNA sense strand
ggaagaaccacccuugcuu

SEQ ID NO: 554106 - RNA, 19 nt, Homo sapiens
  misc_RNA (1)...(19): siRNA sense strand
uagaggaacuacagagaga

SEQ ID NO: 554107 - RNA, 19 nt, Homo sapiens
  misc_RNA (1)...(19): siRNA sense strand
caaauauuccugaugaaga

SEQ ID NO: 554108 - RNA, 19 nt, Homo sapiens
  misc_RNA (1)...(19): siRNA sense strand
ugaacgauaugaacuuugu

SEQ ID NO: 554109 - RNA, 19 nt, Homo sapiens
  misc_RNA (1)...(19): siRNA sense strand
ucagagaauucagugcaua

SEQ ID NO: 554110 - RNA, 19 nt, Homo sapiens
  misc_RNA (1)...(19): siRNA sense strand
ggcaaaggguggagguuau

SEQ ID NO: 554111 - RNA, 19 nt, Homo sapiens
  misc_RNA (1)...(19): siRNA sense strand
uaaagagaguggcauccuu

SEQ ID NO: 554112 - RNA, 19 nt, Homo sapiens
  misc_RNA (1)...(19): siRNA sense strand
cgauaugaacuuugugaua

SEQ ID NO: 554113 - RNA, 19 nt, Homo sapiens
  misc_RNA (1)...(19): siRNA sense strand
ggacaagaagauccauauu

SEQ ID NO: 554114 - RNA, 19 nt, Homo sapiens
  misc_RNA (1)...(19): siRNA sense strand
gacuagaaacuguguguaa

SEQ ID NO: 554115 - RNA, 19 nt, Homo sapiens
  misc_RNA (1)...(19): siRNA sense strand
caagaagauccauauuuga

SEQ ID NO: 554116 - RNA, 19 nt, Homo sapiens
  misc_RNA (1)...(19): siRNA sense strand
cagauuccauuucaacuuc

SEQ ID NO: 554117 - RNA, 19 nt, Homo sapiens
  misc_RNA (1)...(19): siRNA sense strand
gagaguggcauccuucaga

SEQ ID NO: 554118 - RNA, 19 nt, Homo sapiens
  misc_RNA (1)...(19): siRNA sense strand
ucacuaauccucucuaugg

SEQ ID NO: 554119 - RNA, 19 nt, Homo sapiens
  misc_RNA (1)...(19): siRNA sense strand
ccacaauauucauguuaug

SEQ ID NO: 554120 - RNA, 19 nt, Homo sapiens
  misc_RNA (1)...(19): siRNA sense strand
ggaaagcgaagcaaagaag

SEQ ID NO: 554121 - RNA, 19 nt, Homo sapiens
  misc_RNA (1)...(19): siRNA sense strand
gauaagaaccaugcagaug

SEQ ID NO: 554122 - RNA, 19 nt, Homo sapiens
  misc_RNA (1)...(19): siRNA sense strand
ucaaaaugcugaacuaguu

SEQ ID NO: 554123 - RNA, 19 nt, Homo sapiens
  misc_RNA (1)...(19): siRNA sense strand
ggguggagguuaugaaagu

SEQ ID NO: 554124 - RNA, 19 nt, Homo sapiens
  misc_RNA (1)...(19): siRNA sense strand
cuaauaaccugccucuuuu

SEQ ID NO: 554125 - RNA, 19 nt, Homo sapiens
  misc_RNA (1)...(19): siRNA sense strand
ggugggauauuacauaagg

SEQ ID NO: 554126 - RNA, 19 nt, Homo sapiens
  misc_RNA (1)...(19): siRNA sense strand
cauuuccugucucuaauaa

SEQ ID NO: 554127 - RNA, 19 nt, Homo sapiens
  misc_RNA (1)...(19): siRNA sense strand
uaugggagcuauuccaauc

SEQ ID NO: 554128 - RNA, 19 nt, Homo sapiens
  misc_RNA (1)...(19): siRNA sense strand
gaaagaauggcuaaguuuu

SEQ ID NO: 554129 - RNA, 19 nt, Homo sapiens
  misc_RNA (1)...(19): siRNA sense strand
agaaagaauggcuaaguuu

SEQ ID NO: 554130 - RNA, 19 nt, Homo sapiens
  misc_RNA (1)...(19): siRNA sense strand
ggagaaagaauggcuaagu

SEQ ID NO: 554131 - RNA, 19 nt, Homo sapiens
  misc_RNA (1)...(19): siRNA sense strand
gcauuuccugucucuaaua

SEQ ID NO: 554132 - RNA, 19 nt, Homo sapiens
  misc_RNA (1)...(19): siRNA sense strand
gaaagcgaagcaaagaaga

SEQ ID NO: 554133 - RNA, 19 nt, Homo sapiens
  misc_RNA (1)...(19): siRNA sense strand
caaagaaguauucccugaa

SEQ ID NO: 554134 - RNA, 19 nt, Homo sapiens
  misc_RNA (1)...(19): siRNA sense strand
caacuuuucuccugauuug

SEQ ID NO: 554135 - RNA, 19 nt, Homo sapiens
  misc_RNA (1)...(19): siRNA sense strand
ucacaacagauacaaagaa

SEQ ID NO: 554136 - RNA, 19 nt, Homo sapiens
  misc_RNA (1)...(19): siRNA sense strand
ccaccuauacagcugcuua

SEQ ID NO: 554137 - RNA, 19 nt, Homo sapiens
  misc_RNA (1)...(19): siRNA sense strand
gaaggcagggaauuccaaa

SEQ ID NO: 554138 - RNA, 19 nt, Homo sapiens
  misc_RNA (1)...(19): siRNA sense strand
cuacagagagagauuucua

SEQ ID NO: 554139 - RNA, 19 nt, Homo sapiens
  misc_RNA (1)...(19): siRNA sense strand
gaaaccacaggaaccuauu

SEQ ID NO: 554140 - RNA, 19 nt, Homo sapiens
  misc_RNA (1)...(19): siRNA sense strand
caacuucugccgacaacuu

SEQ ID NO: 554141 - RNA, 19 nt, Homo sapiens
  misc_RNA (1)...(19): siRNA sense strand
gaaagcuggagaauaacaa

SEQ ID NO: 554142 - RNA, 19 nt, Homo sapiens
  misc_RNA (1)...(19): siRNA sense strand
gcaaauauuccugaugaag

SEQ ID NO: 554143 - RNA, 19 nt, Homo sapiens
  misc_RNA (1)...(19): siRNA sense strand
ggaacuacagagagagauu

SEQ ID NO: 554144 - RNA, 19 nt, Homo sapiens
  misc_RNA (1)...(19): siRNA sense strand
cagcuucuguuguaucauc

SEQ ID NO: 554145 - RNA, 19 nt, Homo sapiens
  misc_RNA (1)...(19): siRNA sense strand
ugggugggauauuacauaa

SEQ ID NO: 554146 - RNA, 19 nt, Homo sapiens
  misc_RNA (1)...(19): siRNA sense strand
ugagggagucuaacaaguu

SEQ ID NO: 554147 - RNA, 19 nt, Homo sapiens
  misc_RNA (1)...(19): siRNA sense strand
gccaaagauguaacuuaua

SEQ ID NO: 554148 - RNA, 19 nt, Homo sapiens
  misc_RNA (1)...(19): siRNA sense strand
ccaaucauguccuuuaucc

SEQ ID NO: 554149 - RNA, 19 nt, Homo sapiens
  misc_RNA (1)...(19): siRNA sense strand
acaguuuccuaccgcauuu

SEQ ID NO: 554150 - RNA, 19 nt, Homo sapiens
  misc_RNA (1)...(19): siRNA sense strand
gagagaaucauuacgaaaa

SEQ ID NO: 554151 - RNA, 19 nt, Homo sapiens
  misc_RNA (1)...(19): siRNA sense strand
ccaaaugaaagcuggagaa

SEQ ID NO: 554152 - RNA, 19 nt, Homo sapiens
  misc_RNA (1)...(19): siRNA sense strand
uagaaacuguguguaagga

SEQ ID NO: 554153 - RNA, 19 nt, Homo sapiens
  misc_RNA (1)...(19): siRNA sense strand
cuauacagcugcuuauucg

SEQ ID NO: 554154 - RNA, 19 nt, Homo sapiens
  misc_RNA (1)...(19): siRNA sense strand
ucauguccuuuauccagua

SEQ ID NO: 554155 - RNA, 19 nt, Homo sapiens
  misc_RNA (1)...(19): siRNA sense strand
caacagagaggaaaagaga

SEQ ID NO: 554156 - RNA, 19 nt, Homo sapiens
  misc_RNA (1)...(19): siRNA sense strand
gcuggagaauaacaaagau

SEQ ID NO: 554157 - RNA, 19 nt, Homo sapiens
  misc_RNA (1)...(19): siRNA sense strand
agagauuucuaaccgauca

SEQ ID NO: 554158 - RNA, 19 nt, Homo sapiens
  misc_RNA (1)...(19): siRNA sense strand
gaaccuauucacaacagau

SEQ ID NO: 554159 - RNA, 19 nt, Homo sapiens
  misc_RNA (1)...(19): siRNA sense strand
ccacaggaaccuauucaca

SEQ ID NO: 554160 - RNA, 19 nt, Homo sapiens
  misc_RNA (1)...(19): siRNA sense strand
acuaagaguuggccaugga

SEQ ID NO: 554161 - RNA, 19 nt, Homo sapiens
  misc_RNA (1)...(19): siRNA sense strand
ggacuagaaacugugugua

SEQ ID NO: 554162 - RNA, 19 nt, Homo sapiens
  misc_RNA (1)...(19): siRNA sense strand
ucacuccuguccaaacugu

SEQ ID NO: 554163 - RNA, 19 nt, Homo sapiens
  misc_RNA (1)...(19): siRNA sense strand
ugaaguccuuguggagaaa

SEQ ID NO: 554164 - RNA, 19 nt, Homo sapiens
  misc_RNA (1)...(19): siRNA sense strand
gagaauucagugcauacaa

SEQ ID NO: 554165 - RNA, 19 nt, Homo sapiens
  misc_RNA (1)...(19): siRNA sense strand
cucauuggcuagaacauau

SEQ ID NO: 554166 - RNA, 19 nt, Homo sapiens
  misc_RNA (1)...(19): siRNA sense strand
aaagugaagaugccuauca

SEQ ID NO: 554167 - RNA, 19 nt, Homo sapiens
  misc_RNA (1)...(19): siRNA sense strand
gcgaagcaaagaagaugaa

SEQ ID NO: 554168 - RNA, 19 nt, Homo sapiens
  misc_RNA (1)...(19): siRNA sense strand
aaaugaaagcuggagaaua

SEQ ID NO: 554169 - RNA, 19 nt, Homo sapiens
  misc_RNA (1)...(19): siRNA sense strand
cacaggaaccuauucacaa

SEQ ID NO: 554170 - RNA, 19 nt, Homo sapiens
  misc_RNA (1)...(19): siRNA sense strand
ccucgaaggugcauaauua

SEQ ID NO: 554171 - RNA, 19 nt, Homo sapiens
  misc_RNA (1)...(19): siRNA sense strand
gaggauuucucaacccuua

SEQ ID NO: 554172 - RNA, 19 nt, Homo sapiens
  misc_RNA (1)...(19): siRNA sense strand
cgaaggugcauaauuauug

SEQ ID NO: 554173 - RNA, 19 nt, Homo sapiens
  misc_RNA (1)...(19): siRNA sense strand
gaaggugcauaauuauugc

SEQ ID NO: 554174 - RNA, 19 nt, Homo sapiens
  misc_RNA (1)...(19): siRNA sense strand
gcagggcagugaggauuuc

SEQ ID NO: 554175 - RNA, 19 nt, Homo sapiens
  misc_RNA (1)...(19): siRNA sense strand
gagcagggcagugaggauu

SEQ ID NO: 554176 - RNA, 19 nt, Homo sapiens
  misc_RNA (1)...(19): siRNA sense strand
gguaggagcagggcaguga

SEQ ID NO: 554177 - RNA, 19 nt, Homo sapiens
  misc_RNA (1)...(19): siRNA sense strand
gaggacagccccuggaaaa

SEQ ID NO: 554178 - RNA, 19 nt, Homo sapiens
  misc_RNA (1)...(19): siRNA sense strand
ucgaaggugcauaauuauu

SEQ ID NO: 554179 - RNA, 19 nt, Homo sapiens
  misc_RNA (1)...(19): siRNA sense strand
ucucaacccuuacuuucac

SEQ ID NO: 554180 - RNA, 19 nt, Homo sapiens
  misc_RNA (1)...(19): siRNA sense strand
gaacugcccuucacccuaa

SEQ ID NO: 554181 - RNA, 19 nt, Homo sapiens
  misc_RNA (1)...(19): siRNA sense strand
ucauagaacuugacacaaa

SEQ ID NO: 554182 - RNA, 19 nt, Homo sapiens
  misc_RNA (1)...(19): siRNA sense strand
ggacuuugcucgccagaga

SEQ ID NO: 554183 - RNA, 19 nt, Homo sapiens
  misc_RNA (1)...(19): siRNA sense strand
ggaagaggcugaugacacu

SEQ ID NO: 554184 - RNA, 19 nt, Homo sapiens
  misc_RNA (1)...(19): siRNA sense strand
ggagaucuauuaccaugga

SEQ ID NO: 554185 - RNA, 19 nt, Homo sapiens
  misc_RNA (1)...(19): siRNA sense strand
gaacuugacacaaaugaug

SEQ ID NO: 554186 - RNA, 19 nt, Homo sapiens
  misc_RNA (1)...(19): siRNA sense strand
caacacagcucaguacaag

SEQ ID NO: 554187 - RNA, 19 nt, Homo sapiens
  misc_RNA (1)...(19): siRNA sense strand
cuagaagccucucuggaua

SEQ ID NO: 554188 - RNA, 19 nt, Homo sapiens
  misc_RNA (1)...(19): siRNA sense strand
ggacgcgaguguucaagaa

SEQ ID NO: 554189 - RNA, 19 nt, Homo sapiens
  misc_RNA (1)...(19): siRNA sense strand
uggauaaggagaucuauua

SEQ ID NO: 554190 - RNA, 19 nt, Homo sapiens
  misc_RNA (1)...(19): siRNA sense strand
gagcggagagucuauguga

SEQ ID NO: 554191 - RNA, 19 nt, Homo sapiens
  misc_RNA (1)...(19): siRNA sense strand
gaacgagacgccaguagau

SEQ ID NO: 554192 - RNA, 19 nt, Homo sapiens
  misc_RNA (1)...(19): siRNA sense strand
ugagaucccuccaaaccuu

SEQ ID NO: 554193 - RNA, 19 nt, Homo sapiens
  misc_RNA (1)...(19): siRNA sense strand
gcacccagcucgacguucu

SEQ ID NO: 554194 - RNA, 19 nt, Homo sapiens
  misc_RNA (1)...(19): siRNA sense strand
ccaacaagacggugaagaa

SEQ ID NO: 554195 - RNA, 19 nt, Homo sapiens
  misc_RNA (1)...(19): siRNA sense strand
cauagaacuugacacaaau

SEQ ID NO: 554196 - RNA, 19 nt, Homo sapiens
  misc_RNA (1)...(19): siRNA sense strand
acaagacggugaagaagau

SEQ ID NO: 554197 - RNA, 19 nt, Homo sapiens
  misc_RNA (1)...(19): siRNA sense strand
caagaaggccaguccaaau

SEQ ID NO: 554198 - RNA, 19 nt, Homo sapiens
  misc_RNA (1)...(19): siRNA sense strand
gcacgaagacacgaacuug

SEQ ID NO: 554199 - RNA, 19 nt, Homo sapiens
  misc_RNA (1)...(19): siRNA sense strand
cuccaaaccuuccauguuc

SEQ ID NO: 554200 - RNA, 19 nt, Homo sapiens
  misc_RNA (1)...(19): siRNA sense strand
caggaacgccucaucaaga

SEQ ID NO: 554201 - RNA, 19 nt, Homo sapiens
  misc_RNA (1)...(19): siRNA sense strand
gcaugaaggaugacaagga

SEQ ID NO: 554202 - RNA, 19 nt, Homo sapiens
  misc_RNA (1)...(19): siRNA sense strand
auaaggagaucuauuacca

SEQ ID NO: 554203 - RNA, 19 nt, Homo sapiens
  misc_RNA (1)...(19): siRNA sense strand
cgagcacgcuuacccuuuc

SEQ ID NO: 554204 - RNA, 19 nt, Homo sapiens
  misc_RNA (1)...(19): siRNA sense strand
ucaaagagcggagagucua

SEQ ID NO: 554205 - RNA, 19 nt, Homo sapiens
  misc_RNA (1)...(19): siRNA sense strand
gacacgaacuuggccucua

SEQ ID NO: 554206 - RNA, 19 nt, Homo sapiens
  misc_RNA (1)...(19): siRNA sense strand
caaagggacgcgaguguuc

SEQ ID NO: 554207 - RNA, 19 nt, Homo sapiens
  misc_RNA (1)...(19): siRNA sense strand
aggaacgccucaucaagaa

SEQ ID NO: 554208 - RNA, 19 nt, Homo sapiens
  misc_RNA (1)...(19): siRNA sense strand
auggaaagcucaccgucua

SEQ ID NO: 554209 - RNA, 19 nt, Homo sapiens
  misc_RNA (1)...(19): siRNA sense strand
gaccugcgccuuccgcuau

SEQ ID NO: 554210 - RNA, 19 nt, Homo sapiens
  misc_RNA (1)...(19): siRNA sense strand
caguacaagugcccuguug

SEQ ID NO: 554211 - RNA, 19 nt, Homo sapiens
  misc_RNA (1)...(19): siRNA sense strand
cggagaauuuggaggagaa

SEQ ID NO: 554212 - RNA, 19 nt, Homo sapiens
  misc_RNA (1)...(19): siRNA sense strand
ccugguggauccugaguau

SEQ ID NO: 554213 - RNA, 19 nt, Homo sapiens
  misc_RNA (1)...(19): siRNA sense strand
ugaugacgacauuguauuu

SEQ ID NO: 554214 - RNA, 19 nt, Homo sapiens
  misc_RNA (1)...(19): siRNA sense strand
gaaggugccaaccgugaga

SEQ ID NO: 554215 - RNA, 19 nt, Homo sapiens
  misc_RNA (1)...(19): siRNA sense strand
gcaggaacgccucaucaag

SEQ ID NO: 554216 - RNA, 19 nt, Homo sapiens
  misc_RNA (1)...(19): siRNA sense strand
ccuacaaagugaaagugaa

SEQ ID NO: 554217 - RNA, 19 nt, Homo sapiens
  misc_RNA (1)...(19): siRNA sense strand
acacgaacuuggccucuag

SEQ ID NO: 554218 - RNA, 19 nt, Homo sapiens
  misc_RNA (1)...(19): siRNA sense strand
ugcaaggucuacacacuga

SEQ ID NO: 554219 - RNA, 19 nt, Homo sapiens
  misc_RNA (1)...(19): siRNA sense strand
gaucuauuaccauggagaa

SEQ ID NO: 554220 - RNA, 19 nt, Homo sapiens
  misc_RNA (1)...(19): siRNA sense strand
cauuguauuugaggacuuu

SEQ ID NO: 554221 - RNA, 19 nt, Homo sapiens
  misc_RNA (1)...(19): siRNA sense strand
ccuagaagccucucuggau

SEQ ID NO: 554222 - RNA, 19 nt, Homo sapiens
  misc_RNA (1)...(19): siRNA sense strand
ucaagaaggccaguccaaa

SEQ ID NO: 554223 - RNA, 19 nt, Homo sapiens
  misc_RNA (1)...(19): siRNA sense strand
uagaagccucucuggauaa

SEQ ID NO: 554224 - RNA, 19 nt, Homo sapiens
  misc_RNA (1)...(19): siRNA sense strand
gcgagcacgcuuacccuuu

SEQ ID NO: 554225 - RNA, 19 nt, Homo sapiens
  misc_RNA (1)...(19): siRNA sense strand
aagccucucuggauaagga

SEQ ID NO: 554226 - RNA, 19 nt, Homo sapiens
  misc_RNA (1)...(19): siRNA sense strand
gagcacgcuuacccuuuca

SEQ ID NO: 554227 - RNA, 19 nt, Homo sapiens
  misc_RNA (1)...(19): siRNA sense strand
aaccuuccauguucuguga

SEQ ID NO: 554228 - RNA, 19 nt, Homo sapiens
  misc_RNA (1)...(19): siRNA sense strand
acacagcucaguacaagug

SEQ ID NO: 554229 - RNA, 19 nt, Homo sapiens
  misc_RNA (1)...(19): siRNA sense strand
gaucucagugcgccaguau

SEQ ID NO: 554230 - RNA, 19 nt, Homo sapiens
  misc_RNA (1)...(19): siRNA sense strand
auaccaaucucauagaacu

SEQ ID NO: 554231 - RNA, 19 nt, Homo sapiens
  misc_RNA (1)...(19): siRNA sense strand
caacaagacggugaagaag

SEQ ID NO: 554232 - RNA, 19 nt, Homo sapiens
  misc_RNA (1)...(19): siRNA sense strand
gaugacgacauuguauuug

SEQ ID NO: 554233 - RNA, 19 nt, Homo sapiens
  misc_RNA (1)...(19): siRNA sense strand
gacaaagggacgcgagugu

SEQ ID NO: 554234 - RNA, 19 nt, Homo sapiens
  misc_RNA (1)...(19): siRNA sense strand
ccaaucucauagaacuuga

SEQ ID NO: 554235 - RNA, 19 nt, Homo sapiens
  misc_RNA (1)...(19): siRNA sense strand
gcgccaguaugcagacauc

SEQ ID NO: 554236 - RNA, 19 nt, Homo sapiens
  misc_RNA (1)...(19): siRNA sense strand
augacgacauuguauuuga

SEQ ID NO: 554237 - RNA, 19 nt, Homo sapiens
  misc_RNA (1)...(19): siRNA sense strand
caaagagcggagagucuau

SEQ ID NO: 554238 - RNA, 19 nt, Homo sapiens
  misc_RNA (1)...(19): siRNA sense strand
aagaaggccaguccaaaug

SEQ ID NO: 554239 - RNA, 19 nt, Homo sapiens
  misc_RNA (1)...(19): siRNA sense strand
ccuccaaaccuuccauguu

SEQ ID NO: 554240 - RNA, 19 nt, Homo sapiens
  misc_RNA (1)...(19): siRNA sense strand
ugacgacauuguauuugag

SEQ ID NO: 554241 - RNA, 19 nt, Homo sapiens
  misc_RNA (1)...(19): siRNA sense strand
gagaacccaucagcgucaa

SEQ ID NO: 554242 - RNA, 19 nt, Homo sapiens
  misc_RNA (1)...(19): siRNA sense strand
cgcuuacccuuucaccuuu

SEQ ID NO: 554243 - RNA, 19 nt, Homo sapiens
  misc_RNA (1)...(19): siRNA sense strand
ucucauagaacuugacaca

SEQ ID NO: 554244 - RNA, 19 nt, Homo sapiens
  misc_RNA (1)...(19): siRNA sense strand
ggauaaggagaucuauuac

SEQ ID NO: 554245 - RNA, 19 nt, Homo sapiens
  misc_RNA (1)...(19): siRNA sense strand
ccaggcaguuccucauguc

SEQ ID NO: 554246 - RNA, 19 nt, Homo sapiens
  misc_RNA (1)...(19): siRNA sense strand
ccacagcucaacaacagau

SEQ ID NO: 554247 - RNA, 19 nt, Homo sapiens
  misc_RNA (1)...(19): siRNA sense strand
gaagauccacaagcggaau

SEQ ID NO: 554248 - RNA, 19 nt, Homo sapiens
  misc_RNA (1)...(19): siRNA sense strand
gaaggaugacaaggaggaa

SEQ ID NO: 554249 - RNA, 19 nt, Homo sapiens
  misc_RNA (1)...(19): siRNA sense strand
gaauuuggaggagaagauc

SEQ ID NO: 554250 - RNA, 19 nt, Homo sapiens
  misc_RNA (1)...(19): siRNA sense strand
cuccacagcucaacaacag

SEQ ID NO: 554251 - RNA, 19 nt, Homo sapiens
  misc_RNA (1)...(19): siRNA sense strand
ccauggaagaggcugauga

SEQ ID NO: 554252 - RNA, 19 nt, Homo sapiens
  misc_RNA (1)...(19): siRNA sense strand
ucaccaacaacaccaacaa

SEQ ID NO: 554253 - RNA, 19 nt, Homo sapiens
  misc_RNA (1)...(19): siRNA sense strand
gcuuacccuuucaccuuug

SEQ ID NO: 554254 - RNA, 19 nt, Homo sapiens
  misc_RNA (1)...(19): siRNA sense strand
agaacgagacgccaguaga

SEQ ID NO: 554255 - RNA, 19 nt, Homo sapiens
  misc_RNA (1)...(19): siRNA sense strand
ucaacacagcucaguacaa

SEQ ID NO: 554256 - RNA, 19 nt, Homo sapiens
  misc_RNA (1)...(19): siRNA sense strand
gcucuccacagcucaacaa

SEQ ID NO: 554257 - RNA, 19 nt, Homo sapiens
  misc_RNA (1)...(19): siRNA sense strand
gcucgacguucugcaaggu

SEQ ID NO: 554258 - RNA, 19 nt, Homo sapiens
  misc_RNA (1)...(19): siRNA sense strand
cuacaaagugaaagugaag

SEQ ID NO: 554259 - RNA, 19 nt, Homo sapiens
  misc_RNA (1)...(19): siRNA sense strand
acacaaaugaugacgacau

SEQ ID NO: 554260 - RNA, 19 nt, Homo sapiens
  misc_RNA (1)...(19): siRNA sense strand
gagaacgagacgccaguag

SEQ ID NO: 554261 - RNA, 19 nt, Homo sapiens
  misc_RNA (1)...(19): siRNA sense strand
cuugcgguguggacuauga

SEQ ID NO: 554262 - RNA, 19 nt, Homo sapiens
  misc_RNA (1)...(19): siRNA sense strand
acgcuuacccuuucaccuu

SEQ ID NO: 554263 - RNA, 19 nt, Homo sapiens
  misc_RNA (1)...(19): siRNA sense strand
uagaacuugacacaaauga

SEQ ID NO: 554264 - RNA, 19 nt, Homo sapiens
  misc_RNA (1)...(19): siRNA sense strand
ccaacaacaccaacaagac

SEQ ID NO: 554265 - RNA, 19 nt, Homo sapiens
  misc_RNA (1)...(19): siRNA sense strand
gggacgcgaguguucaaga

SEQ ID NO: 554266 - RNA, 19 nt, Homo sapiens
  misc_RNA (1)...(19): siRNA sense strand
gaacugcccuucacccuaa

SEQ ID NO: 554267 - RNA, 19 nt, Homo sapiens
  misc_RNA (1)...(19): siRNA sense strand
ucauagaacuugacacaaa

SEQ ID NO: 554268 - RNA, 19 nt, Homo sapiens
  misc_RNA (1)...(19): siRNA sense strand
ggacuuugcucgccagaga

SEQ ID NO: 554269 - RNA, 19 nt, Homo sapiens
  misc_RNA (1)...(19): siRNA sense strand
ggaagaggcugaugacacu

SEQ ID NO: 554270 - RNA, 19 nt, Homo sapiens
  misc_RNA (1)...(19): siRNA sense strand
ggagaucuauuaccaugga

SEQ ID NO: 554271 - RNA, 19 nt, Homo sapiens
  misc_RNA (1)...(19): siRNA sense strand
gaacuugacacaaaugaug

SEQ ID NO: 554272 - RNA, 19 nt, Homo sapiens
  misc_RNA (1)...(19): siRNA sense strand
caacacagcucaguacaag

SEQ ID NO: 554273 - RNA, 19 nt, Homo sapiens
  misc_RNA (1)...(19): siRNA sense strand
cuagaagccucucuggaua

SEQ ID NO: 554274 - RNA, 19 nt, Homo sapiens
  misc_RNA (1)...(19): siRNA sense strand
ggacgcgaguguucaagaa

SEQ ID NO: 554275 - RNA, 19 nt, Homo sapiens
  misc_RNA (1)...(19): siRNA sense strand
uggauaaggagaucuauua

SEQ ID NO: 554276 - RNA, 19 nt, Homo sapiens
  misc_RNA (1)...(19): siRNA sense strand
gagcggagagucuauguga

SEQ ID NO: 554277 - RNA, 19 nt, Homo sapiens
  misc_RNA (1)...(19): siRNA sense strand
gaacgagacgccaguagau

SEQ ID NO: 554278 - RNA, 19 nt, Homo sapiens
  misc_RNA (1)...(19): siRNA sense strand
ugagaucccuccaaaccuu

SEQ ID NO: 554279 - RNA, 19 nt, Homo sapiens
  misc_RNA (1)...(19): siRNA sense strand
gcacccagcucgacguucu

SEQ ID NO: 554280 - RNA, 19 nt, Homo sapiens
  misc_RNA (1)...(19): siRNA sense strand
ccaacaagacggugaagaa

SEQ ID NO: 554281 - RNA, 19 nt, Homo sapiens
  misc_RNA (1)...(19): siRNA sense strand
cauagaacuugacacaaau

SEQ ID NO: 554282 - RNA, 19 nt, Homo sapiens
  misc_RNA (1)...(19): siRNA sense strand
acaagacggugaagaagau

SEQ ID NO: 554283 - RNA, 19 nt, Homo sapiens
  misc_RNA (1)...(19): siRNA sense strand
caagaaggccaguccaaau

SEQ ID NO: 554284 - RNA, 19 nt, Homo sapiens
  misc_RNA (1)...(19): siRNA sense strand
gcacgaagacacgaacuug

SEQ ID NO: 554285 - RNA, 19 nt, Homo sapiens
  misc_RNA (1)...(19): siRNA sense strand
cuccaaaccuuccauguuc

SEQ ID NO: 554286 - RNA, 19 nt, Homo sapiens
  misc_RNA (1)...(19): siRNA sense strand
caggaacgccucaucaaga

SEQ ID NO: 554287 - RNA, 19 nt, Homo sapiens
  misc_RNA (1)...(19): siRNA sense strand
gcaugaaggaugacaagga

SEQ ID NO: 554288 - RNA, 19 nt, Homo sapiens
  misc_RNA (1)...(19): siRNA sense strand
auaaggagaucuauuacca

SEQ ID NO: 554289 - RNA, 19 nt, Homo sapiens
  misc_RNA (1)...(19): siRNA sense strand
cgagcacgcuuacccuuuc

SEQ ID NO: 554290 - RNA, 19 nt, Homo sapiens
  misc_RNA (1)...(19): siRNA sense strand
ucaaagagcggagagucua

SEQ ID NO: 554291 - RNA, 19 nt, Homo sapiens
  misc_RNA (1)...(19): siRNA sense strand
gacacgaacuuggccucua

SEQ ID NO: 554292 - RNA, 19 nt, Homo sapiens
  misc_RNA (1)...(19): siRNA sense strand
caaagggacgcgaguguuc

SEQ ID NO: 554293 - RNA, 19 nt, Homo sapiens
  misc_RNA (1)...(19): siRNA sense strand
aggaacgccucaucaagaa

SEQ ID NO: 554294 - RNA, 19 nt, Homo sapiens
  misc_RNA (1)...(19): siRNA sense strand
auggaaagcucaccgucua

SEQ ID NO: 554295 - RNA, 19 nt, Homo sapiens
  misc_RNA (1)...(19): siRNA sense strand
gaccugcgccuuccgcuau

SEQ ID NO: 554296 - RNA, 19 nt, Homo sapiens
  misc_RNA (1)...(19): siRNA sense strand
caguacaagugcccuguug

SEQ ID NO: 554297 - RNA, 19 nt, Homo sapiens
  misc_RNA (1)...(19): siRNA sense strand
cggagaauuuggaggagaa

SEQ ID NO: 554298 - RNA, 19 nt, Homo sapiens
  misc_RNA (1)...(19): siRNA sense strand
ccugguggauccugaguau

SEQ ID NO: 554299 - RNA, 19 nt, Homo sapiens
  misc_RNA (1)...(19): siRNA sense strand
ugaugacgacauuguauuu

SEQ ID NO: 554300 - RNA, 19 nt, Homo sapiens
  misc_RNA (1)...(19): siRNA sense strand
gaaggugccaaccgugaga

SEQ ID NO: 554301 - RNA, 19 nt, Homo sapiens
  misc_RNA (1)...(19): siRNA sense strand
gcaggaacgccucaucaag

SEQ ID NO: 554302 - RNA, 19 nt, Homo sapiens
  misc_RNA (1)...(19): siRNA sense strand
ccuacaaagugaaagugaa

SEQ ID NO: 554303 - RNA, 19 nt, Homo sapiens
  misc_RNA (1)...(19): siRNA sense strand
acacgaacuuggccucuag

SEQ ID NO: 554304 - RNA, 19 nt, Homo sapiens
  misc_RNA (1)...(19): siRNA sense strand
ugcaaggucuacacacuga

SEQ ID NO: 554305 - RNA, 19 nt, Homo sapiens
  misc_RNA (1)...(19): siRNA sense strand
gaucuauuaccauggagaa

SEQ ID NO: 554306 - RNA, 19 nt, Homo sapiens
  misc_RNA (1)...(19): siRNA sense strand
cauuguauuugaggacuuu

SEQ ID NO: 554307 - RNA, 19 nt, Homo sapiens
  misc_RNA (1)...(19): siRNA sense strand
ccuagaagccucucuggau

SEQ ID NO: 554308 - RNA, 19 nt, Homo sapiens
  misc_RNA (1)...(19): siRNA sense strand
ucaagaaggccaguccaaa

SEQ ID NO: 554309 - RNA, 19 nt, Homo sapiens
  misc_RNA (1)...(19): siRNA sense strand
uagaagccucucuggauaa

SEQ ID NO: 554310 - RNA, 19 nt, Homo sapiens
  misc_RNA (1)...(19): siRNA sense strand
gcgagcacgcuuacccuuu

SEQ ID NO: 554311 - RNA, 19 nt, Homo sapiens
  misc_RNA (1)...(19): siRNA sense strand
aagccucucuggauaagga

SEQ ID NO: 554312 - RNA, 19 nt, Homo sapiens
  misc_RNA (1)...(19): siRNA sense strand
gagcacgcuuacccuuuca

SEQ ID NO: 554313 - RNA, 19 nt, Homo sapiens
  misc_RNA (1)...(19): siRNA sense strand
aaccuuccauguucuguga

SEQ ID NO: 554314 - RNA, 19 nt, Homo sapiens
  misc_RNA (1)...(19): siRNA sense strand
acacagcucaguacaagug

SEQ ID NO: 554315 - RNA, 19 nt, Homo sapiens
  misc_RNA (1)...(19): siRNA sense strand
gaucucagugcgccaguau

SEQ ID NO: 554316 - RNA, 19 nt, Homo sapiens
  misc_RNA (1)...(19): siRNA sense strand
auaccaaucucauagaacu

SEQ ID NO: 554317 - RNA, 19 nt, Homo sapiens
  misc_RNA (1)...(19): siRNA sense strand
caacaagacggugaagaag

SEQ ID NO: 554318 - RNA, 19 nt, Homo sapiens
  misc_RNA (1)...(19): siRNA sense strand
gaugacgacauuguauuug

SEQ ID NO: 554319 - RNA, 19 nt, Homo sapiens
  misc_RNA (1)...(19): siRNA sense strand
gacaaagggacgcgagugu

SEQ ID NO: 554320 - RNA, 19 nt, Homo sapiens
  misc_RNA (1)...(19): siRNA sense strand
ccaaucucauagaacuuga

SEQ ID NO: 554321 - RNA, 19 nt, Homo sapiens
  misc_RNA (1)...(19): siRNA sense strand
gcgccaguaugcagacauc

SEQ ID NO: 554322 - RNA, 19 nt, Homo sapiens
  misc_RNA (1)...(19): siRNA sense strand
augacgacauuguauuuga

SEQ ID NO: 554323 - RNA, 19 nt, Homo sapiens
  misc_RNA (1)...(19): siRNA sense strand
caaagagcggagagucuau

SEQ ID NO: 554324 - RNA, 19 nt, Homo sapiens
  misc_RNA (1)...(19): siRNA sense strand
aagaaggccaguccaaaug

SEQ ID NO: 554325 - RNA, 19 nt, Homo sapiens
  misc_RNA (1)...(19): siRNA sense strand
ccuccaaaccuuccauguu

SEQ ID NO: 554326 - RNA, 19 nt, Homo sapiens
  misc_RNA (1)...(19): siRNA sense strand
ugacgacauuguauuugag

SEQ ID NO: 554327 - RNA, 19 nt, Homo sapiens
  misc_RNA (1)...(19): siRNA sense strand
gagaacccaucagcgucaa

SEQ ID NO: 554328 - RNA, 19 nt, Homo sapiens
  misc_RNA (1)...(19): siRNA sense strand
cgcuuacccuuucaccuuu

SEQ ID NO: 554329 - RNA, 19 nt, Homo sapiens
  misc_RNA (1)...(19): siRNA sense strand
ucucauagaacuugacaca

SEQ ID NO: 554330 - RNA, 19 nt, Homo sapiens
  misc_RNA (1)...(19): siRNA sense strand
ggauaaggagaucuauuac

SEQ ID NO: 554331 - RNA, 19 nt, Homo sapiens
  misc_RNA (1)...(19): siRNA sense strand
ccaggcaguuccucauguc

SEQ ID NO: 554332 - RNA, 19 nt, Homo sapiens
  misc_RNA (1)...(19): siRNA sense strand
ccacagcucaacaacagau

SEQ ID NO: 554333 - RNA, 19 nt, Homo sapiens
  misc_RNA (1)...(19): siRNA sense strand
gaagauccacaagcggaau

SEQ ID NO: 554334 - RNA, 19 nt, Homo sapiens
  misc_RNA (1)...(19): siRNA sense strand
gaaggaugacaaggaggaa

SEQ ID NO: 554335 - RNA, 19 nt, Homo sapiens
  misc_RNA (1)...(19): siRNA sense strand
gaauuuggaggagaagauc

SEQ ID NO: 554336 - RNA, 19 nt, Homo sapiens
  misc_RNA (1)...(19): siRNA sense strand
cuccacagcucaacaacag

SEQ ID NO: 554337 - RNA, 19 nt, Homo sapiens
  misc_RNA (1)...(19): siRNA sense strand
ccauggaagaggcugauga

SEQ ID NO: 554338 - RNA, 19 nt, Homo sapiens
  misc_RNA (1)...(19): siRNA sense strand
ucaccaacaacaccaacaa

SEQ ID NO: 554339 - RNA, 19 nt, Homo sapiens
  misc_RNA (1)...(19): siRNA sense strand
gcuuacccuuucaccuuug

SEQ ID NO: 554340 - RNA, 19 nt, Homo sapiens
  misc_RNA (1)...(19): siRNA sense strand
agaacgagacgccaguaga

SEQ ID NO: 554341 - RNA, 19 nt, Homo sapiens
  misc_RNA (1)...(19): siRNA sense strand
ucaacacagcucaguacaa

SEQ ID NO: 554342 - RNA, 19 nt, Homo sapiens
  misc_RNA (1)...(19): siRNA sense strand
gcucuccacagcucaacaa

SEQ ID NO: 554343 - RNA, 19 nt, Homo sapiens
  misc_RNA (1)...(19): siRNA sense strand
gcucgacguucugcaaggu

SEQ ID NO: 554344 - RNA, 19 nt, Homo sapiens
  misc_RNA (1)...(19): siRNA sense strand
cuacaaagugaaagugaag

SEQ ID NO: 554345 - RNA, 19 nt, Homo sapiens
  misc_RNA (1)...(19): siRNA sense strand
acacaaaugaugacgacau

SEQ ID NO: 554346 - RNA, 19 nt, Homo sapiens
  misc_RNA (1)...(19): siRNA sense strand
gagaacgagacgccaguag

SEQ ID NO: 554347 - RNA, 19 nt, Homo sapiens
  misc_RNA (1)...(19): siRNA sense strand
cuugcgguguggacuauga

SEQ ID NO: 554348 - RNA, 19 nt, Homo sapiens
  misc_RNA (1)...(19): siRNA sense strand
acgcuuacccuuucaccuu

SEQ ID NO: 554349 - RNA, 19 nt, Homo sapiens
  misc_RNA (1)...(19): siRNA sense strand
uagaacuugacacaaauga

SEQ ID NO: 554350 - RNA, 19 nt, Homo sapiens
  misc_RNA (1)...(19): siRNA sense strand
ccaacaacaccaacaagac

SEQ ID NO: 554351 - RNA, 19 nt, Homo sapiens
  misc_RNA (1)...(19): siRNA sense strand
gggacgcgaguguucaaga

SEQ ID NO: 554352 - RNA, 19 nt, Homo sapiens
  misc_RNA (1)...(19): siRNA sense strand
ccacuaagguccaagaaga

SEQ ID NO: 554353 - RNA, 19 nt, Homo sapiens
  misc_RNA (1)...(19): siRNA sense strand
gcauaucccacuccacuaa

SEQ ID NO: 554354 - RNA, 19 nt, Homo sapiens
  misc_RNA (1)...(19): siRNA sense strand
uauaacagggucacaguaa

SEQ ID NO: 554355 - RNA, 19 nt, Homo sapiens
  misc_RNA (1)...(19): siRNA sense strand
uaacagggucacaguaaug

SEQ ID NO: 554356 - RNA, 19 nt, Homo sapiens
  misc_RNA (1)...(19): siRNA sense strand
cugcaguacuuguuauuau

SEQ ID NO: 554357 - RNA, 19 nt, Homo sapiens
  misc_RNA (1)...(19): siRNA sense strand
ccacugcaguacuuguuau

SEQ ID NO: 554358 - RNA, 19 nt, Homo sapiens
  misc_RNA (1)...(19): siRNA sense strand
gaaugcacgcuacaggaaa

SEQ ID NO: 554359 - RNA, 19 nt, Homo sapiens
  misc_RNA (1)...(19): siRNA sense strand
cuguguagcuaaaucauau

SEQ ID NO: 554360 - RNA, 19 nt, Homo sapiens
  misc_RNA (1)...(19): siRNA sense strand
gcaguacuuguuauuauca

SEQ ID NO: 554361 - RNA, 19 nt, Homo sapiens
  misc_RNA (1)...(19): siRNA sense strand
agaguccacuugcugugua

SEQ ID NO: 554362 - RNA, 19 nt, Homo sapiens
  misc_RNA (1)...(19): siRNA sense strand
gcuguguagcuaaaucaua

SEQ ID NO: 554363 - RNA, 19 nt, Homo sapiens
  misc_RNA (1)...(19): siRNA sense strand
ccauuccgcuccugaugug

SEQ ID NO: 554364 - RNA, 19 nt, Homo sapiens
  misc_RNA (1)...(19): siRNA sense strand
aaaagaacgucaccucaga

SEQ ID NO: 554365 - RNA, 19 nt, Homo sapiens
  misc_RNA (1)...(19): siRNA sense strand
gugcaggauugcccagaau

SEQ ID NO: 554366 - RNA, 19 nt, Homo sapiens
  misc_RNA (1)...(19): siRNA sense strand
gguccaagaagacgauguu

SEQ ID NO: 554367 - RNA, 19 nt, Homo sapiens
  misc_RNA (1)...(19): siRNA sense strand
gccacugcaguacuuguua

SEQ ID NO: 554368 - RNA, 19 nt, Homo sapiens
  misc_RNA (1)...(19): siRNA sense strand
gcgugccacugcaguacuu

SEQ ID NO: 554369 - RNA, 19 nt, Homo sapiens
  misc_RNA (1)...(19): siRNA sense strand
agaaugcacgcuacaggaa

SEQ ID NO: 554370 - RNA, 19 nt, Homo sapiens
  misc_RNA (1)...(19): siRNA sense strand
cuaucuuucuggucacauu

SEQ ID NO: 554371 - RNA, 19 nt, Homo sapiens
  misc_RNA (1)...(19): siRNA sense strand
ccacuugcuguguagcuaa

SEQ ID NO: 554372 - RNA, 19 nt, Homo sapiens
  misc_RNA (1)...(19): siRNA sense strand
auaacagggucacaguaau

SEQ ID NO: 554373 - RNA, 19 nt, Homo sapiens
  misc_RNA (1)...(19): siRNA sense strand
ccacuccacuaagguccaa

SEQ ID NO: 554374 - RNA, 19 nt, Homo sapiens
  misc_RNA (1)...(19): siRNA sense strand
ggucacauugucgguguuu

SEQ ID NO: 554375 - RNA, 19 nt, Homo sapiens
  misc_RNA (1)...(19): siRNA sense strand
ugcaguacuuguuauuauc

SEQ ID NO: 554376 - RNA, 19 nt, Homo sapiens
  misc_RNA (1)...(19): siRNA sense strand
gggcugcugcuucucuaga

SEQ ID NO: 554377 - RNA, 19 nt, Homo sapiens
  misc_RNA (1)...(19): siRNA sense strand
cauauaacagggucacagu

SEQ ID NO: 554378 - RNA, 19 nt, Homo sapiens
  misc_RNA (1)...(19): siRNA sense strand
cacuugcuguguagcuaaa

SEQ ID NO: 554379 - RNA, 19 nt, Homo sapiens
  misc_RNA (1)...(19): siRNA sense strand
ugugcaggauugcccagaa

SEQ ID NO: 554380 - RNA, 19 nt, Homo sapiens
  misc_RNA (1)...(19): siRNA sense strand
caacaucgauaguguauua

SEQ ID NO: 554381 - RNA, 19 nt, Homo sapiens
  misc_RNA (1)...(19): siRNA sense strand
gauaacauguccacuguaa

SEQ ID NO: 554382 - RNA, 19 nt, Homo sapiens
  misc_RNA (1)...(19): siRNA sense strand
caacauugccuacuuauuu

SEQ ID NO: 554383 - RNA, 19 nt, Homo sapiens
  misc_RNA (1)...(19): siRNA sense strand
ugaagaaggugaacaguuu

SEQ ID NO: 554384 - RNA, 19 nt, Homo sapiens
  misc_RNA (1)...(19): siRNA sense strand
uaacacaacuggaauuuca

SEQ ID NO: 554385 - RNA, 19 nt, Homo sapiens
  misc_RNA (1)...(19): siRNA sense strand
aaacaacauugccuacuua

SEQ ID NO: 554386 - RNA, 19 nt, Homo sapiens
  misc_RNA (1)...(19): siRNA sense strand
gcuauuaaaugcuacagua

SEQ ID NO: 554387 - RNA, 19 nt, Homo sapiens
  misc_RNA (1)...(19): siRNA sense strand
ugagagcaguaacaaauua

SEQ ID NO: 554388 - RNA, 19 nt, Homo sapiens
  misc_RNA (1)...(19): siRNA sense strand
ccauugggaugauuucuua

SEQ ID NO: 554389 - RNA, 19 nt, Homo sapiens
  misc_RNA (1)...(19): siRNA sense strand
cgucaaggcuuacaucaaa

SEQ ID NO: 554390 - RNA, 19 nt, Homo sapiens
  misc_RNA (1)...(19): siRNA sense strand
ggacauaaccugagaugga

SEQ ID NO: 554391 - RNA, 19 nt, Homo sapiens
  misc_RNA (1)...(19): siRNA sense strand
cagaaacccucucaucaaa

SEQ ID NO: 554392 - RNA, 19 nt, Homo sapiens
  misc_RNA (1)...(19): siRNA sense strand
gaaagaugcauaugaagaa

SEQ ID NO: 554393 - RNA, 19 nt, Homo sapiens
  misc_RNA (1)...(19): siRNA sense strand
ugagauggauucuuacauu

SEQ ID NO: 554394 - RNA, 19 nt, Homo sapiens
  misc_RNA (1)...(19): siRNA sense strand
aaccugagauggauucuua

SEQ ID NO: 554395 - RNA, 19 nt, Homo sapiens
  misc_RNA (1)...(19): siRNA sense strand
uaucaacgaugguguacua

SEQ ID NO: 554396 - RNA, 19 nt, Homo sapiens
  misc_RNA (1)...(19): siRNA sense strand
cuauauggcuugcaaugua

SEQ ID NO: 554397 - RNA, 19 nt, Homo sapiens
  misc_RNA (1)...(19): siRNA sense strand
ugaaauuccugcaagauga

SEQ ID NO: 554398 - RNA, 19 nt, Homo sapiens
  misc_RNA (1)...(19): siRNA sense strand
gaaaccagauuuaaacaac

SEQ ID NO: 554399 - RNA, 19 nt, Homo sapiens
  misc_RNA (1)...(19): siRNA sense strand
gaaggacauucaaaccaaa

SEQ ID NO: 554400 - RNA, 19 nt, Homo sapiens
  misc_RNA (1)...(19): siRNA sense strand
caaacaacauugccuacuu

SEQ ID NO: 554401 - RNA, 19 nt, Homo sapiens
  misc_RNA (1)...(19): siRNA sense strand
ggacgaagacgaagaggaa

SEQ ID NO: 554402 - RNA, 19 nt, Homo sapiens
  misc_RNA (1)...(19): siRNA sense strand
ggagugagauuucuucaac

SEQ ID NO: 554403 - RNA, 19 nt, Homo sapiens
  misc_RNA (1)...(19): siRNA sense strand
ucggcaagaucaagaauua

SEQ ID NO: 554404 - RNA, 19 nt, Homo sapiens
  misc_RNA (1)...(19): siRNA sense strand
gcaacauacugguggauga

SEQ ID NO: 554405 - RNA, 19 nt, Homo sapiens
  misc_RNA (1)...(19): siRNA sense strand
ugaagaauauggucaaauc

SEQ ID NO: 554406 - RNA, 19 nt, Homo sapiens
  misc_RNA (1)...(19): siRNA sense strand
uacauucgcucuccuguuu

SEQ ID NO: 554407 - RNA, 19 nt, Homo sapiens
  misc_RNA (1)...(19): siRNA sense strand
gcacuuacgauaaccaauu

SEQ ID NO: 554408 - RNA, 19 nt, Homo sapiens
  misc_RNA (1)...(19): siRNA sense strand
ugaaauagcagaaggcauu

SEQ ID NO: 554409 - RNA, 19 nt, Homo sapiens
  misc_RNA (1)...(19): siRNA sense strand
gggaugauuucuuaugcua

SEQ ID NO: 554410 - RNA, 19 nt, Homo sapiens
  misc_RNA (1)...(19): siRNA sense strand
uggaugaacacacuuauua

SEQ ID NO: 554411 - RNA, 19 nt, Homo sapiens
  misc_RNA (1)...(19): siRNA sense strand
ggacaucggaguacaguau

SEQ ID NO: 554412 - RNA, 19 nt, Homo sapiens
  misc_RNA (1)...(19): siRNA sense strand
ccugaaagaugcauaugaa

SEQ ID NO: 554413 - RNA, 19 nt, Homo sapiens
  misc_RNA (1)...(19): siRNA sense strand
gagauuucuucaaccauuu

SEQ ID NO: 554414 - RNA, 19 nt, Homo sapiens
  misc_RNA (1)...(19): siRNA sense strand
acacuacguucuagacuuu

SEQ ID NO: 554415 - RNA, 19 nt, Homo sapiens
  misc_RNA (1)...(19): siRNA sense strand
ugaauuggguugugaggaa

SEQ ID NO: 554416 - RNA, 19 nt, Homo sapiens
  misc_RNA (1)...(19): siRNA sense strand
cuaaucaacucaugugguu

SEQ ID NO: 554417 - RNA, 19 nt, Homo sapiens
  misc_RNA (1)...(19): siRNA sense strand
gccagauauugacuuauua

SEQ ID NO: 554418 - RNA, 19 nt, Homo sapiens
  misc_RNA (1)...(19): siRNA sense strand
gaaacccucucaucaaagg

SEQ ID NO: 554419 - RNA, 19 nt, Homo sapiens
  misc_RNA (1)...(19): siRNA sense strand
gcaugaaaccagauuuaaa

SEQ ID NO: 554420 - RNA, 19 nt, Homo sapiens
  misc_RNA (1)...(19): siRNA sense strand
ggacagaggcagagaaucu

SEQ ID NO: 554421 - RNA, 19 nt, Homo sapiens
  misc_RNA (1)...(19): siRNA sense strand
ucagccagauauugacuua

SEQ ID NO: 554422 - RNA, 19 nt, Homo sapiens
  misc_RNA (1)...(19): siRNA sense strand
ucaaagccaucauaagugu

SEQ ID NO: 554423 - RNA, 19 nt, Homo sapiens
  misc_RNA (1)...(19): siRNA sense strand
gaaaguaaagccuccugaa

SEQ ID NO: 554424 - RNA, 19 nt, Homo sapiens
  misc_RNA (1)...(19): siRNA sense strand
uaacauguccacuguaaug

SEQ ID NO: 554425 - RNA, 19 nt, Homo sapiens
  misc_RNA (1)...(19): siRNA sense strand
ggaggaaacaagaaugaaa

SEQ ID NO: 554426 - RNA, 19 nt, Homo sapiens
  misc_RNA (1)...(19): siRNA sense strand
gagauggauucuuacauuc

SEQ ID NO: 554427 - RNA, 19 nt, Homo sapiens
  misc_RNA (1)...(19): siRNA sense strand
gguguugccuuuuauuuua

SEQ ID NO: 554428 - RNA, 19 nt, Homo sapiens
  misc_RNA (1)...(19): siRNA sense strand
ggaguacaguauaaacaau

SEQ ID NO: 554429 - RNA, 19 nt, Homo sapiens
  misc_RNA (1)...(19): siRNA sense strand
caacuuagucgccauugaa

SEQ ID NO: 554430 - RNA, 19 nt, Homo sapiens
  misc_RNA (1)...(19): siRNA sense strand
cagaaggcauuguuucaga

SEQ ID NO: 554431 - RNA, 19 nt, Homo sapiens
  misc_RNA (1)...(19): siRNA sense strand
ugagauuucuucaaccauu

SEQ ID NO: 554432 - RNA, 19 nt, Homo sapiens
  misc_RNA (1)...(19): siRNA sense strand
gugaacaguuuccugacua

SEQ ID NO: 554433 - RNA, 19 nt, Homo sapiens
  misc_RNA (1)...(19): siRNA sense strand
ggaggaagaugaggaugau

SEQ ID NO: 554434 - RNA, 19 nt, Homo sapiens
  misc_RNA (1)...(19): siRNA sense strand
aaaguucacuggagcaaug

SEQ ID NO: 554435 - RNA, 19 nt, Homo sapiens
  misc_RNA (1)...(19): siRNA sense strand
gaguuucucuugagugaug

SEQ ID NO: 554436 - RNA, 19 nt, Homo sapiens
  misc_RNA (1)...(19): siRNA sense strand
gcgugauucugcucuauaa

SEQ ID NO: 554437 - RNA, 19 nt, Homo sapiens
  misc_RNA (1)...(19): siRNA sense strand
ggugaaaguucgcuuccuu

SEQ ID NO: 554438 - RNA, 19 nt, Homo sapiens
  misc_RNA (1)...(19): siRNA sense strand
uagaugcgguugucacuga

SEQ ID NO: 554439 - RNA, 19 nt, Homo sapiens
  misc_RNA (1)...(19): siRNA sense strand
cacuuacgauaaccaauua

SEQ ID NO: 554440 - RNA, 19 nt, Homo sapiens
  misc_RNA (1)...(19): siRNA sense strand
ggucuucuguaugcacuua

SEQ ID NO: 554441 - RNA, 19 nt, Homo sapiens
  misc_RNA (1)...(19): siRNA sense strand
gcaucuauagcauccauua

SEQ ID NO: 554442 - RNA, 19 nt, Homo sapiens
  misc_RNA (1)...(19): siRNA sense strand
caccacaaccuucucaaua

SEQ ID NO: 554443 - RNA, 19 nt, Homo sapiens
  misc_RNA (1)...(19): siRNA sense strand
gcacgagcgcuguaucaaa

SEQ ID NO: 554444 - RNA, 19 nt, Homo sapiens
  misc_RNA (1)...(19): siRNA sense strand
gaagcaaccagaaguagga

SEQ ID NO: 554445 - RNA, 19 nt, Homo sapiens
  misc_RNA (1)...(19): siRNA sense strand
uugcucagcugaagaauau

SEQ ID NO: 554446 - RNA, 19 nt, Homo sapiens
  misc_RNA (1)...(19): siRNA sense strand
gaacauuggccacaagaag

SEQ ID NO: 554447 - RNA, 19 nt, Homo sapiens
  misc_RNA (1)...(19): siRNA sense strand
ggacuaaaaugccauggaa

SEQ ID NO: 554448 - RNA, 19 nt, Homo sapiens
  misc_RNA (1)...(19): siRNA sense strand
ggccauguauucaagagaa

SEQ ID NO: 554449 - RNA, 19 nt, Homo sapiens
  misc_RNA (1)...(19): siRNA sense strand
caugaauccucagaaagua

SEQ ID NO: 554450 - RNA, 19 nt, Homo sapiens
  misc_RNA (1)...(19): siRNA sense strand
ggacagagacagcuauuuu

SEQ ID NO: 554451 - RNA, 19 nt, Homo sapiens
  misc_RNA (1)...(19): siRNA sense strand
ggaaaacacuuaugaaucg

SEQ ID NO: 554452 - RNA, 19 nt, Homo sapiens
  misc_RNA (1)...(19): siRNA sense strand
gagaaggaacuuugaagga

SEQ ID NO: 554453 - RNA, 19 nt, Homo sapiens
  misc_RNA (1)...(19): siRNA sense strand
cagcuguucuugcuacauu

SEQ ID NO: 554454 - RNA, 19 nt, Homo sapiens
  misc_RNA (1)...(19): siRNA sense strand
acaaauaacacaacuggaa

SEQ ID NO: 554455 - RNA, 19 nt, Homo sapiens
  misc_RNA (1)...(19): siRNA sense strand
gugcaugucugugaaauag

SEQ ID NO: 554456 - RNA, 19 nt, Homo sapiens
  misc_RNA (1)...(19): siRNA sense strand
cacaacacauggcuucauu

SEQ ID NO: 554457 - RNA, 19 nt, Homo sapiens
  misc_RNA (1)...(19): siRNA sense strand
gaacugacggauacaaaca

SEQ ID NO: 554458 - RNA, 19 nt, Homo sapiens
  misc_RNA (1)...(19): siRNA sense strand
ggaaguguccuaagagaag

SEQ ID NO: 554459 - RNA, 19 nt, Homo sapiens
  misc_RNA (1)...(19): siRNA sense strand
gcagugguuuagcuacauu

SEQ ID NO: 554460 - RNA, 19 nt, Homo sapiens
  misc_RNA (1)...(19): siRNA sense strand
gcagucaaagccaucauaa

SEQ ID NO: 554461 - RNA, 19 nt, Homo sapiens
  misc_RNA (1)...(19): siRNA sense strand
gcaaugagagcaguaacaa

SEQ ID NO: 554462 - RNA, 19 nt, Homo sapiens
  misc_RNA (1)...(19): siRNA sense strand
gcagcauucuuauuaugga

SEQ ID NO: 554463 - RNA, 19 nt, Homo sapiens
  misc_RNA (1)...(19): siRNA sense strand
accacaaccuucucaauaa

SEQ ID NO: 554464 - RNA, 19 nt, Homo sapiens
  misc_RNA (1)...(19): siRNA sense strand
ccacauggacaucggagua

SEQ ID NO: 554465 - RNA, 19 nt, Homo sapiens
  misc_RNA (1)...(19): siRNA sense strand
ggagcaauguaaaugaauc

SEQ ID NO: 554466 - RNA, 19 nt, Homo sapiens
  misc_RNA (1)...(19): siRNA sense strand
gaaacaagaaugaaagaac

SEQ ID NO: 554467 - RNA, 19 nt, Homo sapiens
  misc_RNA (1)...(19): siRNA sense strand
gacauaaccugagauggau

SEQ ID NO: 554468 - RNA, 19 nt, Homo sapiens
  misc_RNA (1)...(19): siRNA sense strand
ccuggucccucaugucuuu

SEQ ID NO: 554469 - RNA, 19 nt, Homo sapiens
  misc_RNA (1)...(19): siRNA sense strand
caaaugcacagaugacaga

SEQ ID NO: 554470 - RNA, 19 nt, Homo sapiens
  misc_RNA (1)...(19): siRNA sense strand
gaacuaugaaggcacaaug

SEQ ID NO: 554471 - RNA, 19 nt, Homo sapiens
  misc_RNA (1)...(19): siRNA sense strand
gaaggacucaccaccauuc

SEQ ID NO: 554472 - RNA, 19 nt, Homo sapiens
  misc_RNA (1)...(19): siRNA sense strand
uauggaagcugaccaaacu

SEQ ID NO: 554473 - RNA, 19 nt, Homo sapiens
  misc_RNA (1)...(19): siRNA sense strand
ccucaugucuuucuguugu

SEQ ID NO: 554474 - RNA, 19 nt, Homo sapiens
  misc_RNA (1)...(19): siRNA sense strand
gaaaggcaucaaacuucua

SEQ ID NO: 554475 - RNA, 19 nt, Homo sapiens
  misc_RNA (1)...(19): siRNA sense strand
aaaucggacuccaucuaua

SEQ ID NO: 554476 - RNA, 19 nt, Homo sapiens
  misc_RNA (1)...(19): siRNA sense strand
caaaucggacuccaucuau

SEQ ID NO: 554477 - RNA, 19 nt, Homo sapiens
  misc_RNA (1)...(19): siRNA sense strand
caacguaugcuggaacuga

SEQ ID NO: 554478 - RNA, 19 nt, Homo sapiens
  misc_RNA (1)...(19): siRNA sense strand
ccagaugggugcagugaag

SEQ ID NO: 554479 - RNA, 19 nt, Homo sapiens
  misc_RNA (1)...(19): siRNA sense strand
ucucucagcugccaacaga

SEQ ID NO: 554480 - RNA, 19 nt, Homo sapiens
  misc_RNA (1)...(19): siRNA sense strand
caacaucgauaguguauua

SEQ ID NO: 554481 - RNA, 19 nt, Homo sapiens
  misc_RNA (1)...(19): siRNA sense strand
gauaacauguccacuguaa

SEQ ID NO: 554482 - RNA, 19 nt, Homo sapiens
  misc_RNA (1)...(19): siRNA sense strand
caacauugccuacuuauuu

SEQ ID NO: 554483 - RNA, 19 nt, Homo sapiens
  misc_RNA (1)...(19): siRNA sense strand
ugaagaaggugaacaguuu

SEQ ID NO: 554484 - RNA, 19 nt, Homo sapiens
  misc_RNA (1)...(19): siRNA sense strand
uaacacaacuggaauuuca

SEQ ID NO: 554485 - RNA, 19 nt, Homo sapiens
  misc_RNA (1)...(19): siRNA sense strand
aaacaacauugccuacuua

SEQ ID NO: 554486 - RNA, 19 nt, Homo sapiens
  misc_RNA (1)...(19): siRNA sense strand
gcuauuaaaugcuacagua

SEQ ID NO: 554487 - RNA, 19 nt, Homo sapiens
  misc_RNA (1)...(19): siRNA sense strand
ugagagcaguaacaaauua

SEQ ID NO: 554488 - RNA, 19 nt, Homo sapiens
  misc_RNA (1)...(19): siRNA sense strand
ccauugggaugauuucuua

SEQ ID NO: 554489 - RNA, 19 nt, Homo sapiens
  misc_RNA (1)...(19): siRNA sense strand
cgucaaggcuuacaucaaa

SEQ ID NO: 554490 - RNA, 19 nt, Homo sapiens
  misc_RNA (1)...(19): siRNA sense strand
ggacauaaccugagaugga

SEQ ID NO: 554491 - RNA, 19 nt, Homo sapiens
  misc_RNA (1)...(19): siRNA sense strand
cagaaacccucucaucaaa

SEQ ID NO: 554492 - RNA, 19 nt, Homo sapiens
  misc_RNA (1)...(19): siRNA sense strand
gaaagaugcauaugaagaa

SEQ ID NO: 554493 - RNA, 19 nt, Homo sapiens
  misc_RNA (1)...(19): siRNA sense strand
ugagauggauucuuacauu

SEQ ID NO: 554494 - RNA, 19 nt, Homo sapiens
  misc_RNA (1)...(19): siRNA sense strand
aaccugagauggauucuua

SEQ ID NO: 554495 - RNA, 19 nt, Homo sapiens
  misc_RNA (1)...(19): siRNA sense strand
uaucaacgaugguguacua

SEQ ID NO: 554496 - RNA, 19 nt, Homo sapiens
  misc_RNA (1)...(19): siRNA sense strand
cuauauggcuugcaaugua

SEQ ID NO: 554497 - RNA, 19 nt, Homo sapiens
  misc_RNA (1)...(19): siRNA sense strand
ugaaauuccugcaagauga

SEQ ID NO: 554498 - RNA, 19 nt, Homo sapiens
  misc_RNA (1)...(19): siRNA sense strand
gaaaccagauuuaaacaac

SEQ ID NO: 554499 - RNA, 19 nt, Homo sapiens
  misc_RNA (1)...(19): siRNA sense strand
gaaggacauucaaaccaaa

SEQ ID NO: 554500 - RNA, 19 nt, Homo sapiens
  misc_RNA (1)...(19): siRNA sense strand
caaacaacauugccuacuu

SEQ ID NO: 554501 - RNA, 19 nt, Homo sapiens
  misc_RNA (1)...(19): siRNA sense strand
ggacgaagacgaagaggaa

SEQ ID NO: 554502 - RNA, 19 nt, Homo sapiens
  misc_RNA (1)...(19): siRNA sense strand
ggagugagauuucuucaac

SEQ ID NO: 554503 - RNA, 19 nt, Homo sapiens
  misc_RNA (1)...(19): siRNA sense strand
ucggcaagaucaagaauua

SEQ ID NO: 554504 - RNA, 19 nt, Homo sapiens
  misc_RNA (1)...(19): siRNA sense strand
gcaacauacugguggauga

SEQ ID NO: 554505 - RNA, 19 nt, Homo sapiens
  misc_RNA (1)...(19): siRNA sense strand
ugaagaauauggucaaauc

SEQ ID NO: 554506 - RNA, 19 nt, Homo sapiens
  misc_RNA (1)...(19): siRNA sense strand
uacauucgcucuccuguuu

SEQ ID NO: 554507 - RNA, 19 nt, Homo sapiens
  misc_RNA (1)...(19): siRNA sense strand
gcacuuacgauaaccaauu

SEQ ID NO: 554508 - RNA, 19 nt, Homo sapiens
  misc_RNA (1)...(19): siRNA sense strand
ugaaauagcagaaggcauu

SEQ ID NO: 554509 - RNA, 19 nt, Homo sapiens
  misc_RNA (1)...(19): siRNA sense strand
gggaugauuucuuaugcua

SEQ ID NO: 554510 - RNA, 19 nt, Homo sapiens
  misc_RNA (1)...(19): siRNA sense strand
uggaugaacacacuuauua

SEQ ID NO: 554511 - RNA, 19 nt, Homo sapiens
  misc_RNA (1)...(19): siRNA sense strand
ggacaucggaguacaguau

SEQ ID NO: 554512 - RNA, 19 nt, Homo sapiens
  misc_RNA (1)...(19): siRNA sense strand
ccugaaagaugcauaugaa

SEQ ID NO: 554513 - RNA, 19 nt, Homo sapiens
  misc_RNA (1)...(19): siRNA sense strand
gagauuucuucaaccauuu

SEQ ID NO: 554514 - RNA, 19 nt, Homo sapiens
  misc_RNA (1)...(19): siRNA sense strand
acacuacguucuagacuuu

SEQ ID NO: 554515 - RNA, 19 nt, Homo sapiens
  misc_RNA (1)...(19): siRNA sense strand
ugaauuggguugugaggaa

SEQ ID NO: 554516 - RNA, 19 nt, Homo sapiens
  misc_RNA (1)...(19): siRNA sense strand
cuaaucaacucaugugguu

SEQ ID NO: 554517 - RNA, 19 nt, Homo sapiens
  misc_RNA (1)...(19): siRNA sense strand
gccagauauugacuuauua

SEQ ID NO: 554518 - RNA, 19 nt, Homo sapiens
  misc_RNA (1)...(19): siRNA sense strand
gaaacccucucaucaaagg

SEQ ID NO: 554519 - RNA, 19 nt, Homo sapiens
  misc_RNA (1)...(19): siRNA sense strand
gcaugaaaccagauuuaaa

SEQ ID NO: 554520 - RNA, 19 nt, Homo sapiens
  misc_RNA (1)...(19): siRNA sense strand
ggacagaggcagagaaucu

SEQ ID NO: 554521 - RNA, 19 nt, Homo sapiens
  misc_RNA (1)...(19): siRNA sense strand
ucagccagauauugacuua

SEQ ID NO: 554522 - RNA, 19 nt, Homo sapiens
  misc_RNA (1)...(19): siRNA sense strand
ucaaagccaucauaagugu

SEQ ID NO: 554523 - RNA, 19 nt, Homo sapiens
  misc_RNA (1)...(19): siRNA sense strand
gaaaguaaagccuccugaa

SEQ ID NO: 554524 - RNA, 19 nt, Homo sapiens
  misc_RNA (1)...(19): siRNA sense strand
uaacauguccacuguaaug

SEQ ID NO: 554525 - RNA, 19 nt, Homo sapiens
  misc_RNA (1)...(19): siRNA sense strand
ggaggaaacaagaaugaaa

SEQ ID NO: 554526 - RNA, 19 nt, Homo sapiens
  misc_RNA (1)...(19): siRNA sense strand
gagauggauucuuacauuc

SEQ ID NO: 554527 - RNA, 19 nt, Homo sapiens
  misc_RNA (1)...(19): siRNA sense strand
gguguugccuuuuauuuua

SEQ ID NO: 554528 - RNA, 19 nt, Homo sapiens
  misc_RNA (1)...(19): siRNA sense strand
ggaguacaguauaaacaau

SEQ ID NO: 554529 - RNA, 19 nt, Homo sapiens
  misc_RNA (1)...(19): siRNA sense strand
caacuuagucgccauugaa

SEQ ID NO: 554530 - RNA, 19 nt, Homo sapiens
  misc_RNA (1)...(19): siRNA sense strand
cagaaggcauuguuucaga

SEQ ID NO: 554531 - RNA, 19 nt, Homo sapiens
  misc_RNA (1)...(19): siRNA sense strand
ugagauuucuucaaccauu

SEQ ID NO: 554532 - RNA, 19 nt, Homo sapiens
  misc_RNA (1)...(19): siRNA sense strand
gugaacaguuuccugacua

SEQ ID NO: 554533 - RNA, 19 nt, Homo sapiens
  misc_RNA (1)...(19): siRNA sense strand
ggaggaagaugaggaugau

SEQ ID NO: 554534 - RNA, 19 nt, Homo sapiens
  misc_RNA (1)...(19): siRNA sense strand
aaaguucacuggagcaaug

SEQ ID NO: 554535 - RNA, 19 nt, Homo sapiens
  misc_RNA (1)...(19): siRNA sense strand
gaguuucucuugagugaug

SEQ ID NO: 554536 - RNA, 19 nt, Homo sapiens
  misc_RNA (1)...(19): siRNA sense strand
gcgugauucugcucuauaa

SEQ ID NO: 554537 - RNA, 19 nt, Homo sapiens
  misc_RNA (1)...(19): siRNA sense strand
ggugaaaguucgcuuccuu

SEQ ID NO: 554538 - RNA, 19 nt, Homo sapiens
  misc_RNA (1)...(19): siRNA sense strand
uagaugcgguugucacuga

SEQ ID NO: 554539 - RNA, 19 nt, Homo sapiens
  misc_RNA (1)...(19): siRNA sense strand
cacuuacgauaaccaauua

SEQ ID NO: 554540 - RNA, 19 nt, Homo sapiens
  misc_RNA (1)...(19): siRNA sense strand
ggucuucuguaugcacuua

SEQ ID NO: 554541 - RNA, 19 nt, Homo sapiens
  misc_RNA (1)...(19): siRNA sense strand
gcaucuauagcauccauua

SEQ ID NO: 554542 - RNA, 19 nt, Homo sapiens
  misc_RNA (1)...(19): siRNA sense strand
caccacaaccuucucaaua

SEQ ID NO: 554543 - RNA, 19 nt, Homo sapiens
  misc_RNA (1)...(19): siRNA sense strand
gcacgagcgcuguaucaaa

SEQ ID NO: 554544 - RNA, 19 nt, Homo sapiens
  misc_RNA (1)...(19): siRNA sense strand
gaagcaaccagaaguagga

SEQ ID NO: 554545 - RNA, 19 nt, Homo sapiens
  misc_RNA (1)...(19): siRNA sense strand
uugcucagcugaagaauau

SEQ ID NO: 554546 - RNA, 19 nt, Homo sapiens
  misc_RNA (1)...(19): siRNA sense strand
gaacauuggccacaagaag

SEQ ID NO: 554547 - RNA, 19 nt, Homo sapiens
  misc_RNA (1)...(19): siRNA sense strand
ggacuaaaaugccauggaa

SEQ ID NO: 554548 - RNA, 19 nt, Homo sapiens
  misc_RNA (1)...(19): siRNA sense strand
ggccauguauucaagagaa

SEQ ID NO: 554549 - RNA, 19 nt, Homo sapiens
  misc_RNA (1)...(19): siRNA sense strand
caugaauccucagaaagua

SEQ ID NO: 554550 - RNA, 19 nt, Homo sapiens
  misc_RNA (1)...(19): siRNA sense strand
ggacagagacagcuauuuu

SEQ ID NO: 554551 - RNA, 19 nt, Homo sapiens
  misc_RNA (1)...(19): siRNA sense strand
ggaaaacacuuaugaaucg

SEQ ID NO: 554552 - RNA, 19 nt, Homo sapiens
  misc_RNA (1)...(19): siRNA sense strand
gagaaggaacuuugaagga

SEQ ID NO: 554553 - RNA, 19 nt, Homo sapiens
  misc_RNA (1)...(19): siRNA sense strand
cagcuguucuugcuacauu

SEQ ID NO: 554554 - RNA, 19 nt, Homo sapiens
  misc_RNA (1)...(19): siRNA sense strand
acaaauaacacaacuggaa

SEQ ID NO: 554555 - RNA, 19 nt, Homo sapiens
  misc_RNA (1)...(19): siRNA sense strand
gugcaugucugugaaauag

SEQ ID NO: 554556 - RNA, 19 nt, Homo sapiens
  misc_RNA (1)...(19): siRNA sense strand
cacaacacauggcuucauu

SEQ ID NO: 554557 - RNA, 19 nt, Homo sapiens
  misc_RNA (1)...(19): siRNA sense strand
gaacugacggauacaaaca

SEQ ID NO: 554558 - RNA, 19 nt, Homo sapiens
  misc_RNA (1)...(19): siRNA sense strand
ggaaguguccuaagagaag

SEQ ID NO: 554559 - RNA, 19 nt, Homo sapiens
  misc_RNA (1)...(19): siRNA sense strand
gcagugguuuagcuacauu

SEQ ID NO: 554560 - RNA, 19 nt, Homo sapiens
  misc_RNA (1)...(19): siRNA sense strand
gcagucaaagccaucauaa

SEQ ID NO: 554561 - RNA, 19 nt, Homo sapiens
  misc_RNA (1)...(19): siRNA sense strand
gcaaugagagcaguaacaa

SEQ ID NO: 554562 - RNA, 19 nt, Homo sapiens
  misc_RNA (1)...(19): siRNA sense strand
gcagcauucuuauuaugga

SEQ ID NO: 554563 - RNA, 19 nt, Homo sapiens
  misc_RNA (1)...(19): siRNA sense strand
accacaaccuucucaauaa

SEQ ID NO: 554564 - RNA, 19 nt, Homo sapiens
  misc_RNA (1)...(19): siRNA sense strand
ccacauggacaucggagua

SEQ ID NO: 554565 - RNA, 19 nt, Homo sapiens
  misc_RNA (1)...(19): siRNA sense strand
ggagcaauguaaaugaauc

SEQ ID NO: 554566 - RNA, 19 nt, Homo sapiens
  misc_RNA (1)...(19): siRNA sense strand
gaaacaagaaugaaagaac

SEQ ID NO: 554567 - RNA, 19 nt, Homo sapiens
  misc_RNA (1)...(19): siRNA sense strand
gacauaaccugagauggau

SEQ ID NO: 554568 - RNA, 19 nt, Homo sapiens
  misc_RNA (1)...(19): siRNA sense strand
ccuggucccucaugucuuu

SEQ ID NO: 554569 - RNA, 19 nt, Homo sapiens
  misc_RNA (1)...(19): siRNA sense strand
caaaugcacagaugacaga

SEQ ID NO: 554570 - RNA, 19 nt, Homo sapiens
  misc_RNA (1)...(19): siRNA sense strand
gaacuaugaaggcacaaug

SEQ ID NO: 554571 - RNA, 19 nt, Homo sapiens
  misc_RNA (1)...(19): siRNA sense strand
gaaggacucaccaccauuc

SEQ ID NO: 554572 - RNA, 19 nt, Homo sapiens
  misc_RNA (1)...(19): siRNA sense strand
uauggaagcugaccaaacu

SEQ ID NO: 554573 - RNA, 19 nt, Homo sapiens
  misc_RNA (1)...(19): siRNA sense strand
ccucaugucuuucuguugu

SEQ ID NO: 554574 - RNA, 19 nt, Homo sapiens
  misc_RNA (1)...(19): siRNA sense strand
gaaaggcaucaaacuucua

SEQ ID NO: 554575 - RNA, 19 nt, Homo sapiens
  misc_RNA (1)...(19): siRNA sense strand
aaaucggacuccaucuaua

SEQ ID NO: 554576 - RNA, 19 nt, Homo sapiens
  misc_RNA (1)...(19): siRNA sense strand
caaaucggacuccaucuau

SEQ ID NO: 554577 - RNA, 19 nt, Homo sapiens
  misc_RNA (1)...(19): siRNA sense strand
caacguaugcuggaacuga

SEQ ID NO: 554578 - RNA, 19 nt, Homo sapiens
  misc_RNA (1)...(19): siRNA sense strand
ccagaugggugcagugaag

SEQ ID NO: 554579 - RNA, 19 nt, Homo sapiens
  misc_RNA (1)...(19): siRNA sense strand
ucucucagcugccaacaga

SEQ ID NO: 554580 - RNA, 19 nt, Homo sapiens
  misc_RNA (1)...(19): siRNA sense strand
caacaucgauaguguauua

SEQ ID NO: 554581 - RNA, 19 nt, Homo sapiens
  misc_RNA (1)...(19): siRNA sense strand
gauaacauguccacuguaa

SEQ ID NO: 554582 - RNA, 19 nt, Homo sapiens
  misc_RNA (1)...(19): siRNA sense strand
caacauugccuacuuauuu

SEQ ID NO: 554583 - RNA, 19 nt, Homo sapiens
  misc_RNA (1)...(19): siRNA sense strand
ugaagaaggugaacaguuu

SEQ ID NO: 554584 - RNA, 19 nt, Homo sapiens
  misc_RNA (1)...(19): siRNA sense strand
uaacacaacuggaauuuca

SEQ ID NO: 554585 - RNA, 19 nt, Homo sapiens
  misc_RNA (1)...(19): siRNA sense strand
aaacaacauugccuacuua

SEQ ID NO: 554586 - RNA, 19 nt, Homo sapiens
  misc_RNA (1)...(19): siRNA sense strand
gcuauuaaaugcuacagua

SEQ ID NO: 554587 - RNA, 19 nt, Homo sapiens
  misc_RNA (1)...(19): siRNA sense strand
ugagagcaguaacaaauua

SEQ ID NO: 554588 - RNA, 19 nt, Homo sapiens
  misc_RNA (1)...(19): siRNA sense strand
ccauugggaugauuucuua

SEQ ID NO: 554589 - RNA, 19 nt, Homo sapiens
  misc_RNA (1)...(19): siRNA sense strand
cgucaaggcuuacaucaaa

SEQ ID NO: 554590 - RNA, 19 nt, Homo sapiens
  misc_RNA (1)...(19): siRNA sense strand
ggacauaaccugagaugga

SEQ ID NO: 554591 - RNA, 19 nt, Homo sapiens
  misc_RNA (1)...(19): siRNA sense strand
cagaaacccucucaucaaa

SEQ ID NO: 554592 - RNA, 19 nt, Homo sapiens
  misc_RNA (1)...(19): siRNA sense strand
gaaagaugcauaugaagaa

SEQ ID NO: 554593 - RNA, 19 nt, Homo sapiens
  misc_RNA (1)...(19): siRNA sense strand
ugagauggauucuuacauu

SEQ ID NO: 554594 - RNA, 19 nt, Homo sapiens
  misc_RNA (1)...(19): siRNA sense strand
aaccugagauggauucuua

SEQ ID NO: 554595 - RNA, 19 nt, Homo sapiens
  misc_RNA (1)...(19): siRNA sense strand
uaucaacgaugguguacua

SEQ ID NO: 554596 - RNA, 19 nt, Homo sapiens
  misc_RNA (1)...(19): siRNA sense strand
cuauauggcuugcaaugua

SEQ ID NO: 554597 - RNA, 19 nt, Homo sapiens
  misc_RNA (1)...(19): siRNA sense strand
ugaaauuccugcaagauga

SEQ ID NO: 554598 - RNA, 19 nt, Homo sapiens
  misc_RNA (1)...(19): siRNA sense strand
gaaaccagauuuaaacaac

SEQ ID NO: 554599 - RNA, 19 nt, Homo sapiens
  misc_RNA (1)...(19): siRNA sense strand
gaaggacauucaaaccaaa

SEQ ID NO: 554600 - RNA, 19 nt, Homo sapiens
  misc_RNA (1)...(19): siRNA sense strand
caaacaacauugccuacuu

SEQ ID NO: 554601 - RNA, 19 nt, Homo sapiens
  misc_RNA (1)...(19): siRNA sense strand
ggacgaagacgaagaggaa

SEQ ID NO: 554602 - RNA, 19 nt, Homo sapiens
  misc_RNA (1)...(19): siRNA sense strand
ggagugagauuucuucaac

SEQ ID NO: 554603 - RNA, 19 nt, Homo sapiens
  misc_RNA (1)...(19): siRNA sense strand
ucggcaagaucaagaauua

SEQ ID NO: 554604 - RNA, 19 nt, Homo sapiens
  misc_RNA (1)...(19): siRNA sense strand
gcaacauacugguggauga

SEQ ID NO: 554605 - RNA, 19 nt, Homo sapiens
  misc_RNA (1)...(19): siRNA sense strand
ugaagaauauggucaaauc

SEQ ID NO: 554606 - RNA, 19 nt, Homo sapiens
  misc_RNA (1)...(19): siRNA sense strand
uacauucgcucuccuguuu

SEQ ID NO: 554607 - RNA, 19 nt, Homo sapiens
  misc_RNA (1)...(19): siRNA sense strand
gcacuuacgauaaccaauu

SEQ ID NO: 554608 - RNA, 19 nt, Homo sapiens
  misc_RNA (1)...(19): siRNA sense strand
ugaaauagcagaaggcauu

SEQ ID NO: 554609 - RNA, 19 nt, Homo sapiens
  misc_RNA (1)...(19): siRNA sense strand
gggaugauuucuuaugcua

SEQ ID NO: 554610 - RNA, 19 nt, Homo sapiens
  misc_RNA (1)...(19): siRNA sense strand
uggaugaacacacuuauua

SEQ ID NO: 554611 - RNA, 19 nt, Homo sapiens
  misc_RNA (1)...(19): siRNA sense strand
ggacaucggaguacaguau

SEQ ID NO: 554612 - RNA, 19 nt, Homo sapiens
  misc_RNA (1)...(19): siRNA sense strand
ccugaaagaugcauaugaa

SEQ ID NO: 554613 - RNA, 19 nt, Homo sapiens
  misc_RNA (1)...(19): siRNA sense strand
gagauuucuucaaccauuu

SEQ ID NO: 554614 - RNA, 19 nt, Homo sapiens
  misc_RNA (1)...(19): siRNA sense strand
acacuacguucuagacuuu

SEQ ID NO: 554615 - RNA, 19 nt, Homo sapiens
  misc_RNA (1)...(19): siRNA sense strand
ugaauuggguugugaggaa

SEQ ID NO: 554616 - RNA, 19 nt, Homo sapiens
  misc_RNA (1)...(19): siRNA sense strand
cuaaucaacucaugugguu

SEQ ID NO: 554617 - RNA, 19 nt, Homo sapiens
  misc_RNA (1)...(19): siRNA sense strand
gccagauauugacuuauua

SEQ ID NO: 554618 - RNA, 19 nt, Homo sapiens
  misc_RNA (1)...(19): siRNA sense strand
gaaacccucucaucaaagg

SEQ ID NO: 554619 - RNA, 19 nt, Homo sapiens
  misc_RNA (1)...(19): siRNA sense strand
gcaugaaaccagauuuaaa

SEQ ID NO: 554620 - RNA, 19 nt, Homo sapiens
  misc_RNA (1)...(19): siRNA sense strand
ggacagaggcagagaaucu

SEQ ID NO: 554621 - RNA, 19 nt, Homo sapiens
  misc_RNA (1)...(19): siRNA sense strand
ucagccagauauugacuua

SEQ ID NO: 554622 - RNA, 19 nt, Homo sapiens
  misc_RNA (1)...(19): siRNA sense strand
ucaaagccaucauaagugu

SEQ ID NO: 554623 - RNA, 19 nt, Homo sapiens
  misc_RNA (1)...(19): siRNA sense strand
gaaaguaaagccuccugaa

SEQ ID NO: 554624 - RNA, 19 nt, Homo sapiens
  misc_RNA (1)...(19): siRNA sense strand
uaacauguccacuguaaug

SEQ ID NO: 554625 - RNA, 19 nt, Homo sapiens
  misc_RNA (1)...(19): siRNA sense strand
ggaggaaacaagaaugaaa

SEQ ID NO: 554626 - RNA, 19 nt, Homo sapiens
  misc_RNA (1)...(19): siRNA sense strand
gagauggauucuuacauuc

SEQ ID NO: 554627 - RNA, 19 nt, Homo sapiens
  misc_RNA (1)...(19): siRNA sense strand
gguguugccuuuuauuuua

SEQ ID NO: 554628 - RNA, 19 nt, Homo sapiens
  misc_RNA (1)...(19): siRNA sense strand
ggaguacaguauaaacaau

SEQ ID NO: 554629 - RNA, 19 nt, Homo sapiens
  misc_RNA (1)...(19): siRNA sense strand
caacuuagucgccauugaa

SEQ ID NO: 554630 - RNA, 19 nt, Homo sapiens
  misc_RNA (1)...(19): siRNA sense strand
cagaaggcauuguuucaga

SEQ ID NO: 554631 - RNA, 19 nt, Homo sapiens
  misc_RNA (1)...(19): siRNA sense strand
ugagauuucuucaaccauu

SEQ ID NO: 554632 - RNA, 19 nt, Homo sapiens
  misc_RNA (1)...(19): siRNA sense strand
gugaacaguuuccugacua

SEQ ID NO: 554633 - RNA, 19 nt, Homo sapiens
  misc_RNA (1)...(19): siRNA sense strand
ggaggaagaugaggaugau

SEQ ID NO: 554634 - RNA, 19 nt, Homo sapiens
  misc_RNA (1)...(19): siRNA sense strand
aaaguucacuggagcaaug

SEQ ID NO: 554635 - RNA, 19 nt, Homo sapiens
  misc_RNA (1)...(19): siRNA sense strand
gaguuucucuugagugaug

SEQ ID NO: 554636 - RNA, 19 nt, Homo sapiens
  misc_RNA (1)...(19): siRNA sense strand
gcgugauucugcucuauaa

SEQ ID NO: 554637 - RNA, 19 nt, Homo sapiens
  misc_RNA (1)...(19): siRNA sense strand
ggugaaaguucgcuuccuu

SEQ ID NO: 554638 - RNA, 19 nt, Homo sapiens
  misc_RNA (1)...(19): siRNA sense strand
uagaugcgguugucacuga

SEQ ID NO: 554639 - RNA, 19 nt, Homo sapiens
  misc_RNA (1)...(19): siRNA sense strand
cacuuacgauaaccaauua

SEQ ID NO: 554640 - RNA, 19 nt, Homo sapiens
  misc_RNA (1)...(19): siRNA sense strand
ggucuucuguaugcacuua

SEQ ID NO: 554641 - RNA, 19 nt, Homo sapiens
  misc_RNA (1)...(19): siRNA sense strand
gcaucuauagcauccauua

SEQ ID NO: 554642 - RNA, 19 nt, Homo sapiens
  misc_RNA (1)...(19): siRNA sense strand
caccacaaccuucucaaua

SEQ ID NO: 554643 - RNA, 19 nt, Homo sapiens
  misc_RNA (1)...(19): siRNA sense strand
gcacgagcgcuguaucaaa

SEQ ID NO: 554644 - RNA, 19 nt, Homo sapiens
  misc_RNA (1)...(19): siRNA sense strand
gaagcaaccagaaguagga

SEQ ID NO: 554645 - RNA, 19 nt, Homo sapiens
  misc_RNA (1)...(19): siRNA sense strand
uugcucagcugaagaauau

SEQ ID NO: 554646 - RNA, 19 nt, Homo sapiens
  misc_RNA (1)...(19): siRNA sense strand
gaacauuggccacaagaag

SEQ ID NO: 554647 - RNA, 19 nt, Homo sapiens
  misc_RNA (1)...(19): siRNA sense strand
ggacuaaaaugccauggaa

SEQ ID NO: 554648 - RNA, 19 nt, Homo sapiens
  misc_RNA (1)...(19): siRNA sense strand
ggccauguauucaagagaa

SEQ ID NO: 554649 - RNA, 19 nt, Homo sapiens
  misc_RNA (1)...(19): siRNA sense strand
caugaauccucagaaagua

SEQ ID NO: 554650 - RNA, 19 nt, Homo sapiens
  misc_RNA (1)...(19): siRNA sense strand
ggacagagacagcuauuuu

SEQ ID NO: 554651 - RNA, 19 nt, Homo sapiens
  misc_RNA (1)...(19): siRNA sense strand
ggaaaacacuuaugaaucg

SEQ ID NO: 554652 - RNA, 19 nt, Homo sapiens
  misc_RNA (1)...(19): siRNA sense strand
gagaaggaacuuugaagga

SEQ ID NO: 554653 - RNA, 19 nt, Homo sapiens
  misc_RNA (1)...(19): siRNA sense strand
cagcuguucuugcuacauu

SEQ ID NO: 554654 - RNA, 19 nt, Homo sapiens
  misc_RNA (1)...(19): siRNA sense strand
acaaauaacacaacuggaa

SEQ ID NO: 554655 - RNA, 19 nt, Homo sapiens
  misc_RNA (1)...(19): siRNA sense strand
gugcaugucugugaaauag

SEQ ID NO: 554656 - RNA, 19 nt, Homo sapiens
  misc_RNA (1)...(19): siRNA sense strand
cacaacacauggcuucauu

SEQ ID NO: 554657 - RNA, 19 nt, Homo sapiens
  misc_RNA (1)...(19): siRNA sense strand
gaacugacggauacaaaca

SEQ ID NO: 554658 - RNA, 19 nt, Homo sapiens
  misc_RNA (1)...(19): siRNA sense strand
ggaaguguccuaagagaag

SEQ ID NO: 554659 - RNA, 19 nt, Homo sapiens
  misc_RNA (1)...(19): siRNA sense strand
gcagugguuuagcuacauu

SEQ ID NO: 554660 - RNA, 19 nt, Homo sapiens
  misc_RNA (1)...(19): siRNA sense strand
gcagucaaagccaucauaa

SEQ ID NO: 554661 - RNA, 19 nt, Homo sapiens
  misc_RNA (1)...(19): siRNA sense strand
gcaaugagagcaguaacaa

SEQ ID NO: 554662 - RNA, 19 nt, Homo sapiens
  misc_RNA (1)...(19): siRNA sense strand
gcagcauucuuauuaugga

SEQ ID NO: 554663 - RNA, 19 nt, Homo sapiens
  misc_RNA (1)...(19): siRNA sense strand
accacaaccuucucaauaa

SEQ ID NO: 554664 - RNA, 19 nt, Homo sapiens
  misc_RNA (1)...(19): siRNA sense strand
ccacauggacaucggagua

SEQ ID NO: 554665 - RNA, 19 nt, Homo sapiens
  misc_RNA (1)...(19): siRNA sense strand
ggagcaauguaaaugaauc

SEQ ID NO: 554666 - RNA, 19 nt, Homo sapiens
  misc_RNA (1)...(19): siRNA sense strand
gaaacaagaaugaaagaac

SEQ ID NO: 554667 - RNA, 19 nt, Homo sapiens
  misc_RNA (1)...(19): siRNA sense strand
gacauaaccugagauggau

SEQ ID NO: 554668 - RNA, 19 nt, Homo sapiens
  misc_RNA (1)...(19): siRNA sense strand
ccuggucccucaugucuuu

SEQ ID NO: 554669 - RNA, 19 nt, Homo sapiens
  misc_RNA (1)...(19): siRNA sense strand
caaaugcacagaugacaga

SEQ ID NO: 554670 - RNA, 19 nt, Homo sapiens
  misc_RNA (1)...(19): siRNA sense strand
gaacuaugaaggcacaaug

SEQ ID NO: 554671 - RNA, 19 nt, Homo sapiens
  misc_RNA (1)...(19): siRNA sense strand
gaaggacucaccaccauuc

SEQ ID NO: 554672 - RNA, 19 nt, Homo sapiens
  misc_RNA (1)...(19): siRNA sense strand
uauggaagcugaccaaacu

SEQ ID NO: 554673 - RNA, 19 nt, Homo sapiens
  misc_RNA (1)...(19): siRNA sense strand
ccucaugucuuucuguugu

SEQ ID NO: 554674 - RNA, 19 nt, Homo sapiens
  misc_RNA (1)...(19): siRNA sense strand
gaaaggcaucaaacuucua

SEQ ID NO: 554675 - RNA, 19 nt, Homo sapiens
  misc_RNA (1)...(19): siRNA sense strand
aaaucggacuccaucuaua

SEQ ID NO: 554676 - RNA, 19 nt, Homo sapiens
  misc_RNA (1)...(19): siRNA sense strand
caaaucggacuccaucuau

SEQ ID NO: 554677 - RNA, 19 nt, Homo sapiens
  misc_RNA (1)...(19): siRNA sense strand
caacguaugcuggaacuga

SEQ ID NO: 554678 - RNA, 19 nt, Homo sapiens
  misc_RNA (1)...(19): siRNA sense strand
ccagaugggugcagugaag

SEQ ID NO: 554679 - RNA, 19 nt, Homo sapiens
  misc_RNA (1)...(19): siRNA sense strand
ucucucagcugccaacaga

SEQ ID NO: 554680 - RNA, 19 nt, Homo sapiens
  misc_RNA (1)...(19): siRNA sense strand
gaucucagguuaagaauaa

SEQ ID NO: 554681 - RNA, 19 nt, Homo sapiens
  misc_RNA (1)...(19): siRNA sense strand
gaagaggaguuaaaugauu

SEQ ID NO: 554682 - RNA, 19 nt, Homo sapiens
  misc_RNA (1)...(19): siRNA sense strand
aauaauggcuucuggaaua

SEQ ID NO: 554683 - RNA, 19 nt, Homo sapiens
  misc_RNA (1)...(19): siRNA sense strand
caacagagccauuuacuau

SEQ ID NO: 554684 - RNA, 19 nt, Homo sapiens
  misc_RNA (1)...(19): siRNA sense strand
gaagccagaagauuuauua

SEQ ID NO: 554685 - RNA, 19 nt, Homo sapiens
  misc_RNA (1)...(19): siRNA sense strand
uaaauuagguccuguuugu

SEQ ID NO: 554686 - RNA, 19 nt, Homo sapiens
  misc_RNA (1)...(19): siRNA sense strand
gaaaggaaguuuacaacca

SEQ ID NO: 554687 - RNA, 19 nt, Homo sapiens
  misc_RNA (1)...(19): siRNA sense strand
ggaggaggaugaagaagaa

SEQ ID NO: 554688 - RNA, 19 nt, Homo sapiens
  misc_RNA (1)...(19): siRNA sense strand
gaaacuggcugcgauaugu

SEQ ID NO: 554689 - RNA, 19 nt, Homo sapiens
  misc_RNA (1)...(19): siRNA sense strand
uaagaaagguggacacuca

SEQ ID NO: 554690 - RNA, 19 nt, Homo sapiens
  misc_RNA (1)...(19): siRNA sense strand
gaaauacggugugaugaga

SEQ ID NO: 554691 - RNA, 19 nt, Homo sapiens
  misc_RNA (1)...(19): siRNA sense strand
gcagaaggccgacuugaaa

SEQ ID NO: 554692 - RNA, 19 nt, Homo sapiens
  misc_RNA (1)...(19): siRNA sense strand
caacagaggcagugucuuu

SEQ ID NO: 554693 - RNA, 19 nt, Homo sapiens
  misc_RNA (1)...(19): siRNA sense strand
acagagccauuuacuauaa

SEQ ID NO: 554694 - RNA, 19 nt, Homo sapiens
  misc_RNA (1)...(19): siRNA sense strand
gaaaaggugucgacaauau

SEQ ID NO: 554695 - RNA, 19 nt, Homo sapiens
  misc_RNA (1)...(19): siRNA sense strand
gccagaagauccuuuagaa

SEQ ID NO: 554696 - RNA, 19 nt, Homo sapiens
  misc_RNA (1)...(19): siRNA sense strand
uaacaacacuaguaacugu

SEQ ID NO: 554697 - RNA, 19 nt, Homo sapiens
  misc_RNA (1)...(19): siRNA sense strand
gaagacugcucagagguaa

SEQ ID NO: 554698 - RNA, 19 nt, Homo sapiens
  misc_RNA (1)...(19): siRNA sense strand
caucaaagcucaaacaacu

SEQ ID NO: 554699 - RNA, 19 nt, Homo sapiens
  misc_RNA (1)...(19): siRNA sense strand
ggccaauggugauguauuu

SEQ ID NO: 554700 - RNA, 19 nt, Homo sapiens
  misc_RNA (1)...(19): siRNA sense strand
ggaagcagaugauguguac

SEQ ID NO: 554701 - RNA, 19 nt, Homo sapiens
  misc_RNA (1)...(19): siRNA sense strand
ggaagacaacccugagaua

SEQ ID NO: 554702 - RNA, 19 nt, Homo sapiens
  misc_RNA (1)...(19): siRNA sense strand
gcacacaucacgaguuuga

SEQ ID NO: 554703 - RNA, 19 nt, Homo sapiens
  misc_RNA (1)...(19): siRNA sense strand
ucacgaacgucaucugauu

SEQ ID NO: 554704 - RNA, 19 nt, Homo sapiens
  misc_RNA (1)...(19): siRNA sense strand
acagaccgguucaauauaa

SEQ ID NO: 554705 - RNA, 19 nt, Homo sapiens
  misc_RNA (1)...(19): siRNA sense strand
gcaaggaauucaaagaaag

SEQ ID NO: 554706 - RNA, 19 nt, Homo sapiens
  misc_RNA (1)...(19): siRNA sense strand
gcaauaucaucuguuguuu

SEQ ID NO: 554707 - RNA, 19 nt, Homo sapiens
  misc_RNA (1)...(19): siRNA sense strand
gaagagcuuuacacgacua

SEQ ID NO: 554708 - RNA, 19 nt, Homo sapiens
  misc_RNA (1)...(19): siRNA sense strand
uaaagaagaagaggaguua

SEQ ID NO: 554709 - RNA, 19 nt, Homo sapiens
  misc_RNA (1)...(19): siRNA sense strand
gggaauaucuuuguguguu

SEQ ID NO: 554710 - RNA, 19 nt, Homo sapiens
  misc_RNA (1)...(19): siRNA sense strand
ggacauuucuagcaauauc

SEQ ID NO: 554711 - RNA, 19 nt, Homo sapiens
  misc_RNA (1)...(19): siRNA sense strand
gaucaugaauucagagaag

SEQ ID NO: 554712 - RNA, 19 nt, Homo sapiens
  misc_RNA (1)...(19): siRNA sense strand
gaauggcccuucaaaugug

SEQ ID NO: 554713 - RNA, 19 nt, Homo sapiens
  misc_RNA (1)...(19): siRNA sense strand
gcagauuuguaugguauaa

SEQ ID NO: 554714 - RNA, 19 nt, Homo sapiens
  misc_RNA (1)...(19): siRNA sense strand
gaagauccuuuagaaacuu

SEQ ID NO: 554715 - RNA, 19 nt, Homo sapiens
  misc_RNA (1)...(19): siRNA sense strand
ggcaaggaauucaaagaaa

SEQ ID NO: 554716 - RNA, 19 nt, Homo sapiens
  misc_RNA (1)...(19): siRNA sense strand
ggauggaugugcauugaug

SEQ ID NO: 554717 - RNA, 19 nt, Homo sapiens
  misc_RNA (1)...(19): siRNA sense strand
ccacaaauuucacuacaca

SEQ ID NO: 554718 - RNA, 19 nt, Homo sapiens
  misc_RNA (1)...(19): siRNA sense strand
gugcacacaucacgaguuu

SEQ ID NO: 554719 - RNA, 19 nt, Homo sapiens
  misc_RNA (1)...(19): siRNA sense strand
gguaacaccugccaugcaa

SEQ ID NO: 554720 - RNA, 19 nt, Homo sapiens
  misc_RNA (1)...(19): siRNA sense strand
ggagguguauuacccaaau

SEQ ID NO: 554721 - RNA, 19 nt, Homo sapiens
  misc_RNA (1)...(19): siRNA sense strand
gagaaaacguugcuucaaa

SEQ ID NO: 554722 - RNA, 19 nt, Homo sapiens
  misc_RNA (1)...(19): siRNA sense strand
ugagaagccagaagauuua

SEQ ID NO: 554723 - RNA, 19 nt, Homo sapiens
  misc_RNA (1)...(19): siRNA sense strand
gcaucaauguugccuguga

SEQ ID NO: 554724 - RNA, 19 nt, Homo sapiens
  misc_RNA (1)...(19): siRNA sense strand
ggcagugucuuuccacaaa

SEQ ID NO: 554725 - RNA, 19 nt, Homo sapiens
  misc_RNA (1)...(19): siRNA sense strand
ggaucuggcugauggcaaa

SEQ ID NO: 554726 - RNA, 19 nt, Homo sapiens
  misc_RNA (1)...(19): siRNA sense strand
agaagaagaugaugaugau

SEQ ID NO: 554727 - RNA, 19 nt, Homo sapiens
  misc_RNA (1)...(19): siRNA sense strand
cuaaagcuguggccaagaa

SEQ ID NO: 554728 - RNA, 19 nt, Homo sapiens
  misc_RNA (1)...(19): siRNA sense strand
ucaaacaacuucuucaaac

SEQ ID NO: 554729 - RNA, 19 nt, Homo sapiens
  misc_RNA (1)...(19): siRNA sense strand
ggacagcuaguucugcuuu

SEQ ID NO: 554730 - RNA, 19 nt, Homo sapiens
  misc_RNA (1)...(19): siRNA sense strand
aggcuuaacuuuaguguug

SEQ ID NO: 554731 - RNA, 19 nt, Homo sapiens
  misc_RNA (1)...(19): siRNA sense strand
caugauaucuuucaaacag

SEQ ID NO: 554732 - RNA, 19 nt, Homo sapiens
  misc_RNA (1)...(19): siRNA sense strand
gccagaagauuuauuagag

SEQ ID NO: 554733 - RNA, 19 nt, Homo sapiens
  misc_RNA (1)...(19): siRNA sense strand
ccaagcuccuccucuuuaa

SEQ ID NO: 554734 - RNA, 19 nt, Homo sapiens
  misc_RNA (1)...(19): siRNA sense strand
gagcuuuacacgacuauaa

SEQ ID NO: 554735 - RNA, 19 nt, Homo sapiens
  misc_RNA (1)...(19): siRNA sense strand
cuugugaggugaaugauuu

SEQ ID NO: 554736 - RNA, 19 nt, Homo sapiens
  misc_RNA (1)...(19): siRNA sense strand
aaaccaagcuccuccucuu

SEQ ID NO: 554737 - RNA, 19 nt, Homo sapiens
  misc_RNA (1)...(19): siRNA sense strand
ggaugaagaagaagaagaa

SEQ ID NO: 554738 - RNA, 19 nt, Homo sapiens
  misc_RNA (1)...(19): siRNA sense strand
gaagccagcaugccaaaug

SEQ ID NO: 554739 - RNA, 19 nt, Homo sapiens
  misc_RNA (1)...(19): siRNA sense strand
gccauucgcugcacaaagu

SEQ ID NO: 554740 - RNA, 19 nt, Homo sapiens
  misc_RNA (1)...(19): siRNA sense strand
ggaauaucuuuguguguuc

SEQ ID NO: 554741 - RNA, 19 nt, Homo sapiens
  misc_RNA (1)...(19): siRNA sense strand
gcacaguccugcccuucga

SEQ ID NO: 554742 - RNA, 19 nt, Homo sapiens
  misc_RNA (1)...(19): siRNA sense strand
aaaggaaguuuacaaccaa

SEQ ID NO: 554743 - RNA, 19 nt, Homo sapiens
  misc_RNA (1)...(19): siRNA sense strand
gaagacaagugagccagau

SEQ ID NO: 554744 - RNA, 19 nt, Homo sapiens
  misc_RNA (1)...(19): siRNA sense strand
aagaagaggaguuaaauga

SEQ ID NO: 554745 - RNA, 19 nt, Homo sapiens
  misc_RNA (1)...(19): siRNA sense strand
gcagacacccucccuuuca

SEQ ID NO: 554746 - RNA, 19 nt, Homo sapiens
  misc_RNA (1)...(19): siRNA sense strand
uggcaucgauuuaccugua

SEQ ID NO: 554747 - RNA, 19 nt, Homo sapiens
  misc_RNA (1)...(19): siRNA sense strand
gaagacaacccugagauag

SEQ ID NO: 554748 - RNA, 19 nt, Homo sapiens
  misc_RNA (1)...(19): siRNA sense strand
cagcauuacccaagcuuua

SEQ ID NO: 554749 - RNA, 19 nt, Homo sapiens
  misc_RNA (1)...(19): siRNA sense strand
gaagaagaggaguuaaaug

SEQ ID NO: 554750 - RNA, 19 nt, Homo sapiens
  misc_RNA (1)...(19): siRNA sense strand
gaugagagagaaacuguga

SEQ ID NO: 554751 - RNA, 19 nt, Homo sapiens
  misc_RNA (1)...(19): siRNA sense strand
ggaaaucaacagagccauu

SEQ ID NO: 554752 - RNA, 19 nt, Homo sapiens
  misc_RNA (1)...(19): siRNA sense strand
gacaaaagauccagauguu

SEQ ID NO: 554753 - RNA, 19 nt, Homo sapiens
  misc_RNA (1)...(19): siRNA sense strand
guguagugcuguaaagaaa

SEQ ID NO: 554754 - RNA, 19 nt, Homo sapiens
  misc_RNA (1)...(19): siRNA sense strand
ccagugggaaucugucuua

SEQ ID NO: 554755 - RNA, 19 nt, Homo sapiens
  misc_RNA (1)...(19): siRNA sense strand
ccaguuacaguggaaauua

SEQ ID NO: 554756 - RNA, 19 nt, Homo sapiens
  misc_RNA (1)...(19): siRNA sense strand
uaaagaagacgaagagaag

SEQ ID NO: 554757 - RNA, 19 nt, Homo sapiens
  misc_RNA (1)...(19): siRNA sense strand
cagcugcgauugaggaaga

SEQ ID NO: 554758 - RNA, 19 nt, Homo sapiens
  misc_RNA (1)...(19): siRNA sense strand
ugugaaagagccagaaaua

SEQ ID NO: 554759 - RNA, 19 nt, Homo sapiens
  misc_RNA (1)...(19): siRNA sense strand
guaaucgagaguucacuua

SEQ ID NO: 554760 - RNA, 19 nt, Homo sapiens
  misc_RNA (1)...(19): siRNA sense strand
caagugacaagaagaggua

SEQ ID NO: 554761 - RNA, 19 nt, Homo sapiens
  misc_RNA (1)...(19): siRNA sense strand
gaauauaauggcaucgauu

SEQ ID NO: 554762 - RNA, 19 nt, Homo sapiens
  misc_RNA (1)...(19): siRNA sense strand
caauggugauguauuugaa

SEQ ID NO: 554763 - RNA, 19 nt, Homo sapiens
  misc_RNA (1)...(19): siRNA sense strand
ugagauagcagcugcgauu

SEQ ID NO: 554764 - RNA, 19 nt, Homo sapiens
  misc_RNA (1)...(19): siRNA sense strand
aagaauggcccuucaaaug

SEQ ID NO: 554765 - RNA, 19 nt, Homo sapiens
  misc_RNA (1)...(19): siRNA sense strand
ugcagaagguccuaaagaa

SEQ ID NO: 554766 - RNA, 19 nt, Homo sapiens
  misc_RNA (1)...(19): siRNA sense strand
aagcaaagcuguuuuacaa

SEQ ID NO: 554767 - RNA, 19 nt, Homo sapiens
  misc_RNA (1)...(19): siRNA sense strand
guuaaaugauuccucugaa

SEQ ID NO: 554768 - RNA, 19 nt, Homo sapiens
  misc_RNA (1)...(19): siRNA sense strand
ucaggaaacauucaacaaa

SEQ ID NO: 554769 - RNA, 19 nt, Homo sapiens
  misc_RNA (1)...(19): siRNA sense strand
gaacuucauccgugcaaau

SEQ ID NO: 554770 - RNA, 19 nt, Homo sapiens
  misc_RNA (1)...(19): siRNA sense strand
aaagaucucagguuaagaa

SEQ ID NO: 554771 - RNA, 19 nt, Homo sapiens
  misc_RNA (1)...(19): siRNA sense strand
cagaagguccuaaagaaga

SEQ ID NO: 554772 - RNA, 19 nt, Homo sapiens
  misc_RNA (1)...(19): siRNA sense strand
ggaauuagagaaugaaggu

SEQ ID NO: 554773 - RNA, 19 nt, Homo sapiens
  misc_RNA (1)...(19): siRNA sense strand
cagcuucggugaaauccaa

SEQ ID NO: 554774 - RNA, 19 nt, Homo sapiens
  misc_RNA (1)...(19): siRNA sense strand
uaaaugauuccucugaaga

SEQ ID NO: 554775 - RNA, 19 nt, Homo sapiens
  misc_RNA (1)...(19): siRNA sense strand
ggacacucaucaccugcaa

SEQ ID NO: 554776 - RNA, 19 nt, Homo sapiens
  misc_RNA (1)...(19): siRNA sense strand
gcacgugaggguacagaaa

SEQ ID NO: 554777 - RNA, 19 nt, Homo sapiens
  misc_RNA (1)...(19): siRNA sense strand
aaacggacuugucagaaca

SEQ ID NO: 554778 - RNA, 19 nt, Homo sapiens
  misc_RNA (1)...(19): siRNA sense strand
cagcggaugcggagauuaa

SEQ ID NO: 554779 - RNA, 19 nt, Homo sapiens
  misc_RNA (1)...(19): siRNA sense strand
gaaagguggacacucauca

SEQ ID NO: 554780 - RNA, 19 nt, Homo sapiens
  misc_RNA (1)...(19): siRNA sense strand
gaucucagguuaagaauaa

SEQ ID NO: 554781 - RNA, 19 nt, Homo sapiens
  misc_RNA (1)...(19): siRNA sense strand
gaagaggaguuaaaugauu

SEQ ID NO: 554782 - RNA, 19 nt, Homo sapiens
  misc_RNA (1)...(19): siRNA sense strand
aauaauggcuucuggaaua

SEQ ID NO: 554783 - RNA, 19 nt, Homo sapiens
  misc_RNA (1)...(19): siRNA sense strand
caacagagccauuuacuau

SEQ ID NO: 554784 - RNA, 19 nt, Homo sapiens
  misc_RNA (1)...(19): siRNA sense strand
gaagccagaagauuuauua

SEQ ID NO: 554785 - RNA, 19 nt, Homo sapiens
  misc_RNA (1)...(19): siRNA sense strand
uaaauuagguccuguuugu

SEQ ID NO: 554786 - RNA, 19 nt, Homo sapiens
  misc_RNA (1)...(19): siRNA sense strand
gaaaggaaguuuacaacca

SEQ ID NO: 554787 - RNA, 19 nt, Homo sapiens
  misc_RNA (1)...(19): siRNA sense strand
ggaggaggaugaagaagaa

SEQ ID NO: 554788 - RNA, 19 nt, Homo sapiens
  misc_RNA (1)...(19): siRNA sense strand
gaaacuggcugcgauaugu

SEQ ID NO: 554789 - RNA, 19 nt, Homo sapiens
  misc_RNA (1)...(19): siRNA sense strand
uaagaaagguggacacuca

SEQ ID NO: 554790 - RNA, 19 nt, Homo sapiens
  misc_RNA (1)...(19): siRNA sense strand
gaaauacggugugaugaga

SEQ ID NO: 554791 - RNA, 19 nt, Homo sapiens
  misc_RNA (1)...(19): siRNA sense strand
gcagaaggccgacuugaaa

SEQ ID NO: 554792 - RNA, 19 nt, Homo sapiens
  misc_RNA (1)...(19): siRNA sense strand
caacagaggcagugucuuu

SEQ ID NO: 554793 - RNA, 19 nt, Homo sapiens
  misc_RNA (1)...(19): siRNA sense strand
acagagccauuuacuauaa

SEQ ID NO: 554794 - RNA, 19 nt, Homo sapiens
  misc_RNA (1)...(19): siRNA sense strand
gaaaaggugucgacaauau

SEQ ID NO: 554795 - RNA, 19 nt, Homo sapiens
  misc_RNA (1)...(19): siRNA sense strand
gccagaagauccuuuagaa

SEQ ID NO: 554796 - RNA, 19 nt, Homo sapiens
  misc_RNA (1)...(19): siRNA sense strand
uaacaacacuaguaacugu

SEQ ID NO: 554797 - RNA, 19 nt, Homo sapiens
  misc_RNA (1)...(19): siRNA sense strand
gaagacugcucagagguaa

SEQ ID NO: 554798 - RNA, 19 nt, Homo sapiens
  misc_RNA (1)...(19): siRNA sense strand
caucaaagcucaaacaacu

SEQ ID NO: 554799 - RNA, 19 nt, Homo sapiens
  misc_RNA (1)...(19): siRNA sense strand
ggccaauggugauguauuu

SEQ ID NO: 554800 - RNA, 19 nt, Homo sapiens
  misc_RNA (1)...(19): siRNA sense strand
ggaagcagaugauguguac

SEQ ID NO: 554801 - RNA, 19 nt, Homo sapiens
  misc_RNA (1)...(19): siRNA sense strand
ggaagacaacccugagaua

SEQ ID NO: 554802 - RNA, 19 nt, Homo sapiens
  misc_RNA (1)...(19): siRNA sense strand
gcacacaucacgaguuuga

SEQ ID NO: 554803 - RNA, 19 nt, Homo sapiens
  misc_RNA (1)...(19): siRNA sense strand
ucacgaacgucaucugauu

SEQ ID NO: 554804 - RNA, 19 nt, Homo sapiens
  misc_RNA (1)...(19): siRNA sense strand
acagaccgguucaauauaa

SEQ ID NO: 554805 - RNA, 19 nt, Homo sapiens
  misc_RNA (1)...(19): siRNA sense strand
gcaaggaauucaaagaaag

SEQ ID NO: 554806 - RNA, 19 nt, Homo sapiens
  misc_RNA (1)...(19): siRNA sense strand
gcaauaucaucuguuguuu

SEQ ID NO: 554807 - RNA, 19 nt, Homo sapiens
  misc_RNA (1)...(19): siRNA sense strand
gaagagcuuuacacgacua

SEQ ID NO: 554808 - RNA, 19 nt, Homo sapiens
  misc_RNA (1)...(19): siRNA sense strand
uaaagaagaagaggaguua

SEQ ID NO: 554809 - RNA, 19 nt, Homo sapiens
  misc_RNA (1)...(19): siRNA sense strand
gggaauaucuuuguguguu

SEQ ID NO: 554810 - RNA, 19 nt, Homo sapiens
  misc_RNA (1)...(19): siRNA sense strand
ggacauuucuagcaauauc

SEQ ID NO: 554811 - RNA, 19 nt, Homo sapiens
  misc_RNA (1)...(19): siRNA sense strand
gaucaugaauucagagaag

SEQ ID NO: 554812 - RNA, 19 nt, Homo sapiens
  misc_RNA (1)...(19): siRNA sense strand
gaauggcccuucaaaugug

SEQ ID NO: 554813 - RNA, 19 nt, Homo sapiens
  misc_RNA (1)...(19): siRNA sense strand
gcagauuuguaugguauaa

SEQ ID NO: 554814 - RNA, 19 nt, Homo sapiens
  misc_RNA (1)...(19): siRNA sense strand
gaagauccuuuagaaacuu

SEQ ID NO: 554815 - RNA, 19 nt, Homo sapiens
  misc_RNA (1)...(19): siRNA sense strand
ggcaaggaauucaaagaaa

SEQ ID NO: 554816 - RNA, 19 nt, Homo sapiens
  misc_RNA (1)...(19): siRNA sense strand
ggauggaugugcauugaug

SEQ ID NO: 554817 - RNA, 19 nt, Homo sapiens
  misc_RNA (1)...(19): siRNA sense strand
ccacaaauuucacuacaca

SEQ ID NO: 554818 - RNA, 19 nt, Homo sapiens
  misc_RNA (1)...(19): siRNA sense strand
gugcacacaucacgaguuu

SEQ ID NO: 554819 - RNA, 19 nt, Homo sapiens
  misc_RNA (1)...(19): siRNA sense strand
gguaacaccugccaugcaa

SEQ ID NO: 554820 - RNA, 19 nt, Homo sapiens
  misc_RNA (1)...(19): siRNA sense strand
ggagguguauuacccaaau

SEQ ID NO: 554821 - RNA, 19 nt, Homo sapiens
  misc_RNA (1)...(19): siRNA sense strand
gagaaaacguugcuucaaa

SEQ ID NO: 554822 - RNA, 19 nt, Homo sapiens
  misc_RNA (1)...(19): siRNA sense strand
ugagaagccagaagauuua

SEQ ID NO: 554823 - RNA, 19 nt, Homo sapiens
  misc_RNA (1)...(19): siRNA sense strand
gcaucaauguugccuguga

SEQ ID NO: 554824 - RNA, 19 nt, Homo sapiens
  misc_RNA (1)...(19): siRNA sense strand
ggcagugucuuuccacaaa

SEQ ID NO: 554825 - RNA, 19 nt, Homo sapiens
  misc_RNA (1)...(19): siRNA sense strand
ggaucuggcugauggcaaa

SEQ ID NO: 554826 - RNA, 19 nt, Homo sapiens
  misc_RNA (1)...(19): siRNA sense strand
agaagaagaugaugaugau

SEQ ID NO: 554827 - RNA, 19 nt, Homo sapiens
  misc_RNA (1)...(19): siRNA sense strand
cuaaagcuguggccaagaa

SEQ ID NO: 554828 - RNA, 19 nt, Homo sapiens
  misc_RNA (1)...(19): siRNA sense strand
ucaaacaacuucuucaaac

SEQ ID NO: 554829 - RNA, 19 nt, Homo sapiens
  misc_RNA (1)...(19): siRNA sense strand
ggacagcuaguucugcuuu

SEQ ID NO: 554830 - RNA, 19 nt, Homo sapiens
  misc_RNA (1)...(19): siRNA sense strand
aggcuuaacuuuaguguug

SEQ ID NO: 554831 - RNA, 19 nt, Homo sapiens
  misc_RNA (1)...(19): siRNA sense strand
caugauaucuuucaaacag

SEQ ID NO: 554832 - RNA, 19 nt, Homo sapiens
  misc_RNA (1)...(19): siRNA sense strand
gccagaagauuuauuagag

SEQ ID NO: 554833 - RNA, 19 nt, Homo sapiens
  misc_RNA (1)...(19): siRNA sense strand
ccaagcuccuccucuuuaa

SEQ ID NO: 554834 - RNA, 19 nt, Homo sapiens
  misc_RNA (1)...(19): siRNA sense strand
gagcuuuacacgacuauaa

SEQ ID NO: 554835 - RNA, 19 nt, Homo sapiens
  misc_RNA (1)...(19): siRNA sense strand
cuugugaggugaaugauuu

SEQ ID NO: 554836 - RNA, 19 nt, Homo sapiens
  misc_RNA (1)...(19): siRNA sense strand
aaaccaagcuccuccucuu

SEQ ID NO: 554837 - RNA, 19 nt, Homo sapiens
  misc_RNA (1)...(19): siRNA sense strand
ggaugaagaagaagaagaa

SEQ ID NO: 554838 - RNA, 19 nt, Homo sapiens
  misc_RNA (1)...(19): siRNA sense strand
gaagccagcaugccaaaug

SEQ ID NO: 554839 - RNA, 19 nt, Homo sapiens
  misc_RNA (1)...(19): siRNA sense strand
gccauucgcugcacaaagu

SEQ ID NO: 554840 - RNA, 19 nt, Homo sapiens
  misc_RNA (1)...(19): siRNA sense strand
ggaauaucuuuguguguuc

SEQ ID NO: 554841 - RNA, 19 nt, Homo sapiens
  misc_RNA (1)...(19): siRNA sense strand
gcacaguccugcccuucga

SEQ ID NO: 554842 - RNA, 19 nt, Homo sapiens
  misc_RNA (1)...(19): siRNA sense strand
aaaggaaguuuacaaccaa

SEQ ID NO: 554843 - RNA, 19 nt, Homo sapiens
  misc_RNA (1)...(19): siRNA sense strand
gaagacaagugagccagau

SEQ ID NO: 554844 - RNA, 19 nt, Homo sapiens
  misc_RNA (1)...(19): siRNA sense strand
aagaagaggaguuaaauga

SEQ ID NO: 554845 - RNA, 19 nt, Homo sapiens
  misc_RNA (1)...(19): siRNA sense strand
gcagacacccucccuuuca

SEQ ID NO: 554846 - RNA, 19 nt, Homo sapiens
  misc_RNA (1)...(19): siRNA sense strand
uggcaucgauuuaccugua

SEQ ID NO: 554847 - RNA, 19 nt, Homo sapiens
  misc_RNA (1)...(19): siRNA sense strand
gaagacaacccugagauag

SEQ ID NO: 554848 - RNA, 19 nt, Homo sapiens
  misc_RNA (1)...(19): siRNA sense strand
cagcauuacccaagcuuua

SEQ ID NO: 554849 - RNA, 19 nt, Homo sapiens
  misc_RNA (1)...(19): siRNA sense strand
gaagaagaggaguuaaaug

SEQ ID NO: 554850 - RNA, 19 nt, Homo sapiens
  misc_RNA (1)...(19): siRNA sense strand
gaugagagagaaacuguga

SEQ ID NO: 554851 - RNA, 19 nt, Homo sapiens
  misc_RNA (1)...(19): siRNA sense strand
ggaaaucaacagagccauu

SEQ ID NO: 554852 - RNA, 19 nt, Homo sapiens
  misc_RNA (1)...(19): siRNA sense strand
gacaaaagauccagauguu

SEQ ID NO: 554853 - RNA, 19 nt, Homo sapiens
  misc_RNA (1)...(19): siRNA sense strand
guguagugcuguaaagaaa

SEQ ID NO: 554854 - RNA, 19 nt, Homo sapiens
  misc_RNA (1)...(19): siRNA sense strand
ccagugggaaucugucuua

SEQ ID NO: 554855 - RNA, 19 nt, Homo sapiens
  misc_RNA (1)...(19): siRNA sense strand
ccaguuacaguggaaauua

SEQ ID NO: 554856 - RNA, 19 nt, Homo sapiens
  misc_RNA (1)...(19): siRNA sense strand
uaaagaagacgaagagaag

SEQ ID NO: 554857 - RNA, 19 nt, Homo sapiens
  misc_RNA (1)...(19): siRNA sense strand
cagcugcgauugaggaaga

SEQ ID NO: 554858 - RNA, 19 nt, Homo sapiens
  misc_RNA (1)...(19): siRNA sense strand
ugugaaagagccagaaaua

SEQ ID NO: 554859 - RNA, 19 nt, Homo sapiens
  misc_RNA (1)...(19): siRNA sense strand
guaaucgagaguucacuua

SEQ ID NO: 554860 - RNA, 19 nt, Homo sapiens
  misc_RNA (1)...(19): siRNA sense strand
caagugacaagaagaggua

SEQ ID NO: 554861 - RNA, 19 nt, Homo sapiens
  misc_RNA (1)...(19): siRNA sense strand
gaauauaauggcaucgauu

SEQ ID NO: 554862 - RNA, 19 nt, Homo sapiens
  misc_RNA (1)...(19): siRNA sense strand
caauggugauguauuugaa

SEQ ID NO: 554863 - RNA, 19 nt, Homo sapiens
  misc_RNA (1)...(19): siRNA sense strand
ugagauagcagcugcgauu

SEQ ID NO: 554864 - RNA, 19 nt, Homo sapiens
  misc_RNA (1)...(19): siRNA sense strand
aagaauggcccuucaaaug

SEQ ID NO: 554865 - RNA, 19 nt, Homo sapiens
  misc_RNA (1)...(19): siRNA sense strand
ugcagaagguccuaaagaa

SEQ ID NO: 554866 - RNA, 19 nt, Homo sapiens
  misc_RNA (1)...(19): siRNA sense strand
aagcaaagcuguuuuacaa

SEQ ID NO: 554867 - RNA, 19 nt, Homo sapiens
  misc_RNA (1)...(19): siRNA sense strand
guuaaaugauuccucugaa

SEQ ID NO: 554868 - RNA, 19 nt, Homo sapiens
  misc_RNA (1)...(19): siRNA sense strand
ucaggaaacauucaacaaa

SEQ ID NO: 554869 - RNA, 19 nt, Homo sapiens
  misc_RNA (1)...(19): siRNA sense strand
gaacuucauccgugcaaau

SEQ ID NO: 554870 - RNA, 19 nt, Homo sapiens
  misc_RNA (1)...(19): siRNA sense strand
aaagaucucagguuaagaa

SEQ ID NO: 554871 - RNA, 19 nt, Homo sapiens
  misc_RNA (1)...(19): siRNA sense strand
cagaagguccuaaagaaga

SEQ ID NO: 554872 - RNA, 19 nt, Homo sapiens
  misc_RNA (1)...(19): siRNA sense strand
ggaauuagagaaugaaggu

SEQ ID NO: 554873 - RNA, 19 nt, Homo sapiens
  misc_RNA (1)...(19): siRNA sense strand
cagcuucggugaaauccaa

SEQ ID NO: 554874 - RNA, 19 nt, Homo sapiens
  misc_RNA (1)...(19): siRNA sense strand
uaaaugauuccucugaaga

SEQ ID NO: 554875 - RNA, 19 nt, Homo sapiens
  misc_RNA (1)...(19): siRNA sense strand
ggacacucaucaccugcaa

SEQ ID NO: 554876 - RNA, 19 nt, Homo sapiens
  misc_RNA (1)...(19): siRNA sense strand
gcacgugaggguacagaaa

SEQ ID NO: 554877 - RNA, 19 nt, Homo sapiens
  misc_RNA (1)...(19): siRNA sense strand
aaacggacuugucagaaca

SEQ ID NO: 554878 - RNA, 19 nt, Homo sapiens
  misc_RNA (1)...(19): siRNA sense strand
cagcggaugcggagauuaa

SEQ ID NO: 554879 - RNA, 19 nt, Homo sapiens
  misc_RNA (1)...(19): siRNA sense strand
gaaagguggacacucauca

SEQ ID NO: 554880 - RNA, 19 nt, Homo sapiens
  misc_RNA (1)...(19): siRNA sense strand
gauugaagcuuaucuauga

SEQ ID NO: 554881 - RNA, 19 nt, Homo sapiens
  misc_RNA (1)...(19): siRNA sense strand
agacucagcucuacaauaa

SEQ ID NO: 554882 - RNA, 19 nt, Homo sapiens
  misc_RNA (1)...(19): siRNA sense strand
ccaaguaacucuccucaaa

SEQ ID NO: 554883 - RNA, 19 nt, Homo sapiens
  misc_RNA (1)...(19): siRNA sense strand
agauaaagcuucuggauuu

SEQ ID NO: 554884 - RNA, 19 nt, Homo sapiens
  misc_RNA (1)...(19): siRNA sense strand
gacaugaauuccuuaauga

SEQ ID NO: 554885 - RNA, 19 nt, Homo sapiens
  misc_RNA (1)...(19): siRNA sense strand
gaaguucaaugcacuggaa

SEQ ID NO: 554886 - RNA, 19 nt, Homo sapiens
  misc_RNA (1)...(19): siRNA sense strand
guaccaaagugcaaucaaa

SEQ ID NO: 554887 - RNA, 19 nt, Homo sapiens
  misc_RNA (1)...(19): siRNA sense strand
ugacaugaauuccuuaaug

SEQ ID NO: 554888 - RNA, 19 nt, Homo sapiens
  misc_RNA (1)...(19): siRNA sense strand
aaguaacucuccucaaaua

SEQ ID NO: 554889 - RNA, 19 nt, Homo sapiens
  misc_RNA (1)...(19): siRNA sense strand
ucaaugcacuggaauuaga

SEQ ID NO: 554890 - RNA, 19 nt, Homo sapiens
  misc_RNA (1)...(19): siRNA sense strand
gcauuucuacuccacauua

SEQ ID NO: 554891 - RNA, 19 nt, Homo sapiens
  misc_RNA (1)...(19): siRNA sense strand
gacauuccauucacaagaa

SEQ ID NO: 554892 - RNA, 19 nt, Homo sapiens
  misc_RNA (1)...(19): siRNA sense strand
uuacaaguaugaccugaaa

SEQ ID NO: 554893 - RNA, 19 nt, Homo sapiens
  misc_RNA (1)...(19): siRNA sense strand
ggccaaggcuucaugacaa

SEQ ID NO: 554894 - RNA, 19 nt, Homo sapiens
  misc_RNA (1)...(19): siRNA sense strand
gcaauugaaugucgugucu

SEQ ID NO: 554895 - RNA, 19 nt, Homo sapiens
  misc_RNA (1)...(19): siRNA sense strand
acaauaagccucaugaaga

SEQ ID NO: 554896 - RNA, 19 nt, Homo sapiens
  misc_RNA (1)...(19): siRNA sense strand
caagggaguuucuaaagag

SEQ ID NO: 554897 - RNA, 19 nt, Homo sapiens
  misc_RNA (1)...(19): siRNA sense strand
caauaagccucaugaagag

SEQ ID NO: 554898 - RNA, 19 nt, Homo sapiens
  misc_RNA (1)...(19): siRNA sense strand
gagauaaagcuucuggauu

SEQ ID NO: 554899 - RNA, 19 nt, Homo sapiens
  misc_RNA (1)...(19): siRNA sense strand
acaagggaguuucuaaaga

SEQ ID NO: 554900 - RNA, 19 nt, Homo sapiens
  misc_RNA (1)...(19): siRNA sense strand
gaaauaaaugucaguacug

SEQ ID NO: 554901 - RNA, 19 nt, Homo sapiens
  misc_RNA (1)...(19): siRNA sense strand
gaucacagaguaugccaaa

SEQ ID NO: 554902 - RNA, 19 nt, Homo sapiens
  misc_RNA (1)...(19): siRNA sense strand
gaaagacaacagacaaauc

SEQ ID NO: 554903 - RNA, 19 nt, Homo sapiens
  misc_RNA (1)...(19): siRNA sense strand
ugacagaccucagacagau

SEQ ID NO: 554904 - RNA, 19 nt, Homo sapiens
  misc_RNA (1)...(19): siRNA sense strand
aagaacagauccagugguu

SEQ ID NO: 554905 - RNA, 19 nt, Homo sapiens
  misc_RNA (1)...(19): siRNA sense strand
gguugcagauuacaaguau

SEQ ID NO: 554906 - RNA, 19 nt, Homo sapiens
  misc_RNA (1)...(19): siRNA sense strand
gacaaaucaccauucguua

SEQ ID NO: 554907 - RNA, 19 nt, Homo sapiens
  misc_RNA (1)...(19): siRNA sense strand
gcacuggaauuagaugaca

SEQ ID NO: 554908 - RNA, 19 nt, Homo sapiens
  misc_RNA (1)...(19): siRNA sense strand
guucaaugcacuggaauua

SEQ ID NO: 554909 - RNA, 19 nt, Homo sapiens
  misc_RNA (1)...(19): siRNA sense strand
caccauucguuaucuauga

SEQ ID NO: 554910 - RNA, 19 nt, Homo sapiens
  misc_RNA (1)...(19): siRNA sense strand
gaagacauuccauucacaa

SEQ ID NO: 554911 - RNA, 19 nt, Homo sapiens
  misc_RNA (1)...(19): siRNA sense strand
gaagcccauugaagacauu

SEQ ID NO: 554912 - RNA, 19 nt, Homo sapiens
  misc_RNA (1)...(19): siRNA sense strand
ugcaggagaucacagagua

SEQ ID NO: 554913 - RNA, 19 nt, Homo sapiens
  misc_RNA (1)...(19): siRNA sense strand
gauaaagcuucuggauuuc

SEQ ID NO: 554914 - RNA, 19 nt, Homo sapiens
  misc_RNA (1)...(19): siRNA sense strand
caacagacaaaucaccauu

SEQ ID NO: 554915 - RNA, 19 nt, Homo sapiens
  misc_RNA (1)...(19): siRNA sense strand
ucaagaagacggagacaga

SEQ ID NO: 554916 - RNA, 19 nt, Homo sapiens
  misc_RNA (1)...(19): siRNA sense strand
ugacagcgacuuggcaaua

SEQ ID NO: 554917 - RNA, 19 nt, Homo sapiens
  misc_RNA (1)...(19): siRNA sense strand
agacaaaucaccauucguu

SEQ ID NO: 554918 - RNA, 19 nt, Homo sapiens
  misc_RNA (1)...(19): siRNA sense strand
ggaaagacaacagacaaau

SEQ ID NO: 554919 - RNA, 19 nt, Homo sapiens
  misc_RNA (1)...(19): siRNA sense strand
gauaucaagcccuucacua

SEQ ID NO: 554920 - RNA, 19 nt, Homo sapiens
  misc_RNA (1)...(19): siRNA sense strand
acacaaugcuggccuccuu

SEQ ID NO: 554921 - RNA, 19 nt, Homo sapiens
  misc_RNA (1)...(19): siRNA sense strand
uaacucuccucaaauaugg

SEQ ID NO: 554922 - RNA, 19 nt, Homo sapiens
  misc_RNA (1)...(19): siRNA sense strand
aaagacaacagacaaauca

SEQ ID NO: 554923 - RNA, 19 nt, Homo sapiens
  misc_RNA (1)...(19): siRNA sense strand
ggagauaaagcuucuggau

SEQ ID NO: 554924 - RNA, 19 nt, Homo sapiens
  misc_RNA (1)...(19): siRNA sense strand
gacagcgacuuggcaauau

SEQ ID NO: 554925 - RNA, 19 nt, Homo sapiens
  misc_RNA (1)...(19): siRNA sense strand
guugacuucuccagcauuu

SEQ ID NO: 554926 - RNA, 19 nt, Homo sapiens
  misc_RNA (1)...(19): siRNA sense strand
guaacucuccucaaauaug

SEQ ID NO: 554927 - RNA, 19 nt, Homo sapiens
  misc_RNA (1)...(19): siRNA sense strand
caagacaaccugcuacaag

SEQ ID NO: 554928 - RNA, 19 nt, Homo sapiens
  misc_RNA (1)...(19): siRNA sense strand
ugucgugucuguggagaua

SEQ ID NO: 554929 - RNA, 19 nt, Homo sapiens
  misc_RNA (1)...(19): siRNA sense strand
caaaucaccauucguuauc

SEQ ID NO: 554930 - RNA, 19 nt, Homo sapiens
  misc_RNA (1)...(19): siRNA sense strand
ccaacucccucauggcaau

SEQ ID NO: 554931 - RNA, 19 nt, Homo sapiens
  misc_RNA (1)...(19): siRNA sense strand
gaaaaugacagaccucaga

SEQ ID NO: 554932 - RNA, 19 nt, Homo sapiens
  misc_RNA (1)...(19): siRNA sense strand
cuaaagagccugcgaaagc

SEQ ID NO: 554933 - RNA, 19 nt, Homo sapiens
  misc_RNA (1)...(19): siRNA sense strand
ugacaagggaguuucuaaa

SEQ ID NO: 554934 - RNA, 19 nt, Homo sapiens
  misc_RNA (1)...(19): siRNA sense strand
ccaaaagcauuccugguuu

SEQ ID NO: 554935 - RNA, 19 nt, Homo sapiens
  misc_RNA (1)...(19): siRNA sense strand
ggauuucacuauggaguuc

SEQ ID NO: 554936 - RNA, 19 nt, Homo sapiens
  misc_RNA (1)...(19): siRNA sense strand
cagguuugcugaaugugaa

SEQ ID NO: 554937 - RNA, 19 nt, Homo sapiens
  misc_RNA (1)...(19): siRNA sense strand
ucuaugacaugaauuccuu

SEQ ID NO: 554938 - RNA, 19 nt, Homo sapiens
  misc_RNA (1)...(19): siRNA sense strand
cgaagacauuccauucaca

SEQ ID NO: 554939 - RNA, 19 nt, Homo sapiens
  misc_RNA (1)...(19): siRNA sense strand
gcccagguuugcugaaugu

SEQ ID NO: 554940 - RNA, 19 nt, Homo sapiens
  misc_RNA (1)...(19): siRNA sense strand
uuauggagcccaaguuuga

SEQ ID NO: 554941 - RNA, 19 nt, Homo sapiens
  misc_RNA (1)...(19): siRNA sense strand
ugcaggagaucuacaagga

SEQ ID NO: 554942 - RNA, 19 nt, Homo sapiens
  misc_RNA (1)...(19): siRNA sense strand
cauaaugccaucagguuug

SEQ ID NO: 554943 - RNA, 19 nt, Homo sapiens
  misc_RNA (1)...(19): siRNA sense strand
gacaagggaguuucuaaag

SEQ ID NO: 554944 - RNA, 19 nt, Homo sapiens
  misc_RNA (1)...(19): siRNA sense strand
ggaguccacgagaucauuu

SEQ ID NO: 554945 - RNA, 19 nt, Homo sapiens
  misc_RNA (1)...(19): siRNA sense strand
caaguaacucuccucaaau

SEQ ID NO: 554946 - RNA, 19 nt, Homo sapiens
  misc_RNA (1)...(19): siRNA sense strand
acaaaucaccauucguuau

SEQ ID NO: 554947 - RNA, 19 nt, Homo sapiens
  misc_RNA (1)...(19): siRNA sense strand
gaagacggagacagacaug

SEQ ID NO: 554948 - RNA, 19 nt, Homo sapiens
  misc_RNA (1)...(19): siRNA sense strand
uugccaagcugcuccagaa

SEQ ID NO: 554949 - RNA, 19 nt, Homo sapiens
  misc_RNA (1)...(19): siRNA sense strand
ugaguuugcugugaaguuc

SEQ ID NO: 554950 - RNA, 19 nt, Homo sapiens
  misc_RNA (1)...(19): siRNA sense strand
ccuccuugaugaauaaaga

SEQ ID NO: 554951 - RNA, 19 nt, Homo sapiens
  misc_RNA (1)...(19): siRNA sense strand
uuucagggcugccaguuuc

SEQ ID NO: 554952 - RNA, 19 nt, Homo sapiens
  misc_RNA (1)...(19): siRNA sense strand
ccaaagugcaaucaaagug

SEQ ID NO: 554953 - RNA, 19 nt, Homo sapiens
  misc_RNA (1)...(19): siRNA sense strand
gagcccaaguuugaguuug

SEQ ID NO: 554954 - RNA, 19 nt, Homo sapiens
  misc_RNA (1)...(19): siRNA sense strand
auccagugguugcagauua

SEQ ID NO: 554955 - RNA, 19 nt, Homo sapiens
  misc_RNA (1)...(19): siRNA sense strand
ggaucucuccguaauggaa

SEQ ID NO: 554956 - RNA, 19 nt, Homo sapiens
  misc_RNA (1)...(19): siRNA sense strand
acucauacauaaaguccuu

SEQ ID NO: 554957 - RNA, 19 nt, Homo sapiens
  misc_RNA (1)...(19): siRNA sense strand
uggccuccuugaugaauaa

SEQ ID NO: 554958 - RNA, 19 nt, Homo sapiens
  misc_RNA (1)...(19): siRNA sense strand
caugaauuccuuaaugaug

SEQ ID NO: 554959 - RNA, 19 nt, Homo sapiens
  misc_RNA (1)...(19): siRNA sense strand
ccucauggcaauugaaugu

SEQ ID NO: 554960 - RNA, 19 nt, Homo sapiens
  misc_RNA (1)...(19): siRNA sense strand
guggagaccgcccagguuu

SEQ ID NO: 554961 - RNA, 19 nt, Homo sapiens
  misc_RNA (1)...(19): siRNA sense strand
acagcgacuuggcaauauu

SEQ ID NO: 554962 - RNA, 19 nt, Homo sapiens
  misc_RNA (1)...(19): siRNA sense strand
uuacgaagacauuccauuc

SEQ ID NO: 554963 - RNA, 19 nt, Homo sapiens
  misc_RNA (1)...(19): siRNA sense strand
aaucaccauucguuaucua

SEQ ID NO: 554964 - RNA, 19 nt, Homo sapiens
  misc_RNA (1)...(19): siRNA sense strand
ugacaggaaagacaacaga

SEQ ID NO: 554965 - RNA, 19 nt, Homo sapiens
  misc_RNA (1)...(19): siRNA sense strand
guggaucucuccguaaugg

SEQ ID NO: 554966 - RNA, 19 nt, Homo sapiens
  misc_RNA (1)...(19): siRNA sense strand
uuaaugaugggagaagaua

SEQ ID NO: 554967 - RNA, 19 nt, Homo sapiens
  misc_RNA (1)...(19): siRNA sense strand
cguuaucuaugacaugaau

SEQ ID NO: 554968 - RNA, 19 nt, Homo sapiens
  misc_RNA (1)...(19): siRNA sense strand
caggaaagacaacagacaa

SEQ ID NO: 554969 - RNA, 19 nt, Homo sapiens
  misc_RNA (1)...(19): siRNA sense strand
caaaggcgagggcgaucuu

SEQ ID NO: 554970 - RNA, 19 nt, Homo sapiens
  misc_RNA (1)...(19): siRNA sense strand
cagcgacuuggcaauauuu

SEQ ID NO: 554971 - RNA, 19 nt, Homo sapiens
  misc_RNA (1)...(19): siRNA sense strand
caagaguaccaaagugcaa

SEQ ID NO: 554972 - RNA, 19 nt, Homo sapiens
  misc_RNA (1)...(19): siRNA sense strand
gaguccacgagaucauuua

SEQ ID NO: 554973 - RNA, 19 nt, Homo sapiens
  misc_RNA (1)...(19): siRNA sense strand
ucacuacuguugacuucuc

SEQ ID NO: 554974 - RNA, 19 nt, Homo sapiens
  misc_RNA (1)...(19): siRNA sense strand
ucauaaugccaucagguuu

SEQ ID NO: 554975 - RNA, 19 nt, Homo sapiens
  misc_RNA (1)...(19): siRNA sense strand
ugucaguacugucgguuuc

SEQ ID NO: 554976 - RNA, 19 nt, Homo sapiens
  misc_RNA (1)...(19): siRNA sense strand
caaaguggagccugcaucu

SEQ ID NO: 554977 - RNA, 19 nt, Homo sapiens
  misc_RNA (1)...(19): siRNA sense strand
cuauggaguucaugcuugu

SEQ ID NO: 554978 - RNA, 19 nt, Homo sapiens
  misc_RNA (1)...(19): siRNA sense strand
augcuggccuccuugauga

SEQ ID NO: 554979 - RNA, 19 nt, Homo sapiens
  misc_RNA (1)...(19): siRNA sense strand
gggcgaucuugacaggaaa

SEQ ID NO: 554980 - RNA, 19 nt, Homo sapiens
  misc_RNA (1)...(19): siRNA sense strand
gauugaagcuuaucuauga

SEQ ID NO: 554981 - RNA, 19 nt, Homo sapiens
  misc_RNA (1)...(19): siRNA sense strand
agacucagcucuacaauaa

SEQ ID NO: 554982 - RNA, 19 nt, Homo sapiens
  misc_RNA (1)...(19): siRNA sense strand
ccaaguaacucuccucaaa

SEQ ID NO: 554983 - RNA, 19 nt, Homo sapiens
  misc_RNA (1)...(19): siRNA sense strand
agauaaagcuucuggauuu

SEQ ID NO: 554984 - RNA, 19 nt, Homo sapiens
  misc_RNA (1)...(19): siRNA sense strand
gacaugaauuccuuaauga

SEQ ID NO: 554985 - RNA, 19 nt, Homo sapiens
  misc_RNA (1)...(19): siRNA sense strand
gaaguucaaugcacuggaa

SEQ ID NO: 554986 - RNA, 19 nt, Homo sapiens
  misc_RNA (1)...(19): siRNA sense strand
guaccaaagugcaaucaaa

SEQ ID NO: 554987 - RNA, 19 nt, Homo sapiens
  misc_RNA (1)...(19): siRNA sense strand
ugacaugaauuccuuaaug

SEQ ID NO: 554988 - RNA, 19 nt, Homo sapiens
  misc_RNA (1)...(19): siRNA sense strand
aaguaacucuccucaaaua

SEQ ID NO: 554989 - RNA, 19 nt, Homo sapiens
  misc_RNA (1)...(19): siRNA sense strand
ucaaugcacuggaauuaga

SEQ ID NO: 554990 - RNA, 19 nt, Homo sapiens
  misc_RNA (1)...(19): siRNA sense strand
gcauuucuacuccacauua

SEQ ID NO: 554991 - RNA, 19 nt, Homo sapiens
  misc_RNA (1)...(19): siRNA sense strand
gacauuccauucacaagaa

SEQ ID NO: 554992 - RNA, 19 nt, Homo sapiens
  misc_RNA (1)...(19): siRNA sense strand
uuacaaguaugaccugaaa

SEQ ID NO: 554993 - RNA, 19 nt, Homo sapiens
  misc_RNA (1)...(19): siRNA sense strand
ggccaaggcuucaugacaa

SEQ ID NO: 554994 - RNA, 19 nt, Homo sapiens
  misc_RNA (1)...(19): siRNA sense strand
gcaauugaaugucgugucu

SEQ ID NO: 554995 - RNA, 19 nt, Homo sapiens
  misc_RNA (1)...(19): siRNA sense strand
acaauaagccucaugaaga

SEQ ID NO: 554996 - RNA, 19 nt, Homo sapiens
  misc_RNA (1)...(19): siRNA sense strand
caagggaguuucuaaagag

SEQ ID NO: 554997 - RNA, 19 nt, Homo sapiens
  misc_RNA (1)...(19): siRNA sense strand
caauaagccucaugaagag

SEQ ID NO: 554998 - RNA, 19 nt, Homo sapiens
  misc_RNA (1)...(19): siRNA sense strand
gagauaaagcuucuggauu

SEQ ID NO: 554999 - RNA, 19 nt, Homo sapiens
  misc_RNA (1)...(19): siRNA sense strand
acaagggaguuucuaaaga

SEQ ID NO: 555000 - RNA, 19 nt, Homo sapiens
  misc_RNA (1)...(19): siRNA sense strand
gaaauaaaugucaguacug

SEQ ID NO: 555001 - RNA, 19 nt, Homo sapiens
  misc_RNA (1)...(19): siRNA sense strand
gaucacagaguaugccaaa

SEQ ID NO: 555002 - RNA, 19 nt, Homo sapiens
  misc_RNA (1)...(19): siRNA sense strand
gaaagacaacagacaaauc

SEQ ID NO: 555003 - RNA, 19 nt, Homo sapiens
  misc_RNA (1)...(19): siRNA sense strand
ugacagaccucagacagau

SEQ ID NO: 555004 - RNA, 19 nt, Homo sapiens
  misc_RNA (1)...(19): siRNA sense strand
aagaacagauccagugguu

SEQ ID NO: 555005 - RNA, 19 nt, Homo sapiens
  misc_RNA (1)...(19): siRNA sense strand
gaaaugaccaugguugaca

SEQ ID NO: 555006 - RNA, 19 nt, Homo sapiens
  misc_RNA (1)...(19): siRNA sense strand
gguugcagauuacaaguau

SEQ ID NO: 555007 - RNA, 19 nt, Homo sapiens
  misc_RNA (1)...(19): siRNA sense strand
gacaaaucaccauucguua

SEQ ID NO: 555008 - RNA, 19 nt, Homo sapiens
  misc_RNA (1)...(19): siRNA sense strand
gcacuggaauuagaugaca

SEQ ID NO: 555009 - RNA, 19 nt, Homo sapiens
  misc_RNA (1)...(19): siRNA sense strand
guucaaugcacuggaauua

SEQ ID NO: 555010 - RNA, 19 nt, Homo sapiens
  misc_RNA (1)...(19): siRNA sense strand
caccauucguuaucuauga

SEQ ID NO: 555011 - RNA, 19 nt, Homo sapiens
  misc_RNA (1)...(19): siRNA sense strand
gaagacauuccauucacaa

SEQ ID NO: 555012 - RNA, 19 nt, Homo sapiens
  misc_RNA (1)...(19): siRNA sense strand
gaagcccauugaagacauu

SEQ ID NO: 555013 - RNA, 19 nt, Homo sapiens
  misc_RNA (1)...(19): siRNA sense strand
ugcaggagaucacagagua

SEQ ID NO: 555014 - RNA, 19 nt, Homo sapiens
  misc_RNA (1)...(19): siRNA sense strand
gauaaagcuucuggauuuc

SEQ ID NO: 555015 - RNA, 19 nt, Homo sapiens
  misc_RNA (1)...(19): siRNA sense strand
caacagacaaaucaccauu

SEQ ID NO: 555016 - RNA, 19 nt, Homo sapiens
  misc_RNA (1)...(19): siRNA sense strand
ucaagaagacggagacaga

SEQ ID NO: 555017 - RNA, 19 nt, Homo sapiens
  misc_RNA (1)...(19): siRNA sense strand
ugacagcgacuuggcaaua

SEQ ID NO: 555018 - RNA, 19 nt, Homo sapiens
  misc_RNA (1)...(19): siRNA sense strand
agacaaaucaccauucguu

SEQ ID NO: 555019 - RNA, 19 nt, Homo sapiens
  misc_RNA (1)...(19): siRNA sense strand
ggaaagacaacagacaaau

SEQ ID NO: 555020 - RNA, 19 nt, Homo sapiens
  misc_RNA (1)...(19): siRNA sense strand
acacaaugcuggccuccuu

SEQ ID NO: 555021 - RNA, 19 nt, Homo sapiens
  misc_RNA (1)...(19): siRNA sense strand
uaacucuccucaaauaugg

SEQ ID NO: 555022 - RNA, 19 nt, Homo sapiens
  misc_RNA (1)...(19): siRNA sense strand
gauaucaagcccuucacua

SEQ ID NO: 555023 - RNA, 19 nt, Homo sapiens
  misc_RNA (1)...(19): siRNA sense strand
aaagacaacagacaaauca

SEQ ID NO: 555024 - RNA, 19 nt, Homo sapiens
  misc_RNA (1)...(19): siRNA sense strand
ggagauaaagcuucuggau

SEQ ID NO: 555025 - RNA, 19 nt, Homo sapiens
  misc_RNA (1)...(19): siRNA sense strand
gacagcgacuuggcaauau

SEQ ID NO: 555026 - RNA, 19 nt, Homo sapiens
  misc_RNA (1)...(19): siRNA sense strand
guaacucuccucaaauaug

SEQ ID NO: 555027 - RNA, 19 nt, Homo sapiens
  misc_RNA (1)...(19): siRNA sense strand
guugacuucuccagcauuu

SEQ ID NO: 555028 - RNA, 19 nt, Homo sapiens
  misc_RNA (1)...(19): siRNA sense strand
caagacaaccugcuacaag

SEQ ID NO: 555029 - RNA, 19 nt, Homo sapiens
  misc_RNA (1)...(19): siRNA sense strand
ugucgugucuguggagaua

SEQ ID NO: 555030 - RNA, 19 nt, Homo sapiens
  misc_RNA (1)...(19): siRNA sense strand
caaaucaccauucguuauc

SEQ ID NO: 555031 - RNA, 19 nt, Homo sapiens
  misc_RNA (1)...(19): siRNA sense strand
ccaacucccucauggcaau

SEQ ID NO: 555032 - RNA, 19 nt, Homo sapiens
  misc_RNA (1)...(19): siRNA sense strand
gaaaaugacagaccucaga

SEQ ID NO: 555033 - RNA, 19 nt, Homo sapiens
  misc_RNA (1)...(19): siRNA sense strand
cuaaagagccugcgaaagc

SEQ ID NO: 555034 - RNA, 19 nt, Homo sapiens
  misc_RNA (1)...(19): siRNA sense strand
ugacaagggaguuucuaaa

SEQ ID NO: 555035 - RNA, 19 nt, Homo sapiens
  misc_RNA (1)...(19): siRNA sense strand
ccaaaagcauuccugguuu

SEQ ID NO: 555036 - RNA, 19 nt, Homo sapiens
  misc_RNA (1)...(19): siRNA sense strand
ggauuucacuauggaguuc

SEQ ID NO: 555037 - RNA, 19 nt, Homo sapiens
  misc_RNA (1)...(19): siRNA sense strand
cagguuugcugaaugugaa

SEQ ID NO: 555038 - RNA, 19 nt, Homo sapiens
  misc_RNA (1)...(19): siRNA sense strand
ucuaugacaugaauuccuu

SEQ ID NO: 555039 - RNA, 19 nt, Homo sapiens
  misc_RNA (1)...(19): siRNA sense strand
cgaagacauuccauucaca

SEQ ID NO: 555040 - RNA, 19 nt, Homo sapiens
  misc_RNA (1)...(19): siRNA sense strand
gcccagguuugcugaaugu

SEQ ID NO: 555041 - RNA, 19 nt, Homo sapiens
  misc_RNA (1)...(19): siRNA sense strand
uuauggagcccaaguuuga

SEQ ID NO: 555042 - RNA, 19 nt, Homo sapiens
  misc_RNA (1)...(19): siRNA sense strand
ugcaggagaucuacaagga

SEQ ID NO: 555043 - RNA, 19 nt, Homo sapiens
  misc_RNA (1)...(19): siRNA sense strand
cauaaugccaucagguuug

SEQ ID NO: 555044 - RNA, 19 nt, Homo sapiens
  misc_RNA (1)...(19): siRNA sense strand
gacaagggaguuucuaaag

SEQ ID NO: 555045 - RNA, 19 nt, Homo sapiens
  misc_RNA (1)...(19): siRNA sense strand
ggaguccacgagaucauuu

SEQ ID NO: 555046 - RNA, 19 nt, Homo sapiens
  misc_RNA (1)...(19): siRNA sense strand
caaguaacucuccucaaau

SEQ ID NO: 555047 - RNA, 19 nt, Homo sapiens
  misc_RNA (1)...(19): siRNA sense strand
acaaaucaccauucguuau

SEQ ID NO: 555048 - RNA, 19 nt, Homo sapiens
  misc_RNA (1)...(19): siRNA sense strand
gaagacggagacagacaug

SEQ ID NO: 555049 - RNA, 19 nt, Homo sapiens
  misc_RNA (1)...(19): siRNA sense strand
uugccaagcugcuccagaa

SEQ ID NO: 555050 - RNA, 19 nt, Homo sapiens
  misc_RNA (1)...(19): siRNA sense strand
ugaguuugcugugaaguuc

SEQ ID NO: 555051 - RNA, 19 nt, Homo sapiens
  misc_RNA (1)...(19): siRNA sense strand
ccuccuugaugaauaaaga

SEQ ID NO: 555052 - RNA, 19 nt, Homo sapiens
  misc_RNA (1)...(19): siRNA sense strand
uuucagggcugccaguuuc

SEQ ID NO: 555053 - RNA, 19 nt, Homo sapiens
  misc_RNA (1)...(19): siRNA sense strand
ccaaagugcaaucaaagug

SEQ ID NO: 555054 - RNA, 19 nt, Homo sapiens
  misc_RNA (1)...(19): siRNA sense strand
gagcccaaguuugaguuug

SEQ ID NO: 555055 - RNA, 19 nt, Homo sapiens
  misc_RNA (1)...(19): siRNA sense strand
ugaccaugguugacacaga

SEQ ID NO: 555056 - RNA, 19 nt, Homo sapiens
  misc_RNA (1)...(19): siRNA sense strand
auccagugguugcagauua

SEQ ID NO: 555057 - RNA, 19 nt, Homo sapiens
  misc_RNA (1)...(19): siRNA sense strand
ggaucucuccguaauggaa

SEQ ID NO: 555058 - RNA, 19 nt, Homo sapiens
  misc_RNA (1)...(19): siRNA sense strand
acucauacauaaaguccuu

SEQ ID NO: 555059 - RNA, 19 nt, Homo sapiens
  misc_RNA (1)...(19): siRNA sense strand
uggccuccuugaugaauaa

SEQ ID NO: 555060 - RNA, 19 nt, Homo sapiens
  misc_RNA (1)...(19): siRNA sense strand
caugaauuccuuaaugaug

SEQ ID NO: 555061 - RNA, 19 nt, Homo sapiens
  misc_RNA (1)...(19): siRNA sense strand
ccucauggcaauugaaugu

SEQ ID NO: 555062 - RNA, 19 nt, Homo sapiens
  misc_RNA (1)...(19): siRNA sense strand
guggagaccgcccagguuu

SEQ ID NO: 555063 - RNA, 19 nt, Homo sapiens
  misc_RNA (1)...(19): siRNA sense strand
acagcgacuuggcaauauu

SEQ ID NO: 555064 - RNA, 19 nt, Homo sapiens
  misc_RNA (1)...(19): siRNA sense strand
uuacgaagacauuccauuc

SEQ ID NO: 555065 - RNA, 19 nt, Homo sapiens
  misc_RNA (1)...(19): siRNA sense strand
aaucaccauucguuaucua

SEQ ID NO: 555066 - RNA, 19 nt, Homo sapiens
  misc_RNA (1)...(19): siRNA sense strand
guggaucucuccguaaugg

SEQ ID NO: 555067 - RNA, 19 nt, Homo sapiens
  misc_RNA (1)...(19): siRNA sense strand
uuaaugaugggagaagaua

SEQ ID NO: 555068 - RNA, 19 nt, Homo sapiens
  misc_RNA (1)...(19): siRNA sense strand
cguuaucuaugacaugaau

SEQ ID NO: 555069 - RNA, 19 nt, Homo sapiens
  misc_RNA (1)...(19): siRNA sense strand
caggaaagacaacagacaa

SEQ ID NO: 555070 - RNA, 19 nt, Homo sapiens
  misc_RNA (1)...(19): siRNA sense strand
ugacaggaaagacaacaga

SEQ ID NO: 555071 - RNA, 19 nt, Homo sapiens
  misc_RNA (1)...(19): siRNA sense strand
caaaggcgagggcgaucuu

SEQ ID NO: 555072 - RNA, 19 nt, Homo sapiens
  misc_RNA (1)...(19): siRNA sense strand
cagcgacuuggcaauauuu

SEQ ID NO: 555073 - RNA, 19 nt, Homo sapiens
  misc_RNA (1)...(19): siRNA sense strand
caagaguaccaaagugcaa

SEQ ID NO: 555074 - RNA, 19 nt, Homo sapiens
  misc_RNA (1)...(19): siRNA sense strand
gaguccacgagaucauuua

SEQ ID NO: 555075 - RNA, 19 nt, Homo sapiens
  misc_RNA (1)...(19): siRNA sense strand
ucacuacuguugacuucuc

SEQ ID NO: 555076 - RNA, 19 nt, Homo sapiens
  misc_RNA (1)...(19): siRNA sense strand
ucauaaugccaucagguuu

SEQ ID NO: 555077 - RNA, 19 nt, Homo sapiens
  misc_RNA (1)...(19): siRNA sense strand
ugucaguacugucgguuuc

SEQ ID NO: 555078 - RNA, 19 nt, Homo sapiens
  misc_RNA (1)...(19): siRNA sense strand
caaaguggagccugcaucu

SEQ ID NO: 555079 - RNA, 19 nt, Homo sapiens
  misc_RNA (1)...(19): siRNA sense strand
augcuggccuccuugauga

SEQ ID NO: 555080 - RNA, 19 nt, Homo sapiens
  misc_RNA (1)...(19): siRNA sense strand
gauugaagcuuaucuauga

SEQ ID NO: 555081 - RNA, 19 nt, Homo sapiens
  misc_RNA (1)...(19): siRNA sense strand
agacucagcucuacaauaa

SEQ ID NO: 555082 - RNA, 19 nt, Homo sapiens
  misc_RNA (1)...(19): siRNA sense strand
ccaaguaacucuccucaaa

SEQ ID NO: 555083 - RNA, 19 nt, Homo sapiens
  misc_RNA (1)...(19): siRNA sense strand
agauaaagcuucuggauuu

SEQ ID NO: 555084 - RNA, 19 nt, Homo sapiens
  misc_RNA (1)...(19): siRNA sense strand
gacaugaauuccuuaauga

SEQ ID NO: 555085 - RNA, 19 nt, Homo sapiens
  misc_RNA (1)...(19): siRNA sense strand
gaaguucaaugcacuggaa

SEQ ID NO: 555086 - RNA, 19 nt, Homo sapiens
  misc_RNA (1)...(19): siRNA sense strand
guaccaaagugcaaucaaa

SEQ ID NO: 555087 - RNA, 19 nt, Homo sapiens
  misc_RNA (1)...(19): siRNA sense strand
ugacaugaauuccuuaaug

SEQ ID NO: 555088 - RNA, 19 nt, Homo sapiens
  misc_RNA (1)...(19): siRNA sense strand
aaguaacucuccucaaaua

SEQ ID NO: 555089 - RNA, 19 nt, Homo sapiens
  misc_RNA (1)...(19): siRNA sense strand
ucaaugcacuggaauuaga

SEQ ID NO: 555090 - RNA, 19 nt, Homo sapiens
  misc_RNA (1)...(19): siRNA sense strand
gcauuucuacuccacauua

SEQ ID NO: 555091 - RNA, 19 nt, Homo sapiens
  misc_RNA (1)...(19): siRNA sense strand
gacauuccauucacaagaa

SEQ ID NO: 555092 - RNA, 19 nt, Homo sapiens
  misc_RNA (1)...(19): siRNA sense strand
uuacaaguaugaccugaaa

SEQ ID NO: 555093 - RNA, 19 nt, Homo sapiens
  misc_RNA (1)...(19): siRNA sense strand
ggccaaggcuucaugacaa

SEQ ID NO: 555094 - RNA, 19 nt, Homo sapiens
  misc_RNA (1)...(19): siRNA sense strand
gcaauugaaugucgugucu

SEQ ID NO: 555095 - RNA, 19 nt, Homo sapiens
  misc_RNA (1)...(19): siRNA sense strand
acaauaagccucaugaaga

SEQ ID NO: 555096 - RNA, 19 nt, Homo sapiens
  misc_RNA (1)...(19): siRNA sense strand
caagggaguuucuaaagag

SEQ ID NO: 555097 - RNA, 19 nt, Homo sapiens
  misc_RNA (1)...(19): siRNA sense strand
caauaagccucaugaagag

SEQ ID NO: 555098 - RNA, 19 nt, Homo sapiens
  misc_RNA (1)...(19): siRNA sense strand
gagauaaagcuucuggauu

SEQ ID NO: 555099 - RNA, 19 nt, Homo sapiens
  misc_RNA (1)...(19): siRNA sense strand
acaagggaguuucuaaaga

SEQ ID NO: 555100 - RNA, 19 nt, Homo sapiens
  misc_RNA (1)...(19): siRNA sense strand
gaaauaaaugucaguacug

SEQ ID NO: 555101 - RNA, 19 nt, Homo sapiens
  misc_RNA (1)...(19): siRNA sense strand
gaucacagaguaugccaaa

SEQ ID NO: 555102 - RNA, 19 nt, Homo sapiens
  misc_RNA (1)...(19): siRNA sense strand
gaaagacaacagacaaauc

SEQ ID NO: 555103 - RNA, 19 nt, Homo sapiens
  misc_RNA (1)...(19): siRNA sense strand
ugacagaccucagacagau

SEQ ID NO: 555104 - RNA, 19 nt, Homo sapiens
  misc_RNA (1)...(19): siRNA sense strand
aagaacagauccagugguu

SEQ ID NO: 555105 - RNA, 19 nt, Homo sapiens
  misc_RNA (1)...(19): siRNA sense strand
gguugcagauuacaaguau

SEQ ID NO: 555106 - RNA, 19 nt, Homo sapiens
  misc_RNA (1)...(19): siRNA sense strand
gacaaaucaccauucguua

SEQ ID NO: 555107 - RNA, 19 nt, Homo sapiens
  misc_RNA (1)...(19): siRNA sense strand
gcacuggaauuagaugaca

SEQ ID NO: 555108 - RNA, 19 nt, Homo sapiens
  misc_RNA (1)...(19): siRNA sense strand
guucaaugcacuggaauua

SEQ ID NO: 555109 - RNA, 19 nt, Homo sapiens
  misc_RNA (1)...(19): siRNA sense strand
caccauucguuaucuauga

SEQ ID NO: 555110 - RNA, 19 nt, Homo sapiens
  misc_RNA (1)...(19): siRNA sense strand
gaagacauuccauucacaa

SEQ ID NO: 555111 - RNA, 19 nt, Homo sapiens
  misc_RNA (1)...(19): siRNA sense strand
gaagcccauugaagacauu

SEQ ID NO: 555112 - RNA, 19 nt, Homo sapiens
  misc_RNA (1)...(19): siRNA sense strand
ugcaggagaucacagagua

SEQ ID NO: 555113 - RNA, 19 nt, Homo sapiens
  misc_RNA (1)...(19): siRNA sense strand
gauaaagcuucuggauuuc

SEQ ID NO: 555114 - RNA, 19 nt, Homo sapiens
  misc_RNA (1)...(19): siRNA sense strand
caacagacaaaucaccauu

SEQ ID NO: 555115 - RNA, 19 nt, Homo sapiens
  misc_RNA (1)...(19): siRNA sense strand
ucaagaagacggagacaga

SEQ ID NO: 555116 - RNA, 19 nt, Homo sapiens
  misc_RNA (1)...(19): siRNA sense strand
ugacagcgacuuggcaaua

SEQ ID NO: 555117 - RNA, 19 nt, Homo sapiens
  misc_RNA (1)...(19): siRNA sense strand
agacaaaucaccauucguu

SEQ ID NO: 555118 - RNA, 19 nt, Homo sapiens
  misc_RNA (1)...(19): siRNA sense strand
ggaaagacaacagacaaau

SEQ ID NO: 555119 - RNA, 19 nt, Homo sapiens
  misc_RNA (1)...(19): siRNA sense strand
gauaucaagcccuucacua

SEQ ID NO: 555120 - RNA, 19 nt, Homo sapiens
  misc_RNA (1)...(19): siRNA sense strand
acacaaugcuggccuccuu

SEQ ID NO: 555121 - RNA, 19 nt, Homo sapiens
  misc_RNA (1)...(19): siRNA sense strand
uaacucuccucaaauaugg

SEQ ID NO: 555122 - RNA, 19 nt, Homo sapiens
  misc_RNA (1)...(19): siRNA sense strand
aaagacaacagacaaauca

SEQ ID NO: 555123 - RNA, 19 nt, Homo sapiens
  misc_RNA (1)...(19): siRNA sense strand
ggagauaaagcuucuggau

SEQ ID NO: 555124 - RNA, 19 nt, Homo sapiens
  misc_RNA (1)...(19): siRNA sense strand
gacagcgacuuggcaauau

SEQ ID NO: 555125 - RNA, 19 nt, Homo sapiens
  misc_RNA (1)...(19): siRNA sense strand
guugacuucuccagcauuu

SEQ ID NO: 555126 - RNA, 19 nt, Homo sapiens
  misc_RNA (1)...(19): siRNA sense strand
guaacucuccucaaauaug

SEQ ID NO: 555127 - RNA, 19 nt, Homo sapiens
  misc_RNA (1)...(19): siRNA sense strand
caagacaaccugcuacaag

SEQ ID NO: 555128 - RNA, 19 nt, Homo sapiens
  misc_RNA (1)...(19): siRNA sense strand
ugucgugucuguggagaua

SEQ ID NO: 555129 - RNA, 19 nt, Homo sapiens
  misc_RNA (1)...(19): siRNA sense strand
caaaucaccauucguuauc

SEQ ID NO: 555130 - RNA, 19 nt, Homo sapiens
  misc_RNA (1)...(19): siRNA sense strand
ccaacucccucauggcaau

SEQ ID NO: 555131 - RNA, 19 nt, Homo sapiens
  misc_RNA (1)...(19): siRNA sense strand
gaaaaugacagaccucaga

SEQ ID NO: 555132 - RNA, 19 nt, Homo sapiens
  misc_RNA (1)...(19): siRNA sense strand
cuaaagagccugcgaaagc

SEQ ID NO: 555133 - RNA, 19 nt, Homo sapiens
  misc_RNA (1)...(19): siRNA sense strand
ugacaagggaguuucuaaa

SEQ ID NO: 555134 - RNA, 19 nt, Homo sapiens
  misc_RNA (1)...(19): siRNA sense strand
ccaaaagcauuccugguuu

SEQ ID NO: 555135 - RNA, 19 nt, Homo sapiens
  misc_RNA (1)...(19): siRNA sense strand
ggauuucacuauggaguuc

SEQ ID NO: 555136 - RNA, 19 nt, Homo sapiens
  misc_RNA (1)...(19): siRNA sense strand
cagguuugcugaaugugaa

SEQ ID NO: 555137 - RNA, 19 nt, Homo sapiens
  misc_RNA (1)...(19): siRNA sense strand
ucuaugacaugaauuccuu

SEQ ID NO: 555138 - RNA, 19 nt, Homo sapiens
  misc_RNA (1)...(19): siRNA sense strand
cgaagacauuccauucaca

SEQ ID NO: 555139 - RNA, 19 nt, Homo sapiens
  misc_RNA (1)...(19): siRNA sense strand
gcccagguuugcugaaugu

SEQ ID NO: 555140 - RNA, 19 nt, Homo sapiens
  misc_RNA (1)...(19): siRNA sense strand
uuauggagcccaaguuuga

SEQ ID NO: 555141 - RNA, 19 nt, Homo sapiens
  misc_RNA (1)...(19): siRNA sense strand
ugcaggagaucuacaagga

SEQ ID NO: 555142 - RNA, 19 nt, Homo sapiens
  misc_RNA (1)...(19): siRNA sense strand
cauaaugccaucagguuug

SEQ ID NO: 555143 - RNA, 19 nt, Homo sapiens
  misc_RNA (1)...(19): siRNA sense strand
gacaagggaguuucuaaag

SEQ ID NO: 555144 - RNA, 19 nt, Homo sapiens
  misc_RNA (1)...(19): siRNA sense strand
ggaguccacgagaucauuu

SEQ ID NO: 555145 - RNA, 19 nt, Homo sapiens
  misc_RNA (1)...(19): siRNA sense strand
caaguaacucuccucaaau

SEQ ID NO: 555146 - RNA, 19 nt, Homo sapiens
  misc_RNA (1)...(19): siRNA sense strand
acaaaucaccauucguuau

SEQ ID NO: 555147 - RNA, 19 nt, Homo sapiens
  misc_RNA (1)...(19): siRNA sense strand
gaagacggagacagacaug

SEQ ID NO: 555148 - RNA, 19 nt, Homo sapiens
  misc_RNA (1)...(19): siRNA sense strand
uugccaagcugcuccagaa

SEQ ID NO: 555149 - RNA, 19 nt, Homo sapiens
  misc_RNA (1)...(19): siRNA sense strand
ugaguuugcugugaaguuc

SEQ ID NO: 555150 - RNA, 19 nt, Homo sapiens
  misc_RNA (1)...(19): siRNA sense strand
ccuccuugaugaauaaaga

SEQ ID NO: 555151 - RNA, 19 nt, Homo sapiens
  misc_RNA (1)...(19): siRNA sense strand
uuucagggcugccaguuuc

SEQ ID NO: 555152 - RNA, 19 nt, Homo sapiens
  misc_RNA (1)...(19): siRNA sense strand
ccaaagugcaaucaaagug

SEQ ID NO: 555153 - RNA, 19 nt, Homo sapiens
  misc_RNA (1)...(19): siRNA sense strand
gagcccaaguuugaguuug

SEQ ID NO: 555154 - RNA, 19 nt, Homo sapiens
  misc_RNA (1)...(19): siRNA sense strand
auccagugguugcagauua

SEQ ID NO: 555155 - RNA, 19 nt, Homo sapiens
  misc_RNA (1)...(19): siRNA sense strand
ggaucucuccguaauggaa

SEQ ID NO: 555156 - RNA, 19 nt, Homo sapiens
  misc_RNA (1)...(19): siRNA sense strand
acucauacauaaaguccuu

SEQ ID NO: 555157 - RNA, 19 nt, Homo sapiens
  misc_RNA (1)...(19): siRNA sense strand
uggccuccuugaugaauaa

SEQ ID NO: 555158 - RNA, 19 nt, Homo sapiens
  misc_RNA (1)...(19): siRNA sense strand
caugaauuccuuaaugaug

SEQ ID NO: 555159 - RNA, 19 nt, Homo sapiens
  misc_RNA (1)...(19): siRNA sense strand
ccucauggcaauugaaugu

SEQ ID NO: 555160 - RNA, 19 nt, Homo sapiens
  misc_RNA (1)...(19): siRNA sense strand
guggagaccgcccagguuu

SEQ ID NO: 555161 - RNA, 19 nt, Homo sapiens
  misc_RNA (1)...(19): siRNA sense strand
acagcgacuuggcaauauu

SEQ ID NO: 555162 - RNA, 19 nt, Homo sapiens
  misc_RNA (1)...(19): siRNA sense strand
uuacgaagacauuccauuc

SEQ ID NO: 555163 - RNA, 19 nt, Homo sapiens
  misc_RNA (1)...(19): siRNA sense strand
aaucaccauucguuaucua

SEQ ID NO: 555164 - RNA, 19 nt, Homo sapiens
  misc_RNA (1)...(19): siRNA sense strand
ugacaggaaagacaacaga

SEQ ID NO: 555165 - RNA, 19 nt, Homo sapiens
  misc_RNA (1)...(19): siRNA sense strand
guggaucucuccguaaugg

SEQ ID NO: 555166 - RNA, 19 nt, Homo sapiens
  misc_RNA (1)...(19): siRNA sense strand
uuaaugaugggagaagaua

SEQ ID NO: 555167 - RNA, 19 nt, Homo sapiens
  misc_RNA (1)...(19): siRNA sense strand
cguuaucuaugacaugaau

SEQ ID NO: 555168 - RNA, 19 nt, Homo sapiens
  misc_RNA (1)...(19): siRNA sense strand
caggaaagacaacagacaa

SEQ ID NO: 555169 - RNA, 19 nt, Homo sapiens
  misc_RNA (1)...(19): siRNA sense strand
caaaggcgagggcgaucuu

SEQ ID NO: 555170 - RNA, 19 nt, Homo sapiens
  misc_RNA (1)...(19): siRNA sense strand
cagcgacuuggcaauauuu

SEQ ID NO: 555171 - RNA, 19 nt, Homo sapiens
  misc_RNA (1)...(19): siRNA sense strand
caagaguaccaaagugcaa

SEQ ID NO: 555172 - RNA, 19 nt, Homo sapiens
  misc_RNA (1)...(19): siRNA sense strand
gaguccacgagaucauuua

SEQ ID NO: 555173 - RNA, 19 nt, Homo sapiens
  misc_RNA (1)...(19): siRNA sense strand
ucacuacuguugacuucuc

SEQ ID NO: 555174 - RNA, 19 nt, Homo sapiens
  misc_RNA (1)...(19): siRNA sense strand
ucauaaugccaucagguuu

SEQ ID NO: 555175 - RNA, 19 nt, Homo sapiens
  misc_RNA (1)...(19): siRNA sense strand
ugucaguacugucgguuuc

SEQ ID NO: 555176 - RNA, 19 nt, Homo sapiens
  misc_RNA (1)...(19): siRNA sense strand
caaaguggagccugcaucu

SEQ ID NO: 555177 - RNA, 19 nt, Homo sapiens
  misc_RNA (1)...(19): siRNA sense strand
cuauggaguucaugcuugu

SEQ ID NO: 555178 - RNA, 19 nt, Homo sapiens
  misc_RNA (1)...(19): siRNA sense strand
augcuggccuccuugauga

SEQ ID NO: 555179 - RNA, 19 nt, Homo sapiens
  misc_RNA (1)...(19): siRNA sense strand
gggcgaucuugacaggaaa

SEQ ID NO: 555180 - RNA, 19 nt, Homo sapiens
  misc_RNA (1)...(19): siRNA sense strand
gauugaagcuuaucuauga

SEQ ID NO: 555181 - RNA, 19 nt, Homo sapiens
  misc_RNA (1)...(19): siRNA sense strand
agacucagcucuacaauaa

SEQ ID NO: 555182 - RNA, 19 nt, Homo sapiens
  misc_RNA (1)...(19): siRNA sense strand
ccaaguaacucuccucaaa

SEQ ID NO: 555183 - RNA, 19 nt, Homo sapiens
  misc_RNA (1)...(19): siRNA sense strand
agauaaagcuucuggauuu

SEQ ID NO: 555184 - RNA, 19 nt, Homo sapiens
  misc_RNA (1)...(19): siRNA sense strand
gacaugaauuccuuaauga

SEQ ID NO: 555185 - RNA, 19 nt, Homo sapiens
  misc_RNA (1)...(19): siRNA sense strand
gaaguucaaugcacuggaa

SEQ ID NO: 555186 - RNA, 19 nt, Homo sapiens
  misc_RNA (1)...(19): siRNA sense strand
guaccaaagugcaaucaaa

SEQ ID NO: 555187 - RNA, 19 nt, Homo sapiens
  misc_RNA (1)...(19): siRNA sense strand
ugacaugaauuccuuaaug

SEQ ID NO: 555188 - RNA, 19 nt, Homo sapiens
  misc_RNA (1)...(19): siRNA sense strand
aaguaacucuccucaaaua

SEQ ID NO: 555189 - RNA, 19 nt, Homo sapiens
  misc_RNA (1)...(19): siRNA sense strand
ucaaugcacuggaauuaga

SEQ ID NO: 555190 - RNA, 19 nt, Homo sapiens
  misc_RNA (1)...(19): siRNA sense strand
gcauuucuacuccacauua

SEQ ID NO: 555191 - RNA, 19 nt, Homo sapiens
  misc_RNA (1)...(19): siRNA sense strand
gacauuccauucacaagaa

SEQ ID NO: 555192 - RNA, 19 nt, Homo sapiens
  misc_RNA (1)...(19): siRNA sense strand
uuacaaguaugaccugaaa

SEQ ID NO: 555193 - RNA, 19 nt, Homo sapiens
  misc_RNA (1)...(19): siRNA sense strand
ggccaaggcuucaugacaa

SEQ ID NO: 555194 - RNA, 19 nt, Homo sapiens
  misc_RNA (1)...(19): siRNA sense strand
gcaauugaaugucgugucu

SEQ ID NO: 555195 - RNA, 19 nt, Homo sapiens
  misc_RNA (1)...(19): siRNA sense strand
acaauaagccucaugaaga

SEQ ID NO: 555196 - RNA, 19 nt, Homo sapiens
  misc_RNA (1)...(19): siRNA sense strand
caagggaguuucuaaagag

SEQ ID NO: 555197 - RNA, 19 nt, Homo sapiens
  misc_RNA (1)...(19): siRNA sense strand
caauaagccucaugaagag

SEQ ID NO: 555198 - RNA, 19 nt, Homo sapiens
  misc_RNA (1)...(19): siRNA sense strand
gagauaaagcuucuggauu

SEQ ID NO: 555199 - RNA, 19 nt, Homo sapiens
  misc_RNA (1)...(19): siRNA sense strand
acaagggaguuucuaaaga

SEQ ID NO: 555200 - RNA, 19 nt, Homo sapiens
  misc_RNA (1)...(19): siRNA sense strand
gaaauaaaugucaguacug

SEQ ID NO: 555201 - RNA, 19 nt, Homo sapiens
  misc_RNA (1)...(19): siRNA sense strand
gaucacagaguaugccaaa

SEQ ID NO: 555202 - RNA, 19 nt, Homo sapiens
  misc_RNA (1)...(19): siRNA sense strand
gaaagacaacagacaaauc

SEQ ID NO: 555203 - RNA, 19 nt, Homo sapiens
  misc_RNA (1)...(19): siRNA sense strand
ugacagaccucagacagau

SEQ ID NO: 555204 - RNA, 19 nt, Homo sapiens
  misc_RNA (1)...(19): siRNA sense strand
aagaacagauccagugguu

SEQ ID NO: 555205 - RNA, 19 nt, Homo sapiens
  misc_RNA (1)...(19): siRNA sense strand
gguugcagauuacaaguau

SEQ ID NO: 555206 - RNA, 19 nt, Homo sapiens
  misc_RNA (1)...(19): siRNA sense strand
gacaaaucaccauucguua

SEQ ID NO: 555207 - RNA, 19 nt, Homo sapiens
  misc_RNA (1)...(19): siRNA sense strand
gcacuggaauuagaugaca

SEQ ID NO: 555208 - RNA, 19 nt, Homo sapiens
  misc_RNA (1)...(19): siRNA sense strand
guucaaugcacuggaauua

SEQ ID NO: 555209 - RNA, 19 nt, Homo sapiens
  misc_RNA (1)...(19): siRNA sense strand
caccauucguuaucuauga

SEQ ID NO: 555210 - RNA, 19 nt, Homo sapiens
  misc_RNA (1)...(19): siRNA sense strand
gaagacauuccauucacaa

SEQ ID NO: 555211 - RNA, 19 nt, Homo sapiens
  misc_RNA (1)...(19): siRNA sense strand
gaagcccauugaagacauu

SEQ ID NO: 555212 - RNA, 19 nt, Homo sapiens
  misc_RNA (1)...(19): siRNA sense strand
ugcaggagaucacagagua

SEQ ID NO: 555213 - RNA, 19 nt, Homo sapiens
  misc_RNA (1)...(19): siRNA sense strand
gauaaagcuucuggauuuc

SEQ ID NO: 555214 - RNA, 19 nt, Homo sapiens
  misc_RNA (1)...(19): siRNA sense strand
caacagacaaaucaccauu

SEQ ID NO: 555215 - RNA, 19 nt, Homo sapiens
  misc_RNA (1)...(19): siRNA sense strand
ucaagaagacggagacaga

SEQ ID NO: 555216 - RNA, 19 nt, Homo sapiens
  misc_RNA (1)...(19): siRNA sense strand
ugacagcgacuuggcaaua

SEQ ID NO: 555217 - RNA, 19 nt, Homo sapiens
  misc_RNA (1)...(19): siRNA sense strand
agacaaaucaccauucguu

SEQ ID NO: 555218 - RNA, 19 nt, Homo sapiens
  misc_RNA (1)...(19): siRNA sense strand
ggaaagacaacagacaaau

SEQ ID NO: 555219 - RNA, 19 nt, Homo sapiens
  misc_RNA (1)...(19): siRNA sense strand
gauaucaagcccuucacua

SEQ ID NO: 555220 - RNA, 19 nt, Homo sapiens
  misc_RNA (1)...(19): siRNA sense strand
acacaaugcuggccuccuu

SEQ ID NO: 555221 - RNA, 19 nt, Homo sapiens
  misc_RNA (1)...(19): siRNA sense strand
uaacucuccucaaauaugg

SEQ ID NO: 555222 - RNA, 19 nt, Homo sapiens
  misc_RNA (1)...(19): siRNA sense strand
aaagacaacagacaaauca

SEQ ID NO: 555223 - RNA, 19 nt, Homo sapiens
  misc_RNA (1)...(19): siRNA sense strand
ggagauaaagcuucuggau

SEQ ID NO: 555224 - RNA, 19 nt, Homo sapiens
  misc_RNA (1)...(19): siRNA sense strand
gacagcgacuuggcaauau

SEQ ID NO: 555225 - RNA, 19 nt, Homo sapiens
  misc_RNA (1)...(19): siRNA sense strand
guugacuucuccagcauuu

SEQ ID NO: 555226 - RNA, 19 nt, Homo sapiens
  misc_RNA (1)...(19): siRNA sense strand
guaacucuccucaaauaug

SEQ ID NO: 555227 - RNA, 19 nt, Homo sapiens
  misc_RNA (1)...(19): siRNA sense strand
caagacaaccugcuacaag

SEQ ID NO: 555228 - RNA, 19 nt, Homo sapiens
  misc_RNA (1)...(19): siRNA sense strand
ugucgugucuguggagaua

SEQ ID NO: 555229 - RNA, 19 nt, Homo sapiens
  misc_RNA (1)...(19): siRNA sense strand
caaaucaccauucguuauc

SEQ ID NO: 555230 - RNA, 19 nt, Homo sapiens
  misc_RNA (1)...(19): siRNA sense strand
ccaacucccucauggcaau

SEQ ID NO: 555231 - RNA, 19 nt, Homo sapiens
  misc_RNA (1)...(19): siRNA sense strand
gaaaaugacagaccucaga

SEQ ID NO: 555232 - RNA, 19 nt, Homo sapiens
  misc_RNA (1)...(19): siRNA sense strand
cuaaagagccugcgaaagc

SEQ ID NO: 555233 - RNA, 19 nt, Homo sapiens
  misc_RNA (1)...(19): siRNA sense strand
ugacaagggaguuucuaaa

SEQ ID NO: 555234 - RNA, 19 nt, Homo sapiens
  misc_RNA (1)...(19): siRNA sense strand
ccaaaagcauuccugguuu

SEQ ID NO: 555235 - RNA, 19 nt, Homo sapiens
  misc_RNA (1)...(19): siRNA sense strand
ggauuucacuauggaguuc

SEQ ID NO: 555236 - RNA, 19 nt, Homo sapiens
  misc_RNA (1)...(19): siRNA sense strand
cagguuugcugaaugugaa

SEQ ID NO: 555237 - RNA, 19 nt, Homo sapiens
  misc_RNA (1)...(19): siRNA sense strand
ucuaugacaugaauuccuu

SEQ ID NO: 555238 - RNA, 19 nt, Homo sapiens
  misc_RNA (1)...(19): siRNA sense strand
cgaagacauuccauucaca

SEQ ID NO: 555239 - RNA, 19 nt, Homo sapiens
  misc_RNA (1)...(19): siRNA sense strand
gcccagguuugcugaaugu

SEQ ID NO: 555240 - RNA, 19 nt, Homo sapiens
  misc_RNA (1)...(19): siRNA sense strand
uuauggagcccaaguuuga

SEQ ID NO: 555241 - RNA, 19 nt, Homo sapiens
  misc_RNA (1)...(19): siRNA sense strand
ugcaggagaucuacaagga

SEQ ID NO: 555242 - RNA, 19 nt, Homo sapiens
  misc_RNA (1)...(19): siRNA sense strand
cauaaugccaucagguuug

SEQ ID NO: 555243 - RNA, 19 nt, Homo sapiens
  misc_RNA (1)...(19): siRNA sense strand
gacaagggaguuucuaaag

SEQ ID NO: 555244 - RNA, 19 nt, Homo sapiens
  misc_RNA (1)...(19): siRNA sense strand
ggaguccacgagaucauuu

SEQ ID NO: 555245 - RNA, 19 nt, Homo sapiens
  misc_RNA (1)...(19): siRNA sense strand
caaguaacucuccucaaau

SEQ ID NO: 555246 - RNA, 19 nt, Homo sapiens
  misc_RNA (1)...(19): siRNA sense strand
acaaaucaccauucguuau

SEQ ID NO: 555247 - RNA, 19 nt, Homo sapiens
  misc_RNA (1)...(19): siRNA sense strand
gaagacggagacagacaug

SEQ ID NO: 555248 - RNA, 19 nt, Homo sapiens
  misc_RNA (1)...(19): siRNA sense strand
uugccaagcugcuccagaa

SEQ ID NO: 555249 - RNA, 19 nt, Homo sapiens
  misc_RNA (1)...(19): siRNA sense strand
ugaguuugcugugaaguuc

SEQ ID NO: 555250 - RNA, 19 nt, Homo sapiens
  misc_RNA (1)...(19): siRNA sense strand
ccuccuugaugaauaaaga

SEQ ID NO: 555251 - RNA, 19 nt, Homo sapiens
  misc_RNA (1)...(19): siRNA sense strand
uuucagggcugccaguuuc

SEQ ID NO: 555252 - RNA, 19 nt, Homo sapiens
  misc_RNA (1)...(19): siRNA sense strand
ccaaagugcaaucaaagug

SEQ ID NO: 555253 - RNA, 19 nt, Homo sapiens
  misc_RNA (1)...(19): siRNA sense strand
gagcccaaguuugaguuug

SEQ ID NO: 555254 - RNA, 19 nt, Homo sapiens
  misc_RNA (1)...(19): siRNA sense strand
auccagugguugcagauua

SEQ ID NO: 555255 - RNA, 19 nt, Homo sapiens
  misc_RNA (1)...(19): siRNA sense strand
ggaucucuccguaauggaa

SEQ ID NO: 555256 - RNA, 19 nt, Homo sapiens
  misc_RNA (1)...(19): siRNA sense strand
acucauacauaaaguccuu

SEQ ID NO: 555257 - RNA, 19 nt, Homo sapiens
  misc_RNA (1)...(19): siRNA sense strand
uggccuccuugaugaauaa

SEQ ID NO: 555258 - RNA, 19 nt, Homo sapiens
  misc_RNA (1)...(19): siRNA sense strand
caugaauuccuuaaugaug

SEQ ID NO: 555259 - RNA, 19 nt, Homo sapiens
  misc_RNA (1)...(19): siRNA sense strand
ccucauggcaauugaaugu

SEQ ID NO: 555260 - RNA, 19 nt, Homo sapiens
  misc_RNA (1)...(19): siRNA sense strand
guggagaccgcccagguuu

SEQ ID NO: 555261 - RNA, 19 nt, Homo sapiens
  misc_RNA (1)...(19): siRNA sense strand
acagcgacuuggcaauauu

SEQ ID NO: 555262 - RNA, 19 nt, Homo sapiens
  misc_RNA (1)...(19): siRNA sense strand
uuacgaagacauuccauuc

SEQ ID NO: 555263 - RNA, 19 nt, Homo sapiens
  misc_RNA (1)...(19): siRNA sense strand
aaucaccauucguuaucua

SEQ ID NO: 555264 - RNA, 19 nt, Homo sapiens
  misc_RNA (1)...(19): siRNA sense strand
ugacaggaaagacaacaga

SEQ ID NO: 555265 - RNA, 19 nt, Homo sapiens
  misc_RNA (1)...(19): siRNA sense strand
guggaucucuccguaaugg

SEQ ID NO: 555266 - RNA, 19 nt, Homo sapiens
  misc_RNA (1)...(19): siRNA sense strand
uuaaugaugggagaagaua

SEQ ID NO: 555267 - RNA, 19 nt, Homo sapiens
  misc_RNA (1)...(19): siRNA sense strand
cguuaucuaugacaugaau

SEQ ID NO: 555268 - RNA, 19 nt, Homo sapiens
  misc_RNA (1)...(19): siRNA sense strand
caggaaagacaacagacaa

SEQ ID NO: 555269 - RNA, 19 nt, Homo sapiens
  misc_RNA (1)...(19): siRNA sense strand
caaaggcgagggcgaucuu

SEQ ID NO: 555270 - RNA, 19 nt, Homo sapiens
  misc_RNA (1)...(19): siRNA sense strand
cagcgacuuggcaauauuu

SEQ ID NO: 555271 - RNA, 19 nt, Homo sapiens
  misc_RNA (1)...(19): siRNA sense strand
caagaguaccaaagugcaa

SEQ ID NO: 555272 - RNA, 19 nt, Homo sapiens
  misc_RNA (1)...(19): siRNA sense strand
gaguccacgagaucauuua

SEQ ID NO: 555273 - RNA, 19 nt, Homo sapiens
  misc_RNA (1)...(19): siRNA sense strand
ucacuacuguugacuucuc

SEQ ID NO: 555274 - RNA, 19 nt, Homo sapiens
  misc_RNA (1)...(19): siRNA sense strand
ucauaaugccaucagguuu

SEQ ID NO: 555275 - RNA, 19 nt, Homo sapiens
  misc_RNA (1)...(19): siRNA sense strand
ugucaguacugucgguuuc

SEQ ID NO: 555276 - RNA, 19 nt, Homo sapiens
  misc_RNA (1)...(19): siRNA sense strand
caaaguggagccugcaucu

SEQ ID NO: 555277 - RNA, 19 nt, Homo sapiens
  misc_RNA (1)...(19): siRNA sense strand
cuauggaguucaugcuugu

SEQ ID NO: 555278 - RNA, 19 nt, Homo sapiens
  misc_RNA (1)...(19): siRNA sense strand
augcuggccuccuugauga

SEQ ID NO: 555279 - RNA, 19 nt, Homo sapiens
  misc_RNA (1)...(19): siRNA sense strand
gggcgaucuugacaggaaa

SEQ ID NO: 555280 - RNA, 19 nt, Homo sapiens
  misc_RNA (1)...(19): siRNA sense strand
gaacuacugguuugacaua

SEQ ID NO: 555281 - RNA, 19 nt, Homo sapiens
  misc_RNA (1)...(19): siRNA sense strand
gcaaauacagcgagauguu

SEQ ID NO: 555282 - RNA, 19 nt, Homo sapiens
  misc_RNA (1)...(19): siRNA sense strand
cagcuucaccuccauauuu

SEQ ID NO: 555283 - RNA, 19 nt, Homo sapiens
  misc_RNA (1)...(19): siRNA sense strand
gcacuggccuggcauucau

SEQ ID NO: 555284 - RNA, 19 nt, Homo sapiens
  misc_RNA (1)...(19): siRNA sense strand
gcugggaacuacugguuug

SEQ ID NO: 555285 - RNA, 19 nt, Homo sapiens
  misc_RNA (1)...(19): siRNA sense strand
gggcugaggagauuugaaa

SEQ ID NO: 555286 - RNA, 19 nt, Homo sapiens
  misc_RNA (1)...(19): siRNA sense strand
ggucggugcucuacuucuu

SEQ ID NO: 555287 - RNA, 19 nt, Homo sapiens
  misc_RNA (1)...(19): siRNA sense strand
cuacugguuugacauauuc

SEQ ID NO: 555288 - RNA, 19 nt, Homo sapiens
  misc_RNA (1)...(19): siRNA sense strand
ccacacaguacuucuggua

SEQ ID NO: 555289 - RNA, 19 nt, Homo sapiens
  misc_RNA (1)...(19): siRNA sense strand
gaugugggcuggcguaagc

SEQ ID NO: 555290 - RNA, 19 nt, Homo sapiens
  misc_RNA (1)...(19): siRNA sense strand
gauguucccgcaaaucaaa

SEQ ID NO: 555291 - RNA, 19 nt, Homo sapiens
  misc_RNA (1)...(19): siRNA sense strand
acaaugagccauccaacaa

SEQ ID NO: 555292 - RNA, 19 nt, Homo sapiens
  misc_RNA (1)...(19): siRNA sense strand
gagauguucccgcaaauca

SEQ ID NO: 555293 - RNA, 19 nt, Homo sapiens
  misc_RNA (1)...(19): siRNA sense strand
ugaggagauuugaaaguga

SEQ ID NO: 555294 - RNA, 19 nt, Homo sapiens
  misc_RNA (1)...(19): siRNA sense strand
ggucuggugugccuuguca

SEQ ID NO: 555295 - RNA, 19 nt, Homo sapiens
  misc_RNA (1)...(19): siRNA sense strand
cagaucuucuucucacuug

SEQ ID NO: 555296 - RNA, 19 nt, Homo sapiens
  misc_RNA (1)...(19): siRNA sense strand
caacagcuucaccuccaua

SEQ ID NO: 555297 - RNA, 19 nt, Homo sapiens
  misc_RNA (1)...(19): siRNA sense strand
cuacacagaggccauuaaa

SEQ ID NO: 555298 - RNA, 19 nt, Homo sapiens
  misc_RNA (1)...(19): siRNA sense strand
gauggaggcugggaacuac

SEQ ID NO: 555299 - RNA, 19 nt, Homo sapiens
  misc_RNA (1)...(19): siRNA sense strand
gaaugccgcucuuguaccu

SEQ ID NO: 555300 - RNA, 19 nt, Homo sapiens
  misc_RNA (1)...(19): siRNA sense strand
gauuugaaagugaccuuaa

SEQ ID NO: 555301 - RNA, 19 nt, Homo sapiens
  misc_RNA (1)...(19): siRNA sense strand
gggaacuacugguuugaca

SEQ ID NO: 555302 - RNA, 19 nt, Homo sapiens
  misc_RNA (1)...(19): siRNA sense strand
ggaaaacccucaauaucuc

SEQ ID NO: 555303 - RNA, 19 nt, Homo sapiens
  misc_RNA (1)...(19): siRNA sense strand
ccagcgugguggucucuuu

SEQ ID NO: 555304 - RNA, 19 nt, Homo sapiens
  misc_RNA (1)...(19): siRNA sense strand
cccaaggccuggaucaaug

SEQ ID NO: 555305 - RNA, 19 nt, Homo sapiens
  misc_RNA (1)...(19): siRNA sense strand
uaugaaaacugcuugaaga

SEQ ID NO: 555306 - RNA, 19 nt, Homo sapiens
  misc_RNA (1)...(19): siRNA sense strand
uggccuggcugguggugua

SEQ ID NO: 555307 - RNA, 19 nt, Homo sapiens
  misc_RNA (1)...(19): siRNA sense strand
uaagcccacugcugauugu

SEQ ID NO: 555308 - RNA, 19 nt, Homo sapiens
  misc_RNA (1)...(19): siRNA sense strand
gaccaacacuuuugaccuu

SEQ ID NO: 555309 - RNA, 19 nt, Homo sapiens
  misc_RNA (1)...(19): siRNA sense strand
cugaggagauuugaaagug

SEQ ID NO: 555310 - RNA, 19 nt, Homo sapiens
  misc_RNA (1)...(19): siRNA sense strand
guaagcccacugcugauug

SEQ ID NO: 555311 - RNA, 19 nt, Homo sapiens
  misc_RNA (1)...(19): siRNA sense strand
gaagggcuaccucgcaucu

SEQ ID NO: 555312 - RNA, 19 nt, Homo sapiens
  misc_RNA (1)...(19): siRNA sense strand
gcgagauguucccgcaaau

SEQ ID NO: 555313 - RNA, 19 nt, Homo sapiens
  misc_RNA (1)...(19): siRNA sense strand
caaauacagcgagauguuc

SEQ ID NO: 555314 - RNA, 19 nt, Homo sapiens
  misc_RNA (1)...(19): siRNA sense strand
gcaugguguucacgaugga

SEQ ID NO: 555315 - RNA, 19 nt, Homo sapiens
  misc_RNA (1)...(19): siRNA sense strand
ccacccagaucuucuucuc

SEQ ID NO: 555316 - RNA, 19 nt, Homo sapiens
  misc_RNA (1)...(19): siRNA sense strand
ugagucugcugcugaccaa

SEQ ID NO: 555317 - RNA, 19 nt, Homo sapiens
  misc_RNA (1)...(19): siRNA sense strand
uguacgggcugaggagauu

SEQ ID NO: 555318 - RNA, 19 nt, Homo sapiens
  misc_RNA (1)...(19): siRNA sense strand
ggugugccuugucaacugu

SEQ ID NO: 555319 - RNA, 19 nt, Homo sapiens
  misc_RNA (1)...(19): siRNA sense strand
gcaucugccuacccaagca

SEQ ID NO: 555320 - RNA, 19 nt, Homo sapiens
  misc_RNA (1)...(19): siRNA sense strand
gggaaugccgcucuuguac

SEQ ID NO: 555321 - RNA, 19 nt, Homo sapiens
  misc_RNA (1)...(19): siRNA sense strand
acuacugguuugacauauu

SEQ ID NO: 555322 - RNA, 19 nt, Homo sapiens
  misc_RNA (1)...(19): siRNA sense strand
cuccauauuugccagcauu

SEQ ID NO: 555323 - RNA, 19 nt, Homo sapiens
  misc_RNA (1)...(19): siRNA sense strand
gagggaaugccgcucuugu

SEQ ID NO: 555324 - RNA, 19 nt, Homo sapiens
  misc_RNA (1)...(19): siRNA sense strand
cgauggaggcugggaacua

SEQ ID NO: 555325 - RNA, 19 nt, Homo sapiens
  misc_RNA (1)...(19): siRNA sense strand
uguggucggugcucuacuu

SEQ ID NO: 555326 - RNA, 19 nt, Homo sapiens
  misc_RNA (1)...(19): siRNA sense strand
guacggcggagguaguuuc

SEQ ID NO: 555327 - RNA, 19 nt, Homo sapiens
  misc_RNA (1)...(19): siRNA sense strand
guacuacaacgucaucaac

SEQ ID NO: 555328 - RNA, 19 nt, Homo sapiens
  misc_RNA (1)...(19): siRNA sense strand
guucagcgucgccucaaga

SEQ ID NO: 555329 - RNA, 19 nt, Homo sapiens
  misc_RNA (1)...(19): siRNA sense strand
aagcaaauacagcgagaug

SEQ ID NO: 555330 - RNA, 19 nt, Homo sapiens
  misc_RNA (1)...(19): siRNA sense strand
ugacauauucaacgacuac

SEQ ID NO: 555331 - RNA, 19 nt, Homo sapiens
  misc_RNA (1)...(19): siRNA sense strand
ugacagacagcaagaucau

SEQ ID NO: 555332 - RNA, 19 nt, Homo sapiens
  misc_RNA (1)...(19): siRNA sense strand
caaugcagccacccagauc

SEQ ID NO: 555333 - RNA, 19 nt, Homo sapiens
  misc_RNA (1)...(19): siRNA sense strand
gcucgugaccaaagauuac

SEQ ID NO: 555334 - RNA, 19 nt, Homo sapiens
  misc_RNA (1)...(19): siRNA sense strand
gcugaggagauuugaaagu

SEQ ID NO: 555335 - RNA, 19 nt, Homo sapiens
  misc_RNA (1)...(19): siRNA sense strand
ccagaagcacgccaucauc

SEQ ID NO: 555336 - RNA, 19 nt, Homo sapiens
  misc_RNA (1)...(19): siRNA sense strand
ccagaucuucuucucacuu

SEQ ID NO: 555337 - RNA, 19 nt, Homo sapiens
  misc_RNA (1)...(19): siRNA sense strand
aggccaccuucaauuauga

SEQ ID NO: 555338 - RNA, 19 nt, Homo sapiens
  misc_RNA (1)...(19): siRNA sense strand
cuugucaacugugccauug

SEQ ID NO: 555339 - RNA, 19 nt, Homo sapiens
  misc_RNA (1)...(19): siRNA sense strand
gcccaaggaggccaucuca

SEQ ID NO: 555340 - RNA, 19 nt, Homo sapiens
  misc_RNA (1)...(19): siRNA sense strand
agcgagauguucccgcaaa

SEQ ID NO: 555341 - RNA, 19 nt, Homo sapiens
  misc_RNA (1)...(19): siRNA sense strand
ucugcccacugaaugguaa

SEQ ID NO: 555342 - RNA, 19 nt, Homo sapiens
  misc_RNA (1)...(19): siRNA sense strand
ccuaugcacuggcugucau

SEQ ID NO: 555343 - RNA, 19 nt, Homo sapiens
  misc_RNA (1)...(19): siRNA sense strand
gccagcucgugaccaaaga

SEQ ID NO: 555344 - RNA, 19 nt, Homo sapiens
  misc_RNA (1)...(19): siRNA sense strand
caucagcccguaccucagu

SEQ ID NO: 555345 - RNA, 19 nt, Homo sapiens
  misc_RNA (1)...(19): siRNA sense strand
cccuacaucaucaugcuua

SEQ ID NO: 555346 - RNA, 19 nt, Homo sapiens
  misc_RNA (1)...(19): siRNA sense strand
agggaaugccgcucuugua

SEQ ID NO: 555347 - RNA, 19 nt, Homo sapiens
  misc_RNA (1)...(19): siRNA sense strand
ggaacuacugguuugacau

SEQ ID NO: 555348 - RNA, 19 nt, Homo sapiens
  misc_RNA (1)...(19): siRNA sense strand
gcgugguggucucuuucuu

SEQ ID NO: 555349 - RNA, 19 nt, Homo sapiens
  misc_RNA (1)...(19): siRNA sense strand
ggagggaaugccgcucuug

SEQ ID NO: 555350 - RNA, 19 nt, Homo sapiens
  misc_RNA (1)...(19): siRNA sense strand
gccagaagcacgccaucau

SEQ ID NO: 555351 - RNA, 19 nt, Homo sapiens
  misc_RNA (1)...(19): siRNA sense strand
gauguacggcggagguagu

SEQ ID NO: 555352 - RNA, 19 nt, Homo sapiens
  misc_RNA (1)...(19): siRNA sense strand
ucacggggacccugaagua

SEQ ID NO: 555353 - RNA, 19 nt, Homo sapiens
  misc_RNA (1)...(19): siRNA sense strand
gaacuacugguuugacaua

SEQ ID NO: 555354 - RNA, 19 nt, Homo sapiens
  misc_RNA (1)...(19): siRNA sense strand
gcaaauacagcgagauguu

SEQ ID NO: 555355 - RNA, 19 nt, Homo sapiens
  misc_RNA (1)...(19): siRNA sense strand
cagcuucaccuccauauuu

SEQ ID NO: 555356 - RNA, 19 nt, Homo sapiens
  misc_RNA (1)...(19): siRNA sense strand
gcacuggccuggcauucau

SEQ ID NO: 555357 - RNA, 19 nt, Homo sapiens
  misc_RNA (1)...(19): siRNA sense strand
gcugggaacuacugguuug

SEQ ID NO: 555358 - RNA, 19 nt, Homo sapiens
  misc_RNA (1)...(19): siRNA sense strand
gggcugaggagauuugaaa

SEQ ID NO: 555359 - RNA, 19 nt, Homo sapiens
  misc_RNA (1)...(19): siRNA sense strand
ggucggugcucuacuucuu

SEQ ID NO: 555360 - RNA, 19 nt, Homo sapiens
  misc_RNA (1)...(19): siRNA sense strand
cuacugguuugacauauuc

SEQ ID NO: 555361 - RNA, 19 nt, Homo sapiens
  misc_RNA (1)...(19): siRNA sense strand
ccacacaguacuucuggua

SEQ ID NO: 555362 - RNA, 19 nt, Homo sapiens
  misc_RNA (1)...(19): siRNA sense strand
gaugugggcuggcguaagc

SEQ ID NO: 555363 - RNA, 19 nt, Homo sapiens
  misc_RNA (1)...(19): siRNA sense strand
gauguucccgcaaaucaaa

SEQ ID NO: 555364 - RNA, 19 nt, Homo sapiens
  misc_RNA (1)...(19): siRNA sense strand
acaaugagccauccaacaa

SEQ ID NO: 555365 - RNA, 19 nt, Homo sapiens
  misc_RNA (1)...(19): siRNA sense strand
gagauguucccgcaaauca

SEQ ID NO: 555366 - RNA, 19 nt, Homo sapiens
  misc_RNA (1)...(19): siRNA sense strand
ugaggagauuugaaaguga

SEQ ID NO: 555367 - RNA, 19 nt, Homo sapiens
  misc_RNA (1)...(19): siRNA sense strand
ggucuggugugccuuguca

SEQ ID NO: 555368 - RNA, 19 nt, Homo sapiens
  misc_RNA (1)...(19): siRNA sense strand
cagaucuucuucucacuug

SEQ ID NO: 555369 - RNA, 19 nt, Homo sapiens
  misc_RNA (1)...(19): siRNA sense strand
caacagcuucaccuccaua

SEQ ID NO: 555370 - RNA, 19 nt, Homo sapiens
  misc_RNA (1)...(19): siRNA sense strand
cuacacagaggccauuaaa

SEQ ID NO: 555371 - RNA, 19 nt, Homo sapiens
  misc_RNA (1)...(19): siRNA sense strand
gauggaggcugggaacuac

SEQ ID NO: 555372 - RNA, 19 nt, Homo sapiens
  misc_RNA (1)...(19): siRNA sense strand
gaaugccgcucuuguaccu

SEQ ID NO: 555373 - RNA, 19 nt, Homo sapiens
  misc_RNA (1)...(19): siRNA sense strand
gauuugaaagugaccuuaa

SEQ ID NO: 555374 - RNA, 19 nt, Homo sapiens
  misc_RNA (1)...(19): siRNA sense strand
gggaacuacugguuugaca

SEQ ID NO: 555375 - RNA, 19 nt, Homo sapiens
  misc_RNA (1)...(19): siRNA sense strand
ggaaaacccucaauaucuc

SEQ ID NO: 555376 - RNA, 19 nt, Homo sapiens
  misc_RNA (1)...(19): siRNA sense strand
ccagcgugguggucucuuu

SEQ ID NO: 555377 - RNA, 19 nt, Homo sapiens
  misc_RNA (1)...(19): siRNA sense strand
cccaaggccuggaucaaug

SEQ ID NO: 555378 - RNA, 19 nt, Homo sapiens
  misc_RNA (1)...(19): siRNA sense strand
uaugaaaacugcuugaaga

SEQ ID NO: 555379 - RNA, 19 nt, Homo sapiens
  misc_RNA (1)...(19): siRNA sense strand
uggccuggcugguggugua

SEQ ID NO: 555380 - RNA, 19 nt, Homo sapiens
  misc_RNA (1)...(19): siRNA sense strand
uaagcccacugcugauugu

SEQ ID NO: 555381 - RNA, 19 nt, Homo sapiens
  misc_RNA (1)...(19): siRNA sense strand
gaccaacacuuuugaccuu

SEQ ID NO: 555382 - RNA, 19 nt, Homo sapiens
  misc_RNA (1)...(19): siRNA sense strand
cugaggagauuugaaagug

SEQ ID NO: 555383 - RNA, 19 nt, Homo sapiens
  misc_RNA (1)...(19): siRNA sense strand
guaagcccacugcugauug

SEQ ID NO: 555384 - RNA, 19 nt, Homo sapiens
  misc_RNA (1)...(19): siRNA sense strand
gaagggcuaccucgcaucu

SEQ ID NO: 555385 - RNA, 19 nt, Homo sapiens
  misc_RNA (1)...(19): siRNA sense strand
gcgagauguucccgcaaau

SEQ ID NO: 555386 - RNA, 19 nt, Homo sapiens
  misc_RNA (1)...(19): siRNA sense strand
caaauacagcgagauguuc

SEQ ID NO: 555387 - RNA, 19 nt, Homo sapiens
  misc_RNA (1)...(19): siRNA sense strand
gcaugguguucacgaugga

SEQ ID NO: 555388 - RNA, 19 nt, Homo sapiens
  misc_RNA (1)...(19): siRNA sense strand
ccacccagaucuucuucuc

SEQ ID NO: 555389 - RNA, 19 nt, Homo sapiens
  misc_RNA (1)...(19): siRNA sense strand
ugagucugcugcugaccaa

SEQ ID NO: 555390 - RNA, 19 nt, Homo sapiens
  misc_RNA (1)...(19): siRNA sense strand
uguacgggcugaggagauu

SEQ ID NO: 555391 - RNA, 19 nt, Homo sapiens
  misc_RNA (1)...(19): siRNA sense strand
ggugugccuugucaacugu

SEQ ID NO: 555392 - RNA, 19 nt, Homo sapiens
  misc_RNA (1)...(19): siRNA sense strand
gcaucugccuacccaagca

SEQ ID NO: 555393 - RNA, 19 nt, Homo sapiens
  misc_RNA (1)...(19): siRNA sense strand
gggaaugccgcucuuguac

SEQ ID NO: 555394 - RNA, 19 nt, Homo sapiens
  misc_RNA (1)...(19): siRNA sense strand
acuacugguuugacauauu

SEQ ID NO: 555395 - RNA, 19 nt, Homo sapiens
  misc_RNA (1)...(19): siRNA sense strand
cuccauauuugccagcauu

SEQ ID NO: 555396 - RNA, 19 nt, Homo sapiens
  misc_RNA (1)...(19): siRNA sense strand
gagggaaugccgcucuugu

SEQ ID NO: 555397 - RNA, 19 nt, Homo sapiens
  misc_RNA (1)...(19): siRNA sense strand
cgauggaggcugggaacua

SEQ ID NO: 555398 - RNA, 19 nt, Homo sapiens
  misc_RNA (1)...(19): siRNA sense strand
uguggucggugcucuacuu

SEQ ID NO: 555399 - RNA, 19 nt, Homo sapiens
  misc_RNA (1)...(19): siRNA sense strand
guacggcggagguaguuuc

SEQ ID NO: 555400 - RNA, 19 nt, Homo sapiens
  misc_RNA (1)...(19): siRNA sense strand
guacuacaacgucaucaac

SEQ ID NO: 555401 - RNA, 19 nt, Homo sapiens
  misc_RNA (1)...(19): siRNA sense strand
guucagcgucgccucaaga

SEQ ID NO: 555402 - RNA, 19 nt, Homo sapiens
  misc_RNA (1)...(19): siRNA sense strand
aagcaaauacagcgagaug

SEQ ID NO: 555403 - RNA, 19 nt, Homo sapiens
  misc_RNA (1)...(19): siRNA sense strand
ugacauauucaacgacuac

SEQ ID NO: 555404 - RNA, 19 nt, Homo sapiens
  misc_RNA (1)...(19): siRNA sense strand
ugacagacagcaagaucau

SEQ ID NO: 555405 - RNA, 19 nt, Homo sapiens
  misc_RNA (1)...(19): siRNA sense strand
caaugcagccacccagauc

SEQ ID NO: 555406 - RNA, 19 nt, Homo sapiens
  misc_RNA (1)...(19): siRNA sense strand
gcucgugaccaaagauuac

SEQ ID NO: 555407 - RNA, 19 nt, Homo sapiens
  misc_RNA (1)...(19): siRNA sense strand
gcugaggagauuugaaagu

SEQ ID NO: 555408 - RNA, 19 nt, Homo sapiens
  misc_RNA (1)...(19): siRNA sense strand
ccagaagcacgccaucauc

SEQ ID NO: 555409 - RNA, 19 nt, Homo sapiens
  misc_RNA (1)...(19): siRNA sense strand
ccagaucuucuucucacuu

SEQ ID NO: 555410 - RNA, 19 nt, Homo sapiens
  misc_RNA (1)...(19): siRNA sense strand
aggccaccuucaauuauga

SEQ ID NO: 555411 - RNA, 19 nt, Homo sapiens
  misc_RNA (1)...(19): siRNA sense strand
cuugucaacugugccauug

SEQ ID NO: 555412 - RNA, 19 nt, Homo sapiens
  misc_RNA (1)...(19): siRNA sense strand
gcccaaggaggccaucuca

SEQ ID NO: 555413 - RNA, 19 nt, Homo sapiens
  misc_RNA (1)...(19): siRNA sense strand
agcgagauguucccgcaaa

SEQ ID NO: 555414 - RNA, 19 nt, Homo sapiens
  misc_RNA (1)...(19): siRNA sense strand
ucugcccacugaaugguaa

SEQ ID NO: 555415 - RNA, 19 nt, Homo sapiens
  misc_RNA (1)...(19): siRNA sense strand
ccuaugcacuggcugucau

SEQ ID NO: 555416 - RNA, 19 nt, Homo sapiens
  misc_RNA (1)...(19): siRNA sense strand
gccagcucgugaccaaaga

SEQ ID NO: 555417 - RNA, 19 nt, Homo sapiens
  misc_RNA (1)...(19): siRNA sense strand
caucagcccguaccucagu

SEQ ID NO: 555418 - RNA, 19 nt, Homo sapiens
  misc_RNA (1)...(19): siRNA sense strand
cccuacaucaucaugcuua

SEQ ID NO: 555419 - RNA, 19 nt, Homo sapiens
  misc_RNA (1)...(19): siRNA sense strand
agggaaugccgcucuugua

SEQ ID NO: 555420 - RNA, 19 nt, Homo sapiens
  misc_RNA (1)...(19): siRNA sense strand
ggaacuacugguuugacau

SEQ ID NO: 555421 - RNA, 19 nt, Homo sapiens
  misc_RNA (1)...(19): siRNA sense strand
gcgugguggucucuuucuu

SEQ ID NO: 555422 - RNA, 19 nt, Homo sapiens
  misc_RNA (1)...(19): siRNA sense strand
ggagggaaugccgcucuug

SEQ ID NO: 555423 - RNA, 19 nt, Homo sapiens
  misc_RNA (1)...(19): siRNA sense strand
gccagaagcacgccaucau

SEQ ID NO: 555424 - RNA, 19 nt, Homo sapiens
  misc_RNA (1)...(19): siRNA sense strand
gauguacggcggagguagu

SEQ ID NO: 555425 - RNA, 19 nt, Homo sapiens
  misc_RNA (1)...(19): siRNA sense strand
ucacggggacccugaagua

SEQ ID NO: 555426 - RNA, 19 nt, Homo sapiens
  misc_RNA (1)...(19): siRNA sense strand
gaaccacuaucccguguuu

SEQ ID NO: 555427 - RNA, 19 nt, Homo sapiens
  misc_RNA (1)...(19): siRNA sense strand
gggacuaccugaaccacua

SEQ ID NO: 555428 - RNA, 19 nt, Homo sapiens
  misc_RNA (1)...(19): siRNA sense strand
gggaugcucuucacagcua

SEQ ID NO: 555429 - RNA, 19 nt, Homo sapiens
  misc_RNA (1)...(19): siRNA sense strand
aagcugaccuggagaucua

SEQ ID NO: 555430 - RNA, 19 nt, Homo sapiens
  misc_RNA (1)...(19): siRNA sense strand
gggcagccaugucuacuuc

SEQ ID NO: 555431 - RNA, 19 nt, Homo sapiens
  misc_RNA (1)...(19): siRNA sense strand
agauugcgauggaguuuaa

SEQ ID NO: 555432 - RNA, 19 nt, Homo sapiens
  misc_RNA (1)...(19): siRNA sense strand
gguggcagcuguguuugaa

SEQ ID NO: 555433 - RNA, 19 nt, Homo sapiens
  misc_RNA (1)...(19): siRNA sense strand
gggcgagugucgaaacuuc

SEQ ID NO: 555434 - RNA, 19 nt, Homo sapiens
  misc_RNA (1)...(19): siRNA sense strand
gcagccaugucuacuucuu

SEQ ID NO: 555435 - RNA, 19 nt, Homo sapiens
  misc_RNA (1)...(19): siRNA sense strand
gagacaacaucagcgguau

SEQ ID NO: 555436 - RNA, 19 nt, Homo sapiens
  misc_RNA (1)...(19): siRNA sense strand
ggacagggacaaccucuac

SEQ ID NO: 555437 - RNA, 19 nt, Homo sapiens
  misc_RNA (1)...(19): siRNA sense strand
auaaacgugugucggauga

SEQ ID NO: 555438 - RNA, 19 nt, Homo sapiens
  misc_RNA (1)...(19): siRNA sense strand
ggagauugcgauggaguuu

SEQ ID NO: 555439 - RNA, 19 nt, Homo sapiens
  misc_RNA (1)...(19): siRNA sense strand
cagcuacuguuaccgacuu

SEQ ID NO: 555440 - RNA, 19 nt, Homo sapiens
  misc_RNA (1)...(19): siRNA sense strand
gagauugcgauggaguuua

SEQ ID NO: 555441 - RNA, 19 nt, Homo sapiens
  misc_RNA (1)...(19): siRNA sense strand
gagacucccauuucuacuu

SEQ ID NO: 555442 - RNA, 19 nt, Homo sapiens
  misc_RNA (1)...(19): siRNA sense strand
agacucccauuucuacuuc

SEQ ID NO: 555443 - RNA, 19 nt, Homo sapiens
  misc_RNA (1)...(19): siRNA sense strand
gucaagacccacccucuga

SEQ ID NO: 555444 - RNA, 19 nt, Homo sapiens
  misc_RNA (1)...(19): siRNA sense strand
cggcucaacugcucuguac

SEQ ID NO: 555445 - RNA, 19 nt, Homo sapiens
  misc_RNA (1)...(19): siRNA sense strand
ugaaacaugacuccaagug

SEQ ID NO: 555446 - RNA, 19 nt, Homo sapiens
  misc_RNA (1)...(19): siRNA sense strand
caagacccacccucugaug

SEQ ID NO: 555447 - RNA, 19 nt, Homo sapiens
  misc_RNA (1)...(19): siRNA sense strand
ggacuaccugaaccacuau

SEQ ID NO: 555448 - RNA, 19 nt, Homo sapiens
  misc_RNA (1)...(19): siRNA sense strand
aaacgugugucggaugaag

SEQ ID NO: 555449 - RNA, 19 nt, Homo sapiens
  misc_RNA (1)...(19): siRNA sense strand
caaacaggagggcgagugu

SEQ ID NO: 555450 - RNA, 19 nt, Homo sapiens
  misc_RNA (1)...(19): siRNA sense strand
gaagcugaccuggagaucu

SEQ ID NO: 555451 - RNA, 19 nt, Homo sapiens
  misc_RNA (1)...(19): siRNA sense strand
gagggcgagugucgaaacu

SEQ ID NO: 555452 - RNA, 19 nt, Homo sapiens
  misc_RNA (1)...(19): siRNA sense strand
caauguugcccucuucucu

SEQ ID NO: 555453 - RNA, 19 nt, Homo sapiens
  misc_RNA (1)...(19): siRNA sense strand
gacaacaucagcgguaugg

SEQ ID NO: 555454 - RNA, 19 nt, Homo sapiens
  misc_RNA (1)...(19): siRNA sense strand
ccaugucuacuucuucuuc

SEQ ID NO: 555455 - RNA, 19 nt, Homo sapiens
  misc_RNA (1)...(19): siRNA sense strand
caggagggcgagugucgaa

SEQ ID NO: 555456 - RNA, 19 nt, Homo sapiens
  misc_RNA (1)...(19): siRNA sense strand
ucuccgaggugccgguuag

SEQ ID NO: 555457 - RNA, 19 nt, Homo sapiens
  misc_RNA (1)...(19): siRNA sense strand
ccgacuuccuagccauuga

SEQ ID NO: 555458 - RNA, 19 nt, Homo sapiens
  misc_RNA (1)...(19): siRNA sense strand
cccaagcacgccaauguug

SEQ ID NO: 555459 - RNA, 19 nt, Homo sapiens
  misc_RNA (1)...(19): siRNA sense strand
gugcgccaacuacagcaua

SEQ ID NO: 555460 - RNA, 19 nt, Homo sapiens
  misc_RNA (1)...(19): siRNA sense strand
uccgggagauugcgaugga

SEQ ID NO: 555461 - RNA, 19 nt, Homo sapiens
  misc_RNA (1)...(19): siRNA sense strand
gaggugccgguuaggaguu

SEQ ID NO: 555462 - RNA, 19 nt, Homo sapiens
  misc_RNA (1)...(19): siRNA sense strand
gaaccacuaucccguguuu

SEQ ID NO: 555463 - RNA, 19 nt, Homo sapiens
  misc_RNA (1)...(19): siRNA sense strand
gggacuaccugaaccacua

SEQ ID NO: 555464 - RNA, 19 nt, Homo sapiens
  misc_RNA (1)...(19): siRNA sense strand
gggaugcucuucacagcua

SEQ ID NO: 555465 - RNA, 19 nt, Homo sapiens
  misc_RNA (1)...(19): siRNA sense strand
aagcugaccuggagaucua

SEQ ID NO: 555466 - RNA, 19 nt, Homo sapiens
  misc_RNA (1)...(19): siRNA sense strand
gggcagccaugucuacuuc

SEQ ID NO: 555467 - RNA, 19 nt, Homo sapiens
  misc_RNA (1)...(19): siRNA sense strand
agauugcgauggaguuuaa

SEQ ID NO: 555468 - RNA, 19 nt, Homo sapiens
  misc_RNA (1)...(19): siRNA sense strand
gguggcagcuguguuugaa

SEQ ID NO: 555469 - RNA, 19 nt, Homo sapiens
  misc_RNA (1)...(19): siRNA sense strand
gggcgagugucgaaacuuc

SEQ ID NO: 555470 - RNA, 19 nt, Homo sapiens
  misc_RNA (1)...(19): siRNA sense strand
gcagccaugucuacuucuu

SEQ ID NO: 555471 - RNA, 19 nt, Homo sapiens
  misc_RNA (1)...(19): siRNA sense strand
gagacaacaucagcgguau

SEQ ID NO: 555472 - RNA, 19 nt, Homo sapiens
  misc_RNA (1)...(19): siRNA sense strand
ggacagggacaaccucuac

SEQ ID NO: 555473 - RNA, 19 nt, Homo sapiens
  misc_RNA (1)...(19): siRNA sense strand
auaaacgugugucggauga

SEQ ID NO: 555474 - RNA, 19 nt, Homo sapiens
  misc_RNA (1)...(19): siRNA sense strand
ggagauugcgauggaguuu

SEQ ID NO: 555475 - RNA, 19 nt, Homo sapiens
  misc_RNA (1)...(19): siRNA sense strand
cagcuacuguuaccgacuu

SEQ ID NO: 555476 - RNA, 19 nt, Homo sapiens
  misc_RNA (1)...(19): siRNA sense strand
gagauugcgauggaguuua

SEQ ID NO: 555477 - RNA, 19 nt, Homo sapiens
  misc_RNA (1)...(19): siRNA sense strand
gagacucccauuucuacuu

SEQ ID NO: 555478 - RNA, 19 nt, Homo sapiens
  misc_RNA (1)...(19): siRNA sense strand
agacucccauuucuacuuc

SEQ ID NO: 555479 - RNA, 19 nt, Homo sapiens
  misc_RNA (1)...(19): siRNA sense strand
gucaagacccacccucuga

SEQ ID NO: 555480 - RNA, 19 nt, Homo sapiens
  misc_RNA (1)...(19): siRNA sense strand
cggcucaacugcucuguac

SEQ ID NO: 555481 - RNA, 19 nt, Homo sapiens
  misc_RNA (1)...(19): siRNA sense strand
ugaaacaugacuccaagug

SEQ ID NO: 555482 - RNA, 19 nt, Homo sapiens
  misc_RNA (1)...(19): siRNA sense strand
caagacccacccucugaug

SEQ ID NO: 555483 - RNA, 19 nt, Homo sapiens
  misc_RNA (1)...(19): siRNA sense strand
ggacuaccugaaccacuau

SEQ ID NO: 555484 - RNA, 19 nt, Homo sapiens
  misc_RNA (1)...(19): siRNA sense strand
aaacgugugucggaugaag

SEQ ID NO: 555485 - RNA, 19 nt, Homo sapiens
  misc_RNA (1)...(19): siRNA sense strand
caaacaggagggcgagugu

SEQ ID NO: 555486 - RNA, 19 nt, Homo sapiens
  misc_RNA (1)...(19): siRNA sense strand
gaagcugaccuggagaucu

SEQ ID NO: 555487 - RNA, 19 nt, Homo sapiens
  misc_RNA (1)...(19): siRNA sense strand
gagggcgagugucgaaacu

SEQ ID NO: 555488 - RNA, 19 nt, Homo sapiens
  misc_RNA (1)...(19): siRNA sense strand
caauguugcccucuucucu

SEQ ID NO: 555489 - RNA, 19 nt, Homo sapiens
  misc_RNA (1)...(19): siRNA sense strand
gacaacaucagcgguaugg

SEQ ID NO: 555490 - RNA, 19 nt, Homo sapiens
  misc_RNA (1)...(19): siRNA sense strand
ccaugucuacuucuucuuc

SEQ ID NO: 555491 - RNA, 19 nt, Homo sapiens
  misc_RNA (1)...(19): siRNA sense strand
caggagggcgagugucgaa

SEQ ID NO: 555492 - RNA, 19 nt, Homo sapiens
  misc_RNA (1)...(19): siRNA sense strand
ccgacuuccuagccauuga

SEQ ID NO: 555493 - RNA, 19 nt, Homo sapiens
  misc_RNA (1)...(19): siRNA sense strand
cccaagcacgccaauguug

SEQ ID NO: 555494 - RNA, 19 nt, Homo sapiens
  misc_RNA (1)...(19): siRNA sense strand
gugcgccaacuacagcaua

SEQ ID NO: 555495 - RNA, 19 nt, Homo sapiens
  misc_RNA (1)...(19): siRNA sense strand
uccgggagauugcgaugga

SEQ ID NO: 555496 - RNA, 19 nt, Homo sapiens
  misc_RNA (1)...(19): siRNA sense strand
gaaccacuaucccguguuu

SEQ ID NO: 555497 - RNA, 19 nt, Homo sapiens
  misc_RNA (1)...(19): siRNA sense strand
gggacuaccugaaccacua

SEQ ID NO: 555498 - RNA, 19 nt, Homo sapiens
  misc_RNA (1)...(19): siRNA sense strand
gggaugcucuucacagcua

SEQ ID NO: 555499 - RNA, 19 nt, Homo sapiens
  misc_RNA (1)...(19): siRNA sense strand
aagcugaccuggagaucua

SEQ ID NO: 555500 - RNA, 19 nt, Homo sapiens
  misc_RNA (1)...(19): siRNA sense strand
gggcagccaugucuacuuc

SEQ ID NO: 555501 - RNA, 19 nt, Homo sapiens
  misc_RNA (1)...(19): siRNA sense strand
agauugcgauggaguuuaa

SEQ ID NO: 555502 - RNA, 19 nt, Homo sapiens
  misc_RNA (1)...(19): siRNA sense strand
gguggcagcuguguuugaa

SEQ ID NO: 555503 - RNA, 19 nt, Homo sapiens
  misc_RNA (1)...(19): siRNA sense strand
gggcgagugucgaaacuuc

SEQ ID NO: 555504 - RNA, 19 nt, Homo sapiens
  misc_RNA (1)...(19): siRNA sense strand
gcagccaugucuacuucuu

SEQ ID NO: 555505 - RNA, 19 nt, Homo sapiens
  misc_RNA (1)...(19): siRNA sense strand
gagacaacaucagcgguau

SEQ ID NO: 555506 - RNA, 19 nt, Homo sapiens
  misc_RNA (1)...(19): siRNA sense strand
ggacagggacaaccucuac

SEQ ID NO: 555507 - RNA, 19 nt, Homo sapiens
  misc_RNA (1)...(19): siRNA sense strand
auaaacgugugucggauga

SEQ ID NO: 555508 - RNA, 19 nt, Homo sapiens
  misc_RNA (1)...(19): siRNA sense strand
ggagauugcgauggaguuu

SEQ ID NO: 555509 - RNA, 19 nt, Homo sapiens
  misc_RNA (1)...(19): siRNA sense strand
cagcuacuguuaccgacuu

SEQ ID NO: 555510 - RNA, 19 nt, Homo sapiens
  misc_RNA (1)...(19): siRNA sense strand
gagauugcgauggaguuua

SEQ ID NO: 555511 - RNA, 19 nt, Homo sapiens
  misc_RNA (1)...(19): siRNA sense strand
gagacucccauuucuacuu

SEQ ID NO: 555512 - RNA, 19 nt, Homo sapiens
  misc_RNA (1)...(19): siRNA sense strand
agacucccauuucuacuuc

SEQ ID NO: 555513 - RNA, 19 nt, Homo sapiens
  misc_RNA (1)...(19): siRNA sense strand
gucaagacccacccucuga

SEQ ID NO: 555514 - RNA, 19 nt, Homo sapiens
  misc_RNA (1)...(19): siRNA sense strand
cggcucaacugcucuguac

SEQ ID NO: 555515 - RNA, 19 nt, Homo sapiens
  misc_RNA (1)...(19): siRNA sense strand
ugaaacaugacuccaagug

SEQ ID NO: 555516 - RNA, 19 nt, Homo sapiens
  misc_RNA (1)...(19): siRNA sense strand
caagacccacccucugaug

SEQ ID NO: 555517 - RNA, 19 nt, Homo sapiens
  misc_RNA (1)...(19): siRNA sense strand
ggacuaccugaaccacuau

SEQ ID NO: 555518 - RNA, 19 nt, Homo sapiens
  misc_RNA (1)...(19): siRNA sense strand
aaacgugugucggaugaag

SEQ ID NO: 555519 - RNA, 19 nt, Homo sapiens
  misc_RNA (1)...(19): siRNA sense strand
caaacaggagggcgagugu

SEQ ID NO: 555520 - RNA, 19 nt, Homo sapiens
  misc_RNA (1)...(19): siRNA sense strand
gaagcugaccuggagaucu

SEQ ID NO: 555521 - RNA, 19 nt, Homo sapiens
  misc_RNA (1)...(19): siRNA sense strand
gagggcgagugucgaaacu

SEQ ID NO: 555522 - RNA, 19 nt, Homo sapiens
  misc_RNA (1)...(19): siRNA sense strand
caauguugcccucuucucu

SEQ ID NO: 555523 - RNA, 19 nt, Homo sapiens
  misc_RNA (1)...(19): siRNA sense strand
gacaacaucagcgguaugg

SEQ ID NO: 555524 - RNA, 19 nt, Homo sapiens
  misc_RNA (1)...(19): siRNA sense strand
ccaugucuacuucuucuuc

SEQ ID NO: 555525 - RNA, 19 nt, Homo sapiens
  misc_RNA (1)...(19): siRNA sense strand
caggagggcgagugucgaa

SEQ ID NO: 555526 - RNA, 19 nt, Homo sapiens
  misc_RNA (1)...(19): siRNA sense strand
ucuccgaggugccgguuag

SEQ ID NO: 555527 - RNA, 19 nt, Homo sapiens
  misc_RNA (1)...(19): siRNA sense strand
ccgacuuccuagccauuga

SEQ ID NO: 555528 - RNA, 19 nt, Homo sapiens
  misc_RNA (1)...(19): siRNA sense strand
cccaagcacgccaauguug

SEQ ID NO: 555529 - RNA, 19 nt, Homo sapiens
  misc_RNA (1)...(19): siRNA sense strand
gugcgccaacuacagcaua

SEQ ID NO: 555530 - RNA, 19 nt, Homo sapiens
  misc_RNA (1)...(19): siRNA sense strand
uccgggagauugcgaugga

SEQ ID NO: 555531 - RNA, 19 nt, Homo sapiens
  misc_RNA (1)...(19): siRNA sense strand
gaggugccgguuaggaguu

SEQ ID NO: 555532 - RNA, 19 nt, Homo sapiens
  misc_RNA (1)...(19): siRNA sense strand
gccguucccuucuccauua

SEQ ID NO: 555533 - RNA, 19 nt, Homo sapiens
  misc_RNA (1)...(19): siRNA sense strand
gagcucacgugcaaaguca

SEQ ID NO: 555534 - RNA, 19 nt, Homo sapiens
  misc_RNA (1)...(19): siRNA sense strand
aaacagggcucaccaagcu

SEQ ID NO: 555535 - RNA, 19 nt, Homo sapiens
  misc_RNA (1)...(19): siRNA sense strand
gacaucagcuggccaugca

SEQ ID NO: 555536 - RNA, 19 nt, Homo sapiens
  misc_RNA (1)...(19): siRNA sense strand
cauuaucgcugucuucuac

SEQ ID NO: 555537 - RNA, 19 nt, Homo sapiens
  misc_RNA (1)...(19): siRNA sense strand
ucacacaccucaucuucuc

SEQ ID NO: 555538 - RNA, 19 nt, Homo sapiens
  misc_RNA (1)...(19): siRNA sense strand
uacacgcucuccuucauuu

SEQ ID NO: 555539 - RNA, 19 nt, Homo sapiens
  misc_RNA (1)...(19): siRNA sense strand
caccucaucuucuccauca

SEQ ID NO: 555540 - RNA, 19 nt, Homo sapiens
  misc_RNA (1)...(19): siRNA sense strand
gugguggucugggugaaua

SEQ ID NO: 555541 - RNA, 19 nt, Homo sapiens
  misc_RNA (1)...(19): siRNA sense strand
gcuaugacacgcacugcua

SEQ ID NO: 555542 - RNA, 19 nt, Homo sapiens
  misc_RNA (1)...(19): siRNA sense strand
cgucaacccuguccucuac

SEQ ID NO: 555543 - RNA, 19 nt, Homo sapiens
  misc_RNA (1)...(19): siRNA sense strand
caaagucacacaccucauc

SEQ ID NO: 555544 - RNA, 19 nt, Homo sapiens
  misc_RNA (1)...(19): siRNA sense strand
gagcuggucuccguugucu

SEQ ID NO: 555545 - RNA, 19 nt, Homo sapiens
  misc_RNA (1)...(19): siRNA sense strand
gcuggucuccguugucuug

SEQ ID NO: 555546 - RNA, 19 nt, Homo sapiens
  misc_RNA (1)...(19): siRNA sense strand
gacacgcacugcuacaucu

SEQ ID NO: 555547 - RNA, 19 nt, Homo sapiens
  misc_RNA (1)...(19): siRNA sense strand
ggagcagagcaccaaauga

SEQ ID NO: 555548 - RNA, 19 nt, Homo sapiens
  misc_RNA (1)...(19): siRNA sense strand
gggaacuucucggacauca

SEQ ID NO: 555549 - RNA, 19 nt, Homo sapiens
  misc_RNA (1)...(19): siRNA sense strand
cgucugcguccaacaauga

SEQ ID NO: 555550 - RNA, 19 nt, Homo sapiens
  misc_RNA (1)...(19): siRNA sense strand
gugguggucuuccuugucu

SEQ ID NO: 555551 - RNA, 19 nt, Homo sapiens
  misc_RNA (1)...(19): siRNA sense strand
cacagcagccggaagauca

SEQ ID NO: 555552 - RNA, 19 nt, Homo sapiens
  misc_RNA (1)...(19): siRNA sense strand
gcacagcagccggaagauc

SEQ ID NO: 555553 - RNA, 19 nt, Homo sapiens
  misc_RNA (1)...(19): siRNA sense strand
gucccaacaugcccaacaa

SEQ ID NO: 555554 - RNA, 19 nt, Homo sapiens
  misc_RNA (1)...(19): siRNA sense strand
gugaauauccaggccaaga

SEQ ID NO: 555555 - RNA, 19 nt, Homo sapiens
  misc_RNA (1)...(19): siRNA sense strand
ugggcgagcucacgugcaa

SEQ ID NO: 555556 - RNA, 19 nt, Homo sapiens
  misc_RNA (1)...(19): siRNA sense strand
cuucaucaaucgcaacuac

SEQ ID NO: 555557 - RNA, 19 nt, Homo sapiens
  misc_RNA (1)...(19): siRNA sense strand
aagcacagcagccggaaga

SEQ ID NO: 555558 - RNA, 19 nt, Homo sapiens
  misc_RNA (1)...(19): siRNA sense strand
ucacgucugcguccaacaa

SEQ ID NO: 555559 - RNA, 19 nt, Homo sapiens
  misc_RNA (1)...(19): siRNA sense strand
ccagugaccaggagaagca

SEQ ID NO: 555560 - RNA, 19 nt, Homo sapiens
  misc_RNA (1)...(19): siRNA sense strand
gcacugcuacaucuugaac

SEQ ID NO: 555561 - RNA, 19 nt, Homo sapiens
  misc_RNA (1)...(19): siRNA sense strand
ucaaucgcaacuacaggua

SEQ ID NO: 555562 - RNA, 19 nt, Homo sapiens
  misc_RNA (1)...(19): siRNA sense strand
ggccaagaccacaggcuau

SEQ ID NO: 555563 - RNA, 19 nt, Homo sapiens
  misc_RNA (1)...(19): siRNA sense strand
ccaagaccacaggcuauga

SEQ ID NO: 555564 - RNA, 19 nt, Homo sapiens
  misc_RNA (1)...(19): siRNA sense strand
ucuacacgcucuccuucau

SEQ ID NO: 555565 - RNA, 19 nt, Homo sapiens
  misc_RNA (1)...(19): siRNA sense strand
aggccuucaucuucaagua

SEQ ID NO: 555566 - RNA, 19 nt, Homo sapiens
  misc_RNA (1)...(19): siRNA sense strand
cucuacagcuucaucaauc

SEQ ID NO: 555567 - RNA, 19 nt, Homo sapiens
  misc_RNA (1)...(19): siRNA sense strand
caaccucuucggcagcauu

SEQ ID NO: 555568 - RNA, 19 nt, Homo sapiens
  misc_RNA (1)...(19): siRNA sense strand
acgcacugcuacaucuuga

SEQ ID NO: 555569 - RNA, 19 nt, Homo sapiens
  misc_RNA (1)...(19): siRNA sense strand
cuacacgcucuccuucauu

SEQ ID NO: 555570 - RNA, 19 nt, Homo sapiens
  misc_RNA (1)...(19): siRNA sense strand
ccaacaaugagaccuacug

SEQ ID NO: 555571 - RNA, 19 nt, Homo sapiens
  misc_RNA (1)...(19): siRNA sense strand
gacaccuacuaccugaaga

SEQ ID NO: 555572 - RNA, 19 nt, Homo sapiens
  misc_RNA (1)...(19): siRNA sense strand
gaacggcgcugucugagaa

SEQ ID NO: 555573 - RNA, 19 nt, Homo sapiens
  misc_RNA (1)...(19): siRNA sense strand
gggauggucucauuaaauu

SEQ ID NO: 555574 - RNA, 19 nt, Homo sapiens
  misc_RNA (1)...(19): siRNA sense strand
gagaaauugugcaggaaua

SEQ ID NO: 555575 - RNA, 19 nt, Homo sapiens
  misc_RNA (1)...(19): siRNA sense strand
ucaagugucugcuaaauau

SEQ ID NO: 555576 - RNA, 19 nt, Homo sapiens
  misc_RNA (1)...(19): siRNA sense strand
gaaguucaguauaauccua

SEQ ID NO: 555577 - RNA, 19 nt, Homo sapiens
  misc_RNA (1)...(19): siRNA sense strand
gcacagaacagauuuagau

SEQ ID NO: 555578 - RNA, 19 nt, Homo sapiens
  misc_RNA (1)...(19): siRNA sense strand
gagaauaggagauuuguga

SEQ ID NO: 555579 - RNA, 19 nt, Homo sapiens
  misc_RNA (1)...(19): siRNA sense strand
gauaaaagccuaagaguuu

SEQ ID NO: 555580 - RNA, 19 nt, Homo sapiens
  misc_RNA (1)...(19): siRNA sense strand
agggauaucugcuucaaua

SEQ ID NO: 555581 - RNA, 19 nt, Homo sapiens
  misc_RNA (1)...(19): siRNA sense strand
cuaaaucgccuucaucaaa

SEQ ID NO: 555582 - RNA, 19 nt, Homo sapiens
  misc_RNA (1)...(19): siRNA sense strand
cgaaccagcucauaucaau

SEQ ID NO: 555583 - RNA, 19 nt, Homo sapiens
  misc_RNA (1)...(19): siRNA sense strand
ggaauaugaucggcauuug

SEQ ID NO: 555584 - RNA, 19 nt, Homo sapiens
  misc_RNA (1)...(19): siRNA sense strand
cauguuugcuccugaguuu

SEQ ID NO: 555585 - RNA, 19 nt, Homo sapiens
  misc_RNA (1)...(19): siRNA sense strand
ggacaaccaaaucuuaauu

SEQ ID NO: 555586 - RNA, 19 nt, Homo sapiens
  misc_RNA (1)...(19): siRNA sense strand
caaggcagguccuaucuuc

SEQ ID NO: 555587 - RNA, 19 nt, Homo sapiens
  misc_RNA (1)...(19): siRNA sense strand
ggagaacggcgcugucuga

SEQ ID NO: 555588 - RNA, 19 nt, Homo sapiens
  misc_RNA (1)...(19): siRNA sense strand
ggauguugguguuaaucua

SEQ ID NO: 555589 - RNA, 19 nt, Homo sapiens
  misc_RNA (1)...(19): siRNA sense strand
gauaucugcuucaauacug

SEQ ID NO: 555590 - RNA, 19 nt, Homo sapiens
  misc_RNA (1)...(19): siRNA sense strand
gcagugacuuugucuccaa

SEQ ID NO: 555591 - RNA, 19 nt, Homo sapiens
  misc_RNA (1)...(19): siRNA sense strand
gcaaauggcugccccuaga

SEQ ID NO: 555592 - RNA, 19 nt, Homo sapiens
  misc_RNA (1)...(19): siRNA sense strand
gacaguguauaucaagauu

SEQ ID NO: 555593 - RNA, 19 nt, Homo sapiens
  misc_RNA (1)...(19): siRNA sense strand
ggagaacuuuugcaacaua

SEQ ID NO: 555594 - RNA, 19 nt, Homo sapiens
  misc_RNA (1)...(19): siRNA sense strand
aaugaugcauccaauauug

SEQ ID NO: 555595 - RNA, 19 nt, Homo sapiens
  misc_RNA (1)...(19): siRNA sense strand
uaaaucgccuucaucaaag

SEQ ID NO: 555596 - RNA, 19 nt, Homo sapiens
  misc_RNA (1)...(19): siRNA sense strand
uggcugggaugucugauaa

SEQ ID NO: 555597 - RNA, 19 nt, Homo sapiens
  misc_RNA (1)...(19): siRNA sense strand
ggagguggcaguuaaggaa

SEQ ID NO: 555598 - RNA, 19 nt, Homo sapiens
  misc_RNA (1)...(19): siRNA sense strand
gaugaaaucacagcaaaga

SEQ ID NO: 555599 - RNA, 19 nt, Homo sapiens
  misc_RNA (1)...(19): siRNA sense strand
agaauuggaugaaaucaca

SEQ ID NO: 555600 - RNA, 19 nt, Homo sapiens
  misc_RNA (1)...(19): siRNA sense strand
guaaggcuguuagggauau

SEQ ID NO: 555601 - RNA, 19 nt, Homo sapiens
  misc_RNA (1)...(19): siRNA sense strand
cuucuaaggucauaacaug

SEQ ID NO: 555602 - RNA, 19 nt, Homo sapiens
  misc_RNA (1)...(19): siRNA sense strand
ugcauuagacccuucauua

SEQ ID NO: 555603 - RNA, 19 nt, Homo sapiens
  misc_RNA (1)...(19): siRNA sense strand
aguauaauccuaccuauga

SEQ ID NO: 555604 - RNA, 19 nt, Homo sapiens
  misc_RNA (1)...(19): siRNA sense strand
caucaagugucugcuaaau

SEQ ID NO: 555605 - RNA, 19 nt, Homo sapiens
  misc_RNA (1)...(19): siRNA sense strand
ugaaacuucuaaggucaua

SEQ ID NO: 555606 - RNA, 19 nt, Homo sapiens
  misc_RNA (1)...(19): siRNA sense strand
ggaugagaauaggagauuu

SEQ ID NO: 555607 - RNA, 19 nt, Homo sapiens
  misc_RNA (1)...(19): siRNA sense strand
gcugggaugucugauaaga

SEQ ID NO: 555608 - RNA, 19 nt, Homo sapiens
  misc_RNA (1)...(19): siRNA sense strand
cagguccuaucuucacaua

SEQ ID NO: 555609 - RNA, 19 nt, Homo sapiens
  misc_RNA (1)...(19): siRNA sense strand
uggaugaaaucacagcaaa

SEQ ID NO: 555610 - RNA, 19 nt, Homo sapiens
  misc_RNA (1)...(19): siRNA sense strand
gaaaaugaugcauccaaua

SEQ ID NO: 555611 - RNA, 19 nt, Homo sapiens
  misc_RNA (1)...(19): siRNA sense strand
cgauuuaaagcucaugaua

SEQ ID NO: 555612 - RNA, 19 nt, Homo sapiens
  misc_RNA (1)...(19): siRNA sense strand
guuaaucuacggucaacua

SEQ ID NO: 555613 - RNA, 19 nt, Homo sapiens
  misc_RNA (1)...(19): siRNA sense strand
cgucaaagaaguucaguau

SEQ ID NO: 555614 - RNA, 19 nt, Homo sapiens
  misc_RNA (1)...(19): siRNA sense strand
gaugagaauaggagauuug

SEQ ID NO: 555615 - RNA, 19 nt, Homo sapiens
  misc_RNA (1)...(19): siRNA sense strand
cauucgaaguggagaaauu

SEQ ID NO: 555616 - RNA, 19 nt, Homo sapiens
  misc_RNA (1)...(19): siRNA sense strand
uuagacccuucauuagaua

SEQ ID NO: 555617 - RNA, 19 nt, Homo sapiens
  misc_RNA (1)...(19): siRNA sense strand
gggcgucagugcagucaga

SEQ ID NO: 555618 - RNA, 19 nt, Homo sapiens
  misc_RNA (1)...(19): siRNA sense strand
agacuggaguucaccuuga

SEQ ID NO: 555619 - RNA, 19 nt, Homo sapiens
  misc_RNA (1)...(19): siRNA sense strand
uaaagcucaugauaaagug

SEQ ID NO: 555620 - RNA, 19 nt, Homo sapiens
  misc_RNA (1)...(19): siRNA sense strand
aaacucuacagucgauuua

SEQ ID NO: 555621 - RNA, 19 nt, Homo sapiens
  misc_RNA (1)...(19): siRNA sense strand
ugucugagaacauuuauug

SEQ ID NO: 555622 - RNA, 19 nt, Homo sapiens
  misc_RNA (1)...(19): siRNA sense strand
caacuaugccaccugagaa

SEQ ID NO: 555623 - RNA, 19 nt, Homo sapiens
  misc_RNA (1)...(19): siRNA sense strand
cauuagacccuucauuaga

SEQ ID NO: 555624 - RNA, 19 nt, Homo sapiens
  misc_RNA (1)...(19): siRNA sense strand
gcauuagacccuucauuag

SEQ ID NO: 555625 - RNA, 19 nt, Homo sapiens
  misc_RNA (1)...(19): siRNA sense strand
ugaaacuggucagaagaaa

SEQ ID NO: 555626 - RNA, 19 nt, Homo sapiens
  misc_RNA (1)...(19): siRNA sense strand
gaaaaguaccuuauugugu

SEQ ID NO: 555627 - RNA, 19 nt, Homo sapiens
  misc_RNA (1)...(19): siRNA sense strand
gagacaggacaguguauau

SEQ ID NO: 555628 - RNA, 19 nt, Homo sapiens
  misc_RNA (1)...(19): siRNA sense strand
gccuaugacagguaucuua

SEQ ID NO: 555629 - RNA, 19 nt, Homo sapiens
  misc_RNA (1)...(19): siRNA sense strand
gacaggacaguguauauca

SEQ ID NO: 555630 - RNA, 19 nt, Homo sapiens
  misc_RNA (1)...(19): siRNA sense strand
uaaggaagauuuggagacu

SEQ ID NO: 555631 - RNA, 19 nt, Homo sapiens
  misc_RNA (1)...(19): siRNA sense strand
gauggucucauuaaauugu

SEQ ID NO: 555632 - RNA, 19 nt, Homo sapiens
  misc_RNA (1)...(19): siRNA sense strand
caugauaaaguguguauag

SEQ ID NO: 555633 - RNA, 19 nt, Homo sapiens
  misc_RNA (1)...(19): siRNA sense strand
ggagcacagaacagauuua

SEQ ID NO: 555634 - RNA, 19 nt, Homo sapiens
  misc_RNA (1)...(19): siRNA sense strand
gaaauugugcaggaauaug

SEQ ID NO: 555635 - RNA, 19 nt, Homo sapiens
  misc_RNA (1)...(19): siRNA sense strand
ggacaguguauaucaagau

SEQ ID NO: 555636 - RNA, 19 nt, Homo sapiens
  misc_RNA (1)...(19): siRNA sense strand
uccauggacuguaaaauua

SEQ ID NO: 555637 - RNA, 19 nt, Homo sapiens
  misc_RNA (1)...(19): siRNA sense strand
gagcagcaaaggagaacuu

SEQ ID NO: 555638 - RNA, 19 nt, Homo sapiens
  misc_RNA (1)...(19): siRNA sense strand
acucuacagucgauuuaaa

SEQ ID NO: 555639 - RNA, 19 nt, Homo sapiens
  misc_RNA (1)...(19): siRNA sense strand
ccuaagaguuugggaaugg

SEQ ID NO: 555640 - RNA, 19 nt, Homo sapiens
  misc_RNA (1)...(19): siRNA sense strand
aauggacaaccaaaucuua

SEQ ID NO: 555641 - RNA, 19 nt, Homo sapiens
  misc_RNA (1)...(19): siRNA sense strand
ggagaaauugugcaggaau

SEQ ID NO: 555642 - RNA, 19 nt, Homo sapiens
  misc_RNA (1)...(19): siRNA sense strand
cuccggagguggcaguuaa

SEQ ID NO: 555643 - RNA, 19 nt, Homo sapiens
  misc_RNA (1)...(19): siRNA sense strand
gacuaaaucgccuucauca

SEQ ID NO: 555644 - RNA, 19 nt, Homo sapiens
  misc_RNA (1)...(19): siRNA sense strand
cucaugcacuugacuaaau

SEQ ID NO: 555645 - RNA, 19 nt, Homo sapiens
  misc_RNA (1)...(19): siRNA sense strand
cucauuaaauugugggauu

SEQ ID NO: 555646 - RNA, 19 nt, Homo sapiens
  misc_RNA (1)...(19): siRNA sense strand
gccaaucaauggacaacca

SEQ ID NO: 555647 - RNA, 19 nt, Homo sapiens
  misc_RNA (1)...(19): siRNA sense strand
aaauugugcaggaauauga

SEQ ID NO: 555648 - RNA, 19 nt, Homo sapiens
  misc_RNA (1)...(19): siRNA sense strand
cuuguuccauggacuguaa

SEQ ID NO: 555649 - RNA, 19 nt, Homo sapiens
  misc_RNA (1)...(19): siRNA sense strand
gaaaacaggaagaagagaa

SEQ ID NO: 555650 - RNA, 19 nt, Homo sapiens
  misc_RNA (1)...(19): siRNA sense strand
ucaguauaauccuaccuau

SEQ ID NO: 555651 - RNA, 19 nt, Homo sapiens
  misc_RNA (1)...(19): siRNA sense strand
gagcacagaacagauuuag

SEQ ID NO: 555652 - RNA, 19 nt, Homo sapiens
  misc_RNA (1)...(19): siRNA sense strand
ugggaugucugauaagaag

SEQ ID NO: 555653 - RNA, 19 nt, Homo sapiens
  misc_RNA (1)...(19): siRNA sense strand
aaucuacggucaacuaugc

SEQ ID NO: 555654 - RNA, 19 nt, Homo sapiens
  misc_RNA (1)...(19): siRNA sense strand
gaaccagcucauaucaaug

SEQ ID NO: 555655 - RNA, 19 nt, Homo sapiens
  misc_RNA (1)...(19): siRNA sense strand
gcuagcaugccaaucaaug

SEQ ID NO: 555656 - RNA, 19 nt, Homo sapiens
  misc_RNA (1)...(19): siRNA sense strand
gaauaugaucggcauuugg

SEQ ID NO: 555657 - RNA, 19 nt, Homo sapiens
  misc_RNA (1)...(19): siRNA sense strand
ucaauccugaugaagauaa

SEQ ID NO: 555658 - RNA, 19 nt, Homo sapiens
  misc_RNA (1)...(19): siRNA sense strand
ucaaauucaauccugauga

SEQ ID NO: 555659 - RNA, 19 nt, Homo sapiens
  misc_RNA (1)...(19): siRNA sense strand
acaggacaguguauaucaa

SEQ ID NO: 555660 - RNA, 19 nt, Homo sapiens
  misc_RNA (1)...(19): siRNA sense strand
ccuaugacagguaucuuaa

SEQ ID NO: 555661 - RNA, 19 nt, Homo sapiens
  misc_RNA (1)...(19): siRNA sense strand
caagugucugcuaaauaua

SEQ ID NO: 555662 - RNA, 19 nt, Homo sapiens
  misc_RNA (1)...(19): siRNA sense strand
guugggauggucucauuaa

SEQ ID NO: 555663 - RNA, 19 nt, Homo sapiens
  misc_RNA (1)...(19): siRNA sense strand
caagauuuacaaaccgaaa

SEQ ID NO: 555664 - RNA, 19 nt, Homo sapiens
  misc_RNA (1)...(19): siRNA sense strand
gucaaagaaguucaguaua

SEQ ID NO: 555665 - RNA, 19 nt, Homo sapiens
  misc_RNA (1)...(19): siRNA sense strand
aaaguaccuuauuguguca

SEQ ID NO: 555666 - RNA, 19 nt, Homo sapiens
  misc_RNA (1)...(19): siRNA sense strand
gccauuuauugcugucuug

SEQ ID NO: 555667 - RNA, 19 nt, Homo sapiens
  misc_RNA (1)...(19): siRNA sense strand
gguccuaucuucacauacc

SEQ ID NO: 555668 - RNA, 19 nt, Homo sapiens
  misc_RNA (1)...(19): siRNA sense strand
gaugucugauaagaagauu

SEQ ID NO: 555669 - RNA, 19 nt, Homo sapiens
  misc_RNA (1)...(19): siRNA sense strand
ucaacuaugccaccugaga

SEQ ID NO: 555670 - RNA, 19 nt, Homo sapiens
  misc_RNA (1)...(19): siRNA sense strand
ggacauucgaaguggagaa

SEQ ID NO: 555671 - RNA, 19 nt, Homo sapiens
  misc_RNA (1)...(19): siRNA sense strand
ggagcugucaacaccauug

SEQ ID NO: 555672 - RNA, 19 nt, Homo sapiens
  misc_RNA (1)...(19): siRNA sense strand
gaacaaaucuugaugugaa

SEQ ID NO: 555673 - RNA, 19 nt, Homo sapiens
  misc_RNA (1)...(19): siRNA sense strand
gcacuuauauacuggauua

SEQ ID NO: 555674 - RNA, 19 nt, Homo sapiens
  misc_RNA (1)...(19): siRNA sense strand
ggacaggaaucucccauua

SEQ ID NO: 555675 - RNA, 19 nt, Homo sapiens
  misc_RNA (1)...(19): siRNA sense strand
ggaaauggcuucauccaaa

SEQ ID NO: 555676 - RNA, 19 nt, Homo sapiens
  misc_RNA (1)...(19): siRNA sense strand
caacuuagaucuccugaaa

SEQ ID NO: 555677 - RNA, 19 nt, Homo sapiens
  misc_RNA (1)...(19): siRNA sense strand
gaacgaagguggcuugaug

SEQ ID NO: 555678 - RNA, 19 nt, Homo sapiens
  misc_RNA (1)...(19): siRNA sense strand
gaaauugacuuaccaagau

SEQ ID NO: 555679 - RNA, 19 nt, Homo sapiens
  misc_RNA (1)...(19): siRNA sense strand
gaaauauccucaagugaaa

SEQ ID NO: 555680 - RNA, 19 nt, Homo sapiens
  misc_RNA (1)...(19): siRNA sense strand
gcagggcagugaagaauua

SEQ ID NO: 555681 - RNA, 19 nt, Homo sapiens
  misc_RNA (1)...(19): siRNA sense strand
ccaggaaccuccaguaaua

SEQ ID NO: 555682 - RNA, 19 nt, Homo sapiens
  misc_RNA (1)...(19): siRNA sense strand
gaacagcccuuacaugcaa

SEQ ID NO: 555683 - RNA, 19 nt, Homo sapiens
  misc_RNA (1)...(19): siRNA sense strand
cugagaagcugaacaaaua

SEQ ID NO: 555684 - RNA, 19 nt, Homo sapiens
  misc_RNA (1)...(19): siRNA sense strand
gaagacagcuuuccaucga

SEQ ID NO: 555685 - RNA, 19 nt, Homo sapiens
  misc_RNA (1)...(19): siRNA sense strand
gaaauaggacuuacugaaa

SEQ ID NO: 555686 - RNA, 19 nt, Homo sapiens
  misc_RNA (1)...(19): siRNA sense strand
gaagcaagguugaauuguu

SEQ ID NO: 555687 - RNA, 19 nt, Homo sapiens
  misc_RNA (1)...(19): siRNA sense strand
gauggagccucauuugaua

SEQ ID NO: 555688 - RNA, 19 nt, Homo sapiens
  misc_RNA (1)...(19): siRNA sense strand
caucauggcuguagagaaa

SEQ ID NO: 555689 - RNA, 19 nt, Homo sapiens
  misc_RNA (1)...(19): siRNA sense strand
ggaacaggcuacuauuaaa

SEQ ID NO: 555690 - RNA, 19 nt, Homo sapiens
  misc_RNA (1)...(19): siRNA sense strand
gaauacaccuguucaaagu

SEQ ID NO: 555691 - RNA, 19 nt, Homo sapiens
  misc_RNA (1)...(19): siRNA sense strand
ggauacaccucaacuagaa

SEQ ID NO: 555692 - RNA, 19 nt, Homo sapiens
  misc_RNA (1)...(19): siRNA sense strand
gaaccuugcuguaaauaau

SEQ ID NO: 555693 - RNA, 19 nt, Homo sapiens
  misc_RNA (1)...(19): siRNA sense strand
gcaaauagcauaagagcaa

SEQ ID NO: 555694 - RNA, 19 nt, Homo sapiens
  misc_RNA (1)...(19): siRNA sense strand
gcaauuaccaucuuagaaa

SEQ ID NO: 555695 - RNA, 19 nt, Homo sapiens
  misc_RNA (1)...(19): siRNA sense strand
aaagaaagcugcuguuauc

SEQ ID NO: 555696 - RNA, 19 nt, Homo sapiens
  misc_RNA (1)...(19): siRNA sense strand
gauuguagguuacuuagaa

SEQ ID NO: 555697 - RNA, 19 nt, Homo sapiens
  misc_RNA (1)...(19): siRNA sense strand
ggacuggaaugccuugaaa

SEQ ID NO: 555698 - RNA, 19 nt, Homo sapiens
  misc_RNA (1)...(19): siRNA sense strand
cagguaugcuugagaaaua

SEQ ID NO: 555699 - RNA, 19 nt, Homo sapiens
  misc_RNA (1)...(19): siRNA sense strand
gaaauacgcagaacacaga

SEQ ID NO: 555700 - RNA, 19 nt, Homo sapiens
  misc_RNA (1)...(19): siRNA sense strand
gaaacaaaccuuaaugcaa

SEQ ID NO: 555701 - RNA, 19 nt, Homo sapiens
  misc_RNA (1)...(19): siRNA sense strand
gaaagcugcuguuaucauc

SEQ ID NO: 555702 - RNA, 19 nt, Homo sapiens
  misc_RNA (1)...(19): siRNA sense strand
gaucaauccuaacugaauu

SEQ ID NO: 555703 - RNA, 19 nt, Homo sapiens
  misc_RNA (1)...(19): siRNA sense strand
ggaaauggagugaaucuga

SEQ ID NO: 555704 - RNA, 19 nt, Homo sapiens
  misc_RNA (1)...(19): siRNA sense strand
gcaguugcauuuucaauua

SEQ ID NO: 555705 - RNA, 19 nt, Homo sapiens
  misc_RNA (1)...(19): siRNA sense strand
ggaaugccuugaaaucuau

SEQ ID NO: 555706 - RNA, 19 nt, Homo sapiens
  misc_RNA (1)...(19): siRNA sense strand
ggauuuagaugauacagau

SEQ ID NO: 555707 - RNA, 19 nt, Homo sapiens
  misc_RNA (1)...(19): siRNA sense strand
ccaagcaccuccacuauuc

SEQ ID NO: 555708 - RNA, 19 nt, Homo sapiens
  misc_RNA (1)...(19): siRNA sense strand
ggaccgggauagagacuuu

SEQ ID NO: 555709 - RNA, 19 nt, Homo sapiens
  misc_RNA (1)...(19): siRNA sense strand
gaaaugaggaggaguagug

SEQ ID NO: 555710 - RNA, 19 nt, Homo sapiens
  misc_RNA (1)...(19): siRNA sense strand
uaaguucuguggcuucuaa

SEQ ID NO: 555711 - RNA, 19 nt, Homo sapiens
  misc_RNA (1)...(19): siRNA sense strand
cuaaacagauucucaaaca

SEQ ID NO: 555712 - RNA, 19 nt, Homo sapiens
  misc_RNA (1)...(19): siRNA sense strand
ugaggcagcuuaacaauca

SEQ ID NO: 555713 - RNA, 19 nt, Homo sapiens
  misc_RNA (1)...(19): siRNA sense strand
caauucggcuggacuguuu

SEQ ID NO: 555714 - RNA, 19 nt, Homo sapiens
  misc_RNA (1)...(19): siRNA sense strand
gaaaucugcucgucuugau

SEQ ID NO: 555715 - RNA, 19 nt, Homo sapiens
  misc_RNA (1)...(19): siRNA sense strand
uaaaguuggugucuuaaug

SEQ ID NO: 555716 - RNA, 19 nt, Homo sapiens
  misc_RNA (1)...(19): siRNA sense strand
ggguaaaccugauaauaau

SEQ ID NO: 555717 - RNA, 19 nt, Homo sapiens
  misc_RNA (1)...(19): siRNA sense strand
ggauagagacuuuagaaga

SEQ ID NO: 555718 - RNA, 19 nt, Homo sapiens
  misc_RNA (1)...(19): siRNA sense strand
ggucgaagaugugcuacua

SEQ ID NO: 555719 - RNA, 19 nt, Homo sapiens
  misc_RNA (1)...(19): siRNA sense strand
acaaugagguuucuacguu

SEQ ID NO: 555720 - RNA, 19 nt, Homo sapiens
  misc_RNA (1)...(19): siRNA sense strand
gagaacaaaucuugaugug

SEQ ID NO: 555721 - RNA, 19 nt, Homo sapiens
  misc_RNA (1)...(19): siRNA sense strand
cagaggagcugauuucaca

SEQ ID NO: 555722 - RNA, 19 nt, Homo sapiens
  misc_RNA (1)...(19): siRNA sense strand
ggaaggagagccaaacuug

SEQ ID NO: 555723 - RNA, 19 nt, Homo sapiens
  misc_RNA (1)...(19): siRNA sense strand
acaggaaucucccauuauu

SEQ ID NO: 555724 - RNA, 19 nt, Homo sapiens
  misc_RNA (1)...(19): siRNA sense strand
gaaauugggugcgauacug

SEQ ID NO: 555725 - RNA, 19 nt, Homo sapiens
  misc_RNA (1)...(19): siRNA sense strand
gagagcggauaguuucuuu

SEQ ID NO: 555726 - RNA, 19 nt, Homo sapiens
  misc_RNA (1)...(19): siRNA sense strand
ccauuaagaccaagaauuu

SEQ ID NO: 555727 - RNA, 19 nt, Homo sapiens
  misc_RNA (1)...(19): siRNA sense strand
caauugaccuguguaaaga

SEQ ID NO: 555728 - RNA, 19 nt, Homo sapiens
  misc_RNA (1)...(19): siRNA sense strand
gaagcucaauuacguuaug

SEQ ID NO: 555729 - RNA, 19 nt, Homo sapiens
  misc_RNA (1)...(19): siRNA sense strand
ccaagaugcaguaaacuua

SEQ ID NO: 555730 - RNA, 19 nt, Homo sapiens
  misc_RNA (1)...(19): siRNA sense strand
gcugaaauauccucaagug

SEQ ID NO: 555731 - RNA, 19 nt, Homo sapiens
  misc_RNA (1)...(19): siRNA sense strand
gaucuuccaccuauuagua

SEQ ID NO: 555732 - RNA, 19 nt, Homo sapiens
  misc_RNA (1)...(19): siRNA sense strand
caagagauuugucacuaga

SEQ ID NO: 555733 - RNA, 19 nt, Homo sapiens
  misc_RNA (1)...(19): siRNA sense strand
ugaucuugcugcacaauua

SEQ ID NO: 555734 - RNA, 19 nt, Homo sapiens
  misc_RNA (1)...(19): siRNA sense strand
ggugugcauucuuuaauaa

SEQ ID NO: 555735 - RNA, 19 nt, Homo sapiens
  misc_RNA (1)...(19): siRNA sense strand
aagcuaagccugaaaguaa

SEQ ID NO: 555736 - RNA, 19 nt, Homo sapiens
  misc_RNA (1)...(19): siRNA sense strand
gcaaaugcaauaucaguug

SEQ ID NO: 555737 - RNA, 19 nt, Homo sapiens
  misc_RNA (1)...(19): siRNA sense strand
gggugugcauucuuuaaua

SEQ ID NO: 555738 - RNA, 19 nt, Homo sapiens
  misc_RNA (1)...(19): siRNA sense strand
ggagugaaucugagccuua

SEQ ID NO: 555739 - RNA, 19 nt, Homo sapiens
  misc_RNA (1)...(19): siRNA sense strand
aagcaagguugaauuguuu

SEQ ID NO: 555740 - RNA, 19 nt, Homo sapiens
  misc_RNA (1)...(19): siRNA sense strand
cuaaugcggucucauaaug

SEQ ID NO: 555741 - RNA, 19 nt, Homo sapiens
  misc_RNA (1)...(19): siRNA sense strand
ugaaauauccucaagugaa

SEQ ID NO: 555742 - RNA, 19 nt, Homo sapiens
  misc_RNA (1)...(19): siRNA sense strand
gcaauugaccuguguaaag

SEQ ID NO: 555743 - RNA, 19 nt, Homo sapiens
  misc_RNA (1)...(19): siRNA sense strand
gaaaccagcagucaagaga

SEQ ID NO: 555744 - RNA, 19 nt, Homo sapiens
  misc_RNA (1)...(19): siRNA sense strand
ggccaccucucacaucuuu

SEQ ID NO: 555745 - RNA, 19 nt, Homo sapiens
  misc_RNA (1)...(19): siRNA sense strand
agacaaaucucggacuuga

SEQ ID NO: 555746 - RNA, 19 nt, Homo sapiens
  misc_RNA (1)...(19): siRNA sense strand
ucgaaugacucaagugauu

SEQ ID NO: 555747 - RNA, 19 nt, Homo sapiens
  misc_RNA (1)...(19): siRNA sense strand
gaugaagacgggagugaua

SEQ ID NO: 555748 - RNA, 19 nt, Homo sapiens
  misc_RNA (1)...(19): siRNA sense strand
uaugccagaucaugauuua

SEQ ID NO: 555749 - RNA, 19 nt, Homo sapiens
  misc_RNA (1)...(19): siRNA sense strand
gugcaaggguuugucauaa

SEQ ID NO: 555750 - RNA, 19 nt, Homo sapiens
  misc_RNA (1)...(19): siRNA sense strand
ggaagaaaauguuagagaa

SEQ ID NO: 555751 - RNA, 19 nt, Homo sapiens
  misc_RNA (1)...(19): siRNA sense strand
guaaauggcugcggugaag

SEQ ID NO: 555752 - RNA, 19 nt, Homo sapiens
  misc_RNA (1)...(19): siRNA sense strand
gauagagacuuuagaagac

SEQ ID NO: 555753 - RNA, 19 nt, Homo sapiens
  misc_RNA (1)...(19): siRNA sense strand
ggaacuggguauugauaau

SEQ ID NO: 555754 - RNA, 19 nt, Homo sapiens
  misc_RNA (1)...(19): siRNA sense strand
gcaaggguuugucauaaag

SEQ ID NO: 555755 - RNA, 19 nt, Homo sapiens
  misc_RNA (1)...(19): siRNA sense strand
cuuagaaacugcucagaaa

SEQ ID NO: 555756 - RNA, 19 nt, Homo sapiens
  misc_RNA (1)...(19): siRNA sense strand
ggaccaagcaccuccacua

SEQ ID NO: 555757 - RNA, 19 nt, Homo sapiens
  misc_RNA (1)...(19): siRNA sense strand
gaaugacagcuguagauuu

SEQ ID NO: 555758 - RNA, 19 nt, Homo sapiens
  misc_RNA (1)...(19): siRNA sense strand
agaggaagauguauucaug

SEQ ID NO: 555759 - RNA, 19 nt, Homo sapiens
  misc_RNA (1)...(19): siRNA sense strand
caaccagcauuugcaagua

SEQ ID NO: 555760 - RNA, 19 nt, Homo sapiens
  misc_RNA (1)...(19): siRNA sense strand
ggaagauguuggagcagaa

SEQ ID NO: 555761 - RNA, 19 nt, Homo sapiens
  misc_RNA (1)...(19): siRNA sense strand
gaugagccauuagaaagaa

SEQ ID NO: 555762 - RNA, 19 nt, Homo sapiens
  misc_RNA (1)...(19): siRNA sense strand
gggcagagaugaagaacag

SEQ ID NO: 555763 - RNA, 19 nt, Homo sapiens
  misc_RNA (1)...(19): siRNA sense strand
gagcaccucuuacuauucu

SEQ ID NO: 555764 - RNA, 19 nt, Homo sapiens
  misc_RNA (1)...(19): siRNA sense strand
cuacuaaucugguuacucu

SEQ ID NO: 555765 - RNA, 19 nt, Homo sapiens
  misc_RNA (1)...(19): siRNA sense strand
ugggagaaauguaaaugua

SEQ ID NO: 555766 - RNA, 19 nt, Homo sapiens
  misc_RNA (1)...(19): siRNA sense strand
ugaugacucuccuuuauau

SEQ ID NO: 555767 - RNA, 19 nt, Homo sapiens
  misc_RNA (1)...(19): siRNA sense strand
acagaacuauguagaagaa

SEQ ID NO: 555768 - RNA, 19 nt, Homo sapiens
  misc_RNA (1)...(19): siRNA sense strand
gaauguauaugaguaugug

SEQ ID NO: 555769 - RNA, 19 nt, Homo sapiens
  misc_RNA (1)...(19): siRNA sense strand
uaaaaucacuggcauguug

SEQ ID NO: 555770 - RNA, 19 nt, Homo sapiens
  misc_RNA (1)...(19): siRNA sense strand
gcgaugauccugagccuuu

SEQ ID NO: 555771 - RNA, 19 nt, Homo sapiens
  misc_RNA (1)...(19): siRNA sense strand
caaguuuaaugcagagauu

SEQ ID NO: 555772 - RNA, 19 nt, Homo sapiens
  misc_RNA (1)...(19): siRNA sense strand
gagaaggccaucagcauuu

SEQ ID NO: 555773 - RNA, 19 nt, Homo sapiens
  misc_RNA (1)...(19): siRNA sense strand
ggagauggccagccuacaa

SEQ ID NO: 555774 - RNA, 19 nt, Homo sapiens
  misc_RNA (1)...(19): siRNA sense strand
guacuuuggcccugacuuu

SEQ ID NO: 555775 - RNA, 19 nt, Homo sapiens
  misc_RNA (1)...(19): siRNA sense strand
gagauggccagccuacaaa

SEQ ID NO: 555776 - RNA, 19 nt, Homo sapiens
  misc_RNA (1)...(19): siRNA sense strand
cugcugaccuucucauaga

SEQ ID NO: 555777 - RNA, 19 nt, Homo sapiens
  misc_RNA (1)...(19): siRNA sense strand
cgagaaggccaucagcauu

SEQ ID NO: 555778 - RNA, 19 nt, Homo sapiens
  misc_RNA (1)...(19): siRNA sense strand
ucaaguacugucccuauga

SEQ ID NO: 555779 - RNA, 19 nt, Homo sapiens
  misc_RNA (1)...(19): siRNA sense strand
acacugacgucuucaucug

SEQ ID NO: 555780 - RNA, 19 nt, Homo sapiens
  misc_RNA (1)...(19): siRNA sense strand
caaguacugucccuaugag

SEQ ID NO: 555781 - RNA, 19 nt, Homo sapiens
  misc_RNA (1)...(19): siRNA sense strand
ucaagauguucaaguacug

SEQ ID NO: 555782 - RNA, 19 nt, Homo sapiens
  misc_RNA (1)...(19): siRNA sense strand
agaaggccaucagcauuug

SEQ ID NO: 555783 - RNA, 19 nt, Homo sapiens
  misc_RNA (1)...(19): siRNA sense strand
acaaaacacugacgucuuc

SEQ ID NO: 555784 - RNA, 19 nt, Homo sapiens
  misc_RNA (1)...(19): siRNA sense strand
gcacaagccccaucaagau

SEQ ID NO: 555785 - RNA, 19 nt, Homo sapiens
  misc_RNA (1)...(19): siRNA sense strand
agauugugcugaccagaga

SEQ ID NO: 555786 - RNA, 19 nt, Homo sapiens
  misc_RNA (1)...(19): siRNA sense strand
guucaaguacugucccuau

SEQ ID NO: 555787 - RNA, 19 nt, Homo sapiens
  misc_RNA (1)...(19): siRNA sense strand
gcgagaaggccaucagcau

SEQ ID NO: 555788 - RNA, 19 nt, Homo sapiens
  misc_RNA (1)...(19): siRNA sense strand
guacugucccuaugagaag

SEQ ID NO: 555789 - RNA, 19 nt, Homo sapiens
  misc_RNA (1)...(19): siRNA sense strand
caucagcauuugggaguca

SEQ ID NO: 555790 - RNA, 19 nt, Homo sapiens
  misc_RNA (1)...(19): siRNA sense strand
uggaagcugucaaggagau

SEQ ID NO: 555791 - RNA, 19 nt, Homo sapiens
  misc_RNA (1)...(19): siRNA sense strand
augccuggguggagaagua

SEQ ID NO: 555792 - RNA, 19 nt, Homo sapiens
  misc_RNA (1)...(19): siRNA sense strand
gcugggagcauguccucuu

SEQ ID NO: 555793 - RNA, 19 nt, Homo sapiens
  misc_RNA (1)...(19): siRNA sense strand
ugacuucgagggcggauuc

SEQ ID NO: 555794 - RNA, 19 nt, Homo sapiens
  misc_RNA (1)...(19): siRNA sense strand
aaacacugacgucuucauc

SEQ ID NO: 555795 - RNA, 19 nt, Homo sapiens
  misc_RNA (1)...(19): siRNA sense strand
gagcaaagcaugugaaaca

SEQ ID NO: 555796 - RNA, 19 nt, Homo sapiens
  misc_RNA (1)...(19): siRNA sense strand
ggaaagcccugugcuggaa

SEQ ID NO: 555797 - RNA, 19 nt, Homo sapiens
  misc_RNA (1)...(19): siRNA sense strand
ucucagagcuuuaccuguu

SEQ ID NO: 555798 - RNA, 19 nt, Homo sapiens
  misc_RNA (1)...(19): siRNA sense strand
gcaaaagacugcuaaagug

SEQ ID NO: 555799 - RNA, 19 nt, Homo sapiens
  misc_RNA (1)...(19): siRNA sense strand
ggaaggugauugggacaaa

SEQ ID NO: 555800 - RNA, 19 nt, Homo sapiens
  misc_RNA (1)...(19): siRNA sense strand
cuggaucccuauuuauuaa

SEQ ID NO: 555801 - RNA, 19 nt, Homo sapiens
  misc_RNA (1)...(19): siRNA sense strand
aaagacugcuaaagugaga

SEQ ID NO: 555802 - RNA, 19 nt, Homo sapiens
  misc_RNA (1)...(19): siRNA sense strand
ugaacuggcugagaucguu

SEQ ID NO: 555803 - RNA, 19 nt, Homo sapiens
  misc_RNA (1)...(19): siRNA sense strand
uggaagaacucaauaucuc

SEQ ID NO: 555804 - RNA, 19 nt, Homo sapiens
  misc_RNA (1)...(19): siRNA sense strand
ucuggaucccuauuuauua

SEQ ID NO: 555805 - RNA, 19 nt, Homo sapiens
  misc_RNA (1)...(19): siRNA sense strand
uguucuggaucccuauuua

SEQ ID NO: 555806 - RNA, 19 nt, Homo sapiens
  misc_RNA (1)...(19): siRNA sense strand
gaacuggcugagaucguuu

SEQ ID NO: 555807 - RNA, 19 nt, Homo sapiens
  misc_RNA (1)...(19): siRNA sense strand
gaaaccacccagcuaagca

SEQ ID NO: 555808 - RNA, 19 nt, Homo sapiens
  misc_RNA (1)...(19): siRNA sense strand
cuucagcagugcacaguug

SEQ ID NO: 555809 - RNA, 19 nt, Homo sapiens
  misc_RNA (1)...(19): siRNA sense strand
aacaugaacuggcugagau

SEQ ID NO: 555810 - RNA, 19 nt, Homo sapiens
  misc_RNA (1)...(19): siRNA sense strand
ggaagaacucaauaucucu

SEQ ID NO: 555811 - RNA, 19 nt, Homo sapiens
  misc_RNA (1)...(19): siRNA sense strand
ugagaucguuuucaaaguu

SEQ ID NO: 555812 - RNA, 19 nt, Homo sapiens
  misc_RNA (1)...(19): siRNA sense strand
uagauccagugacaggaaa

SEQ ID NO: 555813 - RNA, 19 nt, Homo sapiens
  misc_RNA (1)...(19): siRNA sense strand
aaacaugaacuggcugaga

SEQ ID NO: 555814 - RNA, 19 nt, Homo sapiens
  misc_RNA (1)...(19): siRNA sense strand
caaaagacugcuaaaguga

SEQ ID NO: 555815 - RNA, 19 nt, Homo sapiens
  misc_RNA (1)...(19): siRNA sense strand
ucggaaaccacccagcuaa

SEQ ID NO: 555816 - RNA, 19 nt, Homo sapiens
  misc_RNA (1)...(19): siRNA sense strand
gaaggugauugggacaaaa

SEQ ID NO: 555817 - RNA, 19 nt, Homo sapiens
  misc_RNA (1)...(19): siRNA sense strand
ggauauugugcuucucaga

SEQ ID NO: 555818 - RNA, 19 nt, Homo sapiens
  misc_RNA (1)...(19): siRNA sense strand
gagagugaccaggcuuguu

SEQ ID NO: 555819 - RNA, 19 nt, Homo sapiens
  misc_RNA (1)...(19): siRNA sense strand
gagaucguuuucaaaguug

SEQ ID NO: 555820 - RNA, 19 nt, Homo sapiens
  misc_RNA (1)...(19): siRNA sense strand
agagugaccaggcuuguuc

SEQ ID NO: 555821 - RNA, 19 nt, Homo sapiens
  misc_RNA (1)...(19): siRNA sense strand
uuaauaagcggaaaaccua

SEQ ID NO: 555822 - RNA, 19 nt, Homo sapiens
  misc_RNA (1)...(19): siRNA sense strand
gaacucaauaucucuucag

SEQ ID NO: 555823 - RNA, 19 nt, Homo sapiens
  misc_RNA (1)...(19): siRNA sense strand
agaacucaauaucucuuca

SEQ ID NO: 555824 - RNA, 19 nt, Homo sapiens
  misc_RNA (1)...(19): siRNA sense strand
ggaaaccacccagcuaagc

SEQ ID NO: 555825 - RNA, 19 nt, Homo sapiens
  misc_RNA (1)...(19): siRNA sense strand
ccacgagcaaagcauguga

SEQ ID NO: 555826 - RNA, 19 nt, Homo sapiens
  misc_RNA (1)...(19): siRNA sense strand
guucuggaucccuauuuau

SEQ ID NO: 555827 - RNA, 19 nt, Homo sapiens
  misc_RNA (1)...(19): siRNA sense strand
aaucuggaagaacucaaua

SEQ ID NO: 555828 - RNA, 19 nt, Homo sapiens
  misc_RNA (1)...(19): siRNA sense strand
aaagucauagauccaguga

SEQ ID NO: 555829 - RNA, 19 nt, Homo sapiens
  misc_RNA (1)...(19): siRNA sense strand
uggagaguccguugaguuc

SEQ ID NO: 555830 - RNA, 19 nt, Homo sapiens
  misc_RNA (1)...(19): siRNA sense strand
gaaagaauauggcccaauu

SEQ ID NO: 555831 - RNA, 19 nt, Homo sapiens
  misc_RNA (1)...(19): siRNA sense strand
gaagaagccucugaagaua

SEQ ID NO: 555832 - RNA, 19 nt, Homo sapiens
  misc_RNA (1)...(19): siRNA sense strand
gcaggaaggcuuuacauaa

SEQ ID NO: 555833 - RNA, 19 nt, Homo sapiens
  misc_RNA (1)...(19): siRNA sense strand
ggaagaagccucugaagau

SEQ ID NO: 555834 - RNA, 19 nt, Homo sapiens
  misc_RNA (1)...(19): siRNA sense strand
guuaauggguguuaugaaa

SEQ ID NO: 555835 - RNA, 19 nt, Homo sapiens
  misc_RNA (1)...(19): siRNA sense strand
gaauuugacuccagugaau

SEQ ID NO: 555836 - RNA, 19 nt, Homo sapiens
  misc_RNA (1)...(19): siRNA sense strand
gaaccugaaagucauguua

SEQ ID NO: 555837 - RNA, 19 nt, Homo sapiens
  misc_RNA (1)...(19): siRNA sense strand
gaaaagaagagaccaaaua

SEQ ID NO: 555838 - RNA, 19 nt, Homo sapiens
  misc_RNA (1)...(19): siRNA sense strand
gagacgauaucaagauuuc

SEQ ID NO: 555839 - RNA, 19 nt, Homo sapiens
  misc_RNA (1)...(19): siRNA sense strand
ggaacucucuucucacaag

SEQ ID NO: 555840 - RNA, 19 nt, Homo sapiens
  misc_RNA (1)...(19): siRNA sense strand
gaaauguuaauggguguua

SEQ ID NO: 555841 - RNA, 19 nt, Homo sapiens
  misc_RNA (1)...(19): siRNA sense strand
gaaguuaggagacgauauc

SEQ ID NO: 555842 - RNA, 19 nt, Homo sapiens
  misc_RNA (1)...(19): siRNA sense strand
gcggaugucuggacucuca

SEQ ID NO: 555843 - RNA, 19 nt, Homo sapiens
  misc_RNA (1)...(19): siRNA sense strand
gaagaggaucugguugaua

SEQ ID NO: 555844 - RNA, 19 nt, Homo sapiens
  misc_RNA (1)...(19): siRNA sense strand
ccagaggaguucauggaaa

SEQ ID NO: 555845 - RNA, 19 nt, Homo sapiens
  misc_RNA (1)...(19): siRNA sense strand
gcuguugcguccucaauga

SEQ ID NO: 555846 - RNA, 19 nt, Homo sapiens
  misc_RNA (1)...(19): siRNA sense strand
agaagccucugaagauaaa

SEQ ID NO: 555847 - RNA, 19 nt, Homo sapiens
  misc_RNA (1)...(19): siRNA sense strand
gaaccgaauugcugaucau

SEQ ID NO: 555848 - RNA, 19 nt, Homo sapiens
  misc_RNA (1)...(19): siRNA sense strand
cagaggaguucauggaaau

SEQ ID NO: 555849 - RNA, 19 nt, Homo sapiens
  misc_RNA (1)...(19): siRNA sense strand
uaaaggaucucuucaucac

SEQ ID NO: 555850 - RNA, 19 nt, Homo sapiens
  misc_RNA (1)...(19): siRNA sense strand
gaaagucauguuacuacaa

SEQ ID NO: 555851 - RNA, 19 nt, Homo sapiens
  misc_RNA (1)...(19): siRNA sense strand
caagauuuccuuugguuga

SEQ ID NO: 555852 - RNA, 19 nt, Homo sapiens
  misc_RNA (1)...(19): siRNA sense strand
guacgugcuuuauagugaa

SEQ ID NO: 555853 - RNA, 19 nt, Homo sapiens
  misc_RNA (1)...(19): siRNA sense strand
ggaaugguggaacgcuuua

SEQ ID NO: 555854 - RNA, 19 nt, Homo sapiens
  misc_RNA (1)...(19): siRNA sense strand
aagaagagaccaaauacaa

SEQ ID NO: 555855 - RNA, 19 nt, Homo sapiens
  misc_RNA (1)...(19): siRNA sense strand
ggaugaaccagauuuaaag

SEQ ID NO: 555856 - RNA, 19 nt, Homo sapiens
  misc_RNA (1)...(19): siRNA sense strand
gaaagggaauauuuugaug

SEQ ID NO: 555857 - RNA, 19 nt, Homo sapiens
  misc_RNA (1)...(19): siRNA sense strand
ugaaccagauuuaaaggau

SEQ ID NO: 555858 - RNA, 19 nt, Homo sapiens
  misc_RNA (1)...(19): siRNA sense strand
aagaggaucugguugauac

SEQ ID NO: 555859 - RNA, 19 nt, Homo sapiens
  misc_RNA (1)...(19): siRNA sense strand
gaggaugaaccagauuuaa

SEQ ID NO: 555860 - RNA, 19 nt, Homo sapiens
  misc_RNA (1)...(19): siRNA sense strand
ggaauuugacuccagugaa

SEQ ID NO: 555861 - RNA, 19 nt, Homo sapiens
  misc_RNA (1)...(19): siRNA sense strand
gaagaaagggaauauuuug

SEQ ID NO: 555862 - RNA, 19 nt, Homo sapiens
  misc_RNA (1)...(19): siRNA sense strand
ugaacuauuuagccagaaa

SEQ ID NO: 555863 - RNA, 19 nt, Homo sapiens
  misc_RNA (1)...(19): siRNA sense strand
ugacuccagugaauuugaa

SEQ ID NO: 555864 - RNA, 19 nt, Homo sapiens
  misc_RNA (1)...(19): siRNA sense strand
ggaagaaagggaauauuuu

SEQ ID NO: 555865 - RNA, 19 nt, Homo sapiens
  misc_RNA (1)...(19): siRNA sense strand
ccagugaauuugaaguuag

SEQ ID NO: 555866 - RNA, 19 nt, Homo sapiens
  misc_RNA (1)...(19): siRNA sense strand
gcugaucauccaacuuuaa

SEQ ID NO: 555867 - RNA, 19 nt, Homo sapiens
  misc_RNA (1)...(19): siRNA sense strand
ccucugaagauaaaccuua

SEQ ID NO: 555868 - RNA, 19 nt, Homo sapiens
  misc_RNA (1)...(19): siRNA sense strand
aggaagaaagggaauauuu

SEQ ID NO: 555869 - RNA, 19 nt, Homo sapiens
  misc_RNA (1)...(19): siRNA sense strand
ggagacgauaucaagauuu

SEQ ID NO: 555870 - RNA, 19 nt, Homo sapiens
  misc_RNA (1)...(19): siRNA sense strand
ggaucugguugauacucua

SEQ ID NO: 555871 - RNA, 19 nt, Homo sapiens
  misc_RNA (1)...(19): siRNA sense strand
gcacaccccacucugauua

SEQ ID NO: 555872 - RNA, 19 nt, Homo sapiens
  misc_RNA (1)...(19): siRNA sense strand
gauaucaagauuuccuuug

SEQ ID NO: 555873 - RNA, 19 nt, Homo sapiens
  misc_RNA (1)...(19): siRNA sense strand
ccaaauacaagcagaacug

SEQ ID NO: 555874 - RNA, 19 nt, Homo sapiens
  misc_RNA (1)...(19): siRNA sense strand
gcacaagcuugggaacucu

SEQ ID NO: 555875 - RNA, 19 nt, Homo sapiens
  misc_RNA (1)...(19): siRNA sense strand
uccagugaauuugaaguua

SEQ ID NO: 555876 - RNA, 19 nt, Homo sapiens
  misc_RNA (1)...(19): siRNA sense strand
caugaguacgugcuuuaua

SEQ ID NO: 555877 - RNA, 19 nt, Homo sapiens
  misc_RNA (1)...(19): siRNA sense strand
gauguugccagcugcauug

SEQ ID NO: 555878 - RNA, 19 nt, Homo sapiens
  misc_RNA (1)...(19): siRNA sense strand
gaucauccaacuuuaacau

SEQ ID NO: 555879 - RNA, 19 nt, Homo sapiens
  misc_RNA (1)...(19): siRNA sense strand
ugaaagucauguuacuaca

SEQ ID NO: 555880 - RNA, 19 nt, Homo sapiens
  misc_RNA (1)...(19): siRNA sense strand
uuuaaaggaucucuucauc

SEQ ID NO: 555881 - RNA, 19 nt, Homo sapiens
  misc_RNA (1)...(19): siRNA sense strand
ugaggaugaaccagauuua

SEQ ID NO: 555882 - RNA, 19 nt, Homo sapiens
  misc_RNA (1)...(19): siRNA sense strand
cuugggaacucucuucuca

SEQ ID NO: 555883 - RNA, 19 nt, Homo sapiens
  misc_RNA (1)...(19): siRNA sense strand
aguacgugcuuuauaguga

SEQ ID NO: 555884 - RNA, 19 nt, Homo sapiens
  misc_RNA (1)...(19): siRNA sense strand
ggagucauuccuuacauca

SEQ ID NO: 555885 - RNA, 19 nt, Homo sapiens
  misc_RNA (1)...(19): siRNA sense strand
gggagucauuccuuacauc

SEQ ID NO: 555886 - RNA, 19 nt, Homo sapiens
  misc_RNA (1)...(19): siRNA sense strand
aggagacgauaucaagauu

SEQ ID NO: 555887 - RNA, 19 nt, Homo sapiens
  misc_RNA (1)...(19): siRNA sense strand
caucacagaccaaccuuca

SEQ ID NO: 555888 - RNA, 19 nt, Homo sapiens
  misc_RNA (1)...(19): siRNA sense strand
caacauccccuuuaucaau

SEQ ID NO: 555889 - RNA, 19 nt, Homo sapiens
  misc_RNA (1)...(19): siRNA sense strand
guuaggagacgauaucaag

SEQ ID NO: 555890 - RNA, 19 nt, Homo sapiens
  misc_RNA (1)...(19): siRNA sense strand
ccagcugcauugacagaug

SEQ ID NO: 555891 - RNA, 19 nt, Homo sapiens
  misc_RNA (1)...(19): siRNA sense strand
gaucugguugauacucuaa

SEQ ID NO: 555892 - RNA, 19 nt, Homo sapiens
  misc_RNA (1)...(19): siRNA sense strand
ugggaacucucuucucaca

SEQ ID NO: 555893 - RNA, 19 nt, Homo sapiens
  misc_RNA (1)...(19): siRNA sense strand
uacaugaguacgugcuuua

SEQ ID NO: 555894 - RNA, 19 nt, Homo sapiens
  misc_RNA (1)...(19): siRNA sense strand
uaaggaagaaagggaauau

SEQ ID NO: 555895 - RNA, 19 nt, Homo sapiens
  misc_RNA (1)...(19): siRNA sense strand
guugccagcugcauugaca

SEQ ID NO: 555896 - RNA, 19 nt, Homo sapiens
  misc_RNA (1)...(19): siRNA sense strand
aagaagccucugaagauaa

SEQ ID NO: 555897 - RNA, 19 nt, Homo sapiens
  misc_RNA (1)...(19): siRNA sense strand
augaguacgugcuuuauag

SEQ ID NO: 555898 - RNA, 19 nt, Homo sapiens
  misc_RNA (1)...(19): siRNA sense strand
ccgaauugcugaucaucca

SEQ ID NO: 555899 - RNA, 19 nt, Homo sapiens
  misc_RNA (1)...(19): siRNA sense strand
aggaugaaccagauuuaaa

SEQ ID NO: 555900 - RNA, 19 nt, Homo sapiens
  misc_RNA (1)...(19): siRNA sense strand
gaucucuucaucacaguug

SEQ ID NO: 555901 - RNA, 19 nt, Homo sapiens
  misc_RNA (1)...(19): siRNA sense strand
uugcugaucauccaacuuu

SEQ ID NO: 555902 - RNA, 19 nt, Homo sapiens
  misc_RNA (1)...(19): siRNA sense strand
uggaacgcuuuaacgauga

SEQ ID NO: 555903 - RNA, 19 nt, Homo sapiens
  misc_RNA (1)...(19): siRNA sense strand
uggaagaagccucugaaga

SEQ ID NO: 555904 - RNA, 19 nt, Homo sapiens
  misc_RNA (1)...(19): siRNA sense strand
ugaaccgaauugcugauca

SEQ ID NO: 555905 - RNA, 19 nt, Homo sapiens
  misc_RNA (1)...(19): siRNA sense strand
uaucaagauuuccuuuggu

SEQ ID NO: 555906 - RNA, 19 nt, Homo sapiens
  misc_RNA (1)...(19): siRNA sense strand
agucauuccuuacaucaca

SEQ ID NO: 555907 - RNA, 19 nt, Homo sapiens
  misc_RNA (1)...(19): siRNA sense strand
gguugauacucuaaaggau

SEQ ID NO: 555908 - RNA, 19 nt, Homo sapiens
  misc_RNA (1)...(19): siRNA sense strand
agaagaggaucugguugau

SEQ ID NO: 555909 - RNA, 19 nt, Homo sapiens
  misc_RNA (1)...(19): siRNA sense strand
cacaguugaugaaccugaa

SEQ ID NO: 555910 - RNA, 19 nt, Homo sapiens
  misc_RNA (1)...(19): siRNA sense strand
gcccagaggaguucaugga

SEQ ID NO: 555911 - RNA, 19 nt, Homo sapiens
  misc_RNA (1)...(19): siRNA sense strand
gcaaaccgucagagcuguu

SEQ ID NO: 555912 - RNA, 19 nt, Homo sapiens
  misc_RNA (1)...(19): siRNA sense strand
gggaauuugacuccaguga

SEQ ID NO: 555913 - RNA, 19 nt, Homo sapiens
  misc_RNA (1)...(19): siRNA sense strand
ggauguugccagcugcauu

SEQ ID NO: 555914 - RNA, 19 nt, Homo sapiens
  misc_RNA (1)...(19): siRNA sense strand
cgcaggaaggcuuuacaua

SEQ ID NO: 555915 - RNA, 19 nt, Homo sapiens
  misc_RNA (1)...(19): siRNA sense strand
ggcccugcuuccuguugua

SEQ ID NO: 555916 - RNA, 19 nt, Homo sapiens
  misc_RNA (1)...(19): siRNA sense strand
aagauuuccuuugguugaa

SEQ ID NO: 555917 - RNA, 19 nt, Homo sapiens
  misc_RNA (1)...(19): siRNA sense strand
ggauuccaaaguugaaguu

SEQ ID NO: 555918 - RNA, 19 nt, Homo sapiens
  misc_RNA (1)...(19): siRNA sense strand
uugauacucuaaaggaugu

SEQ ID NO: 555919 - RNA, 19 nt, Homo sapiens
  misc_RNA (1)...(19): siRNA sense strand
cucagagaauuuauaagga

SEQ ID NO: 555920 - RNA, 19 nt, Homo sapiens
  misc_RNA (1)...(19): siRNA sense strand
uugaugaaccugaaaguca

SEQ ID NO: 555921 - RNA, 19 nt, Homo sapiens
  misc_RNA (1)...(19): siRNA sense strand
gguggaacgcuuuaacgau

SEQ ID NO: 555922 - RNA, 19 nt, Homo sapiens
  misc_RNA (1)...(19): siRNA sense strand
uuaaaggaucucuucauca

SEQ ID NO: 555923 - RNA, 19 nt, Homo sapiens
  misc_RNA (1)...(19): siRNA sense strand
guuugaggaugaaccagau

SEQ ID NO: 555924 - RNA, 19 nt, Homo sapiens
  misc_RNA (1)...(19): siRNA sense strand
gaagcacaccccacucuga

SEQ ID NO: 555925 - RNA, 19 nt, Homo sapiens
  misc_RNA (1)...(19): siRNA sense strand
acgugggagucauuccuua

SEQ ID NO: 555926 - RNA, 19 nt, Homo sapiens
  misc_RNA (1)...(19): siRNA sense strand
gaguacgugcuuuauagug

SEQ ID NO: 555927 - RNA, 19 nt, Homo sapiens
  misc_RNA (1)...(19): siRNA sense strand
cgauaucaagauuuccuuu

SEQ ID NO: 555928 - RNA, 19 nt, Homo sapiens
  misc_RNA (1)...(19): siRNA sense strand
ggauuauuacuaagacauc

SEQ ID NO: 555929 - RNA, 19 nt, Homo sapiens
  misc_RNA (1)...(19): siRNA sense strand
cucugaagauaaaccuuaa

SEQ ID NO: 555930 - RNA, 19 nt, Homo sapiens
  misc_RNA (1)...(19): siRNA sense strand
gaaagaauauggcccaauu

SEQ ID NO: 555931 - RNA, 19 nt, Homo sapiens
  misc_RNA (1)...(19): siRNA sense strand
gaagaagccucugaagaua

SEQ ID NO: 555932 - RNA, 19 nt, Homo sapiens
  misc_RNA (1)...(19): siRNA sense strand
gcaggaaggcuuuacauaa

SEQ ID NO: 555933 - RNA, 19 nt, Homo sapiens
  misc_RNA (1)...(19): siRNA sense strand
ggaagaagccucugaagau

SEQ ID NO: 555934 - RNA, 19 nt, Homo sapiens
  misc_RNA (1)...(19): siRNA sense strand
guuaauggguguuaugaaa

SEQ ID NO: 555935 - RNA, 19 nt, Homo sapiens
  misc_RNA (1)...(19): siRNA sense strand
gaauuugacuccagugaau

SEQ ID NO: 555936 - RNA, 19 nt, Homo sapiens
  misc_RNA (1)...(19): siRNA sense strand
gaaccugaaagucauguua

SEQ ID NO: 555937 - RNA, 19 nt, Homo sapiens
  misc_RNA (1)...(19): siRNA sense strand
gaaaagaagagaccaaaua

SEQ ID NO: 555938 - RNA, 19 nt, Homo sapiens
  misc_RNA (1)...(19): siRNA sense strand
gagacgauaucaagauuuc

SEQ ID NO: 555939 - RNA, 19 nt, Homo sapiens
  misc_RNA (1)...(19): siRNA sense strand
ggaacucucuucucacaag

SEQ ID NO: 555940 - RNA, 19 nt, Homo sapiens
  misc_RNA (1)...(19): siRNA sense strand
gaaauguuaauggguguua

SEQ ID NO: 555941 - RNA, 19 nt, Homo sapiens
  misc_RNA (1)...(19): siRNA sense strand
gaaguuaggagacgauauc

SEQ ID NO: 555942 - RNA, 19 nt, Homo sapiens
  misc_RNA (1)...(19): siRNA sense strand
gcggaugucuggacucuca

SEQ ID NO: 555943 - RNA, 19 nt, Homo sapiens
  misc_RNA (1)...(19): siRNA sense strand
gaagaggaucugguugaua

SEQ ID NO: 555944 - RNA, 19 nt, Homo sapiens
  misc_RNA (1)...(19): siRNA sense strand
ccagaggaguucauggaaa

SEQ ID NO: 555945 - RNA, 19 nt, Homo sapiens
  misc_RNA (1)...(19): siRNA sense strand
gcuguugcguccucaauga

SEQ ID NO: 555946 - RNA, 19 nt, Homo sapiens
  misc_RNA (1)...(19): siRNA sense strand
agaagccucugaagauaaa

SEQ ID NO: 555947 - RNA, 19 nt, Homo sapiens
  misc_RNA (1)...(19): siRNA sense strand
gaaccgaauugcugaucau

SEQ ID NO: 555948 - RNA, 19 nt, Homo sapiens
  misc_RNA (1)...(19): siRNA sense strand
cagaggaguucauggaaau

SEQ ID NO: 555949 - RNA, 19 nt, Homo sapiens
  misc_RNA (1)...(19): siRNA sense strand
uaaaggaucucuucaucac

SEQ ID NO: 555950 - RNA, 19 nt, Homo sapiens
  misc_RNA (1)...(19): siRNA sense strand
gaaagucauguuacuacaa

SEQ ID NO: 555951 - RNA, 19 nt, Homo sapiens
  misc_RNA (1)...(19): siRNA sense strand
caagauuuccuuugguuga

SEQ ID NO: 555952 - RNA, 19 nt, Homo sapiens
  misc_RNA (1)...(19): siRNA sense strand
guacgugcuuuauagugaa

SEQ ID NO: 555953 - RNA, 19 nt, Homo sapiens
  misc_RNA (1)...(19): siRNA sense strand
ggaaugguggaacgcuuua

SEQ ID NO: 555954 - RNA, 19 nt, Homo sapiens
  misc_RNA (1)...(19): siRNA sense strand
aagaagagaccaaauacaa

SEQ ID NO: 555955 - RNA, 19 nt, Homo sapiens
  misc_RNA (1)...(19): siRNA sense strand
ggaugaaccagauuuaaag

SEQ ID NO: 555956 - RNA, 19 nt, Homo sapiens
  misc_RNA (1)...(19): siRNA sense strand
gaaagggaauauuuugaug

SEQ ID NO: 555957 - RNA, 19 nt, Homo sapiens
  misc_RNA (1)...(19): siRNA sense strand
ugaaccagauuuaaaggau

SEQ ID NO: 555958 - RNA, 19 nt, Homo sapiens
  misc_RNA (1)...(19): siRNA sense strand
aagaggaucugguugauac

SEQ ID NO: 555959 - RNA, 19 nt, Homo sapiens
  misc_RNA (1)...(19): siRNA sense strand
gaggaugaaccagauuuaa

SEQ ID NO: 555960 - RNA, 19 nt, Homo sapiens
  misc_RNA (1)...(19): siRNA sense strand
ggaauuugacuccagugaa

SEQ ID NO: 555961 - RNA, 19 nt, Homo sapiens
  misc_RNA (1)...(19): siRNA sense strand
gaagaaagggaauauuuug

SEQ ID NO: 555962 - RNA, 19 nt, Homo sapiens
  misc_RNA (1)...(19): siRNA sense strand
ugaacuauuuagccagaaa

SEQ ID NO: 555963 - RNA, 19 nt, Homo sapiens
  misc_RNA (1)...(19): siRNA sense strand
ugacuccagugaauuugaa

SEQ ID NO: 555964 - RNA, 19 nt, Homo sapiens
  misc_RNA (1)...(19): siRNA sense strand
ggaagaaagggaauauuuu

SEQ ID NO: 555965 - RNA, 19 nt, Homo sapiens
  misc_RNA (1)...(19): siRNA sense strand
ccagugaauuugaaguuag

SEQ ID NO: 555966 - RNA, 19 nt, Homo sapiens
  misc_RNA (1)...(19): siRNA sense strand
gcugaucauccaacuuuaa

SEQ ID NO: 555967 - RNA, 19 nt, Homo sapiens
  misc_RNA (1)...(19): siRNA sense strand
ccucugaagauaaaccuua

SEQ ID NO: 555968 - RNA, 19 nt, Homo sapiens
  misc_RNA (1)...(19): siRNA sense strand
aggaagaaagggaauauuu

SEQ ID NO: 555969 - RNA, 19 nt, Homo sapiens
  misc_RNA (1)...(19): siRNA sense strand
ggagacgauaucaagauuu

SEQ ID NO: 555970 - RNA, 19 nt, Homo sapiens
  misc_RNA (1)...(19): siRNA sense strand
ggaucugguugauacucua

SEQ ID NO: 555971 - RNA, 19 nt, Homo sapiens
  misc_RNA (1)...(19): siRNA sense strand
gcacaccccacucugauua

SEQ ID NO: 555972 - RNA, 19 nt, Homo sapiens
  misc_RNA (1)...(19): siRNA sense strand
gauaucaagauuuccuuug

SEQ ID NO: 555973 - RNA, 19 nt, Homo sapiens
  misc_RNA (1)...(19): siRNA sense strand
ccaaauacaagcagaacug

SEQ ID NO: 555974 - RNA, 19 nt, Homo sapiens
  misc_RNA (1)...(19): siRNA sense strand
gcacaagcuugggaacucu

SEQ ID NO: 555975 - RNA, 19 nt, Homo sapiens
  misc_RNA (1)...(19): siRNA sense strand
uccagugaauuugaaguua

SEQ ID NO: 555976 - RNA, 19 nt, Homo sapiens
  misc_RNA (1)...(19): siRNA sense strand
caugaguacgugcuuuaua

SEQ ID NO: 555977 - RNA, 19 nt, Homo sapiens
  misc_RNA (1)...(19): siRNA sense strand
gauguugccagcugcauug

SEQ ID NO: 555978 - RNA, 19 nt, Homo sapiens
  misc_RNA (1)...(19): siRNA sense strand
gaucauccaacuuuaacau

SEQ ID NO: 555979 - RNA, 19 nt, Homo sapiens
  misc_RNA (1)...(19): siRNA sense strand
ugaaagucauguuacuaca

SEQ ID NO: 555980 - RNA, 19 nt, Homo sapiens
  misc_RNA (1)...(19): siRNA sense strand
uuuaaaggaucucuucauc

SEQ ID NO: 555981 - RNA, 19 nt, Homo sapiens
  misc_RNA (1)...(19): siRNA sense strand
ugaggaugaaccagauuua

SEQ ID NO: 555982 - RNA, 19 nt, Homo sapiens
  misc_RNA (1)...(19): siRNA sense strand
cuugggaacucucuucuca

SEQ ID NO: 555983 - RNA, 19 nt, Homo sapiens
  misc_RNA (1)...(19): siRNA sense strand
aguacgugcuuuauaguga

SEQ ID NO: 555984 - RNA, 19 nt, Homo sapiens
  misc_RNA (1)...(19): siRNA sense strand
ggagucauuccuuacauca

SEQ ID NO: 555985 - RNA, 19 nt, Homo sapiens
  misc_RNA (1)...(19): siRNA sense strand
gggagucauuccuuacauc

SEQ ID NO: 555986 - RNA, 19 nt, Homo sapiens
  misc_RNA (1)...(19): siRNA sense strand
aggagacgauaucaagauu

SEQ ID NO: 555987 - RNA, 19 nt, Homo sapiens
  misc_RNA (1)...(19): siRNA sense strand
caucacagaccaaccuuca

SEQ ID NO: 555988 - RNA, 19 nt, Homo sapiens
  misc_RNA (1)...(19): siRNA sense strand
caacauccccuuuaucaau

SEQ ID NO: 555989 - RNA, 19 nt, Homo sapiens
  misc_RNA (1)...(19): siRNA sense strand
guuaggagacgauaucaag

SEQ ID NO: 555990 - RNA, 19 nt, Homo sapiens
  misc_RNA (1)...(19): siRNA sense strand
ccagcugcauugacagaug

SEQ ID NO: 555991 - RNA, 19 nt, Homo sapiens
  misc_RNA (1)...(19): siRNA sense strand
gaucugguugauacucuaa

SEQ ID NO: 555992 - RNA, 19 nt, Homo sapiens
  misc_RNA (1)...(19): siRNA sense strand
ugggaacucucuucucaca

SEQ ID NO: 555993 - RNA, 19 nt, Homo sapiens
  misc_RNA (1)...(19): siRNA sense strand
uacaugaguacgugcuuua

SEQ ID NO: 555994 - RNA, 19 nt, Homo sapiens
  misc_RNA (1)...(19): siRNA sense strand
uaaggaagaaagggaauau

SEQ ID NO: 555995 - RNA, 19 nt, Homo sapiens
  misc_RNA (1)...(19): siRNA sense strand
guugccagcugcauugaca

SEQ ID NO: 555996 - RNA, 19 nt, Homo sapiens
  misc_RNA (1)...(19): siRNA sense strand
aagaagccucugaagauaa

SEQ ID NO: 555997 - RNA, 19 nt, Homo sapiens
  misc_RNA (1)...(19): siRNA sense strand
augaguacgugcuuuauag

SEQ ID NO: 555998 - RNA, 19 nt, Homo sapiens
  misc_RNA (1)...(19): siRNA sense strand
ccgaauugcugaucaucca

SEQ ID NO: 555999 - RNA, 19 nt, Homo sapiens
  misc_RNA (1)...(19): siRNA sense strand
aggaugaaccagauuuaaa

SEQ ID NO: 556000 - RNA, 19 nt, Homo sapiens
  misc_RNA (1)...(19): siRNA sense strand
gaucucuucaucacaguug

SEQ ID NO: 556001 - RNA, 19 nt, Homo sapiens
  misc_RNA (1)...(19): siRNA sense strand
uugcugaucauccaacuuu

SEQ ID NO: 556002 - RNA, 19 nt, Homo sapiens
  misc_RNA (1)...(19): siRNA sense strand
uggaacgcuuuaacgauga

SEQ ID NO: 556003 - RNA, 19 nt, Homo sapiens
  misc_RNA (1)...(19): siRNA sense strand
uggaagaagccucugaaga

SEQ ID NO: 556004 - RNA, 19 nt, Homo sapiens
  misc_RNA (1)...(19): siRNA sense strand
ugaaccgaauugcugauca

SEQ ID NO: 556005 - RNA, 19 nt, Homo sapiens
  misc_RNA (1)...(19): siRNA sense strand
uaucaagauuuccuuuggu

SEQ ID NO: 556006 - RNA, 19 nt, Homo sapiens
  misc_RNA (1)...(19): siRNA sense strand
agucauuccuuacaucaca

SEQ ID NO: 556007 - RNA, 19 nt, Homo sapiens
  misc_RNA (1)...(19): siRNA sense strand
gguugauacucuaaaggau

SEQ ID NO: 556008 - RNA, 19 nt, Homo sapiens
  misc_RNA (1)...(19): siRNA sense strand
agaagaggaucugguugau

SEQ ID NO: 556009 - RNA, 19 nt, Homo sapiens
  misc_RNA (1)...(19): siRNA sense strand
cacaguugaugaaccugaa

SEQ ID NO: 556010 - RNA, 19 nt, Homo sapiens
  misc_RNA (1)...(19): siRNA sense strand
gcccagaggaguucaugga

SEQ ID NO: 556011 - RNA, 19 nt, Homo sapiens
  misc_RNA (1)...(19): siRNA sense strand
gcaaaccgucagagcuguu

SEQ ID NO: 556012 - RNA, 19 nt, Homo sapiens
  misc_RNA (1)...(19): siRNA sense strand
gggaauuugacuccaguga

SEQ ID NO: 556013 - RNA, 19 nt, Homo sapiens
  misc_RNA (1)...(19): siRNA sense strand
ggauguugccagcugcauu

SEQ ID NO: 556014 - RNA, 19 nt, Homo sapiens
  misc_RNA (1)...(19): siRNA sense strand
cgcaggaaggcuuuacaua

SEQ ID NO: 556015 - RNA, 19 nt, Homo sapiens
  misc_RNA (1)...(19): siRNA sense strand
ggcccugcuuccuguugua

SEQ ID NO: 556016 - RNA, 19 nt, Homo sapiens
  misc_RNA (1)...(19): siRNA sense strand
aagauuuccuuugguugaa

SEQ ID NO: 556017 - RNA, 19 nt, Homo sapiens
  misc_RNA (1)...(19): siRNA sense strand
ggauuccaaaguugaaguu

SEQ ID NO: 556018 - RNA, 19 nt, Homo sapiens
  misc_RNA (1)...(19): siRNA sense strand
uugauacucuaaaggaugu

SEQ ID NO: 556019 - RNA, 19 nt, Homo sapiens
  misc_RNA (1)...(19): siRNA sense strand
cucagagaauuuauaagga

SEQ ID NO: 556020 - RNA, 19 nt, Homo sapiens
  misc_RNA (1)...(19): siRNA sense strand
uugaugaaccugaaaguca

SEQ ID NO: 556021 - RNA, 19 nt, Homo sapiens
  misc_RNA (1)...(19): siRNA sense strand
gguggaacgcuuuaacgau

SEQ ID NO: 556022 - RNA, 19 nt, Homo sapiens
  misc_RNA (1)...(19): siRNA sense strand
uuaaaggaucucuucauca

SEQ ID NO: 556023 - RNA, 19 nt, Homo sapiens
  misc_RNA (1)...(19): siRNA sense strand
guuugaggaugaaccagau

SEQ ID NO: 556024 - RNA, 19 nt, Homo sapiens
  misc_RNA (1)...(19): siRNA sense strand
gaagcacaccccacucuga

SEQ ID NO: 556025 - RNA, 19 nt, Homo sapiens
  misc_RNA (1)...(19): siRNA sense strand
acgugggagucauuccuua

SEQ ID NO: 556026 - RNA, 19 nt, Homo sapiens
  misc_RNA (1)...(19): siRNA sense strand
gaguacgugcuuuauagug

SEQ ID NO: 556027 - RNA, 19 nt, Homo sapiens
  misc_RNA (1)...(19): siRNA sense strand
cgauaucaagauuuccuuu

SEQ ID NO: 556028 - RNA, 19 nt, Homo sapiens
  misc_RNA (1)...(19): siRNA sense strand
ggauuauuacuaagacauc

SEQ ID NO: 556029 - RNA, 19 nt, Homo sapiens
  misc_RNA (1)...(19): siRNA sense strand
cucugaagauaaaccuuaa

SEQ ID NO: 556030 - RNA, 19 nt, Homo sapiens
  misc_RNA (1)...(19): siRNA sense strand
gaacgaggaugcaaauuau

SEQ ID NO: 556031 - RNA, 19 nt, Homo sapiens
  misc_RNA (1)...(19): siRNA sense strand
ggaacgaggaugcaaauua

SEQ ID NO: 556032 - RNA, 19 nt, Homo sapiens
  misc_RNA (1)...(19): siRNA sense strand
gaacagguuucucuugcua

SEQ ID NO: 556033 - RNA, 19 nt, Homo sapiens
  misc_RNA (1)...(19): siRNA sense strand
caaauuauaugcugucgaa

SEQ ID NO: 556034 - RNA, 19 nt, Homo sapiens
  misc_RNA (1)...(19): siRNA sense strand
gagaacaugugcccaucua

SEQ ID NO: 556035 - RNA, 19 nt, Homo sapiens
  misc_RNA (1)...(19): siRNA sense strand
gaacaucaagucagccuaa

SEQ ID NO: 556036 - RNA, 19 nt, Homo sapiens
  misc_RNA (1)...(19): siRNA sense strand
gaacaugugcccaucuaug

SEQ ID NO: 556037 - RNA, 19 nt, Homo sapiens
  misc_RNA (1)...(19): siRNA sense strand
caucaagucagccuaauga

SEQ ID NO: 556038 - RNA, 19 nt, Homo sapiens
  misc_RNA (1)...(19): siRNA sense strand
gcuaaugagucuuuaucug

SEQ ID NO: 556039 - RNA, 19 nt, Homo sapiens
  misc_RNA (1)...(19): siRNA sense strand
ccauagaucaucaaacuuc

SEQ ID NO: 556040 - RNA, 19 nt, Homo sapiens
  misc_RNA (1)...(19): siRNA sense strand
uauaugcugucgaaaucaa

SEQ ID NO: 556041 - RNA, 19 nt, Homo sapiens
  misc_RNA (1)...(19): siRNA sense strand
agguuucucuugcuaauga

SEQ ID NO: 556042 - RNA, 19 nt, Homo sapiens
  misc_RNA (1)...(19): siRNA sense strand
cuccauagaucaucaaacu

SEQ ID NO: 556043 - RNA, 19 nt, Homo sapiens
  misc_RNA (1)...(19): siRNA sense strand
gcccaucuaugaaccucuu

SEQ ID NO: 556044 - RNA, 19 nt, Homo sapiens
  misc_RNA (1)...(19): siRNA sense strand
cauagaucaucaaacuuca

SEQ ID NO: 556045 - RNA, 19 nt, Homo sapiens
  misc_RNA (1)...(19): siRNA sense strand
ucaagggugugagaacaug

SEQ ID NO: 556046 - RNA, 19 nt, Homo sapiens
  misc_RNA (1)...(19): siRNA sense strand
gaaccucuucucccaugga

SEQ ID NO: 556047 - RNA, 19 nt, Homo sapiens
  misc_RNA (1)...(19): siRNA sense strand
auuauaugcugucgaaauc

SEQ ID NO: 556048 - RNA, 19 nt, Homo sapiens
  misc_RNA (1)...(19): siRNA sense strand
aacaugugcccaucuauga

SEQ ID NO: 556049 - RNA, 19 nt, Homo sapiens
  misc_RNA (1)...(19): siRNA sense strand
acagguuucucuugcuaau

SEQ ID NO: 556050 - RNA, 19 nt, Homo sapiens
  misc_RNA (1)...(19): siRNA sense strand
ccagaggaacaucaaguca

SEQ ID NO: 556051 - RNA, 19 nt, Homo sapiens
  misc_RNA (1)...(19): siRNA sense strand
gcugucgaaaucaaucuuu

SEQ ID NO: 556052 - RNA, 19 nt, Homo sapiens
  misc_RNA (1)...(19): siRNA sense strand
acgaggaugcaaauuauau

SEQ ID NO: 556053 - RNA, 19 nt, Homo sapiens
  misc_RNA (1)...(19): siRNA sense strand
cgaggaugcaaauuauaug

SEQ ID NO: 556054 - RNA, 19 nt, Homo sapiens
  misc_RNA (1)...(19): siRNA sense strand
cauggaacgaggaugcaaa

SEQ ID NO: 556055 - RNA, 19 nt, Homo sapiens
  misc_RNA (1)...(19): siRNA sense strand
gaacgaggaugcaaauuau

SEQ ID NO: 556056 - RNA, 19 nt, Homo sapiens
  misc_RNA (1)...(19): siRNA sense strand
ggaacgaggaugcaaauua

SEQ ID NO: 556057 - RNA, 19 nt, Homo sapiens
  misc_RNA (1)...(19): siRNA sense strand
gaacagguuucucuugcua

SEQ ID NO: 556058 - RNA, 19 nt, Homo sapiens
  misc_RNA (1)...(19): siRNA sense strand
caaauuauaugcugucgaa

SEQ ID NO: 556059 - RNA, 19 nt, Homo sapiens
  misc_RNA (1)...(19): siRNA sense strand
gagaacaugugcccaucua

SEQ ID NO: 556060 - RNA, 19 nt, Homo sapiens
  misc_RNA (1)...(19): siRNA sense strand
gaacaucaagucagccuaa

SEQ ID NO: 556061 - RNA, 19 nt, Homo sapiens
  misc_RNA (1)...(19): siRNA sense strand
gaacaugugcccaucuaug

SEQ ID NO: 556062 - RNA, 19 nt, Homo sapiens
  misc_RNA (1)...(19): siRNA sense strand
caucaagucagccuaauga

SEQ ID NO: 556063 - RNA, 19 nt, Homo sapiens
  misc_RNA (1)...(19): siRNA sense strand
gcuaaugagucuuuaucug

SEQ ID NO: 556064 - RNA, 19 nt, Homo sapiens
  misc_RNA (1)...(19): siRNA sense strand
ccauagaucaucaaacuuc

SEQ ID NO: 556065 - RNA, 19 nt, Homo sapiens
  misc_RNA (1)...(19): siRNA sense strand
uauaugcugucgaaaucaa

SEQ ID NO: 556066 - RNA, 19 nt, Homo sapiens
  misc_RNA (1)...(19): siRNA sense strand
agguuucucuugcuaauga

SEQ ID NO: 556067 - RNA, 19 nt, Homo sapiens
  misc_RNA (1)...(19): siRNA sense strand
cuccauagaucaucaaacu

SEQ ID NO: 556068 - RNA, 19 nt, Homo sapiens
  misc_RNA (1)...(19): siRNA sense strand
gcccaucuaugaaccucuu

SEQ ID NO: 556069 - RNA, 19 nt, Homo sapiens
  misc_RNA (1)...(19): siRNA sense strand
cauagaucaucaaacuuca

SEQ ID NO: 556070 - RNA, 19 nt, Homo sapiens
  misc_RNA (1)...(19): siRNA sense strand
ucaagggugugagaacaug

SEQ ID NO: 556071 - RNA, 19 nt, Homo sapiens
  misc_RNA (1)...(19): siRNA sense strand
gaaccucuucucccaugga

SEQ ID NO: 556072 - RNA, 19 nt, Homo sapiens
  misc_RNA (1)...(19): siRNA sense strand
auuauaugcugucgaaauc

SEQ ID NO: 556073 - RNA, 19 nt, Homo sapiens
  misc_RNA (1)...(19): siRNA sense strand
aacaugugcccaucuauga

SEQ ID NO: 556074 - RNA, 19 nt, Homo sapiens
  misc_RNA (1)...(19): siRNA sense strand
acagguuucucuugcuaau

SEQ ID NO: 556075 - RNA, 19 nt, Homo sapiens
  misc_RNA (1)...(19): siRNA sense strand
ccagaggaacaucaaguca

SEQ ID NO: 556076 - RNA, 19 nt, Homo sapiens
  misc_RNA (1)...(19): siRNA sense strand
gcugucgaaaucaaucuuu

SEQ ID NO: 556077 - RNA, 19 nt, Homo sapiens
  misc_RNA (1)...(19): siRNA sense strand
acgaggaugcaaauuauau

SEQ ID NO: 556078 - RNA, 19 nt, Homo sapiens
  misc_RNA (1)...(19): siRNA sense strand
cgaggaugcaaauuauaug

SEQ ID NO: 556079 - RNA, 19 nt, Homo sapiens
  misc_RNA (1)...(19): siRNA sense strand
cauggaacgaggaugcaaa

SEQ ID NO: 556080 - RNA, 19 nt, Homo sapiens
  misc_RNA (1)...(19): siRNA sense strand
gaacgaggaugcaaauuau

SEQ ID NO: 556081 - RNA, 19 nt, Homo sapiens
  misc_RNA (1)...(19): siRNA sense strand
ggaacgaggaugcaaauua

SEQ ID NO: 556082 - RNA, 19 nt, Homo sapiens
  misc_RNA (1)...(19): siRNA sense strand
gaacagguuucucuugcua

SEQ ID NO: 556083 - RNA, 19 nt, Homo sapiens
  misc_RNA (1)...(19): siRNA sense strand
caaauuauaugcugucgaa

SEQ ID NO: 556084 - RNA, 19 nt, Homo sapiens
  misc_RNA (1)...(19): siRNA sense strand
gagaacaugugcccaucua

SEQ ID NO: 556085 - RNA, 19 nt, Homo sapiens
  misc_RNA (1)...(19): siRNA sense strand
gaacaucaagucagccuaa

SEQ ID NO: 556086 - RNA, 19 nt, Homo sapiens
  misc_RNA (1)...(19): siRNA sense strand
gaacaugugcccaucuaug

SEQ ID NO: 556087 - RNA, 19 nt, Homo sapiens
  misc_RNA (1)...(19): siRNA sense strand
caucaagucagccuaauga

SEQ ID NO: 556088 - RNA, 19 nt, Homo sapiens
  misc_RNA (1)...(19): siRNA sense strand
gcuaaugagucuuuaucug

SEQ ID NO: 556089 - RNA, 19 nt, Homo sapiens
  misc_RNA (1)...(19): siRNA sense strand
ccauagaucaucaaacuuc

SEQ ID NO: 556090 - RNA, 19 nt, Homo sapiens
  misc_RNA (1)...(19): siRNA sense strand
uauaugcugucgaaaucaa

SEQ ID NO: 556091 - RNA, 19 nt, Homo sapiens
  misc_RNA (1)...(19): siRNA sense strand
agguuucucuugcuaauga

SEQ ID NO: 556092 - RNA, 19 nt, Homo sapiens
  misc_RNA (1)...(19): siRNA sense strand
cuccauagaucaucaaacu

SEQ ID NO: 556093 - RNA, 19 nt, Homo sapiens
  misc_RNA (1)...(19): siRNA sense strand
gcccaucuaugaaccucuu

SEQ ID NO: 556094 - RNA, 19 nt, Homo sapiens
  misc_RNA (1)...(19): siRNA sense strand
cauagaucaucaaacuuca

SEQ ID NO: 556095 - RNA, 19 nt, Homo sapiens
  misc_RNA (1)...(19): siRNA sense strand
ucaagggugugagaacaug

SEQ ID NO: 556096 - RNA, 19 nt, Homo sapiens
  misc_RNA (1)...(19): siRNA sense strand
gaaccucuucucccaugga

SEQ ID NO: 556097 - RNA, 19 nt, Homo sapiens
  misc_RNA (1)...(19): siRNA sense strand
auuauaugcugucgaaauc

SEQ ID NO: 556098 - RNA, 19 nt, Homo sapiens
  misc_RNA (1)...(19): siRNA sense strand
aacaugugcccaucuauga

SEQ ID NO: 556099 - RNA, 19 nt, Homo sapiens
  misc_RNA (1)...(19): siRNA sense strand
acagguuucucuugcuaau

SEQ ID NO: 556100 - RNA, 19 nt, Homo sapiens
  misc_RNA (1)...(19): siRNA sense strand
ccagaggaacaucaaguca

SEQ ID NO: 556101 - RNA, 19 nt, Homo sapiens
  misc_RNA (1)...(19): siRNA sense strand
gcugucgaaaucaaucuuu

SEQ ID NO: 556102 - RNA, 19 nt, Homo sapiens
  misc_RNA (1)...(19): siRNA sense strand
acgaggaugcaaauuauau

SEQ ID NO: 556103 - RNA, 19 nt, Homo sapiens
  misc_RNA (1)...(19): siRNA sense strand
cgaggaugcaaauuauaug

SEQ ID NO: 556104 - RNA, 19 nt, Homo sapiens
  misc_RNA (1)...(19): siRNA sense strand
cauggaacgaggaugcaaa

SEQ ID NO: 556105 - RNA, 19 nt, Homo sapiens
  misc_RNA (1)...(19): siRNA sense strand
gaacgaggaugcaaauuau

SEQ ID NO: 556106 - RNA, 19 nt, Homo sapiens
  misc_RNA (1)...(19): siRNA sense strand
ggaacgaggaugcaaauua

SEQ ID NO: 556107 - RNA, 19 nt, Homo sapiens
  misc_RNA (1)...(19): siRNA sense strand
gaacagguuucucuugcua

SEQ ID NO: 556108 - RNA, 19 nt, Homo sapiens
  misc_RNA (1)...(19): siRNA sense strand
caaauuauaugcugucgaa

SEQ ID NO: 556109 - RNA, 19 nt, Homo sapiens
  misc_RNA (1)...(19): siRNA sense strand
gagaacaugugcccaucua

SEQ ID NO: 556110 - RNA, 19 nt, Homo sapiens
  misc_RNA (1)...(19): siRNA sense strand
gaacaucaagucagccuaa

SEQ ID NO: 556111 - RNA, 19 nt, Homo sapiens
  misc_RNA (1)...(19): siRNA sense strand
gaacaugugcccaucuaug

SEQ ID NO: 556112 - RNA, 19 nt, Homo sapiens
  misc_RNA (1)...(19): siRNA sense strand
caucaagucagccuaauga

SEQ ID NO: 556113 - RNA, 19 nt, Homo sapiens
  misc_RNA (1)...(19): siRNA sense strand
gcuaaugagucuuuaucug

SEQ ID NO: 556114 - RNA, 19 nt, Homo sapiens
  misc_RNA (1)...(19): siRNA sense strand
ccauagaucaucaaacuuc

SEQ ID NO: 556115 - RNA, 19 nt, Homo sapiens
  misc_RNA (1)...(19): siRNA sense strand
uauaugcugucgaaaucaa

SEQ ID NO: 556116 - RNA, 19 nt, Homo sapiens
  misc_RNA (1)...(19): siRNA sense strand
agguuucucuugcuaauga

SEQ ID NO: 556117 - RNA, 19 nt, Homo sapiens
  misc_RNA (1)...(19): siRNA sense strand
cuccauagaucaucaaacu

SEQ ID NO: 556118 - RNA, 19 nt, Homo sapiens
  misc_RNA (1)...(19): siRNA sense strand
gcccaucuaugaaccucuu

SEQ ID NO: 556119 - RNA, 19 nt, Homo sapiens
  misc_RNA (1)...(19): siRNA sense strand
cauagaucaucaaacuuca

SEQ ID NO: 556120 - RNA, 19 nt, Homo sapiens
  misc_RNA (1)...(19): siRNA sense strand
ucaagggugugagaacaug

SEQ ID NO: 556121 - RNA, 19 nt, Homo sapiens
  misc_RNA (1)...(19): siRNA sense strand
gaaccucuucucccaugga

SEQ ID NO: 556122 - RNA, 19 nt, Homo sapiens
  misc_RNA (1)...(19): siRNA sense strand
auuauaugcugucgaaauc

SEQ ID NO: 556123 - RNA, 19 nt, Homo sapiens
  misc_RNA (1)...(19): siRNA sense strand
aacaugugcccaucuauga

SEQ ID NO: 556124 - RNA, 19 nt, Homo sapiens
  misc_RNA (1)...(19): siRNA sense strand
acagguuucucuugcuaau

SEQ ID NO: 556125 - RNA, 19 nt, Homo sapiens
  misc_RNA (1)...(19): siRNA sense strand
ccagaggaacaucaaguca

SEQ ID NO: 556126 - RNA, 19 nt, Homo sapiens
  misc_RNA (1)...(19): siRNA sense strand
gcugucgaaaucaaucuuu

SEQ ID NO: 556127 - RNA, 19 nt, Homo sapiens
  misc_RNA (1)...(19): siRNA sense strand
acgaggaugcaaauuauau

SEQ ID NO: 556128 - RNA, 19 nt, Homo sapiens
  misc_RNA (1)...(19): siRNA sense strand
cgaggaugcaaauuauaug

SEQ ID NO: 556129 - RNA, 19 nt, Homo sapiens
  misc_RNA (1)...(19): siRNA sense strand
cauggaacgaggaugcaaa

SEQ ID NO: 556130 - RNA, 19 nt, Homo sapiens
  misc_RNA (1)...(19): siRNA sense strand
gaacgaggaugcaaauuau

SEQ ID NO: 556131 - RNA, 19 nt, Homo sapiens
  misc_RNA (1)...(19): siRNA sense strand
ggaacgaggaugcaaauua

SEQ ID NO: 556132 - RNA, 19 nt, Homo sapiens
  misc_RNA (1)...(19): siRNA sense strand
gaacagguuucucuugcua

SEQ ID NO: 556133 - RNA, 19 nt, Homo sapiens
  misc_RNA (1)...(19): siRNA sense strand
caaauuauaugcugucgaa

SEQ ID NO: 556134 - RNA, 19 nt, Homo sapiens
  misc_RNA (1)...(19): siRNA sense strand
gagaacaugugcccaucua

SEQ ID NO: 556135 - RNA, 19 nt, Homo sapiens
  misc_RNA (1)...(19): siRNA sense strand
gaacaucaagucagccuaa

SEQ ID NO: 556136 - RNA, 19 nt, Homo sapiens
  misc_RNA (1)...(19): siRNA sense strand
gaacaugugcccaucuaug

SEQ ID NO: 556137 - RNA, 19 nt, Homo sapiens
  misc_RNA (1)...(19): siRNA sense strand
caucaagucagccuaauga

SEQ ID NO: 556138 - RNA, 19 nt, Homo sapiens
  misc_RNA (1)...(19): siRNA sense strand
gcuaaugagucuuuaucug

SEQ ID NO: 556139 - RNA, 19 nt, Homo sapiens
  misc_RNA (1)...(19): siRNA sense strand
ccauagaucaucaaacuuc

SEQ ID NO: 556140 - RNA, 19 nt, Homo sapiens
  misc_RNA (1)...(19): siRNA sense strand
uauaugcugucgaaaucaa

SEQ ID NO: 556141 - RNA, 19 nt, Homo sapiens
  misc_RNA (1)...(19): siRNA sense strand
agguuucucuugcuaauga

SEQ ID NO: 556142 - RNA, 19 nt, Homo sapiens
  misc_RNA (1)...(19): siRNA sense strand
cuccauagaucaucaaacu

SEQ ID NO: 556143 - RNA, 19 nt, Homo sapiens
  misc_RNA (1)...(19): siRNA sense strand
gcccaucuaugaaccucuu

SEQ ID NO: 556144 - RNA, 19 nt, Homo sapiens
  misc_RNA (1)...(19): siRNA sense strand
cauagaucaucaaacuuca

SEQ ID NO: 556145 - RNA, 19 nt, Homo sapiens
  misc_RNA (1)...(19): siRNA sense strand
ucaagggugugagaacaug

SEQ ID NO: 556146 - RNA, 19 nt, Homo sapiens
  misc_RNA (1)...(19): siRNA sense strand
gaaccucuucucccaugga

SEQ ID NO: 556147 - RNA, 19 nt, Homo sapiens
  misc_RNA (1)...(19): siRNA sense strand
auuauaugcugucgaaauc

SEQ ID NO: 556148 - RNA, 19 nt, Homo sapiens
  misc_RNA (1)...(19): siRNA sense strand
aacaugugcccaucuauga

SEQ ID NO: 556149 - RNA, 19 nt, Homo sapiens
  misc_RNA (1)...(19): siRNA sense strand
acagguuucucuugcuaau

SEQ ID NO: 556150 - RNA, 19 nt, Homo sapiens
  misc_RNA (1)...(19): siRNA sense strand
ccagaggaacaucaaguca

SEQ ID NO: 556151 - RNA, 19 nt, Homo sapiens
  misc_RNA (1)...(19): siRNA sense strand
gcugucgaaaucaaucuuu

SEQ ID NO: 556152 - RNA, 19 nt, Homo sapiens
  misc_RNA (1)...(19): siRNA sense strand
acgaggaugcaaauuauau

SEQ ID NO: 556153 - RNA, 19 nt, Homo sapiens
  misc_RNA (1)...(19): siRNA sense strand
cgaggaugcaaauuauaug

SEQ ID NO: 556154 - RNA, 19 nt, Homo sapiens
  misc_RNA (1)...(19): siRNA sense strand
cauggaacgaggaugcaaa

SEQ ID NO: 556155 - RNA, 19 nt, Homo sapiens
  misc_RNA (1)...(19): siRNA sense strand
gaacgaggaugcaaauuau

SEQ ID NO: 556156 - RNA, 19 nt, Homo sapiens
  misc_RNA (1)...(19): siRNA sense strand
ggaacgaggaugcaaauua

SEQ ID NO: 556157 - RNA, 19 nt, Homo sapiens
  misc_RNA (1)...(19): siRNA sense strand
gaacagguuucucuugcua

SEQ ID NO: 556158 - RNA, 19 nt, Homo sapiens
  misc_RNA (1)...(19): siRNA sense strand
caaauuauaugcugucgaa

SEQ ID NO: 556159 - RNA, 19 nt, Homo sapiens
  misc_RNA (1)...(19): siRNA sense strand
gagaacaugugcccaucua

SEQ ID NO: 556160 - RNA, 19 nt, Homo sapiens
  misc_RNA (1)...(19): siRNA sense strand
gaacaucaagucagccuaa

SEQ ID NO: 556161 - RNA, 19 nt, Homo sapiens
  misc_RNA (1)...(19): siRNA sense strand
gaacaugugcccaucuaug

SEQ ID NO: 556162 - RNA, 19 nt, Homo sapiens
  misc_RNA (1)...(19): siRNA sense strand
caucaagucagccuaauga

SEQ ID NO: 556163 - RNA, 19 nt, Homo sapiens
  misc_RNA (1)...(19): siRNA sense strand
gcuaaugagucuuuaucug

SEQ ID NO: 556164 - RNA, 19 nt, Homo sapiens
  misc_RNA (1)...(19): siRNA sense strand
ccauagaucaucaaacuuc

SEQ ID NO: 556165 - RNA, 19 nt, Homo sapiens
  misc_RNA (1)...(19): siRNA sense strand
uauaugcugucgaaaucaa

SEQ ID NO: 556166 - RNA, 19 nt, Homo sapiens
  misc_RNA (1)...(19): siRNA sense strand
agguuucucuugcuaauga

SEQ ID NO: 556167 - RNA, 19 nt, Homo sapiens
  misc_RNA (1)...(19): siRNA sense strand
cuccauagaucaucaaacu

SEQ ID NO: 556168 - RNA, 19 nt, Homo sapiens
  misc_RNA (1)...(19): siRNA sense strand
gcccaucuaugaaccucuu

SEQ ID NO: 556169 - RNA, 19 nt, Homo sapiens
  misc_RNA (1)...(19): siRNA sense strand
cauagaucaucaaacuuca

SEQ ID NO: 556170 - RNA, 19 nt, Homo sapiens
  misc_RNA (1)...(19): siRNA sense strand
ucaagggugugagaacaug

SEQ ID NO: 556171 - RNA, 19 nt, Homo sapiens
  misc_RNA (1)...(19): siRNA sense strand
gaaccucuucucccaugga

SEQ ID NO: 556172 - RNA, 19 nt, Homo sapiens
  misc_RNA (1)...(19): siRNA sense strand
auuauaugcugucgaaauc

SEQ ID NO: 556173 - RNA, 19 nt, Homo sapiens
  misc_RNA (1)...(19): siRNA sense strand
aacaugugcccaucuauga

SEQ ID NO: 556174 - RNA, 19 nt, Homo sapiens
  misc_RNA (1)...(19): siRNA sense strand
acagguuucucuugcuaau

SEQ ID NO: 556175 - RNA, 19 nt, Homo sapiens
  misc_RNA (1)...(19): siRNA sense strand
ccagaggaacaucaaguca

SEQ ID NO: 556176 - RNA, 19 nt, Homo sapiens
  misc_RNA (1)...(19): siRNA sense strand
gcugucgaaaucaaucuuu

SEQ ID NO: 556177 - RNA, 19 nt, Homo sapiens
  misc_RNA (1)...(19): siRNA sense strand
acgaggaugcaaauuauau

SEQ ID NO: 556178 - RNA, 19 nt, Homo sapiens
  misc_RNA (1)...(19): siRNA sense strand
cgaggaugcaaauuauaug

SEQ ID NO: 556179 - RNA, 19 nt, Homo sapiens
  misc_RNA (1)...(19): siRNA sense strand
cauggaacgaggaugcaaa

SEQ ID NO: 556180 - RNA, 19 nt, Homo sapiens
  misc_RNA (1)...(19): siRNA sense strand
gaacgaggaugcaaauuau

SEQ ID NO: 556181 - RNA, 19 nt, Homo sapiens
  misc_RNA (1)...(19): siRNA sense strand
ggaacgaggaugcaaauua

SEQ ID NO: 556182 - RNA, 19 nt, Homo sapiens
  misc_RNA (1)...(19): siRNA sense strand
gaacagguuucucuugcua

SEQ ID NO: 556183 - RNA, 19 nt, Homo sapiens
  misc_RNA (1)...(19): siRNA sense strand
caaauuauaugcugucgaa

SEQ ID NO: 556184 - RNA, 19 nt, Homo sapiens
  misc_RNA (1)...(19): siRNA sense strand
gagaacaugugcccaucua

SEQ ID NO: 556185 - RNA, 19 nt, Homo sapiens
  misc_RNA (1)...(19): siRNA sense strand
gaacaucaagucagccuaa

SEQ ID NO: 556186 - RNA, 19 nt, Homo sapiens
  misc_RNA (1)...(19): siRNA sense strand
gaacaugugcccaucuaug

SEQ ID NO: 556187 - RNA, 19 nt, Homo sapiens
  misc_RNA (1)...(19): siRNA sense strand
caucaagucagccuaauga

SEQ ID NO: 556188 - RNA, 19 nt, Homo sapiens
  misc_RNA (1)...(19): siRNA sense strand
gcuaaugagucuuuaucug

SEQ ID NO: 556189 - RNA, 19 nt, Homo sapiens
  misc_RNA (1)...(19): siRNA sense strand
ccauagaucaucaaacuuc

SEQ ID NO: 556190 - RNA, 19 nt, Homo sapiens
  misc_RNA (1)...(19): siRNA sense strand
uauaugcugucgaaaucaa

SEQ ID NO: 556191 - RNA, 19 nt, Homo sapiens
  misc_RNA (1)...(19): siRNA sense strand
agguuucucuugcuaauga

SEQ ID NO: 556192 - RNA, 19 nt, Homo sapiens
  misc_RNA (1)...(19): siRNA sense strand
cuccauagaucaucaaacu

SEQ ID NO: 556193 - RNA, 19 nt, Homo sapiens
  misc_RNA (1)...(19): siRNA sense strand
gcccaucuaugaaccucuu

SEQ ID NO: 556194 - RNA, 19 nt, Homo sapiens
  misc_RNA (1)...(19): siRNA sense strand
cauagaucaucaaacuuca

SEQ ID NO: 556195 - RNA, 19 nt, Homo sapiens
  misc_RNA (1)...(19): siRNA sense strand
ucaagggugugagaacaug

SEQ ID NO: 556196 - RNA, 19 nt, Homo sapiens
  misc_RNA (1)...(19): siRNA sense strand
gaaccucuucucccaugga

SEQ ID NO: 556197 - RNA, 19 nt, Homo sapiens
  misc_RNA (1)...(19): siRNA sense strand
auuauaugcugucgaaauc

SEQ ID NO: 556198 - RNA, 19 nt, Homo sapiens
  misc_RNA (1)...(19): siRNA sense strand
aacaugugcccaucuauga

SEQ ID NO: 556199 - RNA, 19 nt, Homo sapiens
  misc_RNA (1)...(19): siRNA sense strand
acagguuucucuugcuaau

SEQ ID NO: 556200 - RNA, 19 nt, Homo sapiens
  misc_RNA (1)...(19): siRNA sense strand
ccagaggaacaucaaguca

SEQ ID NO: 556201 - RNA, 19 nt, Homo sapiens
  misc_RNA (1)...(19): siRNA sense strand
gcugucgaaaucaaucuuu

SEQ ID NO: 556202 - RNA, 19 nt, Homo sapiens
  misc_RNA (1)...(19): siRNA sense strand
acgaggaugcaaauuauau

SEQ ID NO: 556203 - RNA, 19 nt, Homo sapiens
  misc_RNA (1)...(19): siRNA sense strand
cgaggaugcaaauuauaug

SEQ ID NO: 556204 - RNA, 19 nt, Homo sapiens
  misc_RNA (1)...(19): siRNA sense strand
cauggaacgaggaugcaaa

SEQ ID NO: 556205 - RNA, 19 nt, Homo sapiens
  misc_RNA (1)...(19): siRNA sense strand
gaacgaggaugcaaauuau

SEQ ID NO: 556206 - RNA, 19 nt, Homo sapiens
  misc_RNA (1)...(19): siRNA sense strand
ggaacgaggaugcaaauua

SEQ ID NO: 556207 - RNA, 19 nt, Homo sapiens
  misc_RNA (1)...(19): siRNA sense strand
gaacagguuucucuugcua

SEQ ID NO: 556208 - RNA, 19 nt, Homo sapiens
  misc_RNA (1)...(19): siRNA sense strand
caaauuauaugcugucgaa

SEQ ID NO: 556209 - RNA, 19 nt, Homo sapiens
  misc_RNA (1)...(19): siRNA sense strand
gagaacaugugcccaucua

SEQ ID NO: 556210 - RNA, 19 nt, Homo sapiens
  misc_RNA (1)...(19): siRNA sense strand
gaacaucaagucagccuaa

SEQ ID NO: 556211 - RNA, 19 nt, Homo sapiens
  misc_RNA (1)...(19): siRNA sense strand
gaacaugugcccaucuaug

SEQ ID NO: 556212 - RNA, 19 nt, Homo sapiens
  misc_RNA (1)...(19): siRNA sense strand
caucaagucagccuaauga

SEQ ID NO: 556213 - RNA, 19 nt, Homo sapiens
  misc_RNA (1)...(19): siRNA sense strand
gcuaaugagucuuuaucug

SEQ ID NO: 556214 - RNA, 19 nt, Homo sapiens
  misc_RNA (1)...(19): siRNA sense strand
ccauagaucaucaaacuuc

SEQ ID NO: 556215 - RNA, 19 nt, Homo sapiens
  misc_RNA (1)...(19): siRNA sense strand
uauaugcugucgaaaucaa

SEQ ID NO: 556216 - RNA, 19 nt, Homo sapiens
  misc_RNA (1)...(19): siRNA sense strand
agguuucucuugcuaauga

SEQ ID NO: 556217 - RNA, 19 nt, Homo sapiens
  misc_RNA (1)...(19): siRNA sense strand
cuccauagaucaucaaacu

SEQ ID NO: 556218 - RNA, 19 nt, Homo sapiens
  misc_RNA (1)...(19): siRNA sense strand
gcccaucuaugaaccucuu

SEQ ID NO: 556219 - RNA, 19 nt, Homo sapiens
  misc_RNA (1)...(19): siRNA sense strand
cauagaucaucaaacuuca

SEQ ID NO: 556220 - RNA, 19 nt, Homo sapiens
  misc_RNA (1)...(19): siRNA sense strand
ucaagggugugagaacaug

SEQ ID NO: 556221 - RNA, 19 nt, Homo sapiens
  misc_RNA (1)...(19): siRNA sense strand
gaaccucuucucccaugga

SEQ ID NO: 556222 - RNA, 19 nt, Homo sapiens
  misc_RNA (1)...(19): siRNA sense strand
auuauaugcugucgaaauc

SEQ ID NO: 556223 - RNA, 19 nt, Homo sapiens
  misc_RNA (1)...(19): siRNA sense strand
aacaugugcccaucuauga

SEQ ID NO: 556224 - RNA, 19 nt, Homo sapiens
  misc_RNA (1)...(19): siRNA sense strand
acagguuucucuugcuaau

SEQ ID NO: 556225 - RNA, 19 nt, Homo sapiens
  misc_RNA (1)...(19): siRNA sense strand
ccagaggaacaucaaguca

SEQ ID NO: 556226 - RNA, 19 nt, Homo sapiens
  misc_RNA (1)...(19): siRNA sense strand
gcugucgaaaucaaucuuu

SEQ ID NO: 556227 - RNA, 19 nt, Homo sapiens
  misc_RNA (1)...(19): siRNA sense strand
acgaggaugcaaauuauau

SEQ ID NO: 556228 - RNA, 19 nt, Homo sapiens
  misc_RNA (1)...(19): siRNA sense strand
cgaggaugcaaauuauaug

SEQ ID NO: 556229 - RNA, 19 nt, Homo sapiens
  misc_RNA (1)...(19): siRNA sense strand
cauggaacgaggaugcaaa

SEQ ID NO: 556230 - RNA, 19 nt, Homo sapiens
  misc_RNA (1)...(19): siRNA sense strand
gaacgaggaugcaaauuau

SEQ ID NO: 556231 - RNA, 19 nt, Homo sapiens
  misc_RNA (1)...(19): siRNA sense strand
ggaacgaggaugcaaauua

SEQ ID NO: 556232 - RNA, 19 nt, Homo sapiens
  misc_RNA (1)...(19): siRNA sense strand
gaacagguuucucuugcua

SEQ ID NO: 556233 - RNA, 19 nt, Homo sapiens
  misc_RNA (1)...(19): siRNA sense strand
caaauuauaugcugucgaa

SEQ ID NO: 556234 - RNA, 19 nt, Homo sapiens
  misc_RNA (1)...(19): siRNA sense strand
gagaacaugugcccaucua

SEQ ID NO: 556235 - RNA, 19 nt, Homo sapiens
  misc_RNA (1)...(19): siRNA sense strand
gaacaucaagucagccuaa

SEQ ID NO: 556236 - RNA, 19 nt, Homo sapiens
  misc_RNA (1)...(19): siRNA sense strand
gaacaugugcccaucuaug

SEQ ID NO: 556237 - RNA, 19 nt, Homo sapiens
  misc_RNA (1)...(19): siRNA sense strand
caucaagucagccuaauga

SEQ ID NO: 556238 - RNA, 19 nt, Homo sapiens
  misc_RNA (1)...(19): siRNA sense strand
gcuaaugagucuuuaucug

SEQ ID NO: 556239 - RNA, 19 nt, Homo sapiens
  misc_RNA (1)...(19): siRNA sense strand
ccauagaucaucaaacuuc

SEQ ID NO: 556240 - RNA, 19 nt, Homo sapiens
  misc_RNA (1)...(19): siRNA sense strand
uauaugcugucgaaaucaa

SEQ ID NO: 556241 - RNA, 19 nt, Homo sapiens
  misc_RNA (1)...(19): siRNA sense strand
agguuucucuugcuaauga

SEQ ID NO: 556242 - RNA, 19 nt, Homo sapiens
  misc_RNA (1)...(19): siRNA sense strand
cuccauagaucaucaaacu

SEQ ID NO: 556243 - RNA, 19 nt, Homo sapiens
  misc_RNA (1)...(19): siRNA sense strand
gcccaucuaugaaccucuu

SEQ ID NO: 556244 - RNA, 19 nt, Homo sapiens
  misc_RNA (1)...(19): siRNA sense strand
cauagaucaucaaacuuca

SEQ ID NO: 556245 - RNA, 19 nt, Homo sapiens
  misc_RNA (1)...(19): siRNA sense strand
ucaagggugugagaacaug

SEQ ID NO: 556246 - RNA, 19 nt, Homo sapiens
  misc_RNA (1)...(19): siRNA sense strand
gaaccucuucucccaugga

SEQ ID NO: 556247 - RNA, 19 nt, Homo sapiens
  misc_RNA (1)...(19): siRNA sense strand
auuauaugcugucgaaauc

SEQ ID NO: 556248 - RNA, 19 nt, Homo sapiens
  misc_RNA (1)...(19): siRNA sense strand
aacaugugcccaucuauga

SEQ ID NO: 556249 - RNA, 19 nt, Homo sapiens
  misc_RNA (1)...(19): siRNA sense strand
acagguuucucuugcuaau

SEQ ID NO: 556250 - RNA, 19 nt, Homo sapiens
  misc_RNA (1)...(19): siRNA sense strand
ccagaggaacaucaaguca

SEQ ID NO: 556251 - RNA, 19 nt, Homo sapiens
  misc_RNA (1)...(19): siRNA sense strand
gcugucgaaaucaaucuuu

SEQ ID NO: 556252 - RNA, 19 nt, Homo sapiens
  misc_RNA (1)...(19): siRNA sense strand
acgaggaugcaaauuauau

SEQ ID NO: 556253 - RNA, 19 nt, Homo sapiens
  misc_RNA (1)...(19): siRNA sense strand
cgaggaugcaaauuauaug

SEQ ID NO: 556254 - RNA, 19 nt, Homo sapiens
  misc_RNA (1)...(19): siRNA sense strand
cauggaacgaggaugcaaa

SEQ ID NO: 556255 - RNA, 19 nt, Homo sapiens
  misc_RNA (1)...(19): siRNA sense strand
gaacgaggaugcaaauuau

SEQ ID NO: 556256 - RNA, 19 nt, Homo sapiens
  misc_RNA (1)...(19): siRNA sense strand
ggaacgaggaugcaaauua

SEQ ID NO: 556257 - RNA, 19 nt, Homo sapiens
  misc_RNA (1)...(19): siRNA sense strand
gaacagguuucucuugcua

SEQ ID NO: 556258 - RNA, 19 nt, Homo sapiens
  misc_RNA (1)...(19): siRNA sense strand
caaauuauaugcugucgaa

SEQ ID NO: 556259 - RNA, 19 nt, Homo sapiens
  misc_RNA (1)...(19): siRNA sense strand
gagaacaugugcccaucua

SEQ ID NO: 556260 - RNA, 19 nt, Homo sapiens
  misc_RNA (1)...(19): siRNA sense strand
gaacaucaagucagccuaa

SEQ ID NO: 556261 - RNA, 19 nt, Homo sapiens
  misc_RNA (1)...(19): siRNA sense strand
gaacaugugcccaucuaug

SEQ ID NO: 556262 - RNA, 19 nt, Homo sapiens
  misc_RNA (1)...(19): siRNA sense strand
caucaagucagccuaauga

SEQ ID NO: 556263 - RNA, 19 nt, Homo sapiens
  misc_RNA (1)...(19): siRNA sense strand
gcuaaugagucuuuaucug

SEQ ID NO: 556264 - RNA, 19 nt, Homo sapiens
  misc_RNA (1)...(19): siRNA sense strand
ccauagaucaucaaacuuc

SEQ ID NO: 556265 - RNA, 19 nt, Homo sapiens
  misc_RNA (1)...(19): siRNA sense strand
uauaugcugucgaaaucaa

SEQ ID NO: 556266 - RNA, 19 nt, Homo sapiens
  misc_RNA (1)...(19): siRNA sense strand
agguuucucuugcuaauga

SEQ ID NO: 556267 - RNA, 19 nt, Homo sapiens
  misc_RNA (1)...(19): siRNA sense strand
cuccauagaucaucaaacu

SEQ ID NO: 556268 - RNA, 19 nt, Homo sapiens
  misc_RNA (1)...(19): siRNA sense strand
gcccaucuaugaaccucuu

SEQ ID NO: 556269 - RNA, 19 nt, Homo sapiens
  misc_RNA (1)...(19): siRNA sense strand
cauagaucaucaaacuuca

SEQ ID NO: 556270 - RNA, 19 nt, Homo sapiens
  misc_RNA (1)...(19): siRNA sense strand
ucaagggugugagaacaug

SEQ ID NO: 556271 - RNA, 19 nt, Homo sapiens
  misc_RNA (1)...(19): siRNA sense strand
gaaccucuucucccaugga

SEQ ID NO: 556272 - RNA, 19 nt, Homo sapiens
  misc_RNA (1)...(19): siRNA sense strand
auuauaugcugucgaaauc

SEQ ID NO: 556273 - RNA, 19 nt, Homo sapiens
  misc_RNA (1)...(19): siRNA sense strand
aacaugugcccaucuauga

SEQ ID NO: 556274 - RNA, 19 nt, Homo sapiens
  misc_RNA (1)...(19): siRNA sense strand
acagguuucucuugcuaau

SEQ ID NO: 556275 - RNA, 19 nt, Homo sapiens
  misc_RNA (1)...(19): siRNA sense strand
ccagaggaacaucaaguca

SEQ ID NO: 556276 - RNA, 19 nt, Homo sapiens
  misc_RNA (1)...(19): siRNA sense strand
gcugucgaaaucaaucuuu

SEQ ID NO: 556277 - RNA, 19 nt, Homo sapiens
  misc_RNA (1)...(19): siRNA sense strand
acgaggaugcaaauuauau

SEQ ID NO: 556278 - RNA, 19 nt, Homo sapiens
  misc_RNA (1)...(19): siRNA sense strand
cgaggaugcaaauuauaug

SEQ ID NO: 556279 - RNA, 19 nt, Homo sapiens
  misc_RNA (1)...(19): siRNA sense strand
cauggaacgaggaugcaaa

SEQ ID NO: 556280 - RNA, 19 nt, Homo sapiens
  misc_RNA (1)...(19): siRNA sense strand
gaacgaggaugcaaauuau

SEQ ID NO: 556281 - RNA, 19 nt, Homo sapiens
  misc_RNA (1)...(19): siRNA sense strand
ggaacgaggaugcaaauua

SEQ ID NO: 556282 - RNA, 19 nt, Homo sapiens
  misc_RNA (1)...(19): siRNA sense strand
gaacagguuucucuugcua

SEQ ID NO: 556283 - RNA, 19 nt, Homo sapiens
  misc_RNA (1)...(19): siRNA sense strand
caaauuauaugcugucgaa

SEQ ID NO: 556284 - RNA, 19 nt, Homo sapiens
  misc_RNA (1)...(19): siRNA sense strand
gagaacaugugcccaucua

SEQ ID NO: 556285 - RNA, 19 nt, Homo sapiens
  misc_RNA (1)...(19): siRNA sense strand
gaacaucaagucagccuaa

SEQ ID NO: 556286 - RNA, 19 nt, Homo sapiens
  misc_RNA (1)...(19): siRNA sense strand
gaacaugugcccaucuaug

SEQ ID NO: 556287 - RNA, 19 nt, Homo sapiens
  misc_RNA (1)...(19): siRNA sense strand
caucaagucagccuaauga

SEQ ID NO: 556288 - RNA, 19 nt, Homo sapiens
  misc_RNA (1)...(19): siRNA sense strand
gcuaaugagucuuuaucug

SEQ ID NO: 556289 - RNA, 19 nt, Homo sapiens
  misc_RNA (1)...(19): siRNA sense strand
ccauagaucaucaaacuuc

SEQ ID NO: 556290 - RNA, 19 nt, Homo sapiens
  misc_RNA (1)...(19): siRNA sense strand
uauaugcugucgaaaucaa

SEQ ID NO: 556291 - RNA, 19 nt, Homo sapiens
  misc_RNA (1)...(19): siRNA sense strand
agguuucucuugcuaauga

SEQ ID NO: 556292 - RNA, 19 nt, Homo sapiens
  misc_RNA (1)...(19): siRNA sense strand
cuccauagaucaucaaacu

SEQ ID NO: 556293 - RNA, 19 nt, Homo sapiens
  misc_RNA (1)...(19): siRNA sense strand
gcccaucuaugaaccucuu

SEQ ID NO: 556294 - RNA, 19 nt, Homo sapiens
  misc_RNA (1)...(19): siRNA sense strand
cauagaucaucaaacuuca

SEQ ID NO: 556295 - RNA, 19 nt, Homo sapiens
  misc_RNA (1)...(19): siRNA sense strand
ucaagggugugagaacaug

SEQ ID NO: 556296 - RNA, 19 nt, Homo sapiens
  misc_RNA (1)...(19): siRNA sense strand
gaaccucuucucccaugga

SEQ ID NO: 556297 - RNA, 19 nt, Homo sapiens
  misc_RNA (1)...(19): siRNA sense strand
auuauaugcugucgaaauc

SEQ ID NO: 556298 - RNA, 19 nt, Homo sapiens
  misc_RNA (1)...(19): siRNA sense strand
aacaugugcccaucuauga

SEQ ID NO: 556299 - RNA, 19 nt, Homo sapiens
  misc_RNA (1)...(19): siRNA sense strand
acagguuucucuugcuaau

SEQ ID NO: 556300 - RNA, 19 nt, Homo sapiens
  misc_RNA (1)...(19): siRNA sense strand
ccagaggaacaucaaguca

SEQ ID NO: 556301 - RNA, 19 nt, Homo sapiens
  misc_RNA (1)...(19): siRNA sense strand
gcugucgaaaucaaucuuu

SEQ ID NO: 556302 - RNA, 19 nt, Homo sapiens
  misc_RNA (1)...(19): siRNA sense strand
acgaggaugcaaauuauau

SEQ ID NO: 556303 - RNA, 19 nt, Homo sapiens
  misc_RNA (1)...(19): siRNA sense strand
cgaggaugcaaauuauaug

SEQ ID NO: 556304 - RNA, 19 nt, Homo sapiens
  misc_RNA (1)...(19): siRNA sense strand
cauggaacgaggaugcaaa

SEQ ID NO: 556305 - RNA, 19 nt, Homo sapiens
  misc_RNA (1)...(19): siRNA sense strand
gaacgaggaugcaaauuau

SEQ ID NO: 556306 - RNA, 19 nt, Homo sapiens
  misc_RNA (1)...(19): siRNA sense strand
ggaacgaggaugcaaauua

SEQ ID NO: 556307 - RNA, 19 nt, Homo sapiens
  misc_RNA (1)...(19): siRNA sense strand
gaacagguuucucuugcua

SEQ ID NO: 556308 - RNA, 19 nt, Homo sapiens
  misc_RNA (1)...(19): siRNA sense strand
caaauuauaugcugucgaa

SEQ ID NO: 556309 - RNA, 19 nt, Homo sapiens
  misc_RNA (1)...(19): siRNA sense strand
gagaacaugugcccaucua

SEQ ID NO: 556310 - RNA, 19 nt, Homo sapiens
  misc_RNA (1)...(19): siRNA sense strand
gaacaucaagucagccuaa

SEQ ID NO: 556311 - RNA, 19 nt, Homo sapiens
  misc_RNA (1)...(19): siRNA sense strand
gaacaugugcccaucuaug

SEQ ID NO: 556312 - RNA, 19 nt, Homo sapiens
  misc_RNA (1)...(19): siRNA sense strand
caucaagucagccuaauga

SEQ ID NO: 556313 - RNA, 19 nt, Homo sapiens
  misc_RNA (1)...(19): siRNA sense strand
gcuaaugagucuuuaucug

SEQ ID NO: 556314 - RNA, 19 nt, Homo sapiens
  misc_RNA (1)...(19): siRNA sense strand
ccauagaucaucaaacuuc

SEQ ID NO: 556315 - RNA, 19 nt, Homo sapiens
  misc_RNA (1)...(19): siRNA sense strand
uauaugcugucgaaaucaa

SEQ ID NO: 556316 - RNA, 19 nt, Homo sapiens
  misc_RNA (1)...(19): siRNA sense strand
agguuucucuugcuaauga

SEQ ID NO: 556317 - RNA, 19 nt, Homo sapiens
  misc_RNA (1)...(19): siRNA sense strand
cuccauagaucaucaaacu

SEQ ID NO: 556318 - RNA, 19 nt, Homo sapiens
  misc_RNA (1)...(19): siRNA sense strand
gcccaucuaugaaccucuu

SEQ ID NO: 556319 - RNA, 19 nt, Homo sapiens
  misc_RNA (1)...(19): siRNA sense strand
cauagaucaucaaacuuca

SEQ ID NO: 556320 - RNA, 19 nt, Homo sapiens
  misc_RNA (1)...(19): siRNA sense strand
ucaagggugugagaacaug

SEQ ID NO: 556321 - RNA, 19 nt, Homo sapiens
  misc_RNA (1)...(19): siRNA sense strand
gaaccucuucucccaugga

SEQ ID NO: 556322 - RNA, 19 nt, Homo sapiens
  misc_RNA (1)...(19): siRNA sense strand
auuauaugcugucgaaauc

SEQ ID NO: 556323 - RNA, 19 nt, Homo sapiens
  misc_RNA (1)...(19): siRNA sense strand
aacaugugcccaucuauga

SEQ ID NO: 556324 - RNA, 19 nt, Homo sapiens
  misc_RNA (1)...(19): siRNA sense strand
acagguuucucuugcuaau

SEQ ID NO: 556325 - RNA, 19 nt, Homo sapiens
  misc_RNA (1)...(19): siRNA sense strand
ccagaggaacaucaaguca

SEQ ID NO: 556326 - RNA, 19 nt, Homo sapiens
  misc_RNA (1)...(19): siRNA sense strand
gcugucgaaaucaaucuuu

SEQ ID NO: 556327 - RNA, 19 nt, Homo sapiens
  misc_RNA (1)...(19): siRNA sense strand
acgaggaugcaaauuauau

SEQ ID NO: 556328 - RNA, 19 nt, Homo sapiens
  misc_RNA (1)...(19): siRNA sense strand
cgaggaugcaaauuauaug

SEQ ID NO: 556329 - RNA, 19 nt, Homo sapiens
  misc_RNA (1)...(19): siRNA sense strand
cauggaacgaggaugcaaa

SEQ ID NO: 556330 - RNA, 19 nt, Homo sapiens
  misc_RNA (1)...(19): siRNA sense strand
gaacgaggaugcaaauuau

SEQ ID NO: 556331 - RNA, 19 nt, Homo sapiens
  misc_RNA (1)...(19): siRNA sense strand
ggaacgaggaugcaaauua

SEQ ID NO: 556332 - RNA, 19 nt, Homo sapiens
  misc_RNA (1)...(19): siRNA sense strand
gaacagguuucucuugcua

SEQ ID NO: 556333 - RNA, 19 nt, Homo sapiens
  misc_RNA (1)...(19): siRNA sense strand
caaauuauaugcugucgaa

SEQ ID NO: 556334 - RNA, 19 nt, Homo sapiens
  misc_RNA (1)...(19): siRNA sense strand
gagaacaugugcccaucua

SEQ ID NO: 556335 - RNA, 19 nt, Homo sapiens
  misc_RNA (1)...(19): siRNA sense strand
gaacaucaagucagccuaa

SEQ ID NO: 556336 - RNA, 19 nt, Homo sapiens
  misc_RNA (1)...(19): siRNA sense strand
gaacaugugcccaucuaug

SEQ ID NO: 556337 - RNA, 19 nt, Homo sapiens
  misc_RNA (1)...(19): siRNA sense strand
caucaagucagccuaauga

SEQ ID NO: 556338 - RNA, 19 nt, Homo sapiens
  misc_RNA (1)...(19): siRNA sense strand
gcuaaugagucuuuaucug

SEQ ID NO: 556339 - RNA, 19 nt, Homo sapiens
  misc_RNA (1)...(19): siRNA sense strand
ccauagaucaucaaacuuc

SEQ ID NO: 556340 - RNA, 19 nt, Homo sapiens
  misc_RNA (1)...(19): siRNA sense strand
uauaugcugucgaaaucaa

SEQ ID NO: 556341 - RNA, 19 nt, Homo sapiens
  misc_RNA (1)...(19): siRNA sense strand
agguuucucuugcuaauga

SEQ ID NO: 556342 - RNA, 19 nt, Homo sapiens
  misc_RNA (1)...(19): siRNA sense strand
cuccauagaucaucaaacu

SEQ ID NO: 556343 - RNA, 19 nt, Homo sapiens
  misc_RNA (1)...(19): siRNA sense strand
gcccaucuaugaaccucuu

SEQ ID NO: 556344 - RNA, 19 nt, Homo sapiens
  misc_RNA (1)...(19): siRNA sense strand
cauagaucaucaaacuuca

SEQ ID NO: 556345 - RNA, 19 nt, Homo sapiens
  misc_RNA (1)...(19): siRNA sense strand
ucaagggugugagaacaug

SEQ ID NO: 556346 - RNA, 19 nt, Homo sapiens
  misc_RNA (1)...(19): siRNA sense strand
gaaccucuucucccaugga

SEQ ID NO: 556347 - RNA, 19 nt, Homo sapiens
  misc_RNA (1)...(19): siRNA sense strand
auuauaugcugucgaaauc

SEQ ID NO: 556348 - RNA, 19 nt, Homo sapiens
  misc_RNA (1)...(19): siRNA sense strand
aacaugugcccaucuauga

SEQ ID NO: 556349 - RNA, 19 nt, Homo sapiens
  misc_RNA (1)...(19): siRNA sense strand
acagguuucucuugcuaau

SEQ ID NO: 556350 - RNA, 19 nt, Homo sapiens
  misc_RNA (1)...(19): siRNA sense strand
ccagaggaacaucaaguca

SEQ ID NO: 556351 - RNA, 19 nt, Homo sapiens
  misc_RNA (1)...(19): siRNA sense strand
gcugucgaaaucaaucuuu

SEQ ID NO: 556352 - RNA, 19 nt, Homo sapiens
  misc_RNA (1)...(19): siRNA sense strand
acgaggaugcaaauuauau

SEQ ID NO: 556353 - RNA, 19 nt, Homo sapiens
  misc_RNA (1)...(19): siRNA sense strand
cgaggaugcaaauuauaug

SEQ ID NO: 556354 - RNA, 19 nt, Homo sapiens
  misc_RNA (1)...(19): siRNA sense strand
cauggaacgaggaugcaaa

SEQ ID NO: 556355 - RNA, 19 nt, Homo sapiens
  misc_RNA (1)...(19): siRNA sense strand
gaacgaggaugcaaauuau

SEQ ID NO: 556356 - RNA, 19 nt, Homo sapiens
  misc_RNA (1)...(19): siRNA sense strand
ggaacgaggaugcaaauua

SEQ ID NO: 556357 - RNA, 19 nt, Homo sapiens
  misc_RNA (1)...(19): siRNA sense strand
gaacagguuucucuugcua

SEQ ID NO: 556358 - RNA, 19 nt, Homo sapiens
  misc_RNA (1)...(19): siRNA sense strand
caaauuauaugcugucgaa

SEQ ID NO: 556359 - RNA, 19 nt, Homo sapiens
  misc_RNA (1)...(19): siRNA sense strand
gagaacaugugcccaucua

SEQ ID NO: 556360 - RNA, 19 nt, Homo sapiens
  misc_RNA (1)...(19): siRNA sense strand
gaacaucaagucagccuaa

SEQ ID NO: 556361 - RNA, 19 nt, Homo sapiens
  misc_RNA (1)...(19): siRNA sense strand
gaacaugugcccaucuaug

SEQ ID NO: 556362 - RNA, 19 nt, Homo sapiens
  misc_RNA (1)...(19): siRNA sense strand
caucaagucagccuaauga

SEQ ID NO: 556363 - RNA, 19 nt, Homo sapiens
  misc_RNA (1)...(19): siRNA sense strand
gcuaaugagucuuuaucug

SEQ ID NO: 556364 - RNA, 19 nt, Homo sapiens
  misc_RNA (1)...(19): siRNA sense strand
ccauagaucaucaaacuuc

SEQ ID NO: 556365 - RNA, 19 nt, Homo sapiens
  misc_RNA (1)...(19): siRNA sense strand
uauaugcugucgaaaucaa

SEQ ID NO: 556366 - RNA, 19 nt, Homo sapiens
  misc_RNA (1)...(19): siRNA sense strand
agguuucucuugcuaauga

SEQ ID NO: 556367 - RNA, 19 nt, Homo sapiens
  misc_RNA (1)...(19): siRNA sense strand
cuccauagaucaucaaacu

SEQ ID NO: 556368 - RNA, 19 nt, Homo sapiens
  misc_RNA (1)...(19): siRNA sense strand
gcccaucuaugaaccucuu

SEQ ID NO: 556369 - RNA, 19 nt, Homo sapiens
  misc_RNA (1)...(19): siRNA sense strand
cauagaucaucaaacuuca

SEQ ID NO: 556370 - RNA, 19 nt, Homo sapiens
  misc_RNA (1)...(19): siRNA sense strand
ucaagggugugagaacaug

SEQ ID NO: 556371 - RNA, 19 nt, Homo sapiens
  misc_RNA (1)...(19): siRNA sense strand
gaaccucuucucccaugga

SEQ ID NO: 556372 - RNA, 19 nt, Homo sapiens
  misc_RNA (1)...(19): siRNA sense strand
auuauaugcugucgaaauc

SEQ ID NO: 556373 - RNA, 19 nt, Homo sapiens
  misc_RNA (1)...(19): siRNA sense strand
aacaugugcccaucuauga

SEQ ID NO: 556374 - RNA, 19 nt, Homo sapiens
  misc_RNA (1)...(19): siRNA sense strand
acagguuucucuugcuaau

SEQ ID NO: 556375 - RNA, 19 nt, Homo sapiens
  misc_RNA (1)...(19): siRNA sense strand
ccagaggaacaucaaguca

SEQ ID NO: 556376 - RNA, 19 nt, Homo sapiens
  misc_RNA (1)...(19): siRNA sense strand
gcugucgaaaucaaucuuu

SEQ ID NO: 556377 - RNA, 19 nt, Homo sapiens
  misc_RNA (1)...(19): siRNA sense strand
acgaggaugcaaauuauau

SEQ ID NO: 556378 - RNA, 19 nt, Homo sapiens
  misc_RNA (1)...(19): siRNA sense strand
cgaggaugcaaauuauaug

SEQ ID NO: 556379 - RNA, 19 nt, Homo sapiens
  misc_RNA (1)...(19): siRNA sense strand
cauggaacgaggaugcaaa

SEQ ID NO: 556380 - RNA, 19 nt, Homo sapiens
  misc_RNA (1)...(19): siRNA sense strand
gaacgaggaugcaaauuau

SEQ ID NO: 556381 - RNA, 19 nt, Homo sapiens
  misc_RNA (1)...(19): siRNA sense strand
ggaacgaggaugcaaauua

SEQ ID NO: 556382 - RNA, 19 nt, Homo sapiens
  misc_RNA (1)...(19): siRNA sense strand
gaacagguuucucuugcua

SEQ ID NO: 556383 - RNA, 19 nt, Homo sapiens
  misc_RNA (1)...(19): siRNA sense strand
caaauuauaugcugucgaa

SEQ ID NO: 556384 - RNA, 19 nt, Homo sapiens
  misc_RNA (1)...(19): siRNA sense strand
gagaacaugugcccaucua

SEQ ID NO: 556385 - RNA, 19 nt, Homo sapiens
  misc_RNA (1)...(19): siRNA sense strand
gaacaucaagucagccuaa

SEQ ID NO: 556386 - RNA, 19 nt, Homo sapiens
  misc_RNA (1)...(19): siRNA sense strand
gaacaugugcccaucuaug

SEQ ID NO: 556387 - RNA, 19 nt, Homo sapiens
  misc_RNA (1)...(19): siRNA sense strand
caucaagucagccuaauga

SEQ ID NO: 556388 - RNA, 19 nt, Homo sapiens
  misc_RNA (1)...(19): siRNA sense strand
gcuaaugagucuuuaucug

SEQ ID NO: 556389 - RNA, 19 nt, Homo sapiens
  misc_RNA (1)...(19): siRNA sense strand
ccauagaucaucaaacuuc

SEQ ID NO: 556390 - RNA, 19 nt, Homo sapiens
  misc_RNA (1)...(19): siRNA sense strand
uauaugcugucgaaaucaa

SEQ ID NO: 556391 - RNA, 19 nt, Homo sapiens
  misc_RNA (1)...(19): siRNA sense strand
agguuucucuugcuaauga

SEQ ID NO: 556392 - RNA, 19 nt, Homo sapiens
  misc_RNA (1)...(19): siRNA sense strand
cuccauagaucaucaaacu

SEQ ID NO: 556393 - RNA, 19 nt, Homo sapiens
  misc_RNA (1)...(19): siRNA sense strand
gcccaucuaugaaccucuu

SEQ ID NO: 556394 - RNA, 19 nt, Homo sapiens
  misc_RNA (1)...(19): siRNA sense strand
cauagaucaucaaacuuca

SEQ ID NO: 556395 - RNA, 19 nt, Homo sapiens
  misc_RNA (1)...(19): siRNA sense strand
ucaagggugugagaacaug

SEQ ID NO: 556396 - RNA, 19 nt, Homo sapiens
  misc_RNA (1)...(19): siRNA sense strand
gaaccucuucucccaugga

SEQ ID NO: 556397 - RNA, 19 nt, Homo sapiens
  misc_RNA (1)...(19): siRNA sense strand
auuauaugcugucgaaauc

SEQ ID NO: 556398 - RNA, 19 nt, Homo sapiens
  misc_RNA (1)...(19): siRNA sense strand
aacaugugcccaucuauga

SEQ ID NO: 556399 - RNA, 19 nt, Homo sapiens
  misc_RNA (1)...(19): siRNA sense strand
acagguuucucuugcuaau

SEQ ID NO: 556400 - RNA, 19 nt, Homo sapiens
  misc_RNA (1)...(19): siRNA sense strand
ccagaggaacaucaaguca

SEQ ID NO: 556401 - RNA, 19 nt, Homo sapiens
  misc_RNA (1)...(19): siRNA sense strand
gcugucgaaaucaaucuuu

SEQ ID NO: 556402 - RNA, 19 nt, Homo sapiens
  misc_RNA (1)...(19): siRNA sense strand
acgaggaugcaaauuauau

SEQ ID NO: 556403 - RNA, 19 nt, Homo sapiens
  misc_RNA (1)...(19): siRNA sense strand
cgaggaugcaaauuauaug

SEQ ID NO: 556404 - RNA, 19 nt, Homo sapiens
  misc_RNA (1)...(19): siRNA sense strand
cauggaacgaggaugcaaa

SEQ ID NO: 556405 - RNA, 19 nt, Homo sapiens
  misc_RNA (1)...(19): siRNA sense strand
gaacgaggaugcaaauuau

SEQ ID NO: 556406 - RNA, 19 nt, Homo sapiens
  misc_RNA (1)...(19): siRNA sense strand
ggaacgaggaugcaaauua

SEQ ID NO: 556407 - RNA, 19 nt, Homo sapiens
  misc_RNA (1)...(19): siRNA sense strand
gaacagguuucucuugcua

SEQ ID NO: 556408 - RNA, 19 nt, Homo sapiens
  misc_RNA (1)...(19): siRNA sense strand
caaauuauaugcugucgaa

SEQ ID NO: 556409 - RNA, 19 nt, Homo sapiens
  misc_RNA (1)...(19): siRNA sense strand
gagaacaugugcccaucua

SEQ ID NO: 556410 - RNA, 19 nt, Homo sapiens
  misc_RNA (1)...(19): siRNA sense strand
gaacaucaagucagccuaa

SEQ ID NO: 556411 - RNA, 19 nt, Homo sapiens
  misc_RNA (1)...(19): siRNA sense strand
gaacaugugcccaucuaug

SEQ ID NO: 556412 - RNA, 19 nt, Homo sapiens
  misc_RNA (1)...(19): siRNA sense strand
caucaagucagccuaauga

SEQ ID NO: 556413 - RNA, 19 nt, Homo sapiens
  misc_RNA (1)...(19): siRNA sense strand
gcuaaugagucuuuaucug

SEQ ID NO: 556414 - RNA, 19 nt, Homo sapiens
  misc_RNA (1)...(19): siRNA sense strand
ccauagaucaucaaacuuc

SEQ ID NO: 556415 - RNA, 19 nt, Homo sapiens
  misc_RNA (1)...(19): siRNA sense strand
uauaugcugucgaaaucaa

SEQ ID NO: 556416 - RNA, 19 nt, Homo sapiens
  misc_RNA (1)...(19): siRNA sense strand
agguuucucuugcuaauga

SEQ ID NO: 556417 - RNA, 19 nt, Homo sapiens
  misc_RNA (1)...(19): siRNA sense strand
cuccauagaucaucaaacu

SEQ ID NO: 556418 - RNA, 19 nt, Homo sapiens
  misc_RNA (1)...(19): siRNA sense strand
gcccaucuaugaaccucuu

SEQ ID NO: 556419 - RNA, 19 nt, Homo sapiens
  misc_RNA (1)...(19): siRNA sense strand
cauagaucaucaaacuuca

SEQ ID NO: 556420 - RNA, 19 nt, Homo sapiens
  misc_RNA (1)...(19): siRNA sense strand
ucaagggugugagaacaug

SEQ ID NO: 556421 - RNA, 19 nt, Homo sapiens
  misc_RNA (1)...(19): siRNA sense strand
gaaccucuucucccaugga

SEQ ID NO: 556422 - RNA, 19 nt, Homo sapiens
  misc_RNA (1)...(19): siRNA sense strand
auuauaugcugucgaaauc

SEQ ID NO: 556423 - RNA, 19 nt, Homo sapiens
  misc_RNA (1)...(19): siRNA sense strand
aacaugugcccaucuauga

SEQ ID NO: 556424 - RNA, 19 nt, Homo sapiens
  misc_RNA (1)...(19): siRNA sense strand
acagguuucucuugcuaau

SEQ ID NO: 556425 - RNA, 19 nt, Homo sapiens
  misc_RNA (1)...(19): siRNA sense strand
ccagaggaacaucaaguca

SEQ ID NO: 556426 - RNA, 19 nt, Homo sapiens
  misc_RNA (1)...(19): siRNA sense strand
gcugucgaaaucaaucuuu

SEQ ID NO: 556427 - RNA, 19 nt, Homo sapiens
  misc_RNA (1)...(19): siRNA sense strand
acgaggaugcaaauuauau

SEQ ID NO: 556428 - RNA, 19 nt, Homo sapiens
  misc_RNA (1)...(19): siRNA sense strand
cgaggaugcaaauuauaug

SEQ ID NO: 556429 - RNA, 19 nt, Homo sapiens
  misc_RNA (1)...(19): siRNA sense strand
cauggaacgaggaugcaaa

SEQ ID NO: 556430 - RNA, 19 nt, Homo sapiens
  misc_RNA (1)...(19): siRNA sense strand
gaacgaggaugcaaauuau

SEQ ID NO: 556431 - RNA, 19 nt, Homo sapiens
  misc_RNA (1)...(19): siRNA sense strand
ggaacgaggaugcaaauua

SEQ ID NO: 556432 - RNA, 19 nt, Homo sapiens
  misc_RNA (1)...(19): siRNA sense strand
gaacagguuucucuugcua

SEQ ID NO: 556433 - RNA, 19 nt, Homo sapiens
  misc_RNA (1)...(19): siRNA sense strand
caaauuauaugcugucgaa

SEQ ID NO: 556434 - RNA, 19 nt, Homo sapiens
  misc_RNA (1)...(19): siRNA sense strand
gagaacaugugcccaucua

SEQ ID NO: 556435 - RNA, 19 nt, Homo sapiens
  misc_RNA (1)...(19): siRNA sense strand
gaacaucaagucagccuaa

SEQ ID NO: 556436 - RNA, 19 nt, Homo sapiens
  misc_RNA (1)...(19): siRNA sense strand
gaacaugugcccaucuaug

SEQ ID NO: 556437 - RNA, 19 nt, Homo sapiens
  misc_RNA (1)...(19): siRNA sense strand
caucaagucagccuaauga

SEQ ID NO: 556438 - RNA, 19 nt, Homo sapiens
  misc_RNA (1)...(19): siRNA sense strand
gcuaaugagucuuuaucug

SEQ ID NO: 556439 - RNA, 19 nt, Homo sapiens
  misc_RNA (1)...(19): siRNA sense strand
ccauagaucaucaaacuuc

SEQ ID NO: 556440 - RNA, 19 nt, Homo sapiens
  misc_RNA (1)...(19): siRNA sense strand
uauaugcugucgaaaucaa

SEQ ID NO: 556441 - RNA, 19 nt, Homo sapiens
  misc_RNA (1)...(19): siRNA sense strand
agguuucucuugcuaauga

SEQ ID NO: 556442 - RNA, 19 nt, Homo sapiens
  misc_RNA (1)...(19): siRNA sense strand
cuccauagaucaucaaacu

SEQ ID NO: 556443 - RNA, 19 nt, Homo sapiens
  misc_RNA (1)...(19): siRNA sense strand
gcccaucuaugaaccucuu

SEQ ID NO: 556444 - RNA, 19 nt, Homo sapiens
  misc_RNA (1)...(19): siRNA sense strand
cauagaucaucaaacuuca

SEQ ID NO: 556445 - RNA, 19 nt, Homo sapiens
  misc_RNA (1)...(19): siRNA sense strand
ucaagggugugagaacaug

SEQ ID NO: 556446 - RNA, 19 nt, Homo sapiens
  misc_RNA (1)...(19): siRNA sense strand
gaaccucuucucccaugga

SEQ ID NO: 556447 - RNA, 19 nt, Homo sapiens
  misc_RNA (1)...(19): siRNA sense strand
auuauaugcugucgaaauc

SEQ ID NO: 556448 - RNA, 19 nt, Homo sapiens
  misc_RNA (1)...(19): siRNA sense strand
aacaugugcccaucuauga

SEQ ID NO: 556449 - RNA, 19 nt, Homo sapiens
  misc_RNA (1)...(19): siRNA sense strand
acagguuucucuugcuaau

SEQ ID NO: 556450 - RNA, 19 nt, Homo sapiens
  misc_RNA (1)...(19): siRNA sense strand
ccagaggaacaucaaguca

SEQ ID NO: 556451 - RNA, 19 nt, Homo sapiens
  misc_RNA (1)...(19): siRNA sense strand
gcugucgaaaucaaucuuu

SEQ ID NO: 556452 - RNA, 19 nt, Homo sapiens
  misc_RNA (1)...(19): siRNA sense strand
acgaggaugcaaauuauau

SEQ ID NO: 556453 - RNA, 19 nt, Homo sapiens
  misc_RNA (1)...(19): siRNA sense strand
cgaggaugcaaauuauaug

SEQ ID NO: 556454 - RNA, 19 nt, Homo sapiens
  misc_RNA (1)...(19): siRNA sense strand
cauggaacgaggaugcaaa

SEQ ID NO: 556455 - RNA, 19 nt, Homo sapiens
  misc_RNA (1)...(19): siRNA sense strand
gaacgaggaugcaaauuau

SEQ ID NO: 556456 - RNA, 19 nt, Homo sapiens
  misc_RNA (1)...(19): siRNA sense strand
ggaacgaggaugcaaauua

SEQ ID NO: 556457 - RNA, 19 nt, Homo sapiens
  misc_RNA (1)...(19): siRNA sense strand
gaacagguuucucuugcua

SEQ ID NO: 556458 - RNA, 19 nt, Homo sapiens
  misc_RNA (1)...(19): siRNA sense strand
caaauuauaugcugucgaa

SEQ ID NO: 556459 - RNA, 19 nt, Homo sapiens
  misc_RNA (1)...(19): siRNA sense strand
gagaacaugugcccaucua

SEQ ID NO: 556460 - RNA, 19 nt, Homo sapiens
  misc_RNA (1)...(19): siRNA sense strand
gaacaucaagucagccuaa

SEQ ID NO: 556461 - RNA, 19 nt, Homo sapiens
  misc_RNA (1)...(19): siRNA sense strand
gaacaugugcccaucuaug

SEQ ID NO: 556462 - RNA, 19 nt, Homo sapiens
  misc_RNA (1)...(19): siRNA sense strand
caucaagucagccuaauga

SEQ ID NO: 556463 - RNA, 19 nt, Homo sapiens
  misc_RNA (1)...(19): siRNA sense strand
gcuaaugagucuuuaucug

SEQ ID NO: 556464 - RNA, 19 nt, Homo sapiens
  misc_RNA (1)...(19): siRNA sense strand
ccauagaucaucaaacuuc

SEQ ID NO: 556465 - RNA, 19 nt, Homo sapiens
  misc_RNA (1)...(19): siRNA sense strand
uauaugcugucgaaaucaa

SEQ ID NO: 556466 - RNA, 19 nt, Homo sapiens
  misc_RNA (1)...(19): siRNA sense strand
agguuucucuugcuaauga

SEQ ID NO: 556467 - RNA, 19 nt, Homo sapiens
  misc_RNA (1)...(19): siRNA sense strand
cuccauagaucaucaaacu

SEQ ID NO: 556468 - RNA, 19 nt, Homo sapiens
  misc_RNA (1)...(19): siRNA sense strand
gcccaucuaugaaccucuu

SEQ ID NO: 556469 - RNA, 19 nt, Homo sapiens
  misc_RNA (1)...(19): siRNA sense strand
cauagaucaucaaacuuca

SEQ ID NO: 556470 - RNA, 19 nt, Homo sapiens
  misc_RNA (1)...(19): siRNA sense strand
ucaagggugugagaacaug

SEQ ID NO: 556471 - RNA, 19 nt, Homo sapiens
  misc_RNA (1)...(19): siRNA sense strand
gaaccucuucucccaugga

SEQ ID NO: 556472 - RNA, 19 nt, Homo sapiens
  misc_RNA (1)...(19): siRNA sense strand
auuauaugcugucgaaauc

SEQ ID NO: 556473 - RNA, 19 nt, Homo sapiens
  misc_RNA (1)...(19): siRNA sense strand
aacaugugcccaucuauga

SEQ ID NO: 556474 - RNA, 19 nt, Homo sapiens
  misc_RNA (1)...(19): siRNA sense strand
acagguuucucuugcuaau

SEQ ID NO: 556475 - RNA, 19 nt, Homo sapiens
  misc_RNA (1)...(19): siRNA sense strand
ccagaggaacaucaaguca

SEQ ID NO: 556476 - RNA, 19 nt, Homo sapiens
  misc_RNA (1)...(19): siRNA sense strand
gcugucgaaaucaaucuuu

SEQ ID NO: 556477 - RNA, 19 nt, Homo sapiens
  misc_RNA (1)...(19): siRNA sense strand
acgaggaugcaaauuauau

SEQ ID NO: 556478 - RNA, 19 nt, Homo sapiens
  misc_RNA (1)...(19): siRNA sense strand
cgaggaugcaaauuauaug

SEQ ID NO: 556479 - RNA, 19 nt, Homo sapiens
  misc_RNA (1)...(19): siRNA sense strand
cauggaacgaggaugcaaa

SEQ ID NO: 556480 - RNA, 19 nt, Homo sapiens
  misc_RNA (1)...(19): siRNA sense strand
gaacgaggaugcaaauuau

SEQ ID NO: 556481 - RNA, 19 nt, Homo sapiens
  misc_RNA (1)...(19): siRNA sense strand
ggaacgaggaugcaaauua

SEQ ID NO: 556482 - RNA, 19 nt, Homo sapiens
  misc_RNA (1)...(19): siRNA sense strand
gaacagguuucucuugcua

SEQ ID NO: 556483 - RNA, 19 nt, Homo sapiens
  misc_RNA (1)...(19): siRNA sense strand
caaauuauaugcugucgaa

SEQ ID NO: 556484 - RNA, 19 nt, Homo sapiens
  misc_RNA (1)...(19): siRNA sense strand
gagaacaugugcccaucua

SEQ ID NO: 556485 - RNA, 19 nt, Homo sapiens
  misc_RNA (1)...(19): siRNA sense strand
gaacaucaagucagccuaa

SEQ ID NO: 556486 - RNA, 19 nt, Homo sapiens
  misc_RNA (1)...(19): siRNA sense strand
gaacaugugcccaucuaug

SEQ ID NO: 556487 - RNA, 19 nt, Homo sapiens
  misc_RNA (1)...(19): siRNA sense strand
caucaagucagccuaauga

SEQ ID NO: 556488 - RNA, 19 nt, Homo sapiens
  misc_RNA (1)...(19): siRNA sense strand
gcuaaugagucuuuaucug

SEQ ID NO: 556489 - RNA, 19 nt, Homo sapiens
  misc_RNA (1)...(19): siRNA sense strand
ccauagaucaucaaacuuc

SEQ ID NO: 556490 - RNA, 19 nt, Homo sapiens
  misc_RNA (1)...(19): siRNA sense strand
uauaugcugucgaaaucaa

SEQ ID NO: 556491 - RNA, 19 nt, Homo sapiens
  misc_RNA (1)...(19): siRNA sense strand
agguuucucuugcuaauga

SEQ ID NO: 556492 - RNA, 19 nt, Homo sapiens
  misc_RNA (1)...(19): siRNA sense strand
cuccauagaucaucaaacu

SEQ ID NO: 556493 - RNA, 19 nt, Homo sapiens
  misc_RNA (1)...(19): siRNA sense strand
gcccaucuaugaaccucuu

SEQ ID NO: 556494 - RNA, 19 nt, Homo sapiens
  misc_RNA (1)...(19): siRNA sense strand
cauagaucaucaaacuuca

SEQ ID NO: 556495 - RNA, 19 nt, Homo sapiens
  misc_RNA (1)...(19): siRNA sense strand
ucaagggugugagaacaug

SEQ ID NO: 556496 - RNA, 19 nt, Homo sapiens
  misc_RNA (1)...(19): siRNA sense strand
gaaccucuucucccaugga

SEQ ID NO: 556497 - RNA, 19 nt, Homo sapiens
  misc_RNA (1)...(19): siRNA sense strand
auuauaugcugucgaaauc

SEQ ID NO: 556498 - RNA, 19 nt, Homo sapiens
  misc_RNA (1)...(19): siRNA sense strand
aacaugugcccaucuauga

SEQ ID NO: 556499 - RNA, 19 nt, Homo sapiens
  misc_RNA (1)...(19): siRNA sense strand
acagguuucucuugcuaau

SEQ ID NO: 556500 - RNA, 19 nt, Homo sapiens
  misc_RNA (1)...(19): siRNA sense strand
ccagaggaacaucaaguca

SEQ ID NO: 556501 - RNA, 19 nt, Homo sapiens
  misc_RNA (1)...(19): siRNA sense strand
gcugucgaaaucaaucuuu

SEQ ID NO: 556502 - RNA, 19 nt, Homo sapiens
  misc_RNA (1)...(19): siRNA sense strand
acgaggaugcaaauuauau

SEQ ID NO: 556503 - RNA, 19 nt, Homo sapiens
  misc_RNA (1)...(19): siRNA sense strand
cgaggaugcaaauuauaug

SEQ ID NO: 556504 - RNA, 19 nt, Homo sapiens
  misc_RNA (1)...(19): siRNA sense strand
cauggaacgaggaugcaaa

SEQ ID NO: 556505 - RNA, 19 nt, Homo sapiens
  misc_RNA (1)...(19): siRNA sense strand
gaacgaggaugcaaauuau

SEQ ID NO: 556506 - RNA, 19 nt, Homo sapiens
  misc_RNA (1)...(19): siRNA sense strand
ggaacgaggaugcaaauua

SEQ ID NO: 556507 - RNA, 19 nt, Homo sapiens
  misc_RNA (1)...(19): siRNA sense strand
gaacagguuucucuugcua

SEQ ID NO: 556508 - RNA, 19 nt, Homo sapiens
  misc_RNA (1)...(19): siRNA sense strand
caaauuauaugcugucgaa

SEQ ID NO: 556509 - RNA, 19 nt, Homo sapiens
  misc_RNA (1)...(19): siRNA sense strand
gagaacaugugcccaucua

SEQ ID NO: 556510 - RNA, 19 nt, Homo sapiens
  misc_RNA (1)...(19): siRNA sense strand
gaacaucaagucagccuaa

SEQ ID NO: 556511 - RNA, 19 nt, Homo sapiens
  misc_RNA (1)...(19): siRNA sense strand
gaacaugugcccaucuaug

SEQ ID NO: 556512 - RNA, 19 nt, Homo sapiens
  misc_RNA (1)...(19): siRNA sense strand
caucaagucagccuaauga

SEQ ID NO: 556513 - RNA, 19 nt, Homo sapiens
  misc_RNA (1)...(19): siRNA sense strand
gcuaaugagucuuuaucug

SEQ ID NO: 556514 - RNA, 19 nt, Homo sapiens
  misc_RNA (1)...(19): siRNA sense strand
ccauagaucaucaaacuuc

SEQ ID NO: 556515 - RNA, 19 nt, Homo sapiens
  misc_RNA (1)...(19): siRNA sense strand
uauaugcugucgaaaucaa

SEQ ID NO: 556516 - RNA, 19 nt, Homo sapiens
  misc_RNA (1)...(19): siRNA sense strand
agguuucucuugcuaauga

SEQ ID NO: 556517 - RNA, 19 nt, Homo sapiens
  misc_RNA (1)...(19): siRNA sense strand
cuccauagaucaucaaacu

SEQ ID NO: 556518 - RNA, 19 nt, Homo sapiens
  misc_RNA (1)...(19): siRNA sense strand
gcccaucuaugaaccucuu

SEQ ID NO: 556519 - RNA, 19 nt, Homo sapiens
  misc_RNA (1)...(19): siRNA sense strand
cauagaucaucaaacuuca

SEQ ID NO: 556520 - RNA, 19 nt, Homo sapiens
  misc_RNA (1)...(19): siRNA sense strand
ucaagggugugagaacaug

SEQ ID NO: 556521 - RNA, 19 nt, Homo sapiens
  misc_RNA (1)...(19): siRNA sense strand
gaaccucuucucccaugga

SEQ ID NO: 556522 - RNA, 19 nt, Homo sapiens
  misc_RNA (1)...(19): siRNA sense strand
auuauaugcugucgaaauc

SEQ ID NO: 556523 - RNA, 19 nt, Homo sapiens
  misc_RNA (1)...(19): siRNA sense strand
aacaugugcccaucuauga

SEQ ID NO: 556524 - RNA, 19 nt, Homo sapiens
  misc_RNA (1)...(19): siRNA sense strand
acagguuucucuugcuaau

SEQ ID NO: 556525 - RNA, 19 nt, Homo sapiens
  misc_RNA (1)...(19): siRNA sense strand
ccagaggaacaucaaguca

SEQ ID NO: 556526 - RNA, 19 nt, Homo sapiens
  misc_RNA (1)...(19): siRNA sense strand
gcugucgaaaucaaucuuu

SEQ ID NO: 556527 - RNA, 19 nt, Homo sapiens
  misc_RNA (1)...(19): siRNA sense strand
acgaggaugcaaauuauau

SEQ ID NO: 556528 - RNA, 19 nt, Homo sapiens
  misc_RNA (1)...(19): siRNA sense strand
cgaggaugcaaauuauaug

SEQ ID NO: 556529 - RNA, 19 nt, Homo sapiens
  misc_RNA (1)...(19): siRNA sense strand
cauggaacgaggaugcaaa

SEQ ID NO: 556530 - RNA, 19 nt, Homo sapiens
  misc_RNA (1)...(19): siRNA sense strand
gaacgaggaugcaaauuau

SEQ ID NO: 556531 - RNA, 19 nt, Homo sapiens
  misc_RNA (1)...(19): siRNA sense strand
ggaacgaggaugcaaauua

SEQ ID NO: 556532 - RNA, 19 nt, Homo sapiens
  misc_RNA (1)...(19): siRNA sense strand
gaacagguuucucuugcua

SEQ ID NO: 556533 - RNA, 19 nt, Homo sapiens
  misc_RNA (1)...(19): siRNA sense strand
caaauuauaugcugucgaa

SEQ ID NO: 556534 - RNA, 19 nt, Homo sapiens
  misc_RNA (1)...(19): siRNA sense strand
gagaacaugugcccaucua

SEQ ID NO: 556535 - RNA, 19 nt, Homo sapiens
  misc_RNA (1)...(19): siRNA sense strand
gaacaucaagucagccuaa

SEQ ID NO: 556536 - RNA, 19 nt, Homo sapiens
  misc_RNA (1)...(19): siRNA sense strand
gaacaugugcccaucuaug

SEQ ID NO: 556537 - RNA, 19 nt, Homo sapiens
  misc_RNA (1)...(19): siRNA sense strand
caucaagucagccuaauga

SEQ ID NO: 556538 - RNA, 19 nt, Homo sapiens
  misc_RNA (1)...(19): siRNA sense strand
gcuaaugagucuuuaucug

SEQ ID NO: 556539 - RNA, 19 nt, Homo sapiens
  misc_RNA (1)...(19): siRNA sense strand
ccauagaucaucaaacuuc

SEQ ID NO: 556540 - RNA, 19 nt, Homo sapiens
  misc_RNA (1)...(19): siRNA sense strand
uauaugcugucgaaaucaa

SEQ ID NO: 556541 - RNA, 19 nt, Homo sapiens
  misc_RNA (1)...(19): siRNA sense strand
agguuucucuugcuaauga

SEQ ID NO: 556542 - RNA, 19 nt, Homo sapiens
  misc_RNA (1)...(19): siRNA sense strand
cuccauagaucaucaaacu

SEQ ID NO: 556543 - RNA, 19 nt, Homo sapiens
  misc_RNA (1)...(19): siRNA sense strand
gcccaucuaugaaccucuu

SEQ ID NO: 556544 - RNA, 19 nt, Homo sapiens
  misc_RNA (1)...(19): siRNA sense strand
cauagaucaucaaacuuca

SEQ ID NO: 556545 - RNA, 19 nt, Homo sapiens
  misc_RNA (1)...(19): siRNA sense strand
ucaagggugugagaacaug

SEQ ID NO: 556546 - RNA, 19 nt, Homo sapiens
  misc_RNA (1)...(19): siRNA sense strand
gaaccucuucucccaugga

SEQ ID NO: 556547 - RNA, 19 nt, Homo sapiens
  misc_RNA (1)...(19): siRNA sense strand
auuauaugcugucgaaauc

SEQ ID NO: 556548 - RNA, 19 nt, Homo sapiens
  misc_RNA (1)...(19): siRNA sense strand
aacaugugcccaucuauga

SEQ ID NO: 556549 - RNA, 19 nt, Homo sapiens
  misc_RNA (1)...(19): siRNA sense strand
acagguuucucuugcuaau

SEQ ID NO: 556550 - RNA, 19 nt, Homo sapiens
  misc_RNA (1)...(19): siRNA sense strand
ccagaggaacaucaaguca

SEQ ID NO: 556551 - RNA, 19 nt, Homo sapiens
  misc_RNA (1)...(19): siRNA sense strand
gcugucgaaaucaaucuuu

SEQ ID NO: 556552 - RNA, 19 nt, Homo sapiens
  misc_RNA (1)...(19): siRNA sense strand
acgaggaugcaaauuauau

SEQ ID NO: 556553 - RNA, 19 nt, Homo sapiens
  misc_RNA (1)...(19): siRNA sense strand
cgaggaugcaaauuauaug

SEQ ID NO: 556554 - RNA, 19 nt, Homo sapiens
  misc_RNA (1)...(19): siRNA sense strand
cauggaacgaggaugcaaa

SEQ ID NO: 556555 - RNA, 19 nt, Homo sapiens
  misc_RNA (1)...(19): siRNA sense strand
gaacgaggaugcaaauuau

SEQ ID NO: 556556 - RNA, 19 nt, Homo sapiens
  misc_RNA (1)...(19): siRNA sense strand
ggaacgaggaugcaaauua

SEQ ID NO: 556557 - RNA, 19 nt, Homo sapiens
  misc_RNA (1)...(19): siRNA sense strand
gaacagguuucucuugcua

SEQ ID NO: 556558 - RNA, 19 nt, Homo sapiens
  misc_RNA (1)...(19): siRNA sense strand
caaauuauaugcugucgaa

SEQ ID NO: 556559 - RNA, 19 nt, Homo sapiens
  misc_RNA (1)...(19): siRNA sense strand
gagaacaugugcccaucua

SEQ ID NO: 556560 - RNA, 19 nt, Homo sapiens
  misc_RNA (1)...(19): siRNA sense strand
gaacaucaagucagccuaa

SEQ ID NO: 556561 - RNA, 19 nt, Homo sapiens
  misc_RNA (1)...(19): siRNA sense strand
gaacaugugcccaucuaug

SEQ ID NO: 556562 - RNA, 19 nt, Homo sapiens
  misc_RNA (1)...(19): siRNA sense strand
caucaagucagccuaauga

SEQ ID NO: 556563 - RNA, 19 nt, Homo sapiens
  misc_RNA (1)...(19): siRNA sense strand
gcuaaugagucuuuaucug

SEQ ID NO: 556564 - RNA, 19 nt, Homo sapiens
  misc_RNA (1)...(19): siRNA sense strand
ccauagaucaucaaacuuc

SEQ ID NO: 556565 - RNA, 19 nt, Homo sapiens
  misc_RNA (1)...(19): siRNA sense strand
uauaugcugucgaaaucaa

SEQ ID NO: 556566 - RNA, 19 nt, Homo sapiens
  misc_RNA (1)...(19): siRNA sense strand
agguuucucuugcuaauga

SEQ ID NO: 556567 - RNA, 19 nt, Homo sapiens
  misc_RNA (1)...(19): siRNA sense strand
cuccauagaucaucaaacu

SEQ ID NO: 556568 - RNA, 19 nt, Homo sapiens
  misc_RNA (1)...(19): siRNA sense strand
gcccaucuaugaaccucuu

SEQ ID NO: 556569 - RNA, 19 nt, Homo sapiens
  misc_RNA (1)...(19): siRNA sense strand
cauagaucaucaaacuuca

SEQ ID NO: 556570 - RNA, 19 nt, Homo sapiens
  misc_RNA (1)...(19): siRNA sense strand
ucaagggugugagaacaug

SEQ ID NO: 556571 - RNA, 19 nt, Homo sapiens
  misc_RNA (1)...(19): siRNA sense strand
gaaccucuucucccaugga

SEQ ID NO: 556572 - RNA, 19 nt, Homo sapiens
  misc_RNA (1)...(19): siRNA sense strand
auuauaugcugucgaaauc

SEQ ID NO: 556573 - RNA, 19 nt, Homo sapiens
  misc_RNA (1)...(19): siRNA sense strand
aacaugugcccaucuauga

SEQ ID NO: 556574 - RNA, 19 nt, Homo sapiens
  misc_RNA (1)...(19): siRNA sense strand
acagguuucucuugcuaau

SEQ ID NO: 556575 - RNA, 19 nt, Homo sapiens
  misc_RNA (1)...(19): siRNA sense strand
ccagaggaacaucaaguca

SEQ ID NO: 556576 - RNA, 19 nt, Homo sapiens
  misc_RNA (1)...(19): siRNA sense strand
gcugucgaaaucaaucuuu

SEQ ID NO: 556577 - RNA, 19 nt, Homo sapiens
  misc_RNA (1)...(19): siRNA sense strand
acgaggaugcaaauuauau

SEQ ID NO: 556578 - RNA, 19 nt, Homo sapiens
  misc_RNA (1)...(19): siRNA sense strand
cgaggaugcaaauuauaug

SEQ ID NO: 556579 - RNA, 19 nt, Homo sapiens
  misc_RNA (1)...(19): siRNA sense strand
cauggaacgaggaugcaaa

SEQ ID NO: 556580 - RNA, 19 nt, Homo sapiens
  misc_RNA (1)...(19): siRNA sense strand
gaacgaggaugcaaauuau

SEQ ID NO: 556581 - RNA, 19 nt, Homo sapiens
  misc_RNA (1)...(19): siRNA sense strand
ggaacgaggaugcaaauua

SEQ ID NO: 556582 - RNA, 19 nt, Homo sapiens
  misc_RNA (1)...(19): siRNA sense strand
gaacagguuucucuugcua

SEQ ID NO: 556583 - RNA, 19 nt, Homo sapiens
  misc_RNA (1)...(19): siRNA sense strand
caaauuauaugcugucgaa

SEQ ID NO: 556584 - RNA, 19 nt, Homo sapiens
  misc_RNA (1)...(19): siRNA sense strand
gagaacaugugcccaucua

SEQ ID NO: 556585 - RNA, 19 nt, Homo sapiens
  misc_RNA (1)...(19): siRNA sense strand
gaacaucaagucagccuaa

SEQ ID NO: 556586 - RNA, 19 nt, Homo sapiens
  misc_RNA (1)...(19): siRNA sense strand
gaacaugugcccaucuaug

SEQ ID NO: 556587 - RNA, 19 nt, Homo sapiens
  misc_RNA (1)...(19): siRNA sense strand
caucaagucagccuaauga

SEQ ID NO: 556588 - RNA, 19 nt, Homo sapiens
  misc_RNA (1)...(19): siRNA sense strand
gcuaaugagucuuuaucug

SEQ ID NO: 556589 - RNA, 19 nt, Homo sapiens
  misc_RNA (1)...(19): siRNA sense strand
ccauagaucaucaaacuuc

SEQ ID NO: 556590 - RNA, 19 nt, Homo sapiens
  misc_RNA (1)...(19): siRNA sense strand
uauaugcugucgaaaucaa

SEQ ID NO: 556591 - RNA, 19 nt, Homo sapiens
  misc_RNA (1)...(19): siRNA sense strand
agguuucucuugcuaauga

SEQ ID NO: 556592 - RNA, 19 nt, Homo sapiens
  misc_RNA (1)...(19): siRNA sense strand
cuccauagaucaucaaacu

SEQ ID NO: 556593 - RNA, 19 nt, Homo sapiens
  misc_RNA (1)...(19): siRNA sense strand
gcccaucuaugaaccucuu

SEQ ID NO: 556594 - RNA, 19 nt, Homo sapiens
  misc_RNA (1)...(19): siRNA sense strand
cauagaucaucaaacuuca

SEQ ID NO: 556595 - RNA, 19 nt, Homo sapiens
  misc_RNA (1)...(19): siRNA sense strand
ucaagggugugagaacaug

SEQ ID NO: 556596 - RNA, 19 nt, Homo sapiens
  misc_RNA (1)...(19): siRNA sense strand
gaaccucuucucccaugga

SEQ ID NO: 556597 - RNA, 19 nt, Homo sapiens
  misc_RNA (1)...(19): siRNA sense strand
auuauaugcugucgaaauc

SEQ ID NO: 556598 - RNA, 19 nt, Homo sapiens
  misc_RNA (1)...(19): siRNA sense strand
aacaugugcccaucuauga

SEQ ID NO: 556599 - RNA, 19 nt, Homo sapiens
  misc_RNA (1)...(19): siRNA sense strand
acagguuucucuugcuaau

SEQ ID NO: 556600 - RNA, 19 nt, Homo sapiens
  misc_RNA (1)...(19): siRNA sense strand
ccagaggaacaucaaguca

SEQ ID NO: 556601 - RNA, 19 nt, Homo sapiens
  misc_RNA (1)...(19): siRNA sense strand
gcugucgaaaucaaucuuu

SEQ ID NO: 556602 - RNA, 19 nt, Homo sapiens
  misc_RNA (1)...(19): siRNA sense strand
acgaggaugcaaauuauau

SEQ ID NO: 556603 - RNA, 19 nt, Homo sapiens
  misc_RNA (1)...(19): siRNA sense strand
cgaggaugcaaauuauaug

SEQ ID NO: 556604 - RNA, 19 nt, Homo sapiens
  misc_RNA (1)...(19): siRNA sense strand
cauggaacgaggaugcaaa

SEQ ID NO: 556605 - RNA, 19 nt, Homo sapiens
  misc_RNA (1)...(19): siRNA sense strand
gaacgaggaugcaaauuau

SEQ ID NO: 556606 - RNA, 19 nt, Homo sapiens
  misc_RNA (1)...(19): siRNA sense strand
ggaacgaggaugcaaauua

SEQ ID NO: 556607 - RNA, 19 nt, Homo sapiens
  misc_RNA (1)...(19): siRNA sense strand
gaacagguuucucuugcua

SEQ ID NO: 556608 - RNA, 19 nt, Homo sapiens
  misc_RNA (1)...(19): siRNA sense strand
caaauuauaugcugucgaa

SEQ ID NO: 556609 - RNA, 19 nt, Homo sapiens
  misc_RNA (1)...(19): siRNA sense strand
gagaacaugugcccaucua

SEQ ID NO: 556610 - RNA, 19 nt, Homo sapiens
  misc_RNA (1)...(19): siRNA sense strand
gaacaucaagucagccuaa

SEQ ID NO: 556611 - RNA, 19 nt, Homo sapiens
  misc_RNA (1)...(19): siRNA sense strand
gaacaugugcccaucuaug

SEQ ID NO: 556612 - RNA, 19 nt, Homo sapiens
  misc_RNA (1)...(19): siRNA sense strand
caucaagucagccuaauga

SEQ ID NO: 556613 - RNA, 19 nt, Homo sapiens
  misc_RNA (1)...(19): siRNA sense strand
gcuaaugagucuuuaucug

SEQ ID NO: 556614 - RNA, 19 nt, Homo sapiens
  misc_RNA (1)...(19): siRNA sense strand
ccauagaucaucaaacuuc

SEQ ID NO: 556615 - RNA, 19 nt, Homo sapiens
  misc_RNA (1)...(19): siRNA sense strand
uauaugcugucgaaaucaa

SEQ ID NO: 556616 - RNA, 19 nt, Homo sapiens
  misc_RNA (1)...(19): siRNA sense strand
agguuucucuugcuaauga

SEQ ID NO: 556617 - RNA, 19 nt, Homo sapiens
  misc_RNA (1)...(19): siRNA sense strand
cuccauagaucaucaaacu

SEQ ID NO: 556618 - RNA, 19 nt, Homo sapiens
  misc_RNA (1)...(19): siRNA sense strand
gcccaucuaugaaccucuu

SEQ ID NO: 556619 - RNA, 19 nt, Homo sapiens
  misc_RNA (1)...(19): siRNA sense strand
cauagaucaucaaacuuca

SEQ ID NO: 556620 - RNA, 19 nt, Homo sapiens
  misc_RNA (1)...(19): siRNA sense strand
ucaagggugugagaacaug

SEQ ID NO: 556621 - RNA, 19 nt, Homo sapiens
  misc_RNA (1)...(19): siRNA sense strand
gaaccucuucucccaugga

SEQ ID NO: 556622 - RNA, 19 nt, Homo sapiens
  misc_RNA (1)...(19): siRNA sense strand
auuauaugcugucgaaauc

SEQ ID NO: 556623 - RNA, 19 nt, Homo sapiens
  misc_RNA (1)...(19): siRNA sense strand
aacaugugcccaucuauga

SEQ ID NO: 556624 - RNA, 19 nt, Homo sapiens
  misc_RNA (1)...(19): siRNA sense strand
acagguuucucuugcuaau

SEQ ID NO: 556625 - RNA, 19 nt, Homo sapiens
  misc_RNA (1)...(19): siRNA sense strand
ccagaggaacaucaaguca

SEQ ID NO: 556626 - RNA, 19 nt, Homo sapiens
  misc_RNA (1)...(19): siRNA sense strand
gcugucgaaaucaaucuuu

SEQ ID NO: 556627 - RNA, 19 nt, Homo sapiens
  misc_RNA (1)...(19): siRNA sense strand
acgaggaugcaaauuauau

SEQ ID NO: 556628 - RNA, 19 nt, Homo sapiens
  misc_RNA (1)...(19): siRNA sense strand
cgaggaugcaaauuauaug

SEQ ID NO: 556629 - RNA, 19 nt, Homo sapiens
  misc_RNA (1)...(19): siRNA sense strand
cauggaacgaggaugcaaa

SEQ ID NO: 556630 - RNA, 19 nt, Homo sapiens
  misc_RNA (1)...(19): siRNA sense strand
gaacgaggaugcaaauuau

SEQ ID NO: 556631 - RNA, 19 nt, Homo sapiens
  misc_RNA (1)...(19): siRNA sense strand
ggaacgaggaugcaaauua

SEQ ID NO: 556632 - RNA, 19 nt, Homo sapiens
  misc_RNA (1)...(19): siRNA sense strand
gaacagguuucucuugcua

SEQ ID NO: 556633 - RNA, 19 nt, Homo sapiens
  misc_RNA (1)...(19): siRNA sense strand
caaauuauaugcugucgaa

SEQ ID NO: 556634 - RNA, 19 nt, Homo sapiens
  misc_RNA (1)...(19): siRNA sense strand
gagaacaugugcccaucua

SEQ ID NO: 556635 - RNA, 19 nt, Homo sapiens
  misc_RNA (1)...(19): siRNA sense strand
gaacaucaagucagccuaa

SEQ ID NO: 556636 - RNA, 19 nt, Homo sapiens
  misc_RNA (1)...(19): siRNA sense strand
gaacaugugcccaucuaug

SEQ ID NO: 556637 - RNA, 19 nt, Homo sapiens
  misc_RNA (1)...(19): siRNA sense strand
caucaagucagccuaauga

SEQ ID NO: 556638 - RNA, 19 nt, Homo sapiens
  misc_RNA (1)...(19): siRNA sense strand
gcuaaugagucuuuaucug

SEQ ID NO: 556639 - RNA, 19 nt, Homo sapiens
  misc_RNA (1)...(19): siRNA sense strand
ccauagaucaucaaacuuc

SEQ ID NO: 556640 - RNA, 19 nt, Homo sapiens
  misc_RNA (1)...(19): siRNA sense strand
uauaugcugucgaaaucaa

SEQ ID NO: 556641 - RNA, 19 nt, Homo sapiens
  misc_RNA (1)...(19): siRNA sense strand
agguuucucuugcuaauga

SEQ ID NO: 556642 - RNA, 19 nt, Homo sapiens
  misc_RNA (1)...(19): siRNA sense strand
cuccauagaucaucaaacu

SEQ ID NO: 556643 - RNA, 19 nt, Homo sapiens
  misc_RNA (1)...(19): siRNA sense strand
gcccaucuaugaaccucuu

SEQ ID NO: 556644 - RNA, 19 nt, Homo sapiens
  misc_RNA (1)...(19): siRNA sense strand
cauagaucaucaaacuuca

SEQ ID NO: 556645 - RNA, 19 nt, Homo sapiens
  misc_RNA (1)...(19): siRNA sense strand
ucaagggugugagaacaug

SEQ ID NO: 556646 - RNA, 19 nt, Homo sapiens
  misc_RNA (1)...(19): siRNA sense strand
gaaccucuucucccaugga

SEQ ID NO: 556647 - RNA, 19 nt, Homo sapiens
  misc_RNA (1)...(19): siRNA sense strand
auuauaugcugucgaaauc

SEQ ID NO: 556648 - RNA, 19 nt, Homo sapiens
  misc_RNA (1)...(19): siRNA sense strand
aacaugugcccaucuauga

SEQ ID NO: 556649 - RNA, 19 nt, Homo sapiens
  misc_RNA (1)...(19): siRNA sense strand
acagguuucucuugcuaau

SEQ ID NO: 556650 - RNA, 19 nt, Homo sapiens
  misc_RNA (1)...(19): siRNA sense strand
ccagaggaacaucaaguca

SEQ ID NO: 556651 - RNA, 19 nt, Homo sapiens
  misc_RNA (1)...(19): siRNA sense strand
gcugucgaaaucaaucuuu

SEQ ID NO: 556652 - RNA, 19 nt, Homo sapiens
  misc_RNA (1)...(19): siRNA sense strand
acgaggaugcaaauuauau

SEQ ID NO: 556653 - RNA, 19 nt, Homo sapiens
  misc_RNA (1)...(19): siRNA sense strand
cgaggaugcaaauuauaug

SEQ ID NO: 556654 - RNA, 19 nt, Homo sapiens
  misc_RNA (1)...(19): siRNA sense strand
cauggaacgaggaugcaaa

SEQ ID NO: 556655 - RNA, 19 nt, Homo sapiens
  misc_RNA (1)...(19): siRNA sense strand
gaacgaggaugcaaauuau

SEQ ID NO: 556656 - RNA, 19 nt, Homo sapiens
  misc_RNA (1)...(19): siRNA sense strand
ggaacgaggaugcaaauua

SEQ ID NO: 556657 - RNA, 19 nt, Homo sapiens
  misc_RNA (1)...(19): siRNA sense strand
gaacagguuucucuugcua

SEQ ID NO: 556658 - RNA, 19 nt, Homo sapiens
  misc_RNA (1)...(19): siRNA sense strand
caaauuauaugcugucgaa

SEQ ID NO: 556659 - RNA, 19 nt, Homo sapiens
  misc_RNA (1)...(19): siRNA sense strand
gagaacaugugcccaucua

SEQ ID NO: 556660 - RNA, 19 nt, Homo sapiens
  misc_RNA (1)...(19): siRNA sense strand
gaacaucaagucagccuaa

SEQ ID NO: 556661 - RNA, 19 nt, Homo sapiens
  misc_RNA (1)...(19): siRNA sense strand
gaacaugugcccaucuaug

SEQ ID NO: 556662 - RNA, 19 nt, Homo sapiens
  misc_RNA (1)...(19): siRNA sense strand
caucaagucagccuaauga

SEQ ID NO: 556663 - RNA, 19 nt, Homo sapiens
  misc_RNA (1)...(19): siRNA sense strand
gcuaaugagucuuuaucug

SEQ ID NO: 556664 - RNA, 19 nt, Homo sapiens
  misc_RNA (1)...(19): siRNA sense strand
ccauagaucaucaaacuuc

SEQ ID NO: 556665 - RNA, 19 nt, Homo sapiens
  misc_RNA (1)...(19): siRNA sense strand
uauaugcugucgaaaucaa

SEQ ID NO: 556666 - RNA, 19 nt, Homo sapiens
  misc_RNA (1)...(19): siRNA sense strand
agguuucucuugcuaauga

SEQ ID NO: 556667 - RNA, 19 nt, Homo sapiens
  misc_RNA (1)...(19): siRNA sense strand
cuccauagaucaucaaacu

SEQ ID NO: 556668 - RNA, 19 nt, Homo sapiens
  misc_RNA (1)...(19): siRNA sense strand
gcccaucuaugaaccucuu

SEQ ID NO: 556669 - RNA, 19 nt, Homo sapiens
  misc_RNA (1)...(19): siRNA sense strand
cauagaucaucaaacuuca

SEQ ID NO: 556670 - RNA, 19 nt, Homo sapiens
  misc_RNA (1)...(19): siRNA sense strand
ucaagggugugagaacaug

SEQ ID NO: 556671 - RNA, 19 nt, Homo sapiens
  misc_RNA (1)...(19): siRNA sense strand
gaaccucuucucccaugga

SEQ ID NO: 556672 - RNA, 19 nt, Homo sapiens
  misc_RNA (1)...(19): siRNA sense strand
auuauaugcugucgaaauc

SEQ ID NO: 556673 - RNA, 19 nt, Homo sapiens
  misc_RNA (1)...(19): siRNA sense strand
aacaugugcccaucuauga

SEQ ID NO: 556674 - RNA, 19 nt, Homo sapiens
  misc_RNA (1)...(19): siRNA sense strand
acagguuucucuugcuaau

SEQ ID NO: 556675 - RNA, 19 nt, Homo sapiens
  misc_RNA (1)...(19): siRNA sense strand
ccagaggaacaucaaguca

SEQ ID NO: 556676 - RNA, 19 nt, Homo sapiens
  misc_RNA (1)...(19): siRNA sense strand
gcugucgaaaucaaucuuu

SEQ ID NO: 556677 - RNA, 19 nt, Homo sapiens
  misc_RNA (1)...(19): siRNA sense strand
acgaggaugcaaauuauau

SEQ ID NO: 556678 - RNA, 19 nt, Homo sapiens
  misc_RNA (1)...(19): siRNA sense strand
cgaggaugcaaauuauaug

SEQ ID NO: 556679 - RNA, 19 nt, Homo sapiens
  misc_RNA (1)...(19): siRNA sense strand
cauggaacgaggaugcaaa

SEQ ID NO: 556680 - RNA, 19 nt, Homo sapiens
  misc_RNA (1)...(19): siRNA sense strand
gaacgaggaugcaaauuau

SEQ ID NO: 556681 - RNA, 19 nt, Homo sapiens
  misc_RNA (1)...(19): siRNA sense strand
ggaacgaggaugcaaauua

SEQ ID NO: 556682 - RNA, 19 nt, Homo sapiens
  misc_RNA (1)...(19): siRNA sense strand
gaacagguuucucuugcua

SEQ ID NO: 556683 - RNA, 19 nt, Homo sapiens
  misc_RNA (1)...(19): siRNA sense strand
caaauuauaugcugucgaa

SEQ ID NO: 556684 - RNA, 19 nt, Homo sapiens
  misc_RNA (1)...(19): siRNA sense strand
gagaacaugugcccaucua

SEQ ID NO: 556685 - RNA, 19 nt, Homo sapiens
  misc_RNA (1)...(19): siRNA sense strand
gaacaucaagucagccuaa

SEQ ID NO: 556686 - RNA, 19 nt, Homo sapiens
  misc_RNA (1)...(19): siRNA sense strand
gaacaugugcccaucuaug

SEQ ID NO: 556687 - RNA, 19 nt, Homo sapiens
  misc_RNA (1)...(19): siRNA sense strand
caucaagucagccuaauga

SEQ ID NO: 556688 - RNA, 19 nt, Homo sapiens
  misc_RNA (1)...(19): siRNA sense strand
gcuaaugagucuuuaucug

SEQ ID NO: 556689 - RNA, 19 nt, Homo sapiens
  misc_RNA (1)...(19): siRNA sense strand
ccauagaucaucaaacuuc

SEQ ID NO: 556690 - RNA, 19 nt, Homo sapiens
  misc_RNA (1)...(19): siRNA sense strand
uauaugcugucgaaaucaa

SEQ ID NO: 556691 - RNA, 19 nt, Homo sapiens
  misc_RNA (1)...(19): siRNA sense strand
agguuucucuugcuaauga

SEQ ID NO: 556692 - RNA, 19 nt, Homo sapiens
  misc_RNA (1)...(19): siRNA sense strand
cuccauagaucaucaaacu

SEQ ID NO: 556693 - RNA, 19 nt, Homo sapiens
  misc_RNA (1)...(19): siRNA sense strand
gcccaucuaugaaccucuu

SEQ ID NO: 556694 - RNA, 19 nt, Homo sapiens
  misc_RNA (1)...(19): siRNA sense strand
cauagaucaucaaacuuca

SEQ ID NO: 556695 - RNA, 19 nt, Homo sapiens
  misc_RNA (1)...(19): siRNA sense strand
ucaagggugugagaacaug

SEQ ID NO: 556696 - RNA, 19 nt, Homo sapiens
  misc_RNA (1)...(19): siRNA sense strand
gaaccucuucucccaugga

SEQ ID NO: 556697 - RNA, 19 nt, Homo sapiens
  misc_RNA (1)...(19): siRNA sense strand
auuauaugcugucgaaauc

SEQ ID NO: 556698 - RNA, 19 nt, Homo sapiens
  misc_RNA (1)...(19): siRNA sense strand
aacaugugcccaucuauga

SEQ ID NO: 556699 - RNA, 19 nt, Homo sapiens
  misc_RNA (1)...(19): siRNA sense strand
acagguuucucuugcuaau

SEQ ID NO: 556700 - RNA, 19 nt, Homo sapiens
  misc_RNA (1)...(19): siRNA sense strand
ccagaggaacaucaaguca

SEQ ID NO: 556701 - RNA, 19 nt, Homo sapiens
  misc_RNA (1)...(19): siRNA sense strand
gcugucgaaaucaaucuuu

SEQ ID NO: 556702 - RNA, 19 nt, Homo sapiens
  misc_RNA (1)...(19): siRNA sense strand
acgaggaugcaaauuauau

SEQ ID NO: 556703 - RNA, 19 nt, Homo sapiens
  misc_RNA (1)...(19): siRNA sense strand
cgaggaugcaaauuauaug

SEQ ID NO: 556704 - RNA, 19 nt, Homo sapiens
  misc_RNA (1)...(19): siRNA sense strand
cauggaacgaggaugcaaa

SEQ ID NO: 556705 - RNA, 19 nt, Homo sapiens
  misc_RNA (1)...(19): siRNA sense strand
gaacgaggaugcaaauuau

SEQ ID NO: 556706 - RNA, 19 nt, Homo sapiens
  misc_RNA (1)...(19): siRNA sense strand
ggaacgaggaugcaaauua

SEQ ID NO: 556707 - RNA, 19 nt, Homo sapiens
  misc_RNA (1)...(19): siRNA sense strand
gaacagguuucucuugcua

SEQ ID NO: 556708 - RNA, 19 nt, Homo sapiens
  misc_RNA (1)...(19): siRNA sense strand
caaauuauaugcugucgaa

SEQ ID NO: 556709 - RNA, 19 nt, Homo sapiens
  misc_RNA (1)...(19): siRNA sense strand
gagaacaugugcccaucua

SEQ ID NO: 556710 - RNA, 19 nt, Homo sapiens
  misc_RNA (1)...(19): siRNA sense strand
gaacaucaagucagccuaa

SEQ ID NO: 556711 - RNA, 19 nt, Homo sapiens
  misc_RNA (1)...(19): siRNA sense strand
gaacaugugcccaucuaug

SEQ ID NO: 556712 - RNA, 19 nt, Homo sapiens
  misc_RNA (1)...(19): siRNA sense strand
caucaagucagccuaauga

SEQ ID NO: 556713 - RNA, 19 nt, Homo sapiens
  misc_RNA (1)...(19): siRNA sense strand
gcuaaugagucuuuaucug

SEQ ID NO: 556714 - RNA, 19 nt, Homo sapiens
  misc_RNA (1)...(19): siRNA sense strand
ccauagaucaucaaacuuc

SEQ ID NO: 556715 - RNA, 19 nt, Homo sapiens
  misc_RNA (1)...(19): siRNA sense strand
uauaugcugucgaaaucaa

SEQ ID NO: 556716 - RNA, 19 nt, Homo sapiens
  misc_RNA (1)...(19): siRNA sense strand
agguuucucuugcuaauga

SEQ ID NO: 556717 - RNA, 19 nt, Homo sapiens
  misc_RNA (1)...(19): siRNA sense strand
cuccauagaucaucaaacu

SEQ ID NO: 556718 - RNA, 19 nt, Homo sapiens
  misc_RNA (1)...(19): siRNA sense strand
gcccaucuaugaaccucuu

SEQ ID NO: 556719 - RNA, 19 nt, Homo sapiens
  misc_RNA (1)...(19): siRNA sense strand
cauagaucaucaaacuuca

SEQ ID NO: 556720 - RNA, 19 nt, Homo sapiens
  misc_RNA (1)...(19): siRNA sense strand
ucaagggugugagaacaug

SEQ ID NO: 556721 - RNA, 19 nt, Homo sapiens
  misc_RNA (1)...(19): siRNA sense strand
gaaccucuucucccaugga

SEQ ID NO: 556722 - RNA, 19 nt, Homo sapiens
  misc_RNA (1)...(19): siRNA sense strand
auuauaugcugucgaaauc

SEQ ID NO: 556723 - RNA, 19 nt, Homo sapiens
  misc_RNA (1)...(19): siRNA sense strand
aacaugugcccaucuauga

SEQ ID NO: 556724 - RNA, 19 nt, Homo sapiens
  misc_RNA (1)...(19): siRNA sense strand
acagguuucucuugcuaau

SEQ ID NO: 556725 - RNA, 19 nt, Homo sapiens
  misc_RNA (1)...(19): siRNA sense strand
ccagaggaacaucaaguca

SEQ ID NO: 556726 - RNA, 19 nt, Homo sapiens
  misc_RNA (1)...(19): siRNA sense strand
gcugucgaaaucaaucuuu

SEQ ID NO: 556727 - RNA, 19 nt, Homo sapiens
  misc_RNA (1)...(19): siRNA sense strand
acgaggaugcaaauuauau

SEQ ID NO: 556728 - RNA, 19 nt, Homo sapiens
  misc_RNA (1)...(19): siRNA sense strand
cgaggaugcaaauuauaug

SEQ ID NO: 556729 - RNA, 19 nt, Homo sapiens
  misc_RNA (1)...(19): siRNA sense strand
cauggaacgaggaugcaaa

SEQ ID NO: 556730 - RNA, 19 nt, Homo sapiens
  misc_RNA (1)...(19): siRNA sense strand
gaacgaggaugcaaauuau

SEQ ID NO: 556731 - RNA, 19 nt, Homo sapiens
  misc_RNA (1)...(19): siRNA sense strand
ggaacgaggaugcaaauua

SEQ ID NO: 556732 - RNA, 19 nt, Homo sapiens
  misc_RNA (1)...(19): siRNA sense strand
gaacagguuucucuugcua

SEQ ID NO: 556733 - RNA, 19 nt, Homo sapiens
  misc_RNA (1)...(19): siRNA sense strand
caaauuauaugcugucgaa

SEQ ID NO: 556734 - RNA, 19 nt, Homo sapiens
  misc_RNA (1)...(19): siRNA sense strand
gagaacaugugcccaucua

SEQ ID NO: 556735 - RNA, 19 nt, Homo sapiens
  misc_RNA (1)...(19): siRNA sense strand
gaacaucaagucagccuaa

SEQ ID NO: 556736 - RNA, 19 nt, Homo sapiens
  misc_RNA (1)...(19): siRNA sense strand
gaacaugugcccaucuaug

SEQ ID NO: 556737 - RNA, 19 nt, Homo sapiens
  misc_RNA (1)...(19): siRNA sense strand
caucaagucagccuaauga

SEQ ID NO: 556738 - RNA, 19 nt, Homo sapiens
  misc_RNA (1)...(19): siRNA sense strand
gcuaaugagucuuuaucug

SEQ ID NO: 556739 - RNA, 19 nt, Homo sapiens
  misc_RNA (1)...(19): siRNA sense strand
ccauagaucaucaaacuuc

SEQ ID NO: 556740 - RNA, 19 nt, Homo sapiens
  misc_RNA (1)...(19): siRNA sense strand
uauaugcugucgaaaucaa

SEQ ID NO: 556741 - RNA, 19 nt, Homo sapiens
  misc_RNA (1)...(19): siRNA sense strand
agguuucucuugcuaauga

SEQ ID NO: 556742 - RNA, 19 nt, Homo sapiens
  misc_RNA (1)...(19): siRNA sense strand
cuccauagaucaucaaacu

SEQ ID NO: 556743 - RNA, 19 nt, Homo sapiens
  misc_RNA (1)...(19): siRNA sense strand
gcccaucuaugaaccucuu

SEQ ID NO: 556744 - RNA, 19 nt, Homo sapiens
  misc_RNA (1)...(19): siRNA sense strand
cauagaucaucaaacuuca

SEQ ID NO: 556745 - RNA, 19 nt, Homo sapiens
  misc_RNA (1)...(19): siRNA sense strand
ucaagggugugagaacaug

SEQ ID NO: 556746 - RNA, 19 nt, Homo sapiens
  misc_RNA (1)...(19): siRNA sense strand
gaaccucuucucccaugga

SEQ ID NO: 556747 - RNA, 19 nt, Homo sapiens
  misc_RNA (1)...(19): siRNA sense strand
auuauaugcugucgaaauc

SEQ ID NO: 556748 - RNA, 19 nt, Homo sapiens
  misc_RNA (1)...(19): siRNA sense strand
aacaugugcccaucuauga

SEQ ID NO: 556749 - RNA, 19 nt, Homo sapiens
  misc_RNA (1)...(19): siRNA sense strand
acagguuucucuugcuaau

SEQ ID NO: 556750 - RNA, 19 nt, Homo sapiens
  misc_RNA (1)...(19): siRNA sense strand
ccagaggaacaucaaguca

SEQ ID NO: 556751 - RNA, 19 nt, Homo sapiens
  misc_RNA (1)...(19): siRNA sense strand
gcugucgaaaucaaucuuu

SEQ ID NO: 556752 - RNA, 19 nt, Homo sapiens
  misc_RNA (1)...(19): siRNA sense strand
acgaggaugcaaauuauau

SEQ ID NO: 556753 - RNA, 19 nt, Homo sapiens
  misc_RNA (1)...(19): siRNA sense strand
cgaggaugcaaauuauaug

SEQ ID NO: 556754 - RNA, 19 nt, Homo sapiens
  misc_RNA (1)...(19): siRNA sense strand
cauggaacgaggaugcaaa

SEQ ID NO: 556755 - RNA, 19 nt, Homo sapiens
  misc_RNA (1)...(19): siRNA sense strand
gaacgaggaugcaaauuau

SEQ ID NO: 556756 - RNA, 19 nt, Homo sapiens
  misc_RNA (1)...(19): siRNA sense strand
ggaacgaggaugcaaauua

SEQ ID NO: 556757 - RNA, 19 nt, Homo sapiens
  misc_RNA (1)...(19): siRNA sense strand
gaacagguuucucuugcua

SEQ ID NO: 556758 - RNA, 19 nt, Homo sapiens
  misc_RNA (1)...(19): siRNA sense strand
caaauuauaugcugucgaa

SEQ ID NO: 556759 - RNA, 19 nt, Homo sapiens
  misc_RNA (1)...(19): siRNA sense strand
gagaacaugugcccaucua

SEQ ID NO: 556760 - RNA, 19 nt, Homo sapiens
  misc_RNA (1)...(19): siRNA sense strand
gaacaucaagucagccuaa

SEQ ID NO: 556761 - RNA, 19 nt, Homo sapiens
  misc_RNA (1)...(19): siRNA sense strand
gaacaugugcccaucuaug

SEQ ID NO: 556762 - RNA, 19 nt, Homo sapiens
  misc_RNA (1)...(19): siRNA sense strand
caucaagucagccuaauga

SEQ ID NO: 556763 - RNA, 19 nt, Homo sapiens
  misc_RNA (1)...(19): siRNA sense strand
gcuaaugagucuuuaucug

SEQ ID NO: 556764 - RNA, 19 nt, Homo sapiens
  misc_RNA (1)...(19): siRNA sense strand
ccauagaucaucaaacuuc

SEQ ID NO: 556765 - RNA, 19 nt, Homo sapiens
  misc_RNA (1)...(19): siRNA sense strand
uauaugcugucgaaaucaa

SEQ ID NO: 556766 - RNA, 19 nt, Homo sapiens
  misc_RNA (1)...(19): siRNA sense strand
agguuucucuugcuaauga

SEQ ID NO: 556767 - RNA, 19 nt, Homo sapiens
  misc_RNA (1)...(19): siRNA sense strand
cuccauagaucaucaaacu

SEQ ID NO: 556768 - RNA, 19 nt, Homo sapiens
  misc_RNA (1)...(19): siRNA sense strand
gcccaucuaugaaccucuu

SEQ ID NO: 556769 - RNA, 19 nt, Homo sapiens
  misc_RNA (1)...(19): siRNA sense strand
cauagaucaucaaacuuca

SEQ ID NO: 556770 - RNA, 19 nt, Homo sapiens
  misc_RNA (1)...(19): siRNA sense strand
ucaagggugugagaacaug

SEQ ID NO: 556771 - RNA, 19 nt, Homo sapiens
  misc_RNA (1)...(19): siRNA sense strand
gaaccucuucucccaugga

SEQ ID NO: 556772 - RNA, 19 nt, Homo sapiens
  misc_RNA (1)...(19): siRNA sense strand
auuauaugcugucgaaauc

SEQ ID NO: 556773 - RNA, 19 nt, Homo sapiens
  misc_RNA (1)...(19): siRNA sense strand
aacaugugcccaucuauga

SEQ ID NO: 556774 - RNA, 19 nt, Homo sapiens
  misc_RNA (1)...(19): siRNA sense strand
acagguuucucuugcuaau

SEQ ID NO: 556775 - RNA, 19 nt, Homo sapiens
  misc_RNA (1)...(19): siRNA sense strand
ccagaggaacaucaaguca

SEQ ID NO: 556776 - RNA, 19 nt, Homo sapiens
  misc_RNA (1)...(19): siRNA sense strand
gcugucgaaaucaaucuuu

SEQ ID NO: 556777 - RNA, 19 nt, Homo sapiens
  misc_RNA (1)...(19): siRNA sense strand
acgaggaugcaaauuauau

SEQ ID NO: 556778 - RNA, 19 nt, Homo sapiens
  misc_RNA (1)...(19): siRNA sense strand
cgaggaugcaaauuauaug

SEQ ID NO: 556779 - RNA, 19 nt, Homo sapiens
  misc_RNA (1)...(19): siRNA sense strand
cauggaacgaggaugcaaa

SEQ ID NO: 556780 - RNA, 19 nt, Homo sapiens
  misc_RNA (1)...(19): siRNA sense strand
gaacgaggaugcaaauuau

SEQ ID NO: 556781 - RNA, 19 nt, Homo sapiens
  misc_RNA (1)...(19): siRNA sense strand
ggaacgaggaugcaaauua

SEQ ID NO: 556782 - RNA, 19 nt, Homo sapiens
  misc_RNA (1)...(19): siRNA sense strand
gaacagguuucucuugcua

SEQ ID NO: 556783 - RNA, 19 nt, Homo sapiens
  misc_RNA (1)...(19): siRNA sense strand
caaauuauaugcugucgaa

SEQ ID NO: 556784 - RNA, 19 nt, Homo sapiens
  misc_RNA (1)...(19): siRNA sense strand
gagaacaugugcccaucua

SEQ ID NO: 556785 - RNA, 19 nt, Homo sapiens
  misc_RNA (1)...(19): siRNA sense strand
gaacaucaagucagccuaa

SEQ ID NO: 556786 - RNA, 19 nt, Homo sapiens
  misc_RNA (1)...(19): siRNA sense strand
gaacaugugcccaucuaug

SEQ ID NO: 556787 - RNA, 19 nt, Homo sapiens
  misc_RNA (1)...(19): siRNA sense strand
caucaagucagccuaauga

SEQ ID NO: 556788 - RNA, 19 nt, Homo sapiens
  misc_RNA (1)...(19): siRNA sense strand
gcuaaugagucuuuaucug

SEQ ID NO: 556789 - RNA, 19 nt, Homo sapiens
  misc_RNA (1)...(19): siRNA sense strand
ccauagaucaucaaacuuc

SEQ ID NO: 556790 - RNA, 19 nt, Homo sapiens
  misc_RNA (1)...(19): siRNA sense strand
uauaugcugucgaaaucaa

SEQ ID NO: 556791 - RNA, 19 nt, Homo sapiens
  misc_RNA (1)...(19): siRNA sense strand
agguuucucuugcuaauga

SEQ ID NO: 556792 - RNA, 19 nt, Homo sapiens
  misc_RNA (1)...(19): siRNA sense strand
cuccauagaucaucaaacu

SEQ ID NO: 556793 - RNA, 19 nt, Homo sapiens
  misc_RNA (1)...(19): siRNA sense strand
gcccaucuaugaaccucuu

SEQ ID NO: 556794 - RNA, 19 nt, Homo sapiens
  misc_RNA (1)...(19): siRNA sense strand
cauagaucaucaaacuuca

SEQ ID NO: 556795 - RNA, 19 nt, Homo sapiens
  misc_RNA (1)...(19): siRNA sense strand
ucaagggugugagaacaug

SEQ ID NO: 556796 - RNA, 19 nt, Homo sapiens
  misc_RNA (1)...(19): siRNA sense strand
gaaccucuucucccaugga

SEQ ID NO: 556797 - RNA, 19 nt, Homo sapiens
  misc_RNA (1)...(19): siRNA sense strand
auuauaugcugucgaaauc

SEQ ID NO: 556798 - RNA, 19 nt, Homo sapiens
  misc_RNA (1)...(19): siRNA sense strand
aacaugugcccaucuauga

SEQ ID NO: 556799 - RNA, 19 nt, Homo sapiens
  misc_RNA (1)...(19): siRNA sense strand
acagguuucucuugcuaau

SEQ ID NO: 556800 - RNA, 19 nt, Homo sapiens
  misc_RNA (1)...(19): siRNA sense strand
ccagaggaacaucaaguca

SEQ ID NO: 556801 - RNA, 19 nt, Homo sapiens
  misc_RNA (1)...(19): siRNA sense strand
gcugucgaaaucaaucuuu

SEQ ID NO: 556802 - RNA, 19 nt, Homo sapiens
  misc_RNA (1)...(19): siRNA sense strand
acgaggaugcaaauuauau

SEQ ID NO: 556803 - RNA, 19 nt, Homo sapiens
  misc_RNA (1)...(19): siRNA sense strand
cgaggaugcaaauuauaug

SEQ ID NO: 556804 - RNA, 19 nt, Homo sapiens
  misc_RNA (1)...(19): siRNA sense strand
cauggaacgaggaugcaaa

SEQ ID NO: 556805 - RNA, 19 nt, Homo sapiens
  misc_RNA (1)...(19): siRNA sense strand
gaacgaggaugcaaauuau

SEQ ID NO: 556806 - RNA, 19 nt, Homo sapiens
  misc_RNA (1)...(19): siRNA sense strand
ggaacgaggaugcaaauua

SEQ ID NO: 556807 - RNA, 19 nt, Homo sapiens
  misc_RNA (1)...(19): siRNA sense strand
gaacagguuucucuugcua

SEQ ID NO: 556808 - RNA, 19 nt, Homo sapiens
  misc_RNA (1)...(19): siRNA sense strand
caaauuauaugcugucgaa

SEQ ID NO: 556809 - RNA, 19 nt, Homo sapiens
  misc_RNA (1)...(19): siRNA sense strand
gagaacaugugcccaucua

SEQ ID NO: 556810 - RNA, 19 nt, Homo sapiens
  misc_RNA (1)...(19): siRNA sense strand
gaacaucaagucagccuaa

SEQ ID NO: 556811 - RNA, 19 nt, Homo sapiens
  misc_RNA (1)...(19): siRNA sense strand
gaacaugugcccaucuaug

SEQ ID NO: 556812 - RNA, 19 nt, Homo sapiens
  misc_RNA (1)...(19): siRNA sense strand
caucaagucagccuaauga

SEQ ID NO: 556813 - RNA, 19 nt, Homo sapiens
  misc_RNA (1)...(19): siRNA sense strand
gcuaaugagucuuuaucug

SEQ ID NO: 556814 - RNA, 19 nt, Homo sapiens
  misc_RNA (1)...(19): siRNA sense strand
ccauagaucaucaaacuuc

SEQ ID NO: 556815 - RNA, 19 nt, Homo sapiens
  misc_RNA (1)...(19): siRNA sense strand
uauaugcugucgaaaucaa

SEQ ID NO: 556816 - RNA, 19 nt, Homo sapiens
  misc_RNA (1)...(19): siRNA sense strand
agguuucucuugcuaauga

SEQ ID NO: 556817 - RNA, 19 nt, Homo sapiens
  misc_RNA (1)...(19): siRNA sense strand
cuccauagaucaucaaacu

SEQ ID NO: 556818 - RNA, 19 nt, Homo sapiens
  misc_RNA (1)...(19): siRNA sense strand
gcccaucuaugaaccucuu

SEQ ID NO: 556819 - RNA, 19 nt, Homo sapiens
  misc_RNA (1)...(19): siRNA sense strand
cauagaucaucaaacuuca

SEQ ID NO: 556820 - RNA, 19 nt, Homo sapiens
  misc_RNA (1)...(19): siRNA sense strand
ucaagggugugagaacaug

SEQ ID NO: 556821 - RNA, 19 nt, Homo sapiens
  misc_RNA (1)...(19): siRNA sense strand
gaaccucuucucccaugga

SEQ ID NO: 556822 - RNA, 19 nt, Homo sapiens
  misc_RNA (1)...(19): siRNA sense strand
auuauaugcugucgaaauc

SEQ ID NO: 556823 - RNA, 19 nt, Homo sapiens
  misc_RNA (1)...(19): siRNA sense strand
aacaugugcccaucuauga

SEQ ID NO: 556824 - RNA, 19 nt, Homo sapiens
  misc_RNA (1)...(19): siRNA sense strand
acagguuucucuugcuaau

SEQ ID NO: 556825 - RNA, 19 nt, Homo sapiens
  misc_RNA (1)...(19): siRNA sense strand
ccagaggaacaucaaguca

SEQ ID NO: 556826 - RNA, 19 nt, Homo sapiens
  misc_RNA (1)...(19): siRNA sense strand
gcugucgaaaucaaucuuu

SEQ ID NO: 556827 - RNA, 19 nt, Homo sapiens
  misc_RNA (1)...(19): siRNA sense strand
acgaggaugcaaauuauau

SEQ ID NO: 556828 - RNA, 19 nt, Homo sapiens
  misc_RNA (1)...(19): siRNA sense strand
cgaggaugcaaauuauaug

SEQ ID NO: 556829 - RNA, 19 nt, Homo sapiens
  misc_RNA (1)...(19): siRNA sense strand
cauggaacgaggaugcaaa

SEQ ID NO: 556830 - RNA, 19 nt, Homo sapiens
  misc_RNA (1)...(19): siRNA sense strand
gaacgaggaugcaaauuau

SEQ ID NO: 556831 - RNA, 19 nt, Homo sapiens
  misc_RNA (1)...(19): siRNA sense strand
ggaacgaggaugcaaauua

SEQ ID NO: 556832 - RNA, 19 nt, Homo sapiens
  misc_RNA (1)...(19): siRNA sense strand
gaacagguuucucuugcua

SEQ ID NO: 556833 - RNA, 19 nt, Homo sapiens
  misc_RNA (1)...(19): siRNA sense strand
caaauuauaugcugucgaa

SEQ ID NO: 556834 - RNA, 19 nt, Homo sapiens
  misc_RNA (1)...(19): siRNA sense strand
gagaacaugugcccaucua

SEQ ID NO: 556835 - RNA, 19 nt, Homo sapiens
  misc_RNA (1)...(19): siRNA sense strand
gaacaucaagucagccuaa

SEQ ID NO: 556836 - RNA, 19 nt, Homo sapiens
  misc_RNA (1)...(19): siRNA sense strand
gaacaugugcccaucuaug

SEQ ID NO: 556837 - RNA, 19 nt, Homo sapiens
  misc_RNA (1)...(19): siRNA sense strand
caucaagucagccuaauga

SEQ ID NO: 556838 - RNA, 19 nt, Homo sapiens
  misc_RNA (1)...(19): siRNA sense strand
gcuaaugagucuuuaucug

SEQ ID NO: 556839 - RNA, 19 nt, Homo sapiens
  misc_RNA (1)...(19): siRNA sense strand
ccauagaucaucaaacuuc

SEQ ID NO: 556840 - RNA, 19 nt, Homo sapiens
  misc_RNA (1)...(19): siRNA sense strand
uauaugcugucgaaaucaa

SEQ ID NO: 556841 - RNA, 19 nt, Homo sapiens
  misc_RNA (1)...(19): siRNA sense strand
agguuucucuugcuaauga

SEQ ID NO: 556842 - RNA, 19 nt, Homo sapiens
  misc_RNA (1)...(19): siRNA sense strand
cuccauagaucaucaaacu

SEQ ID NO: 556843 - RNA, 19 nt, Homo sapiens
  misc_RNA (1)...(19): siRNA sense strand
gcccaucuaugaaccucuu

SEQ ID NO: 556844 - RNA, 19 nt, Homo sapiens
  misc_RNA (1)...(19): siRNA sense strand
cauagaucaucaaacuuca

SEQ ID NO: 556845 - RNA, 19 nt, Homo sapiens
  misc_RNA (1)...(19): siRNA sense strand
ucaagggugugagaacaug

SEQ ID NO: 556846 - RNA, 19 nt, Homo sapiens
  misc_RNA (1)...(19): siRNA sense strand
gaaccucuucucccaugga

SEQ ID NO: 556847 - RNA, 19 nt, Homo sapiens
  misc_RNA (1)...(19): siRNA sense strand
auuauaugcugucgaaauc

SEQ ID NO: 556848 - RNA, 19 nt, Homo sapiens
  misc_RNA (1)...(19): siRNA sense strand
aacaugugcccaucuauga

SEQ ID NO: 556849 - RNA, 19 nt, Homo sapiens
  misc_RNA (1)...(19): siRNA sense strand
acagguuucucuugcuaau

SEQ ID NO: 556850 - RNA, 19 nt, Homo sapiens
  misc_RNA (1)...(19): siRNA sense strand
ccagaggaacaucaaguca

SEQ ID NO: 556851 - RNA, 19 nt, Homo sapiens
  misc_RNA (1)...(19): siRNA sense strand
gcugucgaaaucaaucuuu

SEQ ID NO: 556852 - RNA, 19 nt, Homo sapiens
  misc_RNA (1)...(19): siRNA sense strand
acgaggaugcaaauuauau

SEQ ID NO: 556853 - RNA, 19 nt, Homo sapiens
  misc_RNA (1)...(19): siRNA sense strand
cgaggaugcaaauuauaug

SEQ ID NO: 556854 - RNA, 19 nt, Homo sapiens
  misc_RNA (1)...(19): siRNA sense strand
cauggaacgaggaugcaaa

SEQ ID NO: 556855 - RNA, 19 nt, Homo sapiens
  misc_RNA (1)...(19): siRNA sense strand
gaacgaggaugcaaauuau

SEQ ID NO: 556856 - RNA, 19 nt, Homo sapiens
  misc_RNA (1)...(19): siRNA sense strand
ggaacgaggaugcaaauua

SEQ ID NO: 556857 - RNA, 19 nt, Homo sapiens
  misc_RNA (1)...(19): siRNA sense strand
gaacagguuucucuugcua

SEQ ID NO: 556858 - RNA, 19 nt, Homo sapiens
  misc_RNA (1)...(19): siRNA sense strand
caaauuauaugcugucgaa

SEQ ID NO: 556859 - RNA, 19 nt, Homo sapiens
  misc_RNA (1)...(19): siRNA sense strand
gagaacaugugcccaucua

SEQ ID NO: 556860 - RNA, 19 nt, Homo sapiens
  misc_RNA (1)...(19): siRNA sense strand
gaacaucaagucagccuaa

SEQ ID NO: 556861 - RNA, 19 nt, Homo sapiens
  misc_RNA (1)...(19): siRNA sense strand
gaacaugugcccaucuaug

SEQ ID NO: 556862 - RNA, 19 nt, Homo sapiens
  misc_RNA (1)...(19): siRNA sense strand
caucaagucagccuaauga

SEQ ID NO: 556863 - RNA, 19 nt, Homo sapiens
  misc_RNA (1)...(19): siRNA sense strand
gcuaaugagucuuuaucug

SEQ ID NO: 556864 - RNA, 19 nt, Homo sapiens
  misc_RNA (1)...(19): siRNA sense strand
ccauagaucaucaaacuuc

SEQ ID NO: 556865 - RNA, 19 nt, Homo sapiens
  misc_RNA (1)...(19): siRNA sense strand
uauaugcugucgaaaucaa

SEQ ID NO: 556866 - RNA, 19 nt, Homo sapiens
  misc_RNA (1)...(19): siRNA sense strand
agguuucucuugcuaauga

SEQ ID NO: 556867 - RNA, 19 nt, Homo sapiens
  misc_RNA (1)...(19): siRNA sense strand
cuccauagaucaucaaacu

SEQ ID NO: 556868 - RNA, 19 nt, Homo sapiens
  misc_RNA (1)...(19): siRNA sense strand
gcccaucuaugaaccucuu

SEQ ID NO: 556869 - RNA, 19 nt, Homo sapiens
  misc_RNA (1)...(19): siRNA sense strand
cauagaucaucaaacuuca

SEQ ID NO: 556870 - RNA, 19 nt, Homo sapiens
  misc_RNA (1)...(19): siRNA sense strand
ucaagggugugagaacaug

SEQ ID NO: 556871 - RNA, 19 nt, Homo sapiens
  misc_RNA (1)...(19): siRNA sense strand
gaaccucuucucccaugga

SEQ ID NO: 556872 - RNA, 19 nt, Homo sapiens
  misc_RNA (1)...(19): siRNA sense strand
auuauaugcugucgaaauc

SEQ ID NO: 556873 - RNA, 19 nt, Homo sapiens
  misc_RNA (1)...(19): siRNA sense strand
aacaugugcccaucuauga

SEQ ID NO: 556874 - RNA, 19 nt, Homo sapiens
  misc_RNA (1)...(19): siRNA sense strand
acagguuucucuugcuaau

SEQ ID NO: 556875 - RNA, 19 nt, Homo sapiens
  misc_RNA (1)...(19): siRNA sense strand
ccagaggaacaucaaguca

SEQ ID NO: 556876 - RNA, 19 nt, Homo sapiens
  misc_RNA (1)...(19): siRNA sense strand
gcugucgaaaucaaucuuu

SEQ ID NO: 556877 - RNA, 19 nt, Homo sapiens
  misc_RNA (1)...(19): siRNA sense strand
acgaggaugcaaauuauau

SEQ ID NO: 556878 - RNA, 19 nt, Homo sapiens
  misc_RNA (1)...(19): siRNA sense strand
cgaggaugcaaauuauaug

SEQ ID NO: 556879 - RNA, 19 nt, Homo sapiens
  misc_RNA (1)...(19): siRNA sense strand
cauggaacgaggaugcaaa

SEQ ID NO: 556880 - RNA, 19 nt, Homo sapiens
  misc_RNA (1)...(19): siRNA sense strand
gaacgaggaugcaaauuau

SEQ ID NO: 556881 - RNA, 19 nt, Homo sapiens
  misc_RNA (1)...(19): siRNA sense strand
ggaacgaggaugcaaauua

SEQ ID NO: 556882 - RNA, 19 nt, Homo sapiens
  misc_RNA (1)...(19): siRNA sense strand
gaacagguuucucuugcua

SEQ ID NO: 556883 - RNA, 19 nt, Homo sapiens
  misc_RNA (1)...(19): siRNA sense strand
caaauuauaugcugucgaa

SEQ ID NO: 556884 - RNA, 19 nt, Homo sapiens
  misc_RNA (1)...(19): siRNA sense strand
gagaacaugugcccaucua

SEQ ID NO: 556885 - RNA, 19 nt, Homo sapiens
  misc_RNA (1)...(19): siRNA sense strand
gaacaucaagucagccuaa

SEQ ID NO: 556886 - RNA, 19 nt, Homo sapiens
  misc_RNA (1)...(19): siRNA sense strand
gaacaugugcccaucuaug

SEQ ID NO: 556887 - RNA, 19 nt, Homo sapiens
  misc_RNA (1)...(19): siRNA sense strand
caucaagucagccuaauga

SEQ ID NO: 556888 - RNA, 19 nt, Homo sapiens
  misc_RNA (1)...(19): siRNA sense strand
gcuaaugagucuuuaucug

SEQ ID NO: 556889 - RNA, 19 nt, Homo sapiens
  misc_RNA (1)...(19): siRNA sense strand
ccauagaucaucaaacuuc

SEQ ID NO: 556890 - RNA, 19 nt, Homo sapiens
  misc_RNA (1)...(19): siRNA sense strand
uauaugcugucgaaaucaa

SEQ ID NO: 556891 - RNA, 19 nt, Homo sapiens
  misc_RNA (1)...(19): siRNA sense strand
agguuucucuugcuaauga

SEQ ID NO: 556892 - RNA, 19 nt, Homo sapiens
  misc_RNA (1)...(19): siRNA sense strand
cuccauagaucaucaaacu

SEQ ID NO: 556893 - RNA, 19 nt, Homo sapiens
  misc_RNA (1)...(19): siRNA sense strand
gcccaucuaugaaccucuu

SEQ ID NO: 556894 - RNA, 19 nt, Homo sapiens
  misc_RNA (1)...(19): siRNA sense strand
cauagaucaucaaacuuca

SEQ ID NO: 556895 - RNA, 19 nt, Homo sapiens
  misc_RNA (1)...(19): siRNA sense strand
ucaagggugugagaacaug

SEQ ID NO: 556896 - RNA, 19 nt, Homo sapiens
  misc_RNA (1)...(19): siRNA sense strand
gaaccucuucucccaugga

SEQ ID NO: 556897 - RNA, 19 nt, Homo sapiens
  misc_RNA (1)...(19): siRNA sense strand
auuauaugcugucgaaauc

SEQ ID NO: 556898 - RNA, 19 nt, Homo sapiens
  misc_RNA (1)...(19): siRNA sense strand
aacaugugcccaucuauga

SEQ ID NO: 556899 - RNA, 19 nt, Homo sapiens
  misc_RNA (1)...(19): siRNA sense strand
acagguuucucuugcuaau

SEQ ID NO: 556900 - RNA, 19 nt, Homo sapiens
  misc_RNA (1)...(19): siRNA sense strand
ccagaggaacaucaaguca

SEQ ID NO: 556901 - RNA, 19 nt, Homo sapiens
  misc_RNA (1)...(19): siRNA sense strand
gcugucgaaaucaaucuuu

SEQ ID NO: 556902 - RNA, 19 nt, Homo sapiens
  misc_RNA (1)...(19): siRNA sense strand
acgaggaugcaaauuauau

SEQ ID NO: 556903 - RNA, 19 nt, Homo sapiens
  misc_RNA (1)...(19): siRNA sense strand
cgaggaugcaaauuauaug

SEQ ID NO: 556904 - RNA, 19 nt, Homo sapiens
  misc_RNA (1)...(19): siRNA sense strand
cauggaacgaggaugcaaa

SEQ ID NO: 556905 - RNA, 19 nt, Homo sapiens
  misc_RNA (1)...(19): siRNA sense strand
gaacgaggaugcaaauuau

SEQ ID NO: 556906 - RNA, 19 nt, Homo sapiens
  misc_RNA (1)...(19): siRNA sense strand
ggaacgaggaugcaaauua

SEQ ID NO: 556907 - RNA, 19 nt, Homo sapiens
  misc_RNA (1)...(19): siRNA sense strand
gaacagguuucucuugcua

SEQ ID NO: 556908 - RNA, 19 nt, Homo sapiens
  misc_RNA (1)...(19): siRNA sense strand
caaauuauaugcugucgaa

SEQ ID NO: 556909 - RNA, 19 nt, Homo sapiens
  misc_RNA (1)...(19): siRNA sense strand
gagaacaugugcccaucua

SEQ ID NO: 556910 - RNA, 19 nt, Homo sapiens
  misc_RNA (1)...(19): siRNA sense strand
gaacaucaagucagccuaa

SEQ ID NO: 556911 - RNA, 19 nt, Homo sapiens
  misc_RNA (1)...(19): siRNA sense strand
gaacaugugcccaucuaug

SEQ ID NO: 556912 - RNA, 19 nt, Homo sapiens
  misc_RNA (1)...(19): siRNA sense strand
caucaagucagccuaauga

SEQ ID NO: 556913 - RNA, 19 nt, Homo sapiens
  misc_RNA (1)...(19): siRNA sense strand
gcuaaugagucuuuaucug

SEQ ID NO: 556914 - RNA, 19 nt, Homo sapiens
  misc_RNA (1)...(19): siRNA sense strand
ccauagaucaucaaacuuc

SEQ ID NO: 556915 - RNA, 19 nt, Homo sapiens
  misc_RNA (1)...(19): siRNA sense strand
uauaugcugucgaaaucaa

SEQ ID NO: 556916 - RNA, 19 nt, Homo sapiens
  misc_RNA (1)...(19): siRNA sense strand
agguuucucuugcuaauga

SEQ ID NO: 556917 - RNA, 19 nt, Homo sapiens
  misc_RNA (1)...(19): siRNA sense strand
cuccauagaucaucaaacu

SEQ ID NO: 556918 - RNA, 19 nt, Homo sapiens
  misc_RNA (1)...(19): siRNA sense strand
gcccaucuaugaaccucuu

SEQ ID NO: 556919 - RNA, 19 nt, Homo sapiens
  misc_RNA (1)...(19): siRNA sense strand
cauagaucaucaaacuuca

SEQ ID NO: 556920 - RNA, 19 nt, Homo sapiens
  misc_RNA (1)...(19): siRNA sense strand
ucaagggugugagaacaug

SEQ ID NO: 556921 - RNA, 19 nt, Homo sapiens
  misc_RNA (1)...(19): siRNA sense strand
gaaccucuucucccaugga

SEQ ID NO: 556922 - RNA, 19 nt, Homo sapiens
  misc_RNA (1)...(19): siRNA sense strand
auuauaugcugucgaaauc

SEQ ID NO: 556923 - RNA, 19 nt, Homo sapiens
  misc_RNA (1)...(19): siRNA sense strand
aacaugugcccaucuauga

SEQ ID NO: 556924 - RNA, 19 nt, Homo sapiens
  misc_RNA (1)...(19): siRNA sense strand
acagguuucucuugcuaau

SEQ ID NO: 556925 - RNA, 19 nt, Homo sapiens
  misc_RNA (1)...(19): siRNA sense strand
ccagaggaacaucaaguca

SEQ ID NO: 556926 - RNA, 19 nt, Homo sapiens
  misc_RNA (1)...(19): siRNA sense strand
gcugucgaaaucaaucuuu

SEQ ID NO: 556927 - RNA, 19 nt, Homo sapiens
  misc_RNA (1)...(19): siRNA sense strand
acgaggaugcaaauuauau

SEQ ID NO: 556928 - RNA, 19 nt, Homo sapiens
  misc_RNA (1)...(19): siRNA sense strand
cgaggaugcaaauuauaug

SEQ ID NO: 556929 - RNA, 19 nt, Homo sapiens
  misc_RNA (1)...(19): siRNA sense strand
cauggaacgaggaugcaaa

SEQ ID NO: 556930 - RNA, 19 nt, Homo sapiens
  misc_RNA (1)...(19): siRNA sense strand
gaacgaggaugcaaauuau

SEQ ID NO: 556931 - RNA, 19 nt, Homo sapiens
  misc_RNA (1)...(19): siRNA sense strand
ggaacgaggaugcaaauua

SEQ ID NO: 556932 - RNA, 19 nt, Homo sapiens
  misc_RNA (1)...(19): siRNA sense strand
gaacagguuucucuugcua

SEQ ID NO: 556933 - RNA, 19 nt, Homo sapiens
  misc_RNA (1)...(19): siRNA sense strand
caaauuauaugcugucgaa

SEQ ID NO: 556934 - RNA, 19 nt, Homo sapiens
  misc_RNA (1)...(19): siRNA sense strand
gagaacaugugcccaucua

SEQ ID NO: 556935 - RNA, 19 nt, Homo sapiens
  misc_RNA (1)...(19): siRNA sense strand
gaacaucaagucagccuaa

SEQ ID NO: 556936 - RNA, 19 nt, Homo sapiens
  misc_RNA (1)...(19): siRNA sense strand
gaacaugugcccaucuaug

SEQ ID NO: 556937 - RNA, 19 nt, Homo sapiens
  misc_RNA (1)...(19): siRNA sense strand
caucaagucagccuaauga

SEQ ID NO: 556938 - RNA, 19 nt, Homo sapiens
  misc_RNA (1)...(19): siRNA sense strand
gcuaaugagucuuuaucug

SEQ ID NO: 556939 - RNA, 19 nt, Homo sapiens
  misc_RNA (1)...(19): siRNA sense strand
ccauagaucaucaaacuuc

SEQ ID NO: 556940 - RNA, 19 nt, Homo sapiens
  misc_RNA (1)...(19): siRNA sense strand
uauaugcugucgaaaucaa

SEQ ID NO: 556941 - RNA, 19 nt, Homo sapiens
  misc_RNA (1)...(19): siRNA sense strand
agguuucucuugcuaauga

SEQ ID NO: 556942 - RNA, 19 nt, Homo sapiens
  misc_RNA (1)...(19): siRNA sense strand
cuccauagaucaucaaacu

SEQ ID NO: 556943 - RNA, 19 nt, Homo sapiens
  misc_RNA (1)...(19): siRNA sense strand
gcccaucuaugaaccucuu

SEQ ID NO: 556944 - RNA, 19 nt, Homo sapiens
  misc_RNA (1)...(19): siRNA sense strand
cauagaucaucaaacuuca

SEQ ID NO: 556945 - RNA, 19 nt, Homo sapiens
  misc_RNA (1)...(19): siRNA sense strand
ucaagggugugagaacaug

SEQ ID NO: 556946 - RNA, 19 nt, Homo sapiens
  misc_RNA (1)...(19): siRNA sense strand
gaaccucuucucccaugga

SEQ ID NO: 556947 - RNA, 19 nt, Homo sapiens
  misc_RNA (1)...(19): siRNA sense strand
auuauaugcugucgaaauc

SEQ ID NO: 556948 - RNA, 19 nt, Homo sapiens
  misc_RNA (1)...(19): siRNA sense strand
aacaugugcccaucuauga

SEQ ID NO: 556949 - RNA, 19 nt, Homo sapiens
  misc_RNA (1)...(19): siRNA sense strand
acagguuucucuugcuaau

SEQ ID NO: 556950 - RNA, 19 nt, Homo sapiens
  misc_RNA (1)...(19): siRNA sense strand
ccagaggaacaucaaguca

SEQ ID NO: 556951 - RNA, 19 nt, Homo sapiens
  misc_RNA (1)...(19): siRNA sense strand
gcugucgaaaucaaucuuu

SEQ ID NO: 556952 - RNA, 19 nt, Homo sapiens
  misc_RNA (1)...(19): siRNA sense strand
acgaggaugcaaauuauau

SEQ ID NO: 556953 - RNA, 19 nt, Homo sapiens
  misc_RNA (1)...(19): siRNA sense strand
cgaggaugcaaauuauaug

SEQ ID NO: 556954 - RNA, 19 nt, Homo sapiens
  misc_RNA (1)...(19): siRNA sense strand
cauggaacgaggaugcaaa

SEQ ID NO: 556955 - RNA, 19 nt, Homo sapiens
  misc_RNA (1)...(19): siRNA sense strand
gaacgaggaugcaaauuau

SEQ ID NO: 556956 - RNA, 19 nt, Homo sapiens
  misc_RNA (1)...(19): siRNA sense strand
ggaacgaggaugcaaauua

SEQ ID NO: 556957 - RNA, 19 nt, Homo sapiens
  misc_RNA (1)...(19): siRNA sense strand
gaacagguuucucuugcua

SEQ ID NO: 556958 - RNA, 19 nt, Homo sapiens
  misc_RNA (1)...(19): siRNA sense strand
caaauuauaugcugucgaa

SEQ ID NO: 556959 - RNA, 19 nt, Homo sapiens
  misc_RNA (1)...(19): siRNA sense strand
gagaacaugugcccaucua

SEQ ID NO: 556960 - RNA, 19 nt, Homo sapiens
  misc_RNA (1)...(19): siRNA sense strand
gaacaucaagucagccuaa

SEQ ID NO: 556961 - RNA, 19 nt, Homo sapiens
  misc_RNA (1)...(19): siRNA sense strand
gaacaugugcccaucuaug

SEQ ID NO: 556962 - RNA, 19 nt, Homo sapiens
  misc_RNA (1)...(19): siRNA sense strand
caucaagucagccuaauga

SEQ ID NO: 556963 - RNA, 19 nt, Homo sapiens
  misc_RNA (1)...(19): siRNA sense strand
gcuaaugagucuuuaucug

SEQ ID NO: 556964 - RNA, 19 nt, Homo sapiens
  misc_RNA (1)...(19): siRNA sense strand
ccauagaucaucaaacuuc

SEQ ID NO: 556965 - RNA, 19 nt, Homo sapiens
  misc_RNA (1)...(19): siRNA sense strand
uauaugcugucgaaaucaa

SEQ ID NO: 556966 - RNA, 19 nt, Homo sapiens
  misc_RNA (1)...(19): siRNA sense strand
agguuucucuugcuaauga

SEQ ID NO: 556967 - RNA, 19 nt, Homo sapiens
  misc_RNA (1)...(19): siRNA sense strand
cuccauagaucaucaaacu

SEQ ID NO: 556968 - RNA, 19 nt, Homo sapiens
  misc_RNA (1)...(19): siRNA sense strand
gcccaucuaugaaccucuu

SEQ ID NO: 556969 - RNA, 19 nt, Homo sapiens
  misc_RNA (1)...(19): siRNA sense strand
cauagaucaucaaacuuca

SEQ ID NO: 556970 - RNA, 19 nt, Homo sapiens
  misc_RNA (1)...(19): siRNA sense strand
ucaagggugugagaacaug

SEQ ID NO: 556971 - RNA, 19 nt, Homo sapiens
  misc_RNA (1)...(19): siRNA sense strand
gaaccucuucucccaugga

SEQ ID NO: 556972 - RNA, 19 nt, Homo sapiens
  misc_RNA (1)...(19): siRNA sense strand
auuauaugcugucgaaauc

SEQ ID NO: 556973 - RNA, 19 nt, Homo sapiens
  misc_RNA (1)...(19): siRNA sense strand
aacaugugcccaucuauga

SEQ ID NO: 556974 - RNA, 19 nt, Homo sapiens
  misc_RNA (1)...(19): siRNA sense strand
acagguuucucuugcuaau

SEQ ID NO: 556975 - RNA, 19 nt, Homo sapiens
  misc_RNA (1)...(19): siRNA sense strand
ccagaggaacaucaaguca

SEQ ID NO: 556976 - RNA, 19 nt, Homo sapiens
  misc_RNA (1)...(19): siRNA sense strand
gcugucgaaaucaaucuuu

SEQ ID NO: 556977 - RNA, 19 nt, Homo sapiens
  misc_RNA (1)...(19): siRNA sense strand
acgaggaugcaaauuauau

SEQ ID NO: 556978 - RNA, 19 nt, Homo sapiens
  misc_RNA (1)...(19): siRNA sense strand
cgaggaugcaaauuauaug

SEQ ID NO: 556979 - RNA, 19 nt, Homo sapiens
  misc_RNA (1)...(19): siRNA sense strand
cauggaacgaggaugcaaa

SEQ ID NO: 556980 - RNA, 19 nt, Homo sapiens
  misc_RNA (1)...(19): siRNA sense strand
gaacgaggaugcaaauuau

SEQ ID NO: 556981 - RNA, 19 nt, Homo sapiens
  misc_RNA (1)...(19): siRNA sense strand
ggaacgaggaugcaaauua

SEQ ID NO: 556982 - RNA, 19 nt, Homo sapiens
  misc_RNA (1)...(19): siRNA sense strand
gaacagguuucucuugcua

SEQ ID NO: 556983 - RNA, 19 nt, Homo sapiens
  misc_RNA (1)...(19): siRNA sense strand
caaauuauaugcugucgaa

SEQ ID NO: 556984 - RNA, 19 nt, Homo sapiens
  misc_RNA (1)...(19): siRNA sense strand
gagaacaugugcccaucua

SEQ ID NO: 556985 - RNA, 19 nt, Homo sapiens
  misc_RNA (1)...(19): siRNA sense strand
gaacaucaagucagccuaa

SEQ ID NO: 556986 - RNA, 19 nt, Homo sapiens
  misc_RNA (1)...(19): siRNA sense strand
gaacaugugcccaucuaug

SEQ ID NO: 556987 - RNA, 19 nt, Homo sapiens
  misc_RNA (1)...(19): siRNA sense strand
caucaagucagccuaauga

SEQ ID NO: 556988 - RNA, 19 nt, Homo sapiens
  misc_RNA (1)...(19): siRNA sense strand
gcuaaugagucuuuaucug

SEQ ID NO: 556989 - RNA, 19 nt, Homo sapiens
  misc_RNA (1)...(19): siRNA sense strand
ccauagaucaucaaacuuc

SEQ ID NO: 556990 - RNA, 19 nt, Homo sapiens
  misc_RNA (1)...(19): siRNA sense strand
uauaugcugucgaaaucaa

SEQ ID NO: 556991 - RNA, 19 nt, Homo sapiens
  misc_RNA (1)...(19): siRNA sense strand
agguuucucuugcuaauga

SEQ ID NO: 556992 - RNA, 19 nt, Homo sapiens
  misc_RNA (1)...(19): siRNA sense strand
cuccauagaucaucaaacu

SEQ ID NO: 556993 - RNA, 19 nt, Homo sapiens
  misc_RNA (1)...(19): siRNA sense strand
gcccaucuaugaaccucuu

SEQ ID NO: 556994 - RNA, 19 nt, Homo sapiens
  misc_RNA (1)...(19): siRNA sense strand
cauagaucaucaaacuuca

SEQ ID NO: 556995 - RNA, 19 nt, Homo sapiens
  misc_RNA (1)...(19): siRNA sense strand
ucaagggugugagaacaug

SEQ ID NO: 556996 - RNA, 19 nt, Homo sapiens
  misc_RNA (1)...(19): siRNA sense strand
gaaccucuucucccaugga

SEQ ID NO: 556997 - RNA, 19 nt, Homo sapiens
  misc_RNA (1)...(19): siRNA sense strand
auuauaugcugucgaaauc

SEQ ID NO: 556998 - RNA, 19 nt, Homo sapiens
  misc_RNA (1)...(19): siRNA sense strand
aacaugugcccaucuauga

SEQ ID NO: 556999 - RNA, 19 nt, Homo sapiens
  misc_RNA (1)...(19): siRNA sense strand
acagguuucucuugcuaau

SEQ ID NO: 557000 - RNA, 19 nt, Homo sapiens
  misc_RNA (1)...(19): siRNA sense strand
ccagaggaacaucaaguca

SEQ ID NO: 557001 - RNA, 19 nt, Homo sapiens
  misc_RNA (1)...(19): siRNA sense strand
gcugucgaaaucaaucuuu

SEQ ID NO: 557002 - RNA, 19 nt, Homo sapiens
  misc_RNA (1)...(19): siRNA sense strand
acgaggaugcaaauuauau

SEQ ID NO: 557003 - RNA, 19 nt, Homo sapiens
  misc_RNA (1)...(19): siRNA sense strand
cgaggaugcaaauuauaug

SEQ ID NO: 557004 - RNA, 19 nt, Homo sapiens
  misc_RNA (1)...(19): siRNA sense strand
cauggaacgaggaugcaaa

SEQ ID NO: 557005 - RNA, 19 nt, Homo sapiens
  misc_RNA (1)...(19): siRNA sense strand
gaacgaggaugcaaauuau

SEQ ID NO: 557006 - RNA, 19 nt, Homo sapiens
  misc_RNA (1)...(19): siRNA sense strand
ggaacgaggaugcaaauua

SEQ ID NO: 557007 - RNA, 19 nt, Homo sapiens
  misc_RNA (1)...(19): siRNA sense strand
gaacagguuucucuugcua

SEQ ID NO: 557008 - RNA, 19 nt, Homo sapiens
  misc_RNA (1)...(19): siRNA sense strand
caaauuauaugcugucgaa

SEQ ID NO: 557009 - RNA, 19 nt, Homo sapiens
  misc_RNA (1)...(19): siRNA sense strand
gagaacaugugcccaucua

SEQ ID NO: 557010 - RNA, 19 nt, Homo sapiens
  misc_RNA (1)...(19): siRNA sense strand
gaacaucaagucagccuaa

SEQ ID NO: 557011 - RNA, 19 nt, Homo sapiens
  misc_RNA (1)...(19): siRNA sense strand
gaacaugugcccaucuaug

SEQ ID NO: 557012 - RNA, 19 nt, Homo sapiens
  misc_RNA (1)...(19): siRNA sense strand
caucaagucagccuaauga

SEQ ID NO: 557013 - RNA, 19 nt, Homo sapiens
  misc_RNA (1)...(19): siRNA sense strand
gcuaaugagucuuuaucug

SEQ ID NO: 557014 - RNA, 19 nt, Homo sapiens
  misc_RNA (1)...(19): siRNA sense strand
ccauagaucaucaaacuuc

SEQ ID NO: 557015 - RNA, 19 nt, Homo sapiens
  misc_RNA (1)...(19): siRNA sense strand
uauaugcugucgaaaucaa

SEQ ID NO: 557016 - RNA, 19 nt, Homo sapiens
  misc_RNA (1)...(19): siRNA sense strand
agguuucucuugcuaauga

SEQ ID NO: 557017 - RNA, 19 nt, Homo sapiens
  misc_RNA (1)...(19): siRNA sense strand
cuccauagaucaucaaacu

SEQ ID NO: 557018 - RNA, 19 nt, Homo sapiens
  misc_RNA (1)...(19): siRNA sense strand
gcccaucuaugaaccucuu

SEQ ID NO: 557019 - RNA, 19 nt, Homo sapiens
  misc_RNA (1)...(19): siRNA sense strand
cauagaucaucaaacuuca

SEQ ID NO: 557020 - RNA, 19 nt, Homo sapiens
  misc_RNA (1)...(19): siRNA sense strand
ucaagggugugagaacaug

SEQ ID NO: 557021 - RNA, 19 nt, Homo sapiens
  misc_RNA (1)...(19): siRNA sense strand
gaaccucuucucccaugga

SEQ ID NO: 557022 - RNA, 19 nt, Homo sapiens
  misc_RNA (1)...(19): siRNA sense strand
auuauaugcugucgaaauc

SEQ ID NO: 557023 - RNA, 19 nt, Homo sapiens
  misc_RNA (1)...(19): siRNA sense strand
aacaugugcccaucuauga

SEQ ID NO: 557024 - RNA, 19 nt, Homo sapiens
  misc_RNA (1)...(19): siRNA sense strand
acagguuucucuugcuaau

SEQ ID NO: 557025 - RNA, 19 nt, Homo sapiens
  misc_RNA (1)...(19): siRNA sense strand
ccagaggaacaucaaguca

SEQ ID NO: 557026 - RNA, 19 nt, Homo sapiens
  misc_RNA (1)...(19): siRNA sense strand
gcugucgaaaucaaucuuu

SEQ ID NO: 557027 - RNA, 19 nt, Homo sapiens
  misc_RNA (1)...(19): siRNA sense strand
acgaggaugcaaauuauau

SEQ ID NO: 557028 - RNA, 19 nt, Homo sapiens
  misc_RNA (1)...(19): siRNA sense strand
cgaggaugcaaauuauaug

SEQ ID NO: 557029 - RNA, 19 nt, Homo sapiens
  misc_RNA (1)...(19): siRNA sense strand
cauggaacgaggaugcaaa

SEQ ID NO: 557030 - RNA, 19 nt, Homo sapiens
  misc_RNA (1)...(19): siRNA sense strand
gaacgaggaugcaaauuau

SEQ ID NO: 557031 - RNA, 19 nt, Homo sapiens
  misc_RNA (1)...(19): siRNA sense strand
ggaacgaggaugcaaauua

SEQ ID NO: 557032 - RNA, 19 nt, Homo sapiens
  misc_RNA (1)...(19): siRNA sense strand
gaacagguuucucuugcua

SEQ ID NO: 557033 - RNA, 19 nt, Homo sapiens
  misc_RNA (1)...(19): siRNA sense strand
caaauuauaugcugucgaa

SEQ ID NO: 557034 - RNA, 19 nt, Homo sapiens
  misc_RNA (1)...(19): siRNA sense strand
gagaacaugugcccaucua

SEQ ID NO: 557035 - RNA, 19 nt, Homo sapiens
  misc_RNA (1)...(19): siRNA sense strand
gaacaucaagucagccuaa

SEQ ID NO: 557036 - RNA, 19 nt, Homo sapiens
  misc_RNA (1)...(19): siRNA sense strand
gaacaugugcccaucuaug

SEQ ID NO: 557037 - RNA, 19 nt, Homo sapiens
  misc_RNA (1)...(19): siRNA sense strand
caucaagucagccuaauga

SEQ ID NO: 557038 - RNA, 19 nt, Homo sapiens
  misc_RNA (1)...(19): siRNA sense strand
gcuaaugagucuuuaucug

SEQ ID NO: 557039 - RNA, 19 nt, Homo sapiens
  misc_RNA (1)...(19): siRNA sense strand
ccauagaucaucaaacuuc

SEQ ID NO: 557040 - RNA, 19 nt, Homo sapiens
  misc_RNA (1)...(19): siRNA sense strand
uauaugcugucgaaaucaa

SEQ ID NO: 557041 - RNA, 19 nt, Homo sapiens
  misc_RNA (1)...(19): siRNA sense strand
agguuucucuugcuaauga

SEQ ID NO: 557042 - RNA, 19 nt, Homo sapiens
  misc_RNA (1)...(19): siRNA sense strand
cuccauagaucaucaaacu

SEQ ID NO: 557043 - RNA, 19 nt, Homo sapiens
  misc_RNA (1)...(19): siRNA sense strand
gcccaucuaugaaccucuu

SEQ ID NO: 557044 - RNA, 19 nt, Homo sapiens
  misc_RNA (1)...(19): siRNA sense strand
cauagaucaucaaacuuca

SEQ ID NO: 557045 - RNA, 19 nt, Homo sapiens
  misc_RNA (1)...(19): siRNA sense strand
ucaagggugugagaacaug

SEQ ID NO: 557046 - RNA, 19 nt, Homo sapiens
  misc_RNA (1)...(19): siRNA sense strand
gaaccucuucucccaugga

SEQ ID NO: 557047 - RNA, 19 nt, Homo sapiens
  misc_RNA (1)...(19): siRNA sense strand
auuauaugcugucgaaauc

SEQ ID NO: 557048 - RNA, 19 nt, Homo sapiens
  misc_RNA (1)...(19): siRNA sense strand
aacaugugcccaucuauga

SEQ ID NO: 557049 - RNA, 19 nt, Homo sapiens
  misc_RNA (1)...(19): siRNA sense strand
acagguuucucuugcuaau

SEQ ID NO: 557050 - RNA, 19 nt, Homo sapiens
  misc_RNA (1)...(19): siRNA sense strand
ccagaggaacaucaaguca

SEQ ID NO: 557051 - RNA, 19 nt, Homo sapiens
  misc_RNA (1)...(19): siRNA sense strand
gcugucgaaaucaaucuuu

SEQ ID NO: 557052 - RNA, 19 nt, Homo sapiens
  misc_RNA (1)...(19): siRNA sense strand
acgaggaugcaaauuauau

SEQ ID NO: 557053 - RNA, 19 nt, Homo sapiens
  misc_RNA (1)...(19): siRNA sense strand
cgaggaugcaaauuauaug

SEQ ID NO: 557054 - RNA, 19 nt, Homo sapiens
  misc_RNA (1)...(19): siRNA sense strand
cauggaacgaggaugcaaa

SEQ ID NO: 557055 - RNA, 19 nt, Homo sapiens
  misc_RNA (1)...(19): siRNA sense strand
gaacgaggaugcaaauuau

SEQ ID NO: 557056 - RNA, 19 nt, Homo sapiens
  misc_RNA (1)...(19): siRNA sense strand
ggaacgaggaugcaaauua

SEQ ID NO: 557057 - RNA, 19 nt, Homo sapiens
  misc_RNA (1)...(19): siRNA sense strand
gaacagguuucucuugcua

SEQ ID NO: 557058 - RNA, 19 nt, Homo sapiens
  misc_RNA (1)...(19): siRNA sense strand
caaauuauaugcugucgaa

SEQ ID NO: 557059 - RNA, 19 nt, Homo sapiens
  misc_RNA (1)...(19): siRNA sense strand
gagaacaugugcccaucua

SEQ ID NO: 557060 - RNA, 19 nt, Homo sapiens
  misc_RNA (1)...(19): siRNA sense strand
gaacaucaagucagccuaa

SEQ ID NO: 557061 - RNA, 19 nt, Homo sapiens
  misc_RNA (1)...(19): siRNA sense strand
gaacaugugcccaucuaug

SEQ ID NO: 557062 - RNA, 19 nt, Homo sapiens
  misc_RNA (1)...(19): siRNA sense strand
caucaagucagccuaauga

SEQ ID NO: 557063 - RNA, 19 nt, Homo sapiens
  misc_RNA (1)...(19): siRNA sense strand
gcuaaugagucuuuaucug

SEQ ID NO: 557064 - RNA, 19 nt, Homo sapiens
  misc_RNA (1)...(19): siRNA sense strand
ccauagaucaucaaacuuc

SEQ ID NO: 557065 - RNA, 19 nt, Homo sapiens
  misc_RNA (1)...(19): siRNA sense strand
uauaugcugucgaaaucaa

SEQ ID NO: 557066 - RNA, 19 nt, Homo sapiens
  misc_RNA (1)...(19): siRNA sense strand
agguuucucuugcuaauga

SEQ ID NO: 557067 - RNA, 19 nt, Homo sapiens
  misc_RNA (1)...(19): siRNA sense strand
cuccauagaucaucaaacu

SEQ ID NO: 557068 - RNA, 19 nt, Homo sapiens
  misc_RNA (1)...(19): siRNA sense strand
gcccaucuaugaaccucuu

SEQ ID NO: 557069 - RNA, 19 nt, Homo sapiens
  misc_RNA (1)...(19): siRNA sense strand
cauagaucaucaaacuuca

SEQ ID NO: 557070 - RNA, 19 nt, Homo sapiens
  misc_RNA (1)...(19): siRNA sense strand
ucaagggugugagaacaug

SEQ ID NO: 557071 - RNA, 19 nt, Homo sapiens
  misc_RNA (1)...(19): siRNA sense strand
gaaccucuucucccaugga

SEQ ID NO: 557072 - RNA, 19 nt, Homo sapiens
  misc_RNA (1)...(19): siRNA sense strand
auuauaugcugucgaaauc

SEQ ID NO: 557073 - RNA, 19 nt, Homo sapiens
  misc_RNA (1)...(19): siRNA sense strand
aacaugugcccaucuauga

SEQ ID NO: 557074 - RNA, 19 nt, Homo sapiens
  misc_RNA (1)...(19): siRNA sense strand
acagguuucucuugcuaau

SEQ ID NO: 557075 - RNA, 19 nt, Homo sapiens
  misc_RNA (1)...(19): siRNA sense strand
ccagaggaacaucaaguca

SEQ ID NO: 557076 - RNA, 19 nt, Homo sapiens
  misc_RNA (1)...(19): siRNA sense strand
gcugucgaaaucaaucuuu

SEQ ID NO: 557077 - RNA, 19 nt, Homo sapiens
  misc_RNA (1)...(19): siRNA sense strand
acgaggaugcaaauuauau

SEQ ID NO: 557078 - RNA, 19 nt, Homo sapiens
  misc_RNA (1)...(19): siRNA sense strand
cgaggaugcaaauuauaug

SEQ ID NO: 557079 - RNA, 19 nt, Homo sapiens
  misc_RNA (1)...(19): siRNA sense strand
cauggaacgaggaugcaaa

SEQ ID NO: 557080 - RNA, 19 nt, Homo sapiens
  misc_RNA (1)...(19): siRNA sense strand
gaacgaggaugcaaauuau

SEQ ID NO: 557081 - RNA, 19 nt, Homo sapiens
  misc_RNA (1)...(19): siRNA sense strand
ggaacgaggaugcaaauua

SEQ ID NO: 557082 - RNA, 19 nt, Homo sapiens
  misc_RNA (1)...(19): siRNA sense strand
gaacagguuucucuugcua

SEQ ID NO: 557083 - RNA, 19 nt, Homo sapiens
  misc_RNA (1)...(19): siRNA sense strand
caaauuauaugcugucgaa

SEQ ID NO: 557084 - RNA, 19 nt, Homo sapiens
  misc_RNA (1)...(19): siRNA sense strand
gagaacaugugcccaucua

SEQ ID NO: 557085 - RNA, 19 nt, Homo sapiens
  misc_RNA (1)...(19): siRNA sense strand
gaacaucaagucagccuaa

SEQ ID NO: 557086 - RNA, 19 nt, Homo sapiens
  misc_RNA (1)...(19): siRNA sense strand
gaacaugugcccaucuaug

SEQ ID NO: 557087 - RNA, 19 nt, Homo sapiens
  misc_RNA (1)...(19): siRNA sense strand
caucaagucagccuaauga

SEQ ID NO: 557088 - RNA, 19 nt, Homo sapiens
  misc_RNA (1)...(19): siRNA sense strand
gcuaaugagucuuuaucug

SEQ ID NO: 557089 - RNA, 19 nt, Homo sapiens
  misc_RNA (1)...(19): siRNA sense strand
ccauagaucaucaaacuuc

SEQ ID NO: 557090 - RNA, 19 nt, Homo sapiens
  misc_RNA (1)...(19): siRNA sense strand
uauaugcugucgaaaucaa

SEQ ID NO: 557091 - RNA, 19 nt, Homo sapiens
  misc_RNA (1)...(19): siRNA sense strand
agguuucucuugcuaauga

SEQ ID NO: 557092 - RNA, 19 nt, Homo sapiens
  misc_RNA (1)...(19): siRNA sense strand
cuccauagaucaucaaacu

SEQ ID NO: 557093 - RNA, 19 nt, Homo sapiens
  misc_RNA (1)...(19): siRNA sense strand
gcccaucuaugaaccucuu

SEQ ID NO: 557094 - RNA, 19 nt, Homo sapiens
  misc_RNA (1)...(19): siRNA sense strand
cauagaucaucaaacuuca

SEQ ID NO: 557095 - RNA, 19 nt, Homo sapiens
  misc_RNA (1)...(19): siRNA sense strand
ucaagggugugagaacaug

SEQ ID NO: 557096 - RNA, 19 nt, Homo sapiens
  misc_RNA (1)...(19): siRNA sense strand
gaaccucuucucccaugga

SEQ ID NO: 557097 - RNA, 19 nt, Homo sapiens
  misc_RNA (1)...(19): siRNA sense strand
auuauaugcugucgaaauc

SEQ ID NO: 557098 - RNA, 19 nt, Homo sapiens
  misc_RNA (1)...(19): siRNA sense strand
aacaugugcccaucuauga

SEQ ID NO: 557099 - RNA, 19 nt, Homo sapiens
  misc_RNA (1)...(19): siRNA sense strand
acagguuucucuugcuaau

SEQ ID NO: 557100 - RNA, 19 nt, Homo sapiens
  misc_RNA (1)...(19): siRNA sense strand
ccagaggaacaucaaguca

SEQ ID NO: 557101 - RNA, 19 nt, Homo sapiens
  misc_RNA (1)...(19): siRNA sense strand
gcugucgaaaucaaucuuu

SEQ ID NO: 557102 - RNA, 19 nt, Homo sapiens
  misc_RNA (1)...(19): siRNA sense strand
acgaggaugcaaauuauau

SEQ ID NO: 557103 - RNA, 19 nt, Homo sapiens
  misc_RNA (1)...(19): siRNA sense strand
cgaggaugcaaauuauaug

SEQ ID NO: 557104 - RNA, 19 nt, Homo sapiens
  misc_RNA (1)...(19): siRNA sense strand
cauggaacgaggaugcaaa

SEQ ID NO: 557105 - RNA, 19 nt, Homo sapiens
  misc_RNA (1)...(19): siRNA sense strand
gaacgaggaugcaaauuau

SEQ ID NO: 557106 - RNA, 19 nt, Homo sapiens
  misc_RNA (1)...(19): siRNA sense strand
ggaacgaggaugcaaauua

SEQ ID NO: 557107 - RNA, 19 nt, Homo sapiens
  misc_RNA (1)...(19): siRNA sense strand
gaacagguuucucuugcua

SEQ ID NO: 557108 - RNA, 19 nt, Homo sapiens
  misc_RNA (1)...(19): siRNA sense strand
caaauuauaugcugucgaa

SEQ ID NO: 557109 - RNA, 19 nt, Homo sapiens
  misc_RNA (1)...(19): siRNA sense strand
gagaacaugugcccaucua

SEQ ID NO: 557110 - RNA, 19 nt, Homo sapiens
  misc_RNA (1)...(19): siRNA sense strand
gaacaucaagucagccuaa

SEQ ID NO: 557111 - RNA, 19 nt, Homo sapiens
  misc_RNA (1)...(19): siRNA sense strand
gaacaugugcccaucuaug

SEQ ID NO: 557112 - RNA, 19 nt, Homo sapiens
  misc_RNA (1)...(19): siRNA sense strand
caucaagucagccuaauga

SEQ ID NO: 557113 - RNA, 19 nt, Homo sapiens
  misc_RNA (1)...(19): siRNA sense strand
gcuaaugagucuuuaucug

SEQ ID NO: 557114 - RNA, 19 nt, Homo sapiens
  misc_RNA (1)...(19): siRNA sense strand
ccauagaucaucaaacuuc

SEQ ID NO: 557115 - RNA, 19 nt, Homo sapiens
  misc_RNA (1)...(19): siRNA sense strand
uauaugcugucgaaaucaa

SEQ ID NO: 557116 - RNA, 19 nt, Homo sapiens
  misc_RNA (1)...(19): siRNA sense strand
agguuucucuugcuaauga

SEQ ID NO: 557117 - RNA, 19 nt, Homo sapiens
  misc_RNA (1)...(19): siRNA sense strand
cuccauagaucaucaaacu

SEQ ID NO: 557118 - RNA, 19 nt, Homo sapiens
  misc_RNA (1)...(19): siRNA sense strand
gcccaucuaugaaccucuu

SEQ ID NO: 557119 - RNA, 19 nt, Homo sapiens
  misc_RNA (1)...(19): siRNA sense strand
cauagaucaucaaacuuca

SEQ ID NO: 557120 - RNA, 19 nt, Homo sapiens
  misc_RNA (1)...(19): siRNA sense strand
ucaagggugugagaacaug

SEQ ID NO: 557121 - RNA, 19 nt, Homo sapiens
  misc_RNA (1)...(19): siRNA sense strand
gaaccucuucucccaugga

SEQ ID NO: 557122 - RNA, 19 nt, Homo sapiens
  misc_RNA (1)...(19): siRNA sense strand
auuauaugcugucgaaauc

SEQ ID NO: 557123 - RNA, 19 nt, Homo sapiens
  misc_RNA (1)...(19): siRNA sense strand
aacaugugcccaucuauga

SEQ ID NO: 557124 - RNA, 19 nt, Homo sapiens
  misc_RNA (1)...(19): siRNA sense strand
acagguuucucuugcuaau

SEQ ID NO: 557125 - RNA, 19 nt, Homo sapiens
  misc_RNA (1)...(19): siRNA sense strand
ccagaggaacaucaaguca

SEQ ID NO: 557126 - RNA, 19 nt, Homo sapiens
  misc_RNA (1)...(19): siRNA sense strand
gcugucgaaaucaaucuuu

SEQ ID NO: 557127 - RNA, 19 nt, Homo sapiens
  misc_RNA (1)...(19): siRNA sense strand
acgaggaugcaaauuauau

SEQ ID NO: 557128 - RNA, 19 nt, Homo sapiens
  misc_RNA (1)...(19): siRNA sense strand
cgaggaugcaaauuauaug

SEQ ID NO: 557129 - RNA, 19 nt, Homo sapiens
  misc_RNA (1)...(19): siRNA sense strand
cauggaacgaggaugcaaa

SEQ ID NO: 557130 - RNA, 19 nt, Homo sapiens
  misc_RNA (1)...(19): siRNA sense strand
gaacgaggaugcaaauuau

SEQ ID NO: 557131 - RNA, 19 nt, Homo sapiens
  misc_RNA (1)...(19): siRNA sense strand
ggaacgaggaugcaaauua

SEQ ID NO: 557132 - RNA, 19 nt, Homo sapiens
  misc_RNA (1)...(19): siRNA sense strand
gaacagguuucucuugcua

SEQ ID NO: 557133 - RNA, 19 nt, Homo sapiens
  misc_RNA (1)...(19): siRNA sense strand
caaauuauaugcugucgaa

SEQ ID NO: 557134 - RNA, 19 nt, Homo sapiens
  misc_RNA (1)...(19): siRNA sense strand
gagaacaugugcccaucua

SEQ ID NO: 557135 - RNA, 19 nt, Homo sapiens
  misc_RNA (1)...(19): siRNA sense strand
gaacaucaagucagccuaa

SEQ ID NO: 557136 - RNA, 19 nt, Homo sapiens
  misc_RNA (1)...(19): siRNA sense strand
gaacaugugcccaucuaug

SEQ ID NO: 557137 - RNA, 19 nt, Homo sapiens
  misc_RNA (1)...(19): siRNA sense strand
caucaagucagccuaauga

SEQ ID NO: 557138 - RNA, 19 nt, Homo sapiens
  misc_RNA (1)...(19): siRNA sense strand
gcuaaugagucuuuaucug

SEQ ID NO: 557139 - RNA, 19 nt, Homo sapiens
  misc_RNA (1)...(19): siRNA sense strand
ccauagaucaucaaacuuc

SEQ ID NO: 557140 - RNA, 19 nt, Homo sapiens
  misc_RNA (1)...(19): siRNA sense strand
uauaugcugucgaaaucaa

SEQ ID NO: 557141 - RNA, 19 nt, Homo sapiens
  misc_RNA (1)...(19): siRNA sense strand
agguuucucuugcuaauga

SEQ ID NO: 557142 - RNA, 19 nt, Homo sapiens
  misc_RNA (1)...(19): siRNA sense strand
cuccauagaucaucaaacu

SEQ ID NO: 557143 - RNA, 19 nt, Homo sapiens
  misc_RNA (1)...(19): siRNA sense strand
gcccaucuaugaaccucuu

SEQ ID NO: 557144 - RNA, 19 nt, Homo sapiens
  misc_RNA (1)...(19): siRNA sense strand
cauagaucaucaaacuuca

SEQ ID NO: 557145 - RNA, 19 nt, Homo sapiens
  misc_RNA (1)...(19): siRNA sense strand
ucaagggugugagaacaug

SEQ ID NO: 557146 - RNA, 19 nt, Homo sapiens
  misc_RNA (1)...(19): siRNA sense strand
gaaccucuucucccaugga

SEQ ID NO: 557147 - RNA, 19 nt, Homo sapiens
  misc_RNA (1)...(19): siRNA sense strand
auuauaugcugucgaaauc

SEQ ID NO: 557148 - RNA, 19 nt, Homo sapiens
  misc_RNA (1)...(19): siRNA sense strand
aacaugugcccaucuauga

SEQ ID NO: 557149 - RNA, 19 nt, Homo sapiens
  misc_RNA (1)...(19): siRNA sense strand
acagguuucucuugcuaau

SEQ ID NO: 557150 - RNA, 19 nt, Homo sapiens
  misc_RNA (1)...(19): siRNA sense strand
ccagaggaacaucaaguca

SEQ ID NO: 557151 - RNA, 19 nt, Homo sapiens
  misc_RNA (1)...(19): siRNA sense strand
gcugucgaaaucaaucuuu

SEQ ID NO: 557152 - RNA, 19 nt, Homo sapiens
  misc_RNA (1)...(19): siRNA sense strand
acgaggaugcaaauuauau

SEQ ID NO: 557153 - RNA, 19 nt, Homo sapiens
  misc_RNA (1)...(19): siRNA sense strand
cgaggaugcaaauuauaug

SEQ ID NO: 557154 - RNA, 19 nt, Homo sapiens
  misc_RNA (1)...(19): siRNA sense strand
cauggaacgaggaugcaaa

SEQ ID NO: 557155 - RNA, 19 nt, Homo sapiens
  misc_RNA (1)...(19): siRNA sense strand
gaacgaggaugcaaauuau

SEQ ID NO: 557156 - RNA, 19 nt, Homo sapiens
  misc_RNA (1)...(19): siRNA sense strand
ggaacgaggaugcaaauua

SEQ ID NO: 557157 - RNA, 19 nt, Homo sapiens
  misc_RNA (1)...(19): siRNA sense strand
gaacagguuucucuugcua

SEQ ID NO: 557158 - RNA, 19 nt, Homo sapiens
  misc_RNA (1)...(19): siRNA sense strand
caaauuauaugcugucgaa

SEQ ID NO: 557159 - RNA, 19 nt, Homo sapiens
  misc_RNA (1)...(19): siRNA sense strand
gagaacaugugcccaucua

SEQ ID NO: 557160 - RNA, 19 nt, Homo sapiens
  misc_RNA (1)...(19): siRNA sense strand
gaacaucaagucagccuaa

SEQ ID NO: 557161 - RNA, 19 nt, Homo sapiens
  misc_RNA (1)...(19): siRNA sense strand
gaacaugugcccaucuaug

SEQ ID NO: 557162 - RNA, 19 nt, Homo sapiens
  misc_RNA (1)...(19): siRNA sense strand
caucaagucagccuaauga

SEQ ID NO: 557163 - RNA, 19 nt, Homo sapiens
  misc_RNA (1)...(19): siRNA sense strand
gcuaaugagucuuuaucug

SEQ ID NO: 557164 - RNA, 19 nt, Homo sapiens
  misc_RNA (1)...(19): siRNA sense strand
ccauagaucaucaaacuuc

SEQ ID NO: 557165 - RNA, 19 nt, Homo sapiens
  misc_RNA (1)...(19): siRNA sense strand
uauaugcugucgaaaucaa

SEQ ID NO: 557166 - RNA, 19 nt, Homo sapiens
  misc_RNA (1)...(19): siRNA sense strand
agguuucucuugcuaauga

SEQ ID NO: 557167 - RNA, 19 nt, Homo sapiens
  misc_RNA (1)...(19): siRNA sense strand
cuccauagaucaucaaacu

SEQ ID NO: 557168 - RNA, 19 nt, Homo sapiens
  misc_RNA (1)...(19): siRNA sense strand
gcccaucuaugaaccucuu

SEQ ID NO: 557169 - RNA, 19 nt, Homo sapiens
  misc_RNA (1)...(19): siRNA sense strand
cauagaucaucaaacuuca

SEQ ID NO: 557170 - RNA, 19 nt, Homo sapiens
  misc_RNA (1)...(19): siRNA sense strand
ucaagggugugagaacaug

SEQ ID NO: 557171 - RNA, 19 nt, Homo sapiens
  misc_RNA (1)...(19): siRNA sense strand
gaaccucuucucccaugga

SEQ ID NO: 557172 - RNA, 19 nt, Homo sapiens
  misc_RNA (1)...(19): siRNA sense strand
auuauaugcugucgaaauc

SEQ ID NO: 557173 - RNA, 19 nt, Homo sapiens
  misc_RNA (1)...(19): siRNA sense strand
aacaugugcccaucuauga

SEQ ID NO: 557174 - RNA, 19 nt, Homo sapiens
  misc_RNA (1)...(19): siRNA sense strand
acagguuucucuugcuaau

SEQ ID NO: 557175 - RNA, 19 nt, Homo sapiens
  misc_RNA (1)...(19): siRNA sense strand
ccagaggaacaucaaguca

SEQ ID NO: 557176 - RNA, 19 nt, Homo sapiens
  misc_RNA (1)...(19): siRNA sense strand
gcugucgaaaucaaucuuu

SEQ ID NO: 557177 - RNA, 19 nt, Homo sapiens
  misc_RNA (1)...(19): siRNA sense strand
acgaggaugcaaauuauau

SEQ ID NO: 557178 - RNA, 19 nt, Homo sapiens
  misc_RNA (1)...(19): siRNA sense strand
cgaggaugcaaauuauaug

SEQ ID NO: 557179 - RNA, 19 nt, Homo sapiens
  misc_RNA (1)...(19): siRNA sense strand
cauggaacgaggaugcaaa

SEQ ID NO: 557180 - RNA, 19 nt, Homo sapiens
  misc_RNA (1)...(19): siRNA sense strand
gaacgaggaugcaaauuau

SEQ ID NO: 557181 - RNA, 19 nt, Homo sapiens
  misc_RNA (1)...(19): siRNA sense strand
ggaacgaggaugcaaauua

SEQ ID NO: 557182 - RNA, 19 nt, Homo sapiens
  misc_RNA (1)...(19): siRNA sense strand
gaacagguuucucuugcua

SEQ ID NO: 557183 - RNA, 19 nt, Homo sapiens
  misc_RNA (1)...(19): siRNA sense strand
caaauuauaugcugucgaa

SEQ ID NO: 557184 - RNA, 19 nt, Homo sapiens
  misc_RNA (1)...(19): siRNA sense strand
gagaacaugugcccaucua

SEQ ID NO: 557185 - RNA, 19 nt, Homo sapiens
  misc_RNA (1)...(19): siRNA sense strand
gaacaucaagucagccuaa

SEQ ID NO: 557186 - RNA, 19 nt, Homo sapiens
  misc_RNA (1)...(19): siRNA sense strand
gaacaugugcccaucuaug

SEQ ID NO: 557187 - RNA, 19 nt, Homo sapiens
  misc_RNA (1)...(19): siRNA sense strand
caucaagucagccuaauga

SEQ ID NO: 557188 - RNA, 19 nt, Homo sapiens
  misc_RNA (1)...(19): siRNA sense strand
gcuaaugagucuuuaucug

SEQ ID NO: 557189 - RNA, 19 nt, Homo sapiens
  misc_RNA (1)...(19): siRNA sense strand
ccauagaucaucaaacuuc

SEQ ID NO: 557190 - RNA, 19 nt, Homo sapiens
  misc_RNA (1)...(19): siRNA sense strand
uauaugcugucgaaaucaa

SEQ ID NO: 557191 - RNA, 19 nt, Homo sapiens
  misc_RNA (1)...(19): siRNA sense strand
agguuucucuugcuaauga

SEQ ID NO: 557192 - RNA, 19 nt, Homo sapiens
  misc_RNA (1)...(19): siRNA sense strand
cuccauagaucaucaaacu

SEQ ID NO: 557193 - RNA, 19 nt, Homo sapiens
  misc_RNA (1)...(19): siRNA sense strand
gcccaucuaugaaccucuu

SEQ ID NO: 557194 - RNA, 19 nt, Homo sapiens
  misc_RNA (1)...(19): siRNA sense strand
cauagaucaucaaacuuca

SEQ ID NO: 557195 - RNA, 19 nt, Homo sapiens
  misc_RNA (1)...(19): siRNA sense strand
ucaagggugugagaacaug

SEQ ID NO: 557196 - RNA, 19 nt, Homo sapiens
  misc_RNA (1)...(19): siRNA sense strand
gaaccucuucucccaugga

SEQ ID NO: 557197 - RNA, 19 nt, Homo sapiens
  misc_RNA (1)...(19): siRNA sense strand
auuauaugcugucgaaauc

SEQ ID NO: 557198 - RNA, 19 nt, Homo sapiens
  misc_RNA (1)...(19): siRNA sense strand
aacaugugcccaucuauga

SEQ ID NO: 557199 - RNA, 19 nt, Homo sapiens
  misc_RNA (1)...(19): siRNA sense strand
acagguuucucuugcuaau

SEQ ID NO: 557200 - RNA, 19 nt, Homo sapiens
  misc_RNA (1)...(19): siRNA sense strand
ccagaggaacaucaaguca

SEQ ID NO: 557201 - RNA, 19 nt, Homo sapiens
  misc_RNA (1)...(19): siRNA sense strand
gcugucgaaaucaaucuuu

SEQ ID NO: 557202 - RNA, 19 nt, Homo sapiens
  misc_RNA (1)...(19): siRNA sense strand
acgaggaugcaaauuauau

SEQ ID NO: 557203 - RNA, 19 nt, Homo sapiens
  misc_RNA (1)...(19): siRNA sense strand
cgaggaugcaaauuauaug

SEQ ID NO: 557204 - RNA, 19 nt, Homo sapiens
  misc_RNA (1)...(19): siRNA sense strand
cauggaacgaggaugcaaa

SEQ ID NO: 557205 - RNA, 19 nt, Homo sapiens
  misc_RNA (1)...(19): siRNA sense strand
gaacgaggaugcaaauuau

SEQ ID NO: 557206 - RNA, 19 nt, Homo sapiens
  misc_RNA (1)...(19): siRNA sense strand
ggaacgaggaugcaaauua

SEQ ID NO: 557207 - RNA, 19 nt, Homo sapiens
  misc_RNA (1)...(19): siRNA sense strand
gaacagguuucucuugcua

SEQ ID NO: 557208 - RNA, 19 nt, Homo sapiens
  misc_RNA (1)...(19): siRNA sense strand
caaauuauaugcugucgaa

SEQ ID NO: 557209 - RNA, 19 nt, Homo sapiens
  misc_RNA (1)...(19): siRNA sense strand
gagaacaugugcccaucua

SEQ ID NO: 557210 - RNA, 19 nt, Homo sapiens
  misc_RNA (1)...(19): siRNA sense strand
gaacaucaagucagccuaa

SEQ ID NO: 557211 - RNA, 19 nt, Homo sapiens
  misc_RNA (1)...(19): siRNA sense strand
gaacaugugcccaucuaug

SEQ ID NO: 557212 - RNA, 19 nt, Homo sapiens
  misc_RNA (1)...(19): siRNA sense strand
caucaagucagccuaauga

SEQ ID NO: 557213 - RNA, 19 nt, Homo sapiens
  misc_RNA (1)...(19): siRNA sense strand
gcuaaugagucuuuaucug

SEQ ID NO: 557214 - RNA, 19 nt, Homo sapiens
  misc_RNA (1)...(19): siRNA sense strand
ccauagaucaucaaacuuc

SEQ ID NO: 557215 - RNA, 19 nt, Homo sapiens
  misc_RNA (1)...(19): siRNA sense strand
uauaugcugucgaaaucaa

SEQ ID NO: 557216 - RNA, 19 nt, Homo sapiens
  misc_RNA (1)...(19): siRNA sense strand
agguuucucuugcuaauga

SEQ ID NO: 557217 - RNA, 19 nt, Homo sapiens
  misc_RNA (1)...(19): siRNA sense strand
cuccauagaucaucaaacu

SEQ ID NO: 557218 - RNA, 19 nt, Homo sapiens
  misc_RNA (1)...(19): siRNA sense strand
gcccaucuaugaaccucuu

SEQ ID NO: 557219 - RNA, 19 nt, Homo sapiens
  misc_RNA (1)...(19): siRNA sense strand
cauagaucaucaaacuuca

SEQ ID NO: 557220 - RNA, 19 nt, Homo sapiens
  misc_RNA (1)...(19): siRNA sense strand
ucaagggugugagaacaug

SEQ ID NO: 557221 - RNA, 19 nt, Homo sapiens
  misc_RNA (1)...(19): siRNA sense strand
gaaccucuucucccaugga

SEQ ID NO: 557222 - RNA, 19 nt, Homo sapiens
  misc_RNA (1)...(19): siRNA sense strand
auuauaugcugucgaaauc

SEQ ID NO: 557223 - RNA, 19 nt, Homo sapiens
  misc_RNA (1)...(19): siRNA sense strand
aacaugugcccaucuauga

SEQ ID NO: 557224 - RNA, 19 nt, Homo sapiens
  misc_RNA (1)...(19): siRNA sense strand
acagguuucucuugcuaau

SEQ ID NO: 557225 - RNA, 19 nt, Homo sapiens
  misc_RNA (1)...(19): siRNA sense strand
ccagaggaacaucaaguca

SEQ ID NO: 557226 - RNA, 19 nt, Homo sapiens
  misc_RNA (1)...(19): siRNA sense strand
gcugucgaaaucaaucuuu

SEQ ID NO: 557227 - RNA, 19 nt, Homo sapiens
  misc_RNA (1)...(19): siRNA sense strand
acgaggaugcaaauuauau

SEQ ID NO: 557228 - RNA, 19 nt, Homo sapiens
  misc_RNA (1)...(19): siRNA sense strand
cgaggaugcaaauuauaug

SEQ ID NO: 557229 - RNA, 19 nt, Homo sapiens
  misc_RNA (1)...(19): siRNA sense strand
cauggaacgaggaugcaaa

SEQ ID NO: 557230 - RNA, 19 nt, Homo sapiens
  misc_RNA (1)...(19): siRNA sense strand
gaacgaggaugcaaauuau

SEQ ID NO: 557231 - RNA, 19 nt, Homo sapiens
  misc_RNA (1)...(19): siRNA sense strand
ggaacgaggaugcaaauua

SEQ ID NO: 557232 - RNA, 19 nt, Homo sapiens
  misc_RNA (1)...(19): siRNA sense strand
gaacagguuucucuugcua

SEQ ID NO: 557233 - RNA, 19 nt, Homo sapiens
  misc_RNA (1)...(19): siRNA sense strand
caaauuauaugcugucgaa

SEQ ID NO: 557234 - RNA, 19 nt, Homo sapiens
  misc_RNA (1)...(19): siRNA sense strand
gagaacaugugcccaucua

SEQ ID NO: 557235 - RNA, 19 nt, Homo sapiens
  misc_RNA (1)...(19): siRNA sense strand
gaacaucaagucagccuaa

SEQ ID NO: 557236 - RNA, 19 nt, Homo sapiens
  misc_RNA (1)...(19): siRNA sense strand
gaacaugugcccaucuaug

SEQ ID NO: 557237 - RNA, 19 nt, Homo sapiens
  misc_RNA (1)...(19): siRNA sense strand
caucaagucagccuaauga

SEQ ID NO: 557238 - RNA, 19 nt, Homo sapiens
  misc_RNA (1)...(19): siRNA sense strand
gcuaaugagucuuuaucug

SEQ ID NO: 557239 - RNA, 19 nt, Homo sapiens
  misc_RNA (1)...(19): siRNA sense strand
ccauagaucaucaaacuuc

SEQ ID NO: 557240 - RNA, 19 nt, Homo sapiens
  misc_RNA (1)...(19): siRNA sense strand
uauaugcugucgaaaucaa

SEQ ID NO: 557241 - RNA, 19 nt, Homo sapiens
  misc_RNA (1)...(19): siRNA sense strand
agguuucucuugcuaauga

SEQ ID NO: 557242 - RNA, 19 nt, Homo sapiens
  misc_RNA (1)...(19): siRNA sense strand
cuccauagaucaucaaacu

SEQ ID NO: 557243 - RNA, 19 nt, Homo sapiens
  misc_RNA (1)...(19): siRNA sense strand
gcccaucuaugaaccucuu

SEQ ID NO: 557244 - RNA, 19 nt, Homo sapiens
  misc_RNA (1)...(19): siRNA sense strand
cauagaucaucaaacuuca

SEQ ID NO: 557245 - RNA, 19 nt, Homo sapiens
  misc_RNA (1)...(19): siRNA sense strand
ucaagggugugagaacaug

SEQ ID NO: 557246 - RNA, 19 nt, Homo sapiens
  misc_RNA (1)...(19): siRNA sense strand
gaaccucuucucccaugga

SEQ ID NO: 557247 - RNA, 19 nt, Homo sapiens
  misc_RNA (1)...(19): siRNA sense strand
auuauaugcugucgaaauc

SEQ ID NO: 557248 - RNA, 19 nt, Homo sapiens
  misc_RNA (1)...(19): siRNA sense strand
aacaugugcccaucuauga

SEQ ID NO: 557249 - RNA, 19 nt, Homo sapiens
  misc_RNA (1)...(19): siRNA sense strand
acagguuucucuugcuaau

SEQ ID NO: 557250 - RNA, 19 nt, Homo sapiens
  misc_RNA (1)...(19): siRNA sense strand
ccagaggaacaucaaguca

SEQ ID NO: 557251 - RNA, 19 nt, Homo sapiens
  misc_RNA (1)...(19): siRNA sense strand
gcugucgaaaucaaucuuu

SEQ ID NO: 557252 - RNA, 19 nt, Homo sapiens
  misc_RNA (1)...(19): siRNA sense strand
acgaggaugcaaauuauau

SEQ ID NO: 557253 - RNA, 19 nt, Homo sapiens
  misc_RNA (1)...(19): siRNA sense strand
cgaggaugcaaauuauaug

SEQ ID NO: 557254 - RNA, 19 nt, Homo sapiens
  misc_RNA (1)...(19): siRNA sense strand
cauggaacgaggaugcaaa

SEQ ID NO: 557255 - RNA, 19 nt, Homo sapiens
  misc_RNA (1)...(19): siRNA sense strand
gaacgaggaugcaaauuau

SEQ ID NO: 557256 - RNA, 19 nt, Homo sapiens
  misc_RNA (1)...(19): siRNA sense strand
ggaacgaggaugcaaauua

SEQ ID NO: 557257 - RNA, 19 nt, Homo sapiens
  misc_RNA (1)...(19): siRNA sense strand
gaacagguuucucuugcua

SEQ ID NO: 557258 - RNA, 19 nt, Homo sapiens
  misc_RNA (1)...(19): siRNA sense strand
caaauuauaugcugucgaa

SEQ ID NO: 557259 - RNA, 19 nt, Homo sapiens
  misc_RNA (1)...(19): siRNA sense strand
gagaacaugugcccaucua

SEQ ID NO: 557260 - RNA, 19 nt, Homo sapiens
  misc_RNA (1)...(19): siRNA sense strand
gaacaucaagucagccuaa

SEQ ID NO: 557261 - RNA, 19 nt, Homo sapiens
  misc_RNA (1)...(19): siRNA sense strand
gaacaugugcccaucuaug

SEQ ID NO: 557262 - RNA, 19 nt, Homo sapiens
  misc_RNA (1)...(19): siRNA sense strand
caucaagucagccuaauga

SEQ ID NO: 557263 - RNA, 19 nt, Homo sapiens
  misc_RNA (1)...(19): siRNA sense strand
gcuaaugagucuuuaucug

SEQ ID NO: 557264 - RNA, 19 nt, Homo sapiens
  misc_RNA (1)...(19): siRNA sense strand
ccauagaucaucaaacuuc

SEQ ID NO: 557265 - RNA, 19 nt, Homo sapiens
  misc_RNA (1)...(19): siRNA sense strand
uauaugcugucgaaaucaa

SEQ ID NO: 557266 - RNA, 19 nt, Homo sapiens
  misc_RNA (1)...(19): siRNA sense strand
agguuucucuugcuaauga

SEQ ID NO: 557267 - RNA, 19 nt, Homo sapiens
  misc_RNA (1)...(19): siRNA sense strand
cuccauagaucaucaaacu

SEQ ID NO: 557268 - RNA, 19 nt, Homo sapiens
  misc_RNA (1)...(19): siRNA sense strand
gcccaucuaugaaccucuu

SEQ ID NO: 557269 - RNA, 19 nt, Homo sapiens
  misc_RNA (1)...(19): siRNA sense strand
cauagaucaucaaacuuca

SEQ ID NO: 557270 - RNA, 19 nt, Homo sapiens
  misc_RNA (1)...(19): siRNA sense strand
ucaagggugugagaacaug

SEQ ID NO: 557271 - RNA, 19 nt, Homo sapiens
  misc_RNA (1)...(19): siRNA sense strand
gaaccucuucucccaugga

SEQ ID NO: 557272 - RNA, 19 nt, Homo sapiens
  misc_RNA (1)...(19): siRNA sense strand
auuauaugcugucgaaauc

SEQ ID NO: 557273 - RNA, 19 nt, Homo sapiens
  misc_RNA (1)...(19): siRNA sense strand
aacaugugcccaucuauga

SEQ ID NO: 557274 - RNA, 19 nt, Homo sapiens
  misc_RNA (1)...(19): siRNA sense strand
acagguuucucuugcuaau

SEQ ID NO: 557275 - RNA, 19 nt, Homo sapiens
  misc_RNA (1)...(19): siRNA sense strand
ccagaggaacaucaaguca

SEQ ID NO: 557276 - RNA, 19 nt, Homo sapiens
  misc_RNA (1)...(19): siRNA sense strand
gcugucgaaaucaaucuuu

SEQ ID NO: 557277 - RNA, 19 nt, Homo sapiens
  misc_RNA (1)...(19): siRNA sense strand
acgaggaugcaaauuauau

SEQ ID NO: 557278 - RNA, 19 nt, Homo sapiens
  misc_RNA (1)...(19): siRNA sense strand
cgaggaugcaaauuauaug

SEQ ID NO: 557279 - RNA, 19 nt, Homo sapiens
  misc_RNA (1)...(19): siRNA sense strand
cauggaacgaggaugcaaa

SEQ ID NO: 557280 - RNA, 19 nt, Homo sapiens
  misc_RNA (1)...(19): siRNA sense strand
gaacgaggaugcaaauuau

SEQ ID NO: 557281 - RNA, 19 nt, Homo sapiens
  misc_RNA (1)...(19): siRNA sense strand
ggaacgaggaugcaaauua

SEQ ID NO: 557282 - RNA, 19 nt, Homo sapiens
  misc_RNA (1)...(19): siRNA sense strand
gaacagguuucucuugcua

SEQ ID NO: 557283 - RNA, 19 nt, Homo sapiens
  misc_RNA (1)...(19): siRNA sense strand
caaauuauaugcugucgaa

SEQ ID NO: 557284 - RNA, 19 nt, Homo sapiens
  misc_RNA (1)...(19): siRNA sense strand
gagaacaugugcccaucua

SEQ ID NO: 557285 - RNA, 19 nt, Homo sapiens
  misc_RNA (1)...(19): siRNA sense strand
gaacaucaagucagccuaa

SEQ ID NO: 557286 - RNA, 19 nt, Homo sapiens
  misc_RNA (1)...(19): siRNA sense strand
gaacaugugcccaucuaug

SEQ ID NO: 557287 - RNA, 19 nt, Homo sapiens
  misc_RNA (1)...(19): siRNA sense strand
caucaagucagccuaauga

SEQ ID NO: 557288 - RNA, 19 nt, Homo sapiens
  misc_RNA (1)...(19): siRNA sense strand
gcuaaugagucuuuaucug

SEQ ID NO: 557289 - RNA, 19 nt, Homo sapiens
  misc_RNA (1)...(19): siRNA sense strand
ccauagaucaucaaacuuc

SEQ ID NO: 557290 - RNA, 19 nt, Homo sapiens
  misc_RNA (1)...(19): siRNA sense strand
uauaugcugucgaaaucaa

SEQ ID NO: 557291 - RNA, 19 nt, Homo sapiens
  misc_RNA (1)...(19): siRNA sense strand
agguuucucuugcuaauga

SEQ ID NO: 557292 - RNA, 19 nt, Homo sapiens
  misc_RNA (1)...(19): siRNA sense strand
cuccauagaucaucaaacu

SEQ ID NO: 557293 - RNA, 19 nt, Homo sapiens
  misc_RNA (1)...(19): siRNA sense strand
gcccaucuaugaaccucuu

SEQ ID NO: 557294 - RNA, 19 nt, Homo sapiens
  misc_RNA (1)...(19): siRNA sense strand
cauagaucaucaaacuuca

SEQ ID NO: 557295 - RNA, 19 nt, Homo sapiens
  misc_RNA (1)...(19): siRNA sense strand
ucaagggugugagaacaug

SEQ ID NO: 557296 - RNA, 19 nt, Homo sapiens
  misc_RNA (1)...(19): siRNA sense strand
gaaccucuucucccaugga

SEQ ID NO: 557297 - RNA, 19 nt, Homo sapiens
  misc_RNA (1)...(19): siRNA sense strand
auuauaugcugucgaaauc

SEQ ID NO: 557298 - RNA, 19 nt, Homo sapiens
  misc_RNA (1)...(19): siRNA sense strand
aacaugugcccaucuauga

SEQ ID NO: 557299 - RNA, 19 nt, Homo sapiens
  misc_RNA (1)...(19): siRNA sense strand
acagguuucucuugcuaau

SEQ ID NO: 557300 - RNA, 19 nt, Homo sapiens
  misc_RNA (1)...(19): siRNA sense strand
ccagaggaacaucaaguca

SEQ ID NO: 557301 - RNA, 19 nt, Homo sapiens
  misc_RNA (1)...(19): siRNA sense strand
gcugucgaaaucaaucuuu

SEQ ID NO: 557302 - RNA, 19 nt, Homo sapiens
  misc_RNA (1)...(19): siRNA sense strand
acgaggaugcaaauuauau

SEQ ID NO: 557303 - RNA, 19 nt, Homo sapiens
  misc_RNA (1)...(19): siRNA sense strand
cgaggaugcaaauuauaug

SEQ ID NO: 557304 - RNA, 19 nt, Homo sapiens
  misc_RNA (1)...(19): siRNA sense strand
cauggaacgaggaugcaaa

SEQ ID NO: 557305 - RNA, 19 nt, Homo sapiens
  misc_RNA (1)...(19): siRNA sense strand
gaacgaggaugcaaauuau

SEQ ID NO: 557306 - RNA, 19 nt, Homo sapiens
  misc_RNA (1)...(19): siRNA sense strand
ggaacgaggaugcaaauua

SEQ ID NO: 557307 - RNA, 19 nt, Homo sapiens
  misc_RNA (1)...(19): siRNA sense strand
gaacagguuucucuugcua

SEQ ID NO: 557308 - RNA, 19 nt, Homo sapiens
  misc_RNA (1)...(19): siRNA sense strand
caaauuauaugcugucgaa

SEQ ID NO: 557309 - RNA, 19 nt, Homo sapiens
  misc_RNA (1)...(19): siRNA sense strand
gagaacaugugcccaucua

SEQ ID NO: 557310 - RNA, 19 nt, Homo sapiens
  misc_RNA (1)...(19): siRNA sense strand
gaacaucaagucagccuaa

SEQ ID NO: 557311 - RNA, 19 nt, Homo sapiens
  misc_RNA (1)...(19): siRNA sense strand
gaacaugugcccaucuaug

SEQ ID NO: 557312 - RNA, 19 nt, Homo sapiens
  misc_RNA (1)...(19): siRNA sense strand
caucaagucagccuaauga

SEQ ID NO: 557313 - RNA, 19 nt, Homo sapiens
  misc_RNA (1)...(19): siRNA sense strand
gcuaaugagucuuuaucug

SEQ ID NO: 557314 - RNA, 19 nt, Homo sapiens
  misc_RNA (1)...(19): siRNA sense strand
ccauagaucaucaaacuuc

SEQ ID NO: 557315 - RNA, 19 nt, Homo sapiens
  misc_RNA (1)...(19): siRNA sense strand
uauaugcugucgaaaucaa

SEQ ID NO: 557316 - RNA, 19 nt, Homo sapiens
  misc_RNA (1)...(19): siRNA sense strand
agguuucucuugcuaauga

SEQ ID NO: 557317 - RNA, 19 nt, Homo sapiens
  misc_RNA (1)...(19): siRNA sense strand
cuccauagaucaucaaacu

SEQ ID NO: 557318 - RNA, 19 nt, Homo sapiens
  misc_RNA (1)...(19): siRNA sense strand
gcccaucuaugaaccucuu

SEQ ID NO: 557319 - RNA, 19 nt, Homo sapiens
  misc_RNA (1)...(19): siRNA sense strand
cauagaucaucaaacuuca

SEQ ID NO: 557320 - RNA, 19 nt, Homo sapiens
  misc_RNA (1)...(19): siRNA sense strand
ucaagggugugagaacaug

SEQ ID NO: 557321 - RNA, 19 nt, Homo sapiens
  misc_RNA (1)...(19): siRNA sense strand
gaaccucuucucccaugga

SEQ ID NO: 557322 - RNA, 19 nt, Homo sapiens
  misc_RNA (1)...(19): siRNA sense strand
auuauaugcugucgaaauc

SEQ ID NO: 557323 - RNA, 19 nt, Homo sapiens
  misc_RNA (1)...(19): siRNA sense strand
aacaugugcccaucuauga

SEQ ID NO: 557324 - RNA, 19 nt, Homo sapiens
  misc_RNA (1)...(19): siRNA sense strand
acagguuucucuugcuaau

SEQ ID NO: 557325 - RNA, 19 nt, Homo sapiens
  misc_RNA (1)...(19): siRNA sense strand
ccagaggaacaucaaguca

SEQ ID NO: 557326 - RNA, 19 nt, Homo sapiens
  misc_RNA (1)...(19): siRNA sense strand
gcugucgaaaucaaucuuu

SEQ ID NO: 557327 - RNA, 19 nt, Homo sapiens
  misc_RNA (1)...(19): siRNA sense strand
acgaggaugcaaauuauau

SEQ ID NO: 557328 - RNA, 19 nt, Homo sapiens
  misc_RNA (1)...(19): siRNA sense strand
cgaggaugcaaauuauaug

SEQ ID NO: 557329 - RNA, 19 nt, Homo sapiens
  misc_RNA (1)...(19): siRNA sense strand
cauggaacgaggaugcaaa

SEQ ID NO: 557330 - RNA, 19 nt, Homo sapiens
  misc_RNA (1)...(19): siRNA sense strand
gaacgaggaugcaaauuau

SEQ ID NO: 557331 - RNA, 19 nt, Homo sapiens
  misc_RNA (1)...(19): siRNA sense strand
ggaacgaggaugcaaauua

SEQ ID NO: 557332 - RNA, 19 nt, Homo sapiens
  misc_RNA (1)...(19): siRNA sense strand
gaacagguuucucuugcua

SEQ ID NO: 557333 - RNA, 19 nt, Homo sapiens
  misc_RNA (1)...(19): siRNA sense strand
caaauuauaugcugucgaa

SEQ ID NO: 557334 - RNA, 19 nt, Homo sapiens
  misc_RNA (1)...(19): siRNA sense strand
gagaacaugugcccaucua

SEQ ID NO: 557335 - RNA, 19 nt, Homo sapiens
  misc_RNA (1)...(19): siRNA sense strand
gaacaucaagucagccuaa

SEQ ID NO: 557336 - RNA, 19 nt, Homo sapiens
  misc_RNA (1)...(19): siRNA sense strand
gaacaugugcccaucuaug

SEQ ID NO: 557337 - RNA, 19 nt, Homo sapiens
  misc_RNA (1)...(19): siRNA sense strand
caucaagucagccuaauga

SEQ ID NO: 557338 - RNA, 19 nt, Homo sapiens
  misc_RNA (1)...(19): siRNA sense strand
gcuaaugagucuuuaucug

SEQ ID NO: 557339 - RNA, 19 nt, Homo sapiens
  misc_RNA (1)...(19): siRNA sense strand
ccauagaucaucaaacuuc

SEQ ID NO: 557340 - RNA, 19 nt, Homo sapiens
  misc_RNA (1)...(19): siRNA sense strand
uauaugcugucgaaaucaa

SEQ ID NO: 557341 - RNA, 19 nt, Homo sapiens
  misc_RNA (1)...(19): siRNA sense strand
agguuucucuugcuaauga

SEQ ID NO: 557342 - RNA, 19 nt, Homo sapiens
  misc_RNA (1)...(19): siRNA sense strand
cuccauagaucaucaaacu

SEQ ID NO: 557343 - RNA, 19 nt, Homo sapiens
  misc_RNA (1)...(19): siRNA sense strand
gcccaucuaugaaccucuu

SEQ ID NO: 557344 - RNA, 19 nt, Homo sapiens
  misc_RNA (1)...(19): siRNA sense strand
cauagaucaucaaacuuca

SEQ ID NO: 557345 - RNA, 19 nt, Homo sapiens
  misc_RNA (1)...(19): siRNA sense strand
ucaagggugugagaacaug

SEQ ID NO: 557346 - RNA, 19 nt, Homo sapiens
  misc_RNA (1)...(19): siRNA sense strand
gaaccucuucucccaugga

SEQ ID NO: 557347 - RNA, 19 nt, Homo sapiens
  misc_RNA (1)...(19): siRNA sense strand
auuauaugcugucgaaauc

SEQ ID NO: 557348 - RNA, 19 nt, Homo sapiens
  misc_RNA (1)...(19): siRNA sense strand
aacaugugcccaucuauga

SEQ ID NO: 557349 - RNA, 19 nt, Homo sapiens
  misc_RNA (1)...(19): siRNA sense strand
acagguuucucuugcuaau

SEQ ID NO: 557350 - RNA, 19 nt, Homo sapiens
  misc_RNA (1)...(19): siRNA sense strand
ccagaggaacaucaaguca

SEQ ID NO: 557351 - RNA, 19 nt, Homo sapiens
  misc_RNA (1)...(19): siRNA sense strand
gcugucgaaaucaaucuuu

SEQ ID NO: 557352 - RNA, 19 nt, Homo sapiens
  misc_RNA (1)...(19): siRNA sense strand
acgaggaugcaaauuauau

SEQ ID NO: 557353 - RNA, 19 nt, Homo sapiens
  misc_RNA (1)...(19): siRNA sense strand
cgaggaugcaaauuauaug

SEQ ID NO: 557354 - RNA, 19 nt, Homo sapiens
  misc_RNA (1)...(19): siRNA sense strand
cauggaacgaggaugcaaa

SEQ ID NO: 557355 - RNA, 19 nt, Homo sapiens
  misc_RNA (1)...(19): siRNA sense strand
gaacgaggaugcaaauuau

SEQ ID NO: 557356 - RNA, 19 nt, Homo sapiens
  misc_RNA (1)...(19): siRNA sense strand
ggaacgaggaugcaaauua

SEQ ID NO: 557357 - RNA, 19 nt, Homo sapiens
  misc_RNA (1)...(19): siRNA sense strand
gaacagguuucucuugcua

SEQ ID NO: 557358 - RNA, 19 nt, Homo sapiens
  misc_RNA (1)...(19): siRNA sense strand
caaauuauaugcugucgaa

SEQ ID NO: 557359 - RNA, 19 nt, Homo sapiens
  misc_RNA (1)...(19): siRNA sense strand
gagaacaugugcccaucua

SEQ ID NO: 557360 - RNA, 19 nt, Homo sapiens
  misc_RNA (1)...(19): siRNA sense strand
gaacaucaagucagccuaa

SEQ ID NO: 557361 - RNA, 19 nt, Homo sapiens
  misc_RNA (1)...(19): siRNA sense strand
gaacaugugcccaucuaug

SEQ ID NO: 557362 - RNA, 19 nt, Homo sapiens
  misc_RNA (1)...(19): siRNA sense strand
caucaagucagccuaauga

SEQ ID NO: 557363 - RNA, 19 nt, Homo sapiens
  misc_RNA (1)...(19): siRNA sense strand
gcuaaugagucuuuaucug

SEQ ID NO: 557364 - RNA, 19 nt, Homo sapiens
  misc_RNA (1)...(19): siRNA sense strand
ccauagaucaucaaacuuc

SEQ ID NO: 557365 - RNA, 19 nt, Homo sapiens
  misc_RNA (1)...(19): siRNA sense strand
uauaugcugucgaaaucaa

SEQ ID NO: 557366 - RNA, 19 nt, Homo sapiens
  misc_RNA (1)...(19): siRNA sense strand
agguuucucuugcuaauga

SEQ ID NO: 557367 - RNA, 19 nt, Homo sapiens
  misc_RNA (1)...(19): siRNA sense strand
cuccauagaucaucaaacu

SEQ ID NO: 557368 - RNA, 19 nt, Homo sapiens
  misc_RNA (1)...(19): siRNA sense strand
gcccaucuaugaaccucuu

SEQ ID NO: 557369 - RNA, 19 nt, Homo sapiens
  misc_RNA (1)...(19): siRNA sense strand
cauagaucaucaaacuuca

SEQ ID NO: 557370 - RNA, 19 nt, Homo sapiens
  misc_RNA (1)...(19): siRNA sense strand
ucaagggugugagaacaug

SEQ ID NO: 557371 - RNA, 19 nt, Homo sapiens
  misc_RNA (1)...(19): siRNA sense strand
gaaccucuucucccaugga

SEQ ID NO: 557372 - RNA, 19 nt, Homo sapiens
  misc_RNA (1)...(19): siRNA sense strand
auuauaugcugucgaaauc

SEQ ID NO: 557373 - RNA, 19 nt, Homo sapiens
  misc_RNA (1)...(19): siRNA sense strand
aacaugugcccaucuauga

SEQ ID NO: 557374 - RNA, 19 nt, Homo sapiens
  misc_RNA (1)...(19): siRNA sense strand
acagguuucucuugcuaau

SEQ ID NO: 557375 - RNA, 19 nt, Homo sapiens
  misc_RNA (1)...(19): siRNA sense strand
ccagaggaacaucaaguca

SEQ ID NO: 557376 - RNA, 19 nt, Homo sapiens
  misc_RNA (1)...(19): siRNA sense strand
gcugucgaaaucaaucuuu

SEQ ID NO: 557377 - RNA, 19 nt, Homo sapiens
  misc_RNA (1)...(19): siRNA sense strand
acgaggaugcaaauuauau

SEQ ID NO: 557378 - RNA, 19 nt, Homo sapiens
  misc_RNA (1)...(19): siRNA sense strand
cgaggaugcaaauuauaug

SEQ ID NO: 557379 - RNA, 19 nt, Homo sapiens
  misc_RNA (1)...(19): siRNA sense strand
cauggaacgaggaugcaaa

SEQ ID NO: 557380 - RNA, 19 nt, Homo sapiens
  misc_RNA (1)...(19): siRNA sense strand
gaacgaggaugcaaauuau

SEQ ID NO: 557381 - RNA, 19 nt, Homo sapiens
  misc_RNA (1)...(19): siRNA sense strand
ggaacgaggaugcaaauua

SEQ ID NO: 557382 - RNA, 19 nt, Homo sapiens
  misc_RNA (1)...(19): siRNA sense strand
gaacagguuucucuugcua

SEQ ID NO: 557383 - RNA, 19 nt, Homo sapiens
  misc_RNA (1)...(19): siRNA sense strand
caaauuauaugcugucgaa

SEQ ID NO: 557384 - RNA, 19 nt, Homo sapiens
  misc_RNA (1)...(19): siRNA sense strand
gagaacaugugcccaucua

SEQ ID NO: 557385 - RNA, 19 nt, Homo sapiens
  misc_RNA (1)...(19): siRNA sense strand
gaacaucaagucagccuaa

SEQ ID NO: 557386 - RNA, 19 nt, Homo sapiens
  misc_RNA (1)...(19): siRNA sense strand
gaacaugugcccaucuaug

SEQ ID NO: 557387 - RNA, 19 nt, Homo sapiens
  misc_RNA (1)...(19): siRNA sense strand
caucaagucagccuaauga

SEQ ID NO: 557388 - RNA, 19 nt, Homo sapiens
  misc_RNA (1)...(19): siRNA sense strand
gcuaaugagucuuuaucug

SEQ ID NO: 557389 - RNA, 19 nt, Homo sapiens
  misc_RNA (1)...(19): siRNA sense strand
ccauagaucaucaaacuuc

SEQ ID NO: 557390 - RNA, 19 nt, Homo sapiens
  misc_RNA (1)...(19): siRNA sense strand
uauaugcugucgaaaucaa

SEQ ID NO: 557391 - RNA, 19 nt, Homo sapiens
  misc_RNA (1)...(19): siRNA sense strand
agguuucucuugcuaauga

SEQ ID NO: 557392 - RNA, 19 nt, Homo sapiens
  misc_RNA (1)...(19): siRNA sense strand
cuccauagaucaucaaacu

SEQ ID NO: 557393 - RNA, 19 nt, Homo sapiens
  misc_RNA (1)...(19): siRNA sense strand
gcccaucuaugaaccucuu

SEQ ID NO: 557394 - RNA, 19 nt, Homo sapiens
  misc_RNA (1)...(19): siRNA sense strand
cauagaucaucaaacuuca

SEQ ID NO: 557395 - RNA, 19 nt, Homo sapiens
  misc_RNA (1)...(19): siRNA sense strand
ucaagggugugagaacaug

SEQ ID NO: 557396 - RNA, 19 nt, Homo sapiens
  misc_RNA (1)...(19): siRNA sense strand
gaaccucuucucccaugga

SEQ ID NO: 557397 - RNA, 19 nt, Homo sapiens
  misc_RNA (1)...(19): siRNA sense strand
auuauaugcugucgaaauc

SEQ ID NO: 557398 - RNA, 19 nt, Homo sapiens
  misc_RNA (1)...(19): siRNA sense strand
aacaugugcccaucuauga

SEQ ID NO: 557399 - RNA, 19 nt, Homo sapiens
  misc_RNA (1)...(19): siRNA sense strand
acagguuucucuugcuaau

SEQ ID NO: 557400 - RNA, 19 nt, Homo sapiens
  misc_RNA (1)...(19): siRNA sense strand
ccagaggaacaucaaguca

SEQ ID NO: 557401 - RNA, 19 nt, Homo sapiens
  misc_RNA (1)...(19): siRNA sense strand
gcugucgaaaucaaucuuu

SEQ ID NO: 557402 - RNA, 19 nt, Homo sapiens
  misc_RNA (1)...(19): siRNA sense strand
acgaggaugcaaauuauau

SEQ ID NO: 557403 - RNA, 19 nt, Homo sapiens
  misc_RNA (1)...(19): siRNA sense strand
cgaggaugcaaauuauaug

SEQ ID NO: 557404 - RNA, 19 nt, Homo sapiens
  misc_RNA (1)...(19): siRNA sense strand
cauggaacgaggaugcaaa

SEQ ID NO: 557405 - RNA, 19 nt, Homo sapiens
  misc_RNA (1)...(19): siRNA sense strand
gaacgaggaugcaaauuau

SEQ ID NO: 557406 - RNA, 19 nt, Homo sapiens
  misc_RNA (1)...(19): siRNA sense strand
ggaacgaggaugcaaauua

SEQ ID NO: 557407 - RNA, 19 nt, Homo sapiens
  misc_RNA (1)...(19): siRNA sense strand
gaacagguuucucuugcua

SEQ ID NO: 557408 - RNA, 19 nt, Homo sapiens
  misc_RNA (1)...(19): siRNA sense strand
caaauuauaugcugucgaa

SEQ ID NO: 557409 - RNA, 19 nt, Homo sapiens
  misc_RNA (1)...(19): siRNA sense strand
gagaacaugugcccaucua

SEQ ID NO: 557410 - RNA, 19 nt, Homo sapiens
  misc_RNA (1)...(19): siRNA sense strand
gaacaucaagucagccuaa

SEQ ID NO: 557411 - RNA, 19 nt, Homo sapiens
  misc_RNA (1)...(19): siRNA sense strand
gaacaugugcccaucuaug

SEQ ID NO: 557412 - RNA, 19 nt, Homo sapiens
  misc_RNA (1)...(19): siRNA sense strand
caucaagucagccuaauga

SEQ ID NO: 557413 - RNA, 19 nt, Homo sapiens
  misc_RNA (1)...(19): siRNA sense strand
gcuaaugagucuuuaucug

SEQ ID NO: 557414 - RNA, 19 nt, Homo sapiens
  misc_RNA (1)...(19): siRNA sense strand
ccauagaucaucaaacuuc

SEQ ID NO: 557415 - RNA, 19 nt, Homo sapiens
  misc_RNA (1)...(19): siRNA sense strand
uauaugcugucgaaaucaa

SEQ ID NO: 557416 - RNA, 19 nt, Homo sapiens
  misc_RNA (1)...(19): siRNA sense strand
agguuucucuugcuaauga

SEQ ID NO: 557417 - RNA, 19 nt, Homo sapiens
  misc_RNA (1)...(19): siRNA sense strand
cuccauagaucaucaaacu

SEQ ID NO: 557418 - RNA, 19 nt, Homo sapiens
  misc_RNA (1)...(19): siRNA sense strand
gcccaucuaugaaccucuu

SEQ ID NO: 557419 - RNA, 19 nt, Homo sapiens
  misc_RNA (1)...(19): siRNA sense strand
cauagaucaucaaacuuca

SEQ ID NO: 557420 - RNA, 19 nt, Homo sapiens
  misc_RNA (1)...(19): siRNA sense strand
ucaagggugugagaacaug

SEQ ID NO: 557421 - RNA, 19 nt, Homo sapiens
  misc_RNA (1)...(19): siRNA sense strand
gaaccucuucucccaugga

SEQ ID NO: 557422 - RNA, 19 nt, Homo sapiens
  misc_RNA (1)...(19): siRNA sense strand
auuauaugcugucgaaauc

SEQ ID NO: 557423 - RNA, 19 nt, Homo sapiens
  misc_RNA (1)...(19): siRNA sense strand
aacaugugcccaucuauga

SEQ ID NO: 557424 - RNA, 19 nt, Homo sapiens
  misc_RNA (1)...(19): siRNA sense strand
acagguuucucuugcuaau

SEQ ID NO: 557425 - RNA, 19 nt, Homo sapiens
  misc_RNA (1)...(19): siRNA sense strand
ccagaggaacaucaaguca

SEQ ID NO: 557426 - RNA, 19 nt, Homo sapiens
  misc_RNA (1)...(19): siRNA sense strand
gcugucgaaaucaaucuuu

SEQ ID NO: 557427 - RNA, 19 nt, Homo sapiens
  misc_RNA (1)...(19): siRNA sense strand
acgaggaugcaaauuauau

SEQ ID NO: 557428 - RNA, 19 nt, Homo sapiens
  misc_RNA (1)...(19): siRNA sense strand
cgaggaugcaaauuauaug

SEQ ID NO: 557429 - RNA, 19 nt, Homo sapiens
  misc_RNA (1)...(19): siRNA sense strand
cauggaacgaggaugcaaa

SEQ ID NO: 557430 - RNA, 19 nt, Homo sapiens
  misc_RNA (1)...(19): siRNA sense strand
gaacgaggaugcaaauuau

SEQ ID NO: 557431 - RNA, 19 nt, Homo sapiens
  misc_RNA (1)...(19): siRNA sense strand
ggaacgaggaugcaaauua

SEQ ID NO: 557432 - RNA, 19 nt, Homo sapiens
  misc_RNA (1)...(19): siRNA sense strand
gaacagguuucucuugcua

SEQ ID NO: 557433 - RNA, 19 nt, Homo sapiens
  misc_RNA (1)...(19): siRNA sense strand
caaauuauaugcugucgaa

SEQ ID NO: 557434 - RNA, 19 nt, Homo sapiens
  misc_RNA (1)...(19): siRNA sense strand
gagaacaugugcccaucua

SEQ ID NO: 557435 - RNA, 19 nt, Homo sapiens
  misc_RNA (1)...(19): siRNA sense strand
gaacaucaagucagccuaa

SEQ ID NO: 557436 - RNA, 19 nt, Homo sapiens
  misc_RNA (1)...(19): siRNA sense strand
gaacaugugcccaucuaug

SEQ ID NO: 557437 - RNA, 19 nt, Homo sapiens
  misc_RNA (1)...(19): siRNA sense strand
caucaagucagccuaauga

SEQ ID NO: 557438 - RNA, 19 nt, Homo sapiens
  misc_RNA (1)...(19): siRNA sense strand
gcuaaugagucuuuaucug

SEQ ID NO: 557439 - RNA, 19 nt, Homo sapiens
  misc_RNA (1)...(19): siRNA sense strand
ccauagaucaucaaacuuc

SEQ ID NO: 557440 - RNA, 19 nt, Homo sapiens
  misc_RNA (1)...(19): siRNA sense strand
uauaugcugucgaaaucaa

SEQ ID NO: 557441 - RNA, 19 nt, Homo sapiens
  misc_RNA (1)...(19): siRNA sense strand
agguuucucuugcuaauga

SEQ ID NO: 557442 - RNA, 19 nt, Homo sapiens
  misc_RNA (1)...(19): siRNA sense strand
cuccauagaucaucaaacu

SEQ ID NO: 557443 - RNA, 19 nt, Homo sapiens
  misc_RNA (1)...(19): siRNA sense strand
gcccaucuaugaaccucuu

SEQ ID NO: 557444 - RNA, 19 nt, Homo sapiens
  misc_RNA (1)...(19): siRNA sense strand
cauagaucaucaaacuuca

SEQ ID NO: 557445 - RNA, 19 nt, Homo sapiens
  misc_RNA (1)...(19): siRNA sense strand
ucaagggugugagaacaug

SEQ ID NO: 557446 - RNA, 19 nt, Homo sapiens
  misc_RNA (1)...(19): siRNA sense strand
gaaccucuucucccaugga

SEQ ID NO: 557447 - RNA, 19 nt, Homo sapiens
  misc_RNA (1)...(19): siRNA sense strand
auuauaugcugucgaaauc

SEQ ID NO: 557448 - RNA, 19 nt, Homo sapiens
  misc_RNA (1)...(19): siRNA sense strand
aacaugugcccaucuauga

SEQ ID NO: 557449 - RNA, 19 nt, Homo sapiens
  misc_RNA (1)...(19): siRNA sense strand
acagguuucucuugcuaau

SEQ ID NO: 557450 - RNA, 19 nt, Homo sapiens
  misc_RNA (1)...(19): siRNA sense strand
ccagaggaacaucaaguca

SEQ ID NO: 557451 - RNA, 19 nt, Homo sapiens
  misc_RNA (1)...(19): siRNA sense strand
gcugucgaaaucaaucuuu

SEQ ID NO: 557452 - RNA, 19 nt, Homo sapiens
  misc_RNA (1)...(19): siRNA sense strand
acgaggaugcaaauuauau

SEQ ID NO: 557453 - RNA, 19 nt, Homo sapiens
  misc_RNA (1)...(19): siRNA sense strand
cgaggaugcaaauuauaug

SEQ ID NO: 557454 - RNA, 19 nt, Homo sapiens
  misc_RNA (1)...(19): siRNA sense strand
cauggaacgaggaugcaaa

SEQ ID NO: 557455 - RNA, 19 nt, Homo sapiens
  misc_RNA (1)...(19): siRNA sense strand
gaacgaggaugcaaauuau

SEQ ID NO: 557456 - RNA, 19 nt, Homo sapiens
  misc_RNA (1)...(19): siRNA sense strand
ggaacgaggaugcaaauua

SEQ ID NO: 557457 - RNA, 19 nt, Homo sapiens
  misc_RNA (1)...(19): siRNA sense strand
gaacagguuucucuugcua

SEQ ID NO: 557458 - RNA, 19 nt, Homo sapiens
  misc_RNA (1)...(19): siRNA sense strand
caaauuauaugcugucgaa

SEQ ID NO: 557459 - RNA, 19 nt, Homo sapiens
  misc_RNA (1)...(19): siRNA sense strand
gagaacaugugcccaucua

SEQ ID NO: 557460 - RNA, 19 nt, Homo sapiens
  misc_RNA (1)...(19): siRNA sense strand
gaacaucaagucagccuaa

SEQ ID NO: 557461 - RNA, 19 nt, Homo sapiens
  misc_RNA (1)...(19): siRNA sense strand
gaacaugugcccaucuaug

SEQ ID NO: 557462 - RNA, 19 nt, Homo sapiens
  misc_RNA (1)...(19): siRNA sense strand
caucaagucagccuaauga

SEQ ID NO: 557463 - RNA, 19 nt, Homo sapiens
  misc_RNA (1)...(19): siRNA sense strand
gcuaaugagucuuuaucug

SEQ ID NO: 557464 - RNA, 19 nt, Homo sapiens
  misc_RNA (1)...(19): siRNA sense strand
ccauagaucaucaaacuuc

SEQ ID NO: 557465 - RNA, 19 nt, Homo sapiens
  misc_RNA (1)...(19): siRNA sense strand
uauaugcugucgaaaucaa

SEQ ID NO: 557466 - RNA, 19 nt, Homo sapiens
  misc_RNA (1)...(19): siRNA sense strand
agguuucucuugcuaauga

SEQ ID NO: 557467 - RNA, 19 nt, Homo sapiens
  misc_RNA (1)...(19): siRNA sense strand
cuccauagaucaucaaacu

SEQ ID NO: 557468 - RNA, 19 nt, Homo sapiens
  misc_RNA (1)...(19): siRNA sense strand
gcccaucuaugaaccucuu

SEQ ID NO: 557469 - RNA, 19 nt, Homo sapiens
  misc_RNA (1)...(19): siRNA sense strand
cauagaucaucaaacuuca

SEQ ID NO: 557470 - RNA, 19 nt, Homo sapiens
  misc_RNA (1)...(19): siRNA sense strand
ucaagggugugagaacaug

SEQ ID NO: 557471 - RNA, 19 nt, Homo sapiens
  misc_RNA (1)...(19): siRNA sense strand
gaaccucuucucccaugga

SEQ ID NO: 557472 - RNA, 19 nt, Homo sapiens
  misc_RNA (1)...(19): siRNA sense strand
auuauaugcugucgaaauc

SEQ ID NO: 557473 - RNA, 19 nt, Homo sapiens
  misc_RNA (1)...(19): siRNA sense strand
aacaugugcccaucuauga

SEQ ID NO: 557474 - RNA, 19 nt, Homo sapiens
  misc_RNA (1)...(19): siRNA sense strand
acagguuucucuugcuaau

SEQ ID NO: 557475 - RNA, 19 nt, Homo sapiens
  misc_RNA (1)...(19): siRNA sense strand
ccagaggaacaucaaguca

SEQ ID NO: 557476 - RNA, 19 nt, Homo sapiens
  misc_RNA (1)...(19): siRNA sense strand
gcugucgaaaucaaucuuu

SEQ ID NO: 557477 - RNA, 19 nt, Homo sapiens
  misc_RNA (1)...(19): siRNA sense strand
acgaggaugcaaauuauau

SEQ ID NO: 557478 - RNA, 19 nt, Homo sapiens
  misc_RNA (1)...(19): siRNA sense strand
cgaggaugcaaauuauaug

SEQ ID NO: 557479 - RNA, 19 nt, Homo sapiens
  misc_RNA (1)...(19): siRNA sense strand
cauggaacgaggaugcaaa

SEQ ID NO: 557480 - RNA, 19 nt, Homo sapiens
  misc_RNA (1)...(19): siRNA sense strand
gaacgaggaugcaaauuau

SEQ ID NO: 557481 - RNA, 19 nt, Homo sapiens
  misc_RNA (1)...(19): siRNA sense strand
ggaacgaggaugcaaauua

SEQ ID NO: 557482 - RNA, 19 nt, Homo sapiens
  misc_RNA (1)...(19): siRNA sense strand
gaacagguuucucuugcua

SEQ ID NO: 557483 - RNA, 19 nt, Homo sapiens
  misc_RNA (1)...(19): siRNA sense strand
caaauuauaugcugucgaa

SEQ ID NO: 557484 - RNA, 19 nt, Homo sapiens
  misc_RNA (1)...(19): siRNA sense strand
gagaacaugugcccaucua

SEQ ID NO: 557485 - RNA, 19 nt, Homo sapiens
  misc_RNA (1)...(19): siRNA sense strand
gaacaucaagucagccuaa

SEQ ID NO: 557486 - RNA, 19 nt, Homo sapiens
  misc_RNA (1)...(19): siRNA sense strand
gaacaugugcccaucuaug

SEQ ID NO: 557487 - RNA, 19 nt, Homo sapiens
  misc_RNA (1)...(19): siRNA sense strand
caucaagucagccuaauga

SEQ ID NO: 557488 - RNA, 19 nt, Homo sapiens
  misc_RNA (1)...(19): siRNA sense strand
gcuaaugagucuuuaucug

SEQ ID NO: 557489 - RNA, 19 nt, Homo sapiens
  misc_RNA (1)...(19): siRNA sense strand
ccauagaucaucaaacuuc

SEQ ID NO: 557490 - RNA, 19 nt, Homo sapiens
  misc_RNA (1)...(19): siRNA sense strand
uauaugcugucgaaaucaa

SEQ ID NO: 557491 - RNA, 19 nt, Homo sapiens
  misc_RNA (1)...(19): siRNA sense strand
agguuucucuugcuaauga

SEQ ID NO: 557492 - RNA, 19 nt, Homo sapiens
  misc_RNA (1)...(19): siRNA sense strand
cuccauagaucaucaaacu

SEQ ID NO: 557493 - RNA, 19 nt, Homo sapiens
  misc_RNA (1)...(19): siRNA sense strand
gcccaucuaugaaccucuu

SEQ ID NO: 557494 - RNA, 19 nt, Homo sapiens
  misc_RNA (1)...(19): siRNA sense strand
cauagaucaucaaacuuca

SEQ ID NO: 557495 - RNA, 19 nt, Homo sapiens
  misc_RNA (1)...(19): siRNA sense strand
ucaagggugugagaacaug

SEQ ID NO: 557496 - RNA, 19 nt, Homo sapiens
  misc_RNA (1)...(19): siRNA sense strand
gaaccucuucucccaugga

SEQ ID NO: 557497 - RNA, 19 nt, Homo sapiens
  misc_RNA (1)...(19): siRNA sense strand
auuauaugcugucgaaauc

SEQ ID NO: 557498 - RNA, 19 nt, Homo sapiens
  misc_RNA (1)...(19): siRNA sense strand
aacaugugcccaucuauga

SEQ ID NO: 557499 - RNA, 19 nt, Homo sapiens
  misc_RNA (1)...(19): siRNA sense strand
acagguuucucuugcuaau

SEQ ID NO: 557500 - RNA, 19 nt, Homo sapiens
  misc_RNA (1)...(19): siRNA sense strand
ccagaggaacaucaaguca

SEQ ID NO: 557501 - RNA, 19 nt, Homo sapiens
  misc_RNA (1)...(19): siRNA sense strand
gcugucgaaaucaaucuuu

SEQ ID NO: 557502 - RNA, 19 nt, Homo sapiens
  misc_RNA (1)...(19): siRNA sense strand
acgaggaugcaaauuauau

SEQ ID NO: 557503 - RNA, 19 nt, Homo sapiens
  misc_RNA (1)...(19): siRNA sense strand
cgaggaugcaaauuauaug

SEQ ID NO: 557504 - RNA, 19 nt, Homo sapiens
  misc_RNA (1)...(19): siRNA sense strand
cauggaacgaggaugcaaa

SEQ ID NO: 557505 - RNA, 19 nt, Homo sapiens
  misc_RNA (1)...(19): siRNA sense strand
gaacgaggaugcaaauuau

SEQ ID NO: 557506 - RNA, 19 nt, Homo sapiens
  misc_RNA (1)...(19): siRNA sense strand
ggaacgaggaugcaaauua

SEQ ID NO: 557507 - RNA, 19 nt, Homo sapiens
  misc_RNA (1)...(19): siRNA sense strand
gaacagguuucucuugcua

SEQ ID NO: 557508 - RNA, 19 nt, Homo sapiens
  misc_RNA (1)...(19): siRNA sense strand
caaauuauaugcugucgaa

SEQ ID NO: 557509 - RNA, 19 nt, Homo sapiens
  misc_RNA (1)...(19): siRNA sense strand
gagaacaugugcccaucua

SEQ ID NO: 557510 - RNA, 19 nt, Homo sapiens
  misc_RNA (1)...(19): siRNA sense strand
gaacaucaagucagccuaa

SEQ ID NO: 557511 - RNA, 19 nt, Homo sapiens
  misc_RNA (1)...(19): siRNA sense strand
gaacaugugcccaucuaug

SEQ ID NO: 557512 - RNA, 19 nt, Homo sapiens
  misc_RNA (1)...(19): siRNA sense strand
caucaagucagccuaauga

SEQ ID NO: 557513 - RNA, 19 nt, Homo sapiens
  misc_RNA (1)...(19): siRNA sense strand
gcuaaugagucuuuaucug

SEQ ID NO: 557514 - RNA, 19 nt, Homo sapiens
  misc_RNA (1)...(19): siRNA sense strand
ccauagaucaucaaacuuc

SEQ ID NO: 557515 - RNA, 19 nt, Homo sapiens
  misc_RNA (1)...(19): siRNA sense strand
uauaugcugucgaaaucaa

SEQ ID NO: 557516 - RNA, 19 nt, Homo sapiens
  misc_RNA (1)...(19): siRNA sense strand
agguuucucuugcuaauga

SEQ ID NO: 557517 - RNA, 19 nt, Homo sapiens
  misc_RNA (1)...(19): siRNA sense strand
cuccauagaucaucaaacu

SEQ ID NO: 557518 - RNA, 19 nt, Homo sapiens
  misc_RNA (1)...(19): siRNA sense strand
gcccaucuaugaaccucuu

SEQ ID NO: 557519 - RNA, 19 nt, Homo sapiens
  misc_RNA (1)...(19): siRNA sense strand
cauagaucaucaaacuuca

SEQ ID NO: 557520 - RNA, 19 nt, Homo sapiens
  misc_RNA (1)...(19): siRNA sense strand
ucaagggugugagaacaug

SEQ ID NO: 557521 - RNA, 19 nt, Homo sapiens
  misc_RNA (1)...(19): siRNA sense strand
gaaccucuucucccaugga

SEQ ID NO: 557522 - RNA, 19 nt, Homo sapiens
  misc_RNA (1)...(19): siRNA sense strand
auuauaugcugucgaaauc

SEQ ID NO: 557523 - RNA, 19 nt, Homo sapiens
  misc_RNA (1)...(19): siRNA sense strand
aacaugugcccaucuauga

SEQ ID NO: 557524 - RNA, 19 nt, Homo sapiens
  misc_RNA (1)...(19): siRNA sense strand
acagguuucucuugcuaau

SEQ ID NO: 557525 - RNA, 19 nt, Homo sapiens
  misc_RNA (1)...(19): siRNA sense strand
ccagaggaacaucaaguca

SEQ ID NO: 557526 - RNA, 19 nt, Homo sapiens
  misc_RNA (1)...(19): siRNA sense strand
gcugucgaaaucaaucuuu

SEQ ID NO: 557527 - RNA, 19 nt, Homo sapiens
  misc_RNA (1)...(19): siRNA sense strand
acgaggaugcaaauuauau

SEQ ID NO: 557528 - RNA, 19 nt, Homo sapiens
  misc_RNA (1)...(19): siRNA sense strand
cgaggaugcaaauuauaug

SEQ ID NO: 557529 - RNA, 19 nt, Homo sapiens
  misc_RNA (1)...(19): siRNA sense strand
cauggaacgaggaugcaaa

SEQ ID NO: 557530 - RNA, 19 nt, Homo sapiens
  misc_RNA (1)...(19): siRNA sense strand
gaacgaggaugcaaauuau

SEQ ID NO: 557531 - RNA, 19 nt, Homo sapiens
  misc_RNA (1)...(19): siRNA sense strand
ggaacgaggaugcaaauua

SEQ ID NO: 557532 - RNA, 19 nt, Homo sapiens
  misc_RNA (1)...(19): siRNA sense strand
gaacagguuucucuugcua

SEQ ID NO: 557533 - RNA, 19 nt, Homo sapiens
  misc_RNA (1)...(19): siRNA sense strand
caaauuauaugcugucgaa

SEQ ID NO: 557534 - RNA, 19 nt, Homo sapiens
  misc_RNA (1)...(19): siRNA sense strand
gagaacaugugcccaucua

SEQ ID NO: 557535 - RNA, 19 nt, Homo sapiens
  misc_RNA (1)...(19): siRNA sense strand
gaacaucaagucagccuaa

SEQ ID NO: 557536 - RNA, 19 nt, Homo sapiens
  misc_RNA (1)...(19): siRNA sense strand
gaacaugugcccaucuaug

SEQ ID NO: 557537 - RNA, 19 nt, Homo sapiens
  misc_RNA (1)...(19): siRNA sense strand
caucaagucagccuaauga

SEQ ID NO: 557538 - RNA, 19 nt, Homo sapiens
  misc_RNA (1)...(19): siRNA sense strand
gcuaaugagucuuuaucug

SEQ ID NO: 557539 - RNA, 19 nt, Homo sapiens
  misc_RNA (1)...(19): siRNA sense strand
ccauagaucaucaaacuuc

SEQ ID NO: 557540 - RNA, 19 nt, Homo sapiens
  misc_RNA (1)...(19): siRNA sense strand
uauaugcugucgaaaucaa

SEQ ID NO: 557541 - RNA, 19 nt, Homo sapiens
  misc_RNA (1)...(19): siRNA sense strand
agguuucucuugcuaauga

SEQ ID NO: 557542 - RNA, 19 nt, Homo sapiens
  misc_RNA (1)...(19): siRNA sense strand
cuccauagaucaucaaacu

SEQ ID NO: 557543 - RNA, 19 nt, Homo sapiens
  misc_RNA (1)...(19): siRNA sense strand
gcccaucuaugaaccucuu

SEQ ID NO: 557544 - RNA, 19 nt, Homo sapiens
  misc_RNA (1)...(19): siRNA sense strand
cauagaucaucaaacuuca

SEQ ID NO: 557545 - RNA, 19 nt, Homo sapiens
  misc_RNA (1)...(19): siRNA sense strand
ucaagggugugagaacaug

SEQ ID NO: 557546 - RNA, 19 nt, Homo sapiens
  misc_RNA (1)...(19): siRNA sense strand
gaaccucuucucccaugga

SEQ ID NO: 557547 - RNA, 19 nt, Homo sapiens
  misc_RNA (1)...(19): siRNA sense strand
auuauaugcugucgaaauc

SEQ ID NO: 557548 - RNA, 19 nt, Homo sapiens
  misc_RNA (1)...(19): siRNA sense strand
aacaugugcccaucuauga

SEQ ID NO: 557549 - RNA, 19 nt, Homo sapiens
  misc_RNA (1)...(19): siRNA sense strand
acagguuucucuugcuaau

SEQ ID NO: 557550 - RNA, 19 nt, Homo sapiens
  misc_RNA (1)...(19): siRNA sense strand
ccagaggaacaucaaguca

SEQ ID NO: 557551 - RNA, 19 nt, Homo sapiens
  misc_RNA (1)...(19): siRNA sense strand
gcugucgaaaucaaucuuu

SEQ ID NO: 557552 - RNA, 19 nt, Homo sapiens
  misc_RNA (1)...(19): siRNA sense strand
acgaggaugcaaauuauau

SEQ ID NO: 557553 - RNA, 19 nt, Homo sapiens
  misc_RNA (1)...(19): siRNA sense strand
cgaggaugcaaauuauaug

SEQ ID NO: 557554 - RNA, 19 nt, Homo sapiens
  misc_RNA (1)...(19): siRNA sense strand
cauggaacgaggaugcaaa

SEQ ID NO: 557555 - RNA, 19 nt, Homo sapiens
  misc_RNA (1)...(19): siRNA sense strand
gaacgaggaugcaaauuau

SEQ ID NO: 557556 - RNA, 19 nt, Homo sapiens
  misc_RNA (1)...(19): siRNA sense strand
ggaacgaggaugcaaauua

SEQ ID NO: 557557 - RNA, 19 nt, Homo sapiens
  misc_RNA (1)...(19): siRNA sense strand
gaacagguuucucuugcua

SEQ ID NO: 557558 - RNA, 19 nt, Homo sapiens
  misc_RNA (1)...(19): siRNA sense strand
caaauuauaugcugucgaa

SEQ ID NO: 557559 - RNA, 19 nt, Homo sapiens
  misc_RNA (1)...(19): siRNA sense strand
gagaacaugugcccaucua

SEQ ID NO: 557560 - RNA, 19 nt, Homo sapiens
  misc_RNA (1)...(19): siRNA sense strand
gaacaucaagucagccuaa

SEQ ID NO: 557561 - RNA, 19 nt, Homo sapiens
  misc_RNA (1)...(19): siRNA sense strand
gaacaugugcccaucuaug

SEQ ID NO: 557562 - RNA, 19 nt, Homo sapiens
  misc_RNA (1)...(19): siRNA sense strand
caucaagucagccuaauga

SEQ ID NO: 557563 - RNA, 19 nt, Homo sapiens
  misc_RNA (1)...(19): siRNA sense strand
gcuaaugagucuuuaucug

SEQ ID NO: 557564 - RNA, 19 nt, Homo sapiens
  misc_RNA (1)...(19): siRNA sense strand
ccauagaucaucaaacuuc

SEQ ID NO: 557565 - RNA, 19 nt, Homo sapiens
  misc_RNA (1)...(19): siRNA sense strand
uauaugcugucgaaaucaa

SEQ ID NO: 557566 - RNA, 19 nt, Homo sapiens
  misc_RNA (1)...(19): siRNA sense strand
agguuucucuugcuaauga

SEQ ID NO: 557567 - RNA, 19 nt, Homo sapiens
  misc_RNA (1)...(19): siRNA sense strand
cuccauagaucaucaaacu

SEQ ID NO: 557568 - RNA, 19 nt, Homo sapiens
  misc_RNA (1)...(19): siRNA sense strand
gcccaucuaugaaccucuu

SEQ ID NO: 557569 - RNA, 19 nt, Homo sapiens
  misc_RNA (1)...(19): siRNA sense strand
cauagaucaucaaacuuca

SEQ ID NO: 557570 - RNA, 19 nt, Homo sapiens
  misc_RNA (1)...(19): siRNA sense strand
ucaagggugugagaacaug

SEQ ID NO: 557571 - RNA, 19 nt, Homo sapiens
  misc_RNA (1)...(19): siRNA sense strand
gaaccucuucucccaugga

SEQ ID NO: 557572 - RNA, 19 nt, Homo sapiens
  misc_RNA (1)...(19): siRNA sense strand
auuauaugcugucgaaauc

SEQ ID NO: 557573 - RNA, 19 nt, Homo sapiens
  misc_RNA (1)...(19): siRNA sense strand
aacaugugcccaucuauga

SEQ ID NO: 557574 - RNA, 19 nt, Homo sapiens
  misc_RNA (1)...(19): siRNA sense strand
acagguuucucuugcuaau

SEQ ID NO: 557575 - RNA, 19 nt, Homo sapiens
  misc_RNA (1)...(19): siRNA sense strand
ccagaggaacaucaaguca

SEQ ID NO: 557576 - RNA, 19 nt, Homo sapiens
  misc_RNA (1)...(19): siRNA sense strand
gcugucgaaaucaaucuuu

SEQ ID NO: 557577 - RNA, 19 nt, Homo sapiens
  misc_RNA (1)...(19): siRNA sense strand
acgaggaugcaaauuauau

SEQ ID NO: 557578 - RNA, 19 nt, Homo sapiens
  misc_RNA (1)...(19): siRNA sense strand
cgaggaugcaaauuauaug

SEQ ID NO: 557579 - RNA, 19 nt, Homo sapiens
  misc_RNA (1)...(19): siRNA sense strand
cauggaacgaggaugcaaa

SEQ ID NO: 557580 - RNA, 19 nt, Homo sapiens
  misc_RNA (1)...(19): siRNA sense strand
gaacgaggaugcaaauuau

SEQ ID NO: 557581 - RNA, 19 nt, Homo sapiens
  misc_RNA (1)...(19): siRNA sense strand
ggaacgaggaugcaaauua

SEQ ID NO: 557582 - RNA, 19 nt, Homo sapiens
  misc_RNA (1)...(19): siRNA sense strand
gaacagguuucucuugcua

SEQ ID NO: 557583 - RNA, 19 nt, Homo sapiens
  misc_RNA (1)...(19): siRNA sense strand
caaauuauaugcugucgaa

SEQ ID NO: 557584 - RNA, 19 nt, Homo sapiens
  misc_RNA (1)...(19): siRNA sense strand
gagaacaugugcccaucua

SEQ ID NO: 557585 - RNA, 19 nt, Homo sapiens
  misc_RNA (1)...(19): siRNA sense strand
gaacaucaagucagccuaa

SEQ ID NO: 557586 - RNA, 19 nt, Homo sapiens
  misc_RNA (1)...(19): siRNA sense strand
gaacaugugcccaucuaug

SEQ ID NO: 557587 - RNA, 19 nt, Homo sapiens
  misc_RNA (1)...(19): siRNA sense strand
caucaagucagccuaauga

SEQ ID NO: 557588 - RNA, 19 nt, Homo sapiens
  misc_RNA (1)...(19): siRNA sense strand
gcuaaugagucuuuaucug

SEQ ID NO: 557589 - RNA, 19 nt, Homo sapiens
  misc_RNA (1)...(19): siRNA sense strand
ccauagaucaucaaacuuc

SEQ ID NO: 557590 - RNA, 19 nt, Homo sapiens
  misc_RNA (1)...(19): siRNA sense strand
uauaugcugucgaaaucaa

SEQ ID NO: 557591 - RNA, 19 nt, Homo sapiens
  misc_RNA (1)...(19): siRNA sense strand
agguuucucuugcuaauga

SEQ ID NO: 557592 - RNA, 19 nt, Homo sapiens
  misc_RNA (1)...(19): siRNA sense strand
cuccauagaucaucaaacu

SEQ ID NO: 557593 - RNA, 19 nt, Homo sapiens
  misc_RNA (1)...(19): siRNA sense strand
gcccaucuaugaaccucuu

SEQ ID NO: 557594 - RNA, 19 nt, Homo sapiens
  misc_RNA (1)...(19): siRNA sense strand
cauagaucaucaaacuuca

SEQ ID NO: 557595 - RNA, 19 nt, Homo sapiens
  misc_RNA (1)...(19): siRNA sense strand
ucaagggugugagaacaug

SEQ ID NO: 557596 - RNA, 19 nt, Homo sapiens
  misc_RNA (1)...(19): siRNA sense strand
gaaccucuucucccaugga

SEQ ID NO: 557597 - RNA, 19 nt, Homo sapiens
  misc_RNA (1)...(19): siRNA sense strand
auuauaugcugucgaaauc

SEQ ID NO: 557598 - RNA, 19 nt, Homo sapiens
  misc_RNA (1)...(19): siRNA sense strand
aacaugugcccaucuauga

SEQ ID NO: 557599 - RNA, 19 nt, Homo sapiens
  misc_RNA (1)...(19): siRNA sense strand
acagguuucucuugcuaau

SEQ ID NO: 557600 - RNA, 19 nt, Homo sapiens
  misc_RNA (1)...(19): siRNA sense strand
ccagaggaacaucaaguca

SEQ ID NO: 557601 - RNA, 19 nt, Homo sapiens
  misc_RNA (1)...(19): siRNA sense strand
gcugucgaaaucaaucuuu

SEQ ID NO: 557602 - RNA, 19 nt, Homo sapiens
  misc_RNA (1)...(19): siRNA sense strand
acgaggaugcaaauuauau

SEQ ID NO: 557603 - RNA, 19 nt, Homo sapiens
  misc_RNA (1)...(19): siRNA sense strand
cgaggaugcaaauuauaug

SEQ ID NO: 557604 - RNA, 19 nt, Homo sapiens
  misc_RNA (1)...(19): siRNA sense strand
cauggaacgaggaugcaaa

SEQ ID NO: 557605 - RNA, 19 nt, Homo sapiens
  misc_RNA (1)...(19): siRNA sense strand
gaacgaggaugcaaauuau

SEQ ID NO: 557606 - RNA, 19 nt, Homo sapiens
  misc_RNA (1)...(19): siRNA sense strand
ggaacgaggaugcaaauua

SEQ ID NO: 557607 - RNA, 19 nt, Homo sapiens
  misc_RNA (1)...(19): siRNA sense strand
gaacagguuucucuugcua

SEQ ID NO: 557608 - RNA, 19 nt, Homo sapiens
  misc_RNA (1)...(19): siRNA sense strand
caaauuauaugcugucgaa

SEQ ID NO: 557609 - RNA, 19 nt, Homo sapiens
  misc_RNA (1)...(19): siRNA sense strand
gagaacaugugcccaucua

SEQ ID NO: 557610 - RNA, 19 nt, Homo sapiens
  misc_RNA (1)...(19): siRNA sense strand
gaacaucaagucagccuaa

SEQ ID NO: 557611 - RNA, 19 nt, Homo sapiens
  misc_RNA (1)...(19): siRNA sense strand
gaacaugugcccaucuaug

SEQ ID NO: 557612 - RNA, 19 nt, Homo sapiens
  misc_RNA (1)...(19): siRNA sense strand
caucaagucagccuaauga

SEQ ID NO: 557613 - RNA, 19 nt, Homo sapiens
  misc_RNA (1)...(19): siRNA sense strand
gcuaaugagucuuuaucug

SEQ ID NO: 557614 - RNA, 19 nt, Homo sapiens
  misc_RNA (1)...(19): siRNA sense strand
ccauagaucaucaaacuuc

SEQ ID NO: 557615 - RNA, 19 nt, Homo sapiens
  misc_RNA (1)...(19): siRNA sense strand
uauaugcugucgaaaucaa

SEQ ID NO: 557616 - RNA, 19 nt, Homo sapiens
  misc_RNA (1)...(19): siRNA sense strand
agguuucucuugcuaauga

SEQ ID NO: 557617 - RNA, 19 nt, Homo sapiens
  misc_RNA (1)...(19): siRNA sense strand
cuccauagaucaucaaacu

SEQ ID NO: 557618 - RNA, 19 nt, Homo sapiens
  misc_RNA (1)...(19): siRNA sense strand
gcccaucuaugaaccucuu

SEQ ID NO: 557619 - RNA, 19 nt, Homo sapiens
  misc_RNA (1)...(19): siRNA sense strand
cauagaucaucaaacuuca

SEQ ID NO: 557620 - RNA, 19 nt, Homo sapiens
  misc_RNA (1)...(19): siRNA sense strand
ucaagggugugagaacaug

SEQ ID NO: 557621 - RNA, 19 nt, Homo sapiens
  misc_RNA (1)...(19): siRNA sense strand
gaaccucuucucccaugga

SEQ ID NO: 557622 - RNA, 19 nt, Homo sapiens
  misc_RNA (1)...(19): siRNA sense strand
auuauaugcugucgaaauc

SEQ ID NO: 557623 - RNA, 19 nt, Homo sapiens
  misc_RNA (1)...(19): siRNA sense strand
aacaugugcccaucuauga

SEQ ID NO: 557624 - RNA, 19 nt, Homo sapiens
  misc_RNA (1)...(19): siRNA sense strand
acagguuucucuugcuaau

SEQ ID NO: 557625 - RNA, 19 nt, Homo sapiens
  misc_RNA (1)...(19): siRNA sense strand
ccagaggaacaucaaguca

SEQ ID NO: 557626 - RNA, 19 nt, Homo sapiens
  misc_RNA (1)...(19): siRNA sense strand
gcugucgaaaucaaucuuu

SEQ ID NO: 557627 - RNA, 19 nt, Homo sapiens
  misc_RNA (1)...(19): siRNA sense strand
acgaggaugcaaauuauau

SEQ ID NO: 557628 - RNA, 19 nt, Homo sapiens
  misc_RNA (1)...(19): siRNA sense strand
cgaggaugcaaauuauaug

SEQ ID NO: 557629 - RNA, 19 nt, Homo sapiens
  misc_RNA (1)...(19): siRNA sense strand
cauggaacgaggaugcaaa

SEQ ID NO: 557630 - RNA, 19 nt, Homo sapiens
  misc_RNA (1)...(19): siRNA sense strand
gaacgaggaugcaaauuau

SEQ ID NO: 557631 - RNA, 19 nt, Homo sapiens
  misc_RNA (1)...(19): siRNA sense strand
ggaacgaggaugcaaauua

SEQ ID NO: 557632 - RNA, 19 nt, Homo sapiens
  misc_RNA (1)...(19): siRNA sense strand
gaacagguuucucuugcua

SEQ ID NO: 557633 - RNA, 19 nt, Homo sapiens
  misc_RNA (1)...(19): siRNA sense strand
caaauuauaugcugucgaa

SEQ ID NO: 557634 - RNA, 19 nt, Homo sapiens
  misc_RNA (1)...(19): siRNA sense strand
gagaacaugugcccaucua

SEQ ID NO: 557635 - RNA, 19 nt, Homo sapiens
  misc_RNA (1)...(19): siRNA sense strand
gaacaucaagucagccuaa

SEQ ID NO: 557636 - RNA, 19 nt, Homo sapiens
  misc_RNA (1)...(19): siRNA sense strand
gaacaugugcccaucuaug

SEQ ID NO: 557637 - RNA, 19 nt, Homo sapiens
  misc_RNA (1)...(19): siRNA sense strand
caucaagucagccuaauga

SEQ ID NO: 557638 - RNA, 19 nt, Homo sapiens
  misc_RNA (1)...(19): siRNA sense strand
gcuaaugagucuuuaucug

SEQ ID NO: 557639 - RNA, 19 nt, Homo sapiens
  misc_RNA (1)...(19): siRNA sense strand
ccauagaucaucaaacuuc

SEQ ID NO: 557640 - RNA, 19 nt, Homo sapiens
  misc_RNA (1)...(19): siRNA sense strand
uauaugcugucgaaaucaa

SEQ ID NO: 557641 - RNA, 19 nt, Homo sapiens
  misc_RNA (1)...(19): siRNA sense strand
agguuucucuugcuaauga

SEQ ID NO: 557642 - RNA, 19 nt, Homo sapiens
  misc_RNA (1)...(19): siRNA sense strand
cuccauagaucaucaaacu

SEQ ID NO: 557643 - RNA, 19 nt, Homo sapiens
  misc_RNA (1)...(19): siRNA sense strand
gcccaucuaugaaccucuu

SEQ ID NO: 557644 - RNA, 19 nt, Homo sapiens
  misc_RNA (1)...(19): siRNA sense strand
cauagaucaucaaacuuca

SEQ ID NO: 557645 - RNA, 19 nt, Homo sapiens
  misc_RNA (1)...(19): siRNA sense strand
ucaagggugugagaacaug

SEQ ID NO: 557646 - RNA, 19 nt, Homo sapiens
  misc_RNA (1)...(19): siRNA sense strand
gaaccucuucucccaugga

SEQ ID NO: 557647 - RNA, 19 nt, Homo sapiens
  misc_RNA (1)...(19): siRNA sense strand
auuauaugcugucgaaauc

SEQ ID NO: 557648 - RNA, 19 nt, Homo sapiens
  misc_RNA (1)...(19): siRNA sense strand
aacaugugcccaucuauga

SEQ ID NO: 557649 - RNA, 19 nt, Homo sapiens
  misc_RNA (1)...(19): siRNA sense strand
acagguuucucuugcuaau

SEQ ID NO: 557650 - RNA, 19 nt, Homo sapiens
  misc_RNA (1)...(19): siRNA sense strand
ccagaggaacaucaaguca

SEQ ID NO: 557651 - RNA, 19 nt, Homo sapiens
  misc_RNA (1)...(19): siRNA sense strand
gcugucgaaaucaaucuuu

SEQ ID NO: 557652 - RNA, 19 nt, Homo sapiens
  misc_RNA (1)...(19): siRNA sense strand
acgaggaugcaaauuauau

SEQ ID NO: 557653 - RNA, 19 nt, Homo sapiens
  misc_RNA (1)...(19): siRNA sense strand
cgaggaugcaaauuauaug

SEQ ID NO: 557654 - RNA, 19 nt, Homo sapiens
  misc_RNA (1)...(19): siRNA sense strand
cauggaacgaggaugcaaa

SEQ ID NO: 557655 - RNA, 19 nt, Homo sapiens
  misc_RNA (1)...(19): siRNA sense strand
gaacgaggaugcaaauuau

SEQ ID NO: 557656 - RNA, 19 nt, Homo sapiens
  misc_RNA (1)...(19): siRNA sense strand
ggaacgaggaugcaaauua

SEQ ID NO: 557657 - RNA, 19 nt, Homo sapiens
  misc_RNA (1)...(19): siRNA sense strand
gaacagguuucucuugcua

SEQ ID NO: 557658 - RNA, 19 nt, Homo sapiens
  misc_RNA (1)...(19): siRNA sense strand
caaauuauaugcugucgaa

SEQ ID NO: 557659 - RNA, 19 nt, Homo sapiens
  misc_RNA (1)...(19): siRNA sense strand
gagaacaugugcccaucua

SEQ ID NO: 557660 - RNA, 19 nt, Homo sapiens
  misc_RNA (1)...(19): siRNA sense strand
gaacaucaagucagccuaa

SEQ ID NO: 557661 - RNA, 19 nt, Homo sapiens
  misc_RNA (1)...(19): siRNA sense strand
gaacaugugcccaucuaug

SEQ ID NO: 557662 - RNA, 19 nt, Homo sapiens
  misc_RNA (1)...(19): siRNA sense strand
caucaagucagccuaauga

SEQ ID NO: 557663 - RNA, 19 nt, Homo sapiens
  misc_RNA (1)...(19): siRNA sense strand
gcuaaugagucuuuaucug

SEQ ID NO: 557664 - RNA, 19 nt, Homo sapiens
  misc_RNA (1)...(19): siRNA sense strand
ccauagaucaucaaacuuc

SEQ ID NO: 557665 - RNA, 19 nt, Homo sapiens
  misc_RNA (1)...(19): siRNA sense strand
uauaugcugucgaaaucaa

SEQ ID NO: 557666 - RNA, 19 nt, Homo sapiens
  misc_RNA (1)...(19): siRNA sense strand
agguuucucuugcuaauga

SEQ ID NO: 557667 - RNA, 19 nt, Homo sapiens
  misc_RNA (1)...(19): siRNA sense strand
cuccauagaucaucaaacu

SEQ ID NO: 557668 - RNA, 19 nt, Homo sapiens
  misc_RNA (1)...(19): siRNA sense strand
gcccaucuaugaaccucuu

SEQ ID NO: 557669 - RNA, 19 nt, Homo sapiens
  misc_RNA (1)...(19): siRNA sense strand
cauagaucaucaaacuuca

SEQ ID NO: 557670 - RNA, 19 nt, Homo sapiens
  misc_RNA (1)...(19): siRNA sense strand
ucaagggugugagaacaug

SEQ ID NO: 557671 - RNA, 19 nt, Homo sapiens
  misc_RNA (1)...(19): siRNA sense strand
gaaccucuucucccaugga

SEQ ID NO: 557672 - RNA, 19 nt, Homo sapiens
  misc_RNA (1)...(19): siRNA sense strand
auuauaugcugucgaaauc

SEQ ID NO: 557673 - RNA, 19 nt, Homo sapiens
  misc_RNA (1)...(19): siRNA sense strand
aacaugugcccaucuauga

SEQ ID NO: 557674 - RNA, 19 nt, Homo sapiens
  misc_RNA (1)...(19): siRNA sense strand
acagguuucucuugcuaau

SEQ ID NO: 557675 - RNA, 19 nt, Homo sapiens
  misc_RNA (1)...(19): siRNA sense strand
ccagaggaacaucaaguca

SEQ ID NO: 557676 - RNA, 19 nt, Homo sapiens
  misc_RNA (1)...(19): siRNA sense strand
gcugucgaaaucaaucuuu

SEQ ID NO: 557677 - RNA, 19 nt, Homo sapiens
  misc_RNA (1)...(19): siRNA sense strand
acgaggaugcaaauuauau

SEQ ID NO: 557678 - RNA, 19 nt, Homo sapiens
  misc_RNA (1)...(19): siRNA sense strand
cgaggaugcaaauuauaug

SEQ ID NO: 557679 - RNA, 19 nt, Homo sapiens
  misc_RNA (1)...(19): siRNA sense strand
cauggaacgaggaugcaaa

SEQ ID NO: 557680 - RNA, 19 nt, Homo sapiens
  misc_RNA (1)...(19): siRNA sense strand
gagaggaagugcucagaua

SEQ ID NO: 557681 - RNA, 19 nt, Homo sapiens
  misc_RNA (1)...(19): siRNA sense strand
caacauugcuucccucuuc

SEQ ID NO: 557682 - RNA, 19 nt, Homo sapiens
  misc_RNA (1)...(19): siRNA sense strand
caauacagaccaagauuua

SEQ ID NO: 557683 - RNA, 19 nt, Homo sapiens
  misc_RNA (1)...(19): siRNA sense strand
ccaaucagcucaugugguu

SEQ ID NO: 557684 - RNA, 19 nt, Homo sapiens
  misc_RNA (1)...(19): siRNA sense strand
gguacaagauggucauuga

SEQ ID NO: 557685 - RNA, 19 nt, Homo sapiens
  misc_RNA (1)...(19): siRNA sense strand
ggagcacacuggaguauuc

SEQ ID NO: 557686 - RNA, 19 nt, Homo sapiens
  misc_RNA (1)...(19): siRNA sense strand
ccacuucucucacacuuug

SEQ ID NO: 557687 - RNA, 19 nt, Homo sapiens
  misc_RNA (1)...(19): siRNA sense strand
cauugcagcuguccucaua

SEQ ID NO: 557688 - RNA, 19 nt, Homo sapiens
  misc_RNA (1)...(19): siRNA sense strand
gcaauacagaccaagauuu

SEQ ID NO: 557689 - RNA, 19 nt, Homo sapiens
  misc_RNA (1)...(19): siRNA sense strand
caccaucgcugaucccaaa

SEQ ID NO: 557690 - RNA, 19 nt, Homo sapiens
  misc_RNA (1)...(19): siRNA sense strand
cagaaaccauggcugcuaa

SEQ ID NO: 557691 - RNA, 19 nt, Homo sapiens
  misc_RNA (1)...(19): siRNA sense strand
cagcuguccucauaacuuu

SEQ ID NO: 557692 - RNA, 19 nt, Homo sapiens
  misc_RNA (1)...(19): siRNA sense strand
gaagggcacaucaucauug

SEQ ID NO: 557693 - RNA, 19 nt, Homo sapiens
  misc_RNA (1)...(19): siRNA sense strand
ccucacagcugccaacaga

SEQ ID NO: 557694 - RNA, 19 nt, Homo sapiens
  misc_RNA (1)...(19): siRNA sense strand
gaaacuggaauuaacuuga

SEQ ID NO: 557695 - RNA, 19 nt, Homo sapiens
  misc_RNA (1)...(19): siRNA sense strand
gcaaaggacauuucugcaa

SEQ ID NO: 557696 - RNA, 19 nt, Homo sapiens
  misc_RNA (1)...(19): siRNA sense strand
gagaacaucaucuuugaga

SEQ ID NO: 557697 - RNA, 19 nt, Homo sapiens
  misc_RNA (1)...(19): siRNA sense strand
gguccgaucuaccgucaaa

SEQ ID NO: 557698 - RNA, 19 nt, Homo sapiens
  misc_RNA (1)...(19): siRNA sense strand
gcacgucaaugcccucauc

SEQ ID NO: 557699 - RNA, 19 nt, Homo sapiens
  misc_RNA (1)...(19): siRNA sense strand
ggagcauccugaacagauu

SEQ ID NO: 557700 - RNA, 19 nt, Homo sapiens
  misc_RNA (1)...(19): siRNA sense strand
caucgagacuuccaacuuc

SEQ ID NO: 557701 - RNA, 19 nt, Homo sapiens
  misc_RNA (1)...(19): siRNA sense strand
ccaacuaccucaacuggau

SEQ ID NO: 557702 - RNA, 19 nt, Homo sapiens
  misc_RNA (1)...(19): siRNA sense strand
gaggagaacaucaucuuug

SEQ ID NO: 557703 - RNA, 19 nt, Homo sapiens
  misc_RNA (1)...(19): siRNA sense strand
uggagcagcugucaucauu

SEQ ID NO: 557704 - RNA, 19 nt, Homo sapiens
  misc_RNA (1)...(19): siRNA sense strand
gcaagcauccuacuaugug

SEQ ID NO: 557705 - RNA, 19 nt, Homo sapiens
  misc_RNA (1)...(19): siRNA sense strand
gagcagcugucaucauucu

SEQ ID NO: 557706 - RNA, 19 nt, Homo sapiens
  misc_RNA (1)...(19): siRNA sense strand
ccaagaccaucaaguuugu

SEQ ID NO: 557707 - RNA, 19 nt, Homo sapiens
  misc_RNA (1)...(19): siRNA sense strand
gagagucccuucaacaaac

SEQ ID NO: 557708 - RNA, 19 nt, Homo sapiens
  misc_RNA (1)...(19): siRNA sense strand
gaacaucaucuuugagagu

SEQ ID NO: 557709 - RNA, 19 nt, Homo sapiens
  misc_RNA (1)...(19): siRNA sense strand
uaauugcccugcuggugua

SEQ ID NO: 557710 - RNA, 19 nt, Homo sapiens
  misc_RNA (1)...(19): siRNA sense strand
caacugcuguguccagauc

SEQ ID NO: 557711 - RNA, 19 nt, Homo sapiens
  misc_RNA (1)...(19): siRNA sense strand
gggaagcugcccaucguua

SEQ ID NO: 557712 - RNA, 19 nt, Homo sapiens
  misc_RNA (1)...(19): siRNA sense strand
caucaagacugcccacaag

SEQ ID NO: 557713 - RNA, 19 nt, Homo sapiens
  misc_RNA (1)...(19): siRNA sense strand
uaacuugagaggagcaaua

SEQ ID NO: 557714 - RNA, 19 nt, Homo sapiens
  misc_RNA (1)...(19): siRNA sense strand
caugucagcuucuucaaag

SEQ ID NO: 557715 - RNA, 19 nt, Homo sapiens
  misc_RNA (1)...(19): siRNA sense strand
accaagagcuggagaagga

SEQ ID NO: 557716 - RNA, 19 nt, Homo sapiens
  misc_RNA (1)...(19): siRNA sense strand
ggucaacgccagcgaauca

SEQ ID NO: 557717 - RNA, 19 nt, Homo sapiens
  misc_RNA (1)...(19): siRNA sense strand
cggagucagugccuuaauu

SEQ ID NO: 557718 - RNA, 19 nt, Homo sapiens
  misc_RNA (1)...(19): siRNA sense strand
ggaaaucgcccagcugaag

SEQ ID NO: 557719 - RNA, 19 nt, Homo sapiens
  misc_RNA (1)...(19): siRNA sense strand
ggaggagaacaucaucuuu

SEQ ID NO: 557720 - RNA, 19 nt, Homo sapiens
  misc_RNA (1)...(19): siRNA sense strand
ggucuacuaucacaacauc

SEQ ID NO: 557721 - RNA, 19 nt, Homo sapiens
  misc_RNA (1)...(19): siRNA sense strand
ucaacuggauggugaggaa

SEQ ID NO: 557722 - RNA, 19 nt, Homo sapiens
  misc_RNA (1)...(19): siRNA sense strand
gaggccagcugacuaugau

SEQ ID NO: 557723 - RNA, 19 nt, Homo sapiens
  misc_RNA (1)...(19): siRNA sense strand
ggagucagugccuuaauug

SEQ ID NO: 557724 - RNA, 19 nt, Homo sapiens
  misc_RNA (1)...(19): siRNA sense strand
ucaccaagaccaucaaguu

SEQ ID NO: 557725 - RNA, 19 nt, Homo sapiens
  misc_RNA (1)...(19): siRNA sense strand
aggagaacaucaucuuuga

SEQ ID NO: 557726 - RNA, 19 nt, Homo sapiens
  misc_RNA (1)...(19): siRNA sense strand
acaagaagcccaucgacuu

SEQ ID NO: 557727 - RNA, 19 nt, Homo sapiens
  misc_RNA (1)...(19): siRNA sense strand
gaucaugggaggcuacuuc

SEQ ID NO: 557728 - RNA, 19 nt, Homo sapiens
  misc_RNA (1)...(19): siRNA sense strand
ucaccuccguggucuacua

SEQ ID NO: 557729 - RNA, 19 nt, Homo sapiens
  misc_RNA (1)...(19): siRNA sense strand
caugcagacuggaucauug

SEQ ID NO: 557730 - RNA, 19 nt, Homo sapiens
  misc_RNA (1)...(19): siRNA sense strand
ggaaggagaacgacgucuu

SEQ ID NO: 557731 - RNA, 19 nt, Homo sapiens
  misc_RNA (1)...(19): siRNA sense strand
ccaaugagcggcugaagca

SEQ ID NO: 557732 - RNA, 19 nt, Homo sapiens
  misc_RNA (1)...(19): siRNA sense strand
gaggagcaauacagaccaa

SEQ ID NO: 557733 - RNA, 19 nt, Homo sapiens
  misc_RNA (1)...(19): siRNA sense strand
ccuacuauguggccauuga

SEQ ID NO: 557734 - RNA, 19 nt, Homo sapiens
  misc_RNA (1)...(19): siRNA sense strand
gcagcuguccucauaacuu

SEQ ID NO: 557735 - RNA, 19 nt, Homo sapiens
  misc_RNA (1)...(19): siRNA sense strand
ggaagcugcccaucguuau

SEQ ID NO: 557736 - RNA, 19 nt, Homo sapiens
  misc_RNA (1)...(19): siRNA sense strand
caacaucaccauucguauc

SEQ ID NO: 557737 - RNA, 19 nt, Homo sapiens
  misc_RNA (1)...(19): siRNA sense strand
aaacuggaauuaacuugag

SEQ ID NO: 557738 - RNA, 19 nt, Homo sapiens
  misc_RNA (1)...(19): siRNA sense strand
caccaagaccaucaaguuu

SEQ ID NO: 557739 - RNA, 19 nt, Homo sapiens
  misc_RNA (1)...(19): siRNA sense strand
gaaaacauccuccaaaagg

SEQ ID NO: 557740 - RNA, 19 nt, Homo sapiens
  misc_RNA (1)...(19): siRNA sense strand
ugaggaaccuggcagacau

SEQ ID NO: 557741 - RNA, 19 nt, Homo sapiens
  misc_RNA (1)...(19): siRNA sense strand
ggccuuaccuacgcccuaa

SEQ ID NO: 557742 - RNA, 19 nt, Homo sapiens
  misc_RNA (1)...(19): siRNA sense strand
gcagucgugugcuacuuca

SEQ ID NO: 557743 - RNA, 19 nt, Homo sapiens
  misc_RNA (1)...(19): siRNA sense strand
gccgucaucuccuauguca

SEQ ID NO: 557744 - RNA, 19 nt, Homo sapiens
  misc_RNA (1)...(19): siRNA sense strand
gcuccacccugcucugugu

SEQ ID NO: 557745 - RNA, 19 nt, Homo sapiens
  misc_RNA (1)...(19): siRNA sense strand
cacagcacauggcuucauu

SEQ ID NO: 557746 - RNA, 19 nt, Homo sapiens
  misc_RNA (1)...(19): siRNA sense strand
ugccaaugccuacgucuua

SEQ ID NO: 557747 - RNA, 19 nt, Homo sapiens
  misc_RNA (1)...(19): siRNA sense strand
ggccuaugcuucgcagaaa

SEQ ID NO: 557748 - RNA, 19 nt, Homo sapiens
  misc_RNA (1)...(19): siRNA sense strand
gugcagaccuggugaucgu

SEQ ID NO: 557749 - RNA, 19 nt, Homo sapiens
  misc_RNA (1)...(19): siRNA sense strand
uagaaggacucaccaccau

SEQ ID NO: 557750 - RNA, 19 nt, Homo sapiens
  misc_RNA (1)...(19): siRNA sense strand
ccacccagcuuccacuucu

SEQ ID NO: 557751 - RNA, 19 nt, Homo sapiens
  misc_RNA (1)...(19): siRNA sense strand
aaccauggcugcuaaaugc

SEQ ID NO: 557752 - RNA, 19 nt, Homo sapiens
  misc_RNA (1)...(19): siRNA sense strand
gaagucagagcuccaaggu

SEQ ID NO: 557753 - RNA, 19 nt, Homo sapiens
  misc_RNA (1)...(19): siRNA sense strand
caucgcugaucccaaagaa

SEQ ID NO: 557754 - RNA, 19 nt, Homo sapiens
  misc_RNA (1)...(19): siRNA sense strand
cgccaacguugucuucuug

SEQ ID NO: 557755 - RNA, 19 nt, Homo sapiens
  misc_RNA (1)...(19): siRNA sense strand
caaacaacgguacaagaug

SEQ ID NO: 557756 - RNA, 19 nt, Homo sapiens
  misc_RNA (1)...(19): siRNA sense strand
gaagcagaccaacgagaug

SEQ ID NO: 557757 - RNA, 19 nt, Homo sapiens
  misc_RNA (1)...(19): siRNA sense strand
gaaaugacugcuggacaga

SEQ ID NO: 557758 - RNA, 19 nt, Homo sapiens
  misc_RNA (1)...(19): siRNA sense strand
gcacgucuuccuacucuuc

SEQ ID NO: 557759 - RNA, 19 nt, Homo sapiens
  misc_RNA (1)...(19): siRNA sense strand
cauugaaacuggaauuaac

SEQ ID NO: 557760 - RNA, 19 nt, Homo sapiens
  misc_RNA (1)...(19): siRNA sense strand
gaagcugcccaucguuaug

SEQ ID NO: 557761 - RNA, 19 nt, Homo sapiens
  misc_RNA (1)...(19): siRNA sense strand
gagcauccugaacagauuu

SEQ ID NO: 557762 - RNA, 19 nt, Homo sapiens
  misc_RNA (1)...(19): siRNA sense strand
ugagagucccuucaacaaa

SEQ ID NO: 557763 - RNA, 19 nt, Homo sapiens
  misc_RNA (1)...(19): siRNA sense strand
gagcaauacagaccaagau

SEQ ID NO: 557764 - RNA, 19 nt, Homo sapiens
  misc_RNA (1)...(19): siRNA sense strand
guacaagauggucauugaa

SEQ ID NO: 557765 - RNA, 19 nt, Homo sapiens
  misc_RNA (1)...(19): siRNA sense strand
ucaagacugcccacaagaa

SEQ ID NO: 557766 - RNA, 19 nt, Homo sapiens
  misc_RNA (1)...(19): siRNA sense strand
acaaacaacgguacaagau

SEQ ID NO: 557767 - RNA, 19 nt, Homo sapiens
  misc_RNA (1)...(19): siRNA sense strand
cgacaccaaucagcucaug

SEQ ID NO: 557768 - RNA, 19 nt, Homo sapiens
  misc_RNA (1)...(19): siRNA sense strand
ccauugaaacuggaauuaa

SEQ ID NO: 557769 - RNA, 19 nt, Homo sapiens
  misc_RNA (1)...(19): siRNA sense strand
gccauugaaacuggaauua

SEQ ID NO: 557770 - RNA, 19 nt, Homo sapiens
  misc_RNA (1)...(19): siRNA sense strand
cgucuuagcugugcuucug

SEQ ID NO: 557771 - RNA, 19 nt, Homo sapiens
  misc_RNA (1)...(19): siRNA sense strand
gggccacugugcaucuuug

SEQ ID NO: 557772 - RNA, 19 nt, Homo sapiens
  misc_RNA (1)...(19): siRNA sense strand
gugugauucuccucuacua

SEQ ID NO: 557773 - RNA, 19 nt, Homo sapiens
  misc_RNA (1)...(19): siRNA sense strand
cggaaaacauccuccaaaa

SEQ ID NO: 557774 - RNA, 19 nt, Homo sapiens
  misc_RNA (1)...(19): siRNA sense strand
gcauugacauccgcaaacu

SEQ ID NO: 557775 - RNA, 19 nt, Homo sapiens
  misc_RNA (1)...(19): siRNA sense strand
gaaccgacaggaccaagag

SEQ ID NO: 557776 - RNA, 19 nt, Homo sapiens
  misc_RNA (1)...(19): siRNA sense strand
gcacgccaacguugucuuc

SEQ ID NO: 557777 - RNA, 19 nt, Homo sapiens
  misc_RNA (1)...(19): siRNA sense strand
ucacagcugccaacagaug

SEQ ID NO: 557778 - RNA, 19 nt, Homo sapiens
  misc_RNA (1)...(19): siRNA sense strand
cagcggcaccauccgauuu

SEQ ID NO: 557779 - RNA, 19 nt, Homo sapiens
  misc_RNA (1)...(19): siRNA sense strand
aagggcacaucaucauuga

SEQ ID NO: 557780 - RNA, 19 nt, Homo sapiens
  misc_RNA (1)...(19): siRNA sense strand
caacacaccuucaaauauu

SEQ ID NO: 557781 - RNA, 19 nt, Homo sapiens
  misc_RNA (1)...(19): siRNA sense strand
gaaagagaaugagaugaaa

SEQ ID NO: 557782 - RNA, 19 nt, Homo sapiens
  misc_RNA (1)...(19): siRNA sense strand
caccaaaccugauaugauu

SEQ ID NO: 557783 - RNA, 19 nt, Homo sapiens
  misc_RNA (1)...(19): siRNA sense strand
aaacauagcuuuugaguug

SEQ ID NO: 557784 - RNA, 19 nt, Homo sapiens
  misc_RNA (1)...(19): siRNA sense strand
cagaguaccugaaccaaug

SEQ ID NO: 557785 - RNA, 19 nt, Homo sapiens
  misc_RNA (1)...(19): siRNA sense strand
cccaagaguuucugcaaua

SEQ ID NO: 557786 - RNA, 19 nt, Homo sapiens
  misc_RNA (1)...(19): siRNA sense strand
ggagauauuuccacaggau

SEQ ID NO: 557787 - RNA, 19 nt, Homo sapiens
  misc_RNA (1)...(19): siRNA sense strand
gaaaucagaagauguuugu

SEQ ID NO: 557788 - RNA, 19 nt, Homo sapiens
  misc_RNA (1)...(19): siRNA sense strand
gagagacaccucaaacaaa

SEQ ID NO: 557789 - RNA, 19 nt, Homo sapiens
  misc_RNA (1)...(19): siRNA sense strand
gcaauucauuuccuguaga

SEQ ID NO: 557790 - RNA, 19 nt, Homo sapiens
  misc_RNA (1)...(19): siRNA sense strand
gaaaugaaagagaaugaga

SEQ ID NO: 557791 - RNA, 19 nt, Homo sapiens
  misc_RNA (1)...(19): siRNA sense strand
gaaagagagacaccucaaa

SEQ ID NO: 557792 - RNA, 19 nt, Homo sapiens
  misc_RNA (1)...(19): siRNA sense strand
gccaacacaccuucaaaua

SEQ ID NO: 557793 - RNA, 19 nt, Homo sapiens
  misc_RNA (1)...(19): siRNA sense strand
ugaaagagaaugagaugaa

SEQ ID NO: 557794 - RNA, 19 nt, Homo sapiens
  misc_RNA (1)...(19): siRNA sense strand
gcaauacacccaaccuaug

SEQ ID NO: 557795 - RNA, 19 nt, Homo sapiens
  misc_RNA (1)...(19): siRNA sense strand
agagacaccucaaacaaau

SEQ ID NO: 557796 - RNA, 19 nt, Homo sapiens
  misc_RNA (1)...(19): siRNA sense strand
ugagacaucugaguaguau

SEQ ID NO: 557797 - RNA, 19 nt, Homo sapiens
  misc_RNA (1)...(19): siRNA sense strand
gcaccaaaccugauaugau

SEQ ID NO: 557798 - RNA, 19 nt, Homo sapiens
  misc_RNA (1)...(19): siRNA sense strand
caauucauuuccuguagaa

SEQ ID NO: 557799 - RNA, 19 nt, Homo sapiens
  misc_RNA (1)...(19): siRNA sense strand
ccaacacaccuucaaauau

SEQ ID NO: 557800 - RNA, 19 nt, Homo sapiens
  misc_RNA (1)...(19): siRNA sense strand
caauacacccaaccuauga

SEQ ID NO: 557801 - RNA, 19 nt, Homo sapiens
  misc_RNA (1)...(19): siRNA sense strand
cuacaggccuucaacaucu

SEQ ID NO: 557802 - RNA, 19 nt, Homo sapiens
  misc_RNA (1)...(19): siRNA sense strand
gagcaauucauuuccugua

SEQ ID NO: 557803 - RNA, 19 nt, Homo sapiens
  misc_RNA (1)...(19): siRNA sense strand
caaauuuacagcucuauuc

SEQ ID NO: 557804 - RNA, 19 nt, Homo sapiens
  misc_RNA (1)...(19): siRNA sense strand
gaagacaugaaagaaauga

SEQ ID NO: 557805 - RNA, 19 nt, Homo sapiens
  misc_RNA (1)...(19): siRNA sense strand
gaaugaaaaugaagacaug

SEQ ID NO: 557806 - RNA, 19 nt, Homo sapiens
  misc_RNA (1)...(19): siRNA sense strand
ccucaaacaaauccaaaua

SEQ ID NO: 557807 - RNA, 19 nt, Homo sapiens
  misc_RNA (1)...(19): siRNA sense strand
gaagagggacaucaagaag

SEQ ID NO: 557808 - RNA, 19 nt, Homo sapiens
  misc_RNA (1)...(19): siRNA sense strand
ggaggaagacgagaaugaa

SEQ ID NO: 557809 - RNA, 19 nt, Homo sapiens
  misc_RNA (1)...(19): siRNA sense strand
ucaaacaaauccaaauagg

SEQ ID NO: 557810 - RNA, 19 nt, Homo sapiens
  misc_RNA (1)...(19): siRNA sense strand
ggaaagagagacaccucaa

SEQ ID NO: 557811 - RNA, 19 nt, Homo sapiens
  misc_RNA (1)...(19): siRNA sense strand
cagaagauguuuguauuac

SEQ ID NO: 557812 - RNA, 19 nt, Homo sapiens
  misc_RNA (1)...(19): siRNA sense strand
gaacugaggagauauuucc

SEQ ID NO: 557813 - RNA, 19 nt, Homo sapiens
  misc_RNA (1)...(19): siRNA sense strand
ggaaaucagaagauguuug

SEQ ID NO: 557814 - RNA, 19 nt, Homo sapiens
  misc_RNA (1)...(19): siRNA sense strand
gaaaagaaauacagugacu

SEQ ID NO: 557815 - RNA, 19 nt, Homo sapiens
  misc_RNA (1)...(19): siRNA sense strand
caaacaaauccaaauagga

SEQ ID NO: 557816 - RNA, 19 nt, Homo sapiens
  misc_RNA (1)...(19): siRNA sense strand
gccuggaacugaggagaua

SEQ ID NO: 557817 - RNA, 19 nt, Homo sapiens
  misc_RNA (1)...(19): siRNA sense strand
gaggaagacgagaaugaaa

SEQ ID NO: 557818 - RNA, 19 nt, Homo sapiens
  misc_RNA (1)...(19): siRNA sense strand
agacaucugaguaguauga

SEQ ID NO: 557819 - RNA, 19 nt, Homo sapiens
  misc_RNA (1)...(19): siRNA sense strand
ggauagacaauuuccugaa

SEQ ID NO: 557820 - RNA, 19 nt, Homo sapiens
  misc_RNA (1)...(19): siRNA sense strand
ccuuauggguauauucauu

SEQ ID NO: 557821 - RNA, 19 nt, Homo sapiens
  misc_RNA (1)...(19): siRNA sense strand
gaguggaaaucagaagaug

SEQ ID NO: 557822 - RNA, 19 nt, Homo sapiens
  misc_RNA (1)...(19): siRNA sense strand
gagaugaaacccucagaag

SEQ ID NO: 557823 - RNA, 19 nt, Homo sapiens
  misc_RNA (1)...(19): siRNA sense strand
gcagaguaccugaaccaau

SEQ ID NO: 557824 - RNA, 19 nt, Homo sapiens
  misc_RNA (1)...(19): siRNA sense strand
aaucugagacaucugagua

SEQ ID NO: 557825 - RNA, 19 nt, Homo sapiens
  misc_RNA (1)...(19): siRNA sense strand
guggaaaucagaagauguu

SEQ ID NO: 557826 - RNA, 19 nt, Homo sapiens
  misc_RNA (1)...(19): siRNA sense strand
gagauuguccgaguggaaa

SEQ ID NO: 557827 - RNA, 19 nt, Homo sapiens
  misc_RNA (1)...(19): siRNA sense strand
cccuaucccuggacuguaa

SEQ ID NO: 557828 - RNA, 19 nt, Homo sapiens
  misc_RNA (1)...(19): siRNA sense strand
ugaagagggacaucaagaa

SEQ ID NO: 557829 - RNA, 19 nt, Homo sapiens
  misc_RNA (1)...(19): siRNA sense strand
ugaguaguaugagcaauuc

SEQ ID NO: 557830 - RNA, 19 nt, Homo sapiens
  misc_RNA (1)...(19): siRNA sense strand
gagauauuuccacaggaua

SEQ ID NO: 557831 - RNA, 19 nt, Homo sapiens
  misc_RNA (1)...(19): siRNA sense strand
ggagauuguccgaguggaa

SEQ ID NO: 557832 - RNA, 19 nt, Homo sapiens
  misc_RNA (1)...(19): siRNA sense strand
agagagacaccucaaacaa

SEQ ID NO: 557833 - RNA, 19 nt, Homo sapiens
  misc_RNA (1)...(19): siRNA sense strand
gaacguucaccugagaaga

SEQ ID NO: 557834 - RNA, 19 nt, Homo sapiens
  misc_RNA (1)...(19): siRNA sense strand
uccacaggauagacaauuu

SEQ ID NO: 557835 - RNA, 19 nt, Homo sapiens
  misc_RNA (1)...(19): siRNA sense strand
ccaaauaggacuugaucag

SEQ ID NO: 557836 - RNA, 19 nt, Homo sapiens
  misc_RNA (1)...(19): siRNA sense strand
aauaggacuugaucagcaa

SEQ ID NO: 557837 - RNA, 19 nt, Homo sapiens
  misc_RNA (1)...(19): siRNA sense strand
gcaagcagaguaccugaac

SEQ ID NO: 557838 - RNA, 19 nt, Homo sapiens
  misc_RNA (1)...(19): siRNA sense strand
ccaagaguuucugcaauac

SEQ ID NO: 557839 - RNA, 19 nt, Homo sapiens
  misc_RNA (1)...(19): siRNA sense strand
ugagauccuuauggguaua

SEQ ID NO: 557840 - RNA, 19 nt, Homo sapiens
  misc_RNA (1)...(19): siRNA sense strand
ucuaugaaaugucccuaca

SEQ ID NO: 557841 - RNA, 19 nt, Homo sapiens
  misc_RNA (1)...(19): siRNA sense strand
gacugugccugggagauug

SEQ ID NO: 557842 - RNA, 19 nt, Homo sapiens
  misc_RNA (1)...(19): siRNA sense strand
ccaaaccugauaugauuca

SEQ ID NO: 557843 - RNA, 19 nt, Homo sapiens
  misc_RNA (1)...(19): siRNA sense strand
cuucaaauauuggaaagag

SEQ ID NO: 557844 - RNA, 19 nt, Homo sapiens
  misc_RNA (1)...(19): siRNA sense strand
gagcaccaaaccugauaug

SEQ ID NO: 557845 - RNA, 19 nt, Homo sapiens
  misc_RNA (1)...(19): siRNA sense strand
ccacaggauagacaauuuc

SEQ ID NO: 557846 - RNA, 19 nt, Homo sapiens
  misc_RNA (1)...(19): siRNA sense strand
caaaaucugagacaucuga

SEQ ID NO: 557847 - RNA, 19 nt, Homo sapiens
  misc_RNA (1)...(19): siRNA sense strand
aaagagagacaccucaaac

SEQ ID NO: 557848 - RNA, 19 nt, Homo sapiens
  misc_RNA (1)...(19): siRNA sense strand
ugacugugccugggagauu

SEQ ID NO: 557849 - RNA, 19 nt, Homo sapiens
  misc_RNA (1)...(19): siRNA sense strand
agaagagucaccuggcaaa

SEQ ID NO: 557850 - RNA, 19 nt, Homo sapiens
  misc_RNA (1)...(19): siRNA sense strand
uggaggaagacgagaauga

SEQ ID NO: 557851 - RNA, 19 nt, Homo sapiens
  misc_RNA (1)...(19): siRNA sense strand
aacacaccuucaaauauug

SEQ ID NO: 557852 - RNA, 19 nt, Homo sapiens
  misc_RNA (1)...(19): siRNA sense strand
ggaacugaggagauauuuc

SEQ ID NO: 557853 - RNA, 19 nt, Homo sapiens
  misc_RNA (1)...(19): siRNA sense strand
caaauauuggaaagagaga

SEQ ID NO: 557854 - RNA, 19 nt, Homo sapiens
  misc_RNA (1)...(19): siRNA sense strand
caaauccaaauaggacuug

SEQ ID NO: 557855 - RNA, 19 nt, Homo sapiens
  misc_RNA (1)...(19): siRNA sense strand
cagccaacacaccuucaaa

SEQ ID NO: 557856 - RNA, 19 nt, Homo sapiens
  misc_RNA (1)...(19): siRNA sense strand
gauauuuccacaggauaga

SEQ ID NO: 557857 - RNA, 19 nt, Homo sapiens
  misc_RNA (1)...(19): siRNA sense strand
aaugaaagagaaugagaug

SEQ ID NO: 557858 - RNA, 19 nt, Homo sapiens
  misc_RNA (1)...(19): siRNA sense strand
gacaugaaagaaaugaaag

SEQ ID NO: 557859 - RNA, 19 nt, Homo sapiens
  misc_RNA (1)...(19): siRNA sense strand
gcucuauucaggaggaaau

SEQ ID NO: 557860 - RNA, 19 nt, Homo sapiens
  misc_RNA (1)...(19): siRNA sense strand
uugagauccuuauggguau

SEQ ID NO: 557861 - RNA, 19 nt, Homo sapiens
  misc_RNA (1)...(19): siRNA sense strand
agacgagaaugaaaaugaa

SEQ ID NO: 557862 - RNA, 19 nt, Homo sapiens
  misc_RNA (1)...(19): siRNA sense strand
caagaguuucugcaauaca

SEQ ID NO: 557863 - RNA, 19 nt, Homo sapiens
  misc_RNA (1)...(19): siRNA sense strand
cugaguaguaugagcaauu

SEQ ID NO: 557864 - RNA, 19 nt, Homo sapiens
  misc_RNA (1)...(19): siRNA sense strand
ggaagacgagaaugaaaau

SEQ ID NO: 557865 - RNA, 19 nt, Homo sapiens
  misc_RNA (1)...(19): siRNA sense strand
ugcaauacacccaaccuau

SEQ ID NO: 557866 - RNA, 19 nt, Homo sapiens
  misc_RNA (1)...(19): siRNA sense strand
ugggauagcugucaucaug

SEQ ID NO: 557867 - RNA, 19 nt, Homo sapiens
  misc_RNA (1)...(19): siRNA sense strand
acagagauguggccuauuc

SEQ ID NO: 557868 - RNA, 19 nt, Homo sapiens
  misc_RNA (1)...(19): siRNA sense strand
cuacuucccauuacaguua

SEQ ID NO: 557869 - RNA, 19 nt, Homo sapiens
  misc_RNA (1)...(19): siRNA sense strand
gggaaggccuccuacaaag

SEQ ID NO: 557870 - RNA, 19 nt, Homo sapiens
  misc_RNA (1)...(19): siRNA sense strand
agacagagauguggccuau

SEQ ID NO: 557871 - RNA, 19 nt, Homo sapiens
  misc_RNA (1)...(19): siRNA sense strand
ggagacaaccauggacuuu

SEQ ID NO: 557872 - RNA, 19 nt, Homo sapiens
  misc_RNA (1)...(19): siRNA sense strand
guucauugcuguagaaagg

SEQ ID NO: 557873 - RNA, 19 nt, Homo sapiens
  misc_RNA (1)...(19): siRNA sense strand
gagcccagcuacacagcaa

SEQ ID NO: 557874 - RNA, 19 nt, Homo sapiens
  misc_RNA (1)...(19): siRNA sense strand
gaaggccuccuacaaagau

SEQ ID NO: 557875 - RNA, 19 nt, Homo sapiens
  misc_RNA (1)...(19): siRNA sense strand
ggaaggccuccuacaaaga

SEQ ID NO: 557876 - RNA, 19 nt, Homo sapiens
  misc_RNA (1)...(19): siRNA sense strand
uggagacucuguaccauuc

SEQ ID NO: 557877 - RNA, 19 nt, Homo sapiens
  misc_RNA (1)...(19): siRNA sense strand
agacaaccauggacuuugg

SEQ ID NO: 557878 - RNA, 19 nt, Homo sapiens
  misc_RNA (1)...(19): siRNA sense strand
cagaguggguccagagaca

SEQ ID NO: 557879 - RNA, 19 nt, Homo sapiens
  misc_RNA (1)...(19): siRNA sense strand
gaaccacacagccucuuca

SEQ ID NO: 557880 - RNA, 19 nt, Homo sapiens
  misc_RNA (1)...(19): siRNA sense strand
ucagcgaaauaaccuauag

SEQ ID NO: 557881 - RNA, 19 nt, Homo sapiens
  misc_RNA (1)...(19): siRNA sense strand
ggagacagcggcaacuucu

SEQ ID NO: 557882 - RNA, 19 nt, Homo sapiens
  misc_RNA (1)...(19): siRNA sense strand
gaggcuaucuggcgaucuc

SEQ ID NO: 557883 - RNA, 19 nt, Homo sapiens
  misc_RNA (1)...(19): siRNA sense strand
cacacagccucuucacaga

SEQ ID NO: 557884 - RNA, 19 nt, Homo sapiens
  misc_RNA (1)...(19): siRNA sense strand
cauggacuuugguauggaa

SEQ ID NO: 557885 - RNA, 19 nt, Homo sapiens
  misc_RNA (1)...(19): siRNA sense strand
gaugcugguuacucucuuc

SEQ ID NO: 557886 - RNA, 19 nt, Homo sapiens
  misc_RNA (1)...(19): siRNA sense strand
cagggaaggccuccuacaa

SEQ ID NO: 557887 - RNA, 19 nt, Homo sapiens
  misc_RNA (1)...(19): siRNA sense strand
gcugguuacucucuucucu

SEQ ID NO: 557888 - RNA, 19 nt, Homo sapiens
  misc_RNA (1)...(19): siRNA sense strand
caacaucagcgaaauaacc

SEQ ID NO: 557889 - RNA, 19 nt, Homo sapiens
  misc_RNA (1)...(19): siRNA sense strand
agggaaggccuccuacaaa

SEQ ID NO: 557890 - RNA, 19 nt, Homo sapiens
  misc_RNA (1)...(19): siRNA sense strand
gagacaaccauggacuuug

SEQ ID NO: 557891 - RNA, 19 nt, Homo sapiens
  misc_RNA (1)...(19): siRNA sense strand
cccaacaucagcgaaauaa

SEQ ID NO: 557892 - RNA, 19 nt, Homo sapiens
  misc_RNA (1)...(19): siRNA sense strand
caucagcgaaauaaccuau

SEQ ID NO: 557893 - RNA, 19 nt, Homo sapiens
  misc_RNA (1)...(19): siRNA sense strand
ggaccaggagacagagaug

SEQ ID NO: 557894 - RNA, 19 nt, Homo sapiens
  misc_RNA (1)...(19): siRNA sense strand
gcugggacuuggccacagu

SEQ ID NO: 557895 - RNA, 19 nt, Homo sapiens
  misc_RNA (1)...(19): siRNA sense strand
ggaaccacacagccucuuc

SEQ ID NO: 557896 - RNA, 19 nt, Homo sapiens
  misc_RNA (1)...(19): siRNA sense strand
gggagacaaccauggacuu

SEQ ID NO: 557897 - RNA, 19 nt, Homo sapiens
  misc_RNA (1)...(19): siRNA sense strand
gcggcaacuucuccguguu

SEQ ID NO: 557898 - RNA, 19 nt, Homo sapiens
  misc_RNA (1)...(19): siRNA sense strand
ccaaguccgugaggcuauc

SEQ ID NO: 557899 - RNA, 19 nt, Homo sapiens
  misc_RNA (1)...(19): siRNA sense strand
aguguucauugcuguagaa

SEQ ID NO: 557900 - RNA, 19 nt, Homo sapiens
  misc_RNA (1)...(19): siRNA sense strand
acagucacgcccugggaua

SEQ ID NO: 557901 - RNA, 19 nt, Homo sapiens
  misc_RNA (1)...(19): siRNA sense strand
gacgggagacaaccaugga

SEQ ID NO: 557902 - RNA, 19 nt, Homo sapiens
  misc_RNA (1)...(19): siRNA sense strand
gggaugcucagcccuccaa

SEQ ID NO: 557903 - RNA, 19 nt, Homo sapiens
  misc_RNA (1)...(19): siRNA sense strand
gccuauuccugcauugucu

SEQ ID NO: 557904 - RNA, 19 nt, Homo sapiens
  misc_RNA (1)...(19): siRNA sense strand
gaguggguccagagacaga

SEQ ID NO: 557905 - RNA, 19 nt, Homo sapiens
  misc_RNA (1)...(19): siRNA sense strand
caccagggaaggccuccua

SEQ ID NO: 557906 - RNA, 19 nt, Homo sapiens
  misc_RNA (1)...(19): siRNA sense strand
gagcauggauuaucuauuc

SEQ ID NO: 557907 - RNA, 19 nt, Homo sapiens
  misc_RNA (1)...(19): siRNA sense strand
cauauuagaugaacuggua

SEQ ID NO: 557908 - RNA, 19 nt, Homo sapiens
  misc_RNA (1)...(19): siRNA sense strand
gaaucuugcugucaaagua

SEQ ID NO: 557909 - RNA, 19 nt, Homo sapiens
  misc_RNA (1)...(19): siRNA sense strand
gaauuugcuucgaguauuu

SEQ ID NO: 557910 - RNA, 19 nt, Homo sapiens
  misc_RNA (1)...(19): siRNA sense strand
gcagguuaauggauaauuu

SEQ ID NO: 557911 - RNA, 19 nt, Homo sapiens
  misc_RNA (1)...(19): siRNA sense strand
gaaacaagcguaauaggaa

SEQ ID NO: 557912 - RNA, 19 nt, Homo sapiens
  misc_RNA (1)...(19): siRNA sense strand
gaaacaaguuacuaaagug

SEQ ID NO: 557913 - RNA, 19 nt, Homo sapiens
  misc_RNA (1)...(19): siRNA sense strand
gaaauaaguccaagacaga

SEQ ID NO: 557914 - RNA, 19 nt, Homo sapiens
  misc_RNA (1)...(19): siRNA sense strand
gauaauaccucaguguuca

SEQ ID NO: 557915 - RNA, 19 nt, Homo sapiens
  misc_RNA (1)...(19): siRNA sense strand
gauaauaugaccucaguaa

SEQ ID NO: 557916 - RNA, 19 nt, Homo sapiens
  misc_RNA (1)...(19): siRNA sense strand
gcaguuugcuuuagaguca

SEQ ID NO: 557917 - RNA, 19 nt, Homo sapiens
  misc_RNA (1)...(19): siRNA sense strand
gggagcagguuaauggaua

SEQ ID NO: 557918 - RNA, 19 nt, Homo sapiens
  misc_RNA (1)...(19): siRNA sense strand
uagaugaaauccacaguaa

SEQ ID NO: 557919 - RNA, 19 nt, Homo sapiens
  misc_RNA (1)...(19): siRNA sense strand
ggaauuugcuucgaguauu

SEQ ID NO: 557920 - RNA, 19 nt, Homo sapiens
  misc_RNA (1)...(19): siRNA sense strand
gaaaauugcuggaauguca

SEQ ID NO: 557921 - RNA, 19 nt, Homo sapiens
  misc_RNA (1)...(19): siRNA sense strand
cuacugcucucucuguaua

SEQ ID NO: 557922 - RNA, 19 nt, Homo sapiens
  misc_RNA (1)...(19): siRNA sense strand
gaaaagcuaucuucuguau

SEQ ID NO: 557923 - RNA, 19 nt, Homo sapiens
  misc_RNA (1)...(19): siRNA sense strand
ccagaaagucacauuaaua

SEQ ID NO: 557924 - RNA, 19 nt, Homo sapiens
  misc_RNA (1)...(19): siRNA sense strand
ccaagaaacaagcguaaua

SEQ ID NO: 557925 - RNA, 19 nt, Homo sapiens
  misc_RNA (1)...(19): siRNA sense strand
guucagacaucauaagaga

SEQ ID NO: 557926 - RNA, 19 nt, Homo sapiens
  misc_RNA (1)...(19): siRNA sense strand
gcauuuagacagcuguuua

SEQ ID NO: 557927 - RNA, 19 nt, Homo sapiens
  misc_RNA (1)...(19): siRNA sense strand
gcucucugaucgugauuua

SEQ ID NO: 557928 - RNA, 19 nt, Homo sapiens
  misc_RNA (1)...(19): siRNA sense strand
uaaaguggauuguccuguu

SEQ ID NO: 557929 - RNA, 19 nt, Homo sapiens
  misc_RNA (1)...(19): siRNA sense strand
caaugaaaguguaaugguu

SEQ ID NO: 557930 - RNA, 19 nt, Homo sapiens
  misc_RNA (1)...(19): siRNA sense strand
gaugaaauccacaguaaau

SEQ ID NO: 557931 - RNA, 19 nt, Homo sapiens
  misc_RNA (1)...(19): siRNA sense strand
ccaagaauuuguacacaug

SEQ ID NO: 557932 - RNA, 19 nt, Homo sapiens
  misc_RNA (1)...(19): siRNA sense strand
ggacaggaagauaauauga

SEQ ID NO: 557933 - RNA, 19 nt, Homo sapiens
  misc_RNA (1)...(19): siRNA sense strand
ggagcagguuaauggauaa

SEQ ID NO: 557934 - RNA, 19 nt, Homo sapiens
  misc_RNA (1)...(19): siRNA sense strand
gcuaguaaacucaaugaaa

SEQ ID NO: 557935 - RNA, 19 nt, Homo sapiens
  misc_RNA (1)...(19): siRNA sense strand
ucuucuagcuguauugaua

SEQ ID NO: 557936 - RNA, 19 nt, Homo sapiens
  misc_RNA (1)...(19): siRNA sense strand
gaaaugagugguucuacau

SEQ ID NO: 557937 - RNA, 19 nt, Homo sapiens
  misc_RNA (1)...(19): siRNA sense strand
ugaaagugcugagauugaa

SEQ ID NO: 557938 - RNA, 19 nt, Homo sapiens
  misc_RNA (1)...(19): siRNA sense strand
gaagacaauagaugauuug

SEQ ID NO: 557939 - RNA, 19 nt, Homo sapiens
  misc_RNA (1)...(19): siRNA sense strand
cuaguaaacucaaugaaag

SEQ ID NO: 557940 - RNA, 19 nt, Homo sapiens
  misc_RNA (1)...(19): siRNA sense strand
ccaaaucuccugcuucuuc

SEQ ID NO: 557941 - RNA, 19 nt, Homo sapiens
  misc_RNA (1)...(19): siRNA sense strand
caaagagacacguucugua

SEQ ID NO: 557942 - RNA, 19 nt, Homo sapiens
  misc_RNA (1)...(19): siRNA sense strand
gaaagucacauuaauaagc

SEQ ID NO: 557943 - RNA, 19 nt, Homo sapiens
  misc_RNA (1)...(19): siRNA sense strand
aaaguggauuguccuguuu

SEQ ID NO: 557944 - RNA, 19 nt, Homo sapiens
  misc_RNA (1)...(19): siRNA sense strand
ggaauuggaaccugacaga

SEQ ID NO: 557945 - RNA, 19 nt, Homo sapiens
  misc_RNA (1)...(19): siRNA sense strand
gaaauccacaguaaauauc

SEQ ID NO: 557946 - RNA, 19 nt, Homo sapiens
  misc_RNA (1)...(19): siRNA sense strand
gcuaaaagagcauggauua

SEQ ID NO: 557947 - RNA, 19 nt, Homo sapiens
  misc_RNA (1)...(19): siRNA sense strand
aaggaaagccucagaaguu

SEQ ID NO: 557948 - RNA, 19 nt, Homo sapiens
  misc_RNA (1)...(19): siRNA sense strand
gaaggaaagccucagaagu

SEQ ID NO: 557949 - RNA, 19 nt, Homo sapiens
  misc_RNA (1)...(19): siRNA sense strand
ucagauucaugcaauaguu

SEQ ID NO: 557950 - RNA, 19 nt, Homo sapiens
  misc_RNA (1)...(19): siRNA sense strand
uggauuaucuauucaagga

SEQ ID NO: 557951 - RNA, 19 nt, Homo sapiens
  misc_RNA (1)...(19): siRNA sense strand
gaagaaggaaagccucaga

SEQ ID NO: 557952 - RNA, 19 nt, Homo sapiens
  misc_RNA (1)...(19): siRNA sense strand
aaagcuaucuucuguaugc

SEQ ID NO: 557953 - RNA, 19 nt, Homo sapiens
  misc_RNA (1)...(19): siRNA sense strand
gcaugggacaggaagauaa

SEQ ID NO: 557954 - RNA, 19 nt, Homo sapiens
  misc_RNA (1)...(19): siRNA sense strand
gcaaugauaauaccucagu

SEQ ID NO: 557955 - RNA, 19 nt, Homo sapiens
  misc_RNA (1)...(19): siRNA sense strand
aauaugaccucaguaacaa

SEQ ID NO: 557956 - RNA, 19 nt, Homo sapiens
  misc_RNA (1)...(19): siRNA sense strand
cacaagagccgcugaaagu

SEQ ID NO: 557957 - RNA, 19 nt, Homo sapiens
  misc_RNA (1)...(19): siRNA sense strand
aaacaagcguaauaggaau

SEQ ID NO: 557958 - RNA, 19 nt, Homo sapiens
  misc_RNA (1)...(19): siRNA sense strand
gaaauaaacaacagcucau

SEQ ID NO: 557959 - RNA, 19 nt, Homo sapiens
  misc_RNA (1)...(19): siRNA sense strand
gaggauucuucuagcugua

SEQ ID NO: 557960 - RNA, 19 nt, Homo sapiens
  misc_RNA (1)...(19): siRNA sense strand
cgacauccacuuugaaaca

SEQ ID NO: 557961 - RNA, 19 nt, Homo sapiens
  misc_RNA (1)...(19): siRNA sense strand
gagauugaaccaagaaaca

SEQ ID NO: 557962 - RNA, 19 nt, Homo sapiens
  misc_RNA (1)...(19): siRNA sense strand
uaauaugaccucaguaaca

SEQ ID NO: 557963 - RNA, 19 nt, Homo sapiens
  misc_RNA (1)...(19): siRNA sense strand
acaaaggaccaaacagaaa

SEQ ID NO: 557964 - RNA, 19 nt, Homo sapiens
  misc_RNA (1)...(19): siRNA sense strand
gcccaaaacuguauauaau

SEQ ID NO: 557965 - RNA, 19 nt, Homo sapiens
  misc_RNA (1)...(19): siRNA sense strand
auaccucaguguucacaua

SEQ ID NO: 557966 - RNA, 19 nt, Homo sapiens
  misc_RNA (1)...(19): siRNA sense strand
gacauccacuuugaaacaa

SEQ ID NO: 557967 - RNA, 19 nt, Homo sapiens
  misc_RNA (1)...(19): siRNA sense strand
gcacaagagccgcugaaag

SEQ ID NO: 557968 - RNA, 19 nt, Homo sapiens
  misc_RNA (1)...(19): siRNA sense strand
uuacaaaggaccaaacaga

SEQ ID NO: 557969 - RNA, 19 nt, Homo sapiens
  misc_RNA (1)...(19): siRNA sense strand
uaaaaggcaccaagaauuu

SEQ ID NO: 557970 - RNA, 19 nt, Homo sapiens
  misc_RNA (1)...(19): siRNA sense strand
gaaguucuguucacaaaag

SEQ ID NO: 557971 - RNA, 19 nt, Homo sapiens
  misc_RNA (1)...(19): siRNA sense strand
aaagagacacguucuguag

SEQ ID NO: 557972 - RNA, 19 nt, Homo sapiens
  misc_RNA (1)...(19): siRNA sense strand
aagauaauaugaccucagu

SEQ ID NO: 557973 - RNA, 19 nt, Homo sapiens
  misc_RNA (1)...(19): siRNA sense strand
gcgaagagaagaaggaaag

SEQ ID NO: 557974 - RNA, 19 nt, Homo sapiens
  misc_RNA (1)...(19): siRNA sense strand
cuucgaguauuucaacauu

SEQ ID NO: 557975 - RNA, 19 nt, Homo sapiens
  misc_RNA (1)...(19): siRNA sense strand
ucaaggaaauaaacaacag

SEQ ID NO: 557976 - RNA, 19 nt, Homo sapiens
  misc_RNA (1)...(19): siRNA sense strand
caagaaacaagcguaauag

SEQ ID NO: 557977 - RNA, 19 nt, Homo sapiens
  misc_RNA (1)...(19): siRNA sense strand
caagaaaauugcuggaaug

SEQ ID NO: 557978 - RNA, 19 nt, Homo sapiens
  misc_RNA (1)...(19): siRNA sense strand
ucucugaucgugauuuaaa

SEQ ID NO: 557979 - RNA, 19 nt, Homo sapiens
  misc_RNA (1)...(19): siRNA sense strand
gaagcuaguaaacucaaug

SEQ ID NO: 557980 - RNA, 19 nt, Homo sapiens
  misc_RNA (1)...(19): siRNA sense strand
agaaacaagcguaauagga

SEQ ID NO: 557981 - RNA, 19 nt, Homo sapiens
  misc_RNA (1)...(19): siRNA sense strand
cagaaucgccgcacaagag

SEQ ID NO: 557982 - RNA, 19 nt, Homo sapiens
  misc_RNA (1)...(19): siRNA sense strand
uaacuacugcucucucugu

SEQ ID NO: 557983 - RNA, 19 nt, Homo sapiens
  misc_RNA (1)...(19): siRNA sense strand
ggguuaacauuccagaaag

SEQ ID NO: 557984 - RNA, 19 nt, Homo sapiens
  misc_RNA (1)...(19): siRNA sense strand
ccaaagagacacguucugu

SEQ ID NO: 557985 - RNA, 19 nt, Homo sapiens
  misc_RNA (1)...(19): siRNA sense strand
ucaagacacagaaauaagu

SEQ ID NO: 557986 - RNA, 19 nt, Homo sapiens
  misc_RNA (1)...(19): siRNA sense strand
ggauucuucuagcuguauu

SEQ ID NO: 557987 - RNA, 19 nt, Homo sapiens
  misc_RNA (1)...(19): siRNA sense strand
gguuaacauuccagaaagu

SEQ ID NO: 557988 - RNA, 19 nt, Homo sapiens
  misc_RNA (1)...(19): siRNA sense strand
uaacaaaccacuuuucuca

SEQ ID NO: 557989 - RNA, 19 nt, Homo sapiens
  misc_RNA (1)...(19): siRNA sense strand
aaugagugguucuacauca

SEQ ID NO: 557990 - RNA, 19 nt, Homo sapiens
  misc_RNA (1)...(19): siRNA sense strand
gaggaagccugggaagcau

SEQ ID NO: 557991 - RNA, 19 nt, Homo sapiens
  misc_RNA (1)...(19): siRNA sense strand
uccagaaagucacauuaau

SEQ ID NO: 557992 - RNA, 19 nt, Homo sapiens
  misc_RNA (1)...(19): siRNA sense strand
cauaacuacugcucucucu

SEQ ID NO: 557993 - RNA, 19 nt, Homo sapiens
  misc_RNA (1)...(19): siRNA sense strand
uugcugcgguguggaauuu

SEQ ID NO: 557994 - RNA, 19 nt, Homo sapiens
  misc_RNA (1)...(19): siRNA sense strand
cuagcuguauugauauuca

SEQ ID NO: 557995 - RNA, 19 nt, Homo sapiens
  misc_RNA (1)...(19): siRNA sense strand
uacaaaggaccaaacagaa

SEQ ID NO: 557996 - RNA, 19 nt, Homo sapiens
  misc_RNA (1)...(19): siRNA sense strand
aaacucaguguccaacuug

SEQ ID NO: 557997 - RNA, 19 nt, Homo sapiens
  misc_RNA (1)...(19): siRNA sense strand
uuagacagcuguuuaucac

SEQ ID NO: 557998 - RNA, 19 nt, Homo sapiens
  misc_RNA (1)...(19): siRNA sense strand
cuucaagacacagaaauaa

SEQ ID NO: 557999 - RNA, 19 nt, Homo sapiens
  misc_RNA (1)...(19): siRNA sense strand
gcaauaguuccaguucaga

SEQ ID NO: 558000 - RNA, 19 nt, Homo sapiens
  misc_RNA (1)...(19): siRNA sense strand
ccacaguaaauaucguaaa

SEQ ID NO: 558001 - RNA, 19 nt, Homo sapiens
  misc_RNA (1)...(19): siRNA sense strand
ggaagccgcugcccaaaac

SEQ ID NO: 558002 - RNA, 19 nt, Homo sapiens
  misc_RNA (1)...(19): siRNA sense strand
ucagacaucauaagagauc

SEQ ID NO: 558003 - RNA, 19 nt, Homo sapiens
  misc_RNA (1)...(19): siRNA sense strand
auuggaaccugacagagaa

SEQ ID NO: 558004 - RNA, 19 nt, Homo sapiens
  misc_RNA (1)...(19): siRNA sense strand
gcagucaugaagacaauag

SEQ ID NO: 558005 - RNA, 19 nt, Homo sapiens
  misc_RNA (1)...(19): siRNA sense strand
gcaccaagaauuuguacac

SEQ ID NO: 558006 - RNA, 19 nt, Homo sapiens
  misc_RNA (1)...(19): siRNA sense strand
guacuaagguuucaucuuu

SEQ ID NO: 558007 - RNA, 19 nt, Homo sapiens
  misc_RNA (1)...(19): siRNA sense strand
caagucagaucaugaagaa

SEQ ID NO: 558008 - RNA, 19 nt, Homo sapiens
  misc_RNA (1)...(19): siRNA sense strand
gauacaagcaauacaagua

SEQ ID NO: 558009 - RNA, 19 nt, Homo sapiens
  misc_RNA (1)...(19): siRNA sense strand
caaaguagcaacaaauauc

SEQ ID NO: 558010 - RNA, 19 nt, Homo sapiens
  misc_RNA (1)...(19): siRNA sense strand
gaccauaacccuucuucuu

SEQ ID NO: 558011 - RNA, 19 nt, Homo sapiens
  misc_RNA (1)...(19): siRNA sense strand
ggacaaggacgcgaucuau

SEQ ID NO: 558012 - RNA, 19 nt, Homo sapiens
  misc_RNA (1)...(19): siRNA sense strand
gcuggacaauuugaugaua

SEQ ID NO: 558013 - RNA, 19 nt, Homo sapiens
  misc_RNA (1)...(19): siRNA sense strand
caauacaaguacuaagguu

SEQ ID NO: 558014 - RNA, 19 nt, Homo sapiens
  misc_RNA (1)...(19): siRNA sense strand
ccaucgaccucgucauuga

SEQ ID NO: 558015 - RNA, 19 nt, Homo sapiens
  misc_RNA (1)...(19): siRNA sense strand
gaugauacaagcaauacaa

SEQ ID NO: 558016 - RNA, 19 nt, Homo sapiens
  misc_RNA (1)...(19): siRNA sense strand
guacaggugacgaugauga

SEQ ID NO: 558017 - RNA, 19 nt, Homo sapiens
  misc_RNA (1)...(19): siRNA sense strand
ccaaggagcagcauauagu

SEQ ID NO: 558018 - RNA, 19 nt, Homo sapiens
  misc_RNA (1)...(19): siRNA sense strand
agacaacaguguagcuuca

SEQ ID NO: 558019 - RNA, 19 nt, Homo sapiens
  misc_RNA (1)...(19): siRNA sense strand
gagcuggacaauuugauga

SEQ ID NO: 558020 - RNA, 19 nt, Homo sapiens
  misc_RNA (1)...(19): siRNA sense strand
gagccaaggagcagcauau

SEQ ID NO: 558021 - RNA, 19 nt, Homo sapiens
  misc_RNA (1)...(19): siRNA sense strand
gcccaucgaccucgucauu

SEQ ID NO: 558022 - RNA, 19 nt, Homo sapiens
  misc_RNA (1)...(19): siRNA sense strand
ccaaaguagcaacaaauau

SEQ ID NO: 558023 - RNA, 19 nt, Homo sapiens
  misc_RNA (1)...(19): siRNA sense strand
gcucuggucuuugagaagu

SEQ ID NO: 558024 - RNA, 19 nt, Homo sapiens
  misc_RNA (1)...(19): siRNA sense strand
uaguacagcccaugauuga

SEQ ID NO: 558025 - RNA, 19 nt, Homo sapiens
  misc_RNA (1)...(19): siRNA sense strand
caaaucucgcugaccauaa

SEQ ID NO: 558026 - RNA, 19 nt, Homo sapiens
  misc_RNA (1)...(19): siRNA sense strand
gcaauacaaguacuaaggu

SEQ ID NO: 558027 - RNA, 19 nt, Homo sapiens
  misc_RNA (1)...(19): siRNA sense strand
cccaaaguagcaacaaaua

SEQ ID NO: 558028 - RNA, 19 nt, Homo sapiens
  misc_RNA (1)...(19): siRNA sense strand
caagcaauacaaguacuaa

SEQ ID NO: 558029 - RNA, 19 nt, Homo sapiens
  misc_RNA (1)...(19): siRNA sense strand
acaaauaucaugagagcau

SEQ ID NO: 558030 - RNA, 19 nt, Homo sapiens
  misc_RNA (1)...(19): siRNA sense strand
acaaaucucgcugaccaua

SEQ ID NO: 558031 - RNA, 19 nt, Homo sapiens
  misc_RNA (1)...(19): siRNA sense strand
gaacugugcgauaacuucu

SEQ ID NO: 558032 - RNA, 19 nt, Homo sapiens
  misc_RNA (1)...(19): siRNA sense strand
gacaaggacgcgaucuaug

SEQ ID NO: 558033 - RNA, 19 nt, Homo sapiens
  misc_RNA (1)...(19): siRNA sense strand
uccacgaacugugcgauaa

SEQ ID NO: 558034 - RNA, 19 nt, Homo sapiens
  misc_RNA (1)...(19): siRNA sense strand
gaauaguacagcccaugau

SEQ ID NO: 558035 - RNA, 19 nt, Homo sapiens
  misc_RNA (1)...(19): siRNA sense strand
ccaagucagaucaugaaga

SEQ ID NO: 558036 - RNA, 19 nt, Homo sapiens
  misc_RNA (1)...(19): siRNA sense strand
gcuccaagucagaucauga

SEQ ID NO: 558037 - RNA, 19 nt, Homo sapiens
  misc_RNA (1)...(19): siRNA sense strand
gggacaaggacgcgaucua

SEQ ID NO: 558038 - RNA, 19 nt, Homo sapiens
  misc_RNA (1)...(19): siRNA sense strand
guagcaacaaauaucauga

SEQ ID NO: 558039 - RNA, 19 nt, Homo sapiens
  misc_RNA (1)...(19): siRNA sense strand
accgauacauuagcuguuu

SEQ ID NO: 558040 - RNA, 19 nt, Homo sapiens
  misc_RNA (1)...(19): siRNA sense strand
guuuauuaaugccagaaga

SEQ ID NO: 558041 - RNA, 19 nt, Homo sapiens
  misc_RNA (1)...(19): siRNA sense strand
gcaaggggaugguuuagac

SEQ ID NO: 558042 - RNA, 19 nt, Homo sapiens
  misc_RNA (1)...(19): siRNA sense strand
uaacuucugccaccgauac

SEQ ID NO: 558043 - RNA, 19 nt, Homo sapiens
  misc_RNA (1)...(19): siRNA sense strand
aauaguacagcccaugauu

SEQ ID NO: 558044 - RNA, 19 nt, Homo sapiens
  misc_RNA (1)...(19): siRNA sense strand
aaaucucgcugaccauaac

SEQ ID NO: 558045 - RNA, 19 nt, Homo sapiens
  misc_RNA (1)...(19): siRNA sense strand
acaaggacgcgaucuaugg

SEQ ID NO: 558046 - RNA, 19 nt, Homo sapiens
  misc_RNA (1)...(19): siRNA sense strand
caaguacuaagguuucauc

SEQ ID NO: 558047 - RNA, 19 nt, Homo sapiens
  misc_RNA (1)...(19): siRNA sense strand
gccagaagaagaauaguac

SEQ ID NO: 558048 - RNA, 19 nt, Homo sapiens
  misc_RNA (1)...(19): siRNA sense strand
accauaacccuucuucuug

SEQ ID NO: 558049 - RNA, 19 nt, Homo sapiens
  misc_RNA (1)...(19): siRNA sense strand
cgaacugugcgauaacuuc

SEQ ID NO: 558050 - RNA, 19 nt, Homo sapiens
  misc_RNA (1)...(19): siRNA sense strand
ucaggcuccuccacaaauc

SEQ ID NO: 558051 - RNA, 19 nt, Homo sapiens
  misc_RNA (1)...(19): siRNA sense strand
uguguuggauggucagcaa

SEQ ID NO: 558052 - RNA, 19 nt, Homo sapiens
  misc_RNA (1)...(19): siRNA sense strand
acaagcaauacaaguacua

SEQ ID NO: 558053 - RNA, 19 nt, Homo sapiens
  misc_RNA (1)...(19): siRNA sense strand
agaauaguacagcccauga

SEQ ID NO: 558054 - RNA, 19 nt, Homo sapiens
  misc_RNA (1)...(19): siRNA sense strand
gucagaucaugaagaacuu

SEQ ID NO: 558055 - RNA, 19 nt, Homo sapiens
  misc_RNA (1)...(19): siRNA sense strand
ggucuucgccaagcagguu

SEQ ID NO: 558056 - RNA, 19 nt, Homo sapiens
  misc_RNA (1)...(19): siRNA sense strand
ugccagaagaagaauagua

SEQ ID NO: 558057 - RNA, 19 nt, Homo sapiens
  misc_RNA (1)...(19): siRNA sense strand
acgaugaugauccggauaa

SEQ ID NO: 558058 - RNA, 19 nt, Homo sapiens
  misc_RNA (1)...(19): siRNA sense strand
auacaaguacuaagguuuc

SEQ ID NO: 558059 - RNA, 19 nt, Homo sapiens
  misc_RNA (1)...(19): siRNA sense strand
agcaacaaauaucaugaga

SEQ ID NO: 558060 - RNA, 19 nt, Homo sapiens
  misc_RNA (1)...(19): siRNA sense strand
gcggagacaacagcaguga

SEQ ID NO: 558061 - RNA, 19 nt, Homo sapiens
  misc_RNA (1)...(19): siRNA sense strand
gguuucaucuuuuggaguu

SEQ ID NO: 558062 - RNA, 19 nt, Homo sapiens
  misc_RNA (1)...(19): siRNA sense strand
caaggagcagcauauaguc

SEQ ID NO: 558063 - RNA, 19 nt, Homo sapiens
  misc_RNA (1)...(19): siRNA sense strand
gccaaggagcagcauauag

SEQ ID NO: 558064 - RNA, 19 nt, Homo sapiens
  misc_RNA (1)...(19): siRNA sense strand
uggacaauuugaugauaca

SEQ ID NO: 558065 - RNA, 19 nt, Homo sapiens
  misc_RNA (1)...(19): siRNA sense strand
cgauacauuagcuguuuga

SEQ ID NO: 558066 - RNA, 19 nt, Homo sapiens
  misc_RNA (1)...(19): siRNA sense strand
ccgauacauuagcuguuug

SEQ ID NO: 558067 - RNA, 19 nt, Homo sapiens
  misc_RNA (1)...(19): siRNA sense strand
gaaaagguccacgaacugu

SEQ ID NO: 558068 - RNA, 19 nt, Homo sapiens
  misc_RNA (1)...(19): siRNA sense strand
gcagcuccaagucagauca

SEQ ID NO: 558069 - RNA, 19 nt, Homo sapiens
  misc_RNA (1)...(19): siRNA sense strand
auuaaugccagaagaagaa

SEQ ID NO: 558070 - RNA, 19 nt, Homo sapiens
  misc_RNA (1)...(19): siRNA sense strand
uagaaaagguccacgaacu

SEQ ID NO: 558071 - RNA, 19 nt, Homo sapiens
  misc_RNA (1)...(19): siRNA sense strand
augaugauccggauaagga

SEQ ID NO: 558072 - RNA, 19 nt, Homo sapiens
  misc_RNA (1)...(19): siRNA sense strand
guacuaagguuucaucuuu

SEQ ID NO: 558073 - RNA, 19 nt, Homo sapiens
  misc_RNA (1)...(19): siRNA sense strand
caagucagaucaugaagaa

SEQ ID NO: 558074 - RNA, 19 nt, Homo sapiens
  misc_RNA (1)...(19): siRNA sense strand
gauacaagcaauacaagua

SEQ ID NO: 558075 - RNA, 19 nt, Homo sapiens
  misc_RNA (1)...(19): siRNA sense strand
caaaguagcaacaaauauc

SEQ ID NO: 558076 - RNA, 19 nt, Homo sapiens
  misc_RNA (1)...(19): siRNA sense strand
gaccauaacccuucuucuu

SEQ ID NO: 558077 - RNA, 19 nt, Homo sapiens
  misc_RNA (1)...(19): siRNA sense strand
ggacaaggacgcgaucuau

SEQ ID NO: 558078 - RNA, 19 nt, Homo sapiens
  misc_RNA (1)...(19): siRNA sense strand
gcuggacaauuugaugaua

SEQ ID NO: 558079 - RNA, 19 nt, Homo sapiens
  misc_RNA (1)...(19): siRNA sense strand
caauacaaguacuaagguu

SEQ ID NO: 558080 - RNA, 19 nt, Homo sapiens
  misc_RNA (1)...(19): siRNA sense strand
ccaucgaccucgucauuga

SEQ ID NO: 558081 - RNA, 19 nt, Homo sapiens
  misc_RNA (1)...(19): siRNA sense strand
gaugauacaagcaauacaa

SEQ ID NO: 558082 - RNA, 19 nt, Homo sapiens
  misc_RNA (1)...(19): siRNA sense strand
guacaggugacgaugauga

SEQ ID NO: 558083 - RNA, 19 nt, Homo sapiens
  misc_RNA (1)...(19): siRNA sense strand
acgaugagcugccccauua

SEQ ID NO: 558084 - RNA, 19 nt, Homo sapiens
  misc_RNA (1)...(19): siRNA sense strand
agacaacaguguagcuuca

SEQ ID NO: 558085 - RNA, 19 nt, Homo sapiens
  misc_RNA (1)...(19): siRNA sense strand
gagcuggacaauuugauga

SEQ ID NO: 558086 - RNA, 19 nt, Homo sapiens
  misc_RNA (1)...(19): siRNA sense strand
gcccaucgaccucgucauu

SEQ ID NO: 558087 - RNA, 19 nt, Homo sapiens
  misc_RNA (1)...(19): siRNA sense strand
ccaaaguagcaacaaauau

SEQ ID NO: 558088 - RNA, 19 nt, Homo sapiens
  misc_RNA (1)...(19): siRNA sense strand
gcucuggucuuugagaagu

SEQ ID NO: 558089 - RNA, 19 nt, Homo sapiens
  misc_RNA (1)...(19): siRNA sense strand
caaaucucgcugaccauaa

SEQ ID NO: 558090 - RNA, 19 nt, Homo sapiens
  misc_RNA (1)...(19): siRNA sense strand
gcaauacaaguacuaaggu

SEQ ID NO: 558091 - RNA, 19 nt, Homo sapiens
  misc_RNA (1)...(19): siRNA sense strand
cccaaaguagcaacaaaua

SEQ ID NO: 558092 - RNA, 19 nt, Homo sapiens
  misc_RNA (1)...(19): siRNA sense strand
caagcaauacaaguacuaa

SEQ ID NO: 558093 - RNA, 19 nt, Homo sapiens
  misc_RNA (1)...(19): siRNA sense strand
acaaauaucaugagagcau

SEQ ID NO: 558094 - RNA, 19 nt, Homo sapiens
  misc_RNA (1)...(19): siRNA sense strand
acaaaucucgcugaccaua

SEQ ID NO: 558095 - RNA, 19 nt, Homo sapiens
  misc_RNA (1)...(19): siRNA sense strand
gaacugugcgauaacuucu

SEQ ID NO: 558096 - RNA, 19 nt, Homo sapiens
  misc_RNA (1)...(19): siRNA sense strand
gacaaggacgcgaucuaug

SEQ ID NO: 558097 - RNA, 19 nt, Homo sapiens
  misc_RNA (1)...(19): siRNA sense strand
uccacgaacugugcgauaa

SEQ ID NO: 558098 - RNA, 19 nt, Homo sapiens
  misc_RNA (1)...(19): siRNA sense strand
ccaagucagaucaugaaga

SEQ ID NO: 558099 - RNA, 19 nt, Homo sapiens
  misc_RNA (1)...(19): siRNA sense strand
gcuccaagucagaucauga

SEQ ID NO: 558100 - RNA, 19 nt, Homo sapiens
  misc_RNA (1)...(19): siRNA sense strand
gggacaaggacgcgaucua

SEQ ID NO: 558101 - RNA, 19 nt, Homo sapiens
  misc_RNA (1)...(19): siRNA sense strand
guagcaacaaauaucauga

SEQ ID NO: 558102 - RNA, 19 nt, Homo sapiens
  misc_RNA (1)...(19): siRNA sense strand
accgauacauuagcuguuu

SEQ ID NO: 558103 - RNA, 19 nt, Homo sapiens
  misc_RNA (1)...(19): siRNA sense strand
gcaaggggaugguuuagac

SEQ ID NO: 558104 - RNA, 19 nt, Homo sapiens
  misc_RNA (1)...(19): siRNA sense strand
uaacuucugccaccgauac

SEQ ID NO: 558105 - RNA, 19 nt, Homo sapiens
  misc_RNA (1)...(19): siRNA sense strand
aaaucucgcugaccauaac

SEQ ID NO: 558106 - RNA, 19 nt, Homo sapiens
  misc_RNA (1)...(19): siRNA sense strand
acaaggacgcgaucuaugg

SEQ ID NO: 558107 - RNA, 19 nt, Homo sapiens
  misc_RNA (1)...(19): siRNA sense strand
caaguacuaagguuucauc

SEQ ID NO: 558108 - RNA, 19 nt, Homo sapiens
  misc_RNA (1)...(19): siRNA sense strand
accauaacccuucuucuug

SEQ ID NO: 558109 - RNA, 19 nt, Homo sapiens
  misc_RNA (1)...(19): siRNA sense strand
cgaacugugcgauaacuuc

SEQ ID NO: 558110 - RNA, 19 nt, Homo sapiens
  misc_RNA (1)...(19): siRNA sense strand
ucaggcuccuccacaaauc

SEQ ID NO: 558111 - RNA, 19 nt, Homo sapiens
  misc_RNA (1)...(19): siRNA sense strand
acaagcaauacaaguacua

SEQ ID NO: 558112 - RNA, 19 nt, Homo sapiens
  misc_RNA (1)...(19): siRNA sense strand
gucagaucaugaagaacuu

SEQ ID NO: 558113 - RNA, 19 nt, Homo sapiens
  misc_RNA (1)...(19): siRNA sense strand
ggucuucgccaagcagguu

SEQ ID NO: 558114 - RNA, 19 nt, Homo sapiens
  misc_RNA (1)...(19): siRNA sense strand
acgaugaugauccggauaa

SEQ ID NO: 558115 - RNA, 19 nt, Homo sapiens
  misc_RNA (1)...(19): siRNA sense strand
auacaaguacuaagguuuc

SEQ ID NO: 558116 - RNA, 19 nt, Homo sapiens
  misc_RNA (1)...(19): siRNA sense strand
agcaacaaauaucaugaga

SEQ ID NO: 558117 - RNA, 19 nt, Homo sapiens
  misc_RNA (1)...(19): siRNA sense strand
gcggagacaacagcaguga

SEQ ID NO: 558118 - RNA, 19 nt, Homo sapiens
  misc_RNA (1)...(19): siRNA sense strand
uggacaauuugaugauaca

SEQ ID NO: 558119 - RNA, 19 nt, Homo sapiens
  misc_RNA (1)...(19): siRNA sense strand
cgauacauuagcuguuuga

SEQ ID NO: 558120 - RNA, 19 nt, Homo sapiens
  misc_RNA (1)...(19): siRNA sense strand
ccgauacauuagcuguuug

SEQ ID NO: 558121 - RNA, 19 nt, Homo sapiens
  misc_RNA (1)...(19): siRNA sense strand
gaaaagguccacgaacugu

SEQ ID NO: 558122 - RNA, 19 nt, Homo sapiens
  misc_RNA (1)...(19): siRNA sense strand
gguuucaucuuuuggaguu

SEQ ID NO: 558123 - RNA, 19 nt, Homo sapiens
  misc_RNA (1)...(19): siRNA sense strand
gcagcuccaagucagauca

SEQ ID NO: 558124 - RNA, 19 nt, Homo sapiens
  misc_RNA (1)...(19): siRNA sense strand
uagaaaagguccacgaacu

SEQ ID NO: 558125 - RNA, 19 nt, Homo sapiens
  misc_RNA (1)...(19): siRNA sense strand
augaugauccggauaagga

SEQ ID NO: 558126 - RNA, 19 nt, Homo sapiens
  misc_RNA (1)...(19): siRNA sense strand
guacuaagguuucaucuuu

SEQ ID NO: 558127 - RNA, 19 nt, Homo sapiens
  misc_RNA (1)...(19): siRNA sense strand
caagucagaucaugaagaa

SEQ ID NO: 558128 - RNA, 19 nt, Homo sapiens
  misc_RNA (1)...(19): siRNA sense strand
gauacaagcaauacaagua

SEQ ID NO: 558129 - RNA, 19 nt, Homo sapiens
  misc_RNA (1)...(19): siRNA sense strand
caaaguagcaacaaauauc

SEQ ID NO: 558130 - RNA, 19 nt, Homo sapiens
  misc_RNA (1)...(19): siRNA sense strand
gaccauaacccuucuucuu

SEQ ID NO: 558131 - RNA, 19 nt, Homo sapiens
  misc_RNA (1)...(19): siRNA sense strand
ggacaaggacgcgaucuau

SEQ ID NO: 558132 - RNA, 19 nt, Homo sapiens
  misc_RNA (1)...(19): siRNA sense strand
gcuggacaauuugaugaua

SEQ ID NO: 558133 - RNA, 19 nt, Homo sapiens
  misc_RNA (1)...(19): siRNA sense strand
caauacaaguacuaagguu

SEQ ID NO: 558134 - RNA, 19 nt, Homo sapiens
  misc_RNA (1)...(19): siRNA sense strand
ccaucgaccucgucauuga

SEQ ID NO: 558135 - RNA, 19 nt, Homo sapiens
  misc_RNA (1)...(19): siRNA sense strand
gaugauacaagcaauacaa

SEQ ID NO: 558136 - RNA, 19 nt, Homo sapiens
  misc_RNA (1)...(19): siRNA sense strand
guacaggugacgaugauga

SEQ ID NO: 558137 - RNA, 19 nt, Homo sapiens
  misc_RNA (1)...(19): siRNA sense strand
ccaaggagcagcauauagu

SEQ ID NO: 558138 - RNA, 19 nt, Homo sapiens
  misc_RNA (1)...(19): siRNA sense strand
acgaugagcugccccauua

SEQ ID NO: 558139 - RNA, 19 nt, Homo sapiens
  misc_RNA (1)...(19): siRNA sense strand
agacaacaguguagcuuca

SEQ ID NO: 558140 - RNA, 19 nt, Homo sapiens
  misc_RNA (1)...(19): siRNA sense strand
gagcuggacaauuugauga

SEQ ID NO: 558141 - RNA, 19 nt, Homo sapiens
  misc_RNA (1)...(19): siRNA sense strand
gagccaaggagcagcauau

SEQ ID NO: 558142 - RNA, 19 nt, Homo sapiens
  misc_RNA (1)...(19): siRNA sense strand
gcccaucgaccucgucauu

SEQ ID NO: 558143 - RNA, 19 nt, Homo sapiens
  misc_RNA (1)...(19): siRNA sense strand
ccaaaguagcaacaaauau

SEQ ID NO: 558144 - RNA, 19 nt, Homo sapiens
  misc_RNA (1)...(19): siRNA sense strand
gcucuggucuuugagaagu

SEQ ID NO: 558145 - RNA, 19 nt, Homo sapiens
  misc_RNA (1)...(19): siRNA sense strand
uaguacagcccaugauuga

SEQ ID NO: 558146 - RNA, 19 nt, Homo sapiens
  misc_RNA (1)...(19): siRNA sense strand
caaaucucgcugaccauaa

SEQ ID NO: 558147 - RNA, 19 nt, Homo sapiens
  misc_RNA (1)...(19): siRNA sense strand
gcaauacaaguacuaaggu

SEQ ID NO: 558148 - RNA, 19 nt, Homo sapiens
  misc_RNA (1)...(19): siRNA sense strand
cccaaaguagcaacaaaua

SEQ ID NO: 558149 - RNA, 19 nt, Homo sapiens
  misc_RNA (1)...(19): siRNA sense strand
caagcaauacaaguacuaa

SEQ ID NO: 558150 - RNA, 19 nt, Homo sapiens
  misc_RNA (1)...(19): siRNA sense strand
acaaauaucaugagagcau

SEQ ID NO: 558151 - RNA, 19 nt, Homo sapiens
  misc_RNA (1)...(19): siRNA sense strand
acaaaucucgcugaccaua

SEQ ID NO: 558152 - RNA, 19 nt, Homo sapiens
  misc_RNA (1)...(19): siRNA sense strand
gaacugugcgauaacuucu

SEQ ID NO: 558153 - RNA, 19 nt, Homo sapiens
  misc_RNA (1)...(19): siRNA sense strand
gacaaggacgcgaucuaug

SEQ ID NO: 558154 - RNA, 19 nt, Homo sapiens
  misc_RNA (1)...(19): siRNA sense strand
uccacgaacugugcgauaa

SEQ ID NO: 558155 - RNA, 19 nt, Homo sapiens
  misc_RNA (1)...(19): siRNA sense strand
gaauaguacagcccaugau

SEQ ID NO: 558156 - RNA, 19 nt, Homo sapiens
  misc_RNA (1)...(19): siRNA sense strand
ccaagucagaucaugaaga

SEQ ID NO: 558157 - RNA, 19 nt, Homo sapiens
  misc_RNA (1)...(19): siRNA sense strand
gcuccaagucagaucauga

SEQ ID NO: 558158 - RNA, 19 nt, Homo sapiens
  misc_RNA (1)...(19): siRNA sense strand
gggacaaggacgcgaucua

SEQ ID NO: 558159 - RNA, 19 nt, Homo sapiens
  misc_RNA (1)...(19): siRNA sense strand
guagcaacaaauaucauga

SEQ ID NO: 558160 - RNA, 19 nt, Homo sapiens
  misc_RNA (1)...(19): siRNA sense strand
accgauacauuagcuguuu

SEQ ID NO: 558161 - RNA, 19 nt, Homo sapiens
  misc_RNA (1)...(19): siRNA sense strand
guuuauuaaugccagaaga

SEQ ID NO: 558162 - RNA, 19 nt, Homo sapiens
  misc_RNA (1)...(19): siRNA sense strand
gcaaggggaugguuuagac

SEQ ID NO: 558163 - RNA, 19 nt, Homo sapiens
  misc_RNA (1)...(19): siRNA sense strand
uaacuucugccaccgauac

SEQ ID NO: 558164 - RNA, 19 nt, Homo sapiens
  misc_RNA (1)...(19): siRNA sense strand
aauaguacagcccaugauu

SEQ ID NO: 558165 - RNA, 19 nt, Homo sapiens
  misc_RNA (1)...(19): siRNA sense strand
acaaggacgcgaucuaugg

SEQ ID NO: 558166 - RNA, 19 nt, Homo sapiens
  misc_RNA (1)...(19): siRNA sense strand
aaaucucgcugaccauaac

SEQ ID NO: 558167 - RNA, 19 nt, Homo sapiens
  misc_RNA (1)...(19): siRNA sense strand
caaguacuaagguuucauc

SEQ ID NO: 558168 - RNA, 19 nt, Homo sapiens
  misc_RNA (1)...(19): siRNA sense strand
gccagaagaagaauaguac

SEQ ID NO: 558169 - RNA, 19 nt, Homo sapiens
  misc_RNA (1)...(19): siRNA sense strand
accauaacccuucuucuug

SEQ ID NO: 558170 - RNA, 19 nt, Homo sapiens
  misc_RNA (1)...(19): siRNA sense strand
cgaacugugcgauaacuuc

SEQ ID NO: 558171 - RNA, 19 nt, Homo sapiens
  misc_RNA (1)...(19): siRNA sense strand
ucaggcuccuccacaaauc

SEQ ID NO: 558172 - RNA, 19 nt, Homo sapiens
  misc_RNA (1)...(19): siRNA sense strand
uguguuggauggucagcaa

SEQ ID NO: 558173 - RNA, 19 nt, Homo sapiens
  misc_RNA (1)...(19): siRNA sense strand
acaagcaauacaaguacua

SEQ ID NO: 558174 - RNA, 19 nt, Homo sapiens
  misc_RNA (1)...(19): siRNA sense strand
agaauaguacagcccauga

SEQ ID NO: 558175 - RNA, 19 nt, Homo sapiens
  misc_RNA (1)...(19): siRNA sense strand
gucagaucaugaagaacuu

SEQ ID NO: 558176 - RNA, 19 nt, Homo sapiens
  misc_RNA (1)...(19): siRNA sense strand
ggucuucgccaagcagguu

SEQ ID NO: 558177 - RNA, 19 nt, Homo sapiens
  misc_RNA (1)...(19): siRNA sense strand
ugccagaagaagaauagua

SEQ ID NO: 558178 - RNA, 19 nt, Homo sapiens
  misc_RNA (1)...(19): siRNA sense strand
acgaugaugauccggauaa

SEQ ID NO: 558179 - RNA, 19 nt, Homo sapiens
  misc_RNA (1)...(19): siRNA sense strand
auacaaguacuaagguuuc

SEQ ID NO: 558180 - RNA, 19 nt, Homo sapiens
  misc_RNA (1)...(19): siRNA sense strand
agcaacaaauaucaugaga

SEQ ID NO: 558181 - RNA, 19 nt, Homo sapiens
  misc_RNA (1)...(19): siRNA sense strand
gcggagacaacagcaguga

SEQ ID NO: 558182 - RNA, 19 nt, Homo sapiens
  misc_RNA (1)...(19): siRNA sense strand
gguuucaucuuuuggaguu

SEQ ID NO: 558183 - RNA, 19 nt, Homo sapiens
  misc_RNA (1)...(19): siRNA sense strand
caaggagcagcauauaguc

SEQ ID NO: 558184 - RNA, 19 nt, Homo sapiens
  misc_RNA (1)...(19): siRNA sense strand
gccaaggagcagcauauag

SEQ ID NO: 558185 - RNA, 19 nt, Homo sapiens
  misc_RNA (1)...(19): siRNA sense strand
cgauacauuagcuguuuga

SEQ ID NO: 558186 - RNA, 19 nt, Homo sapiens
  misc_RNA (1)...(19): siRNA sense strand
ccgauacauuagcuguuug

SEQ ID NO: 558187 - RNA, 19 nt, Homo sapiens
  misc_RNA (1)...(19): siRNA sense strand
uggacaauuugaugauaca

SEQ ID NO: 558188 - RNA, 19 nt, Homo sapiens
  misc_RNA (1)...(19): siRNA sense strand
gaaaagguccacgaacugu

SEQ ID NO: 558189 - RNA, 19 nt, Homo sapiens
  misc_RNA (1)...(19): siRNA sense strand
gcagcuccaagucagauca

SEQ ID NO: 558190 - RNA, 19 nt, Homo sapiens
  misc_RNA (1)...(19): siRNA sense strand
auuaaugccagaagaagaa

SEQ ID NO: 558191 - RNA, 19 nt, Homo sapiens
  misc_RNA (1)...(19): siRNA sense strand
uagaaaagguccacgaacu

SEQ ID NO: 558192 - RNA, 19 nt, Homo sapiens
  misc_RNA (1)...(19): siRNA sense strand
augaugauccggauaagga

SEQ ID NO: 558193 - RNA, 19 nt, Homo sapiens
  misc_RNA (1)...(19): siRNA sense strand
guacuaagguuucaucuuu

SEQ ID NO: 558194 - RNA, 19 nt, Homo sapiens
  misc_RNA (1)...(19): siRNA sense strand
caagucagaucaugaagaa

SEQ ID NO: 558195 - RNA, 19 nt, Homo sapiens
  misc_RNA (1)...(19): siRNA sense strand
ggacauucaugcccaauag

SEQ ID NO: 558196 - RNA, 19 nt, Homo sapiens
  misc_RNA (1)...(19): siRNA sense strand
gauacaagcaauacaagua

SEQ ID NO: 558197 - RNA, 19 nt, Homo sapiens
  misc_RNA (1)...(19): siRNA sense strand
caaaguagcaacaaauauc

SEQ ID NO: 558198 - RNA, 19 nt, Homo sapiens
  misc_RNA (1)...(19): siRNA sense strand
gcacagagccccacaaugu

SEQ ID NO: 558199 - RNA, 19 nt, Homo sapiens
  misc_RNA (1)...(19): siRNA sense strand
gaccauaacccuucuucuu

SEQ ID NO: 558200 - RNA, 19 nt, Homo sapiens
  misc_RNA (1)...(19): siRNA sense strand
ggacaaggacgcgaucuau

SEQ ID NO: 558201 - RNA, 19 nt, Homo sapiens
  misc_RNA (1)...(19): siRNA sense strand
gcuggacaauuugaugaua

SEQ ID NO: 558202 - RNA, 19 nt, Homo sapiens
  misc_RNA (1)...(19): siRNA sense strand
caauacaaguacuaagguu

SEQ ID NO: 558203 - RNA, 19 nt, Homo sapiens
  misc_RNA (1)...(19): siRNA sense strand
ccaucgaccucgucauuga

SEQ ID NO: 558204 - RNA, 19 nt, Homo sapiens
  misc_RNA (1)...(19): siRNA sense strand
gaugauacaagcaauacaa

SEQ ID NO: 558205 - RNA, 19 nt, Homo sapiens
  misc_RNA (1)...(19): siRNA sense strand
cccacacccuacucaauua

SEQ ID NO: 558206 - RNA, 19 nt, Homo sapiens
  misc_RNA (1)...(19): siRNA sense strand
guacaggugacgaugauga

SEQ ID NO: 558207 - RNA, 19 nt, Homo sapiens
  misc_RNA (1)...(19): siRNA sense strand
ccacaauguuaaauucugu

SEQ ID NO: 558208 - RNA, 19 nt, Homo sapiens
  misc_RNA (1)...(19): siRNA sense strand
cccaaugcauucauauuug

SEQ ID NO: 558209 - RNA, 19 nt, Homo sapiens
  misc_RNA (1)...(19): siRNA sense strand
ccaaggagcagcauauagu

SEQ ID NO: 558210 - RNA, 19 nt, Homo sapiens
  misc_RNA (1)...(19): siRNA sense strand
acgaugagcugccccauua

SEQ ID NO: 558211 - RNA, 19 nt, Homo sapiens
  misc_RNA (1)...(19): siRNA sense strand
agacaacaguguagcuuca

SEQ ID NO: 558212 - RNA, 19 nt, Homo sapiens
  misc_RNA (1)...(19): siRNA sense strand
gagcuggacaauuugauga

SEQ ID NO: 558213 - RNA, 19 nt, Homo sapiens
  misc_RNA (1)...(19): siRNA sense strand
gagccaaggagcagcauau

SEQ ID NO: 558214 - RNA, 19 nt, Homo sapiens
  misc_RNA (1)...(19): siRNA sense strand
gcggacagguuauggacau

SEQ ID NO: 558215 - RNA, 19 nt, Homo sapiens
  misc_RNA (1)...(19): siRNA sense strand
gcccaucgaccucgucauu

SEQ ID NO: 558216 - RNA, 19 nt, Homo sapiens
  misc_RNA (1)...(19): siRNA sense strand
ccaaaguagcaacaaauau

SEQ ID NO: 558217 - RNA, 19 nt, Homo sapiens
  misc_RNA (1)...(19): siRNA sense strand
gcaauacaaguacuaaggu

SEQ ID NO: 558218 - RNA, 19 nt, Homo sapiens
  misc_RNA (1)...(19): siRNA sense strand
gacagguuauggacauuca

SEQ ID NO: 558219 - RNA, 19 nt, Homo sapiens
  misc_RNA (1)...(19): siRNA sense strand
uaguacagcccaugauuga

SEQ ID NO: 558220 - RNA, 19 nt, Homo sapiens
  misc_RNA (1)...(19): siRNA sense strand
caaaucucgcugaccauaa

SEQ ID NO: 558221 - RNA, 19 nt, Homo sapiens
  misc_RNA (1)...(19): siRNA sense strand
gcucuggucuuugagaagu

SEQ ID NO: 558222 - RNA, 19 nt, Homo sapiens
  misc_RNA (1)...(19): siRNA sense strand
cccaaaguagcaacaaaua

SEQ ID NO: 558223 - RNA, 19 nt, Homo sapiens
  misc_RNA (1)...(19): siRNA sense strand
gguccuaugggaaugagua

SEQ ID NO: 558224 - RNA, 19 nt, Homo sapiens
  misc_RNA (1)...(19): siRNA sense strand
caagcaauacaaguacuaa

SEQ ID NO: 558225 - RNA, 19 nt, Homo sapiens
  misc_RNA (1)...(19): siRNA sense strand
aauguuggcggacagguua

SEQ ID NO: 558226 - RNA, 19 nt, Homo sapiens
  misc_RNA (1)...(19): siRNA sense strand
ccaaugcauucauauuugc

SEQ ID NO: 558227 - RNA, 19 nt, Homo sapiens
  misc_RNA (1)...(19): siRNA sense strand
acaaauaucaugagagcau

SEQ ID NO: 558228 - RNA, 19 nt, Homo sapiens
  misc_RNA (1)...(19): siRNA sense strand
acaaaucucgcugaccaua

SEQ ID NO: 558229 - RNA, 19 nt, Homo sapiens
  misc_RNA (1)...(19): siRNA sense strand
acacccuacucaauuaaga

SEQ ID NO: 558230 - RNA, 19 nt, Homo sapiens
  misc_RNA (1)...(19): siRNA sense strand
gaacugugcgauaacuucu

SEQ ID NO: 558231 - RNA, 19 nt, Homo sapiens
  misc_RNA (1)...(19): siRNA sense strand
ccuacucaauuaagacaug

SEQ ID NO: 558232 - RNA, 19 nt, Homo sapiens
  misc_RNA (1)...(19): siRNA sense strand
gacaaggacgcgaucuaug

SEQ ID NO: 558233 - RNA, 19 nt, Homo sapiens
  misc_RNA (1)...(19): siRNA sense strand
ccacacccuacucaauuaa

SEQ ID NO: 558234 - RNA, 19 nt, Homo sapiens
  misc_RNA (1)...(19): siRNA sense strand
uccacgaacugugcgauaa

SEQ ID NO: 558235 - RNA, 19 nt, Homo sapiens
  misc_RNA (1)...(19): siRNA sense strand
gaauaguacagcccaugau

SEQ ID NO: 558236 - RNA, 19 nt, Homo sapiens
  misc_RNA (1)...(19): siRNA sense strand
ccaagucagaucaugaaga

SEQ ID NO: 558237 - RNA, 19 nt, Homo sapiens
  misc_RNA (1)...(19): siRNA sense strand
gcuccaagucagaucauga

SEQ ID NO: 558238 - RNA, 19 nt, Homo sapiens
  misc_RNA (1)...(19): siRNA sense strand
gggacaaggacgcgaucua

SEQ ID NO: 558239 - RNA, 19 nt, Homo sapiens
  misc_RNA (1)...(19): siRNA sense strand
guagcaacaaauaucauga

SEQ ID NO: 558240 - RNA, 19 nt, Homo sapiens
  misc_RNA (1)...(19): siRNA sense strand
accgauacauuagcuguuu

SEQ ID NO: 558241 - RNA, 19 nt, Homo sapiens
  misc_RNA (1)...(19): siRNA sense strand
guuuauuaaugccagaaga

SEQ ID NO: 558242 - RNA, 19 nt, Homo sapiens
  misc_RNA (1)...(19): siRNA sense strand
gcaaggggaugguuuagac

SEQ ID NO: 558243 - RNA, 19 nt, Homo sapiens
  misc_RNA (1)...(19): siRNA sense strand
uaacuucugccaccgauac

SEQ ID NO: 558244 - RNA, 19 nt, Homo sapiens
  misc_RNA (1)...(19): siRNA sense strand
ggacagguuauggacauuc

SEQ ID NO: 558245 - RNA, 19 nt, Homo sapiens
  misc_RNA (1)...(19): siRNA sense strand
aauaguacagcccaugauu

SEQ ID NO: 558246 - RNA, 19 nt, Homo sapiens
  misc_RNA (1)...(19): siRNA sense strand
acaaggacgcgaucuaugg

SEQ ID NO: 558247 - RNA, 19 nt, Homo sapiens
  misc_RNA (1)...(19): siRNA sense strand
aaaucucgcugaccauaac

SEQ ID NO: 558248 - RNA, 19 nt, Homo sapiens
  misc_RNA (1)...(19): siRNA sense strand
caaguacuaagguuucauc

SEQ ID NO: 558249 - RNA, 19 nt, Homo sapiens
  misc_RNA (1)...(19): siRNA sense strand
gccagaagaagaauaguac

SEQ ID NO: 558250 - RNA, 19 nt, Homo sapiens
  misc_RNA (1)...(19): siRNA sense strand
accauaacccuucuucuug

SEQ ID NO: 558251 - RNA, 19 nt, Homo sapiens
  misc_RNA (1)...(19): siRNA sense strand
cgaacugugcgauaacuuc

SEQ ID NO: 558252 - RNA, 19 nt, Homo sapiens
  misc_RNA (1)...(19): siRNA sense strand
ucaggcuccuccacaaauc

SEQ ID NO: 558253 - RNA, 19 nt, Homo sapiens
  misc_RNA (1)...(19): siRNA sense strand
uguguuggauggucagcaa

SEQ ID NO: 558254 - RNA, 19 nt, Homo sapiens
  misc_RNA (1)...(19): siRNA sense strand
gucagaucaugaagaacuu

SEQ ID NO: 558255 - RNA, 19 nt, Homo sapiens
  misc_RNA (1)...(19): siRNA sense strand
agaauaguacagcccauga

SEQ ID NO: 558256 - RNA, 19 nt, Homo sapiens
  misc_RNA (1)...(19): siRNA sense strand
acaagcaauacaaguacua

SEQ ID NO: 558257 - RNA, 19 nt, Homo sapiens
  misc_RNA (1)...(19): siRNA sense strand
acgaugaugauccggauaa

SEQ ID NO: 558258 - RNA, 19 nt, Homo sapiens
  misc_RNA (1)...(19): siRNA sense strand
ugccagaagaagaauagua

SEQ ID NO: 558259 - RNA, 19 nt, Homo sapiens
  misc_RNA (1)...(19): siRNA sense strand
ggucuucgccaagcagguu

SEQ ID NO: 558260 - RNA, 19 nt, Homo sapiens
  misc_RNA (1)...(19): siRNA sense strand
gcggagacaacagcaguga

SEQ ID NO: 558261 - RNA, 19 nt, Homo sapiens
  misc_RNA (1)...(19): siRNA sense strand
auacaaguacuaagguuuc

SEQ ID NO: 558262 - RNA, 19 nt, Homo sapiens
  misc_RNA (1)...(19): siRNA sense strand
agcaacaaauaucaugaga

SEQ ID NO: 558263 - RNA, 19 nt, Homo sapiens
  misc_RNA (1)...(19): siRNA sense strand
gaaaagguccacgaacugu

SEQ ID NO: 558264 - RNA, 19 nt, Homo sapiens
  misc_RNA (1)...(19): siRNA sense strand
caaggagcagcauauaguc

SEQ ID NO: 558265 - RNA, 19 nt, Homo sapiens
  misc_RNA (1)...(19): siRNA sense strand
gccaaggagcagcauauag

SEQ ID NO: 558266 - RNA, 19 nt, Homo sapiens
  misc_RNA (1)...(19): siRNA sense strand
uggacaauuugaugauaca

SEQ ID NO: 558267 - RNA, 19 nt, Homo sapiens
  misc_RNA (1)...(19): siRNA sense strand
gguuucaucuuuuggaguu

SEQ ID NO: 558268 - RNA, 19 nt, Homo sapiens
  misc_RNA (1)...(19): siRNA sense strand
cgauacauuagcuguuuga

SEQ ID NO: 558269 - RNA, 19 nt, Homo sapiens
  misc_RNA (1)...(19): siRNA sense strand
ccgauacauuagcuguuug

SEQ ID NO: 558270 - RNA, 19 nt, Homo sapiens
  misc_RNA (1)...(19): siRNA sense strand
gcagcuccaagucagauca

SEQ ID NO: 558271 - RNA, 19 nt, Homo sapiens
  misc_RNA (1)...(19): siRNA sense strand
caauguuggcggacagguu

SEQ ID NO: 558272 - RNA, 19 nt, Homo sapiens
  misc_RNA (1)...(19): siRNA sense strand
auuaaugccagaagaagaa

SEQ ID NO: 558273 - RNA, 19 nt, Homo sapiens
  misc_RNA (1)...(19): siRNA sense strand
uagaaaagguccacgaacu

SEQ ID NO: 558274 - RNA, 19 nt, Homo sapiens
  misc_RNA (1)...(19): siRNA sense strand
cccacaauguuaaauucug

SEQ ID NO: 558275 - RNA, 19 nt, Homo sapiens
  misc_RNA (1)...(19): siRNA sense strand
ccaccacccagccaugaug

SEQ ID NO: 558276 - RNA, 19 nt, Homo sapiens
  misc_RNA (1)...(19): siRNA sense strand
augaugauccggauaagga

SEQ ID NO: 558277 - RNA, 19 nt, Homo sapiens
  misc_RNA (1)...(19): siRNA sense strand
guacuaagguuucaucuuu

SEQ ID NO: 558278 - RNA, 19 nt, Homo sapiens
  misc_RNA (1)...(19): siRNA sense strand
caagucagaucaugaagaa

SEQ ID NO: 558279 - RNA, 19 nt, Homo sapiens
  misc_RNA (1)...(19): siRNA sense strand
ggacauucaugcccaauag

SEQ ID NO: 558280 - RNA, 19 nt, Homo sapiens
  misc_RNA (1)...(19): siRNA sense strand
gauacaagcaauacaagua

SEQ ID NO: 558281 - RNA, 19 nt, Homo sapiens
  misc_RNA (1)...(19): siRNA sense strand
caaaguagcaacaaauauc

SEQ ID NO: 558282 - RNA, 19 nt, Homo sapiens
  misc_RNA (1)...(19): siRNA sense strand
gcacagagccccacaaugu

SEQ ID NO: 558283 - RNA, 19 nt, Homo sapiens
  misc_RNA (1)...(19): siRNA sense strand
gaccauaacccuucuucuu

SEQ ID NO: 558284 - RNA, 19 nt, Homo sapiens
  misc_RNA (1)...(19): siRNA sense strand
ggacaaggacgcgaucuau

SEQ ID NO: 558285 - RNA, 19 nt, Homo sapiens
  misc_RNA (1)...(19): siRNA sense strand
gcuggacaauuugaugaua

SEQ ID NO: 558286 - RNA, 19 nt, Homo sapiens
  misc_RNA (1)...(19): siRNA sense strand
caauacaaguacuaagguu

SEQ ID NO: 558287 - RNA, 19 nt, Homo sapiens
  misc_RNA (1)...(19): siRNA sense strand
ccaucgaccucgucauuga

SEQ ID NO: 558288 - RNA, 19 nt, Homo sapiens
  misc_RNA (1)...(19): siRNA sense strand
gaugauacaagcaauacaa

SEQ ID NO: 558289 - RNA, 19 nt, Homo sapiens
  misc_RNA (1)...(19): siRNA sense strand
cccacacccuacucaauua

SEQ ID NO: 558290 - RNA, 19 nt, Homo sapiens
  misc_RNA (1)...(19): siRNA sense strand
guacaggugacgaugauga

SEQ ID NO: 558291 - RNA, 19 nt, Homo sapiens
  misc_RNA (1)...(19): siRNA sense strand
ccacaauguuaaauucugu

SEQ ID NO: 558292 - RNA, 19 nt, Homo sapiens
  misc_RNA (1)...(19): siRNA sense strand
cccaaugcauucauauuug

SEQ ID NO: 558293 - RNA, 19 nt, Homo sapiens
  misc_RNA (1)...(19): siRNA sense strand
ccaaggagcagcauauagu

SEQ ID NO: 558294 - RNA, 19 nt, Homo sapiens
  misc_RNA (1)...(19): siRNA sense strand
acgaugagcugccccauua

SEQ ID NO: 558295 - RNA, 19 nt, Homo sapiens
  misc_RNA (1)...(19): siRNA sense strand
agacaacaguguagcuuca

SEQ ID NO: 558296 - RNA, 19 nt, Homo sapiens
  misc_RNA (1)...(19): siRNA sense strand
gagcuggacaauuugauga

SEQ ID NO: 558297 - RNA, 19 nt, Homo sapiens
  misc_RNA (1)...(19): siRNA sense strand
gagccaaggagcagcauau

SEQ ID NO: 558298 - RNA, 19 nt, Homo sapiens
  misc_RNA (1)...(19): siRNA sense strand
gcggacagguuauggacau

SEQ ID NO: 558299 - RNA, 19 nt, Homo sapiens
  misc_RNA (1)...(19): siRNA sense strand
gcccaucgaccucgucauu

SEQ ID NO: 558300 - RNA, 19 nt, Homo sapiens
  misc_RNA (1)...(19): siRNA sense strand
ccaaaguagcaacaaauau

SEQ ID NO: 558301 - RNA, 19 nt, Homo sapiens
  misc_RNA (1)...(19): siRNA sense strand
gcaauacaaguacuaaggu

SEQ ID NO: 558302 - RNA, 19 nt, Homo sapiens
  misc_RNA (1)...(19): siRNA sense strand
gacagguuauggacauuca

SEQ ID NO: 558303 - RNA, 19 nt, Homo sapiens
  misc_RNA (1)...(19): siRNA sense strand
uaguacagcccaugauuga

SEQ ID NO: 558304 - RNA, 19 nt, Homo sapiens
  misc_RNA (1)...(19): siRNA sense strand
caaaucucgcugaccauaa

SEQ ID NO: 558305 - RNA, 19 nt, Homo sapiens
  misc_RNA (1)...(19): siRNA sense strand
gcucuggucuuugagaagu

SEQ ID NO: 558306 - RNA, 19 nt, Homo sapiens
  misc_RNA (1)...(19): siRNA sense strand
cccaaaguagcaacaaaua

SEQ ID NO: 558307 - RNA, 19 nt, Homo sapiens
  misc_RNA (1)...(19): siRNA sense strand
gguccuaugggaaugagua

SEQ ID NO: 558308 - RNA, 19 nt, Homo sapiens
  misc_RNA (1)...(19): siRNA sense strand
caagcaauacaaguacuaa

SEQ ID NO: 558309 - RNA, 19 nt, Homo sapiens
  misc_RNA (1)...(19): siRNA sense strand
aauguuggcggacagguua

SEQ ID NO: 558310 - RNA, 19 nt, Homo sapiens
  misc_RNA (1)...(19): siRNA sense strand
ccaaugcauucauauuugc

SEQ ID NO: 558311 - RNA, 19 nt, Homo sapiens
  misc_RNA (1)...(19): siRNA sense strand
acaaauaucaugagagcau

SEQ ID NO: 558312 - RNA, 19 nt, Homo sapiens
  misc_RNA (1)...(19): siRNA sense strand
acaaaucucgcugaccaua

SEQ ID NO: 558313 - RNA, 19 nt, Homo sapiens
  misc_RNA (1)...(19): siRNA sense strand
acacccuacucaauuaaga

SEQ ID NO: 558314 - RNA, 19 nt, Homo sapiens
  misc_RNA (1)...(19): siRNA sense strand
gaacugugcgauaacuucu

SEQ ID NO: 558315 - RNA, 19 nt, Homo sapiens
  misc_RNA (1)...(19): siRNA sense strand
ccuacucaauuaagacaug

SEQ ID NO: 558316 - RNA, 19 nt, Homo sapiens
  misc_RNA (1)...(19): siRNA sense strand
gacaaggacgcgaucuaug

SEQ ID NO: 558317 - RNA, 19 nt, Homo sapiens
  misc_RNA (1)...(19): siRNA sense strand
ccacacccuacucaauuaa

SEQ ID NO: 558318 - RNA, 19 nt, Homo sapiens
  misc_RNA (1)...(19): siRNA sense strand
uccacgaacugugcgauaa

SEQ ID NO: 558319 - RNA, 19 nt, Homo sapiens
  misc_RNA (1)...(19): siRNA sense strand
gaauaguacagcccaugau

SEQ ID NO: 558320 - RNA, 19 nt, Homo sapiens
  misc_RNA (1)...(19): siRNA sense strand
ccaagucagaucaugaaga

SEQ ID NO: 558321 - RNA, 19 nt, Homo sapiens
  misc_RNA (1)...(19): siRNA sense strand
gcuccaagucagaucauga

SEQ ID NO: 558322 - RNA, 19 nt, Homo sapiens
  misc_RNA (1)...(19): siRNA sense strand
gggacaaggacgcgaucua

SEQ ID NO: 558323 - RNA, 19 nt, Homo sapiens
  misc_RNA (1)...(19): siRNA sense strand
guagcaacaaauaucauga

SEQ ID NO: 558324 - RNA, 19 nt, Homo sapiens
  misc_RNA (1)...(19): siRNA sense strand
accgauacauuagcuguuu

SEQ ID NO: 558325 - RNA, 19 nt, Homo sapiens
  misc_RNA (1)...(19): siRNA sense strand
guuuauuaaugccagaaga

SEQ ID NO: 558326 - RNA, 19 nt, Homo sapiens
  misc_RNA (1)...(19): siRNA sense strand
gcaaggggaugguuuagac

SEQ ID NO: 558327 - RNA, 19 nt, Homo sapiens
  misc_RNA (1)...(19): siRNA sense strand
uaacuucugccaccgauac

SEQ ID NO: 558328 - RNA, 19 nt, Homo sapiens
  misc_RNA (1)...(19): siRNA sense strand
ggacagguuauggacauuc

SEQ ID NO: 558329 - RNA, 19 nt, Homo sapiens
  misc_RNA (1)...(19): siRNA sense strand
aauaguacagcccaugauu

SEQ ID NO: 558330 - RNA, 19 nt, Homo sapiens
  misc_RNA (1)...(19): siRNA sense strand
acaaggacgcgaucuaugg

SEQ ID NO: 558331 - RNA, 19 nt, Homo sapiens
  misc_RNA (1)...(19): siRNA sense strand
aaaucucgcugaccauaac

SEQ ID NO: 558332 - RNA, 19 nt, Homo sapiens
  misc_RNA (1)...(19): siRNA sense strand
caaguacuaagguuucauc

SEQ ID NO: 558333 - RNA, 19 nt, Homo sapiens
  misc_RNA (1)...(19): siRNA sense strand
gccagaagaagaauaguac

SEQ ID NO: 558334 - RNA, 19 nt, Homo sapiens
  misc_RNA (1)...(19): siRNA sense strand
accauaacccuucuucuug

SEQ ID NO: 558335 - RNA, 19 nt, Homo sapiens
  misc_RNA (1)...(19): siRNA sense strand
cgaacugugcgauaacuuc

SEQ ID NO: 558336 - RNA, 19 nt, Homo sapiens
  misc_RNA (1)...(19): siRNA sense strand
ucaggcuccuccacaaauc

SEQ ID NO: 558337 - RNA, 19 nt, Homo sapiens
  misc_RNA (1)...(19): siRNA sense strand
uguguuggauggucagcaa

SEQ ID NO: 558338 - RNA, 19 nt, Homo sapiens
  misc_RNA (1)...(19): siRNA sense strand
gucagaucaugaagaacuu

SEQ ID NO: 558339 - RNA, 19 nt, Homo sapiens
  misc_RNA (1)...(19): siRNA sense strand
agaauaguacagcccauga

SEQ ID NO: 558340 - RNA, 19 nt, Homo sapiens
  misc_RNA (1)...(19): siRNA sense strand
acaagcaauacaaguacua

SEQ ID NO: 558341 - RNA, 19 nt, Homo sapiens
  misc_RNA (1)...(19): siRNA sense strand
acgaugaugauccggauaa

SEQ ID NO: 558342 - RNA, 19 nt, Homo sapiens
  misc_RNA (1)...(19): siRNA sense strand
ugccagaagaagaauagua

SEQ ID NO: 558343 - RNA, 19 nt, Homo sapiens
  misc_RNA (1)...(19): siRNA sense strand
ggucuucgccaagcagguu

SEQ ID NO: 558344 - RNA, 19 nt, Homo sapiens
  misc_RNA (1)...(19): siRNA sense strand
gcggagacaacagcaguga

SEQ ID NO: 558345 - RNA, 19 nt, Homo sapiens
  misc_RNA (1)...(19): siRNA sense strand
auacaaguacuaagguuuc

SEQ ID NO: 558346 - RNA, 19 nt, Homo sapiens
  misc_RNA (1)...(19): siRNA sense strand
agcaacaaauaucaugaga

SEQ ID NO: 558347 - RNA, 19 nt, Homo sapiens
  misc_RNA (1)...(19): siRNA sense strand
gaaaagguccacgaacugu

SEQ ID NO: 558348 - RNA, 19 nt, Homo sapiens
  misc_RNA (1)...(19): siRNA sense strand
caaggagcagcauauaguc

SEQ ID NO: 558349 - RNA, 19 nt, Homo sapiens
  misc_RNA (1)...(19): siRNA sense strand
gccaaggagcagcauauag

SEQ ID NO: 558350 - RNA, 19 nt, Homo sapiens
  misc_RNA (1)...(19): siRNA sense strand
uggacaauuugaugauaca

SEQ ID NO: 558351 - RNA, 19 nt, Homo sapiens
  misc_RNA (1)...(19): siRNA sense strand
gguuucaucuuuuggaguu

SEQ ID NO: 558352 - RNA, 19 nt, Homo sapiens
  misc_RNA (1)...(19): siRNA sense strand
cgauacauuagcuguuuga

SEQ ID NO: 558353 - RNA, 19 nt, Homo sapiens
  misc_RNA (1)...(19): siRNA sense strand
ccgauacauuagcuguuug

SEQ ID NO: 558354 - RNA, 19 nt, Homo sapiens
  misc_RNA (1)...(19): siRNA sense strand
gcagcuccaagucagauca

SEQ ID NO: 558355 - RNA, 19 nt, Homo sapiens
  misc_RNA (1)...(19): siRNA sense strand
caauguuggcggacagguu

SEQ ID NO: 558356 - RNA, 19 nt, Homo sapiens
  misc_RNA (1)...(19): siRNA sense strand
auuaaugccagaagaagaa

SEQ ID NO: 558357 - RNA, 19 nt, Homo sapiens
  misc_RNA (1)...(19): siRNA sense strand
uagaaaagguccacgaacu

SEQ ID NO: 558358 - RNA, 19 nt, Homo sapiens
  misc_RNA (1)...(19): siRNA sense strand
cccacaauguuaaauucug

SEQ ID NO: 558359 - RNA, 19 nt, Homo sapiens
  misc_RNA (1)...(19): siRNA sense strand
ccaccacccagccaugaug

SEQ ID NO: 558360 - RNA, 19 nt, Homo sapiens
  misc_RNA (1)...(19): siRNA sense strand
augaugauccggauaagga

SEQ ID NO: 558361 - RNA, 19 nt, Homo sapiens
  misc_RNA (1)...(19): siRNA sense strand
guacuaagguuucaucuuu

SEQ ID NO: 558362 - RNA, 19 nt, Homo sapiens
  misc_RNA (1)...(19): siRNA sense strand
caagucagaucaugaagaa

SEQ ID NO: 558363 - RNA, 19 nt, Homo sapiens
  misc_RNA (1)...(19): siRNA sense strand
gauacaagcaauacaagua

SEQ ID NO: 558364 - RNA, 19 nt, Homo sapiens
  misc_RNA (1)...(19): siRNA sense strand
caaaguagcaacaaauauc

SEQ ID NO: 558365 - RNA, 19 nt, Homo sapiens
  misc_RNA (1)...(19): siRNA sense strand
gaccauaacccuucuucuu

SEQ ID NO: 558366 - RNA, 19 nt, Homo sapiens
  misc_RNA (1)...(19): siRNA sense strand
ggacaaggacgcgaucuau

SEQ ID NO: 558367 - RNA, 19 nt, Homo sapiens
  misc_RNA (1)...(19): siRNA sense strand
gcuggacaauuugaugaua

SEQ ID NO: 558368 - RNA, 19 nt, Homo sapiens
  misc_RNA (1)...(19): siRNA sense strand
caauacaaguacuaagguu

SEQ ID NO: 558369 - RNA, 19 nt, Homo sapiens
  misc_RNA (1)...(19): siRNA sense strand
ccaucgaccucgucauuga

SEQ ID NO: 558370 - RNA, 19 nt, Homo sapiens
  misc_RNA (1)...(19): siRNA sense strand
gaugauacaagcaauacaa

SEQ ID NO: 558371 - RNA, 19 nt, Homo sapiens
  misc_RNA (1)...(19): siRNA sense strand
guacaggugacgaugauga

SEQ ID NO: 558372 - RNA, 19 nt, Homo sapiens
  misc_RNA (1)...(19): siRNA sense strand
ccaaggagcagcauauagu

SEQ ID NO: 558373 - RNA, 19 nt, Homo sapiens
  misc_RNA (1)...(19): siRNA sense strand
acgaugagcugccccauua

SEQ ID NO: 558374 - RNA, 19 nt, Homo sapiens
  misc_RNA (1)...(19): siRNA sense strand
agacaacaguguagcuuca

SEQ ID NO: 558375 - RNA, 19 nt, Homo sapiens
  misc_RNA (1)...(19): siRNA sense strand
gagcuggacaauuugauga

SEQ ID NO: 558376 - RNA, 19 nt, Homo sapiens
  misc_RNA (1)...(19): siRNA sense strand
gagccaaggagcagcauau

SEQ ID NO: 558377 - RNA, 19 nt, Homo sapiens
  misc_RNA (1)...(19): siRNA sense strand
gcccaucgaccucgucauu

SEQ ID NO: 558378 - RNA, 19 nt, Homo sapiens
  misc_RNA (1)...(19): siRNA sense strand
ccaaaguagcaacaaauau

SEQ ID NO: 558379 - RNA, 19 nt, Homo sapiens
  misc_RNA (1)...(19): siRNA sense strand
gcucuggucuuugagaagu

SEQ ID NO: 558380 - RNA, 19 nt, Homo sapiens
  misc_RNA (1)...(19): siRNA sense strand
uaguacagcccaugauuga

SEQ ID NO: 558381 - RNA, 19 nt, Homo sapiens
  misc_RNA (1)...(19): siRNA sense strand
caaaucucgcugaccauaa

SEQ ID NO: 558382 - RNA, 19 nt, Homo sapiens
  misc_RNA (1)...(19): siRNA sense strand
gcaauacaaguacuaaggu

SEQ ID NO: 558383 - RNA, 19 nt, Homo sapiens
  misc_RNA (1)...(19): siRNA sense strand
cccaaaguagcaacaaaua

SEQ ID NO: 558384 - RNA, 19 nt, Homo sapiens
  misc_RNA (1)...(19): siRNA sense strand
caagcaauacaaguacuaa

SEQ ID NO: 558385 - RNA, 19 nt, Homo sapiens
  misc_RNA (1)...(19): siRNA sense strand
acaaauaucaugagagcau

SEQ ID NO: 558386 - RNA, 19 nt, Homo sapiens
  misc_RNA (1)...(19): siRNA sense strand
acaaaucucgcugaccaua

SEQ ID NO: 558387 - RNA, 19 nt, Homo sapiens
  misc_RNA (1)...(19): siRNA sense strand
gaacugugcgauaacuucu

SEQ ID NO: 558388 - RNA, 19 nt, Homo sapiens
  misc_RNA (1)...(19): siRNA sense strand
gacaaggacgcgaucuaug

SEQ ID NO: 558389 - RNA, 19 nt, Homo sapiens
  misc_RNA (1)...(19): siRNA sense strand
uccacgaacugugcgauaa

SEQ ID NO: 558390 - RNA, 19 nt, Homo sapiens
  misc_RNA (1)...(19): siRNA sense strand
gaauaguacagcccaugau

SEQ ID NO: 558391 - RNA, 19 nt, Homo sapiens
  misc_RNA (1)...(19): siRNA sense strand
ccaagucagaucaugaaga

SEQ ID NO: 558392 - RNA, 19 nt, Homo sapiens
  misc_RNA (1)...(19): siRNA sense strand
gcuccaagucagaucauga

SEQ ID NO: 558393 - RNA, 19 nt, Homo sapiens
  misc_RNA (1)...(19): siRNA sense strand
gggacaaggacgcgaucua

SEQ ID NO: 558394 - RNA, 19 nt, Homo sapiens
  misc_RNA (1)...(19): siRNA sense strand
guagcaacaaauaucauga

SEQ ID NO: 558395 - RNA, 19 nt, Homo sapiens
  misc_RNA (1)...(19): siRNA sense strand
accgauacauuagcuguuu

SEQ ID NO: 558396 - RNA, 19 nt, Homo sapiens
  misc_RNA (1)...(19): siRNA sense strand
guuuauuaaugccagaaga

SEQ ID NO: 558397 - RNA, 19 nt, Homo sapiens
  misc_RNA (1)...(19): siRNA sense strand
gcaaggggaugguuuagac

SEQ ID NO: 558398 - RNA, 19 nt, Homo sapiens
  misc_RNA (1)...(19): siRNA sense strand
uaacuucugccaccgauac

SEQ ID NO: 558399 - RNA, 19 nt, Homo sapiens
  misc_RNA (1)...(19): siRNA sense strand
aauaguacagcccaugauu

SEQ ID NO: 558400 - RNA, 19 nt, Homo sapiens
  misc_RNA (1)...(19): siRNA sense strand
acaaggacgcgaucuaugg

SEQ ID NO: 558401 - RNA, 19 nt, Homo sapiens
  misc_RNA (1)...(19): siRNA sense strand
aaaucucgcugaccauaac

SEQ ID NO: 558402 - RNA, 19 nt, Homo sapiens
  misc_RNA (1)...(19): siRNA sense strand
caaguacuaagguuucauc

SEQ ID NO: 558403 - RNA, 19 nt, Homo sapiens
  misc_RNA (1)...(19): siRNA sense strand
gccagaagaagaauaguac

SEQ ID NO: 558404 - RNA, 19 nt, Homo sapiens
  misc_RNA (1)...(19): siRNA sense strand
accauaacccuucuucuug

SEQ ID NO: 558405 - RNA, 19 nt, Homo sapiens
  misc_RNA (1)...(19): siRNA sense strand
cgaacugugcgauaacuuc

SEQ ID NO: 558406 - RNA, 19 nt, Homo sapiens
  misc_RNA (1)...(19): siRNA sense strand
ucaggcuccuccacaaauc

SEQ ID NO: 558407 - RNA, 19 nt, Homo sapiens
  misc_RNA (1)...(19): siRNA sense strand
uguguuggauggucagcaa

SEQ ID NO: 558408 - RNA, 19 nt, Homo sapiens
  misc_RNA (1)...(19): siRNA sense strand
acaagcaauacaaguacua

SEQ ID NO: 558409 - RNA, 19 nt, Homo sapiens
  misc_RNA (1)...(19): siRNA sense strand
agaauaguacagcccauga

SEQ ID NO: 558410 - RNA, 19 nt, Homo sapiens
  misc_RNA (1)...(19): siRNA sense strand
gucagaucaugaagaacuu

SEQ ID NO: 558411 - RNA, 19 nt, Homo sapiens
  misc_RNA (1)...(19): siRNA sense strand
ggucuucgccaagcagguu

SEQ ID NO: 558412 - RNA, 19 nt, Homo sapiens
  misc_RNA (1)...(19): siRNA sense strand
ugccagaagaagaauagua

SEQ ID NO: 558413 - RNA, 19 nt, Homo sapiens
  misc_RNA (1)...(19): siRNA sense strand
acgaugaugauccggauaa

SEQ ID NO: 558414 - RNA, 19 nt, Homo sapiens
  misc_RNA (1)...(19): siRNA sense strand
auacaaguacuaagguuuc

SEQ ID NO: 558415 - RNA, 19 nt, Homo sapiens
  misc_RNA (1)...(19): siRNA sense strand
agcaacaaauaucaugaga

SEQ ID NO: 558416 - RNA, 19 nt, Homo sapiens
  misc_RNA (1)...(19): siRNA sense strand
gcggagacaacagcaguga

SEQ ID NO: 558417 - RNA, 19 nt, Homo sapiens
  misc_RNA (1)...(19): siRNA sense strand
gguuucaucuuuuggaguu

SEQ ID NO: 558418 - RNA, 19 nt, Homo sapiens
  misc_RNA (1)...(19): siRNA sense strand
caaggagcagcauauaguc

SEQ ID NO: 558419 - RNA, 19 nt, Homo sapiens
  misc_RNA (1)...(19): siRNA sense strand
gccaaggagcagcauauag

SEQ ID NO: 558420 - RNA, 19 nt, Homo sapiens
  misc_RNA (1)...(19): siRNA sense strand
cgauacauuagcuguuuga

SEQ ID NO: 558421 - RNA, 19 nt, Homo sapiens
  misc_RNA (1)...(19): siRNA sense strand
ccgauacauuagcuguuug

SEQ ID NO: 558422 - RNA, 19 nt, Homo sapiens
  misc_RNA (1)...(19): siRNA sense strand
uggacaauuugaugauaca

SEQ ID NO: 558423 - RNA, 19 nt, Homo sapiens
  misc_RNA (1)...(19): siRNA sense strand
gaaaagguccacgaacugu

SEQ ID NO: 558424 - RNA, 19 nt, Homo sapiens
  misc_RNA (1)...(19): siRNA sense strand
gcagcuccaagucagauca

SEQ ID NO: 558425 - RNA, 19 nt, Homo sapiens
  misc_RNA (1)...(19): siRNA sense strand
auuaaugccagaagaagaa

SEQ ID NO: 558426 - RNA, 19 nt, Homo sapiens
  misc_RNA (1)...(19): siRNA sense strand
uagaaaagguccacgaacu

SEQ ID NO: 558427 - RNA, 19 nt, Homo sapiens
  misc_RNA (1)...(19): siRNA sense strand
augaugauccggauaagga

SEQ ID NO: 558428 - RNA, 19 nt, Homo sapiens
  misc_RNA (1)...(19): siRNA sense strand
guacuaagguuucaucuuu

SEQ ID NO: 558429 - RNA, 19 nt, Homo sapiens
  misc_RNA (1)...(19): siRNA sense strand
caagucagaucaugaagaa

SEQ ID NO: 558430 - RNA, 19 nt, Homo sapiens
  misc_RNA (1)...(19): siRNA sense strand
gauacaagcaauacaagua

SEQ ID NO: 558431 - RNA, 19 nt, Homo sapiens
  misc_RNA (1)...(19): siRNA sense strand
caaaguagcaacaaauauc

SEQ ID NO: 558432 - RNA, 19 nt, Homo sapiens
  misc_RNA (1)...(19): siRNA sense strand
gaccauaacccuucuucuu

SEQ ID NO: 558433 - RNA, 19 nt, Homo sapiens
  misc_RNA (1)...(19): siRNA sense strand
ggacaaggacgcgaucuau

SEQ ID NO: 558434 - RNA, 19 nt, Homo sapiens
  misc_RNA (1)...(19): siRNA sense strand
gcuggacaauuugaugaua

SEQ ID NO: 558435 - RNA, 19 nt, Homo sapiens
  misc_RNA (1)...(19): siRNA sense strand
caauacaaguacuaagguu

SEQ ID NO: 558436 - RNA, 19 nt, Homo sapiens
  misc_RNA (1)...(19): siRNA sense strand
ccaucgaccucgucauuga

SEQ ID NO: 558437 - RNA, 19 nt, Homo sapiens
  misc_RNA (1)...(19): siRNA sense strand
gaugauacaagcaauacaa

SEQ ID NO: 558438 - RNA, 19 nt, Homo sapiens
  misc_RNA (1)...(19): siRNA sense strand
guacaggugacgaugauga

SEQ ID NO: 558439 - RNA, 19 nt, Homo sapiens
  misc_RNA (1)...(19): siRNA sense strand
ccaaggagcagcauauagu

SEQ ID NO: 558440 - RNA, 19 nt, Homo sapiens
  misc_RNA (1)...(19): siRNA sense strand
agacaacaguguagcuuca

SEQ ID NO: 558441 - RNA, 19 nt, Homo sapiens
  misc_RNA (1)...(19): siRNA sense strand
gagcuggacaauuugauga

SEQ ID NO: 558442 - RNA, 19 nt, Homo sapiens
  misc_RNA (1)...(19): siRNA sense strand
gagccaaggagcagcauau

SEQ ID NO: 558443 - RNA, 19 nt, Homo sapiens
  misc_RNA (1)...(19): siRNA sense strand
gcccaucgaccucgucauu

SEQ ID NO: 558444 - RNA, 19 nt, Homo sapiens
  misc_RNA (1)...(19): siRNA sense strand
ccaaaguagcaacaaauau

SEQ ID NO: 558445 - RNA, 19 nt, Homo sapiens
  misc_RNA (1)...(19): siRNA sense strand
gcucuggucuuugagaagu

SEQ ID NO: 558446 - RNA, 19 nt, Homo sapiens
  misc_RNA (1)...(19): siRNA sense strand
uaguacagcccaugauuga

SEQ ID NO: 558447 - RNA, 19 nt, Homo sapiens
  misc_RNA (1)...(19): siRNA sense strand
caaaucucgcugaccauaa

SEQ ID NO: 558448 - RNA, 19 nt, Homo sapiens
  misc_RNA (1)...(19): siRNA sense strand
gcaauacaaguacuaaggu

SEQ ID NO: 558449 - RNA, 19 nt, Homo sapiens
  misc_RNA (1)...(19): siRNA sense strand
cccaaaguagcaacaaaua

SEQ ID NO: 558450 - RNA, 19 nt, Homo sapiens
  misc_RNA (1)...(19): siRNA sense strand
caagcaauacaaguacuaa

SEQ ID NO: 558451 - RNA, 19 nt, Homo sapiens
  misc_RNA (1)...(19): siRNA sense strand
acaaauaucaugagagcau

SEQ ID NO: 558452 - RNA, 19 nt, Homo sapiens
  misc_RNA (1)...(19): siRNA sense strand
acaaaucucgcugaccaua

SEQ ID NO: 558453 - RNA, 19 nt, Homo sapiens
  misc_RNA (1)...(19): siRNA sense strand
gaacugugcgauaacuucu

SEQ ID NO: 558454 - RNA, 19 nt, Homo sapiens
  misc_RNA (1)...(19): siRNA sense strand
gacaaggacgcgaucuaug

SEQ ID NO: 558455 - RNA, 19 nt, Homo sapiens
  misc_RNA (1)...(19): siRNA sense strand
uccacgaacugugcgauaa

SEQ ID NO: 558456 - RNA, 19 nt, Homo sapiens
  misc_RNA (1)...(19): siRNA sense strand
gaauaguacagcccaugau

SEQ ID NO: 558457 - RNA, 19 nt, Homo sapiens
  misc_RNA (1)...(19): siRNA sense strand
ccaagucagaucaugaaga

SEQ ID NO: 558458 - RNA, 19 nt, Homo sapiens
  misc_RNA (1)...(19): siRNA sense strand
gcuccaagucagaucauga

SEQ ID NO: 558459 - RNA, 19 nt, Homo sapiens
  misc_RNA (1)...(19): siRNA sense strand
gggacaaggacgcgaucua

SEQ ID NO: 558460 - RNA, 19 nt, Homo sapiens
  misc_RNA (1)...(19): siRNA sense strand
guagcaacaaauaucauga

SEQ ID NO: 558461 - RNA, 19 nt, Homo sapiens
  misc_RNA (1)...(19): siRNA sense strand
accgauacauuagcuguuu

SEQ ID NO: 558462 - RNA, 19 nt, Homo sapiens
  misc_RNA (1)...(19): siRNA sense strand
guuuauuaaugccagaaga

SEQ ID NO: 558463 - RNA, 19 nt, Homo sapiens
  misc_RNA (1)...(19): siRNA sense strand
gcaaggggaugguuuagac

SEQ ID NO: 558464 - RNA, 19 nt, Homo sapiens
  misc_RNA (1)...(19): siRNA sense strand
uaacuucugccaccgauac

SEQ ID NO: 558465 - RNA, 19 nt, Homo sapiens
  misc_RNA (1)...(19): siRNA sense strand
aauaguacagcccaugauu

SEQ ID NO: 558466 - RNA, 19 nt, Homo sapiens
  misc_RNA (1)...(19): siRNA sense strand
aaaucucgcugaccauaac

SEQ ID NO: 558467 - RNA, 19 nt, Homo sapiens
  misc_RNA (1)...(19): siRNA sense strand
acaaggacgcgaucuaugg

SEQ ID NO: 558468 - RNA, 19 nt, Homo sapiens
  misc_RNA (1)...(19): siRNA sense strand
caaguacuaagguuucauc

SEQ ID NO: 558469 - RNA, 19 nt, Homo sapiens
  misc_RNA (1)...(19): siRNA sense strand
gccagaagaagaauaguac

SEQ ID NO: 558470 - RNA, 19 nt, Homo sapiens
  misc_RNA (1)...(19): siRNA sense strand
accauaacccuucuucuug

SEQ ID NO: 558471 - RNA, 19 nt, Homo sapiens
  misc_RNA (1)...(19): siRNA sense strand
cgaacugugcgauaacuuc

SEQ ID NO: 558472 - RNA, 19 nt, Homo sapiens
  misc_RNA (1)...(19): siRNA sense strand
ucaggcuccuccacaaauc

SEQ ID NO: 558473 - RNA, 19 nt, Homo sapiens
  misc_RNA (1)...(19): siRNA sense strand
uguguuggauggucagcaa

SEQ ID NO: 558474 - RNA, 19 nt, Homo sapiens
  misc_RNA (1)...(19): siRNA sense strand
acaagcaauacaaguacua

SEQ ID NO: 558475 - RNA, 19 nt, Homo sapiens
  misc_RNA (1)...(19): siRNA sense strand
agaauaguacagcccauga

SEQ ID NO: 558476 - RNA, 19 nt, Homo sapiens
  misc_RNA (1)...(19): siRNA sense strand
gucagaucaugaagaacuu

SEQ ID NO: 558477 - RNA, 19 nt, Homo sapiens
  misc_RNA (1)...(19): siRNA sense strand
ggucuucgccaagcagguu

SEQ ID NO: 558478 - RNA, 19 nt, Homo sapiens
  misc_RNA (1)...(19): siRNA sense strand
ugccagaagaagaauagua

SEQ ID NO: 558479 - RNA, 19 nt, Homo sapiens
  misc_RNA (1)...(19): siRNA sense strand
acgaugaugauccggauaa

SEQ ID NO: 558480 - RNA, 19 nt, Homo sapiens
  misc_RNA (1)...(19): siRNA sense strand
auacaaguacuaagguuuc

SEQ ID NO: 558481 - RNA, 19 nt, Homo sapiens
  misc_RNA (1)...(19): siRNA sense strand
agcaacaaauaucaugaga

SEQ ID NO: 558482 - RNA, 19 nt, Homo sapiens
  misc_RNA (1)...(19): siRNA sense strand
gcggagacaacagcaguga

SEQ ID NO: 558483 - RNA, 19 nt, Homo sapiens
  misc_RNA (1)...(19): siRNA sense strand
gguuucaucuuuuggaguu

SEQ ID NO: 558484 - RNA, 19 nt, Homo sapiens
  misc_RNA (1)...(19): siRNA sense strand
caaggagcagcauauaguc

SEQ ID NO: 558485 - RNA, 19 nt, Homo sapiens
  misc_RNA (1)...(19): siRNA sense strand
gccaaggagcagcauauag

SEQ ID NO: 558486 - RNA, 19 nt, Homo sapiens
  misc_RNA (1)...(19): siRNA sense strand
uggacaauuugaugauaca

SEQ ID NO: 558487 - RNA, 19 nt, Homo sapiens
  misc_RNA (1)...(19): siRNA sense strand
cgauacauuagcuguuuga

SEQ ID NO: 558488 - RNA, 19 nt, Homo sapiens
  misc_RNA (1)...(19): siRNA sense strand
ccgauacauuagcuguuug

SEQ ID NO: 558489 - RNA, 19 nt, Homo sapiens
  misc_RNA (1)...(19): siRNA sense strand
gaaaagguccacgaacugu

SEQ ID NO: 558490 - RNA, 19 nt, Homo sapiens
  misc_RNA (1)...(19): siRNA sense strand
gcagcuccaagucagauca

SEQ ID NO: 558491 - RNA, 19 nt, Homo sapiens
  misc_RNA (1)...(19): siRNA sense strand
auuaaugccagaagaagaa

SEQ ID NO: 558492 - RNA, 19 nt, Homo sapiens
  misc_RNA (1)...(19): siRNA sense strand
uagaaaagguccacgaacu

SEQ ID NO: 558493 - RNA, 19 nt, Homo sapiens
  misc_RNA (1)...(19): siRNA sense strand
augaugauccggauaagga

SEQ ID NO: 558494 - RNA, 19 nt, Homo sapiens
  misc_RNA (1)...(19): siRNA sense strand
guacuaagguuucaucuuu

SEQ ID NO: 558495 - RNA, 19 nt, Homo sapiens
  misc_RNA (1)...(19): siRNA sense strand
caagucagaucaugaagaa

SEQ ID NO: 558496 - RNA, 19 nt, Homo sapiens
  misc_RNA (1)...(19): siRNA sense strand
gauacaagcaauacaagua

SEQ ID NO: 558497 - RNA, 19 nt, Homo sapiens
  misc_RNA (1)...(19): siRNA sense strand
caaaguagcaacaaauauc

SEQ ID NO: 558498 - RNA, 19 nt, Homo sapiens
  misc_RNA (1)...(19): siRNA sense strand
gaccauaacccuucuucuu

SEQ ID NO: 558499 - RNA, 19 nt, Homo sapiens
  misc_RNA (1)...(19): siRNA sense strand
gcuggacaauuugaugaua

SEQ ID NO: 558500 - RNA, 19 nt, Homo sapiens
  misc_RNA (1)...(19): siRNA sense strand
caauacaaguacuaagguu

SEQ ID NO: 558501 - RNA, 19 nt, Homo sapiens
  misc_RNA (1)...(19): siRNA sense strand
ccaucgaccucgucauuga

SEQ ID NO: 558502 - RNA, 19 nt, Homo sapiens
  misc_RNA (1)...(19): siRNA sense strand
gaugauacaagcaauacaa

SEQ ID NO: 558503 - RNA, 19 nt, Homo sapiens
  misc_RNA (1)...(19): siRNA sense strand
guacaggugacgaugauga

SEQ ID NO: 558504 - RNA, 19 nt, Homo sapiens
  misc_RNA (1)...(19): siRNA sense strand
ccaaggagcagcauauagu

SEQ ID NO: 558505 - RNA, 19 nt, Homo sapiens
  misc_RNA (1)...(19): siRNA sense strand
agacaacaguguagcuuca

SEQ ID NO: 558506 - RNA, 19 nt, Homo sapiens
  misc_RNA (1)...(19): siRNA sense strand
gagcuggacaauuugauga

SEQ ID NO: 558507 - RNA, 19 nt, Homo sapiens
  misc_RNA (1)...(19): siRNA sense strand
gagccaaggagcagcauau

SEQ ID NO: 558508 - RNA, 19 nt, Homo sapiens
  misc_RNA (1)...(19): siRNA sense strand
gcccaucgaccucgucauu

SEQ ID NO: 558509 - RNA, 19 nt, Homo sapiens
  misc_RNA (1)...(19): siRNA sense strand
ccaaaguagcaacaaauau

SEQ ID NO: 558510 - RNA, 19 nt, Homo sapiens
  misc_RNA (1)...(19): siRNA sense strand
gcaauacaaguacuaaggu

SEQ ID NO: 558511 - RNA, 19 nt, Homo sapiens
  misc_RNA (1)...(19): siRNA sense strand
uaguacagcccaugauuga

SEQ ID NO: 558512 - RNA, 19 nt, Homo sapiens
  misc_RNA (1)...(19): siRNA sense strand
caaaucucgcugaccauaa

SEQ ID NO: 558513 - RNA, 19 nt, Homo sapiens
  misc_RNA (1)...(19): siRNA sense strand
gcucuggucuuugagaagu

SEQ ID NO: 558514 - RNA, 19 nt, Homo sapiens
  misc_RNA (1)...(19): siRNA sense strand
cccaaaguagcaacaaaua

SEQ ID NO: 558515 - RNA, 19 nt, Homo sapiens
  misc_RNA (1)...(19): siRNA sense strand
caagcaauacaaguacuaa

SEQ ID NO: 558516 - RNA, 19 nt, Homo sapiens
  misc_RNA (1)...(19): siRNA sense strand
acaaauaucaugagagcau

SEQ ID NO: 558517 - RNA, 19 nt, Homo sapiens
  misc_RNA (1)...(19): siRNA sense strand
acaaaucucgcugaccaua

SEQ ID NO: 558518 - RNA, 19 nt, Homo sapiens
  misc_RNA (1)...(19): siRNA sense strand
gaacugugcgauaacuucu

SEQ ID NO: 558519 - RNA, 19 nt, Homo sapiens
  misc_RNA (1)...(19): siRNA sense strand
uccacgaacugugcgauaa

SEQ ID NO: 558520 - RNA, 19 nt, Homo sapiens
  misc_RNA (1)...(19): siRNA sense strand
gaauaguacagcccaugau

SEQ ID NO: 558521 - RNA, 19 nt, Homo sapiens
  misc_RNA (1)...(19): siRNA sense strand
ccaagucagaucaugaaga

SEQ ID NO: 558522 - RNA, 19 nt, Homo sapiens
  misc_RNA (1)...(19): siRNA sense strand
gcuccaagucagaucauga

SEQ ID NO: 558523 - RNA, 19 nt, Homo sapiens
  misc_RNA (1)...(19): siRNA sense strand
guagcaacaaauaucauga

SEQ ID NO: 558524 - RNA, 19 nt, Homo sapiens
  misc_RNA (1)...(19): siRNA sense strand
accgauacauuagcuguuu

SEQ ID NO: 558525 - RNA, 19 nt, Homo sapiens
  misc_RNA (1)...(19): siRNA sense strand
guuuauuaaugccagaaga

SEQ ID NO: 558526 - RNA, 19 nt, Homo sapiens
  misc_RNA (1)...(19): siRNA sense strand
gcaaggggaugguuuagac

SEQ ID NO: 558527 - RNA, 19 nt, Homo sapiens
  misc_RNA (1)...(19): siRNA sense strand
uaacuucugccaccgauac

SEQ ID NO: 558528 - RNA, 19 nt, Homo sapiens
  misc_RNA (1)...(19): siRNA sense strand
aauaguacagcccaugauu

SEQ ID NO: 558529 - RNA, 19 nt, Homo sapiens
  misc_RNA (1)...(19): siRNA sense strand
aaaucucgcugaccauaac

SEQ ID NO: 558530 - RNA, 19 nt, Homo sapiens
  misc_RNA (1)...(19): siRNA sense strand
caaguacuaagguuucauc

SEQ ID NO: 558531 - RNA, 19 nt, Homo sapiens
  misc_RNA (1)...(19): siRNA sense strand
gccagaagaagaauaguac

SEQ ID NO: 558532 - RNA, 19 nt, Homo sapiens
  misc_RNA (1)...(19): siRNA sense strand
accauaacccuucuucuug

SEQ ID NO: 558533 - RNA, 19 nt, Homo sapiens
  misc_RNA (1)...(19): siRNA sense strand
cgaacugugcgauaacuuc

SEQ ID NO: 558534 - RNA, 19 nt, Homo sapiens
  misc_RNA (1)...(19): siRNA sense strand
ucaggcuccuccacaaauc

SEQ ID NO: 558535 - RNA, 19 nt, Homo sapiens
  misc_RNA (1)...(19): siRNA sense strand
uguguuggauggucagcaa

SEQ ID NO: 558536 - RNA, 19 nt, Homo sapiens
  misc_RNA (1)...(19): siRNA sense strand
gucagaucaugaagaacuu

SEQ ID NO: 558537 - RNA, 19 nt, Homo sapiens
  misc_RNA (1)...(19): siRNA sense strand
agaauaguacagcccauga

SEQ ID NO: 558538 - RNA, 19 nt, Homo sapiens
  misc_RNA (1)...(19): siRNA sense strand
acaagcaauacaaguacua

SEQ ID NO: 558539 - RNA, 19 nt, Homo sapiens
  misc_RNA (1)...(19): siRNA sense strand
acgaugaugauccggauaa

SEQ ID NO: 558540 - RNA, 19 nt, Homo sapiens
  misc_RNA (1)...(19): siRNA sense strand
ggucuucgccaagcagguu

SEQ ID NO: 558541 - RNA, 19 nt, Homo sapiens
  misc_RNA (1)...(19): siRNA sense strand
ugccagaagaagaauagua

SEQ ID NO: 558542 - RNA, 19 nt, Homo sapiens
  misc_RNA (1)...(19): siRNA sense strand
auacaaguacuaagguuuc

SEQ ID NO: 558543 - RNA, 19 nt, Homo sapiens
  misc_RNA (1)...(19): siRNA sense strand
agcaacaaauaucaugaga

SEQ ID NO: 558544 - RNA, 19 nt, Homo sapiens
  misc_RNA (1)...(19): siRNA sense strand
gcggagacaacagcaguga

SEQ ID NO: 558545 - RNA, 19 nt, Homo sapiens
  misc_RNA (1)...(19): siRNA sense strand
ccgauacauuagcuguuug

SEQ ID NO: 558546 - RNA, 19 nt, Homo sapiens
  misc_RNA (1)...(19): siRNA sense strand
caaggagcagcauauaguc

SEQ ID NO: 558547 - RNA, 19 nt, Homo sapiens
  misc_RNA (1)...(19): siRNA sense strand
gguuucaucuuuuggaguu

SEQ ID NO: 558548 - RNA, 19 nt, Homo sapiens
  misc_RNA (1)...(19): siRNA sense strand
gccaaggagcagcauauag

SEQ ID NO: 558549 - RNA, 19 nt, Homo sapiens
  misc_RNA (1)...(19): siRNA sense strand
uggacaauuugaugauaca

SEQ ID NO: 558550 - RNA, 19 nt, Homo sapiens
  misc_RNA (1)...(19): siRNA sense strand
gaaaagguccacgaacugu

SEQ ID NO: 558551 - RNA, 19 nt, Homo sapiens
  misc_RNA (1)...(19): siRNA sense strand
cgauacauuagcuguuuga

SEQ ID NO: 558552 - RNA, 19 nt, Homo sapiens
  misc_RNA (1)...(19): siRNA sense strand
gcagcuccaagucagauca

SEQ ID NO: 558553 - RNA, 19 nt, Homo sapiens
  misc_RNA (1)...(19): siRNA sense strand
auuaaugccagaagaagaa

SEQ ID NO: 558554 - RNA, 19 nt, Homo sapiens
  misc_RNA (1)...(19): siRNA sense strand
augaugauccggauaagga

SEQ ID NO: 558555 - RNA, 19 nt, Homo sapiens
  misc_RNA (1)...(19): siRNA sense strand
uagaaaagguccacgaacu

SEQ ID NO: 558556 - RNA, 19 nt, Homo sapiens
  misc_RNA (1)...(19): siRNA sense strand
gcacuuaccugaaauguuc

SEQ ID NO: 558557 - RNA, 19 nt, Homo sapiens
  misc_RNA (1)...(19): siRNA sense strand
gaagaaacauuaccaaggu

SEQ ID NO: 558558 - RNA, 19 nt, Homo sapiens
  misc_RNA (1)...(19): siRNA sense strand
ggaaggaaguauugagauu

SEQ ID NO: 558559 - RNA, 19 nt, Homo sapiens
  misc_RNA (1)...(19): siRNA sense strand
gcaugcagauugaagauaa

SEQ ID NO: 558560 - RNA, 19 nt, Homo sapiens
  misc_RNA (1)...(19): siRNA sense strand
ggaauuugcugaacuuugu

SEQ ID NO: 558561 - RNA, 19 nt, Homo sapiens
  misc_RNA (1)...(19): siRNA sense strand
gaaauguucuguuaaugga

SEQ ID NO: 558562 - RNA, 19 nt, Homo sapiens
  misc_RNA (1)...(19): siRNA sense strand
gaaauuccaugcauguaga

SEQ ID NO: 558563 - RNA, 19 nt, Homo sapiens
  misc_RNA (1)...(19): siRNA sense strand
ccagaaacaugacucuuaa

SEQ ID NO: 558564 - RNA, 19 nt, Homo sapiens
  misc_RNA (1)...(19): siRNA sense strand
gaacaagaauuucaagaac

SEQ ID NO: 558565 - RNA, 19 nt, Homo sapiens
  misc_RNA (1)...(19): siRNA sense strand
gggagaagcugcagucaga

SEQ ID NO: 558566 - RNA, 19 nt, Homo sapiens
  misc_RNA (1)...(19): siRNA sense strand
cagcagagcuaccuaucua

SEQ ID NO: 558567 - RNA, 19 nt, Homo sapiens
  misc_RNA (1)...(19): siRNA sense strand
gaagaagacugaauaucuc

SEQ ID NO: 558568 - RNA, 19 nt, Homo sapiens
  misc_RNA (1)...(19): siRNA sense strand
gcaaugcuguguacuuguu

SEQ ID NO: 558569 - RNA, 19 nt, Homo sapiens
  misc_RNA (1)...(19): siRNA sense strand
caacagacacacuccuuua

SEQ ID NO: 558570 - RNA, 19 nt, Homo sapiens
  misc_RNA (1)...(19): siRNA sense strand
uaccugaaauguucuguua

SEQ ID NO: 558571 - RNA, 19 nt, Homo sapiens
  misc_RNA (1)...(19): siRNA sense strand
ggaagaagacugaauaucu

SEQ ID NO: 558572 - RNA, 19 nt, Homo sapiens
  misc_RNA (1)...(19): siRNA sense strand
gagauucccucaugguuau

SEQ ID NO: 558573 - RNA, 19 nt, Homo sapiens
  misc_RNA (1)...(19): siRNA sense strand
gaacacgccaggagaauug

SEQ ID NO: 558574 - RNA, 19 nt, Homo sapiens
  misc_RNA (1)...(19): siRNA sense strand
gaaugaggauuguuagauc

SEQ ID NO: 558575 - RNA, 19 nt, Homo sapiens
  misc_RNA (1)...(19): siRNA sense strand
ggagauucccucaugguua

SEQ ID NO: 558576 - RNA, 19 nt, Homo sapiens
  misc_RNA (1)...(19): siRNA sense strand
cagaagauccuagcaauaa

SEQ ID NO: 558577 - RNA, 19 nt, Homo sapiens
  misc_RNA (1)...(19): siRNA sense strand
gagagaagauuccuuugag

SEQ ID NO: 558578 - RNA, 19 nt, Homo sapiens
  misc_RNA (1)...(19): siRNA sense strand
gagcacauccaaauccaua

SEQ ID NO: 558579 - RNA, 19 nt, Homo sapiens
  misc_RNA (1)...(19): siRNA sense strand
caccaacauugacuucuua

SEQ ID NO: 558580 - RNA, 19 nt, Homo sapiens
  misc_RNA (1)...(19): siRNA sense strand
cuucgaagcuagaauauau

SEQ ID NO: 558581 - RNA, 19 nt, Homo sapiens
  misc_RNA (1)...(19): siRNA sense strand
agacugcacuuaccugaaa

SEQ ID NO: 558582 - RNA, 19 nt, Homo sapiens
  misc_RNA (1)...(19): siRNA sense strand
ggaggaagaaucagacaaa

SEQ ID NO: 558583 - RNA, 19 nt, Homo sapiens
  misc_RNA (1)...(19): siRNA sense strand
gcaaacagaggagaaauug

SEQ ID NO: 558584 - RNA, 19 nt, Homo sapiens
  misc_RNA (1)...(19): siRNA sense strand
ggaaaacacuauuuaccua

SEQ ID NO: 558585 - RNA, 19 nt, Homo sapiens
  misc_RNA (1)...(19): siRNA sense strand
gcagaagauccuagcaaua

SEQ ID NO: 558586 - RNA, 19 nt, Homo sapiens
  misc_RNA (1)...(19): siRNA sense strand
ggagagaagauuccuuuga

SEQ ID NO: 558587 - RNA, 19 nt, Homo sapiens
  misc_RNA (1)...(19): siRNA sense strand
gcuauccugucaugauuaa

SEQ ID NO: 558588 - RNA, 19 nt, Homo sapiens
  misc_RNA (1)...(19): siRNA sense strand
ccauagcuguaacguauaa

SEQ ID NO: 558589 - RNA, 19 nt, Homo sapiens
  misc_RNA (1)...(19): siRNA sense strand
uuaauggaguugcuaguaa

SEQ ID NO: 558590 - RNA, 19 nt, Homo sapiens
  misc_RNA (1)...(19): siRNA sense strand
cauaaagucuccaaaggau

SEQ ID NO: 558591 - RNA, 19 nt, Homo sapiens
  misc_RNA (1)...(19): siRNA sense strand
ccaaauacuuaucuucugu

SEQ ID NO: 558592 - RNA, 19 nt, Homo sapiens
  misc_RNA (1)...(19): siRNA sense strand
gaucagaacaagaauuuca

SEQ ID NO: 558593 - RNA, 19 nt, Homo sapiens
  misc_RNA (1)...(19): siRNA sense strand
gaucaauucucuccauuuu

SEQ ID NO: 558594 - RNA, 19 nt, Homo sapiens
  misc_RNA (1)...(19): siRNA sense strand
aaaggaaugaggauuguua

SEQ ID NO: 558595 - RNA, 19 nt, Homo sapiens
  misc_RNA (1)...(19): siRNA sense strand
uaauggaguugcuaguaaa

SEQ ID NO: 558596 - RNA, 19 nt, Homo sapiens
  misc_RNA (1)...(19): siRNA sense strand
gagagaagcuaagaagucu

SEQ ID NO: 558597 - RNA, 19 nt, Homo sapiens
  misc_RNA (1)...(19): siRNA sense strand
gcuguguacuuguuugaaa

SEQ ID NO: 558598 - RNA, 19 nt, Homo sapiens
  misc_RNA (1)...(19): siRNA sense strand
guaaagcgaagcugauuau

SEQ ID NO: 558599 - RNA, 19 nt, Homo sapiens
  misc_RNA (1)...(19): siRNA sense strand
cugcuaaagcuguaaauua

SEQ ID NO: 558600 - RNA, 19 nt, Homo sapiens
  misc_RNA (1)...(19): siRNA sense strand
ugacagaaauuccaugcau

SEQ ID NO: 558601 - RNA, 19 nt, Homo sapiens
  misc_RNA (1)...(19): siRNA sense strand
ccaagguccucauugcaaa

SEQ ID NO: 558602 - RNA, 19 nt, Homo sapiens
  misc_RNA (1)...(19): siRNA sense strand
agaauuggcuauccuguca

SEQ ID NO: 558603 - RNA, 19 nt, Homo sapiens
  misc_RNA (1)...(19): siRNA sense strand
gaagacugaauaucucgua

SEQ ID NO: 558604 - RNA, 19 nt, Homo sapiens
  misc_RNA (1)...(19): siRNA sense strand
gcagggccaugccuucgaa

SEQ ID NO: 558605 - RNA, 19 nt, Homo sapiens
  misc_RNA (1)...(19): siRNA sense strand
ggagagaagcuaagaaguc

SEQ ID NO: 558606 - RNA, 19 nt, Homo sapiens
  misc_RNA (1)...(19): siRNA sense strand
ggaacgugcacacugauuu

SEQ ID NO: 558607 - RNA, 19 nt, Homo sapiens
  misc_RNA (1)...(19): siRNA sense strand
caauguagccauagcugua

SEQ ID NO: 558608 - RNA, 19 nt, Homo sapiens
  misc_RNA (1)...(19): siRNA sense strand
gagcagggacuguggaguu

SEQ ID NO: 558609 - RNA, 19 nt, Homo sapiens
  misc_RNA (1)...(19): siRNA sense strand
agccauagcuguaacguau

SEQ ID NO: 558610 - RNA, 19 nt, Homo sapiens
  misc_RNA (1)...(19): siRNA sense strand
ccugaaauguucuguuaau

SEQ ID NO: 558611 - RNA, 19 nt, Homo sapiens
  misc_RNA (1)...(19): siRNA sense strand
ggcaaagaaccaugaagua

SEQ ID NO: 558612 - RNA, 19 nt, Homo sapiens
  misc_RNA (1)...(19): siRNA sense strand
gaaggaaguauugagauug

SEQ ID NO: 558613 - RNA, 19 nt, Homo sapiens
  misc_RNA (1)...(19): siRNA sense strand
agaagucuuucaaugauga

SEQ ID NO: 558614 - RNA, 19 nt, Homo sapiens
  misc_RNA (1)...(19): siRNA sense strand
ggaaugaggauuguuagau

SEQ ID NO: 558615 - RNA, 19 nt, Homo sapiens
  misc_RNA (1)...(19): siRNA sense strand
caaaggauggcacaguaaa

SEQ ID NO: 558616 - RNA, 19 nt, Homo sapiens
  misc_RNA (1)...(19): siRNA sense strand
caugaugggucuuauagca

SEQ ID NO: 558617 - RNA, 19 nt, Homo sapiens
  misc_RNA (1)...(19): siRNA sense strand
ucaggcacaugaucaauuc

SEQ ID NO: 558618 - RNA, 19 nt, Homo sapiens
  misc_RNA (1)...(19): siRNA sense strand
gcaaagaaccaugaaguac

SEQ ID NO: 558619 - RNA, 19 nt, Homo sapiens
  misc_RNA (1)...(19): siRNA sense strand
uuagagacauggguauaaa

SEQ ID NO: 558620 - RNA, 19 nt, Homo sapiens
  misc_RNA (1)...(19): siRNA sense strand
uccaaaggauggcacagua

SEQ ID NO: 558621 - RNA, 19 nt, Homo sapiens
  misc_RNA (1)...(19): siRNA sense strand
aaggaaguauugagauuga

SEQ ID NO: 558622 - RNA, 19 nt, Homo sapiens
  misc_RNA (1)...(19): siRNA sense strand
gaacgugcacacugauuuc

SEQ ID NO: 558623 - RNA, 19 nt, Homo sapiens
  misc_RNA (1)...(19): siRNA sense strand
ggacuguggaguuuauuau

SEQ ID NO: 558624 - RNA, 19 nt, Homo sapiens
  misc_RNA (1)...(19): siRNA sense strand
caaagaaccaugaaguaca

SEQ ID NO: 558625 - RNA, 19 nt, Homo sapiens
  misc_RNA (1)...(19): siRNA sense strand
gaccgacacuuucacucuu

SEQ ID NO: 558626 - RNA, 19 nt, Homo sapiens
  misc_RNA (1)...(19): siRNA sense strand
gguacagccuucgucagua

SEQ ID NO: 558627 - RNA, 19 nt, Homo sapiens
  misc_RNA (1)...(19): siRNA sense strand
auaaagagcacauccaaau

SEQ ID NO: 558628 - RNA, 19 nt, Homo sapiens
  misc_RNA (1)...(19): siRNA sense strand
cugaauaucucguauacca

SEQ ID NO: 558629 - RNA, 19 nt, Homo sapiens
  misc_RNA (1)...(19): siRNA sense strand
gaucacaggaacugacuug

SEQ ID NO: 558630 - RNA, 19 nt, Homo sapiens
  misc_RNA (1)...(19): siRNA sense strand
gaggauuguuagaucagaa

SEQ ID NO: 558631 - RNA, 19 nt, Homo sapiens
  misc_RNA (1)...(19): siRNA sense strand
ggauggcacaguaaagaaa

SEQ ID NO: 558632 - RNA, 19 nt, Homo sapiens
  misc_RNA (1)...(19): siRNA sense strand
gaagcugauuauccuggaa

SEQ ID NO: 558633 - RNA, 19 nt, Homo sapiens
  misc_RNA (1)...(19): siRNA sense strand
ggccaugccuucgaagcua

SEQ ID NO: 558634 - RNA, 19 nt, Homo sapiens
  misc_RNA (1)...(19): siRNA sense strand
gcagagcuaccuaucuaug

SEQ ID NO: 558635 - RNA, 19 nt, Homo sapiens
  misc_RNA (1)...(19): siRNA sense strand
gacugaauaucucguauac

SEQ ID NO: 558636 - RNA, 19 nt, Homo sapiens
  misc_RNA (1)...(19): siRNA sense strand
gaaguuuccgugcauuaug

SEQ ID NO: 558637 - RNA, 19 nt, Homo sapiens
  misc_RNA (1)...(19): siRNA sense strand
gacaucagaagaucauuga

SEQ ID NO: 558638 - RNA, 19 nt, Homo sapiens
  misc_RNA (1)...(19): siRNA sense strand
gugcagaggcgacaucaga

SEQ ID NO: 558639 - RNA, 19 nt, Homo sapiens
  misc_RNA (1)...(19): siRNA sense strand
gaaaaggaaugaggauugu

SEQ ID NO: 558640 - RNA, 19 nt, Homo sapiens
  misc_RNA (1)...(19): siRNA sense strand
cuaccuaucuauggagaaa

SEQ ID NO: 558641 - RNA, 19 nt, Homo sapiens
  misc_RNA (1)...(19): siRNA sense strand
cauggaauuugcugaacuu

SEQ ID NO: 558642 - RNA, 19 nt, Homo sapiens
  misc_RNA (1)...(19): siRNA sense strand
ccuccuccaucugcaauua

SEQ ID NO: 558643 - RNA, 19 nt, Homo sapiens
  misc_RNA (1)...(19): siRNA sense strand
aaacauggaauuugcugaa

SEQ ID NO: 558644 - RNA, 19 nt, Homo sapiens
  misc_RNA (1)...(19): siRNA sense strand
gcacggagagaagcuaaga

SEQ ID NO: 558645 - RNA, 19 nt, Homo sapiens
  misc_RNA (1)...(19): siRNA sense strand
guauaaagagcacauccaa

SEQ ID NO: 558646 - RNA, 19 nt, Homo sapiens
  misc_RNA (1)...(19): siRNA sense strand
ccaaaggauggcacaguaa

SEQ ID NO: 558647 - RNA, 19 nt, Homo sapiens
  misc_RNA (1)...(19): siRNA sense strand
aacauugacuucuuacuca

SEQ ID NO: 558648 - RNA, 19 nt, Homo sapiens
  misc_RNA (1)...(19): siRNA sense strand
caacauugacuucuuacuc

SEQ ID NO: 558649 - RNA, 19 nt, Homo sapiens
  misc_RNA (1)...(19): siRNA sense strand
gcaaggagacgaaguuucc

SEQ ID NO: 558650 - RNA, 19 nt, Homo sapiens
  misc_RNA (1)...(19): siRNA sense strand
ggaguggcagcuuagaauu

SEQ ID NO: 558651 - RNA, 19 nt, Homo sapiens
  misc_RNA (1)...(19): siRNA sense strand
cgagaaguuuguagacaca

SEQ ID NO: 558652 - RNA, 19 nt, Homo sapiens
  misc_RNA (1)...(19): siRNA sense strand
gcacauccaaauccauaau

SEQ ID NO: 558653 - RNA, 19 nt, Homo sapiens
  misc_RNA (1)...(19): siRNA sense strand
guuaauggaguugcuagua

SEQ ID NO: 558654 - RNA, 19 nt, Homo sapiens
  misc_RNA (1)...(19): siRNA sense strand
ccauaaagucuccaaagga

SEQ ID NO: 558655 - RNA, 19 nt, Homo sapiens
  misc_RNA (1)...(19): siRNA sense strand
guauugagauugacauucc

SEQ ID NO: 558656 - RNA, 19 nt, Homo sapiens
  misc_RNA (1)...(19): siRNA sense strand
gaagugaucuccaggucuu

SEQ ID NO: 558657 - RNA, 19 nt, Homo sapiens
  misc_RNA (1)...(19): siRNA sense strand
gcaaagacgucccuaagag

SEQ ID NO: 558658 - RNA, 19 nt, Homo sapiens
  misc_RNA (1)...(19): siRNA sense strand
ccaaugggcuggcugcaaa

SEQ ID NO: 558659 - RNA, 19 nt, Homo sapiens
  misc_RNA (1)...(19): siRNA sense strand
gaagaaacgcccugagauc

SEQ ID NO: 558660 - RNA, 19 nt, Homo sapiens
  misc_RNA (1)...(19): siRNA sense strand
ucaacgacauccagaaguu

SEQ ID NO: 558661 - RNA, 19 nt, Homo sapiens
  misc_RNA (1)...(19): siRNA sense strand
ggacagcuacgugaagauu

SEQ ID NO: 558662 - RNA, 19 nt, Homo sapiens
  misc_RNA (1)...(19): siRNA sense strand
gggugaagcucucggacuu

SEQ ID NO: 558663 - RNA, 19 nt, Homo sapiens
  misc_RNA (1)...(19): siRNA sense strand
gaaugaaggcugccaagca

SEQ ID NO: 558664 - RNA, 19 nt, Homo sapiens
  misc_RNA (1)...(19): siRNA sense strand
gacaucgucucccaaguca

SEQ ID NO: 558665 - RNA, 19 nt, Homo sapiens
  misc_RNA (1)...(19): siRNA sense strand
ucaacgugguggagaugua

SEQ ID NO: 558666 - RNA, 19 nt, Homo sapiens
  misc_RNA (1)...(19): siRNA sense strand
gcagauugccacugugugu

SEQ ID NO: 558667 - RNA, 19 nt, Homo sapiens
  misc_RNA (1)...(19): siRNA sense strand
gcaagcccaacuccucuuu

SEQ ID NO: 558668 - RNA, 19 nt, Homo sapiens
  misc_RNA (1)...(19): siRNA sense strand
ccaccgacccagacaugua

SEQ ID NO: 558669 - RNA, 19 nt, Homo sapiens
  misc_RNA (1)...(19): siRNA sense strand
ugauccagcucuaccgaaa

SEQ ID NO: 558670 - RNA, 19 nt, Homo sapiens
  misc_RNA (1)...(19): siRNA sense strand
cuggauggcuccugaagug

SEQ ID NO: 558671 - RNA, 19 nt, Homo sapiens
  misc_RNA (1)...(19): siRNA sense strand
ccagguggccgucaagaug

SEQ ID NO: 558672 - RNA, 19 nt, Homo sapiens
  misc_RNA (1)...(19): siRNA sense strand
ucaacgagguggugaucau

SEQ ID NO: 558673 - RNA, 19 nt, Homo sapiens
  misc_RNA (1)...(19): siRNA sense strand
ccucugaccacuucggaua

SEQ ID NO: 558674 - RNA, 19 nt, Homo sapiens
  misc_RNA (1)...(19): siRNA sense strand
gagcagauugccacugugu

SEQ ID NO: 558675 - RNA, 19 nt, Homo sapiens
  misc_RNA (1)...(19): siRNA sense strand
aaugaaggcugccaagcau

SEQ ID NO: 558676 - RNA, 19 nt, Homo sapiens
  misc_RNA (1)...(19): siRNA sense strand
cagcaaagacgucccuaag

SEQ ID NO: 558677 - RNA, 19 nt, Homo sapiens
  misc_RNA (1)...(19): siRNA sense strand
aagaagaaacgcccugaga

SEQ ID NO: 558678 - RNA, 19 nt, Homo sapiens
  misc_RNA (1)...(19): siRNA sense strand
gauggcuccugaagugauc

SEQ ID NO: 558679 - RNA, 19 nt, Homo sapiens
  misc_RNA (1)...(19): siRNA sense strand
gugcagcuccagcccauga

SEQ ID NO: 558680 - RNA, 19 nt, Homo sapiens
  misc_RNA (1)...(19): siRNA sense strand
ccacagagcaagcccaacu

SEQ ID NO: 558681 - RNA, 19 nt, Homo sapiens
  misc_RNA (1)...(19): siRNA sense strand
gaucucagcgccacagaac

SEQ ID NO: 558682 - RNA, 19 nt, Homo sapiens
  misc_RNA (1)...(19): siRNA sense strand
cagaaguugucagucauca

SEQ ID NO: 558683 - RNA, 19 nt, Homo sapiens
  misc_RNA (1)...(19): siRNA sense strand
gaucuccaggucuuuguau

SEQ ID NO: 558684 - RNA, 19 nt, Homo sapiens
  misc_RNA (1)...(19): siRNA sense strand
ccaccggcaucgucugcuu

SEQ ID NO: 558685 - RNA, 19 nt, Homo sapiens
  misc_RNA (1)...(19): siRNA sense strand
cauggugauugagauggua

SEQ ID NO: 558686 - RNA, 19 nt, Homo sapiens
  misc_RNA (1)...(19): siRNA sense strand
gcucaacgacauccagaag

SEQ ID NO: 558687 - RNA, 19 nt, Homo sapiens
  misc_RNA (1)...(19): siRNA sense strand
aggagcagauugccacugu

SEQ ID NO: 558688 - RNA, 19 nt, Homo sapiens
  misc_RNA (1)...(19): siRNA sense strand
ugugggugcucauggaguu

SEQ ID NO: 558689 - RNA, 19 nt, Homo sapiens
  misc_RNA (1)...(19): siRNA sense strand
ugauggaccucaggaagca

SEQ ID NO: 558690 - RNA, 19 nt, Homo sapiens
  misc_RNA (1)...(19): siRNA sense strand
agaagaaacgcccugagau

SEQ ID NO: 558691 - RNA, 19 nt, Homo sapiens
  misc_RNA (1)...(19): siRNA sense strand
gcucucggacuucggauuc

SEQ ID NO: 558692 - RNA, 19 nt, Homo sapiens
  misc_RNA (1)...(19): siRNA sense strand
gggacuaccagcacuucaa

SEQ ID NO: 558693 - RNA, 19 nt, Homo sapiens
  misc_RNA (1)...(19): siRNA sense strand
gguggacccuucgcgaauc

SEQ ID NO: 558694 - RNA, 19 nt, Homo sapiens
  misc_RNA (1)...(19): siRNA sense strand
ucucagcgccacagaacuu

SEQ ID NO: 558695 - RNA, 19 nt, Homo sapiens
  misc_RNA (1)...(19): siRNA sense strand
ugacacaugagcaguucaa

SEQ ID NO: 558696 - RNA, 19 nt, Homo sapiens
  misc_RNA (1)...(19): siRNA sense strand
ggauggcuccugaagugau

SEQ ID NO: 558697 - RNA, 19 nt, Homo sapiens
  misc_RNA (1)...(19): siRNA sense strand
acagcuacgugaagauugg

SEQ ID NO: 558698 - RNA, 19 nt, Homo sapiens
  misc_RNA (1)...(19): siRNA sense strand
auccagaaguugucaguca

SEQ ID NO: 558699 - RNA, 19 nt, Homo sapiens
  misc_RNA (1)...(19): siRNA sense strand
ggacuaccagcacuucaac

SEQ ID NO: 558700 - RNA, 19 nt, Homo sapiens
  misc_RNA (1)...(19): siRNA sense strand
cagguggccgucaagauga

SEQ ID NO: 558701 - RNA, 19 nt, Homo sapiens
  misc_RNA (1)...(19): siRNA sense strand
ugaaugaggagcagauugc

SEQ ID NO: 558702 - RNA, 19 nt, Homo sapiens
  misc_RNA (1)...(19): siRNA sense strand
ccaccguacuucagugacu

SEQ ID NO: 558703 - RNA, 19 nt, Homo sapiens
  misc_RNA (1)...(19): siRNA sense strand
ugguggagauguacaagag

SEQ ID NO: 558704 - RNA, 19 nt, Homo sapiens
  misc_RNA (1)...(19): siRNA sense strand
guggacccuucgcgaauca

SEQ ID NO: 558705 - RNA, 19 nt, Homo sapiens
  misc_RNA (1)...(19): siRNA sense strand
accgggacaucaagaguga

SEQ ID NO: 558706 - RNA, 19 nt, Homo sapiens
  misc_RNA (1)...(19): siRNA sense strand
cagcaggccacaagcagau

SEQ ID NO: 558707 - RNA, 19 nt, Homo sapiens
  misc_RNA (1)...(19): siRNA sense strand
ggagccaccguacuucagu

SEQ ID NO: 558708 - RNA, 19 nt, Homo sapiens
  misc_RNA (1)...(19): siRNA sense strand
ggucuuuguaugccacuga

SEQ ID NO: 558709 - RNA, 19 nt, Homo sapiens
  misc_RNA (1)...(19): siRNA sense strand
ucagcaaagacgucccuaa

SEQ ID NO: 558710 - RNA, 19 nt, Homo sapiens
  misc_RNA (1)...(19): siRNA sense strand
cuggacagcuacgugaaga

SEQ ID NO: 558711 - RNA, 19 nt, Homo sapiens
  misc_RNA (1)...(19): siRNA sense strand
gacagcuacgugaagauug

SEQ ID NO: 558712 - RNA, 19 nt, Homo sapiens
  misc_RNA (1)...(19): siRNA sense strand
caacgagguggugaucaug

SEQ ID NO: 558713 - RNA, 19 nt, Homo sapiens
  misc_RNA (1)...(19): siRNA sense strand
gaacagaaacaaccaaaua

SEQ ID NO: 558714 - RNA, 19 nt, Homo sapiens
  misc_RNA (1)...(19): siRNA sense strand
gaagggagccuauauagaa

SEQ ID NO: 558715 - RNA, 19 nt, Homo sapiens
  misc_RNA (1)...(19): siRNA sense strand
ccaaauauguguuuacuga

SEQ ID NO: 558716 - RNA, 19 nt, Homo sapiens
  misc_RNA (1)...(19): siRNA sense strand
gaagagcgaguaccaauaa

SEQ ID NO: 558717 - RNA, 19 nt, Homo sapiens
  misc_RNA (1)...(19): siRNA sense strand
caagaaaccuacauuuaug

SEQ ID NO: 558718 - RNA, 19 nt, Homo sapiens
  misc_RNA (1)...(19): siRNA sense strand
caagaccuaugaagauaua

SEQ ID NO: 558719 - RNA, 19 nt, Homo sapiens
  misc_RNA (1)...(19): siRNA sense strand
ccaagaaaccuacauuuau

SEQ ID NO: 558720 - RNA, 19 nt, Homo sapiens
  misc_RNA (1)...(19): siRNA sense strand
ugaggaaguucaaagcaua

SEQ ID NO: 558721 - RNA, 19 nt, Homo sapiens
  misc_RNA (1)...(19): siRNA sense strand
ccaccaaccuauaagcuaa

SEQ ID NO: 558722 - RNA, 19 nt, Homo sapiens
  misc_RNA (1)...(19): siRNA sense strand
gaacuaacacugcagacuu

SEQ ID NO: 558723 - RNA, 19 nt, Homo sapiens
  misc_RNA (1)...(19): siRNA sense strand
cacaagaccuaugaagaua

SEQ ID NO: 558724 - RNA, 19 nt, Homo sapiens
  misc_RNA (1)...(19): siRNA sense strand
ccuauaagcuaaugacuca

SEQ ID NO: 558725 - RNA, 19 nt, Homo sapiens
  misc_RNA (1)...(19): siRNA sense strand
uaagccagcuauacaagaa

SEQ ID NO: 558726 - RNA, 19 nt, Homo sapiens
  misc_RNA (1)...(19): siRNA sense strand
gaagaacgggaccgaauga

SEQ ID NO: 558727 - RNA, 19 nt, Homo sapiens
  misc_RNA (1)...(19): siRNA sense strand
ggaagagcgaguaccaaua

SEQ ID NO: 558728 - RNA, 19 nt, Homo sapiens
  misc_RNA (1)...(19): siRNA sense strand
gaaacaaccaaauaugugu

SEQ ID NO: 558729 - RNA, 19 nt, Homo sapiens
  misc_RNA (1)...(19): siRNA sense strand
gaacgggaccgaaugauac

SEQ ID NO: 558730 - RNA, 19 nt, Homo sapiens
  misc_RNA (1)...(19): siRNA sense strand
gcugagggaauaaauuuaa

SEQ ID NO: 558731 - RNA, 19 nt, Homo sapiens
  misc_RNA (1)...(19): siRNA sense strand
gcagcuaaaguacgauuaa

SEQ ID NO: 558732 - RNA, 19 nt, Homo sapiens
  misc_RNA (1)...(19): siRNA sense strand
gcacagaagggagccuaua

SEQ ID NO: 558733 - RNA, 19 nt, Homo sapiens
  misc_RNA (1)...(19): siRNA sense strand
cagaguauaucaagguuca

SEQ ID NO: 558734 - RNA, 19 nt, Homo sapiens
  misc_RNA (1)...(19): siRNA sense strand
aacuaacacugcagacuua

SEQ ID NO: 558735 - RNA, 19 nt, Homo sapiens
  misc_RNA (1)...(19): siRNA sense strand
gaccgaaugauacaaguuu

SEQ ID NO: 558736 - RNA, 19 nt, Homo sapiens
  misc_RNA (1)...(19): siRNA sense strand
gagcgaguaccaauaaaug

SEQ ID NO: 558737 - RNA, 19 nt, Homo sapiens
  misc_RNA (1)...(19): siRNA sense strand
ucacaagaccuaugaagau

SEQ ID NO: 558738 - RNA, 19 nt, Homo sapiens
  misc_RNA (1)...(19): siRNA sense strand
gaccaagaaaccuacauuu

SEQ ID NO: 558739 - RNA, 19 nt, Homo sapiens
  misc_RNA (1)...(19): siRNA sense strand
ggaauggugugguauuuug

SEQ ID NO: 558740 - RNA, 19 nt, Homo sapiens
  misc_RNA (1)...(19): siRNA sense strand
gaaguucaaagcauacuca

SEQ ID NO: 558741 - RNA, 19 nt, Homo sapiens
  misc_RNA (1)...(19): siRNA sense strand
ggaagaacgggaccgaaug

SEQ ID NO: 558742 - RNA, 19 nt, Homo sapiens
  misc_RNA (1)...(19): siRNA sense strand
uguguuagcugaagauaag

SEQ ID NO: 558743 - RNA, 19 nt, Homo sapiens
  misc_RNA (1)...(19): siRNA sense strand
ggcuugaacuugcagaaga

SEQ ID NO: 558744 - RNA, 19 nt, Homo sapiens
  misc_RNA (1)...(19): siRNA sense strand
guggaauggugugguauuu

SEQ ID NO: 558745 - RNA, 19 nt, Homo sapiens
  misc_RNA (1)...(19): siRNA sense strand
caagauacuuugguggaau

SEQ ID NO: 558746 - RNA, 19 nt, Homo sapiens
  misc_RNA (1)...(19): siRNA sense strand
cagaaacaaccaaauaugu

SEQ ID NO: 558747 - RNA, 19 nt, Homo sapiens
  misc_RNA (1)...(19): siRNA sense strand
cagcuaaaguacgauuaaa

SEQ ID NO: 558748 - RNA, 19 nt, Homo sapiens
  misc_RNA (1)...(19): siRNA sense strand
accaagaaaccuacauuua

SEQ ID NO: 558749 - RNA, 19 nt, Homo sapiens
  misc_RNA (1)...(19): siRNA sense strand
uaacacugcagacuuauca

SEQ ID NO: 558750 - RNA, 19 nt, Homo sapiens
  misc_RNA (1)...(19): siRNA sense strand
gggagccuauauagaacua

SEQ ID NO: 558751 - RNA, 19 nt, Homo sapiens
  misc_RNA (1)...(19): siRNA sense strand
ugaggcagcuaaaguacga

SEQ ID NO: 558752 - RNA, 19 nt, Homo sapiens
  misc_RNA (1)...(19): siRNA sense strand
ugaagccaccaaccuauaa

SEQ ID NO: 558753 - RNA, 19 nt, Homo sapiens
  misc_RNA (1)...(19): siRNA sense strand
gcagacuuaucaagaagca

SEQ ID NO: 558754 - RNA, 19 nt, Homo sapiens
  misc_RNA (1)...(19): siRNA sense strand
ccagagaccaagaaaccua

SEQ ID NO: 558755 - RNA, 19 nt, Homo sapiens
  misc_RNA (1)...(19): siRNA sense strand
acagaagggagccuauaua

SEQ ID NO: 558756 - RNA, 19 nt, Homo sapiens
  misc_RNA (1)...(19): siRNA sense strand
uaucaagguucaucacaag

SEQ ID NO: 558757 - RNA, 19 nt, Homo sapiens
  misc_RNA (1)...(19): siRNA sense strand
gaacugaagccaccaaccu

SEQ ID NO: 558758 - RNA, 19 nt, Homo sapiens
  misc_RNA (1)...(19): siRNA sense strand
gaagcacucagucgccauu

SEQ ID NO: 558759 - RNA, 19 nt, Homo sapiens
  misc_RNA (1)...(19): siRNA sense strand
agaacgggaccgaaugaua

SEQ ID NO: 558760 - RNA, 19 nt, Homo sapiens
  misc_RNA (1)...(19): siRNA sense strand
gaccagauucagagagauu

SEQ ID NO: 558761 - RNA, 19 nt, Homo sapiens
  misc_RNA (1)...(19): siRNA sense strand
gggaagaacgggaccgaau

SEQ ID NO: 558762 - RNA, 19 nt, Homo sapiens
  misc_RNA (1)...(19): siRNA sense strand
cagaagggagccuauauag

SEQ ID NO: 558763 - RNA, 19 nt, Homo sapiens
  misc_RNA (1)...(19): siRNA sense strand
ccacagaguauaucaaggu

SEQ ID NO: 558764 - RNA, 19 nt, Homo sapiens
  misc_RNA (1)...(19): siRNA sense strand
ugaacuugcagaagacuuu

SEQ ID NO: 558765 - RNA, 19 nt, Homo sapiens
  misc_RNA (1)...(19): siRNA sense strand
gauugaugguuugcugauu

SEQ ID NO: 558766 - RNA, 19 nt, Homo sapiens
  misc_RNA (1)...(19): siRNA sense strand
cuacaagacaggcaguuga

SEQ ID NO: 558767 - RNA, 19 nt, Homo sapiens
  misc_RNA (1)...(19): siRNA sense strand
gaguaccaauaaaugaugu

SEQ ID NO: 558768 - RNA, 19 nt, Homo sapiens
  misc_RNA (1)...(19): siRNA sense strand
gauaagauuuuggaaggaa

SEQ ID NO: 558769 - RNA, 19 nt, Homo sapiens
  misc_RNA (1)...(19): siRNA sense strand
ccagauucagagagauuua

SEQ ID NO: 558770 - RNA, 19 nt, Homo sapiens
  misc_RNA (1)...(19): siRNA sense strand
gcguggaacgggucuguuu

SEQ ID NO: 558771 - RNA, 19 nt, Homo sapiens
  misc_RNA (1)...(19): siRNA sense strand
ggaacagaaacaaccaaau

SEQ ID NO: 558772 - RNA, 19 nt, Homo sapiens
  misc_RNA (1)...(19): siRNA sense strand
acaagauacuuugguggaa

SEQ ID NO: 558773 - RNA, 19 nt, Homo sapiens
  misc_RNA (1)...(19): siRNA sense strand
ucucugcuuugcccaguuu

SEQ ID NO: 558774 - RNA, 19 nt, Homo sapiens
  misc_RNA (1)...(19): siRNA sense strand
agaaacaaccaaauaugug

SEQ ID NO: 558775 - RNA, 19 nt, Homo sapiens
  misc_RNA (1)...(19): siRNA sense strand
ggaccgaaugauacaaguu

SEQ ID NO: 558776 - RNA, 19 nt, Homo sapiens
  misc_RNA (1)...(19): siRNA sense strand
ccucggaacaacuguauug

SEQ ID NO: 558777 - RNA, 19 nt, Homo sapiens
  misc_RNA (1)...(19): siRNA sense strand
cugcugagggaauaaauuu

SEQ ID NO: 558778 - RNA, 19 nt, Homo sapiens
  misc_RNA (1)...(19): siRNA sense strand
caacuugguccagcuguau

SEQ ID NO: 558779 - RNA, 19 nt, Homo sapiens
  misc_RNA (1)...(19): siRNA sense strand
ugacaggcuugaacuugca

SEQ ID NO: 558780 - RNA, 19 nt, Homo sapiens
  misc_RNA (1)...(19): siRNA sense strand
gagccuauauagaacuaac

SEQ ID NO: 558781 - RNA, 19 nt, Homo sapiens
  misc_RNA (1)...(19): siRNA sense strand
acagaaacaaccaaauaug

SEQ ID NO: 558782 - RNA, 19 nt, Homo sapiens
  misc_RNA (1)...(19): siRNA sense strand
gaaggaacagaaacaacca

SEQ ID NO: 558783 - RNA, 19 nt, Homo sapiens
  misc_RNA (1)...(19): siRNA sense strand
gcacucagucgccauucug

SEQ ID NO: 558784 - RNA, 19 nt, Homo sapiens
  misc_RNA (1)...(19): siRNA sense strand
cacagaguauaucaagguu

SEQ ID NO: 558785 - RNA, 19 nt, Homo sapiens
  misc_RNA (1)...(19): siRNA sense strand
cagauuccacagaguauau

SEQ ID NO: 558786 - RNA, 19 nt, Homo sapiens
  misc_RNA (1)...(19): siRNA sense strand
gaaaaucuuaggacuaugu

SEQ ID NO: 558787 - RNA, 19 nt, Homo sapiens
  misc_RNA (1)...(19): siRNA sense strand
uggaagaggcuacaagaca

SEQ ID NO: 558788 - RNA, 19 nt, Homo sapiens
  misc_RNA (1)...(19): siRNA sense strand
acugcagacuuaucaagaa

SEQ ID NO: 558789 - RNA, 19 nt, Homo sapiens
  misc_RNA (1)...(19): siRNA sense strand
aaccuacauuuauggauga

SEQ ID NO: 558790 - RNA, 19 nt, Homo sapiens
  misc_RNA (1)...(19): siRNA sense strand
uguccucaaucucugcuuu

SEQ ID NO: 558791 - RNA, 19 nt, Homo sapiens
  misc_RNA (1)...(19): siRNA sense strand
gcgaguaccaauaaaugau

SEQ ID NO: 558792 - RNA, 19 nt, Homo sapiens
  misc_RNA (1)...(19): siRNA sense strand
aagauacuuugguggaaug

SEQ ID NO: 558793 - RNA, 19 nt, Homo sapiens
  misc_RNA (1)...(19): siRNA sense strand
gccaccaaccuauaagcua

SEQ ID NO: 558794 - RNA, 19 nt, Homo sapiens
  misc_RNA (1)...(19): siRNA sense strand
gagccagauuccacagagu

SEQ ID NO: 558795 - RNA, 19 nt, Homo sapiens
  misc_RNA (1)...(19): siRNA sense strand
gaugaggaaguucaaagca

SEQ ID NO: 558796 - RNA, 19 nt, Homo sapiens
  misc_RNA (1)...(19): siRNA sense strand
gaaaccuacauuuauggau

SEQ ID NO: 558797 - RNA, 19 nt, Homo sapiens
  misc_RNA (1)...(19): siRNA sense strand
accgaaugauacaaguuua

SEQ ID NO: 558798 - RNA, 19 nt, Homo sapiens
  misc_RNA (1)...(19): siRNA sense strand
caaagcauacucacgaaaa

SEQ ID NO: 558799 - RNA, 19 nt, Homo sapiens
  misc_RNA (1)...(19): siRNA sense strand
guuggaagaggcuacaaga

SEQ ID NO: 558800 - RNA, 19 nt, Homo sapiens
  misc_RNA (1)...(19): siRNA sense strand
agaagggagccuauauaga

SEQ ID NO: 558801 - RNA, 19 nt, Homo sapiens
  misc_RNA (1)...(19): siRNA sense strand
cacagaagggagccuauau

SEQ ID NO: 558802 - RNA, 19 nt, Homo sapiens
  misc_RNA (1)...(19): siRNA sense strand
auugaugguuugcugauug

SEQ ID NO: 558803 - RNA, 19 nt, Homo sapiens
  misc_RNA (1)...(19): siRNA sense strand
gguggaauggugugguauu

SEQ ID NO: 558804 - RNA, 19 nt, Homo sapiens
  misc_RNA (1)...(19): siRNA sense strand
ucaaagcauacucacgaaa

SEQ ID NO: 558805 - RNA, 19 nt, Homo sapiens
  misc_RNA (1)...(19): siRNA sense strand
cugaagccaccaaccuaua

SEQ ID NO: 558806 - RNA, 19 nt, Homo sapiens
  misc_RNA (1)...(19): siRNA sense strand
cagauucagagagauuuaa

SEQ ID NO: 558807 - RNA, 19 nt, Homo sapiens
  misc_RNA (1)...(19): siRNA sense strand
auaucaagguucaucacaa

SEQ ID NO: 558808 - RNA, 19 nt, Homo sapiens
  misc_RNA (1)...(19): siRNA sense strand
ccagauuccacagaguaua

SEQ ID NO: 558809 - RNA, 19 nt, Homo sapiens
  misc_RNA (1)...(19): siRNA sense strand
gaaaaugacaggcuugaac

SEQ ID NO: 558810 - RNA, 19 nt, Homo sapiens
  misc_RNA (1)...(19): siRNA sense strand
ccaaaagaaggucguaaaa

SEQ ID NO: 558811 - RNA, 19 nt, Homo sapiens
  misc_RNA (1)...(19): siRNA sense strand
cgaguaccaauaaaugaug

SEQ ID NO: 558812 - RNA, 19 nt, Homo sapiens
  misc_RNA (1)...(19): siRNA sense strand
agaccaagaaaccuacauu

SEQ ID NO: 558813 - RNA, 19 nt, Homo sapiens
  misc_RNA (1)...(19): siRNA sense strand
ggaaagaaaugccugcuua

SEQ ID NO: 558814 - RNA, 19 nt, Homo sapiens
  misc_RNA (1)...(19): siRNA sense strand
caagagagguuauagcaua

SEQ ID NO: 558815 - RNA, 19 nt, Homo sapiens
  misc_RNA (1)...(19): siRNA sense strand
gcaaugaccuguauuugga

SEQ ID NO: 558816 - RNA, 19 nt, Homo sapiens
  misc_RNA (1)...(19): siRNA sense strand
ggaaugcccuucuaaaugu

SEQ ID NO: 558817 - RNA, 19 nt, Homo sapiens
  misc_RNA (1)...(19): siRNA sense strand
gagaugaguuguagcuaua

SEQ ID NO: 558818 - RNA, 19 nt, Homo sapiens
  misc_RNA (1)...(19): siRNA sense strand
ggauucaucucaauagaaa

SEQ ID NO: 558819 - RNA, 19 nt, Homo sapiens
  misc_RNA (1)...(19): siRNA sense strand
gaaccgagccuugauauug

SEQ ID NO: 558820 - RNA, 19 nt, Homo sapiens
  misc_RNA (1)...(19): siRNA sense strand
gaaauggaauuaugaggau

SEQ ID NO: 558821 - RNA, 19 nt, Homo sapiens
  misc_RNA (1)...(19): siRNA sense strand
caacucauguaacagauuu

SEQ ID NO: 558822 - RNA, 19 nt, Homo sapiens
  misc_RNA (1)...(19): siRNA sense strand
gcacaugaauuaucacaag

SEQ ID NO: 558823 - RNA, 19 nt, Homo sapiens
  misc_RNA (1)...(19): siRNA sense strand
cagcagagucuaagaaaua

SEQ ID NO: 558824 - RNA, 19 nt, Homo sapiens
  misc_RNA (1)...(19): siRNA sense strand
ugagucaucuucauacuuu

SEQ ID NO: 558825 - RNA, 19 nt, Homo sapiens
  misc_RNA (1)...(19): siRNA sense strand
ggacaacuuucucucauuc

SEQ ID NO: 558826 - RNA, 19 nt, Homo sapiens
  misc_RNA (1)...(19): siRNA sense strand
gauaaacucugacacucuu

SEQ ID NO: 558827 - RNA, 19 nt, Homo sapiens
  misc_RNA (1)...(19): siRNA sense strand
auaacacucugcacuauua

SEQ ID NO: 558828 - RNA, 19 nt, Homo sapiens
  misc_RNA (1)...(19): siRNA sense strand
gauuggcuauagaguauua

SEQ ID NO: 558829 - RNA, 19 nt, Homo sapiens
  misc_RNA (1)...(19): siRNA sense strand
aaacggaaguuauagaaga

SEQ ID NO: 558830 - RNA, 19 nt, Homo sapiens
  misc_RNA (1)...(19): siRNA sense strand
ccgcagggcuggugucuaa

SEQ ID NO: 558831 - RNA, 19 nt, Homo sapiens
  misc_RNA (1)...(19): siRNA sense strand
acaccaagcacaugaauua

SEQ ID NO: 558832 - RNA, 19 nt, Homo sapiens
  misc_RNA (1)...(19): siRNA sense strand
uaagauugcucuauugugu

SEQ ID NO: 558833 - RNA, 19 nt, Homo sapiens
  misc_RNA (1)...(19): siRNA sense strand
gcaauaugcuagguuuaaa

SEQ ID NO: 558834 - RNA, 19 nt, Homo sapiens
  misc_RNA (1)...(19): siRNA sense strand
gagaacucguuguaugaua

SEQ ID NO: 558835 - RNA, 19 nt, Homo sapiens
  misc_RNA (1)...(19): siRNA sense strand
caagaaauauccagagaag

SEQ ID NO: 558836 - RNA, 19 nt, Homo sapiens
  misc_RNA (1)...(19): siRNA sense strand
gaaaugaagcccagguuug

SEQ ID NO: 558837 - RNA, 19 nt, Homo sapiens
  misc_RNA (1)...(19): siRNA sense strand
aagaaaugccugcuuauua

SEQ ID NO: 558838 - RNA, 19 nt, Homo sapiens
  misc_RNA (1)...(19): siRNA sense strand
cuaggaggcuuauauaaau

SEQ ID NO: 558839 - RNA, 19 nt, Homo sapiens
  misc_RNA (1)...(19): siRNA sense strand
caagagagaacucguugua

SEQ ID NO: 558840 - RNA, 19 nt, Homo sapiens
  misc_RNA (1)...(19): siRNA sense strand
gguagaaacuauuuaugga

SEQ ID NO: 558841 - RNA, 19 nt, Homo sapiens
  misc_RNA (1)...(19): siRNA sense strand
ccaagcacaugaauuauca

SEQ ID NO: 558842 - RNA, 19 nt, Homo sapiens
  misc_RNA (1)...(19): siRNA sense strand
gacaugguauggaaguaua

SEQ ID NO: 558843 - RNA, 19 nt, Homo sapiens
  misc_RNA (1)...(19): siRNA sense strand
gaacugaaccgagccuuga

SEQ ID NO: 558844 - RNA, 19 nt, Homo sapiens
  misc_RNA (1)...(19): siRNA sense strand
gcaaagaaguugggaaugc

SEQ ID NO: 558845 - RNA, 19 nt, Homo sapiens
  misc_RNA (1)...(19): siRNA sense strand
cagauuuccugguauauga

SEQ ID NO: 558846 - RNA, 19 nt, Homo sapiens
  misc_RNA (1)...(19): siRNA sense strand
cagauuggcuauagaguau

SEQ ID NO: 558847 - RNA, 19 nt, Homo sapiens
  misc_RNA (1)...(19): siRNA sense strand
guagcacccauuuaaauua

SEQ ID NO: 558848 - RNA, 19 nt, Homo sapiens
  misc_RNA (1)...(19): siRNA sense strand
gcagggcgaggacugauua

SEQ ID NO: 558849 - RNA, 19 nt, Homo sapiens
  misc_RNA (1)...(19): siRNA sense strand
gaaaugcgcuaugaaugca

SEQ ID NO: 558850 - RNA, 19 nt, Homo sapiens
  misc_RNA (1)...(19): siRNA sense strand
ccaaaucacuggagacucu

SEQ ID NO: 558851 - RNA, 19 nt, Homo sapiens
  misc_RNA (1)...(19): siRNA sense strand
gcaaggauaaacuccauuu

SEQ ID NO: 558852 - RNA, 19 nt, Homo sapiens
  misc_RNA (1)...(19): siRNA sense strand
gagcaaguagagaagauua

SEQ ID NO: 558853 - RNA, 19 nt, Homo sapiens
  misc_RNA (1)...(19): siRNA sense strand
caaaguuucuuacugaagu

SEQ ID NO: 558854 - RNA, 19 nt, Homo sapiens
  misc_RNA (1)...(19): siRNA sense strand
gaucaucacugcccuacca

SEQ ID NO: 558855 - RNA, 19 nt, Homo sapiens
  misc_RNA (1)...(19): siRNA sense strand
ccagguuuguuauuucaua

SEQ ID NO: 558856 - RNA, 19 nt, Homo sapiens
  misc_RNA (1)...(19): siRNA sense strand
gcacugcucucaggcuuau

SEQ ID NO: 558857 - RNA, 19 nt, Homo sapiens
  misc_RNA (1)...(19): siRNA sense strand
gcaacucaauaaaugcauu

SEQ ID NO: 558858 - RNA, 19 nt, Homo sapiens
  misc_RNA (1)...(19): siRNA sense strand
gagagaacucguuguauga

SEQ ID NO: 558859 - RNA, 19 nt, Homo sapiens
  misc_RNA (1)...(19): siRNA sense strand
agagagaacucguuguaug

SEQ ID NO: 558860 - RNA, 19 nt, Homo sapiens
  misc_RNA (1)...(19): siRNA sense strand
caaaucuccuggucccuuu

SEQ ID NO: 558861 - RNA, 19 nt, Homo sapiens
  misc_RNA (1)...(19): siRNA sense strand
gaucugagaccgaggagaa

SEQ ID NO: 558862 - RNA, 19 nt, Homo sapiens
  misc_RNA (1)...(19): siRNA sense strand
gggaaugcccuucuaaaug

SEQ ID NO: 558863 - RNA, 19 nt, Homo sapiens
  misc_RNA (1)...(19): siRNA sense strand
ggaaaugaagcccagguuu

SEQ ID NO: 558864 - RNA, 19 nt, Homo sapiens
  misc_RNA (1)...(19): siRNA sense strand
ggauuuaucagucagcuuu

SEQ ID NO: 558865 - RNA, 19 nt, Homo sapiens
  misc_RNA (1)...(19): siRNA sense strand
ccaguggauuguuaaguuu

SEQ ID NO: 558866 - RNA, 19 nt, Homo sapiens
  misc_RNA (1)...(19): siRNA sense strand
agaaauauccagagaaguu

SEQ ID NO: 558867 - RNA, 19 nt, Homo sapiens
  misc_RNA (1)...(19): siRNA sense strand
guauggaaguauaacauug

SEQ ID NO: 558868 - RNA, 19 nt, Homo sapiens
  misc_RNA (1)...(19): siRNA sense strand
uuaaugacaugguauggaa

SEQ ID NO: 558869 - RNA, 19 nt, Homo sapiens
  misc_RNA (1)...(19): siRNA sense strand
caugggagcucugguagaa

SEQ ID NO: 558870 - RNA, 19 nt, Homo sapiens
  misc_RNA (1)...(19): siRNA sense strand
gcaauucauuucuggaagu

SEQ ID NO: 558871 - RNA, 19 nt, Homo sapiens
  misc_RNA (1)...(19): siRNA sense strand
agaaaugccugcuuauuac

SEQ ID NO: 558872 - RNA, 19 nt, Homo sapiens
  misc_RNA (1)...(19): siRNA sense strand
gaagaccgaauuccaguug

SEQ ID NO: 558873 - RNA, 19 nt, Homo sapiens
  misc_RNA (1)...(19): siRNA sense strand
agacugcuuuguugagaua

SEQ ID NO: 558874 - RNA, 19 nt, Homo sapiens
  misc_RNA (1)...(19): siRNA sense strand
uagcauauaucuuggaaag

SEQ ID NO: 558875 - RNA, 19 nt, Homo sapiens
  misc_RNA (1)...(19): siRNA sense strand
ugaaagagcaaguagagaa

SEQ ID NO: 558876 - RNA, 19 nt, Homo sapiens
  misc_RNA (1)...(19): siRNA sense strand
gaauuccaguugcuuuaug

SEQ ID NO: 558877 - RNA, 19 nt, Homo sapiens
  misc_RNA (1)...(19): siRNA sense strand
cauauuggauuguucuuca

SEQ ID NO: 558878 - RNA, 19 nt, Homo sapiens
  misc_RNA (1)...(19): siRNA sense strand
guauaacacucugcacuau

SEQ ID NO: 558879 - RNA, 19 nt, Homo sapiens
  misc_RNA (1)...(19): siRNA sense strand
gagcacugguuacagaaug

SEQ ID NO: 558880 - RNA, 19 nt, Homo sapiens
  misc_RNA (1)...(19): siRNA sense strand
gagcaacucauguaacaga

SEQ ID NO: 558881 - RNA, 19 nt, Homo sapiens
  misc_RNA (1)...(19): siRNA sense strand
ucaaaggauuuaucaguca

SEQ ID NO: 558882 - RNA, 19 nt, Homo sapiens
  misc_RNA (1)...(19): siRNA sense strand
gagaagauuuugacaauuc

SEQ ID NO: 558883 - RNA, 19 nt, Homo sapiens
  misc_RNA (1)...(19): siRNA sense strand
ccagugacuuaucuguaua

SEQ ID NO: 558884 - RNA, 19 nt, Homo sapiens
  misc_RNA (1)...(19): siRNA sense strand
gucagcaacucaauaaaug

SEQ ID NO: 558885 - RNA, 19 nt, Homo sapiens
  misc_RNA (1)...(19): siRNA sense strand
gaaagaaaugccugcuuau

SEQ ID NO: 558886 - RNA, 19 nt, Homo sapiens
  misc_RNA (1)...(19): siRNA sense strand
ugguggaucugguuguuua

SEQ ID NO: 558887 - RNA, 19 nt, Homo sapiens
  misc_RNA (1)...(19): siRNA sense strand
gaggacauuugcagauuuc

SEQ ID NO: 558888 - RNA, 19 nt, Homo sapiens
  misc_RNA (1)...(19): siRNA sense strand
uagagcaacucauguaaca

SEQ ID NO: 558889 - RNA, 19 nt, Homo sapiens
  misc_RNA (1)...(19): siRNA sense strand
guuuacagaugaaugacua

SEQ ID NO: 558890 - RNA, 19 nt, Homo sapiens
  misc_RNA (1)...(19): siRNA sense strand
agaaccagcuccaucuuug

SEQ ID NO: 558891 - RNA, 19 nt, Homo sapiens
  misc_RNA (1)...(19): siRNA sense strand
ccagagccauauuggauug

SEQ ID NO: 558892 - RNA, 19 nt, Homo sapiens
  misc_RNA (1)...(19): siRNA sense strand
cagaugacaccuacuauug

SEQ ID NO: 558893 - RNA, 19 nt, Homo sapiens
  misc_RNA (1)...(19): siRNA sense strand
gaaagccguuuuaaucuga

SEQ ID NO: 558894 - RNA, 19 nt, Homo sapiens
  misc_RNA (1)...(19): siRNA sense strand
ggaacuugguguaaagaca

SEQ ID NO: 558895 - RNA, 19 nt, Homo sapiens
  misc_RNA (1)...(19): siRNA sense strand
gcuuugggccuuaacauuu

SEQ ID NO: 558896 - RNA, 19 nt, Homo sapiens
  misc_RNA (1)...(19): siRNA sense strand
ugagaugaguuguagcuau

SEQ ID NO: 558897 - RNA, 19 nt, Homo sapiens
  misc_RNA (1)...(19): siRNA sense strand
uacaggcucugauucaauu

SEQ ID NO: 558898 - RNA, 19 nt, Homo sapiens
  misc_RNA (1)...(19): siRNA sense strand
gcagcagagucuaagaaau

SEQ ID NO: 558899 - RNA, 19 nt, Homo sapiens
  misc_RNA (1)...(19): siRNA sense strand
gaaacuggauccugcuacu

SEQ ID NO: 558900 - RNA, 19 nt, Homo sapiens
  misc_RNA (1)...(19): siRNA sense strand
ccacacugguuacuuggaa

SEQ ID NO: 558901 - RNA, 19 nt, Homo sapiens
  misc_RNA (1)...(19): siRNA sense strand
cgagaucucuuaaaaguga

SEQ ID NO: 558902 - RNA, 19 nt, Homo sapiens
  misc_RNA (1)...(19): siRNA sense strand
cgauucaucacacacauua

SEQ ID NO: 558903 - RNA, 19 nt, Homo sapiens
  misc_RNA (1)...(19): siRNA sense strand
gaaugcaauugguuugauc

SEQ ID NO: 558904 - RNA, 19 nt, Homo sapiens
  misc_RNA (1)...(19): siRNA sense strand
gggaaugugugucuucgau

SEQ ID NO: 558905 - RNA, 19 nt, Homo sapiens
  misc_RNA (1)...(19): siRNA sense strand
cacaagaaauauccagaga

SEQ ID NO: 558906 - RNA, 19 nt, Homo sapiens
  misc_RNA (1)...(19): siRNA sense strand
ugaggacauuugcagauuu

SEQ ID NO: 558907 - RNA, 19 nt, Homo sapiens
  misc_RNA (1)...(19): siRNA sense strand
ggaagucaaugagcaacga

SEQ ID NO: 558908 - RNA, 19 nt, Homo sapiens
  misc_RNA (1)...(19): siRNA sense strand
ucagggaacuugguguaaa

SEQ ID NO: 558909 - RNA, 19 nt, Homo sapiens
  misc_RNA (1)...(19): siRNA sense strand
gagguacaaccgcaguuua

SEQ ID NO: 558910 - RNA, 19 nt, Homo sapiens
  misc_RNA (1)...(19): siRNA sense strand
ggucagcaacucaauaaau

SEQ ID NO: 558911 - RNA, 19 nt, Homo sapiens
  misc_RNA (1)...(19): siRNA sense strand
gaugacaccuacuauugca

SEQ ID NO: 558912 - RNA, 19 nt, Homo sapiens
  misc_RNA (1)...(19): siRNA sense strand
caucuaggaggcuuauaua

SEQ ID NO: 558913 - RNA, 19 nt, Homo sapiens
  misc_RNA (1)...(19): siRNA sense strand
ggaaagaaaugccugcuua

SEQ ID NO: 558914 - RNA, 19 nt, Homo sapiens
  misc_RNA (1)...(19): siRNA sense strand
caagagagguuauagcaua

SEQ ID NO: 558915 - RNA, 19 nt, Homo sapiens
  misc_RNA (1)...(19): siRNA sense strand
gcaaugaccuguauuugga

SEQ ID NO: 558916 - RNA, 19 nt, Homo sapiens
  misc_RNA (1)...(19): siRNA sense strand
ggaaugcccuucuaaaugu

SEQ ID NO: 558917 - RNA, 19 nt, Homo sapiens
  misc_RNA (1)...(19): siRNA sense strand
gagaugaguuguagcuaua

SEQ ID NO: 558918 - RNA, 19 nt, Homo sapiens
  misc_RNA (1)...(19): siRNA sense strand
ggauucaucucaauagaaa

SEQ ID NO: 558919 - RNA, 19 nt, Homo sapiens
  misc_RNA (1)...(19): siRNA sense strand
gaaccgagccuugauauug

SEQ ID NO: 558920 - RNA, 19 nt, Homo sapiens
  misc_RNA (1)...(19): siRNA sense strand
gaaauggaauuaugaggau

SEQ ID NO: 558921 - RNA, 19 nt, Homo sapiens
  misc_RNA (1)...(19): siRNA sense strand
caacucauguaacagauuu

SEQ ID NO: 558922 - RNA, 19 nt, Homo sapiens
  misc_RNA (1)...(19): siRNA sense strand
gcacaugaauuaucacaag

SEQ ID NO: 558923 - RNA, 19 nt, Homo sapiens
  misc_RNA (1)...(19): siRNA sense strand
cagcagagucuaagaaaua

SEQ ID NO: 558924 - RNA, 19 nt, Homo sapiens
  misc_RNA (1)...(19): siRNA sense strand
ugagucaucuucauacuuu

SEQ ID NO: 558925 - RNA, 19 nt, Homo sapiens
  misc_RNA (1)...(19): siRNA sense strand
ggacaacuuucucucauuc

SEQ ID NO: 558926 - RNA, 19 nt, Homo sapiens
  misc_RNA (1)...(19): siRNA sense strand
gauaaacucugacacucuu

SEQ ID NO: 558927 - RNA, 19 nt, Homo sapiens
  misc_RNA (1)...(19): siRNA sense strand
auaacacucugcacuauua

SEQ ID NO: 558928 - RNA, 19 nt, Homo sapiens
  misc_RNA (1)...(19): siRNA sense strand
gauuggcuauagaguauua

SEQ ID NO: 558929 - RNA, 19 nt, Homo sapiens
  misc_RNA (1)...(19): siRNA sense strand
aaacggaaguuauagaaga

SEQ ID NO: 558930 - RNA, 19 nt, Homo sapiens
  misc_RNA (1)...(19): siRNA sense strand
ccgcagggcuggugucuaa

SEQ ID NO: 558931 - RNA, 19 nt, Homo sapiens
  misc_RNA (1)...(19): siRNA sense strand
acaccaagcacaugaauua

SEQ ID NO: 558932 - RNA, 19 nt, Homo sapiens
  misc_RNA (1)...(19): siRNA sense strand
uaagauugcucuauugugu

SEQ ID NO: 558933 - RNA, 19 nt, Homo sapiens
  misc_RNA (1)...(19): siRNA sense strand
gcaauaugcuagguuuaaa

SEQ ID NO: 558934 - RNA, 19 nt, Homo sapiens
  misc_RNA (1)...(19): siRNA sense strand
gagaacucguuguaugaua

SEQ ID NO: 558935 - RNA, 19 nt, Homo sapiens
  misc_RNA (1)...(19): siRNA sense strand
caagaaauauccagagaag

SEQ ID NO: 558936 - RNA, 19 nt, Homo sapiens
  misc_RNA (1)...(19): siRNA sense strand
gaaaugaagcccagguuug

SEQ ID NO: 558937 - RNA, 19 nt, Homo sapiens
  misc_RNA (1)...(19): siRNA sense strand
aagaaaugccugcuuauua

SEQ ID NO: 558938 - RNA, 19 nt, Homo sapiens
  misc_RNA (1)...(19): siRNA sense strand
cuaggaggcuuauauaaau

SEQ ID NO: 558939 - RNA, 19 nt, Homo sapiens
  misc_RNA (1)...(19): siRNA sense strand
caagagagaacucguugua

SEQ ID NO: 558940 - RNA, 19 nt, Homo sapiens
  misc_RNA (1)...(19): siRNA sense strand
gguagaaacuauuuaugga

SEQ ID NO: 558941 - RNA, 19 nt, Homo sapiens
  misc_RNA (1)...(19): siRNA sense strand
ccaagcacaugaauuauca

SEQ ID NO: 558942 - RNA, 19 nt, Homo sapiens
  misc_RNA (1)...(19): siRNA sense strand
gacaugguauggaaguaua

SEQ ID NO: 558943 - RNA, 19 nt, Homo sapiens
  misc_RNA (1)...(19): siRNA sense strand
gaacugaaccgagccuuga

SEQ ID NO: 558944 - RNA, 19 nt, Homo sapiens
  misc_RNA (1)...(19): siRNA sense strand
gcaaagaaguugggaaugc

SEQ ID NO: 558945 - RNA, 19 nt, Homo sapiens
  misc_RNA (1)...(19): siRNA sense strand
cagauuuccugguauauga

SEQ ID NO: 558946 - RNA, 19 nt, Homo sapiens
  misc_RNA (1)...(19): siRNA sense strand
cagauuggcuauagaguau

SEQ ID NO: 558947 - RNA, 19 nt, Homo sapiens
  misc_RNA (1)...(19): siRNA sense strand
guagcacccauuuaaauua

SEQ ID NO: 558948 - RNA, 19 nt, Homo sapiens
  misc_RNA (1)...(19): siRNA sense strand
gcagggcgaggacugauua

SEQ ID NO: 558949 - RNA, 19 nt, Homo sapiens
  misc_RNA (1)...(19): siRNA sense strand
gaaaugcgcuaugaaugca

SEQ ID NO: 558950 - RNA, 19 nt, Homo sapiens
  misc_RNA (1)...(19): siRNA sense strand
ccaaaucacuggagacucu

SEQ ID NO: 558951 - RNA, 19 nt, Homo sapiens
  misc_RNA (1)...(19): siRNA sense strand
gcaaggauaaacuccauuu

SEQ ID NO: 558952 - RNA, 19 nt, Homo sapiens
  misc_RNA (1)...(19): siRNA sense strand
gagcaaguagagaagauua

SEQ ID NO: 558953 - RNA, 19 nt, Homo sapiens
  misc_RNA (1)...(19): siRNA sense strand
caaaguuucuuacugaagu

SEQ ID NO: 558954 - RNA, 19 nt, Homo sapiens
  misc_RNA (1)...(19): siRNA sense strand
gaucaucacugcccuacca

SEQ ID NO: 558955 - RNA, 19 nt, Homo sapiens
  misc_RNA (1)...(19): siRNA sense strand
ccagguuuguuauuucaua

SEQ ID NO: 558956 - RNA, 19 nt, Homo sapiens
  misc_RNA (1)...(19): siRNA sense strand
gcacugcucucaggcuuau

SEQ ID NO: 558957 - RNA, 19 nt, Homo sapiens
  misc_RNA (1)...(19): siRNA sense strand
gcaacucaauaaaugcauu

SEQ ID NO: 558958 - RNA, 19 nt, Homo sapiens
  misc_RNA (1)...(19): siRNA sense strand
gagagaacucguuguauga

SEQ ID NO: 558959 - RNA, 19 nt, Homo sapiens
  misc_RNA (1)...(19): siRNA sense strand
agagagaacucguuguaug

SEQ ID NO: 558960 - RNA, 19 nt, Homo sapiens
  misc_RNA (1)...(19): siRNA sense strand
caaaucuccuggucccuuu

SEQ ID NO: 558961 - RNA, 19 nt, Homo sapiens
  misc_RNA (1)...(19): siRNA sense strand
gaucugagaccgaggagaa

SEQ ID NO: 558962 - RNA, 19 nt, Homo sapiens
  misc_RNA (1)...(19): siRNA sense strand
gggaaugcccuucuaaaug

SEQ ID NO: 558963 - RNA, 19 nt, Homo sapiens
  misc_RNA (1)...(19): siRNA sense strand
ggaaaugaagcccagguuu

SEQ ID NO: 558964 - RNA, 19 nt, Homo sapiens
  misc_RNA (1)...(19): siRNA sense strand
ggauuuaucagucagcuuu

SEQ ID NO: 558965 - RNA, 19 nt, Homo sapiens
  misc_RNA (1)...(19): siRNA sense strand
ccaguggauuguuaaguuu

SEQ ID NO: 558966 - RNA, 19 nt, Homo sapiens
  misc_RNA (1)...(19): siRNA sense strand
agaaauauccagagaaguu

SEQ ID NO: 558967 - RNA, 19 nt, Homo sapiens
  misc_RNA (1)...(19): siRNA sense strand
guauggaaguauaacauug

SEQ ID NO: 558968 - RNA, 19 nt, Homo sapiens
  misc_RNA (1)...(19): siRNA sense strand
uuaaugacaugguauggaa

SEQ ID NO: 558969 - RNA, 19 nt, Homo sapiens
  misc_RNA (1)...(19): siRNA sense strand
caugggagcucugguagaa

SEQ ID NO: 558970 - RNA, 19 nt, Homo sapiens
  misc_RNA (1)...(19): siRNA sense strand
gcaauucauuucuggaagu

SEQ ID NO: 558971 - RNA, 19 nt, Homo sapiens
  misc_RNA (1)...(19): siRNA sense strand
agaaaugccugcuuauuac

SEQ ID NO: 558972 - RNA, 19 nt, Homo sapiens
  misc_RNA (1)...(19): siRNA sense strand
gaagaccgaauuccaguug

SEQ ID NO: 558973 - RNA, 19 nt, Homo sapiens
  misc_RNA (1)...(19): siRNA sense strand
agacugcuuuguugagaua

SEQ ID NO: 558974 - RNA, 19 nt, Homo sapiens
  misc_RNA (1)...(19): siRNA sense strand
uagcauauaucuuggaaag

SEQ ID NO: 558975 - RNA, 19 nt, Homo sapiens
  misc_RNA (1)...(19): siRNA sense strand
ugaaagagcaaguagagaa

SEQ ID NO: 558976 - RNA, 19 nt, Homo sapiens
  misc_RNA (1)...(19): siRNA sense strand
gaauuccaguugcuuuaug

SEQ ID NO: 558977 - RNA, 19 nt, Homo sapiens
  misc_RNA (1)...(19): siRNA sense strand
cauauuggauuguucuuca

SEQ ID NO: 558978 - RNA, 19 nt, Homo sapiens
  misc_RNA (1)...(19): siRNA sense strand
guauaacacucugcacuau

SEQ ID NO: 558979 - RNA, 19 nt, Homo sapiens
  misc_RNA (1)...(19): siRNA sense strand
gagcacugguuacagaaug

SEQ ID NO: 558980 - RNA, 19 nt, Homo sapiens
  misc_RNA (1)...(19): siRNA sense strand
gagcaacucauguaacaga

SEQ ID NO: 558981 - RNA, 19 nt, Homo sapiens
  misc_RNA (1)...(19): siRNA sense strand
ucaaaggauuuaucaguca

SEQ ID NO: 558982 - RNA, 19 nt, Homo sapiens
  misc_RNA (1)...(19): siRNA sense strand
gagaagauuuugacaauuc

SEQ ID NO: 558983 - RNA, 19 nt, Homo sapiens
  misc_RNA (1)...(19): siRNA sense strand
ccagugacuuaucuguaua

SEQ ID NO: 558984 - RNA, 19 nt, Homo sapiens
  misc_RNA (1)...(19): siRNA sense strand
gucagcaacucaauaaaug

SEQ ID NO: 558985 - RNA, 19 nt, Homo sapiens
  misc_RNA (1)...(19): siRNA sense strand
gaaagaaaugccugcuuau

SEQ ID NO: 558986 - RNA, 19 nt, Homo sapiens
  misc_RNA (1)...(19): siRNA sense strand
ugguggaucugguuguuua

SEQ ID NO: 558987 - RNA, 19 nt, Homo sapiens
  misc_RNA (1)...(19): siRNA sense strand
gaggacauuugcagauuuc

SEQ ID NO: 558988 - RNA, 19 nt, Homo sapiens
  misc_RNA (1)...(19): siRNA sense strand
uagagcaacucauguaaca

SEQ ID NO: 558989 - RNA, 19 nt, Homo sapiens
  misc_RNA (1)...(19): siRNA sense strand
guuuacagaugaaugacua

SEQ ID NO: 558990 - RNA, 19 nt, Homo sapiens
  misc_RNA (1)...(19): siRNA sense strand
agaaccagcuccaucuuug

SEQ ID NO: 558991 - RNA, 19 nt, Homo sapiens
  misc_RNA (1)...(19): siRNA sense strand
ccagagccauauuggauug

SEQ ID NO: 558992 - RNA, 19 nt, Homo sapiens
  misc_RNA (1)...(19): siRNA sense strand
cagaugacaccuacuauug

SEQ ID NO: 558993 - RNA, 19 nt, Homo sapiens
  misc_RNA (1)...(19): siRNA sense strand
gaaagccguuuuaaucuga

SEQ ID NO: 558994 - RNA, 19 nt, Homo sapiens
  misc_RNA (1)...(19): siRNA sense strand
ggaacuugguguaaagaca

SEQ ID NO: 558995 - RNA, 19 nt, Homo sapiens
  misc_RNA (1)...(19): siRNA sense strand
gcuuugggccuuaacauuu

SEQ ID NO: 558996 - RNA, 19 nt, Homo sapiens
  misc_RNA (1)...(19): siRNA sense strand
ugagaugaguuguagcuau

SEQ ID NO: 558997 - RNA, 19 nt, Homo sapiens
  misc_RNA (1)...(19): siRNA sense strand
uacaggcucugauucaauu

SEQ ID NO: 558998 - RNA, 19 nt, Homo sapiens
  misc_RNA (1)...(19): siRNA sense strand
gcagcagagucuaagaaau

SEQ ID NO: 558999 - RNA, 19 nt, Homo sapiens
  misc_RNA (1)...(19): siRNA sense strand
gaaacuggauccugcuacu

SEQ ID NO: 559000 - RNA, 19 nt, Homo sapiens
  misc_RNA (1)...(19): siRNA sense strand
ccacacugguuacuuggaa

SEQ ID NO: 559001 - RNA, 19 nt, Homo sapiens
  misc_RNA (1)...(19): siRNA sense strand
cgagaucucuuaaaaguga

SEQ ID NO: 559002 - RNA, 19 nt, Homo sapiens
  misc_RNA (1)...(19): siRNA sense strand
cgauucaucacacacauua

SEQ ID NO: 559003 - RNA, 19 nt, Homo sapiens
  misc_RNA (1)...(19): siRNA sense strand
gaaugcaauugguuugauc

SEQ ID NO: 559004 - RNA, 19 nt, Homo sapiens
  misc_RNA (1)...(19): siRNA sense strand
gggaaugugugucuucgau

SEQ ID NO: 559005 - RNA, 19 nt, Homo sapiens
  misc_RNA (1)...(19): siRNA sense strand
cacaagaaauauccagaga

SEQ ID NO: 559006 - RNA, 19 nt, Homo sapiens
  misc_RNA (1)...(19): siRNA sense strand
ugaggacauuugcagauuu

SEQ ID NO: 559007 - RNA, 19 nt, Homo sapiens
  misc_RNA (1)...(19): siRNA sense strand
ggaagucaaugagcaacga

SEQ ID NO: 559008 - RNA, 19 nt, Homo sapiens
  misc_RNA (1)...(19): siRNA sense strand
ucagggaacuugguguaaa

SEQ ID NO: 559009 - RNA, 19 nt, Homo sapiens
  misc_RNA (1)...(19): siRNA sense strand
gagguacaaccgcaguuua

SEQ ID NO: 559010 - RNA, 19 nt, Homo sapiens
  misc_RNA (1)...(19): siRNA sense strand
ggucagcaacucaauaaau

SEQ ID NO: 559011 - RNA, 19 nt, Homo sapiens
  misc_RNA (1)...(19): siRNA sense strand
gaugacaccuacuauugca

SEQ ID NO: 559012 - RNA, 19 nt, Homo sapiens
  misc_RNA (1)...(19): siRNA sense strand
caucuaggaggcuuauaua

SEQ ID NO: 559013 - RNA, 19 nt, Homo sapiens
  misc_RNA (1)...(19): siRNA sense strand
ccaggaagguguucuguga

SEQ ID NO: 559014 - RNA, 19 nt, Homo sapiens
  misc_RNA (1)...(19): siRNA sense strand
gaacuggaaggauuacaaa

SEQ ID NO: 559015 - RNA, 19 nt, Homo sapiens
  misc_RNA (1)...(19): siRNA sense strand
cagcggaacuggaaggauu

SEQ ID NO: 559016 - RNA, 19 nt, Homo sapiens
  misc_RNA (1)...(19): siRNA sense strand
gcagugagaaccagcuaua

SEQ ID NO: 559017 - RNA, 19 nt, Homo sapiens
  misc_RNA (1)...(19): siRNA sense strand
ccaacaagcuggagaacca

SEQ ID NO: 559018 - RNA, 19 nt, Homo sapiens
  misc_RNA (1)...(19): siRNA sense strand
gaaccagacaucaagaaug

SEQ ID NO: 559019 - RNA, 19 nt, Homo sapiens
  misc_RNA (1)...(19): siRNA sense strand
gagaauggcaccgugaauu

SEQ ID NO: 559020 - RNA, 19 nt, Homo sapiens
  misc_RNA (1)...(19): siRNA sense strand
ccaacacccuccagagaga

SEQ ID NO: 559021 - RNA, 19 nt, Homo sapiens
  misc_RNA (1)...(19): siRNA sense strand
aagaauggaugcccagaug

SEQ ID NO: 559022 - RNA, 19 nt, Homo sapiens
  misc_RNA (1)...(19): siRNA sense strand
gcaccagccuccugaacca

SEQ ID NO: 559023 - RNA, 19 nt, Homo sapiens
  misc_RNA (1)...(19): siRNA sense strand
caaauggcccagaaucaga

SEQ ID NO: 559024 - RNA, 19 nt, Homo sapiens
  misc_RNA (1)...(19): siRNA sense strand
gagcagguccagcagcaaa

SEQ ID NO: 559025 - RNA, 19 nt, Homo sapiens
  misc_RNA (1)...(19): siRNA sense strand
agaauggcaccgugaauuu

SEQ ID NO: 559026 - RNA, 19 nt, Homo sapiens
  misc_RNA (1)...(19): siRNA sense strand
caacgaagcccaggaaggu

SEQ ID NO: 559027 - RNA, 19 nt, Homo sapiens
  misc_RNA (1)...(19): siRNA sense strand
cugcagaacaccagcuuua

SEQ ID NO: 559028 - RNA, 19 nt, Homo sapiens
  misc_RNA (1)...(19): siRNA sense strand
ggaacuggaaggauuacaa

SEQ ID NO: 559029 - RNA, 19 nt, Homo sapiens
  misc_RNA (1)...(19): siRNA sense strand
caagugugcccaagugaug

SEQ ID NO: 559030 - RNA, 19 nt, Homo sapiens
  misc_RNA (1)...(19): siRNA sense strand
ccagaccacugcccagauc

SEQ ID NO: 559031 - RNA, 19 nt, Homo sapiens
  misc_RNA (1)...(19): siRNA sense strand
aaccagacaucaagaaugg

SEQ ID NO: 559032 - RNA, 19 nt, Homo sapiens
  misc_RNA (1)...(19): siRNA sense strand
cgacaacaaguacaagaug

SEQ ID NO: 559033 - RNA, 19 nt, Homo sapiens
  misc_RNA (1)...(19): siRNA sense strand
gcaaauggcccagaaucag

SEQ ID NO: 559034 - RNA, 19 nt, Homo sapiens
  misc_RNA (1)...(19): siRNA sense strand
gauacggccuuuggacauc

SEQ ID NO: 559035 - RNA, 19 nt, Homo sapiens
  misc_RNA (1)...(19): siRNA sense strand
aaacagcgcgcucgagaag

SEQ ID NO: 559036 - RNA, 19 nt, Homo sapiens
  misc_RNA (1)...(19): siRNA sense strand
cuagagagggccaucaaga

SEQ ID NO: 559037 - RNA, 19 nt, Homo sapiens
  misc_RNA (1)...(19): siRNA sense strand
ccaggacugugcagagauc

SEQ ID NO: 559038 - RNA, 19 nt, Homo sapiens
  misc_RNA (1)...(19): siRNA sense strand
gaagggcagccuacucucu

SEQ ID NO: 559039 - RNA, 19 nt, Homo sapiens
  misc_RNA (1)...(19): siRNA sense strand
gcaugaugauacggccuuu

SEQ ID NO: 559040 - RNA, 19 nt, Homo sapiens
  misc_RNA (1)...(19): siRNA sense strand
uuagcacccuugacucaga

SEQ ID NO: 559041 - RNA, 19 nt, Homo sapiens
  misc_RNA (1)...(19): siRNA sense strand
gcaagugugcccaagugau

SEQ ID NO: 559042 - RNA, 19 nt, Homo sapiens
  misc_RNA (1)...(19): siRNA sense strand
aaccagcuauacaggcuuu

SEQ ID NO: 559043 - RNA, 19 nt, Homo sapiens
  misc_RNA (1)...(19): siRNA sense strand
gccagcauccucagcaaga

SEQ ID NO: 559044 - RNA, 19 nt, Homo sapiens
  misc_RNA (1)...(19): siRNA sense strand
ccagaugccagagaccuuu

SEQ ID NO: 559045 - RNA, 19 nt, Homo sapiens
  misc_RNA (1)...(19): siRNA sense strand
cuaccacgcucccgacaac

SEQ ID NO: 559046 - RNA, 19 nt, Homo sapiens
  misc_RNA (1)...(19): siRNA sense strand
cugcaagugugcccaagug

SEQ ID NO: 559047 - RNA, 19 nt, Homo sapiens
  misc_RNA (1)...(19): siRNA sense strand
cagaacaccagcuuuagca

SEQ ID NO: 559048 - RNA, 19 nt, Homo sapiens
  misc_RNA (1)...(19): siRNA sense strand
gcacuggcugggcaaugaa

SEQ ID NO: 559049 - RNA, 19 nt, Homo sapiens
  misc_RNA (1)...(19): siRNA sense strand
gggcugcgagacacuugua

SEQ ID NO: 559050 - RNA, 19 nt, Homo sapiens
  misc_RNA (1)...(19): siRNA sense strand
cagaagggcagccuacucu

SEQ ID NO: 559051 - RNA, 19 nt, Homo sapiens
  misc_RNA (1)...(19): siRNA sense strand
cagcaaauggcccagaauc

SEQ ID NO: 559052 - RNA, 19 nt, Homo sapiens
  misc_RNA (1)...(19): siRNA sense strand
gcgugccucucgcaugaug

SEQ ID NO: 559053 - RNA, 19 nt, Homo sapiens
  misc_RNA (1)...(19): siRNA sense strand
ccagcauccucagcaagaa

SEQ ID NO: 559054 - RNA, 19 nt, Homo sapiens
  misc_RNA (1)...(19): siRNA sense strand
ccaugucuguggcucaaca

SEQ ID NO: 559055 - RNA, 19 nt, Homo sapiens
  misc_RNA (1)...(19): siRNA sense strand
gcaagcugaccgacaugga

SEQ ID NO: 559056 - RNA, 19 nt, Homo sapiens
  misc_RNA (1)...(19): siRNA sense strand
agaccuuucuguccaccaa

SEQ ID NO: 559057 - RNA, 19 nt, Homo sapiens
  misc_RNA (1)...(19): siRNA sense strand
ucuggaggguggugguuug

SEQ ID NO: 559058 - RNA, 19 nt, Homo sapiens
  misc_RNA (1)...(19): siRNA sense strand
gcagaacaccagcuuuagc

SEQ ID NO: 559059 - RNA, 19 nt, Homo sapiens
  misc_RNA (1)...(19): siRNA sense strand
ccaccaacaagcuggagaa

SEQ ID NO: 559060 - RNA, 19 nt, Homo sapiens
  misc_RNA (1)...(19): siRNA sense strand
aggcgaagcugcugaacac

SEQ ID NO: 559061 - RNA, 19 nt, Homo sapiens
  misc_RNA (1)...(19): siRNA sense strand
caaggcaggaggcggauag

SEQ ID NO: 559062 - RNA, 19 nt, Homo sapiens
  misc_RNA (1)...(19): siRNA sense strand
caccaugucuguggcucaa

SEQ ID NO: 559063 - RNA, 19 nt, Homo sapiens
  misc_RNA (1)...(19): siRNA sense strand
gaauggcaccgugaauuuu

SEQ ID NO: 559064 - RNA, 19 nt, Homo sapiens
  misc_RNA (1)...(19): siRNA sense strand
caagaauggaugcccagau

SEQ ID NO: 559065 - RNA, 19 nt, Homo sapiens
  misc_RNA (1)...(19): siRNA sense strand
cgcaguggcugaagaagcu

SEQ ID NO: 559066 - RNA, 19 nt, Homo sapiens
  misc_RNA (1)...(19): siRNA sense strand
agagggccaucaagacgau

SEQ ID NO: 559067 - RNA, 19 nt, Homo sapiens
  misc_RNA (1)...(19): siRNA sense strand
cuggaaggauuacaaacag

SEQ ID NO: 559068 - RNA, 19 nt, Homo sapiens
  misc_RNA (1)...(19): siRNA sense strand
ccagacaucaagaauggau

SEQ ID NO: 559069 - RNA, 19 nt, Homo sapiens
  misc_RNA (1)...(19): siRNA sense strand
gcagguccagcagcaaaug

SEQ ID NO: 559070 - RNA, 19 nt, Homo sapiens
  misc_RNA (1)...(19): siRNA sense strand
ugaaccagacaucaagaau

SEQ ID NO: 559071 - RNA, 19 nt, Homo sapiens
  misc_RNA (1)...(19): siRNA sense strand
ucaacggcgucuacuacca

SEQ ID NO: 559072 - RNA, 19 nt, Homo sapiens
  misc_RNA (1)...(19): siRNA sense strand
ccauccagguguccaaugc

SEQ ID NO: 559073 - RNA, 19 nt, Homo sapiens
  misc_RNA (1)...(19): siRNA sense strand
gcagcaaauggcccagaau

SEQ ID NO: 559074 - RNA, 19 nt, Homo sapiens
  misc_RNA (1)...(19): siRNA sense strand
ccucaacggcgucuacuac

SEQ ID NO: 559075 - RNA, 19 nt, Homo sapiens
  misc_RNA (1)...(19): siRNA sense strand
acacgcaguggcugaagaa

SEQ ID NO: 559076 - RNA, 19 nt, Homo sapiens
  misc_RNA (1)...(19): siRNA sense strand
gaugacaccucucaacaaa

SEQ ID NO: 559077 - RNA, 19 nt, Homo sapiens
  misc_RNA (1)...(19): siRNA sense strand
uaaaguugcucaucaaguu

SEQ ID NO: 559078 - RNA, 19 nt, Homo sapiens
  misc_RNA (1)...(19): siRNA sense strand
ggaagcaacugcagagaca

SEQ ID NO: 559079 - RNA, 19 nt, Homo sapiens
  misc_RNA (1)...(19): siRNA sense strand
ccaaggagcuggacacagu

SEQ ID NO: 559080 - RNA, 19 nt, Homo sapiens
  misc_RNA (1)...(19): siRNA sense strand
caacgagucugccgaagga

SEQ ID NO: 559081 - RNA, 19 nt, Homo sapiens
  misc_RNA (1)...(19): siRNA sense strand
gaucaagaccgcugucauu

SEQ ID NO: 559082 - RNA, 19 nt, Homo sapiens
  misc_RNA (1)...(19): siRNA sense strand
caaagcaaauggagaaugg

SEQ ID NO: 559083 - RNA, 19 nt, Homo sapiens
  misc_RNA (1)...(19): siRNA sense strand
gggcagaccucuucuacuc

SEQ ID NO: 559084 - RNA, 19 nt, Homo sapiens
  misc_RNA (1)...(19): siRNA sense strand
ccacguacauuaacaugau

SEQ ID NO: 559085 - RNA, 19 nt, Homo sapiens
  misc_RNA (1)...(19): siRNA sense strand
gaccgaggcuacauucaga

SEQ ID NO: 559086 - RNA, 19 nt, Homo sapiens
  misc_RNA (1)...(19): siRNA sense strand
uggagaggcucaaggagua

SEQ ID NO: 559087 - RNA, 19 nt, Homo sapiens
  misc_RNA (1)...(19): siRNA sense strand
gcagaccucuucuacucuu

SEQ ID NO: 559088 - RNA, 19 nt, Homo sapiens
  misc_RNA (1)...(19): siRNA sense strand
gaaggaagcaaagcaaaug

SEQ ID NO: 559089 - RNA, 19 nt, Homo sapiens
  misc_RNA (1)...(19): siRNA sense strand
ggccgcagaucuuaaaguu

SEQ ID NO: 559090 - RNA, 19 nt, Homo sapiens
  misc_RNA (1)...(19): siRNA sense strand
gaccuccgcuucaagauca

SEQ ID NO: 559091 - RNA, 19 nt, Homo sapiens
  misc_RNA (1)...(19): siRNA sense strand
aaggagaaauccaggagua

SEQ ID NO: 559092 - RNA, 19 nt, Homo sapiens
  misc_RNA (1)...(19): siRNA sense strand
caucugaaauggaaaccaa

SEQ ID NO: 559093 - RNA, 19 nt, Homo sapiens
  misc_RNA (1)...(19): siRNA sense strand
gcaacugcaucguucuguu

SEQ ID NO: 559094 - RNA, 19 nt, Homo sapiens
  misc_RNA (1)...(19): siRNA sense strand
ggaaagaagucggggcaua

SEQ ID NO: 559095 - RNA, 19 nt, Homo sapiens
  misc_RNA (1)...(19): siRNA sense strand
ugaacgaaauucucaaugg

SEQ ID NO: 559096 - RNA, 19 nt, Homo sapiens
  misc_RNA (1)...(19): siRNA sense strand
caagcuagaccaugaaugu

SEQ ID NO: 559097 - RNA, 19 nt, Homo sapiens
  misc_RNA (1)...(19): siRNA sense strand
guacucggaugaagaaguc

SEQ ID NO: 559098 - RNA, 19 nt, Homo sapiens
  misc_RNA (1)...(19): siRNA sense strand
gagaggaccuggacuucgu

SEQ ID NO: 559099 - RNA, 19 nt, Homo sapiens
  misc_RNA (1)...(19): siRNA sense strand
caacugcaucguucuguuu

SEQ ID NO: 559100 - RNA, 19 nt, Homo sapiens
  misc_RNA (1)...(19): siRNA sense strand
ggacuuggccacguacauu

SEQ ID NO: 559101 - RNA, 19 nt, Homo sapiens
  misc_RNA (1)...(19): siRNA sense strand
caacagcaccgcagaacug

SEQ ID NO: 559102 - RNA, 19 nt, Homo sapiens
  misc_RNA (1)...(19): siRNA sense strand
ggaaggaagcaaagcaaau

SEQ ID NO: 559103 - RNA, 19 nt, Homo sapiens
  misc_RNA (1)...(19): siRNA sense strand
gaucaaagugcuaaagcuu

SEQ ID NO: 559104 - RNA, 19 nt, Homo sapiens
  misc_RNA (1)...(19): siRNA sense strand
ugaaggugcugaagaaguc

SEQ ID NO: 559105 - RNA, 19 nt, Homo sapiens
  misc_RNA (1)...(19): siRNA sense strand
gcagagaggucuuuucuac

SEQ ID NO: 559106 - RNA, 19 nt, Homo sapiens
  misc_RNA (1)...(19): siRNA sense strand
ggaucuuucucucccauga

SEQ ID NO: 559107 - RNA, 19 nt, Homo sapiens
  misc_RNA (1)...(19): siRNA sense strand
cgaugaagaccaagacgua

SEQ ID NO: 559108 - RNA, 19 nt, Homo sapiens
  misc_RNA (1)...(19): siRNA sense strand
gcaucaacaucgccaagau

SEQ ID NO: 559109 - RNA, 19 nt, Homo sapiens
  misc_RNA (1)...(19): siRNA sense strand
gcugguagcccuagugugu

SEQ ID NO: 559110 - RNA, 19 nt, Homo sapiens
  misc_RNA (1)...(19): siRNA sense strand
agaaccagaaggccuauua

SEQ ID NO: 559111 - RNA, 19 nt, Homo sapiens
  misc_RNA (1)...(19): siRNA sense strand
ggacucaggagcacacgaa

SEQ ID NO: 559112 - RNA, 19 nt, Homo sapiens
  misc_RNA (1)...(19): siRNA sense strand
ccugggagcuggcauucaa

SEQ ID NO: 559113 - RNA, 19 nt, Homo sapiens
  misc_RNA (1)...(19): siRNA sense strand
cgaaagagaguuccaaggu

SEQ ID NO: 559114 - RNA, 19 nt, Homo sapiens
  misc_RNA (1)...(19): siRNA sense strand
uggcugagauggacaaagu

SEQ ID NO: 559115 - RNA, 19 nt, Homo sapiens
  misc_RNA (1)...(19): siRNA sense strand
gaagucugccuaccuguca

SEQ ID NO: 559116 - RNA, 19 nt, Homo sapiens
  misc_RNA (1)...(19): siRNA sense strand
cauugcaggucaccacgua

SEQ ID NO: 559117 - RNA, 19 nt, Homo sapiens
  misc_RNA (1)...(19): siRNA sense strand
cugacaagcuagaccauga

SEQ ID NO: 559118 - RNA, 19 nt, Homo sapiens
  misc_RNA (1)...(19): siRNA sense strand
ucuguuugcugcccuguuu

SEQ ID NO: 559119 - RNA, 19 nt, Homo sapiens
  misc_RNA (1)...(19): siRNA sense strand
gaccuggacuucguucuca

SEQ ID NO: 559120 - RNA, 19 nt, Homo sapiens
  misc_RNA (1)...(19): siRNA sense strand
gcaaagacaaucggaucaa

SEQ ID NO: 559121 - RNA, 19 nt, Homo sapiens
  misc_RNA (1)...(19): siRNA sense strand
gaaauucucaaugggauca

SEQ ID NO: 559122 - RNA, 19 nt, Homo sapiens
  misc_RNA (1)...(19): siRNA sense strand
caaagacaaucggaucaag

SEQ ID NO: 559123 - RNA, 19 nt, Homo sapiens
  misc_RNA (1)...(19): siRNA sense strand
cucaugagcuucuucuuca

SEQ ID NO: 559124 - RNA, 19 nt, Homo sapiens
  misc_RNA (1)...(19): siRNA sense strand
aaggagagaucaucaucga

SEQ ID NO: 559125 - RNA, 19 nt, Homo sapiens
  misc_RNA (1)...(19): siRNA sense strand
gagcugaaggugcugaaga

SEQ ID NO: 559126 - RNA, 19 nt, Homo sapiens
  misc_RNA (1)...(19): siRNA sense strand
uggaaugucacguggaaua

SEQ ID NO: 559127 - RNA, 19 nt, Homo sapiens
  misc_RNA (1)...(19): siRNA sense strand
ggaaggcccuggugaucac

SEQ ID NO: 559128 - RNA, 19 nt, Homo sapiens
  misc_RNA (1)...(19): siRNA sense strand
ccacgcugcuugcuaccuu

SEQ ID NO: 559129 - RNA, 19 nt, Homo sapiens
  misc_RNA (1)...(19): siRNA sense strand
gcgagugucucccucaaac

SEQ ID NO: 559130 - RNA, 19 nt, Homo sapiens
  misc_RNA (1)...(19): siRNA sense strand
ggacacgucggaacaaguc

SEQ ID NO: 559131 - RNA, 19 nt, Homo sapiens
  misc_RNA (1)...(19): siRNA sense strand
gaguggaauuccggaacua

SEQ ID NO: 559132 - RNA, 19 nt, Homo sapiens
  misc_RNA (1)...(19): siRNA sense strand
caaggaguauucagagacu

SEQ ID NO: 559133 - RNA, 19 nt, Homo sapiens
  misc_RNA (1)...(19): siRNA sense strand
cacaagggaucgccguguu

SEQ ID NO: 559134 - RNA, 19 nt, Homo sapiens
  misc_RNA (1)...(19): siRNA sense strand
gcgcuggcuuccaacuauu

SEQ ID NO: 559135 - RNA, 19 nt, Homo sapiens
  misc_RNA (1)...(19): siRNA sense strand
guacugggacuacaugaag

SEQ ID NO: 559136 - RNA, 19 nt, Homo sapiens
  misc_RNA (1)...(19): siRNA sense strand
gcaaagcaaauggagaaug

SEQ ID NO: 559137 - RNA, 19 nt, Homo sapiens
  misc_RNA (1)...(19): siRNA sense strand
aagcaaagcaaauggagaa

SEQ ID NO: 559138 - RNA, 19 nt, Homo sapiens
  misc_RNA (1)...(19): siRNA sense strand
gcagguggacgucaucauc

SEQ ID NO: 559139 - RNA, 19 nt, Homo sapiens
  misc_RNA (1)...(19): siRNA sense strand
gacuuggccacguacauua

SEQ ID NO: 559140 - RNA, 19 nt, Homo sapiens
  misc_RNA (1)...(19): siRNA sense strand
ucauggacuuggccacgua

SEQ ID NO: 559141 - RNA, 19 nt, Homo sapiens
  misc_RNA (1)...(19): siRNA sense strand
gaaggaaugcgccaagacu

SEQ ID NO: 559142 - RNA, 19 nt, Homo sapiens
  misc_RNA (1)...(19): siRNA sense strand
cagggaucaugcucacuuu

SEQ ID NO: 559143 - RNA, 19 nt, Homo sapiens
  misc_RNA (1)...(19): siRNA sense strand
ccaguacucggaugaagaa

SEQ ID NO: 559144 - RNA, 19 nt, Homo sapiens
  misc_RNA (1)...(19): siRNA sense strand
ggucaagcuuuccguguac

SEQ ID NO: 559145 - RNA, 19 nt, Homo sapiens
  misc_RNA (1)...(19): siRNA sense strand
uaaagaacuggaagaagga

SEQ ID NO: 559146 - RNA, 19 nt, Homo sapiens
  misc_RNA (1)...(19): siRNA sense strand
cucagugucuuacucauug

SEQ ID NO: 559147 - RNA, 19 nt, Homo sapiens
  misc_RNA (1)...(19): siRNA sense strand
ucaagcugaugaacgaaau

SEQ ID NO: 559148 - RNA, 19 nt, Homo sapiens
  misc_RNA (1)...(19): siRNA sense strand
ggaucaugcucacuuucug

SEQ ID NO: 559149 - RNA, 19 nt, Homo sapiens
  misc_RNA (1)...(19): siRNA sense strand
cagcagcuccuccuccuau

SEQ ID NO: 559150 - RNA, 19 nt, Homo sapiens
  misc_RNA (1)...(19): siRNA sense strand
gcacagcaugagcuacuug

SEQ ID NO: 559151 - RNA, 19 nt, Homo sapiens
  misc_RNA (1)...(19): siRNA sense strand
ggaucaaagugcuaaagcu

SEQ ID NO: 559152 - RNA, 19 nt, Homo sapiens
  misc_RNA (1)...(19): siRNA sense strand
gaugaacgaaauucucaau

SEQ ID NO: 559153 - RNA, 19 nt, Homo sapiens
  misc_RNA (1)...(19): siRNA sense strand
gcccgucaaugcugugaug

SEQ ID NO: 559154 - RNA, 19 nt, Homo sapiens
  misc_RNA (1)...(19): siRNA sense strand
augaggagguggaggcuuu

SEQ ID NO: 559155 - RNA, 19 nt, Homo sapiens
  misc_RNA (1)...(19): siRNA sense strand
ccaagguggaugcgaauga

SEQ ID NO: 559156 - RNA, 19 nt, Homo sapiens
  misc_RNA (1)...(19): siRNA sense strand
ucaaacgccugaggaucuu

SEQ ID NO: 559157 - RNA, 19 nt, Homo sapiens
  misc_RNA (1)...(19): siRNA sense strand
ggucagcccaacucucuug

SEQ ID NO: 559158 - RNA, 19 nt, Homo sapiens
  misc_RNA (1)...(19): siRNA sense strand
gaccaugaaugugcagaag

SEQ ID NO: 559159 - RNA, 19 nt, Homo sapiens
  misc_RNA (1)...(19): siRNA sense strand
auuggugccugcaucguua

SEQ ID NO: 559160 - RNA, 19 nt, Homo sapiens
  misc_RNA (1)...(19): siRNA sense strand
gggaaggaagcaaagcaaa

SEQ ID NO: 559161 - RNA, 19 nt, Homo sapiens
  misc_RNA (1)...(19): siRNA sense strand
gggcccuacuuccucauga

SEQ ID NO: 559162 - RNA, 19 nt, Homo sapiens
  misc_RNA (1)...(19): siRNA sense strand
guucaugggcucccuguuc

SEQ ID NO: 559163 - RNA, 19 nt, Homo sapiens
  misc_RNA (1)...(19): siRNA sense strand
cagggcaggucaagcuuuc

SEQ ID NO: 559164 - RNA, 19 nt, Homo sapiens
  misc_RNA (1)...(19): siRNA sense strand
ugauggcgaugaagaccaa

SEQ ID NO: 559165 - RNA, 19 nt, Homo sapiens
  misc_RNA (1)...(19): siRNA sense strand
gagauugucaaccucaugu

SEQ ID NO: 559166 - RNA, 19 nt, Homo sapiens
  misc_RNA (1)...(19): siRNA sense strand
acaccgugcugcuguuugu

SEQ ID NO: 559167 - RNA, 19 nt, Homo sapiens
  misc_RNA (1)...(19): siRNA sense strand
ucuuaaaguugcucaucaa

SEQ ID NO: 559168 - RNA, 19 nt, Homo sapiens
  misc_RNA (1)...(19): siRNA sense strand
ucccggaggucaucaagau

SEQ ID NO: 559169 - RNA, 19 nt, Homo sapiens
  misc_RNA (1)...(19): siRNA sense strand
ggacagugcagggaagcaa

SEQ ID NO: 559170 - RNA, 19 nt, Homo sapiens
  misc_RNA (1)...(19): siRNA sense strand
ggagguggaggcuuugauc

SEQ ID NO: 559171 - RNA, 19 nt, Homo sapiens
  misc_RNA (1)...(19): siRNA sense strand
gcaggucaccacguacuug

SEQ ID NO: 559172 - RNA, 19 nt, Homo sapiens
  misc_RNA (1)...(19): siRNA sense strand
agaaggaggagaccuggaa

SEQ ID NO: 559173 - RNA, 19 nt, Homo sapiens
  misc_RNA (1)...(19): siRNA sense strand
ucgugugggugccuuguuu

SEQ ID NO: 559174 - RNA, 19 nt, Homo sapiens
  misc_RNA (1)...(19): siRNA sense strand
ccacaucugcuucgucagu

SEQ ID NO: 559175 - RNA, 19 nt, Homo sapiens
  misc_RNA (1)...(19): siRNA sense strand
gcaccaguacuuccacauc

SEQ ID NO: 559176 - RNA, 19 nt, Homo sapiens
  misc_RNA (1)...(19): siRNA sense strand
gaugacaccucucaacaaa

SEQ ID NO: 559177 - RNA, 19 nt, Homo sapiens
  misc_RNA (1)...(19): siRNA sense strand
uaaaguugcucaucaaguu

SEQ ID NO: 559178 - RNA, 19 nt, Homo sapiens
  misc_RNA (1)...(19): siRNA sense strand
ggaagcaacugcagagaca

SEQ ID NO: 559179 - RNA, 19 nt, Homo sapiens
  misc_RNA (1)...(19): siRNA sense strand
ccaaggagcuggacacagu

SEQ ID NO: 559180 - RNA, 19 nt, Homo sapiens
  misc_RNA (1)...(19): siRNA sense strand
caacgagucugccgaagga

SEQ ID NO: 559181 - RNA, 19 nt, Homo sapiens
  misc_RNA (1)...(19): siRNA sense strand
gaucaagaccgcugucauu

SEQ ID NO: 559182 - RNA, 19 nt, Homo sapiens
  misc_RNA (1)...(19): siRNA sense strand
caaagcaaauggagaaugg

SEQ ID NO: 559183 - RNA, 19 nt, Homo sapiens
  misc_RNA (1)...(19): siRNA sense strand
gggcagaccucuucuacuc

SEQ ID NO: 559184 - RNA, 19 nt, Homo sapiens
  misc_RNA (1)...(19): siRNA sense strand
ccacguacauuaacaugau

SEQ ID NO: 559185 - RNA, 19 nt, Homo sapiens
  misc_RNA (1)...(19): siRNA sense strand
gaccgaggcuacauucaga

SEQ ID NO: 559186 - RNA, 19 nt, Homo sapiens
  misc_RNA (1)...(19): siRNA sense strand
uggagaggcucaaggagua

SEQ ID NO: 559187 - RNA, 19 nt, Homo sapiens
  misc_RNA (1)...(19): siRNA sense strand
gcagaccucuucuacucuu

SEQ ID NO: 559188 - RNA, 19 nt, Homo sapiens
  misc_RNA (1)...(19): siRNA sense strand
gaaggaagcaaagcaaaug

SEQ ID NO: 559189 - RNA, 19 nt, Homo sapiens
  misc_RNA (1)...(19): siRNA sense strand
ggccgcagaucuuaaaguu

SEQ ID NO: 559190 - RNA, 19 nt, Homo sapiens
  misc_RNA (1)...(19): siRNA sense strand
gaccuccgcuucaagauca

SEQ ID NO: 559191 - RNA, 19 nt, Homo sapiens
  misc_RNA (1)...(19): siRNA sense strand
aaggagaaauccaggagua

SEQ ID NO: 559192 - RNA, 19 nt, Homo sapiens
  misc_RNA (1)...(19): siRNA sense strand
caucugaaauggaaaccaa

SEQ ID NO: 559193 - RNA, 19 nt, Homo sapiens
  misc_RNA (1)...(19): siRNA sense strand
gcaacugcaucguucuguu

SEQ ID NO: 559194 - RNA, 19 nt, Homo sapiens
  misc_RNA (1)...(19): siRNA sense strand
ggaaagaagucggggcaua

SEQ ID NO: 559195 - RNA, 19 nt, Homo sapiens
  misc_RNA (1)...(19): siRNA sense strand
ugaacgaaauucucaaugg

SEQ ID NO: 559196 - RNA, 19 nt, Homo sapiens
  misc_RNA (1)...(19): siRNA sense strand
caagcuagaccaugaaugu

SEQ ID NO: 559197 - RNA, 19 nt, Homo sapiens
  misc_RNA (1)...(19): siRNA sense strand
guacucggaugaagaaguc

SEQ ID NO: 559198 - RNA, 19 nt, Homo sapiens
  misc_RNA (1)...(19): siRNA sense strand
gagaggaccuggacuucgu

SEQ ID NO: 559199 - RNA, 19 nt, Homo sapiens
  misc_RNA (1)...(19): siRNA sense strand
caacugcaucguucuguuu

SEQ ID NO: 559200 - RNA, 19 nt, Homo sapiens
  misc_RNA (1)...(19): siRNA sense strand
ggacuuggccacguacauu

SEQ ID NO: 559201 - RNA, 19 nt, Homo sapiens
  misc_RNA (1)...(19): siRNA sense strand
caacagcaccgcagaacug

SEQ ID NO: 559202 - RNA, 19 nt, Homo sapiens
  misc_RNA (1)...(19): siRNA sense strand
ggaaggaagcaaagcaaau

SEQ ID NO: 559203 - RNA, 19 nt, Homo sapiens
  misc_RNA (1)...(19): siRNA sense strand
gaucaaagugcuaaagcuu

SEQ ID NO: 559204 - RNA, 19 nt, Homo sapiens
  misc_RNA (1)...(19): siRNA sense strand
ugaaggugcugaagaaguc

SEQ ID NO: 559205 - RNA, 19 nt, Homo sapiens
  misc_RNA (1)...(19): siRNA sense strand
gcagagaggucuuuucuac

SEQ ID NO: 559206 - RNA, 19 nt, Homo sapiens
  misc_RNA (1)...(19): siRNA sense strand
ggaucuuucucucccauga

SEQ ID NO: 559207 - RNA, 19 nt, Homo sapiens
  misc_RNA (1)...(19): siRNA sense strand
cgaugaagaccaagacgua

SEQ ID NO: 559208 - RNA, 19 nt, Homo sapiens
  misc_RNA (1)...(19): siRNA sense strand
gcaucaacaucgccaagau

SEQ ID NO: 559209 - RNA, 19 nt, Homo sapiens
  misc_RNA (1)...(19): siRNA sense strand
gcugguagcccuagugugu

SEQ ID NO: 559210 - RNA, 19 nt, Homo sapiens
  misc_RNA (1)...(19): siRNA sense strand
agaaccagaaggccuauua

SEQ ID NO: 559211 - RNA, 19 nt, Homo sapiens
  misc_RNA (1)...(19): siRNA sense strand
ggacucaggagcacacgaa

SEQ ID NO: 559212 - RNA, 19 nt, Homo sapiens
  misc_RNA (1)...(19): siRNA sense strand
ccugggagcuggcauucaa

SEQ ID NO: 559213 - RNA, 19 nt, Homo sapiens
  misc_RNA (1)...(19): siRNA sense strand
cgaaagagaguuccaaggu

SEQ ID NO: 559214 - RNA, 19 nt, Homo sapiens
  misc_RNA (1)...(19): siRNA sense strand
uggcugagauggacaaagu

SEQ ID NO: 559215 - RNA, 19 nt, Homo sapiens
  misc_RNA (1)...(19): siRNA sense strand
gaagucugccuaccuguca

SEQ ID NO: 559216 - RNA, 19 nt, Homo sapiens
  misc_RNA (1)...(19): siRNA sense strand
cauugcaggucaccacgua

SEQ ID NO: 559217 - RNA, 19 nt, Homo sapiens
  misc_RNA (1)...(19): siRNA sense strand
cugacaagcuagaccauga

SEQ ID NO: 559218 - RNA, 19 nt, Homo sapiens
  misc_RNA (1)...(19): siRNA sense strand
ucuguuugcugcccuguuu

SEQ ID NO: 559219 - RNA, 19 nt, Homo sapiens
  misc_RNA (1)...(19): siRNA sense strand
gaccuggacuucguucuca

SEQ ID NO: 559220 - RNA, 19 nt, Homo sapiens
  misc_RNA (1)...(19): siRNA sense strand
gcaaagacaaucggaucaa

SEQ ID NO: 559221 - RNA, 19 nt, Homo sapiens
  misc_RNA (1)...(19): siRNA sense strand
gaaauucucaaugggauca

SEQ ID NO: 559222 - RNA, 19 nt, Homo sapiens
  misc_RNA (1)...(19): siRNA sense strand
caaagacaaucggaucaag

SEQ ID NO: 559223 - RNA, 19 nt, Homo sapiens
  misc_RNA (1)...(19): siRNA sense strand
cucaugagcuucuucuuca

SEQ ID NO: 559224 - RNA, 19 nt, Homo sapiens
  misc_RNA (1)...(19): siRNA sense strand
aaggagagaucaucaucga

SEQ ID NO: 559225 - RNA, 19 nt, Homo sapiens
  misc_RNA (1)...(19): siRNA sense strand
gagcugaaggugcugaaga

SEQ ID NO: 559226 - RNA, 19 nt, Homo sapiens
  misc_RNA (1)...(19): siRNA sense strand
uggaaugucacguggaaua

SEQ ID NO: 559227 - RNA, 19 nt, Homo sapiens
  misc_RNA (1)...(19): siRNA sense strand
ggaaggcccuggugaucac

SEQ ID NO: 559228 - RNA, 19 nt, Homo sapiens
  misc_RNA (1)...(19): siRNA sense strand
ccacgcugcuugcuaccuu

SEQ ID NO: 559229 - RNA, 19 nt, Homo sapiens
  misc_RNA (1)...(19): siRNA sense strand
gcgagugucucccucaaac

SEQ ID NO: 559230 - RNA, 19 nt, Homo sapiens
  misc_RNA (1)...(19): siRNA sense strand
ggacacgucggaacaaguc

SEQ ID NO: 559231 - RNA, 19 nt, Homo sapiens
  misc_RNA (1)...(19): siRNA sense strand
gaguggaauuccggaacua

SEQ ID NO: 559232 - RNA, 19 nt, Homo sapiens
  misc_RNA (1)...(19): siRNA sense strand
caaggaguauucagagacu

SEQ ID NO: 559233 - RNA, 19 nt, Homo sapiens
  misc_RNA (1)...(19): siRNA sense strand
cacaagggaucgccguguu

SEQ ID NO: 559234 - RNA, 19 nt, Homo sapiens
  misc_RNA (1)...(19): siRNA sense strand
gcgcuggcuuccaacuauu

SEQ ID NO: 559235 - RNA, 19 nt, Homo sapiens
  misc_RNA (1)...(19): siRNA sense strand
guacugggacuacaugaag

SEQ ID NO: 559236 - RNA, 19 nt, Homo sapiens
  misc_RNA (1)...(19): siRNA sense strand
gcaaagcaaauggagaaug

SEQ ID NO: 559237 - RNA, 19 nt, Homo sapiens
  misc_RNA (1)...(19): siRNA sense strand
aagcaaagcaaauggagaa

SEQ ID NO: 559238 - RNA, 19 nt, Homo sapiens
  misc_RNA (1)...(19): siRNA sense strand
gcagguggacgucaucauc

SEQ ID NO: 559239 - RNA, 19 nt, Homo sapiens
  misc_RNA (1)...(19): siRNA sense strand
gacuuggccacguacauua

SEQ ID NO: 559240 - RNA, 19 nt, Homo sapiens
  misc_RNA (1)...(19): siRNA sense strand
ucauggacuuggccacgua

SEQ ID NO: 559241 - RNA, 19 nt, Homo sapiens
  misc_RNA (1)...(19): siRNA sense strand
gaaggaaugcgccaagacu

SEQ ID NO: 559242 - RNA, 19 nt, Homo sapiens
  misc_RNA (1)...(19): siRNA sense strand
cagggaucaugcucacuuu

SEQ ID NO: 559243 - RNA, 19 nt, Homo sapiens
  misc_RNA (1)...(19): siRNA sense strand
ccaguacucggaugaagaa

SEQ ID NO: 559244 - RNA, 19 nt, Homo sapiens
  misc_RNA (1)...(19): siRNA sense strand
ggucaagcuuuccguguac

SEQ ID NO: 559245 - RNA, 19 nt, Homo sapiens
  misc_RNA (1)...(19): siRNA sense strand
uaaagaacuggaagaagga

SEQ ID NO: 559246 - RNA, 19 nt, Homo sapiens
  misc_RNA (1)...(19): siRNA sense strand
cucagugucuuacucauug

SEQ ID NO: 559247 - RNA, 19 nt, Homo sapiens
  misc_RNA (1)...(19): siRNA sense strand
ucaagcugaugaacgaaau

SEQ ID NO: 559248 - RNA, 19 nt, Homo sapiens
  misc_RNA (1)...(19): siRNA sense strand
ggaucaugcucacuuucug

SEQ ID NO: 559249 - RNA, 19 nt, Homo sapiens
  misc_RNA (1)...(19): siRNA sense strand
cagcagcuccuccuccuau

SEQ ID NO: 559250 - RNA, 19 nt, Homo sapiens
  misc_RNA (1)...(19): siRNA sense strand
gcacagcaugagcuacuug

SEQ ID NO: 559251 - RNA, 19 nt, Homo sapiens
  misc_RNA (1)...(19): siRNA sense strand
ggaucaaagugcuaaagcu

SEQ ID NO: 559252 - RNA, 19 nt, Homo sapiens
  misc_RNA (1)...(19): siRNA sense strand
gaugaacgaaauucucaau

SEQ ID NO: 559253 - RNA, 19 nt, Homo sapiens
  misc_RNA (1)...(19): siRNA sense strand
gcccgucaaugcugugaug

SEQ ID NO: 559254 - RNA, 19 nt, Homo sapiens
  misc_RNA (1)...(19): siRNA sense strand
augaggagguggaggcuuu

SEQ ID NO: 559255 - RNA, 19 nt, Homo sapiens
  misc_RNA (1)...(19): siRNA sense strand
ccaagguggaugcgaauga

SEQ ID NO: 559256 - RNA, 19 nt, Homo sapiens
  misc_RNA (1)...(19): siRNA sense strand
ucaaacgccugaggaucuu

SEQ ID NO: 559257 - RNA, 19 nt, Homo sapiens
  misc_RNA (1)...(19): siRNA sense strand
ggucagcccaacucucuug

SEQ ID NO: 559258 - RNA, 19 nt, Homo sapiens
  misc_RNA (1)...(19): siRNA sense strand
gaccaugaaugugcagaag

SEQ ID NO: 559259 - RNA, 19 nt, Homo sapiens
  misc_RNA (1)...(19): siRNA sense strand
auuggugccugcaucguua

SEQ ID NO: 559260 - RNA, 19 nt, Homo sapiens
  misc_RNA (1)...(19): siRNA sense strand
gggaaggaagcaaagcaaa

SEQ ID NO: 559261 - RNA, 19 nt, Homo sapiens
  misc_RNA (1)...(19): siRNA sense strand
gggcccuacuuccucauga

SEQ ID NO: 559262 - RNA, 19 nt, Homo sapiens
  misc_RNA (1)...(19): siRNA sense strand
guucaugggcucccuguuc

SEQ ID NO: 559263 - RNA, 19 nt, Homo sapiens
  misc_RNA (1)...(19): siRNA sense strand
cagggcaggucaagcuuuc

SEQ ID NO: 559264 - RNA, 19 nt, Homo sapiens
  misc_RNA (1)...(19): siRNA sense strand
ugauggcgaugaagaccaa

SEQ ID NO: 559265 - RNA, 19 nt, Homo sapiens
  misc_RNA (1)...(19): siRNA sense strand
gagauugucaaccucaugu

SEQ ID NO: 559266 - RNA, 19 nt, Homo sapiens
  misc_RNA (1)...(19): siRNA sense strand
acaccgugcugcuguuugu

SEQ ID NO: 559267 - RNA, 19 nt, Homo sapiens
  misc_RNA (1)...(19): siRNA sense strand
ucuuaaaguugcucaucaa

SEQ ID NO: 559268 - RNA, 19 nt, Homo sapiens
  misc_RNA (1)...(19): siRNA sense strand
ucccggaggucaucaagau

SEQ ID NO: 559269 - RNA, 19 nt, Homo sapiens
  misc_RNA (1)...(19): siRNA sense strand
ggacagugcagggaagcaa

SEQ ID NO: 559270 - RNA, 19 nt, Homo sapiens
  misc_RNA (1)...(19): siRNA sense strand
ggagguggaggcuuugauc

SEQ ID NO: 559271 - RNA, 19 nt, Homo sapiens
  misc_RNA (1)...(19): siRNA sense strand
gcaggucaccacguacuug

SEQ ID NO: 559272 - RNA, 19 nt, Homo sapiens
  misc_RNA (1)...(19): siRNA sense strand
agaaggaggagaccuggaa

SEQ ID NO: 559273 - RNA, 19 nt, Homo sapiens
  misc_RNA (1)...(19): siRNA sense strand
ucgugugggugccuuguuu

SEQ ID NO: 559274 - RNA, 19 nt, Homo sapiens
  misc_RNA (1)...(19): siRNA sense strand
ccacaucugcuucgucagu

SEQ ID NO: 559275 - RNA, 19 nt, Homo sapiens
  misc_RNA (1)...(19): siRNA sense strand
gcaccaguacuuccacauc

SEQ ID NO: 559276 - RNA, 19 nt, Homo sapiens
  misc_RNA (1)...(19): siRNA sense strand
gaugacaccucucaacaaa

SEQ ID NO: 559277 - RNA, 19 nt, Homo sapiens
  misc_RNA (1)...(19): siRNA sense strand
uaaaguugcucaucaaguu

SEQ ID NO: 559278 - RNA, 19 nt, Homo sapiens
  misc_RNA (1)...(19): siRNA sense strand
ggaagcaacugcagagaca

SEQ ID NO: 559279 - RNA, 19 nt, Homo sapiens
  misc_RNA (1)...(19): siRNA sense strand
ccaaggagcuggacacagu

SEQ ID NO: 559280 - RNA, 19 nt, Homo sapiens
  misc_RNA (1)...(19): siRNA sense strand
caacgagucugccgaagga

SEQ ID NO: 559281 - RNA, 19 nt, Homo sapiens
  misc_RNA (1)...(19): siRNA sense strand
gaucaagaccgcugucauu

SEQ ID NO: 559282 - RNA, 19 nt, Homo sapiens
  misc_RNA (1)...(19): siRNA sense strand
caaagcaaauggagaaugg

SEQ ID NO: 559283 - RNA, 19 nt, Homo sapiens
  misc_RNA (1)...(19): siRNA sense strand
gggcagaccucuucuacuc

SEQ ID NO: 559284 - RNA, 19 nt, Homo sapiens
  misc_RNA (1)...(19): siRNA sense strand
ccacguacauuaacaugau

SEQ ID NO: 559285 - RNA, 19 nt, Homo sapiens
  misc_RNA (1)...(19): siRNA sense strand
gaccgaggcuacauucaga

SEQ ID NO: 559286 - RNA, 19 nt, Homo sapiens
  misc_RNA (1)...(19): siRNA sense strand
uggagaggcucaaggagua

SEQ ID NO: 559287 - RNA, 19 nt, Homo sapiens
  misc_RNA (1)...(19): siRNA sense strand
gcagaccucuucuacucuu

SEQ ID NO: 559288 - RNA, 19 nt, Homo sapiens
  misc_RNA (1)...(19): siRNA sense strand
gaaggaagcaaagcaaaug

SEQ ID NO: 559289 - RNA, 19 nt, Homo sapiens
  misc_RNA (1)...(19): siRNA sense strand
ggccgcagaucuuaaaguu

SEQ ID NO: 559290 - RNA, 19 nt, Homo sapiens
  misc_RNA (1)...(19): siRNA sense strand
gaccuccgcuucaagauca

SEQ ID NO: 559291 - RNA, 19 nt, Homo sapiens
  misc_RNA (1)...(19): siRNA sense strand
aaggagaaauccaggagua

SEQ ID NO: 559292 - RNA, 19 nt, Homo sapiens
  misc_RNA (1)...(19): siRNA sense strand
caucugaaauggaaaccaa

SEQ ID NO: 559293 - RNA, 19 nt, Homo sapiens
  misc_RNA (1)...(19): siRNA sense strand
gcaacugcaucguucuguu

SEQ ID NO: 559294 - RNA, 19 nt, Homo sapiens
  misc_RNA (1)...(19): siRNA sense strand
ggaaagaagucggggcaua

SEQ ID NO: 559295 - RNA, 19 nt, Homo sapiens
  misc_RNA (1)...(19): siRNA sense strand
ugaacgaaauucucaaugg

SEQ ID NO: 559296 - RNA, 19 nt, Homo sapiens
  misc_RNA (1)...(19): siRNA sense strand
caagcuagaccaugaaugu

SEQ ID NO: 559297 - RNA, 19 nt, Homo sapiens
  misc_RNA (1)...(19): siRNA sense strand
guacucggaugaagaaguc

SEQ ID NO: 559298 - RNA, 19 nt, Homo sapiens
  misc_RNA (1)...(19): siRNA sense strand
gagaggaccuggacuucgu

SEQ ID NO: 559299 - RNA, 19 nt, Homo sapiens
  misc_RNA (1)...(19): siRNA sense strand
caacugcaucguucuguuu

SEQ ID NO: 559300 - RNA, 19 nt, Homo sapiens
  misc_RNA (1)...(19): siRNA sense strand
ggacuuggccacguacauu

SEQ ID NO: 559301 - RNA, 19 nt, Homo sapiens
  misc_RNA (1)...(19): siRNA sense strand
caacagcaccgcagaacug

SEQ ID NO: 559302 - RNA, 19 nt, Homo sapiens
  misc_RNA (1)...(19): siRNA sense strand
ggaaggaagcaaagcaaau

SEQ ID NO: 559303 - RNA, 19 nt, Homo sapiens
  misc_RNA (1)...(19): siRNA sense strand
gaucaaagugcuaaagcuu

SEQ ID NO: 559304 - RNA, 19 nt, Homo sapiens
  misc_RNA (1)...(19): siRNA sense strand
ugaaggugcugaagaaguc

SEQ ID NO: 559305 - RNA, 19 nt, Homo sapiens
  misc_RNA (1)...(19): siRNA sense strand
gcagagaggucuuuucuac

SEQ ID NO: 559306 - RNA, 19 nt, Homo sapiens
  misc_RNA (1)...(19): siRNA sense strand
ggaucuuucucucccauga

SEQ ID NO: 559307 - RNA, 19 nt, Homo sapiens
  misc_RNA (1)...(19): siRNA sense strand
cgaugaagaccaagacgua

SEQ ID NO: 559308 - RNA, 19 nt, Homo sapiens
  misc_RNA (1)...(19): siRNA sense strand
gcaucaacaucgccaagau

SEQ ID NO: 559309 - RNA, 19 nt, Homo sapiens
  misc_RNA (1)...(19): siRNA sense strand
gcugguagcccuagugugu

SEQ ID NO: 559310 - RNA, 19 nt, Homo sapiens
  misc_RNA (1)...(19): siRNA sense strand
agaaccagaaggccuauua

SEQ ID NO: 559311 - RNA, 19 nt, Homo sapiens
  misc_RNA (1)...(19): siRNA sense strand
ggacucaggagcacacgaa

SEQ ID NO: 559312 - RNA, 19 nt, Homo sapiens
  misc_RNA (1)...(19): siRNA sense strand
ccugggagcuggcauucaa

SEQ ID NO: 559313 - RNA, 19 nt, Homo sapiens
  misc_RNA (1)...(19): siRNA sense strand
cgaaagagaguuccaaggu

SEQ ID NO: 559314 - RNA, 19 nt, Homo sapiens
  misc_RNA (1)...(19): siRNA sense strand
uggcugagauggacaaagu

SEQ ID NO: 559315 - RNA, 19 nt, Homo sapiens
  misc_RNA (1)...(19): siRNA sense strand
gaagucugccuaccuguca

SEQ ID NO: 559316 - RNA, 19 nt, Homo sapiens
  misc_RNA (1)...(19): siRNA sense strand
cauugcaggucaccacgua

SEQ ID NO: 559317 - RNA, 19 nt, Homo sapiens
  misc_RNA (1)...(19): siRNA sense strand
cugacaagcuagaccauga

SEQ ID NO: 559318 - RNA, 19 nt, Homo sapiens
  misc_RNA (1)...(19): siRNA sense strand
ucuguuugcugcccuguuu

SEQ ID NO: 559319 - RNA, 19 nt, Homo sapiens
  misc_RNA (1)...(19): siRNA sense strand
gaccuggacuucguucuca

SEQ ID NO: 559320 - RNA, 19 nt, Homo sapiens
  misc_RNA (1)...(19): siRNA sense strand
gcaaagacaaucggaucaa

SEQ ID NO: 559321 - RNA, 19 nt, Homo sapiens
  misc_RNA (1)...(19): siRNA sense strand
gaaauucucaaugggauca

SEQ ID NO: 559322 - RNA, 19 nt, Homo sapiens
  misc_RNA (1)...(19): siRNA sense strand
caaagacaaucggaucaag

SEQ ID NO: 559323 - RNA, 19 nt, Homo sapiens
  misc_RNA (1)...(19): siRNA sense strand
cucaugagcuucuucuuca

SEQ ID NO: 559324 - RNA, 19 nt, Homo sapiens
  misc_RNA (1)...(19): siRNA sense strand
aaggagagaucaucaucga

SEQ ID NO: 559325 - RNA, 19 nt, Homo sapiens
  misc_RNA (1)...(19): siRNA sense strand
gagcugaaggugcugaaga

SEQ ID NO: 559326 - RNA, 19 nt, Homo sapiens
  misc_RNA (1)...(19): siRNA sense strand
uggaaugucacguggaaua

SEQ ID NO: 559327 - RNA, 19 nt, Homo sapiens
  misc_RNA (1)...(19): siRNA sense strand
ggaaggcccuggugaucac

SEQ ID NO: 559328 - RNA, 19 nt, Homo sapiens
  misc_RNA (1)...(19): siRNA sense strand
ccacgcugcuugcuaccuu

SEQ ID NO: 559329 - RNA, 19 nt, Homo sapiens
  misc_RNA (1)...(19): siRNA sense strand
gcgagugucucccucaaac

SEQ ID NO: 559330 - RNA, 19 nt, Homo sapiens
  misc_RNA (1)...(19): siRNA sense strand
ggacacgucggaacaaguc

SEQ ID NO: 559331 - RNA, 19 nt, Homo sapiens
  misc_RNA (1)...(19): siRNA sense strand
gaguggaauuccggaacua

SEQ ID NO: 559332 - RNA, 19 nt, Homo sapiens
  misc_RNA (1)...(19): siRNA sense strand
caaggaguauucagagacu

SEQ ID NO: 559333 - RNA, 19 nt, Homo sapiens
  misc_RNA (1)...(19): siRNA sense strand
cacaagggaucgccguguu

SEQ ID NO: 559334 - RNA, 19 nt, Homo sapiens
  misc_RNA (1)...(19): siRNA sense strand
gcgcuggcuuccaacuauu

SEQ ID NO: 559335 - RNA, 19 nt, Homo sapiens
  misc_RNA (1)...(19): siRNA sense strand
guacugggacuacaugaag

SEQ ID NO: 559336 - RNA, 19 nt, Homo sapiens
  misc_RNA (1)...(19): siRNA sense strand
gcaaagcaaauggagaaug

SEQ ID NO: 559337 - RNA, 19 nt, Homo sapiens
  misc_RNA (1)...(19): siRNA sense strand
aagcaaagcaaauggagaa

SEQ ID NO: 559338 - RNA, 19 nt, Homo sapiens
  misc_RNA (1)...(19): siRNA sense strand
gcagguggacgucaucauc

SEQ ID NO: 559339 - RNA, 19 nt, Homo sapiens
  misc_RNA (1)...(19): siRNA sense strand
gacuuggccacguacauua
